United States Patent Application Publication US 2026/0258423 A1 - sequence listing, part 37

SEQ ID NO: 244218 - DNA, 20 bp, synthetic construct
  source 1..20: mol_type = other DNA
gaattcttgagagcccaatg

SEQ ID NO: 244219 - DNA, 20 bp, synthetic construct
  source 1..20: mol_type = other DNA
agaattcttgagagcccaat

SEQ ID NO: 244220 - DNA, 20 bp, synthetic construct
  source 1..20: mol_type = other DNA
gagaattcttgagagcccaa

SEQ ID NO: 244221 - DNA, 20 bp, synthetic construct
  source 1..20: mol_type = other DNA
tgagaattcttgagagccca

SEQ ID NO: 244222 - DNA, 20 bp, synthetic construct
  source 1..20: mol_type = other DNA
ttgagaattcttgagagccc

SEQ ID NO: 244223 - DNA, 20 bp, synthetic construct
  source 1..20: mol_type = other DNA
gttgagaattcttgagagcc

SEQ ID NO: 244224 - DNA, 20 bp, synthetic construct
  source 1..20: mol_type = other DNA
ggttgagaattcttgagagc

SEQ ID NO: 244225 - DNA, 20 bp, synthetic construct
  source 1..20: mol_type = other DNA
aggttgagaattcttgagag

SEQ ID NO: 244226 - DNA, 20 bp, synthetic construct
  source 1..20: mol_type = other DNA
aaggttgagaattcttgaga

SEQ ID NO: 244227 - DNA, 20 bp, synthetic construct
  source 1..20: mol_type = other DNA
gaaggttgagaattcttgag

SEQ ID NO: 244228 - DNA, 20 bp, synthetic construct
  source 1..20: mol_type = other DNA
ggaaggttgagaattcttga

SEQ ID NO: 244229 - DNA, 20 bp, synthetic construct
  source 1..20: mol_type = other DNA
tggaaggttgagaattcttg

SEQ ID NO: 244230 - DNA, 20 bp, synthetic construct
  source 1..20: mol_type = other DNA
ctggaaggttgagaattctt

SEQ ID NO: 244231 - DNA, 20 bp, synthetic construct
  source 1..20: mol_type = other DNA
tctggaaggttgagaattct

SEQ ID NO: 244232 - DNA, 20 bp, synthetic construct
  source 1..20: mol_type = other DNA
ctctggaaggttgagaattc

SEQ ID NO: 244233 - DNA, 20 bp, synthetic construct
  source 1..20: mol_type = other DNA
actctggaaggttgagaatt

SEQ ID NO: 244234 - DNA, 20 bp, synthetic construct
  source 1..20: mol_type = other DNA
cactctggaaggttgagaat

SEQ ID NO: 244235 - DNA, 20 bp, synthetic construct
  source 1..20: mol_type = other DNA
acactctggaaggttgagaa

SEQ ID NO: 244236 - DNA, 20 bp, synthetic construct
  source 1..20: mol_type = other DNA
tacactctggaaggttgaga

SEQ ID NO: 244237 - DNA, 20 bp, synthetic construct
  source 1..20: mol_type = other DNA
ttacactctggaaggttgag

SEQ ID NO: 244238 - DNA, 20 bp, synthetic construct
  source 1..20: mol_type = other DNA
cttacactctggaaggttga

SEQ ID NO: 244239 - DNA, 20 bp, synthetic construct
  source 1..20: mol_type = other DNA
ccttacactctggaaggttg

SEQ ID NO: 244240 - DNA, 20 bp, synthetic construct
  source 1..20: mol_type = other DNA
gccttacactctggaaggtt

SEQ ID NO: 244241 - DNA, 20 bp, synthetic construct
  source 1..20: mol_type = other DNA
ggccttacactctggaaggt

SEQ ID NO: 244242 - DNA, 20 bp, synthetic construct
  source 1..20: mol_type = other DNA
aggccttacactctggaagg

SEQ ID NO: 244243 - DNA, 20 bp, synthetic construct
  source 1..20: mol_type = other DNA
aaggccttacactctggaag

SEQ ID NO: 244244 - DNA, 20 bp, synthetic construct
  source 1..20: mol_type = other DNA
caaggccttacactctggaa

SEQ ID NO: 244245 - DNA, 20 bp, synthetic construct
  source 1..20: mol_type = other DNA
tcaaggccttacactctgga

SEQ ID NO: 244246 - DNA, 20 bp, synthetic construct
  source 1..20: mol_type = other DNA
gtcaaggccttacactctgg

SEQ ID NO: 244247 - DNA, 20 bp, synthetic construct
  source 1..20: mol_type = other DNA
ggtcaaggccttacactctg

SEQ ID NO: 244248 - DNA, 20 bp, synthetic construct
  source 1..20: mol_type = other DNA
aggtcaaggccttacactct

SEQ ID NO: 244249 - DNA, 20 bp, synthetic construct
  source 1..20: mol_type = other DNA
caggtcaaggccttacactc

SEQ ID NO: 244250 - DNA, 20 bp, synthetic construct
  source 1..20: mol_type = other DNA
gcaggtcaaggccttacact

SEQ ID NO: 244251 - DNA, 20 bp, synthetic construct
  source 1..20: mol_type = other DNA
agcaggtcaaggccttacac

SEQ ID NO: 244252 - DNA, 20 bp, synthetic construct
  source 1..20: mol_type = other DNA
gagcaggtcaaggccttaca

SEQ ID NO: 244253 - DNA, 20 bp, synthetic construct
  source 1..20: mol_type = other DNA
tgagcaggtcaaggccttac

SEQ ID NO: 244254 - DNA, 20 bp, synthetic construct
  source 1..20: mol_type = other DNA
ctgagcaggtcaaggcctta

SEQ ID NO: 244255 - DNA, 20 bp, synthetic construct
  source 1..20: mol_type = other DNA
gctgagcaggtcaaggcctt

SEQ ID NO: 244256 - DNA, 20 bp, synthetic construct
  source 1..20: mol_type = other DNA
ggctgagcaggtcaaggcct

SEQ ID NO: 244257 - DNA, 20 bp, synthetic construct
  source 1..20: mol_type = other DNA
gggctgagcaggtcaaggcc

SEQ ID NO: 244258 - DNA, 20 bp, synthetic construct
  source 1..20: mol_type = other DNA
agggctgagcaggtcaaggc

SEQ ID NO: 244259 - DNA, 20 bp, synthetic construct
  source 1..20: mol_type = other DNA
cagggctgagcaggtcaagg

SEQ ID NO: 244260 - DNA, 20 bp, synthetic construct
  source 1..20: mol_type = other DNA
ccagggctgagcaggtcaag

SEQ ID NO: 244261 - DNA, 20 bp, synthetic construct
  source 1..20: mol_type = other DNA
tccagggctgagcaggtcaa

SEQ ID NO: 244262 - DNA, 20 bp, synthetic construct
  source 1..20: mol_type = other DNA
atccagggctgagcaggtca

SEQ ID NO: 244263 - DNA, 20 bp, synthetic construct
  source 1..20: mol_type = other DNA
tatccagggctgagcaggtc

SEQ ID NO: 244264 - DNA, 20 bp, synthetic construct
  source 1..20: mol_type = other DNA
gtatccagggctgagcaggt

SEQ ID NO: 244265 - DNA, 20 bp, synthetic construct
  source 1..20: mol_type = other DNA
agtatccagggctgagcagg

SEQ ID NO: 244266 - DNA, 20 bp, synthetic construct
  source 1..20: mol_type = other DNA
cagtatccagggctgagcag

SEQ ID NO: 244267 - DNA, 20 bp, synthetic construct
  source 1..20: mol_type = other DNA
gcagtatccagggctgagca

SEQ ID NO: 244268 - DNA, 20 bp, synthetic construct
  source 1..20: mol_type = other DNA
tgcagtatccagggctgagc

SEQ ID NO: 244269 - DNA, 20 bp, synthetic construct
  source 1..20: mol_type = other DNA
atgcagtatccagggctgag

SEQ ID NO: 244270 - DNA, 20 bp, synthetic construct
  source 1..20: mol_type = other DNA
catgcagtatccagggctga

SEQ ID NO: 244271 - DNA, 20 bp, synthetic construct
  source 1..20: mol_type = other DNA
tcatgcagtatccagggctg

SEQ ID NO: 244272 - DNA, 20 bp, synthetic construct
  source 1..20: mol_type = other DNA
atcatgcagtatccagggct

SEQ ID NO: 244273 - DNA, 20 bp, synthetic construct
  source 1..20: mol_type = other DNA
catcatgcagtatccagggc

SEQ ID NO: 244274 - DNA, 20 bp, synthetic construct
  source 1..20: mol_type = other DNA
gcatcatgcagtatccaggg

SEQ ID NO: 244275 - DNA, 20 bp, synthetic construct
  source 1..20: mol_type = other DNA
tgcatcatgcagtatccagg

SEQ ID NO: 244276 - DNA, 20 bp, synthetic construct
  source 1..20: mol_type = other DNA
atgcatcatgcagtatccag

SEQ ID NO: 244277 - DNA, 20 bp, synthetic construct
  source 1..20: mol_type = other DNA
aatgcatcatgcagtatcca

SEQ ID NO: 244278 - DNA, 20 bp, synthetic construct
  source 1..20: mol_type = other DNA
caatgcatcatgcagtatcc

SEQ ID NO: 244279 - DNA, 20 bp, synthetic construct
  source 1..20: mol_type = other DNA
tcaatgcatcatgcagtatc

SEQ ID NO: 244280 - DNA, 20 bp, synthetic construct
  source 1..20: mol_type = other DNA
atcaatgcatcatgcagtat

SEQ ID NO: 244281 - DNA, 20 bp, synthetic construct
  source 1..20: mol_type = other DNA
tatcaatgcatcatgcagta

SEQ ID NO: 244282 - DNA, 20 bp, synthetic construct
  source 1..20: mol_type = other DNA
ttatcaatgcatcatgcagt

SEQ ID NO: 244283 - DNA, 20 bp, synthetic construct
  source 1..20: mol_type = other DNA
cttatcaatgcatcatgcag

SEQ ID NO: 244284 - DNA, 20 bp, synthetic construct
  source 1..20: mol_type = other DNA
gcttatcaatgcatcatgca

SEQ ID NO: 244285 - DNA, 20 bp, synthetic construct
  source 1..20: mol_type = other DNA
ggcttatcaatgcatcatgc

SEQ ID NO: 244286 - DNA, 20 bp, synthetic construct
  source 1..20: mol_type = other DNA
gggcttatcaatgcatcatg

SEQ ID NO: 244287 - DNA, 20 bp, synthetic construct
  source 1..20: mol_type = other DNA
tgggcttatcaatgcatcat

SEQ ID NO: 244288 - DNA, 20 bp, synthetic construct
  source 1..20: mol_type = other DNA
atgggcttatcaatgcatca

SEQ ID NO: 244289 - DNA, 20 bp, synthetic construct
  source 1..20: mol_type = other DNA
tatgggcttatcaatgcatc

SEQ ID NO: 244290 - DNA, 20 bp, synthetic construct
  source 1..20: mol_type = other DNA
ttatgggcttatcaatgcat

SEQ ID NO: 244291 - DNA, 20 bp, synthetic construct
  source 1..20: mol_type = other DNA
tttatgggcttatcaatgca

SEQ ID NO: 244292 - DNA, 20 bp, synthetic construct
  source 1..20: mol_type = other DNA
ttttatgggcttatcaatgc

SEQ ID NO: 244293 - DNA, 20 bp, synthetic construct
  source 1..20: mol_type = other DNA
attttatgggcttatcaatg

SEQ ID NO: 244294 - DNA, 20 bp, synthetic construct
  source 1..20: mol_type = other DNA
tattttatgggcttatcaat

SEQ ID NO: 244295 - DNA, 20 bp, synthetic construct
  source 1..20: mol_type = other DNA
ttattttatgggcttatcaa

SEQ ID NO: 244296 - DNA, 20 bp, synthetic construct
  source 1..20: mol_type = other DNA
gttattttatgggcttatca

SEQ ID NO: 244297 - DNA, 20 bp, synthetic construct
  source 1..20: mol_type = other DNA
ggttattttatgggcttatc

SEQ ID NO: 244298 - DNA, 20 bp, synthetic construct
  source 1..20: mol_type = other DNA
tggttattttatgggcttat

SEQ ID NO: 244299 - DNA, 20 bp, synthetic construct
  source 1..20: mol_type = other DNA
ctggttattttatgggctta

SEQ ID NO: 244300 - DNA, 20 bp, synthetic construct
  source 1..20: mol_type = other DNA
cctggttattttatgggctt

SEQ ID NO: 244301 - DNA, 20 bp, synthetic construct
  source 1..20: mol_type = other DNA
ccctggttattttatgggct

SEQ ID NO: 244302 - DNA, 20 bp, synthetic construct
  source 1..20: mol_type = other DNA
gccctggttattttatgggc

SEQ ID NO: 244303 - DNA, 20 bp, synthetic construct
  source 1..20: mol_type = other DNA
tgccctggttattttatggg

SEQ ID NO: 244304 - DNA, 20 bp, synthetic construct
  source 1..20: mol_type = other DNA
ctgccctggttattttatgg

SEQ ID NO: 244305 - DNA, 20 bp, synthetic construct
  source 1..20: mol_type = other DNA
tctgccctggttattttatg

SEQ ID NO: 244306 - DNA, 20 bp, synthetic construct
  source 1..20: mol_type = other DNA
atctgccctggttattttat

SEQ ID NO: 244307 - DNA, 20 bp, synthetic construct
  source 1..20: mol_type = other DNA
aatctgccctggttatttta

SEQ ID NO: 244308 - DNA, 20 bp, synthetic construct
  source 1..20: mol_type = other DNA
caatctgccctggttatttt

SEQ ID NO: 244309 - DNA, 20 bp, synthetic construct
  source 1..20: mol_type = other DNA
tcaatctgccctggttattt

SEQ ID NO: 244310 - DNA, 20 bp, synthetic construct
  source 1..20: mol_type = other DNA
gtcaatctgccctggttatt

SEQ ID NO: 244311 - DNA, 20 bp, synthetic construct
  source 1..20: mol_type = other DNA
agtcaatctgccctggttat

SEQ ID NO: 244312 - DNA, 20 bp, synthetic construct
  source 1..20: mol_type = other DNA
gagtcaatctgccctggtta

SEQ ID NO: 244313 - DNA, 20 bp, synthetic construct
  source 1..20: mol_type = other DNA
ggagtcaatctgccctggtt

SEQ ID NO: 244314 - DNA, 20 bp, synthetic construct
  source 1..20: mol_type = other DNA
gggagtcaatctgccctggt

SEQ ID NO: 244315 - DNA, 20 bp, synthetic construct
  source 1..20: mol_type = other DNA
tgggagtcaatctgccctgg

SEQ ID NO: 244316 - DNA, 20 bp, synthetic construct
  source 1..20: mol_type = other DNA
ctgggagtcaatctgccctg

SEQ ID NO: 244317 - DNA, 20 bp, synthetic construct
  source 1..20: mol_type = other DNA
actgggagtcaatctgccct

SEQ ID NO: 244318 - DNA, 20 bp, synthetic construct
  source 1..20: mol_type = other DNA
cactgggagtcaatctgccc

SEQ ID NO: 244319 - DNA, 20 bp, synthetic construct
  source 1..20: mol_type = other DNA
ccactgggagtcaatctgcc

SEQ ID NO: 244320 - DNA, 20 bp, synthetic construct
  source 1..20: mol_type = other DNA
gccactgggagtcaatctgc

SEQ ID NO: 244321 - DNA, 20 bp, synthetic construct
  source 1..20: mol_type = other DNA
ggccactgggagtcaatctg

SEQ ID NO: 244322 - DNA, 20 bp, synthetic construct
  source 1..20: mol_type = other DNA
tggccactgggagtcaatct

SEQ ID NO: 244323 - DNA, 20 bp, synthetic construct
  source 1..20: mol_type = other DNA
ttggccactgggagtcaatc

SEQ ID NO: 244324 - DNA, 20 bp, synthetic construct
  source 1..20: mol_type = other DNA
tttggccactgggagtcaat

SEQ ID NO: 244325 - DNA, 20 bp, synthetic construct
  source 1..20: mol_type = other DNA
ctttggccactgggagtcaa

SEQ ID NO: 244326 - DNA, 20 bp, synthetic construct
  source 1..20: mol_type = other DNA
actttggccactgggagtca

SEQ ID NO: 244327 - DNA, 20 bp, synthetic construct
  source 1..20: mol_type = other DNA
cactttggccactgggagtc

SEQ ID NO: 244328 - DNA, 20 bp, synthetic construct
  source 1..20: mol_type = other DNA
gcactttggccactgggagt

SEQ ID NO: 244329 - DNA, 20 bp, synthetic construct
  source 1..20: mol_type = other DNA
ggcactttggccactgggag

SEQ ID NO: 244330 - DNA, 20 bp, synthetic construct
  source 1..20: mol_type = other DNA
tggcactttggccactggga

SEQ ID NO: 244331 - DNA, 20 bp, synthetic construct
  source 1..20: mol_type = other DNA
gtggcactttggccactggg

SEQ ID NO: 244332 - DNA, 20 bp, synthetic construct
  source 1..20: mol_type = other DNA
tgtggcactttggccactgg

SEQ ID NO: 244333 - DNA, 20 bp, synthetic construct
  source 1..20: mol_type = other DNA
ctgtggcactttggccactg

SEQ ID NO: 244334 - DNA, 20 bp, synthetic construct
  source 1..20: mol_type = other DNA
cctgtggcactttggccact

SEQ ID NO: 244335 - DNA, 20 bp, synthetic construct
  source 1..20: mol_type = other DNA
ccctgtggcactttggccac

SEQ ID NO: 244336 - DNA, 20 bp, synthetic construct
  source 1..20: mol_type = other DNA
tccctgtggcactttggcca

SEQ ID NO: 244337 - DNA, 20 bp, synthetic construct
  source 1..20: mol_type = other DNA
ttccctgtggcactttggcc

SEQ ID NO: 244338 - DNA, 20 bp, synthetic construct
  source 1..20: mol_type = other DNA
cttccctgtggcactttggc

SEQ ID NO: 244339 - DNA, 20 bp, synthetic construct
  source 1..20: mol_type = other DNA
ccttccctgtggcactttgg

SEQ ID NO: 244340 - DNA, 20 bp, synthetic construct
  source 1..20: mol_type = other DNA
cccttccctgtggcactttg

SEQ ID NO: 244341 - DNA, 20 bp, synthetic construct
  source 1..20: mol_type = other DNA
tcccttccctgtggcacttt

SEQ ID NO: 244342 - DNA, 20 bp, synthetic construct
  source 1..20: mol_type = other DNA
gtcccttccctgtggcactt

SEQ ID NO: 244343 - DNA, 20 bp, synthetic construct
  source 1..20: mol_type = other DNA
tgtcccttccctgtggcact

SEQ ID NO: 244344 - DNA, 20 bp, synthetic construct
  source 1..20: mol_type = other DNA
ttgtcccttccctgtggcac

SEQ ID NO: 244345 - DNA, 20 bp, synthetic construct
  source 1..20: mol_type = other DNA
attgtcccttccctgtggca

SEQ ID NO: 244346 - DNA, 20 bp, synthetic construct
  source 1..20: mol_type = other DNA
aattgtcccttccctgtggc

SEQ ID NO: 244347 - DNA, 20 bp, synthetic construct
  source 1..20: mol_type = other DNA
gaattgtcccttccctgtgg

SEQ ID NO: 244348 - DNA, 20 bp, synthetic construct
  source 1..20: mol_type = other DNA
tgaattgtcccttccctgtg

SEQ ID NO: 244349 - DNA, 20 bp, synthetic construct
  source 1..20: mol_type = other DNA
ctgaattgtcccttccctgt

SEQ ID NO: 244350 - DNA, 20 bp, synthetic construct
  source 1..20: mol_type = other DNA
gctgaattgtcccttccctg

SEQ ID NO: 244351 - DNA, 20 bp, synthetic construct
  source 1..20: mol_type = other DNA
ggctgaattgtcccttccct

SEQ ID NO: 244352 - DNA, 20 bp, synthetic construct
  source 1..20: mol_type = other DNA
gggctgaattgtcccttccc

SEQ ID NO: 244353 - DNA, 20 bp, synthetic construct
  source 1..20: mol_type = other DNA
agggctgaattgtcccttcc

SEQ ID NO: 244354 - DNA, 20 bp, synthetic construct
  source 1..20: mol_type = other DNA
aagggctgaattgtcccttc

SEQ ID NO: 244355 - DNA, 20 bp, synthetic construct
  source 1..20: mol_type = other DNA
gaagggctgaattgtccctt

SEQ ID NO: 244356 - DNA, 20 bp, synthetic construct
  source 1..20: mol_type = other DNA
agaagggctgaattgtccct

SEQ ID NO: 244357 - DNA, 20 bp, synthetic construct
  source 1..20: mol_type = other DNA
tagaagggctgaattgtccc

SEQ ID NO: 244358 - DNA, 20 bp, synthetic construct
  source 1..20: mol_type = other DNA
ctagaagggctgaattgtcc

SEQ ID NO: 244359 - DNA, 20 bp, synthetic construct
  source 1..20: mol_type = other DNA
cctagaagggctgaattgtc

SEQ ID NO: 244360 - DNA, 20 bp, synthetic construct
  source 1..20: mol_type = other DNA
tcctagaagggctgaattgt

SEQ ID NO: 244361 - DNA, 20 bp, synthetic construct
  source 1..20: mol_type = other DNA
ctcctagaagggctgaattg

SEQ ID NO: 244362 - DNA, 20 bp, synthetic construct
  source 1..20: mol_type = other DNA
cctcctagaagggctgaatt

SEQ ID NO: 244363 - DNA, 20 bp, synthetic construct
  source 1..20: mol_type = other DNA
tcctcctagaagggctgaat

SEQ ID NO: 244364 - DNA, 20 bp, synthetic construct
  source 1..20: mol_type = other DNA
ctcctcctagaagggctgaa

SEQ ID NO: 244365 - DNA, 20 bp, synthetic construct
  source 1..20: mol_type = other DNA
cctcctcctagaagggctga

SEQ ID NO: 244366 - DNA, 20 bp, synthetic construct
  source 1..20: mol_type = other DNA
tcctcctcctagaagggctg

SEQ ID NO: 244367 - DNA, 20 bp, synthetic construct
  source 1..20: mol_type = other DNA
ctcctcctcctagaagggct

SEQ ID NO: 244368 - DNA, 20 bp, synthetic construct
  source 1..20: mol_type = other DNA
cctcctcctcctagaagggc

SEQ ID NO: 244369 - DNA, 20 bp, synthetic construct
  source 1..20: mol_type = other DNA
tcctcctcctcctagaaggg

SEQ ID NO: 244370 - DNA, 20 bp, synthetic construct
  source 1..20: mol_type = other DNA
ctcctcctcctcctagaagg

SEQ ID NO: 244371 - DNA, 20 bp, synthetic construct
  source 1..20: mol_type = other DNA
cctcctcctcctcctagaag

SEQ ID NO: 244372 - DNA, 20 bp, synthetic construct
  source 1..20: mol_type = other DNA
acctcctcctcctcctagaa

SEQ ID NO: 244373 - DNA, 20 bp, synthetic construct
  source 1..20: mol_type = other DNA
tacctcctcctcctcctaga

SEQ ID NO: 244374 - DNA, 20 bp, synthetic construct
  source 1..20: mol_type = other DNA
ctacctcctcctcctcctag

SEQ ID NO: 244375 - DNA, 20 bp, synthetic construct
  source 1..20: mol_type = other DNA
actacctcctcctcctccta

SEQ ID NO: 244376 - DNA, 20 bp, synthetic construct
  source 1..20: mol_type = other DNA
aactacctcctcctcctcct

SEQ ID NO: 244377 - DNA, 20 bp, synthetic construct
  source 1..20: mol_type = other DNA
aaactacctcctcctcctcc

SEQ ID NO: 244378 - DNA, 20 bp, synthetic construct
  source 1..20: mol_type = other DNA
aaaactacctcctcctcctc

SEQ ID NO: 244379 - DNA, 20 bp, synthetic construct
  source 1..20: mol_type = other DNA
gaaaactacctcctcctcct

SEQ ID NO: 244380 - DNA, 20 bp, synthetic construct
  source 1..20: mol_type = other DNA
agaaaactacctcctcctcc

SEQ ID NO: 244381 - DNA, 20 bp, synthetic construct
  source 1..20: mol_type = other DNA
gagaaaactacctcctcctc

SEQ ID NO: 244382 - DNA, 20 bp, synthetic construct
  source 1..20: mol_type = other DNA
tgagaaaactacctcctcct

SEQ ID NO: 244383 - DNA, 20 bp, synthetic construct
  source 1..20: mol_type = other DNA
atgagaaaactacctcctcc

SEQ ID NO: 244384 - DNA, 20 bp, synthetic construct
  source 1..20: mol_type = other DNA
aatgagaaaactacctcctc

SEQ ID NO: 244385 - DNA, 20 bp, synthetic construct
  source 1..20: mol_type = other DNA
aaatgagaaaactacctcct

SEQ ID NO: 244386 - DNA, 20 bp, synthetic construct
  source 1..20: mol_type = other DNA
gaaatgagaaaactacctcc

SEQ ID NO: 244387 - DNA, 20 bp, synthetic construct
  source 1..20: mol_type = other DNA
agaaatgagaaaactacctc

SEQ ID NO: 244388 - DNA, 20 bp, synthetic construct
  source 1..20: mol_type = other DNA
tagaaatgagaaaactacct

SEQ ID NO: 244389 - DNA, 20 bp, synthetic construct
  source 1..20: mol_type = other DNA
atagaaatgagaaaactacc

SEQ ID NO: 244390 - DNA, 20 bp, synthetic construct
  source 1..20: mol_type = other DNA
aatagaaatgagaaaactac

SEQ ID NO: 244391 - DNA, 20 bp, synthetic construct
  source 1..20: mol_type = other DNA
taatagaaatgagaaaacta

SEQ ID NO: 244392 - DNA, 20 bp, synthetic construct
  source 1..20: mol_type = other DNA
ttaatagaaatgagaaaact

SEQ ID NO: 244393 - DNA, 20 bp, synthetic construct
  source 1..20: mol_type = other DNA
cttaatagaaatgagaaaac

SEQ ID NO: 244394 - DNA, 20 bp, synthetic construct
  source 1..20: mol_type = other DNA
ccttaatagaaatgagaaaa

SEQ ID NO: 244395 - DNA, 20 bp, synthetic construct
  source 1..20: mol_type = other DNA
gccttaatagaaatgagaaa

SEQ ID NO: 244396 - DNA, 20 bp, synthetic construct
  source 1..20: mol_type = other DNA
tgccttaatagaaatgagaa

SEQ ID NO: 244397 - DNA, 20 bp, synthetic construct
  source 1..20: mol_type = other DNA
ttgccttaatagaaatgaga

SEQ ID NO: 244398 - DNA, 20 bp, synthetic construct
  source 1..20: mol_type = other DNA
gttgccttaatagaaatgag

SEQ ID NO: 244399 - DNA, 20 bp, synthetic construct
  source 1..20: mol_type = other DNA
tgttgccttaatagaaatga

SEQ ID NO: 244400 - DNA, 20 bp, synthetic construct
  source 1..20: mol_type = other DNA
ttgttgccttaatagaaatg

SEQ ID NO: 244401 - DNA, 20 bp, synthetic construct
  source 1..20: mol_type = other DNA
tttgttgccttaatagaaat

SEQ ID NO: 244402 - DNA, 20 bp, synthetic construct
  source 1..20: mol_type = other DNA
ttttgttgccttaatagaaa

SEQ ID NO: 244403 - DNA, 20 bp, synthetic construct
  source 1..20: mol_type = other DNA
cttttgttgccttaatagaa

SEQ ID NO: 244404 - DNA, 20 bp, synthetic construct
  source 1..20: mol_type = other DNA
gcttttgttgccttaataga

SEQ ID NO: 244405 - DNA, 20 bp, synthetic construct
  source 1..20: mol_type = other DNA
agcttttgttgccttaatag

SEQ ID NO: 244406 - DNA, 20 bp, synthetic construct
  source 1..20: mol_type = other DNA
cagcttttgttgccttaata

SEQ ID NO: 244407 - DNA, 20 bp, synthetic construct
  source 1..20: mol_type = other DNA
gcagcttttgttgccttaat

SEQ ID NO: 244408 - DNA, 20 bp, synthetic construct
  source 1..20: mol_type = other DNA
ggcagcttttgttgccttaa

SEQ ID NO: 244409 - DNA, 20 bp, synthetic construct
  source 1..20: mol_type = other DNA
aggcagcttttgttgcctta

SEQ ID NO: 244410 - DNA, 20 bp, synthetic construct
  source 1..20: mol_type = other DNA
aaggcagcttttgttgcctt

SEQ ID NO: 244411 - DNA, 20 bp, synthetic construct
  source 1..20: mol_type = other DNA
taaggcagcttttgttgcct

SEQ ID NO: 244412 - DNA, 20 bp, synthetic construct
  source 1..20: mol_type = other DNA
gtaaggcagcttttgttgcc

SEQ ID NO: 244413 - DNA, 20 bp, synthetic construct
  source 1..20: mol_type = other DNA
agtaaggcagcttttgttgc

SEQ ID NO: 244414 - DNA, 20 bp, synthetic construct
  source 1..20: mol_type = other DNA
tagtaaggcagcttttgttg

SEQ ID NO: 244415 - DNA, 20 bp, synthetic construct
  source 1..20: mol_type = other DNA
ttagtaaggcagcttttgtt

SEQ ID NO: 244416 - DNA, 20 bp, synthetic construct
  source 1..20: mol_type = other DNA
cttagtaaggcagcttttgt

SEQ ID NO: 244417 - DNA, 20 bp, synthetic construct
  source 1..20: mol_type = other DNA
ccttagtaaggcagcttttg

SEQ ID NO: 244418 - DNA, 20 bp, synthetic construct
  source 1..20: mol_type = other DNA
tccttagtaaggcagctttt

SEQ ID NO: 244419 - DNA, 20 bp, synthetic construct
  source 1..20: mol_type = other DNA
gtccttagtaaggcagcttt

SEQ ID NO: 244420 - DNA, 20 bp, synthetic construct
  source 1..20: mol_type = other DNA
tgtccttagtaaggcagctt

SEQ ID NO: 244421 - DNA, 20 bp, synthetic construct
  source 1..20: mol_type = other DNA
atgtccttagtaaggcagct

SEQ ID NO: 244422 - DNA, 20 bp, synthetic construct
  source 1..20: mol_type = other DNA
aatgtccttagtaaggcagc

SEQ ID NO: 244423 - DNA, 20 bp, synthetic construct
  source 1..20: mol_type = other DNA
gaatgtccttagtaaggcag

SEQ ID NO: 244424 - DNA, 20 bp, synthetic construct
  source 1..20: mol_type = other DNA
agaatgtccttagtaaggca

SEQ ID NO: 244425 - DNA, 20 bp, synthetic construct
  source 1..20: mol_type = other DNA
aagaatgtccttagtaaggc

SEQ ID NO: 244426 - DNA, 20 bp, synthetic construct
  source 1..20: mol_type = other DNA
caagaatgtccttagtaagg

SEQ ID NO: 244427 - DNA, 20 bp, synthetic construct
  source 1..20: mol_type = other DNA
ccaagaatgtccttagtaag

SEQ ID NO: 244428 - DNA, 20 bp, synthetic construct
  source 1..20: mol_type = other DNA
accaagaatgtccttagtaa

SEQ ID NO: 244429 - DNA, 20 bp, synthetic construct
  source 1..20: mol_type = other DNA
caccaagaatgtccttagta

SEQ ID NO: 244430 - DNA, 20 bp, synthetic construct
  source 1..20: mol_type = other DNA
ccaccaagaatgtccttagt

SEQ ID NO: 244431 - DNA, 20 bp, synthetic construct
  source 1..20: mol_type = other DNA
tccaccaagaatgtccttag

SEQ ID NO: 244432 - DNA, 20 bp, synthetic construct
  source 1..20: mol_type = other DNA
ctccaccaagaatgtcctta

SEQ ID NO: 244433 - DNA, 20 bp, synthetic construct
  source 1..20: mol_type = other DNA
cctccaccaagaatgtcctt

SEQ ID NO: 244434 - DNA, 20 bp, synthetic construct
  source 1..20: mol_type = other DNA
ccctccaccaagaatgtcct

SEQ ID NO: 244435 - DNA, 20 bp, synthetic construct
  source 1..20: mol_type = other DNA
gccctccaccaagaatgtcc

SEQ ID NO: 244436 - DNA, 20 bp, synthetic construct
  source 1..20: mol_type = other DNA
cgccctccaccaagaatgtc

SEQ ID NO: 244437 - DNA, 20 bp, synthetic construct
  source 1..20: mol_type = other DNA
acgccctccaccaagaatgt

SEQ ID NO: 244438 - DNA, 20 bp, synthetic construct
  source 1..20: mol_type = other DNA
cacgccctccaccaagaatg

SEQ ID NO: 244439 - DNA, 20 bp, synthetic construct
  source 1..20: mol_type = other DNA
tcacgccctccaccaagaat

SEQ ID NO: 244440 - DNA, 20 bp, synthetic construct
  source 1..20: mol_type = other DNA
gtcacgccctccaccaagaa

SEQ ID NO: 244441 - DNA, 20 bp, synthetic construct
  source 1..20: mol_type = other DNA
agtcacgccctccaccaaga

SEQ ID NO: 244442 - DNA, 20 bp, synthetic construct
  source 1..20: mol_type = other DNA
cagtcacgccctccaccaag

SEQ ID NO: 244443 - DNA, 20 bp, synthetic construct
  source 1..20: mol_type = other DNA
acagtcacgccctccaccaa

SEQ ID NO: 244444 - DNA, 20 bp, synthetic construct
  source 1..20: mol_type = other DNA
gacagtcacgccctccacca

SEQ ID NO: 244445 - DNA, 20 bp, synthetic construct
  source 1..20: mol_type = other DNA
tgacagtcacgccctccacc

SEQ ID NO: 244446 - DNA, 20 bp, synthetic construct
  source 1..20: mol_type = other DNA
ttgacagtcacgccctccac

SEQ ID NO: 244447 - DNA, 20 bp, synthetic construct
  source 1..20: mol_type = other DNA
gttgacagtcacgccctcca

SEQ ID NO: 244448 - DNA, 20 bp, synthetic construct
  source 1..20: mol_type = other DNA
ggttgacagtcacgccctcc

SEQ ID NO: 244449 - DNA, 20 bp, synthetic construct
  source 1..20: mol_type = other DNA
tggttgacagtcacgccctc

SEQ ID NO: 244450 - DNA, 20 bp, synthetic construct
  source 1..20: mol_type = other DNA
gtggttgacagtcacgccct

SEQ ID NO: 244451 - DNA, 20 bp, synthetic construct
  source 1..20: mol_type = other DNA
agtggttgacagtcacgccc

SEQ ID NO: 244452 - DNA, 20 bp, synthetic construct
  source 1..20: mol_type = other DNA
cagtggttgacagtcacgcc

SEQ ID NO: 244453 - DNA, 20 bp, synthetic construct
  source 1..20: mol_type = other DNA
acagtggttgacagtcacgc

SEQ ID NO: 244454 - DNA, 20 bp, synthetic construct
  source 1..20: mol_type = other DNA
cacagtggttgacagtcacg

SEQ ID NO: 244455 - DNA, 20 bp, synthetic construct
  source 1..20: mol_type = other DNA
tcacagtggttgacagtcac

SEQ ID NO: 244456 - DNA, 20 bp, synthetic construct
  source 1..20: mol_type = other DNA
atcacagtggttgacagtca

SEQ ID NO: 244457 - DNA, 20 bp, synthetic construct
  source 1..20: mol_type = other DNA
gatcacagtggttgacagtc

SEQ ID NO: 244458 - DNA, 20 bp, synthetic construct
  source 1..20: mol_type = other DNA
tgatcacagtggttgacagt

SEQ ID NO: 244459 - DNA, 20 bp, synthetic construct
  source 1..20: mol_type = other DNA
atgatcacagtggttgacag

SEQ ID NO: 244460 - DNA, 20 bp, synthetic construct
  source 1..20: mol_type = other DNA
aatgatcacagtggttgaca

SEQ ID NO: 244461 - DNA, 20 bp, synthetic construct
  source 1..20: mol_type = other DNA
aaatgatcacagtggttgac

SEQ ID NO: 244462 - DNA, 20 bp, synthetic construct
  source 1..20: mol_type = other DNA
caaatgatcacagtggttga

SEQ ID NO: 244463 - DNA, 20 bp, synthetic construct
  source 1..20: mol_type = other DNA
ccaaatgatcacagtggttg

SEQ ID NO: 244464 - DNA, 20 bp, synthetic construct
  source 1..20: mol_type = other DNA
cccaaatgatcacagtggtt

SEQ ID NO: 244465 - DNA, 20 bp, synthetic construct
  source 1..20: mol_type = other DNA
gcccaaatgatcacagtggt

SEQ ID NO: 244466 - DNA, 20 bp, synthetic construct
  source 1..20: mol_type = other DNA
ggcccaaatgatcacagtgg

SEQ ID NO: 244467 - DNA, 20 bp, synthetic construct
  source 1..20: mol_type = other DNA
aggcccaaatgatcacagtg

SEQ ID NO: 244468 - DNA, 20 bp, synthetic construct
  source 1..20: mol_type = other DNA
gaggcccaaatgatcacagt

SEQ ID NO: 244469 - DNA, 20 bp, synthetic construct
  source 1..20: mol_type = other DNA
agaggcccaaatgatcacag

SEQ ID NO: 244470 - DNA, 20 bp, synthetic construct
  source 1..20: mol_type = other DNA
gagaggcccaaatgatcaca

SEQ ID NO: 244471 - DNA, 20 bp, synthetic construct
  source 1..20: mol_type = other DNA
agagaggcccaaatgatcac

SEQ ID NO: 244472 - DNA, 20 bp, synthetic construct
  source 1..20: mol_type = other DNA
aagagaggcccaaatgatca

SEQ ID NO: 244473 - DNA, 20 bp, synthetic construct
  source 1..20: mol_type = other DNA
caagagaggcccaaatgatc

SEQ ID NO: 244474 - DNA, 20 bp, synthetic construct
  source 1..20: mol_type = other DNA
gcaagagaggcccaaatgat

SEQ ID NO: 244475 - DNA, 20 bp, synthetic construct
  source 1..20: mol_type = other DNA
ggcaagagaggcccaaatga

SEQ ID NO: 244476 - DNA, 20 bp, synthetic construct
  source 1..20: mol_type = other DNA
gggcaagagaggcccaaatg

SEQ ID NO: 244477 - DNA, 20 bp, synthetic construct
  source 1..20: mol_type = other DNA
tgggcaagagaggcccaaat

SEQ ID NO: 244478 - DNA, 20 bp, synthetic construct
  source 1..20: mol_type = other DNA
ctgggcaagagaggcccaaa

SEQ ID NO: 244479 - DNA, 20 bp, synthetic construct
  source 1..20: mol_type = other DNA
cctgggcaagagaggcccaa

SEQ ID NO: 244480 - DNA, 20 bp, synthetic construct
  source 1..20: mol_type = other DNA
gcctgggcaagagaggccca

SEQ ID NO: 244481 - DNA, 20 bp, synthetic construct
  source 1..20: mol_type = other DNA
agcctgggcaagagaggccc

SEQ ID NO: 244482 - DNA, 20 bp, synthetic construct
  source 1..20: mol_type = other DNA
aagcctgggcaagagaggcc

SEQ ID NO: 244483 - DNA, 20 bp, synthetic construct
  source 1..20: mol_type = other DNA
gaagcctgggcaagagaggc

SEQ ID NO: 244484 - DNA, 20 bp, synthetic construct
  source 1..20: mol_type = other DNA
ggaagcctgggcaagagagg

SEQ ID NO: 244485 - DNA, 20 bp, synthetic construct
  source 1..20: mol_type = other DNA
gggaagcctgggcaagagag

SEQ ID NO: 244486 - DNA, 20 bp, synthetic construct
  source 1..20: mol_type = other DNA
tgggaagcctgggcaagaga

SEQ ID NO: 244487 - DNA, 20 bp, synthetic construct
  source 1..20: mol_type = other DNA
atgggaagcctgggcaagag

SEQ ID NO: 244488 - DNA, 20 bp, synthetic construct
  source 1..20: mol_type = other DNA
aatgggaagcctgggcaaga

SEQ ID NO: 244489 - DNA, 20 bp, synthetic construct
  source 1..20: mol_type = other DNA
gaatgggaagcctgggcaag

SEQ ID NO: 244490 - DNA, 20 bp, synthetic construct
  source 1..20: mol_type = other DNA
agaatgggaagcctgggcaa

SEQ ID NO: 244491 - DNA, 20 bp, synthetic construct
  source 1..20: mol_type = other DNA
cagaatgggaagcctgggca

SEQ ID NO: 244492 - DNA, 20 bp, synthetic construct
  source 1..20: mol_type = other DNA
tcagaatgggaagcctgggc

SEQ ID NO: 244493 - DNA, 20 bp, synthetic construct
  source 1..20: mol_type = other DNA
ttcagaatgggaagcctggg

SEQ ID NO: 244494 - DNA, 20 bp, synthetic construct
  source 1..20: mol_type = other DNA
tttcagaatgggaagcctgg

SEQ ID NO: 244495 - DNA, 20 bp, synthetic construct
  source 1..20: mol_type = other DNA
ctttcagaatgggaagcctg

SEQ ID NO: 244496 - DNA, 20 bp, synthetic construct
  source 1..20: mol_type = other DNA
cctttcagaatgggaagcct

SEQ ID NO: 244497 - DNA, 20 bp, synthetic construct
  source 1..20: mol_type = other DNA
tcctttcagaatgggaagcc

SEQ ID NO: 244498 - DNA, 20 bp, synthetic construct
  source 1..20: mol_type = other DNA
gtcctttcagaatgggaagc

SEQ ID NO: 244499 - DNA, 20 bp, synthetic construct
  source 1..20: mol_type = other DNA
tgtcctttcagaatgggaag

SEQ ID NO: 244500 - DNA, 20 bp, synthetic construct
  source 1..20: mol_type = other DNA
ctgtcctttcagaatgggaa

SEQ ID NO: 244501 - DNA, 20 bp, synthetic construct
  source 1..20: mol_type = other DNA
actgtcctttcagaatggga

SEQ ID NO: 244502 - DNA, 20 bp, synthetic construct
  source 1..20: mol_type = other DNA
aactgtcctttcagaatggg

SEQ ID NO: 244503 - DNA, 20 bp, synthetic construct
  source 1..20: mol_type = other DNA
aaactgtcctttcagaatgg

SEQ ID NO: 244504 - DNA, 20 bp, synthetic construct
  source 1..20: mol_type = other DNA
aaaactgtcctttcagaatg

SEQ ID NO: 244505 - DNA, 20 bp, synthetic construct
  source 1..20: mol_type = other DNA
taaaactgtcctttcagaat

SEQ ID NO: 244506 - DNA, 20 bp, synthetic construct
  source 1..20: mol_type = other DNA
ataaaactgtcctttcagaa

SEQ ID NO: 244507 - DNA, 20 bp, synthetic construct
  source 1..20: mol_type = other DNA
aataaaactgtcctttcaga

SEQ ID NO: 244508 - DNA, 20 bp, synthetic construct
  source 1..20: mol_type = other DNA
caataaaactgtcctttcag

SEQ ID NO: 244509 - DNA, 20 bp, synthetic construct
  source 1..20: mol_type = other DNA
acaataaaactgtcctttca

SEQ ID NO: 244510 - DNA, 20 bp, synthetic construct
  source 1..20: mol_type = other DNA
tacaataaaactgtcctttc

SEQ ID NO: 244511 - DNA, 20 bp, synthetic construct
  source 1..20: mol_type = other DNA
ctacaataaaactgtccttt

SEQ ID NO: 244512 - DNA, 20 bp, synthetic construct
  source 1..20: mol_type = other DNA
cctacaataaaactgtcctt

SEQ ID NO: 244513 - DNA, 20 bp, synthetic construct
  source 1..20: mol_type = other DNA
acctacaataaaactgtcct

SEQ ID NO: 244514 - DNA, 20 bp, synthetic construct
  source 1..20: mol_type = other DNA
tacctacaataaaactgtcc

SEQ ID NO: 244515 - DNA, 20 bp, synthetic construct
  source 1..20: mol_type = other DNA
gtacctacaataaaactgtc

SEQ ID NO: 244516 - DNA, 20 bp, synthetic construct
  source 1..20: mol_type = other DNA
tgtacctacaataaaactgt

SEQ ID NO: 244517 - DNA, 20 bp, synthetic construct
  source 1..20: mol_type = other DNA
gtgtacctacaataaaactg

SEQ ID NO: 244518 - DNA, 20 bp, synthetic construct
  source 1..20: mol_type = other DNA
tgtgtacctacaataaaact

SEQ ID NO: 244519 - DNA, 20 bp, synthetic construct
  source 1..20: mol_type = other DNA
atgtgtacctacaataaaac

SEQ ID NO: 244520 - DNA, 20 bp, synthetic construct
  source 1..20: mol_type = other DNA
catgtgtacctacaataaaa

SEQ ID NO: 244521 - DNA, 20 bp, synthetic construct
  source 1..20: mol_type = other DNA
ccatgtgtacctacaataaa

SEQ ID NO: 244522 - DNA, 20 bp, synthetic construct
  source 1..20: mol_type = other DNA
gccatgtgtacctacaataa

SEQ ID NO: 244523 - DNA, 20 bp, synthetic construct
  source 1..20: mol_type = other DNA
agccatgtgtacctacaata

SEQ ID NO: 244524 - DNA, 20 bp, synthetic construct
  source 1..20: mol_type = other DNA
cagccatgtgtacctacaat

SEQ ID NO: 244525 - DNA, 20 bp, synthetic construct
  source 1..20: mol_type = other DNA
gcagccatgtgtacctacaa

SEQ ID NO: 244526 - DNA, 20 bp, synthetic construct
  source 1..20: mol_type = other DNA
ggcagccatgtgtacctaca

SEQ ID NO: 244527 - DNA, 20 bp, synthetic construct
  source 1..20: mol_type = other DNA
tggcagccatgtgtacctac

SEQ ID NO: 244528 - DNA, 20 bp, synthetic construct
  source 1..20: mol_type = other DNA
atggcagccatgtgtaccta

SEQ ID NO: 244529 - DNA, 20 bp, synthetic construct
  source 1..20: mol_type = other DNA
aatggcagccatgtgtacct

SEQ ID NO: 244530 - DNA, 20 bp, synthetic construct
  source 1..20: mol_type = other DNA
aaatggcagccatgtgtacc

SEQ ID NO: 244531 - DNA, 20 bp, synthetic construct
  source 1..20: mol_type = other DNA
gaaatggcagccatgtgtac

SEQ ID NO: 244532 - DNA, 20 bp, synthetic construct
  source 1..20: mol_type = other DNA
tgaaatggcagccatgtgta

SEQ ID NO: 244533 - DNA, 20 bp, synthetic construct
  source 1..20: mol_type = other DNA
ttgaaatggcagccatgtgt

SEQ ID NO: 244534 - DNA, 20 bp, synthetic construct
  source 1..20: mol_type = other DNA
tttgaaatggcagccatgtg

SEQ ID NO: 244535 - DNA, 20 bp, synthetic construct
  source 1..20: mol_type = other DNA
atttgaaatggcagccatgt

SEQ ID NO: 244536 - DNA, 20 bp, synthetic construct
  source 1..20: mol_type = other DNA
catttgaaatggcagccatg

SEQ ID NO: 244537 - DNA, 20 bp, synthetic construct
  source 1..20: mol_type = other DNA
acatttgaaatggcagccat

SEQ ID NO: 244538 - DNA, 20 bp, synthetic construct
  source 1..20: mol_type = other DNA
tacatttgaaatggcagcca

SEQ ID NO: 244539 - DNA, 20 bp, synthetic construct
  source 1..20: mol_type = other DNA
ttacatttgaaatggcagcc

SEQ ID NO: 244540 - DNA, 20 bp, synthetic construct
  source 1..20: mol_type = other DNA
gttacatttgaaatggcagc

SEQ ID NO: 244541 - DNA, 20 bp, synthetic construct
  source 1..20: mol_type = other DNA
agttacatttgaaatggcag

SEQ ID NO: 244542 - DNA, 20 bp, synthetic construct
  source 1..20: mol_type = other DNA
gagttacatttgaaatggca

SEQ ID NO: 244543 - DNA, 20 bp, synthetic construct
  source 1..20: mol_type = other DNA
tgagttacatttgaaatggc

SEQ ID NO: 244544 - DNA, 20 bp, synthetic construct
  source 1..20: mol_type = other DNA
gtgagttacatttgaaatgg

SEQ ID NO: 244545 - DNA, 20 bp, synthetic construct
  source 1..20: mol_type = other DNA
tgtgagttacatttgaaatg

SEQ ID NO: 244546 - DNA, 20 bp, synthetic construct
  source 1..20: mol_type = other DNA
ctgtgagttacatttgaaat

SEQ ID NO: 244547 - DNA, 20 bp, synthetic construct
  source 1..20: mol_type = other DNA
gctgtgagttacatttgaaa

SEQ ID NO: 244548 - DNA, 20 bp, synthetic construct
  source 1..20: mol_type = other DNA
agctgtgagttacatttgaa

SEQ ID NO: 244549 - DNA, 20 bp, synthetic construct
  source 1..20: mol_type = other DNA
aagctgtgagttacatttga

SEQ ID NO: 244550 - DNA, 20 bp, synthetic construct
  source 1..20: mol_type = other DNA
caagctgtgagttacatttg

SEQ ID NO: 244551 - DNA, 20 bp, synthetic construct
  source 1..20: mol_type = other DNA
acaagctgtgagttacattt

SEQ ID NO: 244552 - DNA, 20 bp, synthetic construct
  source 1..20: mol_type = other DNA
gacaagctgtgagttacatt

SEQ ID NO: 244553 - DNA, 20 bp, synthetic construct
  source 1..20: mol_type = other DNA
ggacaagctgtgagttacat

SEQ ID NO: 244554 - DNA, 20 bp, synthetic construct
  source 1..20: mol_type = other DNA
tggacaagctgtgagttaca

SEQ ID NO: 244555 - DNA, 20 bp, synthetic construct
  source 1..20: mol_type = other DNA
atggacaagctgtgagttac

SEQ ID NO: 244556 - DNA, 20 bp, synthetic construct
  source 1..20: mol_type = other DNA
gatggacaagctgtgagtta

SEQ ID NO: 244557 - DNA, 20 bp, synthetic construct
  source 1..20: mol_type = other DNA
tgatggacaagctgtgagtt

SEQ ID NO: 244558 - DNA, 20 bp, synthetic construct
  source 1..20: mol_type = other DNA
ctgatggacaagctgtgagt

SEQ ID NO: 244559 - DNA, 20 bp, synthetic construct
  source 1..20: mol_type = other DNA
actgatggacaagctgtgag

SEQ ID NO: 244560 - DNA, 20 bp, synthetic construct
  source 1..20: mol_type = other DNA
gactgatggacaagctgtga

SEQ ID NO: 244561 - DNA, 20 bp, synthetic construct
  source 1..20: mol_type = other DNA
ggactgatggacaagctgtg

SEQ ID NO: 244562 - DNA, 20 bp, synthetic construct
  source 1..20: mol_type = other DNA
aggactgatggacaagctgt

SEQ ID NO: 244563 - DNA, 20 bp, synthetic construct
  source 1..20: mol_type = other DNA
aaggactgatggacaagctg

SEQ ID NO: 244564 - DNA, 20 bp, synthetic construct
  source 1..20: mol_type = other DNA
caaggactgatggacaagct

SEQ ID NO: 244565 - DNA, 20 bp, synthetic construct
  source 1..20: mol_type = other DNA
ccaaggactgatggacaagc

SEQ ID NO: 244566 - DNA, 20 bp, synthetic construct
  source 1..20: mol_type = other DNA
tccaaggactgatggacaag

SEQ ID NO: 244567 - DNA, 20 bp, synthetic construct
  source 1..20: mol_type = other DNA
ctccaaggactgatggacaa

SEQ ID NO: 244568 - DNA, 20 bp, synthetic construct
  source 1..20: mol_type = other DNA
cctccaaggactgatggaca

SEQ ID NO: 244569 - DNA, 20 bp, synthetic construct
  source 1..20: mol_type = other DNA
acctccaaggactgatggac

SEQ ID NO: 244570 - DNA, 20 bp, synthetic construct
  source 1..20: mol_type = other DNA
gacctccaaggactgatgga

SEQ ID NO: 244571 - DNA, 20 bp, synthetic construct
  source 1..20: mol_type = other DNA
agacctccaaggactgatgg

SEQ ID NO: 244572 - DNA, 20 bp, synthetic construct
  source 1..20: mol_type = other DNA
aagacctccaaggactgatg

SEQ ID NO: 244573 - DNA, 20 bp, synthetic construct
  source 1..20: mol_type = other DNA
aaagacctccaaggactgat

SEQ ID NO: 244574 - DNA, 20 bp, synthetic construct
  source 1..20: mol_type = other DNA
gaaagacctccaaggactga

SEQ ID NO: 244575 - DNA, 20 bp, synthetic construct
  source 1..20: mol_type = other DNA
agaaagacctccaaggactg

SEQ ID NO: 244576 - DNA, 20 bp, synthetic construct
  source 1..20: mol_type = other DNA
tagaaagacctccaaggact

SEQ ID NO: 244577 - DNA, 20 bp, synthetic construct
  source 1..20: mol_type = other DNA
atagaaagacctccaaggac

SEQ ID NO: 244578 - DNA, 20 bp, synthetic construct
  source 1..20: mol_type = other DNA
catagaaagacctccaagga

SEQ ID NO: 244579 - DNA, 20 bp, synthetic construct
  source 1..20: mol_type = other DNA
tcatagaaagacctccaagg

SEQ ID NO: 244580 - DNA, 20 bp, synthetic construct
  source 1..20: mol_type = other DNA
ttcatagaaagacctccaag

SEQ ID NO: 244581 - DNA, 20 bp, synthetic construct
  source 1..20: mol_type = other DNA
tttcatagaaagacctccaa

SEQ ID NO: 244582 - DNA, 20 bp, synthetic construct
  source 1..20: mol_type = other DNA
ctttcatagaaagacctcca

SEQ ID NO: 244583 - DNA, 20 bp, synthetic construct
  source 1..20: mol_type = other DNA
cctttcatagaaagacctcc

SEQ ID NO: 244584 - DNA, 20 bp, synthetic construct
  source 1..20: mol_type = other DNA
tcctttcatagaaagacctc

SEQ ID NO: 244585 - DNA, 20 bp, synthetic construct
  source 1..20: mol_type = other DNA
ctcctttcatagaaagacct

SEQ ID NO: 244586 - DNA, 20 bp, synthetic construct
  source 1..20: mol_type = other DNA
gctcctttcatagaaagacc

SEQ ID NO: 244587 - DNA, 20 bp, synthetic construct
  source 1..20: mol_type = other DNA
agctcctttcatagaaagac

SEQ ID NO: 244588 - DNA, 20 bp, synthetic construct
  source 1..20: mol_type = other DNA
aagctcctttcatagaaaga

SEQ ID NO: 244589 - DNA, 20 bp, synthetic construct
  source 1..20: mol_type = other DNA
caagctcctttcatagaaag

SEQ ID NO: 244590 - DNA, 20 bp, synthetic construct
  source 1..20: mol_type = other DNA
ccaagctcctttcatagaaa

SEQ ID NO: 244591 - DNA, 20 bp, synthetic construct
  source 1..20: mol_type = other DNA
accaagctcctttcatagaa

SEQ ID NO: 244592 - DNA, 20 bp, synthetic construct
  source 1..20: mol_type = other DNA
caccaagctcctttcataga

SEQ ID NO: 244593 - DNA, 20 bp, synthetic construct
  source 1..20: mol_type = other DNA
ccaccaagctcctttcatag

SEQ ID NO: 244594 - DNA, 20 bp, synthetic construct
  source 1..20: mol_type = other DNA
gccaccaagctcctttcata

SEQ ID NO: 244595 - DNA, 20 bp, synthetic construct
  source 1..20: mol_type = other DNA
cgccaccaagctcctttcat

SEQ ID NO: 244596 - DNA, 20 bp, synthetic construct
  source 1..20: mol_type = other DNA
acgccaccaagctcctttca

SEQ ID NO: 244597 - DNA, 20 bp, synthetic construct
  source 1..20: mol_type = other DNA
gacgccaccaagctcctttc

SEQ ID NO: 244598 - DNA, 20 bp, synthetic construct
  source 1..20: mol_type = other DNA
ggacgccaccaagctccttt

SEQ ID NO: 244599 - DNA, 20 bp, synthetic construct
  source 1..20: mol_type = other DNA
tggacgccaccaagctcctt

SEQ ID NO: 244600 - DNA, 20 bp, synthetic construct
  source 1..20: mol_type = other DNA
ttggacgccaccaagctcct

SEQ ID NO: 244601 - DNA, 20 bp, synthetic construct
  source 1..20: mol_type = other DNA
tttggacgccaccaagctcc

SEQ ID NO: 244602 - DNA, 20 bp, synthetic construct
  source 1..20: mol_type = other DNA
gtttggacgccaccaagctc

SEQ ID NO: 244603 - DNA, 20 bp, synthetic construct
  source 1..20: mol_type = other DNA
tgtttggacgccaccaagct

SEQ ID NO: 244604 - DNA, 20 bp, synthetic construct
  source 1..20: mol_type = other DNA
gtgtttggacgccaccaagc

SEQ ID NO: 244605 - DNA, 20 bp, synthetic construct
  source 1..20: mol_type = other DNA
ggtgtttggacgccaccaag

SEQ ID NO: 244606 - DNA, 20 bp, synthetic construct
  source 1..20: mol_type = other DNA
tggtgtttggacgccaccaa

SEQ ID NO: 244607 - DNA, 20 bp, synthetic construct
  source 1..20: mol_type = other DNA
gtggtgtttggacgccacca

SEQ ID NO: 244608 - DNA, 20 bp, synthetic construct
  source 1..20: mol_type = other DNA
ggtggtgtttggacgccacc

SEQ ID NO: 244609 - DNA, 20 bp, synthetic construct
  source 1..20: mol_type = other DNA
gggtggtgtttggacgccac

SEQ ID NO: 244610 - DNA, 20 bp, synthetic construct
  source 1..20: mol_type = other DNA
tgggtggtgtttggacgcca

SEQ ID NO: 244611 - DNA, 20 bp, synthetic construct
  source 1..20: mol_type = other DNA
ttgggtggtgtttggacgcc

SEQ ID NO: 244612 - DNA, 20 bp, synthetic construct
  source 1..20: mol_type = other DNA
attgggtggtgtttggacgc

SEQ ID NO: 244613 - DNA, 20 bp, synthetic construct
  source 1..20: mol_type = other DNA
cattgggtggtgtttggacg

SEQ ID NO: 244614 - DNA, 20 bp, synthetic construct
  source 1..20: mol_type = other DNA
acattgggtggtgtttggac

SEQ ID NO: 244615 - DNA, 20 bp, synthetic construct
  source 1..20: mol_type = other DNA
gacattgggtggtgtttgga

SEQ ID NO: 244616 - DNA, 20 bp, synthetic construct
  source 1..20: mol_type = other DNA
ggacattgggtggtgtttgg

SEQ ID NO: 244617 - DNA, 20 bp, synthetic construct
  source 1..20: mol_type = other DNA
tggacattgggtggtgtttg

SEQ ID NO: 244618 - DNA, 20 bp, synthetic construct
  source 1..20: mol_type = other DNA
gtggacattgggtggtgttt

SEQ ID NO: 244619 - DNA, 20 bp, synthetic construct
  source 1..20: mol_type = other DNA
agtggacattgggtggtgtt

SEQ ID NO: 244620 - DNA, 20 bp, synthetic construct
  source 1..20: mol_type = other DNA
aagtggacattgggtggtgt

SEQ ID NO: 244621 - DNA, 20 bp, synthetic construct
  source 1..20: mol_type = other DNA
taagtggacattgggtggtg

SEQ ID NO: 244622 - DNA, 20 bp, synthetic construct
  source 1..20: mol_type = other DNA
ctaagtggacattgggtggt

SEQ ID NO: 244623 - DNA, 20 bp, synthetic construct
  source 1..20: mol_type = other DNA
tctaagtggacattgggtgg

SEQ ID NO: 244624 - DNA, 20 bp, synthetic construct
  source 1..20: mol_type = other DNA
ttctaagtggacattgggtg

SEQ ID NO: 244625 - DNA, 20 bp, synthetic construct
  source 1..20: mol_type = other DNA
cttctaagtggacattgggt

SEQ ID NO: 244626 - DNA, 20 bp, synthetic construct
  source 1..20: mol_type = other DNA
acttctaagtggacattggg

SEQ ID NO: 244627 - DNA, 20 bp, synthetic construct
  source 1..20: mol_type = other DNA
tacttctaagtggacattgg

SEQ ID NO: 244628 - DNA, 20 bp, synthetic construct
  source 1..20: mol_type = other DNA
ttacttctaagtggacattg

SEQ ID NO: 244629 - DNA, 20 bp, synthetic construct
  source 1..20: mol_type = other DNA
cttacttctaagtggacatt

SEQ ID NO: 244630 - DNA, 20 bp, synthetic construct
  source 1..20: mol_type = other DNA
gcttacttctaagtggacat

SEQ ID NO: 244631 - DNA, 20 bp, synthetic construct
  source 1..20: mol_type = other DNA
tgcttacttctaagtggaca

SEQ ID NO: 244632 - DNA, 20 bp, synthetic construct
  source 1..20: mol_type = other DNA
gtgcttacttctaagtggac

SEQ ID NO: 244633 - DNA, 20 bp, synthetic construct
  source 1..20: mol_type = other DNA
ggtgcttacttctaagtgga

SEQ ID NO: 244634 - DNA, 20 bp, synthetic construct
  source 1..20: mol_type = other DNA
cggtgcttacttctaagtgg

SEQ ID NO: 244635 - DNA, 20 bp, synthetic construct
  source 1..20: mol_type = other DNA
acggtgcttacttctaagtg

SEQ ID NO: 244636 - DNA, 20 bp, synthetic construct
  source 1..20: mol_type = other DNA
cacggtgcttacttctaagt

SEQ ID NO: 244637 - DNA, 20 bp, synthetic construct
  source 1..20: mol_type = other DNA
acacggtgcttacttctaag

SEQ ID NO: 244638 - DNA, 20 bp, synthetic construct
  source 1..20: mol_type = other DNA
gacacggtgcttacttctaa

SEQ ID NO: 244639 - DNA, 20 bp, synthetic construct
  source 1..20: mol_type = other DNA
agacacggtgcttacttcta

SEQ ID NO: 244640 - DNA, 20 bp, synthetic construct
  source 1..20: mol_type = other DNA
cagacacggtgcttacttct

SEQ ID NO: 244641 - DNA, 20 bp, synthetic construct
  source 1..20: mol_type = other DNA
gcagacacggtgcttacttc

SEQ ID NO: 244642 - DNA, 20 bp, synthetic construct
  source 1..20: mol_type = other DNA
ggcagacacggtgcttactt

SEQ ID NO: 244643 - DNA, 20 bp, synthetic construct
  source 1..20: mol_type = other DNA
gggcagacacggtgcttact

SEQ ID NO: 244644 - DNA, 20 bp, synthetic construct
  source 1..20: mol_type = other DNA
agggcagacacggtgcttac

SEQ ID NO: 244645 - DNA, 20 bp, synthetic construct
  source 1..20: mol_type = other DNA
cagggcagacacggtgctta

SEQ ID NO: 244646 - DNA, 20 bp, synthetic construct
  source 1..20: mol_type = other DNA
tcagggcagacacggtgctt

SEQ ID NO: 244647 - DNA, 20 bp, synthetic construct
  source 1..20: mol_type = other DNA
ctcagggcagacacggtgct

SEQ ID NO: 244648 - DNA, 20 bp, synthetic construct
  source 1..20: mol_type = other DNA
gctcagggcagacacggtgc

SEQ ID NO: 244649 - DNA, 20 bp, synthetic construct
  source 1..20: mol_type = other DNA
agctcagggcagacacggtg

SEQ ID NO: 244650 - DNA, 20 bp, synthetic construct
  source 1..20: mol_type = other DNA
cagctcagggcagacacggt

SEQ ID NO: 244651 - DNA, 20 bp, synthetic construct
  source 1..20: mol_type = other DNA
tcagctcagggcagacacgg

SEQ ID NO: 244652 - DNA, 20 bp, synthetic construct
  source 1..20: mol_type = other DNA
gtcagctcagggcagacacg

SEQ ID NO: 244653 - DNA, 20 bp, synthetic construct
  source 1..20: mol_type = other DNA
agtcagctcagggcagacac

SEQ ID NO: 244654 - DNA, 20 bp, synthetic construct
  source 1..20: mol_type = other DNA
gagtcagctcagggcagaca

SEQ ID NO: 244655 - DNA, 20 bp, synthetic construct
  source 1..20: mol_type = other DNA
ggagtcagctcagggcagac

SEQ ID NO: 244656 - DNA, 20 bp, synthetic construct
  source 1..20: mol_type = other DNA
aggagtcagctcagggcaga

SEQ ID NO: 244657 - DNA, 20 bp, synthetic construct
  source 1..20: mol_type = other DNA
aaggagtcagctcagggcag

SEQ ID NO: 244658 - DNA, 20 bp, synthetic construct
  source 1..20: mol_type = other DNA
aaaggagtcagctcagggca

SEQ ID NO: 244659 - DNA, 20 bp, synthetic construct
  source 1..20: mol_type = other DNA
aaaaggagtcagctcagggc

SEQ ID NO: 244660 - DNA, 20 bp, synthetic construct
  source 1..20: mol_type = other DNA
gaaaaggagtcagctcaggg

SEQ ID NO: 244661 - DNA, 20 bp, synthetic construct
  source 1..20: mol_type = other DNA
ggaaaaggagtcagctcagg

SEQ ID NO: 244662 - DNA, 20 bp, synthetic construct
  source 1..20: mol_type = other DNA
tggaaaaggagtcagctcag

SEQ ID NO: 244663 - DNA, 20 bp, synthetic construct
  source 1..20: mol_type = other DNA
ttggaaaaggagtcagctca

SEQ ID NO: 244664 - DNA, 20 bp, synthetic construct
  source 1..20: mol_type = other DNA
cttggaaaaggagtcagctc

SEQ ID NO: 244665 - DNA, 20 bp, synthetic construct
  source 1..20: mol_type = other DNA
ccttggaaaaggagtcagct

SEQ ID NO: 244666 - DNA, 20 bp, synthetic construct
  source 1..20: mol_type = other DNA
tccttggaaaaggagtcagc

SEQ ID NO: 244667 - DNA, 20 bp, synthetic construct
  source 1..20: mol_type = other DNA
ttccttggaaaaggagtcag

SEQ ID NO: 244668 - DNA, 20 bp, synthetic construct
  source 1..20: mol_type = other DNA
cttccttggaaaaggagtca

SEQ ID NO: 244669 - DNA, 20 bp, synthetic construct
  source 1..20: mol_type = other DNA
ccttccttggaaaaggagtc

SEQ ID NO: 244670 - DNA, 20 bp, synthetic construct
  source 1..20: mol_type = other DNA
cccttccttggaaaaggagt

SEQ ID NO: 244671 - DNA, 20 bp, synthetic construct
  source 1..20: mol_type = other DNA
ccccttccttggaaaaggag

SEQ ID NO: 244672 - DNA, 20 bp, synthetic construct
  source 1..20: mol_type = other DNA
accccttccttggaaaagga

SEQ ID NO: 244673 - DNA, 20 bp, synthetic construct
  source 1..20: mol_type = other DNA
aaccccttccttggaaaagg

SEQ ID NO: 244674 - DNA, 20 bp, synthetic construct
  source 1..20: mol_type = other DNA
caaccccttccttggaaaag

SEQ ID NO: 244675 - DNA, 20 bp, synthetic construct
  source 1..20: mol_type = other DNA
ccaaccccttccttggaaaa

SEQ ID NO: 244676 - DNA, 20 bp, synthetic construct
  source 1..20: mol_type = other DNA
tccaaccccttccttggaaa

SEQ ID NO: 244677 - DNA, 20 bp, synthetic construct
  source 1..20: mol_type = other DNA
atccaaccccttccttggaa

SEQ ID NO: 244678 - DNA, 20 bp, synthetic construct
  source 1..20: mol_type = other DNA
gatccaaccccttccttgga

SEQ ID NO: 244679 - DNA, 20 bp, synthetic construct
  source 1..20: mol_type = other DNA
cgatccaaccccttccttgg

SEQ ID NO: 244680 - DNA, 20 bp, synthetic construct
  source 1..20: mol_type = other DNA
gcgatccaaccccttccttg

SEQ ID NO: 244681 - DNA, 20 bp, synthetic construct
  source 1..20: mol_type = other DNA
agcgatccaaccccttcctt

SEQ ID NO: 244682 - DNA, 20 bp, synthetic construct
  source 1..20: mol_type = other DNA
cagcgatccaaccccttcct

SEQ ID NO: 244683 - DNA, 20 bp, synthetic construct
  source 1..20: mol_type = other DNA
tcagcgatccaaccccttcc

SEQ ID NO: 244684 - DNA, 20 bp, synthetic construct
  source 1..20: mol_type = other DNA
ctcagcgatccaaccccttc

SEQ ID NO: 244685 - DNA, 20 bp, synthetic construct
  source 1..20: mol_type = other DNA
actcagcgatccaacccctt

SEQ ID NO: 244686 - DNA, 20 bp, synthetic construct
  source 1..20: mol_type = other DNA
cactcagcgatccaacccct

SEQ ID NO: 244687 - DNA, 20 bp, synthetic construct
  source 1..20: mol_type = other DNA
acactcagcgatccaacccc

SEQ ID NO: 244688 - DNA, 20 bp, synthetic construct
  source 1..20: mol_type = other DNA
aacactcagcgatccaaccc

SEQ ID NO: 244689 - DNA, 20 bp, synthetic construct
  source 1..20: mol_type = other DNA
aaacactcagcgatccaacc

SEQ ID NO: 244690 - DNA, 20 bp, synthetic construct
  source 1..20: mol_type = other DNA
aaaacactcagcgatccaac

SEQ ID NO: 244691 - DNA, 20 bp, synthetic construct
  source 1..20: mol_type = other DNA
aaaaacactcagcgatccaa

SEQ ID NO: 244692 - DNA, 20 bp, synthetic construct
  source 1..20: mol_type = other DNA
gaaaaacactcagcgatcca

SEQ ID NO: 244693 - DNA, 20 bp, synthetic construct
  source 1..20: mol_type = other DNA
ggaaaaacactcagcgatcc

SEQ ID NO: 244694 - DNA, 20 bp, synthetic construct
  source 1..20: mol_type = other DNA
tggaaaaacactcagcgatc

SEQ ID NO: 244695 - DNA, 20 bp, synthetic construct
  source 1..20: mol_type = other DNA
ctggaaaaacactcagcgat

SEQ ID NO: 244696 - DNA, 20 bp, synthetic construct
  source 1..20: mol_type = other DNA
cctggaaaaacactcagcga

SEQ ID NO: 244697 - DNA, 20 bp, synthetic construct
  source 1..20: mol_type = other DNA
acctggaaaaacactcagcg

SEQ ID NO: 244698 - DNA, 20 bp, synthetic construct
  source 1..20: mol_type = other DNA
cacctggaaaaacactcagc

SEQ ID NO: 244699 - DNA, 20 bp, synthetic construct
  source 1..20: mol_type = other DNA
acacctggaaaaacactcag

SEQ ID NO: 244700 - DNA, 20 bp, synthetic construct
  source 1..20: mol_type = other DNA
gacacctggaaaaacactca

SEQ ID NO: 244701 - DNA, 20 bp, synthetic construct
  source 1..20: mol_type = other DNA
agacacctggaaaaacactc

SEQ ID NO: 244702 - DNA, 20 bp, synthetic construct
  source 1..20: mol_type = other DNA
tagacacctggaaaaacact

SEQ ID NO: 244703 - DNA, 20 bp, synthetic construct
  source 1..20: mol_type = other DNA
gtagacacctggaaaaacac

SEQ ID NO: 244704 - DNA, 20 bp, synthetic construct
  source 1..20: mol_type = other DNA
agtagacacctggaaaaaca

SEQ ID NO: 244705 - DNA, 20 bp, synthetic construct
  source 1..20: mol_type = other DNA
aagtagacacctggaaaaac

SEQ ID NO: 244706 - DNA, 20 bp, synthetic construct
  source 1..20: mol_type = other DNA
caagtagacacctggaaaaa

SEQ ID NO: 244707 - DNA, 20 bp, synthetic construct
  source 1..20: mol_type = other DNA
acaagtagacacctggaaaa

SEQ ID NO: 244708 - DNA, 20 bp, synthetic construct
  source 1..20: mol_type = other DNA
aacaagtagacacctggaaa

SEQ ID NO: 244709 - DNA, 20 bp, synthetic construct
  source 1..20: mol_type = other DNA
caacaagtagacacctggaa

SEQ ID NO: 244710 - DNA, 20 bp, synthetic construct
  source 1..20: mol_type = other DNA
acaacaagtagacacctgga

SEQ ID NO: 244711 - DNA, 20 bp, synthetic construct
  source 1..20: mol_type = other DNA
aacaacaagtagacacctgg

SEQ ID NO: 244712 - DNA, 20 bp, synthetic construct
  source 1..20: mol_type = other DNA
taacaacaagtagacacctg

SEQ ID NO: 244713 - DNA, 20 bp, synthetic construct
  source 1..20: mol_type = other DNA
ttaacaacaagtagacacct

SEQ ID NO: 244714 - DNA, 20 bp, synthetic construct
  source 1..20: mol_type = other DNA
attaacaacaagtagacacc

SEQ ID NO: 244715 - DNA, 20 bp, synthetic construct
  source 1..20: mol_type = other DNA
aattaacaacaagtagacac

SEQ ID NO: 244716 - DNA, 20 bp, synthetic construct
  source 1..20: mol_type = other DNA
taattaacaacaagtagaca

SEQ ID NO: 244717 - DNA, 20 bp, synthetic construct
  source 1..20: mol_type = other DNA
ttaattaacaacaagtagac

SEQ ID NO: 244718 - DNA, 20 bp, synthetic construct
  source 1..20: mol_type = other DNA
attaattaacaacaagtaga

SEQ ID NO: 244719 - DNA, 20 bp, synthetic construct
  source 1..20: mol_type = other DNA
tattaattaacaacaagtag

SEQ ID NO: 244720 - DNA, 20 bp, synthetic construct
  source 1..20: mol_type = other DNA
ctattaattaacaacaagta

SEQ ID NO: 244721 - DNA, 20 bp, synthetic construct
  source 1..20: mol_type = other DNA
gctattaattaacaacaagt

SEQ ID NO: 244722 - DNA, 20 bp, synthetic construct
  source 1..20: mol_type = other DNA
tgctattaattaacaacaag

SEQ ID NO: 244723 - DNA, 20 bp, synthetic construct
  source 1..20: mol_type = other DNA
ttgctattaattaacaacaa

SEQ ID NO: 244724 - DNA, 20 bp, synthetic construct
  source 1..20: mol_type = other DNA
attgctattaattaacaaca

SEQ ID NO: 244725 - DNA, 20 bp, synthetic construct
  source 1..20: mol_type = other DNA
cattgctattaattaacaac

SEQ ID NO: 244726 - DNA, 20 bp, synthetic construct
  source 1..20: mol_type = other DNA
tcattgctattaattaacaa

SEQ ID NO: 244727 - DNA, 20 bp, synthetic construct
  source 1..20: mol_type = other DNA
gtcattgctattaattaaca

SEQ ID NO: 244728 - DNA, 20 bp, synthetic construct
  source 1..20: mol_type = other DNA
tgtcattgctattaattaac

SEQ ID NO: 244729 - DNA, 20 bp, synthetic construct
  source 1..20: mol_type = other DNA
ttgtcattgctattaattaa

SEQ ID NO: 244730 - DNA, 20 bp, synthetic construct
  source 1..20: mol_type = other DNA
tttgtcattgctattaatta

SEQ ID NO: 244731 - DNA, 20 bp, synthetic construct
  source 1..20: mol_type = other DNA
ctttgtcattgctattaatt

SEQ ID NO: 244732 - DNA, 20 bp, synthetic construct
  source 1..20: mol_type = other DNA
gctttgtcattgctattaat

SEQ ID NO: 244733 - DNA, 20 bp, synthetic construct
  source 1..20: mol_type = other DNA
tgctttgtcattgctattaa

SEQ ID NO: 244734 - DNA, 20 bp, synthetic construct
  source 1..20: mol_type = other DNA
ctgctttgtcattgctatta

SEQ ID NO: 244735 - DNA, 20 bp, synthetic construct
  source 1..20: mol_type = other DNA
tctgctttgtcattgctatt

SEQ ID NO: 244736 - DNA, 20 bp, synthetic construct
  source 1..20: mol_type = other DNA
ttctgctttgtcattgctat

SEQ ID NO: 244737 - DNA, 20 bp, synthetic construct
  source 1..20: mol_type = other DNA
cttctgctttgtcattgcta

SEQ ID NO: 244738 - DNA, 20 bp, synthetic construct
  source 1..20: mol_type = other DNA
ccttctgctttgtcattgct

SEQ ID NO: 244739 - DNA, 20 bp, synthetic construct
  source 1..20: mol_type = other DNA
accttctgctttgtcattgc

SEQ ID NO: 244740 - DNA, 20 bp, synthetic construct
  source 1..20: mol_type = other DNA
aaccttctgctttgtcattg

SEQ ID NO: 244741 - DNA, 20 bp, synthetic construct
  source 1..20: mol_type = other DNA
gaaccttctgctttgtcatt

SEQ ID NO: 244742 - DNA, 20 bp, synthetic construct
  source 1..20: mol_type = other DNA
tgaaccttctgctttgtcat

SEQ ID NO: 244743 - DNA, 20 bp, synthetic construct
  source 1..20: mol_type = other DNA
atgaaccttctgctttgtca

SEQ ID NO: 244744 - DNA, 20 bp, synthetic construct
  source 1..20: mol_type = other DNA
catgaaccttctgctttgtc

SEQ ID NO: 244745 - DNA, 20 bp, synthetic construct
  source 1..20: mol_type = other DNA
gcatgaaccttctgctttgt

SEQ ID NO: 244746 - DNA, 20 bp, synthetic construct
  source 1..20: mol_type = other DNA
cgcatgaaccttctgctttg

SEQ ID NO: 244747 - DNA, 20 bp, synthetic construct
  source 1..20: mol_type = other DNA
acgcatgaaccttctgcttt

SEQ ID NO: 244748 - DNA, 20 bp, synthetic construct
  source 1..20: mol_type = other DNA
tacgcatgaaccttctgctt

SEQ ID NO: 244749 - DNA, 20 bp, synthetic construct
  source 1..20: mol_type = other DNA
ctacgcatgaaccttctgct

SEQ ID NO: 244750 - DNA, 20 bp, synthetic construct
  source 1..20: mol_type = other DNA
gctacgcatgaaccttctgc

SEQ ID NO: 244751 - DNA, 20 bp, synthetic construct
  source 1..20: mol_type = other DNA
agctacgcatgaaccttctg

SEQ ID NO: 244752 - DNA, 20 bp, synthetic construct
  source 1..20: mol_type = other DNA
gagctacgcatgaaccttct

SEQ ID NO: 244753 - DNA, 20 bp, synthetic construct
  source 1..20: mol_type = other DNA
cgagctacgcatgaaccttc

SEQ ID NO: 244754 - DNA, 20 bp, synthetic construct
  source 1..20: mol_type = other DNA
ccgagctacgcatgaacctt

SEQ ID NO: 244755 - DNA, 20 bp, synthetic construct
  source 1..20: mol_type = other DNA
gccgagctacgcatgaacct

SEQ ID NO: 244756 - DNA, 20 bp, synthetic construct
  source 1..20: mol_type = other DNA
agccgagctacgcatgaacc

SEQ ID NO: 244757 - DNA, 20 bp, synthetic construct
  source 1..20: mol_type = other DNA
aagccgagctacgcatgaac

SEQ ID NO: 244758 - DNA, 20 bp, synthetic construct
  source 1..20: mol_type = other DNA
aaagccgagctacgcatgaa

SEQ ID NO: 244759 - DNA, 20 bp, synthetic construct
  source 1..20: mol_type = other DNA
gaaagccgagctacgcatga

SEQ ID NO: 244760 - DNA, 20 bp, synthetic construct
  source 1..20: mol_type = other DNA
agaaagccgagctacgcatg

SEQ ID NO: 244761 - DNA, 20 bp, synthetic construct
  source 1..20: mol_type = other DNA
cagaaagccgagctacgcat

SEQ ID NO: 244762 - DNA, 20 bp, synthetic construct
  source 1..20: mol_type = other DNA
ccagaaagccgagctacgca

SEQ ID NO: 244763 - DNA, 20 bp, synthetic construct
  source 1..20: mol_type = other DNA
accagaaagccgagctacgc

SEQ ID NO: 244764 - DNA, 20 bp, synthetic construct
  source 1..20: mol_type = other DNA
taccagaaagccgagctacg

SEQ ID NO: 244765 - DNA, 20 bp, synthetic construct
  source 1..20: mol_type = other DNA
ataccagaaagccgagctac

SEQ ID NO: 244766 - DNA, 20 bp, synthetic construct
  source 1..20: mol_type = other DNA
aataccagaaagccgagcta

SEQ ID NO: 244767 - DNA, 20 bp, synthetic construct
  source 1..20: mol_type = other DNA
aaataccagaaagccgagct

SEQ ID NO: 244768 - DNA, 20 bp, synthetic construct
  source 1..20: mol_type = other DNA
caaataccagaaagccgagc

SEQ ID NO: 244769 - DNA, 20 bp, synthetic construct
  source 1..20: mol_type = other DNA
gcaaataccagaaagccgag

SEQ ID NO: 244770 - DNA, 20 bp, synthetic construct
  source 1..20: mol_type = other DNA
agcaaataccagaaagccga

SEQ ID NO: 244771 - DNA, 20 bp, synthetic construct
  source 1..20: mol_type = other DNA
cagcaaataccagaaagccg

SEQ ID NO: 244772 - DNA, 20 bp, synthetic construct
  source 1..20: mol_type = other DNA
gcagcaaataccagaaagcc

SEQ ID NO: 244773 - DNA, 20 bp, synthetic construct
  source 1..20: mol_type = other DNA
ggcagcaaataccagaaagc

SEQ ID NO: 244774 - DNA, 20 bp, synthetic construct
  source 1..20: mol_type = other DNA
gggcagcaaataccagaaag

SEQ ID NO: 244775 - DNA, 20 bp, synthetic construct
  source 1..20: mol_type = other DNA
cgggcagcaaataccagaaa

SEQ ID NO: 244776 - DNA, 20 bp, synthetic construct
  source 1..20: mol_type = other DNA
acgggcagcaaataccagaa

SEQ ID NO: 244777 - DNA, 20 bp, synthetic construct
  source 1..20: mol_type = other DNA
aacgggcagcaaataccaga

SEQ ID NO: 244778 - DNA, 20 bp, synthetic construct
  source 1..20: mol_type = other DNA
caacgggcagcaaataccag

SEQ ID NO: 244779 - DNA, 20 bp, synthetic construct
  source 1..20: mol_type = other DNA
tcaacgggcagcaaatacca

SEQ ID NO: 244780 - DNA, 20 bp, synthetic construct
  source 1..20: mol_type = other DNA
gtcaacgggcagcaaatacc

SEQ ID NO: 244781 - DNA, 20 bp, synthetic construct
  source 1..20: mol_type = other DNA
ggtcaacgggcagcaaatac

SEQ ID NO: 244782 - DNA, 20 bp, synthetic construct
  source 1..20: mol_type = other DNA
tggtcaacgggcagcaaata

SEQ ID NO: 244783 - DNA, 20 bp, synthetic construct
  source 1..20: mol_type = other DNA
ttggtcaacgggcagcaaat

SEQ ID NO: 244784 - DNA, 20 bp, synthetic construct
  source 1..20: mol_type = other DNA
attggtcaacgggcagcaaa

SEQ ID NO: 244785 - DNA, 20 bp, synthetic construct
  source 1..20: mol_type = other DNA
cattggtcaacgggcagcaa

SEQ ID NO: 244786 - DNA, 20 bp, synthetic construct
  source 1..20: mol_type = other DNA
ccattggtcaacgggcagca

SEQ ID NO: 244787 - DNA, 20 bp, synthetic construct
  source 1..20: mol_type = other DNA
tccattggtcaacgggcagc

SEQ ID NO: 244788 - DNA, 20 bp, synthetic construct
  source 1..20: mol_type = other DNA
ttccattggtcaacgggcag

SEQ ID NO: 244789 - DNA, 20 bp, synthetic construct
  source 1..20: mol_type = other DNA
cttccattggtcaacgggca

SEQ ID NO: 244790 - DNA, 20 bp, synthetic construct
  source 1..20: mol_type = other DNA
tcttccattggtcaacgggc

SEQ ID NO: 244791 - DNA, 20 bp, synthetic construct
  source 1..20: mol_type = other DNA
atcttccattggtcaacggg

SEQ ID NO: 244792 - DNA, 20 bp, synthetic construct
  source 1..20: mol_type = other DNA
tatcttccattggtcaacgg

SEQ ID NO: 244793 - DNA, 20 bp, synthetic construct
  source 1..20: mol_type = other DNA
ttatcttccattggtcaacg

SEQ ID NO: 244794 - DNA, 20 bp, synthetic construct
  source 1..20: mol_type = other DNA
tttatcttccattggtcaac

SEQ ID NO: 244795 - DNA, 20 bp, synthetic construct
  source 1..20: mol_type = other DNA
gtttatcttccattggtcaa

SEQ ID NO: 244796 - DNA, 20 bp, synthetic construct
  source 1..20: mol_type = other DNA
ggtttatcttccattggtca

SEQ ID NO: 244797 - DNA, 20 bp, synthetic construct
  source 1..20: mol_type = other DNA
aggtttatcttccattggtc

SEQ ID NO: 244798 - DNA, 20 bp, synthetic construct
  source 1..20: mol_type = other DNA
aaggtttatcttccattggt

SEQ ID NO: 244799 - DNA, 20 bp, synthetic construct
  source 1..20: mol_type = other DNA
aaaggtttatcttccattgg

SEQ ID NO: 244800 - DNA, 20 bp, synthetic construct
  source 1..20: mol_type = other DNA
caaaggtttatcttccattg

SEQ ID NO: 244801 - DNA, 20 bp, synthetic construct
  source 1..20: mol_type = other DNA
gcaaaggtttatcttccatt

SEQ ID NO: 244802 - DNA, 20 bp, synthetic construct
  source 1..20: mol_type = other DNA
ggcaaaggtttatcttccat

SEQ ID NO: 244803 - DNA, 20 bp, synthetic construct
  source 1..20: mol_type = other DNA
aggcaaaggtttatcttcca

SEQ ID NO: 244804 - DNA, 20 bp, synthetic construct
  source 1..20: mol_type = other DNA
gaggcaaaggtttatcttcc

SEQ ID NO: 244805 - DNA, 20 bp, synthetic construct
  source 1..20: mol_type = other DNA
tgaggcaaaggtttatcttc

SEQ ID NO: 244806 - DNA, 20 bp, synthetic construct
  source 1..20: mol_type = other DNA
ctgaggcaaaggtttatctt

SEQ ID NO: 244807 - DNA, 20 bp, synthetic construct
  source 1..20: mol_type = other DNA
cctgaggcaaaggtttatct

SEQ ID NO: 244808 - DNA, 20 bp, synthetic construct
  source 1..20: mol_type = other DNA
acctgaggcaaaggtttatc

SEQ ID NO: 244809 - DNA, 20 bp, synthetic construct
  source 1..20: mol_type = other DNA
cacctgaggcaaaggtttat

SEQ ID NO: 244810 - DNA, 20 bp, synthetic construct
  source 1..20: mol_type = other DNA
ccacctgaggcaaaggttta

SEQ ID NO: 244811 - DNA, 20 bp, synthetic construct
  source 1..20: mol_type = other DNA
gccacctgaggcaaaggttt

SEQ ID NO: 244812 - DNA, 20 bp, synthetic construct
  source 1..20: mol_type = other DNA
tgccacctgaggcaaaggtt

SEQ ID NO: 244813 - DNA, 20 bp, synthetic construct
  source 1..20: mol_type = other DNA
gtgccacctgaggcaaaggt

SEQ ID NO: 244814 - DNA, 20 bp, synthetic construct
  source 1..20: mol_type = other DNA
ggtgccacctgaggcaaagg

SEQ ID NO: 244815 - DNA, 20 bp, synthetic construct
  source 1..20: mol_type = other DNA
tggtgccacctgaggcaaag

SEQ ID NO: 244816 - DNA, 20 bp, synthetic construct
  source 1..20: mol_type = other DNA
gtggtgccacctgaggcaaa

SEQ ID NO: 244817 - DNA, 20 bp, synthetic construct
  source 1..20: mol_type = other DNA
agtggtgccacctgaggcaa

SEQ ID NO: 244818 - DNA, 20 bp, synthetic construct
  source 1..20: mol_type = other DNA
tagtggtgccacctgaggca

SEQ ID NO: 244819 - DNA, 20 bp, synthetic construct
  source 1..20: mol_type = other DNA
ctagtggtgccacctgaggc

SEQ ID NO: 244820 - DNA, 20 bp, synthetic construct
  source 1..20: mol_type = other DNA
gctagtggtgccacctgagg

SEQ ID NO: 244821 - DNA, 20 bp, synthetic construct
  source 1..20: mol_type = other DNA
agctagtggtgccacctgag

SEQ ID NO: 244822 - DNA, 20 bp, synthetic construct
  source 1..20: mol_type = other DNA
cagctagtggtgccacctga

SEQ ID NO: 244823 - DNA, 20 bp, synthetic construct
  source 1..20: mol_type = other DNA
ccagctagtggtgccacctg

SEQ ID NO: 244824 - DNA, 20 bp, synthetic construct
  source 1..20: mol_type = other DNA
accagctagtggtgccacct

SEQ ID NO: 244825 - DNA, 20 bp, synthetic construct
  source 1..20: mol_type = other DNA
aaccagctagtggtgccacc

SEQ ID NO: 244826 - DNA, 20 bp, synthetic construct
  source 1..20: mol_type = other DNA
taaccagctagtggtgccac

SEQ ID NO: 244827 - DNA, 20 bp, synthetic construct
  source 1..20: mol_type = other DNA
ttaaccagctagtggtgcca

SEQ ID NO: 244828 - DNA, 20 bp, synthetic construct
  source 1..20: mol_type = other DNA
cttaaccagctagtggtgcc

SEQ ID NO: 244829 - DNA, 20 bp, synthetic construct
  source 1..20: mol_type = other DNA
tcttaaccagctagtggtgc

SEQ ID NO: 244830 - DNA, 20 bp, synthetic construct
  source 1..20: mol_type = other DNA
ctcttaaccagctagtggtg

SEQ ID NO: 244831 - DNA, 20 bp, synthetic construct
  source 1..20: mol_type = other DNA
cctcttaaccagctagtggt

SEQ ID NO: 244832 - DNA, 20 bp, synthetic construct
  source 1..20: mol_type = other DNA
gcctcttaaccagctagtgg

SEQ ID NO: 244833 - DNA, 20 bp, synthetic construct
  source 1..20: mol_type = other DNA
tgcctcttaaccagctagtg

SEQ ID NO: 244834 - DNA, 20 bp, synthetic construct
  source 1..20: mol_type = other DNA
gtgcctcttaaccagctagt

SEQ ID NO: 244835 - DNA, 20 bp, synthetic construct
  source 1..20: mol_type = other DNA
agtgcctcttaaccagctag

SEQ ID NO: 244836 - DNA, 20 bp, synthetic construct
  source 1..20: mol_type = other DNA
aagtgcctcttaaccagcta

SEQ ID NO: 244837 - DNA, 20 bp, synthetic construct
  source 1..20: mol_type = other DNA
aaagtgcctcttaaccagct

SEQ ID NO: 244838 - DNA, 20 bp, synthetic construct
  source 1..20: mol_type = other DNA
caaagtgcctcttaaccagc

SEQ ID NO: 244839 - DNA, 20 bp, synthetic construct
  source 1..20: mol_type = other DNA
acaaagtgcctcttaaccag

SEQ ID NO: 244840 - DNA, 20 bp, synthetic construct
  source 1..20: mol_type = other DNA
gacaaagtgcctcttaacca

SEQ ID NO: 244841 - DNA, 20 bp, synthetic construct
  source 1..20: mol_type = other DNA
ggacaaagtgcctcttaacc

SEQ ID NO: 244842 - DNA, 20 bp, synthetic construct
  source 1..20: mol_type = other DNA
aggacaaagtgcctcttaac

SEQ ID NO: 244843 - DNA, 20 bp, synthetic construct
  source 1..20: mol_type = other DNA
aaggacaaagtgcctcttaa

SEQ ID NO: 244844 - DNA, 20 bp, synthetic construct
  source 1..20: mol_type = other DNA
aaaggacaaagtgcctctta

SEQ ID NO: 244845 - DNA, 20 bp, synthetic construct
  source 1..20: mol_type = other DNA
gaaaggacaaagtgcctctt

SEQ ID NO: 244846 - DNA, 20 bp, synthetic construct
  source 1..20: mol_type = other DNA
tgaaaggacaaagtgcctct

SEQ ID NO: 244847 - DNA, 20 bp, synthetic construct
  source 1..20: mol_type = other DNA
gtgaaaggacaaagtgcctc

SEQ ID NO: 244848 - DNA, 20 bp, synthetic construct
  source 1..20: mol_type = other DNA
ggtgaaaggacaaagtgcct

SEQ ID NO: 244849 - DNA, 20 bp, synthetic construct
  source 1..20: mol_type = other DNA
gggtgaaaggacaaagtgcc

SEQ ID NO: 244850 - DNA, 20 bp, synthetic construct
  source 1..20: mol_type = other DNA
tgggtgaaaggacaaagtgc

SEQ ID NO: 244851 - DNA, 20 bp, synthetic construct
  source 1..20: mol_type = other DNA
ctgggtgaaaggacaaagtg

SEQ ID NO: 244852 - DNA, 20 bp, synthetic construct
  source 1..20: mol_type = other DNA
cctgggtgaaaggacaaagt

SEQ ID NO: 244853 - DNA, 20 bp, synthetic construct
  source 1..20: mol_type = other DNA
tcctgggtgaaaggacaaag

SEQ ID NO: 244854 - DNA, 20 bp, synthetic construct
  source 1..20: mol_type = other DNA
ctcctgggtgaaaggacaaa

SEQ ID NO: 244855 - DNA, 20 bp, synthetic construct
  source 1..20: mol_type = other DNA
gctcctgggtgaaaggacaa

SEQ ID NO: 244856 - DNA, 20 bp, synthetic construct
  source 1..20: mol_type = other DNA
tgctcctgggtgaaaggaca

SEQ ID NO: 244857 - DNA, 20 bp, synthetic construct
  source 1..20: mol_type = other DNA
ttgctcctgggtgaaaggac

SEQ ID NO: 244858 - DNA, 20 bp, synthetic construct
  source 1..20: mol_type = other DNA
tttgctcctgggtgaaagga

SEQ ID NO: 244859 - DNA, 20 bp, synthetic construct
  source 1..20: mol_type = other DNA
gtttgctcctgggtgaaagg

SEQ ID NO: 244860 - DNA, 20 bp, synthetic construct
  source 1..20: mol_type = other DNA
cgtttgctcctgggtgaaag

SEQ ID NO: 244861 - DNA, 20 bp, synthetic construct
  source 1..20: mol_type = other DNA
gcgtttgctcctgggtgaaa

SEQ ID NO: 244862 - DNA, 20 bp, synthetic construct
  source 1..20: mol_type = other DNA
tgcgtttgctcctgggtgaa

SEQ ID NO: 244863 - DNA, 20 bp, synthetic construct
  source 1..20: mol_type = other DNA
gtgcgtttgctcctgggtga

SEQ ID NO: 244864 - DNA, 20 bp, synthetic construct
  source 1..20: mol_type = other DNA
tgtgcgtttgctcctgggtg

SEQ ID NO: 244865 - DNA, 20 bp, synthetic construct
  source 1..20: mol_type = other DNA
atgtgcgtttgctcctgggt

SEQ ID NO: 244866 - DNA, 20 bp, synthetic construct
  source 1..20: mol_type = other DNA
gatgtgcgtttgctcctggg

SEQ ID NO: 244867 - DNA, 20 bp, synthetic construct
  source 1..20: mol_type = other DNA
tgatgtgcgtttgctcctgg

SEQ ID NO: 244868 - DNA, 20 bp, synthetic construct
  source 1..20: mol_type = other DNA
gtgatgtgcgtttgctcctg

SEQ ID NO: 244869 - DNA, 20 bp, synthetic construct
  source 1..20: mol_type = other DNA
ggtgatgtgcgtttgctcct

SEQ ID NO: 244870 - DNA, 20 bp, synthetic construct
  source 1..20: mol_type = other DNA
aggtgatgtgcgtttgctcc

SEQ ID NO: 244871 - DNA, 20 bp, synthetic construct
  source 1..20: mol_type = other DNA
caggtgatgtgcgtttgctc

SEQ ID NO: 244872 - DNA, 20 bp, synthetic construct
  source 1..20: mol_type = other DNA
acaggtgatgtgcgtttgct

SEQ ID NO: 244873 - DNA, 20 bp, synthetic construct
  source 1..20: mol_type = other DNA
cacaggtgatgtgcgtttgc

SEQ ID NO: 244874 - DNA, 20 bp, synthetic construct
  source 1..20: mol_type = other DNA
acacaggtgatgtgcgtttg

SEQ ID NO: 244875 - DNA, 20 bp, synthetic construct
  source 1..20: mol_type = other DNA
gacacaggtgatgtgcgttt

SEQ ID NO: 244876 - DNA, 20 bp, synthetic construct
  source 1..20: mol_type = other DNA
ggacacaggtgatgtgcgtt

SEQ ID NO: 244877 - DNA, 20 bp, synthetic construct
  source 1..20: mol_type = other DNA
aggacacaggtgatgtgcgt

SEQ ID NO: 244878 - DNA, 20 bp, synthetic construct
  source 1..20: mol_type = other DNA
gaggacacaggtgatgtgcg

SEQ ID NO: 244879 - DNA, 20 bp, synthetic construct
  source 1..20: mol_type = other DNA
tgaggacacaggtgatgtgc

SEQ ID NO: 244880 - DNA, 20 bp, synthetic construct
  source 1..20: mol_type = other DNA
atgaggacacaggtgatgtg

SEQ ID NO: 244881 - DNA, 20 bp, synthetic construct
  source 1..20: mol_type = other DNA
gatgaggacacaggtgatgt

SEQ ID NO: 244882 - DNA, 20 bp, synthetic construct
  source 1..20: mol_type = other DNA
agatgaggacacaggtgatg

SEQ ID NO: 244883 - DNA, 20 bp, synthetic construct
  source 1..20: mol_type = other DNA
cagatgaggacacaggtgat

SEQ ID NO: 244884 - DNA, 20 bp, synthetic construct
  source 1..20: mol_type = other DNA
tcagatgaggacacaggtga

SEQ ID NO: 244885 - DNA, 20 bp, synthetic construct
  source 1..20: mol_type = other DNA
atcagatgaggacacaggtg

SEQ ID NO: 244886 - DNA, 20 bp, synthetic construct
  source 1..20: mol_type = other DNA
catcagatgaggacacaggt

SEQ ID NO: 244887 - DNA, 20 bp, synthetic construct
  source 1..20: mol_type = other DNA
ccatcagatgaggacacagg

SEQ ID NO: 244888 - DNA, 20 bp, synthetic construct
  source 1..20: mol_type = other DNA
gccatcagatgaggacacag

SEQ ID NO: 244889 - DNA, 20 bp, synthetic construct
  source 1..20: mol_type = other DNA
ggccatcagatgaggacaca

SEQ ID NO: 244890 - DNA, 20 bp, synthetic construct
  source 1..20: mol_type = other DNA
gggccatcagatgaggacac

SEQ ID NO: 244891 - DNA, 20 bp, synthetic construct
  source 1..20: mol_type = other DNA
agggccatcagatgaggaca

SEQ ID NO: 244892 - DNA, 20 bp, synthetic construct
  source 1..20: mol_type = other DNA
cagggccatcagatgaggac

SEQ ID NO: 244893 - DNA, 20 bp, synthetic construct
  source 1..20: mol_type = other DNA
ccagggccatcagatgagga

SEQ ID NO: 244894 - DNA, 20 bp, synthetic construct
  source 1..20: mol_type = other DNA
accagggccatcagatgagg

SEQ ID NO: 244895 - DNA, 20 bp, synthetic construct
  source 1..20: mol_type = other DNA
caccagggccatcagatgag

SEQ ID NO: 244896 - DNA, 20 bp, synthetic construct
  source 1..20: mol_type = other DNA
acaccagggccatcagatga

SEQ ID NO: 244897 - DNA, 20 bp, synthetic construct
  source 1..20: mol_type = other DNA
cacaccagggccatcagatg

SEQ ID NO: 244898 - DNA, 20 bp, synthetic construct
  source 1..20: mol_type = other DNA
ccacaccagggccatcagat

SEQ ID NO: 244899 - DNA, 20 bp, synthetic construct
  source 1..20: mol_type = other DNA
cccacaccagggccatcaga

SEQ ID NO: 244900 - DNA, 20 bp, synthetic construct
  source 1..20: mol_type = other DNA
ccccacaccagggccatcag

SEQ ID NO: 244901 - DNA, 20 bp, synthetic construct
  source 1..20: mol_type = other DNA
gccccacaccagggccatca

SEQ ID NO: 244902 - DNA, 20 bp, synthetic construct
  source 1..20: mol_type = other DNA
tgccccacaccagggccatc

SEQ ID NO: 244903 - DNA, 20 bp, synthetic construct
  source 1..20: mol_type = other DNA
gtgccccacaccagggccat

SEQ ID NO: 244904 - DNA, 20 bp, synthetic construct
  source 1..20: mol_type = other DNA
tgtgccccacaccagggcca

SEQ ID NO: 244905 - DNA, 20 bp, synthetic construct
  source 1..20: mol_type = other DNA
ctgtgccccacaccagggcc

SEQ ID NO: 244906 - DNA, 20 bp, synthetic construct
  source 1..20: mol_type = other DNA
actgtgccccacaccagggc

SEQ ID NO: 244907 - DNA, 20 bp, synthetic construct
  source 1..20: mol_type = other DNA
gactgtgccccacaccaggg

SEQ ID NO: 244908 - DNA, 20 bp, synthetic construct
  source 1..20: mol_type = other DNA
cgactgtgccccacaccagg

SEQ ID NO: 244909 - DNA, 20 bp, synthetic construct
  source 1..20: mol_type = other DNA
acgactgtgccccacaccag

SEQ ID NO: 244910 - DNA, 20 bp, synthetic construct
  source 1..20: mol_type = other DNA
cacgactgtgccccacacca

SEQ ID NO: 244911 - DNA, 20 bp, synthetic construct
  source 1..20: mol_type = other DNA
acacgactgtgccccacacc

SEQ ID NO: 244912 - DNA, 20 bp, synthetic construct
  source 1..20: mol_type = other DNA
aacacgactgtgccccacac

SEQ ID NO: 244913 - DNA, 20 bp, synthetic construct
  source 1..20: mol_type = other DNA
caacacgactgtgccccaca

SEQ ID NO: 244914 - DNA, 20 bp, synthetic construct
  source 1..20: mol_type = other DNA
ccaacacgactgtgccccac

SEQ ID NO: 244915 - DNA, 20 bp, synthetic construct
  source 1..20: mol_type = other DNA
gccaacacgactgtgcccca

SEQ ID NO: 244916 - DNA, 20 bp, synthetic construct
  source 1..20: mol_type = other DNA
tgccaacacgactgtgcccc

SEQ ID NO: 244917 - DNA, 20 bp, synthetic construct
  source 1..20: mol_type = other DNA
ctgccaacacgactgtgccc

SEQ ID NO: 244918 - DNA, 20 bp, synthetic construct
  source 1..20: mol_type = other DNA
cctgccaacacgactgtgcc

SEQ ID NO: 244919 - DNA, 20 bp, synthetic construct
  source 1..20: mol_type = other DNA
ccctgccaacacgactgtgc

SEQ ID NO: 244920 - DNA, 20 bp, synthetic construct
  source 1..20: mol_type = other DNA
tccctgccaacacgactgtg

SEQ ID NO: 244921 - DNA, 20 bp, synthetic construct
  source 1..20: mol_type = other DNA
ctccctgccaacacgactgt

SEQ ID NO: 244922 - DNA, 20 bp, synthetic construct
  source 1..20: mol_type = other DNA
cctccctgccaacacgactg

SEQ ID NO: 244923 - DNA, 20 bp, synthetic construct
  source 1..20: mol_type = other DNA
ccctccctgccaacacgact

SEQ ID NO: 244924 - DNA, 20 bp, synthetic construct
  source 1..20: mol_type = other DNA
tccctccctgccaacacgac

SEQ ID NO: 244925 - DNA, 20 bp, synthetic construct
  source 1..20: mol_type = other DNA
ctccctccctgccaacacga

SEQ ID NO: 244926 - DNA, 20 bp, synthetic construct
  source 1..20: mol_type = other DNA
cctccctccctgccaacacg

SEQ ID NO: 244927 - DNA, 20 bp, synthetic construct
  source 1..20: mol_type = other DNA
acctccctccctgccaacac

SEQ ID NO: 244928 - DNA, 20 bp, synthetic construct
  source 1..20: mol_type = other DNA
cacctccctccctgccaaca

SEQ ID NO: 244929 - DNA, 20 bp, synthetic construct
  source 1..20: mol_type = other DNA
ccacctccctccctgccaac

SEQ ID NO: 244930 - DNA, 20 bp, synthetic construct
  source 1..20: mol_type = other DNA
cccacctccctccctgccaa

SEQ ID NO: 244931 - DNA, 20 bp, synthetic construct
  source 1..20: mol_type = other DNA
ccccacctccctccctgcca

SEQ ID NO: 244932 - DNA, 20 bp, synthetic construct
  source 1..20: mol_type = other DNA
accccacctccctccctgcc

SEQ ID NO: 244933 - DNA, 20 bp, synthetic construct
  source 1..20: mol_type = other DNA
aaccccacctccctccctgc

SEQ ID NO: 244934 - DNA, 20 bp, synthetic construct
  source 1..20: mol_type = other DNA
caaccccacctccctccctg

SEQ ID NO: 244935 - DNA, 20 bp, synthetic construct
  source 1..20: mol_type = other DNA
ccaaccccacctccctccct

SEQ ID NO: 244936 - DNA, 20 bp, synthetic construct
  source 1..20: mol_type = other DNA
accaaccccacctccctccc

SEQ ID NO: 244937 - DNA, 20 bp, synthetic construct
  source 1..20: mol_type = other DNA
gaccaaccccacctccctcc

SEQ ID NO: 244938 - DNA, 20 bp, synthetic construct
  source 1..20: mol_type = other DNA
ggaccaaccccacctccctc

SEQ ID NO: 244939 - DNA, 20 bp, synthetic construct
  source 1..20: mol_type = other DNA
gggaccaaccccacctccct

SEQ ID NO: 244940 - DNA, 20 bp, synthetic construct
  source 1..20: mol_type = other DNA
ggggaccaaccccacctccc

SEQ ID NO: 244941 - DNA, 20 bp, synthetic construct
  source 1..20: mol_type = other DNA
aggggaccaaccccacctcc

SEQ ID NO: 244942 - DNA, 20 bp, synthetic construct
  source 1..20: mol_type = other DNA
aaggggaccaaccccacctc

SEQ ID NO: 244943 - DNA, 20 bp, synthetic construct
  source 1..20: mol_type = other DNA
aaaggggaccaaccccacct

SEQ ID NO: 244944 - DNA, 20 bp, synthetic construct
  source 1..20: mol_type = other DNA
caaaggggaccaaccccacc

SEQ ID NO: 244945 - DNA, 20 bp, synthetic construct
  source 1..20: mol_type = other DNA
acaaaggggaccaaccccac

SEQ ID NO: 244946 - DNA, 20 bp, synthetic construct
  source 1..20: mol_type = other DNA
cacaaaggggaccaacccca

SEQ ID NO: 244947 - DNA, 20 bp, synthetic construct
  source 1..20: mol_type = other DNA
ccacaaaggggaccaacccc

SEQ ID NO: 244948 - DNA, 20 bp, synthetic construct
  source 1..20: mol_type = other DNA
cccacaaaggggaccaaccc

SEQ ID NO: 244949 - DNA, 20 bp, synthetic construct
  source 1..20: mol_type = other DNA
acccacaaaggggaccaacc

SEQ ID NO: 244950 - DNA, 20 bp, synthetic construct
  source 1..20: mol_type = other DNA
aacccacaaaggggaccaac

SEQ ID NO: 244951 - DNA, 20 bp, synthetic construct
  source 1..20: mol_type = other DNA
aaacccacaaaggggaccaa

SEQ ID NO: 244952 - DNA, 20 bp, synthetic construct
  source 1..20: mol_type = other DNA
caaacccacaaaggggacca

SEQ ID NO: 244953 - DNA, 20 bp, synthetic construct
  source 1..20: mol_type = other DNA
acaaacccacaaaggggacc

SEQ ID NO: 244954 - DNA, 20 bp, synthetic construct
  source 1..20: mol_type = other DNA
aacaaacccacaaaggggac

SEQ ID NO: 244955 - DNA, 20 bp, synthetic construct
  source 1..20: mol_type = other DNA
caacaaacccacaaagggga

SEQ ID NO: 244956 - DNA, 20 bp, synthetic construct
  source 1..20: mol_type = other DNA
gcaacaaacccacaaagggg

SEQ ID NO: 244957 - DNA, 20 bp, synthetic construct
  source 1..20: mol_type = other DNA
cgcaacaaacccacaaaggg

SEQ ID NO: 244958 - DNA, 20 bp, synthetic construct
  source 1..20: mol_type = other DNA
tcgcaacaaacccacaaagg

SEQ ID NO: 244959 - DNA, 20 bp, synthetic construct
  source 1..20: mol_type = other DNA
ctcgcaacaaacccacaaag

SEQ ID NO: 244960 - DNA, 20 bp, synthetic construct
  source 1..20: mol_type = other DNA
cctcgcaacaaacccacaaa

SEQ ID NO: 244961 - DNA, 20 bp, synthetic construct
  source 1..20: mol_type = other DNA
gcctcgcaacaaacccacaa

SEQ ID NO: 244962 - DNA, 20 bp, synthetic construct
  source 1..20: mol_type = other DNA
ggcctcgcaacaaacccaca

SEQ ID NO: 244963 - DNA, 20 bp, synthetic construct
  source 1..20: mol_type = other DNA
cggcctcgcaacaaacccac

SEQ ID NO: 244964 - DNA, 20 bp, synthetic construct
  source 1..20: mol_type = other DNA
acggcctcgcaacaaaccca

SEQ ID NO: 244965 - DNA, 20 bp, synthetic construct
  source 1..20: mol_type = other DNA
cacggcctcgcaacaaaccc

SEQ ID NO: 244966 - DNA, 20 bp, synthetic construct
  source 1..20: mol_type = other DNA
acacggcctcgcaacaaacc

SEQ ID NO: 244967 - DNA, 20 bp, synthetic construct
  source 1..20: mol_type = other DNA
aacacggcctcgcaacaaac

SEQ ID NO: 244968 - DNA, 20 bp, synthetic construct
  source 1..20: mol_type = other DNA
gaacacggcctcgcaacaaa

SEQ ID NO: 244969 - DNA, 20 bp, synthetic construct
  source 1..20: mol_type = other DNA
ggaacacggcctcgcaacaa

SEQ ID NO: 244970 - DNA, 20 bp, synthetic construct
  source 1..20: mol_type = other DNA
tggaacacggcctcgcaaca

SEQ ID NO: 244971 - DNA, 20 bp, synthetic construct
  source 1..20: mol_type = other DNA
ctggaacacggcctcgcaac

SEQ ID NO: 244972 - DNA, 20 bp, synthetic construct
  source 1..20: mol_type = other DNA
gctggaacacggcctcgcaa

SEQ ID NO: 244973 - DNA, 20 bp, synthetic construct
  source 1..20: mol_type = other DNA
agctggaacacggcctcgca

SEQ ID NO: 244974 - DNA, 20 bp, synthetic construct
  source 1..20: mol_type = other DNA
cagctggaacacggcctcgc

SEQ ID NO: 244975 - DNA, 20 bp, synthetic construct
  source 1..20: mol_type = other DNA
acagctggaacacggcctcg

SEQ ID NO: 244976 - DNA, 20 bp, synthetic construct
  source 1..20: mol_type = other DNA
aacagctggaacacggcctc

SEQ ID NO: 244977 - DNA, 20 bp, synthetic construct
  source 1..20: mol_type = other DNA
aaacagctggaacacggcct

SEQ ID NO: 244978 - DNA, 20 bp, synthetic construct
  source 1..20: mol_type = other DNA
gaaacagctggaacacggcc

SEQ ID NO: 244979 - DNA, 20 bp, synthetic construct
  source 1..20: mol_type = other DNA
ggaaacagctggaacacggc

SEQ ID NO: 244980 - DNA, 20 bp, synthetic construct
  source 1..20: mol_type = other DNA
tggaaacagctggaacacgg

SEQ ID NO: 244981 - DNA, 20 bp, synthetic construct
  source 1..20: mol_type = other DNA
gtggaaacagctggaacacg

SEQ ID NO: 244982 - DNA, 20 bp, synthetic construct
  source 1..20: mol_type = other DNA
tgtggaaacagctggaacac

SEQ ID NO: 244983 - DNA, 20 bp, synthetic construct
  source 1..20: mol_type = other DNA
ctgtggaaacagctggaaca

SEQ ID NO: 244984 - DNA, 20 bp, synthetic construct
  source 1..20: mol_type = other DNA
cctgtggaaacagctggaac

SEQ ID NO: 244985 - DNA, 20 bp, synthetic construct
  source 1..20: mol_type = other DNA
ccctgtggaaacagctggaa

SEQ ID NO: 244986 - DNA, 20 bp, synthetic construct
  source 1..20: mol_type = other DNA
tccctgtggaaacagctgga

SEQ ID NO: 244987 - DNA, 20 bp, synthetic construct
  source 1..20: mol_type = other DNA
ctccctgtggaaacagctgg

SEQ ID NO: 244988 - DNA, 20 bp, synthetic construct
  source 1..20: mol_type = other DNA
gctccctgtggaaacagctg

SEQ ID NO: 244989 - DNA, 20 bp, synthetic construct
  source 1..20: mol_type = other DNA
cgctccctgtggaaacagct

SEQ ID NO: 244990 - DNA, 20 bp, synthetic construct
  source 1..20: mol_type = other DNA
tcgctccctgtggaaacagc

SEQ ID NO: 244991 - DNA, 20 bp, synthetic construct
  source 1..20: mol_type = other DNA
atcgctccctgtggaaacag

SEQ ID NO: 244992 - DNA, 20 bp, synthetic construct
  source 1..20: mol_type = other DNA
aatcgctccctgtggaaaca

SEQ ID NO: 244993 - DNA, 20 bp, synthetic construct
  source 1..20: mol_type = other DNA
aaatcgctccctgtggaaac

SEQ ID NO: 244994 - DNA, 20 bp, synthetic construct
  source 1..20: mol_type = other DNA
aaaatcgctccctgtggaaa

SEQ ID NO: 244995 - DNA, 20 bp, synthetic construct
  source 1..20: mol_type = other DNA
gaaaatcgctccctgtggaa

SEQ ID NO: 244996 - DNA, 20 bp, synthetic construct
  source 1..20: mol_type = other DNA
tgaaaatcgctccctgtgga

SEQ ID NO: 244997 - DNA, 20 bp, synthetic construct
  source 1..20: mol_type = other DNA
ctgaaaatcgctccctgtgg

SEQ ID NO: 244998 - DNA, 20 bp, synthetic construct
  source 1..20: mol_type = other DNA
gctgaaaatcgctccctgtg

SEQ ID NO: 244999 - DNA, 20 bp, synthetic construct
  source 1..20: mol_type = other DNA
agctgaaaatcgctccctgt

SEQ ID NO: 245000 - DNA, 20 bp, synthetic construct
  source 1..20: mol_type = other DNA
gagctgaaaatcgctccctg

SEQ ID NO: 245001 - DNA, 20 bp, synthetic construct
  source 1..20: mol_type = other DNA
ggagctgaaaatcgctccct

SEQ ID NO: 245002 - DNA, 20 bp, synthetic construct
  source 1..20: mol_type = other DNA
tggagctgaaaatcgctccc

SEQ ID NO: 245003 - DNA, 20 bp, synthetic construct
  source 1..20: mol_type = other DNA
gtggagctgaaaatcgctcc

SEQ ID NO: 245004 - DNA, 20 bp, synthetic construct
  source 1..20: mol_type = other DNA
tgtggagctgaaaatcgctc

SEQ ID NO: 245005 - DNA, 20 bp, synthetic construct
  source 1..20: mol_type = other DNA
ctgtggagctgaaaatcgct

SEQ ID NO: 245006 - DNA, 20 bp, synthetic construct
  source 1..20: mol_type = other DNA
cctgtggagctgaaaatcgc

SEQ ID NO: 245007 - DNA, 20 bp, synthetic construct
  source 1..20: mol_type = other DNA
tcctgtggagctgaaaatcg

SEQ ID NO: 245008 - DNA, 20 bp, synthetic construct
  source 1..20: mol_type = other DNA
gtcctgtggagctgaaaatc

SEQ ID NO: 245009 - DNA, 20 bp, synthetic construct
  source 1..20: mol_type = other DNA
tgtcctgtggagctgaaaat

SEQ ID NO: 245010 - DNA, 20 bp, synthetic construct
  source 1..20: mol_type = other DNA
gtgtcctgtggagctgaaaa

SEQ ID NO: 245011 - DNA, 20 bp, synthetic construct
  source 1..20: mol_type = other DNA
agtgtcctgtggagctgaaa

SEQ ID NO: 245012 - DNA, 20 bp, synthetic construct
  source 1..20: mol_type = other DNA
cagtgtcctgtggagctgaa

SEQ ID NO: 245013 - DNA, 20 bp, synthetic construct
  source 1..20: mol_type = other DNA
gcagtgtcctgtggagctga

SEQ ID NO: 245014 - DNA, 20 bp, synthetic construct
  source 1..20: mol_type = other DNA
agcagtgtcctgtggagctg

SEQ ID NO: 245015 - DNA, 20 bp, synthetic construct
  source 1..20: mol_type = other DNA
gagcagtgtcctgtggagct

SEQ ID NO: 245016 - DNA, 20 bp, synthetic construct
  source 1..20: mol_type = other DNA
ggagcagtgtcctgtggagc

SEQ ID NO: 245017 - DNA, 20 bp, synthetic construct
  source 1..20: mol_type = other DNA
gggagcagtgtcctgtggag

SEQ ID NO: 245018 - DNA, 20 bp, synthetic construct
  source 1..20: mol_type = other DNA
ggggagcagtgtcctgtgga

SEQ ID NO: 245019 - DNA, 20 bp, synthetic construct
  source 1..20: mol_type = other DNA
tggggagcagtgtcctgtgg

SEQ ID NO: 245020 - DNA, 20 bp, synthetic construct
  source 1..20: mol_type = other DNA
ctggggagcagtgtcctgtg

SEQ ID NO: 245021 - DNA, 20 bp, synthetic construct
  source 1..20: mol_type = other DNA
actggggagcagtgtcctgt

SEQ ID NO: 245022 - DNA, 20 bp, synthetic construct
  source 1..20: mol_type = other DNA
aactggggagcagtgtcctg

SEQ ID NO: 245023 - DNA, 20 bp, synthetic construct
  source 1..20: mol_type = other DNA
gaactggggagcagtgtcct

SEQ ID NO: 245024 - DNA, 20 bp, synthetic construct
  source 1..20: mol_type = other DNA
ggaactggggagcagtgtcc

SEQ ID NO: 245025 - DNA, 20 bp, synthetic construct
  source 1..20: mol_type = other DNA
aggaactggggagcagtgtc

SEQ ID NO: 245026 - DNA, 20 bp, synthetic construct
  source 1..20: mol_type = other DNA
gaggaactggggagcagtgt

SEQ ID NO: 245027 - DNA, 20 bp, synthetic construct
  source 1..20: mol_type = other DNA
ggaggaactggggagcagtg

SEQ ID NO: 245028 - DNA, 20 bp, synthetic construct
  source 1..20: mol_type = other DNA
aggaggaactggggagcagt

SEQ ID NO: 245029 - DNA, 20 bp, synthetic construct
  source 1..20: mol_type = other DNA
caggaggaactggggagcag

SEQ ID NO: 245030 - DNA, 20 bp, synthetic construct
  source 1..20: mol_type = other DNA
tcaggaggaactggggagca

SEQ ID NO: 245031 - DNA, 20 bp, synthetic construct
  source 1..20: mol_type = other DNA
ctcaggaggaactggggagc

SEQ ID NO: 245032 - DNA, 20 bp, synthetic construct
  source 1..20: mol_type = other DNA
tctcaggaggaactggggag

SEQ ID NO: 245033 - DNA, 20 bp, synthetic construct
  source 1..20: mol_type = other DNA
ttctcaggaggaactgggga

SEQ ID NO: 245034 - DNA, 20 bp, synthetic construct
  source 1..20: mol_type = other DNA
gttctcaggaggaactgggg

SEQ ID NO: 245035 - DNA, 20 bp, synthetic construct
  source 1..20: mol_type = other DNA
tgttctcaggaggaactggg

SEQ ID NO: 245036 - DNA, 20 bp, synthetic construct
  source 1..20: mol_type = other DNA
ttgttctcaggaggaactgg

SEQ ID NO: 245037 - DNA, 20 bp, synthetic construct
  source 1..20: mol_type = other DNA
tttgttctcaggaggaactg

SEQ ID NO: 245038 - DNA, 20 bp, synthetic construct
  source 1..20: mol_type = other DNA
ttttgttctcaggaggaact

SEQ ID NO: 245039 - DNA, 20 bp, synthetic construct
  source 1..20: mol_type = other DNA
cttttgttctcaggaggaac

SEQ ID NO: 245040 - DNA, 20 bp, synthetic construct
  source 1..20: mol_type = other DNA
ccttttgttctcaggaggaa

SEQ ID NO: 245041 - DNA, 20 bp, synthetic construct
  source 1..20: mol_type = other DNA
cccttttgttctcaggagga

SEQ ID NO: 245042 - DNA, 20 bp, synthetic construct
  source 1..20: mol_type = other DNA
ccccttttgttctcaggagg

SEQ ID NO: 245043 - DNA, 20 bp, synthetic construct
  source 1..20: mol_type = other DNA
cccccttttgttctcaggag

SEQ ID NO: 245044 - DNA, 20 bp, synthetic construct
  source 1..20: mol_type = other DNA
gcccccttttgttctcagga

SEQ ID NO: 245045 - DNA, 20 bp, synthetic construct
  source 1..20: mol_type = other DNA
cgcccccttttgttctcagg

SEQ ID NO: 245046 - DNA, 20 bp, synthetic construct
  source 1..20: mol_type = other DNA
gcgcccccttttgttctcag

SEQ ID NO: 245047 - DNA, 20 bp, synthetic construct
  source 1..20: mol_type = other DNA
agcgcccccttttgttctca

SEQ ID NO: 245048 - DNA, 20 bp, synthetic construct
  source 1..20: mol_type = other DNA
cagcgcccccttttgttctc

SEQ ID NO: 245049 - DNA, 20 bp, synthetic construct
  source 1..20: mol_type = other DNA
ccagcgcccccttttgttct

SEQ ID NO: 245050 - DNA, 20 bp, synthetic construct
  source 1..20: mol_type = other DNA
cccagcgcccccttttgttc

SEQ ID NO: 245051 - DNA, 20 bp, synthetic construct
  source 1..20: mol_type = other DNA
ccccagcgcccccttttgtt

SEQ ID NO: 245052 - DNA, 20 bp, synthetic construct
  source 1..20: mol_type = other DNA
tccccagcgcccccttttgt

SEQ ID NO: 245053 - DNA, 20 bp, synthetic construct
  source 1..20: mol_type = other DNA
ctccccagcgcccccttttg

SEQ ID NO: 245054 - DNA, 20 bp, synthetic construct
  source 1..20: mol_type = other DNA
tctccccagcgccccctttt

SEQ ID NO: 245055 - DNA, 20 bp, synthetic construct
  source 1..20: mol_type = other DNA
ctctccccagcgcccccttt

SEQ ID NO: 245056 - DNA, 20 bp, synthetic construct
  source 1..20: mol_type = other DNA
cctctccccagcgccccctt

SEQ ID NO: 245057 - DNA, 20 bp, synthetic construct
  source 1..20: mol_type = other DNA
gcctctccccagcgccccct

SEQ ID NO: 245058 - DNA, 20 bp, synthetic construct
  source 1..20: mol_type = other DNA
ggcctctccccagcgccccc

SEQ ID NO: 245059 - DNA, 20 bp, synthetic construct
  source 1..20: mol_type = other DNA
tggcctctccccagcgcccc

SEQ ID NO: 245060 - DNA, 20 bp, synthetic construct
  source 1..20: mol_type = other DNA
gtggcctctccccagcgccc

SEQ ID NO: 245061 - DNA, 20 bp, synthetic construct
  source 1..20: mol_type = other DNA
ggtggcctctccccagcgcc

SEQ ID NO: 245062 - DNA, 20 bp, synthetic construct
  source 1..20: mol_type = other DNA
cggtggcctctccccagcgc

SEQ ID NO: 245063 - DNA, 20 bp, synthetic construct
  source 1..20: mol_type = other DNA
acggtggcctctccccagcg

SEQ ID NO: 245064 - DNA, 20 bp, synthetic construct
  source 1..20: mol_type = other DNA
aacggtggcctctccccagc

SEQ ID NO: 245065 - DNA, 20 bp, synthetic construct
  source 1..20: mol_type = other DNA
gaacggtggcctctccccag

SEQ ID NO: 245066 - DNA, 20 bp, synthetic construct
  source 1..20: mol_type = other DNA
agaacggtggcctctcccca

SEQ ID NO: 245067 - DNA, 20 bp, synthetic construct
  source 1..20: mol_type = other DNA
cagaacggtggcctctcccc

SEQ ID NO: 245068 - DNA, 20 bp, synthetic construct
  source 1..20: mol_type = other DNA
tcagaacggtggcctctccc

SEQ ID NO: 245069 - DNA, 20 bp, synthetic construct
  source 1..20: mol_type = other DNA
ctcagaacggtggcctctcc

SEQ ID NO: 245070 - DNA, 20 bp, synthetic construct
  source 1..20: mol_type = other DNA
cctcagaacggtggcctctc

SEQ ID NO: 245071 - DNA, 20 bp, synthetic construct
  source 1..20: mol_type = other DNA
ccctcagaacggtggcctct

SEQ ID NO: 245072 - DNA, 20 bp, synthetic construct
  source 1..20: mol_type = other DNA
gccctcagaacggtggcctc

SEQ ID NO: 245073 - DNA, 20 bp, synthetic construct
  source 1..20: mol_type = other DNA
agccctcagaacggtggcct

SEQ ID NO: 245074 - DNA, 20 bp, synthetic construct
  source 1..20: mol_type = other DNA
gagccctcagaacggtggcc

SEQ ID NO: 245075 - DNA, 20 bp, synthetic construct
  source 1..20: mol_type = other DNA
tgagccctcagaacggtggc

SEQ ID NO: 245076 - DNA, 20 bp, synthetic construct
  source 1..20: mol_type = other DNA
gtgagccctcagaacggtgg

SEQ ID NO: 245077 - DNA, 20 bp, synthetic construct
  source 1..20: mol_type = other DNA
agtgagccctcagaacggtg

SEQ ID NO: 245078 - DNA, 20 bp, synthetic construct
  source 1..20: mol_type = other DNA
cagtgagccctcagaacggt

SEQ ID NO: 245079 - DNA, 20 bp, synthetic construct
  source 1..20: mol_type = other DNA
acagtgagccctcagaacgg

SEQ ID NO: 245080 - DNA, 20 bp, synthetic construct
  source 1..20: mol_type = other DNA
tacagtgagccctcagaacg

SEQ ID NO: 245081 - DNA, 20 bp, synthetic construct
  source 1..20: mol_type = other DNA
atacagtgagccctcagaac

SEQ ID NO: 245082 - DNA, 20 bp, synthetic construct
  source 1..20: mol_type = other DNA
catacagtgagccctcagaa

SEQ ID NO: 245083 - DNA, 20 bp, synthetic construct
  source 1..20: mol_type = other DNA
acatacagtgagccctcaga

SEQ ID NO: 245084 - DNA, 20 bp, synthetic construct
  source 1..20: mol_type = other DNA
cacatacagtgagccctcag

SEQ ID NO: 245085 - DNA, 20 bp, synthetic construct
  source 1..20: mol_type = other DNA
acacatacagtgagccctca

SEQ ID NO: 245086 - DNA, 20 bp, synthetic construct
  source 1..20: mol_type = other DNA
aacacatacagtgagccctc

SEQ ID NO: 245087 - DNA, 20 bp, synthetic construct
  source 1..20: mol_type = other DNA
gaacacatacagtgagccct

SEQ ID NO: 245088 - DNA, 20 bp, synthetic construct
  source 1..20: mol_type = other DNA
ggaacacatacagtgagccc

SEQ ID NO: 245089 - DNA, 20 bp, synthetic construct
  source 1..20: mol_type = other DNA
tggaacacatacagtgagcc

SEQ ID NO: 245090 - DNA, 20 bp, synthetic construct
  source 1..20: mol_type = other DNA
ctggaacacatacagtgagc

SEQ ID NO: 245091 - DNA, 20 bp, synthetic construct
  source 1..20: mol_type = other DNA
tctggaacacatacagtgag

SEQ ID NO: 245092 - DNA, 20 bp, synthetic construct
  source 1..20: mol_type = other DNA
ttctggaacacatacagtga

SEQ ID NO: 245093 - DNA, 20 bp, synthetic construct
  source 1..20: mol_type = other DNA
attctggaacacatacagtg

SEQ ID NO: 245094 - DNA, 20 bp, synthetic construct
  source 1..20: mol_type = other DNA
gattctggaacacatacagt

SEQ ID NO: 245095 - DNA, 20 bp, synthetic construct
  source 1..20: mol_type = other DNA
agattctggaacacatacag

SEQ ID NO: 245096 - DNA, 20 bp, synthetic construct
  source 1..20: mol_type = other DNA
gagattctggaacacataca

SEQ ID NO: 245097 - DNA, 20 bp, synthetic construct
  source 1..20: mol_type = other DNA
ggagattctggaacacatac

SEQ ID NO: 245098 - DNA, 20 bp, synthetic construct
  source 1..20: mol_type = other DNA
gggagattctggaacacata

SEQ ID NO: 245099 - DNA, 20 bp, synthetic construct
  source 1..20: mol_type = other DNA
ggggagattctggaacacat

SEQ ID NO: 245100 - DNA, 20 bp, synthetic construct
  source 1..20: mol_type = other DNA
aggggagattctggaacaca

SEQ ID NO: 245101 - DNA, 20 bp, synthetic construct
  source 1..20: mol_type = other DNA
caggggagattctggaacac

SEQ ID NO: 245102 - DNA, 20 bp, synthetic construct
  source 1..20: mol_type = other DNA
gcaggggagattctggaaca

SEQ ID NO: 245103 - DNA, 20 bp, synthetic construct
  source 1..20: mol_type = other DNA
tgcaggggagattctggaac

SEQ ID NO: 245104 - DNA, 20 bp, synthetic construct
  source 1..20: mol_type = other DNA
ctgcaggggagattctggaa

SEQ ID NO: 245105 - DNA, 20 bp, synthetic construct
  source 1..20: mol_type = other DNA
tctgcaggggagattctgga

SEQ ID NO: 245106 - DNA, 20 bp, synthetic construct
  source 1..20: mol_type = other DNA
gtctgcaggggagattctgg

SEQ ID NO: 245107 - DNA, 20 bp, synthetic construct
  source 1..20: mol_type = other DNA
ggtctgcaggggagattctg

SEQ ID NO: 245108 - DNA, 20 bp, synthetic construct
  source 1..20: mol_type = other DNA
gggtctgcaggggagattct

SEQ ID NO: 245109 - DNA, 20 bp, synthetic construct
  source 1..20: mol_type = other DNA
ggggtctgcaggggagattc

SEQ ID NO: 245110 - DNA, 20 bp, synthetic construct
  source 1..20: mol_type = other DNA
gggggtctgcaggggagatt

SEQ ID NO: 245111 - DNA, 20 bp, synthetic construct
  source 1..20: mol_type = other DNA
tgggggtctgcaggggagat

SEQ ID NO: 245112 - DNA, 20 bp, synthetic construct
  source 1..20: mol_type = other DNA
gtgggggtctgcaggggaga

SEQ ID NO: 245113 - DNA, 20 bp, synthetic construct
  source 1..20: mol_type = other DNA
agtgggggtctgcaggggag

SEQ ID NO: 245114 - DNA, 20 bp, synthetic construct
  source 1..20: mol_type = other DNA
cagtgggggtctgcagggga

SEQ ID NO: 245115 - DNA, 20 bp, synthetic construct
  source 1..20: mol_type = other DNA
tcagtgggggtctgcagggg

SEQ ID NO: 245116 - DNA, 20 bp, synthetic construct
  source 1..20: mol_type = other DNA
ctcagtgggggtctgcaggg

SEQ ID NO: 245117 - DNA, 20 bp, synthetic construct
  source 1..20: mol_type = other DNA
cctcagtgggggtctgcagg

SEQ ID NO: 245118 - DNA, 20 bp, synthetic construct
  source 1..20: mol_type = other DNA
tcctcagtgggggtctgcag

SEQ ID NO: 245119 - DNA, 20 bp, synthetic construct
  source 1..20: mol_type = other DNA
gtcctcagtgggggtctgca

SEQ ID NO: 245120 - DNA, 20 bp, synthetic construct
  source 1..20: mol_type = other DNA
cgtcctcagtgggggtctgc

SEQ ID NO: 245121 - DNA, 20 bp, synthetic construct
  source 1..20: mol_type = other DNA
ccgtcctcagtgggggtctg

SEQ ID NO: 245122 - DNA, 20 bp, synthetic construct
  source 1..20: mol_type = other DNA
tccgtcctcagtgggggtct

SEQ ID NO: 245123 - DNA, 20 bp, synthetic construct
  source 1..20: mol_type = other DNA
atccgtcctcagtgggggtc

SEQ ID NO: 245124 - DNA, 20 bp, synthetic construct
  source 1..20: mol_type = other DNA
gatccgtcctcagtgggggt

SEQ ID NO: 245125 - DNA, 20 bp, synthetic construct
  source 1..20: mol_type = other DNA
agatccgtcctcagtggggg

SEQ ID NO: 245126 - DNA, 20 bp, synthetic construct
  source 1..20: mol_type = other DNA
cagatccgtcctcagtgggg

SEQ ID NO: 245127 - DNA, 20 bp, synthetic construct
  source 1..20: mol_type = other DNA
tcagatccgtcctcagtggg

SEQ ID NO: 245128 - DNA, 20 bp, synthetic construct
  source 1..20: mol_type = other DNA
ctcagatccgtcctcagtgg

SEQ ID NO: 245129 - DNA, 20 bp, synthetic construct
  source 1..20: mol_type = other DNA
cctcagatccgtcctcagtg

SEQ ID NO: 245130 - DNA, 20 bp, synthetic construct
  source 1..20: mol_type = other DNA
tcctcagatccgtcctcagt

SEQ ID NO: 245131 - DNA, 20 bp, synthetic construct
  source 1..20: mol_type = other DNA
ttcctcagatccgtcctcag

SEQ ID NO: 245132 - DNA, 20 bp, synthetic construct
  source 1..20: mol_type = other DNA
gttcctcagatccgtcctca

SEQ ID NO: 245133 - DNA, 20 bp, synthetic construct
  source 1..20: mol_type = other DNA
ggttcctcagatccgtcctc

SEQ ID NO: 245134 - DNA, 20 bp, synthetic construct
  source 1..20: mol_type = other DNA
cggttcctcagatccgtcct

SEQ ID NO: 245135 - DNA, 20 bp, synthetic construct
  source 1..20: mol_type = other DNA
ccggttcctcagatccgtcc

SEQ ID NO: 245136 - DNA, 20 bp, synthetic construct
  source 1..20: mol_type = other DNA
cccggttcctcagatccgtc

SEQ ID NO: 245137 - DNA, 20 bp, synthetic construct
  source 1..20: mol_type = other DNA
gcccggttcctcagatccgt

SEQ ID NO: 245138 - DNA, 20 bp, synthetic construct
  source 1..20: mol_type = other DNA
agcccggttcctcagatccg

SEQ ID NO: 245139 - DNA, 20 bp, synthetic construct
  source 1..20: mol_type = other DNA
gagcccggttcctcagatcc

SEQ ID NO: 245140 - DNA, 20 bp, synthetic construct
  source 1..20: mol_type = other DNA
agagcccggttcctcagatc

SEQ ID NO: 245141 - DNA, 20 bp, synthetic construct
  source 1..20: mol_type = other DNA
cagagcccggttcctcagat

SEQ ID NO: 245142 - DNA, 20 bp, synthetic construct
  source 1..20: mol_type = other DNA
tcagagcccggttcctcaga

SEQ ID NO: 245143 - DNA, 20 bp, synthetic construct
  source 1..20: mol_type = other DNA
ttcagagcccggttcctcag

SEQ ID NO: 245144 - DNA, 20 bp, synthetic construct
  source 1..20: mol_type = other DNA
tttcagagcccggttcctca

SEQ ID NO: 245145 - DNA, 20 bp, synthetic construct
  source 1..20: mol_type = other DNA
gtttcagagcccggttcctc

SEQ ID NO: 245146 - DNA, 20 bp, synthetic construct
  source 1..20: mol_type = other DNA
ggtttcagagcccggttcct

SEQ ID NO: 245147 - DNA, 20 bp, synthetic construct
  source 1..20: mol_type = other DNA
aggtttcagagcccggttcc

SEQ ID NO: 245148 - DNA, 20 bp, synthetic construct
  source 1..20: mol_type = other DNA
gaggtttcagagcccggttc

SEQ ID NO: 245149 - DNA, 20 bp, synthetic construct
  source 1..20: mol_type = other DNA
agaggtttcagagcccggtt

SEQ ID NO: 245150 - DNA, 20 bp, synthetic construct
  source 1..20: mol_type = other DNA
cagaggtttcagagcccggt

SEQ ID NO: 245151 - DNA, 20 bp, synthetic construct
  source 1..20: mol_type = other DNA
tcagaggtttcagagcccgg

SEQ ID NO: 245152 - DNA, 20 bp, synthetic construct
  source 1..20: mol_type = other DNA
atcagaggtttcagagcccg

SEQ ID NO: 245153 - DNA, 20 bp, synthetic construct
  source 1..20: mol_type = other DNA
catcagaggtttcagagccc

SEQ ID NO: 245154 - DNA, 20 bp, synthetic construct
  source 1..20: mol_type = other DNA
gcatcagaggtttcagagcc

SEQ ID NO: 245155 - DNA, 20 bp, synthetic construct
  source 1..20: mol_type = other DNA
agcatcagaggtttcagagc

SEQ ID NO: 245156 - DNA, 20 bp, synthetic construct
  source 1..20: mol_type = other DNA
tagcatcagaggtttcagag

SEQ ID NO: 245157 - DNA, 20 bp, synthetic construct
  source 1..20: mol_type = other DNA
ttagcatcagaggtttcaga

SEQ ID NO: 245158 - DNA, 20 bp, synthetic construct
  source 1..20: mol_type = other DNA
cttagcatcagaggtttcag

SEQ ID NO: 245159 - DNA, 20 bp, synthetic construct
  source 1..20: mol_type = other DNA
tcttagcatcagaggtttca

SEQ ID NO: 245160 - DNA, 20 bp, synthetic construct
  source 1..20: mol_type = other DNA
ctcttagcatcagaggtttc

SEQ ID NO: 245161 - DNA, 20 bp, synthetic construct
  source 1..20: mol_type = other DNA
gctcttagcatcagaggttt

SEQ ID NO: 245162 - DNA, 20 bp, synthetic construct
  source 1..20: mol_type = other DNA
tgctcttagcatcagaggtt

SEQ ID NO: 245163 - DNA, 20 bp, synthetic construct
  source 1..20: mol_type = other DNA
gtgctcttagcatcagaggt

SEQ ID NO: 245164 - DNA, 20 bp, synthetic construct
  source 1..20: mol_type = other DNA
agtgctcttagcatcagagg

SEQ ID NO: 245165 - DNA, 20 bp, synthetic construct
  source 1..20: mol_type = other DNA
gagtgctcttagcatcagag

SEQ ID NO: 245166 - DNA, 20 bp, synthetic construct
  source 1..20: mol_type = other DNA
ggagtgctcttagcatcaga

SEQ ID NO: 245167 - DNA, 20 bp, synthetic construct
  source 1..20: mol_type = other DNA
tggagtgctcttagcatcag

SEQ ID NO: 245168 - DNA, 20 bp, synthetic construct
  source 1..20: mol_type = other DNA
ttggagtgctcttagcatca

SEQ ID NO: 245169 - DNA, 20 bp, synthetic construct
  source 1..20: mol_type = other DNA
gttggagtgctcttagcatc

SEQ ID NO: 245170 - DNA, 20 bp, synthetic construct
  source 1..20: mol_type = other DNA
tgttggagtgctcttagcat

SEQ ID NO: 245171 - DNA, 20 bp, synthetic construct
  source 1..20: mol_type = other DNA
ctgttggagtgctcttagca

SEQ ID NO: 245172 - DNA, 20 bp, synthetic construct
  source 1..20: mol_type = other DNA
gctgttggagtgctcttagc

SEQ ID NO: 245173 - DNA, 20 bp, synthetic construct
  source 1..20: mol_type = other DNA
cgctgttggagtgctcttag

SEQ ID NO: 245174 - DNA, 20 bp, synthetic construct
  source 1..20: mol_type = other DNA
ccgctgttggagtgctctta

SEQ ID NO: 245175 - DNA, 20 bp, synthetic construct
  source 1..20: mol_type = other DNA
tccgctgttggagtgctctt

SEQ ID NO: 245176 - DNA, 20 bp, synthetic construct
  source 1..20: mol_type = other DNA
ttccgctgttggagtgctct

SEQ ID NO: 245177 - DNA, 20 bp, synthetic construct
  source 1..20: mol_type = other DNA
cttccgctgttggagtgctc

SEQ ID NO: 245178 - DNA, 20 bp, synthetic construct
  source 1..20: mol_type = other DNA
ccttccgctgttggagtgct

SEQ ID NO: 245179 - DNA, 20 bp, synthetic construct
  source 1..20: mol_type = other DNA
accttccgctgttggagtgc

SEQ ID NO: 245180 - DNA, 20 bp, synthetic construct
  source 1..20: mol_type = other DNA
caccttccgctgttggagtg

SEQ ID NO: 245181 - DNA, 20 bp, synthetic construct
  source 1..20: mol_type = other DNA
ccaccttccgctgttggagt

SEQ ID NO: 245182 - DNA, 20 bp, synthetic construct
  source 1..20: mol_type = other DNA
cccaccttccgctgttggag

SEQ ID NO: 245183 - DNA, 20 bp, synthetic construct
  source 1..20: mol_type = other DNA
gcccaccttccgctgttgga

SEQ ID NO: 245184 - DNA, 20 bp, synthetic construct
  source 1..20: mol_type = other DNA
ggcccaccttccgctgttgg

SEQ ID NO: 245185 - DNA, 20 bp, synthetic construct
  source 1..20: mol_type = other DNA
gggcccaccttccgctgttg

SEQ ID NO: 245186 - DNA, 20 bp, synthetic construct
  source 1..20: mol_type = other DNA
ggggcccaccttccgctgtt

SEQ ID NO: 245187 - DNA, 20 bp, synthetic construct
  source 1..20: mol_type = other DNA
gggggcccaccttccgctgt

SEQ ID NO: 245188 - DNA, 20 bp, synthetic construct
  source 1..20: mol_type = other DNA
ggggggcccaccttccgctg

SEQ ID NO: 245189 - DNA, 20 bp, synthetic construct
  source 1..20: mol_type = other DNA
aggggggcccaccttccgct

SEQ ID NO: 245190 - DNA, 20 bp, synthetic construct
  source 1..20: mol_type = other DNA
aaggggggcccaccttccgc

SEQ ID NO: 245191 - DNA, 20 bp, synthetic construct
  source 1..20: mol_type = other DNA
gaaggggggcccaccttccg

SEQ ID NO: 245192 - DNA, 20 bp, synthetic construct
  source 1..20: mol_type = other DNA
tgaaggggggcccaccttcc

SEQ ID NO: 245193 - DNA, 20 bp, synthetic construct
  source 1..20: mol_type = other DNA
ctgaaggggggcccaccttc

SEQ ID NO: 245194 - DNA, 20 bp, synthetic construct
  source 1..20: mol_type = other DNA
tctgaaggggggcccacctt

SEQ ID NO: 245195 - DNA, 20 bp, synthetic construct
  source 1..20: mol_type = other DNA
gtctgaaggggggcccacct

SEQ ID NO: 245196 - DNA, 20 bp, synthetic construct
  source 1..20: mol_type = other DNA
cgtctgaaggggggcccacc

SEQ ID NO: 245197 - DNA, 20 bp, synthetic construct
  source 1..20: mol_type = other DNA
gcgtctgaaggggggcccac

SEQ ID NO: 245198 - DNA, 20 bp, synthetic construct
  source 1..20: mol_type = other DNA
ggcgtctgaaggggggccca

SEQ ID NO: 245199 - DNA, 20 bp, synthetic construct
  source 1..20: mol_type = other DNA
gggcgtctgaaggggggccc

SEQ ID NO: 245200 - DNA, 20 bp, synthetic construct
  source 1..20: mol_type = other DNA
ggggcgtctgaaggggggcc

SEQ ID NO: 245201 - DNA, 20 bp, synthetic construct
  source 1..20: mol_type = other DNA
gggggcgtctgaaggggggc

SEQ ID NO: 245202 - DNA, 20 bp, synthetic construct
  source 1..20: mol_type = other DNA
agggggcgtctgaagggggg

SEQ ID NO: 245203 - DNA, 20 bp, synthetic construct
  source 1..20: mol_type = other DNA
gagggggcgtctgaaggggg

SEQ ID NO: 245204 - DNA, 20 bp, synthetic construct
  source 1..20: mol_type = other DNA
ggagggggcgtctgaagggg

SEQ ID NO: 245205 - DNA, 20 bp, synthetic construct
  source 1..20: mol_type = other DNA
tggagggggcgtctgaaggg

SEQ ID NO: 245206 - DNA, 20 bp, synthetic construct
  source 1..20: mol_type = other DNA
atggagggggcgtctgaagg

SEQ ID NO: 245207 - DNA, 20 bp, synthetic construct
  source 1..20: mol_type = other DNA
catggagggggcgtctgaag

SEQ ID NO: 245208 - DNA, 20 bp, synthetic construct
  source 1..20: mol_type = other DNA
gcatggagggggcgtctgaa

SEQ ID NO: 245209 - DNA, 20 bp, synthetic construct
  source 1..20: mol_type = other DNA
ggcatggagggggcgtctga

SEQ ID NO: 245210 - DNA, 20 bp, synthetic construct
  source 1..20: mol_type = other DNA
aggcatggagggggcgtctg

SEQ ID NO: 245211 - DNA, 20 bp, synthetic construct
  source 1..20: mol_type = other DNA
gaggcatggagggggcgtct

SEQ ID NO: 245212 - DNA, 20 bp, synthetic construct
  source 1..20: mol_type = other DNA
ggaggcatggagggggcgtc

SEQ ID NO: 245213 - DNA, 20 bp, synthetic construct
  source 1..20: mol_type = other DNA
tggaggcatggagggggcgt

SEQ ID NO: 245214 - DNA, 20 bp, synthetic construct
  source 1..20: mol_type = other DNA
ctggaggcatggagggggcg

SEQ ID NO: 245215 - DNA, 20 bp, synthetic construct
  source 1..20: mol_type = other DNA
gctggaggcatggagggggc

SEQ ID NO: 245216 - DNA, 20 bp, synthetic construct
  source 1..20: mol_type = other DNA
ggctggaggcatggaggggg

SEQ ID NO: 245217 - DNA, 20 bp, synthetic construct
  source 1..20: mol_type = other DNA
aggctggaggcatggagggg

SEQ ID NO: 245218 - DNA, 20 bp, synthetic construct
  source 1..20: mol_type = other DNA
caggctggaggcatggaggg

SEQ ID NO: 245219 - DNA, 20 bp, synthetic construct
  source 1..20: mol_type = other DNA
acaggctggaggcatggagg

SEQ ID NO: 245220 - DNA, 20 bp, synthetic construct
  source 1..20: mol_type = other DNA
cacaggctggaggcatggag

SEQ ID NO: 245221 - DNA, 20 bp, synthetic construct
  source 1..20: mol_type = other DNA
gcacaggctggaggcatgga

SEQ ID NO: 245222 - DNA, 20 bp, synthetic construct
  source 1..20: mol_type = other DNA
agcacaggctggaggcatgg

SEQ ID NO: 245223 - DNA, 20 bp, synthetic construct
  source 1..20: mol_type = other DNA
aagcacaggctggaggcatg

SEQ ID NO: 245224 - DNA, 20 bp, synthetic construct
  source 1..20: mol_type = other DNA
taagcacaggctggaggcat

SEQ ID NO: 245225 - DNA, 20 bp, synthetic construct
  source 1..20: mol_type = other DNA
ctaagcacaggctggaggca

SEQ ID NO: 245226 - DNA, 20 bp, synthetic construct
  source 1..20: mol_type = other DNA
gctaagcacaggctggaggc

SEQ ID NO: 245227 - DNA, 20 bp, synthetic construct
  source 1..20: mol_type = other DNA
ggctaagcacaggctggagg

SEQ ID NO: 245228 - DNA, 20 bp, synthetic construct
  source 1..20: mol_type = other DNA
cggctaagcacaggctggag

SEQ ID NO: 245229 - DNA, 20 bp, synthetic construct
  source 1..20: mol_type = other DNA
acggctaagcacaggctgga

SEQ ID NO: 245230 - DNA, 20 bp, synthetic construct
  source 1..20: mol_type = other DNA
cacggctaagcacaggctgg

SEQ ID NO: 245231 - DNA, 20 bp, synthetic construct
  source 1..20: mol_type = other DNA
gcacggctaagcacaggctg

SEQ ID NO: 245232 - DNA, 20 bp, synthetic construct
  source 1..20: mol_type = other DNA
agcacggctaagcacaggct

SEQ ID NO: 245233 - DNA, 20 bp, synthetic construct
  source 1..20: mol_type = other DNA
aagcacggctaagcacaggc

SEQ ID NO: 245234 - DNA, 20 bp, synthetic construct
  source 1..20: mol_type = other DNA
aaagcacggctaagcacagg

SEQ ID NO: 245235 - DNA, 20 bp, synthetic construct
  source 1..20: mol_type = other DNA
caaagcacggctaagcacag

SEQ ID NO: 245236 - DNA, 20 bp, synthetic construct
  source 1..20: mol_type = other DNA
tcaaagcacggctaagcaca

SEQ ID NO: 245237 - DNA, 20 bp, synthetic construct
  source 1..20: mol_type = other DNA
ctcaaagcacggctaagcac

SEQ ID NO: 245238 - DNA, 20 bp, synthetic construct
  source 1..20: mol_type = other DNA
gctcaaagcacggctaagca

SEQ ID NO: 245239 - DNA, 20 bp, synthetic construct
  source 1..20: mol_type = other DNA
ggctcaaagcacggctaagc

SEQ ID NO: 245240 - DNA, 20 bp, synthetic construct
  source 1..20: mol_type = other DNA
aggctcaaagcacggctaag

SEQ ID NO: 245241 - DNA, 20 bp, synthetic construct
  source 1..20: mol_type = other DNA
gaggctcaaagcacggctaa

SEQ ID NO: 245242 - DNA, 20 bp, synthetic construct
  source 1..20: mol_type = other DNA
ggaggctcaaagcacggcta

SEQ ID NO: 245243 - DNA, 20 bp, synthetic construct
  source 1..20: mol_type = other DNA
gggaggctcaaagcacggct

SEQ ID NO: 245244 - DNA, 20 bp, synthetic construct
  source 1..20: mol_type = other DNA
agggaggctcaaagcacggc

SEQ ID NO: 245245 - DNA, 20 bp, synthetic construct
  source 1..20: mol_type = other DNA
gagggaggctcaaagcacgg

SEQ ID NO: 245246 - DNA, 20 bp, synthetic construct
  source 1..20: mol_type = other DNA
ggagggaggctcaaagcacg

SEQ ID NO: 245247 - DNA, 20 bp, synthetic construct
  source 1..20: mol_type = other DNA
aggagggaggctcaaagcac

SEQ ID NO: 245248 - DNA, 20 bp, synthetic construct
  source 1..20: mol_type = other DNA
caggagggaggctcaaagca

SEQ ID NO: 245249 - DNA, 20 bp, synthetic construct
  source 1..20: mol_type = other DNA
ccaggagggaggctcaaagc

SEQ ID NO: 245250 - DNA, 20 bp, synthetic construct
  source 1..20: mol_type = other DNA
gccaggagggaggctcaaag

SEQ ID NO: 245251 - DNA, 20 bp, synthetic construct
  source 1..20: mol_type = other DNA
agccaggagggaggctcaaa

SEQ ID NO: 245252 - DNA, 20 bp, synthetic construct
  source 1..20: mol_type = other DNA
cagccaggagggaggctcaa

SEQ ID NO: 245253 - DNA, 20 bp, synthetic construct
  source 1..20: mol_type = other DNA
gcagccaggagggaggctca

SEQ ID NO: 245254 - DNA, 20 bp, synthetic construct
  source 1..20: mol_type = other DNA
tgcagccaggagggaggctc

SEQ ID NO: 245255 - DNA, 20 bp, synthetic construct
  source 1..20: mol_type = other DNA
atgcagccaggagggaggct

SEQ ID NO: 245256 - DNA, 20 bp, synthetic construct
  source 1..20: mol_type = other DNA
gatgcagccaggagggaggc

SEQ ID NO: 245257 - DNA, 20 bp, synthetic construct
  source 1..20: mol_type = other DNA
agatgcagccaggagggagg

SEQ ID NO: 245258 - DNA, 20 bp, synthetic construct
  source 1..20: mol_type = other DNA
cagatgcagccaggagggag

SEQ ID NO: 245259 - DNA, 20 bp, synthetic construct
  source 1..20: mol_type = other DNA
gcagatgcagccaggaggga

SEQ ID NO: 245260 - DNA, 20 bp, synthetic construct
  source 1..20: mol_type = other DNA
agcagatgcagccaggaggg

SEQ ID NO: 245261 - DNA, 20 bp, synthetic construct
  source 1..20: mol_type = other DNA
cagcagatgcagccaggagg

SEQ ID NO: 245262 - DNA, 20 bp, synthetic construct
  source 1..20: mol_type = other DNA
gcagcagatgcagccaggag

SEQ ID NO: 245263 - DNA, 20 bp, synthetic construct
  source 1..20: mol_type = other DNA
agcagcagatgcagccagga

SEQ ID NO: 245264 - DNA, 20 bp, synthetic construct
  source 1..20: mol_type = other DNA
gagcagcagatgcagccagg

SEQ ID NO: 245265 - DNA, 20 bp, synthetic construct
  source 1..20: mol_type = other DNA
ggagcagcagatgcagccag

SEQ ID NO: 245266 - DNA, 20 bp, synthetic construct
  source 1..20: mol_type = other DNA
gggagcagcagatgcagcca

SEQ ID NO: 245267 - DNA, 20 bp, synthetic construct
  source 1..20: mol_type = other DNA
ggggagcagcagatgcagcc

SEQ ID NO: 245268 - DNA, 20 bp, synthetic construct
  source 1..20: mol_type = other DNA
gggggagcagcagatgcagc

SEQ ID NO: 245269 - DNA, 20 bp, synthetic construct
  source 1..20: mol_type = other DNA
agggggagcagcagatgcag

SEQ ID NO: 245270 - DNA, 20 bp, synthetic construct
  source 1..20: mol_type = other DNA
cagggggagcagcagatgca

SEQ ID NO: 245271 - DNA, 20 bp, synthetic construct
  source 1..20: mol_type = other DNA
ccagggggagcagcagatgc

SEQ ID NO: 245272 - DNA, 20 bp, synthetic construct
  source 1..20: mol_type = other DNA
gccagggggagcagcagatg

SEQ ID NO: 245273 - DNA, 20 bp, synthetic construct
  source 1..20: mol_type = other DNA
agccagggggagcagcagat

SEQ ID NO: 245274 - DNA, 20 bp, synthetic construct
  source 1..20: mol_type = other DNA
cagccagggggagcagcaga

SEQ ID NO: 245275 - DNA, 20 bp, synthetic construct
  source 1..20: mol_type = other DNA
tcagccagggggagcagcag

SEQ ID NO: 245276 - DNA, 20 bp, synthetic construct
  source 1..20: mol_type = other DNA
ctcagccagggggagcagca

SEQ ID NO: 245277 - DNA, 20 bp, synthetic construct
  source 1..20: mol_type = other DNA
tctcagccagggggagcagc

SEQ ID NO: 245278 - DNA, 20 bp, synthetic construct
  source 1..20: mol_type = other DNA
ctctcagccagggggagcag

SEQ ID NO: 245279 - DNA, 20 bp, synthetic construct
  source 1..20: mol_type = other DNA
tctctcagccagggggagca

SEQ ID NO: 245280 - DNA, 20 bp, synthetic construct
  source 1..20: mol_type = other DNA
atctctcagccagggggagc

SEQ ID NO: 245281 - DNA, 20 bp, synthetic construct
  source 1..20: mol_type = other DNA
catctctcagccagggggag

SEQ ID NO: 245282 - DNA, 20 bp, synthetic construct
  source 1..20: mol_type = other DNA
acatctctcagccaggggga

SEQ ID NO: 245283 - DNA, 20 bp, synthetic construct
  source 1..20: mol_type = other DNA
cacatctctcagccaggggg

SEQ ID NO: 245284 - DNA, 20 bp, synthetic construct
  source 1..20: mol_type = other DNA
gcacatctctcagccagggg

SEQ ID NO: 245285 - DNA, 20 bp, synthetic construct
  source 1..20: mol_type = other DNA
agcacatctctcagccaggg

SEQ ID NO: 245286 - DNA, 20 bp, synthetic construct
  source 1..20: mol_type = other DNA
gagcacatctctcagccagg

SEQ ID NO: 245287 - DNA, 20 bp, synthetic construct
  source 1..20: mol_type = other DNA
tgagcacatctctcagccag

SEQ ID NO: 245288 - DNA, 20 bp, synthetic construct
  source 1..20: mol_type = other DNA
gtgagcacatctctcagcca

SEQ ID NO: 245289 - DNA, 20 bp, synthetic construct
  source 1..20: mol_type = other DNA
agtgagcacatctctcagcc

SEQ ID NO: 245290 - DNA, 20 bp, synthetic construct
  source 1..20: mol_type = other DNA
gagtgagcacatctctcagc

SEQ ID NO: 245291 - DNA, 20 bp, synthetic construct
  source 1..20: mol_type = other DNA
ggagtgagcacatctctcag

SEQ ID NO: 245292 - DNA, 20 bp, synthetic construct
  source 1..20: mol_type = other DNA
aggagtgagcacatctctca

SEQ ID NO: 245293 - DNA, 20 bp, synthetic construct
  source 1..20: mol_type = other DNA
aaggagtgagcacatctctc

SEQ ID NO: 245294 - DNA, 20 bp, synthetic construct
  source 1..20: mol_type = other DNA
gaaggagtgagcacatctct

SEQ ID NO: 245295 - DNA, 20 bp, synthetic construct
  source 1..20: mol_type = other DNA
cgaaggagtgagcacatctc

SEQ ID NO: 245296 - DNA, 20 bp, synthetic construct
  source 1..20: mol_type = other DNA
ccgaaggagtgagcacatct

SEQ ID NO: 245297 - DNA, 20 bp, synthetic construct
  source 1..20: mol_type = other DNA
accgaaggagtgagcacatc

SEQ ID NO: 245298 - DNA, 20 bp, synthetic construct
  source 1..20: mol_type = other DNA
caccgaaggagtgagcacat

SEQ ID NO: 245299 - DNA, 20 bp, synthetic construct
  source 1..20: mol_type = other DNA
gcaccgaaggagtgagcaca

SEQ ID NO: 245300 - DNA, 20 bp, synthetic construct
  source 1..20: mol_type = other DNA
agcaccgaaggagtgagcac

SEQ ID NO: 245301 - DNA, 20 bp, synthetic construct
  source 1..20: mol_type = other DNA
aagcaccgaaggagtgagca

SEQ ID NO: 245302 - DNA, 20 bp, synthetic construct
  source 1..20: mol_type = other DNA
aaagcaccgaaggagtgagc

SEQ ID NO: 245303 - DNA, 20 bp, synthetic construct
  source 1..20: mol_type = other DNA
caaagcaccgaaggagtgag

SEQ ID NO: 245304 - DNA, 20 bp, synthetic construct
  source 1..20: mol_type = other DNA
gcaaagcaccgaaggagtga

SEQ ID NO: 245305 - DNA, 20 bp, synthetic construct
  source 1..20: mol_type = other DNA
tgcaaagcaccgaaggagtg

SEQ ID NO: 245306 - DNA, 20 bp, synthetic construct
  source 1..20: mol_type = other DNA
ctgcaaagcaccgaaggagt

SEQ ID NO: 245307 - DNA, 20 bp, synthetic construct
  source 1..20: mol_type = other DNA
cctgcaaagcaccgaaggag

SEQ ID NO: 245308 - DNA, 20 bp, synthetic construct
  source 1..20: mol_type = other DNA
tcctgcaaagcaccgaagga

SEQ ID NO: 245309 - DNA, 20 bp, synthetic construct
  source 1..20: mol_type = other DNA
gtcctgcaaagcaccgaagg

SEQ ID NO: 245310 - DNA, 20 bp, synthetic construct
  source 1..20: mol_type = other DNA
tgtcctgcaaagcaccgaag

SEQ ID NO: 245311 - DNA, 20 bp, synthetic construct
  source 1..20: mol_type = other DNA
ctgtcctgcaaagcaccgaa

SEQ ID NO: 245312 - DNA, 20 bp, synthetic construct
  source 1..20: mol_type = other DNA
gctgtcctgcaaagcaccga

SEQ ID NO: 245313 - DNA, 20 bp, synthetic construct
  source 1..20: mol_type = other DNA
cgctgtcctgcaaagcaccg

SEQ ID NO: 245314 - DNA, 20 bp, synthetic construct
  source 1..20: mol_type = other DNA
acgctgtcctgcaaagcacc

SEQ ID NO: 245315 - DNA, 20 bp, synthetic construct
  source 1..20: mol_type = other DNA
cacgctgtcctgcaaagcac

SEQ ID NO: 245316 - DNA, 20 bp, synthetic construct
  source 1..20: mol_type = other DNA
ccacgctgtcctgcaaagca

SEQ ID NO: 245317 - DNA, 20 bp, synthetic construct
  source 1..20: mol_type = other DNA
accacgctgtcctgcaaagc

SEQ ID NO: 245318 - DNA, 20 bp, synthetic construct
  source 1..20: mol_type = other DNA
caccacgctgtcctgcaaag

SEQ ID NO: 245319 - DNA, 20 bp, synthetic construct
  source 1..20: mol_type = other DNA
ccaccacgctgtcctgcaaa

SEQ ID NO: 245320 - DNA, 20 bp, synthetic construct
  source 1..20: mol_type = other DNA
cccaccacgctgtcctgcaa

SEQ ID NO: 245321 - DNA, 20 bp, synthetic construct
  source 1..20: mol_type = other DNA
tcccaccacgctgtcctgca

SEQ ID NO: 245322 - DNA, 20 bp, synthetic construct
  source 1..20: mol_type = other DNA
ctcccaccacgctgtcctgc

SEQ ID NO: 245323 - DNA, 20 bp, synthetic construct
  source 1..20: mol_type = other DNA
gctcccaccacgctgtcctg

SEQ ID NO: 245324 - DNA, 20 bp, synthetic construct
  source 1..20: mol_type = other DNA
agctcccaccacgctgtcct

SEQ ID NO: 245325 - DNA, 20 bp, synthetic construct
  source 1..20: mol_type = other DNA
cagctcccaccacgctgtcc

SEQ ID NO: 245326 - DNA, 20 bp, synthetic construct
  source 1..20: mol_type = other DNA
tcagctcccaccacgctgtc

SEQ ID NO: 245327 - DNA, 20 bp, synthetic construct
  source 1..20: mol_type = other DNA
ctcagctcccaccacgctgt

SEQ ID NO: 245328 - DNA, 20 bp, synthetic construct
  source 1..20: mol_type = other DNA
gctcagctcccaccacgctg

SEQ ID NO: 245329 - DNA, 20 bp, synthetic construct
  source 1..20: mol_type = other DNA
ggctcagctcccaccacgct

SEQ ID NO: 245330 - DNA, 20 bp, synthetic construct
  source 1..20: mol_type = other DNA
aggctcagctcccaccacgc

SEQ ID NO: 245331 - DNA, 20 bp, synthetic construct
  source 1..20: mol_type = other DNA
aaggctcagctcccaccacg

SEQ ID NO: 245332 - DNA, 20 bp, synthetic construct
  source 1..20: mol_type = other DNA
caaggctcagctcccaccac

SEQ ID NO: 245333 - DNA, 20 bp, synthetic construct
  source 1..20: mol_type = other DNA
gcaaggctcagctcccacca

SEQ ID NO: 245334 - DNA, 20 bp, synthetic construct
  source 1..20: mol_type = other DNA
cgcaaggctcagctcccacc

SEQ ID NO: 245335 - DNA, 20 bp, synthetic construct
  source 1..20: mol_type = other DNA
acgcaaggctcagctcccac

SEQ ID NO: 245336 - DNA, 20 bp, synthetic construct
  source 1..20: mol_type = other DNA
gacgcaaggctcagctccca

SEQ ID NO: 245337 - DNA, 20 bp, synthetic construct
  source 1..20: mol_type = other DNA
cgacgcaaggctcagctccc

SEQ ID NO: 245338 - DNA, 20 bp, synthetic construct
  source 1..20: mol_type = other DNA
tcgacgcaaggctcagctcc

SEQ ID NO: 245339 - DNA, 20 bp, synthetic construct
  source 1..20: mol_type = other DNA
atcgacgcaaggctcagctc

SEQ ID NO: 245340 - DNA, 20 bp, synthetic construct
  source 1..20: mol_type = other DNA
catcgacgcaaggctcagct

SEQ ID NO: 245341 - DNA, 20 bp, synthetic construct
  source 1..20: mol_type = other DNA
gcatcgacgcaaggctcagc

SEQ ID NO: 245342 - DNA, 20 bp, synthetic construct
  source 1..20: mol_type = other DNA
ggcatcgacgcaaggctcag

SEQ ID NO: 245343 - DNA, 20 bp, synthetic construct
  source 1..20: mol_type = other DNA
aggcatcgacgcaaggctca

SEQ ID NO: 245344 - DNA, 20 bp, synthetic construct
  source 1..20: mol_type = other DNA
aaggcatcgacgcaaggctc

SEQ ID NO: 245345 - DNA, 20 bp, synthetic construct
  source 1..20: mol_type = other DNA
caaggcatcgacgcaaggct

SEQ ID NO: 245346 - DNA, 20 bp, synthetic construct
  source 1..20: mol_type = other DNA
gcaaggcatcgacgcaaggc

SEQ ID NO: 245347 - DNA, 20 bp, synthetic construct
  source 1..20: mol_type = other DNA
agcaaggcatcgacgcaagg

SEQ ID NO: 245348 - DNA, 20 bp, synthetic construct
  source 1..20: mol_type = other DNA
aagcaaggcatcgacgcaag

SEQ ID NO: 245349 - DNA, 20 bp, synthetic construct
  source 1..20: mol_type = other DNA
caagcaaggcatcgacgcaa

SEQ ID NO: 245350 - DNA, 20 bp, synthetic construct
  source 1..20: mol_type = other DNA
gcaagcaaggcatcgacgca

SEQ ID NO: 245351 - DNA, 20 bp, synthetic construct
  source 1..20: mol_type = other DNA
agcaagcaaggcatcgacgc

SEQ ID NO: 245352 - DNA, 20 bp, synthetic construct
  source 1..20: mol_type = other DNA
cagcaagcaaggcatcgacg

SEQ ID NO: 245353 - DNA, 20 bp, synthetic construct
  source 1..20: mol_type = other DNA
ccagcaagcaaggcatcgac

SEQ ID NO: 245354 - DNA, 20 bp, synthetic construct
  source 1..20: mol_type = other DNA
accagcaagcaaggcatcga

SEQ ID NO: 245355 - DNA, 20 bp, synthetic construct
  source 1..20: mol_type = other DNA
caccagcaagcaaggcatcg

SEQ ID NO: 245356 - DNA, 20 bp, synthetic construct
  source 1..20: mol_type = other DNA
gcaccagcaagcaaggcatc

SEQ ID NO: 245357 - DNA, 20 bp, synthetic construct
  source 1..20: mol_type = other DNA
agcaccagcaagcaaggcat

SEQ ID NO: 245358 - DNA, 20 bp, synthetic construct
  source 1..20: mol_type = other DNA
cagcaccagcaagcaaggca

SEQ ID NO: 245359 - DNA, 20 bp, synthetic construct
  source 1..20: mol_type = other DNA
tcagcaccagcaagcaaggc

SEQ ID NO: 245360 - DNA, 20 bp, synthetic construct
  source 1..20: mol_type = other DNA
ctcagcaccagcaagcaagg

SEQ ID NO: 245361 - DNA, 20 bp, synthetic construct
  source 1..20: mol_type = other DNA
actcagcaccagcaagcaag

SEQ ID NO: 245362 - DNA, 20 bp, synthetic construct
  source 1..20: mol_type = other DNA
cactcagcaccagcaagcaa

SEQ ID NO: 245363 - DNA, 20 bp, synthetic construct
  source 1..20: mol_type = other DNA
acactcagcaccagcaagca

SEQ ID NO: 245364 - DNA, 20 bp, synthetic construct
  source 1..20: mol_type = other DNA
cacactcagcaccagcaagc

SEQ ID NO: 245365 - DNA, 20 bp, synthetic construct
  source 1..20: mol_type = other DNA
ccacactcagcaccagcaag

SEQ ID NO: 245366 - DNA, 20 bp, synthetic construct
  source 1..20: mol_type = other DNA
cccacactcagcaccagcaa

SEQ ID NO: 245367 - DNA, 20 bp, synthetic construct
  source 1..20: mol_type = other DNA
gcccacactcagcaccagca

SEQ ID NO: 245368 - DNA, 20 bp, synthetic construct
  source 1..20: mol_type = other DNA
tgcccacactcagcaccagc

SEQ ID NO: 245369 - DNA, 20 bp, synthetic construct
  source 1..20: mol_type = other DNA
gtgcccacactcagcaccag

SEQ ID NO: 245370 - DNA, 20 bp, synthetic construct
  source 1..20: mol_type = other DNA
ggtgcccacactcagcacca

SEQ ID NO: 245371 - DNA, 20 bp, synthetic construct
  source 1..20: mol_type = other DNA
aggtgcccacactcagcacc

SEQ ID NO: 245372 - DNA, 20 bp, synthetic construct
  source 1..20: mol_type = other DNA
aaggtgcccacactcagcac

SEQ ID NO: 245373 - DNA, 20 bp, synthetic construct
  source 1..20: mol_type = other DNA
gaaggtgcccacactcagca

SEQ ID NO: 245374 - DNA, 20 bp, synthetic construct
  source 1..20: mol_type = other DNA
tgaaggtgcccacactcagc

SEQ ID NO: 245375 - DNA, 20 bp, synthetic construct
  source 1..20: mol_type = other DNA
atgaaggtgcccacactcag

SEQ ID NO: 245376 - DNA, 20 bp, synthetic construct
  source 1..20: mol_type = other DNA
gatgaaggtgcccacactca

SEQ ID NO: 245377 - DNA, 20 bp, synthetic construct
  source 1..20: mol_type = other DNA
ggatgaaggtgcccacactc

SEQ ID NO: 245378 - DNA, 20 bp, synthetic construct
  source 1..20: mol_type = other DNA
gggatgaaggtgcccacact

SEQ ID NO: 245379 - DNA, 20 bp, synthetic construct
  source 1..20: mol_type = other DNA
cgggatgaaggtgcccacac

SEQ ID NO: 245380 - DNA, 20 bp, synthetic construct
  source 1..20: mol_type = other DNA
acgggatgaaggtgcccaca

SEQ ID NO: 245381 - DNA, 20 bp, synthetic construct
  source 1..20: mol_type = other DNA
cacgggatgaaggtgcccac

SEQ ID NO: 245382 - DNA, 20 bp, synthetic construct
  source 1..20: mol_type = other DNA
acacgggatgaaggtgccca

SEQ ID NO: 245383 - DNA, 20 bp, synthetic construct
  source 1..20: mol_type = other DNA
cacacgggatgaaggtgccc

SEQ ID NO: 245384 - DNA, 20 bp, synthetic construct
  source 1..20: mol_type = other DNA
acacacgggatgaaggtgcc

SEQ ID NO: 245385 - DNA, 20 bp, synthetic construct
  source 1..20: mol_type = other DNA
cacacacgggatgaaggtgc

SEQ ID NO: 245386 - DNA, 20 bp, synthetic construct
  source 1..20: mol_type = other DNA
gcacacacgggatgaaggtg

SEQ ID NO: 245387 - DNA, 20 bp, synthetic construct
  source 1..20: mol_type = other DNA
agcacacacgggatgaaggt

SEQ ID NO: 245388 - DNA, 20 bp, synthetic construct
  source 1..20: mol_type = other DNA
gagcacacacgggatgaagg

SEQ ID NO: 245389 - DNA, 20 bp, synthetic construct
  source 1..20: mol_type = other DNA
agagcacacacgggatgaag

SEQ ID NO: 245390 - DNA, 20 bp, synthetic construct
  source 1..20: mol_type = other DNA
cagagcacacacgggatgaa

SEQ ID NO: 245391 - DNA, 20 bp, synthetic construct
  source 1..20: mol_type = other DNA
ccagagcacacacgggatga

SEQ ID NO: 245392 - DNA, 20 bp, synthetic construct
  source 1..20: mol_type = other DNA
tccagagcacacacgggatg

SEQ ID NO: 245393 - DNA, 20 bp, synthetic construct
  source 1..20: mol_type = other DNA
ctccagagcacacacgggat

SEQ ID NO: 245394 - DNA, 20 bp, synthetic construct
  source 1..20: mol_type = other DNA
cctccagagcacacacggga

SEQ ID NO: 245395 - DNA, 20 bp, synthetic construct
  source 1..20: mol_type = other DNA
gcctccagagcacacacggg

SEQ ID NO: 245396 - DNA, 20 bp, synthetic construct
  source 1..20: mol_type = other DNA
tgcctccagagcacacacgg

SEQ ID NO: 245397 - DNA, 20 bp, synthetic construct
  source 1..20: mol_type = other DNA
ctgcctccagagcacacacg

SEQ ID NO: 245398 - DNA, 20 bp, synthetic construct
  source 1..20: mol_type = other DNA
gctgcctccagagcacacac

SEQ ID NO: 245399 - DNA, 20 bp, synthetic construct
  source 1..20: mol_type = other DNA
ggctgcctccagagcacaca

SEQ ID NO: 245400 - DNA, 20 bp, synthetic construct
  source 1..20: mol_type = other DNA
tggctgcctccagagcacac

SEQ ID NO: 245401 - DNA, 20 bp, synthetic construct
  source 1..20: mol_type = other DNA
gtggctgcctccagagcaca

SEQ ID NO: 245402 - DNA, 20 bp, synthetic construct
  source 1..20: mol_type = other DNA
ggtggctgcctccagagcac

SEQ ID NO: 245403 - DNA, 20 bp, synthetic construct
  source 1..20: mol_type = other DNA
gggtggctgcctccagagca

SEQ ID NO: 245404 - DNA, 20 bp, synthetic construct
  source 1..20: mol_type = other DNA
agggtggctgcctccagagc

SEQ ID NO: 245405 - DNA, 20 bp, synthetic construct
  source 1..20: mol_type = other DNA
aagggtggctgcctccagag

SEQ ID NO: 245406 - DNA, 20 bp, synthetic construct
  source 1..20: mol_type = other DNA
caagggtggctgcctccaga

SEQ ID NO: 245407 - DNA, 20 bp, synthetic construct
  source 1..20: mol_type = other DNA
ccaagggtggctgcctccag

SEQ ID NO: 245408 - DNA, 20 bp, synthetic construct
  source 1..20: mol_type = other DNA
tccaagggtggctgcctcca

SEQ ID NO: 245409 - DNA, 20 bp, synthetic construct
  source 1..20: mol_type = other DNA
gtccaagggtggctgcctcc

SEQ ID NO: 245410 - DNA, 20 bp, synthetic construct
  source 1..20: mol_type = other DNA
tgtccaagggtggctgcctc

SEQ ID NO: 245411 - DNA, 20 bp, synthetic construct
  source 1..20: mol_type = other DNA
ctgtccaagggtggctgcct

SEQ ID NO: 245412 - DNA, 20 bp, synthetic construct
  source 1..20: mol_type = other DNA
actgtccaagggtggctgcc

SEQ ID NO: 245413 - DNA, 20 bp, synthetic construct
  source 1..20: mol_type = other DNA
gactgtccaagggtggctgc

SEQ ID NO: 245414 - DNA, 20 bp, synthetic construct
  source 1..20: mol_type = other DNA
ggactgtccaagggtggctg

SEQ ID NO: 245415 - DNA, 20 bp, synthetic construct
  source 1..20: mol_type = other DNA
gggactgtccaagggtggct

SEQ ID NO: 245416 - DNA, 20 bp, synthetic construct
  source 1..20: mol_type = other DNA
cgggactgtccaagggtggc

SEQ ID NO: 245417 - DNA, 20 bp, synthetic construct
  source 1..20: mol_type = other DNA
gcgggactgtccaagggtgg

SEQ ID NO: 245418 - DNA, 20 bp, synthetic construct
  source 1..20: mol_type = other DNA
cgcgggactgtccaagggtg

SEQ ID NO: 245419 - DNA, 20 bp, synthetic construct
  source 1..20: mol_type = other DNA
gcgcgggactgtccaagggt

SEQ ID NO: 245420 - DNA, 20 bp, synthetic construct
  source 1..20: mol_type = other DNA
tgcgcgggactgtccaaggg

SEQ ID NO: 245421 - DNA, 20 bp, synthetic construct
  source 1..20: mol_type = other DNA
gtgcgcgggactgtccaagg

SEQ ID NO: 245422 - DNA, 20 bp, synthetic construct
  source 1..20: mol_type = other DNA
tgtgcgcgggactgtccaag

SEQ ID NO: 245423 - DNA, 20 bp, synthetic construct
  source 1..20: mol_type = other DNA
ctgtgcgcgggactgtccaa

SEQ ID NO: 245424 - DNA, 20 bp, synthetic construct
  source 1..20: mol_type = other DNA
gctgtgcgcgggactgtcca

SEQ ID NO: 245425 - DNA, 20 bp, synthetic construct
  source 1..20: mol_type = other DNA
agctgtgcgcgggactgtcc

SEQ ID NO: 245426 - DNA, 20 bp, synthetic construct
  source 1..20: mol_type = other DNA
gagctgtgcgcgggactgtc

SEQ ID NO: 245427 - DNA, 20 bp, synthetic construct
  source 1..20: mol_type = other DNA
ggagctgtgcgcgggactgt

SEQ ID NO: 245428 - DNA, 20 bp, synthetic construct
  source 1..20: mol_type = other DNA
tggagctgtgcgcgggactg

SEQ ID NO: 245429 - DNA, 20 bp, synthetic construct
  source 1..20: mol_type = other DNA
gtggagctgtgcgcgggact

SEQ ID NO: 245430 - DNA, 20 bp, synthetic construct
  source 1..20: mol_type = other DNA
tgtggagctgtgcgcgggac

SEQ ID NO: 245431 - DNA, 20 bp, synthetic construct
  source 1..20: mol_type = other DNA
ttgtggagctgtgcgcggga

SEQ ID NO: 245432 - DNA, 20 bp, synthetic construct
  source 1..20: mol_type = other DNA
tttgtggagctgtgcgcggg

SEQ ID NO: 245433 - DNA, 20 bp, synthetic construct
  source 1..20: mol_type = other DNA
ctttgtggagctgtgcgcgg

SEQ ID NO: 245434 - DNA, 20 bp, synthetic construct
  source 1..20: mol_type = other DNA
gctttgtggagctgtgcgcg

SEQ ID NO: 245435 - DNA, 20 bp, synthetic construct
  source 1..20: mol_type = other DNA
ggctttgtggagctgtgcgc

SEQ ID NO: 245436 - DNA, 20 bp, synthetic construct
  source 1..20: mol_type = other DNA
gggctttgtggagctgtgcg

SEQ ID NO: 245437 - DNA, 20 bp, synthetic construct
  source 1..20: mol_type = other DNA
ggggctttgtggagctgtgc

SEQ ID NO: 245438 - DNA, 20 bp, synthetic construct
  source 1..20: mol_type = other DNA
cggggctttgtggagctgtg

SEQ ID NO: 245439 - DNA, 20 bp, synthetic construct
  source 1..20: mol_type = other DNA
gcggggctttgtggagctgt

SEQ ID NO: 245440 - DNA, 20 bp, synthetic construct
  source 1..20: mol_type = other DNA
agcggggctttgtggagctg

SEQ ID NO: 245441 - DNA, 20 bp, synthetic construct
  source 1..20: mol_type = other DNA
gagcggggctttgtggagct

SEQ ID NO: 245442 - DNA, 20 bp, synthetic construct
  source 1..20: mol_type = other DNA
ggagcggggctttgtggagc

SEQ ID NO: 245443 - DNA, 20 bp, synthetic construct
  source 1..20: mol_type = other DNA
tggagcggggctttgtggag

SEQ ID NO: 245444 - DNA, 20 bp, synthetic construct
  source 1..20: mol_type = other DNA
atggagcggggctttgtgga

SEQ ID NO: 245445 - DNA, 20 bp, synthetic construct
  source 1..20: mol_type = other DNA
tatggagcggggctttgtgg

SEQ ID NO: 245446 - DNA, 20 bp, synthetic construct
  source 1..20: mol_type = other DNA
gtatggagcggggctttgtg

SEQ ID NO: 245447 - DNA, 20 bp, synthetic construct
  source 1..20: mol_type = other DNA
cgtatggagcggggctttgt

SEQ ID NO: 245448 - DNA, 20 bp, synthetic construct
  source 1..20: mol_type = other DNA
tcgtatggagcggggctttg

SEQ ID NO: 245449 - DNA, 20 bp, synthetic construct
  source 1..20: mol_type = other DNA
atcgtatggagcggggcttt

SEQ ID NO: 245450 - DNA, 20 bp, synthetic construct
  source 1..20: mol_type = other DNA
aatcgtatggagcggggctt

SEQ ID NO: 245451 - DNA, 20 bp, synthetic construct
  source 1..20: mol_type = other DNA
caatcgtatggagcggggct

SEQ ID NO: 245452 - DNA, 20 bp, synthetic construct
  source 1..20: mol_type = other DNA
acaatcgtatggagcggggc

SEQ ID NO: 245453 - DNA, 20 bp, synthetic construct
  source 1..20: mol_type = other DNA
gacaatcgtatggagcgggg

SEQ ID NO: 245454 - DNA, 20 bp, synthetic construct
  source 1..20: mol_type = other DNA
ggacaatcgtatggagcggg

SEQ ID NO: 245455 - DNA, 20 bp, synthetic construct
  source 1..20: mol_type = other DNA
aggacaatcgtatggagcgg

SEQ ID NO: 245456 - DNA, 20 bp, synthetic construct
  source 1..20: mol_type = other DNA
gaggacaatcgtatggagcg

SEQ ID NO: 245457 - DNA, 20 bp, synthetic construct
  source 1..20: mol_type = other DNA
ggaggacaatcgtatggagc

SEQ ID NO: 245458 - DNA, 20 bp, synthetic construct
  source 1..20: mol_type = other DNA
gggaggacaatcgtatggag

SEQ ID NO: 245459 - DNA, 20 bp, synthetic construct
  source 1..20: mol_type = other DNA
tgggaggacaatcgtatgga

SEQ ID NO: 245460 - DNA, 20 bp, synthetic construct
  source 1..20: mol_type = other DNA
gtgggaggacaatcgtatgg

SEQ ID NO: 245461 - DNA, 20 bp, synthetic construct
  source 1..20: mol_type = other DNA
tgtgggaggacaatcgtatg

SEQ ID NO: 245462 - DNA, 20 bp, synthetic construct
  source 1..20: mol_type = other DNA
gtgtgggaggacaatcgtat

SEQ ID NO: 245463 - DNA, 20 bp, synthetic construct
  source 1..20: mol_type = other DNA
ggtgtgggaggacaatcgta

SEQ ID NO: 245464 - DNA, 20 bp, synthetic construct
  source 1..20: mol_type = other DNA
gggtgtgggaggacaatcgt

SEQ ID NO: 245465 - DNA, 20 bp, synthetic construct
  source 1..20: mol_type = other DNA
ggggtgtgggaggacaatcg

SEQ ID NO: 245466 - DNA, 20 bp, synthetic construct
  source 1..20: mol_type = other DNA
gggggtgtgggaggacaatc

SEQ ID NO: 245467 - DNA, 20 bp, synthetic construct
  source 1..20: mol_type = other DNA
agggggtgtgggaggacaat

SEQ ID NO: 245468 - DNA, 20 bp, synthetic construct
  source 1..20: mol_type = other DNA
aagggggtgtgggaggacaa

SEQ ID NO: 245469 - DNA, 20 bp, synthetic construct
  source 1..20: mol_type = other DNA
gaagggggtgtgggaggaca

SEQ ID NO: 245470 - DNA, 20 bp, synthetic construct
  source 1..20: mol_type = other DNA
tgaagggggtgtgggaggac

SEQ ID NO: 245471 - DNA, 20 bp, synthetic construct
  source 1..20: mol_type = other DNA
ttgaagggggtgtgggagga

SEQ ID NO: 245472 - DNA, 20 bp, synthetic construct
  source 1..20: mol_type = other DNA
tttgaagggggtgtgggagg

SEQ ID NO: 245473 - DNA, 20 bp, synthetic construct
  source 1..20: mol_type = other DNA
ttttgaagggggtgtgggag

SEQ ID NO: 245474 - DNA, 20 bp, synthetic construct
  source 1..20: mol_type = other DNA
cttttgaagggggtgtggga

SEQ ID NO: 245475 - DNA, 20 bp, synthetic construct
  source 1..20: mol_type = other DNA
gcttttgaagggggtgtggg

SEQ ID NO: 245476 - DNA, 20 bp, synthetic construct
  source 1..20: mol_type = other DNA
ggcttttgaagggggtgtgg

SEQ ID NO: 245477 - DNA, 20 bp, synthetic construct
  source 1..20: mol_type = other DNA
gggcttttgaagggggtgtg

SEQ ID NO: 245478 - DNA, 20 bp, synthetic construct
  source 1..20: mol_type = other DNA
ggggcttttgaagggggtgt

SEQ ID NO: 245479 - DNA, 20 bp, synthetic construct
  source 1..20: mol_type = other DNA
gggggcttttgaagggggtg

SEQ ID NO: 245480 - DNA, 20 bp, synthetic construct
  source 1..20: mol_type = other DNA
agggggcttttgaagggggt

SEQ ID NO: 245481 - DNA, 20 bp, synthetic construct
  source 1..20: mol_type = other DNA
gagggggcttttgaaggggg

SEQ ID NO: 245482 - DNA, 20 bp, synthetic construct
  source 1..20: mol_type = other DNA
ggagggggcttttgaagggg

SEQ ID NO: 245483 - DNA, 20 bp, synthetic construct
  source 1..20: mol_type = other DNA
aggagggggcttttgaaggg

SEQ ID NO: 245484 - DNA, 20 bp, synthetic construct
  source 1..20: mol_type = other DNA
gaggagggggcttttgaagg

SEQ ID NO: 245485 - DNA, 20 bp, synthetic construct
  source 1..20: mol_type = other DNA
agaggagggggcttttgaag

SEQ ID NO: 245486 - DNA, 20 bp, synthetic construct
  source 1..20: mol_type = other DNA
gagaggagggggcttttgaa

SEQ ID NO: 245487 - DNA, 20 bp, synthetic construct
  source 1..20: mol_type = other DNA
agagaggagggggcttttga

SEQ ID NO: 245488 - DNA, 20 bp, synthetic construct
  source 1..20: mol_type = other DNA
gagagaggagggggcttttg

SEQ ID NO: 245489 - DNA, 20 bp, synthetic construct
  source 1..20: mol_type = other DNA
agagagaggagggggctttt

SEQ ID NO: 245490 - DNA, 20 bp, synthetic construct
  source 1..20: mol_type = other DNA
aagagagaggagggggcttt

SEQ ID NO: 245491 - DNA, 20 bp, synthetic construct
  source 1..20: mol_type = other DNA
aaagagagaggagggggctt

SEQ ID NO: 245492 - DNA, 20 bp, synthetic construct
  source 1..20: mol_type = other DNA
gaaagagagaggagggggct

SEQ ID NO: 245493 - DNA, 20 bp, synthetic construct
  source 1..20: mol_type = other DNA
agaaagagagaggagggggc

SEQ ID NO: 245494 - DNA, 20 bp, synthetic construct
  source 1..20: mol_type = other DNA
aagaaagagagaggaggggg

SEQ ID NO: 245495 - DNA, 20 bp, synthetic construct
  source 1..20: mol_type = other DNA
gaagaaagagagaggagggg

SEQ ID NO: 245496 - DNA, 20 bp, synthetic construct
  source 1..20: mol_type = other DNA
tgaagaaagagagaggaggg

SEQ ID NO: 245497 - DNA, 20 bp, synthetic construct
  source 1..20: mol_type = other DNA
ctgaagaaagagagaggagg

SEQ ID NO: 245498 - DNA, 20 bp, synthetic construct
  source 1..20: mol_type = other DNA
cctgaagaaagagagaggag

SEQ ID NO: 245499 - DNA, 20 bp, synthetic construct
  source 1..20: mol_type = other DNA
ccctgaagaaagagagagga

SEQ ID NO: 245500 - DNA, 20 bp, synthetic construct
  source 1..20: mol_type = other DNA
cccctgaagaaagagagagg

SEQ ID NO: 245501 - DNA, 20 bp, synthetic construct
  source 1..20: mol_type = other DNA
gcccctgaagaaagagagag

SEQ ID NO: 245502 - DNA, 20 bp, synthetic construct
  source 1..20: mol_type = other DNA
ggcccctgaagaaagagaga

SEQ ID NO: 245503 - DNA, 20 bp, synthetic construct
  source 1..20: mol_type = other DNA
tggcccctgaagaaagagag

SEQ ID NO: 245504 - DNA, 20 bp, synthetic construct
  source 1..20: mol_type = other DNA
ctggcccctgaagaaagaga

SEQ ID NO: 245505 - DNA, 20 bp, synthetic construct
  source 1..20: mol_type = other DNA
actggcccctgaagaaagag

SEQ ID NO: 245506 - DNA, 20 bp, synthetic construct
  source 1..20: mol_type = other DNA
tactggcccctgaagaaaga

SEQ ID NO: 245507 - DNA, 20 bp, synthetic construct
  source 1..20: mol_type = other DNA
ctactggcccctgaagaaag

SEQ ID NO: 245508 - DNA, 20 bp, synthetic construct
  source 1..20: mol_type = other DNA
cctactggcccctgaagaaa

SEQ ID NO: 245509 - DNA, 20 bp, synthetic construct
  source 1..20: mol_type = other DNA
acctactggcccctgaagaa

SEQ ID NO: 245510 - DNA, 20 bp, synthetic construct
  source 1..20: mol_type = other DNA
gacctactggcccctgaaga

SEQ ID NO: 245511 - DNA, 20 bp, synthetic construct
  source 1..20: mol_type = other DNA
ggacctactggcccctgaag

SEQ ID NO: 245512 - DNA, 20 bp, synthetic construct
  source 1..20: mol_type = other DNA
gggacctactggcccctgaa

SEQ ID NO: 245513 - DNA, 20 bp, synthetic construct
  source 1..20: mol_type = other DNA
tgggacctactggcccctga

SEQ ID NO: 245514 - DNA, 20 bp, synthetic construct
  source 1..20: mol_type = other DNA
ctgggacctactggcccctg

SEQ ID NO: 245515 - DNA, 20 bp, synthetic construct
  source 1..20: mol_type = other DNA
tctgggacctactggcccct

SEQ ID NO: 245516 - DNA, 20 bp, synthetic construct
  source 1..20: mol_type = other DNA
ctctgggacctactggcccc

SEQ ID NO: 245517 - DNA, 20 bp, synthetic construct
  source 1..20: mol_type = other DNA
gctctgggacctactggccc

SEQ ID NO: 245518 - DNA, 20 bp, synthetic construct
  source 1..20: mol_type = other DNA
tgctctgggacctactggcc

SEQ ID NO: 245519 - DNA, 20 bp, synthetic construct
  source 1..20: mol_type = other DNA
ctgctctgggacctactggc

SEQ ID NO: 245520 - DNA, 20 bp, synthetic construct
  source 1..20: mol_type = other DNA
gctgctctgggacctactgg

SEQ ID NO: 245521 - DNA, 20 bp, synthetic construct
  source 1..20: mol_type = other DNA
ggctgctctgggacctactg

SEQ ID NO: 245522 - DNA, 20 bp, synthetic construct
  source 1..20: mol_type = other DNA
tggctgctctgggacctact

SEQ ID NO: 245523 - DNA, 20 bp, synthetic construct
  source 1..20: mol_type = other DNA
atggctgctctgggacctac

SEQ ID NO: 245524 - DNA, 20 bp, synthetic construct
  source 1..20: mol_type = other DNA
aatggctgctctgggaccta

SEQ ID NO: 245525 - DNA, 20 bp, synthetic construct
  source 1..20: mol_type = other DNA
aaatggctgctctgggacct

SEQ ID NO: 245526 - DNA, 20 bp, synthetic construct
  source 1..20: mol_type = other DNA
caaatggctgctctgggacc

SEQ ID NO: 245527 - DNA, 20 bp, synthetic construct
  source 1..20: mol_type = other DNA
ccaaatggctgctctgggac

SEQ ID NO: 245528 - DNA, 20 bp, synthetic construct
  source 1..20: mol_type = other DNA
gccaaatggctgctctggga

SEQ ID NO: 245529 - DNA, 20 bp, synthetic construct
  source 1..20: mol_type = other DNA
agccaaatggctgctctggg

SEQ ID NO: 245530 - DNA, 20 bp, synthetic construct
  source 1..20: mol_type = other DNA
cagccaaatggctgctctgg

SEQ ID NO: 245531 - DNA, 20 bp, synthetic construct
  source 1..20: mol_type = other DNA
tcagccaaatggctgctctg

SEQ ID NO: 245532 - DNA, 20 bp, synthetic construct
  source 1..20: mol_type = other DNA
ctcagccaaatggctgctct

SEQ ID NO: 245533 - DNA, 20 bp, synthetic construct
  source 1..20: mol_type = other DNA
cctcagccaaatggctgctc

SEQ ID NO: 245534 - DNA, 20 bp, synthetic construct
  source 1..20: mol_type = other DNA
ccctcagccaaatggctgct

SEQ ID NO: 245535 - DNA, 20 bp, synthetic construct
  source 1..20: mol_type = other DNA
tccctcagccaaatggctgc

SEQ ID NO: 245536 - DNA, 20 bp, synthetic construct
  source 1..20: mol_type = other DNA
ttccctcagccaaatggctg

SEQ ID NO: 245537 - DNA, 20 bp, synthetic construct
  source 1..20: mol_type = other DNA
cttccctcagccaaatggct

SEQ ID NO: 245538 - DNA, 20 bp, synthetic construct
  source 1..20: mol_type = other DNA
ccttccctcagccaaatggc

SEQ ID NO: 245539 - DNA, 20 bp, synthetic construct
  source 1..20: mol_type = other DNA
cccttccctcagccaaatgg

SEQ ID NO: 245540 - DNA, 20 bp, synthetic construct
  source 1..20: mol_type = other DNA
ccccttccctcagccaaatg

SEQ ID NO: 245541 - DNA, 20 bp, synthetic construct
  source 1..20: mol_type = other DNA
gccccttccctcagccaaat

SEQ ID NO: 245542 - DNA, 20 bp, synthetic construct
  source 1..20: mol_type = other DNA
tgccccttccctcagccaaa

SEQ ID NO: 245543 - DNA, 20 bp, synthetic construct
  source 1..20: mol_type = other DNA
ctgccccttccctcagccaa

SEQ ID NO: 245544 - DNA, 20 bp, synthetic construct
  source 1..20: mol_type = other DNA
cctgccccttccctcagcca

SEQ ID NO: 245545 - DNA, 20 bp, synthetic construct
  source 1..20: mol_type = other DNA
acctgccccttccctcagcc

SEQ ID NO: 245546 - DNA, 20 bp, synthetic construct
  source 1..20: mol_type = other DNA
gacctgccccttccctcagc

SEQ ID NO: 245547 - DNA, 20 bp, synthetic construct
  source 1..20: mol_type = other DNA
tgacctgccccttccctcag

SEQ ID NO: 245548 - DNA, 20 bp, synthetic construct
  source 1..20: mol_type = other DNA
ctgacctgccccttccctca

SEQ ID NO: 245549 - DNA, 20 bp, synthetic construct
  source 1..20: mol_type = other DNA
actgacctgccccttccctc

SEQ ID NO: 245550 - DNA, 20 bp, synthetic construct
  source 1..20: mol_type = other DNA
cactgacctgccccttccct

SEQ ID NO: 245551 - DNA, 20 bp, synthetic construct
  source 1..20: mol_type = other DNA
ccactgacctgccccttccc

SEQ ID NO: 245552 - DNA, 20 bp, synthetic construct
  source 1..20: mol_type = other DNA
tccactgacctgccccttcc

SEQ ID NO: 245553 - DNA, 20 bp, synthetic construct
  source 1..20: mol_type = other DNA
gtccactgacctgccccttc

SEQ ID NO: 245554 - DNA, 20 bp, synthetic construct
  source 1..20: mol_type = other DNA
tgtccactgacctgcccctt

SEQ ID NO: 245555 - DNA, 20 bp, synthetic construct
  source 1..20: mol_type = other DNA
atgtccactgacctgcccct

SEQ ID NO: 245556 - DNA, 20 bp, synthetic construct
  source 1..20: mol_type = other DNA
gatgtccactgacctgcccc

SEQ ID NO: 245557 - DNA, 20 bp, synthetic construct
  source 1..20: mol_type = other DNA
agatgtccactgacctgccc

SEQ ID NO: 245558 - DNA, 20 bp, synthetic construct
  source 1..20: mol_type = other DNA
cagatgtccactgacctgcc

SEQ ID NO: 245559 - DNA, 20 bp, synthetic construct
  source 1..20: mol_type = other DNA
tcagatgtccactgacctgc

SEQ ID NO: 245560 - DNA, 20 bp, synthetic construct
  source 1..20: mol_type = other DNA
atcagatgtccactgacctg

SEQ ID NO: 245561 - DNA, 20 bp, synthetic construct
  source 1..20: mol_type = other DNA
gatcagatgtccactgacct

SEQ ID NO: 245562 - DNA, 20 bp, synthetic construct
  source 1..20: mol_type = other DNA
agatcagatgtccactgacc

SEQ ID NO: 245563 - DNA, 20 bp, synthetic construct
  source 1..20: mol_type = other DNA
aagatcagatgtccactgac

SEQ ID NO: 245564 - DNA, 20 bp, synthetic construct
  source 1..20: mol_type = other DNA
caagatcagatgtccactga

SEQ ID NO: 245565 - DNA, 20 bp, synthetic construct
  source 1..20: mol_type = other DNA
ccaagatcagatgtccactg

SEQ ID NO: 245566 - DNA, 20 bp, synthetic construct
  source 1..20: mol_type = other DNA
accaagatcagatgtccact

SEQ ID NO: 245567 - DNA, 20 bp, synthetic construct
  source 1..20: mol_type = other DNA
aaccaagatcagatgtccac

SEQ ID NO: 245568 - DNA, 20 bp, synthetic construct
  source 1..20: mol_type = other DNA
aaaccaagatcagatgtcca

SEQ ID NO: 245569 - DNA, 20 bp, synthetic construct
  source 1..20: mol_type = other DNA
taaaccaagatcagatgtcc

SEQ ID NO: 245570 - DNA, 20 bp, synthetic construct
  source 1..20: mol_type = other DNA
ctaaaccaagatcagatgtc

SEQ ID NO: 245571 - DNA, 20 bp, synthetic construct
  source 1..20: mol_type = other DNA
actaaaccaagatcagatgt

SEQ ID NO: 245572 - DNA, 20 bp, synthetic construct
  source 1..20: mol_type = other DNA
tactaaaccaagatcagatg

SEQ ID NO: 245573 - DNA, 20 bp, synthetic construct
  source 1..20: mol_type = other DNA
atactaaaccaagatcagat

SEQ ID NO: 245574 - DNA, 20 bp, synthetic construct
  source 1..20: mol_type = other DNA
gatactaaaccaagatcaga

SEQ ID NO: 245575 - DNA, 20 bp, synthetic construct
  source 1..20: mol_type = other DNA
ggatactaaaccaagatcag

SEQ ID NO: 245576 - DNA, 20 bp, synthetic construct
  source 1..20: mol_type = other DNA
aggatactaaaccaagatca

SEQ ID NO: 245577 - DNA, 20 bp, synthetic construct
  source 1..20: mol_type = other DNA
aaggatactaaaccaagatc

SEQ ID NO: 245578 - DNA, 20 bp, synthetic construct
  source 1..20: mol_type = other DNA
gaaggatactaaaccaagat

SEQ ID NO: 245579 - DNA, 20 bp, synthetic construct
  source 1..20: mol_type = other DNA
tgaaggatactaaaccaaga

SEQ ID NO: 245580 - DNA, 20 bp, synthetic construct
  source 1..20: mol_type = other DNA
atgaaggatactaaaccaag

SEQ ID NO: 245581 - DNA, 20 bp, synthetic construct
  source 1..20: mol_type = other DNA
aatgaaggatactaaaccaa

SEQ ID NO: 245582 - DNA, 20 bp, synthetic construct
  source 1..20: mol_type = other DNA
aaatgaaggatactaaacca

SEQ ID NO: 245583 - DNA, 20 bp, synthetic construct
  source 1..20: mol_type = other DNA
aaaatgaaggatactaaacc

SEQ ID NO: 245584 - DNA, 20 bp, synthetic construct
  source 1..20: mol_type = other DNA
caaaatgaaggatactaaac

SEQ ID NO: 245585 - DNA, 20 bp, synthetic construct
  source 1..20: mol_type = other DNA
ccaaaatgaaggatactaaa

SEQ ID NO: 245586 - DNA, 20 bp, synthetic construct
  source 1..20: mol_type = other DNA
cccaaaatgaaggatactaa

SEQ ID NO: 245587 - DNA, 20 bp, synthetic construct
  source 1..20: mol_type = other DNA
ccccaaaatgaaggatacta

SEQ ID NO: 245588 - DNA, 20 bp, synthetic construct
  source 1..20: mol_type = other DNA
cccccaaaatgaaggatact

SEQ ID NO: 245589 - DNA, 20 bp, synthetic construct
  source 1..20: mol_type = other DNA
gcccccaaaatgaaggatac

SEQ ID NO: 245590 - DNA, 20 bp, synthetic construct
  source 1..20: mol_type = other DNA
agcccccaaaatgaaggata

SEQ ID NO: 245591 - DNA, 20 bp, synthetic construct
  source 1..20: mol_type = other DNA
gagcccccaaaatgaaggat

SEQ ID NO: 245592 - DNA, 20 bp, synthetic construct
  source 1..20: mol_type = other DNA
agagcccccaaaatgaagga

SEQ ID NO: 245593 - DNA, 20 bp, synthetic construct
  source 1..20: mol_type = other DNA
cagagcccccaaaatgaagg

SEQ ID NO: 245594 - DNA, 20 bp, synthetic construct
  source 1..20: mol_type = other DNA
ccagagcccccaaaatgaag

SEQ ID NO: 245595 - DNA, 20 bp, synthetic construct
  source 1..20: mol_type = other DNA
cccagagcccccaaaatgaa

SEQ ID NO: 245596 - DNA, 20 bp, synthetic construct
  source 1..20: mol_type = other DNA
acccagagcccccaaaatga

SEQ ID NO: 245597 - DNA, 20 bp, synthetic construct
  source 1..20: mol_type = other DNA
cacccagagcccccaaaatg

SEQ ID NO: 245598 - DNA, 20 bp, synthetic construct
  source 1..20: mol_type = other DNA
acacccagagcccccaaaat

SEQ ID NO: 245599 - DNA, 20 bp, synthetic construct
  source 1..20: mol_type = other DNA
cacacccagagcccccaaaa

SEQ ID NO: 245600 - DNA, 20 bp, synthetic construct
  source 1..20: mol_type = other DNA
ccacacccagagcccccaaa

SEQ ID NO: 245601 - DNA, 20 bp, synthetic construct
  source 1..20: mol_type = other DNA
gccacacccagagcccccaa

SEQ ID NO: 245602 - DNA, 20 bp, synthetic construct
  source 1..20: mol_type = other DNA
ggccacacccagagccccca

SEQ ID NO: 245603 - DNA, 20 bp, synthetic construct
  source 1..20: mol_type = other DNA
aggccacacccagagccccc

SEQ ID NO: 245604 - DNA, 20 bp, synthetic construct
  source 1..20: mol_type = other DNA
caggccacacccagagcccc

SEQ ID NO: 245605 - DNA, 20 bp, synthetic construct
  source 1..20: mol_type = other DNA
ccaggccacacccagagccc

SEQ ID NO: 245606 - DNA, 20 bp, synthetic construct
  source 1..20: mol_type = other DNA
cccaggccacacccagagcc

SEQ ID NO: 245607 - DNA, 20 bp, synthetic construct
  source 1..20: mol_type = other DNA
gcccaggccacacccagagc

SEQ ID NO: 245608 - DNA, 20 bp, synthetic construct
  source 1..20: mol_type = other DNA
ggcccaggccacacccagag

SEQ ID NO: 245609 - DNA, 20 bp, synthetic construct
  source 1..20: mol_type = other DNA
aggcccaggccacacccaga

SEQ ID NO: 245610 - DNA, 20 bp, synthetic construct
  source 1..20: mol_type = other DNA
gaggcccaggccacacccag

SEQ ID NO: 245611 - DNA, 20 bp, synthetic construct
  source 1..20: mol_type = other DNA
agaggcccaggccacaccca

SEQ ID NO: 245612 - DNA, 20 bp, synthetic construct
  source 1..20: mol_type = other DNA
cagaggcccaggccacaccc

SEQ ID NO: 245613 - DNA, 20 bp, synthetic construct
  source 1..20: mol_type = other DNA
ccagaggcccaggccacacc

SEQ ID NO: 245614 - DNA, 20 bp, synthetic construct
  source 1..20: mol_type = other DNA
tccagaggcccaggccacac

SEQ ID NO: 245615 - DNA, 20 bp, synthetic construct
  source 1..20: mol_type = other DNA
gtccagaggcccaggccaca

SEQ ID NO: 245616 - DNA, 20 bp, synthetic construct
  source 1..20: mol_type = other DNA
agtccagaggcccaggccac

SEQ ID NO: 245617 - DNA, 20 bp, synthetic construct
  source 1..20: mol_type = other DNA
aagtccagaggcccaggcca

SEQ ID NO: 245618 - DNA, 20 bp, synthetic construct
  source 1..20: mol_type = other DNA
aaagtccagaggcccaggcc

SEQ ID NO: 245619 - DNA, 20 bp, synthetic construct
  source 1..20: mol_type = other DNA
caaagtccagaggcccaggc

SEQ ID NO: 245620 - DNA, 20 bp, synthetic construct
  source 1..20: mol_type = other DNA
ccaaagtccagaggcccagg

SEQ ID NO: 245621 - DNA, 20 bp, synthetic construct
  source 1..20: mol_type = other DNA
gccaaagtccagaggcccag

SEQ ID NO: 245622 - DNA, 20 bp, synthetic construct
  source 1..20: mol_type = other DNA
ggccaaagtccagaggccca

SEQ ID NO: 245623 - DNA, 20 bp, synthetic construct
  source 1..20: mol_type = other DNA
tggccaaagtccagaggccc

SEQ ID NO: 245624 - DNA, 20 bp, synthetic construct
  source 1..20: mol_type = other DNA
gtggccaaagtccagaggcc

SEQ ID NO: 245625 - DNA, 20 bp, synthetic construct
  source 1..20: mol_type = other DNA
cgtggccaaagtccagaggc

SEQ ID NO: 245626 - DNA, 20 bp, synthetic construct
  source 1..20: mol_type = other DNA
ccgtggccaaagtccagagg

SEQ ID NO: 245627 - DNA, 20 bp, synthetic construct
  source 1..20: mol_type = other DNA
accgtggccaaagtccagag

SEQ ID NO: 245628 - DNA, 20 bp, synthetic construct
  source 1..20: mol_type = other DNA
caccgtggccaaagtccaga

SEQ ID NO: 245629 - DNA, 20 bp, synthetic construct
  source 1..20: mol_type = other DNA
acaccgtggccaaagtccag

SEQ ID NO: 245630 - DNA, 20 bp, synthetic construct
  source 1..20: mol_type = other DNA
aacaccgtggccaaagtcca

SEQ ID NO: 245631 - DNA, 20 bp, synthetic construct
  source 1..20: mol_type = other DNA
aaacaccgtggccaaagtcc

SEQ ID NO: 245632 - DNA, 20 bp, synthetic construct
  source 1..20: mol_type = other DNA
caaacaccgtggccaaagtc

SEQ ID NO: 245633 - DNA, 20 bp, synthetic construct
  source 1..20: mol_type = other DNA
acaaacaccgtggccaaagt

SEQ ID NO: 245634 - DNA, 20 bp, synthetic construct
  source 1..20: mol_type = other DNA
aacaaacaccgtggccaaag

SEQ ID NO: 245635 - DNA, 20 bp, synthetic construct
  source 1..20: mol_type = other DNA
gaacaaacaccgtggccaaa

SEQ ID NO: 245636 - DNA, 20 bp, synthetic construct
  source 1..20: mol_type = other DNA
ggaacaaacaccgtggccaa

SEQ ID NO: 245637 - DNA, 20 bp, synthetic construct
  source 1..20: mol_type = other DNA
tggaacaaacaccgtggcca

SEQ ID NO: 245638 - DNA, 20 bp, synthetic construct
  source 1..20: mol_type = other DNA
ctggaacaaacaccgtggcc

SEQ ID NO: 245639 - DNA, 20 bp, synthetic construct
  source 1..20: mol_type = other DNA
gctggaacaaacaccgtggc

SEQ ID NO: 245640 - DNA, 20 bp, synthetic construct
  source 1..20: mol_type = other DNA
ggctggaacaaacaccgtgg

SEQ ID NO: 245641 - DNA, 20 bp, synthetic construct
  source 1..20: mol_type = other DNA
gggctggaacaaacaccgtg

SEQ ID NO: 245642 - DNA, 20 bp, synthetic construct
  source 1..20: mol_type = other DNA
agggctggaacaaacaccgt

SEQ ID NO: 245643 - DNA, 20 bp, synthetic construct
  source 1..20: mol_type = other DNA
aagggctggaacaaacaccg

SEQ ID NO: 245644 - DNA, 20 bp, synthetic construct
  source 1..20: mol_type = other DNA
gaagggctggaacaaacacc

SEQ ID NO: 245645 - DNA, 20 bp, synthetic construct
  source 1..20: mol_type = other DNA
agaagggctggaacaaacac

SEQ ID NO: 245646 - DNA, 20 bp, synthetic construct
  source 1..20: mol_type = other DNA
gagaagggctggaacaaaca

SEQ ID NO: 245647 - DNA, 20 bp, synthetic construct
  source 1..20: mol_type = other DNA
ggagaagggctggaacaaac

SEQ ID NO: 245648 - DNA, 20 bp, synthetic construct
  source 1..20: mol_type = other DNA
aggagaagggctggaacaaa

SEQ ID NO: 245649 - DNA, 20 bp, synthetic construct
  source 1..20: mol_type = other DNA
taggagaagggctggaacaa

SEQ ID NO: 245650 - DNA, 20 bp, synthetic construct
  source 1..20: mol_type = other DNA
ttaggagaagggctggaaca

SEQ ID NO: 245651 - DNA, 20 bp, synthetic construct
  source 1..20: mol_type = other DNA
gttaggagaagggctggaac

SEQ ID NO: 245652 - DNA, 20 bp, synthetic construct
  source 1..20: mol_type = other DNA
ggttaggagaagggctggaa

SEQ ID NO: 245653 - DNA, 20 bp, synthetic construct
  source 1..20: mol_type = other DNA
aggttaggagaagggctgga

SEQ ID NO: 245654 - DNA, 20 bp, synthetic construct
  source 1..20: mol_type = other DNA
caggttaggagaagggctgg

SEQ ID NO: 245655 - DNA, 20 bp, synthetic construct
  source 1..20: mol_type = other DNA
acaggttaggagaagggctg

SEQ ID NO: 245656 - DNA, 20 bp, synthetic construct
  source 1..20: mol_type = other DNA
gacaggttaggagaagggct

SEQ ID NO: 245657 - DNA, 20 bp, synthetic construct
  source 1..20: mol_type = other DNA
ggacaggttaggagaagggc

SEQ ID NO: 245658 - DNA, 20 bp, synthetic construct
  source 1..20: mol_type = other DNA
aggacaggttaggagaaggg

SEQ ID NO: 245659 - DNA, 20 bp, synthetic construct
  source 1..20: mol_type = other DNA
aaggacaggttaggagaagg

SEQ ID NO: 245660 - DNA, 20 bp, synthetic construct
  source 1..20: mol_type = other DNA
aaaggacaggttaggagaag

SEQ ID NO: 245661 - DNA, 20 bp, synthetic construct
  source 1..20: mol_type = other DNA
gaaaggacaggttaggagaa

SEQ ID NO: 245662 - DNA, 20 bp, synthetic construct
  source 1..20: mol_type = other DNA
ggaaaggacaggttaggaga

SEQ ID NO: 245663 - DNA, 20 bp, synthetic construct
  source 1..20: mol_type = other DNA
tggaaaggacaggttaggag

SEQ ID NO: 245664 - DNA, 20 bp, synthetic construct
  source 1..20: mol_type = other DNA
ctggaaaggacaggttagga

SEQ ID NO: 245665 - DNA, 20 bp, synthetic construct
  source 1..20: mol_type = other DNA
tctggaaaggacaggttagg

SEQ ID NO: 245666 - DNA, 20 bp, synthetic construct
  source 1..20: mol_type = other DNA
gtctggaaaggacaggttag

SEQ ID NO: 245667 - DNA, 20 bp, synthetic construct
  source 1..20: mol_type = other DNA
tgtctggaaaggacaggtta

SEQ ID NO: 245668 - DNA, 20 bp, synthetic construct
  source 1..20: mol_type = other DNA
gtgtctggaaaggacaggtt

SEQ ID NO: 245669 - DNA, 20 bp, synthetic construct
  source 1..20: mol_type = other DNA
agtgtctggaaaggacaggt

SEQ ID NO: 245670 - DNA, 20 bp, synthetic construct
  source 1..20: mol_type = other DNA
gagtgtctggaaaggacagg

SEQ ID NO: 245671 - DNA, 20 bp, synthetic construct
  source 1..20: mol_type = other DNA
cgagtgtctggaaaggacag

SEQ ID NO: 245672 - DNA, 20 bp, synthetic construct
  source 1..20: mol_type = other DNA
ccgagtgtctggaaaggaca

SEQ ID NO: 245673 - DNA, 20 bp, synthetic construct
  source 1..20: mol_type = other DNA
gccgagtgtctggaaaggac

SEQ ID NO: 245674 - DNA, 20 bp, synthetic construct
  source 1..20: mol_type = other DNA
tgccgagtgtctggaaagga

SEQ ID NO: 245675 - DNA, 20 bp, synthetic construct
  source 1..20: mol_type = other DNA
atgccgagtgtctggaaagg

SEQ ID NO: 245676 - DNA, 20 bp, synthetic construct
  source 1..20: mol_type = other DNA
gatgccgagtgtctggaaag

SEQ ID NO: 245677 - DNA, 20 bp, synthetic construct
  source 1..20: mol_type = other DNA
agatgccgagtgtctggaaa

SEQ ID NO: 245678 - DNA, 20 bp, synthetic construct
  source 1..20: mol_type = other DNA
tagatgccgagtgtctggaa

SEQ ID NO: 245679 - DNA, 20 bp, synthetic construct
  source 1..20: mol_type = other DNA
ctagatgccgagtgtctgga

SEQ ID NO: 245680 - DNA, 20 bp, synthetic construct
  source 1..20: mol_type = other DNA
cctagatgccgagtgtctgg

SEQ ID NO: 245681 - DNA, 20 bp, synthetic construct
  source 1..20: mol_type = other DNA
acctagatgccgagtgtctg

SEQ ID NO: 245682 - DNA, 20 bp, synthetic construct
  source 1..20: mol_type = other DNA
aacctagatgccgagtgtct

SEQ ID NO: 245683 - DNA, 20 bp, synthetic construct
  source 1..20: mol_type = other DNA
taacctagatgccgagtgtc

SEQ ID NO: 245684 - DNA, 20 bp, synthetic construct
  source 1..20: mol_type = other DNA
ataacctagatgccgagtgt

SEQ ID NO: 245685 - DNA, 20 bp, synthetic construct
  source 1..20: mol_type = other DNA
aataacctagatgccgagtg

SEQ ID NO: 245686 - DNA, 20 bp, synthetic construct
  source 1..20: mol_type = other DNA
taataacctagatgccgagt

SEQ ID NO: 245687 - DNA, 20 bp, synthetic construct
  source 1..20: mol_type = other DNA
ctaataacctagatgccgag

SEQ ID NO: 245688 - DNA, 20 bp, synthetic construct
  source 1..20: mol_type = other DNA
gctaataacctagatgccga

SEQ ID NO: 245689 - DNA, 20 bp, synthetic construct
  source 1..20: mol_type = other DNA
tgctaataacctagatgccg

SEQ ID NO: 245690 - DNA, 20 bp, synthetic construct
  source 1..20: mol_type = other DNA
gtgctaataacctagatgcc

SEQ ID NO: 245691 - DNA, 20 bp, synthetic construct
  source 1..20: mol_type = other DNA
ggtgctaataacctagatgc

SEQ ID NO: 245692 - DNA, 20 bp, synthetic construct
  source 1..20: mol_type = other DNA
aggtgctaataacctagatg

SEQ ID NO: 245693 - DNA, 20 bp, synthetic construct
  source 1..20: mol_type = other DNA
gaggtgctaataacctagat

SEQ ID NO: 245694 - DNA, 20 bp, synthetic construct
  source 1..20: mol_type = other DNA
cgaggtgctaataacctaga

SEQ ID NO: 245695 - DNA, 20 bp, synthetic construct
  source 1..20: mol_type = other DNA
gcgaggtgctaataacctag

SEQ ID NO: 245696 - DNA, 20 bp, synthetic construct
  source 1..20: mol_type = other DNA
tgcgaggtgctaataaccta

SEQ ID NO: 245697 - DNA, 20 bp, synthetic construct
  source 1..20: mol_type = other DNA
atgcgaggtgctaataacct

SEQ ID NO: 245698 - DNA, 20 bp, synthetic construct
  source 1..20: mol_type = other DNA
tatgcgaggtgctaataacc

SEQ ID NO: 245699 - DNA, 20 bp, synthetic construct
  source 1..20: mol_type = other DNA
gtatgcgaggtgctaataac

SEQ ID NO: 245700 - DNA, 20 bp, synthetic construct
  source 1..20: mol_type = other DNA
agtatgcgaggtgctaataa

SEQ ID NO: 245701 - DNA, 20 bp, synthetic construct
  source 1..20: mol_type = other DNA
aagtatgcgaggtgctaata

SEQ ID NO: 245702 - DNA, 20 bp, synthetic construct
  source 1..20: mol_type = other DNA
aaagtatgcgaggtgctaat

SEQ ID NO: 245703 - DNA, 20 bp, synthetic construct
  source 1..20: mol_type = other DNA
gaaagtatgcgaggtgctaa

SEQ ID NO: 245704 - DNA, 20 bp, synthetic construct
  source 1..20: mol_type = other DNA
agaaagtatgcgaggtgcta

SEQ ID NO: 245705 - DNA, 20 bp, synthetic construct
  source 1..20: mol_type = other DNA
cagaaagtatgcgaggtgct

SEQ ID NO: 245706 - DNA, 20 bp, synthetic construct
  source 1..20: mol_type = other DNA
tcagaaagtatgcgaggtgc

SEQ ID NO: 245707 - DNA, 20 bp, synthetic construct
  source 1..20: mol_type = other DNA
gtcagaaagtatgcgaggtg

SEQ ID NO: 245708 - DNA, 20 bp, synthetic construct
  source 1..20: mol_type = other DNA
tgtcagaaagtatgcgaggt

SEQ ID NO: 245709 - DNA, 20 bp, synthetic construct
  source 1..20: mol_type = other DNA
atgtcagaaagtatgcgagg

SEQ ID NO: 245710 - DNA, 20 bp, synthetic construct
  source 1..20: mol_type = other DNA
catgtcagaaagtatgcgag

SEQ ID NO: 245711 - DNA, 20 bp, synthetic construct
  source 1..20: mol_type = other DNA
gcatgtcagaaagtatgcga

SEQ ID NO: 245712 - DNA, 20 bp, synthetic construct
  source 1..20: mol_type = other DNA
agcatgtcagaaagtatgcg

SEQ ID NO: 245713 - DNA, 20 bp, synthetic construct
  source 1..20: mol_type = other DNA
gagcatgtcagaaagtatgc

SEQ ID NO: 245714 - DNA, 20 bp, synthetic construct
  source 1..20: mol_type = other DNA
ggagcatgtcagaaagtatg

SEQ ID NO: 245715 - DNA, 20 bp, synthetic construct
  source 1..20: mol_type = other DNA
aggagcatgtcagaaagtat

SEQ ID NO: 245716 - DNA, 20 bp, synthetic construct
  source 1..20: mol_type = other DNA
gaggagcatgtcagaaagta

SEQ ID NO: 245717 - DNA, 20 bp, synthetic construct
  source 1..20: mol_type = other DNA
tgaggagcatgtcagaaagt

SEQ ID NO: 245718 - DNA, 20 bp, synthetic construct
  source 1..20: mol_type = other DNA
ctgaggagcatgtcagaaag

SEQ ID NO: 245719 - DNA, 20 bp, synthetic construct
  source 1..20: mol_type = other DNA
actgaggagcatgtcagaaa

SEQ ID NO: 245720 - DNA, 20 bp, synthetic construct
  source 1..20: mol_type = other DNA
gactgaggagcatgtcagaa

SEQ ID NO: 245721 - DNA, 20 bp, synthetic construct
  source 1..20: mol_type = other DNA
ggactgaggagcatgtcaga

SEQ ID NO: 245722 - DNA, 20 bp, synthetic construct
  source 1..20: mol_type = other DNA
aggactgaggagcatgtcag

SEQ ID NO: 245723 - DNA, 20 bp, synthetic construct
  source 1..20: mol_type = other DNA
caggactgaggagcatgtca

SEQ ID NO: 245724 - DNA, 20 bp, synthetic construct
  source 1..20: mol_type = other DNA
tcaggactgaggagcatgtc

SEQ ID NO: 245725 - DNA, 20 bp, synthetic construct
  source 1..20: mol_type = other DNA
atcaggactgaggagcatgt

SEQ ID NO: 245726 - DNA, 20 bp, synthetic construct
  source 1..20: mol_type = other DNA
aatcaggactgaggagcatg

SEQ ID NO: 245727 - DNA, 20 bp, synthetic construct
  source 1..20: mol_type = other DNA
aaatcaggactgaggagcat

SEQ ID NO: 245728 - DNA, 20 bp, synthetic construct
  source 1..20: mol_type = other DNA
aaaatcaggactgaggagca

SEQ ID NO: 245729 - DNA, 20 bp, synthetic construct
  source 1..20: mol_type = other DNA
caaaatcaggactgaggagc

SEQ ID NO: 245730 - DNA, 20 bp, synthetic construct
  source 1..20: mol_type = other DNA
tcaaaatcaggactgaggag

SEQ ID NO: 245731 - DNA, 20 bp, synthetic construct
  source 1..20: mol_type = other DNA
gtcaaaatcaggactgagga

SEQ ID NO: 245732 - DNA, 20 bp, synthetic construct
  source 1..20: mol_type = other DNA
ggtcaaaatcaggactgagg

SEQ ID NO: 245733 - DNA, 20 bp, synthetic construct
  source 1..20: mol_type = other DNA
tggtcaaaatcaggactgag

SEQ ID NO: 245734 - DNA, 20 bp, synthetic construct
  source 1..20: mol_type = other DNA
atggtcaaaatcaggactga

SEQ ID NO: 245735 - DNA, 20 bp, synthetic construct
  source 1..20: mol_type = other DNA
gatggtcaaaatcaggactg

SEQ ID NO: 245736 - DNA, 20 bp, synthetic construct
  source 1..20: mol_type = other DNA
agatggtcaaaatcaggact

SEQ ID NO: 245737 - DNA, 20 bp, synthetic construct
  source 1..20: mol_type = other DNA
aagatggtcaaaatcaggac

SEQ ID NO: 245738 - DNA, 20 bp, synthetic construct
  source 1..20: mol_type = other DNA
gaagatggtcaaaatcagga

SEQ ID NO: 245739 - DNA, 20 bp, synthetic construct
  source 1..20: mol_type = other DNA
agaagatggtcaaaatcagg

SEQ ID NO: 245740 - DNA, 20 bp, synthetic construct
  source 1..20: mol_type = other DNA
gagaagatggtcaaaatcag

SEQ ID NO: 245741 - DNA, 20 bp, synthetic construct
  source 1..20: mol_type = other DNA
agagaagatggtcaaaatca

SEQ ID NO: 245742 - DNA, 20 bp, synthetic construct
  source 1..20: mol_type = other DNA
aagagaagatggtcaaaatc

SEQ ID NO: 245743 - DNA, 20 bp, synthetic construct
  source 1..20: mol_type = other DNA
caagagaagatggtcaaaat

SEQ ID NO: 245744 - DNA, 20 bp, synthetic construct
  source 1..20: mol_type = other DNA
gcaagagaagatggtcaaaa

SEQ ID NO: 245745 - DNA, 20 bp, synthetic construct
  source 1..20: mol_type = other DNA
agcaagagaagatggtcaaa

SEQ ID NO: 245746 - DNA, 20 bp, synthetic construct
  source 1..20: mol_type = other DNA
aagcaagagaagatggtcaa

SEQ ID NO: 245747 - DNA, 20 bp, synthetic construct
  source 1..20: mol_type = other DNA
gaagcaagagaagatggtca

SEQ ID NO: 245748 - DNA, 20 bp, synthetic construct
  source 1..20: mol_type = other DNA
ggaagcaagagaagatggtc

SEQ ID NO: 245749 - DNA, 20 bp, synthetic construct
  source 1..20: mol_type = other DNA
gggaagcaagagaagatggt

SEQ ID NO: 245750 - DNA, 20 bp, synthetic construct
  source 1..20: mol_type = other DNA
tgggaagcaagagaagatgg

SEQ ID NO: 245751 - DNA, 20 bp, synthetic construct
  source 1..20: mol_type = other DNA
atgggaagcaagagaagatg

SEQ ID NO: 245752 - DNA, 20 bp, synthetic construct
  source 1..20: mol_type = other DNA
gatgggaagcaagagaagat

SEQ ID NO: 245753 - DNA, 20 bp, synthetic construct
  source 1..20: mol_type = other DNA
agatgggaagcaagagaaga

SEQ ID NO: 245754 - DNA, 20 bp, synthetic construct
  source 1..20: mol_type = other DNA
cagatgggaagcaagagaag

SEQ ID NO: 245755 - DNA, 20 bp, synthetic construct
  source 1..20: mol_type = other DNA
acagatgggaagcaagagaa

SEQ ID NO: 245756 - DNA, 20 bp, synthetic construct
  source 1..20: mol_type = other DNA
cacagatgggaagcaagaga

SEQ ID NO: 245757 - DNA, 20 bp, synthetic construct
  source 1..20: mol_type = other DNA
acacagatgggaagcaagag

SEQ ID NO: 245758 - DNA, 20 bp, synthetic construct
  source 1..20: mol_type = other DNA
gacacagatgggaagcaaga

SEQ ID NO: 245759 - DNA, 20 bp, synthetic construct
  source 1..20: mol_type = other DNA
tgacacagatgggaagcaag

SEQ ID NO: 245760 - DNA, 20 bp, synthetic construct
  source 1..20: mol_type = other DNA
ctgacacagatgggaagcaa

SEQ ID NO: 245761 - DNA, 20 bp, synthetic construct
  source 1..20: mol_type = other DNA
actgacacagatgggaagca

SEQ ID NO: 245762 - DNA, 20 bp, synthetic construct
  source 1..20: mol_type = other DNA
gactgacacagatgggaagc

SEQ ID NO: 245763 - DNA, 20 bp, synthetic construct
  source 1..20: mol_type = other DNA
tgactgacacagatgggaag

SEQ ID NO: 245764 - DNA, 20 bp, synthetic construct
  source 1..20: mol_type = other DNA
ttgactgacacagatgggaa

SEQ ID NO: 245765 - DNA, 20 bp, synthetic construct
  source 1..20: mol_type = other DNA
cttgactgacacagatggga

SEQ ID NO: 245766 - DNA, 20 bp, synthetic construct
  source 1..20: mol_type = other DNA
tcttgactgacacagatggg

SEQ ID NO: 245767 - DNA, 20 bp, synthetic construct
  source 1..20: mol_type = other DNA
gtcttgactgacacagatgg

SEQ ID NO: 245768 - DNA, 20 bp, synthetic construct
  source 1..20: mol_type = other DNA
agtcttgactgacacagatg

SEQ ID NO: 245769 - DNA, 20 bp, synthetic construct
  source 1..20: mol_type = other DNA
cagtcttgactgacacagat

SEQ ID NO: 245770 - DNA, 20 bp, synthetic construct
  source 1..20: mol_type = other DNA
gcagtcttgactgacacaga

SEQ ID NO: 245771 - DNA, 20 bp, synthetic construct
  source 1..20: mol_type = other DNA
tgcagtcttgactgacacag

SEQ ID NO: 245772 - DNA, 20 bp, synthetic construct
  source 1..20: mol_type = other DNA
atgcagtcttgactgacaca

SEQ ID NO: 245773 - DNA, 20 bp, synthetic construct
  source 1..20: mol_type = other DNA
aatgcagtcttgactgacac

SEQ ID NO: 245774 - DNA, 20 bp, synthetic construct
  source 1..20: mol_type = other DNA
aaatgcagtcttgactgaca

SEQ ID NO: 245775 - DNA, 20 bp, synthetic construct
  source 1..20: mol_type = other DNA
caaatgcagtcttgactgac

SEQ ID NO: 245776 - DNA, 20 bp, synthetic construct
  source 1..20: mol_type = other DNA
ccaaatgcagtcttgactga

SEQ ID NO: 245777 - DNA, 20 bp, synthetic construct
  source 1..20: mol_type = other DNA
gccaaatgcagtcttgactg

SEQ ID NO: 245778 - DNA, 20 bp, synthetic construct
  source 1..20: mol_type = other DNA
agccaaatgcagtcttgact

SEQ ID NO: 245779 - DNA, 20 bp, synthetic construct
  source 1..20: mol_type = other DNA
cagccaaatgcagtcttgac

SEQ ID NO: 245780 - DNA, 20 bp, synthetic construct
  source 1..20: mol_type = other DNA
acagccaaatgcagtcttga

SEQ ID NO: 245781 - DNA, 20 bp, synthetic construct
  source 1..20: mol_type = other DNA
tacagccaaatgcagtcttg

SEQ ID NO: 245782 - DNA, 20 bp, synthetic construct
  source 1..20: mol_type = other DNA
ttacagccaaatgcagtctt

SEQ ID NO: 245783 - DNA, 20 bp, synthetic construct
  source 1..20: mol_type = other DNA
cttacagccaaatgcagtct

SEQ ID NO: 245784 - DNA, 20 bp, synthetic construct
  source 1..20: mol_type = other DNA
tcttacagccaaatgcagtc

SEQ ID NO: 245785 - DNA, 20 bp, synthetic construct
  source 1..20: mol_type = other DNA
ttcttacagccaaatgcagt

SEQ ID NO: 245786 - DNA, 20 bp, synthetic construct
  source 1..20: mol_type = other DNA
tttcttacagccaaatgcag

SEQ ID NO: 245787 - DNA, 20 bp, synthetic construct
  source 1..20: mol_type = other DNA
gtttcttacagccaaatgca

SEQ ID NO: 245788 - DNA, 20 bp, synthetic construct
  source 1..20: mol_type = other DNA
tgtttcttacagccaaatgc

SEQ ID NO: 245789 - DNA, 20 bp, synthetic construct
  source 1..20: mol_type = other DNA
ctgtttcttacagccaaatg

SEQ ID NO: 245790 - DNA, 20 bp, synthetic construct
  source 1..20: mol_type = other DNA
tctgtttcttacagccaaat

SEQ ID NO: 245791 - DNA, 20 bp, synthetic construct
  source 1..20: mol_type = other DNA
ttctgtttcttacagccaaa

SEQ ID NO: 245792 - DNA, 20 bp, synthetic construct
  source 1..20: mol_type = other DNA
tttctgtttcttacagccaa

SEQ ID NO: 245793 - DNA, 20 bp, synthetic construct
  source 1..20: mol_type = other DNA
gtttctgtttcttacagcca

SEQ ID NO: 245794 - DNA, 20 bp, synthetic construct
  source 1..20: mol_type = other DNA
ggtttctgtttcttacagcc

SEQ ID NO: 245795 - DNA, 20 bp, synthetic construct
  source 1..20: mol_type = other DNA
gggtttctgtttcttacagc

SEQ ID NO: 245796 - DNA, 20 bp, synthetic construct
  source 1..20: mol_type = other DNA
ggggtttctgtttcttacag

SEQ ID NO: 245797 - DNA, 20 bp, synthetic construct
  source 1..20: mol_type = other DNA
tggggtttctgtttcttaca

SEQ ID NO: 245798 - DNA, 20 bp, synthetic construct
  source 1..20: mol_type = other DNA
ttggggtttctgtttcttac

SEQ ID NO: 245799 - DNA, 20 bp, synthetic construct
  source 1..20: mol_type = other DNA
gttggggtttctgtttctta

SEQ ID NO: 245800 - DNA, 20 bp, synthetic construct
  source 1..20: mol_type = other DNA
agttggggtttctgtttctt

SEQ ID NO: 245801 - DNA, 20 bp, synthetic construct
  source 1..20: mol_type = other DNA
tagttggggtttctgtttct

SEQ ID NO: 245802 - DNA, 20 bp, synthetic construct
  source 1..20: mol_type = other DNA
ttagttggggtttctgtttc

SEQ ID NO: 245803 - DNA, 20 bp, synthetic construct
  source 1..20: mol_type = other DNA
gttagttggggtttctgttt

SEQ ID NO: 245804 - DNA, 20 bp, synthetic construct
  source 1..20: mol_type = other DNA
agttagttggggtttctgtt

SEQ ID NO: 245805 - DNA, 20 bp, synthetic construct
  source 1..20: mol_type = other DNA
cagttagttggggtttctgt

SEQ ID NO: 245806 - DNA, 20 bp, synthetic construct
  source 1..20: mol_type = other DNA
acagttagttggggtttctg

SEQ ID NO: 245807 - DNA, 20 bp, synthetic construct
  source 1..20: mol_type = other DNA
cacagttagttggggtttct

SEQ ID NO: 245808 - DNA, 20 bp, synthetic construct
  source 1..20: mol_type = other DNA
ccacagttagttggggtttc

SEQ ID NO: 245809 - DNA, 20 bp, synthetic construct
  source 1..20: mol_type = other DNA
gccacagttagttggggttt

SEQ ID NO: 245810 - DNA, 20 bp, synthetic construct
  source 1..20: mol_type = other DNA
tgccacagttagttggggtt

SEQ ID NO: 245811 - DNA, 20 bp, synthetic construct
  source 1..20: mol_type = other DNA
atgccacagttagttggggt

SEQ ID NO: 245812 - DNA, 20 bp, synthetic construct
  source 1..20: mol_type = other DNA
aatgccacagttagttgggg

SEQ ID NO: 245813 - DNA, 20 bp, synthetic construct
  source 1..20: mol_type = other DNA
aaatgccacagttagttggg

SEQ ID NO: 245814 - DNA, 20 bp, synthetic construct
  source 1..20: mol_type = other DNA
taaatgccacagttagttgg

SEQ ID NO: 245815 - DNA, 20 bp, synthetic construct
  source 1..20: mol_type = other DNA
gtaaatgccacagttagttg

SEQ ID NO: 245816 - DNA, 20 bp, synthetic construct
  source 1..20: mol_type = other DNA
tgtaaatgccacagttagtt

SEQ ID NO: 245817 - DNA, 20 bp, synthetic construct
  source 1..20: mol_type = other DNA
atgtaaatgccacagttagt

SEQ ID NO: 245818 - DNA, 20 bp, synthetic construct
  source 1..20: mol_type = other DNA
catgtaaatgccacagttag

SEQ ID NO: 245819 - DNA, 20 bp, synthetic construct
  source 1..20: mol_type = other DNA
tcatgtaaatgccacagtta

SEQ ID NO: 245820 - DNA, 20 bp, synthetic construct
  source 1..20: mol_type = other DNA
ttcatgtaaatgccacagtt

SEQ ID NO: 245821 - DNA, 20 bp, synthetic construct
  source 1..20: mol_type = other DNA
cttcatgtaaatgccacagt

SEQ ID NO: 245822 - DNA, 20 bp, synthetic construct
  source 1..20: mol_type = other DNA
tcttcatgtaaatgccacag

SEQ ID NO: 245823 - DNA, 20 bp, synthetic construct
  source 1..20: mol_type = other DNA
ctcttcatgtaaatgccaca

SEQ ID NO: 245824 - DNA, 20 bp, synthetic construct
  source 1..20: mol_type = other DNA
cctcttcatgtaaatgccac

SEQ ID NO: 245825 - DNA, 20 bp, synthetic construct
  source 1..20: mol_type = other DNA
acctcttcatgtaaatgcca

SEQ ID NO: 245826 - DNA, 20 bp, synthetic construct
  source 1..20: mol_type = other DNA
aacctcttcatgtaaatgcc

SEQ ID NO: 245827 - DNA, 20 bp, synthetic construct
  source 1..20: mol_type = other DNA
aaacctcttcatgtaaatgc

SEQ ID NO: 245828 - DNA, 20 bp, synthetic construct
  source 1..20: mol_type = other DNA
taaacctcttcatgtaaatg

SEQ ID NO: 245829 - DNA, 20 bp, synthetic construct
  source 1..20: mol_type = other DNA
gtaaacctcttcatgtaaat

SEQ ID NO: 245830 - DNA, 20 bp, synthetic construct
  source 1..20: mol_type = other DNA
agtaaacctcttcatgtaaa

SEQ ID NO: 245831 - DNA, 20 bp, synthetic construct
  source 1..20: mol_type = other DNA
aagtaaacctcttcatgtaa

SEQ ID NO: 245832 - DNA, 20 bp, synthetic construct
  source 1..20: mol_type = other DNA
aaagtaaacctcttcatgta

SEQ ID NO: 245833 - DNA, 20 bp, synthetic construct
  source 1..20: mol_type = other DNA
aaaagtaaacctcttcatgt

SEQ ID NO: 245834 - DNA, 20 bp, synthetic construct
  source 1..20: mol_type = other DNA
gaaaagtaaacctcttcatg

SEQ ID NO: 245835 - DNA, 20 bp, synthetic construct
  source 1..20: mol_type = other DNA
agaaaagtaaacctcttcat

SEQ ID NO: 245836 - DNA, 20 bp, synthetic construct
  source 1..20: mol_type = other DNA
gagaaaagtaaacctcttca

SEQ ID NO: 245837 - DNA, 20 bp, synthetic construct
  source 1..20: mol_type = other DNA
tgagaaaagtaaacctcttc

SEQ ID NO: 245838 - DNA, 20 bp, synthetic construct
  source 1..20: mol_type = other DNA
gtgagaaaagtaaacctctt

SEQ ID NO: 245839 - DNA, 20 bp, synthetic construct
  source 1..20: mol_type = other DNA
tgtgagaaaagtaaacctct

SEQ ID NO: 245840 - DNA, 20 bp, synthetic construct
  source 1..20: mol_type = other DNA
atgtgagaaaagtaaacctc

SEQ ID NO: 245841 - DNA, 20 bp, synthetic construct
  source 1..20: mol_type = other DNA
tatgtgagaaaagtaaacct

SEQ ID NO: 245842 - DNA, 20 bp, synthetic construct
  source 1..20: mol_type = other DNA
ttatgtgagaaaagtaaacc

SEQ ID NO: 245843 - DNA, 20 bp, synthetic construct
  source 1..20: mol_type = other DNA
attatgtgagaaaagtaaac

SEQ ID NO: 245844 - DNA, 20 bp, synthetic construct
  source 1..20: mol_type = other DNA
gattatgtgagaaaagtaaa

SEQ ID NO: 245845 - DNA, 20 bp, synthetic construct
  source 1..20: mol_type = other DNA
tgattatgtgagaaaagtaa

SEQ ID NO: 245846 - DNA, 20 bp, synthetic construct
  source 1..20: mol_type = other DNA
ctgattatgtgagaaaagta

SEQ ID NO: 245847 - DNA, 20 bp, synthetic construct
  source 1..20: mol_type = other DNA
tctgattatgtgagaaaagt

SEQ ID NO: 245848 - DNA, 20 bp, synthetic construct
  source 1..20: mol_type = other DNA
atctgattatgtgagaaaag

SEQ ID NO: 245849 - DNA, 20 bp, synthetic construct
  source 1..20: mol_type = other DNA
catctgattatgtgagaaaa

SEQ ID NO: 245850 - DNA, 20 bp, synthetic construct
  source 1..20: mol_type = other DNA
acatctgattatgtgagaaa

SEQ ID NO: 245851 - DNA, 20 bp, synthetic construct
  source 1..20: mol_type = other DNA
gacatctgattatgtgagaa

SEQ ID NO: 245852 - DNA, 20 bp, synthetic construct
  source 1..20: mol_type = other DNA
agacatctgattatgtgaga

SEQ ID NO: 245853 - DNA, 20 bp, synthetic construct
  source 1..20: mol_type = other DNA
tagacatctgattatgtgag

SEQ ID NO: 245854 - DNA, 20 bp, synthetic construct
  source 1..20: mol_type = other DNA
ctagacatctgattatgtga

SEQ ID NO: 245855 - DNA, 20 bp, synthetic construct
  source 1..20: mol_type = other DNA
tctagacatctgattatgtg

SEQ ID NO: 245856 - DNA, 20 bp, synthetic construct
  source 1..20: mol_type = other DNA
gtctagacatctgattatgt

SEQ ID NO: 245857 - DNA, 20 bp, synthetic construct
  source 1..20: mol_type = other DNA
agtctagacatctgattatg

SEQ ID NO: 245858 - DNA, 20 bp, synthetic construct
  source 1..20: mol_type = other DNA
aagtctagacatctgattat

SEQ ID NO: 245859 - DNA, 20 bp, synthetic construct
  source 1..20: mol_type = other DNA
caagtctagacatctgatta

SEQ ID NO: 245860 - DNA, 20 bp, synthetic construct
  source 1..20: mol_type = other DNA
ccaagtctagacatctgatt

SEQ ID NO: 245861 - DNA, 20 bp, synthetic construct
  source 1..20: mol_type = other DNA
gccaagtctagacatctgat

SEQ ID NO: 245862 - DNA, 20 bp, synthetic construct
  source 1..20: mol_type = other DNA
ggccaagtctagacatctga

SEQ ID NO: 245863 - DNA, 20 bp, synthetic construct
  source 1..20: mol_type = other DNA
tggccaagtctagacatctg

SEQ ID NO: 245864 - DNA, 20 bp, synthetic construct
  source 1..20: mol_type = other DNA
ctggccaagtctagacatct

SEQ ID NO: 245865 - DNA, 20 bp, synthetic construct
  source 1..20: mol_type = other DNA
gctggccaagtctagacatc

SEQ ID NO: 245866 - DNA, 20 bp, synthetic construct
  source 1..20: mol_type = other DNA
tgctggccaagtctagacat

SEQ ID NO: 245867 - DNA, 20 bp, synthetic construct
  source 1..20: mol_type = other DNA
gtgctggccaagtctagaca

SEQ ID NO: 245868 - DNA, 20 bp, synthetic construct
  source 1..20: mol_type = other DNA
ggtgctggccaagtctagac

SEQ ID NO: 245869 - DNA, 20 bp, synthetic construct
  source 1..20: mol_type = other DNA
aggtgctggccaagtctaga

SEQ ID NO: 245870 - DNA, 20 bp, synthetic construct
  source 1..20: mol_type = other DNA
gaggtgctggccaagtctag

SEQ ID NO: 245871 - DNA, 20 bp, synthetic construct
  source 1..20: mol_type = other DNA
tgaggtgctggccaagtcta

SEQ ID NO: 245872 - DNA, 20 bp, synthetic construct
  source 1..20: mol_type = other DNA
ttgaggtgctggccaagtct

SEQ ID NO: 245873 - DNA, 20 bp, synthetic construct
  source 1..20: mol_type = other DNA
cttgaggtgctggccaagtc

SEQ ID NO: 245874 - DNA, 20 bp, synthetic construct
  source 1..20: mol_type = other DNA
ccttgaggtgctggccaagt

SEQ ID NO: 245875 - DNA, 20 bp, synthetic construct
  source 1..20: mol_type = other DNA
cccttgaggtgctggccaag

SEQ ID NO: 245876 - DNA, 20 bp, synthetic construct
  source 1..20: mol_type = other DNA
acccttgaggtgctggccaa

SEQ ID NO: 245877 - DNA, 20 bp, synthetic construct
  source 1..20: mol_type = other DNA
gacccttgaggtgctggcca

SEQ ID NO: 245878 - DNA, 20 bp, synthetic construct
  source 1..20: mol_type = other DNA
tgacccttgaggtgctggcc

SEQ ID NO: 245879 - DNA, 20 bp, synthetic construct
  source 1..20: mol_type = other DNA
atgacccttgaggtgctggc

SEQ ID NO: 245880 - DNA, 20 bp, synthetic construct
  source 1..20: mol_type = other DNA
aatgacccttgaggtgctgg

SEQ ID NO: 245881 - DNA, 20 bp, synthetic construct
  source 1..20: mol_type = other DNA
caatgacccttgaggtgctg

SEQ ID NO: 245882 - DNA, 20 bp, synthetic construct
  source 1..20: mol_type = other DNA
tcaatgacccttgaggtgct

SEQ ID NO: 245883 - DNA, 20 bp, synthetic construct
  source 1..20: mol_type = other DNA
atcaatgacccttgaggtgc

SEQ ID NO: 245884 - DNA, 20 bp, synthetic construct
  source 1..20: mol_type = other DNA
catcaatgacccttgaggtg

SEQ ID NO: 245885 - DNA, 20 bp, synthetic construct
  source 1..20: mol_type = other DNA
gcatcaatgacccttgaggt

SEQ ID NO: 245886 - DNA, 20 bp, synthetic construct
  source 1..20: mol_type = other DNA
agcatcaatgacccttgagg

SEQ ID NO: 245887 - DNA, 20 bp, synthetic construct
  source 1..20: mol_type = other DNA
gagcatcaatgacccttgag

SEQ ID NO: 245888 - DNA, 20 bp, synthetic construct
  source 1..20: mol_type = other DNA
agagcatcaatgacccttga

SEQ ID NO: 245889 - DNA, 20 bp, synthetic construct
  source 1..20: mol_type = other DNA
gagagcatcaatgacccttg

SEQ ID NO: 245890 - DNA, 20 bp, synthetic construct
  source 1..20: mol_type = other DNA
ggagagcatcaatgaccctt

SEQ ID NO: 245891 - DNA, 20 bp, synthetic construct
  source 1..20: mol_type = other DNA
aggagagcatcaatgaccct

SEQ ID NO: 245892 - DNA, 20 bp, synthetic construct
  source 1..20: mol_type = other DNA
caggagagcatcaatgaccc

SEQ ID NO: 245893 - DNA, 20 bp, synthetic construct
  source 1..20: mol_type = other DNA
acaggagagcatcaatgacc

SEQ ID NO: 245894 - DNA, 20 bp, synthetic construct
  source 1..20: mol_type = other DNA
gacaggagagcatcaatgac

SEQ ID NO: 245895 - DNA, 20 bp, synthetic construct
  source 1..20: mol_type = other DNA
agacaggagagcatcaatga

SEQ ID NO: 245896 - DNA, 20 bp, synthetic construct
  source 1..20: mol_type = other DNA
aagacaggagagcatcaatg

SEQ ID NO: 245897 - DNA, 20 bp, synthetic construct
  source 1..20: mol_type = other DNA
aaagacaggagagcatcaat

SEQ ID NO: 245898 - DNA, 20 bp, synthetic construct
  source 1..20: mol_type = other DNA
taaagacaggagagcatcaa

SEQ ID NO: 245899 - DNA, 20 bp, synthetic construct
  source 1..20: mol_type = other DNA
ataaagacaggagagcatca

SEQ ID NO: 245900 - DNA, 20 bp, synthetic construct
  source 1..20: mol_type = other DNA
aataaagacaggagagcatc

SEQ ID NO: 245901 - DNA, 20 bp, synthetic construct
  source 1..20: mol_type = other DNA
aaataaagacaggagagcat

SEQ ID NO: 245902 - DNA, 20 bp, synthetic construct
  source 1..20: mol_type = other DNA
aaaataaagacaggagagca

SEQ ID NO: 245903 - DNA, 20 bp, synthetic construct
  source 1..20: mol_type = other DNA
gaaaataaagacaggagagc

SEQ ID NO: 245904 - DNA, 20 bp, synthetic construct
  source 1..20: mol_type = other DNA
agaaaataaagacaggagag

SEQ ID NO: 245905 - DNA, 20 bp, synthetic construct
  source 1..20: mol_type = other DNA
cagaaaataaagacaggaga

SEQ ID NO: 245906 - DNA, 20 bp, synthetic construct
  source 1..20: mol_type = other DNA
acagaaaataaagacaggag

SEQ ID NO: 245907 - DNA, 20 bp, synthetic construct
  source 1..20: mol_type = other DNA
gacagaaaataaagacagga

SEQ ID NO: 245908 - DNA, 20 bp, synthetic construct
  source 1..20: mol_type = other DNA
tgacagaaaataaagacagg

SEQ ID NO: 245909 - DNA, 20 bp, synthetic construct
  source 1..20: mol_type = other DNA
atgacagaaaataaagacag

SEQ ID NO: 245910 - DNA, 20 bp, synthetic construct
  source 1..20: mol_type = other DNA
gatgacagaaaataaagaca

SEQ ID NO: 245911 - DNA, 20 bp, synthetic construct
  source 1..20: mol_type = other DNA
agatgacagaaaataaagac

SEQ ID NO: 245912 - DNA, 20 bp, synthetic construct
  source 1..20: mol_type = other DNA
aagatgacagaaaataaaga

SEQ ID NO: 245913 - DNA, 20 bp, synthetic construct
  source 1..20: mol_type = other DNA
aaagatgacagaaaataaag

SEQ ID NO: 245914 - DNA, 20 bp, synthetic construct
  source 1..20: mol_type = other DNA
taaagatgacagaaaataaa

SEQ ID NO: 245915 - DNA, 20 bp, synthetic construct
  source 1..20: mol_type = other DNA
ctaaagatgacagaaaataa

SEQ ID NO: 245916 - DNA, 20 bp, synthetic construct
  source 1..20: mol_type = other DNA
actaaagatgacagaaaata

SEQ ID NO: 245917 - DNA, 20 bp, synthetic construct
  source 1..20: mol_type = other DNA
cactaaagatgacagaaaat

SEQ ID NO: 245918 - DNA, 20 bp, synthetic construct
  source 1..20: mol_type = other DNA
ccactaaagatgacagaaaa

SEQ ID NO: 245919 - DNA, 20 bp, synthetic construct
  source 1..20: mol_type = other DNA
accactaaagatgacagaaa

SEQ ID NO: 245920 - DNA, 20 bp, synthetic construct
  source 1..20: mol_type = other DNA
aaccactaaagatgacagaa

SEQ ID NO: 245921 - DNA, 20 bp, synthetic construct
  source 1..20: mol_type = other DNA
caaccactaaagatgacaga

SEQ ID NO: 245922 - DNA, 20 bp, synthetic construct
  source 1..20: mol_type = other DNA
ccaaccactaaagatgacag

SEQ ID NO: 245923 - DNA, 20 bp, synthetic construct
  source 1..20: mol_type = other DNA
tccaaccactaaagatgaca

SEQ ID NO: 245924 - DNA, 20 bp, synthetic construct
  source 1..20: mol_type = other DNA
atccaaccactaaagatgac

SEQ ID NO: 245925 - DNA, 20 bp, synthetic construct
  source 1..20: mol_type = other DNA
aatccaaccactaaagatga

SEQ ID NO: 245926 - DNA, 20 bp, synthetic construct
  source 1..20: mol_type = other DNA
caatccaaccactaaagatg

SEQ ID NO: 245927 - DNA, 20 bp, synthetic construct
  source 1..20: mol_type = other DNA
acaatccaaccactaaagat

SEQ ID NO: 245928 - DNA, 20 bp, synthetic construct
  source 1..20: mol_type = other DNA
aacaatccaaccactaaaga

SEQ ID NO: 245929 - DNA, 20 bp, synthetic construct
  source 1..20: mol_type = other DNA
caacaatccaaccactaaag

SEQ ID NO: 245930 - DNA, 20 bp, synthetic construct
  source 1..20: mol_type = other DNA
gcaacaatccaaccactaaa

SEQ ID NO: 245931 - DNA, 20 bp, synthetic construct
  source 1..20: mol_type = other DNA
ggcaacaatccaaccactaa

SEQ ID NO: 245932 - DNA, 20 bp, synthetic construct
  source 1..20: mol_type = other DNA
aggcaacaatccaaccacta

SEQ ID NO: 245933 - DNA, 20 bp, synthetic construct
  source 1..20: mol_type = other DNA
gaggcaacaatccaaccact

SEQ ID NO: 245934 - DNA, 20 bp, synthetic construct
  source 1..20: mol_type = other DNA
tgaggcaacaatccaaccac

SEQ ID NO: 245935 - DNA, 20 bp, synthetic construct
  source 1..20: mol_type = other DNA
atgaggcaacaatccaacca

SEQ ID NO: 245936 - DNA, 20 bp, synthetic construct
  source 1..20: mol_type = other DNA
catgaggcaacaatccaacc

SEQ ID NO: 245937 - DNA, 20 bp, synthetic construct
  source 1..20: mol_type = other DNA
ccatgaggcaacaatccaac

SEQ ID NO: 245938 - DNA, 20 bp, synthetic construct
  source 1..20: mol_type = other DNA
accatgaggcaacaatccaa

SEQ ID NO: 245939 - DNA, 20 bp, synthetic construct
  source 1..20: mol_type = other DNA
aaccatgaggcaacaatcca

SEQ ID NO: 245940 - DNA, 20 bp, synthetic construct
  source 1..20: mol_type = other DNA
taaccatgaggcaacaatcc

SEQ ID NO: 245941 - DNA, 20 bp, synthetic construct
  source 1..20: mol_type = other DNA
gtaaccatgaggcaacaatc

SEQ ID NO: 245942 - DNA, 20 bp, synthetic construct
  source 1..20: mol_type = other DNA
tgtaaccatgaggcaacaat

SEQ ID NO: 245943 - DNA, 20 bp, synthetic construct
  source 1..20: mol_type = other DNA
ttgtaaccatgaggcaacaa

SEQ ID NO: 245944 - DNA, 20 bp, synthetic construct
  source 1..20: mol_type = other DNA
tttgtaaccatgaggcaaca

SEQ ID NO: 245945 - DNA, 20 bp, synthetic construct
  source 1..20: mol_type = other DNA
ctttgtaaccatgaggcaac

SEQ ID NO: 245946 - DNA, 20 bp, synthetic construct
  source 1..20: mol_type = other DNA
actttgtaaccatgaggcaa

SEQ ID NO: 245947 - DNA, 20 bp, synthetic construct
  source 1..20: mol_type = other DNA
cactttgtaaccatgaggca

SEQ ID NO: 245948 - DNA, 20 bp, synthetic construct
  source 1..20: mol_type = other DNA
ccactttgtaaccatgaggc

SEQ ID NO: 245949 - DNA, 20 bp, synthetic construct
  source 1..20: mol_type = other DNA
gccactttgtaaccatgagg

SEQ ID NO: 245950 - DNA, 20 bp, synthetic construct
  source 1..20: mol_type = other DNA
agccactttgtaaccatgag

SEQ ID NO: 245951 - DNA, 20 bp, synthetic construct
  source 1..20: mol_type = other DNA
cagccactttgtaaccatga

SEQ ID NO: 245952 - DNA, 20 bp, synthetic construct
  source 1..20: mol_type = other DNA
gcagccactttgtaaccatg

SEQ ID NO: 245953 - DNA, 20 bp, synthetic construct
  source 1..20: mol_type = other DNA
agcagccactttgtaaccat

SEQ ID NO: 245954 - DNA, 20 bp, synthetic construct
  source 1..20: mol_type = other DNA
cagcagccactttgtaacca

SEQ ID NO: 245955 - DNA, 20 bp, synthetic construct
  source 1..20: mol_type = other DNA
gcagcagccactttgtaacc

SEQ ID NO: 245956 - DNA, 20 bp, synthetic construct
  source 1..20: mol_type = other DNA
tgcagcagccactttgtaac

SEQ ID NO: 245957 - DNA, 20 bp, synthetic construct
  source 1..20: mol_type = other DNA
gtgcagcagccactttgtaa

SEQ ID NO: 245958 - DNA, 20 bp, synthetic construct
  source 1..20: mol_type = other DNA
agtgcagcagccactttgta

SEQ ID NO: 245959 - DNA, 20 bp, synthetic construct
  source 1..20: mol_type = other DNA
aagtgcagcagccactttgt

SEQ ID NO: 245960 - DNA, 20 bp, synthetic construct
  source 1..20: mol_type = other DNA
gaagtgcagcagccactttg

SEQ ID NO: 245961 - DNA, 20 bp, synthetic construct
  source 1..20: mol_type = other DNA
ggaagtgcagcagccacttt

SEQ ID NO: 245962 - DNA, 20 bp, synthetic construct
  source 1..20: mol_type = other DNA
tggaagtgcagcagccactt

SEQ ID NO: 245963 - DNA, 20 bp, synthetic construct
  source 1..20: mol_type = other DNA
ctggaagtgcagcagccact

SEQ ID NO: 245964 - DNA, 20 bp, synthetic construct
  source 1..20: mol_type = other DNA
cctggaagtgcagcagccac

SEQ ID NO: 245965 - DNA, 20 bp, synthetic construct
  source 1..20: mol_type = other DNA
gcctggaagtgcagcagcca

SEQ ID NO: 245966 - DNA, 20 bp, synthetic construct
  source 1..20: mol_type = other DNA
tgcctggaagtgcagcagcc

SEQ ID NO: 245967 - DNA, 20 bp, synthetic construct
  source 1..20: mol_type = other DNA
atgcctggaagtgcagcagc

SEQ ID NO: 245968 - DNA, 20 bp, synthetic construct
  source 1..20: mol_type = other DNA
gatgcctggaagtgcagcag

SEQ ID NO: 245969 - DNA, 20 bp, synthetic construct
  source 1..20: mol_type = other DNA
tgatgcctggaagtgcagca

SEQ ID NO: 245970 - DNA, 20 bp, synthetic construct
  source 1..20: mol_type = other DNA
gtgatgcctggaagtgcagc

SEQ ID NO: 245971 - DNA, 20 bp, synthetic construct
  source 1..20: mol_type = other DNA
tgtgatgcctggaagtgcag

SEQ ID NO: 245972 - DNA, 20 bp, synthetic construct
  source 1..20: mol_type = other DNA
atgtgatgcctggaagtgca

SEQ ID NO: 245973 - DNA, 20 bp, synthetic construct
  source 1..20: mol_type = other DNA
gatgtgatgcctggaagtgc

SEQ ID NO: 245974 - DNA, 20 bp, synthetic construct
  source 1..20: mol_type = other DNA
agatgtgatgcctggaagtg

SEQ ID NO: 245975 - DNA, 20 bp, synthetic construct
  source 1..20: mol_type = other DNA
cagatgtgatgcctggaagt

SEQ ID NO: 245976 - DNA, 20 bp, synthetic construct
  source 1..20: mol_type = other DNA
gcagatgtgatgcctggaag

SEQ ID NO: 245977 - DNA, 20 bp, synthetic construct
  source 1..20: mol_type = other DNA
ggcagatgtgatgcctggaa

SEQ ID NO: 245978 - DNA, 20 bp, synthetic construct
  source 1..20: mol_type = other DNA
aggcagatgtgatgcctgga

SEQ ID NO: 245979 - DNA, 20 bp, synthetic construct
  source 1..20: mol_type = other DNA
aaggcagatgtgatgcctgg

SEQ ID NO: 245980 - DNA, 20 bp, synthetic construct
  source 1..20: mol_type = other DNA
aaaggcagatgtgatgcctg

SEQ ID NO: 245981 - DNA, 20 bp, synthetic construct
  source 1..20: mol_type = other DNA
caaaggcagatgtgatgcct

SEQ ID NO: 245982 - DNA, 20 bp, synthetic construct
  source 1..20: mol_type = other DNA
tcaaaggcagatgtgatgcc

SEQ ID NO: 245983 - DNA, 20 bp, synthetic construct
  source 1..20: mol_type = other DNA
ttcaaaggcagatgtgatgc

SEQ ID NO: 245984 - DNA, 20 bp, synthetic construct
  source 1..20: mol_type = other DNA
cttcaaaggcagatgtgatg

SEQ ID NO: 245985 - DNA, 20 bp, synthetic construct
  source 1..20: mol_type = other DNA
gcttcaaaggcagatgtgat

SEQ ID NO: 245986 - DNA, 20 bp, synthetic construct
  source 1..20: mol_type = other DNA
tgcttcaaaggcagatgtga

SEQ ID NO: 245987 - DNA, 20 bp, synthetic construct
  source 1..20: mol_type = other DNA
ctgcttcaaaggcagatgtg

SEQ ID NO: 245988 - DNA, 20 bp, synthetic construct
  source 1..20: mol_type = other DNA
cctgcttcaaaggcagatgt

SEQ ID NO: 245989 - DNA, 20 bp, synthetic construct
  source 1..20: mol_type = other DNA
tcctgcttcaaaggcagatg

SEQ ID NO: 245990 - DNA, 20 bp, synthetic construct
  source 1..20: mol_type = other DNA
ttcctgcttcaaaggcagat

SEQ ID NO: 245991 - DNA, 20 bp, synthetic construct
  source 1..20: mol_type = other DNA
gttcctgcttcaaaggcaga

SEQ ID NO: 245992 - DNA, 20 bp, synthetic construct
  source 1..20: mol_type = other DNA
tgttcctgcttcaaaggcag

SEQ ID NO: 245993 - DNA, 20 bp, synthetic construct
  source 1..20: mol_type = other DNA
ttgttcctgcttcaaaggca

SEQ ID NO: 245994 - DNA, 20 bp, synthetic construct
  source 1..20: mol_type = other DNA
cttgttcctgcttcaaaggc

SEQ ID NO: 245995 - DNA, 20 bp, synthetic construct
  source 1..20: mol_type = other DNA
acttgttcctgcttcaaagg

SEQ ID NO: 245996 - DNA, 20 bp, synthetic construct
  source 1..20: mol_type = other DNA
aacttgttcctgcttcaaag

SEQ ID NO: 245997 - DNA, 20 bp, synthetic construct
  source 1..20: mol_type = other DNA
caacttgttcctgcttcaaa

SEQ ID NO: 245998 - DNA, 20 bp, synthetic construct
  source 1..20: mol_type = other DNA
gcaacttgttcctgcttcaa

SEQ ID NO: 245999 - DNA, 20 bp, synthetic construct
  source 1..20: mol_type = other DNA
tgcaacttgttcctgcttca

SEQ ID NO: 246000 - DNA, 20 bp, synthetic construct
  source 1..20: mol_type = other DNA
ttgcaacttgttcctgcttc

SEQ ID NO: 246001 - DNA, 20 bp, synthetic construct
  source 1..20: mol_type = other DNA
tttgcaacttgttcctgctt

SEQ ID NO: 246002 - DNA, 20 bp, synthetic construct
  source 1..20: mol_type = other DNA
ctttgcaacttgttcctgct

SEQ ID NO: 246003 - DNA, 20 bp, synthetic construct
  source 1..20: mol_type = other DNA
actttgcaacttgttcctgc

SEQ ID NO: 246004 - DNA, 20 bp, synthetic construct
  source 1..20: mol_type = other DNA
tactttgcaacttgttcctg

SEQ ID NO: 246005 - DNA, 20 bp, synthetic construct
  source 1..20: mol_type = other DNA
ttactttgcaacttgttcct

SEQ ID NO: 246006 - DNA, 20 bp, synthetic construct
  source 1..20: mol_type = other DNA
tttactttgcaacttgttcc

SEQ ID NO: 246007 - DNA, 20 bp, synthetic construct
  source 1..20: mol_type = other DNA
ctttactttgcaacttgttc

SEQ ID NO: 246008 - DNA, 20 bp, synthetic construct
  source 1..20: mol_type = other DNA
actttactttgcaacttgtt

SEQ ID NO: 246009 - DNA, 20 bp, synthetic construct
  source 1..20: mol_type = other DNA
cactttactttgcaacttgt

SEQ ID NO: 246010 - DNA, 20 bp, synthetic construct
  source 1..20: mol_type = other DNA
ccactttactttgcaacttg

SEQ ID NO: 246011 - DNA, 20 bp, synthetic construct
  source 1..20: mol_type = other DNA
gccactttactttgcaactt

SEQ ID NO: 246012 - DNA, 20 bp, synthetic construct
  source 1..20: mol_type = other DNA
ggccactttactttgcaact

SEQ ID NO: 246013 - DNA, 20 bp, synthetic construct
  source 1..20: mol_type = other DNA
tggccactttactttgcaac

SEQ ID NO: 246014 - DNA, 20 bp, synthetic construct
  source 1..20: mol_type = other DNA
ttggccactttactttgcaa

SEQ ID NO: 246015 - DNA, 20 bp, synthetic construct
  source 1..20: mol_type = other DNA
tttggccactttactttgca

SEQ ID NO: 246016 - DNA, 20 bp, synthetic construct
  source 1..20: mol_type = other DNA
ttttggccactttactttgc

SEQ ID NO: 246017 - DNA, 20 bp, synthetic construct
  source 1..20: mol_type = other DNA
cttttggccactttactttg

SEQ ID NO: 246018 - DNA, 20 bp, synthetic construct
  source 1..20: mol_type = other DNA
ccttttggccactttacttt

SEQ ID NO: 246019 - DNA, 20 bp, synthetic construct
  source 1..20: mol_type = other DNA
cccttttggccactttactt

SEQ ID NO: 246020 - DNA, 20 bp, synthetic construct
  source 1..20: mol_type = other DNA
gcccttttggccactttact

SEQ ID NO: 246021 - DNA, 20 bp, synthetic construct
  source 1..20: mol_type = other DNA
ggcccttttggccactttac

SEQ ID NO: 246022 - DNA, 20 bp, synthetic construct
  source 1..20: mol_type = other DNA
gggcccttttggccacttta

SEQ ID NO: 246023 - DNA, 20 bp, synthetic construct
  source 1..20: mol_type = other DNA
agggcccttttggccacttt

SEQ ID NO: 246024 - DNA, 20 bp, synthetic construct
  source 1..20: mol_type = other DNA
cagggcccttttggccactt

SEQ ID NO: 246025 - DNA, 20 bp, synthetic construct
  source 1..20: mol_type = other DNA
tcagggcccttttggccact

SEQ ID NO: 246026 - DNA, 20 bp, synthetic construct
  source 1..20: mol_type = other DNA
ttcagggcccttttggccac

SEQ ID NO: 246027 - DNA, 20 bp, synthetic construct
  source 1..20: mol_type = other DNA
tttcagggcccttttggcca

SEQ ID NO: 246028 - DNA, 20 bp, synthetic construct
  source 1..20: mol_type = other DNA
gtttcagggcccttttggcc

SEQ ID NO: 246029 - DNA, 20 bp, synthetic construct
  source 1..20: mol_type = other DNA
agtttcagggcccttttggc

SEQ ID NO: 246030 - DNA, 20 bp, synthetic construct
  source 1..20: mol_type = other DNA
tagtttcagggcccttttgg

SEQ ID NO: 246031 - DNA, 20 bp, synthetic construct
  source 1..20: mol_type = other DNA
ttagtttcagggcccttttg

SEQ ID NO: 246032 - DNA, 20 bp, synthetic construct
  source 1..20: mol_type = other DNA
tttagtttcagggccctttt

SEQ ID NO: 246033 - DNA, 20 bp, synthetic construct
  source 1..20: mol_type = other DNA
atttagtttcagggcccttt

SEQ ID NO: 246034 - DNA, 20 bp, synthetic construct
  source 1..20: mol_type = other DNA
catttagtttcagggccctt

SEQ ID NO: 246035 - DNA, 20 bp, synthetic construct
  source 1..20: mol_type = other DNA
acatttagtttcagggccct

SEQ ID NO: 246036 - DNA, 20 bp, synthetic construct
  source 1..20: mol_type = other DNA
cacatttagtttcagggccc

SEQ ID NO: 246037 - DNA, 20 bp, synthetic construct
  source 1..20: mol_type = other DNA
acacatttagtttcagggcc

SEQ ID NO: 246038 - DNA, 20 bp, synthetic construct
  source 1..20: mol_type = other DNA
gacacatttagtttcagggc

SEQ ID NO: 246039 - DNA, 20 bp, synthetic construct
  source 1..20: mol_type = other DNA
ggacacatttagtttcaggg

SEQ ID NO: 246040 - DNA, 20 bp, synthetic construct
  source 1..20: mol_type = other DNA
gggacacatttagtttcagg

SEQ ID NO: 246041 - DNA, 20 bp, synthetic construct
  source 1..20: mol_type = other DNA
ggggacacatttagtttcag

SEQ ID NO: 246042 - DNA, 20 bp, synthetic construct
  source 1..20: mol_type = other DNA
aggggacacatttagtttca

SEQ ID NO: 246043 - DNA, 20 bp, synthetic construct
  source 1..20: mol_type = other DNA
aaggggacacatttagtttc

SEQ ID NO: 246044 - DNA, 20 bp, synthetic construct
  source 1..20: mol_type = other DNA
taaggggacacatttagttt

SEQ ID NO: 246045 - DNA, 20 bp, synthetic construct
  source 1..20: mol_type = other DNA
ctaaggggacacatttagtt

SEQ ID NO: 246046 - DNA, 20 bp, synthetic construct
  source 1..20: mol_type = other DNA
cctaaggggacacatttagt

SEQ ID NO: 246047 - DNA, 20 bp, synthetic construct
  source 1..20: mol_type = other DNA
tcctaaggggacacatttag

SEQ ID NO: 246048 - DNA, 20 bp, synthetic construct
  source 1..20: mol_type = other DNA
ttcctaaggggacacattta

SEQ ID NO: 246049 - DNA, 20 bp, synthetic construct
  source 1..20: mol_type = other DNA
tttcctaaggggacacattt

SEQ ID NO: 246050 - DNA, 20 bp, synthetic construct
  source 1..20: mol_type = other DNA
ctttcctaaggggacacatt

SEQ ID NO: 246051 - DNA, 20 bp, synthetic construct
  source 1..20: mol_type = other DNA
gctttcctaaggggacacat

SEQ ID NO: 246052 - DNA, 20 bp, synthetic construct
  source 1..20: mol_type = other DNA
tgctttcctaaggggacaca

SEQ ID NO: 246053 - DNA, 20 bp, synthetic construct
  source 1..20: mol_type = other DNA
ctgctttcctaaggggacac

SEQ ID NO: 246054 - DNA, 20 bp, synthetic construct
  source 1..20: mol_type = other DNA
cctgctttcctaaggggaca

SEQ ID NO: 246055 - DNA, 20 bp, synthetic construct
  source 1..20: mol_type = other DNA
tcctgctttcctaaggggac

SEQ ID NO: 246056 - DNA, 20 bp, synthetic construct
  source 1..20: mol_type = other DNA
ctcctgctttcctaagggga

SEQ ID NO: 246057 - DNA, 20 bp, synthetic construct
  source 1..20: mol_type = other DNA
actcctgctttcctaagggg

SEQ ID NO: 246058 - DNA, 20 bp, synthetic construct
  source 1..20: mol_type = other DNA
aactcctgctttcctaaggg

SEQ ID NO: 246059 - DNA, 20 bp, synthetic construct
  source 1..20: mol_type = other DNA
aaactcctgctttcctaagg

SEQ ID NO: 246060 - DNA, 20 bp, synthetic construct
  source 1..20: mol_type = other DNA
aaaactcctgctttcctaag

SEQ ID NO: 246061 - DNA, 20 bp, synthetic construct
  source 1..20: mol_type = other DNA
gaaaactcctgctttcctaa

SEQ ID NO: 246062 - DNA, 20 bp, synthetic construct
  source 1..20: mol_type = other DNA
agaaaactcctgctttccta

SEQ ID NO: 246063 - DNA, 20 bp, synthetic construct
  source 1..20: mol_type = other DNA
aagaaaactcctgctttcct

SEQ ID NO: 246064 - DNA, 20 bp, synthetic construct
  source 1..20: mol_type = other DNA
caagaaaactcctgctttcc

SEQ ID NO: 246065 - DNA, 20 bp, synthetic construct
  source 1..20: mol_type = other DNA
gcaagaaaactcctgctttc

SEQ ID NO: 246066 - DNA, 20 bp, synthetic construct
  source 1..20: mol_type = other DNA
tgcaagaaaactcctgcttt

SEQ ID NO: 246067 - DNA, 20 bp, synthetic construct
  source 1..20: mol_type = other DNA
ttgcaagaaaactcctgctt

SEQ ID NO: 246068 - DNA, 20 bp, synthetic construct
  source 1..20: mol_type = other DNA
cttgcaagaaaactcctgct

SEQ ID NO: 246069 - DNA, 20 bp, synthetic construct
  source 1..20: mol_type = other DNA
acttgcaagaaaactcctgc

SEQ ID NO: 246070 - DNA, 20 bp, synthetic construct
  source 1..20: mol_type = other DNA
cacttgcaagaaaactcctg

SEQ ID NO: 246071 - DNA, 20 bp, synthetic construct
  source 1..20: mol_type = other DNA
ccacttgcaagaaaactcct

SEQ ID NO: 246072 - DNA, 20 bp, synthetic construct
  source 1..20: mol_type = other DNA
gccacttgcaagaaaactcc

SEQ ID NO: 246073 - DNA, 20 bp, synthetic construct
  source 1..20: mol_type = other DNA
tgccacttgcaagaaaactc

SEQ ID NO: 246074 - DNA, 20 bp, synthetic construct
  source 1..20: mol_type = other DNA
ttgccacttgcaagaaaact

SEQ ID NO: 246075 - DNA, 20 bp, synthetic construct
  source 1..20: mol_type = other DNA
attgccacttgcaagaaaac

SEQ ID NO: 246076 - DNA, 20 bp, synthetic construct
  source 1..20: mol_type = other DNA
gattgccacttgcaagaaaa

SEQ ID NO: 246077 - DNA, 20 bp, synthetic construct
  source 1..20: mol_type = other DNA
agattgccacttgcaagaaa

SEQ ID NO: 246078 - DNA, 20 bp, synthetic construct
  source 1..20: mol_type = other DNA
aagattgccacttgcaagaa

SEQ ID NO: 246079 - DNA, 20 bp, synthetic construct
  source 1..20: mol_type = other DNA
gaagattgccacttgcaaga

SEQ ID NO: 246080 - DNA, 20 bp, synthetic construct
  source 1..20: mol_type = other DNA
agaagattgccacttgcaag

SEQ ID NO: 246081 - DNA, 20 bp, synthetic construct
  source 1..20: mol_type = other DNA
cagaagattgccacttgcaa

SEQ ID NO: 246082 - DNA, 20 bp, synthetic construct
  source 1..20: mol_type = other DNA
gcagaagattgccacttgca

SEQ ID NO: 246083 - DNA, 20 bp, synthetic construct
  source 1..20: mol_type = other DNA
agcagaagattgccacttgc

SEQ ID NO: 246084 - DNA, 20 bp, synthetic construct
  source 1..20: mol_type = other DNA
aagcagaagattgccacttg

SEQ ID NO: 246085 - DNA, 20 bp, synthetic construct
  source 1..20: mol_type = other DNA
taagcagaagattgccactt

SEQ ID NO: 246086 - DNA, 20 bp, synthetic construct
  source 1..20: mol_type = other DNA
ataagcagaagattgccact

SEQ ID NO: 246087 - DNA, 20 bp, synthetic construct
  source 1..20: mol_type = other DNA
cataagcagaagattgccac

SEQ ID NO: 246088 - DNA, 20 bp, synthetic construct
  source 1..20: mol_type = other DNA
acataagcagaagattgcca

SEQ ID NO: 246089 - DNA, 20 bp, synthetic construct
  source 1..20: mol_type = other DNA
gacataagcagaagattgcc

SEQ ID NO: 246090 - DNA, 20 bp, synthetic construct
  source 1..20: mol_type = other DNA
agacataagcagaagattgc

SEQ ID NO: 246091 - DNA, 20 bp, synthetic construct
  source 1..20: mol_type = other DNA
gagacataagcagaagattg

SEQ ID NO: 246092 - DNA, 20 bp, synthetic construct
  source 1..20: mol_type = other DNA
tgagacataagcagaagatt

SEQ ID NO: 246093 - DNA, 20 bp, synthetic construct
  source 1..20: mol_type = other DNA
atgagacataagcagaagat

SEQ ID NO: 246094 - DNA, 20 bp, synthetic construct
  source 1..20: mol_type = other DNA
aatgagacataagcagaaga

SEQ ID NO: 246095 - DNA, 20 bp, synthetic construct
  source 1..20: mol_type = other DNA
caatgagacataagcagaag

SEQ ID NO: 246096 - DNA, 20 bp, synthetic construct
  source 1..20: mol_type = other DNA
ccaatgagacataagcagaa

SEQ ID NO: 246097 - DNA, 20 bp, synthetic construct
  source 1..20: mol_type = other DNA
gccaatgagacataagcaga

SEQ ID NO: 246098 - DNA, 20 bp, synthetic construct
  source 1..20: mol_type = other DNA
ggccaatgagacataagcag

SEQ ID NO: 246099 - DNA, 20 bp, synthetic construct
  source 1..20: mol_type = other DNA
tggccaatgagacataagca

SEQ ID NO: 246100 - DNA, 20 bp, synthetic construct
  source 1..20: mol_type = other DNA
ctggccaatgagacataagc

SEQ ID NO: 246101 - DNA, 20 bp, synthetic construct
  source 1..20: mol_type = other DNA
tctggccaatgagacataag

SEQ ID NO: 246102 - DNA, 20 bp, synthetic construct
  source 1..20: mol_type = other DNA
ctctggccaatgagacataa

SEQ ID NO: 246103 - DNA, 20 bp, synthetic construct
  source 1..20: mol_type = other DNA
gctctggccaatgagacata

SEQ ID NO: 246104 - DNA, 20 bp, synthetic construct
  source 1..20: mol_type = other DNA
agctctggccaatgagacat

SEQ ID NO: 246105 - DNA, 20 bp, synthetic construct
  source 1..20: mol_type = other DNA
cagctctggccaatgagaca

SEQ ID NO: 246106 - DNA, 20 bp, synthetic construct
  source 1..20: mol_type = other DNA
ccagctctggccaatgagac

SEQ ID NO: 246107 - DNA, 20 bp, synthetic construct
  source 1..20: mol_type = other DNA
cccagctctggccaatgaga

SEQ ID NO: 246108 - DNA, 20 bp, synthetic construct
  source 1..20: mol_type = other DNA
acccagctctggccaatgag

SEQ ID NO: 246109 - DNA, 20 bp, synthetic construct
  source 1..20: mol_type = other DNA
gacccagctctggccaatga

SEQ ID NO: 246110 - DNA, 20 bp, synthetic construct
  source 1..20: mol_type = other DNA
agacccagctctggccaatg

SEQ ID NO: 246111 - DNA, 20 bp, synthetic construct
  source 1..20: mol_type = other DNA
aagacccagctctggccaat

SEQ ID NO: 246112 - DNA, 20 bp, synthetic construct
  source 1..20: mol_type = other DNA
taagacccagctctggccaa

SEQ ID NO: 246113 - DNA, 20 bp, synthetic construct
  source 1..20: mol_type = other DNA
gtaagacccagctctggcca

SEQ ID NO: 246114 - DNA, 20 bp, synthetic construct
  source 1..20: mol_type = other DNA
cgtaagacccagctctggcc

SEQ ID NO: 246115 - DNA, 20 bp, synthetic construct
  source 1..20: mol_type = other DNA
ccgtaagacccagctctggc

SEQ ID NO: 246116 - DNA, 20 bp, synthetic construct
  source 1..20: mol_type = other DNA
gccgtaagacccagctctgg

SEQ ID NO: 246117 - DNA, 20 bp, synthetic construct
  source 1..20: mol_type = other DNA
ggccgtaagacccagctctg

SEQ ID NO: 246118 - DNA, 20 bp, synthetic construct
  source 1..20: mol_type = other DNA
tggccgtaagacccagctct

SEQ ID NO: 246119 - DNA, 20 bp, synthetic construct
  source 1..20: mol_type = other DNA
gtggccgtaagacccagctc

SEQ ID NO: 246120 - DNA, 20 bp, synthetic construct
  source 1..20: mol_type = other DNA
ggtggccgtaagacccagct

SEQ ID NO: 246121 - DNA, 20 bp, synthetic construct
  source 1..20: mol_type = other DNA
gggtggccgtaagacccagc

SEQ ID NO: 246122 - DNA, 20 bp, synthetic construct
  source 1..20: mol_type = other DNA
ggggtggccgtaagacccag

SEQ ID NO: 246123 - DNA, 20 bp, synthetic construct
  source 1..20: mol_type = other DNA
aggggtggccgtaagaccca

SEQ ID NO: 246124 - DNA, 20 bp, synthetic construct
  source 1..20: mol_type = other DNA
aaggggtggccgtaagaccc

SEQ ID NO: 246125 - DNA, 20 bp, synthetic construct
  source 1..20: mol_type = other DNA
caaggggtggccgtaagacc

SEQ ID NO: 246126 - DNA, 20 bp, synthetic construct
  source 1..20: mol_type = other DNA
gcaaggggtggccgtaagac

SEQ ID NO: 246127 - DNA, 20 bp, synthetic construct
  source 1..20: mol_type = other DNA
agcaaggggtggccgtaaga

SEQ ID NO: 246128 - DNA, 20 bp, synthetic construct
  source 1..20: mol_type = other DNA
cagcaaggggtggccgtaag

SEQ ID NO: 246129 - DNA, 20 bp, synthetic construct
  source 1..20: mol_type = other DNA
gcagcaaggggtggccgtaa

SEQ ID NO: 246130 - DNA, 20 bp, synthetic construct
  source 1..20: mol_type = other DNA
cgcagcaaggggtggccgta

SEQ ID NO: 246131 - DNA, 20 bp, synthetic construct
  source 1..20: mol_type = other DNA
tcgcagcaaggggtggccgt

SEQ ID NO: 246132 - DNA, 20 bp, synthetic construct
  source 1..20: mol_type = other DNA
ctcgcagcaaggggtggccg

SEQ ID NO: 246133 - DNA, 20 bp, synthetic construct
  source 1..20: mol_type = other DNA
gctcgcagcaaggggtggcc

SEQ ID NO: 246134 - DNA, 20 bp, synthetic construct
  source 1..20: mol_type = other DNA
tgctcgcagcaaggggtggc

SEQ ID NO: 246135 - DNA, 20 bp, synthetic construct
  source 1..20: mol_type = other DNA
ttgctcgcagcaaggggtgg

SEQ ID NO: 246136 - DNA, 20 bp, synthetic construct
  source 1..20: mol_type = other DNA
cttgctcgcagcaaggggtg

SEQ ID NO: 246137 - DNA, 20 bp, synthetic construct
  source 1..20: mol_type = other DNA
ccttgctcgcagcaaggggt

SEQ ID NO: 246138 - DNA, 20 bp, synthetic construct
  source 1..20: mol_type = other DNA
gccttgctcgcagcaagggg

SEQ ID NO: 246139 - DNA, 20 bp, synthetic construct
  source 1..20: mol_type = other DNA
agccttgctcgcagcaaggg

SEQ ID NO: 246140 - DNA, 20 bp, synthetic construct
  source 1..20: mol_type = other DNA
cagccttgctcgcagcaagg

SEQ ID NO: 246141 - DNA, 20 bp, synthetic construct
  source 1..20: mol_type = other DNA
ccagccttgctcgcagcaag

SEQ ID NO: 246142 - DNA, 20 bp, synthetic construct
  source 1..20: mol_type = other DNA
cccagccttgctcgcagcaa

SEQ ID NO: 246143 - DNA, 20 bp, synthetic construct
  source 1..20: mol_type = other DNA
tcccagccttgctcgcagca

SEQ ID NO: 246144 - DNA, 20 bp, synthetic construct
  source 1..20: mol_type = other DNA
gtcccagccttgctcgcagc

SEQ ID NO: 246145 - DNA, 20 bp, synthetic construct
  source 1..20: mol_type = other DNA
tgtcccagccttgctcgcag

SEQ ID NO: 246146 - DNA, 20 bp, synthetic construct
  source 1..20: mol_type = other DNA
atgtcccagccttgctcgca

SEQ ID NO: 246147 - DNA, 20 bp, synthetic construct
  source 1..20: mol_type = other DNA
aatgtcccagccttgctcgc

SEQ ID NO: 246148 - DNA, 20 bp, synthetic construct
  source 1..20: mol_type = other DNA
caatgtcccagccttgctcg

SEQ ID NO: 246149 - DNA, 20 bp, synthetic construct
  source 1..20: mol_type = other DNA
tcaatgtcccagccttgctc

SEQ ID NO: 246150 - DNA, 20 bp, synthetic construct
  source 1..20: mol_type = other DNA
ctcaatgtcccagccttgct

SEQ ID NO: 246151 - DNA, 20 bp, synthetic construct
  source 1..20: mol_type = other DNA
gctcaatgtcccagccttgc

SEQ ID NO: 246152 - DNA, 20 bp, synthetic construct
  source 1..20: mol_type = other DNA
tgctcaatgtcccagccttg

SEQ ID NO: 246153 - DNA, 20 bp, synthetic construct
  source 1..20: mol_type = other DNA
atgctcaatgtcccagcctt

SEQ ID NO: 246154 - DNA, 20 bp, synthetic construct
  source 1..20: mol_type = other DNA
aatgctcaatgtcccagcct

SEQ ID NO: 246155 - DNA, 20 bp, synthetic construct
  source 1..20: mol_type = other DNA
aaatgctcaatgtcccagcc

SEQ ID NO: 246156 - DNA, 20 bp, synthetic construct
  source 1..20: mol_type = other DNA
aaaatgctcaatgtcccagc

SEQ ID NO: 246157 - DNA, 20 bp, synthetic construct
  source 1..20: mol_type = other DNA
caaaatgctcaatgtcccag

SEQ ID NO: 246158 - DNA, 20 bp, synthetic construct
  source 1..20: mol_type = other DNA
gcaaaatgctcaatgtccca

SEQ ID NO: 246159 - DNA, 20 bp, synthetic construct
  source 1..20: mol_type = other DNA
ggcaaaatgctcaatgtccc

SEQ ID NO: 246160 - DNA, 20 bp, synthetic construct
  source 1..20: mol_type = other DNA
cggcaaaatgctcaatgtcc

SEQ ID NO: 246161 - DNA, 20 bp, synthetic construct
  source 1..20: mol_type = other DNA
acggcaaaatgctcaatgtc

SEQ ID NO: 246162 - DNA, 20 bp, synthetic construct
  source 1..20: mol_type = other DNA
gacggcaaaatgctcaatgt

SEQ ID NO: 246163 - DNA, 20 bp, synthetic construct
  source 1..20: mol_type = other DNA
ggacggcaaaatgctcaatg

SEQ ID NO: 246164 - DNA, 20 bp, synthetic construct
  source 1..20: mol_type = other DNA
tggacggcaaaatgctcaat

SEQ ID NO: 246165 - DNA, 20 bp, synthetic construct
  source 1..20: mol_type = other DNA
ttggacggcaaaatgctcaa

SEQ ID NO: 246166 - DNA, 20 bp, synthetic construct
  source 1..20: mol_type = other DNA
gttggacggcaaaatgctca

SEQ ID NO: 246167 - DNA, 20 bp, synthetic construct
  source 1..20: mol_type = other DNA
ggttggacggcaaaatgctc

SEQ ID NO: 246168 - DNA, 20 bp, synthetic construct
  source 1..20: mol_type = other DNA
aggttggacggcaaaatgct

SEQ ID NO: 246169 - DNA, 20 bp, synthetic construct
  source 1..20: mol_type = other DNA
gaggttggacggcaaaatgc

SEQ ID NO: 246170 - DNA, 20 bp, synthetic construct
  source 1..20: mol_type = other DNA
agaggttggacggcaaaatg

SEQ ID NO: 246171 - DNA, 20 bp, synthetic construct
  source 1..20: mol_type = other DNA
aagaggttggacggcaaaat

SEQ ID NO: 246172 - DNA, 20 bp, synthetic construct
  source 1..20: mol_type = other DNA
aaagaggttggacggcaaaa

SEQ ID NO: 246173 - DNA, 20 bp, synthetic construct
  source 1..20: mol_type = other DNA
taaagaggttggacggcaaa

SEQ ID NO: 246174 - DNA, 20 bp, synthetic construct
  source 1..20: mol_type = other DNA
ctaaagaggttggacggcaa

SEQ ID NO: 246175 - DNA, 20 bp, synthetic construct
  source 1..20: mol_type = other DNA
gctaaagaggttggacggca

SEQ ID NO: 246176 - DNA, 20 bp, synthetic construct
  source 1..20: mol_type = other DNA
tgctaaagaggttggacggc

SEQ ID NO: 246177 - DNA, 20 bp, synthetic construct
  source 1..20: mol_type = other DNA
ctgctaaagaggttggacgg

SEQ ID NO: 246178 - DNA, 20 bp, synthetic construct
  source 1..20: mol_type = other DNA
tctgctaaagaggttggacg

SEQ ID NO: 246179 - DNA, 20 bp, synthetic construct
  source 1..20: mol_type = other DNA
ttctgctaaagaggttggac

SEQ ID NO: 246180 - DNA, 20 bp, synthetic construct
  source 1..20: mol_type = other DNA
attctgctaaagaggttgga

SEQ ID NO: 246181 - DNA, 20 bp, synthetic construct
  source 1..20: mol_type = other DNA
tattctgctaaagaggttgg

SEQ ID NO: 246182 - DNA, 20 bp, synthetic construct
  source 1..20: mol_type = other DNA
ttattctgctaaagaggttg

SEQ ID NO: 246183 - DNA, 20 bp, synthetic construct
  source 1..20: mol_type = other DNA
tttattctgctaaagaggtt

SEQ ID NO: 246184 - DNA, 20 bp, synthetic construct
  source 1..20: mol_type = other DNA
gtttattctgctaaagaggt

SEQ ID NO: 246185 - DNA, 20 bp, synthetic construct
  source 1..20: mol_type = other DNA
ggtttattctgctaaagagg

SEQ ID NO: 246186 - DNA, 20 bp, synthetic construct
  source 1..20: mol_type = other DNA
tggtttattctgctaaagag

SEQ ID NO: 246187 - DNA, 20 bp, synthetic construct
  source 1..20: mol_type = other DNA
ttggtttattctgctaaaga

SEQ ID NO: 246188 - DNA, 20 bp, synthetic construct
  source 1..20: mol_type = other DNA
cttggtttattctgctaaag

SEQ ID NO: 246189 - DNA, 20 bp, synthetic construct
  source 1..20: mol_type = other DNA
ccttggtttattctgctaaa

SEQ ID NO: 246190 - DNA, 20 bp, synthetic construct
  source 1..20: mol_type = other DNA
cccttggtttattctgctaa

SEQ ID NO: 246191 - DNA, 20 bp, synthetic construct
  source 1..20: mol_type = other DNA
ccccttggtttattctgcta

SEQ ID NO: 246192 - DNA, 20 bp, synthetic construct
  source 1..20: mol_type = other DNA
cccccttggtttattctgct

SEQ ID NO: 246193 - DNA, 20 bp, synthetic construct
  source 1..20: mol_type = other DNA
tcccccttggtttattctgc

SEQ ID NO: 246194 - DNA, 20 bp, synthetic construct
  source 1..20: mol_type = other DNA
ttcccccttggtttattctg

SEQ ID NO: 246195 - DNA, 20 bp, synthetic construct
  source 1..20: mol_type = other DNA
cttcccccttggtttattct

SEQ ID NO: 246196 - DNA, 20 bp, synthetic construct
  source 1..20: mol_type = other DNA
tcttcccccttggtttattc

SEQ ID NO: 246197 - DNA, 20 bp, synthetic construct
  source 1..20: mol_type = other DNA
ttcttcccccttggtttatt

SEQ ID NO: 246198 - DNA, 20 bp, synthetic construct
  source 1..20: mol_type = other DNA
gttcttcccccttggtttat

SEQ ID NO: 246199 - DNA, 20 bp, synthetic construct
  source 1..20: mol_type = other DNA
cgttcttcccccttggttta

SEQ ID NO: 246200 - DNA, 20 bp, synthetic construct
  source 1..20: mol_type = other DNA
acgttcttcccccttggttt

SEQ ID NO: 246201 - DNA, 20 bp, synthetic construct
  source 1..20: mol_type = other DNA
aacgttcttcccccttggtt

SEQ ID NO: 246202 - DNA, 20 bp, synthetic construct
  source 1..20: mol_type = other DNA
taacgttcttcccccttggt

SEQ ID NO: 246203 - DNA, 20 bp, synthetic construct
  source 1..20: mol_type = other DNA
ttaacgttcttcccccttgg

SEQ ID NO: 246204 - DNA, 20 bp, synthetic construct
  source 1..20: mol_type = other DNA
attaacgttcttcccccttg

SEQ ID NO: 246205 - DNA, 20 bp, synthetic construct
  source 1..20: mol_type = other DNA
tattaacgttcttccccctt

SEQ ID NO: 246206 - DNA, 20 bp, synthetic construct
  source 1..20: mol_type = other DNA
ctattaacgttcttccccct

SEQ ID NO: 246207 - DNA, 20 bp, synthetic construct
  source 1..20: mol_type = other DNA
actattaacgttcttccccc

SEQ ID NO: 246208 - DNA, 20 bp, synthetic construct
  source 1..20: mol_type = other DNA
cactattaacgttcttcccc

SEQ ID NO: 246209 - DNA, 20 bp, synthetic construct
  source 1..20: mol_type = other DNA
ccactattaacgttcttccc

SEQ ID NO: 246210 - DNA, 20 bp, synthetic construct
  source 1..20: mol_type = other DNA
gccactattaacgttcttcc

SEQ ID NO: 246211 - DNA, 20 bp, synthetic construct
  source 1..20: mol_type = other DNA
agccactattaacgttcttc

SEQ ID NO: 246212 - DNA, 20 bp, synthetic construct
  source 1..20: mol_type = other DNA
aagccactattaacgttctt

SEQ ID NO: 246213 - DNA, 20 bp, synthetic construct
  source 1..20: mol_type = other DNA
aaagccactattaacgttct

SEQ ID NO: 246214 - DNA, 20 bp, synthetic construct
  source 1..20: mol_type = other DNA
aaaagccactattaacgttc

SEQ ID NO: 246215 - DNA, 20 bp, synthetic construct
  source 1..20: mol_type = other DNA
caaaagccactattaacgtt

SEQ ID NO: 246216 - DNA, 20 bp, synthetic construct
  source 1..20: mol_type = other DNA
tcaaaagccactattaacgt

SEQ ID NO: 246217 - DNA, 20 bp, synthetic construct
  source 1..20: mol_type = other DNA
ctcaaaagccactattaacg

SEQ ID NO: 246218 - DNA, 20 bp, synthetic construct
  source 1..20: mol_type = other DNA
actcaaaagccactattaac

SEQ ID NO: 246219 - DNA, 20 bp, synthetic construct
  source 1..20: mol_type = other DNA
gactcaaaagccactattaa

SEQ ID NO: 246220 - DNA, 20 bp, synthetic construct
  source 1..20: mol_type = other DNA
tgactcaaaagccactatta

SEQ ID NO: 246221 - DNA, 20 bp, synthetic construct
  source 1..20: mol_type = other DNA
gtgactcaaaagccactatt

SEQ ID NO: 246222 - DNA, 20 bp, synthetic construct
  source 1..20: mol_type = other DNA
agtgactcaaaagccactat

SEQ ID NO: 246223 - DNA, 20 bp, synthetic construct
  source 1..20: mol_type = other DNA
tagtgactcaaaagccacta

SEQ ID NO: 246224 - DNA, 20 bp, synthetic construct
  source 1..20: mol_type = other DNA
ctagtgactcaaaagccact

SEQ ID NO: 246225 - DNA, 20 bp, synthetic construct
  source 1..20: mol_type = other DNA
actagtgactcaaaagccac

SEQ ID NO: 246226 - DNA, 20 bp, synthetic construct
  source 1..20: mol_type = other DNA
aactagtgactcaaaagcca

SEQ ID NO: 246227 - DNA, 20 bp, synthetic construct
  source 1..20: mol_type = other DNA
caactagtgactcaaaagcc

SEQ ID NO: 246228 - DNA, 20 bp, synthetic construct
  source 1..20: mol_type = other DNA
ccaactagtgactcaaaagc

SEQ ID NO: 246229 - DNA, 20 bp, synthetic construct
  source 1..20: mol_type = other DNA
gccaactagtgactcaaaag

SEQ ID NO: 246230 - DNA, 20 bp, synthetic construct
  source 1..20: mol_type = other DNA
tgccaactagtgactcaaaa

SEQ ID NO: 246231 - DNA, 20 bp, synthetic construct
  source 1..20: mol_type = other DNA
ctgccaactagtgactcaaa

SEQ ID NO: 246232 - DNA, 20 bp, synthetic construct
  source 1..20: mol_type = other DNA
actgccaactagtgactcaa

SEQ ID NO: 246233 - DNA, 20 bp, synthetic construct
  source 1..20: mol_type = other DNA
tactgccaactagtgactca

SEQ ID NO: 246234 - DNA, 20 bp, synthetic construct
  source 1..20: mol_type = other DNA
atactgccaactagtgactc

SEQ ID NO: 246235 - DNA, 20 bp, synthetic construct
  source 1..20: mol_type = other DNA
gatactgccaactagtgact

SEQ ID NO: 246236 - DNA, 20 bp, synthetic construct
  source 1..20: mol_type = other DNA
agatactgccaactagtgac

SEQ ID NO: 246237 - DNA, 20 bp, synthetic construct
  source 1..20: mol_type = other DNA
cagatactgccaactagtga

SEQ ID NO: 246238 - DNA, 20 bp, synthetic construct
  source 1..20: mol_type = other DNA
gcagatactgccaactagtg

SEQ ID NO: 246239 - DNA, 20 bp, synthetic construct
  source 1..20: mol_type = other DNA
ggcagatactgccaactagt

SEQ ID NO: 246240 - DNA, 20 bp, synthetic construct
  source 1..20: mol_type = other DNA
gggcagatactgccaactag

SEQ ID NO: 246241 - DNA, 20 bp, synthetic construct
  source 1..20: mol_type = other DNA
ggggcagatactgccaacta

SEQ ID NO: 246242 - DNA, 20 bp, synthetic construct
  source 1..20: mol_type = other DNA
aggggcagatactgccaact

SEQ ID NO: 246243 - DNA, 20 bp, synthetic construct
  source 1..20: mol_type = other DNA
gaggggcagatactgccaac

SEQ ID NO: 246244 - DNA, 20 bp, synthetic construct
  source 1..20: mol_type = other DNA
agaggggcagatactgccaa

SEQ ID NO: 246245 - DNA, 20 bp, synthetic construct
  source 1..20: mol_type = other DNA
tagaggggcagatactgcca

SEQ ID NO: 246246 - DNA, 20 bp, synthetic construct
  source 1..20: mol_type = other DNA
atagaggggcagatactgcc

SEQ ID NO: 246247 - DNA, 20 bp, synthetic construct
  source 1..20: mol_type = other DNA
gatagaggggcagatactgc

SEQ ID NO: 246248 - DNA, 20 bp, synthetic construct
  source 1..20: mol_type = other DNA
agatagaggggcagatactg

SEQ ID NO: 246249 - DNA, 20 bp, synthetic construct
  source 1..20: mol_type = other DNA
aagatagaggggcagatact

SEQ ID NO: 246250 - DNA, 20 bp, synthetic construct
  source 1..20: mol_type = other DNA
aaagatagaggggcagatac

SEQ ID NO: 246251 - DNA, 20 bp, synthetic construct
  source 1..20: mol_type = other DNA
gaaagatagaggggcagata

SEQ ID NO: 246252 - DNA, 20 bp, synthetic construct
  source 1..20: mol_type = other DNA
ggaaagatagaggggcagat

SEQ ID NO: 246253 - DNA, 20 bp, synthetic construct
  source 1..20: mol_type = other DNA
tggaaagatagaggggcaga

SEQ ID NO: 246254 - DNA, 20 bp, synthetic construct
  source 1..20: mol_type = other DNA
atggaaagatagaggggcag

SEQ ID NO: 246255 - DNA, 20 bp, synthetic construct
  source 1..20: mol_type = other DNA
gatggaaagatagaggggca

SEQ ID NO: 246256 - DNA, 20 bp, synthetic construct
  source 1..20: mol_type = other DNA
ggatggaaagatagaggggc

SEQ ID NO: 246257 - DNA, 20 bp, synthetic construct
  source 1..20: mol_type = other DNA
aggatggaaagatagagggg

SEQ ID NO: 246258 - DNA, 20 bp, synthetic construct
  source 1..20: mol_type = other DNA
gaggatggaaagatagaggg

SEQ ID NO: 246259 - DNA, 20 bp, synthetic construct
  source 1..20: mol_type = other DNA
ggaggatggaaagatagagg

SEQ ID NO: 246260 - DNA, 20 bp, synthetic construct
  source 1..20: mol_type = other DNA
gggaggatggaaagatagag

SEQ ID NO: 246261 - DNA, 20 bp, synthetic construct
  source 1..20: mol_type = other DNA
ggggaggatggaaagataga

SEQ ID NO: 246262 - DNA, 20 bp, synthetic construct
  source 1..20: mol_type = other DNA
tggggaggatggaaagatag

SEQ ID NO: 246263 - DNA, 20 bp, synthetic construct
  source 1..20: mol_type = other DNA
atggggaggatggaaagata

SEQ ID NO: 246264 - DNA, 20 bp, synthetic construct
  source 1..20: mol_type = other DNA
catggggaggatggaaagat

SEQ ID NO: 246265 - DNA, 20 bp, synthetic construct
  source 1..20: mol_type = other DNA
ccatggggaggatggaaaga

SEQ ID NO: 246266 - DNA, 20 bp, synthetic construct
  source 1..20: mol_type = other DNA
tccatggggaggatggaaag

SEQ ID NO: 246267 - DNA, 20 bp, synthetic construct
  source 1..20: mol_type = other DNA
ctccatggggaggatggaaa

SEQ ID NO: 246268 - DNA, 20 bp, synthetic construct
  source 1..20: mol_type = other DNA
actccatggggaggatggaa

SEQ ID NO: 246269 - DNA, 20 bp, synthetic construct
  source 1..20: mol_type = other DNA
aactccatggggaggatgga

SEQ ID NO: 246270 - DNA, 20 bp, synthetic construct
  source 1..20: mol_type = other DNA
aaactccatggggaggatgg

SEQ ID NO: 246271 - DNA, 20 bp, synthetic construct
  source 1..20: mol_type = other DNA
gaaactccatggggaggatg

SEQ ID NO: 246272 - DNA, 20 bp, synthetic construct
  source 1..20: mol_type = other DNA
tgaaactccatggggaggat

SEQ ID NO: 246273 - DNA, 20 bp, synthetic construct
  source 1..20: mol_type = other DNA
ttgaaactccatggggagga

SEQ ID NO: 246274 - DNA, 20 bp, synthetic construct
  source 1..20: mol_type = other DNA
cttgaaactccatggggagg

SEQ ID NO: 246275 - DNA, 20 bp, synthetic construct
  source 1..20: mol_type = other DNA
ccttgaaactccatggggag

SEQ ID NO: 246276 - DNA, 20 bp, synthetic construct
  source 1..20: mol_type = other DNA
accttgaaactccatgggga

SEQ ID NO: 246277 - DNA, 20 bp, synthetic construct
  source 1..20: mol_type = other DNA
aaccttgaaactccatgggg

SEQ ID NO: 246278 - DNA, 20 bp, synthetic construct
  source 1..20: mol_type = other DNA
gaaccttgaaactccatggg

SEQ ID NO: 246279 - DNA, 20 bp, synthetic construct
  source 1..20: mol_type = other DNA
ggaaccttgaaactccatgg

SEQ ID NO: 246280 - DNA, 20 bp, synthetic construct
  source 1..20: mol_type = other DNA
aggaaccttgaaactccatg

SEQ ID NO: 246281 - DNA, 20 bp, synthetic construct
  source 1..20: mol_type = other DNA
aaggaaccttgaaactccat

SEQ ID NO: 246282 - DNA, 20 bp, synthetic construct
  source 1..20: mol_type = other DNA
aaaggaaccttgaaactcca

SEQ ID NO: 246283 - DNA, 20 bp, synthetic construct
  source 1..20: mol_type = other DNA
gaaaggaaccttgaaactcc

SEQ ID NO: 246284 - DNA, 20 bp, synthetic construct
  source 1..20: mol_type = other DNA
agaaaggaaccttgaaactc

SEQ ID NO: 246285 - DNA, 20 bp, synthetic construct
  source 1..20: mol_type = other DNA
gagaaaggaaccttgaaact

SEQ ID NO: 246286 - DNA, 20 bp, synthetic construct
  source 1..20: mol_type = other DNA
tgagaaaggaaccttgaaac

SEQ ID NO: 246287 - DNA, 20 bp, synthetic construct
  source 1..20: mol_type = other DNA
ctgagaaaggaaccttgaaa

SEQ ID NO: 246288 - DNA, 20 bp, synthetic construct
  source 1..20: mol_type = other DNA
actgagaaaggaaccttgaa

SEQ ID NO: 246289 - DNA, 20 bp, synthetic construct
  source 1..20: mol_type = other DNA
tactgagaaaggaaccttga

SEQ ID NO: 246290 - DNA, 20 bp, synthetic construct
  source 1..20: mol_type = other DNA
gtactgagaaaggaaccttg

SEQ ID NO: 246291 - DNA, 20 bp, synthetic construct
  source 1..20: mol_type = other DNA
agtactgagaaaggaacctt

SEQ ID NO: 246292 - DNA, 20 bp, synthetic construct
  source 1..20: mol_type = other DNA
aagtactgagaaaggaacct

SEQ ID NO: 246293 - DNA, 20 bp, synthetic construct
  source 1..20: mol_type = other DNA
gaagtactgagaaaggaacc

SEQ ID NO: 246294 - DNA, 20 bp, synthetic construct
  source 1..20: mol_type = other DNA
agaagtactgagaaaggaac

SEQ ID NO: 246295 - DNA, 20 bp, synthetic construct
  source 1..20: mol_type = other DNA
aagaagtactgagaaaggaa

SEQ ID NO: 246296 - DNA, 20 bp, synthetic construct
  source 1..20: mol_type = other DNA
gaagaagtactgagaaagga

SEQ ID NO: 246297 - DNA, 20 bp, synthetic construct
  source 1..20: mol_type = other DNA
tgaagaagtactgagaaagg

SEQ ID NO: 246298 - DNA, 20 bp, synthetic construct
  source 1..20: mol_type = other DNA
ctgaagaagtactgagaaag

SEQ ID NO: 246299 - DNA, 20 bp, synthetic construct
  source 1..20: mol_type = other DNA
cctgaagaagtactgagaaa

SEQ ID NO: 246300 - DNA, 20 bp, synthetic construct
  source 1..20: mol_type = other DNA
gcctgaagaagtactgagaa

SEQ ID NO: 246301 - DNA, 20 bp, synthetic construct
  source 1..20: mol_type = other DNA
agcctgaagaagtactgaga

SEQ ID NO: 246302 - DNA, 20 bp, synthetic construct
  source 1..20: mol_type = other DNA
gagcctgaagaagtactgag

SEQ ID NO: 246303 - DNA, 20 bp, synthetic construct
  source 1..20: mol_type = other DNA
agagcctgaagaagtactga

SEQ ID NO: 246304 - DNA, 20 bp, synthetic construct
  source 1..20: mol_type = other DNA
cagagcctgaagaagtactg

SEQ ID NO: 246305 - DNA, 20 bp, synthetic construct
  source 1..20: mol_type = other DNA
gcagagcctgaagaagtact

SEQ ID NO: 246306 - DNA, 20 bp, synthetic construct
  source 1..20: mol_type = other DNA
tgcagagcctgaagaagtac

SEQ ID NO: 246307 - DNA, 20 bp, synthetic construct
  source 1..20: mol_type = other DNA
gtgcagagcctgaagaagta

SEQ ID NO: 246308 - DNA, 20 bp, synthetic construct
  source 1..20: mol_type = other DNA
cgtgcagagcctgaagaagt

SEQ ID NO: 246309 - DNA, 20 bp, synthetic construct
  source 1..20: mol_type = other DNA
acgtgcagagcctgaagaag

SEQ ID NO: 246310 - DNA, 20 bp, synthetic construct
  source 1..20: mol_type = other DNA
aacgtgcagagcctgaagaa

SEQ ID NO: 246311 - DNA, 20 bp, synthetic construct
  source 1..20: mol_type = other DNA
gaacgtgcagagcctgaaga

SEQ ID NO: 246312 - DNA, 20 bp, synthetic construct
  source 1..20: mol_type = other DNA
tgaacgtgcagagcctgaag

SEQ ID NO: 246313 - DNA, 20 bp, synthetic construct
  source 1..20: mol_type = other DNA
atgaacgtgcagagcctgaa

SEQ ID NO: 246314 - DNA, 20 bp, synthetic construct
  source 1..20: mol_type = other DNA
aatgaacgtgcagagcctga

SEQ ID NO: 246315 - DNA, 20 bp, synthetic construct
  source 1..20: mol_type = other DNA
aaatgaacgtgcagagcctg

SEQ ID NO: 246316 - DNA, 20 bp, synthetic construct
  source 1..20: mol_type = other DNA
caaatgaacgtgcagagcct

SEQ ID NO: 246317 - DNA, 20 bp, synthetic construct
  source 1..20: mol_type = other DNA
ccaaatgaacgtgcagagcc

SEQ ID NO: 246318 - DNA, 20 bp, synthetic construct
  source 1..20: mol_type = other DNA
tccaaatgaacgtgcagagc

SEQ ID NO: 246319 - DNA, 20 bp, synthetic construct
  source 1..20: mol_type = other DNA
atccaaatgaacgtgcagag

SEQ ID NO: 246320 - DNA, 20 bp, synthetic construct
  source 1..20: mol_type = other DNA
gatccaaatgaacgtgcaga

SEQ ID NO: 246321 - DNA, 20 bp, synthetic construct
  source 1..20: mol_type = other DNA
agatccaaatgaacgtgcag

SEQ ID NO: 246322 - DNA, 20 bp, synthetic construct
  source 1..20: mol_type = other DNA
aagatccaaatgaacgtgca

SEQ ID NO: 246323 - DNA, 20 bp, synthetic construct
  source 1..20: mol_type = other DNA
caagatccaaatgaacgtgc

SEQ ID NO: 246324 - DNA, 20 bp, synthetic construct
  source 1..20: mol_type = other DNA
acaagatccaaatgaacgtg

SEQ ID NO: 246325 - DNA, 20 bp, synthetic construct
  source 1..20: mol_type = other DNA
cacaagatccaaatgaacgt

SEQ ID NO: 246326 - DNA, 20 bp, synthetic construct
  source 1..20: mol_type = other DNA
acacaagatccaaatgaacg

SEQ ID NO: 246327 - DNA, 20 bp, synthetic construct
  source 1..20: mol_type = other DNA
gacacaagatccaaatgaac

SEQ ID NO: 246328 - DNA, 20 bp, synthetic construct
  source 1..20: mol_type = other DNA
agacacaagatccaaatgaa

SEQ ID NO: 246329 - DNA, 20 bp, synthetic construct
  source 1..20: mol_type = other DNA
aagacacaagatccaaatga

SEQ ID NO: 246330 - DNA, 20 bp, synthetic construct
  source 1..20: mol_type = other DNA
caagacacaagatccaaatg

SEQ ID NO: 246331 - DNA, 20 bp, synthetic construct
  source 1..20: mol_type = other DNA
ccaagacacaagatccaaat

SEQ ID NO: 246332 - DNA, 20 bp, synthetic construct
  source 1..20: mol_type = other DNA
cccaagacacaagatccaaa

SEQ ID NO: 246333 - DNA, 20 bp, synthetic construct
  source 1..20: mol_type = other DNA
ccccaagacacaagatccaa

SEQ ID NO: 246334 - DNA, 20 bp, synthetic construct
  source 1..20: mol_type = other DNA
accccaagacacaagatcca

SEQ ID NO: 246335 - DNA, 20 bp, synthetic construct
  source 1..20: mol_type = other DNA
caccccaagacacaagatcc

SEQ ID NO: 246336 - DNA, 20 bp, synthetic construct
  source 1..20: mol_type = other DNA
tcaccccaagacacaagatc

SEQ ID NO: 246337 - DNA, 20 bp, synthetic construct
  source 1..20: mol_type = other DNA
ttcaccccaagacacaagat

SEQ ID NO: 246338 - DNA, 20 bp, synthetic construct
  source 1..20: mol_type = other DNA
tttcaccccaagacacaaga

SEQ ID NO: 246339 - DNA, 20 bp, synthetic construct
  source 1..20: mol_type = other DNA
ttttcaccccaagacacaag

SEQ ID NO: 246340 - DNA, 20 bp, synthetic construct
  source 1..20: mol_type = other DNA
tttttcaccccaagacacaa

SEQ ID NO: 246341 - DNA, 20 bp, synthetic construct
  source 1..20: mol_type = other DNA
gtttttcaccccaagacaca

SEQ ID NO: 246342 - DNA, 20 bp, synthetic construct
  source 1..20: mol_type = other DNA
agtttttcaccccaagacac

SEQ ID NO: 246343 - DNA, 20 bp, synthetic construct
  source 1..20: mol_type = other DNA
cagtttttcaccccaagaca

SEQ ID NO: 246344 - DNA, 20 bp, synthetic construct
  source 1..20: mol_type = other DNA
ccagtttttcaccccaagac

SEQ ID NO: 246345 - DNA, 20 bp, synthetic construct
  source 1..20: mol_type = other DNA
gccagtttttcaccccaaga

SEQ ID NO: 246346 - DNA, 20 bp, synthetic construct
  source 1..20: mol_type = other DNA
ggccagtttttcaccccaag

SEQ ID NO: 246347 - DNA, 20 bp, synthetic construct
  source 1..20: mol_type = other DNA
gggccagtttttcaccccaa

SEQ ID NO: 246348 - DNA, 20 bp, synthetic construct
  source 1..20: mol_type = other DNA
tgggccagtttttcacccca

SEQ ID NO: 246349 - DNA, 20 bp, synthetic construct
  source 1..20: mol_type = other DNA
ttgggccagtttttcacccc

SEQ ID NO: 246350 - DNA, 20 bp, synthetic construct
  source 1..20: mol_type = other DNA
cttgggccagtttttcaccc

SEQ ID NO: 246351 - DNA, 20 bp, synthetic construct
  source 1..20: mol_type = other DNA
acttgggccagtttttcacc

SEQ ID NO: 246352 - DNA, 20 bp, synthetic construct
  source 1..20: mol_type = other DNA
cacttgggccagtttttcac

SEQ ID NO: 246353 - DNA, 20 bp, synthetic construct
  source 1..20: mol_type = other DNA
acacttgggccagtttttca

SEQ ID NO: 246354 - DNA, 20 bp, synthetic construct
  source 1..20: mol_type = other DNA
gacacttgggccagtttttc

SEQ ID NO: 246355 - DNA, 20 bp, synthetic construct
  source 1..20: mol_type = other DNA
agacacttgggccagttttt

SEQ ID NO: 246356 - DNA, 20 bp, synthetic construct
  source 1..20: mol_type = other DNA
gagacacttgggccagtttt

SEQ ID NO: 246357 - DNA, 20 bp, synthetic construct
  source 1..20: mol_type = other DNA
ggagacacttgggccagttt

SEQ ID NO: 246358 - DNA, 20 bp, synthetic construct
  source 1..20: mol_type = other DNA
gggagacacttgggccagtt

SEQ ID NO: 246359 - DNA, 20 bp, synthetic construct
  source 1..20: mol_type = other DNA
ggggagacacttgggccagt

SEQ ID NO: 246360 - DNA, 20 bp, synthetic construct
  source 1..20: mol_type = other DNA
tggggagacacttgggccag

SEQ ID NO: 246361 - DNA, 20 bp, synthetic construct
  source 1..20: mol_type = other DNA
ttggggagacacttgggcca

SEQ ID NO: 246362 - DNA, 20 bp, synthetic construct
  source 1..20: mol_type = other DNA
cttggggagacacttgggcc

SEQ ID NO: 246363 - DNA, 20 bp, synthetic construct
  source 1..20: mol_type = other DNA
gcttggggagacacttgggc

SEQ ID NO: 246364 - DNA, 20 bp, synthetic construct
  source 1..20: mol_type = other DNA
tgcttggggagacacttggg

SEQ ID NO: 246365 - DNA, 20 bp, synthetic construct
  source 1..20: mol_type = other DNA
atgcttggggagacacttgg

SEQ ID NO: 246366 - DNA, 20 bp, synthetic construct
  source 1..20: mol_type = other DNA
gatgcttggggagacacttg

SEQ ID NO: 246367 - DNA, 20 bp, synthetic construct
  source 1..20: mol_type = other DNA
ggatgcttggggagacactt

SEQ ID NO: 246368 - DNA, 20 bp, synthetic construct
  source 1..20: mol_type = other DNA
tggatgcttggggagacact

SEQ ID NO: 246369 - DNA, 20 bp, synthetic construct
  source 1..20: mol_type = other DNA
gtggatgcttggggagacac

SEQ ID NO: 246370 - DNA, 20 bp, synthetic construct
  source 1..20: mol_type = other DNA
ggtggatgcttggggagaca

SEQ ID NO: 246371 - DNA, 20 bp, synthetic construct
  source 1..20: mol_type = other DNA
aggtggatgcttggggagac

SEQ ID NO: 246372 - DNA, 20 bp, synthetic construct
  source 1..20: mol_type = other DNA
aaggtggatgcttggggaga

SEQ ID NO: 246373 - DNA, 20 bp, synthetic construct
  source 1..20: mol_type = other DNA
aaaggtggatgcttggggag

SEQ ID NO: 246374 - DNA, 20 bp, synthetic construct
  source 1..20: mol_type = other DNA
caaaggtggatgcttgggga

SEQ ID NO: 246375 - DNA, 20 bp, synthetic construct
  source 1..20: mol_type = other DNA
ccaaaggtggatgcttgggg

SEQ ID NO: 246376 - DNA, 20 bp, synthetic construct
  source 1..20: mol_type = other DNA
tccaaaggtggatgcttggg

SEQ ID NO: 246377 - DNA, 20 bp, synthetic construct
  source 1..20: mol_type = other DNA
atccaaaggtggatgcttgg

SEQ ID NO: 246378 - DNA, 20 bp, synthetic construct
  source 1..20: mol_type = other DNA
aatccaaaggtggatgcttg

SEQ ID NO: 246379 - DNA, 20 bp, synthetic construct
  source 1..20: mol_type = other DNA
taatccaaaggtggatgctt

SEQ ID NO: 246380 - DNA, 20 bp, synthetic construct
  source 1..20: mol_type = other DNA
ttaatccaaaggtggatgct

SEQ ID NO: 246381 - DNA, 20 bp, synthetic construct
  source 1..20: mol_type = other DNA
attaatccaaaggtggatgc

SEQ ID NO: 246382 - DNA, 20 bp, synthetic construct
  source 1..20: mol_type = other DNA
aattaatccaaaggtggatg

SEQ ID NO: 246383 - DNA, 20 bp, synthetic construct
  source 1..20: mol_type = other DNA
aaattaatccaaaggtggat

SEQ ID NO: 246384 - DNA, 20 bp, synthetic construct
  source 1..20: mol_type = other DNA
caaattaatccaaaggtgga

SEQ ID NO: 246385 - DNA, 20 bp, synthetic construct
  source 1..20: mol_type = other DNA
ccaaattaatccaaaggtgg

SEQ ID NO: 246386 - DNA, 20 bp, synthetic construct
  source 1..20: mol_type = other DNA
tccaaattaatccaaaggtg

SEQ ID NO: 246387 - DNA, 20 bp, synthetic construct
  source 1..20: mol_type = other DNA
ttccaaattaatccaaaggt

SEQ ID NO: 246388 - DNA, 20 bp, synthetic construct
  source 1..20: mol_type = other DNA
tttccaaattaatccaaagg

SEQ ID NO: 246389 - DNA, 20 bp, synthetic construct
  source 1..20: mol_type = other DNA
ttttccaaattaatccaaag

SEQ ID NO: 246390 - DNA, 20 bp, synthetic construct
  source 1..20: mol_type = other DNA
attttccaaattaatccaaa

SEQ ID NO: 246391 - DNA, 20 bp, synthetic construct
  source 1..20: mol_type = other DNA
cattttccaaattaatccaa

SEQ ID NO: 246392 - DNA, 20 bp, synthetic construct
  source 1..20: mol_type = other DNA
ccattttccaaattaatcca

SEQ ID NO: 246393 - DNA, 20 bp, synthetic construct
  source 1..20: mol_type = other DNA
gccattttccaaattaatcc

SEQ ID NO: 246394 - DNA, 20 bp, synthetic construct
  source 1..20: mol_type = other DNA
agccattttccaaattaatc

SEQ ID NO: 246395 - DNA, 20 bp, synthetic construct
  source 1..20: mol_type = other DNA
cagccattttccaaattaat

SEQ ID NO: 246396 - DNA, 20 bp, synthetic construct
  source 1..20: mol_type = other DNA
acagccattttccaaattaa

SEQ ID NO: 246397 - DNA, 20 bp, synthetic construct
  source 1..20: mol_type = other DNA
gacagccattttccaaatta

SEQ ID NO: 246398 - DNA, 20 bp, synthetic construct
  source 1..20: mol_type = other DNA
tgacagccattttccaaatt

SEQ ID NO: 246399 - DNA, 20 bp, synthetic construct
  source 1..20: mol_type = other DNA
ttgacagccattttccaaat

SEQ ID NO: 246400 - DNA, 20 bp, synthetic construct
  source 1..20: mol_type = other DNA
cttgacagccattttccaaa

SEQ ID NO: 246401 - DNA, 20 bp, synthetic construct
  source 1..20: mol_type = other DNA
acttgacagccattttccaa

SEQ ID NO: 246402 - DNA, 20 bp, synthetic construct
  source 1..20: mol_type = other DNA
cacttgacagccattttcca

SEQ ID NO: 246403 - DNA, 20 bp, synthetic construct
  source 1..20: mol_type = other DNA
gcacttgacagccattttcc

SEQ ID NO: 246404 - DNA, 20 bp, synthetic construct
  source 1..20: mol_type = other DNA
ggcacttgacagccattttc

SEQ ID NO: 246405 - DNA, 20 bp, synthetic construct
  source 1..20: mol_type = other DNA
gggcacttgacagccatttt

SEQ ID NO: 246406 - DNA, 20 bp, synthetic construct
  source 1..20: mol_type = other DNA
cgggcacttgacagccattt

SEQ ID NO: 246407 - DNA, 20 bp, synthetic construct
  source 1..20: mol_type = other DNA
gcgggcacttgacagccatt

SEQ ID NO: 246408 - DNA, 20 bp, synthetic construct
  source 1..20: mol_type = other DNA
ggcgggcacttgacagccat

SEQ ID NO: 246409 - DNA, 20 bp, synthetic construct
  source 1..20: mol_type = other DNA
aggcgggcacttgacagcca

SEQ ID NO: 246410 - DNA, 20 bp, synthetic construct
  source 1..20: mol_type = other DNA
gaggcgggcacttgacagcc

SEQ ID NO: 246411 - DNA, 20 bp, synthetic construct
  source 1..20: mol_type = other DNA
agaggcgggcacttgacagc

SEQ ID NO: 246412 - DNA, 20 bp, synthetic construct
  source 1..20: mol_type = other DNA
aagaggcgggcacttgacag

SEQ ID NO: 246413 - DNA, 20 bp, synthetic construct
  source 1..20: mol_type = other DNA
caagaggcgggcacttgaca

SEQ ID NO: 246414 - DNA, 20 bp, synthetic construct
  source 1..20: mol_type = other DNA
gcaagaggcgggcacttgac

SEQ ID NO: 246415 - DNA, 20 bp, synthetic construct
  source 1..20: mol_type = other DNA
agcaagaggcgggcacttga

SEQ ID NO: 246416 - DNA, 20 bp, synthetic construct
  source 1..20: mol_type = other DNA
aagcaagaggcgggcacttg

SEQ ID NO: 246417 - DNA, 20 bp, synthetic construct
  source 1..20: mol_type = other DNA
caagcaagaggcgggcactt

SEQ ID NO: 246418 - DNA, 20 bp, synthetic construct
  source 1..20: mol_type = other DNA
ccaagcaagaggcgggcact

SEQ ID NO: 246419 - DNA, 20 bp, synthetic construct
  source 1..20: mol_type = other DNA
accaagcaagaggcgggcac

SEQ ID NO: 246420 - DNA, 20 bp, synthetic construct
  source 1..20: mol_type = other DNA
taccaagcaagaggcgggca

SEQ ID NO: 246421 - DNA, 20 bp, synthetic construct
  source 1..20: mol_type = other DNA
ataccaagcaagaggcgggc

SEQ ID NO: 246422 - DNA, 20 bp, synthetic construct
  source 1..20: mol_type = other DNA
tataccaagcaagaggcggg

SEQ ID NO: 246423 - DNA, 20 bp, synthetic construct
  source 1..20: mol_type = other DNA
ttataccaagcaagaggcgg

SEQ ID NO: 246424 - DNA, 20 bp, synthetic construct
  source 1..20: mol_type = other DNA
attataccaagcaagaggcg

SEQ ID NO: 246425 - DNA, 20 bp, synthetic construct
  source 1..20: mol_type = other DNA
cattataccaagcaagaggc

SEQ ID NO: 246426 - DNA, 20 bp, synthetic construct
  source 1..20: mol_type = other DNA
gcattataccaagcaagagg

SEQ ID NO: 246427 - DNA, 20 bp, synthetic construct
  source 1..20: mol_type = other DNA
agcattataccaagcaagag

SEQ ID NO: 246428 - DNA, 20 bp, synthetic construct
  source 1..20: mol_type = other DNA
tagcattataccaagcaaga

SEQ ID NO: 246429 - DNA, 20 bp, synthetic construct
  source 1..20: mol_type = other DNA
gtagcattataccaagcaag

SEQ ID NO: 246430 - DNA, 20 bp, synthetic construct
  source 1..20: mol_type = other DNA
tgtagcattataccaagcaa

SEQ ID NO: 246431 - DNA, 20 bp, synthetic construct
  source 1..20: mol_type = other DNA
ctgtagcattataccaagca

SEQ ID NO: 246432 - DNA, 20 bp, synthetic construct
  source 1..20: mol_type = other DNA
gctgtagcattataccaagc

SEQ ID NO: 246433 - DNA, 20 bp, synthetic construct
  source 1..20: mol_type = other DNA
agctgtagcattataccaag

SEQ ID NO: 246434 - DNA, 20 bp, synthetic construct
  source 1..20: mol_type = other DNA
aagctgtagcattataccaa

SEQ ID NO: 246435 - DNA, 20 bp, synthetic construct
  source 1..20: mol_type = other DNA
aaagctgtagcattatacca

SEQ ID NO: 246436 - DNA, 20 bp, synthetic construct
  source 1..20: mol_type = other DNA
taaagctgtagcattatacc

SEQ ID NO: 246437 - DNA, 20 bp, synthetic construct
  source 1..20: mol_type = other DNA
ctaaagctgtagcattatac

SEQ ID NO: 246438 - DNA, 20 bp, synthetic construct
  source 1..20: mol_type = other DNA
tctaaagctgtagcattata

SEQ ID NO: 246439 - DNA, 20 bp, synthetic construct
  source 1..20: mol_type = other DNA
ctctaaagctgtagcattat

SEQ ID NO: 246440 - DNA, 20 bp, synthetic construct
  source 1..20: mol_type = other DNA
cctctaaagctgtagcatta

SEQ ID NO: 246441 - DNA, 20 bp, synthetic construct
  source 1..20: mol_type = other DNA
tcctctaaagctgtagcatt

SEQ ID NO: 246442 - DNA, 20 bp, synthetic construct
  source 1..20: mol_type = other DNA
gtcctctaaagctgtagcat

SEQ ID NO: 246443 - DNA, 20 bp, synthetic construct
  source 1..20: mol_type = other DNA
cgtcctctaaagctgtagca

SEQ ID NO: 246444 - DNA, 20 bp, synthetic construct
  source 1..20: mol_type = other DNA
gcgtcctctaaagctgtagc

SEQ ID NO: 246445 - DNA, 20 bp, synthetic construct
  source 1..20: mol_type = other DNA
tgcgtcctctaaagctgtag

SEQ ID NO: 246446 - DNA, 20 bp, synthetic construct
  source 1..20: mol_type = other DNA
ctgcgtcctctaaagctgta

SEQ ID NO: 246447 - DNA, 20 bp, synthetic construct
  source 1..20: mol_type = other DNA
gctgcgtcctctaaagctgt

SEQ ID NO: 246448 - DNA, 20 bp, synthetic construct
  source 1..20: mol_type = other DNA
tgctgcgtcctctaaagctg

SEQ ID NO: 246449 - DNA, 20 bp, synthetic construct
  source 1..20: mol_type = other DNA
ctgctgcgtcctctaaagct

SEQ ID NO: 246450 - DNA, 20 bp, synthetic construct
  source 1..20: mol_type = other DNA
cctgctgcgtcctctaaagc

SEQ ID NO: 246451 - DNA, 20 bp, synthetic construct
  source 1..20: mol_type = other DNA
gcctgctgcgtcctctaaag

SEQ ID NO: 246452 - DNA, 20 bp, synthetic construct
  source 1..20: mol_type = other DNA
tgcctgctgcgtcctctaaa

SEQ ID NO: 246453 - DNA, 20 bp, synthetic construct
  source 1..20: mol_type = other DNA
atgcctgctgcgtcctctaa

SEQ ID NO: 246454 - DNA, 20 bp, synthetic construct
  source 1..20: mol_type = other DNA
catgcctgctgcgtcctcta

SEQ ID NO: 246455 - DNA, 20 bp, synthetic construct
  source 1..20: mol_type = other DNA
ccatgcctgctgcgtcctct

SEQ ID NO: 246456 - DNA, 20 bp, synthetic construct
  source 1..20: mol_type = other DNA
cccatgcctgctgcgtcctc

SEQ ID NO: 246457 - DNA, 20 bp, synthetic construct
  source 1..20: mol_type = other DNA
gcccatgcctgctgcgtcct

SEQ ID NO: 246458 - DNA, 20 bp, synthetic construct
  source 1..20: mol_type = other DNA
ggcccatgcctgctgcgtcc

SEQ ID NO: 246459 - DNA, 20 bp, synthetic construct
  source 1..20: mol_type = other DNA
aggcccatgcctgctgcgtc

SEQ ID NO: 246460 - DNA, 20 bp, synthetic construct
  source 1..20: mol_type = other DNA
aaggcccatgcctgctgcgt

SEQ ID NO: 246461 - DNA, 20 bp, synthetic construct
  source 1..20: mol_type = other DNA
caaggcccatgcctgctgcg

SEQ ID NO: 246462 - DNA, 20 bp, synthetic construct
  source 1..20: mol_type = other DNA
gcaaggcccatgcctgctgc

SEQ ID NO: 246463 - DNA, 20 bp, synthetic construct
  source 1..20: mol_type = other DNA
ggcaaggcccatgcctgctg

SEQ ID NO: 246464 - DNA, 20 bp, synthetic construct
  source 1..20: mol_type = other DNA
cggcaaggcccatgcctgct

SEQ ID NO: 246465 - DNA, 20 bp, synthetic construct
  source 1..20: mol_type = other DNA
gcggcaaggcccatgcctgc

SEQ ID NO: 246466 - DNA, 20 bp, synthetic construct
  source 1..20: mol_type = other DNA
agcggcaaggcccatgcctg

SEQ ID NO: 246467 - DNA, 20 bp, synthetic construct
  source 1..20: mol_type = other DNA
cagcggcaaggcccatgcct

SEQ ID NO: 246468 - DNA, 20 bp, synthetic construct
  source 1..20: mol_type = other DNA
tcagcggcaaggcccatgcc

SEQ ID NO: 246469 - DNA, 20 bp, synthetic construct
  source 1..20: mol_type = other DNA
ctcagcggcaaggcccatgc

SEQ ID NO: 246470 - DNA, 20 bp, synthetic construct
  source 1..20: mol_type = other DNA
cctcagcggcaaggcccatg

SEQ ID NO: 246471 - DNA, 20 bp, synthetic construct
  source 1..20: mol_type = other DNA
acctcagcggcaaggcccat

SEQ ID NO: 246472 - DNA, 20 bp, synthetic construct
  source 1..20: mol_type = other DNA
aacctcagcggcaaggccca

SEQ ID NO: 246473 - DNA, 20 bp, synthetic construct
  source 1..20: mol_type = other DNA
gaacctcagcggcaaggccc

SEQ ID NO: 246474 - DNA, 20 bp, synthetic construct
  source 1..20: mol_type = other DNA
agaacctcagcggcaaggcc

SEQ ID NO: 246475 - DNA, 20 bp, synthetic construct
  source 1..20: mol_type = other DNA
aagaacctcagcggcaaggc

SEQ ID NO: 246476 - DNA, 20 bp, synthetic construct
  source 1..20: mol_type = other DNA
taagaacctcagcggcaagg

SEQ ID NO: 246477 - DNA, 20 bp, synthetic construct
  source 1..20: mol_type = other DNA
ctaagaacctcagcggcaag

SEQ ID NO: 246478 - DNA, 20 bp, synthetic construct
  source 1..20: mol_type = other DNA
gctaagaacctcagcggcaa

SEQ ID NO: 246479 - DNA, 20 bp, synthetic construct
  source 1..20: mol_type = other DNA
ggctaagaacctcagcggca

SEQ ID NO: 246480 - DNA, 20 bp, synthetic construct
  source 1..20: mol_type = other DNA
aggctaagaacctcagcggc

SEQ ID NO: 246481 - DNA, 20 bp, synthetic construct
  source 1..20: mol_type = other DNA
gaggctaagaacctcagcgg

SEQ ID NO: 246482 - DNA, 20 bp, synthetic construct
  source 1..20: mol_type = other DNA
tgaggctaagaacctcagcg

SEQ ID NO: 246483 - DNA, 20 bp, synthetic construct
  source 1..20: mol_type = other DNA
atgaggctaagaacctcagc

SEQ ID NO: 246484 - DNA, 20 bp, synthetic construct
  source 1..20: mol_type = other DNA
catgaggctaagaacctcag

SEQ ID NO: 246485 - DNA, 20 bp, synthetic construct
  source 1..20: mol_type = other DNA
tcatgaggctaagaacctca

SEQ ID NO: 246486 - DNA, 20 bp, synthetic construct
  source 1..20: mol_type = other DNA
ctcatgaggctaagaacctc

SEQ ID NO: 246487 - DNA, 20 bp, synthetic construct
  source 1..20: mol_type = other DNA
tctcatgaggctaagaacct

SEQ ID NO: 246488 - DNA, 20 bp, synthetic construct
  source 1..20: mol_type = other DNA
ttctcatgaggctaagaacc

SEQ ID NO: 246489 - DNA, 20 bp, synthetic construct
  source 1..20: mol_type = other DNA
attctcatgaggctaagaac

SEQ ID NO: 246490 - DNA, 20 bp, synthetic construct
  source 1..20: mol_type = other DNA
tattctcatgaggctaagaa

SEQ ID NO: 246491 - DNA, 20 bp, synthetic construct
  source 1..20: mol_type = other DNA
atattctcatgaggctaaga

SEQ ID NO: 246492 - DNA, 20 bp, synthetic construct
  source 1..20: mol_type = other DNA
gatattctcatgaggctaag

SEQ ID NO: 246493 - DNA, 20 bp, synthetic construct
  source 1..20: mol_type = other DNA
ggatattctcatgaggctaa

SEQ ID NO: 246494 - DNA, 20 bp, synthetic construct
  source 1..20: mol_type = other DNA
tggatattctcatgaggcta

SEQ ID NO: 246495 - DNA, 20 bp, synthetic construct
  source 1..20: mol_type = other DNA
ctggatattctcatgaggct

SEQ ID NO: 246496 - DNA, 20 bp, synthetic construct
  source 1..20: mol_type = other DNA
tctggatattctcatgaggc

SEQ ID NO: 246497 - DNA, 20 bp, synthetic construct
  source 1..20: mol_type = other DNA
atctggatattctcatgagg

SEQ ID NO: 246498 - DNA, 20 bp, synthetic construct
  source 1..20: mol_type = other DNA
gatctggatattctcatgag

SEQ ID NO: 246499 - DNA, 20 bp, synthetic construct
  source 1..20: mol_type = other DNA
tgatctggatattctcatga

SEQ ID NO: 246500 - DNA, 20 bp, synthetic construct
  source 1..20: mol_type = other DNA
ctgatctggatattctcatg

SEQ ID NO: 246501 - DNA, 20 bp, synthetic construct
  source 1..20: mol_type = other DNA
tctgatctggatattctcat

SEQ ID NO: 246502 - DNA, 20 bp, synthetic construct
  source 1..20: mol_type = other DNA
atctgatctggatattctca

SEQ ID NO: 246503 - DNA, 20 bp, synthetic construct
  source 1..20: mol_type = other DNA
aatctgatctggatattctc

SEQ ID NO: 246504 - DNA, 20 bp, synthetic construct
  source 1..20: mol_type = other DNA
gaatctgatctggatattct

SEQ ID NO: 246505 - DNA, 20 bp, synthetic construct
  source 1..20: mol_type = other DNA
agaatctgatctggatattc

SEQ ID NO: 246506 - DNA, 20 bp, synthetic construct
  source 1..20: mol_type = other DNA
gagaatctgatctggatatt

SEQ ID NO: 246507 - DNA, 20 bp, synthetic construct
  source 1..20: mol_type = other DNA
agagaatctgatctggatat

SEQ ID NO: 246508 - DNA, 20 bp, synthetic construct
  source 1..20: mol_type = other DNA
aagagaatctgatctggata

SEQ ID NO: 246509 - DNA, 20 bp, synthetic construct
  source 1..20: mol_type = other DNA
caagagaatctgatctggat

SEQ ID NO: 246510 - DNA, 20 bp, synthetic construct
  source 1..20: mol_type = other DNA
ccaagagaatctgatctgga

SEQ ID NO: 246511 - DNA, 20 bp, synthetic construct
  source 1..20: mol_type = other DNA
gccaagagaatctgatctgg

SEQ ID NO: 246512 - DNA, 20 bp, synthetic construct
  source 1..20: mol_type = other DNA
agccaagagaatctgatctg

SEQ ID NO: 246513 - DNA, 20 bp, synthetic construct
  source 1..20: mol_type = other DNA
gagccaagagaatctgatct

SEQ ID NO: 246514 - DNA, 20 bp, synthetic construct
  source 1..20: mol_type = other DNA
ggagccaagagaatctgatc

SEQ ID NO: 246515 - DNA, 20 bp, synthetic construct
  source 1..20: mol_type = other DNA
aggagccaagagaatctgat

SEQ ID NO: 246516 - DNA, 20 bp, synthetic construct
  source 1..20: mol_type = other DNA
aaggagccaagagaatctga

SEQ ID NO: 246517 - DNA, 20 bp, synthetic construct
  source 1..20: mol_type = other DNA
gaaggagccaagagaatctg

SEQ ID NO: 246518 - DNA, 20 bp, synthetic construct
  source 1..20: mol_type = other DNA
agaaggagccaagagaatct

SEQ ID NO: 246519 - DNA, 20 bp, synthetic construct
  source 1..20: mol_type = other DNA
aagaaggagccaagagaatc

SEQ ID NO: 246520 - DNA, 20 bp, synthetic construct
  source 1..20: mol_type = other DNA
taagaaggagccaagagaat

SEQ ID NO: 246521 - DNA, 20 bp, synthetic construct
  source 1..20: mol_type = other DNA
ctaagaaggagccaagagaa

SEQ ID NO: 246522 - DNA, 20 bp, synthetic construct
  source 1..20: mol_type = other DNA
tctaagaaggagccaagaga

SEQ ID NO: 246523 - DNA, 20 bp, synthetic construct
  source 1..20: mol_type = other DNA
ctctaagaaggagccaagag

SEQ ID NO: 246524 - DNA, 20 bp, synthetic construct
  source 1..20: mol_type = other DNA
gctctaagaaggagccaaga

SEQ ID NO: 246525 - DNA, 20 bp, synthetic construct
  source 1..20: mol_type = other DNA
ggctctaagaaggagccaag

SEQ ID NO: 246526 - DNA, 20 bp, synthetic construct
  source 1..20: mol_type = other DNA
tggctctaagaaggagccaa

SEQ ID NO: 246527 - DNA, 20 bp, synthetic construct
  source 1..20: mol_type = other DNA
ctggctctaagaaggagcca

SEQ ID NO: 246528 - DNA, 20 bp, synthetic construct
  source 1..20: mol_type = other DNA
actggctctaagaaggagcc

SEQ ID NO: 246529 - DNA, 20 bp, synthetic construct
  source 1..20: mol_type = other DNA
cactggctctaagaaggagc

SEQ ID NO: 246530 - DNA, 20 bp, synthetic construct
  source 1..20: mol_type = other DNA
tcactggctctaagaaggag

SEQ ID NO: 246531 - DNA, 20 bp, synthetic construct
  source 1..20: mol_type = other DNA
atcactggctctaagaagga

SEQ ID NO: 246532 - DNA, 20 bp, synthetic construct
  source 1..20: mol_type = other DNA
catcactggctctaagaagg

SEQ ID NO: 246533 - DNA, 20 bp, synthetic construct
  source 1..20: mol_type = other DNA
gcatcactggctctaagaag

SEQ ID NO: 246534 - DNA, 20 bp, synthetic construct
  source 1..20: mol_type = other DNA
tgcatcactggctctaagaa

SEQ ID NO: 246535 - DNA, 20 bp, synthetic construct
  source 1..20: mol_type = other DNA
ttgcatcactggctctaaga

SEQ ID NO: 246536 - DNA, 20 bp, synthetic construct
  source 1..20: mol_type = other DNA
cttgcatcactggctctaag

SEQ ID NO: 246537 - DNA, 20 bp, synthetic construct
  source 1..20: mol_type = other DNA
tcttgcatcactggctctaa

SEQ ID NO: 246538 - DNA, 20 bp, synthetic construct
  source 1..20: mol_type = other DNA
gtcttgcatcactggctcta

SEQ ID NO: 246539 - DNA, 20 bp, synthetic construct
  source 1..20: mol_type = other DNA
tgtcttgcatcactggctct

SEQ ID NO: 246540 - DNA, 20 bp, synthetic construct
  source 1..20: mol_type = other DNA
gtgtcttgcatcactggctc

SEQ ID NO: 246541 - DNA, 20 bp, synthetic construct
  source 1..20: mol_type = other DNA
agtgtcttgcatcactggct

SEQ ID NO: 246542 - DNA, 20 bp, synthetic construct
  source 1..20: mol_type = other DNA
aagtgtcttgcatcactggc

SEQ ID NO: 246543 - DNA, 20 bp, synthetic construct
  source 1..20: mol_type = other DNA
gaagtgtcttgcatcactgg

SEQ ID NO: 246544 - DNA, 20 bp, synthetic construct
  source 1..20: mol_type = other DNA
ggaagtgtcttgcatcactg

SEQ ID NO: 246545 - DNA, 20 bp, synthetic construct
  source 1..20: mol_type = other DNA
aggaagtgtcttgcatcact

SEQ ID NO: 246546 - DNA, 20 bp, synthetic construct
  source 1..20: mol_type = other DNA
caggaagtgtcttgcatcac

SEQ ID NO: 246547 - DNA, 20 bp, synthetic construct
  source 1..20: mol_type = other DNA
gcaggaagtgtcttgcatca

SEQ ID NO: 246548 - DNA, 20 bp, synthetic construct
  source 1..20: mol_type = other DNA
agcaggaagtgtcttgcatc

SEQ ID NO: 246549 - DNA, 20 bp, synthetic construct
  source 1..20: mol_type = other DNA
gagcaggaagtgtcttgcat

SEQ ID NO: 246550 - DNA, 20 bp, synthetic construct
  source 1..20: mol_type = other DNA
tgagcaggaagtgtcttgca

SEQ ID NO: 246551 - DNA, 20 bp, synthetic construct
  source 1..20: mol_type = other DNA
atgagcaggaagtgtcttgc

SEQ ID NO: 246552 - DNA, 20 bp, synthetic construct
  source 1..20: mol_type = other DNA
gatgagcaggaagtgtcttg

SEQ ID NO: 246553 - DNA, 20 bp, synthetic construct
  source 1..20: mol_type = other DNA
agatgagcaggaagtgtctt

SEQ ID NO: 246554 - DNA, 20 bp, synthetic construct
  source 1..20: mol_type = other DNA
aagatgagcaggaagtgtct

SEQ ID NO: 246555 - DNA, 20 bp, synthetic construct
  source 1..20: mol_type = other DNA
caagatgagcaggaagtgtc

SEQ ID NO: 246556 - DNA, 20 bp, synthetic construct
  source 1..20: mol_type = other DNA
acaagatgagcaggaagtgt

SEQ ID NO: 246557 - DNA, 20 bp, synthetic construct
  source 1..20: mol_type = other DNA
gacaagatgagcaggaagtg

SEQ ID NO: 246558 - DNA, 20 bp, synthetic construct
  source 1..20: mol_type = other DNA
cgacaagatgagcaggaagt

SEQ ID NO: 246559 - DNA, 20 bp, synthetic construct
  source 1..20: mol_type = other DNA
ccgacaagatgagcaggaag

SEQ ID NO: 246560 - DNA, 20 bp, synthetic construct
  source 1..20: mol_type = other DNA
cccgacaagatgagcaggaa

SEQ ID NO: 246561 - DNA, 20 bp, synthetic construct
  source 1..20: mol_type = other DNA
tcccgacaagatgagcagga

SEQ ID NO: 246562 - DNA, 20 bp, synthetic construct
  source 1..20: mol_type = other DNA
gtcccgacaagatgagcagg

SEQ ID NO: 246563 - DNA, 20 bp, synthetic construct
  source 1..20: mol_type = other DNA
cgtcccgacaagatgagcag

SEQ ID NO: 246564 - DNA, 20 bp, synthetic construct
  source 1..20: mol_type = other DNA
ccgtcccgacaagatgagca

SEQ ID NO: 246565 - DNA, 20 bp, synthetic construct
  source 1..20: mol_type = other DNA
accgtcccgacaagatgagc

SEQ ID NO: 246566 - DNA, 20 bp, synthetic construct
  source 1..20: mol_type = other DNA
aaccgtcccgacaagatgag

SEQ ID NO: 246567 - DNA, 20 bp, synthetic construct
  source 1..20: mol_type = other DNA
aaaccgtcccgacaagatga

SEQ ID NO: 246568 - DNA, 20 bp, synthetic construct
  source 1..20: mol_type = other DNA
aaaaccgtcccgacaagatg

SEQ ID NO: 246569 - DNA, 20 bp, synthetic construct
  source 1..20: mol_type = other DNA
taaaaccgtcccgacaagat

SEQ ID NO: 246570 - DNA, 20 bp, synthetic construct
  source 1..20: mol_type = other DNA
gtaaaaccgtcccgacaaga

SEQ ID NO: 246571 - DNA, 20 bp, synthetic construct
  source 1..20: mol_type = other DNA
tgtaaaaccgtcccgacaag

SEQ ID NO: 246572 - DNA, 20 bp, synthetic construct
  source 1..20: mol_type = other DNA
ttgtaaaaccgtcccgacaa

SEQ ID NO: 246573 - DNA, 20 bp, synthetic construct
  source 1..20: mol_type = other DNA
cttgtaaaaccgtcccgaca

SEQ ID NO: 246574 - DNA, 20 bp, synthetic construct
  source 1..20: mol_type = other DNA
acttgtaaaaccgtcccgac

SEQ ID NO: 246575 - DNA, 20 bp, synthetic construct
  source 1..20: mol_type = other DNA
aacttgtaaaaccgtcccga

SEQ ID NO: 246576 - DNA, 20 bp, synthetic construct
  source 1..20: mol_type = other DNA
caacttgtaaaaccgtcccg

SEQ ID NO: 246577 - DNA, 20 bp, synthetic construct
  source 1..20: mol_type = other DNA
gcaacttgtaaaaccgtccc

SEQ ID NO: 246578 - DNA, 20 bp, synthetic construct
  source 1..20: mol_type = other DNA
ggcaacttgtaaaaccgtcc

SEQ ID NO: 246579 - DNA, 20 bp, synthetic construct
  source 1..20: mol_type = other DNA
aggcaacttgtaaaaccgtc

SEQ ID NO: 246580 - DNA, 20 bp, synthetic construct
  source 1..20: mol_type = other DNA
caggcaacttgtaaaaccgt

SEQ ID NO: 246581 - DNA, 20 bp, synthetic construct
  source 1..20: mol_type = other DNA
gcaggcaacttgtaaaaccg

SEQ ID NO: 246582 - DNA, 20 bp, synthetic construct
  source 1..20: mol_type = other DNA
ggcaggcaacttgtaaaacc

SEQ ID NO: 246583 - DNA, 20 bp, synthetic construct
  source 1..20: mol_type = other DNA
tggcaggcaacttgtaaaac

SEQ ID NO: 246584 - DNA, 20 bp, synthetic construct
  source 1..20: mol_type = other DNA
atggcaggcaacttgtaaaa

SEQ ID NO: 246585 - DNA, 20 bp, synthetic construct
  source 1..20: mol_type = other DNA
gatggcaggcaacttgtaaa

SEQ ID NO: 246586 - DNA, 20 bp, synthetic construct
  source 1..20: mol_type = other DNA
ggatggcaggcaacttgtaa

SEQ ID NO: 246587 - DNA, 20 bp, synthetic construct
  source 1..20: mol_type = other DNA
aggatggcaggcaacttgta

SEQ ID NO: 246588 - DNA, 20 bp, synthetic construct
  source 1..20: mol_type = other DNA
caggatggcaggcaacttgt

SEQ ID NO: 246589 - DNA, 20 bp, synthetic construct
  source 1..20: mol_type = other DNA
tcaggatggcaggcaacttg

SEQ ID NO: 246590 - DNA, 20 bp, synthetic construct
  source 1..20: mol_type = other DNA
ctcaggatggcaggcaactt

SEQ ID NO: 246591 - DNA, 20 bp, synthetic construct
  source 1..20: mol_type = other DNA
tctcaggatggcaggcaact

SEQ ID NO: 246592 - DNA, 20 bp, synthetic construct
  source 1..20: mol_type = other DNA
ttctcaggatggcaggcaac

SEQ ID NO: 246593 - DNA, 20 bp, synthetic construct
  source 1..20: mol_type = other DNA
tttctcaggatggcaggcaa

SEQ ID NO: 246594 - DNA, 20 bp, synthetic construct
  source 1..20: mol_type = other DNA
ctttctcaggatggcaggca

SEQ ID NO: 246595 - DNA, 20 bp, synthetic construct
  source 1..20: mol_type = other DNA
actttctcaggatggcaggc

SEQ ID NO: 246596 - DNA, 20 bp, synthetic construct
  source 1..20: mol_type = other DNA
gactttctcaggatggcagg

SEQ ID NO: 246597 - DNA, 20 bp, synthetic construct
  source 1..20: mol_type = other DNA
agactttctcaggatggcag

SEQ ID NO: 246598 - DNA, 20 bp, synthetic construct
  source 1..20: mol_type = other DNA
tagactttctcaggatggca

SEQ ID NO: 246599 - DNA, 20 bp, synthetic construct
  source 1..20: mol_type = other DNA
gtagactttctcaggatggc

SEQ ID NO: 246600 - DNA, 20 bp, synthetic construct
  source 1..20: mol_type = other DNA
tgtagactttctcaggatgg

SEQ ID NO: 246601 - DNA, 20 bp, synthetic construct
  source 1..20: mol_type = other DNA
ttgtagactttctcaggatg

SEQ ID NO: 246602 - DNA, 20 bp, synthetic construct
  source 1..20: mol_type = other DNA
tttgtagactttctcaggat

SEQ ID NO: 246603 - DNA, 20 bp, synthetic construct
  source 1..20: mol_type = other DNA
ttttgtagactttctcagga

SEQ ID NO: 246604 - DNA, 20 bp, synthetic construct
  source 1..20: mol_type = other DNA
gttttgtagactttctcagg

SEQ ID NO: 246605 - DNA, 20 bp, synthetic construct
  source 1..20: mol_type = other DNA
cgttttgtagactttctcag

SEQ ID NO: 246606 - DNA, 20 bp, synthetic construct
  source 1..20: mol_type = other DNA
tcgttttgtagactttctca

SEQ ID NO: 246607 - DNA, 20 bp, synthetic construct
  source 1..20: mol_type = other DNA
atcgttttgtagactttctc

SEQ ID NO: 246608 - DNA, 20 bp, synthetic construct
  source 1..20: mol_type = other DNA
catcgttttgtagactttct

SEQ ID NO: 246609 - DNA, 20 bp, synthetic construct
  source 1..20: mol_type = other DNA
gcatcgttttgtagactttc

SEQ ID NO: 246610 - DNA, 20 bp, synthetic construct
  source 1..20: mol_type = other DNA
ggcatcgttttgtagacttt

SEQ ID NO: 246611 - DNA, 20 bp, synthetic construct
  source 1..20: mol_type = other DNA
tggcatcgttttgtagactt

SEQ ID NO: 246612 - DNA, 20 bp, synthetic construct
  source 1..20: mol_type = other DNA
ctggcatcgttttgtagact

SEQ ID NO: 246613 - DNA, 20 bp, synthetic construct
  source 1..20: mol_type = other DNA
tctggcatcgttttgtagac

SEQ ID NO: 246614 - DNA, 20 bp, synthetic construct
  source 1..20: mol_type = other DNA
gtctggcatcgttttgtaga

SEQ ID NO: 246615 - DNA, 20 bp, synthetic construct
  source 1..20: mol_type = other DNA
ggtctggcatcgttttgtag

SEQ ID NO: 246616 - DNA, 20 bp, synthetic construct
  source 1..20: mol_type = other DNA
aggtctggcatcgttttgta

SEQ ID NO: 246617 - DNA, 20 bp, synthetic construct
  source 1..20: mol_type = other DNA
gaggtctggcatcgttttgt

SEQ ID NO: 246618 - DNA, 20 bp, synthetic construct
  source 1..20: mol_type = other DNA
tgaggtctggcatcgttttg

SEQ ID NO: 246619 - DNA, 20 bp, synthetic construct
  source 1..20: mol_type = other DNA
atgaggtctggcatcgtttt

SEQ ID NO: 246620 - DNA, 20 bp, synthetic construct
  source 1..20: mol_type = other DNA
catgaggtctggcatcgttt

SEQ ID NO: 246621 - DNA, 20 bp, synthetic construct
  source 1..20: mol_type = other DNA
gcatgaggtctggcatcgtt

SEQ ID NO: 246622 - DNA, 20 bp, synthetic construct
  source 1..20: mol_type = other DNA
ggcatgaggtctggcatcgt

SEQ ID NO: 246623 - DNA, 20 bp, synthetic construct
  source 1..20: mol_type = other DNA
tggcatgaggtctggcatcg

SEQ ID NO: 246624 - DNA, 20 bp, synthetic construct
  source 1..20: mol_type = other DNA
ctggcatgaggtctggcatc

SEQ ID NO: 246625 - DNA, 20 bp, synthetic construct
  source 1..20: mol_type = other DNA
gctggcatgaggtctggcat

SEQ ID NO: 246626 - DNA, 20 bp, synthetic construct
  source 1..20: mol_type = other DNA
agctggcatgaggtctggca

SEQ ID NO: 246627 - DNA, 20 bp, synthetic construct
  source 1..20: mol_type = other DNA
aagctggcatgaggtctggc

SEQ ID NO: 246628 - DNA, 20 bp, synthetic construct
  source 1..20: mol_type = other DNA
gaagctggcatgaggtctgg

SEQ ID NO: 246629 - DNA, 20 bp, synthetic construct
  source 1..20: mol_type = other DNA
ggaagctggcatgaggtctg

SEQ ID NO: 246630 - DNA, 20 bp, synthetic construct
  source 1..20: mol_type = other DNA
gggaagctggcatgaggtct

SEQ ID NO: 246631 - DNA, 20 bp, synthetic construct
  source 1..20: mol_type = other DNA
tgggaagctggcatgaggtc

SEQ ID NO: 246632 - DNA, 20 bp, synthetic construct
  source 1..20: mol_type = other DNA
ttgggaagctggcatgaggt

SEQ ID NO: 246633 - DNA, 20 bp, synthetic construct
  source 1..20: mol_type = other DNA
cttgggaagctggcatgagg

SEQ ID NO: 246634 - DNA, 20 bp, synthetic construct
  source 1..20: mol_type = other DNA
gcttgggaagctggcatgag

SEQ ID NO: 246635 - DNA, 20 bp, synthetic construct
  source 1..20: mol_type = other DNA
ggcttgggaagctggcatga

SEQ ID NO: 246636 - DNA, 20 bp, synthetic construct
  source 1..20: mol_type = other DNA
aggcttgggaagctggcatg

SEQ ID NO: 246637 - DNA, 20 bp, synthetic construct
  source 1..20: mol_type = other DNA
aaggcttgggaagctggcat

SEQ ID NO: 246638 - DNA, 20 bp, synthetic construct
  source 1..20: mol_type = other DNA
caaggcttgggaagctggca

SEQ ID NO: 246639 - DNA, 20 bp, synthetic construct
  source 1..20: mol_type = other DNA
tcaaggcttgggaagctggc

SEQ ID NO: 246640 - DNA, 20 bp, synthetic construct
  source 1..20: mol_type = other DNA
gtcaaggcttgggaagctgg

SEQ ID NO: 246641 - DNA, 20 bp, synthetic construct
  source 1..20: mol_type = other DNA
agtcaaggcttgggaagctg

SEQ ID NO: 246642 - DNA, 20 bp, synthetic construct
  source 1..20: mol_type = other DNA
gagtcaaggcttgggaagct

SEQ ID NO: 246643 - DNA, 20 bp, synthetic construct
  source 1..20: mol_type = other DNA
agagtcaaggcttgggaagc

SEQ ID NO: 246644 - DNA, 20 bp, synthetic construct
  source 1..20: mol_type = other DNA
gagagtcaaggcttgggaag

SEQ ID NO: 246645 - DNA, 20 bp, synthetic construct
  source 1..20: mol_type = other DNA
tgagagtcaaggcttgggaa

SEQ ID NO: 246646 - DNA, 20 bp, synthetic construct
  source 1..20: mol_type = other DNA
ctgagagtcaaggcttggga

SEQ ID NO: 246647 - DNA, 20 bp, synthetic construct
  source 1..20: mol_type = other DNA
actgagagtcaaggcttggg

SEQ ID NO: 246648 - DNA, 20 bp, synthetic construct
  source 1..20: mol_type = other DNA
cactgagagtcaaggcttgg

SEQ ID NO: 246649 - DNA, 20 bp, synthetic construct
  source 1..20: mol_type = other DNA
gcactgagagtcaaggcttg

SEQ ID NO: 246650 - DNA, 20 bp, synthetic construct
  source 1..20: mol_type = other DNA
agcactgagagtcaaggctt

SEQ ID NO: 246651 - DNA, 20 bp, synthetic construct
  source 1..20: mol_type = other DNA
gagcactgagagtcaaggct

SEQ ID NO: 246652 - DNA, 20 bp, synthetic construct
  source 1..20: mol_type = other DNA
ggagcactgagagtcaaggc

SEQ ID NO: 246653 - DNA, 20 bp, synthetic construct
  source 1..20: mol_type = other DNA
gggagcactgagagtcaagg

SEQ ID NO: 246654 - DNA, 20 bp, synthetic construct
  source 1..20: mol_type = other DNA
agggagcactgagagtcaag

SEQ ID NO: 246655 - DNA, 20 bp, synthetic construct
  source 1..20: mol_type = other DNA
gagggagcactgagagtcaa

SEQ ID NO: 246656 - DNA, 20 bp, synthetic construct
  source 1..20: mol_type = other DNA
tgagggagcactgagagtca

SEQ ID NO: 246657 - DNA, 20 bp, synthetic construct
  source 1..20: mol_type = other DNA
ttgagggagcactgagagtc

SEQ ID NO: 246658 - DNA, 20 bp, synthetic construct
  source 1..20: mol_type = other DNA
gttgagggagcactgagagt

SEQ ID NO: 246659 - DNA, 20 bp, synthetic construct
  source 1..20: mol_type = other DNA
tgttgagggagcactgagag

SEQ ID NO: 246660 - DNA, 20 bp, synthetic construct
  source 1..20: mol_type = other DNA
ctgttgagggagcactgaga

SEQ ID NO: 246661 - DNA, 20 bp, synthetic construct
  source 1..20: mol_type = other DNA
cctgttgagggagcactgag

SEQ ID NO: 246662 - DNA, 20 bp, synthetic construct
  source 1..20: mol_type = other DNA
tcctgttgagggagcactga

SEQ ID NO: 246663 - DNA, 20 bp, synthetic construct
  source 1..20: mol_type = other DNA
atcctgttgagggagcactg

SEQ ID NO: 246664 - DNA, 20 bp, synthetic construct
  source 1..20: mol_type = other DNA
aatcctgttgagggagcact

SEQ ID NO: 246665 - DNA, 20 bp, synthetic construct
  source 1..20: mol_type = other DNA
gaatcctgttgagggagcac

SEQ ID NO: 246666 - DNA, 20 bp, synthetic construct
  source 1..20: mol_type = other DNA
agaatcctgttgagggagca

SEQ ID NO: 246667 - DNA, 20 bp, synthetic construct
  source 1..20: mol_type = other DNA
cagaatcctgttgagggagc

SEQ ID NO: 246668 - DNA, 20 bp, synthetic construct
  source 1..20: mol_type = other DNA
ccagaatcctgttgagggag

SEQ ID NO: 246669 - DNA, 20 bp, synthetic construct
  source 1..20: mol_type = other DNA
tccagaatcctgttgaggga

SEQ ID NO: 246670 - DNA, 20 bp, synthetic construct
  source 1..20: mol_type = other DNA
ttccagaatcctgttgaggg

SEQ ID NO: 246671 - DNA, 20 bp, synthetic construct
  source 1..20: mol_type = other DNA
cttccagaatcctgttgagg

SEQ ID NO: 246672 - DNA, 20 bp, synthetic construct
  source 1..20: mol_type = other DNA
tcttccagaatcctgttgag

SEQ ID NO: 246673 - DNA, 20 bp, synthetic construct
  source 1..20: mol_type = other DNA
ttcttccagaatcctgttga

SEQ ID NO: 246674 - DNA, 20 bp, synthetic construct
  source 1..20: mol_type = other DNA
attcttccagaatcctgttg

SEQ ID NO: 246675 - DNA, 20 bp, synthetic construct
  source 1..20: mol_type = other DNA
gattcttccagaatcctgtt

SEQ ID NO: 246676 - DNA, 20 bp, synthetic construct
  source 1..20: mol_type = other DNA
agattcttccagaatcctgt

SEQ ID NO: 246677 - DNA, 20 bp, synthetic construct
  source 1..20: mol_type = other DNA
gagattcttccagaatcctg

SEQ ID NO: 246678 - DNA, 20 bp, synthetic construct
  source 1..20: mol_type = other DNA
ggagattcttccagaatcct

SEQ ID NO: 246679 - DNA, 20 bp, synthetic construct
  source 1..20: mol_type = other DNA
gggagattcttccagaatcc

SEQ ID NO: 246680 - DNA, 20 bp, synthetic construct
  source 1..20: mol_type = other DNA
tgggagattcttccagaatc

SEQ ID NO: 246681 - DNA, 20 bp, synthetic construct
  source 1..20: mol_type = other DNA
ttgggagattcttccagaat

SEQ ID NO: 246682 - DNA, 20 bp, synthetic construct
  source 1..20: mol_type = other DNA
tttgggagattcttccagaa

SEQ ID NO: 246683 - DNA, 20 bp, synthetic construct
  source 1..20: mol_type = other DNA
gtttgggagattcttccaga

SEQ ID NO: 246684 - DNA, 20 bp, synthetic construct
  source 1..20: mol_type = other DNA
tgtttgggagattcttccag

SEQ ID NO: 246685 - DNA, 20 bp, synthetic construct
  source 1..20: mol_type = other DNA
ttgtttgggagattcttcca

SEQ ID NO: 246686 - DNA, 20 bp, synthetic construct
  source 1..20: mol_type = other DNA
cttgtttgggagattcttcc

SEQ ID NO: 246687 - DNA, 20 bp, synthetic construct
  source 1..20: mol_type = other DNA
acttgtttgggagattcttc

SEQ ID NO: 246688 - DNA, 20 bp, synthetic construct
  source 1..20: mol_type = other DNA
gacttgtttgggagattctt

SEQ ID NO: 246689 - DNA, 20 bp, synthetic construct
  source 1..20: mol_type = other DNA
cgacttgtttgggagattct

SEQ ID NO: 246690 - DNA, 20 bp, synthetic construct
  source 1..20: mol_type = other DNA
gcgacttgtttgggagattc

SEQ ID NO: 246691 - DNA, 20 bp, synthetic construct
  source 1..20: mol_type = other DNA
tgcgacttgtttgggagatt

SEQ ID NO: 246692 - DNA, 20 bp, synthetic construct
  source 1..20: mol_type = other DNA
ttgcgacttgtttgggagat

SEQ ID NO: 246693 - DNA, 20 bp, synthetic construct
  source 1..20: mol_type = other DNA
attgcgacttgtttgggaga

SEQ ID NO: 246694 - DNA, 20 bp, synthetic construct
  source 1..20: mol_type = other DNA
cattgcgacttgtttgggag

SEQ ID NO: 246695 - DNA, 20 bp, synthetic construct
  source 1..20: mol_type = other DNA
gcattgcgacttgtttggga

SEQ ID NO: 246696 - DNA, 20 bp, synthetic construct
  source 1..20: mol_type = other DNA
ggcattgcgacttgtttggg

SEQ ID NO: 246697 - DNA, 20 bp, synthetic construct
  source 1..20: mol_type = other DNA
gggcattgcgacttgtttgg

SEQ ID NO: 246698 - DNA, 20 bp, synthetic construct
  source 1..20: mol_type = other DNA
agggcattgcgacttgtttg

SEQ ID NO: 246699 - DNA, 20 bp, synthetic construct
  source 1..20: mol_type = other DNA
gagggcattgcgacttgttt

SEQ ID NO: 246700 - DNA, 20 bp, synthetic construct
  source 1..20: mol_type = other DNA
agagggcattgcgacttgtt

SEQ ID NO: 246701 - DNA, 20 bp, synthetic construct
  source 1..20: mol_type = other DNA
cagagggcattgcgacttgt

SEQ ID NO: 246702 - DNA, 20 bp, synthetic construct
  source 1..20: mol_type = other DNA
ccagagggcattgcgacttg

SEQ ID NO: 246703 - DNA, 20 bp, synthetic construct
  source 1..20: mol_type = other DNA
tccagagggcattgcgactt

SEQ ID NO: 246704 - DNA, 20 bp, synthetic construct
  source 1..20: mol_type = other DNA
gtccagagggcattgcgact

SEQ ID NO: 246705 - DNA, 20 bp, synthetic construct
  source 1..20: mol_type = other DNA
ggtccagagggcattgcgac

SEQ ID NO: 246706 - DNA, 20 bp, synthetic construct
  source 1..20: mol_type = other DNA
gggtccagagggcattgcga

SEQ ID NO: 246707 - DNA, 20 bp, synthetic construct
  source 1..20: mol_type = other DNA
agggtccagagggcattgcg

SEQ ID NO: 246708 - DNA, 20 bp, synthetic construct
  source 1..20: mol_type = other DNA
cagggtccagagggcattgc

SEQ ID NO: 246709 - DNA, 20 bp, synthetic construct
  source 1..20: mol_type = other DNA
acagggtccagagggcattg

SEQ ID NO: 246710 - DNA, 20 bp, synthetic construct
  source 1..20: mol_type = other DNA
cacagggtccagagggcatt

SEQ ID NO: 246711 - DNA, 20 bp, synthetic construct
  source 1..20: mol_type = other DNA
gcacagggtccagagggcat

SEQ ID NO: 246712 - DNA, 20 bp, synthetic construct
  source 1..20: mol_type = other DNA
tgcacagggtccagagggca

SEQ ID NO: 246713 - DNA, 20 bp, synthetic construct
  source 1..20: mol_type = other DNA
ctgcacagggtccagagggc

SEQ ID NO: 246714 - DNA, 20 bp, synthetic construct
  source 1..20: mol_type = other DNA
cctgcacagggtccagaggg

SEQ ID NO: 246715 - DNA, 20 bp, synthetic construct
  source 1..20: mol_type = other DNA
gcctgcacagggtccagagg

SEQ ID NO: 246716 - DNA, 20 bp, synthetic construct
  source 1..20: mol_type = other DNA
tgcctgcacagggtccagag

SEQ ID NO: 246717 - DNA, 20 bp, synthetic construct
  source 1..20: mol_type = other DNA
atgcctgcacagggtccaga

SEQ ID NO: 246718 - DNA, 20 bp, synthetic construct
  source 1..20: mol_type = other DNA
catgcctgcacagggtccag

SEQ ID NO: 246719 - DNA, 20 bp, synthetic construct
  source 1..20: mol_type = other DNA
tcatgcctgcacagggtcca

SEQ ID NO: 246720 - DNA, 20 bp, synthetic construct
  source 1..20: mol_type = other DNA
ctcatgcctgcacagggtcc

SEQ ID NO: 246721 - DNA, 20 bp, synthetic construct
  source 1..20: mol_type = other DNA
tctcatgcctgcacagggtc

SEQ ID NO: 246722 - DNA, 20 bp, synthetic construct
  source 1..20: mol_type = other DNA
gtctcatgcctgcacagggt

SEQ ID NO: 246723 - DNA, 20 bp, synthetic construct
  source 1..20: mol_type = other DNA
agtctcatgcctgcacaggg

SEQ ID NO: 246724 - DNA, 20 bp, synthetic construct
  source 1..20: mol_type = other DNA
gagtctcatgcctgcacagg

SEQ ID NO: 246725 - DNA, 20 bp, synthetic construct
  source 1..20: mol_type = other DNA
tgagtctcatgcctgcacag

SEQ ID NO: 246726 - DNA, 20 bp, synthetic construct
  source 1..20: mol_type = other DNA
ttgagtctcatgcctgcaca

SEQ ID NO: 246727 - DNA, 20 bp, synthetic construct
  source 1..20: mol_type = other DNA
cttgagtctcatgcctgcac

SEQ ID NO: 246728 - DNA, 20 bp, synthetic construct
  source 1..20: mol_type = other DNA
tcttgagtctcatgcctgca

SEQ ID NO: 246729 - DNA, 20 bp, synthetic construct
  source 1..20: mol_type = other DNA
ctcttgagtctcatgcctgc

SEQ ID NO: 246730 - DNA, 20 bp, synthetic construct
  source 1..20: mol_type = other DNA
gctcttgagtctcatgcctg

SEQ ID NO: 246731 - DNA, 20 bp, synthetic construct
  source 1..20: mol_type = other DNA
tgctcttgagtctcatgcct

SEQ ID NO: 246732 - DNA, 20 bp, synthetic construct
  source 1..20: mol_type = other DNA
atgctcttgagtctcatgcc

SEQ ID NO: 246733 - DNA, 20 bp, synthetic construct
  source 1..20: mol_type = other DNA
aatgctcttgagtctcatgc

SEQ ID NO: 246734 - DNA, 20 bp, synthetic construct
  source 1..20: mol_type = other DNA
caatgctcttgagtctcatg

SEQ ID NO: 246735 - DNA, 20 bp, synthetic construct
  source 1..20: mol_type = other DNA
ccaatgctcttgagtctcat

SEQ ID NO: 246736 - DNA, 20 bp, synthetic construct
  source 1..20: mol_type = other DNA
gccaatgctcttgagtctca

SEQ ID NO: 246737 - DNA, 20 bp, synthetic construct
  source 1..20: mol_type = other DNA
agccaatgctcttgagtctc

SEQ ID NO: 246738 - DNA, 20 bp, synthetic construct
  source 1..20: mol_type = other DNA
gagccaatgctcttgagtct

SEQ ID NO: 246739 - DNA, 20 bp, synthetic construct
  source 1..20: mol_type = other DNA
ggagccaatgctcttgagtc

SEQ ID NO: 246740 - DNA, 20 bp, synthetic construct
  source 1..20: mol_type = other DNA
gggagccaatgctcttgagt

SEQ ID NO: 246741 - DNA, 20 bp, synthetic construct
  source 1..20: mol_type = other DNA
tgggagccaatgctcttgag

SEQ ID NO: 246742 - DNA, 20 bp, synthetic construct
  source 1..20: mol_type = other DNA
gtgggagccaatgctcttga

SEQ ID NO: 246743 - DNA, 20 bp, synthetic construct
  source 1..20: mol_type = other DNA
ggtgggagccaatgctcttg

SEQ ID NO: 246744 - DNA, 20 bp, synthetic construct
  source 1..20: mol_type = other DNA
gggtgggagccaatgctctt

SEQ ID NO: 246745 - DNA, 20 bp, synthetic construct
  source 1..20: mol_type = other DNA
ggggtgggagccaatgctct

SEQ ID NO: 246746 - DNA, 20 bp, synthetic construct
  source 1..20: mol_type = other DNA
aggggtgggagccaatgctc

SEQ ID NO: 246747 - DNA, 20 bp, synthetic construct
  source 1..20: mol_type = other DNA
caggggtgggagccaatgct

SEQ ID NO: 246748 - DNA, 20 bp, synthetic construct
  source 1..20: mol_type = other DNA
ccaggggtgggagccaatgc

SEQ ID NO: 246749 - DNA, 20 bp, synthetic construct
  source 1..20: mol_type = other DNA
accaggggtgggagccaatg

SEQ ID NO: 246750 - DNA, 20 bp, synthetic construct
  source 1..20: mol_type = other DNA
caccaggggtgggagccaat

SEQ ID NO: 246751 - DNA, 20 bp, synthetic construct
  source 1..20: mol_type = other DNA
ccaccaggggtgggagccaa

SEQ ID NO: 246752 - DNA, 20 bp, synthetic construct
  source 1..20: mol_type = other DNA
tccaccaggggtgggagcca

SEQ ID NO: 246753 - DNA, 20 bp, synthetic construct
  source 1..20: mol_type = other DNA
ctccaccaggggtgggagcc

SEQ ID NO: 246754 - DNA, 20 bp, synthetic construct
  source 1..20: mol_type = other DNA
cctccaccaggggtgggagc

SEQ ID NO: 246755 - DNA, 20 bp, synthetic construct
  source 1..20: mol_type = other DNA
ccctccaccaggggtgggag

SEQ ID NO: 246756 - DNA, 20 bp, synthetic construct
  source 1..20: mol_type = other DNA
tccctccaccaggggtggga

SEQ ID NO: 246757 - DNA, 20 bp, synthetic construct
  source 1..20: mol_type = other DNA
ttccctccaccaggggtggg

SEQ ID NO: 246758 - DNA, 20 bp, synthetic construct
  source 1..20: mol_type = other DNA
gttccctccaccaggggtgg

SEQ ID NO: 246759 - DNA, 20 bp, synthetic construct
  source 1..20: mol_type = other DNA
tgttccctccaccaggggtg

SEQ ID NO: 246760 - DNA, 20 bp, synthetic construct
  source 1..20: mol_type = other DNA
gtgttccctccaccaggggt

SEQ ID NO: 246761 - DNA, 20 bp, synthetic construct
  source 1..20: mol_type = other DNA
agtgttccctccaccagggg

SEQ ID NO: 246762 - DNA, 20 bp, synthetic construct
  source 1..20: mol_type = other DNA
cagtgttccctccaccaggg

SEQ ID NO: 246763 - DNA, 20 bp, synthetic construct
  source 1..20: mol_type = other DNA
gcagtgttccctccaccagg

SEQ ID NO: 246764 - DNA, 20 bp, synthetic construct
  source 1..20: mol_type = other DNA
agcagtgttccctccaccag

SEQ ID NO: 246765 - DNA, 20 bp, synthetic construct
  source 1..20: mol_type = other DNA
cagcagtgttccctccacca

SEQ ID NO: 246766 - DNA, 20 bp, synthetic construct
  source 1..20: mol_type = other DNA
ccagcagtgttccctccacc

SEQ ID NO: 246767 - DNA, 20 bp, synthetic construct
  source 1..20: mol_type = other DNA
cccagcagtgttccctccac

SEQ ID NO: 246768 - DNA, 20 bp, synthetic construct
  source 1..20: mol_type = other DNA
ccccagcagtgttccctcca

SEQ ID NO: 246769 - DNA, 20 bp, synthetic construct
  source 1..20: mol_type = other DNA
gccccagcagtgttccctcc

SEQ ID NO: 246770 - DNA, 20 bp, synthetic construct
  source 1..20: mol_type = other DNA
agccccagcagtgttccctc

SEQ ID NO: 246771 - DNA, 20 bp, synthetic construct
  source 1..20: mol_type = other DNA
cagccccagcagtgttccct

SEQ ID NO: 246772 - DNA, 20 bp, synthetic construct
  source 1..20: mol_type = other DNA
ccagccccagcagtgttccc

SEQ ID NO: 246773 - DNA, 20 bp, synthetic construct
  source 1..20: mol_type = other DNA
cccagccccagcagtgttcc

SEQ ID NO: 246774 - DNA, 20 bp, synthetic construct
  source 1..20: mol_type = other DNA
tcccagccccagcagtgttc

SEQ ID NO: 246775 - DNA, 20 bp, synthetic construct
  source 1..20: mol_type = other DNA
atcccagccccagcagtgtt

SEQ ID NO: 246776 - DNA, 20 bp, synthetic construct
  source 1..20: mol_type = other DNA
gatcccagccccagcagtgt

SEQ ID NO: 246777 - DNA, 20 bp, synthetic construct
  source 1..20: mol_type = other DNA
agatcccagccccagcagtg

SEQ ID NO: 246778 - DNA, 20 bp, synthetic construct
  source 1..20: mol_type = other DNA
aagatcccagccccagcagt

SEQ ID NO: 246779 - DNA, 20 bp, synthetic construct
  source 1..20: mol_type = other DNA
caagatcccagccccagcag

SEQ ID NO: 246780 - DNA, 20 bp, synthetic construct
  source 1..20: mol_type = other DNA
gcaagatcccagccccagca

SEQ ID NO: 246781 - DNA, 20 bp, synthetic construct
  source 1..20: mol_type = other DNA
ggcaagatcccagccccagc

SEQ ID NO: 246782 - DNA, 20 bp, synthetic construct
  source 1..20: mol_type = other DNA
aggcaagatcccagccccag

SEQ ID NO: 246783 - DNA, 20 bp, synthetic construct
  source 1..20: mol_type = other DNA
caggcaagatcccagcccca

SEQ ID NO: 246784 - DNA, 20 bp, synthetic construct
  source 1..20: mol_type = other DNA
ccaggcaagatcccagcccc

SEQ ID NO: 246785 - DNA, 20 bp, synthetic construct
  source 1..20: mol_type = other DNA
accaggcaagatcccagccc

SEQ ID NO: 246786 - DNA, 20 bp, synthetic construct
  source 1..20: mol_type = other DNA
aaccaggcaagatcccagcc

SEQ ID NO: 246787 - DNA, 20 bp, synthetic construct
  source 1..20: mol_type = other DNA
caaccaggcaagatcccagc

SEQ ID NO: 246788 - DNA, 20 bp, synthetic construct
  source 1..20: mol_type = other DNA
gcaaccaggcaagatcccag

SEQ ID NO: 246789 - DNA, 20 bp, synthetic construct
  source 1..20: mol_type = other DNA
agcaaccaggcaagatccca

SEQ ID NO: 246790 - DNA, 20 bp, synthetic construct
  source 1..20: mol_type = other DNA
gagcaaccaggcaagatccc

SEQ ID NO: 246791 - DNA, 20 bp, synthetic construct
  source 1..20: mol_type = other DNA
ggagcaaccaggcaagatcc

SEQ ID NO: 246792 - DNA, 20 bp, synthetic construct
  source 1..20: mol_type = other DNA
cggagcaaccaggcaagatc

SEQ ID NO: 246793 - DNA, 20 bp, synthetic construct
  source 1..20: mol_type = other DNA
gcggagcaaccaggcaagat

SEQ ID NO: 246794 - DNA, 20 bp, synthetic construct
  source 1..20: mol_type = other DNA
ggcggagcaaccaggcaaga

SEQ ID NO: 246795 - DNA, 20 bp, synthetic construct
  source 1..20: mol_type = other DNA
aggcggagcaaccaggcaag

SEQ ID NO: 246796 - DNA, 20 bp, synthetic construct
  source 1..20: mol_type = other DNA
caggcggagcaaccaggcaa

SEQ ID NO: 246797 - DNA, 20 bp, synthetic construct
  source 1..20: mol_type = other DNA
gcaggcggagcaaccaggca

SEQ ID NO: 246798 - DNA, 20 bp, synthetic construct
  source 1..20: mol_type = other DNA
tgcaggcggagcaaccaggc

SEQ ID NO: 246799 - DNA, 20 bp, synthetic construct
  source 1..20: mol_type = other DNA
gtgcaggcggagcaaccagg

SEQ ID NO: 246800 - DNA, 20 bp, synthetic construct
  source 1..20: mol_type = other DNA
ggtgcaggcggagcaaccag

SEQ ID NO: 246801 - DNA, 20 bp, synthetic construct
  source 1..20: mol_type = other DNA
gggtgcaggcggagcaacca

SEQ ID NO: 246802 - DNA, 20 bp, synthetic construct
  source 1..20: mol_type = other DNA
tgggtgcaggcggagcaacc

SEQ ID NO: 246803 - DNA, 20 bp, synthetic construct
  source 1..20: mol_type = other DNA
ttgggtgcaggcggagcaac

SEQ ID NO: 246804 - DNA, 20 bp, synthetic construct
  source 1..20: mol_type = other DNA
cttgggtgcaggcggagcaa

SEQ ID NO: 246805 - DNA, 20 bp, synthetic construct
  source 1..20: mol_type = other DNA
tcttgggtgcaggcggagca

SEQ ID NO: 246806 - DNA, 20 bp, synthetic construct
  source 1..20: mol_type = other DNA
gtcttgggtgcaggcggagc

SEQ ID NO: 246807 - DNA, 20 bp, synthetic construct
  source 1..20: mol_type = other DNA
tgtcttgggtgcaggcggag

SEQ ID NO: 246808 - DNA, 20 bp, synthetic construct
  source 1..20: mol_type = other DNA
ttgtcttgggtgcaggcgga

SEQ ID NO: 246809 - DNA, 20 bp, synthetic construct
  source 1..20: mol_type = other DNA
gttgtcttgggtgcaggcgg

SEQ ID NO: 246810 - DNA, 20 bp, synthetic construct
  source 1..20: mol_type = other DNA
ggttgtcttgggtgcaggcg

SEQ ID NO: 246811 - DNA, 20 bp, synthetic construct
  source 1..20: mol_type = other DNA
tggttgtcttgggtgcaggc

SEQ ID NO: 246812 - DNA, 20 bp, synthetic construct
  source 1..20: mol_type = other DNA
atggttgtcttgggtgcagg

SEQ ID NO: 246813 - DNA, 20 bp, synthetic construct
  source 1..20: mol_type = other DNA
tatggttgtcttgggtgcag

SEQ ID NO: 246814 - DNA, 20 bp, synthetic construct
  source 1..20: mol_type = other DNA
ttatggttgtcttgggtgca

SEQ ID NO: 246815 - DNA, 20 bp, synthetic construct
  source 1..20: mol_type = other DNA
attatggttgtcttgggtgc

SEQ ID NO: 246816 - DNA, 20 bp, synthetic construct
  source 1..20: mol_type = other DNA
aattatggttgtcttgggtg

SEQ ID NO: 246817 - DNA, 20 bp, synthetic construct
  source 1..20: mol_type = other DNA
taattatggttgtcttgggt

SEQ ID NO: 246818 - DNA, 20 bp, synthetic construct
  source 1..20: mol_type = other DNA
ttaattatggttgtcttggg

SEQ ID NO: 246819 - DNA, 20 bp, synthetic construct
  source 1..20: mol_type = other DNA
tttaattatggttgtcttgg

SEQ ID NO: 246820 - DNA, 20 bp, synthetic construct
  source 1..20: mol_type = other DNA
ttttaattatggttgtcttg

SEQ ID NO: 246821 - DNA, 20 bp, synthetic construct
  source 1..20: mol_type = other DNA
attttaattatggttgtctt

SEQ ID NO: 246822 - DNA, 20 bp, synthetic construct
  source 1..20: mol_type = other DNA
cattttaattatggttgtct

SEQ ID NO: 246823 - DNA, 20 bp, synthetic construct
  source 1..20: mol_type = other DNA
acattttaattatggttgtc

SEQ ID NO: 246824 - DNA, 20 bp, synthetic construct
  source 1..20: mol_type = other DNA
gacattttaattatggttgt

SEQ ID NO: 246825 - DNA, 20 bp, synthetic construct
  source 1..20: mol_type = other DNA
ggacattttaattatggttg

SEQ ID NO: 246826 - DNA, 20 bp, synthetic construct
  source 1..20: mol_type = other DNA
aggacattttaattatggtt

SEQ ID NO: 246827 - DNA, 20 bp, synthetic construct
  source 1..20: mol_type = other DNA
aaggacattttaattatggt

SEQ ID NO: 246828 - DNA, 20 bp, synthetic construct
  source 1..20: mol_type = other DNA
gaaggacattttaattatgg

SEQ ID NO: 246829 - DNA, 20 bp, synthetic construct
  source 1..20: mol_type = other DNA
tgaaggacattttaattatg

SEQ ID NO: 246830 - DNA, 20 bp, synthetic construct
  source 1..20: mol_type = other DNA
atgaaggacattttaattat

SEQ ID NO: 246831 - DNA, 20 bp, synthetic construct
  source 1..20: mol_type = other DNA
aatgaaggacattttaatta

SEQ ID NO: 246832 - DNA, 20 bp, synthetic construct
  source 1..20: mol_type = other DNA
caatgaaggacattttaatt

SEQ ID NO: 246833 - DNA, 20 bp, synthetic construct
  source 1..20: mol_type = other DNA
tcaatgaaggacattttaat

SEQ ID NO: 246834 - DNA, 20 bp, synthetic construct
  source 1..20: mol_type = other DNA
ttcaatgaaggacattttaa

SEQ ID NO: 246835 - DNA, 20 bp, synthetic construct
  source 1..20: mol_type = other DNA
gttcaatgaaggacatttta

SEQ ID NO: 246836 - DNA, 20 bp, synthetic construct
  source 1..20: mol_type = other DNA
agttcaatgaaggacatttt

SEQ ID NO: 246837 - DNA, 20 bp, synthetic construct
  source 1..20: mol_type = other DNA
aagttcaatgaaggacattt

SEQ ID NO: 246838 - DNA, 20 bp, synthetic construct
  source 1..20: mol_type = other DNA
caagttcaatgaaggacatt

SEQ ID NO: 246839 - DNA, 20 bp, synthetic construct
  source 1..20: mol_type = other DNA
ccaagttcaatgaaggacat

SEQ ID NO: 246840 - DNA, 20 bp, synthetic construct
  source 1..20: mol_type = other DNA
tccaagttcaatgaaggaca

SEQ ID NO: 246841 - DNA, 20 bp, synthetic construct
  source 1..20: mol_type = other DNA
ttccaagttcaatgaaggac

SEQ ID NO: 246842 - DNA, 20 bp, synthetic construct
  source 1..20: mol_type = other DNA
tttccaagttcaatgaagga

SEQ ID NO: 246843 - DNA, 20 bp, synthetic construct
  source 1..20: mol_type = other DNA
ctttccaagttcaatgaagg

SEQ ID NO: 246844 - DNA, 20 bp, synthetic construct
  source 1..20: mol_type = other DNA
gctttccaagttcaatgaag

SEQ ID NO: 246845 - DNA, 20 bp, synthetic construct
  source 1..20: mol_type = other DNA
ggctttccaagttcaatgaa

SEQ ID NO: 246846 - DNA, 20 bp, synthetic construct
  source 1..20: mol_type = other DNA
aggctttccaagttcaatga

SEQ ID NO: 246847 - DNA, 20 bp, synthetic construct
  source 1..20: mol_type = other DNA
aaggctttccaagttcaatg

SEQ ID NO: 246848 - DNA, 20 bp, synthetic construct
  source 1..20: mol_type = other DNA
gaaggctttccaagttcaat

SEQ ID NO: 246849 - DNA, 20 bp, synthetic construct
  source 1..20: mol_type = other DNA
tgaaggctttccaagttcaa

SEQ ID NO: 246850 - DNA, 20 bp, synthetic construct
  source 1..20: mol_type = other DNA
ttgaaggctttccaagttca

SEQ ID NO: 246851 - DNA, 20 bp, synthetic construct
  source 1..20: mol_type = other DNA
tttgaaggctttccaagttc

SEQ ID NO: 246852 - DNA, 20 bp, synthetic construct
  source 1..20: mol_type = other DNA
ctttgaaggctttccaagtt

SEQ ID NO: 246853 - DNA, 20 bp, synthetic construct
  source 1..20: mol_type = other DNA
gctttgaaggctttccaagt

SEQ ID NO: 246854 - DNA, 20 bp, synthetic construct
  source 1..20: mol_type = other DNA
agctttgaaggctttccaag

SEQ ID NO: 246855 - DNA, 20 bp, synthetic construct
  source 1..20: mol_type = other DNA
cagctttgaaggctttccaa

SEQ ID NO: 246856 - DNA, 20 bp, synthetic construct
  source 1..20: mol_type = other DNA
tcagctttgaaggctttcca

SEQ ID NO: 246857 - DNA, 20 bp, synthetic construct
  source 1..20: mol_type = other DNA
gtcagctttgaaggctttcc

SEQ ID NO: 246858 - DNA, 20 bp, synthetic construct
  source 1..20: mol_type = other DNA
tgtcagctttgaaggctttc

SEQ ID NO: 246859 - DNA, 20 bp, synthetic construct
  source 1..20: mol_type = other DNA
ttgtcagctttgaaggcttt

SEQ ID NO: 246860 - DNA, 20 bp, synthetic construct
  source 1..20: mol_type = other DNA
gttgtcagctttgaaggctt

SEQ ID NO: 246861 - DNA, 20 bp, synthetic construct
  source 1..20: mol_type = other DNA
agttgtcagctttgaaggct

SEQ ID NO: 246862 - DNA, 20 bp, synthetic construct
  source 1..20: mol_type = other DNA
gagttgtcagctttgaaggc

SEQ ID NO: 246863 - DNA, 20 bp, synthetic construct
  source 1..20: mol_type = other DNA
ggagttgtcagctttgaagg

SEQ ID NO: 246864 - DNA, 20 bp, synthetic construct
  source 1..20: mol_type = other DNA
aggagttgtcagctttgaag

SEQ ID NO: 246865 - DNA, 20 bp, synthetic construct
  source 1..20: mol_type = other DNA
aaggagttgtcagctttgaa

SEQ ID NO: 246866 - DNA, 20 bp, synthetic construct
  source 1..20: mol_type = other DNA
taaggagttgtcagctttga

SEQ ID NO: 246867 - DNA, 20 bp, synthetic construct
  source 1..20: mol_type = other DNA
ataaggagttgtcagctttg

SEQ ID NO: 246868 - DNA, 20 bp, synthetic construct
  source 1..20: mol_type = other DNA
cataaggagttgtcagcttt

SEQ ID NO: 246869 - DNA, 20 bp, synthetic construct
  source 1..20: mol_type = other DNA
acataaggagttgtcagctt

SEQ ID NO: 246870 - DNA, 20 bp, synthetic construct
  source 1..20: mol_type = other DNA
cacataaggagttgtcagct

SEQ ID NO: 246871 - DNA, 20 bp, synthetic construct
  source 1..20: mol_type = other DNA
acacataaggagttgtcagc

SEQ ID NO: 246872 - DNA, 20 bp, synthetic construct
  source 1..20: mol_type = other DNA
tacacataaggagttgtcag

SEQ ID NO: 246873 - DNA, 20 bp, synthetic construct
  source 1..20: mol_type = other DNA
gtacacataaggagttgtca

SEQ ID NO: 246874 - DNA, 20 bp, synthetic construct
  source 1..20: mol_type = other DNA
ggtacacataaggagttgtc

SEQ ID NO: 246875 - DNA, 20 bp, synthetic construct
  source 1..20: mol_type = other DNA
gggtacacataaggagttgt

SEQ ID NO: 246876 - DNA, 20 bp, synthetic construct
  source 1..20: mol_type = other DNA
cgggtacacataaggagttg

SEQ ID NO: 246877 - DNA, 20 bp, synthetic construct
  source 1..20: mol_type = other DNA
ccgggtacacataaggagtt

SEQ ID NO: 246878 - DNA, 20 bp, synthetic construct
  source 1..20: mol_type = other DNA
tccgggtacacataaggagt

SEQ ID NO: 246879 - DNA, 20 bp, synthetic construct
  source 1..20: mol_type = other DNA
ttccgggtacacataaggag

SEQ ID NO: 246880 - DNA, 20 bp, synthetic construct
  source 1..20: mol_type = other DNA
tttccgggtacacataagga

SEQ ID NO: 246881 - DNA, 20 bp, synthetic construct
  source 1..20: mol_type = other DNA
ctttccgggtacacataagg

SEQ ID NO: 246882 - DNA, 20 bp, synthetic construct
  source 1..20: mol_type = other DNA
cctttccgggtacacataag

SEQ ID NO: 246883 - DNA, 20 bp, synthetic construct
  source 1..20: mol_type = other DNA
gcctttccgggtacacataa

SEQ ID NO: 246884 - DNA, 20 bp, synthetic construct
  source 1..20: mol_type = other DNA
ggcctttccgggtacacata

SEQ ID NO: 246885 - DNA, 20 bp, synthetic construct
  source 1..20: mol_type = other DNA
aggcctttccgggtacacat

SEQ ID NO: 246886 - DNA, 20 bp, synthetic construct
  source 1..20: mol_type = other DNA
caggcctttccgggtacaca

SEQ ID NO: 246887 - DNA, 20 bp, synthetic construct
  source 1..20: mol_type = other DNA
ccaggcctttccgggtacac

SEQ ID NO: 246888 - DNA, 20 bp, synthetic construct
  source 1..20: mol_type = other DNA
cccaggcctttccgggtaca

SEQ ID NO: 246889 - DNA, 20 bp, synthetic construct
  source 1..20: mol_type = other DNA
tcccaggcctttccgggtac

SEQ ID NO: 246890 - DNA, 20 bp, synthetic construct
  source 1..20: mol_type = other DNA
ctcccaggcctttccgggta

SEQ ID NO: 246891 - DNA, 20 bp, synthetic construct
  source 1..20: mol_type = other DNA
actcccaggcctttccgggt

SEQ ID NO: 246892 - DNA, 20 bp, synthetic construct
  source 1..20: mol_type = other DNA
cactcccaggcctttccggg

SEQ ID NO: 246893 - DNA, 20 bp, synthetic construct
  source 1..20: mol_type = other DNA
acactcccaggcctttccgg

SEQ ID NO: 246894 - DNA, 20 bp, synthetic construct
  source 1..20: mol_type = other DNA
cacactcccaggcctttccg

SEQ ID NO: 246895 - DNA, 20 bp, synthetic construct
  source 1..20: mol_type = other DNA
gcacactcccaggcctttcc

SEQ ID NO: 246896 - DNA, 20 bp, synthetic construct
  source 1..20: mol_type = other DNA
ggcacactcccaggcctttc

SEQ ID NO: 246897 - DNA, 20 bp, synthetic construct
  source 1..20: mol_type = other DNA
tggcacactcccaggccttt

SEQ ID NO: 246898 - DNA, 20 bp, synthetic construct
  source 1..20: mol_type = other DNA
ctggcacactcccaggcctt

SEQ ID NO: 246899 - DNA, 20 bp, synthetic construct
  source 1..20: mol_type = other DNA
cctggcacactcccaggcct

SEQ ID NO: 246900 - DNA, 20 bp, synthetic construct
  source 1..20: mol_type = other DNA
ccctggcacactcccaggcc

SEQ ID NO: 246901 - DNA, 20 bp, synthetic construct
  source 1..20: mol_type = other DNA
gccctggcacactcccaggc

SEQ ID NO: 246902 - DNA, 20 bp, synthetic construct
  source 1..20: mol_type = other DNA
tgccctggcacactcccagg

SEQ ID NO: 246903 - DNA, 20 bp, synthetic construct
  source 1..20: mol_type = other DNA
atgccctggcacactcccag

SEQ ID NO: 246904 - DNA, 20 bp, synthetic construct
  source 1..20: mol_type = other DNA
aatgccctggcacactccca

SEQ ID NO: 246905 - DNA, 20 bp, synthetic construct
  source 1..20: mol_type = other DNA
caatgccctggcacactccc

SEQ ID NO: 246906 - DNA, 20 bp, synthetic construct
  source 1..20: mol_type = other DNA
gcaatgccctggcacactcc

SEQ ID NO: 246907 - DNA, 20 bp, synthetic construct
  source 1..20: mol_type = other DNA
agcaatgccctggcacactc

SEQ ID NO: 246908 - DNA, 20 bp, synthetic construct
  source 1..20: mol_type = other DNA
gagcaatgccctggcacact

SEQ ID NO: 246909 - DNA, 20 bp, synthetic construct
  source 1..20: mol_type = other DNA
cgagcaatgccctggcacac

SEQ ID NO: 246910 - DNA, 20 bp, synthetic construct
  source 1..20: mol_type = other DNA
ccgagcaatgccctggcaca

SEQ ID NO: 246911 - DNA, 20 bp, synthetic construct
  source 1..20: mol_type = other DNA
cccgagcaatgccctggcac

SEQ ID NO: 246912 - DNA, 20 bp, synthetic construct
  source 1..20: mol_type = other DNA
tcccgagcaatgccctggca

SEQ ID NO: 246913 - DNA, 20 bp, synthetic construct
  source 1..20: mol_type = other DNA
ctcccgagcaatgccctggc

SEQ ID NO: 246914 - DNA, 20 bp, synthetic construct
  source 1..20: mol_type = other DNA
cctcccgagcaatgccctgg

SEQ ID NO: 246915 - DNA, 20 bp, synthetic construct
  source 1..20: mol_type = other DNA
ccctcccgagcaatgccctg

SEQ ID NO: 246916 - DNA, 20 bp, synthetic construct
  source 1..20: mol_type = other DNA
tccctcccgagcaatgccct

SEQ ID NO: 246917 - DNA, 20 bp, synthetic construct
  source 1..20: mol_type = other DNA
gtccctcccgagcaatgccc

SEQ ID NO: 246918 - DNA, 20 bp, synthetic construct
  source 1..20: mol_type = other DNA
cgtccctcccgagcaatgcc

SEQ ID NO: 246919 - DNA, 20 bp, synthetic construct
  source 1..20: mol_type = other DNA
gcgtccctcccgagcaatgc

SEQ ID NO: 246920 - DNA, 20 bp, synthetic construct
  source 1..20: mol_type = other DNA
agcgtccctcccgagcaatg

SEQ ID NO: 246921 - DNA, 20 bp, synthetic construct
  source 1..20: mol_type = other DNA
cagcgtccctcccgagcaat

SEQ ID NO: 246922 - DNA, 20 bp, synthetic construct
  source 1..20: mol_type = other DNA
tcagcgtccctcccgagcaa

SEQ ID NO: 246923 - DNA, 20 bp, synthetic construct
  source 1..20: mol_type = other DNA
atcagcgtccctcccgagca

SEQ ID NO: 246924 - DNA, 20 bp, synthetic construct
  source 1..20: mol_type = other DNA
aatcagcgtccctcccgagc

SEQ ID NO: 246925 - DNA, 20 bp, synthetic construct
  source 1..20: mol_type = other DNA
aaatcagcgtccctcccgag

SEQ ID NO: 246926 - DNA, 20 bp, synthetic construct
  source 1..20: mol_type = other DNA
caaatcagcgtccctcccga

SEQ ID NO: 246927 - DNA, 20 bp, synthetic construct
  source 1..20: mol_type = other DNA
ccaaatcagcgtccctcccg

SEQ ID NO: 246928 - DNA, 20 bp, synthetic construct
  source 1..20: mol_type = other DNA
tccaaatcagcgtccctccc

SEQ ID NO: 246929 - DNA, 20 bp, synthetic construct
  source 1..20: mol_type = other DNA
ttccaaatcagcgtccctcc

SEQ ID NO: 246930 - DNA, 20 bp, synthetic construct
  source 1..20: mol_type = other DNA
cttccaaatcagcgtccctc

SEQ ID NO: 246931 - DNA, 20 bp, synthetic construct
  source 1..20: mol_type = other DNA
gcttccaaatcagcgtccct

SEQ ID NO: 246932 - DNA, 20 bp, synthetic construct
  source 1..20: mol_type = other DNA
tgcttccaaatcagcgtccc

SEQ ID NO: 246933 - DNA, 20 bp, synthetic construct
  source 1..20: mol_type = other DNA
atgcttccaaatcagcgtcc

SEQ ID NO: 246934 - DNA, 20 bp, synthetic construct
  source 1..20: mol_type = other DNA
aatgcttccaaatcagcgtc

SEQ ID NO: 246935 - DNA, 20 bp, synthetic construct
  source 1..20: mol_type = other DNA
aaatgcttccaaatcagcgt

SEQ ID NO: 246936 - DNA, 20 bp, synthetic construct
  source 1..20: mol_type = other DNA
taaatgcttccaaatcagcg

SEQ ID NO: 246937 - DNA, 20 bp, synthetic construct
  source 1..20: mol_type = other DNA
gtaaatgcttccaaatcagc

SEQ ID NO: 246938 - DNA, 20 bp, synthetic construct
  source 1..20: mol_type = other DNA
ggtaaatgcttccaaatcag

SEQ ID NO: 246939 - DNA, 20 bp, synthetic construct
  source 1..20: mol_type = other DNA
aggtaaatgcttccaaatca

SEQ ID NO: 246940 - DNA, 20 bp, synthetic construct
  source 1..20: mol_type = other DNA
caggtaaatgcttccaaatc

SEQ ID NO: 246941 - DNA, 20 bp, synthetic construct
  source 1..20: mol_type = other DNA
tcaggtaaatgcttccaaat

SEQ ID NO: 246942 - DNA, 20 bp, synthetic construct
  source 1..20: mol_type = other DNA
atcaggtaaatgcttccaaa

SEQ ID NO: 246943 - DNA, 20 bp, synthetic construct
  source 1..20: mol_type = other DNA
catcaggtaaatgcttccaa

SEQ ID NO: 246944 - DNA, 20 bp, synthetic construct
  source 1..20: mol_type = other DNA
tcatcaggtaaatgcttcca

SEQ ID NO: 246945 - DNA, 20 bp, synthetic construct
  source 1..20: mol_type = other DNA
ctcatcaggtaaatgcttcc

SEQ ID NO: 246946 - DNA, 20 bp, synthetic construct
  source 1..20: mol_type = other DNA
tctcatcaggtaaatgcttc

SEQ ID NO: 246947 - DNA, 20 bp, synthetic construct
  source 1..20: mol_type = other DNA
ctctcatcaggtaaatgctt

SEQ ID NO: 246948 - DNA, 20 bp, synthetic construct
  source 1..20: mol_type = other DNA
tctctcatcaggtaaatgct

SEQ ID NO: 246949 - DNA, 20 bp, synthetic construct
  source 1..20: mol_type = other DNA
gtctctcatcaggtaaatgc

SEQ ID NO: 246950 - DNA, 20 bp, synthetic construct
  source 1..20: mol_type = other DNA
agtctctcatcaggtaaatg

SEQ ID NO: 246951 - DNA, 20 bp, synthetic construct
  source 1..20: mol_type = other DNA
cagtctctcatcaggtaaat

SEQ ID NO: 246952 - DNA, 20 bp, synthetic construct
  source 1..20: mol_type = other DNA
tcagtctctcatcaggtaaa

SEQ ID NO: 246953 - DNA, 20 bp, synthetic construct
  source 1..20: mol_type = other DNA
gtcagtctctcatcaggtaa

SEQ ID NO: 246954 - DNA, 20 bp, synthetic construct
  source 1..20: mol_type = other DNA
tgtcagtctctcatcaggta

SEQ ID NO: 246955 - DNA, 20 bp, synthetic construct
  source 1..20: mol_type = other DNA
ctgtcagtctctcatcaggt

SEQ ID NO: 246956 - DNA, 20 bp, synthetic construct
  source 1..20: mol_type = other DNA
gctgtcagtctctcatcagg

SEQ ID NO: 246957 - DNA, 20 bp, synthetic construct
  source 1..20: mol_type = other DNA
tgctgtcagtctctcatcag

SEQ ID NO: 246958 - DNA, 20 bp, synthetic construct
  source 1..20: mol_type = other DNA
ctgctgtcagtctctcatca

SEQ ID NO: 246959 - DNA, 20 bp, synthetic construct
  source 1..20: mol_type = other DNA
gctgctgtcagtctctcatc

SEQ ID NO: 246960 - DNA, 20 bp, synthetic construct
  source 1..20: mol_type = other DNA
agctgctgtcagtctctcat

SEQ ID NO: 246961 - DNA, 20 bp, synthetic construct
  source 1..20: mol_type = other DNA
gagctgctgtcagtctctca

SEQ ID NO: 246962 - DNA, 20 bp, synthetic construct
  source 1..20: mol_type = other DNA
ggagctgctgtcagtctctc

SEQ ID NO: 246963 - DNA, 20 bp, synthetic construct
  source 1..20: mol_type = other DNA
aggagctgctgtcagtctct

SEQ ID NO: 246964 - DNA, 20 bp, synthetic construct
  source 1..20: mol_type = other DNA
caggagctgctgtcagtctc

SEQ ID NO: 246965 - DNA, 20 bp, synthetic construct
  source 1..20: mol_type = other DNA
ccaggagctgctgtcagtct

SEQ ID NO: 246966 - DNA, 20 bp, synthetic construct
  source 1..20: mol_type = other DNA
accaggagctgctgtcagtc

SEQ ID NO: 246967 - DNA, 20 bp, synthetic construct
  source 1..20: mol_type = other DNA
taccaggagctgctgtcagt

SEQ ID NO: 246968 - DNA, 20 bp, synthetic construct
  source 1..20: mol_type = other DNA
ctaccaggagctgctgtcag

SEQ ID NO: 246969 - DNA, 20 bp, synthetic construct
  source 1..20: mol_type = other DNA
gctaccaggagctgctgtca

SEQ ID NO: 246970 - DNA, 20 bp, synthetic construct
  source 1..20: mol_type = other DNA
ggctaccaggagctgctgtc

SEQ ID NO: 246971 - DNA, 20 bp, synthetic construct
  source 1..20: mol_type = other DNA
cggctaccaggagctgctgt

SEQ ID NO: 246972 - DNA, 20 bp, synthetic construct
  source 1..20: mol_type = other DNA
tcggctaccaggagctgctg

SEQ ID NO: 246973 - DNA, 20 bp, synthetic construct
  source 1..20: mol_type = other DNA
ctcggctaccaggagctgct

SEQ ID NO: 246974 - DNA, 20 bp, synthetic construct
  source 1..20: mol_type = other DNA
gctcggctaccaggagctgc

SEQ ID NO: 246975 - DNA, 20 bp, synthetic construct
  source 1..20: mol_type = other DNA
agctcggctaccaggagctg

SEQ ID NO: 246976 - DNA, 20 bp, synthetic construct
  source 1..20: mol_type = other DNA
aagctcggctaccaggagct

SEQ ID NO: 246977 - DNA, 20 bp, synthetic construct
  source 1..20: mol_type = other DNA
aaagctcggctaccaggagc

SEQ ID NO: 246978 - DNA, 20 bp, synthetic construct
  source 1..20: mol_type = other DNA
gaaagctcggctaccaggag

SEQ ID NO: 246979 - DNA, 20 bp, synthetic construct
  source 1..20: mol_type = other DNA
ggaaagctcggctaccagga

SEQ ID NO: 246980 - DNA, 20 bp, synthetic construct
  source 1..20: mol_type = other DNA
gggaaagctcggctaccagg

SEQ ID NO: 246981 - DNA, 20 bp, synthetic construct
  source 1..20: mol_type = other DNA
agggaaagctcggctaccag

SEQ ID NO: 246982 - DNA, 20 bp, synthetic construct
  source 1..20: mol_type = other DNA
gagggaaagctcggctacca

SEQ ID NO: 246983 - DNA, 20 bp, synthetic construct
  source 1..20: mol_type = other DNA
ggagggaaagctcggctacc

SEQ ID NO: 246984 - DNA, 20 bp, synthetic construct
  source 1..20: mol_type = other DNA
aggagggaaagctcggctac

SEQ ID NO: 246985 - DNA, 20 bp, synthetic construct
  source 1..20: mol_type = other DNA
caggagggaaagctcggcta

SEQ ID NO: 246986 - DNA, 20 bp, synthetic construct
  source 1..20: mol_type = other DNA
gcaggagggaaagctcggct

SEQ ID NO: 246987 - DNA, 20 bp, synthetic construct
  source 1..20: mol_type = other DNA
ggcaggagggaaagctcggc

SEQ ID NO: 246988 - DNA, 20 bp, synthetic construct
  source 1..20: mol_type = other DNA
aggcaggagggaaagctcgg

SEQ ID NO: 246989 - DNA, 20 bp, synthetic construct
  source 1..20: mol_type = other DNA
gaggcaggagggaaagctcg

SEQ ID NO: 246990 - DNA, 20 bp, synthetic construct
  source 1..20: mol_type = other DNA
agaggcaggagggaaagctc

SEQ ID NO: 246991 - DNA, 20 bp, synthetic construct
  source 1..20: mol_type = other DNA
cagaggcaggagggaaagct

SEQ ID NO: 246992 - DNA, 20 bp, synthetic construct
  source 1..20: mol_type = other DNA
gcagaggcaggagggaaagc

SEQ ID NO: 246993 - DNA, 20 bp, synthetic construct
  source 1..20: mol_type = other DNA
agcagaggcaggagggaaag

SEQ ID NO: 246994 - DNA, 20 bp, synthetic construct
  source 1..20: mol_type = other DNA
cagcagaggcaggagggaaa

SEQ ID NO: 246995 - DNA, 20 bp, synthetic construct
  source 1..20: mol_type = other DNA
acagcagaggcaggagggaa

SEQ ID NO: 246996 - DNA, 20 bp, synthetic construct
  source 1..20: mol_type = other DNA
cacagcagaggcaggaggga

SEQ ID NO: 246997 - DNA, 20 bp, synthetic construct
  source 1..20: mol_type = other DNA
tcacagcagaggcaggaggg

SEQ ID NO: 246998 - DNA, 20 bp, synthetic construct
  source 1..20: mol_type = other DNA
ttcacagcagaggcaggagg

SEQ ID NO: 246999 - DNA, 20 bp, synthetic construct
  source 1..20: mol_type = other DNA
cttcacagcagaggcaggag

SEQ ID NO: 247000 - DNA, 20 bp, synthetic construct
  source 1..20: mol_type = other DNA
ccttcacagcagaggcagga

SEQ ID NO: 247001 - DNA, 20 bp, synthetic construct
  source 1..20: mol_type = other DNA
accttcacagcagaggcagg

SEQ ID NO: 247002 - DNA, 20 bp, synthetic construct
  source 1..20: mol_type = other DNA
caccttcacagcagaggcag

SEQ ID NO: 247003 - DNA, 20 bp, synthetic construct
  source 1..20: mol_type = other DNA
ccaccttcacagcagaggca

SEQ ID NO: 247004 - DNA, 20 bp, synthetic construct
  source 1..20: mol_type = other DNA
tccaccttcacagcagaggc

SEQ ID NO: 247005 - DNA, 20 bp, synthetic construct
  source 1..20: mol_type = other DNA
gtccaccttcacagcagagg

SEQ ID NO: 247006 - DNA, 20 bp, synthetic construct
  source 1..20: mol_type = other DNA
ggtccaccttcacagcagag

SEQ ID NO: 247007 - DNA, 20 bp, synthetic construct
  source 1..20: mol_type = other DNA
gggtccaccttcacagcaga

SEQ ID NO: 247008 - DNA, 20 bp, synthetic construct
  source 1..20: mol_type = other DNA
tgggtccaccttcacagcag

SEQ ID NO: 247009 - DNA, 20 bp, synthetic construct
  source 1..20: mol_type = other DNA
atgggtccaccttcacagca

SEQ ID NO: 247010 - DNA, 20 bp, synthetic construct
  source 1..20: mol_type = other DNA
gatgggtccaccttcacagc

SEQ ID NO: 247011 - DNA, 20 bp, synthetic construct
  source 1..20: mol_type = other DNA
ggatgggtccaccttcacag

SEQ ID NO: 247012 - DNA, 20 bp, synthetic construct
  source 1..20: mol_type = other DNA
tggatgggtccaccttcaca

SEQ ID NO: 247013 - DNA, 20 bp, synthetic construct
  source 1..20: mol_type = other DNA
ttggatgggtccaccttcac

SEQ ID NO: 247014 - DNA, 20 bp, synthetic construct
  source 1..20: mol_type = other DNA
gttggatgggtccaccttca

SEQ ID NO: 247015 - DNA, 20 bp, synthetic construct
  source 1..20: mol_type = other DNA
tgttggatgggtccaccttc

SEQ ID NO: 247016 - DNA, 20 bp, synthetic construct
  source 1..20: mol_type = other DNA
ctgttggatgggtccacctt

SEQ ID NO: 247017 - DNA, 20 bp, synthetic construct
  source 1..20: mol_type = other DNA
actgttggatgggtccacct

SEQ ID NO: 247018 - DNA, 20 bp, synthetic construct
  source 1..20: mol_type = other DNA
gactgttggatgggtccacc

SEQ ID NO: 247019 - DNA, 20 bp, synthetic construct
  source 1..20: mol_type = other DNA
tgactgttggatgggtccac

SEQ ID NO: 247020 - DNA, 20 bp, synthetic construct
  source 1..20: mol_type = other DNA
ttgactgttggatgggtcca

SEQ ID NO: 247021 - DNA, 20 bp, synthetic construct
  source 1..20: mol_type = other DNA
tttgactgttggatgggtcc

SEQ ID NO: 247022 - DNA, 20 bp, synthetic construct
  source 1..20: mol_type = other DNA
atttgactgttggatgggtc

SEQ ID NO: 247023 - DNA, 20 bp, synthetic construct
  source 1..20: mol_type = other DNA
catttgactgttggatgggt

SEQ ID NO: 247024 - DNA, 20 bp, synthetic construct
  source 1..20: mol_type = other DNA
gcatttgactgttggatggg

SEQ ID NO: 247025 - DNA, 20 bp, synthetic construct
  source 1..20: mol_type = other DNA
ggcatttgactgttggatgg

SEQ ID NO: 247026 - DNA, 20 bp, synthetic construct
  source 1..20: mol_type = other DNA
aggcatttgactgttggatg

SEQ ID NO: 247027 - DNA, 20 bp, synthetic construct
  source 1..20: mol_type = other DNA
caggcatttgactgttggat

SEQ ID NO: 247028 - DNA, 20 bp, synthetic construct
  source 1..20: mol_type = other DNA
tcaggcatttgactgttgga

SEQ ID NO: 247029 - DNA, 20 bp, synthetic construct
  source 1..20: mol_type = other DNA
gtcaggcatttgactgttgg

SEQ ID NO: 247030 - DNA, 20 bp, synthetic construct
  source 1..20: mol_type = other DNA
agtcaggcatttgactgttg

SEQ ID NO: 247031 - DNA, 20 bp, synthetic construct
  source 1..20: mol_type = other DNA
gagtcaggcatttgactgtt

SEQ ID NO: 247032 - DNA, 20 bp, synthetic construct
  source 1..20: mol_type = other DNA
agagtcaggcatttgactgt

SEQ ID NO: 247033 - DNA, 20 bp, synthetic construct
  source 1..20: mol_type = other DNA
cagagtcaggcatttgactg

SEQ ID NO: 247034 - DNA, 20 bp, synthetic construct
  source 1..20: mol_type = other DNA
ccagagtcaggcatttgact

SEQ ID NO: 247035 - DNA, 20 bp, synthetic construct
  source 1..20: mol_type = other DNA
tccagagtcaggcatttgac

SEQ ID NO: 247036 - DNA, 20 bp, synthetic construct
  source 1..20: mol_type = other DNA
gtccagagtcaggcatttga

SEQ ID NO: 247037 - DNA, 20 bp, synthetic construct
  source 1..20: mol_type = other DNA
tgtccagagtcaggcatttg

SEQ ID NO: 247038 - DNA, 20 bp, synthetic construct
  source 1..20: mol_type = other DNA
ctgtccagagtcaggcattt

SEQ ID NO: 247039 - DNA, 20 bp, synthetic construct
  source 1..20: mol_type = other DNA
cctgtccagagtcaggcatt

SEQ ID NO: 247040 - DNA, 20 bp, synthetic construct
  source 1..20: mol_type = other DNA
tcctgtccagagtcaggcat

SEQ ID NO: 247041 - DNA, 20 bp, synthetic construct
  source 1..20: mol_type = other DNA
ctcctgtccagagtcaggca

SEQ ID NO: 247042 - DNA, 20 bp, synthetic construct
  source 1..20: mol_type = other DNA
gctcctgtccagagtcaggc

SEQ ID NO: 247043 - DNA, 20 bp, synthetic construct
  source 1..20: mol_type = other DNA
cgctcctgtccagagtcagg

SEQ ID NO: 247044 - DNA, 20 bp, synthetic construct
  source 1..20: mol_type = other DNA
ccgctcctgtccagagtcag

SEQ ID NO: 247045 - DNA, 20 bp, synthetic construct
  source 1..20: mol_type = other DNA
tccgctcctgtccagagtca

SEQ ID NO: 247046 - DNA, 20 bp, synthetic construct
  source 1..20: mol_type = other DNA
gtccgctcctgtccagagtc

SEQ ID NO: 247047 - DNA, 20 bp, synthetic construct
  source 1..20: mol_type = other DNA
ggtccgctcctgtccagagt

SEQ ID NO: 247048 - DNA, 20 bp, synthetic construct
  source 1..20: mol_type = other DNA
aggtccgctcctgtccagag

SEQ ID NO: 247049 - DNA, 20 bp, synthetic construct
  source 1..20: mol_type = other DNA
taggtccgctcctgtccaga

SEQ ID NO: 247050 - DNA, 20 bp, synthetic construct
  source 1..20: mol_type = other DNA
ataggtccgctcctgtccag

SEQ ID NO: 247051 - DNA, 20 bp, synthetic construct
  source 1..20: mol_type = other DNA
aataggtccgctcctgtcca

SEQ ID NO: 247052 - DNA, 20 bp, synthetic construct
  source 1..20: mol_type = other DNA
aaataggtccgctcctgtcc

SEQ ID NO: 247053 - DNA, 20 bp, synthetic construct
  source 1..20: mol_type = other DNA
taaataggtccgctcctgtc

SEQ ID NO: 247054 - DNA, 20 bp, synthetic construct
  source 1..20: mol_type = other DNA
ataaataggtccgctcctgt

SEQ ID NO: 247055 - DNA, 20 bp, synthetic construct
  source 1..20: mol_type = other DNA
aataaataggtccgctcctg

SEQ ID NO: 247056 - DNA, 20 bp, synthetic construct
  source 1..20: mol_type = other DNA
caataaataggtccgctcct

SEQ ID NO: 247057 - DNA, 20 bp, synthetic construct
  source 1..20: mol_type = other DNA
gcaataaataggtccgctcc

SEQ ID NO: 247058 - DNA, 20 bp, synthetic construct
  source 1..20: mol_type = other DNA
ggcaataaataggtccgctc

SEQ ID NO: 247059 - DNA, 20 bp, synthetic construct
  source 1..20: mol_type = other DNA
tggcaataaataggtccgct

SEQ ID NO: 247060 - DNA, 20 bp, synthetic construct
  source 1..20: mol_type = other DNA
atggcaataaataggtccgc

SEQ ID NO: 247061 - DNA, 20 bp, synthetic construct
  source 1..20: mol_type = other DNA
catggcaataaataggtccg

SEQ ID NO: 247062 - DNA, 20 bp, synthetic construct
  source 1..20: mol_type = other DNA
gcatggcaataaataggtcc

SEQ ID NO: 247063 - DNA, 20 bp, synthetic construct
  source 1..20: mol_type = other DNA
tgcatggcaataaataggtc

SEQ ID NO: 247064 - DNA, 20 bp, synthetic construct
  source 1..20: mol_type = other DNA
ttgcatggcaataaataggt

SEQ ID NO: 247065 - DNA, 20 bp, synthetic construct
  source 1..20: mol_type = other DNA
cttgcatggcaataaatagg

SEQ ID NO: 247066 - DNA, 20 bp, synthetic construct
  source 1..20: mol_type = other DNA
ccttgcatggcaataaatag

SEQ ID NO: 247067 - DNA, 20 bp, synthetic construct
  source 1..20: mol_type = other DNA
cccttgcatggcaataaata

SEQ ID NO: 247068 - DNA, 20 bp, synthetic construct
  source 1..20: mol_type = other DNA
tcccttgcatggcaataaat

SEQ ID NO: 247069 - DNA, 20 bp, synthetic construct
  source 1..20: mol_type = other DNA
gtcccttgcatggcaataaa

SEQ ID NO: 247070 - DNA, 20 bp, synthetic construct
  source 1..20: mol_type = other DNA
agtcccttgcatggcaataa

SEQ ID NO: 247071 - DNA, 20 bp, synthetic construct
  source 1..20: mol_type = other DNA
gagtcccttgcatggcaata

SEQ ID NO: 247072 - DNA, 20 bp, synthetic construct
  source 1..20: mol_type = other DNA
agagtcccttgcatggcaat

SEQ ID NO: 247073 - DNA, 20 bp, synthetic construct
  source 1..20: mol_type = other DNA
cagagtcccttgcatggcaa

SEQ ID NO: 247074 - DNA, 20 bp, synthetic construct
  source 1..20: mol_type = other DNA
gcagagtcccttgcatggca

SEQ ID NO: 247075 - DNA, 20 bp, synthetic construct
  source 1..20: mol_type = other DNA
tgcagagtcccttgcatggc

SEQ ID NO: 247076 - DNA, 20 bp, synthetic construct
  source 1..20: mol_type = other DNA
gtgcagagtcccttgcatgg

SEQ ID NO: 247077 - DNA, 20 bp, synthetic construct
  source 1..20: mol_type = other DNA
agtgcagagtcccttgcatg

SEQ ID NO: 247078 - DNA, 20 bp, synthetic construct
  source 1..20: mol_type = other DNA
aagtgcagagtcccttgcat

SEQ ID NO: 247079 - DNA, 20 bp, synthetic construct
  source 1..20: mol_type = other DNA
aaagtgcagagtcccttgca

SEQ ID NO: 247080 - DNA, 20 bp, synthetic construct
  source 1..20: mol_type = other DNA
aaaagtgcagagtcccttgc

SEQ ID NO: 247081 - DNA, 20 bp, synthetic construct
  source 1..20: mol_type = other DNA
caaaagtgcagagtcccttg

SEQ ID NO: 247082 - DNA, 20 bp, synthetic construct
  source 1..20: mol_type = other DNA
tcaaaagtgcagagtccctt

SEQ ID NO: 247083 - DNA, 20 bp, synthetic construct
  source 1..20: mol_type = other DNA
ttcaaaagtgcagagtccct

SEQ ID NO: 247084 - DNA, 20 bp, synthetic construct
  source 1..20: mol_type = other DNA
attcaaaagtgcagagtccc

SEQ ID NO: 247085 - DNA, 20 bp, synthetic construct
  source 1..20: mol_type = other DNA
aattcaaaagtgcagagtcc

SEQ ID NO: 247086 - DNA, 20 bp, synthetic construct
  source 1..20: mol_type = other DNA
caattcaaaagtgcagagtc

SEQ ID NO: 247087 - DNA, 20 bp, synthetic construct
  source 1..20: mol_type = other DNA
acaattcaaaagtgcagagt

SEQ ID NO: 247088 - DNA, 20 bp, synthetic construct
  source 1..20: mol_type = other DNA
cacaattcaaaagtgcagag

SEQ ID NO: 247089 - DNA, 20 bp, synthetic construct
  source 1..20: mol_type = other DNA
ccacaattcaaaagtgcaga

SEQ ID NO: 247090 - DNA, 20 bp, synthetic construct
  source 1..20: mol_type = other DNA
cccacaattcaaaagtgcag

SEQ ID NO: 247091 - DNA, 20 bp, synthetic construct
  source 1..20: mol_type = other DNA
acccacaattcaaaagtgca

SEQ ID NO: 247092 - DNA, 20 bp, synthetic construct
  source 1..20: mol_type = other DNA
gacccacaattcaaaagtgc

SEQ ID NO: 247093 - DNA, 20 bp, synthetic construct
  source 1..20: mol_type = other DNA
tgacccacaattcaaaagtg

SEQ ID NO: 247094 - DNA, 20 bp, synthetic construct
  source 1..20: mol_type = other DNA
atgacccacaattcaaaagt

SEQ ID NO: 247095 - DNA, 20 bp, synthetic construct
  source 1..20: mol_type = other DNA
catgacccacaattcaaaag

SEQ ID NO: 247096 - DNA, 20 bp, synthetic construct
  source 1..20: mol_type = other DNA
ccatgacccacaattcaaaa

SEQ ID NO: 247097 - DNA, 20 bp, synthetic construct
  source 1..20: mol_type = other DNA
cccatgacccacaattcaaa

SEQ ID NO: 247098 - DNA, 20 bp, synthetic construct
  source 1..20: mol_type = other DNA
gcccatgacccacaattcaa

SEQ ID NO: 247099 - DNA, 20 bp, synthetic construct
  source 1..20: mol_type = other DNA
agcccatgacccacaattca

SEQ ID NO: 247100 - DNA, 20 bp, synthetic construct
  source 1..20: mol_type = other DNA
aagcccatgacccacaattc

SEQ ID NO: 247101 - DNA, 20 bp, synthetic construct
  source 1..20: mol_type = other DNA
caagcccatgacccacaatt

SEQ ID NO: 247102 - DNA, 20 bp, synthetic construct
  source 1..20: mol_type = other DNA
ccaagcccatgacccacaat

SEQ ID NO: 247103 - DNA, 20 bp, synthetic construct
  source 1..20: mol_type = other DNA
tccaagcccatgacccacaa

SEQ ID NO: 247104 - DNA, 20 bp, synthetic construct
  source 1..20: mol_type = other DNA
atccaagcccatgacccaca

SEQ ID NO: 247105 - DNA, 20 bp, synthetic construct
  source 1..20: mol_type = other DNA
aatccaagcccatgacccac

SEQ ID NO: 247106 - DNA, 20 bp, synthetic construct
  source 1..20: mol_type = other DNA
aaatccaagcccatgaccca

SEQ ID NO: 247107 - DNA, 20 bp, synthetic construct
  source 1..20: mol_type = other DNA
taaatccaagcccatgaccc

SEQ ID NO: 247108 - DNA, 20 bp, synthetic construct
  source 1..20: mol_type = other DNA
ctaaatccaagcccatgacc

SEQ ID NO: 247109 - DNA, 20 bp, synthetic construct
  source 1..20: mol_type = other DNA
cctaaatccaagcccatgac

SEQ ID NO: 247110 - DNA, 20 bp, synthetic construct
  source 1..20: mol_type = other DNA
ccctaaatccaagcccatga

SEQ ID NO: 247111 - DNA, 20 bp, synthetic construct
  source 1..20: mol_type = other DNA
cccctaaatccaagcccatg

SEQ ID NO: 247112 - DNA, 20 bp, synthetic construct
  source 1..20: mol_type = other DNA
acccctaaatccaagcccat

SEQ ID NO: 247113 - DNA, 20 bp, synthetic construct
  source 1..20: mol_type = other DNA
aacccctaaatccaagccca

SEQ ID NO: 247114 - DNA, 20 bp, synthetic construct
  source 1..20: mol_type = other DNA
taacccctaaatccaagccc

SEQ ID NO: 247115 - DNA, 20 bp, synthetic construct
  source 1..20: mol_type = other DNA
ctaacccctaaatccaagcc

SEQ ID NO: 247116 - DNA, 20 bp, synthetic construct
  source 1..20: mol_type = other DNA
tctaacccctaaatccaagc

SEQ ID NO: 247117 - DNA, 20 bp, synthetic construct
  source 1..20: mol_type = other DNA
ctctaacccctaaatccaag

SEQ ID NO: 247118 - DNA, 20 bp, synthetic construct
  source 1..20: mol_type = other DNA
gctctaacccctaaatccaa

SEQ ID NO: 247119 - DNA, 20 bp, synthetic construct
  source 1..20: mol_type = other DNA
agctctaacccctaaatcca

SEQ ID NO: 247120 - DNA, 20 bp, synthetic construct
  source 1..20: mol_type = other DNA
cagctctaacccctaaatcc

SEQ ID NO: 247121 - DNA, 20 bp, synthetic construct
  source 1..20: mol_type = other DNA
ccagctctaacccctaaatc

SEQ ID NO: 247122 - DNA, 20 bp, synthetic construct
  source 1..20: mol_type = other DNA
cccagctctaacccctaaat

SEQ ID NO: 247123 - DNA, 20 bp, synthetic construct
  source 1..20: mol_type = other DNA
tcccagctctaacccctaaa

SEQ ID NO: 247124 - DNA, 20 bp, synthetic construct
  source 1..20: mol_type = other DNA
ctcccagctctaacccctaa

SEQ ID NO: 247125 - DNA, 20 bp, synthetic construct
  source 1..20: mol_type = other DNA
tctcccagctctaaccccta

SEQ ID NO: 247126 - DNA, 20 bp, synthetic construct
  source 1..20: mol_type = other DNA
ttctcccagctctaacccct

SEQ ID NO: 247127 - DNA, 20 bp, synthetic construct
  source 1..20: mol_type = other DNA
cttctcccagctctaacccc

SEQ ID NO: 247128 - DNA, 20 bp, synthetic construct
  source 1..20: mol_type = other DNA
acttctcccagctctaaccc

SEQ ID NO: 247129 - DNA, 20 bp, synthetic construct
  source 1..20: mol_type = other DNA
gacttctcccagctctaacc

SEQ ID NO: 247130 - DNA, 20 bp, synthetic construct
  source 1..20: mol_type = other DNA
agacttctcccagctctaac

SEQ ID NO: 247131 - DNA, 20 bp, synthetic construct
  source 1..20: mol_type = other DNA
aagacttctcccagctctaa

SEQ ID NO: 247132 - DNA, 20 bp, synthetic construct
  source 1..20: mol_type = other DNA
caagacttctcccagctcta

SEQ ID NO: 247133 - DNA, 20 bp, synthetic construct
  source 1..20: mol_type = other DNA
ccaagacttctcccagctct

SEQ ID NO: 247134 - DNA, 20 bp, synthetic construct
  source 1..20: mol_type = other DNA
tccaagacttctcccagctc

SEQ ID NO: 247135 - DNA, 20 bp, synthetic construct
  source 1..20: mol_type = other DNA
ttccaagacttctcccagct

SEQ ID NO: 247136 - DNA, 20 bp, synthetic construct
  source 1..20: mol_type = other DNA
cttccaagacttctcccagc

SEQ ID NO: 247137 - DNA, 20 bp, synthetic construct
  source 1..20: mol_type = other DNA
acttccaagacttctcccag

SEQ ID NO: 247138 - DNA, 20 bp, synthetic construct
  source 1..20: mol_type = other DNA
gacttccaagacttctccca

SEQ ID NO: 247139 - DNA, 20 bp, synthetic construct
  source 1..20: mol_type = other DNA
tgacttccaagacttctccc

SEQ ID NO: 247140 - DNA, 20 bp, synthetic construct
  source 1..20: mol_type = other DNA
gtgacttccaagacttctcc

SEQ ID NO: 247141 - DNA, 20 bp, synthetic construct
  source 1..20: mol_type = other DNA
ggtgacttccaagacttctc

SEQ ID NO: 247142 - DNA, 20 bp, synthetic construct
  source 1..20: mol_type = other DNA
aggtgacttccaagacttct

SEQ ID NO: 247143 - DNA, 20 bp, synthetic construct
  source 1..20: mol_type = other DNA
taggtgacttccaagacttc

SEQ ID NO: 247144 - DNA, 20 bp, synthetic construct
  source 1..20: mol_type = other DNA
ctaggtgacttccaagactt

SEQ ID NO: 247145 - DNA, 20 bp, synthetic construct
  source 1..20: mol_type = other DNA
tctaggtgacttccaagact

SEQ ID NO: 247146 - DNA, 20 bp, synthetic construct
  source 1..20: mol_type = other DNA
ctctaggtgacttccaagac

SEQ ID NO: 247147 - DNA, 20 bp, synthetic construct
  source 1..20: mol_type = other DNA
tctctaggtgacttccaaga

SEQ ID NO: 247148 - DNA, 20 bp, synthetic construct
  source 1..20: mol_type = other DNA
atctctaggtgacttccaag

SEQ ID NO: 247149 - DNA, 20 bp, synthetic construct
  source 1..20: mol_type = other DNA
catctctaggtgacttccaa

SEQ ID NO: 247150 - DNA, 20 bp, synthetic construct
  source 1..20: mol_type = other DNA
tcatctctaggtgacttcca

SEQ ID NO: 247151 - DNA, 20 bp, synthetic construct
  source 1..20: mol_type = other DNA
gtcatctctaggtgacttcc

SEQ ID NO: 247152 - DNA, 20 bp, synthetic construct
  source 1..20: mol_type = other DNA
tgtcatctctaggtgacttc

SEQ ID NO: 247153 - DNA, 20 bp, synthetic construct
  source 1..20: mol_type = other DNA
gtgtcatctctaggtgactt

SEQ ID NO: 247154 - DNA, 20 bp, synthetic construct
  source 1..20: mol_type = other DNA
agtgtcatctctaggtgact

SEQ ID NO: 247155 - DNA, 20 bp, synthetic construct
  source 1..20: mol_type = other DNA
cagtgtcatctctaggtgac

SEQ ID NO: 247156 - DNA, 20 bp, synthetic construct
  source 1..20: mol_type = other DNA
gcagtgtcatctctaggtga

SEQ ID NO: 247157 - DNA, 20 bp, synthetic construct
  source 1..20: mol_type = other DNA
ggcagtgtcatctctaggtg

SEQ ID NO: 247158 - DNA, 20 bp, synthetic construct
  source 1..20: mol_type = other DNA
tggcagtgtcatctctaggt

SEQ ID NO: 247159 - DNA, 20 bp, synthetic construct
  source 1..20: mol_type = other DNA
atggcagtgtcatctctagg

SEQ ID NO: 247160 - DNA, 20 bp, synthetic construct
  source 1..20: mol_type = other DNA
aatggcagtgtcatctctag

SEQ ID NO: 247161 - DNA, 20 bp, synthetic construct
  source 1..20: mol_type = other DNA
aaatggcagtgtcatctcta

SEQ ID NO: 247162 - DNA, 20 bp, synthetic construct
  source 1..20: mol_type = other DNA
aaaatggcagtgtcatctct

SEQ ID NO: 247163 - DNA, 20 bp, synthetic construct
  source 1..20: mol_type = other DNA
caaaatggcagtgtcatctc

SEQ ID NO: 247164 - DNA, 20 bp, synthetic construct
  source 1..20: mol_type = other DNA
gcaaaatggcagtgtcatct

SEQ ID NO: 247165 - DNA, 20 bp, synthetic construct
  source 1..20: mol_type = other DNA
tgcaaaatggcagtgtcatc

SEQ ID NO: 247166 - DNA, 20 bp, synthetic construct
  source 1..20: mol_type = other DNA
ctgcaaaatggcagtgtcat

SEQ ID NO: 247167 - DNA, 20 bp, synthetic construct
  source 1..20: mol_type = other DNA
tctgcaaaatggcagtgtca

SEQ ID NO: 247168 - DNA, 20 bp, synthetic construct
  source 1..20: mol_type = other DNA
atctgcaaaatggcagtgtc

SEQ ID NO: 247169 - DNA, 20 bp, synthetic construct
  source 1..20: mol_type = other DNA
catctgcaaaatggcagtgt

SEQ ID NO: 247170 - DNA, 20 bp, synthetic construct
  source 1..20: mol_type = other DNA
tcatctgcaaaatggcagtg

SEQ ID NO: 247171 - DNA, 20 bp, synthetic construct
  source 1..20: mol_type = other DNA
ctcatctgcaaaatggcagt

SEQ ID NO: 247172 - DNA, 20 bp, synthetic construct
  source 1..20: mol_type = other DNA
cctcatctgcaaaatggcag

SEQ ID NO: 247173 - DNA, 20 bp, synthetic construct
  source 1..20: mol_type = other DNA
tcctcatctgcaaaatggca

SEQ ID NO: 247174 - DNA, 20 bp, synthetic construct
  source 1..20: mol_type = other DNA
ttcctcatctgcaaaatggc

SEQ ID NO: 247175 - DNA, 20 bp, synthetic construct
  source 1..20: mol_type = other DNA
tttcctcatctgcaaaatgg

SEQ ID NO: 247176 - DNA, 20 bp, synthetic construct
  source 1..20: mol_type = other DNA
gtttcctcatctgcaaaatg

SEQ ID NO: 247177 - DNA, 20 bp, synthetic construct
  source 1..20: mol_type = other DNA
ggtttcctcatctgcaaaat

SEQ ID NO: 247178 - DNA, 20 bp, synthetic construct
  source 1..20: mol_type = other DNA
cggtttcctcatctgcaaaa

SEQ ID NO: 247179 - DNA, 20 bp, synthetic construct
  source 1..20: mol_type = other DNA
acggtttcctcatctgcaaa

SEQ ID NO: 247180 - DNA, 20 bp, synthetic construct
  source 1..20: mol_type = other DNA
gacggtttcctcatctgcaa

SEQ ID NO: 247181 - DNA, 20 bp, synthetic construct
  source 1..20: mol_type = other DNA
ggacggtttcctcatctgca

SEQ ID NO: 247182 - DNA, 20 bp, synthetic construct
  source 1..20: mol_type = other DNA
tggacggtttcctcatctgc

SEQ ID NO: 247183 - DNA, 20 bp, synthetic construct
  source 1..20: mol_type = other DNA
ttggacggtttcctcatctg

SEQ ID NO: 247184 - DNA, 20 bp, synthetic construct
  source 1..20: mol_type = other DNA
attggacggtttcctcatct

SEQ ID NO: 247185 - DNA, 20 bp, synthetic construct
  source 1..20: mol_type = other DNA
gattggacggtttcctcatc

SEQ ID NO: 247186 - DNA, 20 bp, synthetic construct
  source 1..20: mol_type = other DNA
tgattggacggtttcctcat

SEQ ID NO: 247187 - DNA, 20 bp, synthetic construct
  source 1..20: mol_type = other DNA
ttgattggacggtttcctca

SEQ ID NO: 247188 - DNA, 20 bp, synthetic construct
  source 1..20: mol_type = other DNA
tttgattggacggtttcctc

SEQ ID NO: 247189 - DNA, 20 bp, synthetic construct
  source 1..20: mol_type = other DNA
ttttgattggacggtttcct

SEQ ID NO: 247190 - DNA, 20 bp, synthetic construct
  source 1..20: mol_type = other DNA
attttgattggacggtttcc

SEQ ID NO: 247191 - DNA, 20 bp, synthetic construct
  source 1..20: mol_type = other DNA
cattttgattggacggtttc

SEQ ID NO: 247192 - DNA, 20 bp, synthetic construct
  source 1..20: mol_type = other DNA
ccattttgattggacggttt

SEQ ID NO: 247193 - DNA, 20 bp, synthetic construct
  source 1..20: mol_type = other DNA
tccattttgattggacggtt

SEQ ID NO: 247194 - DNA, 20 bp, synthetic construct
  source 1..20: mol_type = other DNA
gtccattttgattggacggt

SEQ ID NO: 247195 - DNA, 20 bp, synthetic construct
  source 1..20: mol_type = other DNA
ggtccattttgattggacgg

SEQ ID NO: 247196 - DNA, 20 bp, synthetic construct
  source 1..20: mol_type = other DNA
tggtccattttgattggacg

SEQ ID NO: 247197 - DNA, 20 bp, synthetic construct
  source 1..20: mol_type = other DNA
ttggtccattttgattggac

SEQ ID NO: 247198 - DNA, 20 bp, synthetic construct
  source 1..20: mol_type = other DNA
cttggtccattttgattgga

SEQ ID NO: 247199 - DNA, 20 bp, synthetic construct
  source 1..20: mol_type = other DNA
ccttggtccattttgattgg

SEQ ID NO: 247200 - DNA, 20 bp, synthetic construct
  source 1..20: mol_type = other DNA
tccttggtccattttgattg

SEQ ID NO: 247201 - DNA, 20 bp, synthetic construct
  source 1..20: mol_type = other DNA
gtccttggtccattttgatt

SEQ ID NO: 247202 - DNA, 20 bp, synthetic construct
  source 1..20: mol_type = other DNA
agtccttggtccattttgat

SEQ ID NO: 247203 - DNA, 20 bp, synthetic construct
  source 1..20: mol_type = other DNA
aagtccttggtccattttga

SEQ ID NO: 247204 - DNA, 20 bp, synthetic construct
  source 1..20: mol_type = other DNA
caagtccttggtccattttg

SEQ ID NO: 247205 - DNA, 20 bp, synthetic construct
  source 1..20: mol_type = other DNA
gcaagtccttggtccatttt

SEQ ID NO: 247206 - DNA, 20 bp, synthetic construct
  source 1..20: mol_type = other DNA
ggcaagtccttggtccattt

SEQ ID NO: 247207 - DNA, 20 bp, synthetic construct
  source 1..20: mol_type = other DNA
gggcaagtccttggtccatt

SEQ ID NO: 247208 - DNA, 20 bp, synthetic construct
  source 1..20: mol_type = other DNA
tgggcaagtccttggtccat

SEQ ID NO: 247209 - DNA, 20 bp, synthetic construct
  source 1..20: mol_type = other DNA
ttgggcaagtccttggtcca

SEQ ID NO: 247210 - DNA, 20 bp, synthetic construct
  source 1..20: mol_type = other DNA
tttgggcaagtccttggtcc

SEQ ID NO: 247211 - DNA, 20 bp, synthetic construct
  source 1..20: mol_type = other DNA
ctttgggcaagtccttggtc

SEQ ID NO: 247212 - DNA, 20 bp, synthetic construct
  source 1..20: mol_type = other DNA
gctttgggcaagtccttggt

SEQ ID NO: 247213 - DNA, 20 bp, synthetic construct
  source 1..20: mol_type = other DNA
ggctttgggcaagtccttgg

SEQ ID NO: 247214 - DNA, 20 bp, synthetic construct
  source 1..20: mol_type = other DNA
aggctttgggcaagtccttg

SEQ ID NO: 247215 - DNA, 20 bp, synthetic construct
  source 1..20: mol_type = other DNA
gaggctttgggcaagtcctt

SEQ ID NO: 247216 - DNA, 20 bp, synthetic construct
  source 1..20: mol_type = other DNA
tgaggctttgggcaagtcct

SEQ ID NO: 247217 - DNA, 20 bp, synthetic construct
  source 1..20: mol_type = other DNA
gtgaggctttgggcaagtcc

SEQ ID NO: 247218 - DNA, 20 bp, synthetic construct
  source 1..20: mol_type = other DNA
tgtgaggctttgggcaagtc

SEQ ID NO: 247219 - DNA, 20 bp, synthetic construct
  source 1..20: mol_type = other DNA
ctgtgaggctttgggcaagt

SEQ ID NO: 247220 - DNA, 20 bp, synthetic construct
  source 1..20: mol_type = other DNA
gctgtgaggctttgggcaag

SEQ ID NO: 247221 - DNA, 20 bp, synthetic construct
  source 1..20: mol_type = other DNA
tgctgtgaggctttgggcaa

SEQ ID NO: 247222 - DNA, 20 bp, synthetic construct
  source 1..20: mol_type = other DNA
ttgctgtgaggctttgggca

SEQ ID NO: 247223 - DNA, 20 bp, synthetic construct
  source 1..20: mol_type = other DNA
tttgctgtgaggctttgggc

SEQ ID NO: 247224 - DNA, 20 bp, synthetic construct
  source 1..20: mol_type = other DNA
ttttgctgtgaggctttggg

SEQ ID NO: 247225 - DNA, 20 bp, synthetic construct
  source 1..20: mol_type = other DNA
gttttgctgtgaggctttgg

SEQ ID NO: 247226 - DNA, 20 bp, synthetic construct
  source 1..20: mol_type = other DNA
ggttttgctgtgaggctttg

SEQ ID NO: 247227 - DNA, 20 bp, synthetic construct
  source 1..20: mol_type = other DNA
tggttttgctgtgaggcttt

SEQ ID NO: 247228 - DNA, 20 bp, synthetic construct
  source 1..20: mol_type = other DNA
atggttttgctgtgaggctt

SEQ ID NO: 247229 - DNA, 20 bp, synthetic construct
  source 1..20: mol_type = other DNA
tatggttttgctgtgaggct

SEQ ID NO: 247230 - DNA, 20 bp, synthetic construct
  source 1..20: mol_type = other DNA
ctatggttttgctgtgaggc

SEQ ID NO: 247231 - DNA, 20 bp, synthetic construct
  source 1..20: mol_type = other DNA
cctatggttttgctgtgagg

SEQ ID NO: 247232 - DNA, 20 bp, synthetic construct
  source 1..20: mol_type = other DNA
gcctatggttttgctgtgag

SEQ ID NO: 247233 - DNA, 20 bp, synthetic construct
  source 1..20: mol_type = other DNA
ggcctatggttttgctgtga

SEQ ID NO: 247234 - DNA, 20 bp, synthetic construct
  source 1..20: mol_type = other DNA
gggcctatggttttgctgtg

SEQ ID NO: 247235 - DNA, 20 bp, synthetic construct
  source 1..20: mol_type = other DNA
ggggcctatggttttgctgt

SEQ ID NO: 247236 - DNA, 20 bp, synthetic construct
  source 1..20: mol_type = other DNA
gggggcctatggttttgctg

SEQ ID NO: 247237 - DNA, 20 bp, synthetic construct
  source 1..20: mol_type = other DNA
cgggggcctatggttttgct

SEQ ID NO: 247238 - DNA, 20 bp, synthetic construct
  source 1..20: mol_type = other DNA
gcgggggcctatggttttgc

SEQ ID NO: 247239 - DNA, 20 bp, synthetic construct
  source 1..20: mol_type = other DNA
tgcgggggcctatggttttg

SEQ ID NO: 247240 - DNA, 20 bp, synthetic construct
  source 1..20: mol_type = other DNA
gtgcgggggcctatggtttt

SEQ ID NO: 247241 - DNA, 20 bp, synthetic construct
  source 1..20: mol_type = other DNA
agtgcgggggcctatggttt

SEQ ID NO: 247242 - DNA, 20 bp, synthetic construct
  source 1..20: mol_type = other DNA
tagtgcgggggcctatggtt

SEQ ID NO: 247243 - DNA, 20 bp, synthetic construct
  source 1..20: mol_type = other DNA
ttagtgcgggggcctatggt

SEQ ID NO: 247244 - DNA, 20 bp, synthetic construct
  source 1..20: mol_type = other DNA
gttagtgcgggggcctatgg

SEQ ID NO: 247245 - DNA, 20 bp, synthetic construct
  source 1..20: mol_type = other DNA
ggttagtgcgggggcctatg

SEQ ID NO: 247246 - DNA, 20 bp, synthetic construct
  source 1..20: mol_type = other DNA
gggttagtgcgggggcctat

SEQ ID NO: 247247 - DNA, 20 bp, synthetic construct
  source 1..20: mol_type = other DNA
ggggttagtgcgggggccta

SEQ ID NO: 247248 - DNA, 20 bp, synthetic construct
  source 1..20: mol_type = other DNA
tggggttagtgcgggggcct

SEQ ID NO: 247249 - DNA, 20 bp, synthetic construct
  source 1..20: mol_type = other DNA
ctggggttagtgcgggggcc

SEQ ID NO: 247250 - DNA, 20 bp, synthetic construct
  source 1..20: mol_type = other DNA
tctggggttagtgcgggggc

SEQ ID NO: 247251 - DNA, 20 bp, synthetic construct
  source 1..20: mol_type = other DNA
ctctggggttagtgcggggg

SEQ ID NO: 247252 - DNA, 20 bp, synthetic construct
  source 1..20: mol_type = other DNA
actctggggttagtgcgggg

SEQ ID NO: 247253 - DNA, 20 bp, synthetic construct
  source 1..20: mol_type = other DNA
gactctggggttagtgcggg

SEQ ID NO: 247254 - DNA, 20 bp, synthetic construct
  source 1..20: mol_type = other DNA
ggactctggggttagtgcgg

SEQ ID NO: 247255 - DNA, 20 bp, synthetic construct
  source 1..20: mol_type = other DNA
gggactctggggttagtgcg

SEQ ID NO: 247256 - DNA, 20 bp, synthetic construct
  source 1..20: mol_type = other DNA
agggactctggggttagtgc

SEQ ID NO: 247257 - DNA, 20 bp, synthetic construct
  source 1..20: mol_type = other DNA
cagggactctggggttagtg

SEQ ID NO: 247258 - DNA, 20 bp, synthetic construct
  source 1..20: mol_type = other DNA
acagggactctggggttagt

SEQ ID NO: 247259 - DNA, 20 bp, synthetic construct
  source 1..20: mol_type = other DNA
cacagggactctggggttag

SEQ ID NO: 247260 - DNA, 20 bp, synthetic construct
  source 1..20: mol_type = other DNA
gcacagggactctggggtta

SEQ ID NO: 247261 - DNA, 20 bp, synthetic construct
  source 1..20: mol_type = other DNA
agcacagggactctggggtt

SEQ ID NO: 247262 - DNA, 20 bp, synthetic construct
  source 1..20: mol_type = other DNA
cagcacagggactctggggt

SEQ ID NO: 247263 - DNA, 20 bp, synthetic construct
  source 1..20: mol_type = other DNA
acagcacagggactctgggg

SEQ ID NO: 247264 - DNA, 20 bp, synthetic construct
  source 1..20: mol_type = other DNA
gacagcacagggactctggg

SEQ ID NO: 247265 - DNA, 20 bp, synthetic construct
  source 1..20: mol_type = other DNA
agacagcacagggactctgg

SEQ ID NO: 247266 - DNA, 20 bp, synthetic construct
  source 1..20: mol_type = other DNA
aagacagcacagggactctg

SEQ ID NO: 247267 - DNA, 20 bp, synthetic construct
  source 1..20: mol_type = other DNA
taagacagcacagggactct

SEQ ID NO: 247268 - DNA, 20 bp, synthetic construct
  source 1..20: mol_type = other DNA
ttaagacagcacagggactc

SEQ ID NO: 247269 - DNA, 20 bp, synthetic construct
  source 1..20: mol_type = other DNA
cttaagacagcacagggact

SEQ ID NO: 247270 - DNA, 20 bp, synthetic construct
  source 1..20: mol_type = other DNA
ccttaagacagcacagggac

SEQ ID NO: 247271 - DNA, 20 bp, synthetic construct
  source 1..20: mol_type = other DNA
tccttaagacagcacaggga

SEQ ID NO: 247272 - DNA, 20 bp, synthetic construct
  source 1..20: mol_type = other DNA
atccttaagacagcacaggg

SEQ ID NO: 247273 - DNA, 20 bp, synthetic construct
  source 1..20: mol_type = other DNA
gatccttaagacagcacagg

SEQ ID NO: 247274 - DNA, 20 bp, synthetic construct
  source 1..20: mol_type = other DNA
tgatccttaagacagcacag

SEQ ID NO: 247275 - DNA, 20 bp, synthetic construct
  source 1..20: mol_type = other DNA
atgatccttaagacagcaca

SEQ ID NO: 247276 - DNA, 20 bp, synthetic construct
  source 1..20: mol_type = other DNA
tatgatccttaagacagcac

SEQ ID NO: 247277 - DNA, 20 bp, synthetic construct
  source 1..20: mol_type = other DNA
atatgatccttaagacagca

SEQ ID NO: 247278 - DNA, 20 bp, synthetic construct
  source 1..20: mol_type = other DNA
tatatgatccttaagacagc

SEQ ID NO: 247279 - DNA, 20 bp, synthetic construct
  source 1..20: mol_type = other DNA
ctatatgatccttaagacag

SEQ ID NO: 247280 - DNA, 20 bp, synthetic construct
  source 1..20: mol_type = other DNA
actatatgatccttaagaca

SEQ ID NO: 247281 - DNA, 20 bp, synthetic construct
  source 1..20: mol_type = other DNA
aactatatgatccttaagac

SEQ ID NO: 247282 - DNA, 20 bp, synthetic construct
  source 1..20: mol_type = other DNA
caactatatgatccttaaga

SEQ ID NO: 247283 - DNA, 20 bp, synthetic construct
  source 1..20: mol_type = other DNA
acaactatatgatccttaag

SEQ ID NO: 247284 - DNA, 20 bp, synthetic construct
  source 1..20: mol_type = other DNA
tacaactatatgatccttaa

SEQ ID NO: 247285 - DNA, 20 bp, synthetic construct
  source 1..20: mol_type = other DNA
ttacaactatatgatcctta

SEQ ID NO: 247286 - DNA, 20 bp, synthetic construct
  source 1..20: mol_type = other DNA
cttacaactatatgatcctt

SEQ ID NO: 247287 - DNA, 20 bp, synthetic construct
  source 1..20: mol_type = other DNA
gcttacaactatatgatcct

SEQ ID NO: 247288 - DNA, 20 bp, synthetic construct
  source 1..20: mol_type = other DNA
tgcttacaactatatgatcc

SEQ ID NO: 247289 - DNA, 20 bp, synthetic construct
  source 1..20: mol_type = other DNA
ttgcttacaactatatgatc

SEQ ID NO: 247290 - DNA, 20 bp, synthetic construct
  source 1..20: mol_type = other DNA
attgcttacaactatatgat

SEQ ID NO: 247291 - DNA, 20 bp, synthetic construct
  source 1..20: mol_type = other DNA
gattgcttacaactatatga

SEQ ID NO: 247292 - DNA, 20 bp, synthetic construct
  source 1..20: mol_type = other DNA
tgattgcttacaactatatg

SEQ ID NO: 247293 - DNA, 20 bp, synthetic construct
  source 1..20: mol_type = other DNA
atgattgcttacaactatat

SEQ ID NO: 247294 - DNA, 20 bp, synthetic construct
  source 1..20: mol_type = other DNA
gatgattgcttacaactata

SEQ ID NO: 247295 - DNA, 20 bp, synthetic construct
  source 1..20: mol_type = other DNA
agatgattgcttacaactat

SEQ ID NO: 247296 - DNA, 20 bp, synthetic construct
  source 1..20: mol_type = other DNA
cagatgattgcttacaacta

SEQ ID NO: 247297 - DNA, 20 bp, synthetic construct
  source 1..20: mol_type = other DNA
ccagatgattgcttacaact

SEQ ID NO: 247298 - DNA, 20 bp, synthetic construct
  source 1..20: mol_type = other DNA
accagatgattgcttacaac

SEQ ID NO: 247299 - DNA, 20 bp, synthetic construct
  source 1..20: mol_type = other DNA
aaccagatgattgcttacaa

SEQ ID NO: 247300 - DNA, 20 bp, synthetic construct
  source 1..20: mol_type = other DNA
aaaccagatgattgcttaca

SEQ ID NO: 247301 - DNA, 20 bp, synthetic construct
  source 1..20: mol_type = other DNA
aaaaccagatgattgcttac

SEQ ID NO: 247302 - DNA, 20 bp, synthetic construct
  source 1..20: mol_type = other DNA
gaaaaccagatgattgctta

SEQ ID NO: 247303 - DNA, 20 bp, synthetic construct
  source 1..20: mol_type = other DNA
tgaaaaccagatgattgctt

SEQ ID NO: 247304 - DNA, 20 bp, synthetic construct
  source 1..20: mol_type = other DNA
ctgaaaaccagatgattgct

SEQ ID NO: 247305 - DNA, 20 bp, synthetic construct
  source 1..20: mol_type = other DNA
actgaaaaccagatgattgc

SEQ ID NO: 247306 - DNA, 20 bp, synthetic construct
  source 1..20: mol_type = other DNA
tactgaaaaccagatgattg

SEQ ID NO: 247307 - DNA, 20 bp, synthetic construct
  source 1..20: mol_type = other DNA
atactgaaaaccagatgatt

SEQ ID NO: 247308 - DNA, 20 bp, synthetic construct
  source 1..20: mol_type = other DNA
aatactgaaaaccagatgat

SEQ ID NO: 247309 - DNA, 20 bp, synthetic construct
  source 1..20: mol_type = other DNA
aaatactgaaaaccagatga

SEQ ID NO: 247310 - DNA, 20 bp, synthetic construct
  source 1..20: mol_type = other DNA
gaaatactgaaaaccagatg

SEQ ID NO: 247311 - DNA, 20 bp, synthetic construct
  source 1..20: mol_type = other DNA
agaaatactgaaaaccagat

SEQ ID NO: 247312 - DNA, 20 bp, synthetic construct
  source 1..20: mol_type = other DNA
aagaaatactgaaaaccaga

SEQ ID NO: 247313 - DNA, 20 bp, synthetic construct
  source 1..20: mol_type = other DNA
gaagaaatactgaaaaccag

SEQ ID NO: 247314 - DNA, 20 bp, synthetic construct
  source 1..20: mol_type = other DNA
agaagaaatactgaaaacca

SEQ ID NO: 247315 - DNA, 20 bp, synthetic construct
  source 1..20: mol_type = other DNA
aagaagaaatactgaaaacc

SEQ ID NO: 247316 - DNA, 20 bp, synthetic construct
  source 1..20: mol_type = other DNA
aaagaagaaatactgaaaac

SEQ ID NO: 247317 - DNA, 20 bp, synthetic construct
  source 1..20: mol_type = other DNA
aaaagaagaaatactgaaaa

SEQ ID NO: 247318 - DNA, 20 bp, synthetic construct
  source 1..20: mol_type = other DNA
taaaagaagaaatactgaaa

SEQ ID NO: 247319 - DNA, 20 bp, synthetic construct
  source 1..20: mol_type = other DNA
ttaaaagaagaaatactgaa

SEQ ID NO: 247320 - DNA, 20 bp, synthetic construct
  source 1..20: mol_type = other DNA
tttaaaagaagaaatactga

SEQ ID NO: 247321 - DNA, 20 bp, synthetic construct
  source 1..20: mol_type = other DNA
ttttaaaagaagaaatactg

SEQ ID NO: 247322 - DNA, 20 bp, synthetic construct
  source 1..20: mol_type = other DNA
attttaaaagaagaaatact

SEQ ID NO: 247323 - DNA, 20 bp, synthetic construct
  source 1..20: mol_type = other DNA
cattttaaaagaagaaatac

SEQ ID NO: 247324 - DNA, 20 bp, synthetic construct
  source 1..20: mol_type = other DNA
gcattttaaaagaagaaata

SEQ ID NO: 247325 - DNA, 20 bp, synthetic construct
  source 1..20: mol_type = other DNA
ggcattttaaaagaagaaat

SEQ ID NO: 247326 - DNA, 20 bp, synthetic construct
  source 1..20: mol_type = other DNA
aggcattttaaaagaagaaa

SEQ ID NO: 247327 - DNA, 20 bp, synthetic construct
  source 1..20: mol_type = other DNA
caggcattttaaaagaagaa

SEQ ID NO: 247328 - DNA, 20 bp, synthetic construct
  source 1..20: mol_type = other DNA
ccaggcattttaaaagaaga

SEQ ID NO: 247329 - DNA, 20 bp, synthetic construct
  source 1..20: mol_type = other DNA
cccaggcattttaaaagaag

SEQ ID NO: 247330 - DNA, 20 bp, synthetic construct
  source 1..20: mol_type = other DNA
ccccaggcattttaaaagaa

SEQ ID NO: 247331 - DNA, 20 bp, synthetic construct
  source 1..20: mol_type = other DNA
gccccaggcattttaaaaga

SEQ ID NO: 247332 - DNA, 20 bp, synthetic construct
  source 1..20: mol_type = other DNA
ggccccaggcattttaaaag

SEQ ID NO: 247333 - DNA, 20 bp, synthetic construct
  source 1..20: mol_type = other DNA
tggccccaggcattttaaaa

SEQ ID NO: 247334 - DNA, 20 bp, synthetic construct
  source 1..20: mol_type = other DNA
atggccccaggcattttaaa

SEQ ID NO: 247335 - DNA, 20 bp, synthetic construct
  source 1..20: mol_type = other DNA
catggccccaggcattttaa

SEQ ID NO: 247336 - DNA, 20 bp, synthetic construct
  source 1..20: mol_type = other DNA
gcatggccccaggcatttta

SEQ ID NO: 247337 - DNA, 20 bp, synthetic construct
  source 1..20: mol_type = other DNA
ggcatggccccaggcatttt

SEQ ID NO: 247338 - DNA, 20 bp, synthetic construct
  source 1..20: mol_type = other DNA
gggcatggccccaggcattt

SEQ ID NO: 247339 - DNA, 20 bp, synthetic construct
  source 1..20: mol_type = other DNA
tgggcatggccccaggcatt

SEQ ID NO: 247340 - DNA, 20 bp, synthetic construct
  source 1..20: mol_type = other DNA
ctgggcatggccccaggcat

SEQ ID NO: 247341 - DNA, 20 bp, synthetic construct
  source 1..20: mol_type = other DNA
gctgggcatggccccaggca

SEQ ID NO: 247342 - DNA, 20 bp, synthetic construct
  source 1..20: mol_type = other DNA
tgctgggcatggccccaggc

SEQ ID NO: 247343 - DNA, 20 bp, synthetic construct
  source 1..20: mol_type = other DNA
ctgctgggcatggccccagg

SEQ ID NO: 247344 - DNA, 20 bp, synthetic construct
  source 1..20: mol_type = other DNA
actgctgggcatggccccag

SEQ ID NO: 247345 - DNA, 20 bp, synthetic construct
  source 1..20: mol_type = other DNA
gactgctgggcatggcccca

SEQ ID NO: 247346 - DNA, 20 bp, synthetic construct
  source 1..20: mol_type = other DNA
agactgctgggcatggcccc

SEQ ID NO: 247347 - DNA, 20 bp, synthetic construct
  source 1..20: mol_type = other DNA
cagactgctgggcatggccc

SEQ ID NO: 247348 - DNA, 20 bp, synthetic construct
  source 1..20: mol_type = other DNA
acagactgctgggcatggcc

SEQ ID NO: 247349 - DNA, 20 bp, synthetic construct
  source 1..20: mol_type = other DNA
aacagactgctgggcatggc

SEQ ID NO: 247350 - DNA, 20 bp, synthetic construct
  source 1..20: mol_type = other DNA
aaacagactgctgggcatgg

SEQ ID NO: 247351 - DNA, 20 bp, synthetic construct
  source 1..20: mol_type = other DNA
gaaacagactgctgggcatg

SEQ ID NO: 247352 - DNA, 20 bp, synthetic construct
  source 1..20: mol_type = other DNA
tgaaacagactgctgggcat

SEQ ID NO: 247353 - DNA, 20 bp, synthetic construct
  source 1..20: mol_type = other DNA
gtgaaacagactgctgggca

SEQ ID NO: 247354 - DNA, 20 bp, synthetic construct
  source 1..20: mol_type = other DNA
agtgaaacagactgctgggc

SEQ ID NO: 247355 - DNA, 20 bp, synthetic construct
  source 1..20: mol_type = other DNA
cagtgaaacagactgctggg

SEQ ID NO: 247356 - DNA, 20 bp, synthetic construct
  source 1..20: mol_type = other DNA
gcagtgaaacagactgctgg

SEQ ID NO: 247357 - DNA, 20 bp, synthetic construct
  source 1..20: mol_type = other DNA
tgcagtgaaacagactgctg

SEQ ID NO: 247358 - DNA, 20 bp, synthetic construct
  source 1..20: mol_type = other DNA
ctgcagtgaaacagactgct

SEQ ID NO: 247359 - DNA, 20 bp, synthetic construct
  source 1..20: mol_type = other DNA
gctgcagtgaaacagactgc

SEQ ID NO: 247360 - DNA, 20 bp, synthetic construct
  source 1..20: mol_type = other DNA
cgctgcagtgaaacagactg

SEQ ID NO: 247361 - DNA, 20 bp, synthetic construct
  source 1..20: mol_type = other DNA
acgctgcagtgaaacagact

SEQ ID NO: 247362 - DNA, 20 bp, synthetic construct
  source 1..20: mol_type = other DNA
aacgctgcagtgaaacagac

SEQ ID NO: 247363 - DNA, 20 bp, synthetic construct
  source 1..20: mol_type = other DNA
aaacgctgcagtgaaacaga

SEQ ID NO: 247364 - DNA, 20 bp, synthetic construct
  source 1..20: mol_type = other DNA
taaacgctgcagtgaaacag

SEQ ID NO: 247365 - DNA, 20 bp, synthetic construct
  source 1..20: mol_type = other DNA
gtaaacgctgcagtgaaaca

SEQ ID NO: 247366 - DNA, 20 bp, synthetic construct
  source 1..20: mol_type = other DNA
tgtaaacgctgcagtgaaac

SEQ ID NO: 247367 - DNA, 20 bp, synthetic construct
  source 1..20: mol_type = other DNA
gtgtaaacgctgcagtgaaa

SEQ ID NO: 247368 - DNA, 20 bp, synthetic construct
  source 1..20: mol_type = other DNA
tgtgtaaacgctgcagtgaa

SEQ ID NO: 247369 - DNA, 20 bp, synthetic construct
  source 1..20: mol_type = other DNA
ctgtgtaaacgctgcagtga

SEQ ID NO: 247370 - DNA, 20 bp, synthetic construct
  source 1..20: mol_type = other DNA
cctgtgtaaacgctgcagtg

SEQ ID NO: 247371 - DNA, 20 bp, synthetic construct
  source 1..20: mol_type = other DNA
ccctgtgtaaacgctgcagt

SEQ ID NO: 247372 - DNA, 20 bp, synthetic construct
  source 1..20: mol_type = other DNA
gccctgtgtaaacgctgcag

SEQ ID NO: 247373 - DNA, 20 bp, synthetic construct
  source 1..20: mol_type = other DNA
agccctgtgtaaacgctgca

SEQ ID NO: 247374 - DNA, 20 bp, synthetic construct
  source 1..20: mol_type = other DNA
cagccctgtgtaaacgctgc

SEQ ID NO: 247375 - DNA, 20 bp, synthetic construct
  source 1..20: mol_type = other DNA
gcagccctgtgtaaacgctg

SEQ ID NO: 247376 - DNA, 20 bp, synthetic construct
  source 1..20: mol_type = other DNA
ggcagccctgtgtaaacgct

SEQ ID NO: 247377 - DNA, 20 bp, synthetic construct
  source 1..20: mol_type = other DNA
cggcagccctgtgtaaacgc

SEQ ID NO: 247378 - DNA, 20 bp, synthetic construct
  source 1..20: mol_type = other DNA
ccggcagccctgtgtaaacg

SEQ ID NO: 247379 - DNA, 20 bp, synthetic construct
  source 1..20: mol_type = other DNA
cccggcagccctgtgtaaac

SEQ ID NO: 247380 - DNA, 20 bp, synthetic construct
  source 1..20: mol_type = other DNA
gcccggcagccctgtgtaaa

SEQ ID NO: 247381 - DNA, 20 bp, synthetic construct
  source 1..20: mol_type = other DNA
agcccggcagccctgtgtaa

SEQ ID NO: 247382 - DNA, 20 bp, synthetic construct
  source 1..20: mol_type = other DNA
aagcccggcagccctgtgta

SEQ ID NO: 247383 - DNA, 20 bp, synthetic construct
  source 1..20: mol_type = other DNA
aaagcccggcagccctgtgt

SEQ ID NO: 247384 - DNA, 20 bp, synthetic construct
  source 1..20: mol_type = other DNA
gaaagcccggcagccctgtg

SEQ ID NO: 247385 - DNA, 20 bp, synthetic construct
  source 1..20: mol_type = other DNA
ggaaagcccggcagccctgt

SEQ ID NO: 247386 - DNA, 20 bp, synthetic construct
  source 1..20: mol_type = other DNA
aggaaagcccggcagccctg

SEQ ID NO: 247387 - DNA, 20 bp, synthetic construct
  source 1..20: mol_type = other DNA
caggaaagcccggcagccct

SEQ ID NO: 247388 - DNA, 20 bp, synthetic construct
  source 1..20: mol_type = other DNA
ccaggaaagcccggcagccc

SEQ ID NO: 247389 - DNA, 20 bp, synthetic construct
  source 1..20: mol_type = other DNA
accaggaaagcccggcagcc

SEQ ID NO: 247390 - DNA, 20 bp, synthetic construct
  source 1..20: mol_type = other DNA
caccaggaaagcccggcagc

SEQ ID NO: 247391 - DNA, 20 bp, synthetic construct
  source 1..20: mol_type = other DNA
ccaccaggaaagcccggcag

SEQ ID NO: 247392 - DNA, 20 bp, synthetic construct
  source 1..20: mol_type = other DNA
tccaccaggaaagcccggca

SEQ ID NO: 247393 - DNA, 20 bp, synthetic construct
  source 1..20: mol_type = other DNA
atccaccaggaaagcccggc

SEQ ID NO: 247394 - DNA, 20 bp, synthetic construct
  source 1..20: mol_type = other DNA
catccaccaggaaagcccgg

SEQ ID NO: 247395 - DNA, 20 bp, synthetic construct
  source 1..20: mol_type = other DNA
tcatccaccaggaaagcccg

SEQ ID NO: 247396 - DNA, 20 bp, synthetic construct
  source 1..20: mol_type = other DNA
ctcatccaccaggaaagccc

SEQ ID NO: 247397 - DNA, 20 bp, synthetic construct
  source 1..20: mol_type = other DNA
gctcatccaccaggaaagcc

SEQ ID NO: 247398 - DNA, 20 bp, synthetic construct
  source 1..20: mol_type = other DNA
agctcatccaccaggaaagc

SEQ ID NO: 247399 - DNA, 20 bp, synthetic construct
  source 1..20: mol_type = other DNA
cagctcatccaccaggaaag

SEQ ID NO: 247400 - DNA, 20 bp, synthetic construct
  source 1..20: mol_type = other DNA
ccagctcatccaccaggaaa

SEQ ID NO: 247401 - DNA, 20 bp, synthetic construct
  source 1..20: mol_type = other DNA
cccagctcatccaccaggaa

SEQ ID NO: 247402 - DNA, 20 bp, synthetic construct
  source 1..20: mol_type = other DNA
gcccagctcatccaccagga

SEQ ID NO: 247403 - DNA, 20 bp, synthetic construct
  source 1..20: mol_type = other DNA
cgcccagctcatccaccagg

SEQ ID NO: 247404 - DNA, 20 bp, synthetic construct
  source 1..20: mol_type = other DNA
ccgcccagctcatccaccag

SEQ ID NO: 247405 - DNA, 20 bp, synthetic construct
  source 1..20: mol_type = other DNA
accgcccagctcatccacca

SEQ ID NO: 247406 - DNA, 20 bp, synthetic construct
  source 1..20: mol_type = other DNA
aaccgcccagctcatccacc

SEQ ID NO: 247407 - DNA, 20 bp, synthetic construct
  source 1..20: mol_type = other DNA
gaaccgcccagctcatccac

SEQ ID NO: 247408 - DNA, 20 bp, synthetic construct
  source 1..20: mol_type = other DNA
tgaaccgcccagctcatcca

SEQ ID NO: 247409 - DNA, 20 bp, synthetic construct
  source 1..20: mol_type = other DNA
atgaaccgcccagctcatcc

SEQ ID NO: 247410 - DNA, 20 bp, synthetic construct
  source 1..20: mol_type = other DNA
catgaaccgcccagctcatc

SEQ ID NO: 247411 - DNA, 20 bp, synthetic construct
  source 1..20: mol_type = other DNA
tcatgaaccgcccagctcat

SEQ ID NO: 247412 - DNA, 20 bp, synthetic construct
  source 1..20: mol_type = other DNA
ctcatgaaccgcccagctca

SEQ ID NO: 247413 - DNA, 20 bp, synthetic construct
  source 1..20: mol_type = other DNA
gctcatgaaccgcccagctc

SEQ ID NO: 247414 - DNA, 20 bp, synthetic construct
  source 1..20: mol_type = other DNA
ggctcatgaaccgcccagct

SEQ ID NO: 247415 - DNA, 20 bp, synthetic construct
  source 1..20: mol_type = other DNA
tggctcatgaaccgcccagc

SEQ ID NO: 247416 - DNA, 20 bp, synthetic construct
  source 1..20: mol_type = other DNA
ctggctcatgaaccgcccag

SEQ ID NO: 247417 - DNA, 20 bp, synthetic construct
  source 1..20: mol_type = other DNA
tctggctcatgaaccgccca

SEQ ID NO: 247418 - DNA, 20 bp, synthetic construct
  source 1..20: mol_type = other DNA
ttctggctcatgaaccgccc

SEQ ID NO: 247419 - DNA, 20 bp, synthetic construct
  source 1..20: mol_type = other DNA
gttctggctcatgaaccgcc

SEQ ID NO: 247420 - DNA, 20 bp, synthetic construct
  source 1..20: mol_type = other DNA
ggttctggctcatgaaccgc

SEQ ID NO: 247421 - DNA, 20 bp, synthetic construct
  source 1..20: mol_type = other DNA
tggttctggctcatgaaccg

SEQ ID NO: 247422 - DNA, 20 bp, synthetic construct
  source 1..20: mol_type = other DNA
gtggttctggctcatgaacc

SEQ ID NO: 247423 - DNA, 20 bp, synthetic construct
  source 1..20: mol_type = other DNA
agtggttctggctcatgaac

SEQ ID NO: 247424 - DNA, 20 bp, synthetic construct
  source 1..20: mol_type = other DNA
gagtggttctggctcatgaa

SEQ ID NO: 247425 - DNA, 20 bp, synthetic construct
  source 1..20: mol_type = other DNA
tgagtggttctggctcatga

SEQ ID NO: 247426 - DNA, 20 bp, synthetic construct
  source 1..20: mol_type = other DNA
ctgagtggttctggctcatg

SEQ ID NO: 247427 - DNA, 20 bp, synthetic construct
  source 1..20: mol_type = other DNA
gctgagtggttctggctcat

SEQ ID NO: 247428 - DNA, 20 bp, synthetic construct
  source 1..20: mol_type = other DNA
tgctgagtggttctggctca

SEQ ID NO: 247429 - DNA, 20 bp, synthetic construct
  source 1..20: mol_type = other DNA
ctgctgagtggttctggctc

SEQ ID NO: 247430 - DNA, 20 bp, synthetic construct
  source 1..20: mol_type = other DNA
gctgctgagtggttctggct

SEQ ID NO: 247431 - DNA, 20 bp, synthetic construct
  source 1..20: mol_type = other DNA
tgctgctgagtggttctggc

SEQ ID NO: 247432 - DNA, 20 bp, synthetic construct
  source 1..20: mol_type = other DNA
atgctgctgagtggttctgg

SEQ ID NO: 247433 - DNA, 20 bp, synthetic construct
  source 1..20: mol_type = other DNA
catgctgctgagtggttctg

SEQ ID NO: 247434 - DNA, 20 bp, synthetic construct
  source 1..20: mol_type = other DNA
acatgctgctgagtggttct

SEQ ID NO: 247435 - DNA, 20 bp, synthetic construct
  source 1..20: mol_type = other DNA
gacatgctgctgagtggttc

SEQ ID NO: 247436 - DNA, 20 bp, synthetic construct
  source 1..20: mol_type = other DNA
tgacatgctgctgagtggtt

SEQ ID NO: 247437 - DNA, 20 bp, synthetic construct
  source 1..20: mol_type = other DNA
ctgacatgctgctgagtggt

SEQ ID NO: 247438 - DNA, 20 bp, synthetic construct
  source 1..20: mol_type = other DNA
actgacatgctgctgagtgg

SEQ ID NO: 247439 - DNA, 20 bp, synthetic construct
  source 1..20: mol_type = other DNA
cactgacatgctgctgagtg

SEQ ID NO: 247440 - DNA, 20 bp, synthetic construct
  source 1..20: mol_type = other DNA
acactgacatgctgctgagt

SEQ ID NO: 247441 - DNA, 20 bp, synthetic construct
  source 1..20: mol_type = other DNA
cacactgacatgctgctgag

SEQ ID NO: 247442 - DNA, 20 bp, synthetic construct
  source 1..20: mol_type = other DNA
gcacactgacatgctgctga

SEQ ID NO: 247443 - DNA, 20 bp, synthetic construct
  source 1..20: mol_type = other DNA
agcacactgacatgctgctg

SEQ ID NO: 247444 - DNA, 20 bp, synthetic construct
  source 1..20: mol_type = other DNA
aagcacactgacatgctgct

SEQ ID NO: 247445 - DNA, 20 bp, synthetic construct
  source 1..20: mol_type = other DNA
gaagcacactgacatgctgc

SEQ ID NO: 247446 - DNA, 20 bp, synthetic construct
  source 1..20: mol_type = other DNA
ggaagcacactgacatgctg

SEQ ID NO: 247447 - DNA, 20 bp, synthetic construct
  source 1..20: mol_type = other DNA
aggaagcacactgacatgct

SEQ ID NO: 247448 - DNA, 20 bp, synthetic construct
  source 1..20: mol_type = other DNA
caggaagcacactgacatgc

SEQ ID NO: 247449 - DNA, 20 bp, synthetic construct
  source 1..20: mol_type = other DNA
ccaggaagcacactgacatg

SEQ ID NO: 247450 - DNA, 20 bp, synthetic construct
  source 1..20: mol_type = other DNA
cccaggaagcacactgacat

SEQ ID NO: 247451 - DNA, 20 bp, synthetic construct
  source 1..20: mol_type = other DNA
ccccaggaagcacactgaca

SEQ ID NO: 247452 - DNA, 20 bp, synthetic construct
  source 1..20: mol_type = other DNA
tccccaggaagcacactgac

SEQ ID NO: 247453 - DNA, 20 bp, synthetic construct
  source 1..20: mol_type = other DNA
ctccccaggaagcacactga

SEQ ID NO: 247454 - DNA, 20 bp, synthetic construct
  source 1..20: mol_type = other DNA
gctccccaggaagcacactg

SEQ ID NO: 247455 - DNA, 20 bp, synthetic construct
  source 1..20: mol_type = other DNA
agctccccaggaagcacact

SEQ ID NO: 247456 - DNA, 20 bp, synthetic construct
  source 1..20: mol_type = other DNA
cagctccccaggaagcacac

SEQ ID NO: 247457 - DNA, 20 bp, synthetic construct
  source 1..20: mol_type = other DNA
ccagctccccaggaagcaca

SEQ ID NO: 247458 - DNA, 20 bp, synthetic construct
  source 1..20: mol_type = other DNA
accagctccccaggaagcac

SEQ ID NO: 247459 - DNA, 20 bp, synthetic construct
  source 1..20: mol_type = other DNA
taccagctccccaggaagca

SEQ ID NO: 247460 - DNA, 20 bp, synthetic construct
  source 1..20: mol_type = other DNA
ctaccagctccccaggaagc

SEQ ID NO: 247461 - DNA, 20 bp, synthetic construct
  source 1..20: mol_type = other DNA
gctaccagctccccaggaag

SEQ ID NO: 247462 - DNA, 20 bp, synthetic construct
  source 1..20: mol_type = other DNA
tgctaccagctccccaggaa

SEQ ID NO: 247463 - DNA, 20 bp, synthetic construct
  source 1..20: mol_type = other DNA
ctgctaccagctccccagga

SEQ ID NO: 247464 - DNA, 20 bp, synthetic construct
  source 1..20: mol_type = other DNA
cctgctaccagctccccagg

SEQ ID NO: 247465 - DNA, 20 bp, synthetic construct
  source 1..20: mol_type = other DNA
ccctgctaccagctccccag

SEQ ID NO: 247466 - DNA, 20 bp, synthetic construct
  source 1..20: mol_type = other DNA
cccctgctaccagctcccca

SEQ ID NO: 247467 - DNA, 20 bp, synthetic construct
  source 1..20: mol_type = other DNA
gcccctgctaccagctcccc

SEQ ID NO: 247468 - DNA, 20 bp, synthetic construct
  source 1..20: mol_type = other DNA
agcccctgctaccagctccc

SEQ ID NO: 247469 - DNA, 20 bp, synthetic construct
  source 1..20: mol_type = other DNA
gagcccctgctaccagctcc

SEQ ID NO: 247470 - DNA, 20 bp, synthetic construct
  source 1..20: mol_type = other DNA
ggagcccctgctaccagctc

SEQ ID NO: 247471 - DNA, 20 bp, synthetic construct
  source 1..20: mol_type = other DNA
cggagcccctgctaccagct

SEQ ID NO: 247472 - DNA, 20 bp, synthetic construct
  source 1..20: mol_type = other DNA
ccggagcccctgctaccagc

SEQ ID NO: 247473 - DNA, 20 bp, synthetic construct
  source 1..20: mol_type = other DNA
cccggagcccctgctaccag

SEQ ID NO: 247474 - DNA, 20 bp, synthetic construct
  source 1..20: mol_type = other DNA
gcccggagcccctgctacca

SEQ ID NO: 247475 - DNA, 20 bp, synthetic construct
  source 1..20: mol_type = other DNA
ggcccggagcccctgctacc

SEQ ID NO: 247476 - DNA, 20 bp, synthetic construct
  source 1..20: mol_type = other DNA
gggcccggagcccctgctac

SEQ ID NO: 247477 - DNA, 20 bp, synthetic construct
  source 1..20: mol_type = other DNA
agggcccggagcccctgcta

SEQ ID NO: 247478 - DNA, 20 bp, synthetic construct
  source 1..20: mol_type = other DNA
tagggcccggagcccctgct

SEQ ID NO: 247479 - DNA, 20 bp, synthetic construct
  source 1..20: mol_type = other DNA
gtagggcccggagcccctgc

SEQ ID NO: 247480 - DNA, 20 bp, synthetic construct
  source 1..20: mol_type = other DNA
agtagggcccggagcccctg

SEQ ID NO: 247481 - DNA, 20 bp, synthetic construct
  source 1..20: mol_type = other DNA
aagtagggcccggagcccct

SEQ ID NO: 247482 - DNA, 20 bp, synthetic construct
  source 1..20: mol_type = other DNA
gaagtagggcccggagcccc

SEQ ID NO: 247483 - DNA, 20 bp, synthetic construct
  source 1..20: mol_type = other DNA
tgaagtagggcccggagccc

SEQ ID NO: 247484 - DNA, 20 bp, synthetic construct
  source 1..20: mol_type = other DNA
ctgaagtagggcccggagcc

SEQ ID NO: 247485 - DNA, 20 bp, synthetic construct
  source 1..20: mol_type = other DNA
cctgaagtagggcccggagc

SEQ ID NO: 247486 - DNA, 20 bp, synthetic construct
  source 1..20: mol_type = other DNA
ccctgaagtagggcccggag

SEQ ID NO: 247487 - DNA, 20 bp, synthetic construct
  source 1..20: mol_type = other DNA
gccctgaagtagggcccgga

SEQ ID NO: 247488 - DNA, 20 bp, synthetic construct
  source 1..20: mol_type = other DNA
agccctgaagtagggcccgg

SEQ ID NO: 247489 - DNA, 20 bp, synthetic construct
  source 1..20: mol_type = other DNA
cagccctgaagtagggcccg

SEQ ID NO: 247490 - DNA, 20 bp, synthetic construct
  source 1..20: mol_type = other DNA
gcagccctgaagtagggccc

SEQ ID NO: 247491 - DNA, 20 bp, synthetic construct
  source 1..20: mol_type = other DNA
agcagccctgaagtagggcc

SEQ ID NO: 247492 - DNA, 20 bp, synthetic construct
  source 1..20: mol_type = other DNA
aagcagccctgaagtagggc

SEQ ID NO: 247493 - DNA, 20 bp, synthetic construct
  source 1..20: mol_type = other DNA
aaagcagccctgaagtaggg

SEQ ID NO: 247494 - DNA, 20 bp, synthetic construct
  source 1..20: mol_type = other DNA
gaaagcagccctgaagtagg

SEQ ID NO: 247495 - DNA, 20 bp, synthetic construct
  source 1..20: mol_type = other DNA
agaaagcagccctgaagtag

SEQ ID NO: 247496 - DNA, 20 bp, synthetic construct
  source 1..20: mol_type = other DNA
cagaaagcagccctgaagta

SEQ ID NO: 247497 - DNA, 20 bp, synthetic construct
  source 1..20: mol_type = other DNA
ccagaaagcagccctgaagt

SEQ ID NO: 247498 - DNA, 20 bp, synthetic construct
  source 1..20: mol_type = other DNA
gccagaaagcagccctgaag

SEQ ID NO: 247499 - DNA, 20 bp, synthetic construct
  source 1..20: mol_type = other DNA
tgccagaaagcagccctgaa

SEQ ID NO: 247500 - DNA, 20 bp, synthetic construct
  source 1..20: mol_type = other DNA
atgccagaaagcagccctga

SEQ ID NO: 247501 - DNA, 20 bp, synthetic construct
  source 1..20: mol_type = other DNA
tatgccagaaagcagccctg

SEQ ID NO: 247502 - DNA, 20 bp, synthetic construct
  source 1..20: mol_type = other DNA
atatgccagaaagcagccct

SEQ ID NO: 247503 - DNA, 20 bp, synthetic construct
  source 1..20: mol_type = other DNA
catatgccagaaagcagccc

SEQ ID NO: 247504 - DNA, 20 bp, synthetic construct
  source 1..20: mol_type = other DNA
ccatatgccagaaagcagcc

SEQ ID NO: 247505 - DNA, 20 bp, synthetic construct
  source 1..20: mol_type = other DNA
gccatatgccagaaagcagc

SEQ ID NO: 247506 - DNA, 20 bp, synthetic construct
  source 1..20: mol_type = other DNA
agccatatgccagaaagcag

SEQ ID NO: 247507 - DNA, 20 bp, synthetic construct
  source 1..20: mol_type = other DNA
cagccatatgccagaaagca

SEQ ID NO: 247508 - DNA, 20 bp, synthetic construct
  source 1..20: mol_type = other DNA
tcagccatatgccagaaagc

SEQ ID NO: 247509 - DNA, 20 bp, synthetic construct
  source 1..20: mol_type = other DNA
atcagccatatgccagaaag

SEQ ID NO: 247510 - DNA, 20 bp, synthetic construct
  source 1..20: mol_type = other DNA
gatcagccatatgccagaaa

SEQ ID NO: 247511 - DNA, 20 bp, synthetic construct
  source 1..20: mol_type = other DNA
ggatcagccatatgccagaa

SEQ ID NO: 247512 - DNA, 20 bp, synthetic construct
  source 1..20: mol_type = other DNA
gggatcagccatatgccaga

SEQ ID NO: 247513 - DNA, 20 bp, synthetic construct
  source 1..20: mol_type = other DNA
ggggatcagccatatgccag

SEQ ID NO: 247514 - DNA, 20 bp, synthetic construct
  source 1..20: mol_type = other DNA
aggggatcagccatatgcca

SEQ ID NO: 247515 - DNA, 20 bp, synthetic construct
  source 1..20: mol_type = other DNA
gaggggatcagccatatgcc

SEQ ID NO: 247516 - DNA, 20 bp, synthetic construct
  source 1..20: mol_type = other DNA
ggaggggatcagccatatgc

SEQ ID NO: 247517 - DNA, 20 bp, synthetic construct
  source 1..20: mol_type = other DNA
aggaggggatcagccatatg

SEQ ID NO: 247518 - DNA, 20 bp, synthetic construct
  source 1..20: mol_type = other DNA
gaggaggggatcagccatat

SEQ ID NO: 247519 - DNA, 20 bp, synthetic construct
  source 1..20: mol_type = other DNA
tgaggaggggatcagccata

SEQ ID NO: 247520 - DNA, 20 bp, synthetic construct
  source 1..20: mol_type = other DNA
gtgaggaggggatcagccat

SEQ ID NO: 247521 - DNA, 20 bp, synthetic construct
  source 1..20: mol_type = other DNA
agtgaggaggggatcagcca

SEQ ID NO: 247522 - DNA, 20 bp, synthetic construct
  source 1..20: mol_type = other DNA
gagtgaggaggggatcagcc

SEQ ID NO: 247523 - DNA, 20 bp, synthetic construct
  source 1..20: mol_type = other DNA
ggagtgaggaggggatcagc

SEQ ID NO: 247524 - DNA, 20 bp, synthetic construct
  source 1..20: mol_type = other DNA
aggagtgaggaggggatcag

SEQ ID NO: 247525 - DNA, 20 bp, synthetic construct
  source 1..20: mol_type = other DNA
gaggagtgaggaggggatca

SEQ ID NO: 247526 - DNA, 20 bp, synthetic construct
  source 1..20: mol_type = other DNA
ggaggagtgaggaggggatc

SEQ ID NO: 247527 - DNA, 20 bp, synthetic construct
  source 1..20: mol_type = other DNA
aggaggagtgaggaggggat

SEQ ID NO: 247528 - DNA, 20 bp, synthetic construct
  source 1..20: mol_type = other DNA
gaggaggagtgaggagggga

SEQ ID NO: 247529 - DNA, 20 bp, synthetic construct
  source 1..20: mol_type = other DNA
ggaggaggagtgaggagggg

SEQ ID NO: 247530 - DNA, 20 bp, synthetic construct
  source 1..20: mol_type = other DNA
gggaggaggagtgaggaggg

SEQ ID NO: 247531 - DNA, 20 bp, synthetic construct
  source 1..20: mol_type = other DNA
agggaggaggagtgaggagg

SEQ ID NO: 247532 - DNA, 20 bp, synthetic construct
  source 1..20: mol_type = other DNA
cagggaggaggagtgaggag

SEQ ID NO: 247533 - DNA, 20 bp, synthetic construct
  source 1..20: mol_type = other DNA
gcagggaggaggagtgagga

SEQ ID NO: 247534 - DNA, 20 bp, synthetic construct
  source 1..20: mol_type = other DNA
tgcagggaggaggagtgagg

SEQ ID NO: 247535 - DNA, 20 bp, synthetic construct
  source 1..20: mol_type = other DNA
atgcagggaggaggagtgag

SEQ ID NO: 247536 - DNA, 20 bp, synthetic construct
  source 1..20: mol_type = other DNA
aatgcagggaggaggagtga

SEQ ID NO: 247537 - DNA, 20 bp, synthetic construct
  source 1..20: mol_type = other DNA
caatgcagggaggaggagtg

SEQ ID NO: 247538 - DNA, 20 bp, synthetic construct
  source 1..20: mol_type = other DNA
gcaatgcagggaggaggagt

SEQ ID NO: 247539 - DNA, 20 bp, synthetic construct
  source 1..20: mol_type = other DNA
agcaatgcagggaggaggag

SEQ ID NO: 247540 - DNA, 20 bp, synthetic construct
  source 1..20: mol_type = other DNA
gagcaatgcagggaggagga

SEQ ID NO: 247541 - DNA, 20 bp, synthetic construct
  source 1..20: mol_type = other DNA
ggagcaatgcagggaggagg

SEQ ID NO: 247542 - DNA, 20 bp, synthetic construct
  source 1..20: mol_type = other DNA
aggagcaatgcagggaggag

SEQ ID NO: 247543 - DNA, 20 bp, synthetic construct
  source 1..20: mol_type = other DNA
caggagcaatgcagggagga

SEQ ID NO: 247544 - DNA, 20 bp, synthetic construct
  source 1..20: mol_type = other DNA
gcaggagcaatgcagggagg

SEQ ID NO: 247545 - DNA, 20 bp, synthetic construct
  source 1..20: mol_type = other DNA
cgcaggagcaatgcagggag

SEQ ID NO: 247546 - DNA, 20 bp, synthetic construct
  source 1..20: mol_type = other DNA
gcgcaggagcaatgcaggga

SEQ ID NO: 247547 - DNA, 20 bp, synthetic construct
  source 1..20: mol_type = other DNA
tgcgcaggagcaatgcaggg

SEQ ID NO: 247548 - DNA, 20 bp, synthetic construct
  source 1..20: mol_type = other DNA
ttgcgcaggagcaatgcagg

SEQ ID NO: 247549 - DNA, 20 bp, synthetic construct
  source 1..20: mol_type = other DNA
cttgcgcaggagcaatgcag

SEQ ID NO: 247550 - DNA, 20 bp, synthetic construct
  source 1..20: mol_type = other DNA
tcttgcgcaggagcaatgca

SEQ ID NO: 247551 - DNA, 20 bp, synthetic construct
  source 1..20: mol_type = other DNA
ttcttgcgcaggagcaatgc

SEQ ID NO: 247552 - DNA, 20 bp, synthetic construct
  source 1..20: mol_type = other DNA
cttcttgcgcaggagcaatg

SEQ ID NO: 247553 - DNA, 20 bp, synthetic construct
  source 1..20: mol_type = other DNA
gcttcttgcgcaggagcaat

SEQ ID NO: 247554 - DNA, 20 bp, synthetic construct
  source 1..20: mol_type = other DNA
tgcttcttgcgcaggagcaa

SEQ ID NO: 247555 - DNA, 20 bp, synthetic construct
  source 1..20: mol_type = other DNA
ttgcttcttgcgcaggagca

SEQ ID NO: 247556 - DNA, 20 bp, synthetic construct
  source 1..20: mol_type = other DNA
tttgcttcttgcgcaggagc

SEQ ID NO: 247557 - DNA, 20 bp, synthetic construct
  source 1..20: mol_type = other DNA
ctttgcttcttgcgcaggag

SEQ ID NO: 247558 - DNA, 20 bp, synthetic construct
  source 1..20: mol_type = other DNA
cctttgcttcttgcgcagga

SEQ ID NO: 247559 - DNA, 20 bp, synthetic construct
  source 1..20: mol_type = other DNA
acctttgcttcttgcgcagg

SEQ ID NO: 247560 - DNA, 20 bp, synthetic construct
  source 1..20: mol_type = other DNA
cacctttgcttcttgcgcag

SEQ ID NO: 247561 - DNA, 20 bp, synthetic construct
  source 1..20: mol_type = other DNA
tcacctttgcttcttgcgca

SEQ ID NO: 247562 - DNA, 20 bp, synthetic construct
  source 1..20: mol_type = other DNA
ctcacctttgcttcttgcgc

SEQ ID NO: 247563 - DNA, 20 bp, synthetic construct
  source 1..20: mol_type = other DNA
cctcacctttgcttcttgcg

SEQ ID NO: 247564 - DNA, 20 bp, synthetic construct
  source 1..20: mol_type = other DNA
ccctcacctttgcttcttgc

SEQ ID NO: 247565 - DNA, 20 bp, synthetic construct
  source 1..20: mol_type = other DNA
cccctcacctttgcttcttg

SEQ ID NO: 247566 - DNA, 20 bp, synthetic construct
  source 1..20: mol_type = other DNA
gcccctcacctttgcttctt

SEQ ID NO: 247567 - DNA, 20 bp, synthetic construct
  source 1..20: mol_type = other DNA
agcccctcacctttgcttct

SEQ ID NO: 247568 - DNA, 20 bp, synthetic construct
  source 1..20: mol_type = other DNA
cagcccctcacctttgcttc

SEQ ID NO: 247569 - DNA, 20 bp, synthetic construct
  source 1..20: mol_type = other DNA
ccagcccctcacctttgctt

SEQ ID NO: 247570 - DNA, 20 bp, synthetic construct
  source 1..20: mol_type = other DNA
cccagcccctcacctttgct

SEQ ID NO: 247571 - DNA, 20 bp, synthetic construct
  source 1..20: mol_type = other DNA
acccagcccctcacctttgc

SEQ ID NO: 247572 - DNA, 20 bp, synthetic construct
  source 1..20: mol_type = other DNA
tacccagcccctcacctttg

SEQ ID NO: 247573 - DNA, 20 bp, synthetic construct
  source 1..20: mol_type = other DNA
atacccagcccctcaccttt

SEQ ID NO: 247574 - DNA, 20 bp, synthetic construct
  source 1..20: mol_type = other DNA
catacccagcccctcacctt

SEQ ID NO: 247575 - DNA, 20 bp, synthetic construct
  source 1..20: mol_type = other DNA
ccatacccagcccctcacct

SEQ ID NO: 247576 - DNA, 20 bp, synthetic construct
  source 1..20: mol_type = other DNA
gccatacccagcccctcacc

SEQ ID NO: 247577 - DNA, 20 bp, synthetic construct
  source 1..20: mol_type = other DNA
agccatacccagcccctcac

SEQ ID NO: 247578 - DNA, 20 bp, synthetic construct
  source 1..20: mol_type = other DNA
gagccatacccagcccctca

SEQ ID NO: 247579 - DNA, 20 bp, synthetic construct
  source 1..20: mol_type = other DNA
cgagccatacccagcccctc

SEQ ID NO: 247580 - DNA, 20 bp, synthetic construct
  source 1..20: mol_type = other DNA
acgagccatacccagcccct

SEQ ID NO: 247581 - DNA, 20 bp, synthetic construct
  source 1..20: mol_type = other DNA
gacgagccatacccagcccc

SEQ ID NO: 247582 - DNA, 20 bp, synthetic construct
  source 1..20: mol_type = other DNA
ggacgagccatacccagccc

SEQ ID NO: 247583 - DNA, 20 bp, synthetic construct
  source 1..20: mol_type = other DNA
aggacgagccatacccagcc

SEQ ID NO: 247584 - DNA, 20 bp, synthetic construct
  source 1..20: mol_type = other DNA
caggacgagccatacccagc

SEQ ID NO: 247585 - DNA, 20 bp, synthetic construct
  source 1..20: mol_type = other DNA
ccaggacgagccatacccag

SEQ ID NO: 247586 - DNA, 20 bp, synthetic construct
  source 1..20: mol_type = other DNA
gccaggacgagccataccca

SEQ ID NO: 247587 - DNA, 20 bp, synthetic construct
  source 1..20: mol_type = other DNA
ggccaggacgagccataccc

SEQ ID NO: 247588 - DNA, 20 bp, synthetic construct
  source 1..20: mol_type = other DNA
gggccaggacgagccatacc

SEQ ID NO: 247589 - DNA, 20 bp, synthetic construct
  source 1..20: mol_type = other DNA
ggggccaggacgagccatac

SEQ ID NO: 247590 - DNA, 20 bp, synthetic construct
  source 1..20: mol_type = other DNA
aggggccaggacgagccata

SEQ ID NO: 247591 - DNA, 20 bp, synthetic construct
  source 1..20: mol_type = other DNA
gaggggccaggacgagccat

SEQ ID NO: 247592 - DNA, 20 bp, synthetic construct
  source 1..20: mol_type = other DNA
agaggggccaggacgagcca

SEQ ID NO: 247593 - DNA, 20 bp, synthetic construct
  source 1..20: mol_type = other DNA
tagaggggccaggacgagcc

SEQ ID NO: 247594 - DNA, 20 bp, synthetic construct
  source 1..20: mol_type = other DNA
ttagaggggccaggacgagc

SEQ ID NO: 247595 - DNA, 20 bp, synthetic construct
  source 1..20: mol_type = other DNA
cttagaggggccaggacgag

SEQ ID NO: 247596 - DNA, 20 bp, synthetic construct
  source 1..20: mol_type = other DNA
ccttagaggggccaggacga

SEQ ID NO: 247597 - DNA, 20 bp, synthetic construct
  source 1..20: mol_type = other DNA
accttagaggggccaggacg

SEQ ID NO: 247598 - DNA, 20 bp, synthetic construct
  source 1..20: mol_type = other DNA
caccttagaggggccaggac

SEQ ID NO: 247599 - DNA, 20 bp, synthetic construct
  source 1..20: mol_type = other DNA
ccaccttagaggggccagga

SEQ ID NO: 247600 - DNA, 20 bp, synthetic construct
  source 1..20: mol_type = other DNA
tccaccttagaggggccagg

SEQ ID NO: 247601 - DNA, 20 bp, synthetic construct
  source 1..20: mol_type = other DNA
atccaccttagaggggccag

SEQ ID NO: 247602 - DNA, 20 bp, synthetic construct
  source 1..20: mol_type = other DNA
gatccaccttagaggggcca

SEQ ID NO: 247603 - DNA, 20 bp, synthetic construct
  source 1..20: mol_type = other DNA
agatccaccttagaggggcc

SEQ ID NO: 247604 - DNA, 20 bp, synthetic construct
  source 1..20: mol_type = other DNA
gagatccaccttagaggggc

SEQ ID NO: 247605 - DNA, 20 bp, synthetic construct
  source 1..20: mol_type = other DNA
cgagatccaccttagagggg

SEQ ID NO: 247606 - DNA, 20 bp, synthetic construct
  source 1..20: mol_type = other DNA
ccgagatccaccttagaggg

SEQ ID NO: 247607 - DNA, 20 bp, synthetic construct
  source 1..20: mol_type = other DNA
accgagatccaccttagagg

SEQ ID NO: 247608 - DNA, 20 bp, synthetic construct
  source 1..20: mol_type = other DNA
caccgagatccaccttagag

SEQ ID NO: 247609 - DNA, 20 bp, synthetic construct
  source 1..20: mol_type = other DNA
ccaccgagatccaccttaga

SEQ ID NO: 247610 - DNA, 20 bp, synthetic construct
  source 1..20: mol_type = other DNA
accaccgagatccaccttag

SEQ ID NO: 247611 - DNA, 20 bp, synthetic construct
  source 1..20: mol_type = other DNA
aaccaccgagatccacctta

SEQ ID NO: 247612 - DNA, 20 bp, synthetic construct
  source 1..20: mol_type = other DNA
aaaccaccgagatccacctt

SEQ ID NO: 247613 - DNA, 20 bp, synthetic construct
  source 1..20: mol_type = other DNA
gaaaccaccgagatccacct

SEQ ID NO: 247614 - DNA, 20 bp, synthetic construct
  source 1..20: mol_type = other DNA
agaaaccaccgagatccacc

SEQ ID NO: 247615 - DNA, 20 bp, synthetic construct
  source 1..20: mol_type = other DNA
tagaaaccaccgagatccac

SEQ ID NO: 247616 - DNA, 20 bp, synthetic construct
  source 1..20: mol_type = other DNA
ctagaaaccaccgagatcca

SEQ ID NO: 247617 - DNA, 20 bp, synthetic construct
  source 1..20: mol_type = other DNA
tctagaaaccaccgagatcc

SEQ ID NO: 247618 - DNA, 20 bp, synthetic construct
  source 1..20: mol_type = other DNA
atctagaaaccaccgagatc

SEQ ID NO: 247619 - DNA, 20 bp, synthetic construct
  source 1..20: mol_type = other DNA
catctagaaaccaccgagat

SEQ ID NO: 247620 - DNA, 20 bp, synthetic construct
  source 1..20: mol_type = other DNA
acatctagaaaccaccgaga

SEQ ID NO: 247621 - DNA, 20 bp, synthetic construct
  source 1..20: mol_type = other DNA
cacatctagaaaccaccgag

SEQ ID NO: 247622 - DNA, 20 bp, synthetic construct
  source 1..20: mol_type = other DNA
tcacatctagaaaccaccga

SEQ ID NO: 247623 - DNA, 20 bp, synthetic construct
  source 1..20: mol_type = other DNA
gtcacatctagaaaccaccg

SEQ ID NO: 247624 - DNA, 20 bp, synthetic construct
  source 1..20: mol_type = other DNA
tgtcacatctagaaaccacc

SEQ ID NO: 247625 - DNA, 20 bp, synthetic construct
  source 1..20: mol_type = other DNA
ctgtcacatctagaaaccac

SEQ ID NO: 247626 - DNA, 20 bp, synthetic construct
  source 1..20: mol_type = other DNA
gctgtcacatctagaaacca

SEQ ID NO: 247627 - DNA, 20 bp, synthetic construct
  source 1..20: mol_type = other DNA
tgctgtcacatctagaaacc

SEQ ID NO: 247628 - DNA, 20 bp, synthetic construct
  source 1..20: mol_type = other DNA
gtgctgtcacatctagaaac

SEQ ID NO: 247629 - DNA, 20 bp, synthetic construct
  source 1..20: mol_type = other DNA
ggtgctgtcacatctagaaa

SEQ ID NO: 247630 - DNA, 20 bp, synthetic construct
  source 1..20: mol_type = other DNA
gggtgctgtcacatctagaa

SEQ ID NO: 247631 - DNA, 20 bp, synthetic construct
  source 1..20: mol_type = other DNA
agggtgctgtcacatctaga

SEQ ID NO: 247632 - DNA, 20 bp, synthetic construct
  source 1..20: mol_type = other DNA
aagggtgctgtcacatctag

SEQ ID NO: 247633 - DNA, 20 bp, synthetic construct
  source 1..20: mol_type = other DNA
taagggtgctgtcacatcta

SEQ ID NO: 247634 - DNA, 20 bp, synthetic construct
  source 1..20: mol_type = other DNA
ctaagggtgctgtcacatct

SEQ ID NO: 247635 - DNA, 20 bp, synthetic construct
  source 1..20: mol_type = other DNA
actaagggtgctgtcacatc

SEQ ID NO: 247636 - DNA, 20 bp, synthetic construct
  source 1..20: mol_type = other DNA
cactaagggtgctgtcacat

SEQ ID NO: 247637 - DNA, 20 bp, synthetic construct
  source 1..20: mol_type = other DNA
ccactaagggtgctgtcaca

SEQ ID NO: 247638 - DNA, 20 bp, synthetic construct
  source 1..20: mol_type = other DNA
tccactaagggtgctgtcac

SEQ ID NO: 247639 - DNA, 20 bp, synthetic construct
  source 1..20: mol_type = other DNA
atccactaagggtgctgtca

SEQ ID NO: 247640 - DNA, 20 bp, synthetic construct
  source 1..20: mol_type = other DNA
catccactaagggtgctgtc

SEQ ID NO: 247641 - DNA, 20 bp, synthetic construct
  source 1..20: mol_type = other DNA
tcatccactaagggtgctgt

SEQ ID NO: 247642 - DNA, 20 bp, synthetic construct
  source 1..20: mol_type = other DNA
ctcatccactaagggtgctg

SEQ ID NO: 247643 - DNA, 20 bp, synthetic construct
  source 1..20: mol_type = other DNA
cctcatccactaagggtgct

SEQ ID NO: 247644 - DNA, 20 bp, synthetic construct
  source 1..20: mol_type = other DNA
ccctcatccactaagggtgc

SEQ ID NO: 247645 - DNA, 20 bp, synthetic construct
  source 1..20: mol_type = other DNA
tccctcatccactaagggtg

SEQ ID NO: 247646 - DNA, 20 bp, synthetic construct
  source 1..20: mol_type = other DNA
ctccctcatccactaagggt

SEQ ID NO: 247647 - DNA, 20 bp, synthetic construct
  source 1..20: mol_type = other DNA
gctccctcatccactaaggg

SEQ ID NO: 247648 - DNA, 20 bp, synthetic construct
  source 1..20: mol_type = other DNA
agctccctcatccactaagg

SEQ ID NO: 247649 - DNA, 20 bp, synthetic construct
  source 1..20: mol_type = other DNA
gagctccctcatccactaag

SEQ ID NO: 247650 - DNA, 20 bp, synthetic construct
  source 1..20: mol_type = other DNA
ggagctccctcatccactaa

SEQ ID NO: 247651 - DNA, 20 bp, synthetic construct
  source 1..20: mol_type = other DNA
gggagctccctcatccacta

SEQ ID NO: 247652 - DNA, 20 bp, synthetic construct
  source 1..20: mol_type = other DNA
cgggagctccctcatccact

SEQ ID NO: 247653 - DNA, 20 bp, synthetic construct
  source 1..20: mol_type = other DNA
ccgggagctccctcatccac

SEQ ID NO: 247654 - DNA, 20 bp, synthetic construct
  source 1..20: mol_type = other DNA
gccgggagctccctcatcca

SEQ ID NO: 247655 - DNA, 20 bp, synthetic construct
  source 1..20: mol_type = other DNA
tgccgggagctccctcatcc

SEQ ID NO: 247656 - DNA, 20 bp, synthetic construct
  source 1..20: mol_type = other DNA
ttgccgggagctccctcatc

SEQ ID NO: 247657 - DNA, 20 bp, synthetic construct
  source 1..20: mol_type = other DNA
cttgccgggagctccctcat

SEQ ID NO: 247658 - DNA, 20 bp, synthetic construct
  source 1..20: mol_type = other DNA
gcttgccgggagctccctca

SEQ ID NO: 247659 - DNA, 20 bp, synthetic construct
  source 1..20: mol_type = other DNA
tgcttgccgggagctccctc

SEQ ID NO: 247660 - DNA, 20 bp, synthetic construct
  source 1..20: mol_type = other DNA
ctgcttgccgggagctccct

SEQ ID NO: 247661 - DNA, 20 bp, synthetic construct
  source 1..20: mol_type = other DNA
cctgcttgccgggagctccc

SEQ ID NO: 247662 - DNA, 20 bp, synthetic construct
  source 1..20: mol_type = other DNA
gcctgcttgccgggagctcc

SEQ ID NO: 247663 - DNA, 20 bp, synthetic construct
  source 1..20: mol_type = other DNA
agcctgcttgccgggagctc

SEQ ID NO: 247664 - DNA, 20 bp, synthetic construct
  source 1..20: mol_type = other DNA
cagcctgcttgccgggagct

SEQ ID NO: 247665 - DNA, 20 bp, synthetic construct
  source 1..20: mol_type = other DNA
gcagcctgcttgccgggagc

SEQ ID NO: 247666 - DNA, 20 bp, synthetic construct
  source 1..20: mol_type = other DNA
ggcagcctgcttgccgggag

SEQ ID NO: 247667 - DNA, 20 bp, synthetic construct
  source 1..20: mol_type = other DNA
cggcagcctgcttgccggga

SEQ ID NO: 247668 - DNA, 20 bp, synthetic construct
  source 1..20: mol_type = other DNA
gcggcagcctgcttgccggg

SEQ ID NO: 247669 - DNA, 20 bp, synthetic construct
  source 1..20: mol_type = other DNA
cgcggcagcctgcttgccgg

SEQ ID NO: 247670 - DNA, 20 bp, synthetic construct
  source 1..20: mol_type = other DNA
gcgcggcagcctgcttgccg

SEQ ID NO: 247671 - DNA, 20 bp, synthetic construct
  source 1..20: mol_type = other DNA
tgcgcggcagcctgcttgcc

SEQ ID NO: 247672 - DNA, 20 bp, synthetic construct
  source 1..20: mol_type = other DNA
ctgcgcggcagcctgcttgc

SEQ ID NO: 247673 - DNA, 20 bp, synthetic construct
  source 1..20: mol_type = other DNA
gctgcgcggcagcctgcttg

SEQ ID NO: 247674 - DNA, 20 bp, synthetic construct
  source 1..20: mol_type = other DNA
ggctgcgcggcagcctgctt

SEQ ID NO: 247675 - DNA, 20 bp, synthetic construct
  source 1..20: mol_type = other DNA
gggctgcgcggcagcctgct

SEQ ID NO: 247676 - DNA, 20 bp, synthetic construct
  source 1..20: mol_type = other DNA
ggggctgcgcggcagcctgc

SEQ ID NO: 247677 - DNA, 20 bp, synthetic construct
  source 1..20: mol_type = other DNA
tggggctgcgcggcagcctg

SEQ ID NO: 247678 - DNA, 20 bp, synthetic construct
  source 1..20: mol_type = other DNA
gtggggctgcgcggcagcct

SEQ ID NO: 247679 - DNA, 20 bp, synthetic construct
  source 1..20: mol_type = other DNA
tgtggggctgcgcggcagcc

SEQ ID NO: 247680 - DNA, 20 bp, synthetic construct
  source 1..20: mol_type = other DNA
gtgtggggctgcgcggcagc

SEQ ID NO: 247681 - DNA, 20 bp, synthetic construct
  source 1..20: mol_type = other DNA
cgtgtggggctgcgcggcag

SEQ ID NO: 247682 - DNA, 20 bp, synthetic construct
  source 1..20: mol_type = other DNA
ccgtgtggggctgcgcggca

SEQ ID NO: 247683 - DNA, 20 bp, synthetic construct
  source 1..20: mol_type = other DNA
tccgtgtggggctgcgcggc

SEQ ID NO: 247684 - DNA, 20 bp, synthetic construct
  source 1..20: mol_type = other DNA
ctccgtgtggggctgcgcgg

SEQ ID NO: 247685 - DNA, 20 bp, synthetic construct
  source 1..20: mol_type = other DNA
tctccgtgtggggctgcgcg

SEQ ID NO: 247686 - DNA, 20 bp, synthetic construct
  source 1..20: mol_type = other DNA
atctccgtgtggggctgcgc

SEQ ID NO: 247687 - DNA, 20 bp, synthetic construct
  source 1..20: mol_type = other DNA
gatctccgtgtggggctgcg

SEQ ID NO: 247688 - DNA, 20 bp, synthetic construct
  source 1..20: mol_type = other DNA
ggatctccgtgtggggctgc

SEQ ID NO: 247689 - DNA, 20 bp, synthetic construct
  source 1..20: mol_type = other DNA
gggatctccgtgtggggctg

SEQ ID NO: 247690 - DNA, 20 bp, synthetic construct
  source 1..20: mol_type = other DNA
tgggatctccgtgtggggct

SEQ ID NO: 247691 - DNA, 20 bp, synthetic construct
  source 1..20: mol_type = other DNA
ctgggatctccgtgtggggc

SEQ ID NO: 247692 - DNA, 20 bp, synthetic construct
  source 1..20: mol_type = other DNA
tctgggatctccgtgtgggg

SEQ ID NO: 247693 - DNA, 20 bp, synthetic construct
  source 1..20: mol_type = other DNA
ttctgggatctccgtgtggg

SEQ ID NO: 247694 - DNA, 20 bp, synthetic construct
  source 1..20: mol_type = other DNA
cttctgggatctccgtgtgg

SEQ ID NO: 247695 - DNA, 20 bp, synthetic construct
  source 1..20: mol_type = other DNA
ccttctgggatctccgtgtg

SEQ ID NO: 247696 - DNA, 20 bp, synthetic construct
  source 1..20: mol_type = other DNA
tccttctgggatctccgtgt

SEQ ID NO: 247697 - DNA, 20 bp, synthetic construct
  source 1..20: mol_type = other DNA
ttccttctgggatctccgtg

SEQ ID NO: 247698 - DNA, 20 bp, synthetic construct
  source 1..20: mol_type = other DNA
gttccttctgggatctccgt

SEQ ID NO: 247699 - DNA, 20 bp, synthetic construct
  source 1..20: mol_type = other DNA
ggttccttctgggatctccg

SEQ ID NO: 247700 - DNA, 20 bp, synthetic construct
  source 1..20: mol_type = other DNA
tggttccttctgggatctcc

SEQ ID NO: 247701 - DNA, 20 bp, synthetic construct
  source 1..20: mol_type = other DNA
gtggttccttctgggatctc

SEQ ID NO: 247702 - DNA, 20 bp, synthetic construct
  source 1..20: mol_type = other DNA
tgtggttccttctgggatct

SEQ ID NO: 247703 - DNA, 20 bp, synthetic construct
  source 1..20: mol_type = other DNA
ctgtggttccttctgggatc

SEQ ID NO: 247704 - DNA, 20 bp, synthetic construct
  source 1..20: mol_type = other DNA
cctgtggttccttctgggat

SEQ ID NO: 247705 - DNA, 20 bp, synthetic construct
  source 1..20: mol_type = other DNA
acctgtggttccttctggga

SEQ ID NO: 247706 - DNA, 20 bp, synthetic construct
  source 1..20: mol_type = other DNA
cacctgtggttccttctggg

SEQ ID NO: 247707 - DNA, 20 bp, synthetic construct
  source 1..20: mol_type = other DNA
tcacctgtggttccttctgg

SEQ ID NO: 247708 - DNA, 20 bp, synthetic construct
  source 1..20: mol_type = other DNA
ctcacctgtggttccttctg

SEQ ID NO: 247709 - DNA, 20 bp, synthetic construct
  source 1..20: mol_type = other DNA
cctcacctgtggttccttct

SEQ ID NO: 247710 - DNA, 20 bp, synthetic construct
  source 1..20: mol_type = other DNA
ccctcacctgtggttccttc

SEQ ID NO: 247711 - DNA, 20 bp, synthetic construct
  source 1..20: mol_type = other DNA
accctcacctgtggttcctt

SEQ ID NO: 247712 - DNA, 20 bp, synthetic construct
  source 1..20: mol_type = other DNA
taccctcacctgtggttcct

SEQ ID NO: 247713 - DNA, 20 bp, synthetic construct
  source 1..20: mol_type = other DNA
ttaccctcacctgtggttcc

SEQ ID NO: 247714 - DNA, 20 bp, synthetic construct
  source 1..20: mol_type = other DNA
cttaccctcacctgtggttc

SEQ ID NO: 247715 - DNA, 20 bp, synthetic construct
  source 1..20: mol_type = other DNA
gcttaccctcacctgtggtt

SEQ ID NO: 247716 - DNA, 20 bp, synthetic construct
  source 1..20: mol_type = other DNA
ggcttaccctcacctgtggt

SEQ ID NO: 247717 - DNA, 20 bp, synthetic construct
  source 1..20: mol_type = other DNA
gggcttaccctcacctgtgg

SEQ ID NO: 247718 - DNA, 20 bp, synthetic construct
  source 1..20: mol_type = other DNA
ggggcttaccctcacctgtg

SEQ ID NO: 247719 - DNA, 20 bp, synthetic construct
  source 1..20: mol_type = other DNA
tggggcttaccctcacctgt

SEQ ID NO: 247720 - DNA, 20 bp, synthetic construct
  source 1..20: mol_type = other DNA
ctggggcttaccctcacctg

SEQ ID NO: 247721 - DNA, 20 bp, synthetic construct
  source 1..20: mol_type = other DNA
tctggggcttaccctcacct

SEQ ID NO: 247722 - DNA, 20 bp, synthetic construct
  source 1..20: mol_type = other DNA
ctctggggcttaccctcacc

SEQ ID NO: 247723 - DNA, 20 bp, synthetic construct
  source 1..20: mol_type = other DNA
tctctggggcttaccctcac

SEQ ID NO: 247724 - DNA, 20 bp, synthetic construct
  source 1..20: mol_type = other DNA
gtctctggggcttaccctca

SEQ ID NO: 247725 - DNA, 20 bp, synthetic construct
  source 1..20: mol_type = other DNA
ggtctctggggcttaccctc

SEQ ID NO: 247726 - DNA, 20 bp, synthetic construct
  source 1..20: mol_type = other DNA
gggtctctggggcttaccct

SEQ ID NO: 247727 - DNA, 20 bp, synthetic construct
  source 1..20: mol_type = other DNA
ggggtctctggggcttaccc

SEQ ID NO: 247728 - DNA, 20 bp, synthetic construct
  source 1..20: mol_type = other DNA
gggggtctctggggcttacc

SEQ ID NO: 247729 - DNA, 20 bp, synthetic construct
  source 1..20: mol_type = other DNA
tgggggtctctggggcttac

SEQ ID NO: 247730 - DNA, 20 bp, synthetic construct
  source 1..20: mol_type = other DNA
ctgggggtctctggggctta

SEQ ID NO: 247731 - DNA, 20 bp, synthetic construct
  source 1..20: mol_type = other DNA
cctgggggtctctggggctt

SEQ ID NO: 247732 - DNA, 20 bp, synthetic construct
  source 1..20: mol_type = other DNA
gcctgggggtctctggggct

SEQ ID NO: 247733 - DNA, 20 bp, synthetic construct
  source 1..20: mol_type = other DNA
tgcctgggggtctctggggc

SEQ ID NO: 247734 - DNA, 20 bp, synthetic construct
  source 1..20: mol_type = other DNA
ctgcctgggggtctctgggg

SEQ ID NO: 247735 - DNA, 20 bp, synthetic construct
  source 1..20: mol_type = other DNA
actgcctgggggtctctggg

SEQ ID NO: 247736 - DNA, 20 bp, synthetic construct
  source 1..20: mol_type = other DNA
gactgcctgggggtctctgg

SEQ ID NO: 247737 - DNA, 20 bp, synthetic construct
  source 1..20: mol_type = other DNA
tgactgcctgggggtctctg

SEQ ID NO: 247738 - DNA, 20 bp, synthetic construct
  source 1..20: mol_type = other DNA
ttgactgcctgggggtctct

SEQ ID NO: 247739 - DNA, 20 bp, synthetic construct
  source 1..20: mol_type = other DNA
cttgactgcctgggggtctc

SEQ ID NO: 247740 - DNA, 20 bp, synthetic construct
  source 1..20: mol_type = other DNA
ccttgactgcctgggggtct

SEQ ID NO: 247741 - DNA, 20 bp, synthetic construct
  source 1..20: mol_type = other DNA
gccttgactgcctgggggtc

SEQ ID NO: 247742 - DNA, 20 bp, synthetic construct
  source 1..20: mol_type = other DNA
ggccttgactgcctgggggt

SEQ ID NO: 247743 - DNA, 20 bp, synthetic construct
  source 1..20: mol_type = other DNA
gggccttgactgcctggggg

SEQ ID NO: 247744 - DNA, 20 bp, synthetic construct
  source 1..20: mol_type = other DNA
agggccttgactgcctgggg

SEQ ID NO: 247745 - DNA, 20 bp, synthetic construct
  source 1..20: mol_type = other DNA
cagggccttgactgcctggg

SEQ ID NO: 247746 - DNA, 20 bp, synthetic construct
  source 1..20: mol_type = other DNA
gcagggccttgactgcctgg

SEQ ID NO: 247747 - DNA, 20 bp, synthetic construct
  source 1..20: mol_type = other DNA
agcagggccttgactgcctg

SEQ ID NO: 247748 - DNA, 20 bp, synthetic construct
  source 1..20: mol_type = other DNA
cagcagggccttgactgcct

SEQ ID NO: 247749 - DNA, 20 bp, synthetic construct
  source 1..20: mol_type = other DNA
ccagcagggccttgactgcc

SEQ ID NO: 247750 - DNA, 20 bp, synthetic construct
  source 1..20: mol_type = other DNA
cccagcagggccttgactgc

SEQ ID NO: 247751 - DNA, 20 bp, synthetic construct
  source 1..20: mol_type = other DNA
acccagcagggccttgactg

SEQ ID NO: 247752 - DNA, 20 bp, synthetic construct
  source 1..20: mol_type = other DNA
cacccagcagggccttgact

SEQ ID NO: 247753 - DNA, 20 bp, synthetic construct
  source 1..20: mol_type = other DNA
gcacccagcagggccttgac

SEQ ID NO: 247754 - DNA, 20 bp, synthetic construct
  source 1..20: mol_type = other DNA
ggcacccagcagggccttga

SEQ ID NO: 247755 - DNA, 20 bp, synthetic construct
  source 1..20: mol_type = other DNA
gggcacccagcagggccttg

SEQ ID NO: 247756 - DNA, 20 bp, synthetic construct
  source 1..20: mol_type = other DNA
ggggcacccagcagggcctt

SEQ ID NO: 247757 - DNA, 20 bp, synthetic construct
  source 1..20: mol_type = other DNA
tggggcacccagcagggcct

SEQ ID NO: 247758 - DNA, 20 bp, synthetic construct
  source 1..20: mol_type = other DNA
ctggggcacccagcagggcc

SEQ ID NO: 247759 - DNA, 20 bp, synthetic construct
  source 1..20: mol_type = other DNA
gctggggcacccagcagggc

SEQ ID NO: 247760 - DNA, 20 bp, synthetic construct
  source 1..20: mol_type = other DNA
agctggggcacccagcaggg

SEQ ID NO: 247761 - DNA, 20 bp, synthetic construct
  source 1..20: mol_type = other DNA
cagctggggcacccagcagg

SEQ ID NO: 247762 - DNA, 20 bp, synthetic construct
  source 1..20: mol_type = other DNA
tcagctggggcacccagcag

SEQ ID NO: 247763 - DNA, 20 bp, synthetic construct
  source 1..20: mol_type = other DNA
gtcagctggggcacccagca

SEQ ID NO: 247764 - DNA, 20 bp, synthetic construct
  source 1..20: mol_type = other DNA
ggtcagctggggcacccagc

SEQ ID NO: 247765 - DNA, 20 bp, synthetic construct
  source 1..20: mol_type = other DNA
aggtcagctggggcacccag

SEQ ID NO: 247766 - DNA, 20 bp, synthetic construct
  source 1..20: mol_type = other DNA
caggtcagctggggcaccca

SEQ ID NO: 247767 - DNA, 20 bp, synthetic construct
  source 1..20: mol_type = other DNA
acaggtcagctggggcaccc

SEQ ID NO: 247768 - DNA, 20 bp, synthetic construct
  source 1..20: mol_type = other DNA
cacaggtcagctggggcacc

SEQ ID NO: 247769 - DNA, 20 bp, synthetic construct
  source 1..20: mol_type = other DNA
tcacaggtcagctggggcac

SEQ ID NO: 247770 - DNA, 20 bp, synthetic construct
  source 1..20: mol_type = other DNA
gtcacaggtcagctggggca

SEQ ID NO: 247771 - DNA, 20 bp, synthetic construct
  source 1..20: mol_type = other DNA
tgtcacaggtcagctggggc

SEQ ID NO: 247772 - DNA, 20 bp, synthetic construct
  source 1..20: mol_type = other DNA
ctgtcacaggtcagctgggg

SEQ ID NO: 247773 - DNA, 20 bp, synthetic construct
  source 1..20: mol_type = other DNA
tctgtcacaggtcagctggg

SEQ ID NO: 247774 - DNA, 20 bp, synthetic construct
  source 1..20: mol_type = other DNA
ttctgtcacaggtcagctgg

SEQ ID NO: 247775 - DNA, 20 bp, synthetic construct
  source 1..20: mol_type = other DNA
cttctgtcacaggtcagctg

SEQ ID NO: 247776 - DNA, 20 bp, synthetic construct
  source 1..20: mol_type = other DNA
acttctgtcacaggtcagct

SEQ ID NO: 247777 - DNA, 20 bp, synthetic construct
  source 1..20: mol_type = other DNA
cacttctgtcacaggtcagc

SEQ ID NO: 247778 - DNA, 20 bp, synthetic construct
  source 1..20: mol_type = other DNA
tcacttctgtcacaggtcag

SEQ ID NO: 247779 - DNA, 20 bp, synthetic construct
  source 1..20: mol_type = other DNA
ctcacttctgtcacaggtca

SEQ ID NO: 247780 - DNA, 20 bp, synthetic construct
  source 1..20: mol_type = other DNA
cctcacttctgtcacaggtc

SEQ ID NO: 247781 - DNA, 20 bp, synthetic construct
  source 1..20: mol_type = other DNA
ccctcacttctgtcacaggt

SEQ ID NO: 247782 - DNA, 20 bp, synthetic construct
  source 1..20: mol_type = other DNA
tccctcacttctgtcacagg

SEQ ID NO: 247783 - DNA, 20 bp, synthetic construct
  source 1..20: mol_type = other DNA
ctccctcacttctgtcacag

SEQ ID NO: 247784 - DNA, 20 bp, synthetic construct
  source 1..20: mol_type = other DNA
gctccctcacttctgtcaca

SEQ ID NO: 247785 - DNA, 20 bp, synthetic construct
  source 1..20: mol_type = other DNA
agctccctcacttctgtcac

SEQ ID NO: 247786 - DNA, 20 bp, synthetic construct
  source 1..20: mol_type = other DNA
aagctccctcacttctgtca

SEQ ID NO: 247787 - DNA, 20 bp, synthetic construct
  source 1..20: mol_type = other DNA
aaagctccctcacttctgtc

SEQ ID NO: 247788 - DNA, 20 bp, synthetic construct
  source 1..20: mol_type = other DNA
caaagctccctcacttctgt

SEQ ID NO: 247789 - DNA, 20 bp, synthetic construct
  source 1..20: mol_type = other DNA
gcaaagctccctcacttctg

SEQ ID NO: 247790 - DNA, 20 bp, synthetic construct
  source 1..20: mol_type = other DNA
cgcaaagctccctcacttct

SEQ ID NO: 247791 - DNA, 20 bp, synthetic construct
  source 1..20: mol_type = other DNA
acgcaaagctccctcacttc

SEQ ID NO: 247792 - DNA, 20 bp, synthetic construct
  source 1..20: mol_type = other DNA
cacgcaaagctccctcactt

SEQ ID NO: 247793 - DNA, 20 bp, synthetic construct
  source 1..20: mol_type = other DNA
acacgcaaagctccctcact

SEQ ID NO: 247794 - DNA, 20 bp, synthetic construct
  source 1..20: mol_type = other DNA
aacacgcaaagctccctcac

SEQ ID NO: 247795 - DNA, 20 bp, synthetic construct
  source 1..20: mol_type = other DNA
aaacacgcaaagctccctca

SEQ ID NO: 247796 - DNA, 20 bp, synthetic construct
  source 1..20: mol_type = other DNA
taaacacgcaaagctccctc

SEQ ID NO: 247797 - DNA, 20 bp, synthetic construct
  source 1..20: mol_type = other DNA
ataaacacgcaaagctccct

SEQ ID NO: 247798 - DNA, 20 bp, synthetic construct
  source 1..20: mol_type = other DNA
gataaacacgcaaagctccc

SEQ ID NO: 247799 - DNA, 20 bp, synthetic construct
  source 1..20: mol_type = other DNA
ggataaacacgcaaagctcc

SEQ ID NO: 247800 - DNA, 20 bp, synthetic construct
  source 1..20: mol_type = other DNA
aggataaacacgcaaagctc

SEQ ID NO: 247801 - DNA, 20 bp, synthetic construct
  source 1..20: mol_type = other DNA
gaggataaacacgcaaagct

SEQ ID NO: 247802 - DNA, 20 bp, synthetic construct
  source 1..20: mol_type = other DNA
ggaggataaacacgcaaagc

SEQ ID NO: 247803 - DNA, 20 bp, synthetic construct
  source 1..20: mol_type = other DNA
aggaggataaacacgcaaag

SEQ ID NO: 247804 - DNA, 20 bp, synthetic construct
  source 1..20: mol_type = other DNA
caggaggataaacacgcaaa

SEQ ID NO: 247805 - DNA, 20 bp, synthetic construct
  source 1..20: mol_type = other DNA
acaggaggataaacacgcaa

SEQ ID NO: 247806 - DNA, 20 bp, synthetic construct
  source 1..20: mol_type = other DNA
cacaggaggataaacacgca

SEQ ID NO: 247807 - DNA, 20 bp, synthetic construct
  source 1..20: mol_type = other DNA
ccacaggaggataaacacgc

SEQ ID NO: 247808 - DNA, 20 bp, synthetic construct
  source 1..20: mol_type = other DNA
cccacaggaggataaacacg

SEQ ID NO: 247809 - DNA, 20 bp, synthetic construct
  source 1..20: mol_type = other DNA
ccccacaggaggataaacac

SEQ ID NO: 247810 - DNA, 20 bp, synthetic construct
  source 1..20: mol_type = other DNA
gccccacaggaggataaaca

SEQ ID NO: 247811 - DNA, 20 bp, synthetic construct
  source 1..20: mol_type = other DNA
tgccccacaggaggataaac

SEQ ID NO: 247812 - DNA, 20 bp, synthetic construct
  source 1..20: mol_type = other DNA
ctgccccacaggaggataaa

SEQ ID NO: 247813 - DNA, 20 bp, synthetic construct
  source 1..20: mol_type = other DNA
cctgccccacaggaggataa

SEQ ID NO: 247814 - DNA, 20 bp, synthetic construct
  source 1..20: mol_type = other DNA
tcctgccccacaggaggata

SEQ ID NO: 247815 - DNA, 20 bp, synthetic construct
  source 1..20: mol_type = other DNA
ttcctgccccacaggaggat

SEQ ID NO: 247816 - DNA, 20 bp, synthetic construct
  source 1..20: mol_type = other DNA
gttcctgccccacaggagga

SEQ ID NO: 247817 - DNA, 20 bp, synthetic construct
  source 1..20: mol_type = other DNA
tgttcctgccccacaggagg

SEQ ID NO: 247818 - DNA, 20 bp, synthetic construct
  source 1..20: mol_type = other DNA
atgttcctgccccacaggag

SEQ ID NO: 247819 - DNA, 20 bp, synthetic construct
  source 1..20: mol_type = other DNA
catgttcctgccccacagga

SEQ ID NO: 247820 - DNA, 20 bp, synthetic construct
  source 1..20: mol_type = other DNA
ccatgttcctgccccacagg

SEQ ID NO: 247821 - DNA, 20 bp, synthetic construct
  source 1..20: mol_type = other DNA
cccatgttcctgccccacag

SEQ ID NO: 247822 - DNA, 20 bp, synthetic construct
  source 1..20: mol_type = other DNA
acccatgttcctgccccaca

SEQ ID NO: 247823 - DNA, 20 bp, synthetic construct
  source 1..20: mol_type = other DNA
cacccatgttcctgccccac

SEQ ID NO: 247824 - DNA, 20 bp, synthetic construct
  source 1..20: mol_type = other DNA
ccacccatgttcctgcccca

SEQ ID NO: 247825 - DNA, 20 bp, synthetic construct
  source 1..20: mol_type = other DNA
tccacccatgttcctgcccc

SEQ ID NO: 247826 - DNA, 20 bp, synthetic construct
  source 1..20: mol_type = other DNA
atccacccatgttcctgccc

SEQ ID NO: 247827 - DNA, 20 bp, synthetic construct
  source 1..20: mol_type = other DNA
aatccacccatgttcctgcc

SEQ ID NO: 247828 - DNA, 20 bp, synthetic construct
  source 1..20: mol_type = other DNA
gaatccacccatgttcctgc

SEQ ID NO: 247829 - DNA, 20 bp, synthetic construct
  source 1..20: mol_type = other DNA
agaatccacccatgttcctg

SEQ ID NO: 247830 - DNA, 20 bp, synthetic construct
  source 1..20: mol_type = other DNA
cagaatccacccatgttcct

SEQ ID NO: 247831 - DNA, 20 bp, synthetic construct
  source 1..20: mol_type = other DNA
ccagaatccacccatgttcc

SEQ ID NO: 247832 - DNA, 20 bp, synthetic construct
  source 1..20: mol_type = other DNA
gccagaatccacccatgttc

SEQ ID NO: 247833 - DNA, 20 bp, synthetic construct
  source 1..20: mol_type = other DNA
agccagaatccacccatgtt

SEQ ID NO: 247834 - DNA, 20 bp, synthetic construct
  source 1..20: mol_type = other DNA
gagccagaatccacccatgt

SEQ ID NO: 247835 - DNA, 20 bp, synthetic construct
  source 1..20: mol_type = other DNA
ggagccagaatccacccatg

SEQ ID NO: 247836 - DNA, 20 bp, synthetic construct
  source 1..20: mol_type = other DNA
aggagccagaatccacccat

SEQ ID NO: 247837 - DNA, 20 bp, synthetic construct
  source 1..20: mol_type = other DNA
caggagccagaatccaccca

SEQ ID NO: 247838 - DNA, 20 bp, synthetic construct
  source 1..20: mol_type = other DNA
ccaggagccagaatccaccc

SEQ ID NO: 247839 - DNA, 20 bp, synthetic construct
  source 1..20: mol_type = other DNA
cccaggagccagaatccacc

SEQ ID NO: 247840 - DNA, 20 bp, synthetic construct
  source 1..20: mol_type = other DNA
tcccaggagccagaatccac

SEQ ID NO: 247841 - DNA, 20 bp, synthetic construct
  source 1..20: mol_type = other DNA
ttcccaggagccagaatcca

SEQ ID NO: 247842 - DNA, 20 bp, synthetic construct
  source 1..20: mol_type = other DNA
attcccaggagccagaatcc

SEQ ID NO: 247843 - DNA, 20 bp, synthetic construct
  source 1..20: mol_type = other DNA
gattcccaggagccagaatc

SEQ ID NO: 247844 - DNA, 20 bp, synthetic construct
  source 1..20: mol_type = other DNA
agattcccaggagccagaat

SEQ ID NO: 247845 - DNA, 20 bp, synthetic construct
  source 1..20: mol_type = other DNA
aagattcccaggagccagaa

SEQ ID NO: 247846 - DNA, 20 bp, synthetic construct
  source 1..20: mol_type = other DNA
caagattcccaggagccaga

SEQ ID NO: 247847 - DNA, 20 bp, synthetic construct
  source 1..20: mol_type = other DNA
ccaagattcccaggagccag

SEQ ID NO: 247848 - DNA, 20 bp, synthetic construct
  source 1..20: mol_type = other DNA
cccaagattcccaggagcca

SEQ ID NO: 247849 - DNA, 20 bp, synthetic construct
  source 1..20: mol_type = other DNA
acccaagattcccaggagcc

SEQ ID NO: 247850 - DNA, 20 bp, synthetic construct
  source 1..20: mol_type = other DNA
aacccaagattcccaggagc

SEQ ID NO: 247851 - DNA, 20 bp, synthetic construct
  source 1..20: mol_type = other DNA
caacccaagattcccaggag

SEQ ID NO: 247852 - DNA, 20 bp, synthetic construct
  source 1..20: mol_type = other DNA
acaacccaagattcccagga

SEQ ID NO: 247853 - DNA, 20 bp, synthetic construct
  source 1..20: mol_type = other DNA
cacaacccaagattcccagg

SEQ ID NO: 247854 - DNA, 20 bp, synthetic construct
  source 1..20: mol_type = other DNA
tcacaacccaagattcccag

SEQ ID NO: 247855 - DNA, 20 bp, synthetic construct
  source 1..20: mol_type = other DNA
ctcacaacccaagattccca

SEQ ID NO: 247856 - DNA, 20 bp, synthetic construct
  source 1..20: mol_type = other DNA
actcacaacccaagattccc

SEQ ID NO: 247857 - DNA, 20 bp, synthetic construct
  source 1..20: mol_type = other DNA
tactcacaacccaagattcc

SEQ ID NO: 247858 - DNA, 20 bp, synthetic construct
  source 1..20: mol_type = other DNA
ctactcacaacccaagattc

SEQ ID NO: 247859 - DNA, 20 bp, synthetic construct
  source 1..20: mol_type = other DNA
gctactcacaacccaagatt

SEQ ID NO: 247860 - DNA, 20 bp, synthetic construct
  source 1..20: mol_type = other DNA
agctactcacaacccaagat

SEQ ID NO: 247861 - DNA, 20 bp, synthetic construct
  source 1..20: mol_type = other DNA
gagctactcacaacccaaga

SEQ ID NO: 247862 - DNA, 20 bp, synthetic construct
  source 1..20: mol_type = other DNA
cgagctactcacaacccaag

SEQ ID NO: 247863 - DNA, 20 bp, synthetic construct
  source 1..20: mol_type = other DNA
tcgagctactcacaacccaa

SEQ ID NO: 247864 - DNA, 20 bp, synthetic construct
  source 1..20: mol_type = other DNA
atcgagctactcacaaccca

SEQ ID NO: 247865 - DNA, 20 bp, synthetic construct
  source 1..20: mol_type = other DNA
catcgagctactcacaaccc

SEQ ID NO: 247866 - DNA, 20 bp, synthetic construct
  source 1..20: mol_type = other DNA
gcatcgagctactcacaacc

SEQ ID NO: 247867 - DNA, 20 bp, synthetic construct
  source 1..20: mol_type = other DNA
ggcatcgagctactcacaac

SEQ ID NO: 247868 - DNA, 20 bp, synthetic construct
  source 1..20: mol_type = other DNA
aggcatcgagctactcacaa

SEQ ID NO: 247869 - DNA, 20 bp, synthetic construct
  source 1..20: mol_type = other DNA
aaggcatcgagctactcaca

SEQ ID NO: 247870 - DNA, 20 bp, synthetic construct
  source 1..20: mol_type = other DNA
caaggcatcgagctactcac

SEQ ID NO: 247871 - DNA, 20 bp, synthetic construct
  source 1..20: mol_type = other DNA
ccaaggcatcgagctactca

SEQ ID NO: 247872 - DNA, 20 bp, synthetic construct
  source 1..20: mol_type = other DNA
accaaggcatcgagctactc

SEQ ID NO: 247873 - DNA, 20 bp, synthetic construct
  source 1..20: mol_type = other DNA
caccaaggcatcgagctact

SEQ ID NO: 247874 - DNA, 20 bp, synthetic construct
  source 1..20: mol_type = other DNA
gcaccaaggcatcgagctac

SEQ ID NO: 247875 - DNA, 20 bp, synthetic construct
  source 1..20: mol_type = other DNA
agcaccaaggcatcgagcta

SEQ ID NO: 247876 - DNA, 20 bp, synthetic construct
  source 1..20: mol_type = other DNA
gagcaccaaggcatcgagct

SEQ ID NO: 247877 - DNA, 20 bp, synthetic construct
  source 1..20: mol_type = other DNA
tgagcaccaaggcatcgagc

SEQ ID NO: 247878 - DNA, 20 bp, synthetic construct
  source 1..20: mol_type = other DNA
ctgagcaccaaggcatcgag

SEQ ID NO: 247879 - DNA, 20 bp, synthetic construct
  source 1..20: mol_type = other DNA
actgagcaccaaggcatcga

SEQ ID NO: 247880 - DNA, 20 bp, synthetic construct
  source 1..20: mol_type = other DNA
aactgagcaccaaggcatcg

SEQ ID NO: 247881 - DNA, 20 bp, synthetic construct
  source 1..20: mol_type = other DNA
taactgagcaccaaggcatc

SEQ ID NO: 247882 - DNA, 20 bp, synthetic construct
  source 1..20: mol_type = other DNA
gtaactgagcaccaaggcat

SEQ ID NO: 247883 - DNA, 20 bp, synthetic construct
  source 1..20: mol_type = other DNA
ggtaactgagcaccaaggca

SEQ ID NO: 247884 - DNA, 20 bp, synthetic construct
  source 1..20: mol_type = other DNA
aggtaactgagcaccaaggc

SEQ ID NO: 247885 - DNA, 20 bp, synthetic construct
  source 1..20: mol_type = other DNA
gaggtaactgagcaccaagg

SEQ ID NO: 247886 - DNA, 20 bp, synthetic construct
  source 1..20: mol_type = other DNA
ggaggtaactgagcaccaag

SEQ ID NO: 247887 - DNA, 20 bp, synthetic construct
  source 1..20: mol_type = other DNA
gggaggtaactgagcaccaa

SEQ ID NO: 247888 - DNA, 20 bp, synthetic construct
  source 1..20: mol_type = other DNA
agggaggtaactgagcacca

SEQ ID NO: 247889 - DNA, 20 bp, synthetic construct
  source 1..20: mol_type = other DNA
cagggaggtaactgagcacc

SEQ ID NO: 247890 - DNA, 20 bp, synthetic construct
  source 1..20: mol_type = other DNA
ccagggaggtaactgagcac

SEQ ID NO: 247891 - DNA, 20 bp, synthetic construct
  source 1..20: mol_type = other DNA
gccagggaggtaactgagca

SEQ ID NO: 247892 - DNA, 20 bp, synthetic construct
  source 1..20: mol_type = other DNA
agccagggaggtaactgagc

SEQ ID NO: 247893 - DNA, 20 bp, synthetic construct
  source 1..20: mol_type = other DNA
cagccagggaggtaactgag

SEQ ID NO: 247894 - DNA, 20 bp, synthetic construct
  source 1..20: mol_type = other DNA
gcagccagggaggtaactga

SEQ ID NO: 247895 - DNA, 20 bp, synthetic construct
  source 1..20: mol_type = other DNA
ggcagccagggaggtaactg

SEQ ID NO: 247896 - DNA, 20 bp, synthetic construct
  source 1..20: mol_type = other DNA
aggcagccagggaggtaact

SEQ ID NO: 247897 - DNA, 20 bp, synthetic construct
  source 1..20: mol_type = other DNA
caggcagccagggaggtaac

SEQ ID NO: 247898 - DNA, 20 bp, synthetic construct
  source 1..20: mol_type = other DNA
gcaggcagccagggaggtaa

SEQ ID NO: 247899 - DNA, 20 bp, synthetic construct
  source 1..20: mol_type = other DNA
ggcaggcagccagggaggta

SEQ ID NO: 247900 - DNA, 20 bp, synthetic construct
  source 1..20: mol_type = other DNA
tggcaggcagccagggaggt

SEQ ID NO: 247901 - DNA, 20 bp, synthetic construct
  source 1..20: mol_type = other DNA
ctggcaggcagccagggagg

SEQ ID NO: 247902 - DNA, 20 bp, synthetic construct
  source 1..20: mol_type = other DNA
gctggcaggcagccagggag

SEQ ID NO: 247903 - DNA, 20 bp, synthetic construct
  source 1..20: mol_type = other DNA
ggctggcaggcagccaggga

SEQ ID NO: 247904 - DNA, 20 bp, synthetic construct
  source 1..20: mol_type = other DNA
aggctggcaggcagccaggg

SEQ ID NO: 247905 - DNA, 20 bp, synthetic construct
  source 1..20: mol_type = other DNA
gaggctggcaggcagccagg

SEQ ID NO: 247906 - DNA, 20 bp, synthetic construct
  source 1..20: mol_type = other DNA
agaggctggcaggcagccag

SEQ ID NO: 247907 - DNA, 20 bp, synthetic construct
  source 1..20: mol_type = other DNA
gagaggctggcaggcagcca

SEQ ID NO: 247908 - DNA, 20 bp, synthetic construct
  source 1..20: mol_type = other DNA
tgagaggctggcaggcagcc

SEQ ID NO: 247909 - DNA, 20 bp, synthetic construct
  source 1..20: mol_type = other DNA
ctgagaggctggcaggcagc

SEQ ID NO: 247910 - DNA, 20 bp, synthetic construct
  source 1..20: mol_type = other DNA
tctgagaggctggcaggcag

SEQ ID NO: 247911 - DNA, 20 bp, synthetic construct
  source 1..20: mol_type = other DNA
ctctgagaggctggcaggca

SEQ ID NO: 247912 - DNA, 20 bp, synthetic construct
  source 1..20: mol_type = other DNA
gctctgagaggctggcaggc

SEQ ID NO: 247913 - DNA, 20 bp, synthetic construct
  source 1..20: mol_type = other DNA
tgctctgagaggctggcagg

SEQ ID NO: 247914 - DNA, 20 bp, synthetic construct
  source 1..20: mol_type = other DNA
atgctctgagaggctggcag

SEQ ID NO: 247915 - DNA, 20 bp, synthetic construct
  source 1..20: mol_type = other DNA
aatgctctgagaggctggca

SEQ ID NO: 247916 - DNA, 20 bp, synthetic construct
  source 1..20: mol_type = other DNA
aaatgctctgagaggctggc

SEQ ID NO: 247917 - DNA, 20 bp, synthetic construct
  source 1..20: mol_type = other DNA
taaatgctctgagaggctgg

SEQ ID NO: 247918 - DNA, 20 bp, synthetic construct
  source 1..20: mol_type = other DNA
ctaaatgctctgagaggctg

SEQ ID NO: 247919 - DNA, 20 bp, synthetic construct
  source 1..20: mol_type = other DNA
cctaaatgctctgagaggct

SEQ ID NO: 247920 - DNA, 20 bp, synthetic construct
  source 1..20: mol_type = other DNA
ccctaaatgctctgagaggc

SEQ ID NO: 247921 - DNA, 20 bp, synthetic construct
  source 1..20: mol_type = other DNA
gccctaaatgctctgagagg

SEQ ID NO: 247922 - DNA, 20 bp, synthetic construct
  source 1..20: mol_type = other DNA
ggccctaaatgctctgagag

SEQ ID NO: 247923 - DNA, 20 bp, synthetic construct
  source 1..20: mol_type = other DNA
aggccctaaatgctctgaga

SEQ ID NO: 247924 - DNA, 20 bp, synthetic construct
  source 1..20: mol_type = other DNA
aaggccctaaatgctctgag

SEQ ID NO: 247925 - DNA, 20 bp, synthetic construct
  source 1..20: mol_type = other DNA
gaaggccctaaatgctctga

SEQ ID NO: 247926 - DNA, 20 bp, synthetic construct
  source 1..20: mol_type = other DNA
agaaggccctaaatgctctg

SEQ ID NO: 247927 - DNA, 20 bp, synthetic construct
  source 1..20: mol_type = other DNA
cagaaggccctaaatgctct

SEQ ID NO: 247928 - DNA, 20 bp, synthetic construct
  source 1..20: mol_type = other DNA
ccagaaggccctaaatgctc

SEQ ID NO: 247929 - DNA, 20 bp, synthetic construct
  source 1..20: mol_type = other DNA
tccagaaggccctaaatgct

SEQ ID NO: 247930 - DNA, 20 bp, synthetic construct
  source 1..20: mol_type = other DNA
gtccagaaggccctaaatgc

SEQ ID NO: 247931 - DNA, 20 bp, synthetic construct
  source 1..20: mol_type = other DNA
agtccagaaggccctaaatg

SEQ ID NO: 247932 - DNA, 20 bp, synthetic construct
  source 1..20: mol_type = other DNA
aagtccagaaggccctaaat

SEQ ID NO: 247933 - DNA, 20 bp, synthetic construct
  source 1..20: mol_type = other DNA
gaagtccagaaggccctaaa

SEQ ID NO: 247934 - DNA, 20 bp, synthetic construct
  source 1..20: mol_type = other DNA
agaagtccagaaggccctaa

SEQ ID NO: 247935 - DNA, 20 bp, synthetic construct
  source 1..20: mol_type = other DNA
tagaagtccagaaggcccta

SEQ ID NO: 247936 - DNA, 20 bp, synthetic construct
  source 1..20: mol_type = other DNA
ctagaagtccagaaggccct

SEQ ID NO: 247937 - DNA, 20 bp, synthetic construct
  source 1..20: mol_type = other DNA
tctagaagtccagaaggccc

SEQ ID NO: 247938 - DNA, 20 bp, synthetic construct
  source 1..20: mol_type = other DNA
atctagaagtccagaaggcc

SEQ ID NO: 247939 - DNA, 20 bp, synthetic construct
  source 1..20: mol_type = other DNA
catctagaagtccagaaggc

SEQ ID NO: 247940 - DNA, 20 bp, synthetic construct
  source 1..20: mol_type = other DNA
gcatctagaagtccagaagg

SEQ ID NO: 247941 - DNA, 20 bp, synthetic construct
  source 1..20: mol_type = other DNA
agcatctagaagtccagaag

SEQ ID NO: 247942 - DNA, 20 bp, synthetic construct
  source 1..20: mol_type = other DNA
gagcatctagaagtccagaa

SEQ ID NO: 247943 - DNA, 20 bp, synthetic construct
  source 1..20: mol_type = other DNA
ggagcatctagaagtccaga

SEQ ID NO: 247944 - DNA, 20 bp, synthetic construct
  source 1..20: mol_type = other DNA
aggagcatctagaagtccag

SEQ ID NO: 247945 - DNA, 20 bp, synthetic construct
  source 1..20: mol_type = other DNA
gaggagcatctagaagtcca

SEQ ID NO: 247946 - DNA, 20 bp, synthetic construct
  source 1..20: mol_type = other DNA
tgaggagcatctagaagtcc

SEQ ID NO: 247947 - DNA, 20 bp, synthetic construct
  source 1..20: mol_type = other DNA
atgaggagcatctagaagtc

SEQ ID NO: 247948 - DNA, 20 bp, synthetic construct
  source 1..20: mol_type = other DNA
gatgaggagcatctagaagt

SEQ ID NO: 247949 - DNA, 20 bp, synthetic construct
  source 1..20: mol_type = other DNA
agatgaggagcatctagaag

SEQ ID NO: 247950 - DNA, 20 bp, synthetic construct
  source 1..20: mol_type = other DNA
aagatgaggagcatctagaa

SEQ ID NO: 247951 - DNA, 20 bp, synthetic construct
  source 1..20: mol_type = other DNA
caagatgaggagcatctaga

SEQ ID NO: 247952 - DNA, 20 bp, synthetic construct
  source 1..20: mol_type = other DNA
gcaagatgaggagcatctag

SEQ ID NO: 247953 - DNA, 20 bp, synthetic construct
  source 1..20: mol_type = other DNA
ggcaagatgaggagcatcta

SEQ ID NO: 247954 - DNA, 20 bp, synthetic construct
  source 1..20: mol_type = other DNA
aggcaagatgaggagcatct

SEQ ID NO: 247955 - DNA, 20 bp, synthetic construct
  source 1..20: mol_type = other DNA
gaggcaagatgaggagcatc

SEQ ID NO: 247956 - DNA, 20 bp, synthetic construct
  source 1..20: mol_type = other DNA
tgaggcaagatgaggagcat

SEQ ID NO: 247957 - DNA, 20 bp, synthetic construct
  source 1..20: mol_type = other DNA
ctgaggcaagatgaggagca

SEQ ID NO: 247958 - DNA, 20 bp, synthetic construct
  source 1..20: mol_type = other DNA
actgaggcaagatgaggagc

SEQ ID NO: 247959 - DNA, 20 bp, synthetic construct
  source 1..20: mol_type = other DNA
gactgaggcaagatgaggag

SEQ ID NO: 247960 - DNA, 20 bp, synthetic construct
  source 1..20: mol_type = other DNA
tgactgaggcaagatgagga

SEQ ID NO: 247961 - DNA, 20 bp, synthetic construct
  source 1..20: mol_type = other DNA
ctgactgaggcaagatgagg

SEQ ID NO: 247962 - DNA, 20 bp, synthetic construct
  source 1..20: mol_type = other DNA
gctgactgaggcaagatgag

SEQ ID NO: 247963 - DNA, 20 bp, synthetic construct
  source 1..20: mol_type = other DNA
cgctgactgaggcaagatga

SEQ ID NO: 247964 - DNA, 20 bp, synthetic construct
  source 1..20: mol_type = other DNA
gcgctgactgaggcaagatg

SEQ ID NO: 247965 - DNA, 20 bp, synthetic construct
  source 1..20: mol_type = other DNA
cgcgctgactgaggcaagat

SEQ ID NO: 247966 - DNA, 20 bp, synthetic construct
  source 1..20: mol_type = other DNA
acgcgctgactgaggcaaga

SEQ ID NO: 247967 - DNA, 20 bp, synthetic construct
  source 1..20: mol_type = other DNA
gacgcgctgactgaggcaag

SEQ ID NO: 247968 - DNA, 20 bp, synthetic construct
  source 1..20: mol_type = other DNA
tgacgcgctgactgaggcaa

SEQ ID NO: 247969 - DNA, 20 bp, synthetic construct
  source 1..20: mol_type = other DNA
ctgacgcgctgactgaggca

SEQ ID NO: 247970 - DNA, 20 bp, synthetic construct
  source 1..20: mol_type = other DNA
actgacgcgctgactgaggc

SEQ ID NO: 247971 - DNA, 20 bp, synthetic construct
  source 1..20: mol_type = other DNA
aactgacgcgctgactgagg

SEQ ID NO: 247972 - DNA, 20 bp, synthetic construct
  source 1..20: mol_type = other DNA
gaactgacgcgctgactgag

SEQ ID NO: 247973 - DNA, 20 bp, synthetic construct
  source 1..20: mol_type = other DNA
ggaactgacgcgctgactga

SEQ ID NO: 247974 - DNA, 20 bp, synthetic construct
  source 1..20: mol_type = other DNA
tggaactgacgcgctgactg

SEQ ID NO: 247975 - DNA, 20 bp, synthetic construct
  source 1..20: mol_type = other DNA
ctggaactgacgcgctgact

SEQ ID NO: 247976 - DNA, 20 bp, synthetic construct
  source 1..20: mol_type = other DNA
tctggaactgacgcgctgac

SEQ ID NO: 247977 - DNA, 20 bp, synthetic construct
  source 1..20: mol_type = other DNA
ctctggaactgacgcgctga

SEQ ID NO: 247978 - DNA, 20 bp, synthetic construct
  source 1..20: mol_type = other DNA
tctctggaactgacgcgctg

SEQ ID NO: 247979 - DNA, 20 bp, synthetic construct
  source 1..20: mol_type = other DNA
gtctctggaactgacgcgct

SEQ ID NO: 247980 - DNA, 20 bp, synthetic construct
  source 1..20: mol_type = other DNA
agtctctggaactgacgcgc

SEQ ID NO: 247981 - DNA, 20 bp, synthetic construct
  source 1..20: mol_type = other DNA
aagtctctggaactgacgcg

SEQ ID NO: 247982 - DNA, 20 bp, synthetic construct
  source 1..20: mol_type = other DNA
gaagtctctggaactgacgc

SEQ ID NO: 247983 - DNA, 20 bp, synthetic construct
  source 1..20: mol_type = other DNA
agaagtctctggaactgacg

SEQ ID NO: 247984 - DNA, 20 bp, synthetic construct
  source 1..20: mol_type = other DNA
gagaagtctctggaactgac

SEQ ID NO: 247985 - DNA, 20 bp, synthetic construct
  source 1..20: mol_type = other DNA
agagaagtctctggaactga

SEQ ID NO: 247986 - DNA, 20 bp, synthetic construct
  source 1..20: mol_type = other DNA
cagagaagtctctggaactg

SEQ ID NO: 247987 - DNA, 20 bp, synthetic construct
  source 1..20: mol_type = other DNA
gcagagaagtctctggaact

SEQ ID NO: 247988 - DNA, 20 bp, synthetic construct
  source 1..20: mol_type = other DNA
tgcagagaagtctctggaac

SEQ ID NO: 247989 - DNA, 20 bp, synthetic construct
  source 1..20: mol_type = other DNA
ctgcagagaagtctctggaa

SEQ ID NO: 247990 - DNA, 20 bp, synthetic construct
  source 1..20: mol_type = other DNA
cctgcagagaagtctctgga

SEQ ID NO: 247991 - DNA, 20 bp, synthetic construct
  source 1..20: mol_type = other DNA
ccctgcagagaagtctctgg

SEQ ID NO: 247992 - DNA, 20 bp, synthetic construct
  source 1..20: mol_type = other DNA
accctgcagagaagtctctg

SEQ ID NO: 247993 - DNA, 20 bp, synthetic construct
  source 1..20: mol_type = other DNA
aaccctgcagagaagtctct

SEQ ID NO: 247994 - DNA, 20 bp, synthetic construct
  source 1..20: mol_type = other DNA
aaaccctgcagagaagtctc

SEQ ID NO: 247995 - DNA, 20 bp, synthetic construct
  source 1..20: mol_type = other DNA
aaaaccctgcagagaagtct

SEQ ID NO: 247996 - DNA, 20 bp, synthetic construct
  source 1..20: mol_type = other DNA
gaaaaccctgcagagaagtc

SEQ ID NO: 247997 - DNA, 20 bp, synthetic construct
  source 1..20: mol_type = other DNA
agaaaaccctgcagagaagt

SEQ ID NO: 247998 - DNA, 20 bp, synthetic construct
  source 1..20: mol_type = other DNA
cagaaaaccctgcagagaag

SEQ ID NO: 247999 - DNA, 20 bp, synthetic construct
  source 1..20: mol_type = other DNA
ccagaaaaccctgcagagaa

SEQ ID NO: 248000 - DNA, 20 bp, synthetic construct
  source 1..20: mol_type = other DNA
cccagaaaaccctgcagaga

SEQ ID NO: 248001 - DNA, 20 bp, synthetic construct
  source 1..20: mol_type = other DNA
ccccagaaaaccctgcagag

SEQ ID NO: 248002 - DNA, 20 bp, synthetic construct
  source 1..20: mol_type = other DNA
gccccagaaaaccctgcaga

SEQ ID NO: 248003 - DNA, 20 bp, synthetic construct
  source 1..20: mol_type = other DNA
tgccccagaaaaccctgcag

SEQ ID NO: 248004 - DNA, 20 bp, synthetic construct
  source 1..20: mol_type = other DNA
ctgccccagaaaaccctgca

SEQ ID NO: 248005 - DNA, 20 bp, synthetic construct
  source 1..20: mol_type = other DNA
cctgccccagaaaaccctgc

SEQ ID NO: 248006 - DNA, 20 bp, synthetic construct
  source 1..20: mol_type = other DNA
acctgccccagaaaaccctg

SEQ ID NO: 248007 - DNA, 20 bp, synthetic construct
  source 1..20: mol_type = other DNA
cacctgccccagaaaaccct

SEQ ID NO: 248008 - DNA, 20 bp, synthetic construct
  source 1..20: mol_type = other DNA
ccacctgccccagaaaaccc

SEQ ID NO: 248009 - DNA, 20 bp, synthetic construct
  source 1..20: mol_type = other DNA
accacctgccccagaaaacc

SEQ ID NO: 248010 - DNA, 20 bp, synthetic construct
  source 1..20: mol_type = other DNA
caccacctgccccagaaaac

SEQ ID NO: 248011 - DNA, 20 bp, synthetic construct
  source 1..20: mol_type = other DNA
ccaccacctgccccagaaaa

SEQ ID NO: 248012 - DNA, 20 bp, synthetic construct
  source 1..20: mol_type = other DNA
gccaccacctgccccagaaa

SEQ ID NO: 248013 - DNA, 20 bp, synthetic construct
  source 1..20: mol_type = other DNA
tgccaccacctgccccagaa

SEQ ID NO: 248014 - DNA, 20 bp, synthetic construct
  source 1..20: mol_type = other DNA
ctgccaccacctgccccaga

SEQ ID NO: 248015 - DNA, 20 bp, synthetic construct
  source 1..20: mol_type = other DNA
tctgccaccacctgccccag

SEQ ID NO: 248016 - DNA, 20 bp, synthetic construct
  source 1..20: mol_type = other DNA
gtctgccaccacctgcccca

SEQ ID NO: 248017 - DNA, 20 bp, synthetic construct
  source 1..20: mol_type = other DNA
ggtctgccaccacctgcccc

SEQ ID NO: 248018 - DNA, 20 bp, synthetic construct
  source 1..20: mol_type = other DNA
gggtctgccaccacctgccc

SEQ ID NO: 248019 - DNA, 20 bp, synthetic construct
  source 1..20: mol_type = other DNA
cgggtctgccaccacctgcc

SEQ ID NO: 248020 - DNA, 20 bp, synthetic construct
  source 1..20: mol_type = other DNA
acgggtctgccaccacctgc

SEQ ID NO: 248021 - DNA, 20 bp, synthetic construct
  source 1..20: mol_type = other DNA
cacgggtctgccaccacctg

SEQ ID NO: 248022 - DNA, 20 bp, synthetic construct
  source 1..20: mol_type = other DNA
gcacgggtctgccaccacct

SEQ ID NO: 248023 - DNA, 20 bp, synthetic construct
  source 1..20: mol_type = other DNA
ggcacgggtctgccaccacc

SEQ ID NO: 248024 - DNA, 20 bp, synthetic construct
  source 1..20: mol_type = other DNA
aggcacgggtctgccaccac

SEQ ID NO: 248025 - DNA, 20 bp, synthetic construct
  source 1..20: mol_type = other DNA
aaggcacgggtctgccacca

SEQ ID NO: 248026 - DNA, 20 bp, synthetic construct
  source 1..20: mol_type = other DNA
gaaggcacgggtctgccacc

SEQ ID NO: 248027 - DNA, 20 bp, synthetic construct
  source 1..20: mol_type = other DNA
agaaggcacgggtctgccac

SEQ ID NO: 248028 - DNA, 20 bp, synthetic construct
  source 1..20: mol_type = other DNA
aagaaggcacgggtctgcca

SEQ ID NO: 248029 - DNA, 20 bp, synthetic construct
  source 1..20: mol_type = other DNA
caagaaggcacgggtctgcc

SEQ ID NO: 248030 - DNA, 20 bp, synthetic construct
  source 1..20: mol_type = other DNA
tcaagaaggcacgggtctgc

SEQ ID NO: 248031 - DNA, 20 bp, synthetic construct
  source 1..20: mol_type = other DNA
gtcaagaaggcacgggtctg

SEQ ID NO: 248032 - DNA, 20 bp, synthetic construct
  source 1..20: mol_type = other DNA
tgtcaagaaggcacgggtct

SEQ ID NO: 248033 - DNA, 20 bp, synthetic construct
  source 1..20: mol_type = other DNA
gtgtcaagaaggcacgggtc

SEQ ID NO: 248034 - DNA, 20 bp, synthetic construct
  source 1..20: mol_type = other DNA
ggtgtcaagaaggcacgggt

SEQ ID NO: 248035 - DNA, 20 bp, synthetic construct
  source 1..20: mol_type = other DNA
aggtgtcaagaaggcacggg

SEQ ID NO: 248036 - DNA, 20 bp, synthetic construct
  source 1..20: mol_type = other DNA
caggtgtcaagaaggcacgg

SEQ ID NO: 248037 - DNA, 20 bp, synthetic construct
  source 1..20: mol_type = other DNA
tcaggtgtcaagaaggcacg

SEQ ID NO: 248038 - DNA, 20 bp, synthetic construct
  source 1..20: mol_type = other DNA
ctcaggtgtcaagaaggcac

SEQ ID NO: 248039 - DNA, 20 bp, synthetic construct
  source 1..20: mol_type = other DNA
cctcaggtgtcaagaaggca

SEQ ID NO: 248040 - DNA, 20 bp, synthetic construct
  source 1..20: mol_type = other DNA
acctcaggtgtcaagaaggc

SEQ ID NO: 248041 - DNA, 20 bp, synthetic construct
  source 1..20: mol_type = other DNA
gacctcaggtgtcaagaagg

SEQ ID NO: 248042 - DNA, 20 bp, synthetic construct
  source 1..20: mol_type = other DNA
tgacctcaggtgtcaagaag

SEQ ID NO: 248043 - DNA, 20 bp, synthetic construct
  source 1..20: mol_type = other DNA
ctgacctcaggtgtcaagaa

SEQ ID NO: 248044 - DNA, 20 bp, synthetic construct
  source 1..20: mol_type = other DNA
actgacctcaggtgtcaaga

SEQ ID NO: 248045 - DNA, 20 bp, synthetic construct
  source 1..20: mol_type = other DNA
gactgacctcaggtgtcaag

SEQ ID NO: 248046 - DNA, 20 bp, synthetic construct
  source 1..20: mol_type = other DNA
ggactgacctcaggtgtcaa

SEQ ID NO: 248047 - DNA, 20 bp, synthetic construct
  source 1..20: mol_type = other DNA
tggactgacctcaggtgtca

SEQ ID NO: 248048 - DNA, 20 bp, synthetic construct
  source 1..20: mol_type = other DNA
gtggactgacctcaggtgtc

SEQ ID NO: 248049 - DNA, 20 bp, synthetic construct
  source 1..20: mol_type = other DNA
ggtggactgacctcaggtgt

SEQ ID NO: 248050 - DNA, 20 bp, synthetic construct
  source 1..20: mol_type = other DNA
gggtggactgacctcaggtg

SEQ ID NO: 248051 - DNA, 20 bp, synthetic construct
  source 1..20: mol_type = other DNA
agggtggactgacctcaggt

SEQ ID NO: 248052 - DNA, 20 bp, synthetic construct
  source 1..20: mol_type = other DNA
gagggtggactgacctcagg

SEQ ID NO: 248053 - DNA, 20 bp, synthetic construct
  source 1..20: mol_type = other DNA
ggagggtggactgacctcag

SEQ ID NO: 248054 - DNA, 20 bp, synthetic construct
  source 1..20: mol_type = other DNA
aggagggtggactgacctca

SEQ ID NO: 248055 - DNA, 20 bp, synthetic construct
  source 1..20: mol_type = other DNA
caggagggtggactgacctc

SEQ ID NO: 248056 - DNA, 20 bp, synthetic construct
  source 1..20: mol_type = other DNA
gcaggagggtggactgacct

SEQ ID NO: 248057 - DNA, 20 bp, synthetic construct
  source 1..20: mol_type = other DNA
agcaggagggtggactgacc

SEQ ID NO: 248058 - DNA, 20 bp, synthetic construct
  source 1..20: mol_type = other DNA
gagcaggagggtggactgac

SEQ ID NO: 248059 - DNA, 20 bp, synthetic construct
  source 1..20: mol_type = other DNA
tgagcaggagggtggactga

SEQ ID NO: 248060 - DNA, 20 bp, synthetic construct
  source 1..20: mol_type = other DNA
ctgagcaggagggtggactg

SEQ ID NO: 248061 - DNA, 20 bp, synthetic construct
  source 1..20: mol_type = other DNA
tctgagcaggagggtggact

SEQ ID NO: 248062 - DNA, 20 bp, synthetic construct
  source 1..20: mol_type = other DNA
gtctgagcaggagggtggac

SEQ ID NO: 248063 - DNA, 20 bp, synthetic construct
  source 1..20: mol_type = other DNA
agtctgagcaggagggtgga

SEQ ID NO: 248064 - DNA, 20 bp, synthetic construct
  source 1..20: mol_type = other DNA
cagtctgagcaggagggtgg

SEQ ID NO: 248065 - DNA, 20 bp, synthetic construct
  source 1..20: mol_type = other DNA
gcagtctgagcaggagggtg

SEQ ID NO: 248066 - DNA, 20 bp, synthetic construct
  source 1..20: mol_type = other DNA
ggcagtctgagcaggagggt

SEQ ID NO: 248067 - DNA, 20 bp, synthetic construct
  source 1..20: mol_type = other DNA
gggcagtctgagcaggaggg

SEQ ID NO: 248068 - DNA, 20 bp, synthetic construct
  source 1..20: mol_type = other DNA
tgggcagtctgagcaggagg

SEQ ID NO: 248069 - DNA, 20 bp, synthetic construct
  source 1..20: mol_type = other DNA
ctgggcagtctgagcaggag

SEQ ID NO: 248070 - DNA, 20 bp, synthetic construct
  source 1..20: mol_type = other DNA
gctgggcagtctgagcagga

SEQ ID NO: 248071 - DNA, 20 bp, synthetic construct
  source 1..20: mol_type = other DNA
tgctgggcagtctgagcagg

SEQ ID NO: 248072 - DNA, 20 bp, synthetic construct
  source 1..20: mol_type = other DNA
gtgctgggcagtctgagcag

SEQ ID NO: 248073 - DNA, 20 bp, synthetic construct
  source 1..20: mol_type = other DNA
tgtgctgggcagtctgagca

SEQ ID NO: 248074 - DNA, 20 bp, synthetic construct
  source 1..20: mol_type = other DNA
ctgtgctgggcagtctgagc

SEQ ID NO: 248075 - DNA, 20 bp, synthetic construct
  source 1..20: mol_type = other DNA
cctgtgctgggcagtctgag

SEQ ID NO: 248076 - DNA, 20 bp, synthetic construct
  source 1..20: mol_type = other DNA
ccctgtgctgggcagtctga

SEQ ID NO: 248077 - DNA, 20 bp, synthetic construct
  source 1..20: mol_type = other DNA
accctgtgctgggcagtctg

SEQ ID NO: 248078 - DNA, 20 bp, synthetic construct
  source 1..20: mol_type = other DNA
gaccctgtgctgggcagtct

SEQ ID NO: 248079 - DNA, 20 bp, synthetic construct
  source 1..20: mol_type = other DNA
tgaccctgtgctgggcagtc

SEQ ID NO: 248080 - DNA, 20 bp, synthetic construct
  source 1..20: mol_type = other DNA
gtgaccctgtgctgggcagt

SEQ ID NO: 248081 - DNA, 20 bp, synthetic construct
  source 1..20: mol_type = other DNA
ggtgaccctgtgctgggcag

SEQ ID NO: 248082 - DNA, 20 bp, synthetic construct
  source 1..20: mol_type = other DNA
aggtgaccctgtgctgggca

SEQ ID NO: 248083 - DNA, 20 bp, synthetic construct
  source 1..20: mol_type = other DNA
gaggtgaccctgtgctgggc

SEQ ID NO: 248084 - DNA, 20 bp, synthetic construct
  source 1..20: mol_type = other DNA
ggaggtgaccctgtgctggg

SEQ ID NO: 248085 - DNA, 20 bp, synthetic construct
  source 1..20: mol_type = other DNA
gggaggtgaccctgtgctgg

SEQ ID NO: 248086 - DNA, 20 bp, synthetic construct
  source 1..20: mol_type = other DNA
tgggaggtgaccctgtgctg

SEQ ID NO: 248087 - DNA, 20 bp, synthetic construct
  source 1..20: mol_type = other DNA
ttgggaggtgaccctgtgct

SEQ ID NO: 248088 - DNA, 20 bp, synthetic construct
  source 1..20: mol_type = other DNA
cttgggaggtgaccctgtgc

SEQ ID NO: 248089 - DNA, 20 bp, synthetic construct
  source 1..20: mol_type = other DNA
ccttgggaggtgaccctgtg

SEQ ID NO: 248090 - DNA, 20 bp, synthetic construct
  source 1..20: mol_type = other DNA
cccttgggaggtgaccctgt

SEQ ID NO: 248091 - DNA, 20 bp, synthetic construct
  source 1..20: mol_type = other DNA
ccccttgggaggtgaccctg

SEQ ID NO: 248092 - DNA, 20 bp, synthetic construct
  source 1..20: mol_type = other DNA
accccttgggaggtgaccct

SEQ ID NO: 248093 - DNA, 20 bp, synthetic construct
  source 1..20: mol_type = other DNA
caccccttgggaggtgaccc

SEQ ID NO: 248094 - DNA, 20 bp, synthetic construct
  source 1..20: mol_type = other DNA
ccaccccttgggaggtgacc

SEQ ID NO: 248095 - DNA, 20 bp, synthetic construct
  source 1..20: mol_type = other DNA
tccaccccttgggaggtgac

SEQ ID NO: 248096 - DNA, 20 bp, synthetic construct
  source 1..20: mol_type = other DNA
gtccaccccttgggaggtga

SEQ ID NO: 248097 - DNA, 20 bp, synthetic construct
  source 1..20: mol_type = other DNA
ggtccaccccttgggaggtg

SEQ ID NO: 248098 - DNA, 20 bp, synthetic construct
  source 1..20: mol_type = other DNA
gggtccaccccttgggaggt

SEQ ID NO: 248099 - DNA, 20 bp, synthetic construct
  source 1..20: mol_type = other DNA
ggggtccaccccttgggagg

SEQ ID NO: 248100 - DNA, 20 bp, synthetic construct
  source 1..20: mol_type = other DNA
tggggtccaccccttgggag

SEQ ID NO: 248101 - DNA, 20 bp, synthetic construct
  source 1..20: mol_type = other DNA
ttggggtccaccccttggga

SEQ ID NO: 248102 - DNA, 20 bp, synthetic construct
  source 1..20: mol_type = other DNA
cttggggtccaccccttggg

SEQ ID NO: 248103 - DNA, 20 bp, synthetic construct
  source 1..20: mol_type = other DNA
tcttggggtccaccccttgg

SEQ ID NO: 248104 - DNA, 20 bp, synthetic construct
  source 1..20: mol_type = other DNA
atcttggggtccaccccttg

SEQ ID NO: 248105 - DNA, 20 bp, synthetic construct
  source 1..20: mol_type = other DNA
gatcttggggtccacccctt

SEQ ID NO: 248106 - DNA, 20 bp, synthetic construct
  source 1..20: mol_type = other DNA
tgatcttggggtccacccct

SEQ ID NO: 248107 - DNA, 20 bp, synthetic construct
  source 1..20: mol_type = other DNA
gtgatcttggggtccacccc

SEQ ID NO: 248108 - DNA, 20 bp, synthetic construct
  source 1..20: mol_type = other DNA
ggtgatcttggggtccaccc

SEQ ID NO: 248109 - DNA, 20 bp, synthetic construct
  source 1..20: mol_type = other DNA
aggtgatcttggggtccacc

SEQ ID NO: 248110 - DNA, 20 bp, synthetic construct
  source 1..20: mol_type = other DNA
caggtgatcttggggtccac

SEQ ID NO: 248111 - DNA, 20 bp, synthetic construct
  source 1..20: mol_type = other DNA
tcaggtgatcttggggtcca

SEQ ID NO: 248112 - DNA, 20 bp, synthetic construct
  source 1..20: mol_type = other DNA
ctcaggtgatcttggggtcc

SEQ ID NO: 248113 - DNA, 20 bp, synthetic construct
  source 1..20: mol_type = other DNA
gctcaggtgatcttggggtc

SEQ ID NO: 248114 - DNA, 20 bp, synthetic construct
  source 1..20: mol_type = other DNA
cgctcaggtgatcttggggt

SEQ ID NO: 248115 - DNA, 20 bp, synthetic construct
  source 1..20: mol_type = other DNA
gcgctcaggtgatcttgggg

SEQ ID NO: 248116 - DNA, 20 bp, synthetic construct
  source 1..20: mol_type = other DNA
tgcgctcaggtgatcttggg

SEQ ID NO: 248117 - DNA, 20 bp, synthetic construct
  source 1..20: mol_type = other DNA
gtgcgctcaggtgatcttgg

SEQ ID NO: 248118 - DNA, 20 bp, synthetic construct
  source 1..20: mol_type = other DNA
tgtgcgctcaggtgatcttg

SEQ ID NO: 248119 - DNA, 20 bp, synthetic construct
  source 1..20: mol_type = other DNA
ctgtgcgctcaggtgatctt

SEQ ID NO: 248120 - DNA, 20 bp, synthetic construct
  source 1..20: mol_type = other DNA
tctgtgcgctcaggtgatct

SEQ ID NO: 248121 - DNA, 20 bp, synthetic construct
  source 1..20: mol_type = other DNA
ctctgtgcgctcaggtgatc

SEQ ID NO: 248122 - DNA, 20 bp, synthetic construct
  source 1..20: mol_type = other DNA
cctctgtgcgctcaggtgat

SEQ ID NO: 248123 - DNA, 20 bp, synthetic construct
  source 1..20: mol_type = other DNA
ccctctgtgcgctcaggtga

SEQ ID NO: 248124 - DNA, 20 bp, synthetic construct
  source 1..20: mol_type = other DNA
accctctgtgcgctcaggtg

SEQ ID NO: 248125 - DNA, 20 bp, synthetic construct
  source 1..20: mol_type = other DNA
caccctctgtgcgctcaggt

SEQ ID NO: 248126 - DNA, 20 bp, synthetic construct
  source 1..20: mol_type = other DNA
gcaccctctgtgcgctcagg

SEQ ID NO: 248127 - DNA, 20 bp, synthetic construct
  source 1..20: mol_type = other DNA
tgcaccctctgtgcgctcag

SEQ ID NO: 248128 - DNA, 20 bp, synthetic construct
  source 1..20: mol_type = other DNA
ctgcaccctctgtgcgctca

SEQ ID NO: 248129 - DNA, 20 bp, synthetic construct
  source 1..20: mol_type = other DNA
tctgcaccctctgtgcgctc

SEQ ID NO: 248130 - DNA, 20 bp, synthetic construct
  source 1..20: mol_type = other DNA
atctgcaccctctgtgcgct

SEQ ID NO: 248131 - DNA, 20 bp, synthetic construct
  source 1..20: mol_type = other DNA
catctgcaccctctgtgcgc

SEQ ID NO: 248132 - DNA, 20 bp, synthetic construct
  source 1..20: mol_type = other DNA
tcatctgcaccctctgtgcg

SEQ ID NO: 248133 - DNA, 20 bp, synthetic construct
  source 1..20: mol_type = other DNA
gtcatctgcaccctctgtgc

SEQ ID NO: 248134 - DNA, 20 bp, synthetic construct
  source 1..20: mol_type = other DNA
agtcatctgcaccctctgtg

SEQ ID NO: 248135 - DNA, 20 bp, synthetic construct
  source 1..20: mol_type = other DNA
cagtcatctgcaccctctgt

SEQ ID NO: 248136 - DNA, 20 bp, synthetic construct
  source 1..20: mol_type = other DNA
ccagtcatctgcaccctctg

SEQ ID NO: 248137 - DNA, 20 bp, synthetic construct
  source 1..20: mol_type = other DNA
tccagtcatctgcaccctct

SEQ ID NO: 248138 - DNA, 20 bp, synthetic construct
  source 1..20: mol_type = other DNA
gtccagtcatctgcaccctc

SEQ ID NO: 248139 - DNA, 20 bp, synthetic construct
  source 1..20: mol_type = other DNA
ggtccagtcatctgcaccct

SEQ ID NO: 248140 - DNA, 20 bp, synthetic construct
  source 1..20: mol_type = other DNA
tggtccagtcatctgcaccc

SEQ ID NO: 248141 - DNA, 20 bp, synthetic construct
  source 1..20: mol_type = other DNA
gtggtccagtcatctgcacc

SEQ ID NO: 248142 - DNA, 20 bp, synthetic construct
  source 1..20: mol_type = other DNA
tgtggtccagtcatctgcac

SEQ ID NO: 248143 - DNA, 20 bp, synthetic construct
  source 1..20: mol_type = other DNA
gtgtggtccagtcatctgca

SEQ ID NO: 248144 - DNA, 20 bp, synthetic construct
  source 1..20: mol_type = other DNA
ggtgtggtccagtcatctgc

SEQ ID NO: 248145 - DNA, 20 bp, synthetic construct
  source 1..20: mol_type = other DNA
aggtgtggtccagtcatctg

SEQ ID NO: 248146 - DNA, 20 bp, synthetic construct
  source 1..20: mol_type = other DNA
aaggtgtggtccagtcatct

SEQ ID NO: 248147 - DNA, 20 bp, synthetic construct
  source 1..20: mol_type = other DNA
aaaggtgtggtccagtcatc

SEQ ID NO: 248148 - DNA, 20 bp, synthetic construct
  source 1..20: mol_type = other DNA
aaaaggtgtggtccagtcat

SEQ ID NO: 248149 - DNA, 20 bp, synthetic construct
  source 1..20: mol_type = other DNA
caaaaggtgtggtccagtca

SEQ ID NO: 248150 - DNA, 20 bp, synthetic construct
  source 1..20: mol_type = other DNA
ccaaaaggtgtggtccagtc

SEQ ID NO: 248151 - DNA, 20 bp, synthetic construct
  source 1..20: mol_type = other DNA
accaaaaggtgtggtccagt

SEQ ID NO: 248152 - DNA, 20 bp, synthetic construct
  source 1..20: mol_type = other DNA
caccaaaaggtgtggtccag

SEQ ID NO: 248153 - DNA, 20 bp, synthetic construct
  source 1..20: mol_type = other DNA
tcaccaaaaggtgtggtcca

SEQ ID NO: 248154 - DNA, 20 bp, synthetic construct
  source 1..20: mol_type = other DNA
atcaccaaaaggtgtggtcc

SEQ ID NO: 248155 - DNA, 20 bp, synthetic construct
  source 1..20: mol_type = other DNA
gatcaccaaaaggtgtggtc

SEQ ID NO: 248156 - DNA, 20 bp, synthetic construct
  source 1..20: mol_type = other DNA
agatcaccaaaaggtgtggt

SEQ ID NO: 248157 - DNA, 20 bp, synthetic construct
  source 1..20: mol_type = other DNA
aagatcaccaaaaggtgtgg

SEQ ID NO: 248158 - DNA, 20 bp, synthetic construct
  source 1..20: mol_type = other DNA
taagatcaccaaaaggtgtg

SEQ ID NO: 248159 - DNA, 20 bp, synthetic construct
  source 1..20: mol_type = other DNA
ttaagatcaccaaaaggtgt

SEQ ID NO: 248160 - DNA, 20 bp, synthetic construct
  source 1..20: mol_type = other DNA
attaagatcaccaaaaggtg

SEQ ID NO: 248161 - DNA, 20 bp, synthetic construct
  source 1..20: mol_type = other DNA
cattaagatcaccaaaaggt

SEQ ID NO: 248162 - DNA, 20 bp, synthetic construct
  source 1..20: mol_type = other DNA
tcattaagatcaccaaaagg

SEQ ID NO: 248163 - DNA, 20 bp, synthetic construct
  source 1..20: mol_type = other DNA
ctcattaagatcaccaaaag

SEQ ID NO: 248164 - DNA, 20 bp, synthetic construct
  source 1..20: mol_type = other DNA
cctcattaagatcaccaaaa

SEQ ID NO: 248165 - DNA, 20 bp, synthetic construct
  source 1..20: mol_type = other DNA
acctcattaagatcaccaaa

SEQ ID NO: 248166 - DNA, 20 bp, synthetic construct
  source 1..20: mol_type = other DNA
cacctcattaagatcaccaa

SEQ ID NO: 248167 - DNA, 20 bp, synthetic construct
  source 1..20: mol_type = other DNA
ccacctcattaagatcacca

SEQ ID NO: 248168 - DNA, 20 bp, synthetic construct
  source 1..20: mol_type = other DNA
accacctcattaagatcacc

SEQ ID NO: 248169 - DNA, 20 bp, synthetic construct
  source 1..20: mol_type = other DNA
gaccacctcattaagatcac

SEQ ID NO: 248170 - DNA, 20 bp, synthetic construct
  source 1..20: mol_type = other DNA
ggaccacctcattaagatca

SEQ ID NO: 248171 - DNA, 20 bp, synthetic construct
  source 1..20: mol_type = other DNA
gggaccacctcattaagatc

SEQ ID NO: 248172 - DNA, 20 bp, synthetic construct
  source 1..20: mol_type = other DNA
tgggaccacctcattaagat

SEQ ID NO: 248173 - DNA, 20 bp, synthetic construct
  source 1..20: mol_type = other DNA
ctgggaccacctcattaaga

SEQ ID NO: 248174 - DNA, 20 bp, synthetic construct
  source 1..20: mol_type = other DNA
tctgggaccacctcattaag

SEQ ID NO: 248175 - DNA, 20 bp, synthetic construct
  source 1..20: mol_type = other DNA
ctctgggaccacctcattaa

SEQ ID NO: 248176 - DNA, 20 bp, synthetic construct
  source 1..20: mol_type = other DNA
cctctgggaccacctcatta

SEQ ID NO: 248177 - DNA, 20 bp, synthetic construct
  source 1..20: mol_type = other DNA
tcctctgggaccacctcatt

SEQ ID NO: 248178 - DNA, 20 bp, synthetic construct
  source 1..20: mol_type = other DNA
ctcctctgggaccacctcat

SEQ ID NO: 248179 - DNA, 20 bp, synthetic construct
  source 1..20: mol_type = other DNA
gctcctctgggaccacctca

SEQ ID NO: 248180 - DNA, 20 bp, synthetic construct
  source 1..20: mol_type = other DNA
agctcctctgggaccacctc

SEQ ID NO: 248181 - DNA, 20 bp, synthetic construct
  source 1..20: mol_type = other DNA
gagctcctctgggaccacct

SEQ ID NO: 248182 - DNA, 20 bp, synthetic construct
  source 1..20: mol_type = other DNA
tgagctcctctgggaccacc

SEQ ID NO: 248183 - DNA, 20 bp, synthetic construct
  source 1..20: mol_type = other DNA
ctgagctcctctgggaccac

SEQ ID NO: 248184 - DNA, 20 bp, synthetic construct
  source 1..20: mol_type = other DNA
tctgagctcctctgggacca

SEQ ID NO: 248185 - DNA, 20 bp, synthetic construct
  source 1..20: mol_type = other DNA
gtctgagctcctctgggacc

SEQ ID NO: 248186 - DNA, 20 bp, synthetic construct
  source 1..20: mol_type = other DNA
tgtctgagctcctctgggac

SEQ ID NO: 248187 - DNA, 20 bp, synthetic construct
  source 1..20: mol_type = other DNA
atgtctgagctcctctggga

SEQ ID NO: 248188 - DNA, 20 bp, synthetic construct
  source 1..20: mol_type = other DNA
catgtctgagctcctctggg

SEQ ID NO: 248189 - DNA, 20 bp, synthetic construct
  source 1..20: mol_type = other DNA
gcatgtctgagctcctctgg

SEQ ID NO: 248190 - DNA, 20 bp, synthetic construct
  source 1..20: mol_type = other DNA
tgcatgtctgagctcctctg

SEQ ID NO: 248191 - DNA, 20 bp, synthetic construct
  source 1..20: mol_type = other DNA
ttgcatgtctgagctcctct

SEQ ID NO: 248192 - DNA, 20 bp, synthetic construct
  source 1..20: mol_type = other DNA
attgcatgtctgagctcctc

SEQ ID NO: 248193 - DNA, 20 bp, synthetic construct
  source 1..20: mol_type = other DNA
gattgcatgtctgagctcct

SEQ ID NO: 248194 - DNA, 20 bp, synthetic construct
  source 1..20: mol_type = other DNA
agattgcatgtctgagctcc

SEQ ID NO: 248195 - DNA, 20 bp, synthetic construct
  source 1..20: mol_type = other DNA
tagattgcatgtctgagctc

SEQ ID NO: 248196 - DNA, 20 bp, synthetic construct
  source 1..20: mol_type = other DNA
ctagattgcatgtctgagct

SEQ ID NO: 248197 - DNA, 20 bp, synthetic construct
  source 1..20: mol_type = other DNA
gctagattgcatgtctgagc

SEQ ID NO: 248198 - DNA, 20 bp, synthetic construct
  source 1..20: mol_type = other DNA
tgctagattgcatgtctgag

SEQ ID NO: 248199 - DNA, 20 bp, synthetic construct
  source 1..20: mol_type = other DNA
atgctagattgcatgtctga

SEQ ID NO: 248200 - DNA, 20 bp, synthetic construct
  source 1..20: mol_type = other DNA
gatgctagattgcatgtctg

SEQ ID NO: 248201 - DNA, 20 bp, synthetic construct
  source 1..20: mol_type = other DNA
ggatgctagattgcatgtct

SEQ ID NO: 248202 - DNA, 20 bp, synthetic construct
  source 1..20: mol_type = other DNA
tggatgctagattgcatgtc

SEQ ID NO: 248203 - DNA, 20 bp, synthetic construct
  source 1..20: mol_type = other DNA
ctggatgctagattgcatgt

SEQ ID NO: 248204 - DNA, 20 bp, synthetic construct
  source 1..20: mol_type = other DNA
actggatgctagattgcatg

SEQ ID NO: 248205 - DNA, 20 bp, synthetic construct
  source 1..20: mol_type = other DNA
aactggatgctagattgcat

SEQ ID NO: 248206 - DNA, 20 bp, synthetic construct
  source 1..20: mol_type = other DNA
gaactggatgctagattgca

SEQ ID NO: 248207 - DNA, 20 bp, synthetic construct
  source 1..20: mol_type = other DNA
agaactggatgctagattgc

SEQ ID NO: 248208 - DNA, 20 bp, synthetic construct
  source 1..20: mol_type = other DNA
cagaactggatgctagattg

SEQ ID NO: 248209 - DNA, 20 bp, synthetic construct
  source 1..20: mol_type = other DNA
ccagaactggatgctagatt

SEQ ID NO: 248210 - DNA, 20 bp, synthetic construct
  source 1..20: mol_type = other DNA
cccagaactggatgctagat

SEQ ID NO: 248211 - DNA, 20 bp, synthetic construct
  source 1..20: mol_type = other DNA
tcccagaactggatgctaga

SEQ ID NO: 248212 - DNA, 20 bp, synthetic construct
  source 1..20: mol_type = other DNA
gtcccagaactggatgctag

SEQ ID NO: 248213 - DNA, 20 bp, synthetic construct
  source 1..20: mol_type = other DNA
agtcccagaactggatgcta

SEQ ID NO: 248214 - DNA, 20 bp, synthetic construct
  source 1..20: mol_type = other DNA
gagtcccagaactggatgct

SEQ ID NO: 248215 - DNA, 20 bp, synthetic construct
  source 1..20: mol_type = other DNA
agagtcccagaactggatgc

SEQ ID NO: 248216 - DNA, 20 bp, synthetic construct
  source 1..20: mol_type = other DNA
cagagtcccagaactggatg

SEQ ID NO: 248217 - DNA, 20 bp, synthetic construct
  source 1..20: mol_type = other DNA
acagagtcccagaactggat

SEQ ID NO: 248218 - DNA, 20 bp, synthetic construct
  source 1..20: mol_type = other DNA
gacagagtcccagaactgga

SEQ ID NO: 248219 - DNA, 20 bp, synthetic construct
  source 1..20: mol_type = other DNA
agacagagtcccagaactgg

SEQ ID NO: 248220 - DNA, 20 bp, synthetic construct
  source 1..20: mol_type = other DNA
gagacagagtcccagaactg

SEQ ID NO: 248221 - DNA, 20 bp, synthetic construct
  source 1..20: mol_type = other DNA
ggagacagagtcccagaact

SEQ ID NO: 248222 - DNA, 20 bp, synthetic construct
  source 1..20: mol_type = other DNA
aggagacagagtcccagaac

SEQ ID NO: 248223 - DNA, 20 bp, synthetic construct
  source 1..20: mol_type = other DNA
aaggagacagagtcccagaa

SEQ ID NO: 248224 - DNA, 20 bp, synthetic construct
  source 1..20: mol_type = other DNA
aaaggagacagagtcccaga

SEQ ID NO: 248225 - DNA, 20 bp, synthetic construct
  source 1..20: mol_type = other DNA
aaaaggagacagagtcccag

SEQ ID NO: 248226 - DNA, 20 bp, synthetic construct
  source 1..20: mol_type = other DNA
gaaaaggagacagagtccca

SEQ ID NO: 248227 - DNA, 20 bp, synthetic construct
  source 1..20: mol_type = other DNA
tgaaaaggagacagagtccc

SEQ ID NO: 248228 - DNA, 20 bp, synthetic construct
  source 1..20: mol_type = other DNA
ttgaaaaggagacagagtcc

SEQ ID NO: 248229 - DNA, 20 bp, synthetic construct
  source 1..20: mol_type = other DNA
tttgaaaaggagacagagtc

SEQ ID NO: 248230 - DNA, 20 bp, synthetic construct
  source 1..20: mol_type = other DNA
gtttgaaaaggagacagagt

SEQ ID NO: 248231 - DNA, 20 bp, synthetic construct
  source 1..20: mol_type = other DNA
cgtttgaaaaggagacagag

SEQ ID NO: 248232 - DNA, 20 bp, synthetic construct
  source 1..20: mol_type = other DNA
acgtttgaaaaggagacaga

SEQ ID NO: 248233 - DNA, 20 bp, synthetic construct
  source 1..20: mol_type = other DNA
tacgtttgaaaaggagacag

SEQ ID NO: 248234 - DNA, 20 bp, synthetic construct
  source 1..20: mol_type = other DNA
atacgtttgaaaaggagaca

SEQ ID NO: 248235 - DNA, 20 bp, synthetic construct
  source 1..20: mol_type = other DNA
aatacgtttgaaaaggagac

SEQ ID NO: 248236 - DNA, 20 bp, synthetic construct
  source 1..20: mol_type = other DNA
gaatacgtttgaaaaggaga

SEQ ID NO: 248237 - DNA, 20 bp, synthetic construct
  source 1..20: mol_type = other DNA
tgaatacgtttgaaaaggag

SEQ ID NO: 248238 - DNA, 20 bp, synthetic construct
  source 1..20: mol_type = other DNA
atgaatacgtttgaaaagga

SEQ ID NO: 248239 - DNA, 20 bp, synthetic construct
  source 1..20: mol_type = other DNA
catgaatacgtttgaaaagg

SEQ ID NO: 248240 - DNA, 20 bp, synthetic construct
  source 1..20: mol_type = other DNA
acatgaatacgtttgaaaag

SEQ ID NO: 248241 - DNA, 20 bp, synthetic construct
  source 1..20: mol_type = other DNA
tacatgaatacgtttgaaaa

SEQ ID NO: 248242 - DNA, 20 bp, synthetic construct
  source 1..20: mol_type = other DNA
ctacatgaatacgtttgaaa

SEQ ID NO: 248243 - DNA, 20 bp, synthetic construct
  source 1..20: mol_type = other DNA
tctacatgaatacgtttgaa

SEQ ID NO: 248244 - DNA, 20 bp, synthetic construct
  source 1..20: mol_type = other DNA
ttctacatgaatacgtttga

SEQ ID NO: 248245 - DNA, 20 bp, synthetic construct
  source 1..20: mol_type = other DNA
gttctacatgaatacgtttg

SEQ ID NO: 248246 - DNA, 20 bp, synthetic construct
  source 1..20: mol_type = other DNA
tgttctacatgaatacgttt

SEQ ID NO: 248247 - DNA, 20 bp, synthetic construct
  source 1..20: mol_type = other DNA
ctgttctacatgaatacgtt

SEQ ID NO: 248248 - DNA, 20 bp, synthetic construct
  source 1..20: mol_type = other DNA
cctgttctacatgaatacgt

SEQ ID NO: 248249 - DNA, 20 bp, synthetic construct
  source 1..20: mol_type = other DNA
gcctgttctacatgaatacg

SEQ ID NO: 248250 - DNA, 20 bp, synthetic construct
  source 1..20: mol_type = other DNA
tgcctgttctacatgaatac

SEQ ID NO: 248251 - DNA, 20 bp, synthetic construct
  source 1..20: mol_type = other DNA
atgcctgttctacatgaata

SEQ ID NO: 248252 - DNA, 20 bp, synthetic construct
  source 1..20: mol_type = other DNA
catgcctgttctacatgaat

SEQ ID NO: 248253 - DNA, 20 bp, synthetic construct
  source 1..20: mol_type = other DNA
tcatgcctgttctacatgaa

SEQ ID NO: 248254 - DNA, 20 bp, synthetic construct
  source 1..20: mol_type = other DNA
gtcatgcctgttctacatga

SEQ ID NO: 248255 - DNA, 20 bp, synthetic construct
  source 1..20: mol_type = other DNA
cgtcatgcctgttctacatg

SEQ ID NO: 248256 - DNA, 20 bp, synthetic construct
  source 1..20: mol_type = other DNA
tcgtcatgcctgttctacat

SEQ ID NO: 248257 - DNA, 20 bp, synthetic construct
  source 1..20: mol_type = other DNA
ctcgtcatgcctgttctaca

SEQ ID NO: 248258 - DNA, 20 bp, synthetic construct
  source 1..20: mol_type = other DNA
tctcgtcatgcctgttctac

SEQ ID NO: 248259 - DNA, 20 bp, synthetic construct
  source 1..20: mol_type = other DNA
ttctcgtcatgcctgttcta

SEQ ID NO: 248260 - DNA, 20 bp, synthetic construct
  source 1..20: mol_type = other DNA
attctcgtcatgcctgttct

SEQ ID NO: 248261 - DNA, 20 bp, synthetic construct
  source 1..20: mol_type = other DNA
cattctcgtcatgcctgttc

SEQ ID NO: 248262 - DNA, 20 bp, synthetic construct
  source 1..20: mol_type = other DNA
gcattctcgtcatgcctgtt

SEQ ID NO: 248263 - DNA, 20 bp, synthetic construct
  source 1..20: mol_type = other DNA
ggcattctcgtcatgcctgt

SEQ ID NO: 248264 - DNA, 20 bp, synthetic construct
  source 1..20: mol_type = other DNA
aggcattctcgtcatgcctg

SEQ ID NO: 248265 - DNA, 20 bp, synthetic construct
  source 1..20: mol_type = other DNA
aaggcattctcgtcatgcct

SEQ ID NO: 248266 - DNA, 20 bp, synthetic construct
  source 1..20: mol_type = other DNA
caaggcattctcgtcatgcc

SEQ ID NO: 248267 - DNA, 20 bp, synthetic construct
  source 1..20: mol_type = other DNA
acaaggcattctcgtcatgc

SEQ ID NO: 248268 - DNA, 20 bp, synthetic construct
  source 1..20: mol_type = other DNA
gacaaggcattctcgtcatg

SEQ ID NO: 248269 - DNA, 20 bp, synthetic construct
  source 1..20: mol_type = other DNA
tgacaaggcattctcgtcat

SEQ ID NO: 248270 - DNA, 20 bp, synthetic construct
  source 1..20: mol_type = other DNA
ttgacaaggcattctcgtca

SEQ ID NO: 248271 - DNA, 20 bp, synthetic construct
  source 1..20: mol_type = other DNA
gttgacaaggcattctcgtc

SEQ ID NO: 248272 - DNA, 20 bp, synthetic construct
  source 1..20: mol_type = other DNA
tgttgacaaggcattctcgt

SEQ ID NO: 248273 - DNA, 20 bp, synthetic construct
  source 1..20: mol_type = other DNA
atgttgacaaggcattctcg

SEQ ID NO: 248274 - DNA, 20 bp, synthetic construct
  source 1..20: mol_type = other DNA
catgttgacaaggcattctc

SEQ ID NO: 248275 - DNA, 20 bp, synthetic construct
  source 1..20: mol_type = other DNA
ccatgttgacaaggcattct

SEQ ID NO: 248276 - DNA, 20 bp, synthetic construct
  source 1..20: mol_type = other DNA
cccatgttgacaaggcattc

SEQ ID NO: 248277 - DNA, 20 bp, synthetic construct
  source 1..20: mol_type = other DNA
acccatgttgacaaggcatt

SEQ ID NO: 248278 - DNA, 20 bp, synthetic construct
  source 1..20: mol_type = other DNA
cacccatgttgacaaggcat

SEQ ID NO: 248279 - DNA, 20 bp, synthetic construct
  source 1..20: mol_type = other DNA
tcacccatgttgacaaggca

SEQ ID NO: 248280 - DNA, 20 bp, synthetic construct
  source 1..20: mol_type = other DNA
atcacccatgttgacaaggc

SEQ ID NO: 248281 - DNA, 20 bp, synthetic construct
  source 1..20: mol_type = other DNA
catcacccatgttgacaagg

SEQ ID NO: 248282 - DNA, 20 bp, synthetic construct
  source 1..20: mol_type = other DNA
ccatcacccatgttgacaag

SEQ ID NO: 248283 - DNA, 20 bp, synthetic construct
  source 1..20: mol_type = other DNA
cccatcacccatgttgacaa

SEQ ID NO: 248284 - DNA, 20 bp, synthetic construct
  source 1..20: mol_type = other DNA
ccccatcacccatgttgaca

SEQ ID NO: 248285 - DNA, 20 bp, synthetic construct
  source 1..20: mol_type = other DNA
tccccatcacccatgttgac

SEQ ID NO: 248286 - DNA, 20 bp, synthetic construct
  source 1..20: mol_type = other DNA
ttccccatcacccatgttga

SEQ ID NO: 248287 - DNA, 20 bp, synthetic construct
  source 1..20: mol_type = other DNA
attccccatcacccatgttg

SEQ ID NO: 248288 - DNA, 20 bp, synthetic construct
  source 1..20: mol_type = other DNA
gattccccatcacccatgtt

SEQ ID NO: 248289 - DNA, 20 bp, synthetic construct
  source 1..20: mol_type = other DNA
tgattccccatcacccatgt

SEQ ID NO: 248290 - DNA, 20 bp, synthetic construct
  source 1..20: mol_type = other DNA
ttgattccccatcacccatg

SEQ ID NO: 248291 - DNA, 20 bp, synthetic construct
  source 1..20: mol_type = other DNA
attgattccccatcacccat

SEQ ID NO: 248292 - DNA, 20 bp, synthetic construct
  source 1..20: mol_type = other DNA
gattgattccccatcaccca

SEQ ID NO: 248293 - DNA, 20 bp, synthetic construct
  source 1..20: mol_type = other DNA
tgattgattccccatcaccc

SEQ ID NO: 248294 - DNA, 20 bp, synthetic construct
  source 1..20: mol_type = other DNA
ctgattgattccccatcacc

SEQ ID NO: 248295 - DNA, 20 bp, synthetic construct
  source 1..20: mol_type = other DNA
tctgattgattccccatcac

SEQ ID NO: 248296 - DNA, 20 bp, synthetic construct
  source 1..20: mol_type = other DNA
gtctgattgattccccatca

SEQ ID NO: 248297 - DNA, 20 bp, synthetic construct
  source 1..20: mol_type = other DNA
tgtctgattgattccccatc

SEQ ID NO: 248298 - DNA, 20 bp, synthetic construct
  source 1..20: mol_type = other DNA
ctgtctgattgattccccat

SEQ ID NO: 248299 - DNA, 20 bp, synthetic construct
  source 1..20: mol_type = other DNA
cctgtctgattgattcccca

SEQ ID NO: 248300 - DNA, 20 bp, synthetic construct
  source 1..20: mol_type = other DNA
ccctgtctgattgattcccc

SEQ ID NO: 248301 - DNA, 20 bp, synthetic construct
  source 1..20: mol_type = other DNA
gccctgtctgattgattccc

SEQ ID NO: 248302 - DNA, 20 bp, synthetic construct
  source 1..20: mol_type = other DNA
cgccctgtctgattgattcc

SEQ ID NO: 248303 - DNA, 20 bp, synthetic construct
  source 1..20: mol_type = other DNA
gcgccctgtctgattgattc

SEQ ID NO: 248304 - DNA, 20 bp, synthetic construct
  source 1..20: mol_type = other DNA
ggcgccctgtctgattgatt

SEQ ID NO: 248305 - DNA, 20 bp, synthetic construct
  source 1..20: mol_type = other DNA
cggcgccctgtctgattgat

SEQ ID NO: 248306 - DNA, 20 bp, synthetic construct
  source 1..20: mol_type = other DNA
ccggcgccctgtctgattga

SEQ ID NO: 248307 - DNA, 20 bp, synthetic construct
  source 1..20: mol_type = other DNA
cccggcgccctgtctgattg

SEQ ID NO: 248308 - DNA, 20 bp, synthetic construct
  source 1..20: mol_type = other DNA
gcccggcgccctgtctgatt

SEQ ID NO: 248309 - DNA, 20 bp, synthetic construct
  source 1..20: mol_type = other DNA
agcccggcgccctgtctgat

SEQ ID NO: 248310 - DNA, 20 bp, synthetic construct
  source 1..20: mol_type = other DNA
gagcccggcgccctgtctga

SEQ ID NO: 248311 - DNA, 20 bp, synthetic construct
  source 1..20: mol_type = other DNA
tgagcccggcgccctgtctg

SEQ ID NO: 248312 - DNA, 20 bp, synthetic construct
  source 1..20: mol_type = other DNA
ttgagcccggcgccctgtct

SEQ ID NO: 248313 - DNA, 20 bp, synthetic construct
  source 1..20: mol_type = other DNA
cttgagcccggcgccctgtc

SEQ ID NO: 248314 - DNA, 20 bp, synthetic construct
  source 1..20: mol_type = other DNA
ccttgagcccggcgccctgt

SEQ ID NO: 248315 - DNA, 20 bp, synthetic construct
  source 1..20: mol_type = other DNA
gccttgagcccggcgccctg

SEQ ID NO: 248316 - DNA, 20 bp, synthetic construct
  source 1..20: mol_type = other DNA
agccttgagcccggcgccct

SEQ ID NO: 248317 - DNA, 20 bp, synthetic construct
  source 1..20: mol_type = other DNA
cagccttgagcccggcgccc

SEQ ID NO: 248318 - DNA, 20 bp, synthetic construct
  source 1..20: mol_type = other DNA
gcagccttgagcccggcgcc

SEQ ID NO: 248319 - DNA, 20 bp, synthetic construct
  source 1..20: mol_type = other DNA
tgcagccttgagcccggcgc

SEQ ID NO: 248320 - DNA, 20 bp, synthetic construct
  source 1..20: mol_type = other DNA
ctgcagccttgagcccggcg

SEQ ID NO: 248321 - DNA, 20 bp, synthetic construct
  source 1..20: mol_type = other DNA
actgcagccttgagcccggc

SEQ ID NO: 248322 - DNA, 20 bp, synthetic construct
  source 1..20: mol_type = other DNA
gactgcagccttgagcccgg

SEQ ID NO: 248323 - DNA, 20 bp, synthetic construct
  source 1..20: mol_type = other DNA
tgactgcagccttgagcccg

SEQ ID NO: 248324 - DNA, 20 bp, synthetic construct
  source 1..20: mol_type = other DNA
gtgactgcagccttgagccc

SEQ ID NO: 248325 - DNA, 20 bp, synthetic construct
  source 1..20: mol_type = other DNA
ggtgactgcagccttgagcc

SEQ ID NO: 248326 - DNA, 20 bp, synthetic construct
  source 1..20: mol_type = other DNA
gggtgactgcagccttgagc

SEQ ID NO: 248327 - DNA, 20 bp, synthetic construct
  source 1..20: mol_type = other DNA
tgggtgactgcagccttgag

SEQ ID NO: 248328 - DNA, 20 bp, synthetic construct
  source 1..20: mol_type = other DNA
ttgggtgactgcagccttga

SEQ ID NO: 248329 - DNA, 20 bp, synthetic construct
  source 1..20: mol_type = other DNA
cttgggtgactgcagccttg

SEQ ID NO: 248330 - DNA, 20 bp, synthetic construct
  source 1..20: mol_type = other DNA
tcttgggtgactgcagcctt

SEQ ID NO: 248331 - DNA, 20 bp, synthetic construct
  source 1..20: mol_type = other DNA
ctcttgggtgactgcagcct

SEQ ID NO: 248332 - DNA, 20 bp, synthetic construct
  source 1..20: mol_type = other DNA
actcttgggtgactgcagcc

SEQ ID NO: 248333 - DNA, 20 bp, synthetic construct
  source 1..20: mol_type = other DNA
cactcttgggtgactgcagc

SEQ ID NO: 248334 - DNA, 20 bp, synthetic construct
  source 1..20: mol_type = other DNA
ccactcttgggtgactgcag

SEQ ID NO: 248335 - DNA, 20 bp, synthetic construct
  source 1..20: mol_type = other DNA
gccactcttgggtgactgca

SEQ ID NO: 248336 - DNA, 20 bp, synthetic construct
  source 1..20: mol_type = other DNA
agccactcttgggtgactgc

SEQ ID NO: 248337 - DNA, 20 bp, synthetic construct
  source 1..20: mol_type = other DNA
gagccactcttgggtgactg

SEQ ID NO: 248338 - DNA, 20 bp, synthetic construct
  source 1..20: mol_type = other DNA
tgagccactcttgggtgact

SEQ ID NO: 248339 - DNA, 20 bp, synthetic construct
  source 1..20: mol_type = other DNA
ctgagccactcttgggtgac

SEQ ID NO: 248340 - DNA, 20 bp, synthetic construct
  source 1..20: mol_type = other DNA
gctgagccactcttgggtga

SEQ ID NO: 248341 - DNA, 20 bp, synthetic construct
  source 1..20: mol_type = other DNA
ggctgagccactcttgggtg

SEQ ID NO: 248342 - DNA, 20 bp, synthetic construct
  source 1..20: mol_type = other DNA
gggctgagccactcttgggt

SEQ ID NO: 248343 - DNA, 20 bp, synthetic construct
  source 1..20: mol_type = other DNA
tgggctgagccactcttggg

SEQ ID NO: 248344 - DNA, 20 bp, synthetic construct
  source 1..20: mol_type = other DNA
gtgggctgagccactcttgg

SEQ ID NO: 248345 - DNA, 20 bp, synthetic construct
  source 1..20: mol_type = other DNA
ggtgggctgagccactcttg

SEQ ID NO: 248346 - DNA, 20 bp, synthetic construct
  source 1..20: mol_type = other DNA
tggtgggctgagccactctt

SEQ ID NO: 248347 - DNA, 20 bp, synthetic construct
  source 1..20: mol_type = other DNA
ctggtgggctgagccactct

SEQ ID NO: 248348 - DNA, 20 bp, synthetic construct
  source 1..20: mol_type = other DNA
cctggtgggctgagccactc

SEQ ID NO: 248349 - DNA, 20 bp, synthetic construct
  source 1..20: mol_type = other DNA
gcctggtgggctgagccact

SEQ ID NO: 248350 - DNA, 20 bp, synthetic construct
  source 1..20: mol_type = other DNA
ggcctggtgggctgagccac

SEQ ID NO: 248351 - DNA, 20 bp, synthetic construct
  source 1..20: mol_type = other DNA
gggcctggtgggctgagcca

SEQ ID NO: 248352 - DNA, 20 bp, synthetic construct
  source 1..20: mol_type = other DNA
agggcctggtgggctgagcc

SEQ ID NO: 248353 - DNA, 20 bp, synthetic construct
  source 1..20: mol_type = other DNA
tagggcctggtgggctgagc

SEQ ID NO: 248354 - DNA, 20 bp, synthetic construct
  source 1..20: mol_type = other DNA
ctagggcctggtgggctgag

SEQ ID NO: 248355 - DNA, 20 bp, synthetic construct
  source 1..20: mol_type = other DNA
cctagggcctggtgggctga

SEQ ID NO: 248356 - DNA, 20 bp, synthetic construct
  source 1..20: mol_type = other DNA
tcctagggcctggtgggctg

SEQ ID NO: 248357 - DNA, 20 bp, synthetic construct
  source 1..20: mol_type = other DNA
ttcctagggcctggtgggct

SEQ ID NO: 248358 - DNA, 20 bp, synthetic construct
  source 1..20: mol_type = other DNA
tttcctagggcctggtgggc

SEQ ID NO: 248359 - DNA, 20 bp, synthetic construct
  source 1..20: mol_type = other DNA
gtttcctagggcctggtggg

SEQ ID NO: 248360 - DNA, 20 bp, synthetic construct
  source 1..20: mol_type = other DNA
cgtttcctagggcctggtgg

SEQ ID NO: 248361 - DNA, 20 bp, synthetic construct
  source 1..20: mol_type = other DNA
gcgtttcctagggcctggtg

SEQ ID NO: 248362 - DNA, 20 bp, synthetic construct
  source 1..20: mol_type = other DNA
ggcgtttcctagggcctggt

SEQ ID NO: 248363 - DNA, 20 bp, synthetic construct
  source 1..20: mol_type = other DNA
aggcgtttcctagggcctgg

SEQ ID NO: 248364 - DNA, 20 bp, synthetic construct
  source 1..20: mol_type = other DNA
caggcgtttcctagggcctg

SEQ ID NO: 248365 - DNA, 20 bp, synthetic construct
  source 1..20: mol_type = other DNA
gcaggcgtttcctagggcct

SEQ ID NO: 248366 - DNA, 20 bp, synthetic construct
  source 1..20: mol_type = other DNA
tgcaggcgtttcctagggcc

SEQ ID NO: 248367 - DNA, 20 bp, synthetic construct
  source 1..20: mol_type = other DNA
gtgcaggcgtttcctagggc

SEQ ID NO: 248368 - DNA, 20 bp, synthetic construct
  source 1..20: mol_type = other DNA
tgtgcaggcgtttcctaggg

SEQ ID NO: 248369 - DNA, 20 bp, synthetic construct
  source 1..20: mol_type = other DNA
ctgtgcaggcgtttcctagg

SEQ ID NO: 248370 - DNA, 20 bp, synthetic construct
  source 1..20: mol_type = other DNA
gctgtgcaggcgtttcctag

SEQ ID NO: 248371 - DNA, 20 bp, synthetic construct
  source 1..20: mol_type = other DNA
ggctgtgcaggcgtttccta

SEQ ID NO: 248372 - DNA, 20 bp, synthetic construct
  source 1..20: mol_type = other DNA
aggctgtgcaggcgtttcct

SEQ ID NO: 248373 - DNA, 20 bp, synthetic construct
  source 1..20: mol_type = other DNA
caggctgtgcaggcgtttcc

SEQ ID NO: 248374 - DNA, 20 bp, synthetic construct
  source 1..20: mol_type = other DNA
ccaggctgtgcaggcgtttc

SEQ ID NO: 248375 - DNA, 20 bp, synthetic construct
  source 1..20: mol_type = other DNA
tccaggctgtgcaggcgttt

SEQ ID NO: 248376 - DNA, 20 bp, synthetic construct
  source 1..20: mol_type = other DNA
ctccaggctgtgcaggcgtt

SEQ ID NO: 248377 - DNA, 20 bp, synthetic construct
  source 1..20: mol_type = other DNA
gctccaggctgtgcaggcgt

SEQ ID NO: 248378 - DNA, 20 bp, synthetic construct
  source 1..20: mol_type = other DNA
agctccaggctgtgcaggcg

SEQ ID NO: 248379 - DNA, 20 bp, synthetic construct
  source 1..20: mol_type = other DNA
gagctccaggctgtgcaggc

SEQ ID NO: 248380 - DNA, 20 bp, synthetic construct
  source 1..20: mol_type = other DNA
ggagctccaggctgtgcagg

SEQ ID NO: 248381 - DNA, 20 bp, synthetic construct
  source 1..20: mol_type = other DNA
aggagctccaggctgtgcag

SEQ ID NO: 248382 - DNA, 20 bp, synthetic construct
  source 1..20: mol_type = other DNA
caggagctccaggctgtgca

SEQ ID NO: 248383 - DNA, 20 bp, synthetic construct
  source 1..20: mol_type = other DNA
ccaggagctccaggctgtgc

SEQ ID NO: 248384 - DNA, 20 bp, synthetic construct
  source 1..20: mol_type = other DNA
tccaggagctccaggctgtg

SEQ ID NO: 248385 - DNA, 20 bp, synthetic construct
  source 1..20: mol_type = other DNA
ctccaggagctccaggctgt

SEQ ID NO: 248386 - DNA, 20 bp, synthetic construct
  source 1..20: mol_type = other DNA
actccaggagctccaggctg

SEQ ID NO: 248387 - DNA, 20 bp, synthetic construct
  source 1..20: mol_type = other DNA
gactccaggagctccaggct

SEQ ID NO: 248388 - DNA, 20 bp, synthetic construct
  source 1..20: mol_type = other DNA
tgactccaggagctccaggc

SEQ ID NO: 248389 - DNA, 20 bp, synthetic construct
  source 1..20: mol_type = other DNA
atgactccaggagctccagg

SEQ ID NO: 248390 - DNA, 20 bp, synthetic construct
  source 1..20: mol_type = other DNA
aatgactccaggagctccag

SEQ ID NO: 248391 - DNA, 20 bp, synthetic construct
  source 1..20: mol_type = other DNA
aaatgactccaggagctcca

SEQ ID NO: 248392 - DNA, 20 bp, synthetic construct
  source 1..20: mol_type = other DNA
gaaatgactccaggagctcc

SEQ ID NO: 248393 - DNA, 20 bp, synthetic construct
  source 1..20: mol_type = other DNA
ggaaatgactccaggagctc

SEQ ID NO: 248394 - DNA, 20 bp, synthetic construct
  source 1..20: mol_type = other DNA
aggaaatgactccaggagct

SEQ ID NO: 248395 - DNA, 20 bp, synthetic construct
  source 1..20: mol_type = other DNA
aaggaaatgactccaggagc

SEQ ID NO: 248396 - DNA, 20 bp, synthetic construct
  source 1..20: mol_type = other DNA
gaaggaaatgactccaggag

SEQ ID NO: 248397 - DNA, 20 bp, synthetic construct
  source 1..20: mol_type = other DNA
tgaaggaaatgactccagga

SEQ ID NO: 248398 - DNA, 20 bp, synthetic construct
  source 1..20: mol_type = other DNA
atgaaggaaatgactccagg

SEQ ID NO: 248399 - DNA, 20 bp, synthetic construct
  source 1..20: mol_type = other DNA
catgaaggaaatgactccag

SEQ ID NO: 248400 - DNA, 20 bp, synthetic construct
  source 1..20: mol_type = other DNA
acatgaaggaaatgactcca

SEQ ID NO: 248401 - DNA, 20 bp, synthetic construct
  source 1..20: mol_type = other DNA
gacatgaaggaaatgactcc

SEQ ID NO: 248402 - DNA, 20 bp, synthetic construct
  source 1..20: mol_type = other DNA
agacatgaaggaaatgactc

SEQ ID NO: 248403 - DNA, 20 bp, synthetic construct
  source 1..20: mol_type = other DNA
aagacatgaaggaaatgact

SEQ ID NO: 248404 - DNA, 20 bp, synthetic construct
  source 1..20: mol_type = other DNA
gaagacatgaaggaaatgac

SEQ ID NO: 248405 - DNA, 20 bp, synthetic construct
  source 1..20: mol_type = other DNA
agaagacatgaaggaaatga

SEQ ID NO: 248406 - DNA, 20 bp, synthetic construct
  source 1..20: mol_type = other DNA
aagaagacatgaaggaaatg

SEQ ID NO: 248407 - DNA, 20 bp, synthetic construct
  source 1..20: mol_type = other DNA
gaagaagacatgaaggaaat

SEQ ID NO: 248408 - DNA, 20 bp, synthetic construct
  source 1..20: mol_type = other DNA
tgaagaagacatgaaggaaa

SEQ ID NO: 248409 - DNA, 20 bp, synthetic construct
  source 1..20: mol_type = other DNA
gtgaagaagacatgaaggaa

SEQ ID NO: 248410 - DNA, 20 bp, synthetic construct
  source 1..20: mol_type = other DNA
agtgaagaagacatgaagga

SEQ ID NO: 248411 - DNA, 20 bp, synthetic construct
  source 1..20: mol_type = other DNA
cagtgaagaagacatgaagg

SEQ ID NO: 248412 - DNA, 20 bp, synthetic construct
  source 1..20: mol_type = other DNA
gcagtgaagaagacatgaag

SEQ ID NO: 248413 - DNA, 20 bp, synthetic construct
  source 1..20: mol_type = other DNA
tgcagtgaagaagacatgaa

SEQ ID NO: 248414 - DNA, 20 bp, synthetic construct
  source 1..20: mol_type = other DNA
gtgcagtgaagaagacatga

SEQ ID NO: 248415 - DNA, 20 bp, synthetic construct
  source 1..20: mol_type = other DNA
agtgcagtgaagaagacatg

SEQ ID NO: 248416 - DNA, 20 bp, synthetic construct
  source 1..20: mol_type = other DNA
aagtgcagtgaagaagacat

SEQ ID NO: 248417 - DNA, 20 bp, synthetic construct
  source 1..20: mol_type = other DNA
taagtgcagtgaagaagaca

SEQ ID NO: 248418 - DNA, 20 bp, synthetic construct
  source 1..20: mol_type = other DNA
gtaagtgcagtgaagaagac

SEQ ID NO: 248419 - DNA, 20 bp, synthetic construct
  source 1..20: mol_type = other DNA
cgtaagtgcagtgaagaaga

SEQ ID NO: 248420 - DNA, 20 bp, synthetic construct
  source 1..20: mol_type = other DNA
acgtaagtgcagtgaagaag

SEQ ID NO: 248421 - DNA, 20 bp, synthetic construct
  source 1..20: mol_type = other DNA
tacgtaagtgcagtgaagaa

SEQ ID NO: 248422 - DNA, 20 bp, synthetic construct
  source 1..20: mol_type = other DNA
ttacgtaagtgcagtgaaga

SEQ ID NO: 248423 - DNA, 20 bp, synthetic construct
  source 1..20: mol_type = other DNA
tttacgtaagtgcagtgaag

SEQ ID NO: 248424 - DNA, 20 bp, synthetic construct
  source 1..20: mol_type = other DNA
ctttacgtaagtgcagtgaa

SEQ ID NO: 248425 - DNA, 20 bp, synthetic construct
  source 1..20: mol_type = other DNA
tctttacgtaagtgcagtga

SEQ ID NO: 248426 - DNA, 20 bp, synthetic construct
  source 1..20: mol_type = other DNA
atctttacgtaagtgcagtg

SEQ ID NO: 248427 - DNA, 20 bp, synthetic construct
  source 1..20: mol_type = other DNA
catctttacgtaagtgcagt

SEQ ID NO: 248428 - DNA, 20 bp, synthetic construct
  source 1..20: mol_type = other DNA
gcatctttacgtaagtgcag

SEQ ID NO: 248429 - DNA, 20 bp, synthetic construct
  source 1..20: mol_type = other DNA
ggcatctttacgtaagtgca

SEQ ID NO: 248430 - DNA, 20 bp, synthetic construct
  source 1..20: mol_type = other DNA
tggcatctttacgtaagtgc

SEQ ID NO: 248431 - DNA, 20 bp, synthetic construct
  source 1..20: mol_type = other DNA
ctggcatctttacgtaagtg

SEQ ID NO: 248432 - DNA, 20 bp, synthetic construct
  source 1..20: mol_type = other DNA
gctggcatctttacgtaagt

SEQ ID NO: 248433 - DNA, 20 bp, synthetic construct
  source 1..20: mol_type = other DNA
ggctggcatctttacgtaag

SEQ ID NO: 248434 - DNA, 20 bp, synthetic construct
  source 1..20: mol_type = other DNA
tggctggcatctttacgtaa

SEQ ID NO: 248435 - DNA, 20 bp, synthetic construct
  source 1..20: mol_type = other DNA
atggctggcatctttacgta

SEQ ID NO: 248436 - DNA, 20 bp, synthetic construct
  source 1..20: mol_type = other DNA
aatggctggcatctttacgt

SEQ ID NO: 248437 - DNA, 20 bp, synthetic construct
  source 1..20: mol_type = other DNA
caatggctggcatctttacg

SEQ ID NO: 248438 - DNA, 20 bp, synthetic construct
  source 1..20: mol_type = other DNA
ccaatggctggcatctttac

SEQ ID NO: 248439 - DNA, 20 bp, synthetic construct
  source 1..20: mol_type = other DNA
accaatggctggcatcttta

SEQ ID NO: 248440 - DNA, 20 bp, synthetic construct
  source 1..20: mol_type = other DNA
aaccaatggctggcatcttt

SEQ ID NO: 248441 - DNA, 20 bp, synthetic construct
  source 1..20: mol_type = other DNA
aaaccaatggctggcatctt

SEQ ID NO: 248442 - DNA, 20 bp, synthetic construct
  source 1..20: mol_type = other DNA
caaaccaatggctggcatct

SEQ ID NO: 248443 - DNA, 20 bp, synthetic construct
  source 1..20: mol_type = other DNA
ccaaaccaatggctggcatc

SEQ ID NO: 248444 - DNA, 20 bp, synthetic construct
  source 1..20: mol_type = other DNA
accaaaccaatggctggcat

SEQ ID NO: 248445 - DNA, 20 bp, synthetic construct
  source 1..20: mol_type = other DNA
caccaaaccaatggctggca

SEQ ID NO: 248446 - DNA, 20 bp, synthetic construct
  source 1..20: mol_type = other DNA
tcaccaaaccaatggctggc

SEQ ID NO: 248447 - DNA, 20 bp, synthetic construct
  source 1..20: mol_type = other DNA
atcaccaaaccaatggctgg

SEQ ID NO: 248448 - DNA, 20 bp, synthetic construct
  source 1..20: mol_type = other DNA
aatcaccaaaccaatggctg

SEQ ID NO: 248449 - DNA, 20 bp, synthetic construct
  source 1..20: mol_type = other DNA
aaatcaccaaaccaatggct

SEQ ID NO: 248450 - DNA, 20 bp, synthetic construct
  source 1..20: mol_type = other DNA
caaatcaccaaaccaatggc

SEQ ID NO: 248451 - DNA, 20 bp, synthetic construct
  source 1..20: mol_type = other DNA
ccaaatcaccaaaccaatgg

SEQ ID NO: 248452 - DNA, 20 bp, synthetic construct
  source 1..20: mol_type = other DNA
tccaaatcaccaaaccaatg

SEQ ID NO: 248453 - DNA, 20 bp, synthetic construct
  source 1..20: mol_type = other DNA
ctccaaatcaccaaaccaat

SEQ ID NO: 248454 - DNA, 20 bp, synthetic construct
  source 1..20: mol_type = other DNA
cctccaaatcaccaaaccaa

SEQ ID NO: 248455 - DNA, 20 bp, synthetic construct
  source 1..20: mol_type = other DNA
ccctccaaatcaccaaacca

SEQ ID NO: 248456 - DNA, 20 bp, synthetic construct
  source 1..20: mol_type = other DNA
accctccaaatcaccaaacc

SEQ ID NO: 248457 - DNA, 20 bp, synthetic construct
  source 1..20: mol_type = other DNA
caccctccaaatcaccaaac

SEQ ID NO: 248458 - DNA, 20 bp, synthetic construct
  source 1..20: mol_type = other DNA
gcaccctccaaatcaccaaa

SEQ ID NO: 248459 - DNA, 20 bp, synthetic construct
  source 1..20: mol_type = other DNA
ggcaccctccaaatcaccaa

SEQ ID NO: 248460 - DNA, 20 bp, synthetic construct
  source 1..20: mol_type = other DNA
gggcaccctccaaatcacca

SEQ ID NO: 248461 - DNA, 20 bp, synthetic construct
  source 1..20: mol_type = other DNA
tgggcaccctccaaatcacc

SEQ ID NO: 248462 - DNA, 20 bp, synthetic construct
  source 1..20: mol_type = other DNA
ctgggcaccctccaaatcac

SEQ ID NO: 248463 - DNA, 20 bp, synthetic construct
  source 1..20: mol_type = other DNA
actgggcaccctccaaatca

SEQ ID NO: 248464 - DNA, 20 bp, synthetic construct
  source 1..20: mol_type = other DNA
aactgggcaccctccaaatc

SEQ ID NO: 248465 - DNA, 20 bp, synthetic construct
  source 1..20: mol_type = other DNA
caactgggcaccctccaaat

SEQ ID NO: 248466 - DNA, 20 bp, synthetic construct
  source 1..20: mol_type = other DNA
gcaactgggcaccctccaaa

SEQ ID NO: 248467 - DNA, 20 bp, synthetic construct
  source 1..20: mol_type = other DNA
ggcaactgggcaccctccaa

SEQ ID NO: 248468 - DNA, 20 bp, synthetic construct
  source 1..20: mol_type = other DNA
gggcaactgggcaccctcca

SEQ ID NO: 248469 - DNA, 20 bp, synthetic construct
  source 1..20: mol_type = other DNA
tgggcaactgggcaccctcc

SEQ ID NO: 248470 - DNA, 20 bp, synthetic construct
  source 1..20: mol_type = other DNA
ttgggcaactgggcaccctc

SEQ ID NO: 248471 - DNA, 20 bp, synthetic construct
  source 1..20: mol_type = other DNA
gttgggcaactgggcaccct

SEQ ID NO: 248472 - DNA, 20 bp, synthetic construct
  source 1..20: mol_type = other DNA
tgttgggcaactgggcaccc

SEQ ID NO: 248473 - DNA, 20 bp, synthetic construct
  source 1..20: mol_type = other DNA
ttgttgggcaactgggcacc

SEQ ID NO: 248474 - DNA, 20 bp, synthetic construct
  source 1..20: mol_type = other DNA
cttgttgggcaactgggcac

SEQ ID NO: 248475 - DNA, 20 bp, synthetic construct
  source 1..20: mol_type = other DNA
tcttgttgggcaactgggca

SEQ ID NO: 248476 - DNA, 20 bp, synthetic construct
  source 1..20: mol_type = other DNA
ttcttgttgggcaactgggc

SEQ ID NO: 248477 - DNA, 20 bp, synthetic construct
  source 1..20: mol_type = other DNA
tttcttgttgggcaactggg

SEQ ID NO: 248478 - DNA, 20 bp, synthetic construct
  source 1..20: mol_type = other DNA
atttcttgttgggcaactgg

SEQ ID NO: 248479 - DNA, 20 bp, synthetic construct
  source 1..20: mol_type = other DNA
catttcttgttgggcaactg

SEQ ID NO: 248480 - DNA, 20 bp, synthetic construct
  source 1..20: mol_type = other DNA
gcatttcttgttgggcaact

SEQ ID NO: 248481 - DNA, 20 bp, synthetic construct
  source 1..20: mol_type = other DNA
tgcatttcttgttgggcaac

SEQ ID NO: 248482 - DNA, 20 bp, synthetic construct
  source 1..20: mol_type = other DNA
ctgcatttcttgttgggcaa

SEQ ID NO: 248483 - DNA, 20 bp, synthetic construct
  source 1..20: mol_type = other DNA
tctgcatttcttgttgggca

SEQ ID NO: 248484 - DNA, 20 bp, synthetic construct
  source 1..20: mol_type = other DNA
ttctgcatttcttgttgggc

SEQ ID NO: 248485 - DNA, 20 bp, synthetic construct
  source 1..20: mol_type = other DNA
cttctgcatttcttgttggg

SEQ ID NO: 248486 - DNA, 20 bp, synthetic construct
  source 1..20: mol_type = other DNA
tcttctgcatttcttgttgg

SEQ ID NO: 248487 - DNA, 20 bp, synthetic construct
  source 1..20: mol_type = other DNA
ctcttctgcatttcttgttg

SEQ ID NO: 248488 - DNA, 20 bp, synthetic construct
  source 1..20: mol_type = other DNA
cctcttctgcatttcttgtt

SEQ ID NO: 248489 - DNA, 20 bp, synthetic construct
  source 1..20: mol_type = other DNA
gcctcttctgcatttcttgt

SEQ ID NO: 248490 - DNA, 20 bp, synthetic construct
  source 1..20: mol_type = other DNA
ggcctcttctgcatttcttg

SEQ ID NO: 248491 - DNA, 20 bp, synthetic construct
  source 1..20: mol_type = other DNA
aggcctcttctgcatttctt

SEQ ID NO: 248492 - DNA, 20 bp, synthetic construct
  source 1..20: mol_type = other DNA
taggcctcttctgcatttct

SEQ ID NO: 248493 - DNA, 20 bp, synthetic construct
  source 1..20: mol_type = other DNA
ctaggcctcttctgcatttc

SEQ ID NO: 248494 - DNA, 20 bp, synthetic construct
  source 1..20: mol_type = other DNA
gctaggcctcttctgcattt

SEQ ID NO: 248495 - DNA, 20 bp, synthetic construct
  source 1..20: mol_type = other DNA
ggctaggcctcttctgcatt

SEQ ID NO: 248496 - DNA, 20 bp, synthetic construct
  source 1..20: mol_type = other DNA
tggctaggcctcttctgcat

SEQ ID NO: 248497 - DNA, 20 bp, synthetic construct
  source 1..20: mol_type = other DNA
ctggctaggcctcttctgca

SEQ ID NO: 248498 - DNA, 20 bp, synthetic construct
  source 1..20: mol_type = other DNA
cctggctaggcctcttctgc

SEQ ID NO: 248499 - DNA, 20 bp, synthetic construct
  source 1..20: mol_type = other DNA
tcctggctaggcctcttctg

SEQ ID NO: 248500 - DNA, 20 bp, synthetic construct
  source 1..20: mol_type = other DNA
atcctggctaggcctcttct

SEQ ID NO: 248501 - DNA, 20 bp, synthetic construct
  source 1..20: mol_type = other DNA
aatcctggctaggcctcttc

SEQ ID NO: 248502 - DNA, 20 bp, synthetic construct
  source 1..20: mol_type = other DNA
aaatcctggctaggcctctt

SEQ ID NO: 248503 - DNA, 20 bp, synthetic construct
  source 1..20: mol_type = other DNA
gaaatcctggctaggcctct

SEQ ID NO: 248504 - DNA, 20 bp, synthetic construct
  source 1..20: mol_type = other DNA
tgaaatcctggctaggcctc

SEQ ID NO: 248505 - DNA, 20 bp, synthetic construct
  source 1..20: mol_type = other DNA
gtgaaatcctggctaggcct

SEQ ID NO: 248506 - DNA, 20 bp, synthetic construct
  source 1..20: mol_type = other DNA
ggtgaaatcctggctaggcc

SEQ ID NO: 248507 - DNA, 20 bp, synthetic construct
  source 1..20: mol_type = other DNA
tggtgaaatcctggctaggc

SEQ ID NO: 248508 - DNA, 20 bp, synthetic construct
  source 1..20: mol_type = other DNA
ctggtgaaatcctggctagg

SEQ ID NO: 248509 - DNA, 20 bp, synthetic construct
  source 1..20: mol_type = other DNA
gctggtgaaatcctggctag

SEQ ID NO: 248510 - DNA, 20 bp, synthetic construct
  source 1..20: mol_type = other DNA
tgctggtgaaatcctggcta

SEQ ID NO: 248511 - DNA, 20 bp, synthetic construct
  source 1..20: mol_type = other DNA
ctgctggtgaaatcctggct

SEQ ID NO: 248512 - DNA, 20 bp, synthetic construct
  source 1..20: mol_type = other DNA
actgctggtgaaatcctggc

SEQ ID NO: 248513 - DNA, 20 bp, synthetic construct
  source 1..20: mol_type = other DNA
cactgctggtgaaatcctgg

SEQ ID NO: 248514 - DNA, 20 bp, synthetic construct
  source 1..20: mol_type = other DNA
ccactgctggtgaaatcctg

SEQ ID NO: 248515 - DNA, 20 bp, synthetic construct
  source 1..20: mol_type = other DNA
tccactgctggtgaaatcct

SEQ ID NO: 248516 - DNA, 20 bp, synthetic construct
  source 1..20: mol_type = other DNA
ctccactgctggtgaaatcc

SEQ ID NO: 248517 - DNA, 20 bp, synthetic construct
  source 1..20: mol_type = other DNA
tctccactgctggtgaaatc

SEQ ID NO: 248518 - DNA, 20 bp, synthetic construct
  source 1..20: mol_type = other DNA
ctctccactgctggtgaaat

SEQ ID NO: 248519 - DNA, 20 bp, synthetic construct
  source 1..20: mol_type = other DNA
actctccactgctggtgaaa

SEQ ID NO: 248520 - DNA, 20 bp, synthetic construct
  source 1..20: mol_type = other DNA
tactctccactgctggtgaa

SEQ ID NO: 248521 - DNA, 20 bp, synthetic construct
  source 1..20: mol_type = other DNA
ctactctccactgctggtga

SEQ ID NO: 248522 - DNA, 20 bp, synthetic construct
  source 1..20: mol_type = other DNA
tctactctccactgctggtg

SEQ ID NO: 248523 - DNA, 20 bp, synthetic construct
  source 1..20: mol_type = other DNA
ctctactctccactgctggt

SEQ ID NO: 248524 - DNA, 20 bp, synthetic construct
  source 1..20: mol_type = other DNA
tctctactctccactgctgg

SEQ ID NO: 248525 - DNA, 20 bp, synthetic construct
  source 1..20: mol_type = other DNA
ttctctactctccactgctg

SEQ ID NO: 248526 - DNA, 20 bp, synthetic construct
  source 1..20: mol_type = other DNA
cttctctactctccactgct

SEQ ID NO: 248527 - DNA, 20 bp, synthetic construct
  source 1..20: mol_type = other DNA
tcttctctactctccactgc

SEQ ID NO: 248528 - DNA, 20 bp, synthetic construct
  source 1..20: mol_type = other DNA
atcttctctactctccactg

SEQ ID NO: 248529 - DNA, 20 bp, synthetic construct
  source 1..20: mol_type = other DNA
catcttctctactctccact

SEQ ID NO: 248530 - DNA, 20 bp, synthetic construct
  source 1..20: mol_type = other DNA
acatcttctctactctccac

SEQ ID NO: 248531 - DNA, 20 bp, synthetic construct
  source 1..20: mol_type = other DNA
cacatcttctctactctcca

SEQ ID NO: 248532 - DNA, 20 bp, synthetic construct
  source 1..20: mol_type = other DNA
ccacatcttctctactctcc

SEQ ID NO: 248533 - DNA, 20 bp, synthetic construct
  source 1..20: mol_type = other DNA
gccacatcttctctactctc

SEQ ID NO: 248534 - DNA, 20 bp, synthetic construct
  source 1..20: mol_type = other DNA
ggccacatcttctctactct

SEQ ID NO: 248535 - DNA, 20 bp, synthetic construct
  source 1..20: mol_type = other DNA
tggccacatcttctctactc

SEQ ID NO: 248536 - DNA, 20 bp, synthetic construct
  source 1..20: mol_type = other DNA
ctggccacatcttctctact

SEQ ID NO: 248537 - DNA, 20 bp, synthetic construct
  source 1..20: mol_type = other DNA
tctggccacatcttctctac

SEQ ID NO: 248538 - DNA, 20 bp, synthetic construct
  source 1..20: mol_type = other DNA
ttctggccacatcttctcta

SEQ ID NO: 248539 - DNA, 20 bp, synthetic construct
  source 1..20: mol_type = other DNA
tttctggccacatcttctct

SEQ ID NO: 248540 - DNA, 20 bp, synthetic construct
  source 1..20: mol_type = other DNA
ttttctggccacatcttctc

SEQ ID NO: 248541 - DNA, 20 bp, synthetic construct
  source 1..20: mol_type = other DNA
cttttctggccacatcttct

SEQ ID NO: 248542 - DNA, 20 bp, synthetic construct
  source 1..20: mol_type = other DNA
tcttttctggccacatcttc

SEQ ID NO: 248543 - DNA, 20 bp, synthetic construct
  source 1..20: mol_type = other DNA
ctcttttctggccacatctt

SEQ ID NO: 248544 - DNA, 20 bp, synthetic construct
  source 1..20: mol_type = other DNA
actcttttctggccacatct

SEQ ID NO: 248545 - DNA, 20 bp, synthetic construct
  source 1..20: mol_type = other DNA
aactcttttctggccacatc

SEQ ID NO: 248546 - DNA, 20 bp, synthetic construct
  source 1..20: mol_type = other DNA
aaactcttttctggccacat

SEQ ID NO: 248547 - DNA, 20 bp, synthetic construct
  source 1..20: mol_type = other DNA
gaaactcttttctggccaca

SEQ ID NO: 248548 - DNA, 20 bp, synthetic construct
  source 1..20: mol_type = other DNA
ggaaactcttttctggccac

SEQ ID NO: 248549 - DNA, 20 bp, synthetic construct
  source 1..20: mol_type = other DNA
aggaaactcttttctggcca

SEQ ID NO: 248550 - DNA, 20 bp, synthetic construct
  source 1..20: mol_type = other DNA
aaggaaactcttttctggcc

SEQ ID NO: 248551 - DNA, 20 bp, synthetic construct
  source 1..20: mol_type = other DNA
aaaggaaactcttttctggc

SEQ ID NO: 248552 - DNA, 20 bp, synthetic construct
  source 1..20: mol_type = other DNA
gaaaggaaactcttttctgg

SEQ ID NO: 248553 - DNA, 20 bp, synthetic construct
  source 1..20: mol_type = other DNA
ggaaaggaaactcttttctg

SEQ ID NO: 248554 - DNA, 20 bp, synthetic construct
  source 1..20: mol_type = other DNA
gggaaaggaaactcttttct

SEQ ID NO: 248555 - DNA, 20 bp, synthetic construct
  source 1..20: mol_type = other DNA
agggaaaggaaactcttttc

SEQ ID NO: 248556 - DNA, 20 bp, synthetic construct
  source 1..20: mol_type = other DNA
gagggaaaggaaactctttt

SEQ ID NO: 248557 - DNA, 20 bp, synthetic construct
  source 1..20: mol_type = other DNA
ggagggaaaggaaactcttt

SEQ ID NO: 248558 - DNA, 20 bp, synthetic construct
  source 1..20: mol_type = other DNA
aggagggaaaggaaactctt

SEQ ID NO: 248559 - DNA, 20 bp, synthetic construct
  source 1..20: mol_type = other DNA
taggagggaaaggaaactct

SEQ ID NO: 248560 - DNA, 20 bp, synthetic construct
  source 1..20: mol_type = other DNA
ttaggagggaaaggaaactc

SEQ ID NO: 248561 - DNA, 20 bp, synthetic construct
  source 1..20: mol_type = other DNA
tttaggagggaaaggaaact

SEQ ID NO: 248562 - DNA, 20 bp, synthetic construct
  source 1..20: mol_type = other DNA
ctttaggagggaaaggaaac

SEQ ID NO: 248563 - DNA, 20 bp, synthetic construct
  source 1..20: mol_type = other DNA
tctttaggagggaaaggaaa

SEQ ID NO: 248564 - DNA, 20 bp, synthetic construct
  source 1..20: mol_type = other DNA
atctttaggagggaaaggaa

SEQ ID NO: 248565 - DNA, 20 bp, synthetic construct
  source 1..20: mol_type = other DNA
catctttaggagggaaagga

SEQ ID NO: 248566 - DNA, 20 bp, synthetic construct
  source 1..20: mol_type = other DNA
ccatctttaggagggaaagg

SEQ ID NO: 248567 - DNA, 20 bp, synthetic construct
  source 1..20: mol_type = other DNA
accatctttaggagggaaag

SEQ ID NO: 248568 - DNA, 20 bp, synthetic construct
  source 1..20: mol_type = other DNA
taccatctttaggagggaaa

SEQ ID NO: 248569 - DNA, 20 bp, synthetic construct
  source 1..20: mol_type = other DNA
gtaccatctttaggagggaa

SEQ ID NO: 248570 - DNA, 20 bp, synthetic construct
  source 1..20: mol_type = other DNA
agtaccatctttaggaggga

SEQ ID NO: 248571 - DNA, 20 bp, synthetic construct
  source 1..20: mol_type = other DNA
gagtaccatctttaggaggg

SEQ ID NO: 248572 - DNA, 20 bp, synthetic construct
  source 1..20: mol_type = other DNA
ggagtaccatctttaggagg

SEQ ID NO: 248573 - DNA, 20 bp, synthetic construct
  source 1..20: mol_type = other DNA
gggagtaccatctttaggag

SEQ ID NO: 248574 - DNA, 20 bp, synthetic construct
  source 1..20: mol_type = other DNA
agggagtaccatctttagga

SEQ ID NO: 248575 - DNA, 20 bp, synthetic construct
  source 1..20: mol_type = other DNA
cagggagtaccatctttagg

SEQ ID NO: 248576 - DNA, 20 bp, synthetic construct
  source 1..20: mol_type = other DNA
gcagggagtaccatctttag

SEQ ID NO: 248577 - DNA, 20 bp, synthetic construct
  source 1..20: mol_type = other DNA
tgcagggagtaccatcttta

SEQ ID NO: 248578 - DNA, 20 bp, synthetic construct
  source 1..20: mol_type = other DNA
ctgcagggagtaccatcttt

SEQ ID NO: 248579 - DNA, 20 bp, synthetic construct
  source 1..20: mol_type = other DNA
gctgcagggagtaccatctt

SEQ ID NO: 248580 - DNA, 20 bp, synthetic construct
  source 1..20: mol_type = other DNA
agctgcagggagtaccatct

SEQ ID NO: 248581 - DNA, 20 bp, synthetic construct
  source 1..20: mol_type = other DNA
tagctgcagggagtaccatc

SEQ ID NO: 248582 - DNA, 20 bp, synthetic construct
  source 1..20: mol_type = other DNA
gtagctgcagggagtaccat

SEQ ID NO: 248583 - DNA, 20 bp, synthetic construct
  source 1..20: mol_type = other DNA
agtagctgcagggagtacca

SEQ ID NO: 248584 - DNA, 20 bp, synthetic construct
  source 1..20: mol_type = other DNA
cagtagctgcagggagtacc

SEQ ID NO: 248585 - DNA, 20 bp, synthetic construct
  source 1..20: mol_type = other DNA
ccagtagctgcagggagtac

SEQ ID NO: 248586 - DNA, 20 bp, synthetic construct
  source 1..20: mol_type = other DNA
cccagtagctgcagggagta

SEQ ID NO: 248587 - DNA, 20 bp, synthetic construct
  source 1..20: mol_type = other DNA
ccccagtagctgcagggagt

SEQ ID NO: 248588 - DNA, 20 bp, synthetic construct
  source 1..20: mol_type = other DNA
tccccagtagctgcagggag

SEQ ID NO: 248589 - DNA, 20 bp, synthetic construct
  source 1..20: mol_type = other DNA
ttccccagtagctgcaggga

SEQ ID NO: 248590 - DNA, 20 bp, synthetic construct
  source 1..20: mol_type = other DNA
cttccccagtagctgcaggg

SEQ ID NO: 248591 - DNA, 20 bp, synthetic construct
  source 1..20: mol_type = other DNA
gcttccccagtagctgcagg

SEQ ID NO: 248592 - DNA, 20 bp, synthetic construct
  source 1..20: mol_type = other DNA
ggcttccccagtagctgcag

SEQ ID NO: 248593 - DNA, 20 bp, synthetic construct
  source 1..20: mol_type = other DNA
aggcttccccagtagctgca

SEQ ID NO: 248594 - DNA, 20 bp, synthetic construct
  source 1..20: mol_type = other DNA
caggcttccccagtagctgc

SEQ ID NO: 248595 - DNA, 20 bp, synthetic construct
  source 1..20: mol_type = other DNA
gcaggcttccccagtagctg

SEQ ID NO: 248596 - DNA, 20 bp, synthetic construct
  source 1..20: mol_type = other DNA
tgcaggcttccccagtagct

SEQ ID NO: 248597 - DNA, 20 bp, synthetic construct
  source 1..20: mol_type = other DNA
ctgcaggcttccccagtagc

SEQ ID NO: 248598 - DNA, 20 bp, synthetic construct
  source 1..20: mol_type = other DNA
gctgcaggcttccccagtag

SEQ ID NO: 248599 - DNA, 20 bp, synthetic construct
  source 1..20: mol_type = other DNA
tgctgcaggcttccccagta

SEQ ID NO: 248600 - DNA, 20 bp, synthetic construct
  source 1..20: mol_type = other DNA
atgctgcaggcttccccagt

SEQ ID NO: 248601 - DNA, 20 bp, synthetic construct
  source 1..20: mol_type = other DNA
aatgctgcaggcttccccag

SEQ ID NO: 248602 - DNA, 20 bp, synthetic construct
  source 1..20: mol_type = other DNA
gaatgctgcaggcttcccca

SEQ ID NO: 248603 - DNA, 20 bp, synthetic construct
  source 1..20: mol_type = other DNA
agaatgctgcaggcttcccc

SEQ ID NO: 248604 - DNA, 20 bp, synthetic construct
  source 1..20: mol_type = other DNA
gagaatgctgcaggcttccc

SEQ ID NO: 248605 - DNA, 20 bp, synthetic construct
  source 1..20: mol_type = other DNA
agagaatgctgcaggcttcc

SEQ ID NO: 248606 - DNA, 20 bp, synthetic construct
  source 1..20: mol_type = other DNA
tagagaatgctgcaggcttc

SEQ ID NO: 248607 - DNA, 20 bp, synthetic construct
  source 1..20: mol_type = other DNA
ctagagaatgctgcaggctt

SEQ ID NO: 248608 - DNA, 20 bp, synthetic construct
  source 1..20: mol_type = other DNA
cctagagaatgctgcaggct

SEQ ID NO: 248609 - DNA, 20 bp, synthetic construct
  source 1..20: mol_type = other DNA
ccctagagaatgctgcaggc

SEQ ID NO: 248610 - DNA, 20 bp, synthetic construct
  source 1..20: mol_type = other DNA
gccctagagaatgctgcagg

SEQ ID NO: 248611 - DNA, 20 bp, synthetic construct
  source 1..20: mol_type = other DNA
agccctagagaatgctgcag

SEQ ID NO: 248612 - DNA, 20 bp, synthetic construct
  source 1..20: mol_type = other DNA
gagccctagagaatgctgca

SEQ ID NO: 248613 - DNA, 20 bp, synthetic construct
  source 1..20: mol_type = other DNA
agagccctagagaatgctgc

SEQ ID NO: 248614 - DNA, 20 bp, synthetic construct
  source 1..20: mol_type = other DNA
cagagccctagagaatgctg

SEQ ID NO: 248615 - DNA, 20 bp, synthetic construct
  source 1..20: mol_type = other DNA
acagagccctagagaatgct

SEQ ID NO: 248616 - DNA, 20 bp, synthetic construct
  source 1..20: mol_type = other DNA
cacagagccctagagaatgc

SEQ ID NO: 248617 - DNA, 20 bp, synthetic construct
  source 1..20: mol_type = other DNA
acacagagccctagagaatg

SEQ ID NO: 248618 - DNA, 20 bp, synthetic construct
  source 1..20: mol_type = other DNA
cacacagagccctagagaat

SEQ ID NO: 248619 - DNA, 20 bp, synthetic construct
  source 1..20: mol_type = other DNA
acacacagagccctagagaa

SEQ ID NO: 248620 - DNA, 20 bp, synthetic construct
  source 1..20: mol_type = other DNA
aacacacagagccctagaga

SEQ ID NO: 248621 - DNA, 20 bp, synthetic construct
  source 1..20: mol_type = other DNA
caacacacagagccctagag

SEQ ID NO: 248622 - DNA, 20 bp, synthetic construct
  source 1..20: mol_type = other DNA
tcaacacacagagccctaga

SEQ ID NO: 248623 - DNA, 20 bp, synthetic construct
  source 1..20: mol_type = other DNA
ctcaacacacagagccctag

SEQ ID NO: 248624 - DNA, 20 bp, synthetic construct
  source 1..20: mol_type = other DNA
tctcaacacacagagcccta

SEQ ID NO: 248625 - DNA, 20 bp, synthetic construct
  source 1..20: mol_type = other DNA
ctctcaacacacagagccct

SEQ ID NO: 248626 - DNA, 20 bp, synthetic construct
  source 1..20: mol_type = other DNA
gctctcaacacacagagccc

SEQ ID NO: 248627 - DNA, 20 bp, synthetic construct
  source 1..20: mol_type = other DNA
tgctctcaacacacagagcc

SEQ ID NO: 248628 - DNA, 20 bp, synthetic construct
  source 1..20: mol_type = other DNA
ctgctctcaacacacagagc

SEQ ID NO: 248629 - DNA, 20 bp, synthetic construct
  source 1..20: mol_type = other DNA
gctgctctcaacacacagag

SEQ ID NO: 248630 - DNA, 20 bp, synthetic construct
  source 1..20: mol_type = other DNA
ggctgctctcaacacacaga

SEQ ID NO: 248631 - DNA, 20 bp, synthetic construct
  source 1..20: mol_type = other DNA
gggctgctctcaacacacag

SEQ ID NO: 248632 - DNA, 20 bp, synthetic construct
  source 1..20: mol_type = other DNA
ggggctgctctcaacacaca

SEQ ID NO: 248633 - DNA, 20 bp, synthetic construct
  source 1..20: mol_type = other DNA
tggggctgctctcaacacac

SEQ ID NO: 248634 - DNA, 20 bp, synthetic construct
  source 1..20: mol_type = other DNA
gtggggctgctctcaacaca

SEQ ID NO: 248635 - DNA, 20 bp, synthetic construct
  source 1..20: mol_type = other DNA
ggtggggctgctctcaacac

SEQ ID NO: 248636 - DNA, 20 bp, synthetic construct
  source 1..20: mol_type = other DNA
gggtggggctgctctcaaca

SEQ ID NO: 248637 - DNA, 20 bp, synthetic construct
  source 1..20: mol_type = other DNA
agggtggggctgctctcaac

SEQ ID NO: 248638 - DNA, 20 bp, synthetic construct
  source 1..20: mol_type = other DNA
cagggtggggctgctctcaa

SEQ ID NO: 248639 - DNA, 20 bp, synthetic construct
  source 1..20: mol_type = other DNA
ccagggtggggctgctctca

SEQ ID NO: 248640 - DNA, 20 bp, synthetic construct
  source 1..20: mol_type = other DNA
gccagggtggggctgctctc

SEQ ID NO: 248641 - DNA, 20 bp, synthetic construct
  source 1..20: mol_type = other DNA
ggccagggtggggctgctct

SEQ ID NO: 248642 - DNA, 20 bp, synthetic construct
  source 1..20: mol_type = other DNA
gggccagggtggggctgctc

SEQ ID NO: 248643 - DNA, 20 bp, synthetic construct
  source 1..20: mol_type = other DNA
ggggccagggtggggctgct

SEQ ID NO: 248644 - DNA, 20 bp, synthetic construct
  source 1..20: mol_type = other DNA
aggggccagggtggggctgc

SEQ ID NO: 248645 - DNA, 20 bp, synthetic construct
  source 1..20: mol_type = other DNA
aaggggccagggtggggctg

SEQ ID NO: 248646 - DNA, 20 bp, synthetic construct
  source 1..20: mol_type = other DNA
gaaggggccagggtggggct

SEQ ID NO: 248647 - DNA, 20 bp, synthetic construct
  source 1..20: mol_type = other DNA
agaaggggccagggtggggc

SEQ ID NO: 248648 - DNA, 20 bp, synthetic construct
  source 1..20: mol_type = other DNA
cagaaggggccagggtgggg

SEQ ID NO: 248649 - DNA, 20 bp, synthetic construct
  source 1..20: mol_type = other DNA
tcagaaggggccagggtggg

SEQ ID NO: 248650 - DNA, 20 bp, synthetic construct
  source 1..20: mol_type = other DNA
ctcagaaggggccagggtgg

SEQ ID NO: 248651 - DNA, 20 bp, synthetic construct
  source 1..20: mol_type = other DNA
actcagaaggggccagggtg

SEQ ID NO: 248652 - DNA, 20 bp, synthetic construct
  source 1..20: mol_type = other DNA
cactcagaaggggccagggt

SEQ ID NO: 248653 - DNA, 20 bp, synthetic construct
  source 1..20: mol_type = other DNA
gcactcagaaggggccaggg

SEQ ID NO: 248654 - DNA, 20 bp, synthetic construct
  source 1..20: mol_type = other DNA
tgcactcagaaggggccagg

SEQ ID NO: 248655 - DNA, 20 bp, synthetic construct
  source 1..20: mol_type = other DNA
atgcactcagaaggggccag

SEQ ID NO: 248656 - DNA, 20 bp, synthetic construct
  source 1..20: mol_type = other DNA
aatgcactcagaaggggcca

SEQ ID NO: 248657 - DNA, 20 bp, synthetic construct
  source 1..20: mol_type = other DNA
aaatgcactcagaaggggcc

SEQ ID NO: 248658 - DNA, 20 bp, synthetic construct
  source 1..20: mol_type = other DNA
gaaatgcactcagaaggggc

SEQ ID NO: 248659 - DNA, 20 bp, synthetic construct
  source 1..20: mol_type = other DNA
agaaatgcactcagaagggg

SEQ ID NO: 248660 - DNA, 20 bp, synthetic construct
  source 1..20: mol_type = other DNA
cagaaatgcactcagaaggg

SEQ ID NO: 248661 - DNA, 20 bp, synthetic construct
  source 1..20: mol_type = other DNA
gcagaaatgcactcagaagg

SEQ ID NO: 248662 - DNA, 20 bp, synthetic construct
  source 1..20: mol_type = other DNA
agcagaaatgcactcagaag

SEQ ID NO: 248663 - DNA, 20 bp, synthetic construct
  source 1..20: mol_type = other DNA
aagcagaaatgcactcagaa

SEQ ID NO: 248664 - DNA, 20 bp, synthetic construct
  source 1..20: mol_type = other DNA
aaagcagaaatgcactcaga

SEQ ID NO: 248665 - DNA, 20 bp, synthetic construct
  source 1..20: mol_type = other DNA
caaagcagaaatgcactcag

SEQ ID NO: 248666 - DNA, 20 bp, synthetic construct
  source 1..20: mol_type = other DNA
acaaagcagaaatgcactca

SEQ ID NO: 248667 - DNA, 20 bp, synthetic construct
  source 1..20: mol_type = other DNA
cacaaagcagaaatgcactc

SEQ ID NO: 248668 - DNA, 20 bp, synthetic construct
  source 1..20: mol_type = other DNA
tcacaaagcagaaatgcact

SEQ ID NO: 248669 - DNA, 20 bp, synthetic construct
  source 1..20: mol_type = other DNA
gtcacaaagcagaaatgcac

SEQ ID NO: 248670 - DNA, 20 bp, synthetic construct
  source 1..20: mol_type = other DNA
agtcacaaagcagaaatgca

SEQ ID NO: 248671 - DNA, 20 bp, synthetic construct
  source 1..20: mol_type = other DNA
aagtcacaaagcagaaatgc

SEQ ID NO: 248672 - DNA, 20 bp, synthetic construct
  source 1..20: mol_type = other DNA
caagtcacaaagcagaaatg

SEQ ID NO: 248673 - DNA, 20 bp, synthetic construct
  source 1..20: mol_type = other DNA
tcaagtcacaaagcagaaat

SEQ ID NO: 248674 - DNA, 20 bp, synthetic construct
  source 1..20: mol_type = other DNA
atcaagtcacaaagcagaaa

SEQ ID NO: 248675 - DNA, 20 bp, synthetic construct
  source 1..20: mol_type = other DNA
gatcaagtcacaaagcagaa

SEQ ID NO: 248676 - DNA, 20 bp, synthetic construct
  source 1..20: mol_type = other DNA
ggatcaagtcacaaagcaga

SEQ ID NO: 248677 - DNA, 20 bp, synthetic construct
  source 1..20: mol_type = other DNA
cggatcaagtcacaaagcag

SEQ ID NO: 248678 - DNA, 20 bp, synthetic construct
  source 1..20: mol_type = other DNA
acggatcaagtcacaaagca

SEQ ID NO: 248679 - DNA, 20 bp, synthetic construct
  source 1..20: mol_type = other DNA
cacggatcaagtcacaaagc

SEQ ID NO: 248680 - DNA, 20 bp, synthetic construct
  source 1..20: mol_type = other DNA
tcacggatcaagtcacaaag

SEQ ID NO: 248681 - DNA, 20 bp, synthetic construct
  source 1..20: mol_type = other DNA
ttcacggatcaagtcacaaa

SEQ ID NO: 248682 - DNA, 20 bp, synthetic construct
  source 1..20: mol_type = other DNA
cttcacggatcaagtcacaa

SEQ ID NO: 248683 - DNA, 20 bp, synthetic construct
  source 1..20: mol_type = other DNA
acttcacggatcaagtcaca

SEQ ID NO: 248684 - DNA, 20 bp, synthetic construct
  source 1..20: mol_type = other DNA
gacttcacggatcaagtcac

SEQ ID NO: 248685 - DNA, 20 bp, synthetic construct
  source 1..20: mol_type = other DNA
ggacttcacggatcaagtca

SEQ ID NO: 248686 - DNA, 20 bp, synthetic construct
  source 1..20: mol_type = other DNA
gggacttcacggatcaagtc

SEQ ID NO: 248687 - DNA, 20 bp, synthetic construct
  source 1..20: mol_type = other DNA
ggggacttcacggatcaagt

SEQ ID NO: 248688 - DNA, 20 bp, synthetic construct
  source 1..20: mol_type = other DNA
aggggacttcacggatcaag

SEQ ID NO: 248689 - DNA, 20 bp, synthetic construct
  source 1..20: mol_type = other DNA
caggggacttcacggatcaa

SEQ ID NO: 248690 - DNA, 20 bp, synthetic construct
  source 1..20: mol_type = other DNA
tcaggggacttcacggatca

SEQ ID NO: 248691 - DNA, 20 bp, synthetic construct
  source 1..20: mol_type = other DNA
ctcaggggacttcacggatc

SEQ ID NO: 248692 - DNA, 20 bp, synthetic construct
  source 1..20: mol_type = other DNA
tctcaggggacttcacggat

SEQ ID NO: 248693 - DNA, 20 bp, synthetic construct
  source 1..20: mol_type = other DNA
atctcaggggacttcacgga

SEQ ID NO: 248694 - DNA, 20 bp, synthetic construct
  source 1..20: mol_type = other DNA
catctcaggggacttcacgg

SEQ ID NO: 248695 - DNA, 20 bp, synthetic construct
  source 1..20: mol_type = other DNA
ccatctcaggggacttcacg

SEQ ID NO: 248696 - DNA, 20 bp, synthetic construct
  source 1..20: mol_type = other DNA
cccatctcaggggacttcac

SEQ ID NO: 248697 - DNA, 20 bp, synthetic construct
  source 1..20: mol_type = other DNA
gcccatctcaggggacttca

SEQ ID NO: 248698 - DNA, 20 bp, synthetic construct
  source 1..20: mol_type = other DNA
tgcccatctcaggggacttc

SEQ ID NO: 248699 - DNA, 20 bp, synthetic construct
  source 1..20: mol_type = other DNA
ctgcccatctcaggggactt

SEQ ID NO: 248700 - DNA, 20 bp, synthetic construct
  source 1..20: mol_type = other DNA
tctgcccatctcaggggact

SEQ ID NO: 248701 - DNA, 20 bp, synthetic construct
  source 1..20: mol_type = other DNA
ctctgcccatctcaggggac

SEQ ID NO: 248702 - DNA, 20 bp, synthetic construct
  source 1..20: mol_type = other DNA
cctctgcccatctcagggga

SEQ ID NO: 248703 - DNA, 20 bp, synthetic construct
  source 1..20: mol_type = other DNA
ccctctgcccatctcagggg

SEQ ID NO: 248704 - DNA, 20 bp, synthetic construct
  source 1..20: mol_type = other DNA
cccctctgcccatctcaggg

SEQ ID NO: 248705 - DNA, 20 bp, synthetic construct
  source 1..20: mol_type = other DNA
tcccctctgcccatctcagg

SEQ ID NO: 248706 - DNA, 20 bp, synthetic construct
  source 1..20: mol_type = other DNA
atcccctctgcccatctcag

SEQ ID NO: 248707 - DNA, 20 bp, synthetic construct
  source 1..20: mol_type = other DNA
catcccctctgcccatctca

SEQ ID NO: 248708 - DNA, 20 bp, synthetic construct
  source 1..20: mol_type = other DNA
acatcccctctgcccatctc

SEQ ID NO: 248709 - DNA, 20 bp, synthetic construct
  source 1..20: mol_type = other DNA
gacatcccctctgcccatct

SEQ ID NO: 248710 - DNA, 20 bp, synthetic construct
  source 1..20: mol_type = other DNA
ggacatcccctctgcccatc

SEQ ID NO: 248711 - DNA, 20 bp, synthetic construct
  source 1..20: mol_type = other DNA
aggacatcccctctgcccat

SEQ ID NO: 248712 - DNA, 20 bp, synthetic construct
  source 1..20: mol_type = other DNA
gaggacatcccctctgccca

SEQ ID NO: 248713 - DNA, 20 bp, synthetic construct
  source 1..20: mol_type = other DNA
cgaggacatcccctctgccc

SEQ ID NO: 248714 - DNA, 20 bp, synthetic construct
  source 1..20: mol_type = other DNA
tcgaggacatcccctctgcc

SEQ ID NO: 248715 - DNA, 20 bp, synthetic construct
  source 1..20: mol_type = other DNA
ttcgaggacatcccctctgc

SEQ ID NO: 248716 - DNA, 20 bp, synthetic construct
  source 1..20: mol_type = other DNA
cttcgaggacatcccctctg

SEQ ID NO: 248717 - DNA, 20 bp, synthetic construct
  source 1..20: mol_type = other DNA
gcttcgaggacatcccctct

SEQ ID NO: 248718 - DNA, 20 bp, synthetic construct
  source 1..20: mol_type = other DNA
agcttcgaggacatcccctc

SEQ ID NO: 248719 - DNA, 20 bp, synthetic construct
  source 1..20: mol_type = other DNA
cagcttcgaggacatcccct

SEQ ID NO: 248720 - DNA, 20 bp, synthetic construct
  source 1..20: mol_type = other DNA
ccagcttcgaggacatcccc

SEQ ID NO: 248721 - DNA, 20 bp, synthetic construct
  source 1..20: mol_type = other DNA
cccagcttcgaggacatccc

SEQ ID NO: 248722 - DNA, 20 bp, synthetic construct
  source 1..20: mol_type = other DNA
ccccagcttcgaggacatcc

SEQ ID NO: 248723 - DNA, 20 bp, synthetic construct
  source 1..20: mol_type = other DNA
gccccagcttcgaggacatc

SEQ ID NO: 248724 - DNA, 20 bp, synthetic construct
  source 1..20: mol_type = other DNA
tgccccagcttcgaggacat

SEQ ID NO: 248725 - DNA, 20 bp, synthetic construct
  source 1..20: mol_type = other DNA
ctgccccagcttcgaggaca

SEQ ID NO: 248726 - DNA, 20 bp, synthetic construct
  source 1..20: mol_type = other DNA
tctgccccagcttcgaggac

SEQ ID NO: 248727 - DNA, 20 bp, synthetic construct
  source 1..20: mol_type = other DNA
ctctgccccagcttcgagga

SEQ ID NO: 248728 - DNA, 20 bp, synthetic construct
  source 1..20: mol_type = other DNA
gctctgccccagcttcgagg

SEQ ID NO: 248729 - DNA, 20 bp, synthetic construct
  source 1..20: mol_type = other DNA
ggctctgccccagcttcgag

SEQ ID NO: 248730 - DNA, 20 bp, synthetic construct
  source 1..20: mol_type = other DNA
aggctctgccccagcttcga

SEQ ID NO: 248731 - DNA, 20 bp, synthetic construct
  source 1..20: mol_type = other DNA
gaggctctgccccagcttcg

SEQ ID NO: 248732 - DNA, 20 bp, synthetic construct
  source 1..20: mol_type = other DNA
tgaggctctgccccagcttc

SEQ ID NO: 248733 - DNA, 20 bp, synthetic construct
  source 1..20: mol_type = other DNA
atgaggctctgccccagctt

SEQ ID NO: 248734 - DNA, 20 bp, synthetic construct
  source 1..20: mol_type = other DNA
gatgaggctctgccccagct

SEQ ID NO: 248735 - DNA, 20 bp, synthetic construct
  source 1..20: mol_type = other DNA
ggatgaggctctgccccagc

SEQ ID NO: 248736 - DNA, 20 bp, synthetic construct
  source 1..20: mol_type = other DNA
aggatgaggctctgccccag

SEQ ID NO: 248737 - DNA, 20 bp, synthetic construct
  source 1..20: mol_type = other DNA
aaggatgaggctctgcccca

SEQ ID NO: 248738 - DNA, 20 bp, synthetic construct
  source 1..20: mol_type = other DNA
caaggatgaggctctgcccc

SEQ ID NO: 248739 - DNA, 20 bp, synthetic construct
  source 1..20: mol_type = other DNA
tcaaggatgaggctctgccc

SEQ ID NO: 248740 - DNA, 20 bp, synthetic construct
  source 1..20: mol_type = other DNA
ttcaaggatgaggctctgcc

SEQ ID NO: 248741 - DNA, 20 bp, synthetic construct
  source 1..20: mol_type = other DNA
gttcaaggatgaggctctgc

SEQ ID NO: 248742 - DNA, 20 bp, synthetic construct
  source 1..20: mol_type = other DNA
cgttcaaggatgaggctctg

SEQ ID NO: 248743 - DNA, 20 bp, synthetic construct
  source 1..20: mol_type = other DNA
acgttcaaggatgaggctct

SEQ ID NO: 248744 - DNA, 20 bp, synthetic construct
  source 1..20: mol_type = other DNA
cacgttcaaggatgaggctc

SEQ ID NO: 248745 - DNA, 20 bp, synthetic construct
  source 1..20: mol_type = other DNA
tcacgttcaaggatgaggct

SEQ ID NO: 248746 - DNA, 20 bp, synthetic construct
  source 1..20: mol_type = other DNA
ttcacgttcaaggatgaggc

SEQ ID NO: 248747 - DNA, 20 bp, synthetic construct
  source 1..20: mol_type = other DNA
cttcacgttcaaggatgagg

SEQ ID NO: 248748 - DNA, 20 bp, synthetic construct
  source 1..20: mol_type = other DNA
ccttcacgttcaaggatgag

SEQ ID NO: 248749 - DNA, 20 bp, synthetic construct
  source 1..20: mol_type = other DNA
tccttcacgttcaaggatga

SEQ ID NO: 248750 - DNA, 20 bp, synthetic construct
  source 1..20: mol_type = other DNA
gtccttcacgttcaaggatg

SEQ ID NO: 248751 - DNA, 20 bp, synthetic construct
  source 1..20: mol_type = other DNA
cgtccttcacgttcaaggat

SEQ ID NO: 248752 - DNA, 20 bp, synthetic construct
  source 1..20: mol_type = other DNA
acgtccttcacgttcaagga

SEQ ID NO: 248753 - DNA, 20 bp, synthetic construct
  source 1..20: mol_type = other DNA
aacgtccttcacgttcaagg

SEQ ID NO: 248754 - DNA, 20 bp, synthetic construct
  source 1..20: mol_type = other DNA
aaacgtccttcacgttcaag

SEQ ID NO: 248755 - DNA, 20 bp, synthetic construct
  source 1..20: mol_type = other DNA
caaacgtccttcacgttcaa

SEQ ID NO: 248756 - DNA, 20 bp, synthetic construct
  source 1..20: mol_type = other DNA
tcaaacgtccttcacgttca

SEQ ID NO: 248757 - DNA, 20 bp, synthetic construct
  source 1..20: mol_type = other DNA
ttcaaacgtccttcacgttc

SEQ ID NO: 248758 - DNA, 20 bp, synthetic construct
  source 1..20: mol_type = other DNA
cttcaaacgtccttcacgtt

SEQ ID NO: 248759 - DNA, 20 bp, synthetic construct
  source 1..20: mol_type = other DNA
tcttcaaacgtccttcacgt

SEQ ID NO: 248760 - DNA, 20 bp, synthetic construct
  source 1..20: mol_type = other DNA
gtcttcaaacgtccttcacg

SEQ ID NO: 248761 - DNA, 20 bp, synthetic construct
  source 1..20: mol_type = other DNA
agtcttcaaacgtccttcac

SEQ ID NO: 248762 - DNA, 20 bp, synthetic construct
  source 1..20: mol_type = other DNA
cagtcttcaaacgtccttca

SEQ ID NO: 248763 - DNA, 20 bp, synthetic construct
  source 1..20: mol_type = other DNA
acagtcttcaaacgtccttc

SEQ ID NO: 248764 - DNA, 20 bp, synthetic construct
  source 1..20: mol_type = other DNA
cacagtcttcaaacgtcctt

SEQ ID NO: 248765 - DNA, 20 bp, synthetic construct
  source 1..20: mol_type = other DNA
ccacagtcttcaaacgtcct

SEQ ID NO: 248766 - DNA, 20 bp, synthetic construct
  source 1..20: mol_type = other DNA
gccacagtcttcaaacgtcc

SEQ ID NO: 248767 - DNA, 20 bp, synthetic construct
  source 1..20: mol_type = other DNA
tgccacagtcttcaaacgtc

SEQ ID NO: 248768 - DNA, 20 bp, synthetic construct
  source 1..20: mol_type = other DNA
atgccacagtcttcaaacgt

SEQ ID NO: 248769 - DNA, 20 bp, synthetic construct
  source 1..20: mol_type = other DNA
catgccacagtcttcaaacg

SEQ ID NO: 248770 - DNA, 20 bp, synthetic construct
  source 1..20: mol_type = other DNA
tcatgccacagtcttcaaac

SEQ ID NO: 248771 - DNA, 20 bp, synthetic construct
  source 1..20: mol_type = other DNA
atcatgccacagtcttcaaa

SEQ ID NO: 248772 - DNA, 20 bp, synthetic construct
  source 1..20: mol_type = other DNA
gatcatgccacagtcttcaa

SEQ ID NO: 248773 - DNA, 20 bp, synthetic construct
  source 1..20: mol_type = other DNA
tgatcatgccacagtcttca

SEQ ID NO: 248774 - DNA, 20 bp, synthetic construct
  source 1..20: mol_type = other DNA
gtgatcatgccacagtcttc

SEQ ID NO: 248775 - DNA, 20 bp, synthetic construct
  source 1..20: mol_type = other DNA
tgtgatcatgccacagtctt

SEQ ID NO: 248776 - DNA, 20 bp, synthetic construct
  source 1..20: mol_type = other DNA
ctgtgatcatgccacagtct

SEQ ID NO: 248777 - DNA, 20 bp, synthetic construct
  source 1..20: mol_type = other DNA
cctgtgatcatgccacagtc

SEQ ID NO: 248778 - DNA, 20 bp, synthetic construct
  source 1..20: mol_type = other DNA
tcctgtgatcatgccacagt

SEQ ID NO: 248779 - DNA, 20 bp, synthetic construct
  source 1..20: mol_type = other DNA
atcctgtgatcatgccacag

SEQ ID NO: 248780 - DNA, 20 bp, synthetic construct
  source 1..20: mol_type = other DNA
catcctgtgatcatgccaca

SEQ ID NO: 248781 - DNA, 20 bp, synthetic construct
  source 1..20: mol_type = other DNA
tcatcctgtgatcatgccac

SEQ ID NO: 248782 - DNA, 20 bp, synthetic construct
  source 1..20: mol_type = other DNA
ctcatcctgtgatcatgcca

SEQ ID NO: 248783 - DNA, 20 bp, synthetic construct
  source 1..20: mol_type = other DNA
tctcatcctgtgatcatgcc

SEQ ID NO: 248784 - DNA, 20 bp, synthetic construct
  source 1..20: mol_type = other DNA
atctcatcctgtgatcatgc

SEQ ID NO: 248785 - DNA, 20 bp, synthetic construct
  source 1..20: mol_type = other DNA
gatctcatcctgtgatcatg

SEQ ID NO: 248786 - DNA, 20 bp, synthetic construct
  source 1..20: mol_type = other DNA
tgatctcatcctgtgatcat

SEQ ID NO: 248787 - DNA, 20 bp, synthetic construct
  source 1..20: mol_type = other DNA
gtgatctcatcctgtgatca

SEQ ID NO: 248788 - DNA, 20 bp, synthetic construct
  source 1..20: mol_type = other DNA
tgtgatctcatcctgtgatc

SEQ ID NO: 248789 - DNA, 20 bp, synthetic construct
  source 1..20: mol_type = other DNA
ctgtgatctcatcctgtgat

SEQ ID NO: 248790 - DNA, 20 bp, synthetic construct
  source 1..20: mol_type = other DNA
cctgtgatctcatcctgtga

SEQ ID NO: 248791 - DNA, 20 bp, synthetic construct
  source 1..20: mol_type = other DNA
ccctgtgatctcatcctgtg

SEQ ID NO: 248792 - DNA, 20 bp, synthetic construct
  source 1..20: mol_type = other DNA
tccctgtgatctcatcctgt

SEQ ID NO: 248793 - DNA, 20 bp, synthetic construct
  source 1..20: mol_type = other DNA
ttccctgtgatctcatcctg

SEQ ID NO: 248794 - DNA, 20 bp, synthetic construct
  source 1..20: mol_type = other DNA
gttccctgtgatctcatcct

SEQ ID NO: 248795 - DNA, 20 bp, synthetic construct
  source 1..20: mol_type = other DNA
agttccctgtgatctcatcc

SEQ ID NO: 248796 - DNA, 20 bp, synthetic construct
  source 1..20: mol_type = other DNA
aagttccctgtgatctcatc

SEQ ID NO: 248797 - DNA, 20 bp, synthetic construct
  source 1..20: mol_type = other DNA
caagttccctgtgatctcat

SEQ ID NO: 248798 - DNA, 20 bp, synthetic construct
  source 1..20: mol_type = other DNA
tcaagttccctgtgatctca

SEQ ID NO: 248799 - DNA, 20 bp, synthetic construct
  source 1..20: mol_type = other DNA
ctcaagttccctgtgatctc

SEQ ID NO: 248800 - DNA, 20 bp, synthetic construct
  source 1..20: mol_type = other DNA
actcaagttccctgtgatct

SEQ ID NO: 248801 - DNA, 20 bp, synthetic construct
  source 1..20: mol_type = other DNA
aactcaagttccctgtgatc

SEQ ID NO: 248802 - DNA, 20 bp, synthetic construct
  source 1..20: mol_type = other DNA
aaactcaagttccctgtgat

SEQ ID NO: 248803 - DNA, 20 bp, synthetic construct
  source 1..20: mol_type = other DNA
gaaactcaagttccctgtga

SEQ ID NO: 248804 - DNA, 20 bp, synthetic construct
  source 1..20: mol_type = other DNA
agaaactcaagttccctgtg

SEQ ID NO: 248805 - DNA, 20 bp, synthetic construct
  source 1..20: mol_type = other DNA
gagaaactcaagttccctgt

SEQ ID NO: 248806 - DNA, 20 bp, synthetic construct
  source 1..20: mol_type = other DNA
agagaaactcaagttccctg

SEQ ID NO: 248807 - DNA, 20 bp, synthetic construct
  source 1..20: mol_type = other DNA
gagagaaactcaagttccct

SEQ ID NO: 248808 - DNA, 20 bp, synthetic construct
  source 1..20: mol_type = other DNA
ggagagaaactcaagttccc

SEQ ID NO: 248809 - DNA, 20 bp, synthetic construct
  source 1..20: mol_type = other DNA
aggagagaaactcaagttcc

SEQ ID NO: 248810 - DNA, 20 bp, synthetic construct
  source 1..20: mol_type = other DNA
gaggagagaaactcaagttc

SEQ ID NO: 248811 - DNA, 20 bp, synthetic construct
  source 1..20: mol_type = other DNA
ggaggagagaaactcaagtt

SEQ ID NO: 248812 - DNA, 20 bp, synthetic construct
  source 1..20: mol_type = other DNA
aggaggagagaaactcaagt

SEQ ID NO: 248813 - DNA, 20 bp, synthetic construct
  source 1..20: mol_type = other DNA
gaggaggagagaaactcaag

SEQ ID NO: 248814 - DNA, 20 bp, synthetic construct
  source 1..20: mol_type = other DNA
agaggaggagagaaactcaa

SEQ ID NO: 248815 - DNA, 20 bp, synthetic construct
  source 1..20: mol_type = other DNA
gagaggaggagagaaactca

SEQ ID NO: 248816 - DNA, 20 bp, synthetic construct
  source 1..20: mol_type = other DNA
ggagaggaggagagaaactc

SEQ ID NO: 248817 - DNA, 20 bp, synthetic construct
  source 1..20: mol_type = other DNA
gggagaggaggagagaaact

SEQ ID NO: 248818 - DNA, 20 bp, synthetic construct
  source 1..20: mol_type = other DNA
agggagaggaggagagaaac

SEQ ID NO: 248819 - DNA, 20 bp, synthetic construct
  source 1..20: mol_type = other DNA
aagggagaggaggagagaaa

SEQ ID NO: 248820 - DNA, 20 bp, synthetic construct
  source 1..20: mol_type = other DNA
gaagggagaggaggagagaa

SEQ ID NO: 248821 - DNA, 20 bp, synthetic construct
  source 1..20: mol_type = other DNA
tgaagggagaggaggagaga

SEQ ID NO: 248822 - DNA, 20 bp, synthetic construct
  source 1..20: mol_type = other DNA
gtgaagggagaggaggagag

SEQ ID NO: 248823 - DNA, 20 bp, synthetic construct
  source 1..20: mol_type = other DNA
tgtgaagggagaggaggaga

SEQ ID NO: 248824 - DNA, 20 bp, synthetic construct
  source 1..20: mol_type = other DNA
ctgtgaagggagaggaggag

SEQ ID NO: 248825 - DNA, 20 bp, synthetic construct
  source 1..20: mol_type = other DNA
actgtgaagggagaggagga

SEQ ID NO: 248826 - DNA, 20 bp, synthetic construct
  source 1..20: mol_type = other DNA
aactgtgaagggagaggagg

SEQ ID NO: 248827 - DNA, 20 bp, synthetic construct
  source 1..20: mol_type = other DNA
taactgtgaagggagaggag

SEQ ID NO: 248828 - DNA, 20 bp, synthetic construct
  source 1..20: mol_type = other DNA
ataactgtgaagggagagga

SEQ ID NO: 248829 - DNA, 20 bp, synthetic construct
  source 1..20: mol_type = other DNA
aataactgtgaagggagagg

SEQ ID NO: 248830 - DNA, 20 bp, synthetic construct
  source 1..20: mol_type = other DNA
aaataactgtgaagggagag

SEQ ID NO: 248831 - DNA, 20 bp, synthetic construct
  source 1..20: mol_type = other DNA
gaaataactgtgaagggaga

SEQ ID NO: 248832 - DNA, 20 bp, synthetic construct
  source 1..20: mol_type = other DNA
tgaaataactgtgaagggag

SEQ ID NO: 248833 - DNA, 20 bp, synthetic construct
  source 1..20: mol_type = other DNA
gtgaaataactgtgaaggga

SEQ ID NO: 248834 - DNA, 20 bp, synthetic construct
  source 1..20: mol_type = other DNA
agtgaaataactgtgaaggg

SEQ ID NO: 248835 - DNA, 20 bp, synthetic construct
  source 1..20: mol_type = other DNA
cagtgaaataactgtgaagg

SEQ ID NO: 248836 - DNA, 20 bp, synthetic construct
  source 1..20: mol_type = other DNA
tcagtgaaataactgtgaag

SEQ ID NO: 248837 - DNA, 20 bp, synthetic construct
  source 1..20: mol_type = other DNA
ctcagtgaaataactgtgaa

SEQ ID NO: 248838 - DNA, 20 bp, synthetic construct
  source 1..20: mol_type = other DNA
cctcagtgaaataactgtga

SEQ ID NO: 248839 - DNA, 20 bp, synthetic construct
  source 1..20: mol_type = other DNA
ccctcagtgaaataactgtg

SEQ ID NO: 248840 - DNA, 20 bp, synthetic construct
  source 1..20: mol_type = other DNA
tccctcagtgaaataactgt

SEQ ID NO: 248841 - DNA, 20 bp, synthetic construct
  source 1..20: mol_type = other DNA
ttccctcagtgaaataactg

SEQ ID NO: 248842 - DNA, 20 bp, synthetic construct
  source 1..20: mol_type = other DNA
tttccctcagtgaaataact

SEQ ID NO: 248843 - DNA, 20 bp, synthetic construct
  source 1..20: mol_type = other DNA
atttccctcagtgaaataac

SEQ ID NO: 248844 - DNA, 20 bp, synthetic construct
  source 1..20: mol_type = other DNA
gatttccctcagtgaaataa

SEQ ID NO: 248845 - DNA, 20 bp, synthetic construct
  source 1..20: mol_type = other DNA
ggatttccctcagtgaaata

SEQ ID NO: 248846 - DNA, 20 bp, synthetic construct
  source 1..20: mol_type = other DNA
gggatttccctcagtgaaat

SEQ ID NO: 248847 - DNA, 20 bp, synthetic construct
  source 1..20: mol_type = other DNA
agggatttccctcagtgaaa

SEQ ID NO: 248848 - DNA, 20 bp, synthetic construct
  source 1..20: mol_type = other DNA
gagggatttccctcagtgaa

SEQ ID NO: 248849 - DNA, 20 bp, synthetic construct
  source 1..20: mol_type = other DNA
ggagggatttccctcagtga

SEQ ID NO: 248850 - DNA, 20 bp, synthetic construct
  source 1..20: mol_type = other DNA
gggagggatttccctcagtg

SEQ ID NO: 248851 - DNA, 20 bp, synthetic construct
  source 1..20: mol_type = other DNA
ggggagggatttccctcagt

SEQ ID NO: 248852 - DNA, 20 bp, synthetic construct
  source 1..20: mol_type = other DNA
aggggagggatttccctcag

SEQ ID NO: 248853 - DNA, 20 bp, synthetic construct
  source 1..20: mol_type = other DNA
caggggagggatttccctca

SEQ ID NO: 248854 - DNA, 20 bp, synthetic construct
  source 1..20: mol_type = other DNA
gcaggggagggatttccctc

SEQ ID NO: 248855 - DNA, 20 bp, synthetic construct
  source 1..20: mol_type = other DNA
ggcaggggagggatttccct

SEQ ID NO: 248856 - DNA, 20 bp, synthetic construct
  source 1..20: mol_type = other DNA
gggcaggggagggatttccc

SEQ ID NO: 248857 - DNA, 20 bp, synthetic construct
  source 1..20: mol_type = other DNA
tgggcaggggagggatttcc

SEQ ID NO: 248858 - DNA, 20 bp, synthetic construct
  source 1..20: mol_type = other DNA
ctgggcaggggagggatttc

SEQ ID NO: 248859 - DNA, 20 bp, synthetic construct
  source 1..20: mol_type = other DNA
tctgggcaggggagggattt

SEQ ID NO: 248860 - DNA, 20 bp, synthetic construct
  source 1..20: mol_type = other DNA
ttctgggcaggggagggatt

SEQ ID NO: 248861 - DNA, 20 bp, synthetic construct
  source 1..20: mol_type = other DNA
attctgggcaggggagggat

SEQ ID NO: 248862 - DNA, 20 bp, synthetic construct
  source 1..20: mol_type = other DNA
cattctgggcaggggaggga

SEQ ID NO: 248863 - DNA, 20 bp, synthetic construct
  source 1..20: mol_type = other DNA
tcattctgggcaggggaggg

SEQ ID NO: 248864 - DNA, 20 bp, synthetic construct
  source 1..20: mol_type = other DNA
ttcattctgggcaggggagg

SEQ ID NO: 248865 - DNA, 20 bp, synthetic construct
  source 1..20: mol_type = other DNA
tttcattctgggcaggggag

SEQ ID NO: 248866 - DNA, 20 bp, synthetic construct
  source 1..20: mol_type = other DNA
ttttcattctgggcagggga

SEQ ID NO: 248867 - DNA, 20 bp, synthetic construct
  source 1..20: mol_type = other DNA
gttttcattctgggcagggg

SEQ ID NO: 248868 - DNA, 20 bp, synthetic construct
  source 1..20: mol_type = other DNA
agttttcattctgggcaggg

SEQ ID NO: 248869 - DNA, 20 bp, synthetic construct
  source 1..20: mol_type = other DNA
gagttttcattctgggcagg

SEQ ID NO: 248870 - DNA, 20 bp, synthetic construct
  source 1..20: mol_type = other DNA
agagttttcattctgggcag

SEQ ID NO: 248871 - DNA, 20 bp, synthetic construct
  source 1..20: mol_type = other DNA
tagagttttcattctgggca

SEQ ID NO: 248872 - DNA, 20 bp, synthetic construct
  source 1..20: mol_type = other DNA
ctagagttttcattctgggc

SEQ ID NO: 248873 - DNA, 20 bp, synthetic construct
  source 1..20: mol_type = other DNA
gctagagttttcattctggg

SEQ ID NO: 248874 - DNA, 20 bp, synthetic construct
  source 1..20: mol_type = other DNA
ggctagagttttcattctgg

SEQ ID NO: 248875 - DNA, 20 bp, synthetic construct
  source 1..20: mol_type = other DNA
tggctagagttttcattctg

SEQ ID NO: 248876 - DNA, 20 bp, synthetic construct
  source 1..20: mol_type = other DNA
ttggctagagttttcattct

SEQ ID NO: 248877 - DNA, 20 bp, synthetic construct
  source 1..20: mol_type = other DNA
gttggctagagttttcattc

SEQ ID NO: 248878 - DNA, 20 bp, synthetic construct
  source 1..20: mol_type = other DNA
agttggctagagttttcatt

SEQ ID NO: 248879 - DNA, 20 bp, synthetic construct
  source 1..20: mol_type = other DNA
gagttggctagagttttcat

SEQ ID NO: 248880 - DNA, 20 bp, synthetic construct
  source 1..20: mol_type = other DNA
agagttggctagagttttca

SEQ ID NO: 248881 - DNA, 20 bp, synthetic construct
  source 1..20: mol_type = other DNA
aagagttggctagagttttc

SEQ ID NO: 248882 - DNA, 20 bp, synthetic construct
  source 1..20: mol_type = other DNA
caagagttggctagagtttt

SEQ ID NO: 248883 - DNA, 20 bp, synthetic construct
  source 1..20: mol_type = other DNA
tcaagagttggctagagttt

SEQ ID NO: 248884 - DNA, 20 bp, synthetic construct
  source 1..20: mol_type = other DNA
gtcaagagttggctagagtt

SEQ ID NO: 248885 - DNA, 20 bp, synthetic construct
  source 1..20: mol_type = other DNA
agtcaagagttggctagagt

SEQ ID NO: 248886 - DNA, 20 bp, synthetic construct
  source 1..20: mol_type = other DNA
aagtcaagagttggctagag

SEQ ID NO: 248887 - DNA, 20 bp, synthetic construct
  source 1..20: mol_type = other DNA
aaagtcaagagttggctaga

SEQ ID NO: 248888 - DNA, 20 bp, synthetic construct
  source 1..20: mol_type = other DNA
aaaagtcaagagttggctag

SEQ ID NO: 248889 - DNA, 20 bp, synthetic construct
  source 1..20: mol_type = other DNA
gaaaagtcaagagttggcta

SEQ ID NO: 248890 - DNA, 20 bp, synthetic construct
  source 1..20: mol_type = other DNA
ggaaaagtcaagagttggct

SEQ ID NO: 248891 - DNA, 20 bp, synthetic construct
  source 1..20: mol_type = other DNA
tggaaaagtcaagagttggc

SEQ ID NO: 248892 - DNA, 20 bp, synthetic construct
  source 1..20: mol_type = other DNA
atggaaaagtcaagagttgg

SEQ ID NO: 248893 - DNA, 20 bp, synthetic construct
  source 1..20: mol_type = other DNA
gatggaaaagtcaagagttg

SEQ ID NO: 248894 - DNA, 20 bp, synthetic construct
  source 1..20: mol_type = other DNA
tgatggaaaagtcaagagtt

SEQ ID NO: 248895 - DNA, 20 bp, synthetic construct
  source 1..20: mol_type = other DNA
gtgatggaaaagtcaagagt

SEQ ID NO: 248896 - DNA, 20 bp, synthetic construct
  source 1..20: mol_type = other DNA
agtgatggaaaagtcaagag

SEQ ID NO: 248897 - DNA, 20 bp, synthetic construct
  source 1..20: mol_type = other DNA
gagtgatggaaaagtcaaga

SEQ ID NO: 248898 - DNA, 20 bp, synthetic construct
  source 1..20: mol_type = other DNA
ggagtgatggaaaagtcaag

SEQ ID NO: 248899 - DNA, 20 bp, synthetic construct
  source 1..20: mol_type = other DNA
tggagtgatggaaaagtcaa

SEQ ID NO: 248900 - DNA, 20 bp, synthetic construct
  source 1..20: mol_type = other DNA
ttggagtgatggaaaagtca

SEQ ID NO: 248901 - DNA, 20 bp, synthetic construct
  source 1..20: mol_type = other DNA
tttggagtgatggaaaagtc

SEQ ID NO: 248902 - DNA, 20 bp, synthetic construct
  source 1..20: mol_type = other DNA
ctttggagtgatggaaaagt

SEQ ID NO: 248903 - DNA, 20 bp, synthetic construct
  source 1..20: mol_type = other DNA
actttggagtgatggaaaag

SEQ ID NO: 248904 - DNA, 20 bp, synthetic construct
  source 1..20: mol_type = other DNA
tactttggagtgatggaaaa

SEQ ID NO: 248905 - DNA, 20 bp, synthetic construct
  source 1..20: mol_type = other DNA
ctactttggagtgatggaaa

SEQ ID NO: 248906 - DNA, 20 bp, synthetic construct
  source 1..20: mol_type = other DNA
actactttggagtgatggaa

SEQ ID NO: 248907 - DNA, 20 bp, synthetic construct
  source 1..20: mol_type = other DNA
aactactttggagtgatgga

SEQ ID NO: 248908 - DNA, 20 bp, synthetic construct
  source 1..20: mol_type = other DNA
caactactttggagtgatgg

SEQ ID NO: 248909 - DNA, 20 bp, synthetic construct
  source 1..20: mol_type = other DNA
tcaactactttggagtgatg

SEQ ID NO: 248910 - DNA, 20 bp, synthetic construct
  source 1..20: mol_type = other DNA
ttcaactactttggagtgat

SEQ ID NO: 248911 - DNA, 20 bp, synthetic construct
  source 1..20: mol_type = other DNA
tttcaactactttggagtga

SEQ ID NO: 248912 - DNA, 20 bp, synthetic construct
  source 1..20: mol_type = other DNA
ctttcaactactttggagtg

SEQ ID NO: 248913 - DNA, 20 bp, synthetic construct
  source 1..20: mol_type = other DNA
actttcaactactttggagt

SEQ ID NO: 248914 - DNA, 20 bp, synthetic construct
  source 1..20: mol_type = other DNA
tactttcaactactttggag

SEQ ID NO: 248915 - DNA, 20 bp, synthetic construct
  source 1..20: mol_type = other DNA
gtactttcaactactttgga

SEQ ID NO: 248916 - DNA, 20 bp, synthetic construct
  source 1..20: mol_type = other DNA
tgtactttcaactactttgg

SEQ ID NO: 248917 - DNA, 20 bp, synthetic construct
  source 1..20: mol_type = other DNA
atgtactttcaactactttg

SEQ ID NO: 248918 - DNA, 20 bp, synthetic construct
  source 1..20: mol_type = other DNA
aatgtactttcaactacttt

SEQ ID NO: 248919 - DNA, 20 bp, synthetic construct
  source 1..20: mol_type = other DNA
taatgtactttcaactactt

SEQ ID NO: 248920 - DNA, 20 bp, synthetic construct
  source 1..20: mol_type = other DNA
ctaatgtactttcaactact

SEQ ID NO: 248921 - DNA, 20 bp, synthetic construct
  source 1..20: mol_type = other DNA
actaatgtactttcaactac

SEQ ID NO: 248922 - DNA, 20 bp, synthetic construct
  source 1..20: mol_type = other DNA
gactaatgtactttcaacta

SEQ ID NO: 248923 - DNA, 20 bp, synthetic construct
  source 1..20: mol_type = other DNA
agactaatgtactttcaact

SEQ ID NO: 248924 - DNA, 20 bp, synthetic construct
  source 1..20: mol_type = other DNA
gagactaatgtactttcaac

SEQ ID NO: 248925 - DNA, 20 bp, synthetic construct
  source 1..20: mol_type = other DNA
ggagactaatgtactttcaa

SEQ ID NO: 248926 - DNA, 20 bp, synthetic construct
  source 1..20: mol_type = other DNA
tggagactaatgtactttca

SEQ ID NO: 248927 - DNA, 20 bp, synthetic construct
  source 1..20: mol_type = other DNA
gtggagactaatgtactttc

SEQ ID NO: 248928 - DNA, 20 bp, synthetic construct
  source 1..20: mol_type = other DNA
tgtggagactaatgtacttt

SEQ ID NO: 248929 - DNA, 20 bp, synthetic construct
  source 1..20: mol_type = other DNA
ctgtggagactaatgtactt

SEQ ID NO: 248930 - DNA, 20 bp, synthetic construct
  source 1..20: mol_type = other DNA
actgtggagactaatgtact

SEQ ID NO: 248931 - DNA, 20 bp, synthetic construct
  source 1..20: mol_type = other DNA
cactgtggagactaatgtac

SEQ ID NO: 248932 - DNA, 20 bp, synthetic construct
  source 1..20: mol_type = other DNA
ccactgtggagactaatgta

SEQ ID NO: 248933 - DNA, 20 bp, synthetic construct
  source 1..20: mol_type = other DNA
gccactgtggagactaatgt

SEQ ID NO: 248934 - DNA, 20 bp, synthetic construct
  source 1..20: mol_type = other DNA
tgccactgtggagactaatg

SEQ ID NO: 248935 - DNA, 20 bp, synthetic construct
  source 1..20: mol_type = other DNA
ttgccactgtggagactaat

SEQ ID NO: 248936 - DNA, 20 bp, synthetic construct
  source 1..20: mol_type = other DNA
tttgccactgtggagactaa

SEQ ID NO: 248937 - DNA, 20 bp, synthetic construct
  source 1..20: mol_type = other DNA
ttttgccactgtggagacta

SEQ ID NO: 248938 - DNA, 20 bp, synthetic construct
  source 1..20: mol_type = other DNA
gttttgccactgtggagact

SEQ ID NO: 248939 - DNA, 20 bp, synthetic construct
  source 1..20: mol_type = other DNA
tgttttgccactgtggagac

SEQ ID NO: 248940 - DNA, 20 bp, synthetic construct
  source 1..20: mol_type = other DNA
ctgttttgccactgtggaga

SEQ ID NO: 248941 - DNA, 20 bp, synthetic construct
  source 1..20: mol_type = other DNA
actgttttgccactgtggag

SEQ ID NO: 248942 - DNA, 20 bp, synthetic construct
  source 1..20: mol_type = other DNA
cactgttttgccactgtgga

SEQ ID NO: 248943 - DNA, 20 bp, synthetic construct
  source 1..20: mol_type = other DNA
acactgttttgccactgtgg

SEQ ID NO: 248944 - DNA, 20 bp, synthetic construct
  source 1..20: mol_type = other DNA
cacactgttttgccactgtg

SEQ ID NO: 248945 - DNA, 20 bp, synthetic construct
  source 1..20: mol_type = other DNA
gcacactgttttgccactgt

SEQ ID NO: 248946 - DNA, 20 bp, synthetic construct
  source 1..20: mol_type = other DNA
tgcacactgttttgccactg

SEQ ID NO: 248947 - DNA, 20 bp, synthetic construct
  source 1..20: mol_type = other DNA
ttgcacactgttttgccact

SEQ ID NO: 248948 - DNA, 20 bp, synthetic construct
  source 1..20: mol_type = other DNA
tttgcacactgttttgccac

SEQ ID NO: 248949 - DNA, 20 bp, synthetic construct
  source 1..20: mol_type = other DNA
ttttgcacactgttttgcca

SEQ ID NO: 248950 - DNA, 20 bp, synthetic construct
  source 1..20: mol_type = other DNA
cttttgcacactgttttgcc

SEQ ID NO: 248951 - DNA, 20 bp, synthetic construct
  source 1..20: mol_type = other DNA
gcttttgcacactgttttgc

SEQ ID NO: 248952 - DNA, 20 bp, synthetic construct
  source 1..20: mol_type = other DNA
agcttttgcacactgttttg

SEQ ID NO: 248953 - DNA, 20 bp, synthetic construct
  source 1..20: mol_type = other DNA
tagcttttgcacactgtttt

SEQ ID NO: 248954 - DNA, 20 bp, synthetic construct
  source 1..20: mol_type = other DNA
ttagcttttgcacactgttt

SEQ ID NO: 248955 - DNA, 20 bp, synthetic construct
  source 1..20: mol_type = other DNA
tttagcttttgcacactgtt

SEQ ID NO: 248956 - DNA, 20 bp, synthetic construct
  source 1..20: mol_type = other DNA
atttagcttttgcacactgt

SEQ ID NO: 248957 - DNA, 20 bp, synthetic construct
  source 1..20: mol_type = other DNA
tatttagcttttgcacactg

SEQ ID NO: 248958 - DNA, 20 bp, synthetic construct
  source 1..20: mol_type = other DNA
ttatttagcttttgcacact

SEQ ID NO: 248959 - DNA, 20 bp, synthetic construct
  source 1..20: mol_type = other DNA
attatttagcttttgcacac

SEQ ID NO: 248960 - DNA, 20 bp, synthetic construct
  source 1..20: mol_type = other DNA
aattatttagcttttgcaca

SEQ ID NO: 248961 - DNA, 20 bp, synthetic construct
  source 1..20: mol_type = other DNA
taattatttagcttttgcac

SEQ ID NO: 248962 - DNA, 20 bp, synthetic construct
  source 1..20: mol_type = other DNA
ctaattatttagcttttgca

SEQ ID NO: 248963 - DNA, 20 bp, synthetic construct
  source 1..20: mol_type = other DNA
tctaattatttagcttttgc

SEQ ID NO: 248964 - DNA, 20 bp, synthetic construct
  source 1..20: mol_type = other DNA
ttctaattatttagcttttg

SEQ ID NO: 248965 - DNA, 20 bp, synthetic construct
  source 1..20: mol_type = other DNA
gttctaattatttagctttt

SEQ ID NO: 248966 - DNA, 20 bp, synthetic construct
  source 1..20: mol_type = other DNA
tgttctaattatttagcttt

SEQ ID NO: 248967 - DNA, 20 bp, synthetic construct
  source 1..20: mol_type = other DNA
ctgttctaattatttagctt

SEQ ID NO: 248968 - DNA, 20 bp, synthetic construct
  source 1..20: mol_type = other DNA
gctgttctaattatttagct

SEQ ID NO: 248969 - DNA, 20 bp, synthetic construct
  source 1..20: mol_type = other DNA
ggctgttctaattatttagc

SEQ ID NO: 248970 - DNA, 20 bp, synthetic construct
  source 1..20: mol_type = other DNA
tggctgttctaattatttag

SEQ ID NO: 248971 - DNA, 20 bp, synthetic construct
  source 1..20: mol_type = other DNA
ctggctgttctaattattta

SEQ ID NO: 248972 - DNA, 20 bp, synthetic construct
  source 1..20: mol_type = other DNA
actggctgttctaattattt

SEQ ID NO: 248973 - DNA, 20 bp, synthetic construct
  source 1..20: mol_type = other DNA
gactggctgttctaattatt

SEQ ID NO: 248974 - DNA, 20 bp, synthetic construct
  source 1..20: mol_type = other DNA
ggactggctgttctaattat

SEQ ID NO: 248975 - DNA, 20 bp, synthetic construct
  source 1..20: mol_type = other DNA
gggactggctgttctaatta

SEQ ID NO: 248976 - DNA, 20 bp, synthetic construct
  source 1..20: mol_type = other DNA
tgggactggctgttctaatt

SEQ ID NO: 248977 - DNA, 20 bp, synthetic construct
  source 1..20: mol_type = other DNA
atgggactggctgttctaat

SEQ ID NO: 248978 - DNA, 20 bp, synthetic construct
  source 1..20: mol_type = other DNA
catgggactggctgttctaa

SEQ ID NO: 248979 - DNA, 20 bp, synthetic construct
  source 1..20: mol_type = other DNA
acatgggactggctgttcta

SEQ ID NO: 248980 - DNA, 20 bp, synthetic construct
  source 1..20: mol_type = other DNA
cacatgggactggctgttct

SEQ ID NO: 248981 - DNA, 20 bp, synthetic construct
  source 1..20: mol_type = other DNA
tcacatgggactggctgttc

SEQ ID NO: 248982 - DNA, 20 bp, synthetic construct
  source 1..20: mol_type = other DNA
gtcacatgggactggctgtt

SEQ ID NO: 248983 - DNA, 20 bp, synthetic construct
  source 1..20: mol_type = other DNA
tgtcacatgggactggctgt

SEQ ID NO: 248984 - DNA, 20 bp, synthetic construct
  source 1..20: mol_type = other DNA
ctgtcacatgggactggctg

SEQ ID NO: 248985 - DNA, 20 bp, synthetic construct
  source 1..20: mol_type = other DNA
actgtcacatgggactggct

SEQ ID NO: 248986 - DNA, 20 bp, synthetic construct
  source 1..20: mol_type = other DNA
gactgtcacatgggactggc

SEQ ID NO: 248987 - DNA, 20 bp, synthetic construct
  source 1..20: mol_type = other DNA
tgactgtcacatgggactgg

SEQ ID NO: 248988 - DNA, 20 bp, synthetic construct
  source 1..20: mol_type = other DNA
ttgactgtcacatgggactg

SEQ ID NO: 248989 - DNA, 20 bp, synthetic construct
  source 1..20: mol_type = other DNA
tttgactgtcacatgggact

SEQ ID NO: 248990 - DNA, 20 bp, synthetic construct
  source 1..20: mol_type = other DNA
ctttgactgtcacatgggac

SEQ ID NO: 248991 - DNA, 20 bp, synthetic construct
  source 1..20: mol_type = other DNA
gctttgactgtcacatggga

SEQ ID NO: 248992 - DNA, 20 bp, synthetic construct
  source 1..20: mol_type = other DNA
agctttgactgtcacatggg

SEQ ID NO: 248993 - DNA, 20 bp, synthetic construct
  source 1..20: mol_type = other DNA
aagctttgactgtcacatgg

SEQ ID NO: 248994 - DNA, 20 bp, synthetic construct
  source 1..20: mol_type = other DNA
gaagctttgactgtcacatg

SEQ ID NO: 248995 - DNA, 20 bp, synthetic construct
  source 1..20: mol_type = other DNA
agaagctttgactgtcacat

SEQ ID NO: 248996 - DNA, 20 bp, synthetic construct
  source 1..20: mol_type = other DNA
tagaagctttgactgtcaca

SEQ ID NO: 248997 - DNA, 20 bp, synthetic construct
  source 1..20: mol_type = other DNA
ttagaagctttgactgtcac

SEQ ID NO: 248998 - DNA, 20 bp, synthetic construct
  source 1..20: mol_type = other DNA
gttagaagctttgactgtca

SEQ ID NO: 248999 - DNA, 20 bp, synthetic construct
  source 1..20: mol_type = other DNA
agttagaagctttgactgtc

SEQ ID NO: 249000 - DNA, 20 bp, synthetic construct
  source 1..20: mol_type = other DNA
gagttagaagctttgactgt

SEQ ID NO: 249001 - DNA, 20 bp, synthetic construct
  source 1..20: mol_type = other DNA
ggagttagaagctttgactg

SEQ ID NO: 249002 - DNA, 20 bp, synthetic construct
  source 1..20: mol_type = other DNA
tggagttagaagctttgact

SEQ ID NO: 249003 - DNA, 20 bp, synthetic construct
  source 1..20: mol_type = other DNA
atggagttagaagctttgac

SEQ ID NO: 249004 - DNA, 20 bp, synthetic construct
  source 1..20: mol_type = other DNA
aatggagttagaagctttga

SEQ ID NO: 249005 - DNA, 20 bp, synthetic construct
  source 1..20: mol_type = other DNA
gaatggagttagaagctttg

SEQ ID NO: 249006 - DNA, 20 bp, synthetic construct
  source 1..20: mol_type = other DNA
tgaatggagttagaagcttt

SEQ ID NO: 249007 - DNA, 20 bp, synthetic construct
  source 1..20: mol_type = other DNA
ttgaatggagttagaagctt

SEQ ID NO: 249008 - DNA, 20 bp, synthetic construct
  source 1..20: mol_type = other DNA
tttgaatggagttagaagct

SEQ ID NO: 249009 - DNA, 20 bp, synthetic construct
  source 1..20: mol_type = other DNA
ctttgaatggagttagaagc

SEQ ID NO: 249010 - DNA, 20 bp, synthetic construct
  source 1..20: mol_type = other DNA
actttgaatggagttagaag

SEQ ID NO: 249011 - DNA, 20 bp, synthetic construct
  source 1..20: mol_type = other DNA
aactttgaatggagttagaa

SEQ ID NO: 249012 - DNA, 20 bp, synthetic construct
  source 1..20: mol_type = other DNA
caactttgaatggagttaga

SEQ ID NO: 249013 - DNA, 20 bp, synthetic construct
  source 1..20: mol_type = other DNA
gcaactttgaatggagttag

SEQ ID NO: 249014 - DNA, 20 bp, synthetic construct
  source 1..20: mol_type = other DNA
tgcaactttgaatggagtta

SEQ ID NO: 249015 - DNA, 20 bp, synthetic construct
  source 1..20: mol_type = other DNA
ctgcaactttgaatggagtt

SEQ ID NO: 249016 - DNA, 20 bp, synthetic construct
  source 1..20: mol_type = other DNA
gctgcaactttgaatggagt

SEQ ID NO: 249017 - DNA, 20 bp, synthetic construct
  source 1..20: mol_type = other DNA
ggctgcaactttgaatggag

SEQ ID NO: 249018 - DNA, 20 bp, synthetic construct
  source 1..20: mol_type = other DNA
tggctgcaactttgaatgga

SEQ ID NO: 249019 - DNA, 20 bp, synthetic construct
  source 1..20: mol_type = other DNA
atggctgcaactttgaatgg

SEQ ID NO: 249020 - DNA, 20 bp, synthetic construct
  source 1..20: mol_type = other DNA
aatggctgcaactttgaatg

SEQ ID NO: 249021 - DNA, 20 bp, synthetic construct
  source 1..20: mol_type = other DNA
gaatggctgcaactttgaat

SEQ ID NO: 249022 - DNA, 20 bp, synthetic construct
  source 1..20: mol_type = other DNA
ggaatggctgcaactttgaa

SEQ ID NO: 249023 - DNA, 20 bp, synthetic construct
  source 1..20: mol_type = other DNA
gggaatggctgcaactttga

SEQ ID NO: 249024 - DNA, 20 bp, synthetic construct
  source 1..20: mol_type = other DNA
ggggaatggctgcaactttg

SEQ ID NO: 249025 - DNA, 20 bp, synthetic construct
  source 1..20: mol_type = other DNA
aggggaatggctgcaacttt

SEQ ID NO: 249026 - DNA, 20 bp, synthetic construct
  source 1..20: mol_type = other DNA
gaggggaatggctgcaactt

SEQ ID NO: 249027 - DNA, 20 bp, synthetic construct
  source 1..20: mol_type = other DNA
cgaggggaatggctgcaact

SEQ ID NO: 249028 - DNA, 20 bp, synthetic construct
  source 1..20: mol_type = other DNA
tcgaggggaatggctgcaac

SEQ ID NO: 249029 - DNA, 20 bp, synthetic construct
  source 1..20: mol_type = other DNA
ctcgaggggaatggctgcaa

SEQ ID NO: 249030 - DNA, 20 bp, synthetic construct
  source 1..20: mol_type = other DNA
cctcgaggggaatggctgca

SEQ ID NO: 249031 - DNA, 20 bp, synthetic construct
  source 1..20: mol_type = other DNA
ccctcgaggggaatggctgc

SEQ ID NO: 249032 - DNA, 20 bp, synthetic construct
  source 1..20: mol_type = other DNA
gccctcgaggggaatggctg

SEQ ID NO: 249033 - DNA, 20 bp, synthetic construct
  source 1..20: mol_type = other DNA
agccctcgaggggaatggct

SEQ ID NO: 249034 - DNA, 20 bp, synthetic construct
  source 1..20: mol_type = other DNA
cagccctcgaggggaatggc

SEQ ID NO: 249035 - DNA, 20 bp, synthetic construct
  source 1..20: mol_type = other DNA
ccagccctcgaggggaatgg

SEQ ID NO: 249036 - DNA, 20 bp, synthetic construct
  source 1..20: mol_type = other DNA
gccagccctcgaggggaatg

SEQ ID NO: 249037 - DNA, 20 bp, synthetic construct
  source 1..20: mol_type = other DNA
tgccagccctcgaggggaat

SEQ ID NO: 249038 - DNA, 20 bp, synthetic construct
  source 1..20: mol_type = other DNA
ctgccagccctcgaggggaa

SEQ ID NO: 249039 - DNA, 20 bp, synthetic construct
  source 1..20: mol_type = other DNA
cctgccagccctcgagggga

SEQ ID NO: 249040 - DNA, 20 bp, synthetic construct
  source 1..20: mol_type = other DNA
ccctgccagccctcgagggg

SEQ ID NO: 249041 - DNA, 20 bp, synthetic construct
  source 1..20: mol_type = other DNA
tccctgccagccctcgaggg

SEQ ID NO: 249042 - DNA, 20 bp, synthetic construct
  source 1..20: mol_type = other DNA
ctccctgccagccctcgagg

SEQ ID NO: 249043 - DNA, 20 bp, synthetic construct
  source 1..20: mol_type = other DNA
cctccctgccagccctcgag

SEQ ID NO: 249044 - DNA, 20 bp, synthetic construct
  source 1..20: mol_type = other DNA
ccctccctgccagccctcga

SEQ ID NO: 249045 - DNA, 20 bp, synthetic construct
  source 1..20: mol_type = other DNA
cccctccctgccagccctcg

SEQ ID NO: 249046 - DNA, 20 bp, synthetic construct
  source 1..20: mol_type = other DNA
tcccctccctgccagccctc

SEQ ID NO: 249047 - DNA, 20 bp, synthetic construct
  source 1..20: mol_type = other DNA
ctcccctccctgccagccct

SEQ ID NO: 249048 - DNA, 20 bp, synthetic construct
  source 1..20: mol_type = other DNA
cctcccctccctgccagccc

SEQ ID NO: 249049 - DNA, 20 bp, synthetic construct
  source 1..20: mol_type = other DNA
ccctcccctccctgccagcc

SEQ ID NO: 249050 - DNA, 20 bp, synthetic construct
  source 1..20: mol_type = other DNA
cccctcccctccctgccagc

SEQ ID NO: 249051 - DNA, 20 bp, synthetic construct
  source 1..20: mol_type = other DNA
acccctcccctccctgccag

SEQ ID NO: 249052 - DNA, 20 bp, synthetic construct
  source 1..20: mol_type = other DNA
tacccctcccctccctgcca

SEQ ID NO: 249053 - DNA, 20 bp, synthetic construct
  source 1..20: mol_type = other DNA
ttacccctcccctccctgcc

SEQ ID NO: 249054 - DNA, 20 bp, synthetic construct
  source 1..20: mol_type = other DNA
cttacccctcccctccctgc

SEQ ID NO: 249055 - DNA, 20 bp, synthetic construct
  source 1..20: mol_type = other DNA
tcttacccctcccctccctg

SEQ ID NO: 249056 - DNA, 20 bp, synthetic construct
  source 1..20: mol_type = other DNA
ctcttacccctcccctccct

SEQ ID NO: 249057 - DNA, 20 bp, synthetic construct
  source 1..20: mol_type = other DNA
tctcttacccctcccctccc

SEQ ID NO: 249058 - DNA, 20 bp, synthetic construct
  source 1..20: mol_type = other DNA
ttctcttacccctcccctcc

SEQ ID NO: 249059 - DNA, 20 bp, synthetic construct
  source 1..20: mol_type = other DNA
tttctcttacccctcccctc

SEQ ID NO: 249060 - DNA, 20 bp, synthetic construct
  source 1..20: mol_type = other DNA
gtttctcttacccctcccct

SEQ ID NO: 249061 - DNA, 20 bp, synthetic construct
  source 1..20: mol_type = other DNA
tgtttctcttacccctcccc

SEQ ID NO: 249062 - DNA, 20 bp, synthetic construct
  source 1..20: mol_type = other DNA
ctgtttctcttacccctccc

SEQ ID NO: 249063 - DNA, 20 bp, synthetic construct
  source 1..20: mol_type = other DNA
cctgtttctcttacccctcc

SEQ ID NO: 249064 - DNA, 20 bp, synthetic construct
  source 1..20: mol_type = other DNA
tcctgtttctcttacccctc

SEQ ID NO: 249065 - DNA, 20 bp, synthetic construct
  source 1..20: mol_type = other DNA
ttcctgtttctcttacccct

SEQ ID NO: 249066 - DNA, 20 bp, synthetic construct
  source 1..20: mol_type = other DNA
cttcctgtttctcttacccc

SEQ ID NO: 249067 - DNA, 20 bp, synthetic construct
  source 1..20: mol_type = other DNA
ccttcctgtttctcttaccc

SEQ ID NO: 249068 - DNA, 20 bp, synthetic construct
  source 1..20: mol_type = other DNA
accttcctgtttctcttacc

SEQ ID NO: 249069 - DNA, 20 bp, synthetic construct
  source 1..20: mol_type = other DNA
aaccttcctgtttctcttac

SEQ ID NO: 249070 - DNA, 20 bp, synthetic construct
  source 1..20: mol_type = other DNA
gaaccttcctgtttctctta

SEQ ID NO: 249071 - DNA, 20 bp, synthetic construct
  source 1..20: mol_type = other DNA
agaaccttcctgtttctctt

SEQ ID NO: 249072 - DNA, 20 bp, synthetic construct
  source 1..20: mol_type = other DNA
aagaaccttcctgtttctct

SEQ ID NO: 249073 - DNA, 20 bp, synthetic construct
  source 1..20: mol_type = other DNA
taagaaccttcctgtttctc

SEQ ID NO: 249074 - DNA, 20 bp, synthetic construct
  source 1..20: mol_type = other DNA
gtaagaaccttcctgtttct

SEQ ID NO: 249075 - DNA, 20 bp, synthetic construct
  source 1..20: mol_type = other DNA
agtaagaaccttcctgtttc

SEQ ID NO: 249076 - DNA, 20 bp, synthetic construct
  source 1..20: mol_type = other DNA
cagtaagaaccttcctgttt

SEQ ID NO: 249077 - DNA, 20 bp, synthetic construct
  source 1..20: mol_type = other DNA
tcagtaagaaccttcctgtt

SEQ ID NO: 249078 - DNA, 20 bp, synthetic construct
  source 1..20: mol_type = other DNA
ctcagtaagaaccttcctgt

SEQ ID NO: 249079 - DNA, 20 bp, synthetic construct
  source 1..20: mol_type = other DNA
actcagtaagaaccttcctg

SEQ ID NO: 249080 - DNA, 20 bp, synthetic construct
  source 1..20: mol_type = other DNA
aactcagtaagaaccttcct

SEQ ID NO: 249081 - DNA, 20 bp, synthetic construct
  source 1..20: mol_type = other DNA
caactcagtaagaaccttcc

SEQ ID NO: 249082 - DNA, 20 bp, synthetic construct
  source 1..20: mol_type = other DNA
ccaactcagtaagaaccttc

SEQ ID NO: 249083 - DNA, 20 bp, synthetic construct
  source 1..20: mol_type = other DNA
accaactcagtaagaacctt

SEQ ID NO: 249084 - DNA, 20 bp, synthetic construct
  source 1..20: mol_type = other DNA
gaccaactcagtaagaacct

SEQ ID NO: 249085 - DNA, 20 bp, synthetic construct
  source 1..20: mol_type = other DNA
ggaccaactcagtaagaacc

SEQ ID NO: 249086 - DNA, 20 bp, synthetic construct
  source 1..20: mol_type = other DNA
aggaccaactcagtaagaac

SEQ ID NO: 249087 - DNA, 20 bp, synthetic construct
  source 1..20: mol_type = other DNA
caggaccaactcagtaagaa

SEQ ID NO: 249088 - DNA, 20 bp, synthetic construct
  source 1..20: mol_type = other DNA
ccaggaccaactcagtaaga

SEQ ID NO: 249089 - DNA, 20 bp, synthetic construct
  source 1..20: mol_type = other DNA
accaggaccaactcagtaag

SEQ ID NO: 249090 - DNA, 20 bp, synthetic construct
  source 1..20: mol_type = other DNA
caccaggaccaactcagtaa

SEQ ID NO: 249091 - DNA, 20 bp, synthetic construct
  source 1..20: mol_type = other DNA
acaccaggaccaactcagta

SEQ ID NO: 249092 - DNA, 20 bp, synthetic construct
  source 1..20: mol_type = other DNA
cacaccaggaccaactcagt

SEQ ID NO: 249093 - DNA, 20 bp, synthetic construct
  source 1..20: mol_type = other DNA
tcacaccaggaccaactcag

SEQ ID NO: 249094 - DNA, 20 bp, synthetic construct
  source 1..20: mol_type = other DNA
ctcacaccaggaccaactca

SEQ ID NO: 249095 - DNA, 20 bp, synthetic construct
  source 1..20: mol_type = other DNA
gctcacaccaggaccaactc

SEQ ID NO: 249096 - DNA, 20 bp, synthetic construct
  source 1..20: mol_type = other DNA
agctcacaccaggaccaact

SEQ ID NO: 249097 - DNA, 20 bp, synthetic construct
  source 1..20: mol_type = other DNA
cagctcacaccaggaccaac

SEQ ID NO: 249098 - DNA, 20 bp, synthetic construct
  source 1..20: mol_type = other DNA
gcagctcacaccaggaccaa

SEQ ID NO: 249099 - DNA, 20 bp, synthetic construct
  source 1..20: mol_type = other DNA
cgcagctcacaccaggacca

SEQ ID NO: 249100 - DNA, 20 bp, synthetic construct
  source 1..20: mol_type = other DNA
acgcagctcacaccaggacc

SEQ ID NO: 249101 - DNA, 20 bp, synthetic construct
  source 1..20: mol_type = other DNA
gacgcagctcacaccaggac

SEQ ID NO: 249102 - DNA, 20 bp, synthetic construct
  source 1..20: mol_type = other DNA
tgacgcagctcacaccagga

SEQ ID NO: 249103 - DNA, 20 bp, synthetic construct
  source 1..20: mol_type = other DNA
gtgacgcagctcacaccagg

SEQ ID NO: 249104 - DNA, 20 bp, synthetic construct
  source 1..20: mol_type = other DNA
tgtgacgcagctcacaccag

SEQ ID NO: 249105 - DNA, 20 bp, synthetic construct
  source 1..20: mol_type = other DNA
gtgtgacgcagctcacacca

SEQ ID NO: 249106 - DNA, 20 bp, synthetic construct
  source 1..20: mol_type = other DNA
agtgtgacgcagctcacacc

SEQ ID NO: 249107 - DNA, 20 bp, synthetic construct
  source 1..20: mol_type = other DNA
gagtgtgacgcagctcacac

SEQ ID NO: 249108 - DNA, 20 bp, synthetic construct
  source 1..20: mol_type = other DNA
ggagtgtgacgcagctcaca

SEQ ID NO: 249109 - DNA, 20 bp, synthetic construct
  source 1..20: mol_type = other DNA
gggagtgtgacgcagctcac

SEQ ID NO: 249110 - DNA, 20 bp, synthetic construct
  source 1..20: mol_type = other DNA
agggagtgtgacgcagctca

SEQ ID NO: 249111 - DNA, 20 bp, synthetic construct
  source 1..20: mol_type = other DNA
cagggagtgtgacgcagctc

SEQ ID NO: 249112 - DNA, 20 bp, synthetic construct
  source 1..20: mol_type = other DNA
gcagggagtgtgacgcagct

SEQ ID NO: 249113 - DNA, 20 bp, synthetic construct
  source 1..20: mol_type = other DNA
tgcagggagtgtgacgcagc

SEQ ID NO: 249114 - DNA, 20 bp, synthetic construct
  source 1..20: mol_type = other DNA
ctgcagggagtgtgacgcag

SEQ ID NO: 249115 - DNA, 20 bp, synthetic construct
  source 1..20: mol_type = other DNA
tctgcagggagtgtgacgca

SEQ ID NO: 249116 - DNA, 20 bp, synthetic construct
  source 1..20: mol_type = other DNA
ctctgcagggagtgtgacgc

SEQ ID NO: 249117 - DNA, 20 bp, synthetic construct
  source 1..20: mol_type = other DNA
cctctgcagggagtgtgacg

SEQ ID NO: 249118 - DNA, 20 bp, synthetic construct
  source 1..20: mol_type = other DNA
acctctgcagggagtgtgac

SEQ ID NO: 249119 - DNA, 20 bp, synthetic construct
  source 1..20: mol_type = other DNA
aacctctgcagggagtgtga

SEQ ID NO: 249120 - DNA, 20 bp, synthetic construct
  source 1..20: mol_type = other DNA
aaacctctgcagggagtgtg

SEQ ID NO: 249121 - DNA, 20 bp, synthetic construct
  source 1..20: mol_type = other DNA
gaaacctctgcagggagtgt

SEQ ID NO: 249122 - DNA, 20 bp, synthetic construct
  source 1..20: mol_type = other DNA
tgaaacctctgcagggagtg

SEQ ID NO: 249123 - DNA, 20 bp, synthetic construct
  source 1..20: mol_type = other DNA
ttgaaacctctgcagggagt

SEQ ID NO: 249124 - DNA, 20 bp, synthetic construct
  source 1..20: mol_type = other DNA
cttgaaacctctgcagggag

SEQ ID NO: 249125 - DNA, 20 bp, synthetic construct
  source 1..20: mol_type = other DNA
ccttgaaacctctgcaggga

SEQ ID NO: 249126 - DNA, 20 bp, synthetic construct
  source 1..20: mol_type = other DNA
tccttgaaacctctgcaggg

SEQ ID NO: 249127 - DNA, 20 bp, synthetic construct
  source 1..20: mol_type = other DNA
ctccttgaaacctctgcagg

SEQ ID NO: 249128 - DNA, 20 bp, synthetic construct
  source 1..20: mol_type = other DNA
tctccttgaaacctctgcag

SEQ ID NO: 249129 - DNA, 20 bp, synthetic construct
  source 1..20: mol_type = other DNA
gtctccttgaaacctctgca

SEQ ID NO: 249130 - DNA, 20 bp, synthetic construct
  source 1..20: mol_type = other DNA
agtctccttgaaacctctgc

SEQ ID NO: 249131 - DNA, 20 bp, synthetic construct
  source 1..20: mol_type = other DNA
gagtctccttgaaacctctg

SEQ ID NO: 249132 - DNA, 20 bp, synthetic construct
  source 1..20: mol_type = other DNA
agagtctccttgaaacctct

SEQ ID NO: 249133 - DNA, 20 bp, synthetic construct
  source 1..20: mol_type = other DNA
gagagtctccttgaaacctc

SEQ ID NO: 249134 - DNA, 20 bp, synthetic construct
  source 1..20: mol_type = other DNA
agagagtctccttgaaacct

SEQ ID NO: 249135 - DNA, 20 bp, synthetic construct
  source 1..20: mol_type = other DNA
gagagagtctccttgaaacc

SEQ ID NO: 249136 - DNA, 20 bp, synthetic construct
  source 1..20: mol_type = other DNA
agagagagtctccttgaaac

SEQ ID NO: 249137 - DNA, 20 bp, synthetic construct
  source 1..20: mol_type = other DNA
gagagagagtctccttgaaa

SEQ ID NO: 249138 - DNA, 20 bp, synthetic construct
  source 1..20: mol_type = other DNA
agagagagagtctccttgaa

SEQ ID NO: 249139 - DNA, 20 bp, synthetic construct
  source 1..20: mol_type = other DNA
gagagagagagtctccttga

SEQ ID NO: 249140 - DNA, 20 bp, synthetic construct
  source 1..20: mol_type = other DNA
agagagagagagtctccttg

SEQ ID NO: 249141 - DNA, 20 bp, synthetic construct
  source 1..20: mol_type = other DNA
gagagagagagagtctcctt

SEQ ID NO: 249142 - DNA, 20 bp, synthetic construct
  source 1..20: mol_type = other DNA
agagagagagagagtctcct

SEQ ID NO: 249143 - DNA, 20 bp, synthetic construct
  source 1..20: mol_type = other DNA
cagagagagagagagtctcc

SEQ ID NO: 249144 - DNA, 20 bp, synthetic construct
  source 1..20: mol_type = other DNA
acagagagagagagagtctc

SEQ ID NO: 249145 - DNA, 20 bp, synthetic construct
  source 1..20: mol_type = other DNA
gacagagagagagagagtct

SEQ ID NO: 249146 - DNA, 20 bp, synthetic construct
  source 1..20: mol_type = other DNA
agacagagagagagagagtc

SEQ ID NO: 249147 - DNA, 20 bp, synthetic construct
  source 1..20: mol_type = other DNA
gagacagagagagagagagt

SEQ ID NO: 249148 - DNA, 20 bp, synthetic construct
  source 1..20: mol_type = other DNA
ggagacagagagagagagag

SEQ ID NO: 249149 - DNA, 20 bp, synthetic construct
  source 1..20: mol_type = other DNA
tggagacagagagagagaga

SEQ ID NO: 249150 - DNA, 20 bp, synthetic construct
  source 1..20: mol_type = other DNA
atggagacagagagagagag

SEQ ID NO: 249151 - DNA, 20 bp, synthetic construct
  source 1..20: mol_type = other DNA
catggagacagagagagaga

SEQ ID NO: 249152 - DNA, 20 bp, synthetic construct
  source 1..20: mol_type = other DNA
ccatggagacagagagagag

SEQ ID NO: 249153 - DNA, 20 bp, synthetic construct
  source 1..20: mol_type = other DNA
cccatggagacagagagaga

SEQ ID NO: 249154 - DNA, 20 bp, synthetic construct
  source 1..20: mol_type = other DNA
ccccatggagacagagagag

SEQ ID NO: 249155 - DNA, 20 bp, synthetic construct
  source 1..20: mol_type = other DNA
tccccatggagacagagaga

SEQ ID NO: 249156 - DNA, 20 bp, synthetic construct
  source 1..20: mol_type = other DNA
gtccccatggagacagagag

SEQ ID NO: 249157 - DNA, 20 bp, synthetic construct
  source 1..20: mol_type = other DNA
ggtccccatggagacagaga

SEQ ID NO: 249158 - DNA, 20 bp, synthetic construct
  source 1..20: mol_type = other DNA
aggtccccatggagacagag

SEQ ID NO: 249159 - DNA, 20 bp, synthetic construct
  source 1..20: mol_type = other DNA
aaggtccccatggagacaga

SEQ ID NO: 249160 - DNA, 20 bp, synthetic construct
  source 1..20: mol_type = other DNA
taaggtccccatggagacag

SEQ ID NO: 249161 - DNA, 20 bp, synthetic construct
  source 1..20: mol_type = other DNA
ataaggtccccatggagaca

SEQ ID NO: 249162 - DNA, 20 bp, synthetic construct
  source 1..20: mol_type = other DNA
aataaggtccccatggagac

SEQ ID NO: 249163 - DNA, 20 bp, synthetic construct
  source 1..20: mol_type = other DNA
aaataaggtccccatggaga

SEQ ID NO: 249164 - DNA, 20 bp, synthetic construct
  source 1..20: mol_type = other DNA
caaataaggtccccatggag

SEQ ID NO: 249165 - DNA, 20 bp, synthetic construct
  source 1..20: mol_type = other DNA
tcaaataaggtccccatgga

SEQ ID NO: 249166 - DNA, 20 bp, synthetic construct
  source 1..20: mol_type = other DNA
ttcaaataaggtccccatgg

SEQ ID NO: 249167 - DNA, 20 bp, synthetic construct
  source 1..20: mol_type = other DNA
attcaaataaggtccccatg

SEQ ID NO: 249168 - DNA, 20 bp, synthetic construct
  source 1..20: mol_type = other DNA
aattcaaataaggtccccat

SEQ ID NO: 249169 - DNA, 20 bp, synthetic construct
  source 1..20: mol_type = other DNA
gaattcaaataaggtcccca

SEQ ID NO: 249170 - DNA, 20 bp, synthetic construct
  source 1..20: mol_type = other DNA
agaattcaaataaggtcccc

SEQ ID NO: 249171 - DNA, 20 bp, synthetic construct
  source 1..20: mol_type = other DNA
aagaattcaaataaggtccc

SEQ ID NO: 249172 - DNA, 20 bp, synthetic construct
  source 1..20: mol_type = other DNA
gaagaattcaaataaggtcc

SEQ ID NO: 249173 - DNA, 20 bp, synthetic construct
  source 1..20: mol_type = other DNA
agaagaattcaaataaggtc

SEQ ID NO: 249174 - DNA, 20 bp, synthetic construct
  source 1..20: mol_type = other DNA
tagaagaattcaaataaggt

SEQ ID NO: 249175 - DNA, 20 bp, synthetic construct
  source 1..20: mol_type = other DNA
gtagaagaattcaaataagg

SEQ ID NO: 249176 - DNA, 20 bp, synthetic construct
  source 1..20: mol_type = other DNA
agtagaagaattcaaataag

SEQ ID NO: 249177 - DNA, 20 bp, synthetic construct
  source 1..20: mol_type = other DNA
gagtagaagaattcaaataa

SEQ ID NO: 249178 - DNA, 20 bp, synthetic construct
  source 1..20: mol_type = other DNA
agagtagaagaattcaaata

SEQ ID NO: 249179 - DNA, 20 bp, synthetic construct
  source 1..20: mol_type = other DNA
aagagtagaagaattcaaat

SEQ ID NO: 249180 - DNA, 20 bp, synthetic construct
  source 1..20: mol_type = other DNA
taagagtagaagaattcaaa

SEQ ID NO: 249181 - DNA, 20 bp, synthetic construct
  source 1..20: mol_type = other DNA
gtaagagtagaagaattcaa

SEQ ID NO: 249182 - DNA, 20 bp, synthetic construct
  source 1..20: mol_type = other DNA
ggtaagagtagaagaattca

SEQ ID NO: 249183 - DNA, 20 bp, synthetic construct
  source 1..20: mol_type = other DNA
gggtaagagtagaagaattc

SEQ ID NO: 249184 - DNA, 20 bp, synthetic construct
  source 1..20: mol_type = other DNA
ggggtaagagtagaagaatt

SEQ ID NO: 249185 - DNA, 20 bp, synthetic construct
  source 1..20: mol_type = other DNA
tggggtaagagtagaagaat

SEQ ID NO: 249186 - DNA, 20 bp, synthetic construct
  source 1..20: mol_type = other DNA
ctggggtaagagtagaagaa

SEQ ID NO: 249187 - DNA, 20 bp, synthetic construct
  source 1..20: mol_type = other DNA
gctggggtaagagtagaaga

SEQ ID NO: 249188 - DNA, 20 bp, synthetic construct
  source 1..20: mol_type = other DNA
ggctggggtaagagtagaag

SEQ ID NO: 249189 - DNA, 20 bp, synthetic construct
  source 1..20: mol_type = other DNA
aggctggggtaagagtagaa

SEQ ID NO: 249190 - DNA, 20 bp, synthetic construct
  source 1..20: mol_type = other DNA
caggctggggtaagagtaga

SEQ ID NO: 249191 - DNA, 20 bp, synthetic construct
  source 1..20: mol_type = other DNA
gcaggctggggtaagagtag

SEQ ID NO: 249192 - DNA, 20 bp, synthetic construct
  source 1..20: mol_type = other DNA
ggcaggctggggtaagagta

SEQ ID NO: 249193 - DNA, 20 bp, synthetic construct
  source 1..20: mol_type = other DNA
tggcaggctggggtaagagt

SEQ ID NO: 249194 - DNA, 20 bp, synthetic construct
  source 1..20: mol_type = other DNA
atggcaggctggggtaagag

SEQ ID NO: 249195 - DNA, 20 bp, synthetic construct
  source 1..20: mol_type = other DNA
gatggcaggctggggtaaga

SEQ ID NO: 249196 - DNA, 20 bp, synthetic construct
  source 1..20: mol_type = other DNA
agatggcaggctggggtaag

SEQ ID NO: 249197 - DNA, 20 bp, synthetic construct
  source 1..20: mol_type = other DNA
gagatggcaggctggggtaa

SEQ ID NO: 249198 - DNA, 20 bp, synthetic construct
  source 1..20: mol_type = other DNA
ggagatggcaggctggggta

SEQ ID NO: 249199 - DNA, 20 bp, synthetic construct
  source 1..20: mol_type = other DNA
tggagatggcaggctggggt

SEQ ID NO: 249200 - DNA, 20 bp, synthetic construct
  source 1..20: mol_type = other DNA
ctggagatggcaggctgggg

SEQ ID NO: 249201 - DNA, 20 bp, synthetic construct
  source 1..20: mol_type = other DNA
gctggagatggcaggctggg

SEQ ID NO: 249202 - DNA, 20 bp, synthetic construct
  source 1..20: mol_type = other DNA
agctggagatggcaggctgg

SEQ ID NO: 249203 - DNA, 20 bp, synthetic construct
  source 1..20: mol_type = other DNA
tagctggagatggcaggctg

SEQ ID NO: 249204 - DNA, 20 bp, synthetic construct
  source 1..20: mol_type = other DNA
atagctggagatggcaggct

SEQ ID NO: 249205 - DNA, 20 bp, synthetic construct
  source 1..20: mol_type = other DNA
gatagctggagatggcaggc

SEQ ID NO: 249206 - DNA, 20 bp, synthetic construct
  source 1..20: mol_type = other DNA
ggatagctggagatggcagg

SEQ ID NO: 249207 - DNA, 20 bp, synthetic construct
  source 1..20: mol_type = other DNA
aggatagctggagatggcag

SEQ ID NO: 249208 - DNA, 20 bp, synthetic construct
  source 1..20: mol_type = other DNA
gaggatagctggagatggca

SEQ ID NO: 249209 - DNA, 20 bp, synthetic construct
  source 1..20: mol_type = other DNA
ggaggatagctggagatggc

SEQ ID NO: 249210 - DNA, 20 bp, synthetic construct
  source 1..20: mol_type = other DNA
gggaggatagctggagatgg

SEQ ID NO: 249211 - DNA, 20 bp, synthetic construct
  source 1..20: mol_type = other DNA
ggggaggatagctggagatg

SEQ ID NO: 249212 - DNA, 20 bp, synthetic construct
  source 1..20: mol_type = other DNA
aggggaggatagctggagat

SEQ ID NO: 249213 - DNA, 20 bp, synthetic construct
  source 1..20: mol_type = other DNA
caggggaggatagctggaga

SEQ ID NO: 249214 - DNA, 20 bp, synthetic construct
  source 1..20: mol_type = other DNA
tcaggggaggatagctggag

SEQ ID NO: 249215 - DNA, 20 bp, synthetic construct
  source 1..20: mol_type = other DNA
ttcaggggaggatagctgga

SEQ ID NO: 249216 - DNA, 20 bp, synthetic construct
  source 1..20: mol_type = other DNA
cttcaggggaggatagctgg

SEQ ID NO: 249217 - DNA, 20 bp, synthetic construct
  source 1..20: mol_type = other DNA
tcttcaggggaggatagctg

SEQ ID NO: 249218 - DNA, 20 bp, synthetic construct
  source 1..20: mol_type = other DNA
ctcttcaggggaggatagct

SEQ ID NO: 249219 - DNA, 20 bp, synthetic construct
  source 1..20: mol_type = other DNA
gctcttcaggggaggatagc

SEQ ID NO: 249220 - DNA, 20 bp, synthetic construct
  source 1..20: mol_type = other DNA
ggctcttcaggggaggatag

SEQ ID NO: 249221 - DNA, 20 bp, synthetic construct
  source 1..20: mol_type = other DNA
gggctcttcaggggaggata

SEQ ID NO: 249222 - DNA, 20 bp, synthetic construct
  source 1..20: mol_type = other DNA
agggctcttcaggggaggat

SEQ ID NO: 249223 - DNA, 20 bp, synthetic construct
  source 1..20: mol_type = other DNA
aagggctcttcaggggagga

SEQ ID NO: 249224 - DNA, 20 bp, synthetic construct
  source 1..20: mol_type = other DNA
gaagggctcttcaggggagg

SEQ ID NO: 249225 - DNA, 20 bp, synthetic construct
  source 1..20: mol_type = other DNA
agaagggctcttcaggggag

SEQ ID NO: 249226 - DNA, 20 bp, synthetic construct
  source 1..20: mol_type = other DNA
cagaagggctcttcagggga

SEQ ID NO: 249227 - DNA, 20 bp, synthetic construct
  source 1..20: mol_type = other DNA
gcagaagggctcttcagggg

SEQ ID NO: 249228 - DNA, 20 bp, synthetic construct
  source 1..20: mol_type = other DNA
agcagaagggctcttcaggg

SEQ ID NO: 249229 - DNA, 20 bp, synthetic construct
  source 1..20: mol_type = other DNA
cagcagaagggctcttcagg

SEQ ID NO: 249230 - DNA, 20 bp, synthetic construct
  source 1..20: mol_type = other DNA
gcagcagaagggctcttcag

SEQ ID NO: 249231 - DNA, 20 bp, synthetic construct
  source 1..20: mol_type = other DNA
cgcagcagaagggctcttca

SEQ ID NO: 249232 - DNA, 20 bp, synthetic construct
  source 1..20: mol_type = other DNA
gcgcagcagaagggctcttc

SEQ ID NO: 249233 - DNA, 20 bp, synthetic construct
  source 1..20: mol_type = other DNA
agcgcagcagaagggctctt

SEQ ID NO: 249234 - DNA, 20 bp, synthetic construct
  source 1..20: mol_type = other DNA
cagcgcagcagaagggctct

SEQ ID NO: 249235 - DNA, 20 bp, synthetic construct
  source 1..20: mol_type = other DNA
ccagcgcagcagaagggctc

SEQ ID NO: 249236 - DNA, 20 bp, synthetic construct
  source 1..20: mol_type = other DNA
tccagcgcagcagaagggct

SEQ ID NO: 249237 - DNA, 20 bp, synthetic construct
  source 1..20: mol_type = other DNA
atccagcgcagcagaagggc

SEQ ID NO: 249238 - DNA, 20 bp, synthetic construct
  source 1..20: mol_type = other DNA
aatccagcgcagcagaaggg

SEQ ID NO: 249239 - DNA, 20 bp, synthetic construct
  source 1..20: mol_type = other DNA
gaatccagcgcagcagaagg

SEQ ID NO: 249240 - DNA, 20 bp, synthetic construct
  source 1..20: mol_type = other DNA
agaatccagcgcagcagaag

SEQ ID NO: 249241 - DNA, 20 bp, synthetic construct
  source 1..20: mol_type = other DNA
cagaatccagcgcagcagaa

SEQ ID NO: 249242 - DNA, 20 bp, synthetic construct
  source 1..20: mol_type = other DNA
ccagaatccagcgcagcaga

SEQ ID NO: 249243 - DNA, 20 bp, synthetic construct
  source 1..20: mol_type = other DNA
accagaatccagcgcagcag

SEQ ID NO: 249244 - DNA, 20 bp, synthetic construct
  source 1..20: mol_type = other DNA
caccagaatccagcgcagca

SEQ ID NO: 249245 - DNA, 20 bp, synthetic construct
  source 1..20: mol_type = other DNA
ccaccagaatccagcgcagc

SEQ ID NO: 249246 - DNA, 20 bp, synthetic construct
  source 1..20: mol_type = other DNA
gccaccagaatccagcgcag

SEQ ID NO: 249247 - DNA, 20 bp, synthetic construct
  source 1..20: mol_type = other DNA
ggccaccagaatccagcgca

SEQ ID NO: 249248 - DNA, 20 bp, synthetic construct
  source 1..20: mol_type = other DNA
tggccaccagaatccagcgc

SEQ ID NO: 249249 - DNA, 20 bp, synthetic construct
  source 1..20: mol_type = other DNA
atggccaccagaatccagcg

SEQ ID NO: 249250 - DNA, 20 bp, synthetic construct
  source 1..20: mol_type = other DNA
catggccaccagaatccagc

SEQ ID NO: 249251 - DNA, 20 bp, synthetic construct
  source 1..20: mol_type = other DNA
acatggccaccagaatccag

SEQ ID NO: 249252 - DNA, 20 bp, synthetic construct
  source 1..20: mol_type = other DNA
gacatggccaccagaatcca

SEQ ID NO: 249253 - DNA, 20 bp, synthetic construct
  source 1..20: mol_type = other DNA
tgacatggccaccagaatcc

SEQ ID NO: 249254 - DNA, 20 bp, synthetic construct
  source 1..20: mol_type = other DNA
atgacatggccaccagaatc

SEQ ID NO: 249255 - DNA, 20 bp, synthetic construct
  source 1..20: mol_type = other DNA
gatgacatggccaccagaat

SEQ ID NO: 249256 - DNA, 20 bp, synthetic construct
  source 1..20: mol_type = other DNA
agatgacatggccaccagaa

SEQ ID NO: 249257 - DNA, 20 bp, synthetic construct
  source 1..20: mol_type = other DNA
gagatgacatggccaccaga

SEQ ID NO: 249258 - DNA, 20 bp, synthetic construct
  source 1..20: mol_type = other DNA
ggagatgacatggccaccag

SEQ ID NO: 249259 - DNA, 20 bp, synthetic construct
  source 1..20: mol_type = other DNA
aggagatgacatggccacca

SEQ ID NO: 249260 - DNA, 20 bp, synthetic construct
  source 1..20: mol_type = other DNA
gaggagatgacatggccacc

SEQ ID NO: 249261 - DNA, 20 bp, synthetic construct
  source 1..20: mol_type = other DNA
cgaggagatgacatggccac

SEQ ID NO: 249262 - DNA, 20 bp, synthetic construct
  source 1..20: mol_type = other DNA
ccgaggagatgacatggcca

SEQ ID NO: 249263 - DNA, 20 bp, synthetic construct
  source 1..20: mol_type = other DNA
gccgaggagatgacatggcc

SEQ ID NO: 249264 - DNA, 20 bp, synthetic construct
  source 1..20: mol_type = other DNA
ggccgaggagatgacatggc

SEQ ID NO: 249265 - DNA, 20 bp, synthetic construct
  source 1..20: mol_type = other DNA
gggccgaggagatgacatgg

SEQ ID NO: 249266 - DNA, 20 bp, synthetic construct
  source 1..20: mol_type = other DNA
ggggccgaggagatgacatg

SEQ ID NO: 249267 - DNA, 20 bp, synthetic construct
  source 1..20: mol_type = other DNA
cggggccgaggagatgacat

SEQ ID NO: 249268 - DNA, 20 bp, synthetic construct
  source 1..20: mol_type = other DNA
acggggccgaggagatgaca

SEQ ID NO: 249269 - DNA, 20 bp, synthetic construct
  source 1..20: mol_type = other DNA
cacggggccgaggagatgac

SEQ ID NO: 249270 - DNA, 20 bp, synthetic construct
  source 1..20: mol_type = other DNA
ccacggggccgaggagatga

SEQ ID NO: 249271 - DNA, 20 bp, synthetic construct
  source 1..20: mol_type = other DNA
cccacggggccgaggagatg

SEQ ID NO: 249272 - DNA, 20 bp, synthetic construct
  source 1..20: mol_type = other DNA
tcccacggggccgaggagat

SEQ ID NO: 249273 - DNA, 20 bp, synthetic construct
  source 1..20: mol_type = other DNA
ctcccacggggccgaggaga

SEQ ID NO: 249274 - DNA, 20 bp, synthetic construct
  source 1..20: mol_type = other DNA
actcccacggggccgaggag

SEQ ID NO: 249275 - DNA, 20 bp, synthetic construct
  source 1..20: mol_type = other DNA
gactcccacggggccgagga

SEQ ID NO: 249276 - DNA, 20 bp, synthetic construct
  source 1..20: mol_type = other DNA
agactcccacggggccgagg

SEQ ID NO: 249277 - DNA, 20 bp, synthetic construct
  source 1..20: mol_type = other DNA
cagactcccacggggccgag

SEQ ID NO: 249278 - DNA, 20 bp, synthetic construct
  source 1..20: mol_type = other DNA
tcagactcccacggggccga

SEQ ID NO: 249279 - DNA, 20 bp, synthetic construct
  source 1..20: mol_type = other DNA
ttcagactcccacggggccg

SEQ ID NO: 249280 - DNA, 20 bp, synthetic construct
  source 1..20: mol_type = other DNA
cttcagactcccacggggcc

SEQ ID NO: 249281 - DNA, 20 bp, synthetic construct
  source 1..20: mol_type = other DNA
tcttcagactcccacggggc

SEQ ID NO: 249282 - DNA, 20 bp, synthetic construct
  source 1..20: mol_type = other DNA
atcttcagactcccacgggg

SEQ ID NO: 249283 - DNA, 20 bp, synthetic construct
  source 1..20: mol_type = other DNA
gatcttcagactcccacggg

SEQ ID NO: 249284 - DNA, 20 bp, synthetic construct
  source 1..20: mol_type = other DNA
agatcttcagactcccacgg

SEQ ID NO: 249285 - DNA, 20 bp, synthetic construct
  source 1..20: mol_type = other DNA
cagatcttcagactcccacg

SEQ ID NO: 249286 - DNA, 20 bp, synthetic construct
  source 1..20: mol_type = other DNA
ccagatcttcagactcccac

SEQ ID NO: 249287 - DNA, 20 bp, synthetic construct
  source 1..20: mol_type = other DNA
gccagatcttcagactccca

SEQ ID NO: 249288 - DNA, 20 bp, synthetic construct
  source 1..20: mol_type = other DNA
agccagatcttcagactccc

SEQ ID NO: 249289 - DNA, 20 bp, synthetic construct
  source 1..20: mol_type = other DNA
cagccagatcttcagactcc

SEQ ID NO: 249290 - DNA, 20 bp, synthetic construct
  source 1..20: mol_type = other DNA
gcagccagatcttcagactc

SEQ ID NO: 249291 - DNA, 20 bp, synthetic construct
  source 1..20: mol_type = other DNA
tgcagccagatcttcagact

SEQ ID NO: 249292 - DNA, 20 bp, synthetic construct
  source 1..20: mol_type = other DNA
ctgcagccagatcttcagac

SEQ ID NO: 249293 - DNA, 20 bp, synthetic construct
  source 1..20: mol_type = other DNA
gctgcagccagatcttcaga

SEQ ID NO: 249294 - DNA, 20 bp, synthetic construct
  source 1..20: mol_type = other DNA
ggctgcagccagatcttcag

SEQ ID NO: 249295 - DNA, 20 bp, synthetic construct
  source 1..20: mol_type = other DNA
aggctgcagccagatcttca

SEQ ID NO: 249296 - DNA, 20 bp, synthetic construct
  source 1..20: mol_type = other DNA
gaggctgcagccagatcttc

SEQ ID NO: 249297 - DNA, 20 bp, synthetic construct
  source 1..20: mol_type = other DNA
tgaggctgcagccagatctt

SEQ ID NO: 249298 - DNA, 20 bp, synthetic construct
  source 1..20: mol_type = other DNA
gtgaggctgcagccagatct

SEQ ID NO: 249299 - DNA, 20 bp, synthetic construct
  source 1..20: mol_type = other DNA
ggtgaggctgcagccagatc

SEQ ID NO: 249300 - DNA, 20 bp, synthetic construct
  source 1..20: mol_type = other DNA
aggtgaggctgcagccagat

SEQ ID NO: 249301 - DNA, 20 bp, synthetic construct
  source 1..20: mol_type = other DNA
gaggtgaggctgcagccaga

SEQ ID NO: 249302 - DNA, 20 bp, synthetic construct
  source 1..20: mol_type = other DNA
agaggtgaggctgcagccag

SEQ ID NO: 249303 - DNA, 20 bp, synthetic construct
  source 1..20: mol_type = other DNA
cagaggtgaggctgcagcca

SEQ ID NO: 249304 - DNA, 20 bp, synthetic construct
  source 1..20: mol_type = other DNA
tcagaggtgaggctgcagcc

SEQ ID NO: 249305 - DNA, 20 bp, synthetic construct
  source 1..20: mol_type = other DNA
ctcagaggtgaggctgcagc

SEQ ID NO: 249306 - DNA, 20 bp, synthetic construct
  source 1..20: mol_type = other DNA
cctcagaggtgaggctgcag

SEQ ID NO: 249307 - DNA, 20 bp, synthetic construct
  source 1..20: mol_type = other DNA
acctcagaggtgaggctgca

SEQ ID NO: 249308 - DNA, 20 bp, synthetic construct
  source 1..20: mol_type = other DNA
gacctcagaggtgaggctgc

SEQ ID NO: 249309 - DNA, 20 bp, synthetic construct
  source 1..20: mol_type = other DNA
ggacctcagaggtgaggctg

SEQ ID NO: 249310 - DNA, 20 bp, synthetic construct
  source 1..20: mol_type = other DNA
aggacctcagaggtgaggct

SEQ ID NO: 249311 - DNA, 20 bp, synthetic construct
  source 1..20: mol_type = other DNA
caggacctcagaggtgaggc

SEQ ID NO: 249312 - DNA, 20 bp, synthetic construct
  source 1..20: mol_type = other DNA
gcaggacctcagaggtgagg

SEQ ID NO: 249313 - DNA, 20 bp, synthetic construct
  source 1..20: mol_type = other DNA
agcaggacctcagaggtgag

SEQ ID NO: 249314 - DNA, 20 bp, synthetic construct
  source 1..20: mol_type = other DNA
tagcaggacctcagaggtga

SEQ ID NO: 249315 - DNA, 20 bp, synthetic construct
  source 1..20: mol_type = other DNA
ctagcaggacctcagaggtg

SEQ ID NO: 249316 - DNA, 20 bp, synthetic construct
  source 1..20: mol_type = other DNA
actagcaggacctcagaggt

SEQ ID NO: 249317 - DNA, 20 bp, synthetic construct
  source 1..20: mol_type = other DNA
aactagcaggacctcagagg

SEQ ID NO: 249318 - DNA, 20 bp, synthetic construct
  source 1..20: mol_type = other DNA
caactagcaggacctcagag

SEQ ID NO: 249319 - DNA, 20 bp, synthetic construct
  source 1..20: mol_type = other DNA
gcaactagcaggacctcaga

SEQ ID NO: 249320 - DNA, 20 bp, synthetic construct
  source 1..20: mol_type = other DNA
ggcaactagcaggacctcag

SEQ ID NO: 249321 - DNA, 20 bp, synthetic construct
  source 1..20: mol_type = other DNA
tggcaactagcaggacctca

SEQ ID NO: 249322 - DNA, 20 bp, synthetic construct
  source 1..20: mol_type = other DNA
gtggcaactagcaggacctc

SEQ ID NO: 249323 - DNA, 20 bp, synthetic construct
  source 1..20: mol_type = other DNA
ggtggcaactagcaggacct

SEQ ID NO: 249324 - DNA, 20 bp, synthetic construct
  source 1..20: mol_type = other DNA
aggtggcaactagcaggacc

SEQ ID NO: 249325 - DNA, 20 bp, synthetic construct
  source 1..20: mol_type = other DNA
gaggtggcaactagcaggac

SEQ ID NO: 249326 - DNA, 20 bp, synthetic construct
  source 1..20: mol_type = other DNA
agaggtggcaactagcagga

SEQ ID NO: 249327 - DNA, 20 bp, synthetic construct
  source 1..20: mol_type = other DNA
aagaggtggcaactagcagg

SEQ ID NO: 249328 - DNA, 20 bp, synthetic construct
  source 1..20: mol_type = other DNA
taagaggtggcaactagcag

SEQ ID NO: 249329 - DNA, 20 bp, synthetic construct
  source 1..20: mol_type = other DNA
ttaagaggtggcaactagca

SEQ ID NO: 249330 - DNA, 20 bp, synthetic construct
  source 1..20: mol_type = other DNA
tttaagaggtggcaactagc

SEQ ID NO: 249331 - DNA, 20 bp, synthetic construct
  source 1..20: mol_type = other DNA
gtttaagaggtggcaactag

SEQ ID NO: 249332 - DNA, 20 bp, synthetic construct
  source 1..20: mol_type = other DNA
tgtttaagaggtggcaacta

SEQ ID NO: 249333 - DNA, 20 bp, synthetic construct
  source 1..20: mol_type = other DNA
atgtttaagaggtggcaact

SEQ ID NO: 249334 - DNA, 20 bp, synthetic construct
  source 1..20: mol_type = other DNA
catgtttaagaggtggcaac

SEQ ID NO: 249335 - DNA, 20 bp, synthetic construct
  source 1..20: mol_type = other DNA
tcatgtttaagaggtggcaa

SEQ ID NO: 249336 - DNA, 20 bp, synthetic construct
  source 1..20: mol_type = other DNA
atcatgtttaagaggtggca

SEQ ID NO: 249337 - DNA, 20 bp, synthetic construct
  source 1..20: mol_type = other DNA
gatcatgtttaagaggtggc

SEQ ID NO: 249338 - DNA, 20 bp, synthetic construct
  source 1..20: mol_type = other DNA
agatcatgtttaagaggtgg

SEQ ID NO: 249339 - DNA, 20 bp, synthetic construct
  source 1..20: mol_type = other DNA
cagatcatgtttaagaggtg

SEQ ID NO: 249340 - DNA, 20 bp, synthetic construct
  source 1..20: mol_type = other DNA
tcagatcatgtttaagaggt

SEQ ID NO: 249341 - DNA, 20 bp, synthetic construct
  source 1..20: mol_type = other DNA
ctcagatcatgtttaagagg

SEQ ID NO: 249342 - DNA, 20 bp, synthetic construct
  source 1..20: mol_type = other DNA
cctcagatcatgtttaagag

SEQ ID NO: 249343 - DNA, 20 bp, synthetic construct
  source 1..20: mol_type = other DNA
gcctcagatcatgtttaaga

SEQ ID NO: 249344 - DNA, 20 bp, synthetic construct
  source 1..20: mol_type = other DNA
agcctcagatcatgtttaag

SEQ ID NO: 249345 - DNA, 20 bp, synthetic construct
  source 1..20: mol_type = other DNA
gagcctcagatcatgtttaa

SEQ ID NO: 249346 - DNA, 20 bp, synthetic construct
  source 1..20: mol_type = other DNA
ggagcctcagatcatgttta

SEQ ID NO: 249347 - DNA, 20 bp, synthetic construct
  source 1..20: mol_type = other DNA
gggagcctcagatcatgttt

SEQ ID NO: 249348 - DNA, 20 bp, synthetic construct
  source 1..20: mol_type = other DNA
tgggagcctcagatcatgtt

SEQ ID NO: 249349 - DNA, 20 bp, synthetic construct
  source 1..20: mol_type = other DNA
atgggagcctcagatcatgt

SEQ ID NO: 249350 - DNA, 20 bp, synthetic construct
  source 1..20: mol_type = other DNA
catgggagcctcagatcatg

SEQ ID NO: 249351 - DNA, 20 bp, synthetic construct
  source 1..20: mol_type = other DNA
gcatgggagcctcagatcat

SEQ ID NO: 249352 - DNA, 20 bp, synthetic construct
  source 1..20: mol_type = other DNA
tgcatgggagcctcagatca

SEQ ID NO: 249353 - DNA, 20 bp, synthetic construct
  source 1..20: mol_type = other DNA
gtgcatgggagcctcagatc

SEQ ID NO: 249354 - DNA, 20 bp, synthetic construct
  source 1..20: mol_type = other DNA
agtgcatgggagcctcagat

SEQ ID NO: 249355 - DNA, 20 bp, synthetic construct
  source 1..20: mol_type = other DNA
gagtgcatgggagcctcaga

SEQ ID NO: 249356 - DNA, 20 bp, synthetic construct
  source 1..20: mol_type = other DNA
agagtgcatgggagcctcag

SEQ ID NO: 249357 - DNA, 20 bp, synthetic construct
  source 1..20: mol_type = other DNA
cagagtgcatgggagcctca

SEQ ID NO: 249358 - DNA, 20 bp, synthetic construct
  source 1..20: mol_type = other DNA
tcagagtgcatgggagcctc

SEQ ID NO: 249359 - DNA, 20 bp, synthetic construct
  source 1..20: mol_type = other DNA
gtcagagtgcatgggagcct

SEQ ID NO: 249360 - DNA, 20 bp, synthetic construct
  source 1..20: mol_type = other DNA
ggtcagagtgcatgggagcc

SEQ ID NO: 249361 - DNA, 20 bp, synthetic construct
  source 1..20: mol_type = other DNA
aggtcagagtgcatgggagc

SEQ ID NO: 249362 - DNA, 20 bp, synthetic construct
  source 1..20: mol_type = other DNA
caggtcagagtgcatgggag

SEQ ID NO: 249363 - DNA, 20 bp, synthetic construct
  source 1..20: mol_type = other DNA
acaggtcagagtgcatggga

SEQ ID NO: 249364 - DNA, 20 bp, synthetic construct
  source 1..20: mol_type = other DNA
cacaggtcagagtgcatggg

SEQ ID NO: 249365 - DNA, 20 bp, synthetic construct
  source 1..20: mol_type = other DNA
gcacaggtcagagtgcatgg

SEQ ID NO: 249366 - DNA, 20 bp, synthetic construct
  source 1..20: mol_type = other DNA
ggcacaggtcagagtgcatg

SEQ ID NO: 249367 - DNA, 20 bp, synthetic construct
  source 1..20: mol_type = other DNA
gggcacaggtcagagtgcat

SEQ ID NO: 249368 - DNA, 20 bp, synthetic construct
  source 1..20: mol_type = other DNA
tgggcacaggtcagagtgca

SEQ ID NO: 249369 - DNA, 20 bp, synthetic construct
  source 1..20: mol_type = other DNA
gtgggcacaggtcagagtgc

SEQ ID NO: 249370 - DNA, 20 bp, synthetic construct
  source 1..20: mol_type = other DNA
tgtgggcacaggtcagagtg

SEQ ID NO: 249371 - DNA, 20 bp, synthetic construct
  source 1..20: mol_type = other DNA
atgtgggcacaggtcagagt

SEQ ID NO: 249372 - DNA, 20 bp, synthetic construct
  source 1..20: mol_type = other DNA
catgtgggcacaggtcagag

SEQ ID NO: 249373 - DNA, 20 bp, synthetic construct
  source 1..20: mol_type = other DNA
ccatgtgggcacaggtcaga

SEQ ID NO: 249374 - DNA, 20 bp, synthetic construct
  source 1..20: mol_type = other DNA
cccatgtgggcacaggtcag

SEQ ID NO: 249375 - DNA, 20 bp, synthetic construct
  source 1..20: mol_type = other DNA
ccccatgtgggcacaggtca

SEQ ID NO: 249376 - DNA, 20 bp, synthetic construct
  source 1..20: mol_type = other DNA
gccccatgtgggcacaggtc

SEQ ID NO: 249377 - DNA, 20 bp, synthetic construct
  source 1..20: mol_type = other DNA
ggccccatgtgggcacaggt

SEQ ID NO: 249378 - DNA, 20 bp, synthetic construct
  source 1..20: mol_type = other DNA
gggccccatgtgggcacagg

SEQ ID NO: 249379 - DNA, 20 bp, synthetic construct
  source 1..20: mol_type = other DNA
tgggccccatgtgggcacag

SEQ ID NO: 249380 - DNA, 20 bp, synthetic construct
  source 1..20: mol_type = other DNA
gtgggccccatgtgggcaca

SEQ ID NO: 249381 - DNA, 20 bp, synthetic construct
  source 1..20: mol_type = other DNA
cgtgggccccatgtgggcac

SEQ ID NO: 249382 - DNA, 20 bp, synthetic construct
  source 1..20: mol_type = other DNA
ccgtgggccccatgtgggca

SEQ ID NO: 249383 - DNA, 20 bp, synthetic construct
  source 1..20: mol_type = other DNA
cccgtgggccccatgtgggc

SEQ ID NO: 249384 - DNA, 20 bp, synthetic construct
  source 1..20: mol_type = other DNA
tcccgtgggccccatgtggg

SEQ ID NO: 249385 - DNA, 20 bp, synthetic construct
  source 1..20: mol_type = other DNA
ttcccgtgggccccatgtgg

SEQ ID NO: 249386 - DNA, 20 bp, synthetic construct
  source 1..20: mol_type = other DNA
tttcccgtgggccccatgtg

SEQ ID NO: 249387 - DNA, 20 bp, synthetic construct
  source 1..20: mol_type = other DNA
gtttcccgtgggccccatgt

SEQ ID NO: 249388 - DNA, 20 bp, synthetic construct
  source 1..20: mol_type = other DNA
tgtttcccgtgggccccatg

SEQ ID NO: 249389 - DNA, 20 bp, synthetic construct
  source 1..20: mol_type = other DNA
gtgtttcccgtgggccccat

SEQ ID NO: 249390 - DNA, 20 bp, synthetic construct
  source 1..20: mol_type = other DNA
cgtgtttcccgtgggcccca

SEQ ID NO: 249391 - DNA, 20 bp, synthetic construct
  source 1..20: mol_type = other DNA
gcgtgtttcccgtgggcccc

SEQ ID NO: 249392 - DNA, 20 bp, synthetic construct
  source 1..20: mol_type = other DNA
agcgtgtttcccgtgggccc

SEQ ID NO: 249393 - DNA, 20 bp, synthetic construct
  source 1..20: mol_type = other DNA
cagcgtgtttcccgtgggcc

SEQ ID NO: 249394 - DNA, 20 bp, synthetic construct
  source 1..20: mol_type = other DNA
ccagcgtgtttcccgtgggc

SEQ ID NO: 249395 - DNA, 20 bp, synthetic construct
  source 1..20: mol_type = other DNA
gccagcgtgtttcccgtggg

SEQ ID NO: 249396 - DNA, 20 bp, synthetic construct
  source 1..20: mol_type = other DNA
tgccagcgtgtttcccgtgg

SEQ ID NO: 249397 - DNA, 20 bp, synthetic construct
  source 1..20: mol_type = other DNA
ttgccagcgtgtttcccgtg

SEQ ID NO: 249398 - DNA, 20 bp, synthetic construct
  source 1..20: mol_type = other DNA
cttgccagcgtgtttcccgt

SEQ ID NO: 249399 - DNA, 20 bp, synthetic construct
  source 1..20: mol_type = other DNA
gcttgccagcgtgtttcccg

SEQ ID NO: 249400 - DNA, 20 bp, synthetic construct
  source 1..20: mol_type = other DNA
tgcttgccagcgtgtttccc

SEQ ID NO: 249401 - DNA, 20 bp, synthetic construct
  source 1..20: mol_type = other DNA
ttgcttgccagcgtgtttcc

SEQ ID NO: 249402 - DNA, 20 bp, synthetic construct
  source 1..20: mol_type = other DNA
tttgcttgccagcgtgtttc

SEQ ID NO: 249403 - DNA, 20 bp, synthetic construct
  source 1..20: mol_type = other DNA
gtttgcttgccagcgtgttt

SEQ ID NO: 249404 - DNA, 20 bp, synthetic construct
  source 1..20: mol_type = other DNA
agtttgcttgccagcgtgtt

SEQ ID NO: 249405 - DNA, 20 bp, synthetic construct
  source 1..20: mol_type = other DNA
cagtttgcttgccagcgtgt

SEQ ID NO: 249406 - DNA, 20 bp, synthetic construct
  source 1..20: mol_type = other DNA
acagtttgcttgccagcgtg

SEQ ID NO: 249407 - DNA, 20 bp, synthetic construct
  source 1..20: mol_type = other DNA
cacagtttgcttgccagcgt

SEQ ID NO: 249408 - DNA, 20 bp, synthetic construct
  source 1..20: mol_type = other DNA
ccacagtttgcttgccagcg

SEQ ID NO: 249409 - DNA, 20 bp, synthetic construct
  source 1..20: mol_type = other DNA
cccacagtttgcttgccagc

SEQ ID NO: 249410 - DNA, 20 bp, synthetic construct
  source 1..20: mol_type = other DNA
acccacagtttgcttgccag

SEQ ID NO: 249411 - DNA, 20 bp, synthetic construct
  source 1..20: mol_type = other DNA
cacccacagtttgcttgcca

SEQ ID NO: 249412 - DNA, 20 bp, synthetic construct
  source 1..20: mol_type = other DNA
acacccacagtttgcttgcc

SEQ ID NO: 249413 - DNA, 20 bp, synthetic construct
  source 1..20: mol_type = other DNA
cacacccacagtttgcttgc

SEQ ID NO: 249414 - DNA, 20 bp, synthetic construct
  source 1..20: mol_type = other DNA
gcacacccacagtttgcttg

SEQ ID NO: 249415 - DNA, 20 bp, synthetic construct
  source 1..20: mol_type = other DNA
tgcacacccacagtttgctt

SEQ ID NO: 249416 - DNA, 20 bp, synthetic construct
  source 1..20: mol_type = other DNA
ctgcacacccacagtttgct

SEQ ID NO: 249417 - DNA, 20 bp, synthetic construct
  source 1..20: mol_type = other DNA
tctgcacacccacagtttgc

SEQ ID NO: 249418 - DNA, 20 bp, synthetic construct
  source 1..20: mol_type = other DNA
gtctgcacacccacagtttg

SEQ ID NO: 249419 - DNA, 20 bp, synthetic construct
  source 1..20: mol_type = other DNA
cgtctgcacacccacagttt

SEQ ID NO: 249420 - DNA, 20 bp, synthetic construct
  source 1..20: mol_type = other DNA
ccgtctgcacacccacagtt

SEQ ID NO: 249421 - DNA, 20 bp, synthetic construct
  source 1..20: mol_type = other DNA
accgtctgcacacccacagt

SEQ ID NO: 249422 - DNA, 20 bp, synthetic construct
  source 1..20: mol_type = other DNA
aaccgtctgcacacccacag

SEQ ID NO: 249423 - DNA, 20 bp, synthetic construct
  source 1..20: mol_type = other DNA
gaaccgtctgcacacccaca

SEQ ID NO: 249424 - DNA, 20 bp, synthetic construct
  source 1..20: mol_type = other DNA
agaaccgtctgcacacccac

SEQ ID NO: 249425 - DNA, 20 bp, synthetic construct
  source 1..20: mol_type = other DNA
gagaaccgtctgcacaccca

SEQ ID NO: 249426 - DNA, 20 bp, synthetic construct
  source 1..20: mol_type = other DNA
tgagaaccgtctgcacaccc

SEQ ID NO: 249427 - DNA, 20 bp, synthetic construct
  source 1..20: mol_type = other DNA
ctgagaaccgtctgcacacc

SEQ ID NO: 249428 - DNA, 20 bp, synthetic construct
  source 1..20: mol_type = other DNA
cctgagaaccgtctgcacac

SEQ ID NO: 249429 - DNA, 20 bp, synthetic construct
  source 1..20: mol_type = other DNA
ccctgagaaccgtctgcaca

SEQ ID NO: 249430 - DNA, 20 bp, synthetic construct
  source 1..20: mol_type = other DNA
gccctgagaaccgtctgcac

SEQ ID NO: 249431 - DNA, 20 bp, synthetic construct
  source 1..20: mol_type = other DNA
agccctgagaaccgtctgca

SEQ ID NO: 249432 - DNA, 20 bp, synthetic construct
  source 1..20: mol_type = other DNA
cagccctgagaaccgtctgc

SEQ ID NO: 249433 - DNA, 20 bp, synthetic construct
  source 1..20: mol_type = other DNA
gcagccctgagaaccgtctg

SEQ ID NO: 249434 - DNA, 20 bp, synthetic construct
  source 1..20: mol_type = other DNA
tgcagccctgagaaccgtct

SEQ ID NO: 249435 - DNA, 20 bp, synthetic construct
  source 1..20: mol_type = other DNA
ctgcagccctgagaaccgtc

SEQ ID NO: 249436 - DNA, 20 bp, synthetic construct
  source 1..20: mol_type = other DNA
gctgcagccctgagaaccgt

SEQ ID NO: 249437 - DNA, 20 bp, synthetic construct
  source 1..20: mol_type = other DNA
tgctgcagccctgagaaccg

SEQ ID NO: 249438 - DNA, 20 bp, synthetic construct
  source 1..20: mol_type = other DNA
gtgctgcagccctgagaacc

SEQ ID NO: 249439 - DNA, 20 bp, synthetic construct
  source 1..20: mol_type = other DNA
ggtgctgcagccctgagaac

SEQ ID NO: 249440 - DNA, 20 bp, synthetic construct
  source 1..20: mol_type = other DNA
aggtgctgcagccctgagaa

SEQ ID NO: 249441 - DNA, 20 bp, synthetic construct
  source 1..20: mol_type = other DNA
caggtgctgcagccctgaga

SEQ ID NO: 249442 - DNA, 20 bp, synthetic construct
  source 1..20: mol_type = other DNA
acaggtgctgcagccctgag

SEQ ID NO: 249443 - DNA, 20 bp, synthetic construct
  source 1..20: mol_type = other DNA
gacaggtgctgcagccctga

SEQ ID NO: 249444 - DNA, 20 bp, synthetic construct
  source 1..20: mol_type = other DNA
ggacaggtgctgcagccctg

SEQ ID NO: 249445 - DNA, 20 bp, synthetic construct
  source 1..20: mol_type = other DNA
aggacaggtgctgcagccct

SEQ ID NO: 249446 - DNA, 20 bp, synthetic construct
  source 1..20: mol_type = other DNA
aaggacaggtgctgcagccc

SEQ ID NO: 249447 - DNA, 20 bp, synthetic construct
  source 1..20: mol_type = other DNA
aaaggacaggtgctgcagcc

SEQ ID NO: 249448 - DNA, 20 bp, synthetic construct
  source 1..20: mol_type = other DNA
caaaggacaggtgctgcagc

SEQ ID NO: 249449 - DNA, 20 bp, synthetic construct
  source 1..20: mol_type = other DNA
gcaaaggacaggtgctgcag

SEQ ID NO: 249450 - DNA, 20 bp, synthetic construct
  source 1..20: mol_type = other DNA
agcaaaggacaggtgctgca

SEQ ID NO: 249451 - DNA, 20 bp, synthetic construct
  source 1..20: mol_type = other DNA
gagcaaaggacaggtgctgc

SEQ ID NO: 249452 - DNA, 20 bp, synthetic construct
  source 1..20: mol_type = other DNA
agagcaaaggacaggtgctg

SEQ ID NO: 249453 - DNA, 20 bp, synthetic construct
  source 1..20: mol_type = other DNA
cagagcaaaggacaggtgct

SEQ ID NO: 249454 - DNA, 20 bp, synthetic construct
  source 1..20: mol_type = other DNA
gcagagcaaaggacaggtgc

SEQ ID NO: 249455 - DNA, 20 bp, synthetic construct
  source 1..20: mol_type = other DNA
ggcagagcaaaggacaggtg

SEQ ID NO: 249456 - DNA, 20 bp, synthetic construct
  source 1..20: mol_type = other DNA
gggcagagcaaaggacaggt

SEQ ID NO: 249457 - DNA, 20 bp, synthetic construct
  source 1..20: mol_type = other DNA
ggggcagagcaaaggacagg

SEQ ID NO: 249458 - DNA, 20 bp, synthetic construct
  source 1..20: mol_type = other DNA
gggggcagagcaaaggacag

SEQ ID NO: 249459 - DNA, 20 bp, synthetic construct
  source 1..20: mol_type = other DNA
tgggggcagagcaaaggaca

SEQ ID NO: 249460 - DNA, 20 bp, synthetic construct
  source 1..20: mol_type = other DNA
ttgggggcagagcaaaggac

SEQ ID NO: 249461 - DNA, 20 bp, synthetic construct
  source 1..20: mol_type = other DNA
tttgggggcagagcaaagga

SEQ ID NO: 249462 - DNA, 20 bp, synthetic construct
  source 1..20: mol_type = other DNA
ctttgggggcagagcaaagg

SEQ ID NO: 249463 - DNA, 20 bp, synthetic construct
  source 1..20: mol_type = other DNA
gctttgggggcagagcaaag

SEQ ID NO: 249464 - DNA, 20 bp, synthetic construct
  source 1..20: mol_type = other DNA
tgctttgggggcagagcaaa

SEQ ID NO: 249465 - DNA, 20 bp, synthetic construct
  source 1..20: mol_type = other DNA
ttgctttgggggcagagcaa

SEQ ID NO: 249466 - DNA, 20 bp, synthetic construct
  source 1..20: mol_type = other DNA
cttgctttgggggcagagca

SEQ ID NO: 249467 - DNA, 20 bp, synthetic construct
  source 1..20: mol_type = other DNA
ccttgctttgggggcagagc

SEQ ID NO: 249468 - DNA, 20 bp, synthetic construct
  source 1..20: mol_type = other DNA
gccttgctttgggggcagag

SEQ ID NO: 249469 - DNA, 20 bp, synthetic construct
  source 1..20: mol_type = other DNA
ggccttgctttgggggcaga

SEQ ID NO: 249470 - DNA, 20 bp, synthetic construct
  source 1..20: mol_type = other DNA
tggccttgctttgggggcag

SEQ ID NO: 249471 - DNA, 20 bp, synthetic construct
  source 1..20: mol_type = other DNA
ctggccttgctttgggggca

SEQ ID NO: 249472 - DNA, 20 bp, synthetic construct
  source 1..20: mol_type = other DNA
gctggccttgctttgggggc

SEQ ID NO: 249473 - DNA, 20 bp, synthetic construct
  source 1..20: mol_type = other DNA
ggctggccttgctttggggg

SEQ ID NO: 249474 - DNA, 20 bp, synthetic construct
  source 1..20: mol_type = other DNA
gggctggccttgctttgggg

SEQ ID NO: 249475 - DNA, 20 bp, synthetic construct
  source 1..20: mol_type = other DNA
tgggctggccttgctttggg

SEQ ID NO: 249476 - DNA, 20 bp, synthetic construct
  source 1..20: mol_type = other DNA
atgggctggccttgctttgg

SEQ ID NO: 249477 - DNA, 20 bp, synthetic construct
  source 1..20: mol_type = other DNA
gatgggctggccttgctttg

SEQ ID NO: 249478 - DNA, 20 bp, synthetic construct
  source 1..20: mol_type = other DNA
agatgggctggccttgcttt

SEQ ID NO: 249479 - DNA, 20 bp, synthetic construct
  source 1..20: mol_type = other DNA
aagatgggctggccttgctt

SEQ ID NO: 249480 - DNA, 20 bp, synthetic construct
  source 1..20: mol_type = other DNA
gaagatgggctggccttgct

SEQ ID NO: 249481 - DNA, 20 bp, synthetic construct
  source 1..20: mol_type = other DNA
ggaagatgggctggccttgc

SEQ ID NO: 249482 - DNA, 20 bp, synthetic construct
  source 1..20: mol_type = other DNA
tggaagatgggctggccttg

SEQ ID NO: 249483 - DNA, 20 bp, synthetic construct
  source 1..20: mol_type = other DNA
atggaagatgggctggcctt

SEQ ID NO: 249484 - DNA, 20 bp, synthetic construct
  source 1..20: mol_type = other DNA
gatggaagatgggctggcct

SEQ ID NO: 249485 - DNA, 20 bp, synthetic construct
  source 1..20: mol_type = other DNA
ggatggaagatgggctggcc

SEQ ID NO: 249486 - DNA, 20 bp, synthetic construct
  source 1..20: mol_type = other DNA
aggatggaagatgggctggc

SEQ ID NO: 249487 - DNA, 20 bp, synthetic construct
  source 1..20: mol_type = other DNA
gaggatggaagatgggctgg

SEQ ID NO: 249488 - DNA, 20 bp, synthetic construct
  source 1..20: mol_type = other DNA
agaggatggaagatgggctg

SEQ ID NO: 249489 - DNA, 20 bp, synthetic construct
  source 1..20: mol_type = other DNA
tagaggatggaagatgggct

SEQ ID NO: 249490 - DNA, 20 bp, synthetic construct
  source 1..20: mol_type = other DNA
ctagaggatggaagatgggc

SEQ ID NO: 249491 - DNA, 20 bp, synthetic construct
  source 1..20: mol_type = other DNA
actagaggatggaagatggg

SEQ ID NO: 249492 - DNA, 20 bp, synthetic construct
  source 1..20: mol_type = other DNA
cactagaggatggaagatgg

SEQ ID NO: 249493 - DNA, 20 bp, synthetic construct
  source 1..20: mol_type = other DNA
acactagaggatggaagatg

SEQ ID NO: 249494 - DNA, 20 bp, synthetic construct
  source 1..20: mol_type = other DNA
aacactagaggatggaagat

SEQ ID NO: 249495 - DNA, 20 bp, synthetic construct
  source 1..20: mol_type = other DNA
gaacactagaggatggaaga

SEQ ID NO: 249496 - DNA, 20 bp, synthetic construct
  source 1..20: mol_type = other DNA
ggaacactagaggatggaag

SEQ ID NO: 249497 - DNA, 20 bp, synthetic construct
  source 1..20: mol_type = other DNA
aggaacactagaggatggaa

SEQ ID NO: 249498 - DNA, 20 bp, synthetic construct
  source 1..20: mol_type = other DNA
aaggaacactagaggatgga

SEQ ID NO: 249499 - DNA, 20 bp, synthetic construct
  source 1..20: mol_type = other DNA
caaggaacactagaggatgg

SEQ ID NO: 249500 - DNA, 20 bp, synthetic construct
  source 1..20: mol_type = other DNA
ccaaggaacactagaggatg

SEQ ID NO: 249501 - DNA, 20 bp, synthetic construct
  source 1..20: mol_type = other DNA
accaaggaacactagaggat

SEQ ID NO: 249502 - DNA, 20 bp, synthetic construct
  source 1..20: mol_type = other DNA
caccaaggaacactagagga

SEQ ID NO: 249503 - DNA, 20 bp, synthetic construct
  source 1..20: mol_type = other DNA
ccaccaaggaacactagagg

SEQ ID NO: 249504 - DNA, 20 bp, synthetic construct
  source 1..20: mol_type = other DNA
cccaccaaggaacactagag

SEQ ID NO: 249505 - DNA, 20 bp, synthetic construct
  source 1..20: mol_type = other DNA
ccccaccaaggaacactaga

SEQ ID NO: 249506 - DNA, 20 bp, synthetic construct
  source 1..20: mol_type = other DNA
gccccaccaaggaacactag

SEQ ID NO: 249507 - DNA, 20 bp, synthetic construct
  source 1..20: mol_type = other DNA
ggccccaccaaggaacacta

SEQ ID NO: 249508 - DNA, 20 bp, synthetic construct
  source 1..20: mol_type = other DNA
gggccccaccaaggaacact

SEQ ID NO: 249509 - DNA, 20 bp, synthetic construct
  source 1..20: mol_type = other DNA
agggccccaccaaggaacac

SEQ ID NO: 249510 - DNA, 20 bp, synthetic construct
  source 1..20: mol_type = other DNA
cagggccccaccaaggaaca

SEQ ID NO: 249511 - DNA, 20 bp, synthetic construct
  source 1..20: mol_type = other DNA
tcagggccccaccaaggaac

SEQ ID NO: 249512 - DNA, 20 bp, synthetic construct
  source 1..20: mol_type = other DNA
gtcagggccccaccaaggaa

SEQ ID NO: 249513 - DNA, 20 bp, synthetic construct
  source 1..20: mol_type = other DNA
ggtcagggccccaccaagga

SEQ ID NO: 249514 - DNA, 20 bp, synthetic construct
  source 1..20: mol_type = other DNA
tggtcagggccccaccaagg

SEQ ID NO: 249515 - DNA, 20 bp, synthetic construct
  source 1..20: mol_type = other DNA
gtggtcagggccccaccaag

SEQ ID NO: 249516 - DNA, 20 bp, synthetic construct
  source 1..20: mol_type = other DNA
tgtggtcagggccccaccaa

SEQ ID NO: 249517 - DNA, 20 bp, synthetic construct
  source 1..20: mol_type = other DNA
ctgtggtcagggccccacca

SEQ ID NO: 249518 - DNA, 20 bp, synthetic construct
  source 1..20: mol_type = other DNA
actgtggtcagggccccacc

SEQ ID NO: 249519 - DNA, 20 bp, synthetic construct
  source 1..20: mol_type = other DNA
gactgtggtcagggccccac

SEQ ID NO: 249520 - DNA, 20 bp, synthetic construct
  source 1..20: mol_type = other DNA
ggactgtggtcagggcccca

SEQ ID NO: 249521 - DNA, 20 bp, synthetic construct
  source 1..20: mol_type = other DNA
tggactgtggtcagggcccc

SEQ ID NO: 249522 - DNA, 20 bp, synthetic construct
  source 1..20: mol_type = other DNA
gtggactgtggtcagggccc

SEQ ID NO: 249523 - DNA, 20 bp, synthetic construct
  source 1..20: mol_type = other DNA
ggtggactgtggtcagggcc

SEQ ID NO: 249524 - DNA, 20 bp, synthetic construct
  source 1..20: mol_type = other DNA
tggtggactgtggtcagggc

SEQ ID NO: 249525 - DNA, 20 bp, synthetic construct
  source 1..20: mol_type = other DNA
ctggtggactgtggtcaggg

SEQ ID NO: 249526 - DNA, 20 bp, synthetic construct
  source 1..20: mol_type = other DNA
cctggtggactgtggtcagg

SEQ ID NO: 249527 - DNA, 20 bp, synthetic construct
  source 1..20: mol_type = other DNA
acctggtggactgtggtcag

SEQ ID NO: 249528 - DNA, 20 bp, synthetic construct
  source 1..20: mol_type = other DNA
gacctggtggactgtggtca

SEQ ID NO: 249529 - DNA, 20 bp, synthetic construct
  source 1..20: mol_type = other DNA
ggacctggtggactgtggtc

SEQ ID NO: 249530 - DNA, 20 bp, synthetic construct
  source 1..20: mol_type = other DNA
gggacctggtggactgtggt

SEQ ID NO: 249531 - DNA, 20 bp, synthetic construct
  source 1..20: mol_type = other DNA
agggacctggtggactgtgg

SEQ ID NO: 249532 - DNA, 20 bp, synthetic construct
  source 1..20: mol_type = other DNA
tagggacctggtggactgtg

SEQ ID NO: 249533 - DNA, 20 bp, synthetic construct
  source 1..20: mol_type = other DNA
ttagggacctggtggactgt

SEQ ID NO: 249534 - DNA, 20 bp, synthetic construct
  source 1..20: mol_type = other DNA
gttagggacctggtggactg

SEQ ID NO: 249535 - DNA, 20 bp, synthetic construct
  source 1..20: mol_type = other DNA
ggttagggacctggtggact

SEQ ID NO: 249536 - DNA, 20 bp, synthetic construct
  source 1..20: mol_type = other DNA
tggttagggacctggtggac

SEQ ID NO: 249537 - DNA, 20 bp, synthetic construct
  source 1..20: mol_type = other DNA
ctggttagggacctggtgga

SEQ ID NO: 249538 - DNA, 20 bp, synthetic construct
  source 1..20: mol_type = other DNA
tctggttagggacctggtgg

SEQ ID NO: 249539 - DNA, 20 bp, synthetic construct
  source 1..20: mol_type = other DNA
ctctggttagggacctggtg

SEQ ID NO: 249540 - DNA, 20 bp, synthetic construct
  source 1..20: mol_type = other DNA
cctctggttagggacctggt

SEQ ID NO: 249541 - DNA, 20 bp, synthetic construct
  source 1..20: mol_type = other DNA
ccctctggttagggacctgg

SEQ ID NO: 249542 - DNA, 20 bp, synthetic construct
  source 1..20: mol_type = other DNA
cccctctggttagggacctg

SEQ ID NO: 249543 - DNA, 20 bp, synthetic construct
  source 1..20: mol_type = other DNA
tcccctctggttagggacct

SEQ ID NO: 249544 - DNA, 20 bp, synthetic construct
  source 1..20: mol_type = other DNA
gtcccctctggttagggacc

SEQ ID NO: 249545 - DNA, 20 bp, synthetic construct
  source 1..20: mol_type = other DNA
tgtcccctctggttagggac

SEQ ID NO: 249546 - DNA, 20 bp, synthetic construct
  source 1..20: mol_type = other DNA
gtgtcccctctggttaggga

SEQ ID NO: 249547 - DNA, 20 bp, synthetic construct
  source 1..20: mol_type = other DNA
tgtgtcccctctggttaggg

SEQ ID NO: 249548 - DNA, 20 bp, synthetic construct
  source 1..20: mol_type = other DNA
gtgtgtcccctctggttagg

SEQ ID NO: 249549 - DNA, 20 bp, synthetic construct
  source 1..20: mol_type = other DNA
tgtgtgtcccctctggttag

SEQ ID NO: 249550 - DNA, 20 bp, synthetic construct
  source 1..20: mol_type = other DNA
gtgtgtgtcccctctggtta

SEQ ID NO: 249551 - DNA, 20 bp, synthetic construct
  source 1..20: mol_type = other DNA
ggtgtgtgtcccctctggtt

SEQ ID NO: 249552 - DNA, 20 bp, synthetic construct
  source 1..20: mol_type = other DNA
tggtgtgtgtcccctctggt

SEQ ID NO: 249553 - DNA, 20 bp, synthetic construct
  source 1..20: mol_type = other DNA
ctggtgtgtgtcccctctgg

SEQ ID NO: 249554 - DNA, 20 bp, synthetic construct
  source 1..20: mol_type = other DNA
cctggtgtgtgtcccctctg

SEQ ID NO: 249555 - DNA, 20 bp, synthetic construct
  source 1..20: mol_type = other DNA
acctggtgtgtgtcccctct

SEQ ID NO: 249556 - DNA, 20 bp, synthetic construct
  source 1..20: mol_type = other DNA
cacctggtgtgtgtcccctc

SEQ ID NO: 249557 - DNA, 20 bp, synthetic construct
  source 1..20: mol_type = other DNA
acacctggtgtgtgtcccct

SEQ ID NO: 249558 - DNA, 20 bp, synthetic construct
  source 1..20: mol_type = other DNA
gacacctggtgtgtgtcccc

SEQ ID NO: 249559 - DNA, 20 bp, synthetic construct
  source 1..20: mol_type = other DNA
ggacacctggtgtgtgtccc

SEQ ID NO: 249560 - DNA, 20 bp, synthetic construct
  source 1..20: mol_type = other DNA
aggacacctggtgtgtgtcc

SEQ ID NO: 249561 - DNA, 20 bp, synthetic construct
  source 1..20: mol_type = other DNA
gaggacacctggtgtgtgtc

SEQ ID NO: 249562 - DNA, 20 bp, synthetic construct
  source 1..20: mol_type = other DNA
tgaggacacctggtgtgtgt

SEQ ID NO: 249563 - DNA, 20 bp, synthetic construct
  source 1..20: mol_type = other DNA
ttgaggacacctggtgtgtg

SEQ ID NO: 249564 - DNA, 20 bp, synthetic construct
  source 1..20: mol_type = other DNA
attgaggacacctggtgtgt

SEQ ID NO: 249565 - DNA, 20 bp, synthetic construct
  source 1..20: mol_type = other DNA
cattgaggacacctggtgtg

SEQ ID NO: 249566 - DNA, 20 bp, synthetic construct
  source 1..20: mol_type = other DNA
acattgaggacacctggtgt

SEQ ID NO: 249567 - DNA, 20 bp, synthetic construct
  source 1..20: mol_type = other DNA
tacattgaggacacctggtg

SEQ ID NO: 249568 - DNA, 20 bp, synthetic construct
  source 1..20: mol_type = other DNA
atacattgaggacacctggt

SEQ ID NO: 249569 - DNA, 20 bp, synthetic construct
  source 1..20: mol_type = other DNA
aatacattgaggacacctgg

SEQ ID NO: 249570 - DNA, 20 bp, synthetic construct
  source 1..20: mol_type = other DNA
caatacattgaggacacctg

SEQ ID NO: 249571 - DNA, 20 bp, synthetic construct
  source 1..20: mol_type = other DNA
gcaatacattgaggacacct

SEQ ID NO: 249572 - DNA, 20 bp, synthetic construct
  source 1..20: mol_type = other DNA
ggcaatacattgaggacacc

SEQ ID NO: 249573 - DNA, 20 bp, synthetic construct
  source 1..20: mol_type = other DNA
aggcaatacattgaggacac

SEQ ID NO: 249574 - DNA, 20 bp, synthetic construct
  source 1..20: mol_type = other DNA
aaggcaatacattgaggaca

SEQ ID NO: 249575 - DNA, 20 bp, synthetic construct
  source 1..20: mol_type = other DNA
caaggcaatacattgaggac

SEQ ID NO: 249576 - DNA, 20 bp, synthetic construct
  source 1..20: mol_type = other DNA
tcaaggcaatacattgagga

SEQ ID NO: 249577 - DNA, 20 bp, synthetic construct
  source 1..20: mol_type = other DNA
ttcaaggcaatacattgagg

SEQ ID NO: 249578 - DNA, 20 bp, synthetic construct
  source 1..20: mol_type = other DNA
tttcaaggcaatacattgag

SEQ ID NO: 249579 - DNA, 20 bp, synthetic construct
  source 1..20: mol_type = other DNA
gtttcaaggcaatacattga

SEQ ID NO: 249580 - DNA, 20 bp, synthetic construct
  source 1..20: mol_type = other DNA
tgtttcaaggcaatacattg

SEQ ID NO: 249581 - DNA, 20 bp, synthetic construct
  source 1..20: mol_type = other DNA
ctgtttcaaggcaatacatt

SEQ ID NO: 249582 - DNA, 20 bp, synthetic construct
  source 1..20: mol_type = other DNA
actgtttcaaggcaatacat

SEQ ID NO: 249583 - DNA, 20 bp, synthetic construct
  source 1..20: mol_type = other DNA
aactgtttcaaggcaataca

SEQ ID NO: 249584 - DNA, 20 bp, synthetic construct
  source 1..20: mol_type = other DNA
caactgtttcaaggcaatac

SEQ ID NO: 249585 - DNA, 20 bp, synthetic construct
  source 1..20: mol_type = other DNA
acaactgtttcaaggcaata

SEQ ID NO: 249586 - DNA, 20 bp, synthetic construct
  source 1..20: mol_type = other DNA
cacaactgtttcaaggcaat

SEQ ID NO: 249587 - DNA, 20 bp, synthetic construct
  source 1..20: mol_type = other DNA
gcacaactgtttcaaggcaa

SEQ ID NO: 249588 - DNA, 20 bp, synthetic construct
  source 1..20: mol_type = other DNA
agcacaactgtttcaaggca

SEQ ID NO: 249589 - DNA, 20 bp, synthetic construct
  source 1..20: mol_type = other DNA
cagcacaactgtttcaaggc

SEQ ID NO: 249590 - DNA, 20 bp, synthetic construct
  source 1..20: mol_type = other DNA
ccagcacaactgtttcaagg

SEQ ID NO: 249591 - DNA, 20 bp, synthetic construct
  source 1..20: mol_type = other DNA
cccagcacaactgtttcaag

SEQ ID NO: 249592 - DNA, 20 bp, synthetic construct
  source 1..20: mol_type = other DNA
tcccagcacaactgtttcaa

SEQ ID NO: 249593 - DNA, 20 bp, synthetic construct
  source 1..20: mol_type = other DNA
gtcccagcacaactgtttca

SEQ ID NO: 249594 - DNA, 20 bp, synthetic construct
  source 1..20: mol_type = other DNA
agtcccagcacaactgtttc

SEQ ID NO: 249595 - DNA, 20 bp, synthetic construct
  source 1..20: mol_type = other DNA
cagtcccagcacaactgttt

SEQ ID NO: 249596 - DNA, 20 bp, synthetic construct
  source 1..20: mol_type = other DNA
acagtcccagcacaactgtt

SEQ ID NO: 249597 - DNA, 20 bp, synthetic construct
  source 1..20: mol_type = other DNA
cacagtcccagcacaactgt

SEQ ID NO: 249598 - DNA, 20 bp, synthetic construct
  source 1..20: mol_type = other DNA
tcacagtcccagcacaactg

SEQ ID NO: 249599 - DNA, 20 bp, synthetic construct
  source 1..20: mol_type = other DNA
atcacagtcccagcacaact

SEQ ID NO: 249600 - DNA, 20 bp, synthetic construct
  source 1..20: mol_type = other DNA
catcacagtcccagcacaac

SEQ ID NO: 249601 - DNA, 20 bp, synthetic construct
  source 1..20: mol_type = other DNA
ccatcacagtcccagcacaa

SEQ ID NO: 249602 - DNA, 20 bp, synthetic construct
  source 1..20: mol_type = other DNA
cccatcacagtcccagcaca

SEQ ID NO: 249603 - DNA, 20 bp, synthetic construct
  source 1..20: mol_type = other DNA
ccccatcacagtcccagcac

SEQ ID NO: 249604 - DNA, 20 bp, synthetic construct
  source 1..20: mol_type = other DNA
cccccatcacagtcccagca

SEQ ID NO: 249605 - DNA, 20 bp, synthetic construct
  source 1..20: mol_type = other DNA
ccccccatcacagtcccagc

SEQ ID NO: 249606 - DNA, 20 bp, synthetic construct
  source 1..20: mol_type = other DNA
accccccatcacagtcccag

SEQ ID NO: 249607 - DNA, 20 bp, synthetic construct
  source 1..20: mol_type = other DNA
caccccccatcacagtccca

SEQ ID NO: 249608 - DNA, 20 bp, synthetic construct
  source 1..20: mol_type = other DNA
ccaccccccatcacagtccc

SEQ ID NO: 249609 - DNA, 20 bp, synthetic construct
  source 1..20: mol_type = other DNA
gccaccccccatcacagtcc

SEQ ID NO: 249610 - DNA, 20 bp, synthetic construct
  source 1..20: mol_type = other DNA
ggccaccccccatcacagtc

SEQ ID NO: 249611 - DNA, 20 bp, synthetic construct
  source 1..20: mol_type = other DNA
tggccaccccccatcacagt

SEQ ID NO: 249612 - DNA, 20 bp, synthetic construct
  source 1..20: mol_type = other DNA
atggccaccccccatcacag

SEQ ID NO: 249613 - DNA, 20 bp, synthetic construct
  source 1..20: mol_type = other DNA
catggccaccccccatcaca

SEQ ID NO: 249614 - DNA, 20 bp, synthetic construct
  source 1..20: mol_type = other DNA
acatggccaccccccatcac

SEQ ID NO: 249615 - DNA, 20 bp, synthetic construct
  source 1..20: mol_type = other DNA
tacatggccaccccccatca

SEQ ID NO: 249616 - DNA, 20 bp, synthetic construct
  source 1..20: mol_type = other DNA
ctacatggccaccccccatc

SEQ ID NO: 249617 - DNA, 20 bp, synthetic construct
  source 1..20: mol_type = other DNA
gctacatggccaccccccat

SEQ ID NO: 249618 - DNA, 20 bp, synthetic construct
  source 1..20: mol_type = other DNA
ggctacatggccacccccca

SEQ ID NO: 249619 - DNA, 20 bp, synthetic construct
  source 1..20: mol_type = other DNA
tggctacatggccacccccc

SEQ ID NO: 249620 - DNA, 20 bp, synthetic construct
  source 1..20: mol_type = other DNA
gtggctacatggccaccccc

SEQ ID NO: 249621 - DNA, 20 bp, synthetic construct
  source 1..20: mol_type = other DNA
ggtggctacatggccacccc

SEQ ID NO: 249622 - DNA, 20 bp, synthetic construct
  source 1..20: mol_type = other DNA
gggtggctacatggccaccc

SEQ ID NO: 249623 - DNA, 20 bp, synthetic construct
  source 1..20: mol_type = other DNA
ggggtggctacatggccacc

SEQ ID NO: 249624 - DNA, 20 bp, synthetic construct
  source 1..20: mol_type = other DNA
gggggtggctacatggccac

SEQ ID NO: 249625 - DNA, 20 bp, synthetic construct
  source 1..20: mol_type = other DNA
tgggggtggctacatggcca

SEQ ID NO: 249626 - DNA, 20 bp, synthetic construct
  source 1..20: mol_type = other DNA
gtgggggtggctacatggcc

SEQ ID NO: 249627 - DNA, 20 bp, synthetic construct
  source 1..20: mol_type = other DNA
ggtgggggtggctacatggc

SEQ ID NO: 249628 - DNA, 20 bp, synthetic construct
  source 1..20: mol_type = other DNA
tggtgggggtggctacatgg

SEQ ID NO: 249629 - DNA, 20 bp, synthetic construct
  source 1..20: mol_type = other DNA
gtggtgggggtggctacatg

SEQ ID NO: 249630 - DNA, 20 bp, synthetic construct
  source 1..20: mol_type = other DNA
ggtggtgggggtggctacat

SEQ ID NO: 249631 - DNA, 20 bp, synthetic construct
  source 1..20: mol_type = other DNA
gggtggtgggggtggctaca

SEQ ID NO: 249632 - DNA, 20 bp, synthetic construct
  source 1..20: mol_type = other DNA
ggggtggtgggggtggctac

SEQ ID NO: 249633 - DNA, 20 bp, synthetic construct
  source 1..20: mol_type = other DNA
gggggtggtgggggtggcta

SEQ ID NO: 249634 - DNA, 20 bp, synthetic construct
  source 1..20: mol_type = other DNA
tgggggtggtgggggtggct

SEQ ID NO: 249635 - DNA, 20 bp, synthetic construct
  source 1..20: mol_type = other DNA
ttgggggtggtgggggtggc

SEQ ID NO: 249636 - DNA, 20 bp, synthetic construct
  source 1..20: mol_type = other DNA
cttgggggtggtgggggtgg

SEQ ID NO: 249637 - DNA, 20 bp, synthetic construct
  source 1..20: mol_type = other DNA
gcttgggggtggtgggggtg

SEQ ID NO: 249638 - DNA, 20 bp, synthetic construct
  source 1..20: mol_type = other DNA
ggcttgggggtggtgggggt

SEQ ID NO: 249639 - DNA, 20 bp, synthetic construct
  source 1..20: mol_type = other DNA
tggcttgggggtggtggggg

SEQ ID NO: 249640 - DNA, 20 bp, synthetic construct
  source 1..20: mol_type = other DNA
gtggcttgggggtggtgggg

SEQ ID NO: 249641 - DNA, 20 bp, synthetic construct
  source 1..20: mol_type = other DNA
agtggcttgggggtggtggg

SEQ ID NO: 249642 - DNA, 20 bp, synthetic construct
  source 1..20: mol_type = other DNA
gagtggcttgggggtggtgg

SEQ ID NO: 249643 - DNA, 20 bp, synthetic construct
  source 1..20: mol_type = other DNA
agagtggcttgggggtggtg

SEQ ID NO: 249644 - DNA, 20 bp, synthetic construct
  source 1..20: mol_type = other DNA
gagagtggcttgggggtggt

SEQ ID NO: 249645 - DNA, 20 bp, synthetic construct
  source 1..20: mol_type = other DNA
agagagtggcttgggggtgg

SEQ ID NO: 249646 - DNA, 20 bp, synthetic construct
  source 1..20: mol_type = other DNA
gagagagtggcttgggggtg

SEQ ID NO: 249647 - DNA, 20 bp, synthetic construct
  source 1..20: mol_type = other DNA
ggagagagtggcttgggggt

SEQ ID NO: 249648 - DNA, 20 bp, synthetic construct
  source 1..20: mol_type = other DNA
tggagagagtggcttggggg

SEQ ID NO: 249649 - DNA, 20 bp, synthetic construct
  source 1..20: mol_type = other DNA
ttggagagagtggcttgggg

SEQ ID NO: 249650 - DNA, 20 bp, synthetic construct
  source 1..20: mol_type = other DNA
cttggagagagtggcttggg

SEQ ID NO: 249651 - DNA, 20 bp, synthetic construct
  source 1..20: mol_type = other DNA
ccttggagagagtggcttgg

SEQ ID NO: 249652 - DNA, 20 bp, synthetic construct
  source 1..20: mol_type = other DNA
tccttggagagagtggcttg

SEQ ID NO: 249653 - DNA, 20 bp, synthetic construct
  source 1..20: mol_type = other DNA
ttccttggagagagtggctt

SEQ ID NO: 249654 - DNA, 20 bp, synthetic construct
  source 1..20: mol_type = other DNA
tttccttggagagagtggct

SEQ ID NO: 249655 - DNA, 20 bp, synthetic construct
  source 1..20: mol_type = other DNA
atttccttggagagagtggc

SEQ ID NO: 249656 - DNA, 20 bp, synthetic construct
  source 1..20: mol_type = other DNA
gatttccttggagagagtgg

SEQ ID NO: 249657 - DNA, 20 bp, synthetic construct
  source 1..20: mol_type = other DNA
ggatttccttggagagagtg

SEQ ID NO: 249658 - DNA, 20 bp, synthetic construct
  source 1..20: mol_type = other DNA
aggatttccttggagagagt

SEQ ID NO: 249659 - DNA, 20 bp, synthetic construct
  source 1..20: mol_type = other DNA
gaggatttccttggagagag

SEQ ID NO: 249660 - DNA, 20 bp, synthetic construct
  source 1..20: mol_type = other DNA
ggaggatttccttggagaga

SEQ ID NO: 249661 - DNA, 20 bp, synthetic construct
  source 1..20: mol_type = other DNA
aggaggatttccttggagag

SEQ ID NO: 249662 - DNA, 20 bp, synthetic construct
  source 1..20: mol_type = other DNA
taggaggatttccttggaga

SEQ ID NO: 249663 - DNA, 20 bp, synthetic construct
  source 1..20: mol_type = other DNA
ttaggaggatttccttggag

SEQ ID NO: 249664 - DNA, 20 bp, synthetic construct
  source 1..20: mol_type = other DNA
tttaggaggatttccttgga

SEQ ID NO: 249665 - DNA, 20 bp, synthetic construct
  source 1..20: mol_type = other DNA
ctttaggaggatttccttgg

SEQ ID NO: 249666 - DNA, 20 bp, synthetic construct
  source 1..20: mol_type = other DNA
tctttaggaggatttccttg

SEQ ID NO: 249667 - DNA, 20 bp, synthetic construct
  source 1..20: mol_type = other DNA
atctttaggaggatttcctt

SEQ ID NO: 249668 - DNA, 20 bp, synthetic construct
  source 1..20: mol_type = other DNA
gatctttaggaggatttcct

SEQ ID NO: 249669 - DNA, 20 bp, synthetic construct
  source 1..20: mol_type = other DNA
ggatctttaggaggatttcc

SEQ ID NO: 249670 - DNA, 20 bp, synthetic construct
  source 1..20: mol_type = other DNA
gggatctttaggaggatttc

SEQ ID NO: 249671 - DNA, 20 bp, synthetic construct
  source 1..20: mol_type = other DNA
agggatctttaggaggattt

SEQ ID NO: 249672 - DNA, 20 bp, synthetic construct
  source 1..20: mol_type = other DNA
aagggatctttaggaggatt

SEQ ID NO: 249673 - DNA, 20 bp, synthetic construct
  source 1..20: mol_type = other DNA
aaagggatctttaggaggat

SEQ ID NO: 249674 - DNA, 20 bp, synthetic construct
  source 1..20: mol_type = other DNA
taaagggatctttaggagga

SEQ ID NO: 249675 - DNA, 20 bp, synthetic construct
  source 1..20: mol_type = other DNA
gtaaagggatctttaggagg

SEQ ID NO: 249676 - DNA, 20 bp, synthetic construct
  source 1..20: mol_type = other DNA
tgtaaagggatctttaggag

SEQ ID NO: 249677 - DNA, 20 bp, synthetic construct
  source 1..20: mol_type = other DNA
atgtaaagggatctttagga

SEQ ID NO: 249678 - DNA, 20 bp, synthetic construct
  source 1..20: mol_type = other DNA
gatgtaaagggatctttagg

SEQ ID NO: 249679 - DNA, 20 bp, synthetic construct
  source 1..20: mol_type = other DNA
ggatgtaaagggatctttag

SEQ ID NO: 249680 - DNA, 20 bp, synthetic construct
  source 1..20: mol_type = other DNA
aggatgtaaagggatcttta

SEQ ID NO: 249681 - DNA, 20 bp, synthetic construct
  source 1..20: mol_type = other DNA
gaggatgtaaagggatcttt

SEQ ID NO: 249682 - DNA, 20 bp, synthetic construct
  source 1..20: mol_type = other DNA
ggaggatgtaaagggatctt

SEQ ID NO: 249683 - DNA, 20 bp, synthetic construct
  source 1..20: mol_type = other DNA
tggaggatgtaaagggatct

SEQ ID NO: 249684 - DNA, 20 bp, synthetic construct
  source 1..20: mol_type = other DNA
atggaggatgtaaagggatc

SEQ ID NO: 249685 - DNA, 20 bp, synthetic construct
  source 1..20: mol_type = other DNA
catggaggatgtaaagggat

SEQ ID NO: 249686 - DNA, 20 bp, synthetic construct
  source 1..20: mol_type = other DNA
acatggaggatgtaaaggga

SEQ ID NO: 249687 - DNA, 20 bp, synthetic construct
  source 1..20: mol_type = other DNA
cacatggaggatgtaaaggg

SEQ ID NO: 249688 - DNA, 20 bp, synthetic construct
  source 1..20: mol_type = other DNA
ccacatggaggatgtaaagg

SEQ ID NO: 249689 - DNA, 20 bp, synthetic construct
  source 1..20: mol_type = other DNA
accacatggaggatgtaaag

SEQ ID NO: 249690 - DNA, 20 bp, synthetic construct
  source 1..20: mol_type = other DNA
caccacatggaggatgtaaa

SEQ ID NO: 249691 - DNA, 20 bp, synthetic construct
  source 1..20: mol_type = other DNA
ccaccacatggaggatgtaa

SEQ ID NO: 249692 - DNA, 20 bp, synthetic construct
  source 1..20: mol_type = other DNA
cccaccacatggaggatgta

SEQ ID NO: 249693 - DNA, 20 bp, synthetic construct
  source 1..20: mol_type = other DNA
ccccaccacatggaggatgt

SEQ ID NO: 249694 - DNA, 20 bp, synthetic construct
  source 1..20: mol_type = other DNA
tccccaccacatggaggatg

SEQ ID NO: 249695 - DNA, 20 bp, synthetic construct
  source 1..20: mol_type = other DNA
ctccccaccacatggaggat

SEQ ID NO: 249696 - DNA, 20 bp, synthetic construct
  source 1..20: mol_type = other DNA
cctccccaccacatggagga

SEQ ID NO: 249697 - DNA, 20 bp, synthetic construct
  source 1..20: mol_type = other DNA
acctccccaccacatggagg

SEQ ID NO: 249698 - DNA, 20 bp, synthetic construct
  source 1..20: mol_type = other DNA
aacctccccaccacatggag

SEQ ID NO: 249699 - DNA, 20 bp, synthetic construct
  source 1..20: mol_type = other DNA
gaacctccccaccacatgga

SEQ ID NO: 249700 - DNA, 20 bp, synthetic construct
  source 1..20: mol_type = other DNA
agaacctccccaccacatgg

SEQ ID NO: 249701 - DNA, 20 bp, synthetic construct
  source 1..20: mol_type = other DNA
tagaacctccccaccacatg

SEQ ID NO: 249702 - DNA, 20 bp, synthetic construct
  source 1..20: mol_type = other DNA
ctagaacctccccaccacat

SEQ ID NO: 249703 - DNA, 20 bp, synthetic construct
  source 1..20: mol_type = other DNA
tctagaacctccccaccaca

SEQ ID NO: 249704 - DNA, 20 bp, synthetic construct
  source 1..20: mol_type = other DNA
ctctagaacctccccaccac

SEQ ID NO: 249705 - DNA, 20 bp, synthetic construct
  source 1..20: mol_type = other DNA
actctagaacctccccacca

SEQ ID NO: 249706 - DNA, 20 bp, synthetic construct
  source 1..20: mol_type = other DNA
aactctagaacctccccacc

SEQ ID NO: 249707 - DNA, 20 bp, synthetic construct
  source 1..20: mol_type = other DNA
caactctagaacctccccac

SEQ ID NO: 249708 - DNA, 20 bp, synthetic construct
  source 1..20: mol_type = other DNA
ccaactctagaacctcccca

SEQ ID NO: 249709 - DNA, 20 bp, synthetic construct
  source 1..20: mol_type = other DNA
cccaactctagaacctcccc

SEQ ID NO: 249710 - DNA, 20 bp, synthetic construct
  source 1..20: mol_type = other DNA
acccaactctagaacctccc

SEQ ID NO: 249711 - DNA, 20 bp, synthetic construct
  source 1..20: mol_type = other DNA
cacccaactctagaacctcc

SEQ ID NO: 249712 - DNA, 20 bp, synthetic construct
  source 1..20: mol_type = other DNA
gcacccaactctagaacctc

SEQ ID NO: 249713 - DNA, 20 bp, synthetic construct
  source 1..20: mol_type = other DNA
tgcacccaactctagaacct

SEQ ID NO: 249714 - DNA, 20 bp, synthetic construct
  source 1..20: mol_type = other DNA
atgcacccaactctagaacc

SEQ ID NO: 249715 - DNA, 20 bp, synthetic construct
  source 1..20: mol_type = other DNA
catgcacccaactctagaac

SEQ ID NO: 249716 - DNA, 20 bp, synthetic construct
  source 1..20: mol_type = other DNA
acatgcacccaactctagaa

SEQ ID NO: 249717 - DNA, 20 bp, synthetic construct
  source 1..20: mol_type = other DNA
cacatgcacccaactctaga

SEQ ID NO: 249718 - DNA, 20 bp, synthetic construct
  source 1..20: mol_type = other DNA
acacatgcacccaactctag

SEQ ID NO: 249719 - DNA, 20 bp, synthetic construct
  source 1..20: mol_type = other DNA
gacacatgcacccaactcta

SEQ ID NO: 249720 - DNA, 20 bp, synthetic construct
  source 1..20: mol_type = other DNA
agacacatgcacccaactct

SEQ ID NO: 249721 - DNA, 20 bp, synthetic construct
  source 1..20: mol_type = other DNA
aagacacatgcacccaactc

SEQ ID NO: 249722 - DNA, 20 bp, synthetic construct
  source 1..20: mol_type = other DNA
gaagacacatgcacccaact

SEQ ID NO: 249723 - DNA, 20 bp, synthetic construct
  source 1..20: mol_type = other DNA
tgaagacacatgcacccaac

SEQ ID NO: 249724 - DNA, 20 bp, synthetic construct
  source 1..20: mol_type = other DNA
ctgaagacacatgcacccaa

SEQ ID NO: 249725 - DNA, 20 bp, synthetic construct
  source 1..20: mol_type = other DNA
gctgaagacacatgcaccca

SEQ ID NO: 249726 - DNA, 20 bp, synthetic construct
  source 1..20: mol_type = other DNA
agctgaagacacatgcaccc

SEQ ID NO: 249727 - DNA, 20 bp, synthetic construct
  source 1..20: mol_type = other DNA
tagctgaagacacatgcacc

SEQ ID NO: 249728 - DNA, 20 bp, synthetic construct
  source 1..20: mol_type = other DNA
gtagctgaagacacatgcac

SEQ ID NO: 249729 - DNA, 20 bp, synthetic construct
  source 1..20: mol_type = other DNA
agtagctgaagacacatgca

SEQ ID NO: 249730 - DNA, 20 bp, synthetic construct
  source 1..20: mol_type = other DNA
cagtagctgaagacacatgc

SEQ ID NO: 249731 - DNA, 20 bp, synthetic construct
  source 1..20: mol_type = other DNA
tcagtagctgaagacacatg

SEQ ID NO: 249732 - DNA, 20 bp, synthetic construct
  source 1..20: mol_type = other DNA
gtcagtagctgaagacacat

SEQ ID NO: 249733 - DNA, 20 bp, synthetic construct
  source 1..20: mol_type = other DNA
tgtcagtagctgaagacaca

SEQ ID NO: 249734 - DNA, 20 bp, synthetic construct
  source 1..20: mol_type = other DNA
ttgtcagtagctgaagacac

SEQ ID NO: 249735 - DNA, 20 bp, synthetic construct
  source 1..20: mol_type = other DNA
attgtcagtagctgaagaca

SEQ ID NO: 249736 - DNA, 20 bp, synthetic construct
  source 1..20: mol_type = other DNA
cattgtcagtagctgaagac

SEQ ID NO: 249737 - DNA, 20 bp, synthetic construct
  source 1..20: mol_type = other DNA
gcattgtcagtagctgaaga

SEQ ID NO: 249738 - DNA, 20 bp, synthetic construct
  source 1..20: mol_type = other DNA
tgcattgtcagtagctgaag

SEQ ID NO: 249739 - DNA, 20 bp, synthetic construct
  source 1..20: mol_type = other DNA
ctgcattgtcagtagctgaa

SEQ ID NO: 249740 - DNA, 20 bp, synthetic construct
  source 1..20: mol_type = other DNA
tctgcattgtcagtagctga

SEQ ID NO: 249741 - DNA, 20 bp, synthetic construct
  source 1..20: mol_type = other DNA
gtctgcattgtcagtagctg

SEQ ID NO: 249742 - DNA, 20 bp, synthetic construct
  source 1..20: mol_type = other DNA
ggtctgcattgtcagtagct

SEQ ID NO: 249743 - DNA, 20 bp, synthetic construct
  source 1..20: mol_type = other DNA
aggtctgcattgtcagtagc

SEQ ID NO: 249744 - DNA, 20 bp, synthetic construct
  source 1..20: mol_type = other DNA
aaggtctgcattgtcagtag

SEQ ID NO: 249745 - DNA, 20 bp, synthetic construct
  source 1..20: mol_type = other DNA
taaggtctgcattgtcagta

SEQ ID NO: 249746 - DNA, 20 bp, synthetic construct
  source 1..20: mol_type = other DNA
ctaaggtctgcattgtcagt

SEQ ID NO: 249747 - DNA, 20 bp, synthetic construct
  source 1..20: mol_type = other DNA
actaaggtctgcattgtcag

SEQ ID NO: 249748 - DNA, 20 bp, synthetic construct
  source 1..20: mol_type = other DNA
aactaaggtctgcattgtca

SEQ ID NO: 249749 - DNA, 20 bp, synthetic construct
  source 1..20: mol_type = other DNA
caactaaggtctgcattgtc

SEQ ID NO: 249750 - DNA, 20 bp, synthetic construct
  source 1..20: mol_type = other DNA
ccaactaaggtctgcattgt

SEQ ID NO: 249751 - DNA, 20 bp, synthetic construct
  source 1..20: mol_type = other DNA
gccaactaaggtctgcattg

SEQ ID NO: 249752 - DNA, 20 bp, synthetic construct
  source 1..20: mol_type = other DNA
tgccaactaaggtctgcatt

SEQ ID NO: 249753 - DNA, 20 bp, synthetic construct
  source 1..20: mol_type = other DNA
gtgccaactaaggtctgcat

SEQ ID NO: 249754 - DNA, 20 bp, synthetic construct
  source 1..20: mol_type = other DNA
ggtgccaactaaggtctgca

SEQ ID NO: 249755 - DNA, 20 bp, synthetic construct
  source 1..20: mol_type = other DNA
aggtgccaactaaggtctgc

SEQ ID NO: 249756 - DNA, 20 bp, synthetic construct
  source 1..20: mol_type = other DNA
gaggtgccaactaaggtctg

SEQ ID NO: 249757 - DNA, 20 bp, synthetic construct
  source 1..20: mol_type = other DNA
cgaggtgccaactaaggtct

SEQ ID NO: 249758 - DNA, 20 bp, synthetic construct
  source 1..20: mol_type = other DNA
gcgaggtgccaactaaggtc

SEQ ID NO: 249759 - DNA, 20 bp, synthetic construct
  source 1..20: mol_type = other DNA
agcgaggtgccaactaaggt

SEQ ID NO: 249760 - DNA, 20 bp, synthetic construct
  source 1..20: mol_type = other DNA
gagcgaggtgccaactaagg

SEQ ID NO: 249761 - DNA, 20 bp, synthetic construct
  source 1..20: mol_type = other DNA
agagcgaggtgccaactaag

SEQ ID NO: 249762 - DNA, 20 bp, synthetic construct
  source 1..20: mol_type = other DNA
cagagcgaggtgccaactaa

SEQ ID NO: 249763 - DNA, 20 bp, synthetic construct
  source 1..20: mol_type = other DNA
ccagagcgaggtgccaacta

SEQ ID NO: 249764 - DNA, 20 bp, synthetic construct
  source 1..20: mol_type = other DNA
gccagagcgaggtgccaact

SEQ ID NO: 249765 - DNA, 20 bp, synthetic construct
  source 1..20: mol_type = other DNA
ggccagagcgaggtgccaac

SEQ ID NO: 249766 - DNA, 20 bp, synthetic construct
  source 1..20: mol_type = other DNA
aggccagagcgaggtgccaa

SEQ ID NO: 249767 - DNA, 20 bp, synthetic construct
  source 1..20: mol_type = other DNA
taggccagagcgaggtgcca

SEQ ID NO: 249768 - DNA, 20 bp, synthetic construct
  source 1..20: mol_type = other DNA
ataggccagagcgaggtgcc

SEQ ID NO: 249769 - DNA, 20 bp, synthetic construct
  source 1..20: mol_type = other DNA
gataggccagagcgaggtgc

SEQ ID NO: 249770 - DNA, 20 bp, synthetic construct
  source 1..20: mol_type = other DNA
ggataggccagagcgaggtg

SEQ ID NO: 249771 - DNA, 20 bp, synthetic construct
  source 1..20: mol_type = other DNA
aggataggccagagcgaggt

SEQ ID NO: 249772 - DNA, 20 bp, synthetic construct
  source 1..20: mol_type = other DNA
caggataggccagagcgagg

SEQ ID NO: 249773 - DNA, 20 bp, synthetic construct
  source 1..20: mol_type = other DNA
acaggataggccagagcgag

SEQ ID NO: 249774 - DNA, 20 bp, synthetic construct
  source 1..20: mol_type = other DNA
aacaggataggccagagcga

SEQ ID NO: 249775 - DNA, 20 bp, synthetic construct
  source 1..20: mol_type = other DNA
aaacaggataggccagagcg

SEQ ID NO: 249776 - DNA, 20 bp, synthetic construct
  source 1..20: mol_type = other DNA
caaacaggataggccagagc

SEQ ID NO: 249777 - DNA, 20 bp, synthetic construct
  source 1..20: mol_type = other DNA
gcaaacaggataggccagag

SEQ ID NO: 249778 - DNA, 20 bp, synthetic construct
  source 1..20: mol_type = other DNA
agcaaacaggataggccaga

SEQ ID NO: 249779 - DNA, 20 bp, synthetic construct
  source 1..20: mol_type = other DNA
cagcaaacaggataggccag

SEQ ID NO: 249780 - DNA, 20 bp, synthetic construct
  source 1..20: mol_type = other DNA
acagcaaacaggataggcca

SEQ ID NO: 249781 - DNA, 20 bp, synthetic construct
  source 1..20: mol_type = other DNA
aacagcaaacaggataggcc

SEQ ID NO: 249782 - DNA, 20 bp, synthetic construct
  source 1..20: mol_type = other DNA
gaacagcaaacaggataggc

SEQ ID NO: 249783 - DNA, 20 bp, synthetic construct
  source 1..20: mol_type = other DNA
agaacagcaaacaggatagg

SEQ ID NO: 249784 - DNA, 20 bp, synthetic construct
  source 1..20: mol_type = other DNA
aagaacagcaaacaggatag

SEQ ID NO: 249785 - DNA, 20 bp, synthetic construct
  source 1..20: mol_type = other DNA
caagaacagcaaacaggata

SEQ ID NO: 249786 - DNA, 20 bp, synthetic construct
  source 1..20: mol_type = other DNA
ccaagaacagcaaacaggat

SEQ ID NO: 249787 - DNA, 20 bp, synthetic construct
  source 1..20: mol_type = other DNA
gccaagaacagcaaacagga

SEQ ID NO: 249788 - DNA, 20 bp, synthetic construct
  source 1..20: mol_type = other DNA
cgccaagaacagcaaacagg

SEQ ID NO: 249789 - DNA, 20 bp, synthetic construct
  source 1..20: mol_type = other DNA
gcgccaagaacagcaaacag

SEQ ID NO: 249790 - DNA, 20 bp, synthetic construct
  source 1..20: mol_type = other DNA
agcgccaagaacagcaaaca

SEQ ID NO: 249791 - DNA, 20 bp, synthetic construct
  source 1..20: mol_type = other DNA
gagcgccaagaacagcaaac

SEQ ID NO: 249792 - DNA, 20 bp, synthetic construct
  source 1..20: mol_type = other DNA
ggagcgccaagaacagcaaa

SEQ ID NO: 249793 - DNA, 20 bp, synthetic construct
  source 1..20: mol_type = other DNA
tggagcgccaagaacagcaa

SEQ ID NO: 249794 - DNA, 20 bp, synthetic construct
  source 1..20: mol_type = other DNA
ctggagcgccaagaacagca

SEQ ID NO: 249795 - DNA, 20 bp, synthetic construct
  source 1..20: mol_type = other DNA
actggagcgccaagaacagc

SEQ ID NO: 249796 - DNA, 20 bp, synthetic construct
  source 1..20: mol_type = other DNA
cactggagcgccaagaacag

SEQ ID NO: 249797 - DNA, 20 bp, synthetic construct
  source 1..20: mol_type = other DNA
tcactggagcgccaagaaca

SEQ ID NO: 249798 - DNA, 20 bp, synthetic construct
  source 1..20: mol_type = other DNA
ttcactggagcgccaagaac

SEQ ID NO: 249799 - DNA, 20 bp, synthetic construct
  source 1..20: mol_type = other DNA
tttcactggagcgccaagaa

SEQ ID NO: 249800 - DNA, 20 bp, synthetic construct
  source 1..20: mol_type = other DNA
gtttcactggagcgccaaga

SEQ ID NO: 249801 - DNA, 20 bp, synthetic construct
  source 1..20: mol_type = other DNA
agtttcactggagcgccaag

SEQ ID NO: 249802 - DNA, 20 bp, synthetic construct
  source 1..20: mol_type = other DNA
gagtttcactggagcgccaa

SEQ ID NO: 249803 - DNA, 20 bp, synthetic construct
  source 1..20: mol_type = other DNA
ggagtttcactggagcgcca

SEQ ID NO: 249804 - DNA, 20 bp, synthetic construct
  source 1..20: mol_type = other DNA
gggagtttcactggagcgcc

SEQ ID NO: 249805 - DNA, 20 bp, synthetic construct
  source 1..20: mol_type = other DNA
ggggagtttcactggagcgc

SEQ ID NO: 249806 - DNA, 20 bp, synthetic construct
  source 1..20: mol_type = other DNA
tggggagtttcactggagcg

SEQ ID NO: 249807 - DNA, 20 bp, synthetic construct
  source 1..20: mol_type = other DNA
atggggagtttcactggagc

SEQ ID NO: 249808 - DNA, 20 bp, synthetic construct
  source 1..20: mol_type = other DNA
catggggagtttcactggag

SEQ ID NO: 249809 - DNA, 20 bp, synthetic construct
  source 1..20: mol_type = other DNA
ccatggggagtttcactgga

SEQ ID NO: 249810 - DNA, 20 bp, synthetic construct
  source 1..20: mol_type = other DNA
cccatggggagtttcactgg

SEQ ID NO: 249811 - DNA, 20 bp, synthetic construct
  source 1..20: mol_type = other DNA
gcccatggggagtttcactg

SEQ ID NO: 249812 - DNA, 20 bp, synthetic construct
  source 1..20: mol_type = other DNA
ggcccatggggagtttcact

SEQ ID NO: 249813 - DNA, 20 bp, synthetic construct
  source 1..20: mol_type = other DNA
tggcccatggggagtttcac

SEQ ID NO: 249814 - DNA, 20 bp, synthetic construct
  source 1..20: mol_type = other DNA
atggcccatggggagtttca

SEQ ID NO: 249815 - DNA, 20 bp, synthetic construct
  source 1..20: mol_type = other DNA
gatggcccatggggagtttc

SEQ ID NO: 249816 - DNA, 20 bp, synthetic construct
  source 1..20: mol_type = other DNA
ggatggcccatggggagttt

SEQ ID NO: 249817 - DNA, 20 bp, synthetic construct
  source 1..20: mol_type = other DNA
tggatggcccatggggagtt

SEQ ID NO: 249818 - DNA, 20 bp, synthetic construct
  source 1..20: mol_type = other DNA
ctggatggcccatggggagt

SEQ ID NO: 249819 - DNA, 20 bp, synthetic construct
  source 1..20: mol_type = other DNA
actggatggcccatggggag

SEQ ID NO: 249820 - DNA, 20 bp, synthetic construct
  source 1..20: mol_type = other DNA
aactggatggcccatgggga

SEQ ID NO: 249821 - DNA, 20 bp, synthetic construct
  source 1..20: mol_type = other DNA
caactggatggcccatgggg

SEQ ID NO: 249822 - DNA, 20 bp, synthetic construct
  source 1..20: mol_type = other DNA
ccaactggatggcccatggg

SEQ ID NO: 249823 - DNA, 20 bp, synthetic construct
  source 1..20: mol_type = other DNA
cccaactggatggcccatgg

SEQ ID NO: 249824 - DNA, 20 bp, synthetic construct
  source 1..20: mol_type = other DNA
ccccaactggatggcccatg

SEQ ID NO: 249825 - DNA, 20 bp, synthetic construct
  source 1..20: mol_type = other DNA
accccaactggatggcccat

SEQ ID NO: 249826 - DNA, 20 bp, synthetic construct
  source 1..20: mol_type = other DNA
caccccaactggatggccca

SEQ ID NO: 249827 - DNA, 20 bp, synthetic construct
  source 1..20: mol_type = other DNA
gcaccccaactggatggccc

SEQ ID NO: 249828 - DNA, 20 bp, synthetic construct
  source 1..20: mol_type = other DNA
tgcaccccaactggatggcc

SEQ ID NO: 249829 - DNA, 20 bp, synthetic construct
  source 1..20: mol_type = other DNA
ctgcaccccaactggatggc

SEQ ID NO: 249830 - DNA, 20 bp, synthetic construct
  source 1..20: mol_type = other DNA
actgcaccccaactggatgg

SEQ ID NO: 249831 - DNA, 20 bp, synthetic construct
  source 1..20: mol_type = other DNA
cactgcaccccaactggatg

SEQ ID NO: 249832 - DNA, 20 bp, synthetic construct
  source 1..20: mol_type = other DNA
acactgcaccccaactggat

SEQ ID NO: 249833 - DNA, 20 bp, synthetic construct
  source 1..20: mol_type = other DNA
cacactgcaccccaactgga

SEQ ID NO: 249834 - DNA, 20 bp, synthetic construct
  source 1..20: mol_type = other DNA
ccacactgcaccccaactgg

SEQ ID NO: 249835 - DNA, 20 bp, synthetic construct
  source 1..20: mol_type = other DNA
gccacactgcaccccaactg

SEQ ID NO: 249836 - DNA, 20 bp, synthetic construct
  source 1..20: mol_type = other DNA
ggccacactgcaccccaact

SEQ ID NO: 249837 - DNA, 20 bp, synthetic construct
  source 1..20: mol_type = other DNA
tggccacactgcaccccaac

SEQ ID NO: 249838 - DNA, 20 bp, synthetic construct
  source 1..20: mol_type = other DNA
gtggccacactgcaccccaa

SEQ ID NO: 249839 - DNA, 20 bp, synthetic construct
  source 1..20: mol_type = other DNA
ggtggccacactgcacccca

SEQ ID NO: 249840 - DNA, 20 bp, synthetic construct
  source 1..20: mol_type = other DNA
gggtggccacactgcacccc

SEQ ID NO: 249841 - DNA, 20 bp, synthetic construct
  source 1..20: mol_type = other DNA
ggggtggccacactgcaccc

SEQ ID NO: 249842 - DNA, 20 bp, synthetic construct
  source 1..20: mol_type = other DNA
gggggtggccacactgcacc

SEQ ID NO: 249843 - DNA, 20 bp, synthetic construct
  source 1..20: mol_type = other DNA
agggggtggccacactgcac

SEQ ID NO: 249844 - DNA, 20 bp, synthetic construct
  source 1..20: mol_type = other DNA
aagggggtggccacactgca

SEQ ID NO: 249845 - DNA, 20 bp, synthetic construct
  source 1..20: mol_type = other DNA
caagggggtggccacactgc

SEQ ID NO: 249846 - DNA, 20 bp, synthetic construct
  source 1..20: mol_type = other DNA
gcaagggggtggccacactg

SEQ ID NO: 249847 - DNA, 20 bp, synthetic construct
  source 1..20: mol_type = other DNA
tgcaagggggtggccacact

SEQ ID NO: 249848 - DNA, 20 bp, synthetic construct
  source 1..20: mol_type = other DNA
ctgcaagggggtggccacac

SEQ ID NO: 249849 - DNA, 20 bp, synthetic construct
  source 1..20: mol_type = other DNA
cctgcaagggggtggccaca

SEQ ID NO: 249850 - DNA, 20 bp, synthetic construct
  source 1..20: mol_type = other DNA
acctgcaagggggtggccac

SEQ ID NO: 249851 - DNA, 20 bp, synthetic construct
  source 1..20: mol_type = other DNA
aacctgcaagggggtggcca

SEQ ID NO: 249852 - DNA, 20 bp, synthetic construct
  source 1..20: mol_type = other DNA
gaacctgcaagggggtggcc

SEQ ID NO: 249853 - DNA, 20 bp, synthetic construct
  source 1..20: mol_type = other DNA
ggaacctgcaagggggtggc

SEQ ID NO: 249854 - DNA, 20 bp, synthetic construct
  source 1..20: mol_type = other DNA
aggaacctgcaagggggtgg

SEQ ID NO: 249855 - DNA, 20 bp, synthetic construct
  source 1..20: mol_type = other DNA
caggaacctgcaagggggtg

SEQ ID NO: 249856 - DNA, 20 bp, synthetic construct
  source 1..20: mol_type = other DNA
gcaggaacctgcaagggggt

SEQ ID NO: 249857 - DNA, 20 bp, synthetic construct
  source 1..20: mol_type = other DNA
ggcaggaacctgcaaggggg

SEQ ID NO: 249858 - DNA, 20 bp, synthetic construct
  source 1..20: mol_type = other DNA
aggcaggaacctgcaagggg

SEQ ID NO: 249859 - DNA, 20 bp, synthetic construct
  source 1..20: mol_type = other DNA
aaggcaggaacctgcaaggg

SEQ ID NO: 249860 - DNA, 20 bp, synthetic construct
  source 1..20: mol_type = other DNA
caaggcaggaacctgcaagg

SEQ ID NO: 249861 - DNA, 20 bp, synthetic construct
  source 1..20: mol_type = other DNA
gcaaggcaggaacctgcaag

SEQ ID NO: 249862 - DNA, 20 bp, synthetic construct
  source 1..20: mol_type = other DNA
agcaaggcaggaacctgcaa

SEQ ID NO: 249863 - DNA, 20 bp, synthetic construct
  source 1..20: mol_type = other DNA
cagcaaggcaggaacctgca

SEQ ID NO: 249864 - DNA, 20 bp, synthetic construct
  source 1..20: mol_type = other DNA
ccagcaaggcaggaacctgc

SEQ ID NO: 249865 - DNA, 20 bp, synthetic construct
  source 1..20: mol_type = other DNA
tccagcaaggcaggaacctg

SEQ ID NO: 249866 - DNA, 20 bp, synthetic construct
  source 1..20: mol_type = other DNA
ctccagcaaggcaggaacct

SEQ ID NO: 249867 - DNA, 20 bp, synthetic construct
  source 1..20: mol_type = other DNA
tctccagcaaggcaggaacc

SEQ ID NO: 249868 - DNA, 20 bp, synthetic construct
  source 1..20: mol_type = other DNA
ctctccagcaaggcaggaac

SEQ ID NO: 249869 - DNA, 20 bp, synthetic construct
  source 1..20: mol_type = other DNA
gctctccagcaaggcaggaa

SEQ ID NO: 249870 - DNA, 20 bp, synthetic construct
  source 1..20: mol_type = other DNA
tgctctccagcaaggcagga

SEQ ID NO: 249871 - DNA, 20 bp, synthetic construct
  source 1..20: mol_type = other DNA
gtgctctccagcaaggcagg

SEQ ID NO: 249872 - DNA, 20 bp, synthetic construct
  source 1..20: mol_type = other DNA
tgtgctctccagcaaggcag

SEQ ID NO: 249873 - DNA, 20 bp, synthetic construct
  source 1..20: mol_type = other DNA
ctgtgctctccagcaaggca

SEQ ID NO: 249874 - DNA, 20 bp, synthetic construct
  source 1..20: mol_type = other DNA
cctgtgctctccagcaaggc

SEQ ID NO: 249875 - DNA, 20 bp, synthetic construct
  source 1..20: mol_type = other DNA
ccctgtgctctccagcaagg

SEQ ID NO: 249876 - DNA, 20 bp, synthetic construct
  source 1..20: mol_type = other DNA
gccctgtgctctccagcaag

SEQ ID NO: 249877 - DNA, 20 bp, synthetic construct
  source 1..20: mol_type = other DNA
ggccctgtgctctccagcaa

SEQ ID NO: 249878 - DNA, 20 bp, synthetic construct
  source 1..20: mol_type = other DNA
gggccctgtgctctccagca

SEQ ID NO: 249879 - DNA, 20 bp, synthetic construct
  source 1..20: mol_type = other DNA
agggccctgtgctctccagc

SEQ ID NO: 249880 - DNA, 20 bp, synthetic construct
  source 1..20: mol_type = other DNA
gagggccctgtgctctccag

SEQ ID NO: 249881 - DNA, 20 bp, synthetic construct
  source 1..20: mol_type = other DNA
ggagggccctgtgctctcca

SEQ ID NO: 249882 - DNA, 20 bp, synthetic construct
  source 1..20: mol_type = other DNA
aggagggccctgtgctctcc

SEQ ID NO: 249883 - DNA, 20 bp, synthetic construct
  source 1..20: mol_type = other DNA
caggagggccctgtgctctc

SEQ ID NO: 249884 - DNA, 20 bp, synthetic construct
  source 1..20: mol_type = other DNA
ccaggagggccctgtgctct

SEQ ID NO: 249885 - DNA, 20 bp, synthetic construct
  source 1..20: mol_type = other DNA
gccaggagggccctgtgctc

SEQ ID NO: 249886 - DNA, 20 bp, synthetic construct
  source 1..20: mol_type = other DNA
agccaggagggccctgtgct

SEQ ID NO: 249887 - DNA, 20 bp, synthetic construct
  source 1..20: mol_type = other DNA
gagccaggagggccctgtgc

SEQ ID NO: 249888 - DNA, 20 bp, synthetic construct
  source 1..20: mol_type = other DNA
agagccaggagggccctgtg

SEQ ID NO: 249889 - DNA, 20 bp, synthetic construct
  source 1..20: mol_type = other DNA
aagagccaggagggccctgt

SEQ ID NO: 249890 - DNA, 20 bp, synthetic construct
  source 1..20: mol_type = other DNA
caagagccaggagggccctg

SEQ ID NO: 249891 - DNA, 20 bp, synthetic construct
  source 1..20: mol_type = other DNA
acaagagccaggagggccct

SEQ ID NO: 249892 - DNA, 20 bp, synthetic construct
  source 1..20: mol_type = other DNA
tacaagagccaggagggccc

SEQ ID NO: 249893 - DNA, 20 bp, synthetic construct
  source 1..20: mol_type = other DNA
ttacaagagccaggagggcc

SEQ ID NO: 249894 - DNA, 20 bp, synthetic construct
  source 1..20: mol_type = other DNA
tttacaagagccaggagggc

SEQ ID NO: 249895 - DNA, 20 bp, synthetic construct
  source 1..20: mol_type = other DNA
ttttacaagagccaggaggg

SEQ ID NO: 249896 - DNA, 20 bp, synthetic construct
  source 1..20: mol_type = other DNA
gttttacaagagccaggagg

SEQ ID NO: 249897 - DNA, 20 bp, synthetic construct
  source 1..20: mol_type = other DNA
tgttttacaagagccaggag

SEQ ID NO: 249898 - DNA, 20 bp, synthetic construct
  source 1..20: mol_type = other DNA
gtgttttacaagagccagga

SEQ ID NO: 249899 - DNA, 20 bp, synthetic construct
  source 1..20: mol_type = other DNA
agtgttttacaagagccagg

SEQ ID NO: 249900 - DNA, 20 bp, synthetic construct
  source 1..20: mol_type = other DNA
gagtgttttacaagagccag

SEQ ID NO: 249901 - DNA, 20 bp, synthetic construct
  source 1..20: mol_type = other DNA
ggagtgttttacaagagcca

SEQ ID NO: 249902 - DNA, 20 bp, synthetic construct
  source 1..20: mol_type = other DNA
gggagtgttttacaagagcc

SEQ ID NO: 249903 - DNA, 20 bp, synthetic construct
  source 1..20: mol_type = other DNA
ggggagtgttttacaagagc

SEQ ID NO: 249904 - DNA, 20 bp, synthetic construct
  source 1..20: mol_type = other DNA
tggggagtgttttacaagag

SEQ ID NO: 249905 - DNA, 20 bp, synthetic construct
  source 1..20: mol_type = other DNA
atggggagtgttttacaaga

SEQ ID NO: 249906 - DNA, 20 bp, synthetic construct
  source 1..20: mol_type = other DNA
catggggagtgttttacaag

SEQ ID NO: 249907 - DNA, 20 bp, synthetic construct
  source 1..20: mol_type = other DNA
ccatggggagtgttttacaa

SEQ ID NO: 249908 - DNA, 20 bp, synthetic construct
  source 1..20: mol_type = other DNA
accatggggagtgttttaca

SEQ ID NO: 249909 - DNA, 20 bp, synthetic construct
  source 1..20: mol_type = other DNA
taccatggggagtgttttac

SEQ ID NO: 249910 - DNA, 20 bp, synthetic construct
  source 1..20: mol_type = other DNA
gtaccatggggagtgtttta

SEQ ID NO: 249911 - DNA, 20 bp, synthetic construct
  source 1..20: mol_type = other DNA
tgtaccatggggagtgtttt

SEQ ID NO: 249912 - DNA, 20 bp, synthetic construct
  source 1..20: mol_type = other DNA
ctgtaccatggggagtgttt

SEQ ID NO: 249913 - DNA, 20 bp, synthetic construct
  source 1..20: mol_type = other DNA
tctgtaccatggggagtgtt

SEQ ID NO: 249914 - DNA, 20 bp, synthetic construct
  source 1..20: mol_type = other DNA
ctctgtaccatggggagtgt

SEQ ID NO: 249915 - DNA, 20 bp, synthetic construct
  source 1..20: mol_type = other DNA
tctctgtaccatggggagtg

SEQ ID NO: 249916 - DNA, 20 bp, synthetic construct
  source 1..20: mol_type = other DNA
ctctctgtaccatggggagt

SEQ ID NO: 249917 - DNA, 20 bp, synthetic construct
  source 1..20: mol_type = other DNA
cctctctgtaccatggggag

SEQ ID NO: 249918 - DNA, 20 bp, synthetic construct
  source 1..20: mol_type = other DNA
gcctctctgtaccatgggga

SEQ ID NO: 249919 - DNA, 20 bp, synthetic construct
  source 1..20: mol_type = other DNA
ggcctctctgtaccatgggg

SEQ ID NO: 249920 - DNA, 20 bp, synthetic construct
  source 1..20: mol_type = other DNA
tggcctctctgtaccatggg

SEQ ID NO: 249921 - DNA, 20 bp, synthetic construct
  source 1..20: mol_type = other DNA
ctggcctctctgtaccatgg

SEQ ID NO: 249922 - DNA, 20 bp, synthetic construct
  source 1..20: mol_type = other DNA
gctggcctctctgtaccatg

SEQ ID NO: 249923 - DNA, 20 bp, synthetic construct
  source 1..20: mol_type = other DNA
tgctggcctctctgtaccat

SEQ ID NO: 249924 - DNA, 20 bp, synthetic construct
  source 1..20: mol_type = other DNA
ctgctggcctctctgtacca

SEQ ID NO: 249925 - DNA, 20 bp, synthetic construct
  source 1..20: mol_type = other DNA
actgctggcctctctgtacc

SEQ ID NO: 249926 - DNA, 20 bp, synthetic construct
  source 1..20: mol_type = other DNA
cactgctggcctctctgtac

SEQ ID NO: 249927 - DNA, 20 bp, synthetic construct
  source 1..20: mol_type = other DNA
tcactgctggcctctctgta

SEQ ID NO: 249928 - DNA, 20 bp, synthetic construct
  source 1..20: mol_type = other DNA
atcactgctggcctctctgt

SEQ ID NO: 249929 - DNA, 20 bp, synthetic construct
  source 1..20: mol_type = other DNA
catcactgctggcctctctg

SEQ ID NO: 249930 - DNA, 20 bp, synthetic construct
  source 1..20: mol_type = other DNA
acatcactgctggcctctct

SEQ ID NO: 249931 - DNA, 20 bp, synthetic construct
  source 1..20: mol_type = other DNA
cacatcactgctggcctctc

SEQ ID NO: 249932 - DNA, 20 bp, synthetic construct
  source 1..20: mol_type = other DNA
tcacatcactgctggcctct

SEQ ID NO: 249933 - DNA, 20 bp, synthetic construct
  source 1..20: mol_type = other DNA
ctcacatcactgctggcctc

SEQ ID NO: 249934 - DNA, 20 bp, synthetic construct
  source 1..20: mol_type = other DNA
cctcacatcactgctggcct

SEQ ID NO: 249935 - DNA, 20 bp, synthetic construct
  source 1..20: mol_type = other DNA
gcctcacatcactgctggcc

SEQ ID NO: 249936 - DNA, 20 bp, synthetic construct
  source 1..20: mol_type = other DNA
ggcctcacatcactgctggc

SEQ ID NO: 249937 - DNA, 20 bp, synthetic construct
  source 1..20: mol_type = other DNA
gggcctcacatcactgctgg

SEQ ID NO: 249938 - DNA, 20 bp, synthetic construct
  source 1..20: mol_type = other DNA
tgggcctcacatcactgctg

SEQ ID NO: 249939 - DNA, 20 bp, synthetic construct
  source 1..20: mol_type = other DNA
ttgggcctcacatcactgct

SEQ ID NO: 249940 - DNA, 20 bp, synthetic construct
  source 1..20: mol_type = other DNA
gttgggcctcacatcactgc

SEQ ID NO: 249941 - DNA, 20 bp, synthetic construct
  source 1..20: mol_type = other DNA
ggttgggcctcacatcactg

SEQ ID NO: 249942 - DNA, 20 bp, synthetic construct
  source 1..20: mol_type = other DNA
aggttgggcctcacatcact

SEQ ID NO: 249943 - DNA, 20 bp, synthetic construct
  source 1..20: mol_type = other DNA
gaggttgggcctcacatcac

SEQ ID NO: 249944 - DNA, 20 bp, synthetic construct
  source 1..20: mol_type = other DNA
ggaggttgggcctcacatca

SEQ ID NO: 249945 - DNA, 20 bp, synthetic construct
  source 1..20: mol_type = other DNA
gggaggttgggcctcacatc

SEQ ID NO: 249946 - DNA, 20 bp, synthetic construct
  source 1..20: mol_type = other DNA
agggaggttgggcctcacat

SEQ ID NO: 249947 - DNA, 20 bp, synthetic construct
  source 1..20: mol_type = other DNA
gagggaggttgggcctcaca

SEQ ID NO: 249948 - DNA, 20 bp, synthetic construct
  source 1..20: mol_type = other DNA
ggagggaggttgggcctcac

SEQ ID NO: 249949 - DNA, 20 bp, synthetic construct
  source 1..20: mol_type = other DNA
tggagggaggttgggcctca

SEQ ID NO: 249950 - DNA, 20 bp, synthetic construct
  source 1..20: mol_type = other DNA
atggagggaggttgggcctc

SEQ ID NO: 249951 - DNA, 20 bp, synthetic construct
  source 1..20: mol_type = other DNA
catggagggaggttgggcct

SEQ ID NO: 249952 - DNA, 20 bp, synthetic construct
  source 1..20: mol_type = other DNA
ccatggagggaggttgggcc

SEQ ID NO: 249953 - DNA, 20 bp, synthetic construct
  source 1..20: mol_type = other DNA
accatggagggaggttgggc

SEQ ID NO: 249954 - DNA, 20 bp, synthetic construct
  source 1..20: mol_type = other DNA
caccatggagggaggttggg

SEQ ID NO: 249955 - DNA, 20 bp, synthetic construct
  source 1..20: mol_type = other DNA
acaccatggagggaggttgg

SEQ ID NO: 249956 - DNA, 20 bp, synthetic construct
  source 1..20: mol_type = other DNA
aacaccatggagggaggttg

SEQ ID NO: 249957 - DNA, 20 bp, synthetic construct
  source 1..20: mol_type = other DNA
gaacaccatggagggaggtt

SEQ ID NO: 249958 - DNA, 20 bp, synthetic construct
  source 1..20: mol_type = other DNA
ggaacaccatggagggaggt

SEQ ID NO: 249959 - DNA, 20 bp, synthetic construct
  source 1..20: mol_type = other DNA
gggaacaccatggagggagg

SEQ ID NO: 249960 - DNA, 20 bp, synthetic construct
  source 1..20: mol_type = other DNA
tgggaacaccatggagggag

SEQ ID NO: 249961 - DNA, 20 bp, synthetic construct
  source 1..20: mol_type = other DNA
ttgggaacaccatggaggga

SEQ ID NO: 249962 - DNA, 20 bp, synthetic construct
  source 1..20: mol_type = other DNA
cttgggaacaccatggaggg

SEQ ID NO: 249963 - DNA, 20 bp, synthetic construct
  source 1..20: mol_type = other DNA
gcttgggaacaccatggagg

SEQ ID NO: 249964 - DNA, 20 bp, synthetic construct
  source 1..20: mol_type = other DNA
tgcttgggaacaccatggag

SEQ ID NO: 249965 - DNA, 20 bp, synthetic construct
  source 1..20: mol_type = other DNA
ctgcttgggaacaccatgga

SEQ ID NO: 249966 - DNA, 20 bp, synthetic construct
  source 1..20: mol_type = other DNA
gctgcttgggaacaccatgg

SEQ ID NO: 249967 - DNA, 20 bp, synthetic construct
  source 1..20: mol_type = other DNA
agctgcttgggaacaccatg

SEQ ID NO: 249968 - DNA, 20 bp, synthetic construct
  source 1..20: mol_type = other DNA
gagctgcttgggaacaccat

SEQ ID NO: 249969 - DNA, 20 bp, synthetic construct
  source 1..20: mol_type = other DNA
ggagctgcttgggaacacca

SEQ ID NO: 249970 - DNA, 20 bp, synthetic construct
  source 1..20: mol_type = other DNA
gggagctgcttgggaacacc

SEQ ID NO: 249971 - DNA, 20 bp, synthetic construct
  source 1..20: mol_type = other DNA
agggagctgcttgggaacac

SEQ ID NO: 249972 - DNA, 20 bp, synthetic construct
  source 1..20: mol_type = other DNA
aagggagctgcttgggaaca

SEQ ID NO: 249973 - DNA, 20 bp, synthetic construct
  source 1..20: mol_type = other DNA
aaagggagctgcttgggaac

SEQ ID NO: 249974 - DNA, 20 bp, synthetic construct
  source 1..20: mol_type = other DNA
gaaagggagctgcttgggaa

SEQ ID NO: 249975 - DNA, 20 bp, synthetic construct
  source 1..20: mol_type = other DNA
agaaagggagctgcttggga

SEQ ID NO: 249976 - DNA, 20 bp, synthetic construct
  source 1..20: mol_type = other DNA
cagaaagggagctgcttggg

SEQ ID NO: 249977 - DNA, 20 bp, synthetic construct
  source 1..20: mol_type = other DNA
ccagaaagggagctgcttgg

SEQ ID NO: 249978 - DNA, 20 bp, synthetic construct
  source 1..20: mol_type = other DNA
cccagaaagggagctgcttg

SEQ ID NO: 249979 - DNA, 20 bp, synthetic construct
  source 1..20: mol_type = other DNA
ccccagaaagggagctgctt

SEQ ID NO: 249980 - DNA, 20 bp, synthetic construct
  source 1..20: mol_type = other DNA
accccagaaagggagctgct

SEQ ID NO: 249981 - DNA, 20 bp, synthetic construct
  source 1..20: mol_type = other DNA
gaccccagaaagggagctgc

SEQ ID NO: 249982 - DNA, 20 bp, synthetic construct
  source 1..20: mol_type = other DNA
tgaccccagaaagggagctg

SEQ ID NO: 249983 - DNA, 20 bp, synthetic construct
  source 1..20: mol_type = other DNA
ttgaccccagaaagggagct

SEQ ID NO: 249984 - DNA, 20 bp, synthetic construct
  source 1..20: mol_type = other DNA
cttgaccccagaaagggagc

SEQ ID NO: 249985 - DNA, 20 bp, synthetic construct
  source 1..20: mol_type = other DNA
ccttgaccccagaaagggag

SEQ ID NO: 249986 - DNA, 20 bp, synthetic construct
  source 1..20: mol_type = other DNA
cccttgaccccagaaaggga

SEQ ID NO: 249987 - DNA, 20 bp, synthetic construct
  source 1..20: mol_type = other DNA
ccccttgaccccagaaaggg

SEQ ID NO: 249988 - DNA, 20 bp, synthetic construct
  source 1..20: mol_type = other DNA
accccttgaccccagaaagg

SEQ ID NO: 249989 - DNA, 20 bp, synthetic construct
  source 1..20: mol_type = other DNA
caccccttgaccccagaaag

SEQ ID NO: 249990 - DNA, 20 bp, synthetic construct
  source 1..20: mol_type = other DNA
ccaccccttgaccccagaaa

SEQ ID NO: 249991 - DNA, 20 bp, synthetic construct
  source 1..20: mol_type = other DNA
gccaccccttgaccccagaa

SEQ ID NO: 249992 - DNA, 20 bp, synthetic construct
  source 1..20: mol_type = other DNA
tgccaccccttgaccccaga

SEQ ID NO: 249993 - DNA, 20 bp, synthetic construct
  source 1..20: mol_type = other DNA
ttgccaccccttgaccccag

SEQ ID NO: 249994 - DNA, 20 bp, synthetic construct
  source 1..20: mol_type = other DNA
tttgccaccccttgacccca

SEQ ID NO: 249995 - DNA, 20 bp, synthetic construct
  source 1..20: mol_type = other DNA
ctttgccaccccttgacccc

SEQ ID NO: 249996 - DNA, 20 bp, synthetic construct
  source 1..20: mol_type = other DNA
tctttgccaccccttgaccc

SEQ ID NO: 249997 - DNA, 20 bp, synthetic construct
  source 1..20: mol_type = other DNA
gtctttgccaccccttgacc

SEQ ID NO: 249998 - DNA, 20 bp, synthetic construct
  source 1..20: mol_type = other DNA
tgtctttgccaccccttgac

SEQ ID NO: 249999 - DNA, 20 bp, synthetic construct
  source 1..20: mol_type = other DNA
ctgtctttgccaccccttga

SEQ ID NO: 250000 - DNA, 20 bp, synthetic construct
  source 1..20: mol_type = other DNA
actgtctttgccaccccttg

SEQ ID NO: 250001 - DNA, 20 bp, synthetic construct
  source 1..20: mol_type = other DNA
cactgtctttgccacccctt

SEQ ID NO: 250002 - DNA, 20 bp, synthetic construct
  source 1..20: mol_type = other DNA
gcactgtctttgccacccct

SEQ ID NO: 250003 - DNA, 20 bp, synthetic construct
  source 1..20: mol_type = other DNA
tgcactgtctttgccacccc

SEQ ID NO: 250004 - DNA, 20 bp, synthetic construct
  source 1..20: mol_type = other DNA
ctgcactgtctttgccaccc

SEQ ID NO: 250005 - DNA, 20 bp, synthetic construct
  source 1..20: mol_type = other DNA
gctgcactgtctttgccacc

SEQ ID NO: 250006 - DNA, 20 bp, synthetic construct
  source 1..20: mol_type = other DNA
cgctgcactgtctttgccac

SEQ ID NO: 250007 - DNA, 20 bp, synthetic construct
  source 1..20: mol_type = other DNA
acgctgcactgtctttgcca

SEQ ID NO: 250008 - DNA, 20 bp, synthetic construct
  source 1..20: mol_type = other DNA
gacgctgcactgtctttgcc

SEQ ID NO: 250009 - DNA, 20 bp, synthetic construct
  source 1..20: mol_type = other DNA
ggacgctgcactgtctttgc

SEQ ID NO: 250010 - DNA, 20 bp, synthetic construct
  source 1..20: mol_type = other DNA
tggacgctgcactgtctttg

SEQ ID NO: 250011 - DNA, 20 bp, synthetic construct
  source 1..20: mol_type = other DNA
ttggacgctgcactgtcttt

SEQ ID NO: 250012 - DNA, 20 bp, synthetic construct
  source 1..20: mol_type = other DNA
attggacgctgcactgtctt

SEQ ID NO: 250013 - DNA, 20 bp, synthetic construct
  source 1..20: mol_type = other DNA
aattggacgctgcactgtct

SEQ ID NO: 250014 - DNA, 20 bp, synthetic construct
  source 1..20: mol_type = other DNA
aaattggacgctgcactgtc

SEQ ID NO: 250015 - DNA, 20 bp, synthetic construct
  source 1..20: mol_type = other DNA
gaaattggacgctgcactgt

SEQ ID NO: 250016 - DNA, 20 bp, synthetic construct
  source 1..20: mol_type = other DNA
agaaattggacgctgcactg

SEQ ID NO: 250017 - DNA, 20 bp, synthetic construct
  source 1..20: mol_type = other DNA
cagaaattggacgctgcact

SEQ ID NO: 250018 - DNA, 20 bp, synthetic construct
  source 1..20: mol_type = other DNA
tcagaaattggacgctgcac

SEQ ID NO: 250019 - DNA, 20 bp, synthetic construct
  source 1..20: mol_type = other DNA
gtcagaaattggacgctgca

SEQ ID NO: 250020 - DNA, 20 bp, synthetic construct
  source 1..20: mol_type = other DNA
agtcagaaattggacgctgc

SEQ ID NO: 250021 - DNA, 20 bp, synthetic construct
  source 1..20: mol_type = other DNA
gagtcagaaattggacgctg

SEQ ID NO: 250022 - DNA, 20 bp, synthetic construct
  source 1..20: mol_type = other DNA
tgagtcagaaattggacgct

SEQ ID NO: 250023 - DNA, 20 bp, synthetic construct
  source 1..20: mol_type = other DNA
ttgagtcagaaattggacgc

SEQ ID NO: 250024 - DNA, 20 bp, synthetic construct
  source 1..20: mol_type = other DNA
cttgagtcagaaattggacg

SEQ ID NO: 250025 - DNA, 20 bp, synthetic construct
  source 1..20: mol_type = other DNA
gcttgagtcagaaattggac

SEQ ID NO: 250026 - DNA, 20 bp, synthetic construct
  source 1..20: mol_type = other DNA
ggcttgagtcagaaattgga

SEQ ID NO: 250027 - DNA, 20 bp, synthetic construct
  source 1..20: mol_type = other DNA
cggcttgagtcagaaattgg

SEQ ID NO: 250028 - DNA, 20 bp, synthetic construct
  source 1..20: mol_type = other DNA
ccggcttgagtcagaaattg

SEQ ID NO: 250029 - DNA, 20 bp, synthetic construct
  source 1..20: mol_type = other DNA
cccggcttgagtcagaaatt

SEQ ID NO: 250030 - DNA, 20 bp, synthetic construct
  source 1..20: mol_type = other DNA
gcccggcttgagtcagaaat

SEQ ID NO: 250031 - DNA, 20 bp, synthetic construct
  source 1..20: mol_type = other DNA
ggcccggcttgagtcagaaa

SEQ ID NO: 250032 - DNA, 20 bp, synthetic construct
  source 1..20: mol_type = other DNA
aggcccggcttgagtcagaa

SEQ ID NO: 250033 - DNA, 20 bp, synthetic construct
  source 1..20: mol_type = other DNA
caggcccggcttgagtcaga

SEQ ID NO: 250034 - DNA, 20 bp, synthetic construct
  source 1..20: mol_type = other DNA
ccaggcccggcttgagtcag

SEQ ID NO: 250035 - DNA, 20 bp, synthetic construct
  source 1..20: mol_type = other DNA
gccaggcccggcttgagtca

SEQ ID NO: 250036 - DNA, 20 bp, synthetic construct
  source 1..20: mol_type = other DNA
agccaggcccggcttgagtc

SEQ ID NO: 250037 - DNA, 20 bp, synthetic construct
  source 1..20: mol_type = other DNA
tagccaggcccggcttgagt

SEQ ID NO: 250038 - DNA, 20 bp, synthetic construct
  source 1..20: mol_type = other DNA
atagccaggcccggcttgag

SEQ ID NO: 250039 - DNA, 20 bp, synthetic construct
  source 1..20: mol_type = other DNA
gatagccaggcccggcttga

SEQ ID NO: 250040 - DNA, 20 bp, synthetic construct
  source 1..20: mol_type = other DNA
cgatagccaggcccggcttg

SEQ ID NO: 250041 - DNA, 20 bp, synthetic construct
  source 1..20: mol_type = other DNA
gcgatagccaggcccggctt

SEQ ID NO: 250042 - DNA, 20 bp, synthetic construct
  source 1..20: mol_type = other DNA
tgcgatagccaggcccggct

SEQ ID NO: 250043 - DNA, 20 bp, synthetic construct
  source 1..20: mol_type = other DNA
ctgcgatagccaggcccggc

SEQ ID NO: 250044 - DNA, 20 bp, synthetic construct
  source 1..20: mol_type = other DNA
gctgcgatagccaggcccgg

SEQ ID NO: 250045 - DNA, 20 bp, synthetic construct
  source 1..20: mol_type = other DNA
agctgcgatagccaggcccg

SEQ ID NO: 250046 - DNA, 20 bp, synthetic construct
  source 1..20: mol_type = other DNA
gagctgcgatagccaggccc

SEQ ID NO: 250047 - DNA, 20 bp, synthetic construct
  source 1..20: mol_type = other DNA
agagctgcgatagccaggcc

SEQ ID NO: 250048 - DNA, 20 bp, synthetic construct
  source 1..20: mol_type = other DNA
cagagctgcgatagccaggc

SEQ ID NO: 250049 - DNA, 20 bp, synthetic construct
  source 1..20: mol_type = other DNA
gcagagctgcgatagccagg

SEQ ID NO: 250050 - DNA, 20 bp, synthetic construct
  source 1..20: mol_type = other DNA
tgcagagctgcgatagccag

SEQ ID NO: 250051 - DNA, 20 bp, synthetic construct
  source 1..20: mol_type = other DNA
gtgcagagctgcgatagcca

SEQ ID NO: 250052 - DNA, 20 bp, synthetic construct
  source 1..20: mol_type = other DNA
agtgcagagctgcgatagcc

SEQ ID NO: 250053 - DNA, 20 bp, synthetic construct
  source 1..20: mol_type = other DNA
cagtgcagagctgcgatagc

SEQ ID NO: 250054 - DNA, 20 bp, synthetic construct
  source 1..20: mol_type = other DNA
acagtgcagagctgcgatag

SEQ ID NO: 250055 - DNA, 20 bp, synthetic construct
  source 1..20: mol_type = other DNA
cacagtgcagagctgcgata

SEQ ID NO: 250056 - DNA, 20 bp, synthetic construct
  source 1..20: mol_type = other DNA
acacagtgcagagctgcgat

SEQ ID NO: 250057 - DNA, 20 bp, synthetic construct
  source 1..20: mol_type = other DNA
cacacagtgcagagctgcga

SEQ ID NO: 250058 - DNA, 20 bp, synthetic construct
  source 1..20: mol_type = other DNA
acacacagtgcagagctgcg

SEQ ID NO: 250059 - DNA, 20 bp, synthetic construct
  source 1..20: mol_type = other DNA
cacacacagtgcagagctgc

SEQ ID NO: 250060 - DNA, 20 bp, synthetic construct
  source 1..20: mol_type = other DNA
tcacacacagtgcagagctg

SEQ ID NO: 250061 - DNA, 20 bp, synthetic construct
  source 1..20: mol_type = other DNA
gtcacacacagtgcagagct

SEQ ID NO: 250062 - DNA, 20 bp, synthetic construct
  source 1..20: mol_type = other DNA
tgtcacacacagtgcagagc

SEQ ID NO: 250063 - DNA, 20 bp, synthetic construct
  source 1..20: mol_type = other DNA
ctgtcacacacagtgcagag

SEQ ID NO: 250064 - DNA, 20 bp, synthetic construct
  source 1..20: mol_type = other DNA
gctgtcacacacagtgcaga

SEQ ID NO: 250065 - DNA, 20 bp, synthetic construct
  source 1..20: mol_type = other DNA
tgctgtcacacacagtgcag

SEQ ID NO: 250066 - DNA, 20 bp, synthetic construct
  source 1..20: mol_type = other DNA
ttgctgtcacacacagtgca

SEQ ID NO: 250067 - DNA, 20 bp, synthetic construct
  source 1..20: mol_type = other DNA
cttgctgtcacacacagtgc

SEQ ID NO: 250068 - DNA, 20 bp, synthetic construct
  source 1..20: mol_type = other DNA
ccttgctgtcacacacagtg

SEQ ID NO: 250069 - DNA, 20 bp, synthetic construct
  source 1..20: mol_type = other DNA
gccttgctgtcacacacagt

SEQ ID NO: 250070 - DNA, 20 bp, synthetic construct
  source 1..20: mol_type = other DNA
tgccttgctgtcacacacag

SEQ ID NO: 250071 - DNA, 20 bp, synthetic construct
  source 1..20: mol_type = other DNA
ttgccttgctgtcacacaca

SEQ ID NO: 250072 - DNA, 20 bp, synthetic construct
  source 1..20: mol_type = other DNA
gttgccttgctgtcacacac

SEQ ID NO: 250073 - DNA, 20 bp, synthetic construct
  source 1..20: mol_type = other DNA
agttgccttgctgtcacaca

SEQ ID NO: 250074 - DNA, 20 bp, synthetic construct
  source 1..20: mol_type = other DNA
gagttgccttgctgtcacac

SEQ ID NO: 250075 - DNA, 20 bp, synthetic construct
  source 1..20: mol_type = other DNA
tgagttgccttgctgtcaca

SEQ ID NO: 250076 - DNA, 20 bp, synthetic construct
  source 1..20: mol_type = other DNA
gtgagttgccttgctgtcac

SEQ ID NO: 250077 - DNA, 20 bp, synthetic construct
  source 1..20: mol_type = other DNA
ggtgagttgccttgctgtca

SEQ ID NO: 250078 - DNA, 20 bp, synthetic construct
  source 1..20: mol_type = other DNA
gggtgagttgccttgctgtc

SEQ ID NO: 250079 - DNA, 20 bp, synthetic construct
  source 1..20: mol_type = other DNA
tgggtgagttgccttgctgt

SEQ ID NO: 250080 - DNA, 20 bp, synthetic construct
  source 1..20: mol_type = other DNA
ctgggtgagttgccttgctg

SEQ ID NO: 250081 - DNA, 20 bp, synthetic construct
  source 1..20: mol_type = other DNA
actgggtgagttgccttgct

SEQ ID NO: 250082 - DNA, 20 bp, synthetic construct
  source 1..20: mol_type = other DNA
cactgggtgagttgccttgc

SEQ ID NO: 250083 - DNA, 20 bp, synthetic construct
  source 1..20: mol_type = other DNA
gcactgggtgagttgccttg

SEQ ID NO: 250084 - DNA, 20 bp, synthetic construct
  source 1..20: mol_type = other DNA
ggcactgggtgagttgcctt

SEQ ID NO: 250085 - DNA, 20 bp, synthetic construct
  source 1..20: mol_type = other DNA
cggcactgggtgagttgcct

SEQ ID NO: 250086 - DNA, 20 bp, synthetic construct
  source 1..20: mol_type = other DNA
acggcactgggtgagttgcc

SEQ ID NO: 250087 - DNA, 20 bp, synthetic construct
  source 1..20: mol_type = other DNA
cacggcactgggtgagttgc

SEQ ID NO: 250088 - DNA, 20 bp, synthetic construct
  source 1..20: mol_type = other DNA
ccacggcactgggtgagttg

SEQ ID NO: 250089 - DNA, 20 bp, synthetic construct
  source 1..20: mol_type = other DNA
gccacggcactgggtgagtt

SEQ ID NO: 250090 - DNA, 20 bp, synthetic construct
  source 1..20: mol_type = other DNA
tgccacggcactgggtgagt

SEQ ID NO: 250091 - DNA, 20 bp, synthetic construct
  source 1..20: mol_type = other DNA
ctgccacggcactgggtgag

SEQ ID NO: 250092 - DNA, 20 bp, synthetic construct
  source 1..20: mol_type = other DNA
actgccacggcactgggtga

SEQ ID NO: 250093 - DNA, 20 bp, synthetic construct
  source 1..20: mol_type = other DNA
cactgccacggcactgggtg

SEQ ID NO: 250094 - DNA, 20 bp, synthetic construct
  source 1..20: mol_type = other DNA
tcactgccacggcactgggt

SEQ ID NO: 250095 - DNA, 20 bp, synthetic construct
  source 1..20: mol_type = other DNA
gtcactgccacggcactggg

SEQ ID NO: 250096 - DNA, 20 bp, synthetic construct
  source 1..20: mol_type = other DNA
ggtcactgccacggcactgg

SEQ ID NO: 250097 - DNA, 20 bp, synthetic construct
  source 1..20: mol_type = other DNA
cggtcactgccacggcactg

SEQ ID NO: 250098 - DNA, 20 bp, synthetic construct
  source 1..20: mol_type = other DNA
acggtcactgccacggcact

SEQ ID NO: 250099 - DNA, 20 bp, synthetic construct
  source 1..20: mol_type = other DNA
cacggtcactgccacggcac

SEQ ID NO: 250100 - DNA, 20 bp, synthetic construct
  source 1..20: mol_type = other DNA
acacggtcactgccacggca

SEQ ID NO: 250101 - DNA, 20 bp, synthetic construct
  source 1..20: mol_type = other DNA
gacacggtcactgccacggc

SEQ ID NO: 250102 - DNA, 20 bp, synthetic construct
  source 1..20: mol_type = other DNA
ggacacggtcactgccacgg

SEQ ID NO: 250103 - DNA, 20 bp, synthetic construct
  source 1..20: mol_type = other DNA
cggacacggtcactgccacg

SEQ ID NO: 250104 - DNA, 20 bp, synthetic construct
  source 1..20: mol_type = other DNA
tcggacacggtcactgccac

SEQ ID NO: 250105 - DNA, 20 bp, synthetic construct
  source 1..20: mol_type = other DNA
ctcggacacggtcactgcca

SEQ ID NO: 250106 - DNA, 20 bp, synthetic construct
  source 1..20: mol_type = other DNA
cctcggacacggtcactgcc

SEQ ID NO: 250107 - DNA, 20 bp, synthetic construct
  source 1..20: mol_type = other DNA
tcctcggacacggtcactgc

SEQ ID NO: 250108 - DNA, 20 bp, synthetic construct
  source 1..20: mol_type = other DNA
ttcctcggacacggtcactg

SEQ ID NO: 250109 - DNA, 20 bp, synthetic construct
  source 1..20: mol_type = other DNA
cttcctcggacacggtcact

SEQ ID NO: 250110 - DNA, 20 bp, synthetic construct
  source 1..20: mol_type = other DNA
gcttcctcggacacggtcac

SEQ ID NO: 250111 - DNA, 20 bp, synthetic construct
  source 1..20: mol_type = other DNA
ggcttcctcggacacggtca

SEQ ID NO: 250112 - DNA, 20 bp, synthetic construct
  source 1..20: mol_type = other DNA
aggcttcctcggacacggtc

SEQ ID NO: 250113 - DNA, 20 bp, synthetic construct
  source 1..20: mol_type = other DNA
gaggcttcctcggacacggt

SEQ ID NO: 250114 - DNA, 20 bp, synthetic construct
  source 1..20: mol_type = other DNA
ggaggcttcctcggacacgg

SEQ ID NO: 250115 - DNA, 20 bp, synthetic construct
  source 1..20: mol_type = other DNA
aggaggcttcctcggacacg

SEQ ID NO: 250116 - DNA, 20 bp, synthetic construct
  source 1..20: mol_type = other DNA
gaggaggcttcctcggacac

SEQ ID NO: 250117 - DNA, 20 bp, synthetic construct
  source 1..20: mol_type = other DNA
tgaggaggcttcctcggaca

SEQ ID NO: 250118 - DNA, 20 bp, synthetic construct
  source 1..20: mol_type = other DNA
gtgaggaggcttcctcggac

SEQ ID NO: 250119 - DNA, 20 bp, synthetic construct
  source 1..20: mol_type = other DNA
tgtgaggaggcttcctcgga

SEQ ID NO: 250120 - DNA, 20 bp, synthetic construct
  source 1..20: mol_type = other DNA
gtgtgaggaggcttcctcgg

SEQ ID NO: 250121 - DNA, 20 bp, synthetic construct
  source 1..20: mol_type = other DNA
ggtgtgaggaggcttcctcg

SEQ ID NO: 250122 - DNA, 20 bp, synthetic construct
  source 1..20: mol_type = other DNA
gggtgtgaggaggcttcctc

SEQ ID NO: 250123 - DNA, 20 bp, synthetic construct
  source 1..20: mol_type = other DNA
agggtgtgaggaggcttcct

SEQ ID NO: 250124 - DNA, 20 bp, synthetic construct
  source 1..20: mol_type = other DNA
gagggtgtgaggaggcttcc

SEQ ID NO: 250125 - DNA, 20 bp, synthetic construct
  source 1..20: mol_type = other DNA
agagggtgtgaggaggcttc

SEQ ID NO: 250126 - DNA, 20 bp, synthetic construct
  source 1..20: mol_type = other DNA
cagagggtgtgaggaggctt

SEQ ID NO: 250127 - DNA, 20 bp, synthetic construct
  source 1..20: mol_type = other DNA
acagagggtgtgaggaggct

SEQ ID NO: 250128 - DNA, 20 bp, synthetic construct
  source 1..20: mol_type = other DNA
gacagagggtgtgaggaggc

SEQ ID NO: 250129 - DNA, 20 bp, synthetic construct
  source 1..20: mol_type = other DNA
agacagagggtgtgaggagg

SEQ ID NO: 250130 - DNA, 20 bp, synthetic construct
  source 1..20: mol_type = other DNA
gagacagagggtgtgaggag

SEQ ID NO: 250131 - DNA, 20 bp, synthetic construct
  source 1..20: mol_type = other DNA
tgagacagagggtgtgagga

SEQ ID NO: 250132 - DNA, 20 bp, synthetic construct
  source 1..20: mol_type = other DNA
ttgagacagagggtgtgagg

SEQ ID NO: 250133 - DNA, 20 bp, synthetic construct
  source 1..20: mol_type = other DNA
cttgagacagagggtgtgag

SEQ ID NO: 250134 - DNA, 20 bp, synthetic construct
  source 1..20: mol_type = other DNA
ccttgagacagagggtgtga

SEQ ID NO: 250135 - DNA, 20 bp, synthetic construct
  source 1..20: mol_type = other DNA
tccttgagacagagggtgtg

SEQ ID NO: 250136 - DNA, 20 bp, synthetic construct
  source 1..20: mol_type = other DNA
gtccttgagacagagggtgt

SEQ ID NO: 250137 - DNA, 20 bp, synthetic construct
  source 1..20: mol_type = other DNA
agtccttgagacagagggtg

SEQ ID NO: 250138 - DNA, 20 bp, synthetic construct
  source 1..20: mol_type = other DNA
gagtccttgagacagagggt

SEQ ID NO: 250139 - DNA, 20 bp, synthetic construct
  source 1..20: mol_type = other DNA
agagtccttgagacagaggg

SEQ ID NO: 250140 - DNA, 20 bp, synthetic construct
  source 1..20: mol_type = other DNA
cagagtccttgagacagagg

SEQ ID NO: 250141 - DNA, 20 bp, synthetic construct
  source 1..20: mol_type = other DNA
ccagagtccttgagacagag

SEQ ID NO: 250142 - DNA, 20 bp, synthetic construct
  source 1..20: mol_type = other DNA
gccagagtccttgagacaga

SEQ ID NO: 250143 - DNA, 20 bp, synthetic construct
  source 1..20: mol_type = other DNA
tgccagagtccttgagacag

SEQ ID NO: 250144 - DNA, 20 bp, synthetic construct
  source 1..20: mol_type = other DNA
atgccagagtccttgagaca

SEQ ID NO: 250145 - DNA, 20 bp, synthetic construct
  source 1..20: mol_type = other DNA
aatgccagagtccttgagac

SEQ ID NO: 250146 - DNA, 20 bp, synthetic construct
  source 1..20: mol_type = other DNA
aaatgccagagtccttgaga

SEQ ID NO: 250147 - DNA, 20 bp, synthetic construct
  source 1..20: mol_type = other DNA
taaatgccagagtccttgag

SEQ ID NO: 250148 - DNA, 20 bp, synthetic construct
  source 1..20: mol_type = other DNA
ctaaatgccagagtccttga

SEQ ID NO: 250149 - DNA, 20 bp, synthetic construct
  source 1..20: mol_type = other DNA
gctaaatgccagagtccttg

SEQ ID NO: 250150 - DNA, 20 bp, synthetic construct
  source 1..20: mol_type = other DNA
agctaaatgccagagtcctt

SEQ ID NO: 250151 - DNA, 20 bp, synthetic construct
  source 1..20: mol_type = other DNA
cagctaaatgccagagtcct

SEQ ID NO: 250152 - DNA, 20 bp, synthetic construct
  source 1..20: mol_type = other DNA
ccagctaaatgccagagtcc

SEQ ID NO: 250153 - DNA, 20 bp, synthetic construct
  source 1..20: mol_type = other DNA
tccagctaaatgccagagtc

SEQ ID NO: 250154 - DNA, 20 bp, synthetic construct
  source 1..20: mol_type = other DNA
gtccagctaaatgccagagt

SEQ ID NO: 250155 - DNA, 20 bp, synthetic construct
  source 1..20: mol_type = other DNA
agtccagctaaatgccagag

SEQ ID NO: 250156 - DNA, 20 bp, synthetic construct
  source 1..20: mol_type = other DNA
aagtccagctaaatgccaga

SEQ ID NO: 250157 - DNA, 20 bp, synthetic construct
  source 1..20: mol_type = other DNA
caagtccagctaaatgccag

SEQ ID NO: 250158 - DNA, 20 bp, synthetic construct
  source 1..20: mol_type = other DNA
gcaagtccagctaaatgcca

SEQ ID NO: 250159 - DNA, 20 bp, synthetic construct
  source 1..20: mol_type = other DNA
agcaagtccagctaaatgcc

SEQ ID NO: 250160 - DNA, 20 bp, synthetic construct
  source 1..20: mol_type = other DNA
cagcaagtccagctaaatgc

SEQ ID NO: 250161 - DNA, 20 bp, synthetic construct
  source 1..20: mol_type = other DNA
acagcaagtccagctaaatg

SEQ ID NO: 250162 - DNA, 20 bp, synthetic construct
  source 1..20: mol_type = other DNA
tacagcaagtccagctaaat

SEQ ID NO: 250163 - DNA, 20 bp, synthetic construct
  source 1..20: mol_type = other DNA
ctacagcaagtccagctaaa

SEQ ID NO: 250164 - DNA, 20 bp, synthetic construct
  source 1..20: mol_type = other DNA
gctacagcaagtccagctaa

SEQ ID NO: 250165 - DNA, 20 bp, synthetic construct
  source 1..20: mol_type = other DNA
agctacagcaagtccagcta

SEQ ID NO: 250166 - DNA, 20 bp, synthetic construct
  source 1..20: mol_type = other DNA
gagctacagcaagtccagct

SEQ ID NO: 250167 - DNA, 20 bp, synthetic construct
  source 1..20: mol_type = other DNA
agagctacagcaagtccagc

SEQ ID NO: 250168 - DNA, 20 bp, synthetic construct
  source 1..20: mol_type = other DNA
cagagctacagcaagtccag

SEQ ID NO: 250169 - DNA, 20 bp, synthetic construct
  source 1..20: mol_type = other DNA
tcagagctacagcaagtcca

SEQ ID NO: 250170 - DNA, 20 bp, synthetic construct
  source 1..20: mol_type = other DNA
ctcagagctacagcaagtcc

SEQ ID NO: 250171 - DNA, 20 bp, synthetic construct
  source 1..20: mol_type = other DNA
gctcagagctacagcaagtc

SEQ ID NO: 250172 - DNA, 20 bp, synthetic construct
  source 1..20: mol_type = other DNA
ggctcagagctacagcaagt

SEQ ID NO: 250173 - DNA, 20 bp, synthetic construct
  source 1..20: mol_type = other DNA
aggctcagagctacagcaag

SEQ ID NO: 250174 - DNA, 20 bp, synthetic construct
  source 1..20: mol_type = other DNA
aaggctcagagctacagcaa

SEQ ID NO: 250175 - DNA, 20 bp, synthetic construct
  source 1..20: mol_type = other DNA
aaaggctcagagctacagca

SEQ ID NO: 250176 - DNA, 20 bp, synthetic construct
  source 1..20: mol_type = other DNA
gaaaggctcagagctacagc

SEQ ID NO: 250177 - DNA, 20 bp, synthetic construct
  source 1..20: mol_type = other DNA
agaaaggctcagagctacag

SEQ ID NO: 250178 - DNA, 20 bp, synthetic construct
  source 1..20: mol_type = other DNA
cagaaaggctcagagctaca

SEQ ID NO: 250179 - DNA, 20 bp, synthetic construct
  source 1..20: mol_type = other DNA
gcagaaaggctcagagctac

SEQ ID NO: 250180 - DNA, 20 bp, synthetic construct
  source 1..20: mol_type = other DNA
ggcagaaaggctcagagcta

SEQ ID NO: 250181 - DNA, 20 bp, synthetic construct
  source 1..20: mol_type = other DNA
tggcagaaaggctcagagct

SEQ ID NO: 250182 - DNA, 20 bp, synthetic construct
  source 1..20: mol_type = other DNA
atggcagaaaggctcagagc

SEQ ID NO: 250183 - DNA, 20 bp, synthetic construct
  source 1..20: mol_type = other DNA
aatggcagaaaggctcagag

SEQ ID NO: 250184 - DNA, 20 bp, synthetic construct
  source 1..20: mol_type = other DNA
caatggcagaaaggctcaga

SEQ ID NO: 250185 - DNA, 20 bp, synthetic construct
  source 1..20: mol_type = other DNA
gcaatggcagaaaggctcag

SEQ ID NO: 250186 - DNA, 20 bp, synthetic construct
  source 1..20: mol_type = other DNA
ggcaatggcagaaaggctca

SEQ ID NO: 250187 - DNA, 20 bp, synthetic construct
  source 1..20: mol_type = other DNA
tggcaatggcagaaaggctc

SEQ ID NO: 250188 - DNA, 20 bp, synthetic construct
  source 1..20: mol_type = other DNA
atggcaatggcagaaaggct

SEQ ID NO: 250189 - DNA, 20 bp, synthetic construct
  source 1..20: mol_type = other DNA
gatggcaatggcagaaaggc

SEQ ID NO: 250190 - DNA, 20 bp, synthetic construct
  source 1..20: mol_type = other DNA
tgatggcaatggcagaaagg

SEQ ID NO: 250191 - DNA, 20 bp, synthetic construct
  source 1..20: mol_type = other DNA
gtgatggcaatggcagaaag

SEQ ID NO: 250192 - DNA, 20 bp, synthetic construct
  source 1..20: mol_type = other DNA
ggtgatggcaatggcagaaa

SEQ ID NO: 250193 - DNA, 20 bp, synthetic construct
  source 1..20: mol_type = other DNA
aggtgatggcaatggcagaa

SEQ ID NO: 250194 - DNA, 20 bp, synthetic construct
  source 1..20: mol_type = other DNA
aaggtgatggcaatggcaga

SEQ ID NO: 250195 - DNA, 20 bp, synthetic construct
  source 1..20: mol_type = other DNA
caaggtgatggcaatggcag

SEQ ID NO: 250196 - DNA, 20 bp, synthetic construct
  source 1..20: mol_type = other DNA
acaaggtgatggcaatggca

SEQ ID NO: 250197 - DNA, 20 bp, synthetic construct
  source 1..20: mol_type = other DNA
gacaaggtgatggcaatggc

SEQ ID NO: 250198 - DNA, 20 bp, synthetic construct
  source 1..20: mol_type = other DNA
tgacaaggtgatggcaatgg

SEQ ID NO: 250199 - DNA, 20 bp, synthetic construct
  source 1..20: mol_type = other DNA
ctgacaaggtgatggcaatg

SEQ ID NO: 250200 - DNA, 20 bp, synthetic construct
  source 1..20: mol_type = other DNA
tctgacaaggtgatggcaat

SEQ ID NO: 250201 - DNA, 20 bp, synthetic construct
  source 1..20: mol_type = other DNA
ttctgacaaggtgatggcaa

SEQ ID NO: 250202 - DNA, 20 bp, synthetic construct
  source 1..20: mol_type = other DNA
tttctgacaaggtgatggca

SEQ ID NO: 250203 - DNA, 20 bp, synthetic construct
  source 1..20: mol_type = other DNA
gtttctgacaaggtgatggc

SEQ ID NO: 250204 - DNA, 20 bp, synthetic construct
  source 1..20: mol_type = other DNA
agtttctgacaaggtgatgg

SEQ ID NO: 250205 - DNA, 20 bp, synthetic construct
  source 1..20: mol_type = other DNA
gagtttctgacaaggtgatg

SEQ ID NO: 250206 - DNA, 20 bp, synthetic construct
  source 1..20: mol_type = other DNA
tgagtttctgacaaggtgat

SEQ ID NO: 250207 - DNA, 20 bp, synthetic construct
  source 1..20: mol_type = other DNA
ctgagtttctgacaaggtga

SEQ ID NO: 250208 - DNA, 20 bp, synthetic construct
  source 1..20: mol_type = other DNA
cctgagtttctgacaaggtg

SEQ ID NO: 250209 - DNA, 20 bp, synthetic construct
  source 1..20: mol_type = other DNA
gcctgagtttctgacaaggt

SEQ ID NO: 250210 - DNA, 20 bp, synthetic construct
  source 1..20: mol_type = other DNA
ggcctgagtttctgacaagg

SEQ ID NO: 250211 - DNA, 20 bp, synthetic construct
  source 1..20: mol_type = other DNA
cggcctgagtttctgacaag

SEQ ID NO: 250212 - DNA, 20 bp, synthetic construct
  source 1..20: mol_type = other DNA
tcggcctgagtttctgacaa

SEQ ID NO: 250213 - DNA, 20 bp, synthetic construct
  source 1..20: mol_type = other DNA
ttcggcctgagtttctgaca

SEQ ID NO: 250214 - DNA, 20 bp, synthetic construct
  source 1..20: mol_type = other DNA
attcggcctgagtttctgac

SEQ ID NO: 250215 - DNA, 20 bp, synthetic construct
  source 1..20: mol_type = other DNA
gattcggcctgagtttctga

SEQ ID NO: 250216 - DNA, 20 bp, synthetic construct
  source 1..20: mol_type = other DNA
agattcggcctgagtttctg

SEQ ID NO: 250217 - DNA, 20 bp, synthetic construct
  source 1..20: mol_type = other DNA
cagattcggcctgagtttct

SEQ ID NO: 250218 - DNA, 20 bp, synthetic construct
  source 1..20: mol_type = other DNA
gcagattcggcctgagtttc

SEQ ID NO: 250219 - DNA, 20 bp, synthetic construct
  source 1..20: mol_type = other DNA
tgcagattcggcctgagttt

SEQ ID NO: 250220 - DNA, 20 bp, synthetic construct
  source 1..20: mol_type = other DNA
gtgcagattcggcctgagtt

SEQ ID NO: 250221 - DNA, 20 bp, synthetic construct
  source 1..20: mol_type = other DNA
agtgcagattcggcctgagt

SEQ ID NO: 250222 - DNA, 20 bp, synthetic construct
  source 1..20: mol_type = other DNA
gagtgcagattcggcctgag

SEQ ID NO: 250223 - DNA, 20 bp, synthetic construct
  source 1..20: mol_type = other DNA
tgagtgcagattcggcctga

SEQ ID NO: 250224 - DNA, 20 bp, synthetic construct
  source 1..20: mol_type = other DNA
ctgagtgcagattcggcctg

SEQ ID NO: 250225 - DNA, 20 bp, synthetic construct
  source 1..20: mol_type = other DNA
tctgagtgcagattcggcct

SEQ ID NO: 250226 - DNA, 20 bp, synthetic construct
  source 1..20: mol_type = other DNA
ctctgagtgcagattcggcc

SEQ ID NO: 250227 - DNA, 20 bp, synthetic construct
  source 1..20: mol_type = other DNA
actctgagtgcagattcggc

SEQ ID NO: 250228 - DNA, 20 bp, synthetic construct
  source 1..20: mol_type = other DNA
aactctgagtgcagattcgg

SEQ ID NO: 250229 - DNA, 20 bp, synthetic construct
  source 1..20: mol_type = other DNA
caactctgagtgcagattcg

SEQ ID NO: 250230 - DNA, 20 bp, synthetic construct
  source 1..20: mol_type = other DNA
acaactctgagtgcagattc

SEQ ID NO: 250231 - DNA, 20 bp, synthetic construct
  source 1..20: mol_type = other DNA
cacaactctgagtgcagatt

SEQ ID NO: 250232 - DNA, 20 bp, synthetic construct
  source 1..20: mol_type = other DNA
gcacaactctgagtgcagat

SEQ ID NO: 250233 - DNA, 20 bp, synthetic construct
  source 1..20: mol_type = other DNA
ggcacaactctgagtgcaga

SEQ ID NO: 250234 - DNA, 20 bp, synthetic construct
  source 1..20: mol_type = other DNA
gggcacaactctgagtgcag

SEQ ID NO: 250235 - DNA, 20 bp, synthetic construct
  source 1..20: mol_type = other DNA
tgggcacaactctgagtgca

SEQ ID NO: 250236 - DNA, 20 bp, synthetic construct
  source 1..20: mol_type = other DNA
ctgggcacaactctgagtgc

SEQ ID NO: 250237 - DNA, 20 bp, synthetic construct
  source 1..20: mol_type = other DNA
cctgggcacaactctgagtg

SEQ ID NO: 250238 - DNA, 20 bp, synthetic construct
  source 1..20: mol_type = other DNA
gcctgggcacaactctgagt

SEQ ID NO: 250239 - DNA, 20 bp, synthetic construct
  source 1..20: mol_type = other DNA
tgcctgggcacaactctgag

SEQ ID NO: 250240 - DNA, 20 bp, synthetic construct
  source 1..20: mol_type = other DNA
ctgcctgggcacaactctga

SEQ ID NO: 250241 - DNA, 20 bp, synthetic construct
  source 1..20: mol_type = other DNA
actgcctgggcacaactctg

SEQ ID NO: 250242 - DNA, 20 bp, synthetic construct
  source 1..20: mol_type = other DNA
aactgcctgggcacaactct

SEQ ID NO: 250243 - DNA, 20 bp, synthetic construct
  source 1..20: mol_type = other DNA
caactgcctgggcacaactc

SEQ ID NO: 250244 - DNA, 20 bp, synthetic construct
  source 1..20: mol_type = other DNA
tcaactgcctgggcacaact

SEQ ID NO: 250245 - DNA, 20 bp, synthetic construct
  source 1..20: mol_type = other DNA
ctcaactgcctgggcacaac

SEQ ID NO: 250246 - DNA, 20 bp, synthetic construct
  source 1..20: mol_type = other DNA
gctcaactgcctgggcacaa

SEQ ID NO: 250247 - DNA, 20 bp, synthetic construct
  source 1..20: mol_type = other DNA
ggctcaactgcctgggcaca

SEQ ID NO: 250248 - DNA, 20 bp, synthetic construct
  source 1..20: mol_type = other DNA
tggctcaactgcctgggcac

SEQ ID NO: 250249 - DNA, 20 bp, synthetic construct
  source 1..20: mol_type = other DNA
ttggctcaactgcctgggca

SEQ ID NO: 250250 - DNA, 20 bp, synthetic construct
  source 1..20: mol_type = other DNA
gttggctcaactgcctgggc

SEQ ID NO: 250251 - DNA, 20 bp, synthetic construct
  source 1..20: mol_type = other DNA
tgttggctcaactgcctggg

SEQ ID NO: 250252 - DNA, 20 bp, synthetic construct
  source 1..20: mol_type = other DNA
gtgttggctcaactgcctgg

SEQ ID NO: 250253 - DNA, 20 bp, synthetic construct
  source 1..20: mol_type = other DNA
agtgttggctcaactgcctg

SEQ ID NO: 250254 - DNA, 20 bp, synthetic construct
  source 1..20: mol_type = other DNA
aagtgttggctcaactgcct

SEQ ID NO: 250255 - DNA, 20 bp, synthetic construct
  source 1..20: mol_type = other DNA
caagtgttggctcaactgcc

SEQ ID NO: 250256 - DNA, 20 bp, synthetic construct
  source 1..20: mol_type = other DNA
gcaagtgttggctcaactgc

SEQ ID NO: 250257 - DNA, 20 bp, synthetic construct
  source 1..20: mol_type = other DNA
agcaagtgttggctcaactg

SEQ ID NO: 250258 - DNA, 20 bp, synthetic construct
  source 1..20: mol_type = other DNA
gagcaagtgttggctcaact

SEQ ID NO: 250259 - DNA, 20 bp, synthetic construct
  source 1..20: mol_type = other DNA
tgagcaagtgttggctcaac

SEQ ID NO: 250260 - DNA, 20 bp, synthetic construct
  source 1..20: mol_type = other DNA
ctgagcaagtgttggctcaa

SEQ ID NO: 250261 - DNA, 20 bp, synthetic construct
  source 1..20: mol_type = other DNA
gctgagcaagtgttggctca

SEQ ID NO: 250262 - DNA, 20 bp, synthetic construct
  source 1..20: mol_type = other DNA
cgctgagcaagtgttggctc

SEQ ID NO: 250263 - DNA, 20 bp, synthetic construct
  source 1..20: mol_type = other DNA
tcgctgagcaagtgttggct

SEQ ID NO: 250264 - DNA, 20 bp, synthetic construct
  source 1..20: mol_type = other DNA
atcgctgagcaagtgttggc

SEQ ID NO: 250265 - DNA, 20 bp, synthetic construct
  source 1..20: mol_type = other DNA
tatcgctgagcaagtgttgg

SEQ ID NO: 250266 - DNA, 20 bp, synthetic construct
  source 1..20: mol_type = other DNA
atatcgctgagcaagtgttg

SEQ ID NO: 250267 - DNA, 20 bp, synthetic construct
  source 1..20: mol_type = other DNA
aatatcgctgagcaagtgtt

SEQ ID NO: 250268 - DNA, 20 bp, synthetic construct
  source 1..20: mol_type = other DNA
caatatcgctgagcaagtgt

SEQ ID NO: 250269 - DNA, 20 bp, synthetic construct
  source 1..20: mol_type = other DNA
acaatatcgctgagcaagtg

SEQ ID NO: 250270 - DNA, 20 bp, synthetic construct
  source 1..20: mol_type = other DNA
gacaatatcgctgagcaagt

SEQ ID NO: 250271 - DNA, 20 bp, synthetic construct
  source 1..20: mol_type = other DNA
tgacaatatcgctgagcaag

SEQ ID NO: 250272 - DNA, 20 bp, synthetic construct
  source 1..20: mol_type = other DNA
gtgacaatatcgctgagcaa

SEQ ID NO: 250273 - DNA, 20 bp, synthetic construct
  source 1..20: mol_type = other DNA
tgtgacaatatcgctgagca

SEQ ID NO: 250274 - DNA, 20 bp, synthetic construct
  source 1..20: mol_type = other DNA
atgtgacaatatcgctgagc

SEQ ID NO: 250275 - DNA, 20 bp, synthetic construct
  source 1..20: mol_type = other DNA
catgtgacaatatcgctgag

SEQ ID NO: 250276 - DNA, 20 bp, synthetic construct
  source 1..20: mol_type = other DNA
tcatgtgacaatatcgctga

SEQ ID NO: 250277 - DNA, 20 bp, synthetic construct
  source 1..20: mol_type = other DNA
gtcatgtgacaatatcgctg

SEQ ID NO: 250278 - DNA, 20 bp, synthetic construct
  source 1..20: mol_type = other DNA
tgtcatgtgacaatatcgct

SEQ ID NO: 250279 - DNA, 20 bp, synthetic construct
  source 1..20: mol_type = other DNA
ttgtcatgtgacaatatcgc

SEQ ID NO: 250280 - DNA, 20 bp, synthetic construct
  source 1..20: mol_type = other DNA
cttgtcatgtgacaatatcg

SEQ ID NO: 250281 - DNA, 20 bp, synthetic construct
  source 1..20: mol_type = other DNA
ccttgtcatgtgacaatatc

SEQ ID NO: 250282 - DNA, 20 bp, synthetic construct
  source 1..20: mol_type = other DNA
gccttgtcatgtgacaatat

SEQ ID NO: 250283 - DNA, 20 bp, synthetic construct
  source 1..20: mol_type = other DNA
tgccttgtcatgtgacaata

SEQ ID NO: 250284 - DNA, 20 bp, synthetic construct
  source 1..20: mol_type = other DNA
gtgccttgtcatgtgacaat

SEQ ID NO: 250285 - DNA, 20 bp, synthetic construct
  source 1..20: mol_type = other DNA
agtgccttgtcatgtgacaa

SEQ ID NO: 250286 - DNA, 20 bp, synthetic construct
  source 1..20: mol_type = other DNA
cagtgccttgtcatgtgaca

SEQ ID NO: 250287 - DNA, 20 bp, synthetic construct
  source 1..20: mol_type = other DNA
acagtgccttgtcatgtgac

SEQ ID NO: 250288 - DNA, 20 bp, synthetic construct
  source 1..20: mol_type = other DNA
gacagtgccttgtcatgtga

SEQ ID NO: 250289 - DNA, 20 bp, synthetic construct
  source 1..20: mol_type = other DNA
tgacagtgccttgtcatgtg

SEQ ID NO: 250290 - DNA, 20 bp, synthetic construct
  source 1..20: mol_type = other DNA
gtgacagtgccttgtcatgt

SEQ ID NO: 250291 - DNA, 20 bp, synthetic construct
  source 1..20: mol_type = other DNA
ggtgacagtgccttgtcatg

SEQ ID NO: 250292 - DNA, 20 bp, synthetic construct
  source 1..20: mol_type = other DNA
tggtgacagtgccttgtcat

SEQ ID NO: 250293 - DNA, 20 bp, synthetic construct
  source 1..20: mol_type = other DNA
gtggtgacagtgccttgtca

SEQ ID NO: 250294 - DNA, 20 bp, synthetic construct
  source 1..20: mol_type = other DNA
agtggtgacagtgccttgtc

SEQ ID NO: 250295 - DNA, 20 bp, synthetic construct
  source 1..20: mol_type = other DNA
cagtggtgacagtgccttgt

SEQ ID NO: 250296 - DNA, 20 bp, synthetic construct
  source 1..20: mol_type = other DNA
ccagtggtgacagtgccttg

SEQ ID NO: 250297 - DNA, 20 bp, synthetic construct
  source 1..20: mol_type = other DNA
cccagtggtgacagtgcctt

SEQ ID NO: 250298 - DNA, 20 bp, synthetic construct
  source 1..20: mol_type = other DNA
gcccagtggtgacagtgcct

SEQ ID NO: 250299 - DNA, 20 bp, synthetic construct
  source 1..20: mol_type = other DNA
tgcccagtggtgacagtgcc

SEQ ID NO: 250300 - DNA, 20 bp, synthetic construct
  source 1..20: mol_type = other DNA
atgcccagtggtgacagtgc

SEQ ID NO: 250301 - DNA, 20 bp, synthetic construct
  source 1..20: mol_type = other DNA
gatgcccagtggtgacagtg

SEQ ID NO: 250302 - DNA, 20 bp, synthetic construct
  source 1..20: mol_type = other DNA
cgatgcccagtggtgacagt

SEQ ID NO: 250303 - DNA, 20 bp, synthetic construct
  source 1..20: mol_type = other DNA
acgatgcccagtggtgacag

SEQ ID NO: 250304 - DNA, 20 bp, synthetic construct
  source 1..20: mol_type = other DNA
cacgatgcccagtggtgaca

SEQ ID NO: 250305 - DNA, 20 bp, synthetic construct
  source 1..20: mol_type = other DNA
ccacgatgcccagtggtgac

SEQ ID NO: 250306 - DNA, 20 bp, synthetic construct
  source 1..20: mol_type = other DNA
cccacgatgcccagtggtga

SEQ ID NO: 250307 - DNA, 20 bp, synthetic construct
  source 1..20: mol_type = other DNA
acccacgatgcccagtggtg

SEQ ID NO: 250308 - DNA, 20 bp, synthetic construct
  source 1..20: mol_type = other DNA
tacccacgatgcccagtggt

SEQ ID NO: 250309 - DNA, 20 bp, synthetic construct
  source 1..20: mol_type = other DNA
ctacccacgatgcccagtgg

SEQ ID NO: 250310 - DNA, 20 bp, synthetic construct
  source 1..20: mol_type = other DNA
gctacccacgatgcccagtg

SEQ ID NO: 250311 - DNA, 20 bp, synthetic construct
  source 1..20: mol_type = other DNA
cgctacccacgatgcccagt

SEQ ID NO: 250312 - DNA, 20 bp, synthetic construct
  source 1..20: mol_type = other DNA
gcgctacccacgatgcccag

SEQ ID NO: 250313 - DNA, 20 bp, synthetic construct
  source 1..20: mol_type = other DNA
tgcgctacccacgatgccca

SEQ ID NO: 250314 - DNA, 20 bp, synthetic construct
  source 1..20: mol_type = other DNA
ctgcgctacccacgatgccc

SEQ ID NO: 250315 - DNA, 20 bp, synthetic construct
  source 1..20: mol_type = other DNA
actgcgctacccacgatgcc

SEQ ID NO: 250316 - DNA, 20 bp, synthetic construct
  source 1..20: mol_type = other DNA
cactgcgctacccacgatgc

SEQ ID NO: 250317 - DNA, 20 bp, synthetic construct
  source 1..20: mol_type = other DNA
acactgcgctacccacgatg

SEQ ID NO: 250318 - DNA, 20 bp, synthetic construct
  source 1..20: mol_type = other DNA
gacactgcgctacccacgat

SEQ ID NO: 250319 - DNA, 20 bp, synthetic construct
  source 1..20: mol_type = other DNA
cgacactgcgctacccacga

SEQ ID NO: 250320 - DNA, 20 bp, synthetic construct
  source 1..20: mol_type = other DNA
ccgacactgcgctacccacg

SEQ ID NO: 250321 - DNA, 20 bp, synthetic construct
  source 1..20: mol_type = other DNA
gccgacactgcgctacccac

SEQ ID NO: 250322 - DNA, 20 bp, synthetic construct
  source 1..20: mol_type = other DNA
agccgacactgcgctaccca

SEQ ID NO: 250323 - DNA, 20 bp, synthetic construct
  source 1..20: mol_type = other DNA
cagccgacactgcgctaccc

SEQ ID NO: 250324 - DNA, 20 bp, synthetic construct
  source 1..20: mol_type = other DNA
ccagccgacactgcgctacc

SEQ ID NO: 250325 - DNA, 20 bp, synthetic construct
  source 1..20: mol_type = other DNA
tccagccgacactgcgctac

SEQ ID NO: 250326 - DNA, 20 bp, synthetic construct
  source 1..20: mol_type = other DNA
atccagccgacactgcgcta

SEQ ID NO: 250327 - DNA, 20 bp, synthetic construct
  source 1..20: mol_type = other DNA
catccagccgacactgcgct

SEQ ID NO: 250328 - DNA, 20 bp, synthetic construct
  source 1..20: mol_type = other DNA
ccatccagccgacactgcgc

SEQ ID NO: 250329 - DNA, 20 bp, synthetic construct
  source 1..20: mol_type = other DNA
tccatccagccgacactgcg

SEQ ID NO: 250330 - DNA, 20 bp, synthetic construct
  source 1..20: mol_type = other DNA
gtccatccagccgacactgc

SEQ ID NO: 250331 - DNA, 20 bp, synthetic construct
  source 1..20: mol_type = other DNA
ggtccatccagccgacactg

SEQ ID NO: 250332 - DNA, 20 bp, synthetic construct
  source 1..20: mol_type = other DNA
gggtccatccagccgacact

SEQ ID NO: 250333 - DNA, 20 bp, synthetic construct
  source 1..20: mol_type = other DNA
cgggtccatccagccgacac

SEQ ID NO: 250334 - DNA, 20 bp, synthetic construct
  source 1..20: mol_type = other DNA
ccgggtccatccagccgaca

SEQ ID NO: 250335 - DNA, 20 bp, synthetic construct
  source 1..20: mol_type = other DNA
tccgggtccatccagccgac

SEQ ID NO: 250336 - DNA, 20 bp, synthetic construct
  source 1..20: mol_type = other DNA
ctccgggtccatccagccga

SEQ ID NO: 250337 - DNA, 20 bp, synthetic construct
  source 1..20: mol_type = other DNA
cctccgggtccatccagccg

SEQ ID NO: 250338 - DNA, 20 bp, synthetic construct
  source 1..20: mol_type = other DNA
ccctccgggtccatccagcc

SEQ ID NO: 250339 - DNA, 20 bp, synthetic construct
  source 1..20: mol_type = other DNA
accctccgggtccatccagc

SEQ ID NO: 250340 - DNA, 20 bp, synthetic construct
  source 1..20: mol_type = other DNA
caccctccgggtccatccag

SEQ ID NO: 250341 - DNA, 20 bp, synthetic construct
  source 1..20: mol_type = other DNA
acaccctccgggtccatcca

SEQ ID NO: 250342 - DNA, 20 bp, synthetic construct
  source 1..20: mol_type = other DNA
gacaccctccgggtccatcc

SEQ ID NO: 250343 - DNA, 20 bp, synthetic construct
  source 1..20: mol_type = other DNA
agacaccctccgggtccatc

SEQ ID NO: 250344 - DNA, 20 bp, synthetic construct
  source 1..20: mol_type = other DNA
cagacaccctccgggtccat

SEQ ID NO: 250345 - DNA, 20 bp, synthetic construct
  source 1..20: mol_type = other DNA
acagacaccctccgggtcca

SEQ ID NO: 250346 - DNA, 20 bp, synthetic construct
  source 1..20: mol_type = other DNA
cacagacaccctccgggtcc

SEQ ID NO: 250347 - DNA, 20 bp, synthetic construct
  source 1..20: mol_type = other DNA
acacagacaccctccgggtc

SEQ ID NO: 250348 - DNA, 20 bp, synthetic construct
  source 1..20: mol_type = other DNA
gacacagacaccctccgggt

SEQ ID NO: 250349 - DNA, 20 bp, synthetic construct
  source 1..20: mol_type = other DNA
tgacacagacaccctccggg

SEQ ID NO: 250350 - DNA, 20 bp, synthetic construct
  source 1..20: mol_type = other DNA
atgacacagacaccctccgg

SEQ ID NO: 250351 - DNA, 20 bp, synthetic construct
  source 1..20: mol_type = other DNA
catgacacagacaccctccg

SEQ ID NO: 250352 - DNA, 20 bp, synthetic construct
  source 1..20: mol_type = other DNA
gcatgacacagacaccctcc

SEQ ID NO: 250353 - DNA, 20 bp, synthetic construct
  source 1..20: mol_type = other DNA
agcatgacacagacaccctc

SEQ ID NO: 250354 - DNA, 20 bp, synthetic construct
  source 1..20: mol_type = other DNA
tagcatgacacagacaccct

SEQ ID NO: 250355 - DNA, 20 bp, synthetic construct
  source 1..20: mol_type = other DNA
ctagcatgacacagacaccc

SEQ ID NO: 250356 - DNA, 20 bp, synthetic construct
  source 1..20: mol_type = other DNA
actagcatgacacagacacc

SEQ ID NO: 250357 - DNA, 20 bp, synthetic construct
  source 1..20: mol_type = other DNA
cactagcatgacacagacac

SEQ ID NO: 250358 - DNA, 20 bp, synthetic construct
  source 1..20: mol_type = other DNA
gcactagcatgacacagaca

SEQ ID NO: 250359 - DNA, 20 bp, synthetic construct
  source 1..20: mol_type = other DNA
agcactagcatgacacagac

SEQ ID NO: 250360 - DNA, 20 bp, synthetic construct
  source 1..20: mol_type = other DNA
tagcactagcatgacacaga

SEQ ID NO: 250361 - DNA, 20 bp, synthetic construct
  source 1..20: mol_type = other DNA
ctagcactagcatgacacag

SEQ ID NO: 250362 - DNA, 20 bp, synthetic construct
  source 1..20: mol_type = other DNA
actagcactagcatgacaca

SEQ ID NO: 250363 - DNA, 20 bp, synthetic construct
  source 1..20: mol_type = other DNA
cactagcactagcatgacac

SEQ ID NO: 250364 - DNA, 20 bp, synthetic construct
  source 1..20: mol_type = other DNA
tcactagcactagcatgaca

SEQ ID NO: 250365 - DNA, 20 bp, synthetic construct
  source 1..20: mol_type = other DNA
atcactagcactagcatgac

SEQ ID NO: 250366 - DNA, 20 bp, synthetic construct
  source 1..20: mol_type = other DNA
catcactagcactagcatga

SEQ ID NO: 250367 - DNA, 20 bp, synthetic construct
  source 1..20: mol_type = other DNA
ccatcactagcactagcatg

SEQ ID NO: 250368 - DNA, 20 bp, synthetic construct
  source 1..20: mol_type = other DNA
cccatcactagcactagcat

SEQ ID NO: 250369 - DNA, 20 bp, synthetic construct
  source 1..20: mol_type = other DNA
tcccatcactagcactagca

SEQ ID NO: 250370 - DNA, 20 bp, synthetic construct
  source 1..20: mol_type = other DNA
ctcccatcactagcactagc

SEQ ID NO: 250371 - DNA, 20 bp, synthetic construct
  source 1..20: mol_type = other DNA
gctcccatcactagcactag

SEQ ID NO: 250372 - DNA, 20 bp, synthetic construct
  source 1..20: mol_type = other DNA
ggctcccatcactagcacta

SEQ ID NO: 250373 - DNA, 20 bp, synthetic construct
  source 1..20: mol_type = other DNA
gggctcccatcactagcact

SEQ ID NO: 250374 - DNA, 20 bp, synthetic construct
  source 1..20: mol_type = other DNA
ggggctcccatcactagcac

SEQ ID NO: 250375 - DNA, 20 bp, synthetic construct
  source 1..20: mol_type = other DNA
cggggctcccatcactagca

SEQ ID NO: 250376 - DNA, 20 bp, synthetic construct
  source 1..20: mol_type = other DNA
acggggctcccatcactagc

SEQ ID NO: 250377 - DNA, 20 bp, synthetic construct
  source 1..20: mol_type = other DNA
cacggggctcccatcactag

SEQ ID NO: 250378 - DNA, 20 bp, synthetic construct
  source 1..20: mol_type = other DNA
tcacggggctcccatcacta

SEQ ID NO: 250379 - DNA, 20 bp, synthetic construct
  source 1..20: mol_type = other DNA
ctcacggggctcccatcact

SEQ ID NO: 250380 - DNA, 20 bp, synthetic construct
  source 1..20: mol_type = other DNA
gctcacggggctcccatcac

SEQ ID NO: 250381 - DNA, 20 bp, synthetic construct
  source 1..20: mol_type = other DNA
ggctcacggggctcccatca

SEQ ID NO: 250382 - DNA, 20 bp, synthetic construct
  source 1..20: mol_type = other DNA
gggctcacggggctcccatc

SEQ ID NO: 250383 - DNA, 20 bp, synthetic construct
  source 1..20: mol_type = other DNA
tgggctcacggggctcccat

SEQ ID NO: 250384 - DNA, 20 bp, synthetic construct
  source 1..20: mol_type = other DNA
atgggctcacggggctccca

SEQ ID NO: 250385 - DNA, 20 bp, synthetic construct
  source 1..20: mol_type = other DNA
aatgggctcacggggctccc

SEQ ID NO: 250386 - DNA, 20 bp, synthetic construct
  source 1..20: mol_type = other DNA
caatgggctcacggggctcc

SEQ ID NO: 250387 - DNA, 20 bp, synthetic construct
  source 1..20: mol_type = other DNA
gcaatgggctcacggggctc

SEQ ID NO: 250388 - DNA, 20 bp, synthetic construct
  source 1..20: mol_type = other DNA
ggcaatgggctcacggggct

SEQ ID NO: 250389 - DNA, 20 bp, synthetic construct
  source 1..20: mol_type = other DNA
gggcaatgggctcacggggc

SEQ ID NO: 250390 - DNA, 20 bp, synthetic construct
  source 1..20: mol_type = other DNA
cgggcaatgggctcacgggg

SEQ ID NO: 250391 - DNA, 20 bp, synthetic construct
  source 1..20: mol_type = other DNA
gcgggcaatgggctcacggg

SEQ ID NO: 250392 - DNA, 20 bp, synthetic construct
  source 1..20: mol_type = other DNA
ggcgggcaatgggctcacgg

SEQ ID NO: 250393 - DNA, 20 bp, synthetic construct
  source 1..20: mol_type = other DNA
gggcgggcaatgggctcacg

SEQ ID NO: 250394 - DNA, 20 bp, synthetic construct
  source 1..20: mol_type = other DNA
agggcgggcaatgggctcac

SEQ ID NO: 250395 - DNA, 20 bp, synthetic construct
  source 1..20: mol_type = other DNA
gagggcgggcaatgggctca

SEQ ID NO: 250396 - DNA, 20 bp, synthetic construct
  source 1..20: mol_type = other DNA
ggagggcgggcaatgggctc

SEQ ID NO: 250397 - DNA, 20 bp, synthetic construct
  source 1..20: mol_type = other DNA
gggagggcgggcaatgggct

SEQ ID NO: 250398 - DNA, 20 bp, synthetic construct
  source 1..20: mol_type = other DNA
tgggagggcgggcaatgggc

SEQ ID NO: 250399 - DNA, 20 bp, synthetic construct
  source 1..20: mol_type = other DNA
atgggagggcgggcaatggg

SEQ ID NO: 250400 - DNA, 20 bp, synthetic construct
  source 1..20: mol_type = other DNA
catgggagggcgggcaatgg

SEQ ID NO: 250401 - DNA, 20 bp, synthetic construct
  source 1..20: mol_type = other DNA
gcatgggagggcgggcaatg

SEQ ID NO: 250402 - DNA, 20 bp, synthetic construct
  source 1..20: mol_type = other DNA
ggcatgggagggcgggcaat

SEQ ID NO: 250403 - DNA, 20 bp, synthetic construct
  source 1..20: mol_type = other DNA
gggcatgggagggcgggcaa

SEQ ID NO: 250404 - DNA, 20 bp, synthetic construct
  source 1..20: mol_type = other DNA
agggcatgggagggcgggca

SEQ ID NO: 250405 - DNA, 20 bp, synthetic construct
  source 1..20: mol_type = other DNA
gagggcatgggagggcgggc

SEQ ID NO: 250406 - DNA, 20 bp, synthetic construct
  source 1..20: mol_type = other DNA
tgagggcatgggagggcggg

SEQ ID NO: 250407 - DNA, 20 bp, synthetic construct
  source 1..20: mol_type = other DNA
ctgagggcatgggagggcgg

SEQ ID NO: 250408 - DNA, 20 bp, synthetic construct
  source 1..20: mol_type = other DNA
gctgagggcatgggagggcg

SEQ ID NO: 250409 - DNA, 20 bp, synthetic construct
  source 1..20: mol_type = other DNA
tgctgagggcatgggagggc

SEQ ID NO: 250410 - DNA, 20 bp, synthetic construct
  source 1..20: mol_type = other DNA
ctgctgagggcatgggaggg

SEQ ID NO: 250411 - DNA, 20 bp, synthetic construct
  source 1..20: mol_type = other DNA
gctgctgagggcatgggagg

SEQ ID NO: 250412 - DNA, 20 bp, synthetic construct
  source 1..20: mol_type = other DNA
agctgctgagggcatgggag

SEQ ID NO: 250413 - DNA, 20 bp, synthetic construct
  source 1..20: mol_type = other DNA
cagctgctgagggcatggga

SEQ ID NO: 250414 - DNA, 20 bp, synthetic construct
  source 1..20: mol_type = other DNA
gcagctgctgagggcatggg

SEQ ID NO: 250415 - DNA, 20 bp, synthetic construct
  source 1..20: mol_type = other DNA
ggcagctgctgagggcatgg

SEQ ID NO: 250416 - DNA, 20 bp, synthetic construct
  source 1..20: mol_type = other DNA
aggcagctgctgagggcatg

SEQ ID NO: 250417 - DNA, 20 bp, synthetic construct
  source 1..20: mol_type = other DNA
caggcagctgctgagggcat

SEQ ID NO: 250418 - DNA, 20 bp, synthetic construct
  source 1..20: mol_type = other DNA
ccaggcagctgctgagggca

SEQ ID NO: 250419 - DNA, 20 bp, synthetic construct
  source 1..20: mol_type = other DNA
cccaggcagctgctgagggc

SEQ ID NO: 250420 - DNA, 20 bp, synthetic construct
  source 1..20: mol_type = other DNA
ccccaggcagctgctgaggg

SEQ ID NO: 250421 - DNA, 20 bp, synthetic construct
  source 1..20: mol_type = other DNA
tccccaggcagctgctgagg

SEQ ID NO: 250422 - DNA, 20 bp, synthetic construct
  source 1..20: mol_type = other DNA
gtccccaggcagctgctgag

SEQ ID NO: 250423 - DNA, 20 bp, synthetic construct
  source 1..20: mol_type = other DNA
tgtccccaggcagctgctga

SEQ ID NO: 250424 - DNA, 20 bp, synthetic construct
  source 1..20: mol_type = other DNA
ctgtccccaggcagctgctg

SEQ ID NO: 250425 - DNA, 20 bp, synthetic construct
  source 1..20: mol_type = other DNA
gctgtccccaggcagctgct

SEQ ID NO: 250426 - DNA, 20 bp, synthetic construct
  source 1..20: mol_type = other DNA
ggctgtccccaggcagctgc

SEQ ID NO: 250427 - DNA, 20 bp, synthetic construct
  source 1..20: mol_type = other DNA
tggctgtccccaggcagctg

SEQ ID NO: 250428 - DNA, 20 bp, synthetic construct
  source 1..20: mol_type = other DNA
ttggctgtccccaggcagct

SEQ ID NO: 250429 - DNA, 20 bp, synthetic construct
  source 1..20: mol_type = other DNA
attggctgtccccaggcagc

SEQ ID NO: 250430 - DNA, 20 bp, synthetic construct
  source 1..20: mol_type = other DNA
cattggctgtccccaggcag

SEQ ID NO: 250431 - DNA, 20 bp, synthetic construct
  source 1..20: mol_type = other DNA
ccattggctgtccccaggca

SEQ ID NO: 250432 - DNA, 20 bp, synthetic construct
  source 1..20: mol_type = other DNA
gccattggctgtccccaggc

SEQ ID NO: 250433 - DNA, 20 bp, synthetic construct
  source 1..20: mol_type = other DNA
ggccattggctgtccccagg

SEQ ID NO: 250434 - DNA, 20 bp, synthetic construct
  source 1..20: mol_type = other DNA
aggccattggctgtccccag

SEQ ID NO: 250435 - DNA, 20 bp, synthetic construct
  source 1..20: mol_type = other DNA
caggccattggctgtcccca

SEQ ID NO: 250436 - DNA, 20 bp, synthetic construct
  source 1..20: mol_type = other DNA
ccaggccattggctgtcccc

SEQ ID NO: 250437 - DNA, 20 bp, synthetic construct
  source 1..20: mol_type = other DNA
cccaggccattggctgtccc

SEQ ID NO: 250438 - DNA, 20 bp, synthetic construct
  source 1..20: mol_type = other DNA
acccaggccattggctgtcc

SEQ ID NO: 250439 - DNA, 20 bp, synthetic construct
  source 1..20: mol_type = other DNA
cacccaggccattggctgtc

SEQ ID NO: 250440 - DNA, 20 bp, synthetic construct
  source 1..20: mol_type = other DNA
acacccaggccattggctgt

SEQ ID NO: 250441 - DNA, 20 bp, synthetic construct
  source 1..20: mol_type = other DNA
aacacccaggccattggctg

SEQ ID NO: 250442 - DNA, 20 bp, synthetic construct
  source 1..20: mol_type = other DNA
aaacacccaggccattggct

SEQ ID NO: 250443 - DNA, 20 bp, synthetic construct
  source 1..20: mol_type = other DNA
gaaacacccaggccattggc

SEQ ID NO: 250444 - DNA, 20 bp, synthetic construct
  source 1..20: mol_type = other DNA
agaaacacccaggccattgg

SEQ ID NO: 250445 - DNA, 20 bp, synthetic construct
  source 1..20: mol_type = other DNA
cagaaacacccaggccattg

SEQ ID NO: 250446 - DNA, 20 bp, synthetic construct
  source 1..20: mol_type = other DNA
tcagaaacacccaggccatt

SEQ ID NO: 250447 - DNA, 20 bp, synthetic construct
  source 1..20: mol_type = other DNA
ctcagaaacacccaggccat

SEQ ID NO: 250448 - DNA, 20 bp, synthetic construct
  source 1..20: mol_type = other DNA
cctcagaaacacccaggcca

SEQ ID NO: 250449 - DNA, 20 bp, synthetic construct
  source 1..20: mol_type = other DNA
gcctcagaaacacccaggcc

SEQ ID NO: 250450 - DNA, 20 bp, synthetic construct
  source 1..20: mol_type = other DNA
agcctcagaaacacccaggc

SEQ ID NO: 250451 - DNA, 20 bp, synthetic construct
  source 1..20: mol_type = other DNA
tagcctcagaaacacccagg

SEQ ID NO: 250452 - DNA, 20 bp, synthetic construct
  source 1..20: mol_type = other DNA
gtagcctcagaaacacccag

SEQ ID NO: 250453 - DNA, 20 bp, synthetic construct
  source 1..20: mol_type = other DNA
ggtagcctcagaaacaccca

SEQ ID NO: 250454 - DNA, 20 bp, synthetic construct
  source 1..20: mol_type = other DNA
tggtagcctcagaaacaccc

SEQ ID NO: 250455 - DNA, 20 bp, synthetic construct
  source 1..20: mol_type = other DNA
gtggtagcctcagaaacacc

SEQ ID NO: 250456 - DNA, 20 bp, synthetic construct
  source 1..20: mol_type = other DNA
tgtggtagcctcagaaacac

SEQ ID NO: 250457 - DNA, 20 bp, synthetic construct
  source 1..20: mol_type = other DNA
atgtggtagcctcagaaaca

SEQ ID NO: 250458 - DNA, 20 bp, synthetic construct
  source 1..20: mol_type = other DNA
catgtggtagcctcagaaac

SEQ ID NO: 250459 - DNA, 20 bp, synthetic construct
  source 1..20: mol_type = other DNA
ccatgtggtagcctcagaaa

SEQ ID NO: 250460 - DNA, 20 bp, synthetic construct
  source 1..20: mol_type = other DNA
gccatgtggtagcctcagaa

SEQ ID NO: 250461 - DNA, 20 bp, synthetic construct
  source 1..20: mol_type = other DNA
agccatgtggtagcctcaga

SEQ ID NO: 250462 - DNA, 20 bp, synthetic construct
  source 1..20: mol_type = other DNA
aagccatgtggtagcctcag

SEQ ID NO: 250463 - DNA, 20 bp, synthetic construct
  source 1..20: mol_type = other DNA
gaagccatgtggtagcctca

SEQ ID NO: 250464 - DNA, 20 bp, synthetic construct
  source 1..20: mol_type = other DNA
ggaagccatgtggtagcctc

SEQ ID NO: 250465 - DNA, 20 bp, synthetic construct
  source 1..20: mol_type = other DNA
tggaagccatgtggtagcct

SEQ ID NO: 250466 - DNA, 20 bp, synthetic construct
  source 1..20: mol_type = other DNA
ctggaagccatgtggtagcc

SEQ ID NO: 250467 - DNA, 20 bp, synthetic construct
  source 1..20: mol_type = other DNA
cctggaagccatgtggtagc

SEQ ID NO: 250468 - DNA, 20 bp, synthetic construct
  source 1..20: mol_type = other DNA
tcctggaagccatgtggtag

SEQ ID NO: 250469 - DNA, 20 bp, synthetic construct
  source 1..20: mol_type = other DNA
ttcctggaagccatgtggta

SEQ ID NO: 250470 - DNA, 20 bp, synthetic construct
  source 1..20: mol_type = other DNA
tttcctggaagccatgtggt

SEQ ID NO: 250471 - DNA, 20 bp, synthetic construct
  source 1..20: mol_type = other DNA
gtttcctggaagccatgtgg

SEQ ID NO: 250472 - DNA, 20 bp, synthetic construct
  source 1..20: mol_type = other DNA
agtttcctggaagccatgtg

SEQ ID NO: 250473 - DNA, 20 bp, synthetic construct
  source 1..20: mol_type = other DNA
gagtttcctggaagccatgt

SEQ ID NO: 250474 - DNA, 20 bp, synthetic construct
  source 1..20: mol_type = other DNA
cgagtttcctggaagccatg

SEQ ID NO: 250475 - DNA, 20 bp, synthetic construct
  source 1..20: mol_type = other DNA
tcgagtttcctggaagccat

SEQ ID NO: 250476 - DNA, 20 bp, synthetic construct
  source 1..20: mol_type = other DNA
ctcgagtttcctggaagcca

SEQ ID NO: 250477 - DNA, 20 bp, synthetic construct
  source 1..20: mol_type = other DNA
tctcgagtttcctggaagcc

SEQ ID NO: 250478 - DNA, 20 bp, synthetic construct
  source 1..20: mol_type = other DNA
ttctcgagtttcctggaagc

SEQ ID NO: 250479 - DNA, 20 bp, synthetic construct
  source 1..20: mol_type = other DNA
gttctcgagtttcctggaag

SEQ ID NO: 250480 - DNA, 20 bp, synthetic construct
  source 1..20: mol_type = other DNA
ggttctcgagtttcctggaa

SEQ ID NO: 250481 - DNA, 20 bp, synthetic construct
  source 1..20: mol_type = other DNA
aggttctcgagtttcctgga

SEQ ID NO: 250482 - DNA, 20 bp, synthetic construct
  source 1..20: mol_type = other DNA
aaggttctcgagtttcctgg

SEQ ID NO: 250483 - DNA, 20 bp, synthetic construct
  source 1..20: mol_type = other DNA
aaaggttctcgagtttcctg

SEQ ID NO: 250484 - DNA, 20 bp, synthetic construct
  source 1..20: mol_type = other DNA
gaaaggttctcgagtttcct

SEQ ID NO: 250485 - DNA, 20 bp, synthetic construct
  source 1..20: mol_type = other DNA
agaaaggttctcgagtttcc

SEQ ID NO: 250486 - DNA, 20 bp, synthetic construct
  source 1..20: mol_type = other DNA
gagaaaggttctcgagtttc

SEQ ID NO: 250487 - DNA, 20 bp, synthetic construct
  source 1..20: mol_type = other DNA
agagaaaggttctcgagttt

SEQ ID NO: 250488 - DNA, 20 bp, synthetic construct
  source 1..20: mol_type = other DNA
gagagaaaggttctcgagtt

SEQ ID NO: 250489 - DNA, 20 bp, synthetic construct
  source 1..20: mol_type = other DNA
ggagagaaaggttctcgagt

SEQ ID NO: 250490 - DNA, 20 bp, synthetic construct
  source 1..20: mol_type = other DNA
gggagagaaaggttctcgag

SEQ ID NO: 250491 - DNA, 20 bp, synthetic construct
  source 1..20: mol_type = other DNA
agggagagaaaggttctcga

SEQ ID NO: 250492 - DNA, 20 bp, synthetic construct
  source 1..20: mol_type = other DNA
aagggagagaaaggttctcg

SEQ ID NO: 250493 - DNA, 20 bp, synthetic construct
  source 1..20: mol_type = other DNA
caagggagagaaaggttctc

SEQ ID NO: 250494 - DNA, 20 bp, synthetic construct
  source 1..20: mol_type = other DNA
gcaagggagagaaaggttct

SEQ ID NO: 250495 - DNA, 20 bp, synthetic construct
  source 1..20: mol_type = other DNA
ggcaagggagagaaaggttc

SEQ ID NO: 250496 - DNA, 20 bp, synthetic construct
  source 1..20: mol_type = other DNA
aggcaagggagagaaaggtt

SEQ ID NO: 250497 - DNA, 20 bp, synthetic construct
  source 1..20: mol_type = other DNA
taggcaagggagagaaaggt

SEQ ID NO: 250498 - DNA, 20 bp, synthetic construct
  source 1..20: mol_type = other DNA
gtaggcaagggagagaaagg

SEQ ID NO: 250499 - DNA, 20 bp, synthetic construct
  source 1..20: mol_type = other DNA
tgtaggcaagggagagaaag

SEQ ID NO: 250500 - DNA, 20 bp, synthetic construct
  source 1..20: mol_type = other DNA
gtgtaggcaagggagagaaa

SEQ ID NO: 250501 - DNA, 20 bp, synthetic construct
  source 1..20: mol_type = other DNA
agtgtaggcaagggagagaa

SEQ ID NO: 250502 - DNA, 20 bp, synthetic construct
  source 1..20: mol_type = other DNA
gagtgtaggcaagggagaga

SEQ ID NO: 250503 - DNA, 20 bp, synthetic construct
  source 1..20: mol_type = other DNA
agagtgtaggcaagggagag

SEQ ID NO: 250504 - DNA, 20 bp, synthetic construct
  source 1..20: mol_type = other DNA
aagagtgtaggcaagggaga

SEQ ID NO: 250505 - DNA, 20 bp, synthetic construct
  source 1..20: mol_type = other DNA
gaagagtgtaggcaagggag

SEQ ID NO: 250506 - DNA, 20 bp, synthetic construct
  source 1..20: mol_type = other DNA
tgaagagtgtaggcaaggga

SEQ ID NO: 250507 - DNA, 20 bp, synthetic construct
  source 1..20: mol_type = other DNA
gtgaagagtgtaggcaaggg

SEQ ID NO: 250508 - DNA, 20 bp, synthetic construct
  source 1..20: mol_type = other DNA
tgtgaagagtgtaggcaagg

SEQ ID NO: 250509 - DNA, 20 bp, synthetic construct
  source 1..20: mol_type = other DNA
gtgtgaagagtgtaggcaag

SEQ ID NO: 250510 - DNA, 20 bp, synthetic construct
  source 1..20: mol_type = other DNA
tgtgtgaagagtgtaggcaa

SEQ ID NO: 250511 - DNA, 20 bp, synthetic construct
  source 1..20: mol_type = other DNA
ctgtgtgaagagtgtaggca

SEQ ID NO: 250512 - DNA, 20 bp, synthetic construct
  source 1..20: mol_type = other DNA
cctgtgtgaagagtgtaggc

SEQ ID NO: 250513 - DNA, 20 bp, synthetic construct
  source 1..20: mol_type = other DNA
gcctgtgtgaagagtgtagg

SEQ ID NO: 250514 - DNA, 20 bp, synthetic construct
  source 1..20: mol_type = other DNA
ggcctgtgtgaagagtgtag

SEQ ID NO: 250515 - DNA, 20 bp, synthetic construct
  source 1..20: mol_type = other DNA
aggcctgtgtgaagagtgta

SEQ ID NO: 250516 - DNA, 20 bp, synthetic construct
  source 1..20: mol_type = other DNA
caggcctgtgtgaagagtgt

SEQ ID NO: 250517 - DNA, 20 bp, synthetic construct
  source 1..20: mol_type = other DNA
acaggcctgtgtgaagagtg

SEQ ID NO: 250518 - DNA, 20 bp, synthetic construct
  source 1..20: mol_type = other DNA
cacaggcctgtgtgaagagt

SEQ ID NO: 250519 - DNA, 20 bp, synthetic construct
  source 1..20: mol_type = other DNA
gcacaggcctgtgtgaagag

SEQ ID NO: 250520 - DNA, 20 bp, synthetic construct
  source 1..20: mol_type = other DNA
agcacaggcctgtgtgaaga

SEQ ID NO: 250521 - DNA, 20 bp, synthetic construct
  source 1..20: mol_type = other DNA
cagcacaggcctgtgtgaag

SEQ ID NO: 250522 - DNA, 20 bp, synthetic construct
  source 1..20: mol_type = other DNA
ccagcacaggcctgtgtgaa

SEQ ID NO: 250523 - DNA, 20 bp, synthetic construct
  source 1..20: mol_type = other DNA
gccagcacaggcctgtgtga

SEQ ID NO: 250524 - DNA, 20 bp, synthetic construct
  source 1..20: mol_type = other DNA
ggccagcacaggcctgtgtg

SEQ ID NO: 250525 - DNA, 20 bp, synthetic construct
  source 1..20: mol_type = other DNA
tggccagcacaggcctgtgt

SEQ ID NO: 250526 - DNA, 20 bp, synthetic construct
  source 1..20: mol_type = other DNA
ctggccagcacaggcctgtg

SEQ ID NO: 250527 - DNA, 20 bp, synthetic construct
  source 1..20: mol_type = other DNA
gctggccagcacaggcctgt

SEQ ID NO: 250528 - DNA, 20 bp, synthetic construct
  source 1..20: mol_type = other DNA
cgctggccagcacaggcctg

SEQ ID NO: 250529 - DNA, 20 bp, synthetic construct
  source 1..20: mol_type = other DNA
ccgctggccagcacaggcct

SEQ ID NO: 250530 - DNA, 20 bp, synthetic construct
  source 1..20: mol_type = other DNA
accgctggccagcacaggcc

SEQ ID NO: 250531 - DNA, 20 bp, synthetic construct
  source 1..20: mol_type = other DNA
caccgctggccagcacaggc

SEQ ID NO: 250532 - DNA, 20 bp, synthetic construct
  source 1..20: mol_type = other DNA
ccaccgctggccagcacagg

SEQ ID NO: 250533 - DNA, 20 bp, synthetic construct
  source 1..20: mol_type = other DNA
cccaccgctggccagcacag

SEQ ID NO: 250534 - DNA, 20 bp, synthetic construct
  source 1..20: mol_type = other DNA
ccccaccgctggccagcaca

SEQ ID NO: 250535 - DNA, 20 bp, synthetic construct
  source 1..20: mol_type = other DNA
tccccaccgctggccagcac

SEQ ID NO: 250536 - DNA, 20 bp, synthetic construct
  source 1..20: mol_type = other DNA
atccccaccgctggccagca

SEQ ID NO: 250537 - DNA, 20 bp, synthetic construct
  source 1..20: mol_type = other DNA
gatccccaccgctggccagc

SEQ ID NO: 250538 - DNA, 20 bp, synthetic construct
  source 1..20: mol_type = other DNA
ggatccccaccgctggccag

SEQ ID NO: 250539 - DNA, 20 bp, synthetic construct
  source 1..20: mol_type = other DNA
cggatccccaccgctggcca

SEQ ID NO: 250540 - DNA, 20 bp, synthetic construct
  source 1..20: mol_type = other DNA
ccggatccccaccgctggcc

SEQ ID NO: 250541 - DNA, 20 bp, synthetic construct
  source 1..20: mol_type = other DNA
gccggatccccaccgctggc

SEQ ID NO: 250542 - DNA, 20 bp, synthetic construct
  source 1..20: mol_type = other DNA
tgccggatccccaccgctgg

SEQ ID NO: 250543 - DNA, 20 bp, synthetic construct
  source 1..20: mol_type = other DNA
atgccggatccccaccgctg

SEQ ID NO: 250544 - DNA, 20 bp, synthetic construct
  source 1..20: mol_type = other DNA
aatgccggatccccaccgct

SEQ ID NO: 250545 - DNA, 20 bp, synthetic construct
  source 1..20: mol_type = other DNA
gaatgccggatccccaccgc

SEQ ID NO: 250546 - DNA, 20 bp, synthetic construct
  source 1..20: mol_type = other DNA
ggaatgccggatccccaccg

SEQ ID NO: 250547 - DNA, 20 bp, synthetic construct
  source 1..20: mol_type = other DNA
aggaatgccggatccccacc

SEQ ID NO: 250548 - DNA, 20 bp, synthetic construct
  source 1..20: mol_type = other DNA
taggaatgccggatccccac

SEQ ID NO: 250549 - DNA, 20 bp, synthetic construct
  source 1..20: mol_type = other DNA
ataggaatgccggatcccca

SEQ ID NO: 250550 - DNA, 20 bp, synthetic construct
  source 1..20: mol_type = other DNA
gataggaatgccggatcccc

SEQ ID NO: 250551 - DNA, 20 bp, synthetic construct
  source 1..20: mol_type = other DNA
agataggaatgccggatccc

SEQ ID NO: 250552 - DNA, 20 bp, synthetic construct
  source 1..20: mol_type = other DNA
aagataggaatgccggatcc

SEQ ID NO: 250553 - DNA, 20 bp, synthetic construct
  source 1..20: mol_type = other DNA
taagataggaatgccggatc

SEQ ID NO: 250554 - DNA, 20 bp, synthetic construct
  source 1..20: mol_type = other DNA
ctaagataggaatgccggat

SEQ ID NO: 250555 - DNA, 20 bp, synthetic construct
  source 1..20: mol_type = other DNA
cctaagataggaatgccgga

SEQ ID NO: 250556 - DNA, 20 bp, synthetic construct
  source 1..20: mol_type = other DNA
acctaagataggaatgccgg

SEQ ID NO: 250557 - DNA, 20 bp, synthetic construct
  source 1..20: mol_type = other DNA
cacctaagataggaatgccg

SEQ ID NO: 250558 - DNA, 20 bp, synthetic construct
  source 1..20: mol_type = other DNA
gcacctaagataggaatgcc

SEQ ID NO: 250559 - DNA, 20 bp, synthetic construct
  source 1..20: mol_type = other DNA
tgcacctaagataggaatgc

SEQ ID NO: 250560 - DNA, 20 bp, synthetic construct
  source 1..20: mol_type = other DNA
ctgcacctaagataggaatg

SEQ ID NO: 250561 - DNA, 20 bp, synthetic construct
  source 1..20: mol_type = other DNA
tctgcacctaagataggaat

SEQ ID NO: 250562 - DNA, 20 bp, synthetic construct
  source 1..20: mol_type = other DNA
ctctgcacctaagataggaa

SEQ ID NO: 250563 - DNA, 20 bp, synthetic construct
  source 1..20: mol_type = other DNA
tctctgcacctaagatagga

SEQ ID NO: 250564 - DNA, 20 bp, synthetic construct
  source 1..20: mol_type = other DNA
ctctctgcacctaagatagg

SEQ ID NO: 250565 - DNA, 20 bp, synthetic construct
  source 1..20: mol_type = other DNA
actctctgcacctaagatag

SEQ ID NO: 250566 - DNA, 20 bp, synthetic construct
  source 1..20: mol_type = other DNA
cactctctgcacctaagata

SEQ ID NO: 250567 - DNA, 20 bp, synthetic construct
  source 1..20: mol_type = other DNA
tcactctctgcacctaagat

SEQ ID NO: 250568 - DNA, 20 bp, synthetic construct
  source 1..20: mol_type = other DNA
gtcactctctgcacctaaga

SEQ ID NO: 250569 - DNA, 20 bp, synthetic construct
  source 1..20: mol_type = other DNA
agtcactctctgcacctaag

SEQ ID NO: 250570 - DNA, 20 bp, synthetic construct
  source 1..20: mol_type = other DNA
cagtcactctctgcacctaa

SEQ ID NO: 250571 - DNA, 20 bp, synthetic construct
  source 1..20: mol_type = other DNA
tcagtcactctctgcaccta

SEQ ID NO: 250572 - DNA, 20 bp, synthetic construct
  source 1..20: mol_type = other DNA
gtcagtcactctctgcacct

SEQ ID NO: 250573 - DNA, 20 bp, synthetic construct
  source 1..20: mol_type = other DNA
agtcagtcactctctgcacc

SEQ ID NO: 250574 - DNA, 20 bp, synthetic construct
  source 1..20: mol_type = other DNA
gagtcagtcactctctgcac

SEQ ID NO: 250575 - DNA, 20 bp, synthetic construct
  source 1..20: mol_type = other DNA
tgagtcagtcactctctgca

SEQ ID NO: 250576 - DNA, 20 bp, synthetic construct
  source 1..20: mol_type = other DNA
atgagtcagtcactctctgc

SEQ ID NO: 250577 - DNA, 20 bp, synthetic construct
  source 1..20: mol_type = other DNA
aatgagtcagtcactctctg

SEQ ID NO: 250578 - DNA, 20 bp, synthetic construct
  source 1..20: mol_type = other DNA
caatgagtcagtcactctct

SEQ ID NO: 250579 - DNA, 20 bp, synthetic construct
  source 1..20: mol_type = other DNA
gcaatgagtcagtcactctc

SEQ ID NO: 250580 - DNA, 20 bp, synthetic construct
  source 1..20: mol_type = other DNA
tgcaatgagtcagtcactct

SEQ ID NO: 250581 - DNA, 20 bp, synthetic construct
  source 1..20: mol_type = other DNA
ctgcaatgagtcagtcactc

SEQ ID NO: 250582 - DNA, 20 bp, synthetic construct
  source 1..20: mol_type = other DNA
cctgcaatgagtcagtcact

SEQ ID NO: 250583 - DNA, 20 bp, synthetic construct
  source 1..20: mol_type = other DNA
gcctgcaatgagtcagtcac

SEQ ID NO: 250584 - DNA, 20 bp, synthetic construct
  source 1..20: mol_type = other DNA
ggcctgcaatgagtcagtca

SEQ ID NO: 250585 - DNA, 20 bp, synthetic construct
  source 1..20: mol_type = other DNA
aggcctgcaatgagtcagtc

SEQ ID NO: 250586 - DNA, 20 bp, synthetic construct
  source 1..20: mol_type = other DNA
caggcctgcaatgagtcagt

SEQ ID NO: 250587 - DNA, 20 bp, synthetic construct
  source 1..20: mol_type = other DNA
ccaggcctgcaatgagtcag

SEQ ID NO: 250588 - DNA, 20 bp, synthetic construct
  source 1..20: mol_type = other DNA
cccaggcctgcaatgagtca

SEQ ID NO: 250589 - DNA, 20 bp, synthetic construct
  source 1..20: mol_type = other DNA
tcccaggcctgcaatgagtc

SEQ ID NO: 250590 - DNA, 20 bp, synthetic construct
  source 1..20: mol_type = other DNA
ctcccaggcctgcaatgagt

SEQ ID NO: 250591 - DNA, 20 bp, synthetic construct
  source 1..20: mol_type = other DNA
tctcccaggcctgcaatgag

SEQ ID NO: 250592 - DNA, 20 bp, synthetic construct
  source 1..20: mol_type = other DNA
atctcccaggcctgcaatga

SEQ ID NO: 250593 - DNA, 20 bp, synthetic construct
  source 1..20: mol_type = other DNA
tatctcccaggcctgcaatg

SEQ ID NO: 250594 - DNA, 20 bp, synthetic construct
  source 1..20: mol_type = other DNA
ttatctcccaggcctgcaat

SEQ ID NO: 250595 - DNA, 20 bp, synthetic construct
  source 1..20: mol_type = other DNA
cttatctcccaggcctgcaa

SEQ ID NO: 250596 - DNA, 20 bp, synthetic construct
  source 1..20: mol_type = other DNA
tcttatctcccaggcctgca

SEQ ID NO: 250597 - DNA, 20 bp, synthetic construct
  source 1..20: mol_type = other DNA
gtcttatctcccaggcctgc

SEQ ID NO: 250598 - DNA, 20 bp, synthetic construct
  source 1..20: mol_type = other DNA
agtcttatctcccaggcctg

SEQ ID NO: 250599 - DNA, 20 bp, synthetic construct
  source 1..20: mol_type = other DNA
cagtcttatctcccaggcct

SEQ ID NO: 250600 - DNA, 20 bp, synthetic construct
  source 1..20: mol_type = other DNA
tcagtcttatctcccaggcc

SEQ ID NO: 250601 - DNA, 20 bp, synthetic construct
  source 1..20: mol_type = other DNA
atcagtcttatctcccaggc

SEQ ID NO: 250602 - DNA, 20 bp, synthetic construct
  source 1..20: mol_type = other DNA
catcagtcttatctcccagg

SEQ ID NO: 250603 - DNA, 20 bp, synthetic construct
  source 1..20: mol_type = other DNA
ccatcagtcttatctcccag

SEQ ID NO: 250604 - DNA, 20 bp, synthetic construct
  source 1..20: mol_type = other DNA
gccatcagtcttatctccca

SEQ ID NO: 250605 - DNA, 20 bp, synthetic construct
  source 1..20: mol_type = other DNA
ggccatcagtcttatctccc

SEQ ID NO: 250606 - DNA, 20 bp, synthetic construct
  source 1..20: mol_type = other DNA
gggccatcagtcttatctcc

SEQ ID NO: 250607 - DNA, 20 bp, synthetic construct
  source 1..20: mol_type = other DNA
tgggccatcagtcttatctc

SEQ ID NO: 250608 - DNA, 20 bp, synthetic construct
  source 1..20: mol_type = other DNA
ctgggccatcagtcttatct

SEQ ID NO: 250609 - DNA, 20 bp, synthetic construct
  source 1..20: mol_type = other DNA
gctgggccatcagtcttatc

SEQ ID NO: 250610 - DNA, 20 bp, synthetic construct
  source 1..20: mol_type = other DNA
ggctgggccatcagtcttat

SEQ ID NO: 250611 - DNA, 20 bp, synthetic construct
  source 1..20: mol_type = other DNA
tggctgggccatcagtctta

SEQ ID NO: 250612 - DNA, 20 bp, synthetic construct
  source 1..20: mol_type = other DNA
ctggctgggccatcagtctt

SEQ ID NO: 250613 - DNA, 20 bp, synthetic construct
  source 1..20: mol_type = other DNA
gctggctgggccatcagtct

SEQ ID NO: 250614 - DNA, 20 bp, synthetic construct
  source 1..20: mol_type = other DNA
tgctggctgggccatcagtc

SEQ ID NO: 250615 - DNA, 20 bp, synthetic construct
  source 1..20: mol_type = other DNA
ttgctggctgggccatcagt

SEQ ID NO: 250616 - DNA, 20 bp, synthetic construct
  source 1..20: mol_type = other DNA
cttgctggctgggccatcag

SEQ ID NO: 250617 - DNA, 20 bp, synthetic construct
  source 1..20: mol_type = other DNA
tcttgctggctgggccatca

SEQ ID NO: 250618 - DNA, 20 bp, synthetic construct
  source 1..20: mol_type = other DNA
atcttgctggctgggccatc

SEQ ID NO: 250619 - DNA, 20 bp, synthetic construct
  source 1..20: mol_type = other DNA
catcttgctggctgggccat

SEQ ID NO: 250620 - DNA, 20 bp, synthetic construct
  source 1..20: mol_type = other DNA
acatcttgctggctgggcca

SEQ ID NO: 250621 - DNA, 20 bp, synthetic construct
  source 1..20: mol_type = other DNA
tacatcttgctggctgggcc

SEQ ID NO: 250622 - DNA, 20 bp, synthetic construct
  source 1..20: mol_type = other DNA
atacatcttgctggctgggc

SEQ ID NO: 250623 - DNA, 20 bp, synthetic construct
  source 1..20: mol_type = other DNA
catacatcttgctggctggg

SEQ ID NO: 250624 - DNA, 20 bp, synthetic construct
  source 1..20: mol_type = other DNA
ccatacatcttgctggctgg

SEQ ID NO: 250625 - DNA, 20 bp, synthetic construct
  source 1..20: mol_type = other DNA
tccatacatcttgctggctg

SEQ ID NO: 250626 - DNA, 20 bp, synthetic construct
  source 1..20: mol_type = other DNA
atccatacatcttgctggct

SEQ ID NO: 250627 - DNA, 20 bp, synthetic construct
  source 1..20: mol_type = other DNA
aatccatacatcttgctggc

SEQ ID NO: 250628 - DNA, 20 bp, synthetic construct
  source 1..20: mol_type = other DNA
aaatccatacatcttgctgg

SEQ ID NO: 250629 - DNA, 20 bp, synthetic construct
  source 1..20: mol_type = other DNA
gaaatccatacatcttgctg

SEQ ID NO: 250630 - DNA, 20 bp, synthetic construct
  source 1..20: mol_type = other DNA
agaaatccatacatcttgct

SEQ ID NO: 250631 - DNA, 20 bp, synthetic construct
  source 1..20: mol_type = other DNA
gagaaatccatacatcttgc

SEQ ID NO: 250632 - DNA, 20 bp, synthetic construct
  source 1..20: mol_type = other DNA
tgagaaatccatacatcttg

SEQ ID NO: 250633 - DNA, 20 bp, synthetic construct
  source 1..20: mol_type = other DNA
ctgagaaatccatacatctt

SEQ ID NO: 250634 - DNA, 20 bp, synthetic construct
  source 1..20: mol_type = other DNA
tctgagaaatccatacatct

SEQ ID NO: 250635 - DNA, 20 bp, synthetic construct
  source 1..20: mol_type = other DNA
ctctgagaaatccatacatc

SEQ ID NO: 250636 - DNA, 20 bp, synthetic construct
  source 1..20: mol_type = other DNA
cctctgagaaatccatacat

SEQ ID NO: 250637 - DNA, 20 bp, synthetic construct
  source 1..20: mol_type = other DNA
gcctctgagaaatccataca

SEQ ID NO: 250638 - DNA, 20 bp, synthetic construct
  source 1..20: mol_type = other DNA
tgcctctgagaaatccatac

SEQ ID NO: 250639 - DNA, 20 bp, synthetic construct
  source 1..20: mol_type = other DNA
ctgcctctgagaaatccata

SEQ ID NO: 250640 - DNA, 20 bp, synthetic construct
  source 1..20: mol_type = other DNA
actgcctctgagaaatccat

SEQ ID NO: 250641 - DNA, 20 bp, synthetic construct
  source 1..20: mol_type = other DNA
cactgcctctgagaaatcca

SEQ ID NO: 250642 - DNA, 20 bp, synthetic construct
  source 1..20: mol_type = other DNA
ccactgcctctgagaaatcc

SEQ ID NO: 250643 - DNA, 20 bp, synthetic construct
  source 1..20: mol_type = other DNA
gccactgcctctgagaaatc

SEQ ID NO: 250644 - DNA, 20 bp, synthetic construct
  source 1..20: mol_type = other DNA
ggccactgcctctgagaaat

SEQ ID NO: 250645 - DNA, 20 bp, synthetic construct
  source 1..20: mol_type = other DNA
aggccactgcctctgagaaa

SEQ ID NO: 250646 - DNA, 20 bp, synthetic construct
  source 1..20: mol_type = other DNA
gaggccactgcctctgagaa

SEQ ID NO: 250647 - DNA, 20 bp, synthetic construct
  source 1..20: mol_type = other DNA
agaggccactgcctctgaga

SEQ ID NO: 250648 - DNA, 20 bp, synthetic construct
  source 1..20: mol_type = other DNA
cagaggccactgcctctgag

SEQ ID NO: 250649 - DNA, 20 bp, synthetic construct
  source 1..20: mol_type = other DNA
acagaggccactgcctctga

SEQ ID NO: 250650 - DNA, 20 bp, synthetic construct
  source 1..20: mol_type = other DNA
gacagaggccactgcctctg

SEQ ID NO: 250651 - DNA, 20 bp, synthetic construct
  source 1..20: mol_type = other DNA
tgacagaggccactgcctct

SEQ ID NO: 250652 - DNA, 20 bp, synthetic construct
  source 1..20: mol_type = other DNA
atgacagaggccactgcctc

SEQ ID NO: 250653 - DNA, 20 bp, synthetic construct
  source 1..20: mol_type = other DNA
aatgacagaggccactgcct

SEQ ID NO: 250654 - DNA, 20 bp, synthetic construct
  source 1..20: mol_type = other DNA
caatgacagaggccactgcc

SEQ ID NO: 250655 - DNA, 20 bp, synthetic construct
  source 1..20: mol_type = other DNA
acaatgacagaggccactgc

SEQ ID NO: 250656 - DNA, 20 bp, synthetic construct
  source 1..20: mol_type = other DNA
gacaatgacagaggccactg

SEQ ID NO: 250657 - DNA, 20 bp, synthetic construct
  source 1..20: mol_type = other DNA
ggacaatgacagaggccact

SEQ ID NO: 250658 - DNA, 20 bp, synthetic construct
  source 1..20: mol_type = other DNA
aggacaatgacagaggccac

SEQ ID NO: 250659 - DNA, 20 bp, synthetic construct
  source 1..20: mol_type = other DNA
gaggacaatgacagaggcca

SEQ ID NO: 250660 - DNA, 20 bp, synthetic construct
  source 1..20: mol_type = other DNA
tgaggacaatgacagaggcc

SEQ ID NO: 250661 - DNA, 20 bp, synthetic construct
  source 1..20: mol_type = other DNA
ctgaggacaatgacagaggc

SEQ ID NO: 250662 - DNA, 20 bp, synthetic construct
  source 1..20: mol_type = other DNA
cctgaggacaatgacagagg

SEQ ID NO: 250663 - DNA, 20 bp, synthetic construct
  source 1..20: mol_type = other DNA
tcctgaggacaatgacagag

SEQ ID NO: 250664 - DNA, 20 bp, synthetic construct
  source 1..20: mol_type = other DNA
ttcctgaggacaatgacaga

SEQ ID NO: 250665 - DNA, 20 bp, synthetic construct
  source 1..20: mol_type = other DNA
tttcctgaggacaatgacag

SEQ ID NO: 250666 - DNA, 20 bp, synthetic construct
  source 1..20: mol_type = other DNA
atttcctgaggacaatgaca

SEQ ID NO: 250667 - DNA, 20 bp, synthetic construct
  source 1..20: mol_type = other DNA
catttcctgaggacaatgac

SEQ ID NO: 250668 - DNA, 20 bp, synthetic construct
  source 1..20: mol_type = other DNA
gcatttcctgaggacaatga

SEQ ID NO: 250669 - DNA, 20 bp, synthetic construct
  source 1..20: mol_type = other DNA
agcatttcctgaggacaatg

SEQ ID NO: 250670 - DNA, 20 bp, synthetic construct
  source 1..20: mol_type = other DNA
cagcatttcctgaggacaat

SEQ ID NO: 250671 - DNA, 20 bp, synthetic construct
  source 1..20: mol_type = other DNA
ccagcatttcctgaggacaa

SEQ ID NO: 250672 - DNA, 20 bp, synthetic construct
  source 1..20: mol_type = other DNA
accagcatttcctgaggaca

SEQ ID NO: 250673 - DNA, 20 bp, synthetic construct
  source 1..20: mol_type = other DNA
caccagcatttcctgaggac

SEQ ID NO: 250674 - DNA, 20 bp, synthetic construct
  source 1..20: mol_type = other DNA
tcaccagcatttcctgagga

SEQ ID NO: 250675 - DNA, 20 bp, synthetic construct
  source 1..20: mol_type = other DNA
atcaccagcatttcctgagg

SEQ ID NO: 250676 - DNA, 20 bp, synthetic construct
  source 1..20: mol_type = other DNA
aatcaccagcatttcctgag

SEQ ID NO: 250677 - DNA, 20 bp, synthetic construct
  source 1..20: mol_type = other DNA
gaatcaccagcatttcctga

SEQ ID NO: 250678 - DNA, 20 bp, synthetic construct
  source 1..20: mol_type = other DNA
agaatcaccagcatttcctg

SEQ ID NO: 250679 - DNA, 20 bp, synthetic construct
  source 1..20: mol_type = other DNA
cagaatcaccagcatttcct

SEQ ID NO: 250680 - DNA, 20 bp, synthetic construct
  source 1..20: mol_type = other DNA
ccagaatcaccagcatttcc

SEQ ID NO: 250681 - DNA, 20 bp, synthetic construct
  source 1..20: mol_type = other DNA
accagaatcaccagcatttc

SEQ ID NO: 250682 - DNA, 20 bp, synthetic construct
  source 1..20: mol_type = other DNA
caccagaatcaccagcattt

SEQ ID NO: 250683 - DNA, 20 bp, synthetic construct
  source 1..20: mol_type = other DNA
ccaccagaatcaccagcatt

SEQ ID NO: 250684 - DNA, 20 bp, synthetic construct
  source 1..20: mol_type = other DNA
gccaccagaatcaccagcat

SEQ ID NO: 250685 - DNA, 20 bp, synthetic construct
  source 1..20: mol_type = other DNA
ggccaccagaatcaccagca

SEQ ID NO: 250686 - DNA, 20 bp, synthetic construct
  source 1..20: mol_type = other DNA
aggccaccagaatcaccagc

SEQ ID NO: 250687 - DNA, 20 bp, synthetic construct
  source 1..20: mol_type = other DNA
caggccaccagaatcaccag

SEQ ID NO: 250688 - DNA, 20 bp, synthetic construct
  source 1..20: mol_type = other DNA
tcaggccaccagaatcacca

SEQ ID NO: 250689 - DNA, 20 bp, synthetic construct
  source 1..20: mol_type = other DNA
ctcaggccaccagaatcacc

SEQ ID NO: 250690 - DNA, 20 bp, synthetic construct
  source 1..20: mol_type = other DNA
cctcaggccaccagaatcac

SEQ ID NO: 250691 - DNA, 20 bp, synthetic construct
  source 1..20: mol_type = other DNA
acctcaggccaccagaatca

SEQ ID NO: 250692 - DNA, 20 bp, synthetic construct
  source 1..20: mol_type = other DNA
gacctcaggccaccagaatc

SEQ ID NO: 250693 - DNA, 20 bp, synthetic construct
  source 1..20: mol_type = other DNA
tgacctcaggccaccagaat

SEQ ID NO: 250694 - DNA, 20 bp, synthetic construct
  source 1..20: mol_type = other DNA
ttgacctcaggccaccagaa

SEQ ID NO: 250695 - DNA, 20 bp, synthetic construct
  source 1..20: mol_type = other DNA
attgacctcaggccaccaga

SEQ ID NO: 250696 - DNA, 20 bp, synthetic construct
  source 1..20: mol_type = other DNA
cattgacctcaggccaccag

SEQ ID NO: 250697 - DNA, 20 bp, synthetic construct
  source 1..20: mol_type = other DNA
gcattgacctcaggccacca

SEQ ID NO: 250698 - DNA, 20 bp, synthetic construct
  source 1..20: mol_type = other DNA
tgcattgacctcaggccacc

SEQ ID NO: 250699 - DNA, 20 bp, synthetic construct
  source 1..20: mol_type = other DNA
atgcattgacctcaggccac

SEQ ID NO: 250700 - DNA, 20 bp, synthetic construct
  source 1..20: mol_type = other DNA
catgcattgacctcaggcca

SEQ ID NO: 250701 - DNA, 20 bp, synthetic construct
  source 1..20: mol_type = other DNA
acatgcattgacctcaggcc

SEQ ID NO: 250702 - DNA, 20 bp, synthetic construct
  source 1..20: mol_type = other DNA
gacatgcattgacctcaggc

SEQ ID NO: 250703 - DNA, 20 bp, synthetic construct
  source 1..20: mol_type = other DNA
tgacatgcattgacctcagg

SEQ ID NO: 250704 - DNA, 20 bp, synthetic construct
  source 1..20: mol_type = other DNA
ttgacatgcattgacctcag

SEQ ID NO: 250705 - DNA, 20 bp, synthetic construct
  source 1..20: mol_type = other DNA
gttgacatgcattgacctca

SEQ ID NO: 250706 - DNA, 20 bp, synthetic construct
  source 1..20: mol_type = other DNA
cgttgacatgcattgacctc

SEQ ID NO: 250707 - DNA, 20 bp, synthetic construct
  source 1..20: mol_type = other DNA
acgttgacatgcattgacct

SEQ ID NO: 250708 - DNA, 20 bp, synthetic construct
  source 1..20: mol_type = other DNA
cacgttgacatgcattgacc

SEQ ID NO: 250709 - DNA, 20 bp, synthetic construct
  source 1..20: mol_type = other DNA
ccacgttgacatgcattgac

SEQ ID NO: 250710 - DNA, 20 bp, synthetic construct
  source 1..20: mol_type = other DNA
gccacgttgacatgcattga

SEQ ID NO: 250711 - DNA, 20 bp, synthetic construct
  source 1..20: mol_type = other DNA
ggccacgttgacatgcattg

SEQ ID NO: 250712 - DNA, 20 bp, synthetic construct
  source 1..20: mol_type = other DNA
tggccacgttgacatgcatt

SEQ ID NO: 250713 - DNA, 20 bp, synthetic construct
  source 1..20: mol_type = other DNA
ttggccacgttgacatgcat

SEQ ID NO: 250714 - DNA, 20 bp, synthetic construct
  source 1..20: mol_type = other DNA
gttggccacgttgacatgca

SEQ ID NO: 250715 - DNA, 20 bp, synthetic construct
  source 1..20: mol_type = other DNA
agttggccacgttgacatgc

SEQ ID NO: 250716 - DNA, 20 bp, synthetic construct
  source 1..20: mol_type = other DNA
aagttggccacgttgacatg

SEQ ID NO: 250717 - DNA, 20 bp, synthetic construct
  source 1..20: mol_type = other DNA
caagttggccacgttgacat

SEQ ID NO: 250718 - DNA, 20 bp, synthetic construct
  source 1..20: mol_type = other DNA
gcaagttggccacgttgaca

SEQ ID NO: 250719 - DNA, 20 bp, synthetic construct
  source 1..20: mol_type = other DNA
ggcaagttggccacgttgac

SEQ ID NO: 250720 - DNA, 20 bp, synthetic construct
  source 1..20: mol_type = other DNA
aggcaagttggccacgttga

SEQ ID NO: 250721 - DNA, 20 bp, synthetic construct
  source 1..20: mol_type = other DNA
aaggcaagttggccacgttg

SEQ ID NO: 250722 - DNA, 20 bp, synthetic construct
  source 1..20: mol_type = other DNA
taaggcaagttggccacgtt

SEQ ID NO: 250723 - DNA, 20 bp, synthetic construct
  source 1..20: mol_type = other DNA
ataaggcaagttggccacgt

SEQ ID NO: 250724 - DNA, 20 bp, synthetic construct
  source 1..20: mol_type = other DNA
tataaggcaagttggccacg

SEQ ID NO: 250725 - DNA, 20 bp, synthetic construct
  source 1..20: mol_type = other DNA
ttataaggcaagttggccac

SEQ ID NO: 250726 - DNA, 20 bp, synthetic construct
  source 1..20: mol_type = other DNA
tttataaggcaagttggcca

SEQ ID NO: 250727 - DNA, 20 bp, synthetic construct
  source 1..20: mol_type = other DNA
gtttataaggcaagttggcc

SEQ ID NO: 250728 - DNA, 20 bp, synthetic construct
  source 1..20: mol_type = other DNA
agtttataaggcaagttggc

SEQ ID NO: 250729 - DNA, 20 bp, synthetic construct
  source 1..20: mol_type = other DNA
aagtttataaggcaagttgg

SEQ ID NO: 250730 - DNA, 20 bp, synthetic construct
  source 1..20: mol_type = other DNA
aaagtttataaggcaagttg

SEQ ID NO: 250731 - DNA, 20 bp, synthetic construct
  source 1..20: mol_type = other DNA
aaaagtttataaggcaagtt

SEQ ID NO: 250732 - DNA, 20 bp, synthetic construct
  source 1..20: mol_type = other DNA
aaaaagtttataaggcaagt

SEQ ID NO: 250733 - DNA, 20 bp, synthetic construct
  source 1..20: mol_type = other DNA
aaaaaagtttataaggcaag

SEQ ID NO: 250734 - DNA, 20 bp, synthetic construct
  source 1..20: mol_type = other DNA
aaaaaaagtttataaggcaa

SEQ ID NO: 250735 - DNA, 20 bp, synthetic construct
  source 1..20: mol_type = other DNA
gaaaaaaagtttataaggca

SEQ ID NO: 250736 - DNA, 20 bp, synthetic construct
  source 1..20: mol_type = other DNA
agaaaaaaagtttataaggc

SEQ ID NO: 250737 - DNA, 20 bp, synthetic construct
  source 1..20: mol_type = other DNA
cagaaaaaaagtttataagg

SEQ ID NO: 250738 - DNA, 20 bp, synthetic construct
  source 1..20: mol_type = other DNA
ccagaaaaaaagtttataag

SEQ ID NO: 250739 - DNA, 20 bp, synthetic construct
  source 1..20: mol_type = other DNA
tccagaaaaaaagtttataa

SEQ ID NO: 250740 - DNA, 20 bp, synthetic construct
  source 1..20: mol_type = other DNA
gtccagaaaaaaagtttata

SEQ ID NO: 250741 - DNA, 20 bp, synthetic construct
  source 1..20: mol_type = other DNA
tgtccagaaaaaaagtttat

SEQ ID NO: 250742 - DNA, 20 bp, synthetic construct
  source 1..20: mol_type = other DNA
ttgtccagaaaaaaagttta

SEQ ID NO: 250743 - DNA, 20 bp, synthetic construct
  source 1..20: mol_type = other DNA
attgtccagaaaaaaagttt

SEQ ID NO: 250744 - DNA, 20 bp, synthetic construct
  source 1..20: mol_type = other DNA
aattgtccagaaaaaaagtt

SEQ ID NO: 250745 - DNA, 20 bp, synthetic construct
  source 1..20: mol_type = other DNA
caattgtccagaaaaaaagt

SEQ ID NO: 250746 - DNA, 20 bp, synthetic construct
  source 1..20: mol_type = other DNA
gcaattgtccagaaaaaaag

SEQ ID NO: 250747 - DNA, 20 bp, synthetic construct
  source 1..20: mol_type = other DNA
cgcaattgtccagaaaaaaa

SEQ ID NO: 250748 - DNA, 20 bp, synthetic construct
  source 1..20: mol_type = other DNA
acgcaattgtccagaaaaaa

SEQ ID NO: 250749 - DNA, 20 bp, synthetic construct
  source 1..20: mol_type = other DNA
cacgcaattgtccagaaaaa

SEQ ID NO: 250750 - DNA, 20 bp, synthetic construct
  source 1..20: mol_type = other DNA
gcacgcaattgtccagaaaa

SEQ ID NO: 250751 - DNA, 20 bp, synthetic construct
  source 1..20: mol_type = other DNA
tgcacgcaattgtccagaaa

SEQ ID NO: 250752 - DNA, 20 bp, synthetic construct
  source 1..20: mol_type = other DNA
gtgcacgcaattgtccagaa

SEQ ID NO: 250753 - DNA, 20 bp, synthetic construct
  source 1..20: mol_type = other DNA
agtgcacgcaattgtccaga

SEQ ID NO: 250754 - DNA, 20 bp, synthetic construct
  source 1..20: mol_type = other DNA
cagtgcacgcaattgtccag

SEQ ID NO: 250755 - DNA, 20 bp, synthetic construct
  source 1..20: mol_type = other DNA
acagtgcacgcaattgtcca

SEQ ID NO: 250756 - DNA, 20 bp, synthetic construct
  source 1..20: mol_type = other DNA
gacagtgcacgcaattgtcc

SEQ ID NO: 250757 - DNA, 20 bp, synthetic construct
  source 1..20: mol_type = other DNA
ggacagtgcacgcaattgtc

SEQ ID NO: 250758 - DNA, 20 bp, synthetic construct
  source 1..20: mol_type = other DNA
aggacagtgcacgcaattgt

SEQ ID NO: 250759 - DNA, 20 bp, synthetic construct
  source 1..20: mol_type = other DNA
caggacagtgcacgcaattg

SEQ ID NO: 250760 - DNA, 20 bp, synthetic construct
  source 1..20: mol_type = other DNA
acaggacagtgcacgcaatt

SEQ ID NO: 250761 - DNA, 20 bp, synthetic construct
  source 1..20: mol_type = other DNA
tacaggacagtgcacgcaat

SEQ ID NO: 250762 - DNA, 20 bp, synthetic construct
  source 1..20: mol_type = other DNA
ttacaggacagtgcacgcaa

SEQ ID NO: 250763 - DNA, 20 bp, synthetic construct
  source 1..20: mol_type = other DNA
gttacaggacagtgcacgca

SEQ ID NO: 250764 - DNA, 20 bp, synthetic construct
  source 1..20: mol_type = other DNA
tgttacaggacagtgcacgc

SEQ ID NO: 250765 - DNA, 20 bp, synthetic construct
  source 1..20: mol_type = other DNA
ctgttacaggacagtgcacg

SEQ ID NO: 250766 - DNA, 20 bp, synthetic construct
  source 1..20: mol_type = other DNA
actgttacaggacagtgcac

SEQ ID NO: 250767 - DNA, 20 bp, synthetic construct
  source 1..20: mol_type = other DNA
cactgttacaggacagtgca

SEQ ID NO: 250768 - DNA, 20 bp, synthetic construct
  source 1..20: mol_type = other DNA
acactgttacaggacagtgc

SEQ ID NO: 250769 - DNA, 20 bp, synthetic construct
  source 1..20: mol_type = other DNA
gacactgttacaggacagtg

SEQ ID NO: 250770 - DNA, 20 bp, synthetic construct
  source 1..20: mol_type = other DNA
ggacactgttacaggacagt

SEQ ID NO: 250771 - DNA, 20 bp, synthetic construct
  source 1..20: mol_type = other DNA
aggacactgttacaggacag

SEQ ID NO: 250772 - DNA, 20 bp, synthetic construct
  source 1..20: mol_type = other DNA
caggacactgttacaggaca

SEQ ID NO: 250773 - DNA, 20 bp, synthetic construct
  source 1..20: mol_type = other DNA
acaggacactgttacaggac

SEQ ID NO: 250774 - DNA, 20 bp, synthetic construct
  source 1..20: mol_type = other DNA
aacaggacactgttacagga

SEQ ID NO: 250775 - DNA, 20 bp, synthetic construct
  source 1..20: mol_type = other DNA
caacaggacactgttacagg

SEQ ID NO: 250776 - DNA, 20 bp, synthetic construct
  source 1..20: mol_type = other DNA
acaacaggacactgttacag

SEQ ID NO: 250777 - DNA, 20 bp, synthetic construct
  source 1..20: mol_type = other DNA
aacaacaggacactgttaca

SEQ ID NO: 250778 - DNA, 20 bp, synthetic construct
  source 1..20: mol_type = other DNA
aaacaacaggacactgttac

SEQ ID NO: 250779 - DNA, 20 bp, synthetic construct
  source 1..20: mol_type = other DNA
taaacaacaggacactgtta

SEQ ID NO: 250780 - DNA, 20 bp, synthetic construct
  source 1..20: mol_type = other DNA
ataaacaacaggacactgtt

SEQ ID NO: 250781 - DNA, 20 bp, synthetic construct
  source 1..20: mol_type = other DNA
cataaacaacaggacactgt

SEQ ID NO: 250782 - DNA, 20 bp, synthetic construct
  source 1..20: mol_type = other DNA
tcataaacaacaggacactg

SEQ ID NO: 250783 - DNA, 20 bp, synthetic construct
  source 1..20: mol_type = other DNA
atcataaacaacaggacact

SEQ ID NO: 250784 - DNA, 20 bp, synthetic construct
  source 1..20: mol_type = other DNA
catcataaacaacaggacac

SEQ ID NO: 250785 - DNA, 20 bp, synthetic construct
  source 1..20: mol_type = other DNA
gcatcataaacaacaggaca

SEQ ID NO: 250786 - DNA, 20 bp, synthetic construct
  source 1..20: mol_type = other DNA
tgcatcataaacaacaggac

SEQ ID NO: 250787 - DNA, 20 bp, synthetic construct
  source 1..20: mol_type = other DNA
ctgcatcataaacaacagga

SEQ ID NO: 250788 - DNA, 20 bp, synthetic construct
  source 1..20: mol_type = other DNA
tctgcatcataaacaacagg

SEQ ID NO: 250789 - DNA, 20 bp, synthetic construct
  source 1..20: mol_type = other DNA
ttctgcatcataaacaacag

SEQ ID NO: 250790 - DNA, 20 bp, synthetic construct
  source 1..20: mol_type = other DNA
tttctgcatcataaacaaca

SEQ ID NO: 250791 - DNA, 20 bp, synthetic construct
  source 1..20: mol_type = other DNA
atttctgcatcataaacaac

SEQ ID NO: 250792 - DNA, 20 bp, synthetic construct
  source 1..20: mol_type = other DNA
tatttctgcatcataaacaa

SEQ ID NO: 250793 - DNA, 20 bp, synthetic construct
  source 1..20: mol_type = other DNA
ctatttctgcatcataaaca

SEQ ID NO: 250794 - DNA, 20 bp, synthetic construct
  source 1..20: mol_type = other DNA
cctatttctgcatcataaac

SEQ ID NO: 250795 - DNA, 20 bp, synthetic construct
  source 1..20: mol_type = other DNA
acctatttctgcatcataaa

SEQ ID NO: 250796 - DNA, 20 bp, synthetic construct
  source 1..20: mol_type = other DNA
cacctatttctgcatcataa

SEQ ID NO: 250797 - DNA, 20 bp, synthetic construct
  source 1..20: mol_type = other DNA
acacctatttctgcatcata

SEQ ID NO: 250798 - DNA, 20 bp, synthetic construct
  source 1..20: mol_type = other DNA
aacacctatttctgcatcat

SEQ ID NO: 250799 - DNA, 20 bp, synthetic construct
  source 1..20: mol_type = other DNA
aaacacctatttctgcatca

SEQ ID NO: 250800 - DNA, 20 bp, synthetic construct
  source 1..20: mol_type = other DNA
aaaacacctatttctgcatc

SEQ ID NO: 250801 - DNA, 20 bp, synthetic construct
  source 1..20: mol_type = other DNA
aaaaacacctatttctgcat

SEQ ID NO: 250802 - DNA, 20 bp, synthetic construct
  source 1..20: mol_type = other DNA
taaaaacacctatttctgca

SEQ ID NO: 250803 - DNA, 20 bp, synthetic construct
  source 1..20: mol_type = other DNA
ttaaaaacacctatttctgc

SEQ ID NO: 250804 - DNA, 20 bp, synthetic construct
  source 1..20: mol_type = other DNA
tttaaaaacacctatttctg

SEQ ID NO: 250805 - DNA, 20 bp, synthetic construct
  source 1..20: mol_type = other DNA
ctttaaaaacacctatttct

SEQ ID NO: 250806 - DNA, 20 bp, synthetic construct
  source 1..20: mol_type = other DNA
gctttaaaaacacctatttc

SEQ ID NO: 250807 - DNA, 20 bp, synthetic construct
  source 1..20: mol_type = other DNA
ggctttaaaaacacctattt

SEQ ID NO: 250808 - DNA, 20 bp, synthetic construct
  source 1..20: mol_type = other DNA
aggctttaaaaacacctatt

SEQ ID NO: 250809 - DNA, 20 bp, synthetic construct
  source 1..20: mol_type = other DNA
taggctttaaaaacacctat

SEQ ID NO: 250810 - DNA, 20 bp, synthetic construct
  source 1..20: mol_type = other DNA
ataggctttaaaaacaccta

SEQ ID NO: 250811 - DNA, 20 bp, synthetic construct
  source 1..20: mol_type = other DNA
aataggctttaaaaacacct

SEQ ID NO: 250812 - DNA, 20 bp, synthetic construct
  source 1..20: mol_type = other DNA
caataggctttaaaaacacc

SEQ ID NO: 250813 - DNA, 20 bp, synthetic construct
  source 1..20: mol_type = other DNA
tcaataggctttaaaaacac

SEQ ID NO: 250814 - DNA, 20 bp, synthetic construct
  source 1..20: mol_type = other DNA
atcaataggctttaaaaaca

SEQ ID NO: 250815 - DNA, 20 bp, synthetic construct
  source 1..20: mol_type = other DNA
aatcaataggctttaaaaac

SEQ ID NO: 250816 - DNA, 20 bp, synthetic construct
  source 1..20: mol_type = other DNA
aaatcaataggctttaaaaa

SEQ ID NO: 250817 - DNA, 20 bp, synthetic construct
  source 1..20: mol_type = other DNA
aaaatcaataggctttaaaa

SEQ ID NO: 250818 - DNA, 20 bp, synthetic construct
  source 1..20: mol_type = other DNA
caaaatcaataggctttaaa

SEQ ID NO: 250819 - DNA, 20 bp, synthetic construct
  source 1..20: mol_type = other DNA
ccaaaatcaataggctttaa

SEQ ID NO: 250820 - DNA, 20 bp, synthetic construct
  source 1..20: mol_type = other DNA
accaaaatcaataggcttta

SEQ ID NO: 250821 - DNA, 20 bp, synthetic construct
  source 1..20: mol_type = other DNA
taccaaaatcaataggcttt

SEQ ID NO: 250822 - DNA, 20 bp, synthetic construct
  source 1..20: mol_type = other DNA
gtaccaaaatcaataggctt

SEQ ID NO: 250823 - DNA, 20 bp, synthetic construct
  source 1..20: mol_type = other DNA
agtaccaaaatcaataggct

SEQ ID NO: 250824 - DNA, 20 bp, synthetic construct
  source 1..20: mol_type = other DNA
tagtaccaaaatcaataggc

SEQ ID NO: 250825 - DNA, 20 bp, synthetic construct
  source 1..20: mol_type = other DNA
atagtaccaaaatcaatagg

SEQ ID NO: 250826 - DNA, 20 bp, synthetic construct
  source 1..20: mol_type = other DNA
aatagtaccaaaatcaatag

SEQ ID NO: 250827 - DNA, 20 bp, synthetic construct
  source 1..20: mol_type = other DNA
taatagtaccaaaatcaata

SEQ ID NO: 250828 - DNA, 20 bp, synthetic construct
  source 1..20: mol_type = other DNA
ttaatagtaccaaaatcaat

SEQ ID NO: 250829 - DNA, 20 bp, synthetic construct
  source 1..20: mol_type = other DNA
attaatagtaccaaaatcaa

SEQ ID NO: 250830 - DNA, 20 bp, synthetic construct
  source 1..20: mol_type = other DNA
cattaatagtaccaaaatca

SEQ ID NO: 250831 - DNA, 20 bp, synthetic construct
  source 1..20: mol_type = other DNA
acattaatagtaccaaaatc

SEQ ID NO: 250832 - DNA, 20 bp, synthetic construct
  source 1..20: mol_type = other DNA
cacattaatagtaccaaaat

SEQ ID NO: 250833 - DNA, 20 bp, synthetic construct
  source 1..20: mol_type = other DNA
ccacattaatagtaccaaaa

SEQ ID NO: 250834 - DNA, 20 bp, synthetic construct
  source 1..20: mol_type = other DNA
accacattaatagtaccaaa

SEQ ID NO: 250835 - DNA, 20 bp, synthetic construct
  source 1..20: mol_type = other DNA
gaccacattaatagtaccaa

SEQ ID NO: 250836 - DNA, 20 bp, synthetic construct
  source 1..20: mol_type = other DNA
tgaccacattaatagtacca

SEQ ID NO: 250837 - DNA, 20 bp, synthetic construct
  source 1..20: mol_type = other DNA
ctgaccacattaatagtacc

SEQ ID NO: 250838 - DNA, 20 bp, synthetic construct
  source 1..20: mol_type = other DNA
cctgaccacattaatagtac

SEQ ID NO: 250839 - DNA, 20 bp, synthetic construct
  source 1..20: mol_type = other DNA
tcctgaccacattaatagta

SEQ ID NO: 250840 - DNA, 20 bp, synthetic construct
  source 1..20: mol_type = other DNA
ttcctgaccacattaatagt

SEQ ID NO: 250841 - DNA, 20 bp, synthetic construct
  source 1..20: mol_type = other DNA
gttcctgaccacattaatag

SEQ ID NO: 250842 - DNA, 20 bp, synthetic construct
  source 1..20: mol_type = other DNA
agttcctgaccacattaata

SEQ ID NO: 250843 - DNA, 20 bp, synthetic construct
  source 1..20: mol_type = other DNA
aagttcctgaccacattaat

SEQ ID NO: 250844 - DNA, 20 bp, synthetic construct
  source 1..20: mol_type = other DNA
aaagttcctgaccacattaa

SEQ ID NO: 250845 - DNA, 20 bp, synthetic construct
  source 1..20: mol_type = other DNA
gaaagttcctgaccacatta

SEQ ID NO: 250846 - DNA, 20 bp, synthetic construct
  source 1..20: mol_type = other DNA
agaaagttcctgaccacatt

SEQ ID NO: 250847 - DNA, 20 bp, synthetic construct
  source 1..20: mol_type = other DNA
gagaaagttcctgaccacat

SEQ ID NO: 250848 - DNA, 20 bp, synthetic construct
  source 1..20: mol_type = other DNA
tgagaaagttcctgaccaca

SEQ ID NO: 250849 - DNA, 20 bp, synthetic construct
  source 1..20: mol_type = other DNA
ctgagaaagttcctgaccac

SEQ ID NO: 250850 - DNA, 20 bp, synthetic construct
  source 1..20: mol_type = other DNA
actgagaaagttcctgacca

SEQ ID NO: 250851 - DNA, 20 bp, synthetic construct
  source 1..20: mol_type = other DNA
gactgagaaagttcctgacc

SEQ ID NO: 250852 - DNA, 20 bp, synthetic construct
  source 1..20: mol_type = other DNA
agactgagaaagttcctgac

SEQ ID NO: 250853 - DNA, 20 bp, synthetic construct
  source 1..20: mol_type = other DNA
aagactgagaaagttcctga

SEQ ID NO: 250854 - DNA, 20 bp, synthetic construct
  source 1..20: mol_type = other DNA
aaagactgagaaagttcctg

SEQ ID NO: 250855 - DNA, 20 bp, synthetic construct
  source 1..20: mol_type = other DNA
gaaagactgagaaagttcct

SEQ ID NO: 250856 - DNA, 20 bp, synthetic construct
  source 1..20: mol_type = other DNA
agaaagactgagaaagttcc

SEQ ID NO: 250857 - DNA, 20 bp, synthetic construct
  source 1..20: mol_type = other DNA
aagaaagactgagaaagttc

SEQ ID NO: 250858 - DNA, 20 bp, synthetic construct
  source 1..20: mol_type = other DNA
caagaaagactgagaaagtt

SEQ ID NO: 250859 - DNA, 20 bp, synthetic construct
  source 1..20: mol_type = other DNA
acaagaaagactgagaaagt

SEQ ID NO: 250860 - DNA, 20 bp, synthetic construct
  source 1..20: mol_type = other DNA
aacaagaaagactgagaaag

SEQ ID NO: 250861 - DNA, 20 bp, synthetic construct
  source 1..20: mol_type = other DNA
aaacaagaaagactgagaaa

SEQ ID NO: 250862 - DNA, 20 bp, synthetic construct
  source 1..20: mol_type = other DNA
caaacaagaaagactgagaa

SEQ ID NO: 250863 - DNA, 20 bp, synthetic construct
  source 1..20: mol_type = other DNA
ccaaacaagaaagactgaga

SEQ ID NO: 250864 - DNA, 20 bp, synthetic construct
  source 1..20: mol_type = other DNA
cccaaacaagaaagactgag

SEQ ID NO: 250865 - DNA, 20 bp, synthetic construct
  source 1..20: mol_type = other DNA
ccccaaacaagaaagactga

SEQ ID NO: 250866 - DNA, 20 bp, synthetic construct
  source 1..20: mol_type = other DNA
accccaaacaagaaagactg

SEQ ID NO: 250867 - DNA, 20 bp, synthetic construct
  source 1..20: mol_type = other DNA
caccccaaacaagaaagact

SEQ ID NO: 250868 - DNA, 20 bp, synthetic construct
  source 1..20: mol_type = other DNA
tcaccccaaacaagaaagac

SEQ ID NO: 250869 - DNA, 20 bp, synthetic construct
  source 1..20: mol_type = other DNA
ctcaccccaaacaagaaaga

SEQ ID NO: 250870 - DNA, 20 bp, synthetic construct
  source 1..20: mol_type = other DNA
gctcaccccaaacaagaaag

SEQ ID NO: 250871 - DNA, 20 bp, synthetic construct
  source 1..20: mol_type = other DNA
agctcaccccaaacaagaaa

SEQ ID NO: 250872 - DNA, 20 bp, synthetic construct
  source 1..20: mol_type = other DNA
cagctcaccccaaacaagaa

SEQ ID NO: 250873 - DNA, 20 bp, synthetic construct
  source 1..20: mol_type = other DNA
acagctcaccccaaacaaga

SEQ ID NO: 250874 - DNA, 20 bp, synthetic construct
  source 1..20: mol_type = other DNA
cacagctcaccccaaacaag

SEQ ID NO: 250875 - DNA, 20 bp, synthetic construct
  source 1..20: mol_type = other DNA
ccacagctcaccccaaacaa

SEQ ID NO: 250876 - DNA, 20 bp, synthetic construct
  source 1..20: mol_type = other DNA
gccacagctcaccccaaaca

SEQ ID NO: 250877 - DNA, 20 bp, synthetic construct
  source 1..20: mol_type = other DNA
agccacagctcaccccaaac

SEQ ID NO: 250878 - DNA, 20 bp, synthetic construct
  source 1..20: mol_type = other DNA
aagccacagctcaccccaaa

SEQ ID NO: 250879 - DNA, 20 bp, synthetic construct
  source 1..20: mol_type = other DNA
gaagccacagctcaccccaa

SEQ ID NO: 250880 - DNA, 20 bp, synthetic construct
  source 1..20: mol_type = other DNA
ggaagccacagctcacccca

SEQ ID NO: 250881 - DNA, 20 bp, synthetic construct
  source 1..20: mol_type = other DNA
aggaagccacagctcacccc

SEQ ID NO: 250882 - DNA, 20 bp, synthetic construct
  source 1..20: mol_type = other DNA
taggaagccacagctcaccc

SEQ ID NO: 250883 - DNA, 20 bp, synthetic construct
  source 1..20: mol_type = other DNA
ttaggaagccacagctcacc

SEQ ID NO: 250884 - DNA, 20 bp, synthetic construct
  source 1..20: mol_type = other DNA
tttaggaagccacagctcac

SEQ ID NO: 250885 - DNA, 20 bp, synthetic construct
  source 1..20: mol_type = other DNA
gtttaggaagccacagctca

SEQ ID NO: 250886 - DNA, 20 bp, synthetic construct
  source 1..20: mol_type = other DNA
tgtttaggaagccacagctc

SEQ ID NO: 250887 - DNA, 20 bp, synthetic construct
  source 1..20: mol_type = other DNA
ctgtttaggaagccacagct

SEQ ID NO: 250888 - DNA, 20 bp, synthetic construct
  source 1..20: mol_type = other DNA
cctgtttaggaagccacagc

SEQ ID NO: 250889 - DNA, 20 bp, synthetic construct
  source 1..20: mol_type = other DNA
tcctgtttaggaagccacag

SEQ ID NO: 250890 - DNA, 20 bp, synthetic construct
  source 1..20: mol_type = other DNA
ttcctgtttaggaagccaca

SEQ ID NO: 250891 - DNA, 20 bp, synthetic construct
  source 1..20: mol_type = other DNA
gttcctgtttaggaagccac

SEQ ID NO: 250892 - DNA, 20 bp, synthetic construct
  source 1..20: mol_type = other DNA
ggttcctgtttaggaagcca

SEQ ID NO: 250893 - DNA, 20 bp, synthetic construct
  source 1..20: mol_type = other DNA
gggttcctgtttaggaagcc

SEQ ID NO: 250894 - DNA, 20 bp, synthetic construct
  source 1..20: mol_type = other DNA
tgggttcctgtttaggaagc

SEQ ID NO: 250895 - DNA, 20 bp, synthetic construct
  source 1..20: mol_type = other DNA
ttgggttcctgtttaggaag

SEQ ID NO: 250896 - DNA, 20 bp, synthetic construct
  source 1..20: mol_type = other DNA
cttgggttcctgtttaggaa

SEQ ID NO: 250897 - DNA, 20 bp, synthetic construct
  source 1..20: mol_type = other DNA
tcttgggttcctgtttagga

SEQ ID NO: 250898 - DNA, 20 bp, synthetic construct
  source 1..20: mol_type = other DNA
gtcttgggttcctgtttagg

SEQ ID NO: 250899 - DNA, 20 bp, synthetic construct
  source 1..20: mol_type = other DNA
tgtcttgggttcctgtttag

SEQ ID NO: 250900 - DNA, 20 bp, synthetic construct
  source 1..20: mol_type = other DNA
gtgtcttgggttcctgttta

SEQ ID NO: 250901 - DNA, 20 bp, synthetic construct
  source 1..20: mol_type = other DNA
ggtgtcttgggttcctgttt

SEQ ID NO: 250902 - DNA, 20 bp, synthetic construct
  source 1..20: mol_type = other DNA
gggtgtcttgggttcctgtt

SEQ ID NO: 250903 - DNA, 20 bp, synthetic construct
  source 1..20: mol_type = other DNA
ggggtgtcttgggttcctgt

SEQ ID NO: 250904 - DNA, 20 bp, synthetic construct
  source 1..20: mol_type = other DNA
gggggtgtcttgggttcctg

SEQ ID NO: 250905 - DNA, 20 bp, synthetic construct
  source 1..20: mol_type = other DNA
tgggggtgtcttgggttcct

SEQ ID NO: 250906 - DNA, 20 bp, synthetic construct
  source 1..20: mol_type = other DNA
ttgggggtgtcttgggttcc

SEQ ID NO: 250907 - DNA, 20 bp, synthetic construct
  source 1..20: mol_type = other DNA
tttgggggtgtcttgggttc

SEQ ID NO: 250908 - DNA, 20 bp, synthetic construct
  source 1..20: mol_type = other DNA
ttttgggggtgtcttgggtt

SEQ ID NO: 250909 - DNA, 20 bp, synthetic construct
  source 1..20: mol_type = other DNA
cttttgggggtgtcttgggt

SEQ ID NO: 250910 - DNA, 20 bp, synthetic construct
  source 1..20: mol_type = other DNA
gcttttgggggtgtcttggg

SEQ ID NO: 250911 - DNA, 20 bp, synthetic construct
  source 1..20: mol_type = other DNA
agcttttgggggtgtcttgg

SEQ ID NO: 250912 - DNA, 20 bp, synthetic construct
  source 1..20: mol_type = other DNA
cagcttttgggggtgtcttg

SEQ ID NO: 250913 - DNA, 20 bp, synthetic construct
  source 1..20: mol_type = other DNA
gcagcttttgggggtgtctt

SEQ ID NO: 250914 - DNA, 20 bp, synthetic construct
  source 1..20: mol_type = other DNA
agcagcttttgggggtgtct

SEQ ID NO: 250915 - DNA, 20 bp, synthetic construct
  source 1..20: mol_type = other DNA
gagcagcttttgggggtgtc

SEQ ID NO: 250916 - DNA, 20 bp, synthetic construct
  source 1..20: mol_type = other DNA
tgagcagcttttgggggtgt

SEQ ID NO: 250917 - DNA, 20 bp, synthetic construct
  source 1..20: mol_type = other DNA
gtgagcagcttttgggggtg

SEQ ID NO: 250918 - DNA, 20 bp, synthetic construct
  source 1..20: mol_type = other DNA
ggtgagcagcttttgggggt

SEQ ID NO: 250919 - DNA, 20 bp, synthetic construct
  source 1..20: mol_type = other DNA
tggtgagcagcttttggggg

SEQ ID NO: 250920 - DNA, 20 bp, synthetic construct
  source 1..20: mol_type = other DNA
ctggtgagcagcttttgggg

SEQ ID NO: 250921 - DNA, 20 bp, synthetic construct
  source 1..20: mol_type = other DNA
gctggtgagcagcttttggg

SEQ ID NO: 250922 - DNA, 20 bp, synthetic construct
  source 1..20: mol_type = other DNA
tgctggtgagcagcttttgg

SEQ ID NO: 250923 - DNA, 20 bp, synthetic construct
  source 1..20: mol_type = other DNA
gtgctggtgagcagcttttg

SEQ ID NO: 250924 - DNA, 20 bp, synthetic construct
  source 1..20: mol_type = other DNA
agtgctggtgagcagctttt

SEQ ID NO: 250925 - DNA, 20 bp, synthetic construct
  source 1..20: mol_type = other DNA
cagtgctggtgagcagcttt

SEQ ID NO: 250926 - DNA, 20 bp, synthetic construct
  source 1..20: mol_type = other DNA
gcagtgctggtgagcagctt

SEQ ID NO: 250927 - DNA, 20 bp, synthetic construct
  source 1..20: mol_type = other DNA
ggcagtgctggtgagcagct

SEQ ID NO: 250928 - DNA, 20 bp, synthetic construct
  source 1..20: mol_type = other DNA
tggcagtgctggtgagcagc

SEQ ID NO: 250929 - DNA, 20 bp, synthetic construct
  source 1..20: mol_type = other DNA
ctggcagtgctggtgagcag

SEQ ID NO: 250930 - DNA, 20 bp, synthetic construct
  source 1..20: mol_type = other DNA
gctggcagtgctggtgagca

SEQ ID NO: 250931 - DNA, 20 bp, synthetic construct
  source 1..20: mol_type = other DNA
ggctggcagtgctggtgagc

SEQ ID NO: 250932 - DNA, 20 bp, synthetic construct
  source 1..20: mol_type = other DNA
aggctggcagtgctggtgag

SEQ ID NO: 250933 - DNA, 20 bp, synthetic construct
  source 1..20: mol_type = other DNA
gaggctggcagtgctggtga

SEQ ID NO: 250934 - DNA, 20 bp, synthetic construct
  source 1..20: mol_type = other DNA
ggaggctggcagtgctggtg

SEQ ID NO: 250935 - DNA, 20 bp, synthetic construct
  source 1..20: mol_type = other DNA
gggaggctggcagtgctggt

SEQ ID NO: 250936 - DNA, 20 bp, synthetic construct
  source 1..20: mol_type = other DNA
agggaggctggcagtgctgg

SEQ ID NO: 250937 - DNA, 20 bp, synthetic construct
  source 1..20: mol_type = other DNA
gagggaggctggcagtgctg

SEQ ID NO: 250938 - DNA, 20 bp, synthetic construct
  source 1..20: mol_type = other DNA
agagggaggctggcagtgct

SEQ ID NO: 250939 - DNA, 20 bp, synthetic construct
  source 1..20: mol_type = other DNA
aagagggaggctggcagtgc

SEQ ID NO: 250940 - DNA, 20 bp, synthetic construct
  source 1..20: mol_type = other DNA
taagagggaggctggcagtg

SEQ ID NO: 250941 - DNA, 20 bp, synthetic construct
  source 1..20: mol_type = other DNA
gtaagagggaggctggcagt

SEQ ID NO: 250942 - DNA, 20 bp, synthetic construct
  source 1..20: mol_type = other DNA
ggtaagagggaggctggcag

SEQ ID NO: 250943 - DNA, 20 bp, synthetic construct
  source 1..20: mol_type = other DNA
tggtaagagggaggctggca

SEQ ID NO: 250944 - DNA, 20 bp, synthetic construct
  source 1..20: mol_type = other DNA
ttggtaagagggaggctggc

SEQ ID NO: 250945 - DNA, 20 bp, synthetic construct
  source 1..20: mol_type = other DNA
cttggtaagagggaggctgg

SEQ ID NO: 250946 - DNA, 20 bp, synthetic construct
  source 1..20: mol_type = other DNA
acttggtaagagggaggctg

SEQ ID NO: 250947 - DNA, 20 bp, synthetic construct
  source 1..20: mol_type = other DNA
tacttggtaagagggaggct

SEQ ID NO: 250948 - DNA, 20 bp, synthetic construct
  source 1..20: mol_type = other DNA
ctacttggtaagagggaggc

SEQ ID NO: 250949 - DNA, 20 bp, synthetic construct
  source 1..20: mol_type = other DNA
gctacttggtaagagggagg

SEQ ID NO: 250950 - DNA, 20 bp, synthetic construct
  source 1..20: mol_type = other DNA
tgctacttggtaagagggag

SEQ ID NO: 250951 - DNA, 20 bp, synthetic construct
  source 1..20: mol_type = other DNA
gtgctacttggtaagaggga

SEQ ID NO: 250952 - DNA, 20 bp, synthetic construct
  source 1..20: mol_type = other DNA
ggtgctacttggtaagaggg

SEQ ID NO: 250953 - DNA, 20 bp, synthetic construct
  source 1..20: mol_type = other DNA
gggtgctacttggtaagagg

SEQ ID NO: 250954 - DNA, 20 bp, synthetic construct
  source 1..20: mol_type = other DNA
cgggtgctacttggtaagag

SEQ ID NO: 250955 - DNA, 20 bp, synthetic construct
  source 1..20: mol_type = other DNA
acgggtgctacttggtaaga

SEQ ID NO: 250956 - DNA, 20 bp, synthetic construct
  source 1..20: mol_type = other DNA
aacgggtgctacttggtaag

SEQ ID NO: 250957 - DNA, 20 bp, synthetic construct
  source 1..20: mol_type = other DNA
gaacgggtgctacttggtaa

SEQ ID NO: 250958 - DNA, 20 bp, synthetic construct
  source 1..20: mol_type = other DNA
tgaacgggtgctacttggta

SEQ ID NO: 250959 - DNA, 20 bp, synthetic construct
  source 1..20: mol_type = other DNA
ctgaacgggtgctacttggt

SEQ ID NO: 250960 - DNA, 20 bp, synthetic construct
  source 1..20: mol_type = other DNA
cctgaacgggtgctacttgg

SEQ ID NO: 250961 - DNA, 20 bp, synthetic construct
  source 1..20: mol_type = other DNA
tcctgaacgggtgctacttg

SEQ ID NO: 250962 - DNA, 20 bp, synthetic construct
  source 1..20: mol_type = other DNA
gtcctgaacgggtgctactt

SEQ ID NO: 250963 - DNA, 20 bp, synthetic construct
  source 1..20: mol_type = other DNA
tgtcctgaacgggtgctact

SEQ ID NO: 250964 - DNA, 20 bp, synthetic construct
  source 1..20: mol_type = other DNA
atgtcctgaacgggtgctac

SEQ ID NO: 250965 - DNA, 20 bp, synthetic construct
  source 1..20: mol_type = other DNA
aatgtcctgaacgggtgcta

SEQ ID NO: 250966 - DNA, 20 bp, synthetic construct
  source 1..20: mol_type = other DNA
gaatgtcctgaacgggtgct

SEQ ID NO: 250967 - DNA, 20 bp, synthetic construct
  source 1..20: mol_type = other DNA
agaatgtcctgaacgggtgc

SEQ ID NO: 250968 - DNA, 20 bp, synthetic construct
  source 1..20: mol_type = other DNA
cagaatgtcctgaacgggtg

SEQ ID NO: 250969 - DNA, 20 bp, synthetic construct
  source 1..20: mol_type = other DNA
gcagaatgtcctgaacgggt

SEQ ID NO: 250970 - DNA, 20 bp, synthetic construct
  source 1..20: mol_type = other DNA
cgcagaatgtcctgaacggg

SEQ ID NO: 250971 - DNA, 20 bp, synthetic construct
  source 1..20: mol_type = other DNA
tcgcagaatgtcctgaacgg

SEQ ID NO: 250972 - DNA, 20 bp, synthetic construct
  source 1..20: mol_type = other DNA
ttcgcagaatgtcctgaacg

SEQ ID NO: 250973 - DNA, 20 bp, synthetic construct
  source 1..20: mol_type = other DNA
tttcgcagaatgtcctgaac

SEQ ID NO: 250974 - DNA, 20 bp, synthetic construct
  source 1..20: mol_type = other DNA
ctttcgcagaatgtcctgaa

SEQ ID NO: 250975 - DNA, 20 bp, synthetic construct
  source 1..20: mol_type = other DNA
cctttcgcagaatgtcctga

SEQ ID NO: 250976 - DNA, 20 bp, synthetic construct
  source 1..20: mol_type = other DNA
gcctttcgcagaatgtcctg

SEQ ID NO: 250977 - DNA, 20 bp, synthetic construct
  source 1..20: mol_type = other DNA
tgcctttcgcagaatgtcct

SEQ ID NO: 250978 - DNA, 20 bp, synthetic construct
  source 1..20: mol_type = other DNA
atgcctttcgcagaatgtcc

SEQ ID NO: 250979 - DNA, 20 bp, synthetic construct
  source 1..20: mol_type = other DNA
aatgcctttcgcagaatgtc

SEQ ID NO: 250980 - DNA, 20 bp, synthetic construct
  source 1..20: mol_type = other DNA
aaatgcctttcgcagaatgt

SEQ ID NO: 250981 - DNA, 20 bp, synthetic construct
  source 1..20: mol_type = other DNA
caaatgcctttcgcagaatg

SEQ ID NO: 250982 - DNA, 20 bp, synthetic construct
  source 1..20: mol_type = other DNA
gcaaatgcctttcgcagaat

SEQ ID NO: 250983 - DNA, 20 bp, synthetic construct
  source 1..20: mol_type = other DNA
ggcaaatgcctttcgcagaa

SEQ ID NO: 250984 - DNA, 20 bp, synthetic construct
  source 1..20: mol_type = other DNA
gggcaaatgcctttcgcaga

SEQ ID NO: 250985 - DNA, 20 bp, synthetic construct
  source 1..20: mol_type = other DNA
tgggcaaatgcctttcgcag

SEQ ID NO: 250986 - DNA, 20 bp, synthetic construct
  source 1..20: mol_type = other DNA
ctgggcaaatgcctttcgca

SEQ ID NO: 250987 - DNA, 20 bp, synthetic construct
  source 1..20: mol_type = other DNA
tctgggcaaatgcctttcgc

SEQ ID NO: 250988 - DNA, 20 bp, synthetic construct
  source 1..20: mol_type = other DNA
ttctgggcaaatgcctttcg

SEQ ID NO: 250989 - DNA, 20 bp, synthetic construct
  source 1..20: mol_type = other DNA
cttctgggcaaatgcctttc

SEQ ID NO: 250990 - DNA, 20 bp, synthetic construct
  source 1..20: mol_type = other DNA
acttctgggcaaatgccttt

SEQ ID NO: 250991 - DNA, 20 bp, synthetic construct
  source 1..20: mol_type = other DNA
aacttctgggcaaatgcctt

SEQ ID NO: 250992 - DNA, 20 bp, synthetic construct
  source 1..20: mol_type = other DNA
caacttctgggcaaatgcct

SEQ ID NO: 250993 - DNA, 20 bp, synthetic construct
  source 1..20: mol_type = other DNA
ccaacttctgggcaaatgcc

SEQ ID NO: 250994 - DNA, 20 bp, synthetic construct
  source 1..20: mol_type = other DNA
cccaacttctgggcaaatgc

SEQ ID NO: 250995 - DNA, 20 bp, synthetic construct
  source 1..20: mol_type = other DNA
tcccaacttctgggcaaatg

SEQ ID NO: 250996 - DNA, 20 bp, synthetic construct
  source 1..20: mol_type = other DNA
ctcccaacttctgggcaaat

SEQ ID NO: 250997 - DNA, 20 bp, synthetic construct
  source 1..20: mol_type = other DNA
cctcccaacttctgggcaaa

SEQ ID NO: 250998 - DNA, 20 bp, synthetic construct
  source 1..20: mol_type = other DNA
tcctcccaacttctgggcaa

SEQ ID NO: 250999 - DNA, 20 bp, synthetic construct
  source 1..20: mol_type = other DNA
ttcctcccaacttctgggca

SEQ ID NO: 251000 - DNA, 20 bp, synthetic construct
  source 1..20: mol_type = other DNA
cttcctcccaacttctgggc

SEQ ID NO: 251001 - DNA, 20 bp, synthetic construct
  source 1..20: mol_type = other DNA
ccttcctcccaacttctggg

SEQ ID NO: 251002 - DNA, 20 bp, synthetic construct
  source 1..20: mol_type = other DNA
tccttcctcccaacttctgg

SEQ ID NO: 251003 - DNA, 20 bp, synthetic construct
  source 1..20: mol_type = other DNA
ttccttcctcccaacttctg

SEQ ID NO: 251004 - DNA, 20 bp, synthetic construct
  source 1..20: mol_type = other DNA
tttccttcctcccaacttct

SEQ ID NO: 251005 - DNA, 20 bp, synthetic construct
  source 1..20: mol_type = other DNA
atttccttcctcccaacttc

SEQ ID NO: 251006 - DNA, 20 bp, synthetic construct
  source 1..20: mol_type = other DNA
catttccttcctcccaactt

SEQ ID NO: 251007 - DNA, 20 bp, synthetic construct
  source 1..20: mol_type = other DNA
acatttccttcctcccaact

SEQ ID NO: 251008 - DNA, 20 bp, synthetic construct
  source 1..20: mol_type = other DNA
tacatttccttcctcccaac

SEQ ID NO: 251009 - DNA, 20 bp, synthetic construct
  source 1..20: mol_type = other DNA
ttacatttccttcctcccaa

SEQ ID NO: 251010 - DNA, 20 bp, synthetic construct
  source 1..20: mol_type = other DNA
gttacatttccttcctccca

SEQ ID NO: 251011 - DNA, 20 bp, synthetic construct
  source 1..20: mol_type = other DNA
tgttacatttccttcctccc

SEQ ID NO: 251012 - DNA, 20 bp, synthetic construct
  source 1..20: mol_type = other DNA
atgttacatttccttcctcc

SEQ ID NO: 251013 - DNA, 20 bp, synthetic construct
  source 1..20: mol_type = other DNA
aatgttacatttccttcctc

SEQ ID NO: 251014 - DNA, 20 bp, synthetic construct
  source 1..20: mol_type = other DNA
aaatgttacatttccttcct

SEQ ID NO: 251015 - DNA, 20 bp, synthetic construct
  source 1..20: mol_type = other DNA
aaaatgttacatttccttcc

SEQ ID NO: 251016 - DNA, 20 bp, synthetic construct
  source 1..20: mol_type = other DNA
caaaatgttacatttccttc

SEQ ID NO: 251017 - DNA, 20 bp, synthetic construct
  source 1..20: mol_type = other DNA
ccaaaatgttacatttcctt

SEQ ID NO: 251018 - DNA, 20 bp, synthetic construct
  source 1..20: mol_type = other DNA
cccaaaatgttacatttcct

SEQ ID NO: 251019 - DNA, 20 bp, synthetic construct
  source 1..20: mol_type = other DNA
ccccaaaatgttacatttcc

SEQ ID NO: 251020 - DNA, 20 bp, synthetic construct
  source 1..20: mol_type = other DNA
gccccaaaatgttacatttc

SEQ ID NO: 251021 - DNA, 20 bp, synthetic construct
  source 1..20: mol_type = other DNA
tgccccaaaatgttacattt

SEQ ID NO: 251022 - DNA, 20 bp, synthetic construct
  source 1..20: mol_type = other DNA
gtgccccaaaatgttacatt

SEQ ID NO: 251023 - DNA, 20 bp, synthetic construct
  source 1..20: mol_type = other DNA
ggtgccccaaaatgttacat

SEQ ID NO: 251024 - DNA, 20 bp, synthetic construct
  source 1..20: mol_type = other DNA
aggtgccccaaaatgttaca

SEQ ID NO: 251025 - DNA, 20 bp, synthetic construct
  source 1..20: mol_type = other DNA
taggtgccccaaaatgttac

SEQ ID NO: 251026 - DNA, 20 bp, synthetic construct
  source 1..20: mol_type = other DNA
gtaggtgccccaaaatgtta

SEQ ID NO: 251027 - DNA, 20 bp, synthetic construct
  source 1..20: mol_type = other DNA
ggtaggtgccccaaaatgtt

SEQ ID NO: 251028 - DNA, 20 bp, synthetic construct
  source 1..20: mol_type = other DNA
tggtaggtgccccaaaatgt

SEQ ID NO: 251029 - DNA, 20 bp, synthetic construct
  source 1..20: mol_type = other DNA
atggtaggtgccccaaaatg

SEQ ID NO: 251030 - DNA, 20 bp, synthetic construct
  source 1..20: mol_type = other DNA
tatggtaggtgccccaaaat

SEQ ID NO: 251031 - DNA, 20 bp, synthetic construct
  source 1..20: mol_type = other DNA
atatggtaggtgccccaaaa

SEQ ID NO: 251032 - DNA, 20 bp, synthetic construct
  source 1..20: mol_type = other DNA
catatggtaggtgccccaaa

SEQ ID NO: 251033 - DNA, 20 bp, synthetic construct
  source 1..20: mol_type = other DNA
gcatatggtaggtgccccaa

SEQ ID NO: 251034 - DNA, 20 bp, synthetic construct
  source 1..20: mol_type = other DNA
ggcatatggtaggtgcccca

SEQ ID NO: 251035 - DNA, 20 bp, synthetic construct
  source 1..20: mol_type = other DNA
tggcatatggtaggtgcccc

SEQ ID NO: 251036 - DNA, 20 bp, synthetic construct
  source 1..20: mol_type = other DNA
ctggcatatggtaggtgccc

SEQ ID NO: 251037 - DNA, 20 bp, synthetic construct
  source 1..20: mol_type = other DNA
cctggcatatggtaggtgcc

SEQ ID NO: 251038 - DNA, 20 bp, synthetic construct
  source 1..20: mol_type = other DNA
gcctggcatatggtaggtgc

SEQ ID NO: 251039 - DNA, 20 bp, synthetic construct
  source 1..20: mol_type = other DNA
tgcctggcatatggtaggtg

SEQ ID NO: 251040 - DNA, 20 bp, synthetic construct
  source 1..20: mol_type = other DNA
gtgcctggcatatggtaggt

SEQ ID NO: 251041 - DNA, 20 bp, synthetic construct
  source 1..20: mol_type = other DNA
ggtgcctggcatatggtagg

SEQ ID NO: 251042 - DNA, 20 bp, synthetic construct
  source 1..20: mol_type = other DNA
tggtgcctggcatatggtag

SEQ ID NO: 251043 - DNA, 20 bp, synthetic construct
  source 1..20: mol_type = other DNA
ctggtgcctggcatatggta

SEQ ID NO: 251044 - DNA, 20 bp, synthetic construct
  source 1..20: mol_type = other DNA
cctggtgcctggcatatggt

SEQ ID NO: 251045 - DNA, 20 bp, synthetic construct
  source 1..20: mol_type = other DNA
gcctggtgcctggcatatgg

SEQ ID NO: 251046 - DNA, 20 bp, synthetic construct
  source 1..20: mol_type = other DNA
agcctggtgcctggcatatg

SEQ ID NO: 251047 - DNA, 20 bp, synthetic construct
  source 1..20: mol_type = other DNA
tagcctggtgcctggcatat

SEQ ID NO: 251048 - DNA, 20 bp, synthetic construct
  source 1..20: mol_type = other DNA
ttagcctggtgcctggcata

SEQ ID NO: 251049 - DNA, 20 bp, synthetic construct
  source 1..20: mol_type = other DNA
tttagcctggtgcctggcat

SEQ ID NO: 251050 - DNA, 20 bp, synthetic construct
  source 1..20: mol_type = other DNA
gtttagcctggtgcctggca

SEQ ID NO: 251051 - DNA, 20 bp, synthetic construct
  source 1..20: mol_type = other DNA
cgtttagcctggtgcctggc

SEQ ID NO: 251052 - DNA, 20 bp, synthetic construct
  source 1..20: mol_type = other DNA
acgtttagcctggtgcctgg

SEQ ID NO: 251053 - DNA, 20 bp, synthetic construct
  source 1..20: mol_type = other DNA
cacgtttagcctggtgcctg

SEQ ID NO: 251054 - DNA, 20 bp, synthetic construct
  source 1..20: mol_type = other DNA
acacgtttagcctggtgcct

SEQ ID NO: 251055 - DNA, 20 bp, synthetic construct
  source 1..20: mol_type = other DNA
aacacgtttagcctggtgcc

SEQ ID NO: 251056 - DNA, 20 bp, synthetic construct
  source 1..20: mol_type = other DNA
gaacacgtttagcctggtgc

SEQ ID NO: 251057 - DNA, 20 bp, synthetic construct
  source 1..20: mol_type = other DNA
tgaacacgtttagcctggtg

SEQ ID NO: 251058 - DNA, 20 bp, synthetic construct
  source 1..20: mol_type = other DNA
gtgaacacgtttagcctggt

SEQ ID NO: 251059 - DNA, 20 bp, synthetic construct
  source 1..20: mol_type = other DNA
tgtgaacacgtttagcctgg

SEQ ID NO: 251060 - DNA, 20 bp, synthetic construct
  source 1..20: mol_type = other DNA
gtgtgaacacgtttagcctg

SEQ ID NO: 251061 - DNA, 20 bp, synthetic construct
  source 1..20: mol_type = other DNA
tgtgtgaacacgtttagcct

SEQ ID NO: 251062 - DNA, 20 bp, synthetic construct
  source 1..20: mol_type = other DNA
ttgtgtgaacacgtttagcc

SEQ ID NO: 251063 - DNA, 20 bp, synthetic construct
  source 1..20: mol_type = other DNA
tttgtgtgaacacgtttagc

SEQ ID NO: 251064 - DNA, 20 bp, synthetic construct
  source 1..20: mol_type = other DNA
atttgtgtgaacacgtttag

SEQ ID NO: 251065 - DNA, 20 bp, synthetic construct
  source 1..20: mol_type = other DNA
aatttgtgtgaacacgttta

SEQ ID NO: 251066 - DNA, 20 bp, synthetic construct
  source 1..20: mol_type = other DNA
gaatttgtgtgaacacgttt

SEQ ID NO: 251067 - DNA, 20 bp, synthetic construct
  source 1..20: mol_type = other DNA
agaatttgtgtgaacacgtt

SEQ ID NO: 251068 - DNA, 20 bp, synthetic construct
  source 1..20: mol_type = other DNA
gagaatttgtgtgaacacgt

SEQ ID NO: 251069 - DNA, 20 bp, synthetic construct
  source 1..20: mol_type = other DNA
agagaatttgtgtgaacacg

SEQ ID NO: 251070 - DNA, 20 bp, synthetic construct
  source 1..20: mol_type = other DNA
aagagaatttgtgtgaacac

SEQ ID NO: 251071 - DNA, 20 bp, synthetic construct
  source 1..20: mol_type = other DNA
taagagaatttgtgtgaaca

SEQ ID NO: 251072 - DNA, 20 bp, synthetic construct
  source 1..20: mol_type = other DNA
gtaagagaatttgtgtgaac

SEQ ID NO: 251073 - DNA, 20 bp, synthetic construct
  source 1..20: mol_type = other DNA
agtaagagaatttgtgtgaa

SEQ ID NO: 251074 - DNA, 20 bp, synthetic construct
  source 1..20: mol_type = other DNA
tagtaagagaatttgtgtga

SEQ ID NO: 251075 - DNA, 20 bp, synthetic construct
  source 1..20: mol_type = other DNA
ttagtaagagaatttgtgtg

SEQ ID NO: 251076 - DNA, 20 bp, synthetic construct
  source 1..20: mol_type = other DNA
gttagtaagagaatttgtgt

SEQ ID NO: 251077 - DNA, 20 bp, synthetic construct
  source 1..20: mol_type = other DNA
ggttagtaagagaatttgtg

SEQ ID NO: 251078 - DNA, 20 bp, synthetic construct
  source 1..20: mol_type = other DNA
gggttagtaagagaatttgt

SEQ ID NO: 251079 - DNA, 20 bp, synthetic construct
  source 1..20: mol_type = other DNA
agggttagtaagagaatttg

SEQ ID NO: 251080 - DNA, 20 bp, synthetic construct
  source 1..20: mol_type = other DNA
gagggttagtaagagaattt

SEQ ID NO: 251081 - DNA, 20 bp, synthetic construct
  source 1..20: mol_type = other DNA
tgagggttagtaagagaatt

SEQ ID NO: 251082 - DNA, 20 bp, synthetic construct
  source 1..20: mol_type = other DNA
gtgagggttagtaagagaat

SEQ ID NO: 251083 - DNA, 20 bp, synthetic construct
  source 1..20: mol_type = other DNA
ggtgagggttagtaagagaa

SEQ ID NO: 251084 - DNA, 20 bp, synthetic construct
  source 1..20: mol_type = other DNA
tggtgagggttagtaagaga

SEQ ID NO: 251085 - DNA, 20 bp, synthetic construct
  source 1..20: mol_type = other DNA
atggtgagggttagtaagag

SEQ ID NO: 251086 - DNA, 20 bp, synthetic construct
  source 1..20: mol_type = other DNA
gatggtgagggttagtaaga

SEQ ID NO: 251087 - DNA, 20 bp, synthetic construct
  source 1..20: mol_type = other DNA
ggatggtgagggttagtaag

SEQ ID NO: 251088 - DNA, 20 bp, synthetic construct
  source 1..20: mol_type = other DNA
aggatggtgagggttagtaa

SEQ ID NO: 251089 - DNA, 20 bp, synthetic construct
  source 1..20: mol_type = other DNA
aaggatggtgagggttagta

SEQ ID NO: 251090 - DNA, 20 bp, synthetic construct
  source 1..20: mol_type = other DNA
gaaggatggtgagggttagt

SEQ ID NO: 251091 - DNA, 20 bp, synthetic construct
  source 1..20: mol_type = other DNA
agaaggatggtgagggttag

SEQ ID NO: 251092 - DNA, 20 bp, synthetic construct
  source 1..20: mol_type = other DNA
tagaaggatggtgagggtta

SEQ ID NO: 251093 - DNA, 20 bp, synthetic construct
  source 1..20: mol_type = other DNA
gtagaaggatggtgagggtt

SEQ ID NO: 251094 - DNA, 20 bp, synthetic construct
  source 1..20: mol_type = other DNA
tgtagaaggatggtgagggt

SEQ ID NO: 251095 - DNA, 20 bp, synthetic construct
  source 1..20: mol_type = other DNA
ttgtagaaggatggtgaggg

SEQ ID NO: 251096 - DNA, 20 bp, synthetic construct
  source 1..20: mol_type = other DNA
cttgtagaaggatggtgagg

SEQ ID NO: 251097 - DNA, 20 bp, synthetic construct
  source 1..20: mol_type = other DNA
tcttgtagaaggatggtgag

SEQ ID NO: 251098 - DNA, 20 bp, synthetic construct
  source 1..20: mol_type = other DNA
gtcttgtagaaggatggtga

SEQ ID NO: 251099 - DNA, 20 bp, synthetic construct
  source 1..20: mol_type = other DNA
tgtcttgtagaaggatggtg

SEQ ID NO: 251100 - DNA, 20 bp, synthetic construct
  source 1..20: mol_type = other DNA
ttgtcttgtagaaggatggt

SEQ ID NO: 251101 - DNA, 20 bp, synthetic construct
  source 1..20: mol_type = other DNA
tttgtcttgtagaaggatgg

SEQ ID NO: 251102 - DNA, 20 bp, synthetic construct
  source 1..20: mol_type = other DNA
gtttgtcttgtagaaggatg

SEQ ID NO: 251103 - DNA, 20 bp, synthetic construct
  source 1..20: mol_type = other DNA
agtttgtcttgtagaaggat

SEQ ID NO: 251104 - DNA, 20 bp, synthetic construct
  source 1..20: mol_type = other DNA
tagtttgtcttgtagaagga

SEQ ID NO: 251105 - DNA, 20 bp, synthetic construct
  source 1..20: mol_type = other DNA
ctagtttgtcttgtagaagg

SEQ ID NO: 251106 - DNA, 20 bp, synthetic construct
  source 1..20: mol_type = other DNA
actagtttgtcttgtagaag

SEQ ID NO: 251107 - DNA, 20 bp, synthetic construct
  source 1..20: mol_type = other DNA
tactagtttgtcttgtagaa

SEQ ID NO: 251108 - DNA, 20 bp, synthetic construct
  source 1..20: mol_type = other DNA
atactagtttgtcttgtaga

SEQ ID NO: 251109 - DNA, 20 bp, synthetic construct
  source 1..20: mol_type = other DNA
gatactagtttgtcttgtag

SEQ ID NO: 251110 - DNA, 20 bp, synthetic construct
  source 1..20: mol_type = other DNA
agatactagtttgtcttgta

SEQ ID NO: 251111 - DNA, 20 bp, synthetic construct
  source 1..20: mol_type = other DNA
aagatactagtttgtcttgt

SEQ ID NO: 251112 - DNA, 20 bp, synthetic construct
  source 1..20: mol_type = other DNA
gaagatactagtttgtcttg

SEQ ID NO: 251113 - DNA, 20 bp, synthetic construct
  source 1..20: mol_type = other DNA
tgaagatactagtttgtctt

SEQ ID NO: 251114 - DNA, 20 bp, synthetic construct
  source 1..20: mol_type = other DNA
atgaagatactagtttgtct

SEQ ID NO: 251115 - DNA, 20 bp, synthetic construct
  source 1..20: mol_type = other DNA
gatgaagatactagtttgtc

SEQ ID NO: 251116 - DNA, 20 bp, synthetic construct
  source 1..20: mol_type = other DNA
agatgaagatactagtttgt

SEQ ID NO: 251117 - DNA, 20 bp, synthetic construct
  source 1..20: mol_type = other DNA
aagatgaagatactagtttg

SEQ ID NO: 251118 - DNA, 20 bp, synthetic construct
  source 1..20: mol_type = other DNA
caagatgaagatactagttt

SEQ ID NO: 251119 - DNA, 20 bp, synthetic construct
  source 1..20: mol_type = other DNA
ccaagatgaagatactagtt

SEQ ID NO: 251120 - DNA, 20 bp, synthetic construct
  source 1..20: mol_type = other DNA
cccaagatgaagatactagt

SEQ ID NO: 251121 - DNA, 20 bp, synthetic construct
  source 1..20: mol_type = other DNA
ccccaagatgaagatactag

SEQ ID NO: 251122 - DNA, 20 bp, synthetic construct
  source 1..20: mol_type = other DNA
accccaagatgaagatacta

SEQ ID NO: 251123 - DNA, 20 bp, synthetic construct
  source 1..20: mol_type = other DNA
aaccccaagatgaagatact

SEQ ID NO: 251124 - DNA, 20 bp, synthetic construct
  source 1..20: mol_type = other DNA
gaaccccaagatgaagatac

SEQ ID NO: 251125 - DNA, 20 bp, synthetic construct
  source 1..20: mol_type = other DNA
tgaaccccaagatgaagata

SEQ ID NO: 251126 - DNA, 20 bp, synthetic construct
  source 1..20: mol_type = other DNA
ttgaaccccaagatgaagat

SEQ ID NO: 251127 - DNA, 20 bp, synthetic construct
  source 1..20: mol_type = other DNA
cttgaaccccaagatgaaga

SEQ ID NO: 251128 - DNA, 20 bp, synthetic construct
  source 1..20: mol_type = other DNA
tcttgaaccccaagatgaag

SEQ ID NO: 251129 - DNA, 20 bp, synthetic construct
  source 1..20: mol_type = other DNA
atcttgaaccccaagatgaa

SEQ ID NO: 251130 - DNA, 20 bp, synthetic construct
  source 1..20: mol_type = other DNA
catcttgaaccccaagatga

SEQ ID NO: 251131 - DNA, 20 bp, synthetic construct
  source 1..20: mol_type = other DNA
tcatcttgaaccccaagatg

SEQ ID NO: 251132 - DNA, 20 bp, synthetic construct
  source 1..20: mol_type = other DNA
ctcatcttgaaccccaagat

SEQ ID NO: 251133 - DNA, 20 bp, synthetic construct
  source 1..20: mol_type = other DNA
cctcatcttgaaccccaaga

SEQ ID NO: 251134 - DNA, 20 bp, synthetic construct
  source 1..20: mol_type = other DNA
tcctcatcttgaaccccaag

SEQ ID NO: 251135 - DNA, 20 bp, synthetic construct
  source 1..20: mol_type = other DNA
ttcctcatcttgaaccccaa

SEQ ID NO: 251136 - DNA, 20 bp, synthetic construct
  source 1..20: mol_type = other DNA
tttcctcatcttgaacccca

SEQ ID NO: 251137 - DNA, 20 bp, synthetic construct
  source 1..20: mol_type = other DNA
atttcctcatcttgaacccc

SEQ ID NO: 251138 - DNA, 20 bp, synthetic construct
  source 1..20: mol_type = other DNA
catttcctcatcttgaaccc

SEQ ID NO: 251139 - DNA, 20 bp, synthetic construct
  source 1..20: mol_type = other DNA
ccatttcctcatcttgaacc

SEQ ID NO: 251140 - DNA, 20 bp, synthetic construct
  source 1..20: mol_type = other DNA
tccatttcctcatcttgaac

SEQ ID NO: 251141 - DNA, 20 bp, synthetic construct
  source 1..20: mol_type = other DNA
ctccatttcctcatcttgaa

SEQ ID NO: 251142 - DNA, 20 bp, synthetic construct
  source 1..20: mol_type = other DNA
cctccatttcctcatcttga

SEQ ID NO: 251143 - DNA, 20 bp, synthetic construct
  source 1..20: mol_type = other DNA
gcctccatttcctcatcttg

SEQ ID NO: 251144 - DNA, 20 bp, synthetic construct
  source 1..20: mol_type = other DNA
agcctccatttcctcatctt

SEQ ID NO: 251145 - DNA, 20 bp, synthetic construct
  source 1..20: mol_type = other DNA
gagcctccatttcctcatct

SEQ ID NO: 251146 - DNA, 20 bp, synthetic construct
  source 1..20: mol_type = other DNA
tgagcctccatttcctcatc

SEQ ID NO: 251147 - DNA, 20 bp, synthetic construct
  source 1..20: mol_type = other DNA
ctgagcctccatttcctcat

SEQ ID NO: 251148 - DNA, 20 bp, synthetic construct
  source 1..20: mol_type = other DNA
tctgagcctccatttcctca

SEQ ID NO: 251149 - DNA, 20 bp, synthetic construct
  source 1..20: mol_type = other DNA
ctctgagcctccatttcctc

SEQ ID NO: 251150 - DNA, 20 bp, synthetic construct
  source 1..20: mol_type = other DNA
tctctgagcctccatttcct

SEQ ID NO: 251151 - DNA, 20 bp, synthetic construct
  source 1..20: mol_type = other DNA
ctctctgagcctccatttcc

SEQ ID NO: 251152 - DNA, 20 bp, synthetic construct
  source 1..20: mol_type = other DNA
cctctctgagcctccatttc

SEQ ID NO: 251153 - DNA, 20 bp, synthetic construct
  source 1..20: mol_type = other DNA
acctctctgagcctccattt

SEQ ID NO: 251154 - DNA, 20 bp, synthetic construct
  source 1..20: mol_type = other DNA
aacctctctgagcctccatt

SEQ ID NO: 251155 - DNA, 20 bp, synthetic construct
  source 1..20: mol_type = other DNA
caacctctctgagcctccat

SEQ ID NO: 251156 - DNA, 20 bp, synthetic construct
  source 1..20: mol_type = other DNA
tcaacctctctgagcctcca

SEQ ID NO: 251157 - DNA, 20 bp, synthetic construct
  source 1..20: mol_type = other DNA
ttcaacctctctgagcctcc

SEQ ID NO: 251158 - DNA, 20 bp, synthetic construct
  source 1..20: mol_type = other DNA
attcaacctctctgagcctc

SEQ ID NO: 251159 - DNA, 20 bp, synthetic construct
  source 1..20: mol_type = other DNA
cattcaacctctctgagcct

SEQ ID NO: 251160 - DNA, 20 bp, synthetic construct
  source 1..20: mol_type = other DNA
tcattcaacctctctgagcc

SEQ ID NO: 251161 - DNA, 20 bp, synthetic construct
  source 1..20: mol_type = other DNA
ttcattcaacctctctgagc

SEQ ID NO: 251162 - DNA, 20 bp, synthetic construct
  source 1..20: mol_type = other DNA
attcattcaacctctctgag

SEQ ID NO: 251163 - DNA, 20 bp, synthetic construct
  source 1..20: mol_type = other DNA
cattcattcaacctctctga

SEQ ID NO: 251164 - DNA, 20 bp, synthetic construct
  source 1..20: mol_type = other DNA
gcattcattcaacctctctg

SEQ ID NO: 251165 - DNA, 20 bp, synthetic construct
  source 1..20: mol_type = other DNA
ggcattcattcaacctctct

SEQ ID NO: 251166 - DNA, 20 bp, synthetic construct
  source 1..20: mol_type = other DNA
cggcattcattcaacctctc

SEQ ID NO: 251167 - DNA, 20 bp, synthetic construct
  source 1..20: mol_type = other DNA
ccggcattcattcaacctct

SEQ ID NO: 251168 - DNA, 20 bp, synthetic construct
  source 1..20: mol_type = other DNA
accggcattcattcaacctc

SEQ ID NO: 251169 - DNA, 20 bp, synthetic construct
  source 1..20: mol_type = other DNA
caccggcattcattcaacct

SEQ ID NO: 251170 - DNA, 20 bp, synthetic construct
  source 1..20: mol_type = other DNA
gcaccggcattcattcaacc

SEQ ID NO: 251171 - DNA, 20 bp, synthetic construct
  source 1..20: mol_type = other DNA
ggcaccggcattcattcaac

SEQ ID NO: 251172 - DNA, 20 bp, synthetic construct
  source 1..20: mol_type = other DNA
aggcaccggcattcattcaa

SEQ ID NO: 251173 - DNA, 20 bp, synthetic construct
  source 1..20: mol_type = other DNA
caggcaccggcattcattca

SEQ ID NO: 251174 - DNA, 20 bp, synthetic construct
  source 1..20: mol_type = other DNA
ccaggcaccggcattcattc

SEQ ID NO: 251175 - DNA, 20 bp, synthetic construct
  source 1..20: mol_type = other DNA
tccaggcaccggcattcatt

SEQ ID NO: 251176 - DNA, 20 bp, synthetic construct
  source 1..20: mol_type = other DNA
atccaggcaccggcattcat

SEQ ID NO: 251177 - DNA, 20 bp, synthetic construct
  source 1..20: mol_type = other DNA
tatccaggcaccggcattca

SEQ ID NO: 251178 - DNA, 20 bp, synthetic construct
  source 1..20: mol_type = other DNA
atatccaggcaccggcattc

SEQ ID NO: 251179 - DNA, 20 bp, synthetic construct
  source 1..20: mol_type = other DNA
catatccaggcaccggcatt

SEQ ID NO: 251180 - DNA, 20 bp, synthetic construct
  source 1..20: mol_type = other DNA
tcatatccaggcaccggcat

SEQ ID NO: 251181 - DNA, 20 bp, synthetic construct
  source 1..20: mol_type = other DNA
ttcatatccaggcaccggca

SEQ ID NO: 251182 - DNA, 20 bp, synthetic construct
  source 1..20: mol_type = other DNA
gttcatatccaggcaccggc

SEQ ID NO: 251183 - DNA, 20 bp, synthetic construct
  source 1..20: mol_type = other DNA
ggttcatatccaggcaccgg

SEQ ID NO: 251184 - DNA, 20 bp, synthetic construct
  source 1..20: mol_type = other DNA
gggttcatatccaggcaccg

SEQ ID NO: 251185 - DNA, 20 bp, synthetic construct
  source 1..20: mol_type = other DNA
ggggttcatatccaggcacc

SEQ ID NO: 251186 - DNA, 20 bp, synthetic construct
  source 1..20: mol_type = other DNA
tggggttcatatccaggcac

SEQ ID NO: 251187 - DNA, 20 bp, synthetic construct
  source 1..20: mol_type = other DNA
atggggttcatatccaggca

SEQ ID NO: 251188 - DNA, 20 bp, synthetic construct
  source 1..20: mol_type = other DNA
gatggggttcatatccaggc

SEQ ID NO: 251189 - DNA, 20 bp, synthetic construct
  source 1..20: mol_type = other DNA
agatggggttcatatccagg

SEQ ID NO: 251190 - DNA, 20 bp, synthetic construct
  source 1..20: mol_type = other DNA
cagatggggttcatatccag

SEQ ID NO: 251191 - DNA, 20 bp, synthetic construct
  source 1..20: mol_type = other DNA
gcagatggggttcatatcca

SEQ ID NO: 251192 - DNA, 20 bp, synthetic construct
  source 1..20: mol_type = other DNA
ggcagatggggttcatatcc

SEQ ID NO: 251193 - DNA, 20 bp, synthetic construct
  source 1..20: mol_type = other DNA
aggcagatggggttcatatc

SEQ ID NO: 251194 - DNA, 20 bp, synthetic construct
  source 1..20: mol_type = other DNA
caggcagatggggttcatat

SEQ ID NO: 251195 - DNA, 20 bp, synthetic construct
  source 1..20: mol_type = other DNA
tcaggcagatggggttcata

SEQ ID NO: 251196 - DNA, 20 bp, synthetic construct
  source 1..20: mol_type = other DNA
gtcaggcagatggggttcat

SEQ ID NO: 251197 - DNA, 20 bp, synthetic construct
  source 1..20: mol_type = other DNA
agtcaggcagatggggttca

SEQ ID NO: 251198 - DNA, 20 bp, synthetic construct
  source 1..20: mol_type = other DNA
gagtcaggcagatggggttc

SEQ ID NO: 251199 - DNA, 20 bp, synthetic construct
  source 1..20: mol_type = other DNA
ggagtcaggcagatggggtt

SEQ ID NO: 251200 - DNA, 20 bp, synthetic construct
  source 1..20: mol_type = other DNA
cggagtcaggcagatggggt

SEQ ID NO: 251201 - DNA, 20 bp, synthetic construct
  source 1..20: mol_type = other DNA
gcggagtcaggcagatgggg

SEQ ID NO: 251202 - DNA, 20 bp, synthetic construct
  source 1..20: mol_type = other DNA
tgcggagtcaggcagatggg

SEQ ID NO: 251203 - DNA, 20 bp, synthetic construct
  source 1..20: mol_type = other DNA
ttgcggagtcaggcagatgg

SEQ ID NO: 251204 - DNA, 20 bp, synthetic construct
  source 1..20: mol_type = other DNA
gttgcggagtcaggcagatg

SEQ ID NO: 251205 - DNA, 20 bp, synthetic construct
  source 1..20: mol_type = other DNA
ggttgcggagtcaggcagat

SEQ ID NO: 251206 - DNA, 20 bp, synthetic construct
  source 1..20: mol_type = other DNA
gggttgcggagtcaggcaga

SEQ ID NO: 251207 - DNA, 20 bp, synthetic construct
  source 1..20: mol_type = other DNA
tgggttgcggagtcaggcag

SEQ ID NO: 251208 - DNA, 20 bp, synthetic construct
  source 1..20: mol_type = other DNA
ctgggttgcggagtcaggca

SEQ ID NO: 251209 - DNA, 20 bp, synthetic construct
  source 1..20: mol_type = other DNA
cctgggttgcggagtcaggc

SEQ ID NO: 251210 - DNA, 20 bp, synthetic construct
  source 1..20: mol_type = other DNA
gcctgggttgcggagtcagg

SEQ ID NO: 251211 - DNA, 20 bp, synthetic construct
  source 1..20: mol_type = other DNA
tgcctgggttgcggagtcag

SEQ ID NO: 251212 - DNA, 20 bp, synthetic construct
  source 1..20: mol_type = other DNA
ttgcctgggttgcggagtca

SEQ ID NO: 251213 - DNA, 20 bp, synthetic construct
  source 1..20: mol_type = other DNA
tttgcctgggttgcggagtc

SEQ ID NO: 251214 - DNA, 20 bp, synthetic construct
  source 1..20: mol_type = other DNA
ctttgcctgggttgcggagt

SEQ ID NO: 251215 - DNA, 20 bp, synthetic construct
  source 1..20: mol_type = other DNA
actttgcctgggttgcggag

SEQ ID NO: 251216 - DNA, 20 bp, synthetic construct
  source 1..20: mol_type = other DNA
gactttgcctgggttgcgga

SEQ ID NO: 251217 - DNA, 20 bp, synthetic construct
  source 1..20: mol_type = other DNA
agactttgcctgggttgcgg

SEQ ID NO: 251218 - DNA, 20 bp, synthetic construct
  source 1..20: mol_type = other DNA
aagactttgcctgggttgcg

SEQ ID NO: 251219 - DNA, 20 bp, synthetic construct
  source 1..20: mol_type = other DNA
aaagactttgcctgggttgc

SEQ ID NO: 251220 - DNA, 20 bp, synthetic construct
  source 1..20: mol_type = other DNA
gaaagactttgcctgggttg

SEQ ID NO: 251221 - DNA, 20 bp, synthetic construct
  source 1..20: mol_type = other DNA
ggaaagactttgcctgggtt

SEQ ID NO: 251222 - DNA, 20 bp, synthetic construct
  source 1..20: mol_type = other DNA
aggaaagactttgcctgggt

SEQ ID NO: 251223 - DNA, 20 bp, synthetic construct
  source 1..20: mol_type = other DNA
aaggaaagactttgcctggg

SEQ ID NO: 251224 - DNA, 20 bp, synthetic construct
  source 1..20: mol_type = other DNA
caaggaaagactttgcctgg

SEQ ID NO: 251225 - DNA, 20 bp, synthetic construct
  source 1..20: mol_type = other DNA
tcaaggaaagactttgcctg

SEQ ID NO: 251226 - DNA, 20 bp, synthetic construct
  source 1..20: mol_type = other DNA
ttcaaggaaagactttgcct

SEQ ID NO: 251227 - DNA, 20 bp, synthetic construct
  source 1..20: mol_type = other DNA
gttcaaggaaagactttgcc

SEQ ID NO: 251228 - DNA, 20 bp, synthetic construct
  source 1..20: mol_type = other DNA
agttcaaggaaagactttgc

SEQ ID NO: 251229 - DNA, 20 bp, synthetic construct
  source 1..20: mol_type = other DNA
aagttcaaggaaagactttg

SEQ ID NO: 251230 - DNA, 20 bp, synthetic construct
  source 1..20: mol_type = other DNA
gaagttcaaggaaagacttt

SEQ ID NO: 251231 - DNA, 20 bp, synthetic construct
  source 1..20: mol_type = other DNA
ggaagttcaaggaaagactt

SEQ ID NO: 251232 - DNA, 20 bp, synthetic construct
  source 1..20: mol_type = other DNA
gggaagttcaaggaaagact

SEQ ID NO: 251233 - DNA, 20 bp, synthetic construct
  source 1..20: mol_type = other DNA
tgggaagttcaaggaaagac

SEQ ID NO: 251234 - DNA, 20 bp, synthetic construct
  source 1..20: mol_type = other DNA
ctgggaagttcaaggaaaga

SEQ ID NO: 251235 - DNA, 20 bp, synthetic construct
  source 1..20: mol_type = other DNA
gctgggaagttcaaggaaag

SEQ ID NO: 251236 - DNA, 20 bp, synthetic construct
  source 1..20: mol_type = other DNA
tgctgggaagttcaaggaaa

SEQ ID NO: 251237 - DNA, 20 bp, synthetic construct
  source 1..20: mol_type = other DNA
ctgctgggaagttcaaggaa

SEQ ID NO: 251238 - DNA, 20 bp, synthetic construct
  source 1..20: mol_type = other DNA
gctgctgggaagttcaagga

SEQ ID NO: 251239 - DNA, 20 bp, synthetic construct
  source 1..20: mol_type = other DNA
ggctgctgggaagttcaagg

SEQ ID NO: 251240 - DNA, 20 bp, synthetic construct
  source 1..20: mol_type = other DNA
tggctgctgggaagttcaag

SEQ ID NO: 251241 - DNA, 20 bp, synthetic construct
  source 1..20: mol_type = other DNA
gtggctgctgggaagttcaa

SEQ ID NO: 251242 - DNA, 20 bp, synthetic construct
  source 1..20: mol_type = other DNA
agtggctgctgggaagttca

SEQ ID NO: 251243 - DNA, 20 bp, synthetic construct
  source 1..20: mol_type = other DNA
cagtggctgctgggaagttc

SEQ ID NO: 251244 - DNA, 20 bp, synthetic construct
  source 1..20: mol_type = other DNA
gcagtggctgctgggaagtt

SEQ ID NO: 251245 - DNA, 20 bp, synthetic construct
  source 1..20: mol_type = other DNA
agcagtggctgctgggaagt

SEQ ID NO: 251246 - DNA, 20 bp, synthetic construct
  source 1..20: mol_type = other DNA
aagcagtggctgctgggaag

SEQ ID NO: 251247 - DNA, 20 bp, synthetic construct
  source 1..20: mol_type = other DNA
taagcagtggctgctgggaa

SEQ ID NO: 251248 - DNA, 20 bp, synthetic construct
  source 1..20: mol_type = other DNA
ctaagcagtggctgctggga

SEQ ID NO: 251249 - DNA, 20 bp, synthetic construct
  source 1..20: mol_type = other DNA
tctaagcagtggctgctggg

SEQ ID NO: 251250 - DNA, 20 bp, synthetic construct
  source 1..20: mol_type = other DNA
gtctaagcagtggctgctgg

SEQ ID NO: 251251 - DNA, 20 bp, synthetic construct
  source 1..20: mol_type = other DNA
tgtctaagcagtggctgctg

SEQ ID NO: 251252 - DNA, 20 bp, synthetic construct
  source 1..20: mol_type = other DNA
gtgtctaagcagtggctgct

SEQ ID NO: 251253 - DNA, 20 bp, synthetic construct
  source 1..20: mol_type = other DNA
tgtgtctaagcagtggctgc

SEQ ID NO: 251254 - DNA, 20 bp, synthetic construct
  source 1..20: mol_type = other DNA
ctgtgtctaagcagtggctg

SEQ ID NO: 251255 - DNA, 20 bp, synthetic construct
  source 1..20: mol_type = other DNA
gctgtgtctaagcagtggct

SEQ ID NO: 251256 - DNA, 20 bp, synthetic construct
  source 1..20: mol_type = other DNA
ggctgtgtctaagcagtggc

SEQ ID NO: 251257 - DNA, 20 bp, synthetic construct
  source 1..20: mol_type = other DNA
aggctgtgtctaagcagtgg

SEQ ID NO: 251258 - DNA, 20 bp, synthetic construct
  source 1..20: mol_type = other DNA
gaggctgtgtctaagcagtg

SEQ ID NO: 251259 - DNA, 20 bp, synthetic construct
  source 1..20: mol_type = other DNA
ggaggctgtgtctaagcagt

SEQ ID NO: 251260 - DNA, 20 bp, synthetic construct
  source 1..20: mol_type = other DNA
tggaggctgtgtctaagcag

SEQ ID NO: 251261 - DNA, 20 bp, synthetic construct
  source 1..20: mol_type = other DNA
gtggaggctgtgtctaagca

SEQ ID NO: 251262 - DNA, 20 bp, synthetic construct
  source 1..20: mol_type = other DNA
tgtggaggctgtgtctaagc

SEQ ID NO: 251263 - DNA, 20 bp, synthetic construct
  source 1..20: mol_type = other DNA
ttgtggaggctgtgtctaag

SEQ ID NO: 251264 - DNA, 20 bp, synthetic construct
  source 1..20: mol_type = other DNA
gttgtggaggctgtgtctaa

SEQ ID NO: 251265 - DNA, 20 bp, synthetic construct
  source 1..20: mol_type = other DNA
ggttgtggaggctgtgtcta

SEQ ID NO: 251266 - DNA, 20 bp, synthetic construct
  source 1..20: mol_type = other DNA
tggttgtggaggctgtgtct

SEQ ID NO: 251267 - DNA, 20 bp, synthetic construct
  source 1..20: mol_type = other DNA
atggttgtggaggctgtgtc

SEQ ID NO: 251268 - DNA, 20 bp, synthetic construct
  source 1..20: mol_type = other DNA
catggttgtggaggctgtgt

SEQ ID NO: 251269 - DNA, 20 bp, synthetic construct
  source 1..20: mol_type = other DNA
ccatggttgtggaggctgtg

SEQ ID NO: 251270 - DNA, 20 bp, synthetic construct
  source 1..20: mol_type = other DNA
gccatggttgtggaggctgt

SEQ ID NO: 251271 - DNA, 20 bp, synthetic construct
  source 1..20: mol_type = other DNA
agccatggttgtggaggctg

SEQ ID NO: 251272 - DNA, 20 bp, synthetic construct
  source 1..20: mol_type = other DNA
gagccatggttgtggaggct

SEQ ID NO: 251273 - DNA, 20 bp, synthetic construct
  source 1..20: mol_type = other DNA
tgagccatggttgtggaggc

SEQ ID NO: 251274 - DNA, 20 bp, synthetic construct
  source 1..20: mol_type = other DNA
ctgagccatggttgtggagg

SEQ ID NO: 251275 - DNA, 20 bp, synthetic construct
  source 1..20: mol_type = other DNA
gctgagccatggttgtggag

SEQ ID NO: 251276 - DNA, 20 bp, synthetic construct
  source 1..20: mol_type = other DNA
tgctgagccatggttgtgga

SEQ ID NO: 251277 - DNA, 20 bp, synthetic construct
  source 1..20: mol_type = other DNA
ctgctgagccatggttgtgg

SEQ ID NO: 251278 - DNA, 20 bp, synthetic construct
  source 1..20: mol_type = other DNA
gctgctgagccatggttgtg

SEQ ID NO: 251279 - DNA, 20 bp, synthetic construct
  source 1..20: mol_type = other DNA
tgctgctgagccatggttgt

SEQ ID NO: 251280 - DNA, 20 bp, synthetic construct
  source 1..20: mol_type = other DNA
ttgctgctgagccatggttg

SEQ ID NO: 251281 - DNA, 20 bp, synthetic construct
  source 1..20: mol_type = other DNA
tttgctgctgagccatggtt

SEQ ID NO: 251282 - DNA, 20 bp, synthetic construct
  source 1..20: mol_type = other DNA
atttgctgctgagccatggt

SEQ ID NO: 251283 - DNA, 20 bp, synthetic construct
  source 1..20: mol_type = other DNA
aatttgctgctgagccatgg

SEQ ID NO: 251284 - DNA, 20 bp, synthetic construct
  source 1..20: mol_type = other DNA
caatttgctgctgagccatg

SEQ ID NO: 251285 - DNA, 20 bp, synthetic construct
  source 1..20: mol_type = other DNA
gcaatttgctgctgagccat

SEQ ID NO: 251286 - DNA, 20 bp, synthetic construct
  source 1..20: mol_type = other DNA
agcaatttgctgctgagcca

SEQ ID NO: 251287 - DNA, 20 bp, synthetic construct
  source 1..20: mol_type = other DNA
aagcaatttgctgctgagcc

SEQ ID NO: 251288 - DNA, 20 bp, synthetic construct
  source 1..20: mol_type = other DNA
gaagcaatttgctgctgagc

SEQ ID NO: 251289 - DNA, 20 bp, synthetic construct
  source 1..20: mol_type = other DNA
agaagcaatttgctgctgag

SEQ ID NO: 251290 - DNA, 20 bp, synthetic construct
  source 1..20: mol_type = other DNA
gagaagcaatttgctgctga

SEQ ID NO: 251291 - DNA, 20 bp, synthetic construct
  source 1..20: mol_type = other DNA
agagaagcaatttgctgctg

SEQ ID NO: 251292 - DNA, 20 bp, synthetic construct
  source 1..20: mol_type = other DNA
cagagaagcaatttgctgct

SEQ ID NO: 251293 - DNA, 20 bp, synthetic construct
  source 1..20: mol_type = other DNA
tcagagaagcaatttgctgc

SEQ ID NO: 251294 - DNA, 20 bp, synthetic construct
  source 1..20: mol_type = other DNA
gtcagagaagcaatttgctg

SEQ ID NO: 251295 - DNA, 20 bp, synthetic construct
  source 1..20: mol_type = other DNA
ggtcagagaagcaatttgct

SEQ ID NO: 251296 - DNA, 20 bp, synthetic construct
  source 1..20: mol_type = other DNA
aggtcagagaagcaatttgc

SEQ ID NO: 251297 - DNA, 20 bp, synthetic construct
  source 1..20: mol_type = other DNA
gaggtcagagaagcaatttg

SEQ ID NO: 251298 - DNA, 20 bp, synthetic construct
  source 1..20: mol_type = other DNA
tgaggtcagagaagcaattt

SEQ ID NO: 251299 - DNA, 20 bp, synthetic construct
  source 1..20: mol_type = other DNA
gtgaggtcagagaagcaatt

SEQ ID NO: 251300 - DNA, 20 bp, synthetic construct
  source 1..20: mol_type = other DNA
agtgaggtcagagaagcaat

SEQ ID NO: 251301 - DNA, 20 bp, synthetic construct
  source 1..20: mol_type = other DNA
gagtgaggtcagagaagcaa

SEQ ID NO: 251302 - DNA, 20 bp, synthetic construct
  source 1..20: mol_type = other DNA
tgagtgaggtcagagaagca

SEQ ID NO: 251303 - DNA, 20 bp, synthetic construct
  source 1..20: mol_type = other DNA
ctgagtgaggtcagagaagc

SEQ ID NO: 251304 - DNA, 20 bp, synthetic construct
  source 1..20: mol_type = other DNA
gctgagtgaggtcagagaag

SEQ ID NO: 251305 - DNA, 20 bp, synthetic construct
  source 1..20: mol_type = other DNA
ggctgagtgaggtcagagaa

SEQ ID NO: 251306 - DNA, 20 bp, synthetic construct
  source 1..20: mol_type = other DNA
aggctgagtgaggtcagaga

SEQ ID NO: 251307 - DNA, 20 bp, synthetic construct
  source 1..20: mol_type = other DNA
caggctgagtgaggtcagag

SEQ ID NO: 251308 - DNA, 20 bp, synthetic construct
  source 1..20: mol_type = other DNA
acaggctgagtgaggtcaga

SEQ ID NO: 251309 - DNA, 20 bp, synthetic construct
  source 1..20: mol_type = other DNA
cacaggctgagtgaggtcag

SEQ ID NO: 251310 - DNA, 20 bp, synthetic construct
  source 1..20: mol_type = other DNA
acacaggctgagtgaggtca

SEQ ID NO: 251311 - DNA, 20 bp, synthetic construct
  source 1..20: mol_type = other DNA
cacacaggctgagtgaggtc

SEQ ID NO: 251312 - DNA, 20 bp, synthetic construct
  source 1..20: mol_type = other DNA
acacacaggctgagtgaggt

SEQ ID NO: 251313 - DNA, 20 bp, synthetic construct
  source 1..20: mol_type = other DNA
gacacacaggctgagtgagg

SEQ ID NO: 251314 - DNA, 20 bp, synthetic construct
  source 1..20: mol_type = other DNA
ggacacacaggctgagtgag

SEQ ID NO: 251315 - DNA, 20 bp, synthetic construct
  source 1..20: mol_type = other DNA
aggacacacaggctgagtga

SEQ ID NO: 251316 - DNA, 20 bp, synthetic construct
  source 1..20: mol_type = other DNA
aaggacacacaggctgagtg

SEQ ID NO: 251317 - DNA, 20 bp, synthetic construct
  source 1..20: mol_type = other DNA
caaggacacacaggctgagt

SEQ ID NO: 251318 - DNA, 20 bp, synthetic construct
  source 1..20: mol_type = other DNA
acaaggacacacaggctgag

SEQ ID NO: 251319 - DNA, 20 bp, synthetic construct
  source 1..20: mol_type = other DNA
aacaaggacacacaggctga

SEQ ID NO: 251320 - DNA, 20 bp, synthetic construct
  source 1..20: mol_type = other DNA
caacaaggacacacaggctg

SEQ ID NO: 251321 - DNA, 20 bp, synthetic construct
  source 1..20: mol_type = other DNA
tcaacaaggacacacaggct

SEQ ID NO: 251322 - DNA, 20 bp, synthetic construct
  source 1..20: mol_type = other DNA
ctcaacaaggacacacaggc

SEQ ID NO: 251323 - DNA, 20 bp, synthetic construct
  source 1..20: mol_type = other DNA
actcaacaaggacacacagg

SEQ ID NO: 251324 - DNA, 20 bp, synthetic construct
  source 1..20: mol_type = other DNA
cactcaacaaggacacacag

SEQ ID NO: 251325 - DNA, 20 bp, synthetic construct
  source 1..20: mol_type = other DNA
tcactcaacaaggacacaca

SEQ ID NO: 251326 - DNA, 20 bp, synthetic construct
  source 1..20: mol_type = other DNA
ctcactcaacaaggacacac

SEQ ID NO: 251327 - DNA, 20 bp, synthetic construct
  source 1..20: mol_type = other DNA
cctcactcaacaaggacaca

SEQ ID NO: 251328 - DNA, 20 bp, synthetic construct
  source 1..20: mol_type = other DNA
gcctcactcaacaaggacac

SEQ ID NO: 251329 - DNA, 20 bp, synthetic construct
  source 1..20: mol_type = other DNA
tgcctcactcaacaaggaca

SEQ ID NO: 251330 - DNA, 20 bp, synthetic construct
  source 1..20: mol_type = other DNA
atgcctcactcaacaaggac

SEQ ID NO: 251331 - DNA, 20 bp, synthetic construct
  source 1..20: mol_type = other DNA
aatgcctcactcaacaagga

SEQ ID NO: 251332 - DNA, 20 bp, synthetic construct
  source 1..20: mol_type = other DNA
gaatgcctcactcaacaagg

SEQ ID NO: 251333 - DNA, 20 bp, synthetic construct
  source 1..20: mol_type = other DNA
tgaatgcctcactcaacaag

SEQ ID NO: 251334 - DNA, 20 bp, synthetic construct
  source 1..20: mol_type = other DNA
ctgaatgcctcactcaacaa

SEQ ID NO: 251335 - DNA, 20 bp, synthetic construct
  source 1..20: mol_type = other DNA
cctgaatgcctcactcaaca

SEQ ID NO: 251336 - DNA, 20 bp, synthetic construct
  source 1..20: mol_type = other DNA
tcctgaatgcctcactcaac

SEQ ID NO: 251337 - DNA, 20 bp, synthetic construct
  source 1..20: mol_type = other DNA
gtcctgaatgcctcactcaa

SEQ ID NO: 251338 - DNA, 20 bp, synthetic construct
  source 1..20: mol_type = other DNA
ggtcctgaatgcctcactca

SEQ ID NO: 251339 - DNA, 20 bp, synthetic construct
  source 1..20: mol_type = other DNA
gggtcctgaatgcctcactc

SEQ ID NO: 251340 - DNA, 20 bp, synthetic construct
  source 1..20: mol_type = other DNA
agggtcctgaatgcctcact

SEQ ID NO: 251341 - DNA, 20 bp, synthetic construct
  source 1..20: mol_type = other DNA
cagggtcctgaatgcctcac

SEQ ID NO: 251342 - DNA, 20 bp, synthetic construct
  source 1..20: mol_type = other DNA
ccagggtcctgaatgcctca

SEQ ID NO: 251343 - DNA, 20 bp, synthetic construct
  source 1..20: mol_type = other DNA
accagggtcctgaatgcctc

SEQ ID NO: 251344 - DNA, 20 bp, synthetic construct
  source 1..20: mol_type = other DNA
gaccagggtcctgaatgcct

SEQ ID NO: 251345 - DNA, 20 bp, synthetic construct
  source 1..20: mol_type = other DNA
ggaccagggtcctgaatgcc

SEQ ID NO: 251346 - DNA, 20 bp, synthetic construct
  source 1..20: mol_type = other DNA
gggaccagggtcctgaatgc

SEQ ID NO: 251347 - DNA, 20 bp, synthetic construct
  source 1..20: mol_type = other DNA
tgggaccagggtcctgaatg

SEQ ID NO: 251348 - DNA, 20 bp, synthetic construct
  source 1..20: mol_type = other DNA
ttgggaccagggtcctgaat

SEQ ID NO: 251349 - DNA, 20 bp, synthetic construct
  source 1..20: mol_type = other DNA
tttgggaccagggtcctgaa

SEQ ID NO: 251350 - DNA, 20 bp, synthetic construct
  source 1..20: mol_type = other DNA
ctttgggaccagggtcctga

SEQ ID NO: 251351 - DNA, 20 bp, synthetic construct
  source 1..20: mol_type = other DNA
actttgggaccagggtcctg

SEQ ID NO: 251352 - DNA, 20 bp, synthetic construct
  source 1..20: mol_type = other DNA
cactttgggaccagggtcct

SEQ ID NO: 251353 - DNA, 20 bp, synthetic construct
  source 1..20: mol_type = other DNA
ccactttgggaccagggtcc

SEQ ID NO: 251354 - DNA, 20 bp, synthetic construct
  source 1..20: mol_type = other DNA
tccactttgggaccagggtc

SEQ ID NO: 251355 - DNA, 20 bp, synthetic construct
  source 1..20: mol_type = other DNA
ctccactttgggaccagggt

SEQ ID NO: 251356 - DNA, 20 bp, synthetic construct
  source 1..20: mol_type = other DNA
tctccactttgggaccaggg

SEQ ID NO: 251357 - DNA, 20 bp, synthetic construct
  source 1..20: mol_type = other DNA
ttctccactttgggaccagg

SEQ ID NO: 251358 - DNA, 20 bp, synthetic construct
  source 1..20: mol_type = other DNA
tttctccactttgggaccag

SEQ ID NO: 251359 - DNA, 20 bp, synthetic construct
  source 1..20: mol_type = other DNA
ctttctccactttgggacca

SEQ ID NO: 251360 - DNA, 20 bp, synthetic construct
  source 1..20: mol_type = other DNA
actttctccactttgggacc

SEQ ID NO: 251361 - DNA, 20 bp, synthetic construct
  source 1..20: mol_type = other DNA
gactttctccactttgggac

SEQ ID NO: 251362 - DNA, 20 bp, synthetic construct
  source 1..20: mol_type = other DNA
agactttctccactttggga

SEQ ID NO: 251363 - DNA, 20 bp, synthetic construct
  source 1..20: mol_type = other DNA
aagactttctccactttggg

SEQ ID NO: 251364 - DNA, 20 bp, synthetic construct
  source 1..20: mol_type = other DNA
aaagactttctccactttgg

SEQ ID NO: 251365 - DNA, 20 bp, synthetic construct
  source 1..20: mol_type = other DNA
gaaagactttctccactttg

SEQ ID NO: 251366 - DNA, 20 bp, synthetic construct
  source 1..20: mol_type = other DNA
ggaaagactttctccacttt

SEQ ID NO: 251367 - DNA, 20 bp, synthetic construct
  source 1..20: mol_type = other DNA
aggaaagactttctccactt

SEQ ID NO: 251368 - DNA, 20 bp, synthetic construct
  source 1..20: mol_type = other DNA
taggaaagactttctccact

SEQ ID NO: 251369 - DNA, 20 bp, synthetic construct
  source 1..20: mol_type = other DNA
gtaggaaagactttctccac

SEQ ID NO: 251370 - DNA, 20 bp, synthetic construct
  source 1..20: mol_type = other DNA
agtaggaaagactttctcca

SEQ ID NO: 251371 - DNA, 20 bp, synthetic construct
  source 1..20: mol_type = other DNA
tagtaggaaagactttctcc

SEQ ID NO: 251372 - DNA, 20 bp, synthetic construct
  source 1..20: mol_type = other DNA
ctagtaggaaagactttctc

SEQ ID NO: 251373 - DNA, 20 bp, synthetic construct
  source 1..20: mol_type = other DNA
cctagtaggaaagactttct

SEQ ID NO: 251374 - DNA, 20 bp, synthetic construct
  source 1..20: mol_type = other DNA
acctagtaggaaagactttc

SEQ ID NO: 251375 - DNA, 20 bp, synthetic construct
  source 1..20: mol_type = other DNA
gacctagtaggaaagacttt

SEQ ID NO: 251376 - DNA, 20 bp, synthetic construct
  source 1..20: mol_type = other DNA
tgacctagtaggaaagactt

SEQ ID NO: 251377 - DNA, 20 bp, synthetic construct
  source 1..20: mol_type = other DNA
atgacctagtaggaaagact

SEQ ID NO: 251378 - DNA, 20 bp, synthetic construct
  source 1..20: mol_type = other DNA
tatgacctagtaggaaagac

SEQ ID NO: 251379 - DNA, 20 bp, synthetic construct
  source 1..20: mol_type = other DNA
ctatgacctagtaggaaaga

SEQ ID NO: 251380 - DNA, 20 bp, synthetic construct
  source 1..20: mol_type = other DNA
gctatgacctagtaggaaag

SEQ ID NO: 251381 - DNA, 20 bp, synthetic construct
  source 1..20: mol_type = other DNA
agctatgacctagtaggaaa

SEQ ID NO: 251382 - DNA, 20 bp, synthetic construct
  source 1..20: mol_type = other DNA
tagctatgacctagtaggaa

SEQ ID NO: 251383 - DNA, 20 bp, synthetic construct
  source 1..20: mol_type = other DNA
gtagctatgacctagtagga

SEQ ID NO: 251384 - DNA, 20 bp, synthetic construct
  source 1..20: mol_type = other DNA
tgtagctatgacctagtagg

SEQ ID NO: 251385 - DNA, 20 bp, synthetic construct
  source 1..20: mol_type = other DNA
gtgtagctatgacctagtag

SEQ ID NO: 251386 - DNA, 20 bp, synthetic construct
  source 1..20: mol_type = other DNA
ggtgtagctatgacctagta

SEQ ID NO: 251387 - DNA, 20 bp, synthetic construct
  source 1..20: mol_type = other DNA
aggtgtagctatgacctagt

SEQ ID NO: 251388 - DNA, 20 bp, synthetic construct
  source 1..20: mol_type = other DNA
caggtgtagctatgacctag

SEQ ID NO: 251389 - DNA, 20 bp, synthetic construct
  source 1..20: mol_type = other DNA
gcaggtgtagctatgaccta

SEQ ID NO: 251390 - DNA, 20 bp, synthetic construct
  source 1..20: mol_type = other DNA
tgcaggtgtagctatgacct

SEQ ID NO: 251391 - DNA, 20 bp, synthetic construct
  source 1..20: mol_type = other DNA
atgcaggtgtagctatgacc

SEQ ID NO: 251392 - DNA, 20 bp, synthetic construct
  source 1..20: mol_type = other DNA
catgcaggtgtagctatgac

SEQ ID NO: 251393 - DNA, 20 bp, synthetic construct
  source 1..20: mol_type = other DNA
acatgcaggtgtagctatga

SEQ ID NO: 251394 - DNA, 20 bp, synthetic construct
  source 1..20: mol_type = other DNA
cacatgcaggtgtagctatg

SEQ ID NO: 251395 - DNA, 20 bp, synthetic construct
  source 1..20: mol_type = other DNA
ccacatgcaggtgtagctat

SEQ ID NO: 251396 - DNA, 20 bp, synthetic construct
  source 1..20: mol_type = other DNA
cccacatgcaggtgtagcta

SEQ ID NO: 251397 - DNA, 20 bp, synthetic construct
  source 1..20: mol_type = other DNA
acccacatgcaggtgtagct

SEQ ID NO: 251398 - DNA, 20 bp, synthetic construct
  source 1..20: mol_type = other DNA
cacccacatgcaggtgtagc

SEQ ID NO: 251399 - DNA, 20 bp, synthetic construct
  source 1..20: mol_type = other DNA
gcacccacatgcaggtgtag

SEQ ID NO: 251400 - DNA, 20 bp, synthetic construct
  source 1..20: mol_type = other DNA
agcacccacatgcaggtgta

SEQ ID NO: 251401 - DNA, 20 bp, synthetic construct
  source 1..20: mol_type = other DNA
cagcacccacatgcaggtgt

SEQ ID NO: 251402 - DNA, 20 bp, synthetic construct
  source 1..20: mol_type = other DNA
acagcacccacatgcaggtg

SEQ ID NO: 251403 - DNA, 20 bp, synthetic construct
  source 1..20: mol_type = other DNA
cacagcacccacatgcaggt

SEQ ID NO: 251404 - DNA, 20 bp, synthetic construct
  source 1..20: mol_type = other DNA
gcacagcacccacatgcagg

SEQ ID NO: 251405 - DNA, 20 bp, synthetic construct
  source 1..20: mol_type = other DNA
ggcacagcacccacatgcag

SEQ ID NO: 251406 - DNA, 20 bp, synthetic construct
  source 1..20: mol_type = other DNA
aggcacagcacccacatgca

SEQ ID NO: 251407 - DNA, 20 bp, synthetic construct
  source 1..20: mol_type = other DNA
aaggcacagcacccacatgc

SEQ ID NO: 251408 - DNA, 20 bp, synthetic construct
  source 1..20: mol_type = other DNA
aaaggcacagcacccacatg

SEQ ID NO: 251409 - DNA, 20 bp, synthetic construct
  source 1..20: mol_type = other DNA
aaaaggcacagcacccacat

SEQ ID NO: 251410 - DNA, 20 bp, synthetic construct
  source 1..20: mol_type = other DNA
caaaaggcacagcacccaca

SEQ ID NO: 251411 - DNA, 20 bp, synthetic construct
  source 1..20: mol_type = other DNA
acaaaaggcacagcacccac

SEQ ID NO: 251412 - DNA, 20 bp, synthetic construct
  source 1..20: mol_type = other DNA
aacaaaaggcacagcaccca

SEQ ID NO: 251413 - DNA, 20 bp, synthetic construct
  source 1..20: mol_type = other DNA
aaacaaaaggcacagcaccc

SEQ ID NO: 251414 - DNA, 20 bp, synthetic construct
  source 1..20: mol_type = other DNA
taaacaaaaggcacagcacc

SEQ ID NO: 251415 - DNA, 20 bp, synthetic construct
  source 1..20: mol_type = other DNA
ctaaacaaaaggcacagcac

SEQ ID NO: 251416 - DNA, 20 bp, synthetic construct
  source 1..20: mol_type = other DNA
actaaacaaaaggcacagca

SEQ ID NO: 251417 - DNA, 20 bp, synthetic construct
  source 1..20: mol_type = other DNA
cactaaacaaaaggcacagc

SEQ ID NO: 251418 - DNA, 20 bp, synthetic construct
  source 1..20: mol_type = other DNA
tcactaaacaaaaggcacag

SEQ ID NO: 251419 - DNA, 20 bp, synthetic construct
  source 1..20: mol_type = other DNA
ttcactaaacaaaaggcaca

SEQ ID NO: 251420 - DNA, 20 bp, synthetic construct
  source 1..20: mol_type = other DNA
gttcactaaacaaaaggcac

SEQ ID NO: 251421 - DNA, 20 bp, synthetic construct
  source 1..20: mol_type = other DNA
agttcactaaacaaaaggca

SEQ ID NO: 251422 - DNA, 20 bp, synthetic construct
  source 1..20: mol_type = other DNA
aagttcactaaacaaaaggc

SEQ ID NO: 251423 - DNA, 20 bp, synthetic construct
  source 1..20: mol_type = other DNA
aaagttcactaaacaaaagg

SEQ ID NO: 251424 - DNA, 20 bp, synthetic construct
  source 1..20: mol_type = other DNA
aaaagttcactaaacaaaag

SEQ ID NO: 251425 - DNA, 20 bp, synthetic construct
  source 1..20: mol_type = other DNA
taaaagttcactaaacaaaa

SEQ ID NO: 251426 - DNA, 20 bp, synthetic construct
  source 1..20: mol_type = other DNA
ataaaagttcactaaacaaa

SEQ ID NO: 251427 - DNA, 20 bp, synthetic construct
  source 1..20: mol_type = other DNA
gataaaagttcactaaacaa

SEQ ID NO: 251428 - DNA, 20 bp, synthetic construct
  source 1..20: mol_type = other DNA
tgataaaagttcactaaaca

SEQ ID NO: 251429 - DNA, 20 bp, synthetic construct
  source 1..20: mol_type = other DNA
gtgataaaagttcactaaac

SEQ ID NO: 251430 - DNA, 20 bp, synthetic construct
  source 1..20: mol_type = other DNA
ggtgataaaagttcactaaa

SEQ ID NO: 251431 - DNA, 20 bp, synthetic construct
  source 1..20: mol_type = other DNA
tggtgataaaagttcactaa

SEQ ID NO: 251432 - DNA, 20 bp, synthetic construct
  source 1..20: mol_type = other DNA
ctggtgataaaagttcacta

SEQ ID NO: 251433 - DNA, 20 bp, synthetic construct
  source 1..20: mol_type = other DNA
gctggtgataaaagttcact

SEQ ID NO: 251434 - DNA, 20 bp, synthetic construct
  source 1..20: mol_type = other DNA
tgctggtgataaaagttcac

SEQ ID NO: 251435 - DNA, 20 bp, synthetic construct
  source 1..20: mol_type = other DNA
atgctggtgataaaagttca

SEQ ID NO: 251436 - DNA, 20 bp, synthetic construct
  source 1..20: mol_type = other DNA
gatgctggtgataaaagttc

SEQ ID NO: 251437 - DNA, 20 bp, synthetic construct
  source 1..20: mol_type = other DNA
ggatgctggtgataaaagtt

SEQ ID NO: 251438 - DNA, 20 bp, synthetic construct
  source 1..20: mol_type = other DNA
aggatgctggtgataaaagt

SEQ ID NO: 251439 - DNA, 20 bp, synthetic construct
  source 1..20: mol_type = other DNA
gaggatgctggtgataaaag

SEQ ID NO: 251440 - DNA, 20 bp, synthetic construct
  source 1..20: mol_type = other DNA
tgaggatgctggtgataaaa

SEQ ID NO: 251441 - DNA, 20 bp, synthetic construct
  source 1..20: mol_type = other DNA
ctgaggatgctggtgataaa

SEQ ID NO: 251442 - DNA, 20 bp, synthetic construct
  source 1..20: mol_type = other DNA
gctgaggatgctggtgataa

SEQ ID NO: 251443 - DNA, 20 bp, synthetic construct
  source 1..20: mol_type = other DNA
tgctgaggatgctggtgata

SEQ ID NO: 251444 - DNA, 20 bp, synthetic construct
  source 1..20: mol_type = other DNA
ttgctgaggatgctggtgat

SEQ ID NO: 251445 - DNA, 20 bp, synthetic construct
  source 1..20: mol_type = other DNA
attgctgaggatgctggtga

SEQ ID NO: 251446 - DNA, 20 bp, synthetic construct
  source 1..20: mol_type = other DNA
cattgctgaggatgctggtg

SEQ ID NO: 251447 - DNA, 20 bp, synthetic construct
  source 1..20: mol_type = other DNA
tcattgctgaggatgctggt

SEQ ID NO: 251448 - DNA, 20 bp, synthetic construct
  source 1..20: mol_type = other DNA
gtcattgctgaggatgctgg

SEQ ID NO: 251449 - DNA, 20 bp, synthetic construct
  source 1..20: mol_type = other DNA
tgtcattgctgaggatgctg

SEQ ID NO: 251450 - DNA, 20 bp, synthetic construct
  source 1..20: mol_type = other DNA
atgtcattgctgaggatgct

SEQ ID NO: 251451 - DNA, 20 bp, synthetic construct
  source 1..20: mol_type = other DNA
aatgtcattgctgaggatgc

SEQ ID NO: 251452 - DNA, 20 bp, synthetic construct
  source 1..20: mol_type = other DNA
aaatgtcattgctgaggatg

SEQ ID NO: 251453 - DNA, 20 bp, synthetic construct
  source 1..20: mol_type = other DNA
caaatgtcattgctgaggat

SEQ ID NO: 251454 - DNA, 20 bp, synthetic construct
  source 1..20: mol_type = other DNA
gcaaatgtcattgctgagga

SEQ ID NO: 251455 - DNA, 20 bp, synthetic construct
  source 1..20: mol_type = other DNA
tgcaaatgtcattgctgagg

SEQ ID NO: 251456 - DNA, 20 bp, synthetic construct
  source 1..20: mol_type = other DNA
ctgcaaatgtcattgctgag

SEQ ID NO: 251457 - DNA, 20 bp, synthetic construct
  source 1..20: mol_type = other DNA
tctgcaaatgtcattgctga

SEQ ID NO: 251458 - DNA, 20 bp, synthetic construct
  source 1..20: mol_type = other DNA
ctctgcaaatgtcattgctg

SEQ ID NO: 251459 - DNA, 20 bp, synthetic construct
  source 1..20: mol_type = other DNA
tctctgcaaatgtcattgct

SEQ ID NO: 251460 - DNA, 20 bp, synthetic construct
  source 1..20: mol_type = other DNA
ttctctgcaaatgtcattgc

SEQ ID NO: 251461 - DNA, 20 bp, synthetic construct
  source 1..20: mol_type = other DNA
cttctctgcaaatgtcattg

SEQ ID NO: 251462 - DNA, 20 bp, synthetic construct
  source 1..20: mol_type = other DNA
gcttctctgcaaatgtcatt

SEQ ID NO: 251463 - DNA, 20 bp, synthetic construct
  source 1..20: mol_type = other DNA
ggcttctctgcaaatgtcat

SEQ ID NO: 251464 - DNA, 20 bp, synthetic construct
  source 1..20: mol_type = other DNA
tggcttctctgcaaatgtca

SEQ ID NO: 251465 - DNA, 20 bp, synthetic construct
  source 1..20: mol_type = other DNA
ctggcttctctgcaaatgtc

SEQ ID NO: 251466 - DNA, 20 bp, synthetic construct
  source 1..20: mol_type = other DNA
tctggcttctctgcaaatgt

SEQ ID NO: 251467 - DNA, 20 bp, synthetic construct
  source 1..20: mol_type = other DNA
ctctggcttctctgcaaatg

SEQ ID NO: 251468 - DNA, 20 bp, synthetic construct
  source 1..20: mol_type = other DNA
gctctggcttctctgcaaat

SEQ ID NO: 251469 - DNA, 20 bp, synthetic construct
  source 1..20: mol_type = other DNA
agctctggcttctctgcaaa

SEQ ID NO: 251470 - DNA, 20 bp, synthetic construct
  source 1..20: mol_type = other DNA
cagctctggcttctctgcaa

SEQ ID NO: 251471 - DNA, 20 bp, synthetic construct
  source 1..20: mol_type = other DNA
tcagctctggcttctctgca

SEQ ID NO: 251472 - DNA, 20 bp, synthetic construct
  source 1..20: mol_type = other DNA
ctcagctctggcttctctgc

SEQ ID NO: 251473 - DNA, 20 bp, synthetic construct
  source 1..20: mol_type = other DNA
cctcagctctggcttctctg

SEQ ID NO: 251474 - DNA, 20 bp, synthetic construct
  source 1..20: mol_type = other DNA
gcctcagctctggcttctct

SEQ ID NO: 251475 - DNA, 20 bp, synthetic construct
  source 1..20: mol_type = other DNA
tgcctcagctctggcttctc

SEQ ID NO: 251476 - DNA, 20 bp, synthetic construct
  source 1..20: mol_type = other DNA
gtgcctcagctctggcttct

SEQ ID NO: 251477 - DNA, 20 bp, synthetic construct
  source 1..20: mol_type = other DNA
ggtgcctcagctctggcttc

SEQ ID NO: 251478 - DNA, 20 bp, synthetic construct
  source 1..20: mol_type = other DNA
aggtgcctcagctctggctt

SEQ ID NO: 251479 - DNA, 20 bp, synthetic construct
  source 1..20: mol_type = other DNA
aaggtgcctcagctctggct

SEQ ID NO: 251480 - DNA, 20 bp, synthetic construct
  source 1..20: mol_type = other DNA
caaggtgcctcagctctggc

SEQ ID NO: 251481 - DNA, 20 bp, synthetic construct
  source 1..20: mol_type = other DNA
ccaaggtgcctcagctctgg

SEQ ID NO: 251482 - DNA, 20 bp, synthetic construct
  source 1..20: mol_type = other DNA
accaaggtgcctcagctctg

SEQ ID NO: 251483 - DNA, 20 bp, synthetic construct
  source 1..20: mol_type = other DNA
taccaaggtgcctcagctct

SEQ ID NO: 251484 - DNA, 20 bp, synthetic construct
  source 1..20: mol_type = other DNA
ataccaaggtgcctcagctc

SEQ ID NO: 251485 - DNA, 20 bp, synthetic construct
  source 1..20: mol_type = other DNA
aataccaaggtgcctcagct

SEQ ID NO: 251486 - DNA, 20 bp, synthetic construct
  source 1..20: mol_type = other DNA
gaataccaaggtgcctcagc

SEQ ID NO: 251487 - DNA, 20 bp, synthetic construct
  source 1..20: mol_type = other DNA
agaataccaaggtgcctcag

SEQ ID NO: 251488 - DNA, 20 bp, synthetic construct
  source 1..20: mol_type = other DNA
aagaataccaaggtgcctca

SEQ ID NO: 251489 - DNA, 20 bp, synthetic construct
  source 1..20: mol_type = other DNA
caagaataccaaggtgcctc

SEQ ID NO: 251490 - DNA, 20 bp, synthetic construct
  source 1..20: mol_type = other DNA
ccaagaataccaaggtgcct

SEQ ID NO: 251491 - DNA, 20 bp, synthetic construct
  source 1..20: mol_type = other DNA
cccaagaataccaaggtgcc

SEQ ID NO: 251492 - DNA, 20 bp, synthetic construct
  source 1..20: mol_type = other DNA
tcccaagaataccaaggtgc

SEQ ID NO: 251493 - DNA, 20 bp, synthetic construct
  source 1..20: mol_type = other DNA
atcccaagaataccaaggtg

SEQ ID NO: 251494 - DNA, 20 bp, synthetic construct
  source 1..20: mol_type = other DNA
catcccaagaataccaaggt

SEQ ID NO: 251495 - DNA, 20 bp, synthetic construct
  source 1..20: mol_type = other DNA
acatcccaagaataccaagg

SEQ ID NO: 251496 - DNA, 20 bp, synthetic construct
  source 1..20: mol_type = other DNA
cacatcccaagaataccaag

SEQ ID NO: 251497 - DNA, 20 bp, synthetic construct
  source 1..20: mol_type = other DNA
tcacatcccaagaataccaa

SEQ ID NO: 251498 - DNA, 20 bp, synthetic construct
  source 1..20: mol_type = other DNA
gtcacatcccaagaatacca

SEQ ID NO: 251499 - DNA, 20 bp, synthetic construct
  source 1..20: mol_type = other DNA
agtcacatcccaagaatacc

SEQ ID NO: 251500 - DNA, 20 bp, synthetic construct
  source 1..20: mol_type = other DNA
aagtcacatcccaagaatac

SEQ ID NO: 251501 - DNA, 20 bp, synthetic construct
  source 1..20: mol_type = other DNA
aaagtcacatcccaagaata

SEQ ID NO: 251502 - DNA, 20 bp, synthetic construct
  source 1..20: mol_type = other DNA
gaaagtcacatcccaagaat

SEQ ID NO: 251503 - DNA, 20 bp, synthetic construct
  source 1..20: mol_type = other DNA
ggaaagtcacatcccaagaa

SEQ ID NO: 251504 - DNA, 20 bp, synthetic construct
  source 1..20: mol_type = other DNA
aggaaagtcacatcccaaga

SEQ ID NO: 251505 - DNA, 20 bp, synthetic construct
  source 1..20: mol_type = other DNA
caggaaagtcacatcccaag

SEQ ID NO: 251506 - DNA, 20 bp, synthetic construct
  source 1..20: mol_type = other DNA
tcaggaaagtcacatcccaa

SEQ ID NO: 251507 - DNA, 20 bp, synthetic construct
  source 1..20: mol_type = other DNA
ttcaggaaagtcacatccca

SEQ ID NO: 251508 - DNA, 20 bp, synthetic construct
  source 1..20: mol_type = other DNA
attcaggaaagtcacatccc

SEQ ID NO: 251509 - DNA, 20 bp, synthetic construct
  source 1..20: mol_type = other DNA
cattcaggaaagtcacatcc

SEQ ID NO: 251510 - DNA, 20 bp, synthetic construct
  source 1..20: mol_type = other DNA
acattcaggaaagtcacatc

SEQ ID NO: 251511 - DNA, 20 bp, synthetic construct
  source 1..20: mol_type = other DNA
aacattcaggaaagtcacat

SEQ ID NO: 251512 - DNA, 20 bp, synthetic construct
  source 1..20: mol_type = other DNA
aaacattcaggaaagtcaca

SEQ ID NO: 251513 - DNA, 20 bp, synthetic construct
  source 1..20: mol_type = other DNA
taaacattcaggaaagtcac

SEQ ID NO: 251514 - DNA, 20 bp, synthetic construct
  source 1..20: mol_type = other DNA
ttaaacattcaggaaagtca

SEQ ID NO: 251515 - DNA, 20 bp, synthetic construct
  source 1..20: mol_type = other DNA
cttaaacattcaggaaagtc

SEQ ID NO: 251516 - DNA, 20 bp, synthetic construct
  source 1..20: mol_type = other DNA
ccttaaacattcaggaaagt

SEQ ID NO: 251517 - DNA, 20 bp, synthetic construct
  source 1..20: mol_type = other DNA
cccttaaacattcaggaaag

SEQ ID NO: 251518 - DNA, 20 bp, synthetic construct
  source 1..20: mol_type = other DNA
tcccttaaacattcaggaaa

SEQ ID NO: 251519 - DNA, 20 bp, synthetic construct
  source 1..20: mol_type = other DNA
ttcccttaaacattcaggaa

SEQ ID NO: 251520 - DNA, 20 bp, synthetic construct
  source 1..20: mol_type = other DNA
tttcccttaaacattcagga

SEQ ID NO: 251521 - DNA, 20 bp, synthetic construct
  source 1..20: mol_type = other DNA
ttttcccttaaacattcagg

SEQ ID NO: 251522 - DNA, 20 bp, synthetic construct
  source 1..20: mol_type = other DNA
attttcccttaaacattcag

SEQ ID NO: 251523 - DNA, 20 bp, synthetic construct
  source 1..20: mol_type = other DNA
cattttcccttaaacattca

SEQ ID NO: 251524 - DNA, 20 bp, synthetic construct
  source 1..20: mol_type = other DNA
gcattttcccttaaacattc

SEQ ID NO: 251525 - DNA, 20 bp, synthetic construct
  source 1..20: mol_type = other DNA
ggcattttcccttaaacatt

SEQ ID NO: 251526 - DNA, 20 bp, synthetic construct
  source 1..20: mol_type = other DNA
gggcattttcccttaaacat

SEQ ID NO: 251527 - DNA, 20 bp, synthetic construct
  source 1..20: mol_type = other DNA
cgggcattttcccttaaaca

SEQ ID NO: 251528 - DNA, 20 bp, synthetic construct
  source 1..20: mol_type = other DNA
tcgggcattttcccttaaac

SEQ ID NO: 251529 - DNA, 20 bp, synthetic construct
  source 1..20: mol_type = other DNA
ttcgggcattttcccttaaa

SEQ ID NO: 251530 - DNA, 20 bp, synthetic construct
  source 1..20: mol_type = other DNA
cttcgggcattttcccttaa

SEQ ID NO: 251531 - DNA, 20 bp, synthetic construct
  source 1..20: mol_type = other DNA
ccttcgggcattttccctta

SEQ ID NO: 251532 - DNA, 20 bp, synthetic construct
  source 1..20: mol_type = other DNA
accttcgggcattttccctt

SEQ ID NO: 251533 - DNA, 20 bp, synthetic construct
  source 1..20: mol_type = other DNA
taccttcgggcattttccct

SEQ ID NO: 251534 - DNA, 20 bp, synthetic construct
  source 1..20: mol_type = other DNA
gtaccttcgggcattttccc

SEQ ID NO: 251535 - DNA, 20 bp, synthetic construct
  source 1..20: mol_type = other DNA
tgtaccttcgggcattttcc

SEQ ID NO: 251536 - DNA, 20 bp, synthetic construct
  source 1..20: mol_type = other DNA
ctgtaccttcgggcattttc

SEQ ID NO: 251537 - DNA, 20 bp, synthetic construct
  source 1..20: mol_type = other DNA
tctgtaccttcgggcatttt

SEQ ID NO: 251538 - DNA, 20 bp, synthetic construct
  source 1..20: mol_type = other DNA
ctctgtaccttcgggcattt

SEQ ID NO: 251539 - DNA, 20 bp, synthetic construct
  source 1..20: mol_type = other DNA
tctctgtaccttcgggcatt

SEQ ID NO: 251540 - DNA, 20 bp, synthetic construct
  source 1..20: mol_type = other DNA
ctctctgtaccttcgggcat

SEQ ID NO: 251541 - DNA, 20 bp, synthetic construct
  source 1..20: mol_type = other DNA
gctctctgtaccttcgggca

SEQ ID NO: 251542 - DNA, 20 bp, synthetic construct
  source 1..20: mol_type = other DNA
agctctctgtaccttcgggc

SEQ ID NO: 251543 - DNA, 20 bp, synthetic construct
  source 1..20: mol_type = other DNA
aagctctctgtaccttcggg

SEQ ID NO: 251544 - DNA, 20 bp, synthetic construct
  source 1..20: mol_type = other DNA
caagctctctgtaccttcgg

SEQ ID NO: 251545 - DNA, 20 bp, synthetic construct
  source 1..20: mol_type = other DNA
ccaagctctctgtaccttcg

SEQ ID NO: 251546 - DNA, 20 bp, synthetic construct
  source 1..20: mol_type = other DNA
accaagctctctgtaccttc

SEQ ID NO: 251547 - DNA, 20 bp, synthetic construct
  source 1..20: mol_type = other DNA
aaccaagctctctgtacctt

SEQ ID NO: 251548 - DNA, 20 bp, synthetic construct
  source 1..20: mol_type = other DNA
aaaccaagctctctgtacct

SEQ ID NO: 251549 - DNA, 20 bp, synthetic construct
  source 1..20: mol_type = other DNA
gaaaccaagctctctgtacc

SEQ ID NO: 251550 - DNA, 20 bp, synthetic construct
  source 1..20: mol_type = other DNA
agaaaccaagctctctgtac

SEQ ID NO: 251551 - DNA, 20 bp, synthetic construct
  source 1..20: mol_type = other DNA
tagaaaccaagctctctgta

SEQ ID NO: 251552 - DNA, 20 bp, synthetic construct
  source 1..20: mol_type = other DNA
ctagaaaccaagctctctgt

SEQ ID NO: 251553 - DNA, 20 bp, synthetic construct
  source 1..20: mol_type = other DNA
actagaaaccaagctctctg

SEQ ID NO: 251554 - DNA, 20 bp, synthetic construct
  source 1..20: mol_type = other DNA
tactagaaaccaagctctct

SEQ ID NO: 251555 - DNA, 20 bp, synthetic construct
  source 1..20: mol_type = other DNA
ttactagaaaccaagctctc

SEQ ID NO: 251556 - DNA, 20 bp, synthetic construct
  source 1..20: mol_type = other DNA
tttactagaaaccaagctct

SEQ ID NO: 251557 - DNA, 20 bp, synthetic construct
  source 1..20: mol_type = other DNA
gtttactagaaaccaagctc

SEQ ID NO: 251558 - DNA, 20 bp, synthetic construct
  source 1..20: mol_type = other DNA
tgtttactagaaaccaagct

SEQ ID NO: 251559 - DNA, 20 bp, synthetic construct
  source 1..20: mol_type = other DNA
ttgtttactagaaaccaagc

SEQ ID NO: 251560 - DNA, 20 bp, synthetic construct
  source 1..20: mol_type = other DNA
attgtttactagaaaccaag

SEQ ID NO: 251561 - DNA, 20 bp, synthetic construct
  source 1..20: mol_type = other DNA
tattgtttactagaaaccaa

SEQ ID NO: 251562 - DNA, 20 bp, synthetic construct
  source 1..20: mol_type = other DNA
ttattgtttactagaaacca

SEQ ID NO: 251563 - DNA, 20 bp, synthetic construct
  source 1..20: mol_type = other DNA
gttattgtttactagaaacc

SEQ ID NO: 251564 - DNA, 20 bp, synthetic construct
  source 1..20: mol_type = other DNA
agttattgtttactagaaac

SEQ ID NO: 251565 - DNA, 20 bp, synthetic construct
  source 1..20: mol_type = other DNA
cagttattgtttactagaaa

SEQ ID NO: 251566 - DNA, 20 bp, synthetic construct
  source 1..20: mol_type = other DNA
acagttattgtttactagaa

SEQ ID NO: 251567 - DNA, 20 bp, synthetic construct
  source 1..20: mol_type = other DNA
gacagttattgtttactaga

SEQ ID NO: 251568 - DNA, 20 bp, synthetic construct
  source 1..20: mol_type = other DNA
agacagttattgtttactag

SEQ ID NO: 251569 - DNA, 20 bp, synthetic construct
  source 1..20: mol_type = other DNA
aagacagttattgtttacta

SEQ ID NO: 251570 - DNA, 20 bp, synthetic construct
  source 1..20: mol_type = other DNA
caagacagttattgtttact

SEQ ID NO: 251571 - DNA, 20 bp, synthetic construct
  source 1..20: mol_type = other DNA
gcaagacagttattgtttac

SEQ ID NO: 251572 - DNA, 20 bp, synthetic construct
  source 1..20: mol_type = other DNA
agcaagacagttattgttta

SEQ ID NO: 251573 - DNA, 20 bp, synthetic construct
  source 1..20: mol_type = other DNA
aagcaagacagttattgttt

SEQ ID NO: 251574 - DNA, 20 bp, synthetic construct
  source 1..20: mol_type = other DNA
aaagcaagacagttattgtt

SEQ ID NO: 251575 - DNA, 20 bp, synthetic construct
  source 1..20: mol_type = other DNA
aaaagcaagacagttattgt

SEQ ID NO: 251576 - DNA, 20 bp, synthetic construct
  source 1..20: mol_type = other DNA
taaaagcaagacagttattg

SEQ ID NO: 251577 - DNA, 20 bp, synthetic construct
  source 1..20: mol_type = other DNA
gtaaaagcaagacagttatt

SEQ ID NO: 251578 - DNA, 20 bp, synthetic construct
  source 1..20: mol_type = other DNA
ggtaaaagcaagacagttat

SEQ ID NO: 251579 - DNA, 20 bp, synthetic construct
  source 1..20: mol_type = other DNA
gggtaaaagcaagacagtta

SEQ ID NO: 251580 - DNA, 20 bp, synthetic construct
  source 1..20: mol_type = other DNA
ggggtaaaagcaagacagtt

SEQ ID NO: 251581 - DNA, 20 bp, synthetic construct
  source 1..20: mol_type = other DNA
gggggtaaaagcaagacagt

SEQ ID NO: 251582 - DNA, 20 bp, synthetic construct
  source 1..20: mol_type = other DNA
ggggggtaaaagcaagacag

SEQ ID NO: 251583 - DNA, 20 bp, synthetic construct
  source 1..20: mol_type = other DNA
aggggggtaaaagcaagaca

SEQ ID NO: 251584 - DNA, 20 bp, synthetic construct
  source 1..20: mol_type = other DNA
aaggggggtaaaagcaagac

SEQ ID NO: 251585 - DNA, 20 bp, synthetic construct
  source 1..20: mol_type = other DNA
gaaggggggtaaaagcaaga

SEQ ID NO: 251586 - DNA, 20 bp, synthetic construct
  source 1..20: mol_type = other DNA
tgaaggggggtaaaagcaag

SEQ ID NO: 251587 - DNA, 20 bp, synthetic construct
  source 1..20: mol_type = other DNA
atgaaggggggtaaaagcaa

SEQ ID NO: 251588 - DNA, 20 bp, synthetic construct
  source 1..20: mol_type = other DNA
aatgaaggggggtaaaagca

SEQ ID NO: 251589 - DNA, 20 bp, synthetic construct
  source 1..20: mol_type = other DNA
aaatgaaggggggtaaaagc

SEQ ID NO: 251590 - DNA, 20 bp, synthetic construct
  source 1..20: mol_type = other DNA
caaatgaaggggggtaaaag

SEQ ID NO: 251591 - DNA, 20 bp, synthetic construct
  source 1..20: mol_type = other DNA
gcaaatgaaggggggtaaaa

SEQ ID NO: 251592 - DNA, 20 bp, synthetic construct
  source 1..20: mol_type = other DNA
agcaaatgaaggggggtaaa

SEQ ID NO: 251593 - DNA, 20 bp, synthetic construct
  source 1..20: mol_type = other DNA
cagcaaatgaaggggggtaa

SEQ ID NO: 251594 - DNA, 20 bp, synthetic construct
  source 1..20: mol_type = other DNA
tcagcaaatgaaggggggta

SEQ ID NO: 251595 - DNA, 20 bp, synthetic construct
  source 1..20: mol_type = other DNA
gtcagcaaatgaaggggggt

SEQ ID NO: 251596 - DNA, 20 bp, synthetic construct
  source 1..20: mol_type = other DNA
tgtcagcaaatgaagggggg

SEQ ID NO: 251597 - DNA, 20 bp, synthetic construct
  source 1..20: mol_type = other DNA
gtgtcagcaaatgaaggggg

SEQ ID NO: 251598 - DNA, 20 bp, synthetic construct
  source 1..20: mol_type = other DNA
tgtgtcagcaaatgaagggg

SEQ ID NO: 251599 - DNA, 20 bp, synthetic construct
  source 1..20: mol_type = other DNA
atgtgtcagcaaatgaaggg

SEQ ID NO: 251600 - DNA, 20 bp, synthetic construct
  source 1..20: mol_type = other DNA
tatgtgtcagcaaatgaagg

SEQ ID NO: 251601 - DNA, 20 bp, synthetic construct
  source 1..20: mol_type = other DNA
gtatgtgtcagcaaatgaag

SEQ ID NO: 251602 - DNA, 20 bp, synthetic construct
  source 1..20: mol_type = other DNA
tgtatgtgtcagcaaatgaa

SEQ ID NO: 251603 - DNA, 20 bp, synthetic construct
  source 1..20: mol_type = other DNA
gtgtatgtgtcagcaaatga

SEQ ID NO: 251604 - DNA, 20 bp, synthetic construct
  source 1..20: mol_type = other DNA
ggtgtatgtgtcagcaaatg

SEQ ID NO: 251605 - DNA, 20 bp, synthetic construct
  source 1..20: mol_type = other DNA
tggtgtatgtgtcagcaaat

SEQ ID NO: 251606 - DNA, 20 bp, synthetic construct
  source 1..20: mol_type = other DNA
ctggtgtatgtgtcagcaaa

SEQ ID NO: 251607 - DNA, 20 bp, synthetic construct
  source 1..20: mol_type = other DNA
gctggtgtatgtgtcagcaa

SEQ ID NO: 251608 - DNA, 20 bp, synthetic construct
  source 1..20: mol_type = other DNA
agctggtgtatgtgtcagca

SEQ ID NO: 251609 - DNA, 20 bp, synthetic construct
  source 1..20: mol_type = other DNA
cagctggtgtatgtgtcagc

SEQ ID NO: 251610 - DNA, 20 bp, synthetic construct
  source 1..20: mol_type = other DNA
tcagctggtgtatgtgtcag

SEQ ID NO: 251611 - DNA, 20 bp, synthetic construct
  source 1..20: mol_type = other DNA
ttcagctggtgtatgtgtca

SEQ ID NO: 251612 - DNA, 20 bp, synthetic construct
  source 1..20: mol_type = other DNA
cttcagctggtgtatgtgtc

SEQ ID NO: 251613 - DNA, 20 bp, synthetic construct
  source 1..20: mol_type = other DNA
tcttcagctggtgtatgtgt

SEQ ID NO: 251614 - DNA, 20 bp, synthetic construct
  source 1..20: mol_type = other DNA
ttcttcagctggtgtatgtg

SEQ ID NO: 251615 - DNA, 20 bp, synthetic construct
  source 1..20: mol_type = other DNA
cttcttcagctggtgtatgt

SEQ ID NO: 251616 - DNA, 20 bp, synthetic construct
  source 1..20: mol_type = other DNA
gcttcttcagctggtgtatg

SEQ ID NO: 251617 - DNA, 20 bp, synthetic construct
  source 1..20: mol_type = other DNA
tgcttcttcagctggtgtat

SEQ ID NO: 251618 - DNA, 20 bp, synthetic construct
  source 1..20: mol_type = other DNA
ctgcttcttcagctggtgta

SEQ ID NO: 251619 - DNA, 20 bp, synthetic construct
  source 1..20: mol_type = other DNA
cctgcttcttcagctggtgt

SEQ ID NO: 251620 - DNA, 20 bp, synthetic construct
  source 1..20: mol_type = other DNA
gcctgcttcttcagctggtg

SEQ ID NO: 251621 - DNA, 20 bp, synthetic construct
  source 1..20: mol_type = other DNA
tgcctgcttcttcagctggt

SEQ ID NO: 251622 - DNA, 20 bp, synthetic construct
  source 1..20: mol_type = other DNA
atgcctgcttcttcagctgg

SEQ ID NO: 251623 - DNA, 20 bp, synthetic construct
  source 1..20: mol_type = other DNA
aatgcctgcttcttcagctg

SEQ ID NO: 251624 - DNA, 20 bp, synthetic construct
  source 1..20: mol_type = other DNA
caatgcctgcttcttcagct

SEQ ID NO: 251625 - DNA, 20 bp, synthetic construct
  source 1..20: mol_type = other DNA
ccaatgcctgcttcttcagc

SEQ ID NO: 251626 - DNA, 20 bp, synthetic construct
  source 1..20: mol_type = other DNA
tccaatgcctgcttcttcag

SEQ ID NO: 251627 - DNA, 20 bp, synthetic construct
  source 1..20: mol_type = other DNA
ctccaatgcctgcttcttca

SEQ ID NO: 251628 - DNA, 20 bp, synthetic construct
  source 1..20: mol_type = other DNA
tctccaatgcctgcttcttc

SEQ ID NO: 251629 - DNA, 20 bp, synthetic construct
  source 1..20: mol_type = other DNA
gtctccaatgcctgcttctt

SEQ ID NO: 251630 - DNA, 20 bp, synthetic construct
  source 1..20: mol_type = other DNA
tgtctccaatgcctgcttct

SEQ ID NO: 251631 - DNA, 20 bp, synthetic construct
  source 1..20: mol_type = other DNA
gtgtctccaatgcctgcttc

SEQ ID NO: 251632 - DNA, 20 bp, synthetic construct
  source 1..20: mol_type = other DNA
ggtgtctccaatgcctgctt

SEQ ID NO: 251633 - DNA, 20 bp, synthetic construct
  source 1..20: mol_type = other DNA
gggtgtctccaatgcctgct

SEQ ID NO: 251634 - DNA, 20 bp, synthetic construct
  source 1..20: mol_type = other DNA
ggggtgtctccaatgcctgc

SEQ ID NO: 251635 - DNA, 20 bp, synthetic construct
  source 1..20: mol_type = other DNA
gggggtgtctccaatgcctg

SEQ ID NO: 251636 - DNA, 20 bp, synthetic construct
  source 1..20: mol_type = other DNA
tgggggtgtctccaatgcct

SEQ ID NO: 251637 - DNA, 20 bp, synthetic construct
  source 1..20: mol_type = other DNA
ctgggggtgtctccaatgcc

SEQ ID NO: 251638 - DNA, 20 bp, synthetic construct
  source 1..20: mol_type = other DNA
gctgggggtgtctccaatgc

SEQ ID NO: 251639 - DNA, 20 bp, synthetic construct
  source 1..20: mol_type = other DNA
ggctgggggtgtctccaatg

SEQ ID NO: 251640 - DNA, 20 bp, synthetic construct
  source 1..20: mol_type = other DNA
aggctgggggtgtctccaat

SEQ ID NO: 251641 - DNA, 20 bp, synthetic construct
  source 1..20: mol_type = other DNA
caggctgggggtgtctccaa

SEQ ID NO: 251642 - DNA, 20 bp, synthetic construct
  source 1..20: mol_type = other DNA
ccaggctgggggtgtctcca

SEQ ID NO: 251643 - DNA, 20 bp, synthetic construct
  source 1..20: mol_type = other DNA
tccaggctgggggtgtctcc

SEQ ID NO: 251644 - DNA, 20 bp, synthetic construct
  source 1..20: mol_type = other DNA
ttccaggctgggggtgtctc

SEQ ID NO: 251645 - DNA, 20 bp, synthetic construct
  source 1..20: mol_type = other DNA
cttccaggctgggggtgtct

SEQ ID NO: 251646 - DNA, 20 bp, synthetic construct
  source 1..20: mol_type = other DNA
tcttccaggctgggggtgtc

SEQ ID NO: 251647 - DNA, 20 bp, synthetic construct
  source 1..20: mol_type = other DNA
gtcttccaggctgggggtgt

SEQ ID NO: 251648 - DNA, 20 bp, synthetic construct
  source 1..20: mol_type = other DNA
cgtcttccaggctgggggtg

SEQ ID NO: 251649 - DNA, 20 bp, synthetic construct
  source 1..20: mol_type = other DNA
tcgtcttccaggctgggggt

SEQ ID NO: 251650 - DNA, 20 bp, synthetic construct
  source 1..20: mol_type = other DNA
ttcgtcttccaggctggggg

SEQ ID NO: 251651 - DNA, 20 bp, synthetic construct
  source 1..20: mol_type = other DNA
cttcgtcttccaggctgggg

SEQ ID NO: 251652 - DNA, 20 bp, synthetic construct
  source 1..20: mol_type = other DNA
gcttcgtcttccaggctggg

SEQ ID NO: 251653 - DNA, 20 bp, synthetic construct
  source 1..20: mol_type = other DNA
agcttcgtcttccaggctgg

SEQ ID NO: 251654 - DNA, 20 bp, synthetic construct
  source 1..20: mol_type = other DNA
cagcttcgtcttccaggctg

SEQ ID NO: 251655 - DNA, 20 bp, synthetic construct
  source 1..20: mol_type = other DNA
gcagcttcgtcttccaggct

SEQ ID NO: 251656 - DNA, 20 bp, synthetic construct
  source 1..20: mol_type = other DNA
agcagcttcgtcttccaggc

SEQ ID NO: 251657 - DNA, 20 bp, synthetic construct
  source 1..20: mol_type = other DNA
cagcagcttcgtcttccagg

SEQ ID NO: 251658 - DNA, 20 bp, synthetic construct
  source 1..20: mol_type = other DNA
ccagcagcttcgtcttccag

SEQ ID NO: 251659 - DNA, 20 bp, synthetic construct
  source 1..20: mol_type = other DNA
accagcagcttcgtcttcca

SEQ ID NO: 251660 - DNA, 20 bp, synthetic construct
  source 1..20: mol_type = other DNA
gaccagcagcttcgtcttcc

SEQ ID NO: 251661 - DNA, 20 bp, synthetic construct
  source 1..20: mol_type = other DNA
tgaccagcagcttcgtcttc

SEQ ID NO: 251662 - DNA, 20 bp, synthetic construct
  source 1..20: mol_type = other DNA
gtgaccagcagcttcgtctt

SEQ ID NO: 251663 - DNA, 20 bp, synthetic construct
  source 1..20: mol_type = other DNA
cgtgaccagcagcttcgtct

SEQ ID NO: 251664 - DNA, 20 bp, synthetic construct
  source 1..20: mol_type = other DNA
acgtgaccagcagcttcgtc

SEQ ID NO: 251665 - DNA, 20 bp, synthetic construct
  source 1..20: mol_type = other DNA
cacgtgaccagcagcttcgt

SEQ ID NO: 251666 - DNA, 20 bp, synthetic construct
  source 1..20: mol_type = other DNA
tcacgtgaccagcagcttcg

SEQ ID NO: 251667 - DNA, 20 bp, synthetic construct
  source 1..20: mol_type = other DNA
gtcacgtgaccagcagcttc

SEQ ID NO: 251668 - DNA, 20 bp, synthetic construct
  source 1..20: mol_type = other DNA
ggtcacgtgaccagcagctt

SEQ ID NO: 251669 - DNA, 20 bp, synthetic construct
  source 1..20: mol_type = other DNA
gggtcacgtgaccagcagct

SEQ ID NO: 251670 - DNA, 20 bp, synthetic construct
  source 1..20: mol_type = other DNA
tgggtcacgtgaccagcagc

SEQ ID NO: 251671 - DNA, 20 bp, synthetic construct
  source 1..20: mol_type = other DNA
ttgggtcacgtgaccagcag

SEQ ID NO: 251672 - DNA, 20 bp, synthetic construct
  source 1..20: mol_type = other DNA
cttgggtcacgtgaccagca

SEQ ID NO: 251673 - DNA, 20 bp, synthetic construct
  source 1..20: mol_type = other DNA
ccttgggtcacgtgaccagc

SEQ ID NO: 251674 - DNA, 20 bp, synthetic construct
  source 1..20: mol_type = other DNA
accttgggtcacgtgaccag

SEQ ID NO: 251675 - DNA, 20 bp, synthetic construct
  source 1..20: mol_type = other DNA
gaccttgggtcacgtgacca

SEQ ID NO: 251676 - DNA, 20 bp, synthetic construct
  source 1..20: mol_type = other DNA
tgaccttgggtcacgtgacc

SEQ ID NO: 251677 - DNA, 20 bp, synthetic construct
  source 1..20: mol_type = other DNA
ctgaccttgggtcacgtgac

SEQ ID NO: 251678 - DNA, 20 bp, synthetic construct
  source 1..20: mol_type = other DNA
actgaccttgggtcacgtga

SEQ ID NO: 251679 - DNA, 20 bp, synthetic construct
  source 1..20: mol_type = other DNA
cactgaccttgggtcacgtg

SEQ ID NO: 251680 - DNA, 20 bp, synthetic construct
  source 1..20: mol_type = other DNA
tcactgaccttgggtcacgt

SEQ ID NO: 251681 - DNA, 20 bp, synthetic construct
  source 1..20: mol_type = other DNA
ttcactgaccttgggtcacg

SEQ ID NO: 251682 - DNA, 20 bp, synthetic construct
  source 1..20: mol_type = other DNA
gttcactgaccttgggtcac

SEQ ID NO: 251683 - DNA, 20 bp, synthetic construct
  source 1..20: mol_type = other DNA
agttcactgaccttgggtca

SEQ ID NO: 251684 - DNA, 20 bp, synthetic construct
  source 1..20: mol_type = other DNA
cagttcactgaccttgggtc

SEQ ID NO: 251685 - DNA, 20 bp, synthetic construct
  source 1..20: mol_type = other DNA
ccagttcactgaccttgggt

SEQ ID NO: 251686 - DNA, 20 bp, synthetic construct
  source 1..20: mol_type = other DNA
tccagttcactgaccttggg

SEQ ID NO: 251687 - DNA, 20 bp, synthetic construct
  source 1..20: mol_type = other DNA
ttccagttcactgaccttgg

SEQ ID NO: 251688 - DNA, 20 bp, synthetic construct
  source 1..20: mol_type = other DNA
attccagttcactgaccttg

SEQ ID NO: 251689 - DNA, 20 bp, synthetic construct
  source 1..20: mol_type = other DNA
aattccagttcactgacctt

SEQ ID NO: 251690 - DNA, 20 bp, synthetic construct
  source 1..20: mol_type = other DNA
caattccagttcactgacct

SEQ ID NO: 251691 - DNA, 20 bp, synthetic construct
  source 1..20: mol_type = other DNA
gcaattccagttcactgacc

SEQ ID NO: 251692 - DNA, 20 bp, synthetic construct
  source 1..20: mol_type = other DNA
ggcaattccagttcactgac

SEQ ID NO: 251693 - DNA, 20 bp, synthetic construct
  source 1..20: mol_type = other DNA
aggcaattccagttcactga

SEQ ID NO: 251694 - DNA, 20 bp, synthetic construct
  source 1..20: mol_type = other DNA
caggcaattccagttcactg

SEQ ID NO: 251695 - DNA, 20 bp, synthetic construct
  source 1..20: mol_type = other DNA
gcaggcaattccagttcact

SEQ ID NO: 251696 - DNA, 20 bp, synthetic construct
  source 1..20: mol_type = other DNA
ggcaggcaattccagttcac

SEQ ID NO: 251697 - DNA, 20 bp, synthetic construct
  source 1..20: mol_type = other DNA
tggcaggcaattccagttca

SEQ ID NO: 251698 - DNA, 20 bp, synthetic construct
  source 1..20: mol_type = other DNA
atggcaggcaattccagttc

SEQ ID NO: 251699 - DNA, 20 bp, synthetic construct
  source 1..20: mol_type = other DNA
catggcaggcaattccagtt

SEQ ID NO: 251700 - DNA, 20 bp, synthetic construct
  source 1..20: mol_type = other DNA
tcatggcaggcaattccagt

SEQ ID NO: 251701 - DNA, 20 bp, synthetic construct
  source 1..20: mol_type = other DNA
gtcatggcaggcaattccag

SEQ ID NO: 251702 - DNA, 20 bp, synthetic construct
  source 1..20: mol_type = other DNA
agtcatggcaggcaattcca

SEQ ID NO: 251703 - DNA, 20 bp, synthetic construct
  source 1..20: mol_type = other DNA
aagtcatggcaggcaattcc

SEQ ID NO: 251704 - DNA, 20 bp, synthetic construct
  source 1..20: mol_type = other DNA
caagtcatggcaggcaattc

SEQ ID NO: 251705 - DNA, 20 bp, synthetic construct
  source 1..20: mol_type = other DNA
ccaagtcatggcaggcaatt

SEQ ID NO: 251706 - DNA, 20 bp, synthetic construct
  source 1..20: mol_type = other DNA
cccaagtcatggcaggcaat

SEQ ID NO: 251707 - DNA, 20 bp, synthetic construct
  source 1..20: mol_type = other DNA
ccccaagtcatggcaggcaa

SEQ ID NO: 251708 - DNA, 20 bp, synthetic construct
  source 1..20: mol_type = other DNA
cccccaagtcatggcaggca

SEQ ID NO: 251709 - DNA, 20 bp, synthetic construct
  source 1..20: mol_type = other DNA
acccccaagtcatggcaggc

SEQ ID NO: 251710 - DNA, 20 bp, synthetic construct
  source 1..20: mol_type = other DNA
aacccccaagtcatggcagg

SEQ ID NO: 251711 - DNA, 20 bp, synthetic construct
  source 1..20: mol_type = other DNA
caacccccaagtcatggcag

SEQ ID NO: 251712 - DNA, 20 bp, synthetic construct
  source 1..20: mol_type = other DNA
ccaacccccaagtcatggca

SEQ ID NO: 251713 - DNA, 20 bp, synthetic construct
  source 1..20: mol_type = other DNA
cccaacccccaagtcatggc

SEQ ID NO: 251714 - DNA, 20 bp, synthetic construct
  source 1..20: mol_type = other DNA
ccccaacccccaagtcatgg

SEQ ID NO: 251715 - DNA, 20 bp, synthetic construct
  source 1..20: mol_type = other DNA
cccccaacccccaagtcatg

SEQ ID NO: 251716 - DNA, 20 bp, synthetic construct
  source 1..20: mol_type = other DNA
ccccccaacccccaagtcat

SEQ ID NO: 251717 - DNA, 20 bp, synthetic construct
  source 1..20: mol_type = other DNA
tccccccaacccccaagtca

SEQ ID NO: 251718 - DNA, 20 bp, synthetic construct
  source 1..20: mol_type = other DNA
ctccccccaacccccaagtc

SEQ ID NO: 251719 - DNA, 20 bp, synthetic construct
  source 1..20: mol_type = other DNA
cctccccccaacccccaagt

SEQ ID NO: 251720 - DNA, 20 bp, synthetic construct
  source 1..20: mol_type = other DNA
ccctccccccaacccccaag

SEQ ID NO: 251721 - DNA, 20 bp, synthetic construct
  source 1..20: mol_type = other DNA
tccctccccccaacccccaa

SEQ ID NO: 251722 - DNA, 20 bp, synthetic construct
  source 1..20: mol_type = other DNA
gtccctccccccaaccccca

SEQ ID NO: 251723 - DNA, 20 bp, synthetic construct
  source 1..20: mol_type = other DNA
tgtccctccccccaaccccc

SEQ ID NO: 251724 - DNA, 20 bp, synthetic construct
  source 1..20: mol_type = other DNA
atgtccctccccccaacccc

SEQ ID NO: 251725 - DNA, 20 bp, synthetic construct
  source 1..20: mol_type = other DNA
catgtccctccccccaaccc

SEQ ID NO: 251726 - DNA, 20 bp, synthetic construct
  source 1..20: mol_type = other DNA
ccatgtccctccccccaacc

SEQ ID NO: 251727 - DNA, 20 bp, synthetic construct
  source 1..20: mol_type = other DNA
cccatgtccctccccccaac

SEQ ID NO: 251728 - DNA, 20 bp, synthetic construct
  source 1..20: mol_type = other DNA
ccccatgtccctccccccaa

SEQ ID NO: 251729 - DNA, 20 bp, synthetic construct
  source 1..20: mol_type = other DNA
accccatgtccctcccccca

SEQ ID NO: 251730 - DNA, 20 bp, synthetic construct
  source 1..20: mol_type = other DNA
caccccatgtccctcccccc

SEQ ID NO: 251731 - DNA, 20 bp, synthetic construct
  source 1..20: mol_type = other DNA
ccaccccatgtccctccccc

SEQ ID NO: 251732 - DNA, 20 bp, synthetic construct
  source 1..20: mol_type = other DNA
cccaccccatgtccctcccc

SEQ ID NO: 251733 - DNA, 20 bp, synthetic construct
  source 1..20: mol_type = other DNA
gcccaccccatgtccctccc

SEQ ID NO: 251734 - DNA, 20 bp, synthetic construct
  source 1..20: mol_type = other DNA
agcccaccccatgtccctcc

SEQ ID NO: 251735 - DNA, 20 bp, synthetic construct
  source 1..20: mol_type = other DNA
gagcccaccccatgtccctc

SEQ ID NO: 251736 - DNA, 20 bp, synthetic construct
  source 1..20: mol_type = other DNA
agagcccaccccatgtccct

SEQ ID NO: 251737 - DNA, 20 bp, synthetic construct
  source 1..20: mol_type = other DNA
cagagcccaccccatgtccc

SEQ ID NO: 251738 - DNA, 20 bp, synthetic construct
  source 1..20: mol_type = other DNA
gcagagcccaccccatgtcc

SEQ ID NO: 251739 - DNA, 20 bp, synthetic construct
  source 1..20: mol_type = other DNA
ggcagagcccaccccatgtc

SEQ ID NO: 251740 - DNA, 20 bp, synthetic construct
  source 1..20: mol_type = other DNA
gggcagagcccaccccatgt

SEQ ID NO: 251741 - DNA, 20 bp, synthetic construct
  source 1..20: mol_type = other DNA
agggcagagcccaccccatg

SEQ ID NO: 251742 - DNA, 20 bp, synthetic construct
  source 1..20: mol_type = other DNA
cagggcagagcccaccccat

SEQ ID NO: 251743 - DNA, 20 bp, synthetic construct
  source 1..20: mol_type = other DNA
tcagggcagagcccacccca

SEQ ID NO: 251744 - DNA, 20 bp, synthetic construct
  source 1..20: mol_type = other DNA
ttcagggcagagcccacccc

SEQ ID NO: 251745 - DNA, 20 bp, synthetic construct
  source 1..20: mol_type = other DNA
tttcagggcagagcccaccc

SEQ ID NO: 251746 - DNA, 20 bp, synthetic construct
  source 1..20: mol_type = other DNA
ttttcagggcagagcccacc

SEQ ID NO: 251747 - DNA, 20 bp, synthetic construct
  source 1..20: mol_type = other DNA
cttttcagggcagagcccac

SEQ ID NO: 251748 - DNA, 20 bp, synthetic construct
  source 1..20: mol_type = other DNA
tcttttcagggcagagccca

SEQ ID NO: 251749 - DNA, 20 bp, synthetic construct
  source 1..20: mol_type = other DNA
atcttttcagggcagagccc

SEQ ID NO: 251750 - DNA, 20 bp, synthetic construct
  source 1..20: mol_type = other DNA
gatcttttcagggcagagcc

SEQ ID NO: 251751 - DNA, 20 bp, synthetic construct
  source 1..20: mol_type = other DNA
tgatcttttcagggcagagc

SEQ ID NO: 251752 - DNA, 20 bp, synthetic construct
  source 1..20: mol_type = other DNA
atgatcttttcagggcagag

SEQ ID NO: 251753 - DNA, 20 bp, synthetic construct
  source 1..20: mol_type = other DNA
aatgatcttttcagggcaga

SEQ ID NO: 251754 - DNA, 20 bp, synthetic construct
  source 1..20: mol_type = other DNA
aaatgatcttttcagggcag

SEQ ID NO: 251755 - DNA, 20 bp, synthetic construct
  source 1..20: mol_type = other DNA
caaatgatcttttcagggca

SEQ ID NO: 251756 - DNA, 20 bp, synthetic construct
  source 1..20: mol_type = other DNA
ccaaatgatcttttcagggc

SEQ ID NO: 251757 - DNA, 20 bp, synthetic construct
  source 1..20: mol_type = other DNA
tccaaatgatcttttcaggg

SEQ ID NO: 251758 - DNA, 20 bp, synthetic construct
  source 1..20: mol_type = other DNA
gtccaaatgatcttttcagg

SEQ ID NO: 251759 - DNA, 20 bp, synthetic construct
  source 1..20: mol_type = other DNA
ggtccaaatgatcttttcag

SEQ ID NO: 251760 - DNA, 20 bp, synthetic construct
  source 1..20: mol_type = other DNA
aggtccaaatgatcttttca

SEQ ID NO: 251761 - DNA, 20 bp, synthetic construct
  source 1..20: mol_type = other DNA
caggtccaaatgatcttttc

SEQ ID NO: 251762 - DNA, 20 bp, synthetic construct
  source 1..20: mol_type = other DNA
tcaggtccaaatgatctttt

SEQ ID NO: 251763 - DNA, 20 bp, synthetic construct
  source 1..20: mol_type = other DNA
ctcaggtccaaatgatcttt

SEQ ID NO: 251764 - DNA, 20 bp, synthetic construct
  source 1..20: mol_type = other DNA
gctcaggtccaaatgatctt

SEQ ID NO: 251765 - DNA, 20 bp, synthetic construct
  source 1..20: mol_type = other DNA
agctcaggtccaaatgatct

SEQ ID NO: 251766 - DNA, 20 bp, synthetic construct
  source 1..20: mol_type = other DNA
gagctcaggtccaaatgatc

SEQ ID NO: 251767 - DNA, 20 bp, synthetic construct
  source 1..20: mol_type = other DNA
agagctcaggtccaaatgat

SEQ ID NO: 251768 - DNA, 20 bp, synthetic construct
  source 1..20: mol_type = other DNA
tagagctcaggtccaaatga

SEQ ID NO: 251769 - DNA, 20 bp, synthetic construct
  source 1..20: mol_type = other DNA
ttagagctcaggtccaaatg

SEQ ID NO: 251770 - DNA, 20 bp, synthetic construct
  source 1..20: mol_type = other DNA
attagagctcaggtccaaat

SEQ ID NO: 251771 - DNA, 20 bp, synthetic construct
  source 1..20: mol_type = other DNA
aattagagctcaggtccaaa

SEQ ID NO: 251772 - DNA, 20 bp, synthetic construct
  source 1..20: mol_type = other DNA
gaattagagctcaggtccaa

SEQ ID NO: 251773 - DNA, 20 bp, synthetic construct
  source 1..20: mol_type = other DNA
tgaattagagctcaggtcca

SEQ ID NO: 251774 - DNA, 20 bp, synthetic construct
  source 1..20: mol_type = other DNA
gtgaattagagctcaggtcc

SEQ ID NO: 251775 - DNA, 20 bp, synthetic construct
  source 1..20: mol_type = other DNA
tgtgaattagagctcaggtc

SEQ ID NO: 251776 - DNA, 20 bp, synthetic construct
  source 1..20: mol_type = other DNA
ttgtgaattagagctcaggt

SEQ ID NO: 251777 - DNA, 20 bp, synthetic construct
  source 1..20: mol_type = other DNA
cttgtgaattagagctcagg

SEQ ID NO: 251778 - DNA, 20 bp, synthetic construct
  source 1..20: mol_type = other DNA
acttgtgaattagagctcag

SEQ ID NO: 251779 - DNA, 20 bp, synthetic construct
  source 1..20: mol_type = other DNA
gacttgtgaattagagctca

SEQ ID NO: 251780 - DNA, 20 bp, synthetic construct
  source 1..20: mol_type = other DNA
ggacttgtgaattagagctc

SEQ ID NO: 251781 - DNA, 20 bp, synthetic construct
  source 1..20: mol_type = other DNA
tggacttgtgaattagagct

SEQ ID NO: 251782 - DNA, 20 bp, synthetic construct
  source 1..20: mol_type = other DNA
ctggacttgtgaattagagc

SEQ ID NO: 251783 - DNA, 20 bp, synthetic construct
  source 1..20: mol_type = other DNA
cctggacttgtgaattagag

SEQ ID NO: 251784 - DNA, 20 bp, synthetic construct
  source 1..20: mol_type = other DNA
tcctggacttgtgaattaga

SEQ ID NO: 251785 - DNA, 20 bp, synthetic construct
  source 1..20: mol_type = other DNA
ctcctggacttgtgaattag

SEQ ID NO: 251786 - DNA, 20 bp, synthetic construct
  source 1..20: mol_type = other DNA
tctcctggacttgtgaatta

SEQ ID NO: 251787 - DNA, 20 bp, synthetic construct
  source 1..20: mol_type = other DNA
atctcctggacttgtgaatt

SEQ ID NO: 251788 - DNA, 20 bp, synthetic construct
  source 1..20: mol_type = other DNA
aatctcctggacttgtgaat

SEQ ID NO: 251789 - DNA, 20 bp, synthetic construct
  source 1..20: mol_type = other DNA
aaatctcctggacttgtgaa

SEQ ID NO: 251790 - DNA, 20 bp, synthetic construct
  source 1..20: mol_type = other DNA
aaaatctcctggacttgtga

SEQ ID NO: 251791 - DNA, 20 bp, synthetic construct
  source 1..20: mol_type = other DNA
taaaatctcctggacttgtg

SEQ ID NO: 251792 - DNA, 20 bp, synthetic construct
  source 1..20: mol_type = other DNA
ctaaaatctcctggacttgt

SEQ ID NO: 251793 - DNA, 20 bp, synthetic construct
  source 1..20: mol_type = other DNA
cctaaaatctcctggacttg

SEQ ID NO: 251794 - DNA, 20 bp, synthetic construct
  source 1..20: mol_type = other DNA
ccctaaaatctcctggactt

SEQ ID NO: 251795 - DNA, 20 bp, synthetic construct
  source 1..20: mol_type = other DNA
tccctaaaatctcctggact

SEQ ID NO: 251796 - DNA, 20 bp, synthetic construct
  source 1..20: mol_type = other DNA
ctccctaaaatctcctggac

SEQ ID NO: 251797 - DNA, 20 bp, synthetic construct
  source 1..20: mol_type = other DNA
actccctaaaatctcctgga

SEQ ID NO: 251798 - DNA, 20 bp, synthetic construct
  source 1..20: mol_type = other DNA
aactccctaaaatctcctgg

SEQ ID NO: 251799 - DNA, 20 bp, synthetic construct
  source 1..20: mol_type = other DNA
caactccctaaaatctcctg

SEQ ID NO: 251800 - DNA, 20 bp, synthetic construct
  source 1..20: mol_type = other DNA
ccaactccctaaaatctcct

SEQ ID NO: 251801 - DNA, 20 bp, synthetic construct
  source 1..20: mol_type = other DNA
accaactccctaaaatctcc

SEQ ID NO: 251802 - DNA, 20 bp, synthetic construct
  source 1..20: mol_type = other DNA
aaccaactccctaaaatctc

SEQ ID NO: 251803 - DNA, 20 bp, synthetic construct
  source 1..20: mol_type = other DNA
gaaccaactccctaaaatct

SEQ ID NO: 251804 - DNA, 20 bp, synthetic construct
  source 1..20: mol_type = other DNA
agaaccaactccctaaaatc

SEQ ID NO: 251805 - DNA, 20 bp, synthetic construct
  source 1..20: mol_type = other DNA
aagaaccaactccctaaaat

SEQ ID NO: 251806 - DNA, 20 bp, synthetic construct
  source 1..20: mol_type = other DNA
taagaaccaactccctaaaa

SEQ ID NO: 251807 - DNA, 20 bp, synthetic construct
  source 1..20: mol_type = other DNA
ataagaaccaactccctaaa

SEQ ID NO: 251808 - DNA, 20 bp, synthetic construct
  source 1..20: mol_type = other DNA
gataagaaccaactccctaa

SEQ ID NO: 251809 - DNA, 20 bp, synthetic construct
  source 1..20: mol_type = other DNA
tgataagaaccaactcccta

SEQ ID NO: 251810 - DNA, 20 bp, synthetic construct
  source 1..20: mol_type = other DNA
ttgataagaaccaactccct

SEQ ID NO: 251811 - DNA, 20 bp, synthetic construct
  source 1..20: mol_type = other DNA
tttgataagaaccaactccc

SEQ ID NO: 251812 - DNA, 20 bp, synthetic construct
  source 1..20: mol_type = other DNA
ctttgataagaaccaactcc

SEQ ID NO: 251813 - DNA, 20 bp, synthetic construct
  source 1..20: mol_type = other DNA
cctttgataagaaccaactc

SEQ ID NO: 251814 - DNA, 20 bp, synthetic construct
  source 1..20: mol_type = other DNA
acctttgataagaaccaact

SEQ ID NO: 251815 - DNA, 20 bp, synthetic construct
  source 1..20: mol_type = other DNA
aacctttgataagaaccaac

SEQ ID NO: 251816 - DNA, 20 bp, synthetic construct
  source 1..20: mol_type = other DNA
caacctttgataagaaccaa

SEQ ID NO: 251817 - DNA, 20 bp, synthetic construct
  source 1..20: mol_type = other DNA
ccaacctttgataagaacca

SEQ ID NO: 251818 - DNA, 20 bp, synthetic construct
  source 1..20: mol_type = other DNA
gccaacctttgataagaacc

SEQ ID NO: 251819 - DNA, 20 bp, synthetic construct
  source 1..20: mol_type = other DNA
agccaacctttgataagaac

SEQ ID NO: 251820 - DNA, 20 bp, synthetic construct
  source 1..20: mol_type = other DNA
tagccaacctttgataagaa

SEQ ID NO: 251821 - DNA, 20 bp, synthetic construct
  source 1..20: mol_type = other DNA
gtagccaacctttgataaga

SEQ ID NO: 251822 - DNA, 20 bp, synthetic construct
  source 1..20: mol_type = other DNA
agtagccaacctttgataag

SEQ ID NO: 251823 - DNA, 20 bp, synthetic construct
  source 1..20: mol_type = other DNA
gagtagccaacctttgataa

SEQ ID NO: 251824 - DNA, 20 bp, synthetic construct
  source 1..20: mol_type = other DNA
tgagtagccaacctttgata

SEQ ID NO: 251825 - DNA, 20 bp, synthetic construct
  source 1..20: mol_type = other DNA
ctgagtagccaacctttgat

SEQ ID NO: 251826 - DNA, 20 bp, synthetic construct
  source 1..20: mol_type = other DNA
tctgagtagccaacctttga

SEQ ID NO: 251827 - DNA, 20 bp, synthetic construct
  source 1..20: mol_type = other DNA
atctgagtagccaacctttg

SEQ ID NO: 251828 - DNA, 20 bp, synthetic construct
  source 1..20: mol_type = other DNA
tatctgagtagccaaccttt

SEQ ID NO: 251829 - DNA, 20 bp, synthetic construct
  source 1..20: mol_type = other DNA
atatctgagtagccaacctt

SEQ ID NO: 251830 - DNA, 20 bp, synthetic construct
  source 1..20: mol_type = other DNA
tatatctgagtagccaacct

SEQ ID NO: 251831 - DNA, 20 bp, synthetic construct
  source 1..20: mol_type = other DNA
ctatatctgagtagccaacc

SEQ ID NO: 251832 - DNA, 20 bp, synthetic construct
  source 1..20: mol_type = other DNA
tctatatctgagtagccaac

SEQ ID NO: 251833 - DNA, 20 bp, synthetic construct
  source 1..20: mol_type = other DNA
ttctatatctgagtagccaa

SEQ ID NO: 251834 - DNA, 20 bp, synthetic construct
  source 1..20: mol_type = other DNA
tttctatatctgagtagcca

SEQ ID NO: 251835 - DNA, 20 bp, synthetic construct
  source 1..20: mol_type = other DNA
ctttctatatctgagtagcc

SEQ ID NO: 251836 - DNA, 20 bp, synthetic construct
  source 1..20: mol_type = other DNA
tctttctatatctgagtagc

SEQ ID NO: 251837 - DNA, 20 bp, synthetic construct
  source 1..20: mol_type = other DNA
ctctttctatatctgagtag

SEQ ID NO: 251838 - DNA, 20 bp, synthetic construct
  source 1..20: mol_type = other DNA
gctctttctatatctgagta

SEQ ID NO: 251839 - DNA, 20 bp, synthetic construct
  source 1..20: mol_type = other DNA
ggctctttctatatctgagt

SEQ ID NO: 251840 - DNA, 20 bp, synthetic construct
  source 1..20: mol_type = other DNA
gggctctttctatatctgag

SEQ ID NO: 251841 - DNA, 20 bp, synthetic construct
  source 1..20: mol_type = other DNA
agggctctttctatatctga

SEQ ID NO: 251842 - DNA, 20 bp, synthetic construct
  source 1..20: mol_type = other DNA
tagggctctttctatatctg

SEQ ID NO: 251843 - DNA, 20 bp, synthetic construct
  source 1..20: mol_type = other DNA
ctagggctctttctatatct

SEQ ID NO: 251844 - DNA, 20 bp, synthetic construct
  source 1..20: mol_type = other DNA
actagggctctttctatatc

SEQ ID NO: 251845 - DNA, 20 bp, synthetic construct
  source 1..20: mol_type = other DNA
cactagggctctttctatat

SEQ ID NO: 251846 - DNA, 20 bp, synthetic construct
  source 1..20: mol_type = other DNA
ccactagggctctttctata

SEQ ID NO: 251847 - DNA, 20 bp, synthetic construct
  source 1..20: mol_type = other DNA
accactagggctctttctat

SEQ ID NO: 251848 - DNA, 20 bp, synthetic construct
  source 1..20: mol_type = other DNA
aaccactagggctctttcta

SEQ ID NO: 251849 - DNA, 20 bp, synthetic construct
  source 1..20: mol_type = other DNA
aaaccactagggctctttct

SEQ ID NO: 251850 - DNA, 20 bp, synthetic construct
  source 1..20: mol_type = other DNA
aaaaccactagggctctttc

SEQ ID NO: 251851 - DNA, 20 bp, synthetic construct
  source 1..20: mol_type = other DNA
aaaaaccactagggctcttt

SEQ ID NO: 251852 - DNA, 20 bp, synthetic construct
  source 1..20: mol_type = other DNA
aaaaaaccactagggctctt

SEQ ID NO: 251853 - DNA, 20 bp, synthetic construct
  source 1..20: mol_type = other DNA
aaaaaaaccactagggctct

SEQ ID NO: 251854 - DNA, 20 bp, synthetic construct
  source 1..20: mol_type = other DNA
gaaaaaaaccactagggctc

SEQ ID NO: 251855 - DNA, 20 bp, synthetic construct
  source 1..20: mol_type = other DNA
agaaaaaaaccactagggct

SEQ ID NO: 251856 - DNA, 20 bp, synthetic construct
  source 1..20: mol_type = other DNA
tagaaaaaaaccactagggc

SEQ ID NO: 251857 - DNA, 20 bp, synthetic construct
  source 1..20: mol_type = other DNA
ttagaaaaaaaccactaggg

SEQ ID NO: 251858 - DNA, 20 bp, synthetic construct
  source 1..20: mol_type = other DNA
attagaaaaaaaccactagg

SEQ ID NO: 251859 - DNA, 20 bp, synthetic construct
  source 1..20: mol_type = other DNA
tattagaaaaaaaccactag

SEQ ID NO: 251860 - DNA, 20 bp, synthetic construct
  source 1..20: mol_type = other DNA
gtattagaaaaaaaccacta

SEQ ID NO: 251861 - DNA, 20 bp, synthetic construct
  source 1..20: mol_type = other DNA
ggtattagaaaaaaaccact

SEQ ID NO: 251862 - DNA, 20 bp, synthetic construct
  source 1..20: mol_type = other DNA
tggtattagaaaaaaaccac

SEQ ID NO: 251863 - DNA, 20 bp, synthetic construct
  source 1..20: mol_type = other DNA
atggtattagaaaaaaacca

SEQ ID NO: 251864 - DNA, 20 bp, synthetic construct
  source 1..20: mol_type = other DNA
aatggtattagaaaaaaacc

SEQ ID NO: 251865 - DNA, 20 bp, synthetic construct
  source 1..20: mol_type = other DNA
aaatggtattagaaaaaaac

SEQ ID NO: 251866 - DNA, 20 bp, synthetic construct
  source 1..20: mol_type = other DNA
gaaatggtattagaaaaaaa

SEQ ID NO: 251867 - DNA, 20 bp, synthetic construct
  source 1..20: mol_type = other DNA
agaaatggtattagaaaaaa

SEQ ID NO: 251868 - DNA, 20 bp, synthetic construct
  source 1..20: mol_type = other DNA
cagaaatggtattagaaaaa

SEQ ID NO: 251869 - DNA, 20 bp, synthetic construct
  source 1..20: mol_type = other DNA
ccagaaatggtattagaaaa

SEQ ID NO: 251870 - DNA, 20 bp, synthetic construct
  source 1..20: mol_type = other DNA
cccagaaatggtattagaaa

SEQ ID NO: 251871 - DNA, 20 bp, synthetic construct
  source 1..20: mol_type = other DNA
acccagaaatggtattagaa

SEQ ID NO: 251872 - DNA, 20 bp, synthetic construct
  source 1..20: mol_type = other DNA
tacccagaaatggtattaga

SEQ ID NO: 251873 - DNA, 20 bp, synthetic construct
  source 1..20: mol_type = other DNA
ttacccagaaatggtattag

SEQ ID NO: 251874 - DNA, 20 bp, synthetic construct
  source 1..20: mol_type = other DNA
attacccagaaatggtatta

SEQ ID NO: 251875 - DNA, 20 bp, synthetic construct
  source 1..20: mol_type = other DNA
aattacccagaaatggtatt

SEQ ID NO: 251876 - DNA, 20 bp, synthetic construct
  source 1..20: mol_type = other DNA
gaattacccagaaatggtat

SEQ ID NO: 251877 - DNA, 20 bp, synthetic construct
  source 1..20: mol_type = other DNA
ggaattacccagaaatggta

SEQ ID NO: 251878 - DNA, 20 bp, synthetic construct
  source 1..20: mol_type = other DNA
aggaattacccagaaatggt

SEQ ID NO: 251879 - DNA, 20 bp, synthetic construct
  source 1..20: mol_type = other DNA
taggaattacccagaaatgg

SEQ ID NO: 251880 - DNA, 20 bp, synthetic construct
  source 1..20: mol_type = other DNA
ttaggaattacccagaaatg

SEQ ID NO: 251881 - DNA, 20 bp, synthetic construct
  source 1..20: mol_type = other DNA
cttaggaattacccagaaat

SEQ ID NO: 251882 - DNA, 20 bp, synthetic construct
  source 1..20: mol_type = other DNA
ccttaggaattacccagaaa

SEQ ID NO: 251883 - DNA, 20 bp, synthetic construct
  source 1..20: mol_type = other DNA
gccttaggaattacccagaa

SEQ ID NO: 251884 - DNA, 20 bp, synthetic construct
  source 1..20: mol_type = other DNA
tgccttaggaattacccaga

SEQ ID NO: 251885 - DNA, 20 bp, synthetic construct
  source 1..20: mol_type = other DNA
atgccttaggaattacccag

SEQ ID NO: 251886 - DNA, 20 bp, synthetic construct
  source 1..20: mol_type = other DNA
aatgccttaggaattaccca

SEQ ID NO: 251887 - DNA, 20 bp, synthetic construct
  source 1..20: mol_type = other DNA
aaatgccttaggaattaccc

SEQ ID NO: 251888 - DNA, 20 bp, synthetic construct
  source 1..20: mol_type = other DNA
taaatgccttaggaattacc

SEQ ID NO: 251889 - DNA, 20 bp, synthetic construct
  source 1..20: mol_type = other DNA
ctaaatgccttaggaattac

SEQ ID NO: 251890 - DNA, 20 bp, synthetic construct
  source 1..20: mol_type = other DNA
actaaatgccttaggaatta

SEQ ID NO: 251891 - DNA, 20 bp, synthetic construct
  source 1..20: mol_type = other DNA
cactaaatgccttaggaatt

SEQ ID NO: 251892 - DNA, 20 bp, synthetic construct
  source 1..20: mol_type = other DNA
acactaaatgccttaggaat

SEQ ID NO: 251893 - DNA, 20 bp, synthetic construct
  source 1..20: mol_type = other DNA
aacactaaatgccttaggaa

SEQ ID NO: 251894 - DNA, 20 bp, synthetic construct
  source 1..20: mol_type = other DNA
gaacactaaatgccttagga

SEQ ID NO: 251895 - DNA, 20 bp, synthetic construct
  source 1..20: mol_type = other DNA
agaacactaaatgccttagg

SEQ ID NO: 251896 - DNA, 20 bp, synthetic construct
  source 1..20: mol_type = other DNA
cagaacactaaatgccttag

SEQ ID NO: 251897 - DNA, 20 bp, synthetic construct
  source 1..20: mol_type = other DNA
tcagaacactaaatgcctta

SEQ ID NO: 251898 - DNA, 20 bp, synthetic construct
  source 1..20: mol_type = other DNA
ttcagaacactaaatgcctt

SEQ ID NO: 251899 - DNA, 20 bp, synthetic construct
  source 1..20: mol_type = other DNA
tttcagaacactaaatgcct

SEQ ID NO: 251900 - DNA, 20 bp, synthetic construct
  source 1..20: mol_type = other DNA
ctttcagaacactaaatgcc

SEQ ID NO: 251901 - DNA, 20 bp, synthetic construct
  source 1..20: mol_type = other DNA
tctttcagaacactaaatgc

SEQ ID NO: 251902 - DNA, 20 bp, synthetic construct
  source 1..20: mol_type = other DNA
atctttcagaacactaaatg

SEQ ID NO: 251903 - DNA, 20 bp, synthetic construct
  source 1..20: mol_type = other DNA
catctttcagaacactaaat

SEQ ID NO: 251904 - DNA, 20 bp, synthetic construct
  source 1..20: mol_type = other DNA
gcatctttcagaacactaaa

SEQ ID NO: 251905 - DNA, 20 bp, synthetic construct
  source 1..20: mol_type = other DNA
agcatctttcagaacactaa

SEQ ID NO: 251906 - DNA, 20 bp, synthetic construct
  source 1..20: mol_type = other DNA
tagcatctttcagaacacta

SEQ ID NO: 251907 - DNA, 20 bp, synthetic construct
  source 1..20: mol_type = other DNA
ctagcatctttcagaacact

SEQ ID NO: 251908 - DNA, 20 bp, synthetic construct
  source 1..20: mol_type = other DNA
gctagcatctttcagaacac

SEQ ID NO: 251909 - DNA, 20 bp, synthetic construct
  source 1..20: mol_type = other DNA
ggctagcatctttcagaaca

SEQ ID NO: 251910 - DNA, 20 bp, synthetic construct
  source 1..20: mol_type = other DNA
aggctagcatctttcagaac

SEQ ID NO: 251911 - DNA, 20 bp, synthetic construct
  source 1..20: mol_type = other DNA
aaggctagcatctttcagaa

SEQ ID NO: 251912 - DNA, 20 bp, synthetic construct
  source 1..20: mol_type = other DNA
caaggctagcatctttcaga

SEQ ID NO: 251913 - DNA, 20 bp, synthetic construct
  source 1..20: mol_type = other DNA
acaaggctagcatctttcag

SEQ ID NO: 251914 - DNA, 20 bp, synthetic construct
  source 1..20: mol_type = other DNA
gacaaggctagcatctttca

SEQ ID NO: 251915 - DNA, 20 bp, synthetic construct
  source 1..20: mol_type = other DNA
ggacaaggctagcatctttc

SEQ ID NO: 251916 - DNA, 20 bp, synthetic construct
  source 1..20: mol_type = other DNA
tggacaaggctagcatcttt

SEQ ID NO: 251917 - DNA, 20 bp, synthetic construct
  source 1..20: mol_type = other DNA
ctggacaaggctagcatctt

SEQ ID NO: 251918 - DNA, 20 bp, synthetic construct
  source 1..20: mol_type = other DNA
gctggacaaggctagcatct

SEQ ID NO: 251919 - DNA, 20 bp, synthetic construct
  source 1..20: mol_type = other DNA
ggctggacaaggctagcatc

SEQ ID NO: 251920 - DNA, 20 bp, synthetic construct
  source 1..20: mol_type = other DNA
aggctggacaaggctagcat

SEQ ID NO: 251921 - DNA, 20 bp, synthetic construct
  source 1..20: mol_type = other DNA
caggctggacaaggctagca

SEQ ID NO: 251922 - DNA, 20 bp, synthetic construct
  source 1..20: mol_type = other DNA
ccaggctggacaaggctagc

SEQ ID NO: 251923 - DNA, 20 bp, synthetic construct
  source 1..20: mol_type = other DNA
cccaggctggacaaggctag

SEQ ID NO: 251924 - DNA, 20 bp, synthetic construct
  source 1..20: mol_type = other DNA
tcccaggctggacaaggcta

SEQ ID NO: 251925 - DNA, 20 bp, synthetic construct
  source 1..20: mol_type = other DNA
ctcccaggctggacaaggct

SEQ ID NO: 251926 - DNA, 20 bp, synthetic construct
  source 1..20: mol_type = other DNA
actcccaggctggacaaggc

SEQ ID NO: 251927 - DNA, 20 bp, synthetic construct
  source 1..20: mol_type = other DNA
aactcccaggctggacaagg

SEQ ID NO: 251928 - DNA, 20 bp, synthetic construct
  source 1..20: mol_type = other DNA
caactcccaggctggacaag

SEQ ID NO: 251929 - DNA, 20 bp, synthetic construct
  source 1..20: mol_type = other DNA
tcaactcccaggctggacaa

SEQ ID NO: 251930 - DNA, 20 bp, synthetic construct
  source 1..20: mol_type = other DNA
ctcaactcccaggctggaca

SEQ ID NO: 251931 - DNA, 20 bp, synthetic construct
  source 1..20: mol_type = other DNA
tctcaactcccaggctggac

SEQ ID NO: 251932 - DNA, 20 bp, synthetic construct
  source 1..20: mol_type = other DNA
ttctcaactcccaggctgga

SEQ ID NO: 251933 - DNA, 20 bp, synthetic construct
  source 1..20: mol_type = other DNA
attctcaactcccaggctgg

SEQ ID NO: 251934 - DNA, 20 bp, synthetic construct
  source 1..20: mol_type = other DNA
cattctcaactcccaggctg

SEQ ID NO: 251935 - DNA, 20 bp, synthetic construct
  source 1..20: mol_type = other DNA
tcattctcaactcccaggct

SEQ ID NO: 251936 - DNA, 20 bp, synthetic construct
  source 1..20: mol_type = other DNA
ttcattctcaactcccaggc

SEQ ID NO: 251937 - DNA, 20 bp, synthetic construct
  source 1..20: mol_type = other DNA
attcattctcaactcccagg

SEQ ID NO: 251938 - DNA, 20 bp, synthetic construct
  source 1..20: mol_type = other DNA
cattcattctcaactcccag

SEQ ID NO: 251939 - DNA, 20 bp, synthetic construct
  source 1..20: mol_type = other DNA
acattcattctcaactccca

SEQ ID NO: 251940 - DNA, 20 bp, synthetic construct
  source 1..20: mol_type = other DNA
gacattcattctcaactccc

SEQ ID NO: 251941 - DNA, 20 bp, synthetic construct
  source 1..20: mol_type = other DNA
agacattcattctcaactcc

SEQ ID NO: 251942 - DNA, 20 bp, synthetic construct
  source 1..20: mol_type = other DNA
tagacattcattctcaactc

SEQ ID NO: 251943 - DNA, 20 bp, synthetic construct
  source 1..20: mol_type = other DNA
ttagacattcattctcaact

SEQ ID NO: 251944 - DNA, 20 bp, synthetic construct
  source 1..20: mol_type = other DNA
gttagacattcattctcaac

SEQ ID NO: 251945 - DNA, 20 bp, synthetic construct
  source 1..20: mol_type = other DNA
tgttagacattcattctcaa

SEQ ID NO: 251946 - DNA, 20 bp, synthetic construct
  source 1..20: mol_type = other DNA
ctgttagacattcattctca

SEQ ID NO: 251947 - DNA, 20 bp, synthetic construct
  source 1..20: mol_type = other DNA
tctgttagacattcattctc

SEQ ID NO: 251948 - DNA, 20 bp, synthetic construct
  source 1..20: mol_type = other DNA
ttctgttagacattcattct

SEQ ID NO: 251949 - DNA, 20 bp, synthetic construct
  source 1..20: mol_type = other DNA
tttctgttagacattcattc

SEQ ID NO: 251950 - DNA, 20 bp, synthetic construct
  source 1..20: mol_type = other DNA
gtttctgttagacattcatt

SEQ ID NO: 251951 - DNA, 20 bp, synthetic construct
  source 1..20: mol_type = other DNA
agtttctgttagacattcat

SEQ ID NO: 251952 - DNA, 20 bp, synthetic construct
  source 1..20: mol_type = other DNA
gagtttctgttagacattca

SEQ ID NO: 251953 - DNA, 20 bp, synthetic construct
  source 1..20: mol_type = other DNA
agagtttctgttagacattc

SEQ ID NO: 251954 - DNA, 20 bp, synthetic construct
  source 1..20: mol_type = other DNA
tagagtttctgttagacatt

SEQ ID NO: 251955 - DNA, 20 bp, synthetic construct
  source 1..20: mol_type = other DNA
ctagagtttctgttagacat

SEQ ID NO: 251956 - DNA, 20 bp, synthetic construct
  source 1..20: mol_type = other DNA
cctagagtttctgttagaca

SEQ ID NO: 251957 - DNA, 20 bp, synthetic construct
  source 1..20: mol_type = other DNA
gcctagagtttctgttagac

SEQ ID NO: 251958 - DNA, 20 bp, synthetic construct
  source 1..20: mol_type = other DNA
ggcctagagtttctgttaga

SEQ ID NO: 251959 - DNA, 20 bp, synthetic construct
  source 1..20: mol_type = other DNA
cggcctagagtttctgttag

SEQ ID NO: 251960 - DNA, 20 bp, synthetic construct
  source 1..20: mol_type = other DNA
ccggcctagagtttctgtta

SEQ ID NO: 251961 - DNA, 20 bp, synthetic construct
  source 1..20: mol_type = other DNA
cccggcctagagtttctgtt

SEQ ID NO: 251962 - DNA, 20 bp, synthetic construct
  source 1..20: mol_type = other DNA
gcccggcctagagtttctgt

SEQ ID NO: 251963 - DNA, 20 bp, synthetic construct
  source 1..20: mol_type = other DNA
ggcccggcctagagtttctg

SEQ ID NO: 251964 - DNA, 20 bp, synthetic construct
  source 1..20: mol_type = other DNA
aggcccggcctagagtttct

SEQ ID NO: 251965 - DNA, 20 bp, synthetic construct
  source 1..20: mol_type = other DNA
caggcccggcctagagtttc

SEQ ID NO: 251966 - DNA, 20 bp, synthetic construct
  source 1..20: mol_type = other DNA
ccaggcccggcctagagttt

SEQ ID NO: 251967 - DNA, 20 bp, synthetic construct
  source 1..20: mol_type = other DNA
accaggcccggcctagagtt

SEQ ID NO: 251968 - DNA, 20 bp, synthetic construct
  source 1..20: mol_type = other DNA
caccaggcccggcctagagt

SEQ ID NO: 251969 - DNA, 20 bp, synthetic construct
  source 1..20: mol_type = other DNA
ccaccaggcccggcctagag

SEQ ID NO: 251970 - DNA, 20 bp, synthetic construct
  source 1..20: mol_type = other DNA
gccaccaggcccggcctaga

SEQ ID NO: 251971 - DNA, 20 bp, synthetic construct
  source 1..20: mol_type = other DNA
agccaccaggcccggcctag

SEQ ID NO: 251972 - DNA, 20 bp, synthetic construct
  source 1..20: mol_type = other DNA
gagccaccaggcccggccta

SEQ ID NO: 251973 - DNA, 20 bp, synthetic construct
  source 1..20: mol_type = other DNA
tgagccaccaggcccggcct

SEQ ID NO: 251974 - DNA, 20 bp, synthetic construct
  source 1..20: mol_type = other DNA
gtgagccaccaggcccggcc

SEQ ID NO: 251975 - DNA, 20 bp, synthetic construct
  source 1..20: mol_type = other DNA
cgtgagccaccaggcccggc

SEQ ID NO: 251976 - DNA, 20 bp, synthetic construct
  source 1..20: mol_type = other DNA
gcgtgagccaccaggcccgg

SEQ ID NO: 251977 - DNA, 20 bp, synthetic construct
  source 1..20: mol_type = other DNA
ggcgtgagccaccaggcccg

SEQ ID NO: 251978 - DNA, 20 bp, synthetic construct
  source 1..20: mol_type = other DNA
aggcgtgagccaccaggccc

SEQ ID NO: 251979 - DNA, 20 bp, synthetic construct
  source 1..20: mol_type = other DNA
gaggcgtgagccaccaggcc

SEQ ID NO: 251980 - DNA, 20 bp, synthetic construct
  source 1..20: mol_type = other DNA
agaggcgtgagccaccaggc

SEQ ID NO: 251981 - DNA, 20 bp, synthetic construct
  source 1..20: mol_type = other DNA
tagaggcgtgagccaccagg

SEQ ID NO: 251982 - DNA, 20 bp, synthetic construct
  source 1..20: mol_type = other DNA
ttagaggcgtgagccaccag

SEQ ID NO: 251983 - DNA, 20 bp, synthetic construct
  source 1..20: mol_type = other DNA
attagaggcgtgagccacca

SEQ ID NO: 251984 - DNA, 20 bp, synthetic construct
  source 1..20: mol_type = other DNA
gattagaggcgtgagccacc

SEQ ID NO: 251985 - DNA, 20 bp, synthetic construct
  source 1..20: mol_type = other DNA
ggattagaggcgtgagccac

SEQ ID NO: 251986 - DNA, 20 bp, synthetic construct
  source 1..20: mol_type = other DNA
gggattagaggcgtgagcca

SEQ ID NO: 251987 - DNA, 20 bp, synthetic construct
  source 1..20: mol_type = other DNA
tgggattagaggcgtgagcc

SEQ ID NO: 251988 - DNA, 20 bp, synthetic construct
  source 1..20: mol_type = other DNA
ctgggattagaggcgtgagc

SEQ ID NO: 251989 - DNA, 20 bp, synthetic construct
  source 1..20: mol_type = other DNA
gctgggattagaggcgtgag

SEQ ID NO: 251990 - DNA, 20 bp, synthetic construct
  source 1..20: mol_type = other DNA
tgctgggattagaggcgtga

SEQ ID NO: 251991 - DNA, 20 bp, synthetic construct
  source 1..20: mol_type = other DNA
gtgctgggattagaggcgtg

SEQ ID NO: 251992 - DNA, 20 bp, synthetic construct
  source 1..20: mol_type = other DNA
agtgctgggattagaggcgt

SEQ ID NO: 251993 - DNA, 20 bp, synthetic construct
  source 1..20: mol_type = other DNA
tagtgctgggattagaggcg

SEQ ID NO: 251994 - DNA, 20 bp, synthetic construct
  source 1..20: mol_type = other DNA
atagtgctgggattagaggc

SEQ ID NO: 251995 - DNA, 20 bp, synthetic construct
  source 1..20: mol_type = other DNA
catagtgctgggattagagg

SEQ ID NO: 251996 - DNA, 20 bp, synthetic construct
  source 1..20: mol_type = other DNA
ccatagtgctgggattagag

SEQ ID NO: 251997 - DNA, 20 bp, synthetic construct
  source 1..20: mol_type = other DNA
cccatagtgctgggattaga

SEQ ID NO: 251998 - DNA, 20 bp, synthetic construct
  source 1..20: mol_type = other DNA
tcccatagtgctgggattag

SEQ ID NO: 251999 - DNA, 20 bp, synthetic construct
  source 1..20: mol_type = other DNA
ctcccatagtgctgggatta

SEQ ID NO: 252000 - DNA, 20 bp, synthetic construct
  source 1..20: mol_type = other DNA
tctcccatagtgctgggatt

SEQ ID NO: 252001 - DNA, 20 bp, synthetic construct
  source 1..20: mol_type = other DNA
gtctcccatagtgctgggat

SEQ ID NO: 252002 - DNA, 20 bp, synthetic construct
  source 1..20: mol_type = other DNA
ggtctcccatagtgctggga

SEQ ID NO: 252003 - DNA, 20 bp, synthetic construct
  source 1..20: mol_type = other DNA
gggtctcccatagtgctggg

SEQ ID NO: 252004 - DNA, 20 bp, synthetic construct
  source 1..20: mol_type = other DNA
tgggtctcccatagtgctgg

SEQ ID NO: 252005 - DNA, 20 bp, synthetic construct
  source 1..20: mol_type = other DNA
ctgggtctcccatagtgctg

SEQ ID NO: 252006 - DNA, 20 bp, synthetic construct
  source 1..20: mol_type = other DNA
cctgggtctcccatagtgct

SEQ ID NO: 252007 - DNA, 20 bp, synthetic construct
  source 1..20: mol_type = other DNA
acctgggtctcccatagtgc

SEQ ID NO: 252008 - DNA, 20 bp, synthetic construct
  source 1..20: mol_type = other DNA
cacctgggtctcccatagtg

SEQ ID NO: 252009 - DNA, 20 bp, synthetic construct
  source 1..20: mol_type = other DNA
ccacctgggtctcccatagt

SEQ ID NO: 252010 - DNA, 20 bp, synthetic construct
  source 1..20: mol_type = other DNA
cccacctgggtctcccatag

SEQ ID NO: 252011 - DNA, 20 bp, synthetic construct
  source 1..20: mol_type = other DNA
gcccacctgggtctcccata

SEQ ID NO: 252012 - DNA, 20 bp, synthetic construct
  source 1..20: mol_type = other DNA
tgcccacctgggtctcccat

SEQ ID NO: 252013 - DNA, 20 bp, synthetic construct
  source 1..20: mol_type = other DNA
ctgcccacctgggtctccca

SEQ ID NO: 252014 - DNA, 20 bp, synthetic construct
  source 1..20: mol_type = other DNA
tctgcccacctgggtctccc

SEQ ID NO: 252015 - DNA, 20 bp, synthetic construct
  source 1..20: mol_type = other DNA
atctgcccacctgggtctcc

SEQ ID NO: 252016 - DNA, 20 bp, synthetic construct
  source 1..20: mol_type = other DNA
gatctgcccacctgggtctc

SEQ ID NO: 252017 - DNA, 20 bp, synthetic construct
  source 1..20: mol_type = other DNA
tgatctgcccacctgggtct

SEQ ID NO: 252018 - DNA, 20 bp, synthetic construct
  source 1..20: mol_type = other DNA
gtgatctgcccacctgggtc

SEQ ID NO: 252019 - DNA, 20 bp, synthetic construct
  source 1..20: mol_type = other DNA
ggtgatctgcccacctgggt

SEQ ID NO: 252020 - DNA, 20 bp, synthetic construct
  source 1..20: mol_type = other DNA
aggtgatctgcccacctggg

SEQ ID NO: 252021 - DNA, 20 bp, synthetic construct
  source 1..20: mol_type = other DNA
caggtgatctgcccacctgg

SEQ ID NO: 252022 - DNA, 20 bp, synthetic construct
  source 1..20: mol_type = other DNA
tcaggtgatctgcccacctg

SEQ ID NO: 252023 - DNA, 20 bp, synthetic construct
  source 1..20: mol_type = other DNA
ctcaggtgatctgcccacct

SEQ ID NO: 252024 - DNA, 20 bp, synthetic construct
  source 1..20: mol_type = other DNA
cctcaggtgatctgcccacc

SEQ ID NO: 252025 - DNA, 20 bp, synthetic construct
  source 1..20: mol_type = other DNA
acctcaggtgatctgcccac

SEQ ID NO: 252026 - DNA, 20 bp, synthetic construct
  source 1..20: mol_type = other DNA
gacctcaggtgatctgccca

SEQ ID NO: 252027 - DNA, 20 bp, synthetic construct
  source 1..20: mol_type = other DNA
tgacctcaggtgatctgccc

SEQ ID NO: 252028 - DNA, 20 bp, synthetic construct
  source 1..20: mol_type = other DNA
ctgacctcaggtgatctgcc

SEQ ID NO: 252029 - DNA, 20 bp, synthetic construct
  source 1..20: mol_type = other DNA
cctgacctcaggtgatctgc

SEQ ID NO: 252030 - DNA, 20 bp, synthetic construct
  source 1..20: mol_type = other DNA
tcctgacctcaggtgatctg

SEQ ID NO: 252031 - DNA, 20 bp, synthetic construct
  source 1..20: mol_type = other DNA
ctcctgacctcaggtgatct

SEQ ID NO: 252032 - DNA, 20 bp, synthetic construct
  source 1..20: mol_type = other DNA
actcctgacctcaggtgatc

SEQ ID NO: 252033 - DNA, 20 bp, synthetic construct
  source 1..20: mol_type = other DNA
aactcctgacctcaggtgat

SEQ ID NO: 252034 - DNA, 20 bp, synthetic construct
  source 1..20: mol_type = other DNA
aaactcctgacctcaggtga

SEQ ID NO: 252035 - DNA, 20 bp, synthetic construct
  source 1..20: mol_type = other DNA
caaactcctgacctcaggtg

SEQ ID NO: 252036 - DNA, 20 bp, synthetic construct
  source 1..20: mol_type = other DNA
tcaaactcctgacctcaggt

SEQ ID NO: 252037 - DNA, 20 bp, synthetic construct
  source 1..20: mol_type = other DNA
ctcaaactcctgacctcagg

SEQ ID NO: 252038 - DNA, 20 bp, synthetic construct
  source 1..20: mol_type = other DNA
tctcaaactcctgacctcag

SEQ ID NO: 252039 - DNA, 20 bp, synthetic construct
  source 1..20: mol_type = other DNA
gtctcaaactcctgacctca

SEQ ID NO: 252040 - DNA, 20 bp, synthetic construct
  source 1..20: mol_type = other DNA
ggtctcaaactcctgacctc

SEQ ID NO: 252041 - DNA, 20 bp, synthetic construct
  source 1..20: mol_type = other DNA
tggtctcaaactcctgacct

SEQ ID NO: 252042 - DNA, 20 bp, synthetic construct
  source 1..20: mol_type = other DNA
ctggtctcaaactcctgacc

SEQ ID NO: 252043 - DNA, 20 bp, synthetic construct
  source 1..20: mol_type = other DNA
gctggtctcaaactcctgac

SEQ ID NO: 252044 - DNA, 20 bp, synthetic construct
  source 1..20: mol_type = other DNA
ggctggtctcaaactcctga

SEQ ID NO: 252045 - DNA, 20 bp, synthetic construct
  source 1..20: mol_type = other DNA
aggctggtctcaaactcctg

SEQ ID NO: 252046 - DNA, 20 bp, synthetic construct
  source 1..20: mol_type = other DNA
caggctggtctcaaactcct

SEQ ID NO: 252047 - DNA, 20 bp, synthetic construct
  source 1..20: mol_type = other DNA
ccaggctggtctcaaactcc

SEQ ID NO: 252048 - DNA, 20 bp, synthetic construct
  source 1..20: mol_type = other DNA
gccaggctggtctcaaactc

SEQ ID NO: 252049 - DNA, 20 bp, synthetic construct
  source 1..20: mol_type = other DNA
ggccaggctggtctcaaact

SEQ ID NO: 252050 - DNA, 20 bp, synthetic construct
  source 1..20: mol_type = other DNA
tggccaggctggtctcaaac

SEQ ID NO: 252051 - DNA, 20 bp, synthetic construct
  source 1..20: mol_type = other DNA
ttggccaggctggtctcaaa

SEQ ID NO: 252052 - DNA, 20 bp, synthetic construct
  source 1..20: mol_type = other DNA
gttggccaggctggtctcaa

SEQ ID NO: 252053 - DNA, 20 bp, synthetic construct
  source 1..20: mol_type = other DNA
tgttggccaggctggtctca

SEQ ID NO: 252054 - DNA, 20 bp, synthetic construct
  source 1..20: mol_type = other DNA
atgttggccaggctggtctc

SEQ ID NO: 252055 - DNA, 20 bp, synthetic construct
  source 1..20: mol_type = other DNA
catgttggccaggctggtct

SEQ ID NO: 252056 - DNA, 20 bp, synthetic construct
  source 1..20: mol_type = other DNA
acatgttggccaggctggtc

SEQ ID NO: 252057 - DNA, 20 bp, synthetic construct
  source 1..20: mol_type = other DNA
cacatgttggccaggctggt

SEQ ID NO: 252058 - DNA, 20 bp, synthetic construct
  source 1..20: mol_type = other DNA
tcacatgttggccaggctgg

SEQ ID NO: 252059 - DNA, 20 bp, synthetic construct
  source 1..20: mol_type = other DNA
ttcacatgttggccaggctg

SEQ ID NO: 252060 - DNA, 20 bp, synthetic construct
  source 1..20: mol_type = other DNA
tttcacatgttggccaggct

SEQ ID NO: 252061 - DNA, 20 bp, synthetic construct
  source 1..20: mol_type = other DNA
atttcacatgttggccaggc

SEQ ID NO: 252062 - DNA, 20 bp, synthetic construct
  source 1..20: mol_type = other DNA
gatttcacatgttggccagg

SEQ ID NO: 252063 - DNA, 20 bp, synthetic construct
  source 1..20: mol_type = other DNA
ggatttcacatgttggccag

SEQ ID NO: 252064 - DNA, 20 bp, synthetic construct
  source 1..20: mol_type = other DNA
aggatttcacatgttggcca

SEQ ID NO: 252065 - DNA, 20 bp, synthetic construct
  source 1..20: mol_type = other DNA
caggatttcacatgttggcc

SEQ ID NO: 252066 - DNA, 20 bp, synthetic construct
  source 1..20: mol_type = other DNA
acaggatttcacatgttggc

SEQ ID NO: 252067 - DNA, 20 bp, synthetic construct
  source 1..20: mol_type = other DNA
gacaggatttcacatgttgg

SEQ ID NO: 252068 - DNA, 20 bp, synthetic construct
  source 1..20: mol_type = other DNA
agacaggatttcacatgttg

SEQ ID NO: 252069 - DNA, 20 bp, synthetic construct
  source 1..20: mol_type = other DNA
gagacaggatttcacatgtt

SEQ ID NO: 252070 - DNA, 20 bp, synthetic construct
  source 1..20: mol_type = other DNA
tgagacaggatttcacatgt

SEQ ID NO: 252071 - DNA, 20 bp, synthetic construct
  source 1..20: mol_type = other DNA
gtgagacaggatttcacatg

SEQ ID NO: 252072 - DNA, 20 bp, synthetic construct
  source 1..20: mol_type = other DNA
agtgagacaggatttcacat

SEQ ID NO: 252073 - DNA, 20 bp, synthetic construct
  source 1..20: mol_type = other DNA
tagtgagacaggatttcaca

SEQ ID NO: 252074 - DNA, 20 bp, synthetic construct
  source 1..20: mol_type = other DNA
gtagtgagacaggatttcac

SEQ ID NO: 252075 - DNA, 20 bp, synthetic construct
  source 1..20: mol_type = other DNA
tgtagtgagacaggatttca

SEQ ID NO: 252076 - DNA, 20 bp, synthetic construct
  source 1..20: mol_type = other DNA
ttgtagtgagacaggatttc

SEQ ID NO: 252077 - DNA, 20 bp, synthetic construct
  source 1..20: mol_type = other DNA
tttgtagtgagacaggattt

SEQ ID NO: 252078 - DNA, 20 bp, synthetic construct
  source 1..20: mol_type = other DNA
atttgtagtgagacaggatt

SEQ ID NO: 252079 - DNA, 20 bp, synthetic construct
  source 1..20: mol_type = other DNA
tatttgtagtgagacaggat

SEQ ID NO: 252080 - DNA, 20 bp, synthetic construct
  source 1..20: mol_type = other DNA
ttatttgtagtgagacagga

SEQ ID NO: 252081 - DNA, 20 bp, synthetic construct
  source 1..20: mol_type = other DNA
tttatttgtagtgagacagg

SEQ ID NO: 252082 - DNA, 20 bp, synthetic construct
  source 1..20: mol_type = other DNA
ttttatttgtagtgagacag

SEQ ID NO: 252083 - DNA, 20 bp, synthetic construct
  source 1..20: mol_type = other DNA
tttttatttgtagtgagaca

SEQ ID NO: 252084 - DNA, 20 bp, synthetic construct
  source 1..20: mol_type = other DNA
ttttttatttgtagtgagac

SEQ ID NO: 252085 - DNA, 20 bp, synthetic construct
  source 1..20: mol_type = other DNA
tttttttatttgtagtgaga

SEQ ID NO: 252086 - DNA, 20 bp, synthetic construct
  source 1..20: mol_type = other DNA
atttttttatttgtagtgag

SEQ ID NO: 252087 - DNA, 20 bp, synthetic construct
  source 1..20: mol_type = other DNA
aatttttttatttgtagtga

SEQ ID NO: 252088 - DNA, 20 bp, synthetic construct
  source 1..20: mol_type = other DNA
taatttttttatttgtagtg

SEQ ID NO: 252089 - DNA, 20 bp, synthetic construct
  source 1..20: mol_type = other DNA
ctaatttttttatttgtagt

SEQ ID NO: 252090 - DNA, 20 bp, synthetic construct
  source 1..20: mol_type = other DNA
gctaatttttttatttgtag

SEQ ID NO: 252091 - DNA, 20 bp, synthetic construct
  source 1..20: mol_type = other DNA
ggctaatttttttatttgta

SEQ ID NO: 252092 - DNA, 20 bp, synthetic construct
  source 1..20: mol_type = other DNA
cggctaatttttttatttgt

SEQ ID NO: 252093 - DNA, 20 bp, synthetic construct
  source 1..20: mol_type = other DNA
ccggctaatttttttatttg

SEQ ID NO: 252094 - DNA, 20 bp, synthetic construct
  source 1..20: mol_type = other DNA
cccggctaatttttttattt

SEQ ID NO: 252095 - DNA, 20 bp, synthetic construct
  source 1..20: mol_type = other DNA
acccggctaatttttttatt

SEQ ID NO: 252096 - DNA, 20 bp, synthetic construct
  source 1..20: mol_type = other DNA
cacccggctaatttttttat

SEQ ID NO: 252097 - DNA, 20 bp, synthetic construct
  source 1..20: mol_type = other DNA
acacccggctaattttttta

SEQ ID NO: 252098 - DNA, 20 bp, synthetic construct
  source 1..20: mol_type = other DNA
cacacccggctaattttttt

SEQ ID NO: 252099 - DNA, 20 bp, synthetic construct
  source 1..20: mol_type = other DNA
ccacacccggctaatttttt

SEQ ID NO: 252100 - DNA, 20 bp, synthetic construct
  source 1..20: mol_type = other DNA
accacacccggctaattttt

SEQ ID NO: 252101 - DNA, 20 bp, synthetic construct
  source 1..20: mol_type = other DNA
caccacacccggctaatttt

SEQ ID NO: 252102 - DNA, 20 bp, synthetic construct
  source 1..20: mol_type = other DNA
ccaccacacccggctaattt

SEQ ID NO: 252103 - DNA, 20 bp, synthetic construct
  source 1..20: mol_type = other DNA
accaccacacccggctaatt

SEQ ID NO: 252104 - DNA, 20 bp, synthetic construct
  source 1..20: mol_type = other DNA
taccaccacacccggctaat

SEQ ID NO: 252105 - DNA, 20 bp, synthetic construct
  source 1..20: mol_type = other DNA
ctaccaccacacccggctaa

SEQ ID NO: 252106 - DNA, 20 bp, synthetic construct
  source 1..20: mol_type = other DNA
cctaccaccacacccggcta

SEQ ID NO: 252107 - DNA, 20 bp, synthetic construct
  source 1..20: mol_type = other DNA
acctaccaccacacccggct

SEQ ID NO: 252108 - DNA, 20 bp, synthetic construct
  source 1..20: mol_type = other DNA
cacctaccaccacacccggc

SEQ ID NO: 252109 - DNA, 20 bp, synthetic construct
  source 1..20: mol_type = other DNA
gcacctaccaccacacccgg

SEQ ID NO: 252110 - DNA, 20 bp, synthetic construct
  source 1..20: mol_type = other DNA
ggcacctaccaccacacccg

SEQ ID NO: 252111 - DNA, 20 bp, synthetic construct
  source 1..20: mol_type = other DNA
aggcacctaccaccacaccc

SEQ ID NO: 252112 - DNA, 20 bp, synthetic construct
  source 1..20: mol_type = other DNA
taggcacctaccaccacacc

SEQ ID NO: 252113 - DNA, 20 bp, synthetic construct
  source 1..20: mol_type = other DNA
ataggcacctaccaccacac

SEQ ID NO: 252114 - DNA, 20 bp, synthetic construct
  source 1..20: mol_type = other DNA
tataggcacctaccaccaca

SEQ ID NO: 252115 - DNA, 20 bp, synthetic construct
  source 1..20: mol_type = other DNA
ttataggcacctaccaccac

SEQ ID NO: 252116 - DNA, 20 bp, synthetic construct
  source 1..20: mol_type = other DNA
attataggcacctaccacca

SEQ ID NO: 252117 - DNA, 20 bp, synthetic construct
  source 1..20: mol_type = other DNA
gattataggcacctaccacc

SEQ ID NO: 252118 - DNA, 20 bp, synthetic construct
  source 1..20: mol_type = other DNA
ggattataggcacctaccac

SEQ ID NO: 252119 - DNA, 20 bp, synthetic construct
  source 1..20: mol_type = other DNA
gggattataggcacctacca

SEQ ID NO: 252120 - DNA, 20 bp, synthetic construct
  source 1..20: mol_type = other DNA
tgggattataggcacctacc

SEQ ID NO: 252121 - DNA, 20 bp, synthetic construct
  source 1..20: mol_type = other DNA
ctgggattataggcacctac

SEQ ID NO: 252122 - DNA, 20 bp, synthetic construct
  source 1..20: mol_type = other DNA
gctgggattataggcaccta

SEQ ID NO: 252123 - DNA, 20 bp, synthetic construct
  source 1..20: mol_type = other DNA
agctgggattataggcacct

SEQ ID NO: 252124 - DNA, 20 bp, synthetic construct
  source 1..20: mol_type = other DNA
tagctgggattataggcacc

SEQ ID NO: 252125 - DNA, 20 bp, synthetic construct
  source 1..20: mol_type = other DNA
gtagctgggattataggcac

SEQ ID NO: 252126 - DNA, 20 bp, synthetic construct
  source 1..20: mol_type = other DNA
agtagctgggattataggca

SEQ ID NO: 252127 - DNA, 20 bp, synthetic construct
  source 1..20: mol_type = other DNA
gagtagctgggattataggc

SEQ ID NO: 252128 - DNA, 20 bp, synthetic construct
  source 1..20: mol_type = other DNA
tgagtagctgggattatagg

SEQ ID NO: 252129 - DNA, 20 bp, synthetic construct
  source 1..20: mol_type = other DNA
ctgagtagctgggattatag

SEQ ID NO: 252130 - DNA, 20 bp, synthetic construct
  source 1..20: mol_type = other DNA
cctgagtagctgggattata

SEQ ID NO: 252131 - DNA, 20 bp, synthetic construct
  source 1..20: mol_type = other DNA
tcctgagtagctgggattat

SEQ ID NO: 252132 - DNA, 20 bp, synthetic construct
  source 1..20: mol_type = other DNA
ctcctgagtagctgggatta

SEQ ID NO: 252133 - DNA, 20 bp, synthetic construct
  source 1..20: mol_type = other DNA
cctcctgagtagctgggatt

SEQ ID NO: 252134 - DNA, 20 bp, synthetic construct
  source 1..20: mol_type = other DNA
gcctcctgagtagctgggat

SEQ ID NO: 252135 - DNA, 20 bp, synthetic construct
  source 1..20: mol_type = other DNA
agcctcctgagtagctggga

SEQ ID NO: 252136 - DNA, 20 bp, synthetic construct
  source 1..20: mol_type = other DNA
cagcctcctgagtagctggg

SEQ ID NO: 252137 - DNA, 20 bp, synthetic construct
  source 1..20: mol_type = other DNA
tcagcctcctgagtagctgg

SEQ ID NO: 252138 - DNA, 20 bp, synthetic construct
  source 1..20: mol_type = other DNA
ctcagcctcctgagtagctg

SEQ ID NO: 252139 - DNA, 20 bp, synthetic construct
  source 1..20: mol_type = other DNA
cctcagcctcctgagtagct

SEQ ID NO: 252140 - DNA, 20 bp, synthetic construct
  source 1..20: mol_type = other DNA
gcctcagcctcctgagtagc

SEQ ID NO: 252141 - DNA, 20 bp, synthetic construct
  source 1..20: mol_type = other DNA
tgcctcagcctcctgagtag

SEQ ID NO: 252142 - DNA, 20 bp, synthetic construct
  source 1..20: mol_type = other DNA
ctgcctcagcctcctgagta

SEQ ID NO: 252143 - DNA, 20 bp, synthetic construct
  source 1..20: mol_type = other DNA
cctgcctcagcctcctgagt

SEQ ID NO: 252144 - DNA, 20 bp, synthetic construct
  source 1..20: mol_type = other DNA
tcctgcctcagcctcctgag

SEQ ID NO: 252145 - DNA, 20 bp, synthetic construct
  source 1..20: mol_type = other DNA
gtcctgcctcagcctcctga

SEQ ID NO: 252146 - DNA, 20 bp, synthetic construct
  source 1..20: mol_type = other DNA
tgtcctgcctcagcctcctg

SEQ ID NO: 252147 - DNA, 20 bp, synthetic construct
  source 1..20: mol_type = other DNA
ttgtcctgcctcagcctcct

SEQ ID NO: 252148 - DNA, 20 bp, synthetic construct
  source 1..20: mol_type = other DNA
attgtcctgcctcagcctcc

SEQ ID NO: 252149 - DNA, 20 bp, synthetic construct
  source 1..20: mol_type = other DNA
gattgtcctgcctcagcctc

SEQ ID NO: 252150 - DNA, 20 bp, synthetic construct
  source 1..20: mol_type = other DNA
cgattgtcctgcctcagcct

SEQ ID NO: 252151 - DNA, 20 bp, synthetic construct
  source 1..20: mol_type = other DNA
gcgattgtcctgcctcagcc

SEQ ID NO: 252152 - DNA, 20 bp, synthetic construct
  source 1..20: mol_type = other DNA
agcgattgtcctgcctcagc

SEQ ID NO: 252153 - DNA, 20 bp, synthetic construct
  source 1..20: mol_type = other DNA
gagcgattgtcctgcctcag

SEQ ID NO: 252154 - DNA, 20 bp, synthetic construct
  source 1..20: mol_type = other DNA
cgagcgattgtcctgcctca

SEQ ID NO: 252155 - DNA, 20 bp, synthetic construct
  source 1..20: mol_type = other DNA
tcgagcgattgtcctgcctc

SEQ ID NO: 252156 - DNA, 20 bp, synthetic construct
  source 1..20: mol_type = other DNA
ttcgagcgattgtcctgcct

SEQ ID NO: 252157 - DNA, 20 bp, synthetic construct
  source 1..20: mol_type = other DNA
gttcgagcgattgtcctgcc

SEQ ID NO: 252158 - DNA, 20 bp, synthetic construct
  source 1..20: mol_type = other DNA
ggttcgagcgattgtcctgc

SEQ ID NO: 252159 - DNA, 20 bp, synthetic construct
  source 1..20: mol_type = other DNA
gggttcgagcgattgtcctg

SEQ ID NO: 252160 - DNA, 20 bp, synthetic construct
  source 1..20: mol_type = other DNA
tgggttcgagcgattgtcct

SEQ ID NO: 252161 - DNA, 20 bp, synthetic construct
  source 1..20: mol_type = other DNA
ctgggttcgagcgattgtcc

SEQ ID NO: 252162 - DNA, 20 bp, synthetic construct
  source 1..20: mol_type = other DNA
cctgggttcgagcgattgtc

SEQ ID NO: 252163 - DNA, 20 bp, synthetic construct
  source 1..20: mol_type = other DNA
tcctgggttcgagcgattgt

SEQ ID NO: 252164 - DNA, 20 bp, synthetic construct
  source 1..20: mol_type = other DNA
ctcctgggttcgagcgattg

SEQ ID NO: 252165 - DNA, 20 bp, synthetic construct
  source 1..20: mol_type = other DNA
cctcctgggttcgagcgatt

SEQ ID NO: 252166 - DNA, 20 bp, synthetic construct
  source 1..20: mol_type = other DNA
acctcctgggttcgagcgat

SEQ ID NO: 252167 - DNA, 20 bp, synthetic construct
  source 1..20: mol_type = other DNA
cacctcctgggttcgagcga

SEQ ID NO: 252168 - DNA, 20 bp, synthetic construct
  source 1..20: mol_type = other DNA
ccacctcctgggttcgagcg

SEQ ID NO: 252169 - DNA, 20 bp, synthetic construct
  source 1..20: mol_type = other DNA
tccacctcctgggttcgagc

SEQ ID NO: 252170 - DNA, 20 bp, synthetic construct
  source 1..20: mol_type = other DNA
gtccacctcctgggttcgag

SEQ ID NO: 252171 - DNA, 20 bp, synthetic construct
  source 1..20: mol_type = other DNA
cgtccacctcctgggttcga

SEQ ID NO: 252172 - DNA, 20 bp, synthetic construct
  source 1..20: mol_type = other DNA
acgtccacctcctgggttcg

SEQ ID NO: 252173 - DNA, 20 bp, synthetic construct
  source 1..20: mol_type = other DNA
aacgtccacctcctgggttc

SEQ ID NO: 252174 - DNA, 20 bp, synthetic construct
  source 1..20: mol_type = other DNA
caacgtccacctcctgggtt

SEQ ID NO: 252175 - DNA, 20 bp, synthetic construct
  source 1..20: mol_type = other DNA
gcaacgtccacctcctgggt

SEQ ID NO: 252176 - DNA, 20 bp, synthetic construct
  source 1..20: mol_type = other DNA
tgcaacgtccacctcctggg

SEQ ID NO: 252177 - DNA, 20 bp, synthetic construct
  source 1..20: mol_type = other DNA
ctgcaacgtccacctcctgg

SEQ ID NO: 252178 - DNA, 20 bp, synthetic construct
  source 1..20: mol_type = other DNA
actgcaacgtccacctcctg

SEQ ID NO: 252179 - DNA, 20 bp, synthetic construct
  source 1..20: mol_type = other DNA
cactgcaacgtccacctcct

SEQ ID NO: 252180 - DNA, 20 bp, synthetic construct
  source 1..20: mol_type = other DNA
tcactgcaacgtccacctcc

SEQ ID NO: 252181 - DNA, 20 bp, synthetic construct
  source 1..20: mol_type = other DNA
ctcactgcaacgtccacctc

SEQ ID NO: 252182 - DNA, 20 bp, synthetic construct
  source 1..20: mol_type = other DNA
gctcactgcaacgtccacct

SEQ ID NO: 252183 - DNA, 20 bp, synthetic construct
  source 1..20: mol_type = other DNA
ggctcactgcaacgtccacc

SEQ ID NO: 252184 - DNA, 20 bp, synthetic construct
  source 1..20: mol_type = other DNA
cggctcactgcaacgtccac

SEQ ID NO: 252185 - DNA, 20 bp, synthetic construct
  source 1..20: mol_type = other DNA
tcggctcactgcaacgtcca

SEQ ID NO: 252186 - DNA, 20 bp, synthetic construct
  source 1..20: mol_type = other DNA
ctcggctcactgcaacgtcc

SEQ ID NO: 252187 - DNA, 20 bp, synthetic construct
  source 1..20: mol_type = other DNA
tctcggctcactgcaacgtc

SEQ ID NO: 252188 - DNA, 20 bp, synthetic construct
  source 1..20: mol_type = other DNA
atctcggctcactgcaacgt

SEQ ID NO: 252189 - DNA, 20 bp, synthetic construct
  source 1..20: mol_type = other DNA
gatctcggctcactgcaacg

SEQ ID NO: 252190 - DNA, 20 bp, synthetic construct
  source 1..20: mol_type = other DNA
cgatctcggctcactgcaac

SEQ ID NO: 252191 - DNA, 20 bp, synthetic construct
  source 1..20: mol_type = other DNA
gcgatctcggctcactgcaa

SEQ ID NO: 252192 - DNA, 20 bp, synthetic construct
  source 1..20: mol_type = other DNA
tgcgatctcggctcactgca

SEQ ID NO: 252193 - DNA, 20 bp, synthetic construct
  source 1..20: mol_type = other DNA
atgcgatctcggctcactgc

SEQ ID NO: 252194 - DNA, 20 bp, synthetic construct
  source 1..20: mol_type = other DNA
gatgcgatctcggctcactg

SEQ ID NO: 252195 - DNA, 20 bp, synthetic construct
  source 1..20: mol_type = other DNA
tgatgcgatctcggctcact

SEQ ID NO: 252196 - DNA, 20 bp, synthetic construct
  source 1..20: mol_type = other DNA
atgatgcgatctcggctcac

SEQ ID NO: 252197 - DNA, 20 bp, synthetic construct
  source 1..20: mol_type = other DNA
aatgatgcgatctcggctca

SEQ ID NO: 252198 - DNA, 20 bp, synthetic construct
  source 1..20: mol_type = other DNA
caatgatgcgatctcggctc

SEQ ID NO: 252199 - DNA, 20 bp, synthetic construct
  source 1..20: mol_type = other DNA
gcaatgatgcgatctcggct

SEQ ID NO: 252200 - DNA, 20 bp, synthetic construct
  source 1..20: mol_type = other DNA
tgcaatgatgcgatctcggc

SEQ ID NO: 252201 - DNA, 20 bp, synthetic construct
  source 1..20: mol_type = other DNA
gtgcaatgatgcgatctcgg

SEQ ID NO: 252202 - DNA, 20 bp, synthetic construct
  source 1..20: mol_type = other DNA
agtgcaatgatgcgatctcg

SEQ ID NO: 252203 - DNA, 20 bp, synthetic construct
  source 1..20: mol_type = other DNA
gagtgcaatgatgcgatctc

SEQ ID NO: 252204 - DNA, 20 bp, synthetic construct
  source 1..20: mol_type = other DNA
ggagtgcaatgatgcgatct

SEQ ID NO: 252205 - DNA, 20 bp, synthetic construct
  source 1..20: mol_type = other DNA
tggagtgcaatgatgcgatc

SEQ ID NO: 252206 - DNA, 20 bp, synthetic construct
  source 1..20: mol_type = other DNA
ctggagtgcaatgatgcgat

SEQ ID NO: 252207 - DNA, 20 bp, synthetic construct
  source 1..20: mol_type = other DNA
gctggagtgcaatgatgcga

SEQ ID NO: 252208 - DNA, 20 bp, synthetic construct
  source 1..20: mol_type = other DNA
ggctggagtgcaatgatgcg

SEQ ID NO: 252209 - DNA, 20 bp, synthetic construct
  source 1..20: mol_type = other DNA
aggctggagtgcaatgatgc

SEQ ID NO: 252210 - DNA, 20 bp, synthetic construct
  source 1..20: mol_type = other DNA
caggctggagtgcaatgatg

SEQ ID NO: 252211 - DNA, 20 bp, synthetic construct
  source 1..20: mol_type = other DNA
ccaggctggagtgcaatgat

SEQ ID NO: 252212 - DNA, 20 bp, synthetic construct
  source 1..20: mol_type = other DNA
cccaggctggagtgcaatga

SEQ ID NO: 252213 - DNA, 20 bp, synthetic construct
  source 1..20: mol_type = other DNA
gcccaggctggagtgcaatg

SEQ ID NO: 252214 - DNA, 20 bp, synthetic construct
  source 1..20: mol_type = other DNA
tgcccaggctggagtgcaat

SEQ ID NO: 252215 - DNA, 20 bp, synthetic construct
  source 1..20: mol_type = other DNA
ttgcccaggctggagtgcaa

SEQ ID NO: 252216 - DNA, 20 bp, synthetic construct
  source 1..20: mol_type = other DNA
gttgcccaggctggagtgca

SEQ ID NO: 252217 - DNA, 20 bp, synthetic construct
  source 1..20: mol_type = other DNA
tgttgcccaggctggagtgc

SEQ ID NO: 252218 - DNA, 20 bp, synthetic construct
  source 1..20: mol_type = other DNA
ttgttgcccaggctggagtg

SEQ ID NO: 252219 - DNA, 20 bp, synthetic construct
  source 1..20: mol_type = other DNA
tttgttgcccaggctggagt

SEQ ID NO: 252220 - DNA, 20 bp, synthetic construct
  source 1..20: mol_type = other DNA
ttttgttgcccaggctggag

SEQ ID NO: 252221 - DNA, 20 bp, synthetic construct
  source 1..20: mol_type = other DNA
cttttgttgcccaggctgga

SEQ ID NO: 252222 - DNA, 20 bp, synthetic construct
  source 1..20: mol_type = other DNA
gcttttgttgcccaggctgg

SEQ ID NO: 252223 - DNA, 20 bp, synthetic construct
  source 1..20: mol_type = other DNA
tgcttttgttgcccaggctg

SEQ ID NO: 252224 - DNA, 20 bp, synthetic construct
  source 1..20: mol_type = other DNA
ttgcttttgttgcccaggct

SEQ ID NO: 252225 - DNA, 20 bp, synthetic construct
  source 1..20: mol_type = other DNA
tttgcttttgttgcccaggc

SEQ ID NO: 252226 - DNA, 20 bp, synthetic construct
  source 1..20: mol_type = other DNA
ttttgcttttgttgcccagg

SEQ ID NO: 252227 - DNA, 20 bp, synthetic construct
  source 1..20: mol_type = other DNA
gttttgcttttgttgcccag

SEQ ID NO: 252228 - DNA, 20 bp, synthetic construct
  source 1..20: mol_type = other DNA
agttttgcttttgttgccca

SEQ ID NO: 252229 - DNA, 20 bp, synthetic construct
  source 1..20: mol_type = other DNA
gagttttgcttttgttgccc

SEQ ID NO: 252230 - DNA, 20 bp, synthetic construct
  source 1..20: mol_type = other DNA
ggagttttgcttttgttgcc

SEQ ID NO: 252231 - DNA, 20 bp, synthetic construct
  source 1..20: mol_type = other DNA
cggagttttgcttttgttgc

SEQ ID NO: 252232 - DNA, 20 bp, synthetic construct
  source 1..20: mol_type = other DNA
acggagttttgcttttgttg

SEQ ID NO: 252233 - DNA, 20 bp, synthetic construct
  source 1..20: mol_type = other DNA
gacggagttttgcttttgtt

SEQ ID NO: 252234 - DNA, 20 bp, synthetic construct
  source 1..20: mol_type = other DNA
agacggagttttgcttttgt

SEQ ID NO: 252235 - DNA, 20 bp, synthetic construct
  source 1..20: mol_type = other DNA
gagacggagttttgcttttg

SEQ ID NO: 252236 - DNA, 20 bp, synthetic construct
  source 1..20: mol_type = other DNA
tgagacggagttttgctttt

SEQ ID NO: 252237 - DNA, 20 bp, synthetic construct
  source 1..20: mol_type = other DNA
ttgagacggagttttgcttt

SEQ ID NO: 252238 - DNA, 20 bp, synthetic construct
  source 1..20: mol_type = other DNA
tttgagacggagttttgctt

SEQ ID NO: 252239 - DNA, 20 bp, synthetic construct
  source 1..20: mol_type = other DNA
ttttgagacggagttttgct

SEQ ID NO: 252240 - DNA, 20 bp, synthetic construct
  source 1..20: mol_type = other DNA
tttttgagacggagttttgc

SEQ ID NO: 252241 - DNA, 20 bp, synthetic construct
  source 1..20: mol_type = other DNA
ttttttgagacggagttttg

SEQ ID NO: 252242 - DNA, 20 bp, synthetic construct
  source 1..20: mol_type = other DNA
tttttttgagacggagtttt

SEQ ID NO: 252243 - DNA, 20 bp, synthetic construct
  source 1..20: mol_type = other DNA
ttttttttgagacggagttt

SEQ ID NO: 252244 - DNA, 20 bp, synthetic construct
  source 1..20: mol_type = other DNA
tttttttttgagacggagtt

SEQ ID NO: 252245 - DNA, 20 bp, synthetic construct
  source 1..20: mol_type = other DNA
ttttttttttgagacggagt

SEQ ID NO: 252246 - DNA, 20 bp, synthetic construct
  source 1..20: mol_type = other DNA
tttttttttttgagacggag

SEQ ID NO: 252247 - DNA, 20 bp, synthetic construct
  source 1..20: mol_type = other DNA
ttttttttttttgagacgga

SEQ ID NO: 252248 - DNA, 20 bp, synthetic construct
  source 1..20: mol_type = other DNA
cttttttttttttgagacgg

SEQ ID NO: 252249 - DNA, 20 bp, synthetic construct
  source 1..20: mol_type = other DNA
tcttttttttttttgagacg

SEQ ID NO: 252250 - DNA, 20 bp, synthetic construct
  source 1..20: mol_type = other DNA
ttcttttttttttttgagac

SEQ ID NO: 252251 - DNA, 20 bp, synthetic construct
  source 1..20: mol_type = other DNA
tttcttttttttttttgaga

SEQ ID NO: 252252 - DNA, 20 bp, synthetic construct
  source 1..20: mol_type = other DNA
gtttcttttttttttttgag

SEQ ID NO: 252253 - DNA, 20 bp, synthetic construct
  source 1..20: mol_type = other DNA
agtttcttttttttttttga

SEQ ID NO: 252254 - DNA, 20 bp, synthetic construct
  source 1..20: mol_type = other DNA
gagtttcttttttttttttg

SEQ ID NO: 252255 - DNA, 20 bp, synthetic construct
  source 1..20: mol_type = other DNA
tgagtttctttttttttttt

SEQ ID NO: 252256 - DNA, 20 bp, synthetic construct
  source 1..20: mol_type = other DNA
ttgagtttcttttttttttt

SEQ ID NO: 252257 - DNA, 20 bp, synthetic construct
  source 1..20: mol_type = other DNA
tttgagtttctttttttttt

SEQ ID NO: 252258 - DNA, 20 bp, synthetic construct
  source 1..20: mol_type = other DNA
atttgagtttcttttttttt

SEQ ID NO: 252259 - DNA, 20 bp, synthetic construct
  source 1..20: mol_type = other DNA
tatttgagtttctttttttt

SEQ ID NO: 252260 - DNA, 20 bp, synthetic construct
  source 1..20: mol_type = other DNA
atatttgagtttcttttttt

SEQ ID NO: 252261 - DNA, 20 bp, synthetic construct
  source 1..20: mol_type = other DNA
catatttgagtttctttttt

SEQ ID NO: 252262 - DNA, 20 bp, synthetic construct
  source 1..20: mol_type = other DNA
acatatttgagtttcttttt

SEQ ID NO: 252263 - DNA, 20 bp, synthetic construct
  source 1..20: mol_type = other DNA
cacatatttgagtttctttt

SEQ ID NO: 252264 - DNA, 20 bp, synthetic construct
  source 1..20: mol_type = other DNA
acacatatttgagtttcttt

SEQ ID NO: 252265 - DNA, 20 bp, synthetic construct
  source 1..20: mol_type = other DNA
cacacatatttgagtttctt

SEQ ID NO: 252266 - DNA, 20 bp, synthetic construct
  source 1..20: mol_type = other DNA
tcacacatatttgagtttct

SEQ ID NO: 252267 - DNA, 20 bp, synthetic construct
  source 1..20: mol_type = other DNA
gtcacacatatttgagtttc

SEQ ID NO: 252268 - DNA, 20 bp, synthetic construct
  source 1..20: mol_type = other DNA
tgtcacacatatttgagttt

SEQ ID NO: 252269 - DNA, 20 bp, synthetic construct
  source 1..20: mol_type = other DNA
ctgtcacacatatttgagtt

SEQ ID NO: 252270 - DNA, 20 bp, synthetic construct
  source 1..20: mol_type = other DNA
cctgtcacacatatttgagt

SEQ ID NO: 252271 - DNA, 20 bp, synthetic construct
  source 1..20: mol_type = other DNA
gcctgtcacacatatttgag

SEQ ID NO: 252272 - DNA, 20 bp, synthetic construct
  source 1..20: mol_type = other DNA
cgcctgtcacacatatttga

SEQ ID NO: 252273 - DNA, 20 bp, synthetic construct
  source 1..20: mol_type = other DNA
tcgcctgtcacacatatttg

SEQ ID NO: 252274 - DNA, 20 bp, synthetic construct
  source 1..20: mol_type = other DNA
atcgcctgtcacacatattt

SEQ ID NO: 252275 - DNA, 20 bp, synthetic construct
  source 1..20: mol_type = other DNA
aatcgcctgtcacacatatt

SEQ ID NO: 252276 - DNA, 20 bp, synthetic construct
  source 1..20: mol_type = other DNA
gaatcgcctgtcacacatat

SEQ ID NO: 252277 - DNA, 20 bp, synthetic construct
  source 1..20: mol_type = other DNA
agaatcgcctgtcacacata

SEQ ID NO: 252278 - DNA, 20 bp, synthetic construct
  source 1..20: mol_type = other DNA
gagaatcgcctgtcacacat

SEQ ID NO: 252279 - DNA, 20 bp, synthetic construct
  source 1..20: mol_type = other DNA
tgagaatcgcctgtcacaca

SEQ ID NO: 252280 - DNA, 20 bp, synthetic construct
  source 1..20: mol_type = other DNA
gtgagaatcgcctgtcacac

SEQ ID NO: 252281 - DNA, 20 bp, synthetic construct
  source 1..20: mol_type = other DNA
agtgagaatcgcctgtcaca

SEQ ID NO: 252282 - DNA, 20 bp, synthetic construct
  source 1..20: mol_type = other DNA
cagtgagaatcgcctgtcac

SEQ ID NO: 252283 - DNA, 20 bp, synthetic construct
  source 1..20: mol_type = other DNA
gcagtgagaatcgcctgtca

SEQ ID NO: 252284 - DNA, 20 bp, synthetic construct
  source 1..20: mol_type = other DNA
tgcagtgagaatcgcctgtc

SEQ ID NO: 252285 - DNA, 20 bp, synthetic construct
  source 1..20: mol_type = other DNA
ctgcagtgagaatcgcctgt

SEQ ID NO: 252286 - DNA, 20 bp, synthetic construct
  source 1..20: mol_type = other DNA
cctgcagtgagaatcgcctg

SEQ ID NO: 252287 - DNA, 20 bp, synthetic construct
  source 1..20: mol_type = other DNA
gcctgcagtgagaatcgcct

SEQ ID NO: 252288 - DNA, 20 bp, synthetic construct
  source 1..20: mol_type = other DNA
agcctgcagtgagaatcgcc

SEQ ID NO: 252289 - DNA, 20 bp, synthetic construct
  source 1..20: mol_type = other DNA
cagcctgcagtgagaatcgc

SEQ ID NO: 252290 - DNA, 20 bp, synthetic construct
  source 1..20: mol_type = other DNA
gcagcctgcagtgagaatcg

SEQ ID NO: 252291 - DNA, 20 bp, synthetic construct
  source 1..20: mol_type = other DNA
ggcagcctgcagtgagaatc

SEQ ID NO: 252292 - DNA, 20 bp, synthetic construct
  source 1..20: mol_type = other DNA
gggcagcctgcagtgagaat

SEQ ID NO: 252293 - DNA, 20 bp, synthetic construct
  source 1..20: mol_type = other DNA
agggcagcctgcagtgagaa

SEQ ID NO: 252294 - DNA, 20 bp, synthetic construct
  source 1..20: mol_type = other DNA
cagggcagcctgcagtgaga

SEQ ID NO: 252295 - DNA, 20 bp, synthetic construct
  source 1..20: mol_type = other DNA
acagggcagcctgcagtgag

SEQ ID NO: 252296 - DNA, 20 bp, synthetic construct
  source 1..20: mol_type = other DNA
cacagggcagcctgcagtga

SEQ ID NO: 252297 - DNA, 20 bp, synthetic construct
  source 1..20: mol_type = other DNA
ccacagggcagcctgcagtg

SEQ ID NO: 252298 - DNA, 20 bp, synthetic construct
  source 1..20: mol_type = other DNA
gccacagggcagcctgcagt

SEQ ID NO: 252299 - DNA, 20 bp, synthetic construct
  source 1..20: mol_type = other DNA
agccacagggcagcctgcag

SEQ ID NO: 252300 - DNA, 20 bp, synthetic construct
  source 1..20: mol_type = other DNA
cagccacagggcagcctgca

SEQ ID NO: 252301 - DNA, 20 bp, synthetic construct
  source 1..20: mol_type = other DNA
tcagccacagggcagcctgc

SEQ ID NO: 252302 - DNA, 20 bp, synthetic construct
  source 1..20: mol_type = other DNA
atcagccacagggcagcctg

SEQ ID NO: 252303 - DNA, 20 bp, synthetic construct
  source 1..20: mol_type = other DNA
gatcagccacagggcagcct

SEQ ID NO: 252304 - DNA, 20 bp, synthetic construct
  source 1..20: mol_type = other DNA
ggatcagccacagggcagcc

SEQ ID NO: 252305 - DNA, 20 bp, synthetic construct
  source 1..20: mol_type = other DNA
tggatcagccacagggcagc

SEQ ID NO: 252306 - DNA, 20 bp, synthetic construct
  source 1..20: mol_type = other DNA
ctggatcagccacagggcag

SEQ ID NO: 252307 - DNA, 20 bp, synthetic construct
  source 1..20: mol_type = other DNA
cctggatcagccacagggca

SEQ ID NO: 252308 - DNA, 20 bp, synthetic construct
  source 1..20: mol_type = other DNA
tcctggatcagccacagggc

SEQ ID NO: 252309 - DNA, 20 bp, synthetic construct
  source 1..20: mol_type = other DNA
ctcctggatcagccacaggg

SEQ ID NO: 252310 - DNA, 20 bp, synthetic construct
  source 1..20: mol_type = other DNA
gctcctggatcagccacagg

SEQ ID NO: 252311 - DNA, 20 bp, synthetic construct
  source 1..20: mol_type = other DNA
tgctcctggatcagccacag

SEQ ID NO: 252312 - DNA, 20 bp, synthetic construct
  source 1..20: mol_type = other DNA
ttgctcctggatcagccaca

SEQ ID NO: 252313 - DNA, 20 bp, synthetic construct
  source 1..20: mol_type = other DNA
cttgctcctggatcagccac

SEQ ID NO: 252314 - DNA, 20 bp, synthetic construct
  source 1..20: mol_type = other DNA
ccttgctcctggatcagcca

SEQ ID NO: 252315 - DNA, 20 bp, synthetic construct
  source 1..20: mol_type = other DNA
gccttgctcctggatcagcc

SEQ ID NO: 252316 - DNA, 20 bp, synthetic construct
  source 1..20: mol_type = other DNA
ggccttgctcctggatcagc

SEQ ID NO: 252317 - DNA, 20 bp, synthetic construct
  source 1..20: mol_type = other DNA
aggccttgctcctggatcag

SEQ ID NO: 252318 - DNA, 20 bp, synthetic construct
  source 1..20: mol_type = other DNA
aaggccttgctcctggatca

SEQ ID NO: 252319 - DNA, 20 bp, synthetic construct
  source 1..20: mol_type = other DNA
taaggccttgctcctggatc

SEQ ID NO: 252320 - DNA, 20 bp, synthetic construct
  source 1..20: mol_type = other DNA
ttaaggccttgctcctggat

SEQ ID NO: 252321 - DNA, 20 bp, synthetic construct
  source 1..20: mol_type = other DNA
gttaaggccttgctcctgga

SEQ ID NO: 252322 - DNA, 20 bp, synthetic construct
  source 1..20: mol_type = other DNA
ggttaaggccttgctcctgg

SEQ ID NO: 252323 - DNA, 20 bp, synthetic construct
  source 1..20: mol_type = other DNA
tggttaaggccttgctcctg

SEQ ID NO: 252324 - DNA, 20 bp, synthetic construct
  source 1..20: mol_type = other DNA
atggttaaggccttgctcct

SEQ ID NO: 252325 - DNA, 20 bp, synthetic construct
  source 1..20: mol_type = other DNA
catggttaaggccttgctcc

SEQ ID NO: 252326 - DNA, 20 bp, synthetic construct
  source 1..20: mol_type = other DNA
acatggttaaggccttgctc

SEQ ID NO: 252327 - DNA, 20 bp, synthetic construct
  source 1..20: mol_type = other DNA
gacatggttaaggccttgct

SEQ ID NO: 252328 - DNA, 20 bp, synthetic construct
  source 1..20: mol_type = other DNA
tgacatggttaaggccttgc

SEQ ID NO: 252329 - DNA, 20 bp, synthetic construct
  source 1..20: mol_type = other DNA
atgacatggttaaggccttg

SEQ ID NO: 252330 - DNA, 20 bp, synthetic construct
  source 1..20: mol_type = other DNA
gatgacatggttaaggcctt

SEQ ID NO: 252331 - DNA, 20 bp, synthetic construct
  source 1..20: mol_type = other DNA
ggatgacatggttaaggcct

SEQ ID NO: 252332 - DNA, 20 bp, synthetic construct
  source 1..20: mol_type = other DNA
gggatgacatggttaaggcc

SEQ ID NO: 252333 - DNA, 20 bp, synthetic construct
  source 1..20: mol_type = other DNA
ggggatgacatggttaaggc

SEQ ID NO: 252334 - DNA, 20 bp, synthetic construct
  source 1..20: mol_type = other DNA
tggggatgacatggttaagg

SEQ ID NO: 252335 - DNA, 20 bp, synthetic construct
  source 1..20: mol_type = other DNA
ttggggatgacatggttaag

SEQ ID NO: 252336 - DNA, 20 bp, synthetic construct
  source 1..20: mol_type = other DNA
cttggggatgacatggttaa

SEQ ID NO: 252337 - DNA, 20 bp, synthetic construct
  source 1..20: mol_type = other DNA
gcttggggatgacatggtta

SEQ ID NO: 252338 - DNA, 20 bp, synthetic construct
  source 1..20: mol_type = other DNA
cgcttggggatgacatggtt

SEQ ID NO: 252339 - DNA, 20 bp, synthetic construct
  source 1..20: mol_type = other DNA
tcgcttggggatgacatggt

SEQ ID NO: 252340 - DNA, 20 bp, synthetic construct
  source 1..20: mol_type = other DNA
atcgcttggggatgacatgg

SEQ ID NO: 252341 - DNA, 20 bp, synthetic construct
  source 1..20: mol_type = other DNA
aatcgcttggggatgacatg

SEQ ID NO: 252342 - DNA, 20 bp, synthetic construct
  source 1..20: mol_type = other DNA
caatcgcttggggatgacat

SEQ ID NO: 252343 - DNA, 20 bp, synthetic construct
  source 1..20: mol_type = other DNA
gcaatcgcttggggatgaca

SEQ ID NO: 252344 - DNA, 20 bp, synthetic construct
  source 1..20: mol_type = other DNA
agcaatcgcttggggatgac

SEQ ID NO: 252345 - DNA, 20 bp, synthetic construct
  source 1..20: mol_type = other DNA
aagcaatcgcttggggatga

SEQ ID NO: 252346 - DNA, 20 bp, synthetic construct
  source 1..20: mol_type = other DNA
caagcaatcgcttggggatg

SEQ ID NO: 252347 - DNA, 20 bp, synthetic construct
  source 1..20: mol_type = other DNA
acaagcaatcgcttggggat

SEQ ID NO: 252348 - DNA, 20 bp, synthetic construct
  source 1..20: mol_type = other DNA
tacaagcaatcgcttgggga

SEQ ID NO: 252349 - DNA, 20 bp, synthetic construct
  source 1..20: mol_type = other DNA
ttacaagcaatcgcttgggg

SEQ ID NO: 252350 - DNA, 20 bp, synthetic construct
  source 1..20: mol_type = other DNA
tttacaagcaatcgcttggg

SEQ ID NO: 252351 - DNA, 20 bp, synthetic construct
  source 1..20: mol_type = other DNA
gtttacaagcaatcgcttgg

SEQ ID NO: 252352 - DNA, 20 bp, synthetic construct
  source 1..20: mol_type = other DNA
agtttacaagcaatcgcttg

SEQ ID NO: 252353 - DNA, 20 bp, synthetic construct
  source 1..20: mol_type = other DNA
aagtttacaagcaatcgctt

SEQ ID NO: 252354 - DNA, 20 bp, synthetic construct
  source 1..20: mol_type = other DNA
aaagtttacaagcaatcgct

SEQ ID NO: 252355 - DNA, 20 bp, synthetic construct
  source 1..20: mol_type = other DNA
gaaagtttacaagcaatcgc

SEQ ID NO: 252356 - DNA, 20 bp, synthetic construct
  source 1..20: mol_type = other DNA
agaaagtttacaagcaatcg

SEQ ID NO: 252357 - DNA, 20 bp, synthetic construct
  source 1..20: mol_type = other DNA
aagaaagtttacaagcaatc

SEQ ID NO: 252358 - DNA, 20 bp, synthetic construct
  source 1..20: mol_type = other DNA
gaagaaagtttacaagcaat

SEQ ID NO: 252359 - DNA, 20 bp, synthetic construct
  source 1..20: mol_type = other DNA
agaagaaagtttacaagcaa

SEQ ID NO: 252360 - DNA, 20 bp, synthetic construct
  source 1..20: mol_type = other DNA
cagaagaaagtttacaagca

SEQ ID NO: 252361 - DNA, 20 bp, synthetic construct
  source 1..20: mol_type = other DNA
acagaagaaagtttacaagc

SEQ ID NO: 252362 - DNA, 20 bp, synthetic construct
  source 1..20: mol_type = other DNA
cacagaagaaagtttacaag

SEQ ID NO: 252363 - DNA, 20 bp, synthetic construct
  source 1..20: mol_type = other DNA
gcacagaagaaagtttacaa

SEQ ID NO: 252364 - DNA, 20 bp, synthetic construct
  source 1..20: mol_type = other DNA
tgcacagaagaaagtttaca

SEQ ID NO: 252365 - DNA, 20 bp, synthetic construct
  source 1..20: mol_type = other DNA
ctgcacagaagaaagtttac

SEQ ID NO: 252366 - DNA, 20 bp, synthetic construct
  source 1..20: mol_type = other DNA
gctgcacagaagaaagttta

SEQ ID NO: 252367 - DNA, 20 bp, synthetic construct
  source 1..20: mol_type = other DNA
ggctgcacagaagaaagttt

SEQ ID NO: 252368 - DNA, 20 bp, synthetic construct
  source 1..20: mol_type = other DNA
aggctgcacagaagaaagtt

SEQ ID NO: 252369 - DNA, 20 bp, synthetic construct
  source 1..20: mol_type = other DNA
aaggctgcacagaagaaagt

SEQ ID NO: 252370 - DNA, 20 bp, synthetic construct
  source 1..20: mol_type = other DNA
gaaggctgcacagaagaaag

SEQ ID NO: 252371 - DNA, 20 bp, synthetic construct
  source 1..20: mol_type = other DNA
tgaaggctgcacagaagaaa

SEQ ID NO: 252372 - DNA, 20 bp, synthetic construct
  source 1..20: mol_type = other DNA
ttgaaggctgcacagaagaa

SEQ ID NO: 252373 - DNA, 20 bp, synthetic construct
  source 1..20: mol_type = other DNA
gttgaaggctgcacagaaga

SEQ ID NO: 252374 - DNA, 20 bp, synthetic construct
  source 1..20: mol_type = other DNA
ggttgaaggctgcacagaag

SEQ ID NO: 252375 - DNA, 20 bp, synthetic construct
  source 1..20: mol_type = other DNA
gggttgaaggctgcacagaa

SEQ ID NO: 252376 - DNA, 20 bp, synthetic construct
  source 1..20: mol_type = other DNA
agggttgaaggctgcacaga

SEQ ID NO: 252377 - DNA, 20 bp, synthetic construct
  source 1..20: mol_type = other DNA
aagggttgaaggctgcacag

SEQ ID NO: 252378 - DNA, 20 bp, synthetic construct
  source 1..20: mol_type = other DNA
taagggttgaaggctgcaca

SEQ ID NO: 252379 - DNA, 20 bp, synthetic construct
  source 1..20: mol_type = other DNA
ataagggttgaaggctgcac

SEQ ID NO: 252380 - DNA, 20 bp, synthetic construct
  source 1..20: mol_type = other DNA
aataagggttgaaggctgca

SEQ ID NO: 252381 - DNA, 20 bp, synthetic construct
  source 1..20: mol_type = other DNA
taataagggttgaaggctgc

SEQ ID NO: 252382 - DNA, 20 bp, synthetic construct
  source 1..20: mol_type = other DNA
ataataagggttgaaggctg

SEQ ID NO: 252383 - DNA, 20 bp, synthetic construct
  source 1..20: mol_type = other DNA
cataataagggttgaaggct

SEQ ID NO: 252384 - DNA, 20 bp, synthetic construct
  source 1..20: mol_type = other DNA
tcataataagggttgaaggc

SEQ ID NO: 252385 - DNA, 20 bp, synthetic construct
  source 1..20: mol_type = other DNA
atcataataagggttgaagg

SEQ ID NO: 252386 - DNA, 20 bp, synthetic construct
  source 1..20: mol_type = other DNA
aatcataataagggttgaag

SEQ ID NO: 252387 - DNA, 20 bp, synthetic construct
  source 1..20: mol_type = other DNA
aaatcataataagggttgaa

SEQ ID NO: 252388 - DNA, 20 bp, synthetic construct
  source 1..20: mol_type = other DNA
aaaatcataataagggttga

SEQ ID NO: 252389 - DNA, 20 bp, synthetic construct
  source 1..20: mol_type = other DNA
gaaaatcataataagggttg

SEQ ID NO: 252390 - DNA, 20 bp, synthetic construct
  source 1..20: mol_type = other DNA
agaaaatcataataagggtt

SEQ ID NO: 252391 - DNA, 20 bp, synthetic construct
  source 1..20: mol_type = other DNA
aagaaaatcataataagggt

SEQ ID NO: 252392 - DNA, 20 bp, synthetic construct
  source 1..20: mol_type = other DNA
gaagaaaatcataataaggg

SEQ ID NO: 252393 - DNA, 20 bp, synthetic construct
  source 1..20: mol_type = other DNA
agaagaaaatcataataagg

SEQ ID NO: 252394 - DNA, 20 bp, synthetic construct
  source 1..20: mol_type = other DNA
gagaagaaaatcataataag

SEQ ID NO: 252395 - DNA, 20 bp, synthetic construct
  source 1..20: mol_type = other DNA
tgagaagaaaatcataataa

SEQ ID NO: 252396 - DNA, 20 bp, synthetic construct
  source 1..20: mol_type = other DNA
ctgagaagaaaatcataata

SEQ ID NO: 252397 - DNA, 20 bp, synthetic construct
  source 1..20: mol_type = other DNA
cctgagaagaaaatcataat

SEQ ID NO: 252398 - DNA, 20 bp, synthetic construct
  source 1..20: mol_type = other DNA
tcctgagaagaaaatcataa

SEQ ID NO: 252399 - DNA, 20 bp, synthetic construct
  source 1..20: mol_type = other DNA
ttcctgagaagaaaatcata

SEQ ID NO: 252400 - DNA, 20 bp, synthetic construct
  source 1..20: mol_type = other DNA
gttcctgagaagaaaatcat

SEQ ID NO: 252401 - DNA, 20 bp, synthetic construct
  source 1..20: mol_type = other DNA
ggttcctgagaagaaaatca

SEQ ID NO: 252402 - DNA, 20 bp, synthetic construct
  source 1..20: mol_type = other DNA
tggttcctgagaagaaaatc

SEQ ID NO: 252403 - DNA, 20 bp, synthetic construct
  source 1..20: mol_type = other DNA
ttggttcctgagaagaaaat

SEQ ID NO: 252404 - DNA, 20 bp, synthetic construct
  source 1..20: mol_type = other DNA
tttggttcctgagaagaaaa

SEQ ID NO: 252405 - DNA, 20 bp, synthetic construct
  source 1..20: mol_type = other DNA
gtttggttcctgagaagaaa

SEQ ID NO: 252406 - DNA, 20 bp, synthetic construct
  source 1..20: mol_type = other DNA
agtttggttcctgagaagaa

SEQ ID NO: 252407 - DNA, 20 bp, synthetic construct
  source 1..20: mol_type = other DNA
cagtttggttcctgagaaga

SEQ ID NO: 252408 - DNA, 20 bp, synthetic construct
  source 1..20: mol_type = other DNA
gcagtttggttcctgagaag

SEQ ID NO: 252409 - DNA, 20 bp, synthetic construct
  source 1..20: mol_type = other DNA
agcagtttggttcctgagaa

SEQ ID NO: 252410 - DNA, 20 bp, synthetic construct
  source 1..20: mol_type = other DNA
cagcagtttggttcctgaga

SEQ ID NO: 252411 - DNA, 20 bp, synthetic construct
  source 1..20: mol_type = other DNA
acagcagtttggttcctgag

SEQ ID NO: 252412 - DNA, 20 bp, synthetic construct
  source 1..20: mol_type = other DNA
tacagcagtttggttcctga

SEQ ID NO: 252413 - DNA, 20 bp, synthetic construct
  source 1..20: mol_type = other DNA
atacagcagtttggttcctg

SEQ ID NO: 252414 - DNA, 20 bp, synthetic construct
  source 1..20: mol_type = other DNA
aatacagcagtttggttcct

SEQ ID NO: 252415 - DNA, 20 bp, synthetic construct
  source 1..20: mol_type = other DNA
gaatacagcagtttggttcc

SEQ ID NO: 252416 - DNA, 20 bp, synthetic construct
  source 1..20: mol_type = other DNA
tgaatacagcagtttggttc

SEQ ID NO: 252417 - DNA, 20 bp, synthetic construct
  source 1..20: mol_type = other DNA
ttgaatacagcagtttggtt

SEQ ID NO: 252418 - DNA, 20 bp, synthetic construct
  source 1..20: mol_type = other DNA
cttgaatacagcagtttggt

SEQ ID NO: 252419 - DNA, 20 bp, synthetic construct
  source 1..20: mol_type = other DNA
tcttgaatacagcagtttgg

SEQ ID NO: 252420 - DNA, 20 bp, synthetic construct
  source 1..20: mol_type = other DNA
ttcttgaatacagcagtttg

SEQ ID NO: 252421 - DNA, 20 bp, synthetic construct
  source 1..20: mol_type = other DNA
tttcttgaatacagcagttt

SEQ ID NO: 252422 - DNA, 20 bp, synthetic construct
  source 1..20: mol_type = other DNA
ctttcttgaatacagcagtt

SEQ ID NO: 252423 - DNA, 20 bp, synthetic construct
  source 1..20: mol_type = other DNA
cctttcttgaatacagcagt

SEQ ID NO: 252424 - DNA, 20 bp, synthetic construct
  source 1..20: mol_type = other DNA
gcctttcttgaatacagcag

SEQ ID NO: 252425 - DNA, 20 bp, synthetic construct
  source 1..20: mol_type = other DNA
tgcctttcttgaatacagca

SEQ ID NO: 252426 - DNA, 20 bp, synthetic construct
  source 1..20: mol_type = other DNA
ctgcctttcttgaatacagc

SEQ ID NO: 252427 - DNA, 20 bp, synthetic construct
  source 1..20: mol_type = other DNA
gctgcctttcttgaatacag

SEQ ID NO: 252428 - DNA, 20 bp, synthetic construct
  source 1..20: mol_type = other DNA
agctgcctttcttgaataca

SEQ ID NO: 252429 - DNA, 20 bp, synthetic construct
  source 1..20: mol_type = other DNA
aagctgcctttcttgaatac

SEQ ID NO: 252430 - DNA, 20 bp, synthetic construct
  source 1..20: mol_type = other DNA
aaagctgcctttcttgaata

SEQ ID NO: 252431 - DNA, 20 bp, synthetic construct
  source 1..20: mol_type = other DNA
caaagctgcctttcttgaat

SEQ ID NO: 252432 - DNA, 20 bp, synthetic construct
  source 1..20: mol_type = other DNA
acaaagctgcctttcttgaa

SEQ ID NO: 252433 - DNA, 20 bp, synthetic construct
  source 1..20: mol_type = other DNA
cacaaagctgcctttcttga

SEQ ID NO: 252434 - DNA, 20 bp, synthetic construct
  source 1..20: mol_type = other DNA
acacaaagctgcctttcttg

SEQ ID NO: 252435 - DNA, 20 bp, synthetic construct
  source 1..20: mol_type = other DNA
tacacaaagctgcctttctt

SEQ ID NO: 252436 - DNA, 20 bp, synthetic construct
  source 1..20: mol_type = other DNA
ttacacaaagctgcctttct

SEQ ID NO: 252437 - DNA, 20 bp, synthetic construct
  source 1..20: mol_type = other DNA
attacacaaagctgcctttc

SEQ ID NO: 252438 - DNA, 20 bp, synthetic construct
  source 1..20: mol_type = other DNA
gattacacaaagctgccttt

SEQ ID NO: 252439 - DNA, 20 bp, synthetic construct
  source 1..20: mol_type = other DNA
tgattacacaaagctgcctt

SEQ ID NO: 252440 - DNA, 20 bp, synthetic construct
  source 1..20: mol_type = other DNA
atgattacacaaagctgcct

SEQ ID NO: 252441 - DNA, 20 bp, synthetic construct
  source 1..20: mol_type = other DNA
aatgattacacaaagctgcc

SEQ ID NO: 252442 - DNA, 20 bp, synthetic construct
  source 1..20: mol_type = other DNA
aaatgattacacaaagctgc

SEQ ID NO: 252443 - DNA, 20 bp, synthetic construct
  source 1..20: mol_type = other DNA
taaatgattacacaaagctg

SEQ ID NO: 252444 - DNA, 20 bp, synthetic construct
  source 1..20: mol_type = other DNA
ataaatgattacacaaagct

SEQ ID NO: 252445 - DNA, 20 bp, synthetic construct
  source 1..20: mol_type = other DNA
gataaatgattacacaaagc

SEQ ID NO: 252446 - DNA, 20 bp, synthetic construct
  source 1..20: mol_type = other DNA
tgataaatgattacacaaag

SEQ ID NO: 252447 - DNA, 20 bp, synthetic construct
  source 1..20: mol_type = other DNA
atgataaatgattacacaaa

SEQ ID NO: 252448 - DNA, 20 bp, synthetic construct
  source 1..20: mol_type = other DNA
tatgataaatgattacacaa

SEQ ID NO: 252449 - DNA, 20 bp, synthetic construct
  source 1..20: mol_type = other DNA
ttatgataaatgattacaca

SEQ ID NO: 252450 - DNA, 20 bp, synthetic construct
  source 1..20: mol_type = other DNA
tttatgataaatgattacac

SEQ ID NO: 252451 - DNA, 20 bp, synthetic construct
  source 1..20: mol_type = other DNA
atttatgataaatgattaca

SEQ ID NO: 252452 - DNA, 20 bp, synthetic construct
  source 1..20: mol_type = other DNA
tatttatgataaatgattac

SEQ ID NO: 252453 - DNA, 20 bp, synthetic construct
  source 1..20: mol_type = other DNA
atatttatgataaatgatta

SEQ ID NO: 252454 - DNA, 20 bp, synthetic construct
  source 1..20: mol_type = other DNA
gatatttatgataaatgatt

SEQ ID NO: 252455 - DNA, 20 bp, synthetic construct
  source 1..20: mol_type = other DNA
agatatttatgataaatgat

SEQ ID NO: 252456 - DNA, 20 bp, synthetic construct
  source 1..20: mol_type = other DNA
aagatatttatgataaatga

SEQ ID NO: 252457 - DNA, 20 bp, synthetic construct
  source 1..20: mol_type = other DNA
taagatatttatgataaatg

SEQ ID NO: 252458 - DNA, 20 bp, synthetic construct
  source 1..20: mol_type = other DNA
ttaagatatttatgataaat

SEQ ID NO: 252459 - DNA, 20 bp, synthetic construct
  source 1..20: mol_type = other DNA
cttaagatatttatgataaa

SEQ ID NO: 252460 - DNA, 20 bp, synthetic construct
  source 1..20: mol_type = other DNA
tcttaagatatttatgataa

SEQ ID NO: 252461 - DNA, 20 bp, synthetic construct
  source 1..20: mol_type = other DNA
ttcttaagatatttatgata

SEQ ID NO: 252462 - DNA, 20 bp, synthetic construct
  source 1..20: mol_type = other DNA
tttcttaagatatttatgat

SEQ ID NO: 252463 - DNA, 20 bp, synthetic construct
  source 1..20: mol_type = other DNA
ttttcttaagatatttatga

SEQ ID NO: 252464 - DNA, 20 bp, synthetic construct
  source 1..20: mol_type = other DNA
tttttcttaagatatttatg

SEQ ID NO: 252465 - DNA, 20 bp, synthetic construct
  source 1..20: mol_type = other DNA
atttttcttaagatatttat

SEQ ID NO: 252466 - DNA, 20 bp, synthetic construct
  source 1..20: mol_type = other DNA
gatttttcttaagatattta

SEQ ID NO: 252467 - DNA, 20 bp, synthetic construct
  source 1..20: mol_type = other DNA
ggatttttcttaagatattt

SEQ ID NO: 252468 - DNA, 20 bp, synthetic construct
  source 1..20: mol_type = other DNA
aggatttttcttaagatatt

SEQ ID NO: 252469 - DNA, 20 bp, synthetic construct
  source 1..20: mol_type = other DNA
taggatttttcttaagatat

SEQ ID NO: 252470 - DNA, 20 bp, synthetic construct
  source 1..20: mol_type = other DNA
ctaggatttttcttaagata

SEQ ID NO: 252471 - DNA, 20 bp, synthetic construct
  source 1..20: mol_type = other DNA
tctaggatttttcttaagat

SEQ ID NO: 252472 - DNA, 20 bp, synthetic construct
  source 1..20: mol_type = other DNA
ctctaggatttttcttaaga

SEQ ID NO: 252473 - DNA, 20 bp, synthetic construct
  source 1..20: mol_type = other DNA
tctctaggatttttcttaag

SEQ ID NO: 252474 - DNA, 20 bp, synthetic construct
  source 1..20: mol_type = other DNA
atctctaggatttttcttaa

SEQ ID NO: 252475 - DNA, 20 bp, synthetic construct
  source 1..20: mol_type = other DNA
aatctctaggatttttctta

SEQ ID NO: 252476 - DNA, 20 bp, synthetic construct
  source 1..20: mol_type = other DNA
gaatctctaggatttttctt

SEQ ID NO: 252477 - DNA, 20 bp, synthetic construct
  source 1..20: mol_type = other DNA
ggaatctctaggatttttct

SEQ ID NO: 252478 - DNA, 20 bp, synthetic construct
  source 1..20: mol_type = other DNA
aggaatctctaggatttttc

SEQ ID NO: 252479 - DNA, 20 bp, synthetic construct
  source 1..20: mol_type = other DNA
taggaatctctaggattttt

SEQ ID NO: 252480 - DNA, 20 bp, synthetic construct
  source 1..20: mol_type = other DNA
ttaggaatctctaggatttt

SEQ ID NO: 252481 - DNA, 20 bp, synthetic construct
  source 1..20: mol_type = other DNA
attaggaatctctaggattt

SEQ ID NO: 252482 - DNA, 20 bp, synthetic construct
  source 1..20: mol_type = other DNA
aattaggaatctctaggatt

SEQ ID NO: 252483 - DNA, 20 bp, synthetic construct
  source 1..20: mol_type = other DNA
aaattaggaatctctaggat

SEQ ID NO: 252484 - DNA, 20 bp, synthetic construct
  source 1..20: mol_type = other DNA
aaaattaggaatctctagga

SEQ ID NO: 252485 - DNA, 20 bp, synthetic construct
  source 1..20: mol_type = other DNA
taaaattaggaatctctagg

SEQ ID NO: 252486 - DNA, 20 bp, synthetic construct
  source 1..20: mol_type = other DNA
ctaaaattaggaatctctag

SEQ ID NO: 252487 - DNA, 20 bp, synthetic construct
  source 1..20: mol_type = other DNA
cctaaaattaggaatctcta

SEQ ID NO: 252488 - DNA, 20 bp, synthetic construct
  source 1..20: mol_type = other DNA
tcctaaaattaggaatctct

SEQ ID NO: 252489 - DNA, 20 bp, synthetic construct
  source 1..20: mol_type = other DNA
ttcctaaaattaggaatctc

SEQ ID NO: 252490 - DNA, 20 bp, synthetic construct
  source 1..20: mol_type = other DNA
tttcctaaaattaggaatct

SEQ ID NO: 252491 - DNA, 20 bp, synthetic construct
  source 1..20: mol_type = other DNA
atttcctaaaattaggaatc

SEQ ID NO: 252492 - DNA, 20 bp, synthetic construct
  source 1..20: mol_type = other DNA
catttcctaaaattaggaat

SEQ ID NO: 252493 - DNA, 20 bp, synthetic construct
  source 1..20: mol_type = other DNA
ccatttcctaaaattaggaa

SEQ ID NO: 252494 - DNA, 20 bp, synthetic construct
  source 1..20: mol_type = other DNA
cccatttcctaaaattagga

SEQ ID NO: 252495 - DNA, 20 bp, synthetic construct
  source 1..20: mol_type = other DNA
tcccatttcctaaaattagg

SEQ ID NO: 252496 - DNA, 20 bp, synthetic construct
  source 1..20: mol_type = other DNA
ctcccatttcctaaaattag

SEQ ID NO: 252497 - DNA, 20 bp, synthetic construct
  source 1..20: mol_type = other DNA
tctcccatttcctaaaatta

SEQ ID NO: 252498 - DNA, 20 bp, synthetic construct
  source 1..20: mol_type = other DNA
gtctcccatttcctaaaatt

SEQ ID NO: 252499 - DNA, 20 bp, synthetic construct
  source 1..20: mol_type = other DNA
ggtctcccatttcctaaaat

SEQ ID NO: 252500 - DNA, 20 bp, synthetic construct
  source 1..20: mol_type = other DNA
aggtctcccatttcctaaaa

SEQ ID NO: 252501 - DNA, 20 bp, synthetic construct
  source 1..20: mol_type = other DNA
taggtctcccatttcctaaa

SEQ ID NO: 252502 - DNA, 20 bp, synthetic construct
  source 1..20: mol_type = other DNA
ataggtctcccatttcctaa

SEQ ID NO: 252503 - DNA, 20 bp, synthetic construct
  source 1..20: mol_type = other DNA
cataggtctcccatttccta

SEQ ID NO: 252504 - DNA, 20 bp, synthetic construct
  source 1..20: mol_type = other DNA
ccataggtctcccatttcct

SEQ ID NO: 252505 - DNA, 20 bp, synthetic construct
  source 1..20: mol_type = other DNA
accataggtctcccatttcc

SEQ ID NO: 252506 - DNA, 20 bp, synthetic construct
  source 1..20: mol_type = other DNA
taccataggtctcccatttc

SEQ ID NO: 252507 - DNA, 20 bp, synthetic construct
  source 1..20: mol_type = other DNA
gtaccataggtctcccattt

SEQ ID NO: 252508 - DNA, 20 bp, synthetic construct
  source 1..20: mol_type = other DNA
agtaccataggtctcccatt

SEQ ID NO: 252509 - DNA, 20 bp, synthetic construct
  source 1..20: mol_type = other DNA
cagtaccataggtctcccat

SEQ ID NO: 252510 - DNA, 20 bp, synthetic construct
  source 1..20: mol_type = other DNA
tcagtaccataggtctccca

SEQ ID NO: 252511 - DNA, 20 bp, synthetic construct
  source 1..20: mol_type = other DNA
atcagtaccataggtctccc

SEQ ID NO: 252512 - DNA, 20 bp, synthetic construct
  source 1..20: mol_type = other DNA
tatcagtaccataggtctcc

SEQ ID NO: 252513 - DNA, 20 bp, synthetic construct
  source 1..20: mol_type = other DNA
atatcagtaccataggtctc

SEQ ID NO: 252514 - DNA, 20 bp, synthetic construct
  source 1..20: mol_type = other DNA
tatatcagtaccataggtct

SEQ ID NO: 252515 - DNA, 20 bp, synthetic construct
  source 1..20: mol_type = other DNA
ttatatcagtaccataggtc

SEQ ID NO: 252516 - DNA, 20 bp, synthetic construct
  source 1..20: mol_type = other DNA
attatatcagtaccataggt

SEQ ID NO: 252517 - DNA, 20 bp, synthetic construct
  source 1..20: mol_type = other DNA
cattatatcagtaccatagg

SEQ ID NO: 252518 - DNA, 20 bp, synthetic construct
  source 1..20: mol_type = other DNA
acattatatcagtaccatag

SEQ ID NO: 252519 - DNA, 20 bp, synthetic construct
  source 1..20: mol_type = other DNA
cacattatatcagtaccata

SEQ ID NO: 252520 - DNA, 20 bp, synthetic construct
  source 1..20: mol_type = other DNA
ccacattatatcagtaccat

SEQ ID NO: 252521 - DNA, 20 bp, synthetic construct
  source 1..20: mol_type = other DNA
cccacattatatcagtacca

SEQ ID NO: 252522 - DNA, 20 bp, synthetic construct
  source 1..20: mol_type = other DNA
gcccacattatatcagtacc

SEQ ID NO: 252523 - DNA, 20 bp, synthetic construct
  source 1..20: mol_type = other DNA
agcccacattatatcagtac

SEQ ID NO: 252524 - DNA, 20 bp, synthetic construct
  source 1..20: mol_type = other DNA
cagcccacattatatcagta

SEQ ID NO: 252525 - DNA, 20 bp, synthetic construct
  source 1..20: mol_type = other DNA
ccagcccacattatatcagt

SEQ ID NO: 252526 - DNA, 20 bp, synthetic construct
  source 1..20: mol_type = other DNA
cccagcccacattatatcag

SEQ ID NO: 252527 - DNA, 20 bp, synthetic construct
  source 1..20: mol_type = other DNA
gcccagcccacattatatca

SEQ ID NO: 252528 - DNA, 20 bp, synthetic construct
  source 1..20: mol_type = other DNA
agcccagcccacattatatc

SEQ ID NO: 252529 - DNA, 20 bp, synthetic construct
  source 1..20: mol_type = other DNA
aagcccagcccacattatat

SEQ ID NO: 252530 - DNA, 20 bp, synthetic construct
  source 1..20: mol_type = other DNA
caagcccagcccacattata

SEQ ID NO: 252531 - DNA, 20 bp, synthetic construct
  source 1..20: mol_type = other DNA
acaagcccagcccacattat

SEQ ID NO: 252532 - DNA, 20 bp, synthetic construct
  source 1..20: mol_type = other DNA
aacaagcccagcccacatta

SEQ ID NO: 252533 - DNA, 20 bp, synthetic construct
  source 1..20: mol_type = other DNA
aaacaagcccagcccacatt

SEQ ID NO: 252534 - DNA, 20 bp, synthetic construct
  source 1..20: mol_type = other DNA
aaaacaagcccagcccacat

SEQ ID NO: 252535 - DNA, 20 bp, synthetic construct
  source 1..20: mol_type = other DNA
gaaaacaagcccagcccaca

SEQ ID NO: 252536 - DNA, 20 bp, synthetic construct
  source 1..20: mol_type = other DNA
agaaaacaagcccagcccac

SEQ ID NO: 252537 - DNA, 20 bp, synthetic construct
  source 1..20: mol_type = other DNA
cagaaaacaagcccagccca

SEQ ID NO: 252538 - DNA, 20 bp, synthetic construct
  source 1..20: mol_type = other DNA
acagaaaacaagcccagccc

SEQ ID NO: 252539 - DNA, 20 bp, synthetic construct
  source 1..20: mol_type = other DNA
gacagaaaacaagcccagcc

SEQ ID NO: 252540 - DNA, 20 bp, synthetic construct
  source 1..20: mol_type = other DNA
tgacagaaaacaagcccagc

SEQ ID NO: 252541 - DNA, 20 bp, synthetic construct
  source 1..20: mol_type = other DNA
atgacagaaaacaagcccag

SEQ ID NO: 252542 - DNA, 20 bp, synthetic construct
  source 1..20: mol_type = other DNA
aatgacagaaaacaagccca

SEQ ID NO: 252543 - DNA, 20 bp, synthetic construct
  source 1..20: mol_type = other DNA
aaatgacagaaaacaagccc

SEQ ID NO: 252544 - DNA, 20 bp, synthetic construct
  source 1..20: mol_type = other DNA
caaatgacagaaaacaagcc

SEQ ID NO: 252545 - DNA, 20 bp, synthetic construct
  source 1..20: mol_type = other DNA
gcaaatgacagaaaacaagc

SEQ ID NO: 252546 - DNA, 20 bp, synthetic construct
  source 1..20: mol_type = other DNA
agcaaatgacagaaaacaag

SEQ ID NO: 252547 - DNA, 20 bp, synthetic construct
  source 1..20: mol_type = other DNA
tagcaaatgacagaaaacaa

SEQ ID NO: 252548 - DNA, 20 bp, synthetic construct
  source 1..20: mol_type = other DNA
ctagcaaatgacagaaaaca

SEQ ID NO: 252549 - DNA, 20 bp, synthetic construct
  source 1..20: mol_type = other DNA
tctagcaaatgacagaaaac

SEQ ID NO: 252550 - DNA, 20 bp, synthetic construct
  source 1..20: mol_type = other DNA
atctagcaaatgacagaaaa

SEQ ID NO: 252551 - DNA, 20 bp, synthetic construct
  source 1..20: mol_type = other DNA
tatctagcaaatgacagaaa

SEQ ID NO: 252552 - DNA, 20 bp, synthetic construct
  source 1..20: mol_type = other DNA
ttatctagcaaatgacagaa

SEQ ID NO: 252553 - DNA, 20 bp, synthetic construct
  source 1..20: mol_type = other DNA
tttatctagcaaatgacaga

SEQ ID NO: 252554 - DNA, 20 bp, synthetic construct
  source 1..20: mol_type = other DNA
atttatctagcaaatgacag

SEQ ID NO: 252555 - DNA, 20 bp, synthetic construct
  source 1..20: mol_type = other DNA
catttatctagcaaatgaca

SEQ ID NO: 252556 - DNA, 20 bp, synthetic construct
  source 1..20: mol_type = other DNA
tcatttatctagcaaatgac

SEQ ID NO: 252557 - DNA, 20 bp, synthetic construct
  source 1..20: mol_type = other DNA
ttcatttatctagcaaatga

SEQ ID NO: 252558 - DNA, 20 bp, synthetic construct
  source 1..20: mol_type = other DNA
gttcatttatctagcaaatg

SEQ ID NO: 252559 - DNA, 20 bp, synthetic construct
  source 1..20: mol_type = other DNA
agttcatttatctagcaaat

SEQ ID NO: 252560 - DNA, 20 bp, synthetic construct
  source 1..20: mol_type = other DNA
aagttcatttatctagcaaa

SEQ ID NO: 252561 - DNA, 20 bp, synthetic construct
  source 1..20: mol_type = other DNA
caagttcatttatctagcaa

SEQ ID NO: 252562 - DNA, 20 bp, synthetic construct
  source 1..20: mol_type = other DNA
tcaagttcatttatctagca

SEQ ID NO: 252563 - DNA, 20 bp, synthetic construct
  source 1..20: mol_type = other DNA
ctcaagttcatttatctagc

SEQ ID NO: 252564 - DNA, 20 bp, synthetic construct
  source 1..20: mol_type = other DNA
tctcaagttcatttatctag

SEQ ID NO: 252565 - DNA, 20 bp, synthetic construct
  source 1..20: mol_type = other DNA
ctctcaagttcatttatcta

SEQ ID NO: 252566 - DNA, 20 bp, synthetic construct
  source 1..20: mol_type = other DNA
gctctcaagttcatttatct

SEQ ID NO: 252567 - DNA, 20 bp, synthetic construct
  source 1..20: mol_type = other DNA
ggctctcaagttcatttatc

SEQ ID NO: 252568 - DNA, 20 bp, synthetic construct
  source 1..20: mol_type = other DNA
aggctctcaagttcatttat

SEQ ID NO: 252569 - DNA, 20 bp, synthetic construct
  source 1..20: mol_type = other DNA
taggctctcaagttcattta

SEQ ID NO: 252570 - DNA, 20 bp, synthetic construct
  source 1..20: mol_type = other DNA
gtaggctctcaagttcattt

SEQ ID NO: 252571 - DNA, 20 bp, synthetic construct
  source 1..20: mol_type = other DNA
agtaggctctcaagttcatt

SEQ ID NO: 252572 - DNA, 20 bp, synthetic construct
  source 1..20: mol_type = other DNA
cagtaggctctcaagttcat

SEQ ID NO: 252573 - DNA, 20 bp, synthetic construct
  source 1..20: mol_type = other DNA
acagtaggctctcaagttca

SEQ ID NO: 252574 - DNA, 20 bp, synthetic construct
  source 1..20: mol_type = other DNA
tacagtaggctctcaagttc

SEQ ID NO: 252575 - DNA, 20 bp, synthetic construct
  source 1..20: mol_type = other DNA
ttacagtaggctctcaagtt

SEQ ID NO: 252576 - DNA, 20 bp, synthetic construct
  source 1..20: mol_type = other DNA
tttacagtaggctctcaagt

SEQ ID NO: 252577 - DNA, 20 bp, synthetic construct
  source 1..20: mol_type = other DNA
ttttacagtaggctctcaag

SEQ ID NO: 252578 - DNA, 20 bp, synthetic construct
  source 1..20: mol_type = other DNA
attttacagtaggctctcaa

SEQ ID NO: 252579 - DNA, 20 bp, synthetic construct
  source 1..20: mol_type = other DNA
cattttacagtaggctctca

SEQ ID NO: 252580 - DNA, 20 bp, synthetic construct
  source 1..20: mol_type = other DNA
acattttacagtaggctctc

SEQ ID NO: 252581 - DNA, 20 bp, synthetic construct
  source 1..20: mol_type = other DNA
cacattttacagtaggctct

SEQ ID NO: 252582 - DNA, 20 bp, synthetic construct
  source 1..20: mol_type = other DNA
ccacattttacagtaggctc

SEQ ID NO: 252583 - DNA, 20 bp, synthetic construct
  source 1..20: mol_type = other DNA
tccacattttacagtaggct

SEQ ID NO: 252584 - DNA, 20 bp, synthetic construct
  source 1..20: mol_type = other DNA
ttccacattttacagtaggc

SEQ ID NO: 252585 - DNA, 20 bp, synthetic construct
  source 1..20: mol_type = other DNA
cttccacattttacagtagg

SEQ ID NO: 252586 - DNA, 20 bp, synthetic construct
  source 1..20: mol_type = other DNA
gcttccacattttacagtag

SEQ ID NO: 252587 - DNA, 20 bp, synthetic construct
  source 1..20: mol_type = other DNA
agcttccacattttacagta

SEQ ID NO: 252588 - DNA, 20 bp, synthetic construct
  source 1..20: mol_type = other DNA
aagcttccacattttacagt

SEQ ID NO: 252589 - DNA, 20 bp, synthetic construct
  source 1..20: mol_type = other DNA
gaagcttccacattttacag

SEQ ID NO: 252590 - DNA, 20 bp, synthetic construct
  source 1..20: mol_type = other DNA
agaagcttccacattttaca

SEQ ID NO: 252591 - DNA, 20 bp, synthetic construct
  source 1..20: mol_type = other DNA
tagaagcttccacattttac

SEQ ID NO: 252592 - DNA, 20 bp, synthetic construct
  source 1..20: mol_type = other DNA
ctagaagcttccacatttta

SEQ ID NO: 252593 - DNA, 20 bp, synthetic construct
  source 1..20: mol_type = other DNA
tctagaagcttccacatttt

SEQ ID NO: 252594 - DNA, 20 bp, synthetic construct
  source 1..20: mol_type = other DNA
atctagaagcttccacattt

SEQ ID NO: 252595 - DNA, 20 bp, synthetic construct
  source 1..20: mol_type = other DNA
aatctagaagcttccacatt

SEQ ID NO: 252596 - DNA, 20 bp, synthetic construct
  source 1..20: mol_type = other DNA
caatctagaagcttccacat

SEQ ID NO: 252597 - DNA, 20 bp, synthetic construct
  source 1..20: mol_type = other DNA
gcaatctagaagcttccaca

SEQ ID NO: 252598 - DNA, 20 bp, synthetic construct
  source 1..20: mol_type = other DNA
tgcaatctagaagcttccac

SEQ ID NO: 252599 - DNA, 20 bp, synthetic construct
  source 1..20: mol_type = other DNA
ctgcaatctagaagcttcca

SEQ ID NO: 252600 - DNA, 20 bp, synthetic construct
  source 1..20: mol_type = other DNA
tctgcaatctagaagcttcc

SEQ ID NO: 252601 - DNA, 20 bp, synthetic construct
  source 1..20: mol_type = other DNA
ttctgcaatctagaagcttc

SEQ ID NO: 252602 - DNA, 20 bp, synthetic construct
  source 1..20: mol_type = other DNA
cttctgcaatctagaagctt

SEQ ID NO: 252603 - DNA, 20 bp, synthetic construct
  source 1..20: mol_type = other DNA
ccttctgcaatctagaagct

SEQ ID NO: 252604 - DNA, 20 bp, synthetic construct
  source 1..20: mol_type = other DNA
cccttctgcaatctagaagc

SEQ ID NO: 252605 - DNA, 20 bp, synthetic construct
  source 1..20: mol_type = other DNA
gcccttctgcaatctagaag

SEQ ID NO: 252606 - DNA, 20 bp, synthetic construct
  source 1..20: mol_type = other DNA
agcccttctgcaatctagaa

SEQ ID NO: 252607 - DNA, 20 bp, synthetic construct
  source 1..20: mol_type = other DNA
cagcccttctgcaatctaga

SEQ ID NO: 252608 - DNA, 20 bp, synthetic construct
  source 1..20: mol_type = other DNA
ccagcccttctgcaatctag

SEQ ID NO: 252609 - DNA, 20 bp, synthetic construct
  source 1..20: mol_type = other DNA
tccagcccttctgcaatcta

SEQ ID NO: 252610 - DNA, 20 bp, synthetic construct
  source 1..20: mol_type = other DNA
ttccagcccttctgcaatct

SEQ ID NO: 252611 - DNA, 20 bp, synthetic construct
  source 1..20: mol_type = other DNA
tttccagcccttctgcaatc

SEQ ID NO: 252612 - DNA, 20 bp, synthetic construct
  source 1..20: mol_type = other DNA
ctttccagcccttctgcaat

SEQ ID NO: 252613 - DNA, 20 bp, synthetic construct
  source 1..20: mol_type = other DNA
tctttccagcccttctgcaa

SEQ ID NO: 252614 - DNA, 20 bp, synthetic construct
  source 1..20: mol_type = other DNA
gtctttccagcccttctgca

SEQ ID NO: 252615 - DNA, 20 bp, synthetic construct
  source 1..20: mol_type = other DNA
tgtctttccagcccttctgc

SEQ ID NO: 252616 - DNA, 20 bp, synthetic construct
  source 1..20: mol_type = other DNA
gtgtctttccagcccttctg

SEQ ID NO: 252617 - DNA, 20 bp, synthetic construct
  source 1..20: mol_type = other DNA
agtgtctttccagcccttct

SEQ ID NO: 252618 - DNA, 20 bp, synthetic construct
  source 1..20: mol_type = other DNA
cagtgtctttccagcccttc

SEQ ID NO: 252619 - DNA, 20 bp, synthetic construct
  source 1..20: mol_type = other DNA
acagtgtctttccagccctt

SEQ ID NO: 252620 - DNA, 20 bp, synthetic construct
  source 1..20: mol_type = other DNA
aacagtgtctttccagccct

SEQ ID NO: 252621 - DNA, 20 bp, synthetic construct
  source 1..20: mol_type = other DNA
gaacagtgtctttccagccc

SEQ ID NO: 252622 - DNA, 20 bp, synthetic construct
  source 1..20: mol_type = other DNA
agaacagtgtctttccagcc

SEQ ID NO: 252623 - DNA, 20 bp, synthetic construct
  source 1..20: mol_type = other DNA
aagaacagtgtctttccagc

SEQ ID NO: 252624 - DNA, 20 bp, synthetic construct
  source 1..20: mol_type = other DNA
aaagaacagtgtctttccag

SEQ ID NO: 252625 - DNA, 20 bp, synthetic construct
  source 1..20: mol_type = other DNA
aaaagaacagtgtctttcca

SEQ ID NO: 252626 - DNA, 20 bp, synthetic construct
  source 1..20: mol_type = other DNA
gaaaagaacagtgtctttcc

SEQ ID NO: 252627 - DNA, 20 bp, synthetic construct
  source 1..20: mol_type = other DNA
agaaaagaacagtgtctttc

SEQ ID NO: 252628 - DNA, 20 bp, synthetic construct
  source 1..20: mol_type = other DNA
gagaaaagaacagtgtcttt

SEQ ID NO: 252629 - DNA, 20 bp, synthetic construct
  source 1..20: mol_type = other DNA
ggagaaaagaacagtgtctt

SEQ ID NO: 252630 - DNA, 20 bp, synthetic construct
  source 1..20: mol_type = other DNA
gggagaaaagaacagtgtct

SEQ ID NO: 252631 - DNA, 20 bp, synthetic construct
  source 1..20: mol_type = other DNA
cgggagaaaagaacagtgtc

SEQ ID NO: 252632 - DNA, 20 bp, synthetic construct
  source 1..20: mol_type = other DNA
tcgggagaaaagaacagtgt

SEQ ID NO: 252633 - DNA, 20 bp, synthetic construct
  source 1..20: mol_type = other DNA
ctcgggagaaaagaacagtg

SEQ ID NO: 252634 - DNA, 20 bp, synthetic construct
  source 1..20: mol_type = other DNA
actcgggagaaaagaacagt

SEQ ID NO: 252635 - DNA, 20 bp, synthetic construct
  source 1..20: mol_type = other DNA
cactcgggagaaaagaacag

SEQ ID NO: 252636 - DNA, 20 bp, synthetic construct
  source 1..20: mol_type = other DNA
tcactcgggagaaaagaaca

SEQ ID NO: 252637 - DNA, 20 bp, synthetic construct
  source 1..20: mol_type = other DNA
atcactcgggagaaaagaac

SEQ ID NO: 252638 - DNA, 20 bp, synthetic construct
  source 1..20: mol_type = other DNA
catcactcgggagaaaagaa

SEQ ID NO: 252639 - DNA, 20 bp, synthetic construct
  source 1..20: mol_type = other DNA
ccatcactcgggagaaaaga

SEQ ID NO: 252640 - DNA, 20 bp, synthetic construct
  source 1..20: mol_type = other DNA
cccatcactcgggagaaaag

SEQ ID NO: 252641 - DNA, 20 bp, synthetic construct
  source 1..20: mol_type = other DNA
tcccatcactcgggagaaaa

SEQ ID NO: 252642 - DNA, 20 bp, synthetic construct
  source 1..20: mol_type = other DNA
atcccatcactcgggagaaa

SEQ ID NO: 252643 - DNA, 20 bp, synthetic construct
  source 1..20: mol_type = other DNA
gatcccatcactcgggagaa

SEQ ID NO: 252644 - DNA, 20 bp, synthetic construct
  source 1..20: mol_type = other DNA
agatcccatcactcgggaga

SEQ ID NO: 252645 - DNA, 20 bp, synthetic construct
  source 1..20: mol_type = other DNA
cagatcccatcactcgggag

SEQ ID NO: 252646 - DNA, 20 bp, synthetic construct
  source 1..20: mol_type = other DNA
acagatcccatcactcggga

SEQ ID NO: 252647 - DNA, 20 bp, synthetic construct
  source 1..20: mol_type = other DNA
gacagatcccatcactcggg

SEQ ID NO: 252648 - DNA, 20 bp, synthetic construct
  source 1..20: mol_type = other DNA
ggacagatcccatcactcgg

SEQ ID NO: 252649 - DNA, 20 bp, synthetic construct
  source 1..20: mol_type = other DNA
tggacagatcccatcactcg

SEQ ID NO: 252650 - DNA, 20 bp, synthetic construct
  source 1..20: mol_type = other DNA
ctggacagatcccatcactc

SEQ ID NO: 252651 - DNA, 20 bp, synthetic construct
  source 1..20: mol_type = other DNA
actggacagatcccatcact

SEQ ID NO: 252652 - DNA, 20 bp, synthetic construct
  source 1..20: mol_type = other DNA
tactggacagatcccatcac

SEQ ID NO: 252653 - DNA, 20 bp, synthetic construct
  source 1..20: mol_type = other DNA
atactggacagatcccatca

SEQ ID NO: 252654 - DNA, 20 bp, synthetic construct
  source 1..20: mol_type = other DNA
aatactggacagatcccatc

SEQ ID NO: 252655 - DNA, 20 bp, synthetic construct
  source 1..20: mol_type = other DNA
aaatactggacagatcccat

SEQ ID NO: 252656 - DNA, 20 bp, synthetic construct
  source 1..20: mol_type = other DNA
taaatactggacagatccca

SEQ ID NO: 252657 - DNA, 20 bp, synthetic construct
  source 1..20: mol_type = other DNA
ctaaatactggacagatccc

SEQ ID NO: 252658 - DNA, 20 bp, synthetic construct
  source 1..20: mol_type = other DNA
tctaaatactggacagatcc

SEQ ID NO: 252659 - DNA, 20 bp, synthetic construct
  source 1..20: mol_type = other DNA
ctctaaatactggacagatc

SEQ ID NO: 252660 - DNA, 20 bp, synthetic construct
  source 1..20: mol_type = other DNA
gctctaaatactggacagat

SEQ ID NO: 252661 - DNA, 20 bp, synthetic construct
  source 1..20: mol_type = other DNA
agctctaaatactggacaga

SEQ ID NO: 252662 - DNA, 20 bp, synthetic construct
  source 1..20: mol_type = other DNA
cagctctaaatactggacag

SEQ ID NO: 252663 - DNA, 20 bp, synthetic construct
  source 1..20: mol_type = other DNA
gcagctctaaatactggaca

SEQ ID NO: 252664 - DNA, 20 bp, synthetic construct
  source 1..20: mol_type = other DNA
ggcagctctaaatactggac

SEQ ID NO: 252665 - DNA, 20 bp, synthetic construct
  source 1..20: mol_type = other DNA
aggcagctctaaatactgga

SEQ ID NO: 252666 - DNA, 20 bp, synthetic construct
  source 1..20: mol_type = other DNA
gaggcagctctaaatactgg

SEQ ID NO: 252667 - DNA, 20 bp, synthetic construct
  source 1..20: mol_type = other DNA
agaggcagctctaaatactg

SEQ ID NO: 252668 - DNA, 20 bp, synthetic construct
  source 1..20: mol_type = other DNA
cagaggcagctctaaatact

SEQ ID NO: 252669 - DNA, 20 bp, synthetic construct
  source 1..20: mol_type = other DNA
tcagaggcagctctaaatac

SEQ ID NO: 252670 - DNA, 20 bp, synthetic construct
  source 1..20: mol_type = other DNA
ctcagaggcagctctaaata

SEQ ID NO: 252671 - DNA, 20 bp, synthetic construct
  source 1..20: mol_type = other DNA
cctcagaggcagctctaaat

SEQ ID NO: 252672 - DNA, 20 bp, synthetic construct
  source 1..20: mol_type = other DNA
gcctcagaggcagctctaaa

SEQ ID NO: 252673 - DNA, 20 bp, synthetic construct
  source 1..20: mol_type = other DNA
ggcctcagaggcagctctaa

SEQ ID NO: 252674 - DNA, 20 bp, synthetic construct
  source 1..20: mol_type = other DNA
tggcctcagaggcagctcta

SEQ ID NO: 252675 - DNA, 20 bp, synthetic construct
  source 1..20: mol_type = other DNA
atggcctcagaggcagctct

SEQ ID NO: 252676 - DNA, 20 bp, synthetic construct
  source 1..20: mol_type = other DNA
gatggcctcagaggcagctc

SEQ ID NO: 252677 - DNA, 20 bp, synthetic construct
  source 1..20: mol_type = other DNA
agatggcctcagaggcagct

SEQ ID NO: 252678 - DNA, 20 bp, synthetic construct
  source 1..20: mol_type = other DNA
cagatggcctcagaggcagc

SEQ ID NO: 252679 - DNA, 20 bp, synthetic construct
  source 1..20: mol_type = other DNA
tcagatggcctcagaggcag

SEQ ID NO: 252680 - DNA, 20 bp, synthetic construct
  source 1..20: mol_type = other DNA
atcagatggcctcagaggca

SEQ ID NO: 252681 - DNA, 20 bp, synthetic construct
  source 1..20: mol_type = other DNA
aatcagatggcctcagaggc

SEQ ID NO: 252682 - DNA, 20 bp, synthetic construct
  source 1..20: mol_type = other DNA
gaatcagatggcctcagagg

SEQ ID NO: 252683 - DNA, 20 bp, synthetic construct
  source 1..20: mol_type = other DNA
agaatcagatggcctcagag

SEQ ID NO: 252684 - DNA, 20 bp, synthetic construct
  source 1..20: mol_type = other DNA
tagaatcagatggcctcaga

SEQ ID NO: 252685 - DNA, 20 bp, synthetic construct
  source 1..20: mol_type = other DNA
ctagaatcagatggcctcag

SEQ ID NO: 252686 - DNA, 20 bp, synthetic construct
  source 1..20: mol_type = other DNA
cctagaatcagatggcctca

SEQ ID NO: 252687 - DNA, 20 bp, synthetic construct
  source 1..20: mol_type = other DNA
tcctagaatcagatggcctc

SEQ ID NO: 252688 - DNA, 20 bp, synthetic construct
  source 1..20: mol_type = other DNA
ctcctagaatcagatggcct

SEQ ID NO: 252689 - DNA, 20 bp, synthetic construct
  source 1..20: mol_type = other DNA
tctcctagaatcagatggcc

SEQ ID NO: 252690 - DNA, 20 bp, synthetic construct
  source 1..20: mol_type = other DNA
gtctcctagaatcagatggc

SEQ ID NO: 252691 - DNA, 20 bp, synthetic construct
  source 1..20: mol_type = other DNA
agtctcctagaatcagatgg

SEQ ID NO: 252692 - DNA, 20 bp, synthetic construct
  source 1..20: mol_type = other DNA
gagtctcctagaatcagatg

SEQ ID NO: 252693 - DNA, 20 bp, synthetic construct
  source 1..20: mol_type = other DNA
agagtctcctagaatcagat

SEQ ID NO: 252694 - DNA, 20 bp, synthetic construct
  source 1..20: mol_type = other DNA
cagagtctcctagaatcaga

SEQ ID NO: 252695 - DNA, 20 bp, synthetic construct
  source 1..20: mol_type = other DNA
gcagagtctcctagaatcag

SEQ ID NO: 252696 - DNA, 20 bp, synthetic construct
  source 1..20: mol_type = other DNA
ggcagagtctcctagaatca

SEQ ID NO: 252697 - DNA, 20 bp, synthetic construct
  source 1..20: mol_type = other DNA
aggcagagtctcctagaatc

SEQ ID NO: 252698 - DNA, 20 bp, synthetic construct
  source 1..20: mol_type = other DNA
gaggcagagtctcctagaat

SEQ ID NO: 252699 - DNA, 20 bp, synthetic construct
  source 1..20: mol_type = other DNA
cgaggcagagtctcctagaa

SEQ ID NO: 252700 - DNA, 20 bp, synthetic construct
  source 1..20: mol_type = other DNA
acgaggcagagtctcctaga

SEQ ID NO: 252701 - DNA, 20 bp, synthetic construct
  source 1..20: mol_type = other DNA
aacgaggcagagtctcctag

SEQ ID NO: 252702 - DNA, 20 bp, synthetic construct
  source 1..20: mol_type = other DNA
caacgaggcagagtctccta

SEQ ID NO: 252703 - DNA, 20 bp, synthetic construct
  source 1..20: mol_type = other DNA
tcaacgaggcagagtctcct

SEQ ID NO: 252704 - DNA, 20 bp, synthetic construct
  source 1..20: mol_type = other DNA
ctcaacgaggcagagtctcc

SEQ ID NO: 252705 - DNA, 20 bp, synthetic construct
  source 1..20: mol_type = other DNA
cctcaacgaggcagagtctc

SEQ ID NO: 252706 - DNA, 20 bp, synthetic construct
  source 1..20: mol_type = other DNA
tcctcaacgaggcagagtct

SEQ ID NO: 252707 - DNA, 20 bp, synthetic construct
  source 1..20: mol_type = other DNA
atcctcaacgaggcagagtc

SEQ ID NO: 252708 - DNA, 20 bp, synthetic construct
  source 1..20: mol_type = other DNA
tatcctcaacgaggcagagt

SEQ ID NO: 252709 - DNA, 20 bp, synthetic construct
  source 1..20: mol_type = other DNA
atatcctcaacgaggcagag

SEQ ID NO: 252710 - DNA, 20 bp, synthetic construct
  source 1..20: mol_type = other DNA
aatatcctcaacgaggcaga

SEQ ID NO: 252711 - DNA, 20 bp, synthetic construct
  source 1..20: mol_type = other DNA
aaatatcctcaacgaggcag

SEQ ID NO: 252712 - DNA, 20 bp, synthetic construct
  source 1..20: mol_type = other DNA
aaaatatcctcaacgaggca

SEQ ID NO: 252713 - DNA, 20 bp, synthetic construct
  source 1..20: mol_type = other DNA
caaaatatcctcaacgaggc

SEQ ID NO: 252714 - DNA, 20 bp, synthetic construct
  source 1..20: mol_type = other DNA
tcaaaatatcctcaacgagg

SEQ ID NO: 252715 - DNA, 20 bp, synthetic construct
  source 1..20: mol_type = other DNA
ctcaaaatatcctcaacgag

SEQ ID NO: 252716 - DNA, 20 bp, synthetic construct
  source 1..20: mol_type = other DNA
cctcaaaatatcctcaacga

SEQ ID NO: 252717 - DNA, 20 bp, synthetic construct
  source 1..20: mol_type = other DNA
gcctcaaaatatcctcaacg

SEQ ID NO: 252718 - DNA, 20 bp, synthetic construct
  source 1..20: mol_type = other DNA
ggcctcaaaatatcctcaac

SEQ ID NO: 252719 - DNA, 20 bp, synthetic construct
  source 1..20: mol_type = other DNA
aggcctcaaaatatcctcaa

SEQ ID NO: 252720 - DNA, 20 bp, synthetic construct
  source 1..20: mol_type = other DNA
taggcctcaaaatatcctca

SEQ ID NO: 252721 - DNA, 20 bp, synthetic construct
  source 1..20: mol_type = other DNA
ttaggcctcaaaatatcctc

SEQ ID NO: 252722 - DNA, 20 bp, synthetic construct
  source 1..20: mol_type = other DNA
gttaggcctcaaaatatcct

SEQ ID NO: 252723 - DNA, 20 bp, synthetic construct
  source 1..20: mol_type = other DNA
agttaggcctcaaaatatcc

SEQ ID NO: 252724 - DNA, 20 bp, synthetic construct
  source 1..20: mol_type = other DNA
tagttaggcctcaaaatatc

SEQ ID NO: 252725 - DNA, 20 bp, synthetic construct
  source 1..20: mol_type = other DNA
gtagttaggcctcaaaatat

SEQ ID NO: 252726 - DNA, 20 bp, synthetic construct
  source 1..20: mol_type = other DNA
tgtagttaggcctcaaaata

SEQ ID NO: 252727 - DNA, 20 bp, synthetic construct
  source 1..20: mol_type = other DNA
gtgtagttaggcctcaaaat

SEQ ID NO: 252728 - DNA, 20 bp, synthetic construct
  source 1..20: mol_type = other DNA
tgtgtagttaggcctcaaaa

SEQ ID NO: 252729 - DNA, 20 bp, synthetic construct
  source 1..20: mol_type = other DNA
atgtgtagttaggcctcaaa

SEQ ID NO: 252730 - DNA, 20 bp, synthetic construct
  source 1..20: mol_type = other DNA
aatgtgtagttaggcctcaa

SEQ ID NO: 252731 - DNA, 20 bp, synthetic construct
  source 1..20: mol_type = other DNA
gaatgtgtagttaggcctca

SEQ ID NO: 252732 - DNA, 20 bp, synthetic construct
  source 1..20: mol_type = other DNA
ggaatgtgtagttaggcctc

SEQ ID NO: 252733 - DNA, 20 bp, synthetic construct
  source 1..20: mol_type = other DNA
aggaatgtgtagttaggcct

SEQ ID NO: 252734 - DNA, 20 bp, synthetic construct
  source 1..20: mol_type = other DNA
caggaatgtgtagttaggcc

SEQ ID NO: 252735 - DNA, 20 bp, synthetic construct
  source 1..20: mol_type = other DNA
gcaggaatgtgtagttaggc

SEQ ID NO: 252736 - DNA, 20 bp, synthetic construct
  source 1..20: mol_type = other DNA
ggcaggaatgtgtagttagg

SEQ ID NO: 252737 - DNA, 20 bp, synthetic construct
  source 1..20: mol_type = other DNA
gggcaggaatgtgtagttag

SEQ ID NO: 252738 - DNA, 20 bp, synthetic construct
  source 1..20: mol_type = other DNA
ggggcaggaatgtgtagtta

SEQ ID NO: 252739 - DNA, 20 bp, synthetic construct
  source 1..20: mol_type = other DNA
gggggcaggaatgtgtagtt

SEQ ID NO: 252740 - DNA, 20 bp, synthetic construct
  source 1..20: mol_type = other DNA
tgggggcaggaatgtgtagt

SEQ ID NO: 252741 - DNA, 20 bp, synthetic construct
  source 1..20: mol_type = other DNA
ctgggggcaggaatgtgtag

SEQ ID NO: 252742 - DNA, 20 bp, synthetic construct
  source 1..20: mol_type = other DNA
tctgggggcaggaatgtgta

SEQ ID NO: 252743 - DNA, 20 bp, synthetic construct
  source 1..20: mol_type = other DNA
ctctgggggcaggaatgtgt

SEQ ID NO: 252744 - DNA, 20 bp, synthetic construct
  source 1..20: mol_type = other DNA
tctctgggggcaggaatgtg

SEQ ID NO: 252745 - DNA, 20 bp, synthetic construct
  source 1..20: mol_type = other DNA
ctctctgggggcaggaatgt

SEQ ID NO: 252746 - DNA, 20 bp, synthetic construct
  source 1..20: mol_type = other DNA
cctctctgggggcaggaatg

SEQ ID NO: 252747 - DNA, 20 bp, synthetic construct
  source 1..20: mol_type = other DNA
acctctctgggggcaggaat

SEQ ID NO: 252748 - DNA, 20 bp, synthetic construct
  source 1..20: mol_type = other DNA
gacctctctgggggcaggaa

SEQ ID NO: 252749 - DNA, 20 bp, synthetic construct
  source 1..20: mol_type = other DNA
tgacctctctgggggcagga

SEQ ID NO: 252750 - DNA, 20 bp, synthetic construct
  source 1..20: mol_type = other DNA
gtgacctctctgggggcagg

SEQ ID NO: 252751 - DNA, 20 bp, synthetic construct
  source 1..20: mol_type = other DNA
tgtgacctctctgggggcag

SEQ ID NO: 252752 - DNA, 20 bp, synthetic construct
  source 1..20: mol_type = other DNA
ctgtgacctctctgggggca

SEQ ID NO: 252753 - DNA, 20 bp, synthetic construct
  source 1..20: mol_type = other DNA
gctgtgacctctctgggggc

SEQ ID NO: 252754 - DNA, 20 bp, synthetic construct
  source 1..20: mol_type = other DNA
ggctgtgacctctctggggg

SEQ ID NO: 252755 - DNA, 20 bp, synthetic construct
  source 1..20: mol_type = other DNA
aggctgtgacctctctgggg

SEQ ID NO: 252756 - DNA, 20 bp, synthetic construct
  source 1..20: mol_type = other DNA
taggctgtgacctctctggg

SEQ ID NO: 252757 - DNA, 20 bp, synthetic construct
  source 1..20: mol_type = other DNA
ataggctgtgacctctctgg

SEQ ID NO: 252758 - DNA, 20 bp, synthetic construct
  source 1..20: mol_type = other DNA
tataggctgtgacctctctg

SEQ ID NO: 252759 - DNA, 20 bp, synthetic construct
  source 1..20: mol_type = other DNA
ctataggctgtgacctctct

SEQ ID NO: 252760 - DNA, 20 bp, synthetic construct
  source 1..20: mol_type = other DNA
gctataggctgtgacctctc

SEQ ID NO: 252761 - DNA, 20 bp, synthetic construct
  source 1..20: mol_type = other DNA
tgctataggctgtgacctct

SEQ ID NO: 252762 - DNA, 20 bp, synthetic construct
  source 1..20: mol_type = other DNA
ctgctataggctgtgacctc

SEQ ID NO: 252763 - DNA, 20 bp, synthetic construct
  source 1..20: mol_type = other DNA
cctgctataggctgtgacct

SEQ ID NO: 252764 - DNA, 20 bp, synthetic construct
  source 1..20: mol_type = other DNA
gcctgctataggctgtgacc

SEQ ID NO: 252765 - DNA, 20 bp, synthetic construct
  source 1..20: mol_type = other DNA
agcctgctataggctgtgac

SEQ ID NO: 252766 - DNA, 20 bp, synthetic construct
  source 1..20: mol_type = other DNA
cagcctgctataggctgtga

SEQ ID NO: 252767 - DNA, 20 bp, synthetic construct
  source 1..20: mol_type = other DNA
tcagcctgctataggctgtg

SEQ ID NO: 252768 - DNA, 20 bp, synthetic construct
  source 1..20: mol_type = other DNA
atcagcctgctataggctgt

SEQ ID NO: 252769 - DNA, 20 bp, synthetic construct
  source 1..20: mol_type = other DNA
catcagcctgctataggctg

SEQ ID NO: 252770 - DNA, 20 bp, synthetic construct
  source 1..20: mol_type = other DNA
acatcagcctgctataggct

SEQ ID NO: 252771 - DNA, 20 bp, synthetic construct
  source 1..20: mol_type = other DNA
aacatcagcctgctataggc

SEQ ID NO: 252772 - DNA, 20 bp, synthetic construct
  source 1..20: mol_type = other DNA
aaacatcagcctgctatagg

SEQ ID NO: 252773 - DNA, 20 bp, synthetic construct
  source 1..20: mol_type = other DNA
gaaacatcagcctgctatag

SEQ ID NO: 252774 - DNA, 20 bp, synthetic construct
  source 1..20: mol_type = other DNA
agaaacatcagcctgctata

SEQ ID NO: 252775 - DNA, 20 bp, synthetic construct
  source 1..20: mol_type = other DNA
gagaaacatcagcctgctat

SEQ ID NO: 252776 - DNA, 20 bp, synthetic construct
  source 1..20: mol_type = other DNA
tgagaaacatcagcctgcta

SEQ ID NO: 252777 - DNA, 20 bp, synthetic construct
  source 1..20: mol_type = other DNA
atgagaaacatcagcctgct

SEQ ID NO: 252778 - DNA, 20 bp, synthetic construct
  source 1..20: mol_type = other DNA
catgagaaacatcagcctgc

SEQ ID NO: 252779 - DNA, 20 bp, synthetic construct
  source 1..20: mol_type = other DNA
acatgagaaacatcagcctg

SEQ ID NO: 252780 - DNA, 20 bp, synthetic construct
  source 1..20: mol_type = other DNA
gacatgagaaacatcagcct

SEQ ID NO: 252781 - DNA, 20 bp, synthetic construct
  source 1..20: mol_type = other DNA
tgacatgagaaacatcagcc

SEQ ID NO: 252782 - DNA, 20 bp, synthetic construct
  source 1..20: mol_type = other DNA
gtgacatgagaaacatcagc

SEQ ID NO: 252783 - DNA, 20 bp, synthetic construct
  source 1..20: mol_type = other DNA
tgtgacatgagaaacatcag

SEQ ID NO: 252784 - DNA, 20 bp, synthetic construct
  source 1..20: mol_type = other DNA
atgtgacatgagaaacatca

SEQ ID NO: 252785 - DNA, 20 bp, synthetic construct
  source 1..20: mol_type = other DNA
catgtgacatgagaaacatc

SEQ ID NO: 252786 - DNA, 20 bp, synthetic construct
  source 1..20: mol_type = other DNA
ccatgtgacatgagaaacat

SEQ ID NO: 252787 - DNA, 20 bp, synthetic construct
  source 1..20: mol_type = other DNA
gccatgtgacatgagaaaca

SEQ ID NO: 252788 - DNA, 20 bp, synthetic construct
  source 1..20: mol_type = other DNA
tgccatgtgacatgagaaac

SEQ ID NO: 252789 - DNA, 20 bp, synthetic construct
  source 1..20: mol_type = other DNA
gtgccatgtgacatgagaaa

SEQ ID NO: 252790 - DNA, 20 bp, synthetic construct
  source 1..20: mol_type = other DNA
tgtgccatgtgacatgagaa

SEQ ID NO: 252791 - DNA, 20 bp, synthetic construct
  source 1..20: mol_type = other DNA
ctgtgccatgtgacatgaga

SEQ ID NO: 252792 - DNA, 20 bp, synthetic construct
  source 1..20: mol_type = other DNA
tctgtgccatgtgacatgag

SEQ ID NO: 252793 - DNA, 20 bp, synthetic construct
  source 1..20: mol_type = other DNA
ttctgtgccatgtgacatga

SEQ ID NO: 252794 - DNA, 20 bp, synthetic construct
  source 1..20: mol_type = other DNA
tttctgtgccatgtgacatg

SEQ ID NO: 252795 - DNA, 20 bp, synthetic construct
  source 1..20: mol_type = other DNA
ctttctgtgccatgtgacat

SEQ ID NO: 252796 - DNA, 20 bp, synthetic construct
  source 1..20: mol_type = other DNA
cctttctgtgccatgtgaca

SEQ ID NO: 252797 - DNA, 20 bp, synthetic construct
  source 1..20: mol_type = other DNA
gcctttctgtgccatgtgac

SEQ ID NO: 252798 - DNA, 20 bp, synthetic construct
  source 1..20: mol_type = other DNA
tgcctttctgtgccatgtga

SEQ ID NO: 252799 - DNA, 20 bp, synthetic construct
  source 1..20: mol_type = other DNA
gtgcctttctgtgccatgtg

SEQ ID NO: 252800 - DNA, 20 bp, synthetic construct
  source 1..20: mol_type = other DNA
tgtgcctttctgtgccatgt

SEQ ID NO: 252801 - DNA, 20 bp, synthetic construct
  source 1..20: mol_type = other DNA
atgtgcctttctgtgccatg

SEQ ID NO: 252802 - DNA, 20 bp, synthetic construct
  source 1..20: mol_type = other DNA
aatgtgcctttctgtgccat

SEQ ID NO: 252803 - DNA, 20 bp, synthetic construct
  source 1..20: mol_type = other DNA
aaatgtgcctttctgtgcca

SEQ ID NO: 252804 - DNA, 20 bp, synthetic construct
  source 1..20: mol_type = other DNA
aaaatgtgcctttctgtgcc

SEQ ID NO: 252805 - DNA, 20 bp, synthetic construct
  source 1..20: mol_type = other DNA
gaaaatgtgcctttctgtgc

SEQ ID NO: 252806 - DNA, 20 bp, synthetic construct
  source 1..20: mol_type = other DNA
cgaaaatgtgcctttctgtg

SEQ ID NO: 252807 - DNA, 20 bp, synthetic construct
  source 1..20: mol_type = other DNA
acgaaaatgtgcctttctgt

SEQ ID NO: 252808 - DNA, 20 bp, synthetic construct
  source 1..20: mol_type = other DNA
aacgaaaatgtgcctttctg

SEQ ID NO: 252809 - DNA, 20 bp, synthetic construct
  source 1..20: mol_type = other DNA
gaacgaaaatgtgcctttct

SEQ ID NO: 252810 - DNA, 20 bp, synthetic construct
  source 1..20: mol_type = other DNA
agaacgaaaatgtgcctttc

SEQ ID NO: 252811 - DNA, 20 bp, synthetic construct
  source 1..20: mol_type = other DNA
gagaacgaaaatgtgccttt

SEQ ID NO: 252812 - DNA, 20 bp, synthetic construct
  source 1..20: mol_type = other DNA
tgagaacgaaaatgtgcctt

SEQ ID NO: 252813 - DNA, 20 bp, synthetic construct
  source 1..20: mol_type = other DNA
ctgagaacgaaaatgtgcct

SEQ ID NO: 252814 - DNA, 20 bp, synthetic construct
  source 1..20: mol_type = other DNA
cctgagaacgaaaatgtgcc

SEQ ID NO: 252815 - DNA, 20 bp, synthetic construct
  source 1..20: mol_type = other DNA
gcctgagaacgaaaatgtgc

SEQ ID NO: 252816 - DNA, 20 bp, synthetic construct
  source 1..20: mol_type = other DNA
agcctgagaacgaaaatgtg

SEQ ID NO: 252817 - DNA, 20 bp, synthetic construct
  source 1..20: mol_type = other DNA
tagcctgagaacgaaaatgt

SEQ ID NO: 252818 - DNA, 20 bp, synthetic construct
  source 1..20: mol_type = other DNA
ttagcctgagaacgaaaatg

SEQ ID NO: 252819 - DNA, 20 bp, synthetic construct
  source 1..20: mol_type = other DNA
gttagcctgagaacgaaaat

SEQ ID NO: 252820 - DNA, 20 bp, synthetic construct
  source 1..20: mol_type = other DNA
tgttagcctgagaacgaaaa

SEQ ID NO: 252821 - DNA, 20 bp, synthetic construct
  source 1..20: mol_type = other DNA
ttgttagcctgagaacgaaa

SEQ ID NO: 252822 - DNA, 20 bp, synthetic construct
  source 1..20: mol_type = other DNA
tttgttagcctgagaacgaa

SEQ ID NO: 252823 - DNA, 20 bp, synthetic construct
  source 1..20: mol_type = other DNA
ctttgttagcctgagaacga

SEQ ID NO: 252824 - DNA, 20 bp, synthetic construct
  source 1..20: mol_type = other DNA
tctttgttagcctgagaacg

SEQ ID NO: 252825 - DNA, 20 bp, synthetic construct
  source 1..20: mol_type = other DNA
ctctttgttagcctgagaac

SEQ ID NO: 252826 - DNA, 20 bp, synthetic construct
  source 1..20: mol_type = other DNA
gctctttgttagcctgagaa

SEQ ID NO: 252827 - DNA, 20 bp, synthetic construct
  source 1..20: mol_type = other DNA
agctctttgttagcctgaga

SEQ ID NO: 252828 - DNA, 20 bp, synthetic construct
  source 1..20: mol_type = other DNA
aagctctttgttagcctgag

SEQ ID NO: 252829 - DNA, 20 bp, synthetic construct
  source 1..20: mol_type = other DNA
gaagctctttgttagcctga

SEQ ID NO: 252830 - DNA, 20 bp, synthetic construct
  source 1..20: mol_type = other DNA
tgaagctctttgttagcctg

SEQ ID NO: 252831 - DNA, 20 bp, synthetic construct
  source 1..20: mol_type = other DNA
ttgaagctctttgttagcct

SEQ ID NO: 252832 - DNA, 20 bp, synthetic construct
  source 1..20: mol_type = other DNA
tttgaagctctttgttagcc

SEQ ID NO: 252833 - DNA, 20 bp, synthetic construct
  source 1..20: mol_type = other DNA
ttttgaagctctttgttagc

SEQ ID NO: 252834 - DNA, 20 bp, synthetic construct
  source 1..20: mol_type = other DNA
tttttgaagctctttgttag

SEQ ID NO: 252835 - DNA, 20 bp, synthetic construct
  source 1..20: mol_type = other DNA
gtttttgaagctctttgtta

SEQ ID NO: 252836 - DNA, 20 bp, synthetic construct
  source 1..20: mol_type = other DNA
agtttttgaagctctttgtt

SEQ ID NO: 252837 - DNA, 20 bp, synthetic construct
  source 1..20: mol_type = other DNA
tagtttttgaagctctttgt

SEQ ID NO: 252838 - DNA, 20 bp, synthetic construct
  source 1..20: mol_type = other DNA
atagtttttgaagctctttg

SEQ ID NO: 252839 - DNA, 20 bp, synthetic construct
  source 1..20: mol_type = other DNA
aatagtttttgaagctcttt

SEQ ID NO: 252840 - DNA, 20 bp, synthetic construct
  source 1..20: mol_type = other DNA
taatagtttttgaagctctt

SEQ ID NO: 252841 - DNA, 20 bp, synthetic construct
  source 1..20: mol_type = other DNA
ctaatagtttttgaagctct

SEQ ID NO: 252842 - DNA, 20 bp, synthetic construct
  source 1..20: mol_type = other DNA
tctaatagtttttgaagctc

SEQ ID NO: 252843 - DNA, 20 bp, synthetic construct
  source 1..20: mol_type = other DNA
ttctaatagtttttgaagct

SEQ ID NO: 252844 - DNA, 20 bp, synthetic construct
  source 1..20: mol_type = other DNA
cttctaatagtttttgaagc

SEQ ID NO: 252845 - DNA, 20 bp, synthetic construct
  source 1..20: mol_type = other DNA
ccttctaatagtttttgaag

SEQ ID NO: 252846 - DNA, 20 bp, synthetic construct
  source 1..20: mol_type = other DNA
cccttctaatagtttttgaa

SEQ ID NO: 252847 - DNA, 20 bp, synthetic construct
  source 1..20: mol_type = other DNA
tcccttctaatagtttttga

SEQ ID NO: 252848 - DNA, 20 bp, synthetic construct
  source 1..20: mol_type = other DNA
gtcccttctaatagtttttg

SEQ ID NO: 252849 - DNA, 20 bp, synthetic construct
  source 1..20: mol_type = other DNA
tgtcccttctaatagttttt

SEQ ID NO: 252850 - DNA, 20 bp, synthetic construct
  source 1..20: mol_type = other DNA
ctgtcccttctaatagtttt

SEQ ID NO: 252851 - DNA, 20 bp, synthetic construct
  source 1..20: mol_type = other DNA
actgtcccttctaatagttt

SEQ ID NO: 252852 - DNA, 20 bp, synthetic construct
  source 1..20: mol_type = other DNA
cactgtcccttctaatagtt

SEQ ID NO: 252853 - DNA, 20 bp, synthetic construct
  source 1..20: mol_type = other DNA
ccactgtcccttctaatagt

SEQ ID NO: 252854 - DNA, 20 bp, synthetic construct
  source 1..20: mol_type = other DNA
gccactgtcccttctaatag

SEQ ID NO: 252855 - DNA, 20 bp, synthetic construct
  source 1..20: mol_type = other DNA
agccactgtcccttctaata

SEQ ID NO: 252856 - DNA, 20 bp, synthetic construct
  source 1..20: mol_type = other DNA
tagccactgtcccttctaat

SEQ ID NO: 252857 - DNA, 20 bp, synthetic construct
  source 1..20: mol_type = other DNA
atagccactgtcccttctaa

SEQ ID NO: 252858 - DNA, 20 bp, synthetic construct
  source 1..20: mol_type = other DNA
tatagccactgtcccttcta

SEQ ID NO: 252859 - DNA, 20 bp, synthetic construct
  source 1..20: mol_type = other DNA
ttatagccactgtcccttct

SEQ ID NO: 252860 - DNA, 20 bp, synthetic construct
  source 1..20: mol_type = other DNA
cttatagccactgtcccttc

SEQ ID NO: 252861 - DNA, 20 bp, synthetic construct
  source 1..20: mol_type = other DNA
tcttatagccactgtccctt

SEQ ID NO: 252862 - DNA, 20 bp, synthetic construct
  source 1..20: mol_type = other DNA
ctcttatagccactgtccct

SEQ ID NO: 252863 - DNA, 20 bp, synthetic construct
  source 1..20: mol_type = other DNA
tctcttatagccactgtccc

SEQ ID NO: 252864 - DNA, 20 bp, synthetic construct
  source 1..20: mol_type = other DNA
ttctcttatagccactgtcc

SEQ ID NO: 252865 - DNA, 20 bp, synthetic construct
  source 1..20: mol_type = other DNA
cttctcttatagccactgtc

SEQ ID NO: 252866 - DNA, 20 bp, synthetic construct
  source 1..20: mol_type = other DNA
tcttctcttatagccactgt

SEQ ID NO: 252867 - DNA, 20 bp, synthetic construct
  source 1..20: mol_type = other DNA
ttcttctcttatagccactg

SEQ ID NO: 252868 - DNA, 20 bp, synthetic construct
  source 1..20: mol_type = other DNA
gttcttctcttatagccact

SEQ ID NO: 252869 - DNA, 20 bp, synthetic construct
  source 1..20: mol_type = other DNA
ggttcttctcttatagccac

SEQ ID NO: 252870 - DNA, 20 bp, synthetic construct
  source 1..20: mol_type = other DNA
aggttcttctcttatagcca

SEQ ID NO: 252871 - DNA, 20 bp, synthetic construct
  source 1..20: mol_type = other DNA
gaggttcttctcttatagcc

SEQ ID NO: 252872 - DNA, 20 bp, synthetic construct
  source 1..20: mol_type = other DNA
tgaggttcttctcttatagc

SEQ ID NO: 252873 - DNA, 20 bp, synthetic construct
  source 1..20: mol_type = other DNA
ctgaggttcttctcttatag

SEQ ID NO: 252874 - DNA, 20 bp, synthetic construct
  source 1..20: mol_type = other DNA
actgaggttcttctcttata

SEQ ID NO: 252875 - DNA, 20 bp, synthetic construct
  source 1..20: mol_type = other DNA
gactgaggttcttctcttat

SEQ ID NO: 252876 - DNA, 20 bp, synthetic construct
  source 1..20: mol_type = other DNA
tgactgaggttcttctctta

SEQ ID NO: 252877 - DNA, 20 bp, synthetic construct
  source 1..20: mol_type = other DNA
ttgactgaggttcttctctt

SEQ ID NO: 252878 - DNA, 20 bp, synthetic construct
  source 1..20: mol_type = other DNA
attgactgaggttcttctct

SEQ ID NO: 252879 - DNA, 20 bp, synthetic construct
  source 1..20: mol_type = other DNA
cattgactgaggttcttctc

SEQ ID NO: 252880 - DNA, 20 bp, synthetic construct
  source 1..20: mol_type = other DNA
acattgactgaggttcttct

SEQ ID NO: 252881 - DNA, 20 bp, synthetic construct
  source 1..20: mol_type = other DNA
cacattgactgaggttcttc

SEQ ID NO: 252882 - DNA, 20 bp, synthetic construct
  source 1..20: mol_type = other DNA
acacattgactgaggttctt

SEQ ID NO: 252883 - DNA, 20 bp, synthetic construct
  source 1..20: mol_type = other DNA
cacacattgactgaggttct

SEQ ID NO: 252884 - DNA, 20 bp, synthetic construct
  source 1..20: mol_type = other DNA
tcacacattgactgaggttc

SEQ ID NO: 252885 - DNA, 20 bp, synthetic construct
  source 1..20: mol_type = other DNA
ttcacacattgactgaggtt

SEQ ID NO: 252886 - DNA, 20 bp, synthetic construct
  source 1..20: mol_type = other DNA
tttcacacattgactgaggt

SEQ ID NO: 252887 - DNA, 20 bp, synthetic construct
  source 1..20: mol_type = other DNA
atttcacacattgactgagg

SEQ ID NO: 252888 - DNA, 20 bp, synthetic construct
  source 1..20: mol_type = other DNA
aatttcacacattgactgag

SEQ ID NO: 252889 - DNA, 20 bp, synthetic construct
  source 1..20: mol_type = other DNA
taatttcacacattgactga

SEQ ID NO: 252890 - DNA, 20 bp, synthetic construct
  source 1..20: mol_type = other DNA
ttaatttcacacattgactg

SEQ ID NO: 252891 - DNA, 20 bp, synthetic construct
  source 1..20: mol_type = other DNA
gttaatttcacacattgact

SEQ ID NO: 252892 - DNA, 20 bp, synthetic construct
  source 1..20: mol_type = other DNA
agttaatttcacacattgac

SEQ ID NO: 252893 - DNA, 20 bp, synthetic construct
  source 1..20: mol_type = other DNA
tagttaatttcacacattga

SEQ ID NO: 252894 - DNA, 20 bp, synthetic construct
  source 1..20: mol_type = other DNA
ctagttaatttcacacattg

SEQ ID NO: 252895 - DNA, 20 bp, synthetic construct
  source 1..20: mol_type = other DNA
cctagttaatttcacacatt

SEQ ID NO: 252896 - DNA, 20 bp, synthetic construct
  source 1..20: mol_type = other DNA
tcctagttaatttcacacat

SEQ ID NO: 252897 - DNA, 20 bp, synthetic construct
  source 1..20: mol_type = other DNA
ttcctagttaatttcacaca

SEQ ID NO: 252898 - DNA, 20 bp, synthetic construct
  source 1..20: mol_type = other DNA
gttcctagttaatttcacac

SEQ ID NO: 252899 - DNA, 20 bp, synthetic construct
  source 1..20: mol_type = other DNA
ggttcctagttaatttcaca

SEQ ID NO: 252900 - DNA, 20 bp, synthetic construct
  source 1..20: mol_type = other DNA
aggttcctagttaatttcac

SEQ ID NO: 252901 - DNA, 20 bp, synthetic construct
  source 1..20: mol_type = other DNA
caggttcctagttaatttca

SEQ ID NO: 252902 - DNA, 20 bp, synthetic construct
  source 1..20: mol_type = other DNA
ccaggttcctagttaatttc

SEQ ID NO: 252903 - DNA, 20 bp, synthetic construct
  source 1..20: mol_type = other DNA
gccaggttcctagttaattt

SEQ ID NO: 252904 - DNA, 20 bp, synthetic construct
  source 1..20: mol_type = other DNA
agccaggttcctagttaatt

SEQ ID NO: 252905 - DNA, 20 bp, synthetic construct
  source 1..20: mol_type = other DNA
gagccaggttcctagttaat

SEQ ID NO: 252906 - DNA, 20 bp, synthetic construct
  source 1..20: mol_type = other DNA
ggagccaggttcctagttaa

SEQ ID NO: 252907 - DNA, 20 bp, synthetic construct
  source 1..20: mol_type = other DNA
aggagccaggttcctagtta

SEQ ID NO: 252908 - DNA, 20 bp, synthetic construct
  source 1..20: mol_type = other DNA
caggagccaggttcctagtt

SEQ ID NO: 252909 - DNA, 20 bp, synthetic construct
  source 1..20: mol_type = other DNA
acaggagccaggttcctagt

SEQ ID NO: 252910 - DNA, 20 bp, synthetic construct
  source 1..20: mol_type = other DNA
aacaggagccaggttcctag

SEQ ID NO: 252911 - DNA, 20 bp, synthetic construct
  source 1..20: mol_type = other DNA
aaacaggagccaggttccta

SEQ ID NO: 252912 - DNA, 20 bp, synthetic construct
  source 1..20: mol_type = other DNA
gaaacaggagccaggttcct

SEQ ID NO: 252913 - DNA, 20 bp, synthetic construct
  source 1..20: mol_type = other DNA
agaaacaggagccaggttcc

SEQ ID NO: 252914 - DNA, 20 bp, synthetic construct
  source 1..20: mol_type = other DNA
aagaaacaggagccaggttc

SEQ ID NO: 252915 - DNA, 20 bp, synthetic construct
  source 1..20: mol_type = other DNA
aaagaaacaggagccaggtt

SEQ ID NO: 252916 - DNA, 20 bp, synthetic construct
  source 1..20: mol_type = other DNA
aaaagaaacaggagccaggt

SEQ ID NO: 252917 - DNA, 20 bp, synthetic construct
  source 1..20: mol_type = other DNA
taaaagaaacaggagccagg

SEQ ID NO: 252918 - DNA, 20 bp, synthetic construct
  source 1..20: mol_type = other DNA
ctaaaagaaacaggagccag

SEQ ID NO: 252919 - DNA, 20 bp, synthetic construct
  source 1..20: mol_type = other DNA
cctaaaagaaacaggagcca

SEQ ID NO: 252920 - DNA, 20 bp, synthetic construct
  source 1..20: mol_type = other DNA
acctaaaagaaacaggagcc

SEQ ID NO: 252921 - DNA, 20 bp, synthetic construct
  source 1..20: mol_type = other DNA
gacctaaaagaaacaggagc

SEQ ID NO: 252922 - DNA, 20 bp, synthetic construct
  source 1..20: mol_type = other DNA
tgacctaaaagaaacaggag

SEQ ID NO: 252923 - DNA, 20 bp, synthetic construct
  source 1..20: mol_type = other DNA
atgacctaaaagaaacagga

SEQ ID NO: 252924 - DNA, 20 bp, synthetic construct
  source 1..20: mol_type = other DNA
catgacctaaaagaaacagg

SEQ ID NO: 252925 - DNA, 20 bp, synthetic construct
  source 1..20: mol_type = other DNA
acatgacctaaaagaaacag

SEQ ID NO: 252926 - DNA, 20 bp, synthetic construct
  source 1..20: mol_type = other DNA
aacatgacctaaaagaaaca

SEQ ID NO: 252927 - DNA, 20 bp, synthetic construct
  source 1..20: mol_type = other DNA
aaacatgacctaaaagaaac

SEQ ID NO: 252928 - DNA, 20 bp, synthetic construct
  source 1..20: mol_type = other DNA
aaaacatgacctaaaagaaa

SEQ ID NO: 252929 - DNA, 20 bp, synthetic construct
  source 1..20: mol_type = other DNA
aaaaacatgacctaaaagaa

SEQ ID NO: 252930 - DNA, 20 bp, synthetic construct
  source 1..20: mol_type = other DNA
gaaaaacatgacctaaaaga

SEQ ID NO: 252931 - DNA, 20 bp, synthetic construct
  source 1..20: mol_type = other DNA
tgaaaaacatgacctaaaag

SEQ ID NO: 252932 - DNA, 20 bp, synthetic construct
  source 1..20: mol_type = other DNA
ctgaaaaacatgacctaaaa

SEQ ID NO: 252933 - DNA, 20 bp, synthetic construct
  source 1..20: mol_type = other DNA
gctgaaaaacatgacctaaa

SEQ ID NO: 252934 - DNA, 20 bp, synthetic construct
  source 1..20: mol_type = other DNA
agctgaaaaacatgacctaa

SEQ ID NO: 252935 - DNA, 20 bp, synthetic construct
  source 1..20: mol_type = other DNA
aagctgaaaaacatgaccta

SEQ ID NO: 252936 - DNA, 20 bp, synthetic construct
  source 1..20: mol_type = other DNA
taagctgaaaaacatgacct

SEQ ID NO: 252937 - DNA, 20 bp, synthetic construct
  source 1..20: mol_type = other DNA
ctaagctgaaaaacatgacc

SEQ ID NO: 252938 - DNA, 20 bp, synthetic construct
  source 1..20: mol_type = other DNA
cctaagctgaaaaacatgac

SEQ ID NO: 252939 - DNA, 20 bp, synthetic construct
  source 1..20: mol_type = other DNA
acctaagctgaaaaacatga

SEQ ID NO: 252940 - DNA, 20 bp, synthetic construct
  source 1..20: mol_type = other DNA
tacctaagctgaaaaacatg

SEQ ID NO: 252941 - DNA, 20 bp, synthetic construct
  source 1..20: mol_type = other DNA
ttacctaagctgaaaaacat

SEQ ID NO: 252942 - DNA, 20 bp, synthetic construct
  source 1..20: mol_type = other DNA
tttacctaagctgaaaaaca

SEQ ID NO: 252943 - DNA, 20 bp, synthetic construct
  source 1..20: mol_type = other DNA
ttttacctaagctgaaaaac

SEQ ID NO: 252944 - DNA, 20 bp, synthetic construct
  source 1..20: mol_type = other DNA
gttttacctaagctgaaaaa

SEQ ID NO: 252945 - DNA, 20 bp, synthetic construct
  source 1..20: mol_type = other DNA
agttttacctaagctgaaaa

SEQ ID NO: 252946 - DNA, 20 bp, synthetic construct
  source 1..20: mol_type = other DNA
tagttttacctaagctgaaa

SEQ ID NO: 252947 - DNA, 20 bp, synthetic construct
  source 1..20: mol_type = other DNA
ctagttttacctaagctgaa

SEQ ID NO: 252948 - DNA, 20 bp, synthetic construct
  source 1..20: mol_type = other DNA
tctagttttacctaagctga

SEQ ID NO: 252949 - DNA, 20 bp, synthetic construct
  source 1..20: mol_type = other DNA
ctctagttttacctaagctg

SEQ ID NO: 252950 - DNA, 20 bp, synthetic construct
  source 1..20: mol_type = other DNA
cctctagttttacctaagct

SEQ ID NO: 252951 - DNA, 20 bp, synthetic construct
  source 1..20: mol_type = other DNA
gcctctagttttacctaagc

SEQ ID NO: 252952 - DNA, 20 bp, synthetic construct
  source 1..20: mol_type = other DNA
agcctctagttttacctaag

SEQ ID NO: 252953 - DNA, 20 bp, synthetic construct
  source 1..20: mol_type = other DNA
aagcctctagttttacctaa

SEQ ID NO: 252954 - DNA, 20 bp, synthetic construct
  source 1..20: mol_type = other DNA
aaagcctctagttttaccta

SEQ ID NO: 252955 - DNA, 20 bp, synthetic construct
  source 1..20: mol_type = other DNA
caaagcctctagttttacct

SEQ ID NO: 252956 - DNA, 20 bp, synthetic construct
  source 1..20: mol_type = other DNA
tcaaagcctctagttttacc

SEQ ID NO: 252957 - DNA, 20 bp, synthetic construct
  source 1..20: mol_type = other DNA
atcaaagcctctagttttac

SEQ ID NO: 252958 - DNA, 20 bp, synthetic construct
  source 1..20: mol_type = other DNA
tatcaaagcctctagtttta

SEQ ID NO: 252959 - DNA, 20 bp, synthetic construct
  source 1..20: mol_type = other DNA
ttatcaaagcctctagtttt

SEQ ID NO: 252960 - DNA, 20 bp, synthetic construct
  source 1..20: mol_type = other DNA
tttatcaaagcctctagttt

SEQ ID NO: 252961 - DNA, 20 bp, synthetic construct
  source 1..20: mol_type = other DNA
ctttatcaaagcctctagtt

SEQ ID NO: 252962 - DNA, 20 bp, synthetic construct
  source 1..20: mol_type = other DNA
gctttatcaaagcctctagt

SEQ ID NO: 252963 - DNA, 20 bp, synthetic construct
  source 1..20: mol_type = other DNA
tgctttatcaaagcctctag

SEQ ID NO: 252964 - DNA, 20 bp, synthetic construct
  source 1..20: mol_type = other DNA
atgctttatcaaagcctcta

SEQ ID NO: 252965 - DNA, 20 bp, synthetic construct
  source 1..20: mol_type = other DNA
catgctttatcaaagcctct

SEQ ID NO: 252966 - DNA, 20 bp, synthetic construct
  source 1..20: mol_type = other DNA
tcatgctttatcaaagcctc

SEQ ID NO: 252967 - DNA, 20 bp, synthetic construct
  source 1..20: mol_type = other DNA
gtcatgctttatcaaagcct

SEQ ID NO: 252968 - DNA, 20 bp, synthetic construct
  source 1..20: mol_type = other DNA
ggtcatgctttatcaaagcc

SEQ ID NO: 252969 - DNA, 20 bp, synthetic construct
  source 1..20: mol_type = other DNA
aggtcatgctttatcaaagc

SEQ ID NO: 252970 - DNA, 20 bp, synthetic construct
  source 1..20: mol_type = other DNA
gaggtcatgctttatcaaag

SEQ ID NO: 252971 - DNA, 20 bp, synthetic construct
  source 1..20: mol_type = other DNA
agaggtcatgctttatcaaa

SEQ ID NO: 252972 - DNA, 20 bp, synthetic construct
  source 1..20: mol_type = other DNA
tagaggtcatgctttatcaa

SEQ ID NO: 252973 - DNA, 20 bp, synthetic construct
  source 1..20: mol_type = other DNA
ctagaggtcatgctttatca

SEQ ID NO: 252974 - DNA, 20 bp, synthetic construct
  source 1..20: mol_type = other DNA
tctagaggtcatgctttatc

SEQ ID NO: 252975 - DNA, 20 bp, synthetic construct
  source 1..20: mol_type = other DNA
ttctagaggtcatgctttat

SEQ ID NO: 252976 - DNA, 20 bp, synthetic construct
  source 1..20: mol_type = other DNA
tttctagaggtcatgcttta

SEQ ID NO: 252977 - DNA, 20 bp, synthetic construct
  source 1..20: mol_type = other DNA
atttctagaggtcatgcttt

SEQ ID NO: 252978 - DNA, 20 bp, synthetic construct
  source 1..20: mol_type = other DNA
gatttctagaggtcatgctt

SEQ ID NO: 252979 - DNA, 20 bp, synthetic construct
  source 1..20: mol_type = other DNA
tgatttctagaggtcatgct

SEQ ID NO: 252980 - DNA, 20 bp, synthetic construct
  source 1..20: mol_type = other DNA
atgatttctagaggtcatgc

SEQ ID NO: 252981 - DNA, 20 bp, synthetic construct
  source 1..20: mol_type = other DNA
aatgatttctagaggtcatg

SEQ ID NO: 252982 - DNA, 20 bp, synthetic construct
  source 1..20: mol_type = other DNA
caatgatttctagaggtcat

SEQ ID NO: 252983 - DNA, 20 bp, synthetic construct
  source 1..20: mol_type = other DNA
gcaatgatttctagaggtca

SEQ ID NO: 252984 - DNA, 20 bp, synthetic construct
  source 1..20: mol_type = other DNA
agcaatgatttctagaggtc

SEQ ID NO: 252985 - DNA, 20 bp, synthetic construct
  source 1..20: mol_type = other DNA
aagcaatgatttctagaggt

SEQ ID NO: 252986 - DNA, 20 bp, synthetic construct
  source 1..20: mol_type = other DNA
aaagcaatgatttctagagg

SEQ ID NO: 252987 - DNA, 20 bp, synthetic construct
  source 1..20: mol_type = other DNA
aaaagcaatgatttctagag

SEQ ID NO: 252988 - DNA, 20 bp, synthetic construct
  source 1..20: mol_type = other DNA
gaaaagcaatgatttctaga

SEQ ID NO: 252989 - DNA, 20 bp, synthetic construct
  source 1..20: mol_type = other DNA
tgaaaagcaatgatttctag

SEQ ID NO: 252990 - DNA, 20 bp, synthetic construct
  source 1..20: mol_type = other DNA
atgaaaagcaatgatttcta

SEQ ID NO: 252991 - DNA, 20 bp, synthetic construct
  source 1..20: mol_type = other DNA
tatgaaaagcaatgatttct

SEQ ID NO: 252992 - DNA, 20 bp, synthetic construct
  source 1..20: mol_type = other DNA
ttatgaaaagcaatgatttc

SEQ ID NO: 252993 - DNA, 20 bp, synthetic construct
  source 1..20: mol_type = other DNA
tttatgaaaagcaatgattt

SEQ ID NO: 252994 - DNA, 20 bp, synthetic construct
  source 1..20: mol_type = other DNA
atttatgaaaagcaatgatt

SEQ ID NO: 252995 - DNA, 20 bp, synthetic construct
  source 1..20: mol_type = other DNA
catttatgaaaagcaatgat

SEQ ID NO: 252996 - DNA, 20 bp, synthetic construct
  source 1..20: mol_type = other DNA
ccatttatgaaaagcaatga

SEQ ID NO: 252997 - DNA, 20 bp, synthetic construct
  source 1..20: mol_type = other DNA
tccatttatgaaaagcaatg

SEQ ID NO: 252998 - DNA, 20 bp, synthetic construct
  source 1..20: mol_type = other DNA
ttccatttatgaaaagcaat

SEQ ID NO: 252999 - DNA, 20 bp, synthetic construct
  source 1..20: mol_type = other DNA
cttccatttatgaaaagcaa

SEQ ID NO: 253000 - DNA, 20 bp, synthetic construct
  source 1..20: mol_type = other DNA
acttccatttatgaaaagca

SEQ ID NO: 253001 - DNA, 20 bp, synthetic construct
  source 1..20: mol_type = other DNA
cacttccatttatgaaaagc

SEQ ID NO: 253002 - DNA, 20 bp, synthetic construct
  source 1..20: mol_type = other DNA
ccacttccatttatgaaaag

SEQ ID NO: 253003 - DNA, 20 bp, synthetic construct
  source 1..20: mol_type = other DNA
cccacttccatttatgaaaa

SEQ ID NO: 253004 - DNA, 20 bp, synthetic construct
  source 1..20: mol_type = other DNA
acccacttccatttatgaaa

SEQ ID NO: 253005 - DNA, 20 bp, synthetic construct
  source 1..20: mol_type = other DNA
aacccacttccatttatgaa

SEQ ID NO: 253006 - DNA, 20 bp, synthetic construct
  source 1..20: mol_type = other DNA
aaacccacttccatttatga

SEQ ID NO: 253007 - DNA, 20 bp, synthetic construct
  source 1..20: mol_type = other DNA
caaacccacttccatttatg

SEQ ID NO: 253008 - DNA, 20 bp, synthetic construct
  source 1..20: mol_type = other DNA
tcaaacccacttccatttat

SEQ ID NO: 253009 - DNA, 20 bp, synthetic construct
  source 1..20: mol_type = other DNA
ctcaaacccacttccattta

SEQ ID NO: 253010 - DNA, 20 bp, synthetic construct
  source 1..20: mol_type = other DNA
actcaaacccacttccattt

SEQ ID NO: 253011 - DNA, 20 bp, synthetic construct
  source 1..20: mol_type = other DNA
aactcaaacccacttccatt

SEQ ID NO: 253012 - DNA, 20 bp, synthetic construct
  source 1..20: mol_type = other DNA
aaactcaaacccacttccat

SEQ ID NO: 253013 - DNA, 20 bp, synthetic construct
  source 1..20: mol_type = other DNA
aaaactcaaacccacttcca

SEQ ID NO: 253014 - DNA, 20 bp, synthetic construct
  source 1..20: mol_type = other DNA
aaaaactcaaacccacttcc

SEQ ID NO: 253015 - DNA, 20 bp, synthetic construct
  source 1..20: mol_type = other DNA
aaaaaactcaaacccacttc

SEQ ID NO: 253016 - DNA, 20 bp, synthetic construct
  source 1..20: mol_type = other DNA
gaaaaaactcaaacccactt

SEQ ID NO: 253017 - DNA, 20 bp, synthetic construct
  source 1..20: mol_type = other DNA
agaaaaaactcaaacccact

SEQ ID NO: 253018 - DNA, 20 bp, synthetic construct
  source 1..20: mol_type = other DNA
tagaaaaaactcaaacccac

SEQ ID NO: 253019 - DNA, 20 bp, synthetic construct
  source 1..20: mol_type = other DNA
gtagaaaaaactcaaaccca

SEQ ID NO: 253020 - DNA, 20 bp, synthetic construct
  source 1..20: mol_type = other DNA
agtagaaaaaactcaaaccc

SEQ ID NO: 253021 - DNA, 20 bp, synthetic construct
  source 1..20: mol_type = other DNA
cagtagaaaaaactcaaacc

SEQ ID NO: 253022 - DNA, 20 bp, synthetic construct
  source 1..20: mol_type = other DNA
tcagtagaaaaaactcaaac

SEQ ID NO: 253023 - DNA, 20 bp, synthetic construct
  source 1..20: mol_type = other DNA
atcagtagaaaaaactcaaa

SEQ ID NO: 253024 - DNA, 20 bp, synthetic construct
  source 1..20: mol_type = other DNA
aatcagtagaaaaaactcaa

SEQ ID NO: 253025 - DNA, 20 bp, synthetic construct
  source 1..20: mol_type = other DNA
caatcagtagaaaaaactca

SEQ ID NO: 253026 - DNA, 20 bp, synthetic construct
  source 1..20: mol_type = other DNA
acaatcagtagaaaaaactc

SEQ ID NO: 253027 - DNA, 20 bp, synthetic construct
  source 1..20: mol_type = other DNA
aacaatcagtagaaaaaact

SEQ ID NO: 253028 - DNA, 20 bp, synthetic construct
  source 1..20: mol_type = other DNA
taacaatcagtagaaaaaac

SEQ ID NO: 253029 - DNA, 20 bp, synthetic construct
  source 1..20: mol_type = other DNA
ctaacaatcagtagaaaaaa

SEQ ID NO: 253030 - DNA, 20 bp, synthetic construct
  source 1..20: mol_type = other DNA
actaacaatcagtagaaaaa

SEQ ID NO: 253031 - DNA, 20 bp, synthetic construct
  source 1..20: mol_type = other DNA
cactaacaatcagtagaaaa

SEQ ID NO: 253032 - DNA, 20 bp, synthetic construct
  source 1..20: mol_type = other DNA
gcactaacaatcagtagaaa

SEQ ID NO: 253033 - DNA, 20 bp, synthetic construct
  source 1..20: mol_type = other DNA
tgcactaacaatcagtagaa

SEQ ID NO: 253034 - DNA, 20 bp, synthetic construct
  source 1..20: mol_type = other DNA
ctgcactaacaatcagtaga

SEQ ID NO: 253035 - DNA, 20 bp, synthetic construct
  source 1..20: mol_type = other DNA
cctgcactaacaatcagtag

SEQ ID NO: 253036 - DNA, 20 bp, synthetic construct
  source 1..20: mol_type = other DNA
acctgcactaacaatcagta

SEQ ID NO: 253037 - DNA, 20 bp, synthetic construct
  source 1..20: mol_type = other DNA
cacctgcactaacaatcagt

SEQ ID NO: 253038 - DNA, 20 bp, synthetic construct
  source 1..20: mol_type = other DNA
tcacctgcactaacaatcag

SEQ ID NO: 253039 - DNA, 20 bp, synthetic construct
  source 1..20: mol_type = other DNA
atcacctgcactaacaatca

SEQ ID NO: 253040 - DNA, 20 bp, synthetic construct
  source 1..20: mol_type = other DNA
catcacctgcactaacaatc

SEQ ID NO: 253041 - DNA, 20 bp, synthetic construct
  source 1..20: mol_type = other DNA
acatcacctgcactaacaat

SEQ ID NO: 253042 - DNA, 20 bp, synthetic construct
  source 1..20: mol_type = other DNA
gacatcacctgcactaacaa

SEQ ID NO: 253043 - DNA, 20 bp, synthetic construct
  source 1..20: mol_type = other DNA
agacatcacctgcactaaca

SEQ ID NO: 253044 - DNA, 20 bp, synthetic construct
  source 1..20: mol_type = other DNA
tagacatcacctgcactaac

SEQ ID NO: 253045 - DNA, 20 bp, synthetic construct
  source 1..20: mol_type = other DNA
gtagacatcacctgcactaa

SEQ ID NO: 253046 - DNA, 20 bp, synthetic construct
  source 1..20: mol_type = other DNA
tgtagacatcacctgcacta

SEQ ID NO: 253047 - DNA, 20 bp, synthetic construct
  source 1..20: mol_type = other DNA
atgtagacatcacctgcact

SEQ ID NO: 253048 - DNA, 20 bp, synthetic construct
  source 1..20: mol_type = other DNA
catgtagacatcacctgcac

SEQ ID NO: 253049 - DNA, 20 bp, synthetic construct
  source 1..20: mol_type = other DNA
gcatgtagacatcacctgca

SEQ ID NO: 253050 - DNA, 20 bp, synthetic construct
  source 1..20: mol_type = other DNA
ggcatgtagacatcacctgc

SEQ ID NO: 253051 - DNA, 20 bp, synthetic construct
  source 1..20: mol_type = other DNA
gggcatgtagacatcacctg

SEQ ID NO: 253052 - DNA, 20 bp, synthetic construct
  source 1..20: mol_type = other DNA
ggggcatgtagacatcacct

SEQ ID NO: 253053 - DNA, 20 bp, synthetic construct
  source 1..20: mol_type = other DNA
gggggcatgtagacatcacc

SEQ ID NO: 253054 - DNA, 20 bp, synthetic construct
  source 1..20: mol_type = other DNA
tgggggcatgtagacatcac

SEQ ID NO: 253055 - DNA, 20 bp, synthetic construct
  source 1..20: mol_type = other DNA
ctgggggcatgtagacatca

SEQ ID NO: 253056 - DNA, 20 bp, synthetic construct
  source 1..20: mol_type = other DNA
tctgggggcatgtagacatc

SEQ ID NO: 253057 - DNA, 20 bp, synthetic construct
  source 1..20: mol_type = other DNA
ttctgggggcatgtagacat

SEQ ID NO: 253058 - DNA, 20 bp, synthetic construct
  source 1..20: mol_type = other DNA
gttctgggggcatgtagaca

SEQ ID NO: 253059 - DNA, 20 bp, synthetic construct
  source 1..20: mol_type = other DNA
tgttctgggggcatgtagac

SEQ ID NO: 253060 - DNA, 20 bp, synthetic construct
  source 1..20: mol_type = other DNA
atgttctgggggcatgtaga

SEQ ID NO: 253061 - DNA, 20 bp, synthetic construct
  source 1..20: mol_type = other DNA
tatgttctgggggcatgtag

SEQ ID NO: 253062 - DNA, 20 bp, synthetic construct
  source 1..20: mol_type = other DNA
atatgttctgggggcatgta

SEQ ID NO: 253063 - DNA, 20 bp, synthetic construct
  source 1..20: mol_type = other DNA
aatatgttctgggggcatgt

SEQ ID NO: 253064 - DNA, 20 bp, synthetic construct
  source 1..20: mol_type = other DNA
gaatatgttctgggggcatg

SEQ ID NO: 253065 - DNA, 20 bp, synthetic construct
  source 1..20: mol_type = other DNA
ggaatatgttctgggggcat

SEQ ID NO: 253066 - DNA, 20 bp, synthetic construct
  source 1..20: mol_type = other DNA
tggaatatgttctgggggca

SEQ ID NO: 253067 - DNA, 20 bp, synthetic construct
  source 1..20: mol_type = other DNA
atggaatatgttctgggggc

SEQ ID NO: 253068 - DNA, 20 bp, synthetic construct
  source 1..20: mol_type = other DNA
catggaatatgttctggggg

SEQ ID NO: 253069 - DNA, 20 bp, synthetic construct
  source 1..20: mol_type = other DNA
gcatggaatatgttctgggg

SEQ ID NO: 253070 - DNA, 20 bp, synthetic construct
  source 1..20: mol_type = other DNA
tgcatggaatatgttctggg

SEQ ID NO: 253071 - DNA, 20 bp, synthetic construct
  source 1..20: mol_type = other DNA
ttgcatggaatatgttctgg

SEQ ID NO: 253072 - DNA, 20 bp, synthetic construct
  source 1..20: mol_type = other DNA
gttgcatggaatatgttctg

SEQ ID NO: 253073 - DNA, 20 bp, synthetic construct
  source 1..20: mol_type = other DNA
tgttgcatggaatatgttct

SEQ ID NO: 253074 - DNA, 20 bp, synthetic construct
  source 1..20: mol_type = other DNA
ttgttgcatggaatatgttc

SEQ ID NO: 253075 - DNA, 20 bp, synthetic construct
  source 1..20: mol_type = other DNA
tttgttgcatggaatatgtt

SEQ ID NO: 253076 - DNA, 20 bp, synthetic construct
  source 1..20: mol_type = other DNA
ttttgttgcatggaatatgt

SEQ ID NO: 253077 - DNA, 20 bp, synthetic construct
  source 1..20: mol_type = other DNA
tttttgttgcatggaatatg

SEQ ID NO: 253078 - DNA, 20 bp, synthetic construct
  source 1..20: mol_type = other DNA
ttttttgttgcatggaatat

SEQ ID NO: 253079 - DNA, 20 bp, synthetic construct
  source 1..20: mol_type = other DNA
tttttttgttgcatggaata

SEQ ID NO: 253080 - DNA, 20 bp, synthetic construct
  source 1..20: mol_type = other DNA
ctttttttgttgcatggaat

SEQ ID NO: 253081 - DNA, 20 bp, synthetic construct
  source 1..20: mol_type = other DNA
gctttttttgttgcatggaa

SEQ ID NO: 253082 - DNA, 20 bp, synthetic construct
  source 1..20: mol_type = other DNA
ggctttttttgttgcatgga

SEQ ID NO: 253083 - DNA, 20 bp, synthetic construct
  source 1..20: mol_type = other DNA
gggctttttttgttgcatgg

SEQ ID NO: 253084 - DNA, 20 bp, synthetic construct
  source 1..20: mol_type = other DNA
tgggctttttttgttgcatg

SEQ ID NO: 253085 - DNA, 20 bp, synthetic construct
  source 1..20: mol_type = other DNA
ctgggctttttttgttgcat

SEQ ID NO: 253086 - DNA, 20 bp, synthetic construct
  source 1..20: mol_type = other DNA
cctgggctttttttgttgca

SEQ ID NO: 253087 - DNA, 20 bp, synthetic construct
  source 1..20: mol_type = other DNA
acctgggctttttttgttgc

SEQ ID NO: 253088 - DNA, 20 bp, synthetic construct
  source 1..20: mol_type = other DNA
gacctgggctttttttgttg

SEQ ID NO: 253089 - DNA, 20 bp, synthetic construct
  source 1..20: mol_type = other DNA
tgacctgggctttttttgtt

SEQ ID NO: 253090 - DNA, 20 bp, synthetic construct
  source 1..20: mol_type = other DNA
gtgacctgggctttttttgt

SEQ ID NO: 253091 - DNA, 20 bp, synthetic construct
  source 1..20: mol_type = other DNA
ggtgacctgggctttttttg

SEQ ID NO: 253092 - DNA, 20 bp, synthetic construct
  source 1..20: mol_type = other DNA
cggtgacctgggcttttttt

SEQ ID NO: 253093 - DNA, 20 bp, synthetic construct
  source 1..20: mol_type = other DNA
acggtgacctgggctttttt

SEQ ID NO: 253094 - DNA, 20 bp, synthetic construct
  source 1..20: mol_type = other DNA
gacggtgacctgggcttttt

SEQ ID NO: 253095 - DNA, 20 bp, synthetic construct
  source 1..20: mol_type = other DNA
agacggtgacctgggctttt

SEQ ID NO: 253096 - DNA, 20 bp, synthetic construct
  source 1..20: mol_type = other DNA
aagacggtgacctgggcttt

SEQ ID NO: 253097 - DNA, 20 bp, synthetic construct
  source 1..20: mol_type = other DNA
aaagacggtgacctgggctt

SEQ ID NO: 253098 - DNA, 20 bp, synthetic construct
  source 1..20: mol_type = other DNA
caaagacggtgacctgggct

SEQ ID NO: 253099 - DNA, 20 bp, synthetic construct
  source 1..20: mol_type = other DNA
gcaaagacggtgacctgggc

SEQ ID NO: 253100 - DNA, 20 bp, synthetic construct
  source 1..20: mol_type = other DNA
agcaaagacggtgacctggg

SEQ ID NO: 253101 - DNA, 20 bp, synthetic construct
  source 1..20: mol_type = other DNA
cagcaaagacggtgacctgg

SEQ ID NO: 253102 - DNA, 20 bp, synthetic construct
  source 1..20: mol_type = other DNA
ccagcaaagacggtgacctg

SEQ ID NO: 253103 - DNA, 20 bp, synthetic construct
  source 1..20: mol_type = other DNA
cccagcaaagacggtgacct

SEQ ID NO: 253104 - DNA, 20 bp, synthetic construct
  source 1..20: mol_type = other DNA
tcccagcaaagacggtgacc

SEQ ID NO: 253105 - DNA, 20 bp, synthetic construct
  source 1..20: mol_type = other DNA
ttcccagcaaagacggtgac

SEQ ID NO: 253106 - DNA, 20 bp, synthetic construct
  source 1..20: mol_type = other DNA
gttcccagcaaagacggtga

SEQ ID NO: 253107 - DNA, 20 bp, synthetic construct
  source 1..20: mol_type = other DNA
agttcccagcaaagacggtg

SEQ ID NO: 253108 - DNA, 20 bp, synthetic construct
  source 1..20: mol_type = other DNA
aagttcccagcaaagacggt

SEQ ID NO: 253109 - DNA, 20 bp, synthetic construct
  source 1..20: mol_type = other DNA
caagttcccagcaaagacgg

SEQ ID NO: 253110 - DNA, 20 bp, synthetic construct
  source 1..20: mol_type = other DNA
tcaagttcccagcaaagacg

SEQ ID NO: 253111 - DNA, 20 bp, synthetic construct
  source 1..20: mol_type = other DNA
gtcaagttcccagcaaagac

SEQ ID NO: 253112 - DNA, 20 bp, synthetic construct
  source 1..20: mol_type = other DNA
agtcaagttcccagcaaaga

SEQ ID NO: 253113 - DNA, 20 bp, synthetic construct
  source 1..20: mol_type = other DNA
aagtcaagttcccagcaaag

SEQ ID NO: 253114 - DNA, 20 bp, synthetic construct
  source 1..20: mol_type = other DNA
aaagtcaagttcccagcaaa

SEQ ID NO: 253115 - DNA, 20 bp, synthetic construct
  source 1..20: mol_type = other DNA
aaaagtcaagttcccagcaa

SEQ ID NO: 253116 - DNA, 20 bp, synthetic construct
  source 1..20: mol_type = other DNA
caaaagtcaagttcccagca

SEQ ID NO: 253117 - DNA, 20 bp, synthetic construct
  source 1..20: mol_type = other DNA
acaaaagtcaagttcccagc

SEQ ID NO: 253118 - DNA, 20 bp, synthetic construct
  source 1..20: mol_type = other DNA
cacaaaagtcaagttcccag

SEQ ID NO: 253119 - DNA, 20 bp, synthetic construct
  source 1..20: mol_type = other DNA
gcacaaaagtcaagttccca

SEQ ID NO: 253120 - DNA, 20 bp, synthetic construct
  source 1..20: mol_type = other DNA
agcacaaaagtcaagttccc

SEQ ID NO: 253121 - DNA, 20 bp, synthetic construct
  source 1..20: mol_type = other DNA
gagcacaaaagtcaagttcc

SEQ ID NO: 253122 - DNA, 20 bp, synthetic construct
  source 1..20: mol_type = other DNA
tgagcacaaaagtcaagttc

SEQ ID NO: 253123 - DNA, 20 bp, synthetic construct
  source 1..20: mol_type = other DNA
gtgagcacaaaagtcaagtt

SEQ ID NO: 253124 - DNA, 20 bp, synthetic construct
  source 1..20: mol_type = other DNA
agtgagcacaaaagtcaagt

SEQ ID NO: 253125 - DNA, 20 bp, synthetic construct
  source 1..20: mol_type = other DNA
cagtgagcacaaaagtcaag

SEQ ID NO: 253126 - DNA, 20 bp, synthetic construct
  source 1..20: mol_type = other DNA
tcagtgagcacaaaagtcaa

SEQ ID NO: 253127 - DNA, 20 bp, synthetic construct
  source 1..20: mol_type = other DNA
ttcagtgagcacaaaagtca

SEQ ID NO: 253128 - DNA, 20 bp, synthetic construct
  source 1..20: mol_type = other DNA
attcagtgagcacaaaagtc

SEQ ID NO: 253129 - DNA, 20 bp, synthetic construct
  source 1..20: mol_type = other DNA
aattcagtgagcacaaaagt

SEQ ID NO: 253130 - DNA, 20 bp, synthetic construct
  source 1..20: mol_type = other DNA
aaattcagtgagcacaaaag

SEQ ID NO: 253131 - DNA, 20 bp, synthetic construct
  source 1..20: mol_type = other DNA
aaaattcagtgagcacaaaa

SEQ ID NO: 253132 - DNA, 20 bp, synthetic construct
  source 1..20: mol_type = other DNA
taaaattcagtgagcacaaa

SEQ ID NO: 253133 - DNA, 20 bp, synthetic construct
  source 1..20: mol_type = other DNA
ttaaaattcagtgagcacaa

SEQ ID NO: 253134 - DNA, 20 bp, synthetic construct
  source 1..20: mol_type = other DNA
cttaaaattcagtgagcaca

SEQ ID NO: 253135 - DNA, 20 bp, synthetic construct
  source 1..20: mol_type = other DNA
gcttaaaattcagtgagcac

SEQ ID NO: 253136 - DNA, 20 bp, synthetic construct
  source 1..20: mol_type = other DNA
agcttaaaattcagtgagca

SEQ ID NO: 253137 - DNA, 20 bp, synthetic construct
  source 1..20: mol_type = other DNA
aagcttaaaattcagtgagc

SEQ ID NO: 253138 - DNA, 20 bp, synthetic construct
  source 1..20: mol_type = other DNA
aaagcttaaaattcagtgag

SEQ ID NO: 253139 - DNA, 20 bp, synthetic construct
  source 1..20: mol_type = other DNA
gaaagcttaaaattcagtga

SEQ ID NO: 253140 - DNA, 20 bp, synthetic construct
  source 1..20: mol_type = other DNA
agaaagcttaaaattcagtg

SEQ ID NO: 253141 - DNA, 20 bp, synthetic construct
  source 1..20: mol_type = other DNA
cagaaagcttaaaattcagt

SEQ ID NO: 253142 - DNA, 20 bp, synthetic construct
  source 1..20: mol_type = other DNA
tcagaaagcttaaaattcag

SEQ ID NO: 253143 - DNA, 20 bp, synthetic construct
  source 1..20: mol_type = other DNA
gtcagaaagcttaaaattca

SEQ ID NO: 253144 - DNA, 20 bp, synthetic construct
  source 1..20: mol_type = other DNA
tgtcagaaagcttaaaattc

SEQ ID NO: 253145 - DNA, 20 bp, synthetic construct
  source 1..20: mol_type = other DNA
ctgtcagaaagcttaaaatt

SEQ ID NO: 253146 - DNA, 20 bp, synthetic construct
  source 1..20: mol_type = other DNA
gctgtcagaaagcttaaaat

SEQ ID NO: 253147 - DNA, 20 bp, synthetic construct
  source 1..20: mol_type = other DNA
tgctgtcagaaagcttaaaa

SEQ ID NO: 253148 - DNA, 20 bp, synthetic construct
  source 1..20: mol_type = other DNA
ctgctgtcagaaagcttaaa

SEQ ID NO: 253149 - DNA, 20 bp, synthetic construct
  source 1..20: mol_type = other DNA
gctgctgtcagaaagcttaa

SEQ ID NO: 253150 - DNA, 20 bp, synthetic construct
  source 1..20: mol_type = other DNA
ggctgctgtcagaaagctta

SEQ ID NO: 253151 - DNA, 20 bp, synthetic construct
  source 1..20: mol_type = other DNA
aggctgctgtcagaaagctt

SEQ ID NO: 253152 - DNA, 20 bp, synthetic construct
  source 1..20: mol_type = other DNA
caggctgctgtcagaaagct

SEQ ID NO: 253153 - DNA, 20 bp, synthetic construct
  source 1..20: mol_type = other DNA
ccaggctgctgtcagaaagc

SEQ ID NO: 253154 - DNA, 20 bp, synthetic construct
  source 1..20: mol_type = other DNA
tccaggctgctgtcagaaag

SEQ ID NO: 253155 - DNA, 20 bp, synthetic construct
  source 1..20: mol_type = other DNA
ttccaggctgctgtcagaaa

SEQ ID NO: 253156 - DNA, 20 bp, synthetic construct
  source 1..20: mol_type = other DNA
attccaggctgctgtcagaa

SEQ ID NO: 253157 - DNA, 20 bp, synthetic construct
  source 1..20: mol_type = other DNA
gattccaggctgctgtcaga

SEQ ID NO: 253158 - DNA, 20 bp, synthetic construct
  source 1..20: mol_type = other DNA
tgattccaggctgctgtcag

SEQ ID NO: 253159 - DNA, 20 bp, synthetic construct
  source 1..20: mol_type = other DNA
atgattccaggctgctgtca

SEQ ID NO: 253160 - DNA, 20 bp, synthetic construct
  source 1..20: mol_type = other DNA
catgattccaggctgctgtc

SEQ ID NO: 253161 - DNA, 20 bp, synthetic construct
  source 1..20: mol_type = other DNA
ccatgattccaggctgctgt

SEQ ID NO: 253162 - DNA, 20 bp, synthetic construct
  source 1..20: mol_type = other DNA
tccatgattccaggctgctg

SEQ ID NO: 253163 - DNA, 20 bp, synthetic construct
  source 1..20: mol_type = other DNA
ctccatgattccaggctgct

SEQ ID NO: 253164 - DNA, 20 bp, synthetic construct
  source 1..20: mol_type = other DNA
cctccatgattccaggctgc

SEQ ID NO: 253165 - DNA, 20 bp, synthetic construct
  source 1..20: mol_type = other DNA
ccctccatgattccaggctg

SEQ ID NO: 253166 - DNA, 20 bp, synthetic construct
  source 1..20: mol_type = other DNA
tccctccatgattccaggct

SEQ ID NO: 253167 - DNA, 20 bp, synthetic construct
  source 1..20: mol_type = other DNA
atccctccatgattccaggc

SEQ ID NO: 253168 - DNA, 20 bp, synthetic construct
  source 1..20: mol_type = other DNA
tatccctccatgattccagg

SEQ ID NO: 253169 - DNA, 20 bp, synthetic construct
  source 1..20: mol_type = other DNA
ttatccctccatgattccag

SEQ ID NO: 253170 - DNA, 20 bp, synthetic construct
  source 1..20: mol_type = other DNA
tttatccctccatgattcca

SEQ ID NO: 253171 - DNA, 20 bp, synthetic construct
  source 1..20: mol_type = other DNA
ctttatccctccatgattcc

SEQ ID NO: 253172 - DNA, 20 bp, synthetic construct
  source 1..20: mol_type = other DNA
actttatccctccatgattc

SEQ ID NO: 253173 - DNA, 20 bp, synthetic construct
  source 1..20: mol_type = other DNA
tactttatccctccatgatt

SEQ ID NO: 253174 - DNA, 20 bp, synthetic construct
  source 1..20: mol_type = other DNA
gtactttatccctccatgat

SEQ ID NO: 253175 - DNA, 20 bp, synthetic construct
  source 1..20: mol_type = other DNA
ggtactttatccctccatga

SEQ ID NO: 253176 - DNA, 20 bp, synthetic construct
  source 1..20: mol_type = other DNA
aggtactttatccctccatg

SEQ ID NO: 253177 - DNA, 20 bp, synthetic construct
  source 1..20: mol_type = other DNA
taggtactttatccctccat

SEQ ID NO: 253178 - DNA, 20 bp, synthetic construct
  source 1..20: mol_type = other DNA
ataggtactttatccctcca

SEQ ID NO: 253179 - DNA, 20 bp, synthetic construct
  source 1..20: mol_type = other DNA
aataggtactttatccctcc

SEQ ID NO: 253180 - DNA, 20 bp, synthetic construct
  source 1..20: mol_type = other DNA
taataggtactttatccctc

SEQ ID NO: 253181 - DNA, 20 bp, synthetic construct
  source 1..20: mol_type = other DNA
ctaataggtactttatccct

SEQ ID NO: 253182 - DNA, 20 bp, synthetic construct
  source 1..20: mol_type = other DNA
actaataggtactttatccc

SEQ ID NO: 253183 - DNA, 20 bp, synthetic construct
  source 1..20: mol_type = other DNA
tactaataggtactttatcc

SEQ ID NO: 253184 - DNA, 20 bp, synthetic construct
  source 1..20: mol_type = other DNA
ttactaataggtactttatc

SEQ ID NO: 253185 - DNA, 20 bp, synthetic construct
  source 1..20: mol_type = other DNA
cttactaataggtactttat

SEQ ID NO: 253186 - DNA, 20 bp, synthetic construct
  source 1..20: mol_type = other DNA
tcttactaataggtacttta

SEQ ID NO: 253187 - DNA, 20 bp, synthetic construct
  source 1..20: mol_type = other DNA
atcttactaataggtacttt

SEQ ID NO: 253188 - DNA, 20 bp, synthetic construct
  source 1..20: mol_type = other DNA
catcttactaataggtactt

SEQ ID NO: 253189 - DNA, 20 bp, synthetic construct
  source 1..20: mol_type = other DNA
ccatcttactaataggtact

SEQ ID NO: 253190 - DNA, 20 bp, synthetic construct
  source 1..20: mol_type = other DNA
tccatcttactaataggtac

SEQ ID NO: 253191 - DNA, 20 bp, synthetic construct
  source 1..20: mol_type = other DNA
ttccatcttactaataggta

SEQ ID NO: 253192 - DNA, 20 bp, synthetic construct
  source 1..20: mol_type = other DNA
tttccatcttactaataggt

SEQ ID NO: 253193 - DNA, 20 bp, synthetic construct
  source 1..20: mol_type = other DNA
ttttccatcttactaatagg

SEQ ID NO: 253194 - DNA, 20 bp, synthetic construct
  source 1..20: mol_type = other DNA
tttttccatcttactaatag

SEQ ID NO: 253195 - DNA, 20 bp, synthetic construct
  source 1..20: mol_type = other DNA
ctttttccatcttactaata

SEQ ID NO: 253196 - DNA, 20 bp, synthetic construct
  source 1..20: mol_type = other DNA
cctttttccatcttactaat

SEQ ID NO: 253197 - DNA, 20 bp, synthetic construct
  source 1..20: mol_type = other DNA
acctttttccatcttactaa

SEQ ID NO: 253198 - DNA, 20 bp, synthetic construct
  source 1..20: mol_type = other DNA
cacctttttccatcttacta

SEQ ID NO: 253199 - DNA, 20 bp, synthetic construct
  source 1..20: mol_type = other DNA
acacctttttccatcttact

SEQ ID NO: 253200 - DNA, 20 bp, synthetic construct
  source 1..20: mol_type = other DNA
aacacctttttccatcttac

SEQ ID NO: 253201 - DNA, 20 bp, synthetic construct
  source 1..20: mol_type = other DNA
aaacacctttttccatctta

SEQ ID NO: 253202 - DNA, 20 bp, synthetic construct
  source 1..20: mol_type = other DNA
gaaacacctttttccatctt

SEQ ID NO: 253203 - DNA, 20 bp, synthetic construct
  source 1..20: mol_type = other DNA
tgaaacacctttttccatct

SEQ ID NO: 253204 - DNA, 20 bp, synthetic construct
  source 1..20: mol_type = other DNA
ctgaaacacctttttccatc

SEQ ID NO: 253205 - DNA, 20 bp, synthetic construct
  source 1..20: mol_type = other DNA
cctgaaacacctttttccat

SEQ ID NO: 253206 - DNA, 20 bp, synthetic construct
  source 1..20: mol_type = other DNA
acctgaaacacctttttcca

SEQ ID NO: 253207 - DNA, 20 bp, synthetic construct
  source 1..20: mol_type = other DNA
aacctgaaacacctttttcc

SEQ ID NO: 253208 - DNA, 20 bp, synthetic construct
  source 1..20: mol_type = other DNA
caacctgaaacacctttttc

SEQ ID NO: 253209 - DNA, 20 bp, synthetic construct
  source 1..20: mol_type = other DNA
ccaacctgaaacaccttttt

SEQ ID NO: 253210 - DNA, 20 bp, synthetic construct
  source 1..20: mol_type = other DNA
tccaacctgaaacacctttt

SEQ ID NO: 253211 - DNA, 20 bp, synthetic construct
  source 1..20: mol_type = other DNA
ctccaacctgaaacaccttt

SEQ ID NO: 253212 - DNA, 20 bp, synthetic construct
  source 1..20: mol_type = other DNA
gctccaacctgaaacacctt

SEQ ID NO: 253213 - DNA, 20 bp, synthetic construct
  source 1..20: mol_type = other DNA
agctccaacctgaaacacct

SEQ ID NO: 253214 - DNA, 20 bp, synthetic construct
  source 1..20: mol_type = other DNA
cagctccaacctgaaacacc

SEQ ID NO: 253215 - DNA, 20 bp, synthetic construct
  source 1..20: mol_type = other DNA
gcagctccaacctgaaacac

SEQ ID NO: 253216 - DNA, 20 bp, synthetic construct
  source 1..20: mol_type = other DNA
tgcagctccaacctgaaaca

SEQ ID NO: 253217 - DNA, 20 bp, synthetic construct
  source 1..20: mol_type = other DNA
ctgcagctccaacctgaaac

SEQ ID NO: 253218 - DNA, 20 bp, synthetic construct
  source 1..20: mol_type = other DNA
actgcagctccaacctgaaa

SEQ ID NO: 253219 - DNA, 20 bp, synthetic construct
  source 1..20: mol_type = other DNA
gactgcagctccaacctgaa

SEQ ID NO: 253220 - DNA, 20 bp, synthetic construct
  source 1..20: mol_type = other DNA
agactgcagctccaacctga

SEQ ID NO: 253221 - DNA, 20 bp, synthetic construct
  source 1..20: mol_type = other DNA
cagactgcagctccaacctg

SEQ ID NO: 253222 - DNA, 20 bp, synthetic construct
  source 1..20: mol_type = other DNA
acagactgcagctccaacct

SEQ ID NO: 253223 - DNA, 20 bp, synthetic construct
  source 1..20: mol_type = other DNA
aacagactgcagctccaacc

SEQ ID NO: 253224 - DNA, 20 bp, synthetic construct
  source 1..20: mol_type = other DNA
caacagactgcagctccaac

SEQ ID NO: 253225 - DNA, 20 bp, synthetic construct
  source 1..20: mol_type = other DNA
tcaacagactgcagctccaa

SEQ ID NO: 253226 - DNA, 20 bp, synthetic construct
  source 1..20: mol_type = other DNA
ctcaacagactgcagctcca

SEQ ID NO: 253227 - DNA, 20 bp, synthetic construct
  source 1..20: mol_type = other DNA
tctcaacagactgcagctcc

SEQ ID NO: 253228 - DNA, 20 bp, synthetic construct
  source 1..20: mol_type = other DNA
ctctcaacagactgcagctc

SEQ ID NO: 253229 - DNA, 20 bp, synthetic construct
  source 1..20: mol_type = other DNA
actctcaacagactgcagct

SEQ ID NO: 253230 - DNA, 20 bp, synthetic construct
  source 1..20: mol_type = other DNA
tactctcaacagactgcagc

SEQ ID NO: 253231 - DNA, 20 bp, synthetic construct
  source 1..20: mol_type = other DNA
ttactctcaacagactgcag

SEQ ID NO: 253232 - DNA, 20 bp, synthetic construct
  source 1..20: mol_type = other DNA
cttactctcaacagactgca

SEQ ID NO: 253233 - DNA, 20 bp, synthetic construct
  source 1..20: mol_type = other DNA
gcttactctcaacagactgc

SEQ ID NO: 253234 - DNA, 20 bp, synthetic construct
  source 1..20: mol_type = other DNA
agcttactctcaacagactg

SEQ ID NO: 253235 - DNA, 20 bp, synthetic construct
  source 1..20: mol_type = other DNA
tagcttactctcaacagact

SEQ ID NO: 253236 - DNA, 20 bp, synthetic construct
  source 1..20: mol_type = other DNA
atagcttactctcaacagac

SEQ ID NO: 253237 - DNA, 20 bp, synthetic construct
  source 1..20: mol_type = other DNA
catagcttactctcaacaga

SEQ ID NO: 253238 - DNA, 20 bp, synthetic construct
  source 1..20: mol_type = other DNA
ccatagcttactctcaacag

SEQ ID NO: 253239 - DNA, 20 bp, synthetic construct
  source 1..20: mol_type = other DNA
cccatagcttactctcaaca

SEQ ID NO: 253240 - DNA, 20 bp, synthetic construct
  source 1..20: mol_type = other DNA
tcccatagcttactctcaac

SEQ ID NO: 253241 - DNA, 20 bp, synthetic construct
  source 1..20: mol_type = other DNA
ttcccatagcttactctcaa

SEQ ID NO: 253242 - DNA, 20 bp, synthetic construct
  source 1..20: mol_type = other DNA
cttcccatagcttactctca

SEQ ID NO: 253243 - DNA, 20 bp, synthetic construct
  source 1..20: mol_type = other DNA
ccttcccatagcttactctc

SEQ ID NO: 253244 - DNA, 20 bp, synthetic construct
  source 1..20: mol_type = other DNA
gccttcccatagcttactct

SEQ ID NO: 253245 - DNA, 20 bp, synthetic construct
  source 1..20: mol_type = other DNA
ggccttcccatagcttactc

SEQ ID NO: 253246 - DNA, 20 bp, synthetic construct
  source 1..20: mol_type = other DNA
aggccttcccatagcttact

SEQ ID NO: 253247 - DNA, 20 bp, synthetic construct
  source 1..20: mol_type = other DNA
caggccttcccatagcttac

SEQ ID NO: 253248 - DNA, 20 bp, synthetic construct
  source 1..20: mol_type = other DNA
acaggccttcccatagctta

SEQ ID NO: 253249 - DNA, 20 bp, synthetic construct
  source 1..20: mol_type = other DNA
tacaggccttcccatagctt

SEQ ID NO: 253250 - DNA, 20 bp, synthetic construct
  source 1..20: mol_type = other DNA
atacaggccttcccatagct

SEQ ID NO: 253251 - DNA, 20 bp, synthetic construct
  source 1..20: mol_type = other DNA
tatacaggccttcccatagc

SEQ ID NO: 253252 - DNA, 20 bp, synthetic construct
  source 1..20: mol_type = other DNA
gtatacaggccttcccatag

SEQ ID NO: 253253 - DNA, 20 bp, synthetic construct
  source 1..20: mol_type = other DNA
cgtatacaggccttcccata

SEQ ID NO: 253254 - DNA, 20 bp, synthetic construct
  source 1..20: mol_type = other DNA
tcgtatacaggccttcccat

SEQ ID NO: 253255 - DNA, 20 bp, synthetic construct
  source 1..20: mol_type = other DNA
ctcgtatacaggccttccca

SEQ ID NO: 253256 - DNA, 20 bp, synthetic construct
  source 1..20: mol_type = other DNA
cctcgtatacaggccttccc

SEQ ID NO: 253257 - DNA, 20 bp, synthetic construct
  source 1..20: mol_type = other DNA
ccctcgtatacaggccttcc

SEQ ID NO: 253258 - DNA, 20 bp, synthetic construct
  source 1..20: mol_type = other DNA
cccctcgtatacaggccttc

SEQ ID NO: 253259 - DNA, 20 bp, synthetic construct
  source 1..20: mol_type = other DNA
acccctcgtatacaggcctt

SEQ ID NO: 253260 - DNA, 20 bp, synthetic construct
  source 1..20: mol_type = other DNA
cacccctcgtatacaggcct

SEQ ID NO: 253261 - DNA, 20 bp, synthetic construct
  source 1..20: mol_type = other DNA
ccacccctcgtatacaggcc

SEQ ID NO: 253262 - DNA, 20 bp, synthetic construct
  source 1..20: mol_type = other DNA
tccacccctcgtatacaggc

SEQ ID NO: 253263 - DNA, 20 bp, synthetic construct
  source 1..20: mol_type = other DNA
gtccacccctcgtatacagg

SEQ ID NO: 253264 - DNA, 20 bp, synthetic construct
  source 1..20: mol_type = other DNA
agtccacccctcgtatacag

SEQ ID NO: 253265 - DNA, 20 bp, synthetic construct
  source 1..20: mol_type = other DNA
aagtccacccctcgtataca

SEQ ID NO: 253266 - DNA, 20 bp, synthetic construct
  source 1..20: mol_type = other DNA
aaagtccacccctcgtatac

SEQ ID NO: 253267 - DNA, 20 bp, synthetic construct
  source 1..20: mol_type = other DNA
aaaagtccacccctcgtata

SEQ ID NO: 253268 - DNA, 20 bp, synthetic construct
  source 1..20: mol_type = other DNA
gaaaagtccacccctcgtat

SEQ ID NO: 253269 - DNA, 20 bp, synthetic construct
  source 1..20: mol_type = other DNA
agaaaagtccacccctcgta

SEQ ID NO: 253270 - DNA, 20 bp, synthetic construct
  source 1..20: mol_type = other DNA
aagaaaagtccacccctcgt

SEQ ID NO: 253271 - DNA, 20 bp, synthetic construct
  source 1..20: mol_type = other DNA
gaagaaaagtccacccctcg

SEQ ID NO: 253272 - DNA, 20 bp, synthetic construct
  source 1..20: mol_type = other DNA
agaagaaaagtccacccctc

SEQ ID NO: 253273 - DNA, 20 bp, synthetic construct
  source 1..20: mol_type = other DNA
cagaagaaaagtccacccct

SEQ ID NO: 253274 - DNA, 20 bp, synthetic construct
  source 1..20: mol_type = other DNA
acagaagaaaagtccacccc

SEQ ID NO: 253275 - DNA, 20 bp, synthetic construct
  source 1..20: mol_type = other DNA
tacagaagaaaagtccaccc

SEQ ID NO: 253276 - DNA, 20 bp, synthetic construct
  source 1..20: mol_type = other DNA
ttacagaagaaaagtccacc

SEQ ID NO: 253277 - DNA, 20 bp, synthetic construct
  source 1..20: mol_type = other DNA
cttacagaagaaaagtccac

SEQ ID NO: 253278 - DNA, 20 bp, synthetic construct
  source 1..20: mol_type = other DNA
acttacagaagaaaagtcca

SEQ ID NO: 253279 - DNA, 20 bp, synthetic construct
  source 1..20: mol_type = other DNA
cacttacagaagaaaagtcc

SEQ ID NO: 253280 - DNA, 20 bp, synthetic construct
  source 1..20: mol_type = other DNA
acacttacagaagaaaagtc

SEQ ID NO: 253281 - DNA, 20 bp, synthetic construct
  source 1..20: mol_type = other DNA
gacacttacagaagaaaagt

SEQ ID NO: 253282 - DNA, 20 bp, synthetic construct
  source 1..20: mol_type = other DNA
ggacacttacagaagaaaag

SEQ ID NO: 253283 - DNA, 20 bp, synthetic construct
  source 1..20: mol_type = other DNA
tggacacttacagaagaaaa

SEQ ID NO: 253284 - DNA, 20 bp, synthetic construct
  source 1..20: mol_type = other DNA
ctggacacttacagaagaaa

SEQ ID NO: 253285 - DNA, 20 bp, synthetic construct
  source 1..20: mol_type = other DNA
tctggacacttacagaagaa

SEQ ID NO: 253286 - DNA, 20 bp, synthetic construct
  source 1..20: mol_type = other DNA
ctctggacacttacagaaga

SEQ ID NO: 253287 - DNA, 20 bp, synthetic construct
  source 1..20: mol_type = other DNA
tctctggacacttacagaag

SEQ ID NO: 253288 - DNA, 20 bp, synthetic construct
  source 1..20: mol_type = other DNA
gtctctggacacttacagaa

SEQ ID NO: 253289 - DNA, 20 bp, synthetic construct
  source 1..20: mol_type = other DNA
ggtctctggacacttacaga

SEQ ID NO: 253290 - DNA, 20 bp, synthetic construct
  source 1..20: mol_type = other DNA
tggtctctggacacttacag

SEQ ID NO: 253291 - DNA, 20 bp, synthetic construct
  source 1..20: mol_type = other DNA
ctggtctctggacacttaca

SEQ ID NO: 253292 - DNA, 20 bp, synthetic construct
  source 1..20: mol_type = other DNA
cctggtctctggacacttac

SEQ ID NO: 253293 - DNA, 20 bp, synthetic construct
  source 1..20: mol_type = other DNA
gcctggtctctggacactta

SEQ ID NO: 253294 - DNA, 20 bp, synthetic construct
  source 1..20: mol_type = other DNA
ggcctggtctctggacactt

SEQ ID NO: 253295 - DNA, 20 bp, synthetic construct
  source 1..20: mol_type = other DNA
aggcctggtctctggacact

SEQ ID NO: 253296 - DNA, 20 bp, synthetic construct
  source 1..20: mol_type = other DNA
gaggcctggtctctggacac

SEQ ID NO: 253297 - DNA, 20 bp, synthetic construct
  source 1..20: mol_type = other DNA
ggaggcctggtctctggaca

SEQ ID NO: 253298 - DNA, 20 bp, synthetic construct
  source 1..20: mol_type = other DNA
aggaggcctggtctctggac

SEQ ID NO: 253299 - DNA, 20 bp, synthetic construct
  source 1..20: mol_type = other DNA
caggaggcctggtctctgga

SEQ ID NO: 253300 - DNA, 20 bp, synthetic construct
  source 1..20: mol_type = other DNA
tcaggaggcctggtctctgg

SEQ ID NO: 253301 - DNA, 20 bp, synthetic construct
  source 1..20: mol_type = other DNA
ttcaggaggcctggtctctg

SEQ ID NO: 253302 - DNA, 20 bp, synthetic construct
  source 1..20: mol_type = other DNA
cttcaggaggcctggtctct

SEQ ID NO: 253303 - DNA, 20 bp, synthetic construct
  source 1..20: mol_type = other DNA
tcttcaggaggcctggtctc

SEQ ID NO: 253304 - DNA, 20 bp, synthetic construct
  source 1..20: mol_type = other DNA
ctcttcaggaggcctggtct

SEQ ID NO: 253305 - DNA, 20 bp, synthetic construct
  source 1..20: mol_type = other DNA
cctcttcaggaggcctggtc

SEQ ID NO: 253306 - DNA, 20 bp, synthetic construct
  source 1..20: mol_type = other DNA
ccctcttcaggaggcctggt

SEQ ID NO: 253307 - DNA, 20 bp, synthetic construct
  source 1..20: mol_type = other DNA
gccctcttcaggaggcctgg

SEQ ID NO: 253308 - DNA, 20 bp, synthetic construct
  source 1..20: mol_type = other DNA
tgccctcttcaggaggcctg

SEQ ID NO: 253309 - DNA, 20 bp, synthetic construct
  source 1..20: mol_type = other DNA
atgccctcttcaggaggcct

SEQ ID NO: 253310 - DNA, 20 bp, synthetic construct
  source 1..20: mol_type = other DNA
catgccctcttcaggaggcc

SEQ ID NO: 253311 - DNA, 20 bp, synthetic construct
  source 1..20: mol_type = other DNA
ccatgccctcttcaggaggc

SEQ ID NO: 253312 - DNA, 20 bp, synthetic construct
  source 1..20: mol_type = other DNA
cccatgccctcttcaggagg

SEQ ID NO: 253313 - DNA, 20 bp, synthetic construct
  source 1..20: mol_type = other DNA
ccccatgccctcttcaggag

SEQ ID NO: 253314 - DNA, 20 bp, synthetic construct
  source 1..20: mol_type = other DNA
cccccatgccctcttcagga

SEQ ID NO: 253315 - DNA, 20 bp, synthetic construct
  source 1..20: mol_type = other DNA
gcccccatgccctcttcagg

SEQ ID NO: 253316 - DNA, 20 bp, synthetic construct
  source 1..20: mol_type = other DNA
agcccccatgccctcttcag

SEQ ID NO: 253317 - DNA, 20 bp, synthetic construct
  source 1..20: mol_type = other DNA
aagcccccatgccctcttca

SEQ ID NO: 253318 - DNA, 20 bp, synthetic construct
  source 1..20: mol_type = other DNA
taagcccccatgccctcttc

SEQ ID NO: 253319 - DNA, 20 bp, synthetic construct
  source 1..20: mol_type = other DNA
ttaagcccccatgccctctt

SEQ ID NO: 253320 - DNA, 20 bp, synthetic construct
  source 1..20: mol_type = other DNA
gttaagcccccatgccctct

SEQ ID NO: 253321 - DNA, 20 bp, synthetic construct
  source 1..20: mol_type = other DNA
agttaagcccccatgccctc

SEQ ID NO: 253322 - DNA, 20 bp, synthetic construct
  source 1..20: mol_type = other DNA
aagttaagcccccatgccct

SEQ ID NO: 253323 - DNA, 20 bp, synthetic construct
  source 1..20: mol_type = other DNA
taagttaagcccccatgccc

SEQ ID NO: 253324 - DNA, 20 bp, synthetic construct
  source 1..20: mol_type = other DNA
gtaagttaagcccccatgcc

SEQ ID NO: 253325 - DNA, 20 bp, synthetic construct
  source 1..20: mol_type = other DNA
ggtaagttaagcccccatgc

SEQ ID NO: 253326 - DNA, 20 bp, synthetic construct
  source 1..20: mol_type = other DNA
aggtaagttaagcccccatg

SEQ ID NO: 253327 - DNA, 20 bp, synthetic construct
  source 1..20: mol_type = other DNA
caggtaagttaagcccccat

SEQ ID NO: 253328 - DNA, 20 bp, synthetic construct
  source 1..20: mol_type = other DNA
ccaggtaagttaagccccca

SEQ ID NO: 253329 - DNA, 20 bp, synthetic construct
  source 1..20: mol_type = other DNA
tccaggtaagttaagccccc

SEQ ID NO: 253330 - DNA, 20 bp, synthetic construct
  source 1..20: mol_type = other DNA
gtccaggtaagttaagcccc

SEQ ID NO: 253331 - DNA, 20 bp, synthetic construct
  source 1..20: mol_type = other DNA
agtccaggtaagttaagccc

SEQ ID NO: 253332 - DNA, 20 bp, synthetic construct
  source 1..20: mol_type = other DNA
tagtccaggtaagttaagcc

SEQ ID NO: 253333 - DNA, 20 bp, synthetic construct
  source 1..20: mol_type = other DNA
gtagtccaggtaagttaagc

SEQ ID NO: 253334 - DNA, 20 bp, synthetic construct
  source 1..20: mol_type = other DNA
agtagtccaggtaagttaag

SEQ ID NO: 253335 - DNA, 20 bp, synthetic construct
  source 1..20: mol_type = other DNA
cagtagtccaggtaagttaa

SEQ ID NO: 253336 - DNA, 20 bp, synthetic construct
  source 1..20: mol_type = other DNA
acagtagtccaggtaagtta

SEQ ID NO: 253337 - DNA, 20 bp, synthetic construct
  source 1..20: mol_type = other DNA
cacagtagtccaggtaagtt

SEQ ID NO: 253338 - DNA, 20 bp, synthetic construct
  source 1..20: mol_type = other DNA
acacagtagtccaggtaagt

SEQ ID NO: 253339 - DNA, 20 bp, synthetic construct
  source 1..20: mol_type = other DNA
aacacagtagtccaggtaag

SEQ ID NO: 253340 - DNA, 20 bp, synthetic construct
  source 1..20: mol_type = other DNA
aaacacagtagtccaggtaa

SEQ ID NO: 253341 - DNA, 20 bp, synthetic construct
  source 1..20: mol_type = other DNA
taaacacagtagtccaggta

SEQ ID NO: 253342 - DNA, 20 bp, synthetic construct
  source 1..20: mol_type = other DNA
gtaaacacagtagtccaggt

SEQ ID NO: 253343 - DNA, 20 bp, synthetic construct
  source 1..20: mol_type = other DNA
tgtaaacacagtagtccagg

SEQ ID NO: 253344 - DNA, 20 bp, synthetic construct
  source 1..20: mol_type = other DNA
ttgtaaacacagtagtccag

SEQ ID NO: 253345 - DNA, 20 bp, synthetic construct
  source 1..20: mol_type = other DNA
attgtaaacacagtagtcca

SEQ ID NO: 253346 - DNA, 20 bp, synthetic construct
  source 1..20: mol_type = other DNA
tattgtaaacacagtagtcc

SEQ ID NO: 253347 - DNA, 20 bp, synthetic construct
  source 1..20: mol_type = other DNA
gtattgtaaacacagtagtc

SEQ ID NO: 253348 - DNA, 20 bp, synthetic construct
  source 1..20: mol_type = other DNA
agtattgtaaacacagtagt

SEQ ID NO: 253349 - DNA, 20 bp, synthetic construct
  source 1..20: mol_type = other DNA
gagtattgtaaacacagtag

SEQ ID NO: 253350 - DNA, 20 bp, synthetic construct
  source 1..20: mol_type = other DNA
tgagtattgtaaacacagta

SEQ ID NO: 253351 - DNA, 20 bp, synthetic construct
  source 1..20: mol_type = other DNA
atgagtattgtaaacacagt

SEQ ID NO: 253352 - DNA, 20 bp, synthetic construct
  source 1..20: mol_type = other DNA
aatgagtattgtaaacacag

SEQ ID NO: 253353 - DNA, 20 bp, synthetic construct
  source 1..20: mol_type = other DNA
aaatgagtattgtaaacaca

SEQ ID NO: 253354 - DNA, 20 bp, synthetic construct
  source 1..20: mol_type = other DNA
taaatgagtattgtaaacac

SEQ ID NO: 253355 - DNA, 20 bp, synthetic construct
  source 1..20: mol_type = other DNA
ataaatgagtattgtaaaca

SEQ ID NO: 253356 - DNA, 20 bp, synthetic construct
  source 1..20: mol_type = other DNA
gataaatgagtattgtaaac

SEQ ID NO: 253357 - DNA, 20 bp, synthetic construct
  source 1..20: mol_type = other DNA
agataaatgagtattgtaaa

SEQ ID NO: 253358 - DNA, 20 bp, synthetic construct
  source 1..20: mol_type = other DNA
aagataaatgagtattgtaa

SEQ ID NO: 253359 - DNA, 20 bp, synthetic construct
  source 1..20: mol_type = other DNA
caagataaatgagtattgta

SEQ ID NO: 253360 - DNA, 20 bp, synthetic construct
  source 1..20: mol_type = other DNA
tcaagataaatgagtattgt

SEQ ID NO: 253361 - DNA, 20 bp, synthetic construct
  source 1..20: mol_type = other DNA
ttcaagataaatgagtattg

SEQ ID NO: 253362 - DNA, 20 bp, synthetic construct
  source 1..20: mol_type = other DNA
gttcaagataaatgagtatt

SEQ ID NO: 253363 - DNA, 20 bp, synthetic construct
  source 1..20: mol_type = other DNA
agttcaagataaatgagtat

SEQ ID NO: 253364 - DNA, 20 bp, synthetic construct
  source 1..20: mol_type = other DNA
gagttcaagataaatgagta

SEQ ID NO: 253365 - DNA, 20 bp, synthetic construct
  source 1..20: mol_type = other DNA
ggagttcaagataaatgagt

SEQ ID NO: 253366 - DNA, 20 bp, synthetic construct
  source 1..20: mol_type = other DNA
aggagttcaagataaatgag

SEQ ID NO: 253367 - DNA, 20 bp, synthetic construct
  source 1..20: mol_type = other DNA
gaggagttcaagataaatga

SEQ ID NO: 253368 - DNA, 20 bp, synthetic construct
  source 1..20: mol_type = other DNA
ggaggagttcaagataaatg

SEQ ID NO: 253369 - DNA, 20 bp, synthetic construct
  source 1..20: mol_type = other DNA
aggaggagttcaagataaat

SEQ ID NO: 253370 - DNA, 20 bp, synthetic construct
  source 1..20: mol_type = other DNA
taggaggagttcaagataaa

SEQ ID NO: 253371 - DNA, 20 bp, synthetic construct
  source 1..20: mol_type = other DNA
ttaggaggagttcaagataa

SEQ ID NO: 253372 - DNA, 20 bp, synthetic construct
  source 1..20: mol_type = other DNA
gttaggaggagttcaagata

SEQ ID NO: 253373 - DNA, 20 bp, synthetic construct
  source 1..20: mol_type = other DNA
ggttaggaggagttcaagat

SEQ ID NO: 253374 - DNA, 20 bp, synthetic construct
  source 1..20: mol_type = other DNA
gggttaggaggagttcaaga

SEQ ID NO: 253375 - DNA, 20 bp, synthetic construct
  source 1..20: mol_type = other DNA
ggggttaggaggagttcaag

SEQ ID NO: 253376 - DNA, 20 bp, synthetic construct
  source 1..20: mol_type = other DNA
aggggttaggaggagttcaa

SEQ ID NO: 253377 - DNA, 20 bp, synthetic construct
  source 1..20: mol_type = other DNA
caggggttaggaggagttca

SEQ ID NO: 253378 - DNA, 20 bp, synthetic construct
  source 1..20: mol_type = other DNA
tcaggggttaggaggagttc

SEQ ID NO: 253379 - DNA, 20 bp, synthetic construct
  source 1..20: mol_type = other DNA
ctcaggggttaggaggagtt

SEQ ID NO: 253380 - DNA, 20 bp, synthetic construct
  source 1..20: mol_type = other DNA
tctcaggggttaggaggagt

SEQ ID NO: 253381 - DNA, 20 bp, synthetic construct
  source 1..20: mol_type = other DNA
ttctcaggggttaggaggag

SEQ ID NO: 253382 - DNA, 20 bp, synthetic construct
  source 1..20: mol_type = other DNA
attctcaggggttaggagga

SEQ ID NO: 253383 - DNA, 20 bp, synthetic construct
  source 1..20: mol_type = other DNA
aattctcaggggttaggagg

SEQ ID NO: 253384 - DNA, 20 bp, synthetic construct
  source 1..20: mol_type = other DNA
caattctcaggggttaggag

SEQ ID NO: 253385 - DNA, 20 bp, synthetic construct
  source 1..20: mol_type = other DNA
gcaattctcaggggttagga

SEQ ID NO: 253386 - DNA, 20 bp, synthetic construct
  source 1..20: mol_type = other DNA
agcaattctcaggggttagg

SEQ ID NO: 253387 - DNA, 20 bp, synthetic construct
  source 1..20: mol_type = other DNA
tagcaattctcaggggttag

SEQ ID NO: 253388 - DNA, 20 bp, synthetic construct
  source 1..20: mol_type = other DNA
gtagcaattctcaggggtta

SEQ ID NO: 253389 - DNA, 20 bp, synthetic construct
  source 1..20: mol_type = other DNA
tgtagcaattctcaggggtt

SEQ ID NO: 253390 - DNA, 20 bp, synthetic construct
  source 1..20: mol_type = other DNA
atgtagcaattctcaggggt

SEQ ID NO: 253391 - DNA, 20 bp, synthetic construct
  source 1..20: mol_type = other DNA
aatgtagcaattctcagggg

SEQ ID NO: 253392 - DNA, 20 bp, synthetic construct
  source 1..20: mol_type = other DNA
aaatgtagcaattctcaggg

SEQ ID NO: 253393 - DNA, 20 bp, synthetic construct
  source 1..20: mol_type = other DNA
taaatgtagcaattctcagg

SEQ ID NO: 253394 - DNA, 20 bp, synthetic construct
  source 1..20: mol_type = other DNA
ctaaatgtagcaattctcag

SEQ ID NO: 253395 - DNA, 20 bp, synthetic construct
  source 1..20: mol_type = other DNA
actaaatgtagcaattctca

SEQ ID NO: 253396 - DNA, 20 bp, synthetic construct
  source 1..20: mol_type = other DNA
tactaaatgtagcaattctc

SEQ ID NO: 253397 - DNA, 20 bp, synthetic construct
  source 1..20: mol_type = other DNA
atactaaatgtagcaattct

SEQ ID NO: 253398 - DNA, 20 bp, synthetic construct
  source 1..20: mol_type = other DNA
aatactaaatgtagcaattc

SEQ ID NO: 253399 - DNA, 20 bp, synthetic construct
  source 1..20: mol_type = other DNA
aaatactaaatgtagcaatt

SEQ ID NO: 253400 - DNA, 20 bp, synthetic construct
  source 1..20: mol_type = other DNA
caaatactaaatgtagcaat

SEQ ID NO: 253401 - DNA, 20 bp, synthetic construct
  source 1..20: mol_type = other DNA
gcaaatactaaatgtagcaa

SEQ ID NO: 253402 - DNA, 20 bp, synthetic construct
  source 1..20: mol_type = other DNA
agcaaatactaaatgtagca

SEQ ID NO: 253403 - DNA, 20 bp, synthetic construct
  source 1..20: mol_type = other DNA
cagcaaatactaaatgtagc

SEQ ID NO: 253404 - DNA, 20 bp, synthetic construct
  source 1..20: mol_type = other DNA
tcagcaaatactaaatgtag

SEQ ID NO: 253405 - DNA, 20 bp, synthetic construct
  source 1..20: mol_type = other DNA
ctcagcaaatactaaatgta

SEQ ID NO: 253406 - DNA, 20 bp, synthetic construct
  source 1..20: mol_type = other DNA
actcagcaaatactaaatgt

SEQ ID NO: 253407 - DNA, 20 bp, synthetic construct
  source 1..20: mol_type = other DNA
tactcagcaaatactaaatg

SEQ ID NO: 253408 - DNA, 20 bp, synthetic construct
  source 1..20: mol_type = other DNA
gtactcagcaaatactaaat

SEQ ID NO: 253409 - DNA, 20 bp, synthetic construct
  source 1..20: mol_type = other DNA
agtactcagcaaatactaaa

SEQ ID NO: 253410 - DNA, 20 bp, synthetic construct
  source 1..20: mol_type = other DNA
aagtactcagcaaatactaa

SEQ ID NO: 253411 - DNA, 20 bp, synthetic construct
  source 1..20: mol_type = other DNA
gaagtactcagcaaatacta

SEQ ID NO: 253412 - DNA, 20 bp, synthetic construct
  source 1..20: mol_type = other DNA
ggaagtactcagcaaatact

SEQ ID NO: 253413 - DNA, 20 bp, synthetic construct
  source 1..20: mol_type = other DNA
aggaagtactcagcaaatac

SEQ ID NO: 253414 - DNA, 20 bp, synthetic construct
  source 1..20: mol_type = other DNA
taggaagtactcagcaaata

SEQ ID NO: 253415 - DNA, 20 bp, synthetic construct
  source 1..20: mol_type = other DNA
ctaggaagtactcagcaaat

SEQ ID NO: 253416 - DNA, 20 bp, synthetic construct
  source 1..20: mol_type = other DNA
gctaggaagtactcagcaaa

SEQ ID NO: 253417 - DNA, 20 bp, synthetic construct
  source 1..20: mol_type = other DNA
tgctaggaagtactcagcaa

SEQ ID NO: 253418 - DNA, 20 bp, synthetic construct
  source 1..20: mol_type = other DNA
atgctaggaagtactcagca

SEQ ID NO: 253419 - DNA, 20 bp, synthetic construct
  source 1..20: mol_type = other DNA
gatgctaggaagtactcagc

SEQ ID NO: 253420 - DNA, 20 bp, synthetic construct
  source 1..20: mol_type = other DNA
ggatgctaggaagtactcag

SEQ ID NO: 253421 - DNA, 20 bp, synthetic construct
  source 1..20: mol_type = other DNA
aggatgctaggaagtactca

SEQ ID NO: 253422 - DNA, 20 bp, synthetic construct
  source 1..20: mol_type = other DNA
taggatgctaggaagtactc

SEQ ID NO: 253423 - DNA, 20 bp, synthetic construct
  source 1..20: mol_type = other DNA
ctaggatgctaggaagtact

SEQ ID NO: 253424 - DNA, 20 bp, synthetic construct
  source 1..20: mol_type = other DNA
cctaggatgctaggaagtac

SEQ ID NO: 253425 - DNA, 20 bp, synthetic construct
  source 1..20: mol_type = other DNA
ccctaggatgctaggaagta

SEQ ID NO: 253426 - DNA, 20 bp, synthetic construct
  source 1..20: mol_type = other DNA
tccctaggatgctaggaagt

SEQ ID NO: 253427 - DNA, 20 bp, synthetic construct
  source 1..20: mol_type = other DNA
ttccctaggatgctaggaag

SEQ ID NO: 253428 - DNA, 20 bp, synthetic construct
  source 1..20: mol_type = other DNA
attccctaggatgctaggaa

SEQ ID NO: 253429 - DNA, 20 bp, synthetic construct
  source 1..20: mol_type = other DNA
gattccctaggatgctagga

SEQ ID NO: 253430 - DNA, 20 bp, synthetic construct
  source 1..20: mol_type = other DNA
tgattccctaggatgctagg

SEQ ID NO: 253431 - DNA, 20 bp, synthetic construct
  source 1..20: mol_type = other DNA
ttgattccctaggatgctag

SEQ ID NO: 253432 - DNA, 20 bp, synthetic construct
  source 1..20: mol_type = other DNA
attgattccctaggatgcta

SEQ ID NO: 253433 - DNA, 20 bp, synthetic construct
  source 1..20: mol_type = other DNA
tattgattccctaggatgct

SEQ ID NO: 253434 - DNA, 20 bp, synthetic construct
  source 1..20: mol_type = other DNA
ctattgattccctaggatgc

SEQ ID NO: 253435 - DNA, 20 bp, synthetic construct
  source 1..20: mol_type = other DNA
tctattgattccctaggatg

SEQ ID NO: 253436 - DNA, 20 bp, synthetic construct
  source 1..20: mol_type = other DNA
ttctattgattccctaggat

SEQ ID NO: 253437 - DNA, 20 bp, synthetic construct
  source 1..20: mol_type = other DNA
gttctattgattccctagga

SEQ ID NO: 253438 - DNA, 20 bp, synthetic construct
  source 1..20: mol_type = other DNA
tgttctattgattccctagg

SEQ ID NO: 253439 - DNA, 20 bp, synthetic construct
  source 1..20: mol_type = other DNA
atgttctattgattccctag

SEQ ID NO: 253440 - DNA, 20 bp, synthetic construct
  source 1..20: mol_type = other DNA
aatgttctattgattcccta

SEQ ID NO: 253441 - DNA, 20 bp, synthetic construct
  source 1..20: mol_type = other DNA
gaatgttctattgattccct

SEQ ID NO: 253442 - DNA, 20 bp, synthetic construct
  source 1..20: mol_type = other DNA
agaatgttctattgattccc

SEQ ID NO: 253443 - DNA, 20 bp, synthetic construct
  source 1..20: mol_type = other DNA
gagaatgttctattgattcc

SEQ ID NO: 253444 - DNA, 20 bp, synthetic construct
  source 1..20: mol_type = other DNA
ggagaatgttctattgattc

SEQ ID NO: 253445 - DNA, 20 bp, synthetic construct
  source 1..20: mol_type = other DNA
gggagaatgttctattgatt

SEQ ID NO: 253446 - DNA, 20 bp, synthetic construct
  source 1..20: mol_type = other DNA
tgggagaatgttctattgat

SEQ ID NO: 253447 - DNA, 20 bp, synthetic construct
  source 1..20: mol_type = other DNA
ttgggagaatgttctattga

SEQ ID NO: 253448 - DNA, 20 bp, synthetic construct
  source 1..20: mol_type = other DNA
gttgggagaatgttctattg

SEQ ID NO: 253449 - DNA, 20 bp, synthetic construct
  source 1..20: mol_type = other DNA
ggttgggagaatgttctatt

SEQ ID NO: 253450 - DNA, 20 bp, synthetic construct
  source 1..20: mol_type = other DNA
tggttgggagaatgttctat

SEQ ID NO: 253451 - DNA, 20 bp, synthetic construct
  source 1..20: mol_type = other DNA
ctggttgggagaatgttcta

SEQ ID NO: 253452 - DNA, 20 bp, synthetic construct
  source 1..20: mol_type = other DNA
cctggttgggagaatgttct

SEQ ID NO: 253453 - DNA, 20 bp, synthetic construct
  source 1..20: mol_type = other DNA
gcctggttgggagaatgttc

SEQ ID NO: 253454 - DNA, 20 bp, synthetic construct
  source 1..20: mol_type = other DNA
agcctggttgggagaatgtt

SEQ ID NO: 253455 - DNA, 20 bp, synthetic construct
  source 1..20: mol_type = other DNA
cagcctggttgggagaatgt

SEQ ID NO: 253456 - DNA, 20 bp, synthetic construct
  source 1..20: mol_type = other DNA
ccagcctggttgggagaatg

SEQ ID NO: 253457 - DNA, 20 bp, synthetic construct
  source 1..20: mol_type = other DNA
cccagcctggttgggagaat

SEQ ID NO: 253458 - DNA, 20 bp, synthetic construct
  source 1..20: mol_type = other DNA
acccagcctggttgggagaa

SEQ ID NO: 253459 - DNA, 20 bp, synthetic construct
  source 1..20: mol_type = other DNA
cacccagcctggttgggaga

SEQ ID NO: 253460 - DNA, 20 bp, synthetic construct
  source 1..20: mol_type = other DNA
gcacccagcctggttgggag

SEQ ID NO: 253461 - DNA, 20 bp, synthetic construct
  source 1..20: mol_type = other DNA
cgcacccagcctggttggga

SEQ ID NO: 253462 - DNA, 20 bp, synthetic construct
  source 1..20: mol_type = other DNA
ccgcacccagcctggttggg

SEQ ID NO: 253463 - DNA, 20 bp, synthetic construct
  source 1..20: mol_type = other DNA
accgcacccagcctggttgg

SEQ ID NO: 253464 - DNA, 20 bp, synthetic construct
  source 1..20: mol_type = other DNA
caccgcacccagcctggttg

SEQ ID NO: 253465 - DNA, 20 bp, synthetic construct
  source 1..20: mol_type = other DNA
ccaccgcacccagcctggtt

SEQ ID NO: 253466 - DNA, 20 bp, synthetic construct
  source 1..20: mol_type = other DNA
gccaccgcacccagcctggt

SEQ ID NO: 253467 - DNA, 20 bp, synthetic construct
  source 1..20: mol_type = other DNA
agccaccgcacccagcctgg

SEQ ID NO: 253468 - DNA, 20 bp, synthetic construct
  source 1..20: mol_type = other DNA
gagccaccgcacccagcctg

SEQ ID NO: 253469 - DNA, 20 bp, synthetic construct
  source 1..20: mol_type = other DNA
tgagccaccgcacccagcct

SEQ ID NO: 253470 - DNA, 20 bp, synthetic construct
  source 1..20: mol_type = other DNA
atgagccaccgcacccagcc

SEQ ID NO: 253471 - DNA, 20 bp, synthetic construct
  source 1..20: mol_type = other DNA
catgagccaccgcacccagc

SEQ ID NO: 253472 - DNA, 20 bp, synthetic construct
  source 1..20: mol_type = other DNA
acatgagccaccgcacccag

SEQ ID NO: 253473 - DNA, 20 bp, synthetic construct
  source 1..20: mol_type = other DNA
gacatgagccaccgcaccca

SEQ ID NO: 253474 - DNA, 20 bp, synthetic construct
  source 1..20: mol_type = other DNA
agacatgagccaccgcaccc

SEQ ID NO: 253475 - DNA, 20 bp, synthetic construct
  source 1..20: mol_type = other DNA
cagacatgagccaccgcacc

SEQ ID NO: 253476 - DNA, 20 bp, synthetic construct
  source 1..20: mol_type = other DNA
acagacatgagccaccgcac

SEQ ID NO: 253477 - DNA, 20 bp, synthetic construct
  source 1..20: mol_type = other DNA
tacagacatgagccaccgca

SEQ ID NO: 253478 - DNA, 20 bp, synthetic construct
  source 1..20: mol_type = other DNA
ttacagacatgagccaccgc

SEQ ID NO: 253479 - DNA, 20 bp, synthetic construct
  source 1..20: mol_type = other DNA
attacagacatgagccaccg

SEQ ID NO: 253480 - DNA, 20 bp, synthetic construct
  source 1..20: mol_type = other DNA
gattacagacatgagccacc

SEQ ID NO: 253481 - DNA, 20 bp, synthetic construct
  source 1..20: mol_type = other DNA
ggattacagacatgagccac

SEQ ID NO: 253482 - DNA, 20 bp, synthetic construct
  source 1..20: mol_type = other DNA
gggattacagacatgagcca

SEQ ID NO: 253483 - DNA, 20 bp, synthetic construct
  source 1..20: mol_type = other DNA
tgggattacagacatgagcc

SEQ ID NO: 253484 - DNA, 20 bp, synthetic construct
  source 1..20: mol_type = other DNA
ctgggattacagacatgagc

SEQ ID NO: 253485 - DNA, 20 bp, synthetic construct
  source 1..20: mol_type = other DNA
gctgggattacagacatgag

SEQ ID NO: 253486 - DNA, 20 bp, synthetic construct
  source 1..20: mol_type = other DNA
tgctgggattacagacatga

SEQ ID NO: 253487 - DNA, 20 bp, synthetic construct
  source 1..20: mol_type = other DNA
gtgctgggattacagacatg

SEQ ID NO: 253488 - DNA, 20 bp, synthetic construct
  source 1..20: mol_type = other DNA
agtgctgggattacagacat

SEQ ID NO: 253489 - DNA, 20 bp, synthetic construct
  source 1..20: mol_type = other DNA
aagtgctgggattacagaca

SEQ ID NO: 253490 - DNA, 20 bp, synthetic construct
  source 1..20: mol_type = other DNA
aaagtgctgggattacagac

SEQ ID NO: 253491 - DNA, 20 bp, synthetic construct
  source 1..20: mol_type = other DNA
caaagtgctgggattacaga

SEQ ID NO: 253492 - DNA, 20 bp, synthetic construct
  source 1..20: mol_type = other DNA
ccaaagtgctgggattacag

SEQ ID NO: 253493 - DNA, 20 bp, synthetic construct
  source 1..20: mol_type = other DNA
cccaaagtgctgggattaca

SEQ ID NO: 253494 - DNA, 20 bp, synthetic construct
  source 1..20: mol_type = other DNA
tcccaaagtgctgggattac

SEQ ID NO: 253495 - DNA, 20 bp, synthetic construct
  source 1..20: mol_type = other DNA
ctcccaaagtgctgggatta

SEQ ID NO: 253496 - DNA, 20 bp, synthetic construct
  source 1..20: mol_type = other DNA
cctcccaaagtgctgggatt

SEQ ID NO: 253497 - DNA, 20 bp, synthetic construct
  source 1..20: mol_type = other DNA
gcctcccaaagtgctgggat

SEQ ID NO: 253498 - DNA, 20 bp, synthetic construct
  source 1..20: mol_type = other DNA
ggcctcccaaagtgctggga

SEQ ID NO: 253499 - DNA, 20 bp, synthetic construct
  source 1..20: mol_type = other DNA
tggcctcccaaagtgctggg

SEQ ID NO: 253500 - DNA, 20 bp, synthetic construct
  source 1..20: mol_type = other DNA
ttggcctcccaaagtgctgg

SEQ ID NO: 253501 - DNA, 20 bp, synthetic construct
  source 1..20: mol_type = other DNA
cttggcctcccaaagtgctg

SEQ ID NO: 253502 - DNA, 20 bp, synthetic construct
  source 1..20: mol_type = other DNA
ccttggcctcccaaagtgct

SEQ ID NO: 253503 - DNA, 20 bp, synthetic construct
  source 1..20: mol_type = other DNA
accttggcctcccaaagtgc

SEQ ID NO: 253504 - DNA, 20 bp, synthetic construct
  source 1..20: mol_type = other DNA
taccttggcctcccaaagtg

SEQ ID NO: 253505 - DNA, 20 bp, synthetic construct
  source 1..20: mol_type = other DNA
ctaccttggcctcccaaagt

SEQ ID NO: 253506 - DNA, 20 bp, synthetic construct
  source 1..20: mol_type = other DNA
cctaccttggcctcccaaag

SEQ ID NO: 253507 - DNA, 20 bp, synthetic construct
  source 1..20: mol_type = other DNA
gcctaccttggcctcccaaa

SEQ ID NO: 253508 - DNA, 20 bp, synthetic construct
  source 1..20: mol_type = other DNA
tgcctaccttggcctcccaa

SEQ ID NO: 253509 - DNA, 20 bp, synthetic construct
  source 1..20: mol_type = other DNA
ctgcctaccttggcctccca

SEQ ID NO: 253510 - DNA, 20 bp, synthetic construct
  source 1..20: mol_type = other DNA
tctgcctaccttggcctccc

SEQ ID NO: 253511 - DNA, 20 bp, synthetic construct
  source 1..20: mol_type = other DNA
atctgcctaccttggcctcc

SEQ ID NO: 253512 - DNA, 20 bp, synthetic construct
  source 1..20: mol_type = other DNA
gatctgcctaccttggcctc

SEQ ID NO: 253513 - DNA, 20 bp, synthetic construct
  source 1..20: mol_type = other DNA
ggatctgcctaccttggcct

SEQ ID NO: 253514 - DNA, 20 bp, synthetic construct
  source 1..20: mol_type = other DNA
gggatctgcctaccttggcc

SEQ ID NO: 253515 - DNA, 20 bp, synthetic construct
  source 1..20: mol_type = other DNA
agggatctgcctaccttggc

SEQ ID NO: 253516 - DNA, 20 bp, synthetic construct
  source 1..20: mol_type = other DNA
aagggatctgcctaccttgg

SEQ ID NO: 253517 - DNA, 20 bp, synthetic construct
  source 1..20: mol_type = other DNA
caagggatctgcctaccttg

SEQ ID NO: 253518 - DNA, 20 bp, synthetic construct
  source 1..20: mol_type = other DNA
tcaagggatctgcctacctt

SEQ ID NO: 253519 - DNA, 20 bp, synthetic construct
  source 1..20: mol_type = other DNA
ctcaagggatctgcctacct

SEQ ID NO: 253520 - DNA, 20 bp, synthetic construct
  source 1..20: mol_type = other DNA
cctcaagggatctgcctacc

SEQ ID NO: 253521 - DNA, 20 bp, synthetic construct
  source 1..20: mol_type = other DNA
gcctcaagggatctgcctac

SEQ ID NO: 253522 - DNA, 20 bp, synthetic construct
  source 1..20: mol_type = other DNA
ggcctcaagggatctgccta

SEQ ID NO: 253523 - DNA, 20 bp, synthetic construct
  source 1..20: mol_type = other DNA
tggcctcaagggatctgcct

SEQ ID NO: 253524 - DNA, 20 bp, synthetic construct
  source 1..20: mol_type = other DNA
ctggcctcaagggatctgcc

SEQ ID NO: 253525 - DNA, 20 bp, synthetic construct
  source 1..20: mol_type = other DNA
cctggcctcaagggatctgc

SEQ ID NO: 253526 - DNA, 20 bp, synthetic construct
  source 1..20: mol_type = other DNA
tcctggcctcaagggatctg

SEQ ID NO: 253527 - DNA, 20 bp, synthetic construct
  source 1..20: mol_type = other DNA
ctcctggcctcaagggatct

SEQ ID NO: 253528 - DNA, 20 bp, synthetic construct
  source 1..20: mol_type = other DNA
actcctggcctcaagggatc

SEQ ID NO: 253529 - DNA, 20 bp, synthetic construct
  source 1..20: mol_type = other DNA
cactcctggcctcaagggat

SEQ ID NO: 253530 - DNA, 20 bp, synthetic construct
  source 1..20: mol_type = other DNA
gcactcctggcctcaaggga

SEQ ID NO: 253531 - DNA, 20 bp, synthetic construct
  source 1..20: mol_type = other DNA
tgcactcctggcctcaaggg

SEQ ID NO: 253532 - DNA, 20 bp, synthetic construct
  source 1..20: mol_type = other DNA
ttgcactcctggcctcaagg

SEQ ID NO: 253533 - DNA, 20 bp, synthetic construct
  source 1..20: mol_type = other DNA
cttgcactcctggcctcaag

SEQ ID NO: 253534 - DNA, 20 bp, synthetic construct
  source 1..20: mol_type = other DNA
tcttgcactcctggcctcaa

SEQ ID NO: 253535 - DNA, 20 bp, synthetic construct
  source 1..20: mol_type = other DNA
gtcttgcactcctggcctca

SEQ ID NO: 253536 - DNA, 20 bp, synthetic construct
  source 1..20: mol_type = other DNA
agtcttgcactcctggcctc

SEQ ID NO: 253537 - DNA, 20 bp, synthetic construct
  source 1..20: mol_type = other DNA
tagtcttgcactcctggcct

SEQ ID NO: 253538 - DNA, 20 bp, synthetic construct
  source 1..20: mol_type = other DNA
ctagtcttgcactcctggcc

SEQ ID NO: 253539 - DNA, 20 bp, synthetic construct
  source 1..20: mol_type = other DNA
gctagtcttgcactcctggc

SEQ ID NO: 253540 - DNA, 20 bp, synthetic construct
  source 1..20: mol_type = other DNA
ggctagtcttgcactcctgg

SEQ ID NO: 253541 - DNA, 20 bp, synthetic construct
  source 1..20: mol_type = other DNA
aggctagtcttgcactcctg

SEQ ID NO: 253542 - DNA, 20 bp, synthetic construct
  source 1..20: mol_type = other DNA
caggctagtcttgcactcct

SEQ ID NO: 253543 - DNA, 20 bp, synthetic construct
  source 1..20: mol_type = other DNA
ccaggctagtcttgcactcc

SEQ ID NO: 253544 - DNA, 20 bp, synthetic construct
  source 1..20: mol_type = other DNA
gccaggctagtcttgcactc

SEQ ID NO: 253545 - DNA, 20 bp, synthetic construct
  source 1..20: mol_type = other DNA
agccaggctagtcttgcact

SEQ ID NO: 253546 - DNA, 20 bp, synthetic construct
  source 1..20: mol_type = other DNA
cagccaggctagtcttgcac

SEQ ID NO: 253547 - DNA, 20 bp, synthetic construct
  source 1..20: mol_type = other DNA
tcagccaggctagtcttgca

SEQ ID NO: 253548 - DNA, 20 bp, synthetic construct
  source 1..20: mol_type = other DNA
gtcagccaggctagtcttgc

SEQ ID NO: 253549 - DNA, 20 bp, synthetic construct
  source 1..20: mol_type = other DNA
tgtcagccaggctagtcttg

SEQ ID NO: 253550 - DNA, 20 bp, synthetic construct
  source 1..20: mol_type = other DNA
atgtcagccaggctagtctt

SEQ ID NO: 253551 - DNA, 20 bp, synthetic construct
  source 1..20: mol_type = other DNA
catgtcagccaggctagtct

SEQ ID NO: 253552 - DNA, 20 bp, synthetic construct
  source 1..20: mol_type = other DNA
ccatgtcagccaggctagtc

SEQ ID NO: 253553 - DNA, 20 bp, synthetic construct
  source 1..20: mol_type = other DNA
accatgtcagccaggctagt

SEQ ID NO: 253554 - DNA, 20 bp, synthetic construct
  source 1..20: mol_type = other DNA
caccatgtcagccaggctag

SEQ ID NO: 253555 - DNA, 20 bp, synthetic construct
  source 1..20: mol_type = other DNA
tcaccatgtcagccaggcta

SEQ ID NO: 253556 - DNA, 20 bp, synthetic construct
  source 1..20: mol_type = other DNA
ttcaccatgtcagccaggct

SEQ ID NO: 253557 - DNA, 20 bp, synthetic construct
  source 1..20: mol_type = other DNA
tttcaccatgtcagccaggc

SEQ ID NO: 253558 - DNA, 20 bp, synthetic construct
  source 1..20: mol_type = other DNA
gtttcaccatgtcagccagg

SEQ ID NO: 253559 - DNA, 20 bp, synthetic construct
  source 1..20: mol_type = other DNA
ggtttcaccatgtcagccag

SEQ ID NO: 253560 - DNA, 20 bp, synthetic construct
  source 1..20: mol_type = other DNA
gggtttcaccatgtcagcca

SEQ ID NO: 253561 - DNA, 20 bp, synthetic construct
  source 1..20: mol_type = other DNA
ggggtttcaccatgtcagcc

SEQ ID NO: 253562 - DNA, 20 bp, synthetic construct
  source 1..20: mol_type = other DNA
cggggtttcaccatgtcagc

SEQ ID NO: 253563 - DNA, 20 bp, synthetic construct
  source 1..20: mol_type = other DNA
acggggtttcaccatgtcag

SEQ ID NO: 253564 - DNA, 20 bp, synthetic construct
  source 1..20: mol_type = other DNA
gacggggtttcaccatgtca

SEQ ID NO: 253565 - DNA, 20 bp, synthetic construct
  source 1..20: mol_type = other DNA
agacggggtttcaccatgtc

SEQ ID NO: 253566 - DNA, 20 bp, synthetic construct
  source 1..20: mol_type = other DNA
aagacggggtttcaccatgt

SEQ ID NO: 253567 - DNA, 20 bp, synthetic construct
  source 1..20: mol_type = other DNA
aaagacggggtttcaccatg

SEQ ID NO: 253568 - DNA, 20 bp, synthetic construct
  source 1..20: mol_type = other DNA
taaagacggggtttcaccat

SEQ ID NO: 253569 - DNA, 20 bp, synthetic construct
  source 1..20: mol_type = other DNA
gtaaagacggggtttcacca

SEQ ID NO: 253570 - DNA, 20 bp, synthetic construct
  source 1..20: mol_type = other DNA
agtaaagacggggtttcacc

SEQ ID NO: 253571 - DNA, 20 bp, synthetic construct
  source 1..20: mol_type = other DNA
tagtaaagacggggtttcac

SEQ ID NO: 253572 - DNA, 20 bp, synthetic construct
  source 1..20: mol_type = other DNA
ttagtaaagacggggtttca

SEQ ID NO: 253573 - DNA, 20 bp, synthetic construct
  source 1..20: mol_type = other DNA
tttagtaaagacggggtttc

SEQ ID NO: 253574 - DNA, 20 bp, synthetic construct
  source 1..20: mol_type = other DNA
ttttagtaaagacggggttt

SEQ ID NO: 253575 - DNA, 20 bp, synthetic construct
  source 1..20: mol_type = other DNA
tttttagtaaagacggggtt

SEQ ID NO: 253576 - DNA, 20 bp, synthetic construct
  source 1..20: mol_type = other DNA
atttttagtaaagacggggt

SEQ ID NO: 253577 - DNA, 20 bp, synthetic construct
  source 1..20: mol_type = other DNA
tatttttagtaaagacgggg

SEQ ID NO: 253578 - DNA, 20 bp, synthetic construct
  source 1..20: mol_type = other DNA
gtatttttagtaaagacggg

SEQ ID NO: 253579 - DNA, 20 bp, synthetic construct
  source 1..20: mol_type = other DNA
tgtatttttagtaaagacgg

SEQ ID NO: 253580 - DNA, 20 bp, synthetic construct
  source 1..20: mol_type = other DNA
ttgtatttttagtaaagacg

SEQ ID NO: 253581 - DNA, 20 bp, synthetic construct
  source 1..20: mol_type = other DNA
tttgtatttttagtaaagac

SEQ ID NO: 253582 - DNA, 20 bp, synthetic construct
  source 1..20: mol_type = other DNA
ttttgtatttttagtaaaga

SEQ ID NO: 253583 - DNA, 20 bp, synthetic construct
  source 1..20: mol_type = other DNA
cttttgtatttttagtaaag

SEQ ID NO: 253584 - DNA, 20 bp, synthetic construct
  source 1..20: mol_type = other DNA
acttttgtatttttagtaaa

SEQ ID NO: 253585 - DNA, 20 bp, synthetic construct
  source 1..20: mol_type = other DNA
aacttttgtatttttagtaa

SEQ ID NO: 253586 - DNA, 20 bp, synthetic construct
  source 1..20: mol_type = other DNA
taacttttgtatttttagta

SEQ ID NO: 253587 - DNA, 20 bp, synthetic construct
  source 1..20: mol_type = other DNA
ctaacttttgtatttttagt

SEQ ID NO: 253588 - DNA, 20 bp, synthetic construct
  source 1..20: mol_type = other DNA
gctaacttttgtatttttag

SEQ ID NO: 253589 - DNA, 20 bp, synthetic construct
  source 1..20: mol_type = other DNA
ggctaacttttgtattttta

SEQ ID NO: 253590 - DNA, 20 bp, synthetic construct
  source 1..20: mol_type = other DNA
tggctaacttttgtattttt

SEQ ID NO: 253591 - DNA, 20 bp, synthetic construct
  source 1..20: mol_type = other DNA
ctggctaacttttgtatttt

SEQ ID NO: 253592 - DNA, 20 bp, synthetic construct
  source 1..20: mol_type = other DNA
cctggctaacttttgtattt

SEQ ID NO: 253593 - DNA, 20 bp, synthetic construct
  source 1..20: mol_type = other DNA
gcctggctaacttttgtatt

SEQ ID NO: 253594 - DNA, 20 bp, synthetic construct
  source 1..20: mol_type = other DNA
tgcctggctaacttttgtat

SEQ ID NO: 253595 - DNA, 20 bp, synthetic construct
  source 1..20: mol_type = other DNA
atgcctggctaacttttgta

SEQ ID NO: 253596 - DNA, 20 bp, synthetic construct
  source 1..20: mol_type = other DNA
catgcctggctaacttttgt

SEQ ID NO: 253597 - DNA, 20 bp, synthetic construct
  source 1..20: mol_type = other DNA
ccatgcctggctaacttttg

SEQ ID NO: 253598 - DNA, 20 bp, synthetic construct
  source 1..20: mol_type = other DNA
accatgcctggctaactttt

SEQ ID NO: 253599 - DNA, 20 bp, synthetic construct
  source 1..20: mol_type = other DNA
caccatgcctggctaacttt

SEQ ID NO: 253600 - DNA, 20 bp, synthetic construct
  source 1..20: mol_type = other DNA
ccaccatgcctggctaactt

SEQ ID NO: 253601 - DNA, 20 bp, synthetic construct
  source 1..20: mol_type = other DNA
accaccatgcctggctaact

SEQ ID NO: 253602 - DNA, 20 bp, synthetic construct
  source 1..20: mol_type = other DNA
taccaccatgcctggctaac

SEQ ID NO: 253603 - DNA, 20 bp, synthetic construct
  source 1..20: mol_type = other DNA
gtaccaccatgcctggctaa

SEQ ID NO: 253604 - DNA, 20 bp, synthetic construct
  source 1..20: mol_type = other DNA
tgtaccaccatgcctggcta

SEQ ID NO: 253605 - DNA, 20 bp, synthetic construct
  source 1..20: mol_type = other DNA
gtgtaccaccatgcctggct

SEQ ID NO: 253606 - DNA, 20 bp, synthetic construct
  source 1..20: mol_type = other DNA
tgtgtaccaccatgcctggc

SEQ ID NO: 253607 - DNA, 20 bp, synthetic construct
  source 1..20: mol_type = other DNA
gtgtgtaccaccatgcctgg

SEQ ID NO: 253608 - DNA, 20 bp, synthetic construct
  source 1..20: mol_type = other DNA
ggtgtgtaccaccatgcctg

SEQ ID NO: 253609 - DNA, 20 bp, synthetic construct
  source 1..20: mol_type = other DNA
aggtgtgtaccaccatgcct

SEQ ID NO: 253610 - DNA, 20 bp, synthetic construct
  source 1..20: mol_type = other DNA
caggtgtgtaccaccatgcc

SEQ ID NO: 253611 - DNA, 20 bp, synthetic construct
  source 1..20: mol_type = other DNA
acaggtgtgtaccaccatgc

SEQ ID NO: 253612 - DNA, 20 bp, synthetic construct
  source 1..20: mol_type = other DNA
tacaggtgtgtaccaccatg

SEQ ID NO: 253613 - DNA, 20 bp, synthetic construct
  source 1..20: mol_type = other DNA
ttacaggtgtgtaccaccat

SEQ ID NO: 253614 - DNA, 20 bp, synthetic construct
  source 1..20: mol_type = other DNA
attacaggtgtgtaccacca

SEQ ID NO: 253615 - DNA, 20 bp, synthetic construct
  source 1..20: mol_type = other DNA
gattacaggtgtgtaccacc

SEQ ID NO: 253616 - DNA, 20 bp, synthetic construct
  source 1..20: mol_type = other DNA
ggattacaggtgtgtaccac

SEQ ID NO: 253617 - DNA, 20 bp, synthetic construct
  source 1..20: mol_type = other DNA
gggattacaggtgtgtacca

SEQ ID NO: 253618 - DNA, 20 bp, synthetic construct
  source 1..20: mol_type = other DNA
tgggattacaggtgtgtacc

SEQ ID NO: 253619 - DNA, 20 bp, synthetic construct
  source 1..20: mol_type = other DNA
ctgggattacaggtgtgtac

SEQ ID NO: 253620 - DNA, 20 bp, synthetic construct
  source 1..20: mol_type = other DNA
gctgggattacaggtgtgta

SEQ ID NO: 253621 - DNA, 20 bp, synthetic construct
  source 1..20: mol_type = other DNA
agctgggattacaggtgtgt

SEQ ID NO: 253622 - DNA, 20 bp, synthetic construct
  source 1..20: mol_type = other DNA
tagctgggattacaggtgtg

SEQ ID NO: 253623 - DNA, 20 bp, synthetic construct
  source 1..20: mol_type = other DNA
gtagctgggattacaggtgt

SEQ ID NO: 253624 - DNA, 20 bp, synthetic construct
  source 1..20: mol_type = other DNA
tgtagctgggattacaggtg

SEQ ID NO: 253625 - DNA, 20 bp, synthetic construct
  source 1..20: mol_type = other DNA
atgtagctgggattacaggt

SEQ ID NO: 253626 - DNA, 20 bp, synthetic construct
  source 1..20: mol_type = other DNA
catgtagctgggattacagg

SEQ ID NO: 253627 - DNA, 20 bp, synthetic construct
  source 1..20: mol_type = other DNA
ccatgtagctgggattacag

SEQ ID NO: 253628 - DNA, 20 bp, synthetic construct
  source 1..20: mol_type = other DNA
cccatgtagctgggattaca

SEQ ID NO: 253629 - DNA, 20 bp, synthetic construct
  source 1..20: mol_type = other DNA
tcccatgtagctgggattac

SEQ ID NO: 253630 - DNA, 20 bp, synthetic construct
  source 1..20: mol_type = other DNA
ctcccatgtagctgggatta

SEQ ID NO: 253631 - DNA, 20 bp, synthetic construct
  source 1..20: mol_type = other DNA
cctcccatgtagctgggatt

SEQ ID NO: 253632 - DNA, 20 bp, synthetic construct
  source 1..20: mol_type = other DNA
tcctcccatgtagctgggat

SEQ ID NO: 253633 - DNA, 20 bp, synthetic construct
  source 1..20: mol_type = other DNA
ctcctcccatgtagctggga

SEQ ID NO: 253634 - DNA, 20 bp, synthetic construct
  source 1..20: mol_type = other DNA
actcctcccatgtagctggg

SEQ ID NO: 253635 - DNA, 20 bp, synthetic construct
  source 1..20: mol_type = other DNA
tactcctcccatgtagctgg

SEQ ID NO: 253636 - DNA, 20 bp, synthetic construct
  source 1..20: mol_type = other DNA
ctactcctcccatgtagctg

SEQ ID NO: 253637 - DNA, 20 bp, synthetic construct
  source 1..20: mol_type = other DNA
cctactcctcccatgtagct

SEQ ID NO: 253638 - DNA, 20 bp, synthetic construct
  source 1..20: mol_type = other DNA
tcctactcctcccatgtagc

SEQ ID NO: 253639 - DNA, 20 bp, synthetic construct
  source 1..20: mol_type = other DNA
ctcctactcctcccatgtag

SEQ ID NO: 253640 - DNA, 20 bp, synthetic construct
  source 1..20: mol_type = other DNA
cctcctactcctcccatgta

SEQ ID NO: 253641 - DNA, 20 bp, synthetic construct
  source 1..20: mol_type = other DNA
gcctcctactcctcccatgt

SEQ ID NO: 253642 - DNA, 20 bp, synthetic construct
  source 1..20: mol_type = other DNA
tgcctcctactcctcccatg

SEQ ID NO: 253643 - DNA, 20 bp, synthetic construct
  source 1..20: mol_type = other DNA
ctgcctcctactcctcccat

SEQ ID NO: 253644 - DNA, 20 bp, synthetic construct
  source 1..20: mol_type = other DNA
cctgcctcctactcctccca

SEQ ID NO: 253645 - DNA, 20 bp, synthetic construct
  source 1..20: mol_type = other DNA
tcctgcctcctactcctccc

SEQ ID NO: 253646 - DNA, 20 bp, synthetic construct
  source 1..20: mol_type = other DNA
ctcctgcctcctactcctcc

SEQ ID NO: 253647 - DNA, 20 bp, synthetic construct
  source 1..20: mol_type = other DNA
tctcctgcctcctactcctc

SEQ ID NO: 253648 - DNA, 20 bp, synthetic construct
  source 1..20: mol_type = other DNA
ttctcctgcctcctactcct

SEQ ID NO: 253649 - DNA, 20 bp, synthetic construct
  source 1..20: mol_type = other DNA
attctcctgcctcctactcc

SEQ ID NO: 253650 - DNA, 20 bp, synthetic construct
  source 1..20: mol_type = other DNA
aattctcctgcctcctactc

SEQ ID NO: 253651 - DNA, 20 bp, synthetic construct
  source 1..20: mol_type = other DNA
caattctcctgcctcctact

SEQ ID NO: 253652 - DNA, 20 bp, synthetic construct
  source 1..20: mol_type = other DNA
gcaattctcctgcctcctac

SEQ ID NO: 253653 - DNA, 20 bp, synthetic construct
  source 1..20: mol_type = other DNA
agcaattctcctgcctccta

SEQ ID NO: 253654 - DNA, 20 bp, synthetic construct
  source 1..20: mol_type = other DNA
aagcaattctcctgcctcct

SEQ ID NO: 253655 - DNA, 20 bp, synthetic construct
  source 1..20: mol_type = other DNA
caagcaattctcctgcctcc

SEQ ID NO: 253656 - DNA, 20 bp, synthetic construct
  source 1..20: mol_type = other DNA
tcaagcaattctcctgcctc

SEQ ID NO: 253657 - DNA, 20 bp, synthetic construct
  source 1..20: mol_type = other DNA
ttcaagcaattctcctgcct

SEQ ID NO: 253658 - DNA, 20 bp, synthetic construct
  source 1..20: mol_type = other DNA
gttcaagcaattctcctgcc

SEQ ID NO: 253659 - DNA, 20 bp, synthetic construct
  source 1..20: mol_type = other DNA
ggttcaagcaattctcctgc

SEQ ID NO: 253660 - DNA, 20 bp, synthetic construct
  source 1..20: mol_type = other DNA
aggttcaagcaattctcctg

SEQ ID NO: 253661 - DNA, 20 bp, synthetic construct
  source 1..20: mol_type = other DNA
caggttcaagcaattctcct

SEQ ID NO: 253662 - DNA, 20 bp, synthetic construct
  source 1..20: mol_type = other DNA
ccaggttcaagcaattctcc

SEQ ID NO: 253663 - DNA, 20 bp, synthetic construct
  source 1..20: mol_type = other DNA
cccaggttcaagcaattctc

SEQ ID NO: 253664 - DNA, 20 bp, synthetic construct
  source 1..20: mol_type = other DNA
tcccaggttcaagcaattct

SEQ ID NO: 253665 - DNA, 20 bp, synthetic construct
  source 1..20: mol_type = other DNA
ctcccaggttcaagcaattc

SEQ ID NO: 253666 - DNA, 20 bp, synthetic construct
  source 1..20: mol_type = other DNA
cctcccaggttcaagcaatt

SEQ ID NO: 253667 - DNA, 20 bp, synthetic construct
  source 1..20: mol_type = other DNA
acctcccaggttcaagcaat

SEQ ID NO: 253668 - DNA, 20 bp, synthetic construct
  source 1..20: mol_type = other DNA
cacctcccaggttcaagcaa

SEQ ID NO: 253669 - DNA, 20 bp, synthetic construct
  source 1..20: mol_type = other DNA
ccacctcccaggttcaagca

SEQ ID NO: 253670 - DNA, 20 bp, synthetic construct
  source 1..20: mol_type = other DNA
tccacctcccaggttcaagc

SEQ ID NO: 253671 - DNA, 20 bp, synthetic construct
  source 1..20: mol_type = other DNA
ctccacctcccaggttcaag

SEQ ID NO: 253672 - DNA, 20 bp, synthetic construct
  source 1..20: mol_type = other DNA
cctccacctcccaggttcaa

SEQ ID NO: 253673 - DNA, 20 bp, synthetic construct
  source 1..20: mol_type = other DNA
acctccacctcccaggttca

SEQ ID NO: 253674 - DNA, 20 bp, synthetic construct
  source 1..20: mol_type = other DNA
aacctccacctcccaggttc

SEQ ID NO: 253675 - DNA, 20 bp, synthetic construct
  source 1..20: mol_type = other DNA
caacctccacctcccaggtt

SEQ ID NO: 253676 - DNA, 20 bp, synthetic construct
  source 1..20: mol_type = other DNA
gcaacctccacctcccaggt

SEQ ID NO: 253677 - DNA, 20 bp, synthetic construct
  source 1..20: mol_type = other DNA
agcaacctccacctcccagg

SEQ ID NO: 253678 - DNA, 20 bp, synthetic construct
  source 1..20: mol_type = other DNA
cagcaacctccacctcccag

SEQ ID NO: 253679 - DNA, 20 bp, synthetic construct
  source 1..20: mol_type = other DNA
acagcaacctccacctccca

SEQ ID NO: 253680 - DNA, 20 bp, synthetic construct
  source 1..20: mol_type = other DNA
cacagcaacctccacctccc

SEQ ID NO: 253681 - DNA, 20 bp, synthetic construct
  source 1..20: mol_type = other DNA
tcacagcaacctccacctcc

SEQ ID NO: 253682 - DNA, 20 bp, synthetic construct
  source 1..20: mol_type = other DNA
ctcacagcaacctccacctc

SEQ ID NO: 253683 - DNA, 20 bp, synthetic construct
  source 1..20: mol_type = other DNA
gctcacagcaacctccacct

SEQ ID NO: 253684 - DNA, 20 bp, synthetic construct
  source 1..20: mol_type = other DNA
ggctcacagcaacctccacc

SEQ ID NO: 253685 - DNA, 20 bp, synthetic construct
  source 1..20: mol_type = other DNA
cggctcacagcaacctccac

SEQ ID NO: 253686 - DNA, 20 bp, synthetic construct
  source 1..20: mol_type = other DNA
tcggctcacagcaacctcca

SEQ ID NO: 253687 - DNA, 20 bp, synthetic construct
  source 1..20: mol_type = other DNA
ctcggctcacagcaacctcc

SEQ ID NO: 253688 - DNA, 20 bp, synthetic construct
  source 1..20: mol_type = other DNA
tctcggctcacagcaacctc

SEQ ID NO: 253689 - DNA, 20 bp, synthetic construct
  source 1..20: mol_type = other DNA
atctcggctcacagcaacct

SEQ ID NO: 253690 - DNA, 20 bp, synthetic construct
  source 1..20: mol_type = other DNA
gatctcggctcacagcaacc

SEQ ID NO: 253691 - DNA, 20 bp, synthetic construct
  source 1..20: mol_type = other DNA
tgatctcggctcacagcaac

SEQ ID NO: 253692 - DNA, 20 bp, synthetic construct
  source 1..20: mol_type = other DNA
atgatctcggctcacagcaa

SEQ ID NO: 253693 - DNA, 20 bp, synthetic construct
  source 1..20: mol_type = other DNA
catgatctcggctcacagca

SEQ ID NO: 253694 - DNA, 20 bp, synthetic construct
  source 1..20: mol_type = other DNA
gcatgatctcggctcacagc

SEQ ID NO: 253695 - DNA, 20 bp, synthetic construct
  source 1..20: mol_type = other DNA
ggcatgatctcggctcacag

SEQ ID NO: 253696 - DNA, 20 bp, synthetic construct
  source 1..20: mol_type = other DNA
tggcatgatctcggctcaca

SEQ ID NO: 253697 - DNA, 20 bp, synthetic construct
  source 1..20: mol_type = other DNA
gtggcatgatctcggctcac

SEQ ID NO: 253698 - DNA, 20 bp, synthetic construct
  source 1..20: mol_type = other DNA
agtggcatgatctcggctca

SEQ ID NO: 253699 - DNA, 20 bp, synthetic construct
  source 1..20: mol_type = other DNA
cagtggcatgatctcggctc

SEQ ID NO: 253700 - DNA, 20 bp, synthetic construct
  source 1..20: mol_type = other DNA
gcagtggcatgatctcggct

SEQ ID NO: 253701 - DNA, 20 bp, synthetic construct
  source 1..20: mol_type = other DNA
tgcagtggcatgatctcggc

SEQ ID NO: 253702 - DNA, 20 bp, synthetic construct
  source 1..20: mol_type = other DNA
gtgcagtggcatgatctcgg

SEQ ID NO: 253703 - DNA, 20 bp, synthetic construct
  source 1..20: mol_type = other DNA
agtgcagtggcatgatctcg

SEQ ID NO: 253704 - DNA, 20 bp, synthetic construct
  source 1..20: mol_type = other DNA
gagtgcagtggcatgatctc

SEQ ID NO: 253705 - DNA, 20 bp, synthetic construct
  source 1..20: mol_type = other DNA
ggagtgcagtggcatgatct

SEQ ID NO: 253706 - DNA, 20 bp, synthetic construct
  source 1..20: mol_type = other DNA
tggagtgcagtggcatgatc

SEQ ID NO: 253707 - DNA, 20 bp, synthetic construct
  source 1..20: mol_type = other DNA
ctggagtgcagtggcatgat

SEQ ID NO: 253708 - DNA, 20 bp, synthetic construct
  source 1..20: mol_type = other DNA
gctggagtgcagtggcatga

SEQ ID NO: 253709 - DNA, 20 bp, synthetic construct
  source 1..20: mol_type = other DNA
ggctggagtgcagtggcatg

SEQ ID NO: 253710 - DNA, 20 bp, synthetic construct
  source 1..20: mol_type = other DNA
aggctggagtgcagtggcat

SEQ ID NO: 253711 - DNA, 20 bp, synthetic construct
  source 1..20: mol_type = other DNA
caggctggagtgcagtggca

SEQ ID NO: 253712 - DNA, 20 bp, synthetic construct
  source 1..20: mol_type = other DNA
ccaggctggagtgcagtggc

SEQ ID NO: 253713 - DNA, 20 bp, synthetic construct
  source 1..20: mol_type = other DNA
cccaggctggagtgcagtgg

SEQ ID NO: 253714 - DNA, 20 bp, synthetic construct
  source 1..20: mol_type = other DNA
gcccaggctggagtgcagtg

SEQ ID NO: 253715 - DNA, 20 bp, synthetic construct
  source 1..20: mol_type = other DNA
cgcccaggctggagtgcagt

SEQ ID NO: 253716 - DNA, 20 bp, synthetic construct
  source 1..20: mol_type = other DNA
tcgcccaggctggagtgcag

SEQ ID NO: 253717 - DNA, 20 bp, synthetic construct
  source 1..20: mol_type = other DNA
gtcgcccaggctggagtgca

SEQ ID NO: 253718 - DNA, 20 bp, synthetic construct
  source 1..20: mol_type = other DNA
tgtcgcccaggctggagtgc

SEQ ID NO: 253719 - DNA, 20 bp, synthetic construct
  source 1..20: mol_type = other DNA
ctgtcgcccaggctggagtg

SEQ ID NO: 253720 - DNA, 20 bp, synthetic construct
  source 1..20: mol_type = other DNA
tctgtcgcccaggctggagt

SEQ ID NO: 253721 - DNA, 20 bp, synthetic construct
  source 1..20: mol_type = other DNA
ctctgtcgcccaggctggag

SEQ ID NO: 253722 - DNA, 20 bp, synthetic construct
  source 1..20: mol_type = other DNA
actctgtcgcccaggctgga

SEQ ID NO: 253723 - DNA, 20 bp, synthetic construct
  source 1..20: mol_type = other DNA
cactctgtcgcccaggctgg

SEQ ID NO: 253724 - DNA, 20 bp, synthetic construct
  source 1..20: mol_type = other DNA
tcactctgtcgcccaggctg

SEQ ID NO: 253725 - DNA, 20 bp, synthetic construct
  source 1..20: mol_type = other DNA
ctcactctgtcgcccaggct

SEQ ID NO: 253726 - DNA, 20 bp, synthetic construct
  source 1..20: mol_type = other DNA
actcactctgtcgcccaggc

SEQ ID NO: 253727 - DNA, 20 bp, synthetic construct
  source 1..20: mol_type = other DNA
cactcactctgtcgcccagg

SEQ ID NO: 253728 - DNA, 20 bp, synthetic construct
  source 1..20: mol_type = other DNA
tcactcactctgtcgcccag

SEQ ID NO: 253729 - DNA, 20 bp, synthetic construct
  source 1..20: mol_type = other DNA
ctcactcactctgtcgccca

SEQ ID NO: 253730 - DNA, 20 bp, synthetic construct
  source 1..20: mol_type = other DNA
tctcactcactctgtcgccc

SEQ ID NO: 253731 - DNA, 20 bp, synthetic construct
  source 1..20: mol_type = other DNA
gtctcactcactctgtcgcc

SEQ ID NO: 253732 - DNA, 20 bp, synthetic construct
  source 1..20: mol_type = other DNA
agtctcactcactctgtcgc

SEQ ID NO: 253733 - DNA, 20 bp, synthetic construct
  source 1..20: mol_type = other DNA
gagtctcactcactctgtcg

SEQ ID NO: 253734 - DNA, 20 bp, synthetic construct
  source 1..20: mol_type = other DNA
agagtctcactcactctgtc

SEQ ID NO: 253735 - DNA, 20 bp, synthetic construct
  source 1..20: mol_type = other DNA
cagagtctcactcactctgt

SEQ ID NO: 253736 - DNA, 20 bp, synthetic construct
  source 1..20: mol_type = other DNA
acagagtctcactcactctg

SEQ ID NO: 253737 - DNA, 20 bp, synthetic construct
  source 1..20: mol_type = other DNA
aacagagtctcactcactct

SEQ ID NO: 253738 - DNA, 20 bp, synthetic construct
  source 1..20: mol_type = other DNA
aaacagagtctcactcactc

SEQ ID NO: 253739 - DNA, 20 bp, synthetic construct
  source 1..20: mol_type = other DNA
taaacagagtctcactcact

SEQ ID NO: 253740 - DNA, 20 bp, synthetic construct
  source 1..20: mol_type = other DNA
ttaaacagagtctcactcac

SEQ ID NO: 253741 - DNA, 20 bp, synthetic construct
  source 1..20: mol_type = other DNA
tttaaacagagtctcactca

SEQ ID NO: 253742 - DNA, 20 bp, synthetic construct
  source 1..20: mol_type = other DNA
ttttaaacagagtctcactc

SEQ ID NO: 253743 - DNA, 20 bp, synthetic construct
  source 1..20: mol_type = other DNA
tttttaaacagagtctcact

SEQ ID NO: 253744 - DNA, 20 bp, synthetic construct
  source 1..20: mol_type = other DNA
ttttttaaacagagtctcac

SEQ ID NO: 253745 - DNA, 20 bp, synthetic construct
  source 1..20: mol_type = other DNA
tttttttaaacagagtctca

SEQ ID NO: 253746 - DNA, 20 bp, synthetic construct
  source 1..20: mol_type = other DNA
ttttttttaaacagagtctc

SEQ ID NO: 253747 - DNA, 20 bp, synthetic construct
  source 1..20: mol_type = other DNA
tttttttttaaacagagtct

SEQ ID NO: 253748 - DNA, 20 bp, synthetic construct
  source 1..20: mol_type = other DNA
ttttttttttaaacagagtc

SEQ ID NO: 253749 - DNA, 20 bp, synthetic construct
  source 1..20: mol_type = other DNA
tttttttttttaaacagagt

SEQ ID NO: 253750 - DNA, 20 bp, synthetic construct
  source 1..20: mol_type = other DNA
ttttttttttttaaacagag

SEQ ID NO: 253751 - DNA, 20 bp, synthetic construct
  source 1..20: mol_type = other DNA
tttttttttttttaaacaga

SEQ ID NO: 253752 - DNA, 20 bp, synthetic construct
  source 1..20: mol_type = other DNA
ttttttttttttttaaacag

SEQ ID NO: 253753 - DNA, 20 bp, synthetic construct
  source 1..20: mol_type = other DNA
tttttttttttttttaaaca

SEQ ID NO: 253754 - DNA, 20 bp, synthetic construct
  source 1..20: mol_type = other DNA
ttttttttttttttttaaac

SEQ ID NO: 253755 - DNA, 20 bp, synthetic construct
  source 1..20: mol_type = other DNA
tttttttttttttttttaaa

SEQ ID NO: 253756 - DNA, 20 bp, synthetic construct
  source 1..20: mol_type = other DNA
ctttttttttttttttttaa

SEQ ID NO: 253757 - DNA, 20 bp, synthetic construct
  source 1..20: mol_type = other DNA
tcttttttttttttttttta

SEQ ID NO: 253758 - DNA, 20 bp, synthetic construct
  source 1..20: mol_type = other DNA
ttcttttttttttttttttt

SEQ ID NO: 253759 - DNA, 20 bp, synthetic construct
  source 1..20: mol_type = other DNA
gttctttttttttttttttt

SEQ ID NO: 253760 - DNA, 20 bp, synthetic construct
  source 1..20: mol_type = other DNA
tgttcttttttttttttttt

SEQ ID NO: 253761 - DNA, 20 bp, synthetic construct
  source 1..20: mol_type = other DNA
atgttctttttttttttttt

SEQ ID NO: 253762 - DNA, 20 bp, synthetic construct
  source 1..20: mol_type = other DNA
aatgttcttttttttttttt

SEQ ID NO: 253763 - DNA, 20 bp, synthetic construct
  source 1..20: mol_type = other DNA
gaatgttctttttttttttt

SEQ ID NO: 253764 - DNA, 20 bp, synthetic construct
  source 1..20: mol_type = other DNA
agaatgttcttttttttttt

SEQ ID NO: 253765 - DNA, 20 bp, synthetic construct
  source 1..20: mol_type = other DNA
gagaatgttctttttttttt

SEQ ID NO: 253766 - DNA, 20 bp, synthetic construct
  source 1..20: mol_type = other DNA
ggagaatgttcttttttttt

SEQ ID NO: 253767 - DNA, 20 bp, synthetic construct
  source 1..20: mol_type = other DNA
aggagaatgttctttttttt

SEQ ID NO: 253768 - DNA, 20 bp, synthetic construct
  source 1..20: mol_type = other DNA
taggagaatgttcttttttt

SEQ ID NO: 253769 - DNA, 20 bp, synthetic construct
  source 1..20: mol_type = other DNA
ttaggagaatgttctttttt

SEQ ID NO: 253770 - DNA, 20 bp, synthetic construct
  source 1..20: mol_type = other DNA
gttaggagaatgttcttttt

SEQ ID NO: 253771 - DNA, 20 bp, synthetic construct
  source 1..20: mol_type = other DNA
ggttaggagaatgttctttt

SEQ ID NO: 253772 - DNA, 20 bp, synthetic construct
  source 1..20: mol_type = other DNA
aggttaggagaatgttcttt

SEQ ID NO: 253773 - DNA, 20 bp, synthetic construct
  source 1..20: mol_type = other DNA
caggttaggagaatgttctt

SEQ ID NO: 253774 - DNA, 20 bp, synthetic construct
  source 1..20: mol_type = other DNA
ccaggttaggagaatgttct

SEQ ID NO: 253775 - DNA, 20 bp, synthetic construct
  source 1..20: mol_type = other DNA
gccaggttaggagaatgttc

SEQ ID NO: 253776 - DNA, 20 bp, synthetic construct
  source 1..20: mol_type = other DNA
agccaggttaggagaatgtt

SEQ ID NO: 253777 - DNA, 20 bp, synthetic construct
  source 1..20: mol_type = other DNA
aagccaggttaggagaatgt

SEQ ID NO: 253778 - DNA, 20 bp, synthetic construct
  source 1..20: mol_type = other DNA
gaagccaggttaggagaatg

SEQ ID NO: 253779 - DNA, 20 bp, synthetic construct
  source 1..20: mol_type = other DNA
agaagccaggttaggagaat

SEQ ID NO: 253780 - DNA, 20 bp, synthetic construct
  source 1..20: mol_type = other DNA
aagaagccaggttaggagaa

SEQ ID NO: 253781 - DNA, 20 bp, synthetic construct
  source 1..20: mol_type = other DNA
gaagaagccaggttaggaga

SEQ ID NO: 253782 - DNA, 20 bp, synthetic construct
  source 1..20: mol_type = other DNA
ggaagaagccaggttaggag

SEQ ID NO: 253783 - DNA, 20 bp, synthetic construct
  source 1..20: mol_type = other DNA
aggaagaagccaggttagga

SEQ ID NO: 253784 - DNA, 20 bp, synthetic construct
  source 1..20: mol_type = other DNA
gaggaagaagccaggttagg

SEQ ID NO: 253785 - DNA, 20 bp, synthetic construct
  source 1..20: mol_type = other DNA
ggaggaagaagccaggttag

SEQ ID NO: 253786 - DNA, 20 bp, synthetic construct
  source 1..20: mol_type = other DNA
tggaggaagaagccaggtta

SEQ ID NO: 253787 - DNA, 20 bp, synthetic construct
  source 1..20: mol_type = other DNA
ctggaggaagaagccaggtt

SEQ ID NO: 253788 - DNA, 20 bp, synthetic construct
  source 1..20: mol_type = other DNA
cctggaggaagaagccaggt

SEQ ID NO: 253789 - DNA, 20 bp, synthetic construct
  source 1..20: mol_type = other DNA
ccctggaggaagaagccagg

SEQ ID NO: 253790 - DNA, 20 bp, synthetic construct
  source 1..20: mol_type = other DNA
cccctggaggaagaagccag

SEQ ID NO: 253791 - DNA, 20 bp, synthetic construct
  source 1..20: mol_type = other DNA
acccctggaggaagaagcca

SEQ ID NO: 253792 - DNA, 20 bp, synthetic construct
  source 1..20: mol_type = other DNA
cacccctggaggaagaagcc

SEQ ID NO: 253793 - DNA, 20 bp, synthetic construct
  source 1..20: mol_type = other DNA
acacccctggaggaagaagc

SEQ ID NO: 253794 - DNA, 20 bp, synthetic construct
  source 1..20: mol_type = other DNA
tacacccctggaggaagaag

SEQ ID NO: 253795 - DNA, 20 bp, synthetic construct
  source 1..20: mol_type = other DNA
ttacacccctggaggaagaa

SEQ ID NO: 253796 - DNA, 20 bp, synthetic construct
  source 1..20: mol_type = other DNA
attacacccctggaggaaga

SEQ ID NO: 253797 - DNA, 20 bp, synthetic construct
  source 1..20: mol_type = other DNA
aattacacccctggaggaag

SEQ ID NO: 253798 - DNA, 20 bp, synthetic construct
  source 1..20: mol_type = other DNA
taattacacccctggaggaa

SEQ ID NO: 253799 - DNA, 20 bp, synthetic construct
  source 1..20: mol_type = other DNA
ttaattacacccctggagga

SEQ ID NO: 253800 - DNA, 20 bp, synthetic construct
  source 1..20: mol_type = other DNA
attaattacacccctggagg

SEQ ID NO: 253801 - DNA, 20 bp, synthetic construct
  source 1..20: mol_type = other DNA
gattaattacacccctggag

SEQ ID NO: 253802 - DNA, 20 bp, synthetic construct
  source 1..20: mol_type = other DNA
tgattaattacacccctgga

SEQ ID NO: 253803 - DNA, 20 bp, synthetic construct
  source 1..20: mol_type = other DNA
atgattaattacacccctgg

SEQ ID NO: 253804 - DNA, 20 bp, synthetic construct
  source 1..20: mol_type = other DNA
catgattaattacacccctg

SEQ ID NO: 253805 - DNA, 20 bp, synthetic construct
  source 1..20: mol_type = other DNA
acatgattaattacacccct

SEQ ID NO: 253806 - DNA, 20 bp, synthetic construct
  source 1..20: mol_type = other DNA
gacatgattaattacacccc

SEQ ID NO: 253807 - DNA, 20 bp, synthetic construct
  source 1..20: mol_type = other DNA
tgacatgattaattacaccc

SEQ ID NO: 253808 - DNA, 20 bp, synthetic construct
  source 1..20: mol_type = other DNA
ctgacatgattaattacacc

SEQ ID NO: 253809 - DNA, 20 bp, synthetic construct
  source 1..20: mol_type = other DNA
actgacatgattaattacac

SEQ ID NO: 253810 - DNA, 20 bp, synthetic construct
  source 1..20: mol_type = other DNA
aactgacatgattaattaca

SEQ ID NO: 253811 - DNA, 20 bp, synthetic construct
  source 1..20: mol_type = other DNA
aaactgacatgattaattac

SEQ ID NO: 253812 - DNA, 20 bp, synthetic construct
  source 1..20: mol_type = other DNA
gaaactgacatgattaatta

SEQ ID NO: 253813 - DNA, 20 bp, synthetic construct
  source 1..20: mol_type = other DNA
ggaaactgacatgattaatt

SEQ ID NO: 253814 - DNA, 20 bp, synthetic construct
  source 1..20: mol_type = other DNA
aggaaactgacatgattaat

SEQ ID NO: 253815 - DNA, 20 bp, synthetic construct
  source 1..20: mol_type = other DNA
gaggaaactgacatgattaa

SEQ ID NO: 253816 - DNA, 20 bp, synthetic construct
  source 1..20: mol_type = other DNA
tgaggaaactgacatgatta

SEQ ID NO: 253817 - DNA, 20 bp, synthetic construct
  source 1..20: mol_type = other DNA
atgaggaaactgacatgatt

SEQ ID NO: 253818 - DNA, 20 bp, synthetic construct
  source 1..20: mol_type = other DNA
aatgaggaaactgacatgat

SEQ ID NO: 253819 - DNA, 20 bp, synthetic construct
  source 1..20: mol_type = other DNA
caatgaggaaactgacatga

SEQ ID NO: 253820 - DNA, 20 bp, synthetic construct
  source 1..20: mol_type = other DNA
tcaatgaggaaactgacatg

SEQ ID NO: 253821 - DNA, 20 bp, synthetic construct
  source 1..20: mol_type = other DNA
atcaatgaggaaactgacat

SEQ ID NO: 253822 - DNA, 20 bp, synthetic construct
  source 1..20: mol_type = other DNA
tatcaatgaggaaactgaca

SEQ ID NO: 253823 - DNA, 20 bp, synthetic construct
  source 1..20: mol_type = other DNA
gtatcaatgaggaaactgac

SEQ ID NO: 253824 - DNA, 20 bp, synthetic construct
  source 1..20: mol_type = other DNA
tgtatcaatgaggaaactga

SEQ ID NO: 253825 - DNA, 20 bp, synthetic construct
  source 1..20: mol_type = other DNA
gtgtatcaatgaggaaactg

SEQ ID NO: 253826 - DNA, 20 bp, synthetic construct
  source 1..20: mol_type = other DNA
tgtgtatcaatgaggaaact

SEQ ID NO: 253827 - DNA, 20 bp, synthetic construct
  source 1..20: mol_type = other DNA
gtgtgtatcaatgaggaaac

SEQ ID NO: 253828 - DNA, 20 bp, synthetic construct
  source 1..20: mol_type = other DNA
tgtgtgtatcaatgaggaaa

SEQ ID NO: 253829 - DNA, 20 bp, synthetic construct
  source 1..20: mol_type = other DNA
gtgtgtgtatcaatgaggaa

SEQ ID NO: 253830 - DNA, 20 bp, synthetic construct
  source 1..20: mol_type = other DNA
tgtgtgtgtatcaatgagga

SEQ ID NO: 253831 - DNA, 20 bp, synthetic construct
  source 1..20: mol_type = other DNA
gtgtgtgtgtatcaatgagg

SEQ ID NO: 253832 - DNA, 20 bp, synthetic construct
  source 1..20: mol_type = other DNA
tgtgtgtgtgtatcaatgag

SEQ ID NO: 253833 - DNA, 20 bp, synthetic construct
  source 1..20: mol_type = other DNA
gtgtgtgtgtgtatcaatga

SEQ ID NO: 253834 - DNA, 20 bp, synthetic construct
  source 1..20: mol_type = other DNA
tgtgtgtgtgtgtatcaatg

SEQ ID NO: 253835 - DNA, 20 bp, synthetic construct
  source 1..20: mol_type = other DNA
gtgtgtgtgtgtgtatcaat

SEQ ID NO: 253836 - DNA, 20 bp, synthetic construct
  source 1..20: mol_type = other DNA
tgtgtgtgtgtgtgtatcaa

SEQ ID NO: 253837 - DNA, 20 bp, synthetic construct
  source 1..20: mol_type = other DNA
gtgtgtgtgtgtgtgtatca

SEQ ID NO: 253838 - DNA, 20 bp, synthetic construct
  source 1..20: mol_type = other DNA
agtgtgtgtgtgtgtgtatc

SEQ ID NO: 253839 - DNA, 20 bp, synthetic construct
  source 1..20: mol_type = other DNA
tagtgtgtgtgtgtgtgtat

SEQ ID NO: 253840 - DNA, 20 bp, synthetic construct
  source 1..20: mol_type = other DNA
gtagtgtgtgtgtgtgtgta

SEQ ID NO: 253841 - DNA, 20 bp, synthetic construct
  source 1..20: mol_type = other DNA
tgtagtgtgtgtgtgtgtgt

SEQ ID NO: 253842 - DNA, 20 bp, synthetic construct
  source 1..20: mol_type = other DNA
ttgtagtgtgtgtgtgtgtg

SEQ ID NO: 253843 - DNA, 20 bp, synthetic construct
  source 1..20: mol_type = other DNA
attgtagtgtgtgtgtgtgt

SEQ ID NO: 253844 - DNA, 20 bp, synthetic construct
  source 1..20: mol_type = other DNA
gattgtagtgtgtgtgtgtg

SEQ ID NO: 253845 - DNA, 20 bp, synthetic construct
  source 1..20: mol_type = other DNA
ggattgtagtgtgtgtgtgt

SEQ ID NO: 253846 - DNA, 20 bp, synthetic construct
  source 1..20: mol_type = other DNA
aggattgtagtgtgtgtgtg

SEQ ID NO: 253847 - DNA, 20 bp, synthetic construct
  source 1..20: mol_type = other DNA
caggattgtagtgtgtgtgt

SEQ ID NO: 253848 - DNA, 20 bp, synthetic construct
  source 1..20: mol_type = other DNA
acaggattgtagtgtgtgtg

SEQ ID NO: 253849 - DNA, 20 bp, synthetic construct
  source 1..20: mol_type = other DNA
tacaggattgtagtgtgtgt

SEQ ID NO: 253850 - DNA, 20 bp, synthetic construct
  source 1..20: mol_type = other DNA
atacaggattgtagtgtgtg

SEQ ID NO: 253851 - DNA, 20 bp, synthetic construct
  source 1..20: mol_type = other DNA
gatacaggattgtagtgtgt

SEQ ID NO: 253852 - DNA, 20 bp, synthetic construct
  source 1..20: mol_type = other DNA
ggatacaggattgtagtgtg

SEQ ID NO: 253853 - DNA, 20 bp, synthetic construct
  source 1..20: mol_type = other DNA
tggatacaggattgtagtgt

SEQ ID NO: 253854 - DNA, 20 bp, synthetic construct
  source 1..20: mol_type = other DNA
atggatacaggattgtagtg

SEQ ID NO: 253855 - DNA, 20 bp, synthetic construct
  source 1..20: mol_type = other DNA
aatggatacaggattgtagt

SEQ ID NO: 253856 - DNA, 20 bp, synthetic construct
  source 1..20: mol_type = other DNA
taatggatacaggattgtag

SEQ ID NO: 253857 - DNA, 20 bp, synthetic construct
  source 1..20: mol_type = other DNA
gtaatggatacaggattgta

SEQ ID NO: 253858 - DNA, 20 bp, synthetic construct
  source 1..20: mol_type = other DNA
agtaatggatacaggattgt

SEQ ID NO: 253859 - DNA, 20 bp, synthetic construct
  source 1..20: mol_type = other DNA
aagtaatggatacaggattg

SEQ ID NO: 253860 - DNA, 20 bp, synthetic construct
  source 1..20: mol_type = other DNA
aaagtaatggatacaggatt

SEQ ID NO: 253861 - DNA, 20 bp, synthetic construct
  source 1..20: mol_type = other DNA
aaaagtaatggatacaggat

SEQ ID NO: 253862 - DNA, 20 bp, synthetic construct
  source 1..20: mol_type = other DNA
gaaaagtaatggatacagga

SEQ ID NO: 253863 - DNA, 20 bp, synthetic construct
  source 1..20: mol_type = other DNA
tgaaaagtaatggatacagg

SEQ ID NO: 253864 - DNA, 20 bp, synthetic construct
  source 1..20: mol_type = other DNA
ttgaaaagtaatggatacag

SEQ ID NO: 253865 - DNA, 20 bp, synthetic construct
  source 1..20: mol_type = other DNA
cttgaaaagtaatggataca

SEQ ID NO: 253866 - DNA, 20 bp, synthetic construct
  source 1..20: mol_type = other DNA
ccttgaaaagtaatggatac

SEQ ID NO: 253867 - DNA, 20 bp, synthetic construct
  source 1..20: mol_type = other DNA
accttgaaaagtaatggata

SEQ ID NO: 253868 - DNA, 20 bp, synthetic construct
  source 1..20: mol_type = other DNA
taccttgaaaagtaatggat

SEQ ID NO: 253869 - DNA, 20 bp, synthetic construct
  source 1..20: mol_type = other DNA
gtaccttgaaaagtaatgga

SEQ ID NO: 253870 - DNA, 20 bp, synthetic construct
  source 1..20: mol_type = other DNA
tgtaccttgaaaagtaatgg

SEQ ID NO: 253871 - DNA, 20 bp, synthetic construct
  source 1..20: mol_type = other DNA
atgtaccttgaaaagtaatg

SEQ ID NO: 253872 - DNA, 20 bp, synthetic construct
  source 1..20: mol_type = other DNA
aatgtaccttgaaaagtaat

SEQ ID NO: 253873 - DNA, 20 bp, synthetic construct
  source 1..20: mol_type = other DNA
aaatgtaccttgaaaagtaa

SEQ ID NO: 253874 - DNA, 20 bp, synthetic construct
  source 1..20: mol_type = other DNA
taaatgtaccttgaaaagta

SEQ ID NO: 253875 - DNA, 20 bp, synthetic construct
  source 1..20: mol_type = other DNA
gtaaatgtaccttgaaaagt

SEQ ID NO: 253876 - DNA, 20 bp, synthetic construct
  source 1..20: mol_type = other DNA
agtaaatgtaccttgaaaag

SEQ ID NO: 253877 - DNA, 20 bp, synthetic construct
  source 1..20: mol_type = other DNA
tagtaaatgtaccttgaaaa

SEQ ID NO: 253878 - DNA, 20 bp, synthetic construct
  source 1..20: mol_type = other DNA
atagtaaatgtaccttgaaa

SEQ ID NO: 253879 - DNA, 20 bp, synthetic construct
  source 1..20: mol_type = other DNA
aatagtaaatgtaccttgaa

SEQ ID NO: 253880 - DNA, 20 bp, synthetic construct
  source 1..20: mol_type = other DNA
aaatagtaaatgtaccttga

SEQ ID NO: 253881 - DNA, 20 bp, synthetic construct
  source 1..20: mol_type = other DNA
taaatagtaaatgtaccttg

SEQ ID NO: 253882 - DNA, 20 bp, synthetic construct
  source 1..20: mol_type = other DNA
gtaaatagtaaatgtacctt

SEQ ID NO: 253883 - DNA, 20 bp, synthetic construct
  source 1..20: mol_type = other DNA
cgtaaatagtaaatgtacct

SEQ ID NO: 253884 - DNA, 20 bp, synthetic construct
  source 1..20: mol_type = other DNA
acgtaaatagtaaatgtacc

SEQ ID NO: 253885 - DNA, 20 bp, synthetic construct
  source 1..20: mol_type = other DNA
aacgtaaatagtaaatgtac

SEQ ID NO: 253886 - DNA, 20 bp, synthetic construct
  source 1..20: mol_type = other DNA
aaacgtaaatagtaaatgta

SEQ ID NO: 253887 - DNA, 20 bp, synthetic construct
  source 1..20: mol_type = other DNA
caaacgtaaatagtaaatgt

SEQ ID NO: 253888 - DNA, 20 bp, synthetic construct
  source 1..20: mol_type = other DNA
ccaaacgtaaatagtaaatg

SEQ ID NO: 253889 - DNA, 20 bp, synthetic construct
  source 1..20: mol_type = other DNA
cccaaacgtaaatagtaaat

SEQ ID NO: 253890 - DNA, 20 bp, synthetic construct
  source 1..20: mol_type = other DNA
ccccaaacgtaaatagtaaa

SEQ ID NO: 253891 - DNA, 20 bp, synthetic construct
  source 1..20: mol_type = other DNA
accccaaacgtaaatagtaa

SEQ ID NO: 253892 - DNA, 20 bp, synthetic construct
  source 1..20: mol_type = other DNA
gaccccaaacgtaaatagta

SEQ ID NO: 253893 - DNA, 20 bp, synthetic construct
  source 1..20: mol_type = other DNA
ggaccccaaacgtaaatagt

SEQ ID NO: 253894 - DNA, 20 bp, synthetic construct
  source 1..20: mol_type = other DNA
aggaccccaaacgtaaatag

SEQ ID NO: 253895 - DNA, 20 bp, synthetic construct
  source 1..20: mol_type = other DNA
aaggaccccaaacgtaaata

SEQ ID NO: 253896 - DNA, 20 bp, synthetic construct
  source 1..20: mol_type = other DNA
caaggaccccaaacgtaaat

SEQ ID NO: 253897 - DNA, 20 bp, synthetic construct
  source 1..20: mol_type = other DNA
acaaggaccccaaacgtaaa

SEQ ID NO: 253898 - DNA, 20 bp, synthetic construct
  source 1..20: mol_type = other DNA
gacaaggaccccaaacgtaa

SEQ ID NO: 253899 - DNA, 20 bp, synthetic construct
  source 1..20: mol_type = other DNA
agacaaggaccccaaacgta

SEQ ID NO: 253900 - DNA, 20 bp, synthetic construct
  source 1..20: mol_type = other DNA
gagacaaggaccccaaacgt

SEQ ID NO: 253901 - DNA, 20 bp, synthetic construct
  source 1..20: mol_type = other DNA
agagacaaggaccccaaacg

SEQ ID NO: 253902 - DNA, 20 bp, synthetic construct
  source 1..20: mol_type = other DNA
aagagacaaggaccccaaac

SEQ ID NO: 253903 - DNA, 20 bp, synthetic construct
  source 1..20: mol_type = other DNA
aaagagacaaggaccccaaa

SEQ ID NO: 253904 - DNA, 20 bp, synthetic construct
  source 1..20: mol_type = other DNA
aaaagagacaaggaccccaa

SEQ ID NO: 253905 - DNA, 20 bp, synthetic construct
  source 1..20: mol_type = other DNA
aaaaagagacaaggacccca

SEQ ID NO: 253906 - DNA, 20 bp, synthetic construct
  source 1..20: mol_type = other DNA
aaaaaagagacaaggacccc

SEQ ID NO: 253907 - DNA, 20 bp, synthetic construct
  source 1..20: mol_type = other DNA
taaaaaagagacaaggaccc

SEQ ID NO: 253908 - DNA, 20 bp, synthetic construct
  source 1..20: mol_type = other DNA
ttaaaaaagagacaaggacc

SEQ ID NO: 253909 - DNA, 20 bp, synthetic construct
  source 1..20: mol_type = other DNA
attaaaaaagagacaaggac

SEQ ID NO: 253910 - DNA, 20 bp, synthetic construct
  source 1..20: mol_type = other DNA
tattaaaaaagagacaagga

SEQ ID NO: 253911 - DNA, 20 bp, synthetic construct
  source 1..20: mol_type = other DNA
ctattaaaaaagagacaagg

SEQ ID NO: 253912 - DNA, 20 bp, synthetic construct
  source 1..20: mol_type = other DNA
actattaaaaaagagacaag

SEQ ID NO: 253913 - DNA, 20 bp, synthetic construct
  source 1..20: mol_type = other DNA
cactattaaaaaagagacaa

SEQ ID NO: 253914 - DNA, 20 bp, synthetic construct
  source 1..20: mol_type = other DNA
acactattaaaaaagagaca

SEQ ID NO: 253915 - DNA, 20 bp, synthetic construct
  source 1..20: mol_type = other DNA
aacactattaaaaaagagac

SEQ ID NO: 253916 - DNA, 20 bp, synthetic construct
  source 1..20: mol_type = other DNA
aaacactattaaaaaagaga

SEQ ID NO: 253917 - DNA, 20 bp, synthetic construct
  source 1..20: mol_type = other DNA
gaaacactattaaaaaagag

SEQ ID NO: 253918 - DNA, 20 bp, synthetic construct
  source 1..20: mol_type = other DNA
agaaacactattaaaaaaga

SEQ ID NO: 253919 - DNA, 20 bp, synthetic construct
  source 1..20: mol_type = other DNA
aagaaacactattaaaaaag

SEQ ID NO: 253920 - DNA, 20 bp, synthetic construct
  source 1..20: mol_type = other DNA
taagaaacactattaaaaaa

SEQ ID NO: 253921 - DNA, 20 bp, synthetic construct
  source 1..20: mol_type = other DNA
ttaagaaacactattaaaaa

SEQ ID NO: 253922 - DNA, 20 bp, synthetic construct
  source 1..20: mol_type = other DNA
tttaagaaacactattaaaa

SEQ ID NO: 253923 - DNA, 20 bp, synthetic construct
  source 1..20: mol_type = other DNA
ctttaagaaacactattaaa

SEQ ID NO: 253924 - DNA, 20 bp, synthetic construct
  source 1..20: mol_type = other DNA
actttaagaaacactattaa

SEQ ID NO: 253925 - DNA, 20 bp, synthetic construct
  source 1..20: mol_type = other DNA
gactttaagaaacactatta

SEQ ID NO: 253926 - DNA, 20 bp, synthetic construct
  source 1..20: mol_type = other DNA
agactttaagaaacactatt

SEQ ID NO: 253927 - DNA, 20 bp, synthetic construct
  source 1..20: mol_type = other DNA
aagactttaagaaacactat

SEQ ID NO: 253928 - DNA, 20 bp, synthetic construct
  source 1..20: mol_type = other DNA
caagactttaagaaacacta

SEQ ID NO: 253929 - DNA, 20 bp, synthetic construct
  source 1..20: mol_type = other DNA
acaagactttaagaaacact

SEQ ID NO: 253930 - DNA, 20 bp, synthetic construct
  source 1..20: mol_type = other DNA
tacaagactttaagaaacac

SEQ ID NO: 253931 - DNA, 20 bp, synthetic construct
  source 1..20: mol_type = other DNA
atacaagactttaagaaaca

SEQ ID NO: 253932 - DNA, 20 bp, synthetic construct
  source 1..20: mol_type = other DNA
aatacaagactttaagaaac

SEQ ID NO: 253933 - DNA, 20 bp, synthetic construct
  source 1..20: mol_type = other DNA
taatacaagactttaagaaa

SEQ ID NO: 253934 - DNA, 20 bp, synthetic construct
  source 1..20: mol_type = other DNA
ataatacaagactttaagaa

SEQ ID NO: 253935 - DNA, 20 bp, synthetic construct
  source 1..20: mol_type = other DNA
tataatacaagactttaaga

SEQ ID NO: 253936 - DNA, 20 bp, synthetic construct
  source 1..20: mol_type = other DNA
atataatacaagactttaag

SEQ ID NO: 253937 - DNA, 20 bp, synthetic construct
  source 1..20: mol_type = other DNA
gatataatacaagactttaa

SEQ ID NO: 253938 - DNA, 20 bp, synthetic construct
  source 1..20: mol_type = other DNA
tgatataatacaagacttta

SEQ ID NO: 253939 - DNA, 20 bp, synthetic construct
  source 1..20: mol_type = other DNA
ctgatataatacaagacttt

SEQ ID NO: 253940 - DNA, 20 bp, synthetic construct
  source 1..20: mol_type = other DNA
tctgatataatacaagactt

SEQ ID NO: 253941 - DNA, 20 bp, synthetic construct
  source 1..20: mol_type = other DNA
ctctgatataatacaagact

SEQ ID NO: 253942 - DNA, 20 bp, synthetic construct
  source 1..20: mol_type = other DNA
actctgatataatacaagac

SEQ ID NO: 253943 - DNA, 20 bp, synthetic construct
  source 1..20: mol_type = other DNA
tactctgatataatacaaga

SEQ ID NO: 253944 - DNA, 20 bp, synthetic construct
  source 1..20: mol_type = other DNA
gtactctgatataatacaag

SEQ ID NO: 253945 - DNA, 20 bp, synthetic construct
  source 1..20: mol_type = other DNA
tgtactctgatataatacaa

SEQ ID NO: 253946 - DNA, 20 bp, synthetic construct
  source 1..20: mol_type = other DNA
ctgtactctgatataataca

SEQ ID NO: 253947 - DNA, 20 bp, synthetic construct
  source 1..20: mol_type = other DNA
actgtactctgatataatac

SEQ ID NO: 253948 - DNA, 20 bp, synthetic construct
  source 1..20: mol_type = other DNA
tactgtactctgatataata

SEQ ID NO: 253949 - DNA, 20 bp, synthetic construct
  source 1..20: mol_type = other DNA
ttactgtactctgatataat

SEQ ID NO: 253950 - DNA, 20 bp, synthetic construct
  source 1..20: mol_type = other DNA
gttactgtactctgatataa

SEQ ID NO: 253951 - DNA, 20 bp, synthetic construct
  source 1..20: mol_type = other DNA
tgttactgtactctgatata

SEQ ID NO: 253952 - DNA, 20 bp, synthetic construct
  source 1..20: mol_type = other DNA
atgttactgtactctgatat

SEQ ID NO: 253953 - DNA, 20 bp, synthetic construct
  source 1..20: mol_type = other DNA
gatgttactgtactctgata

SEQ ID NO: 253954 - DNA, 20 bp, synthetic construct
  source 1..20: mol_type = other DNA
ggatgttactgtactctgat

SEQ ID NO: 253955 - DNA, 20 bp, synthetic construct
  source 1..20: mol_type = other DNA
gggatgttactgtactctga

SEQ ID NO: 253956 - DNA, 20 bp, synthetic construct
  source 1..20: mol_type = other DNA
tgggatgttactgtactctg

SEQ ID NO: 253957 - DNA, 20 bp, synthetic construct
  source 1..20: mol_type = other DNA
ctgggatgttactgtactct

SEQ ID NO: 253958 - DNA, 20 bp, synthetic construct
  source 1..20: mol_type = other DNA
actgggatgttactgtactc

SEQ ID NO: 253959 - DNA, 20 bp, synthetic construct
  source 1..20: mol_type = other DNA
gactgggatgttactgtact

SEQ ID NO: 253960 - DNA, 20 bp, synthetic construct
  source 1..20: mol_type = other DNA
tgactgggatgttactgtac

SEQ ID NO: 253961 - DNA, 20 bp, synthetic construct
  source 1..20: mol_type = other DNA
ttgactgggatgttactgta

SEQ ID NO: 253962 - DNA, 20 bp, synthetic construct
  source 1..20: mol_type = other DNA
cttgactgggatgttactgt

SEQ ID NO: 253963 - DNA, 20 bp, synthetic construct
  source 1..20: mol_type = other DNA
tcttgactgggatgttactg

SEQ ID NO: 253964 - DNA, 20 bp, synthetic construct
  source 1..20: mol_type = other DNA
ctcttgactgggatgttact

SEQ ID NO: 253965 - DNA, 20 bp, synthetic construct
  source 1..20: mol_type = other DNA
gctcttgactgggatgttac

SEQ ID NO: 253966 - DNA, 20 bp, synthetic construct
  source 1..20: mol_type = other DNA
tgctcttgactgggatgtta

SEQ ID NO: 253967 - DNA, 20 bp, synthetic construct
  source 1..20: mol_type = other DNA
gtgctcttgactgggatgtt

SEQ ID NO: 253968 - DNA, 20 bp, synthetic construct
  source 1..20: mol_type = other DNA
agtgctcttgactgggatgt

SEQ ID NO: 253969 - DNA, 20 bp, synthetic construct
  source 1..20: mol_type = other DNA
gagtgctcttgactgggatg

SEQ ID NO: 253970 - DNA, 20 bp, synthetic construct
  source 1..20: mol_type = other DNA
agagtgctcttgactgggat

SEQ ID NO: 253971 - DNA, 20 bp, synthetic construct
  source 1..20: mol_type = other DNA
tagagtgctcttgactggga

SEQ ID NO: 253972 - DNA, 20 bp, synthetic construct
  source 1..20: mol_type = other DNA
ctagagtgctcttgactggg

SEQ ID NO: 253973 - DNA, 20 bp, synthetic construct
  source 1..20: mol_type = other DNA
actagagtgctcttgactgg

SEQ ID NO: 253974 - DNA, 20 bp, synthetic construct
  source 1..20: mol_type = other DNA
tactagagtgctcttgactg

SEQ ID NO: 253975 - DNA, 20 bp, synthetic construct
  source 1..20: mol_type = other DNA
ttactagagtgctcttgact

SEQ ID NO: 253976 - DNA, 20 bp, synthetic construct
  source 1..20: mol_type = other DNA
cttactagagtgctcttgac

SEQ ID NO: 253977 - DNA, 20 bp, synthetic construct
  source 1..20: mol_type = other DNA
gcttactagagtgctcttga

SEQ ID NO: 253978 - DNA, 20 bp, synthetic construct
  source 1..20: mol_type = other DNA
agcttactagagtgctcttg

SEQ ID NO: 253979 - DNA, 20 bp, synthetic construct
  source 1..20: mol_type = other DNA
gagcttactagagtgctctt

SEQ ID NO: 253980 - DNA, 20 bp, synthetic construct
  source 1..20: mol_type = other DNA
agagcttactagagtgctct

SEQ ID NO: 253981 - DNA, 20 bp, synthetic construct
  source 1..20: mol_type = other DNA
tagagcttactagagtgctc

SEQ ID NO: 253982 - DNA, 20 bp, synthetic construct
  source 1..20: mol_type = other DNA
ctagagcttactagagtgct

SEQ ID NO: 253983 - DNA, 20 bp, synthetic construct
  source 1..20: mol_type = other DNA
cctagagcttactagagtgc

SEQ ID NO: 253984 - DNA, 20 bp, synthetic construct
  source 1..20: mol_type = other DNA
tcctagagcttactagagtg

SEQ ID NO: 253985 - DNA, 20 bp, synthetic construct
  source 1..20: mol_type = other DNA
ctcctagagcttactagagt

SEQ ID NO: 253986 - DNA, 20 bp, synthetic construct
  source 1..20: mol_type = other DNA
cctcctagagcttactagag

SEQ ID NO: 253987 - DNA, 20 bp, synthetic construct
  source 1..20: mol_type = other DNA
tcctcctagagcttactaga

SEQ ID NO: 253988 - DNA, 20 bp, synthetic construct
  source 1..20: mol_type = other DNA
ttcctcctagagcttactag

SEQ ID NO: 253989 - DNA, 20 bp, synthetic construct
  source 1..20: mol_type = other DNA
tttcctcctagagcttacta

SEQ ID NO: 253990 - DNA, 20 bp, synthetic construct
  source 1..20: mol_type = other DNA
ctttcctcctagagcttact

SEQ ID NO: 253991 - DNA, 20 bp, synthetic construct
  source 1..20: mol_type = other DNA
gctttcctcctagagcttac

SEQ ID NO: 253992 - DNA, 20 bp, synthetic construct
  source 1..20: mol_type = other DNA
cgctttcctcctagagctta

SEQ ID NO: 253993 - DNA, 20 bp, synthetic construct
  source 1..20: mol_type = other DNA
tcgctttcctcctagagctt

SEQ ID NO: 253994 - DNA, 20 bp, synthetic construct
  source 1..20: mol_type = other DNA
gtcgctttcctcctagagct

SEQ ID NO: 253995 - DNA, 20 bp, synthetic construct
  source 1..20: mol_type = other DNA
agtcgctttcctcctagagc

SEQ ID NO: 253996 - DNA, 20 bp, synthetic construct
  source 1..20: mol_type = other DNA
aagtcgctttcctcctagag

SEQ ID NO: 253997 - DNA, 20 bp, synthetic construct
  source 1..20: mol_type = other DNA
gaagtcgctttcctcctaga

SEQ ID NO: 253998 - DNA, 20 bp, synthetic construct
  source 1..20: mol_type = other DNA
ggaagtcgctttcctcctag

SEQ ID NO: 253999 - DNA, 20 bp, synthetic construct
  source 1..20: mol_type = other DNA
cggaagtcgctttcctccta

SEQ ID NO: 254000 - DNA, 20 bp, synthetic construct
  source 1..20: mol_type = other DNA
ccggaagtcgctttcctcct

SEQ ID NO: 254001 - DNA, 20 bp, synthetic construct
  source 1..20: mol_type = other DNA
tccggaagtcgctttcctcc

SEQ ID NO: 254002 - DNA, 20 bp, synthetic construct
  source 1..20: mol_type = other DNA
ttccggaagtcgctttcctc

SEQ ID NO: 254003 - DNA, 20 bp, synthetic construct
  source 1..20: mol_type = other DNA
cttccggaagtcgctttcct

SEQ ID NO: 254004 - DNA, 20 bp, synthetic construct
  source 1..20: mol_type = other DNA
ccttccggaagtcgctttcc

SEQ ID NO: 254005 - DNA, 20 bp, synthetic construct
  source 1..20: mol_type = other DNA
gccttccggaagtcgctttc

SEQ ID NO: 254006 - DNA, 20 bp, synthetic construct
  source 1..20: mol_type = other DNA
tgccttccggaagtcgcttt

SEQ ID NO: 254007 - DNA, 20 bp, synthetic construct
  source 1..20: mol_type = other DNA
ctgccttccggaagtcgctt

SEQ ID NO: 254008 - DNA, 20 bp, synthetic construct
  source 1..20: mol_type = other DNA
actgccttccggaagtcgct

SEQ ID NO: 254009 - DNA, 20 bp, synthetic construct
  source 1..20: mol_type = other DNA
cactgccttccggaagtcgc

SEQ ID NO: 254010 - DNA, 20 bp, synthetic construct
  source 1..20: mol_type = other DNA
ccactgccttccggaagtcg

SEQ ID NO: 254011 - DNA, 20 bp, synthetic construct
  source 1..20: mol_type = other DNA
tccactgccttccggaagtc

SEQ ID NO: 254012 - DNA, 20 bp, synthetic construct
  source 1..20: mol_type = other DNA
ctccactgccttccggaagt

SEQ ID NO: 254013 - DNA, 20 bp, synthetic construct
  source 1..20: mol_type = other DNA
tctccactgccttccggaag

SEQ ID NO: 254014 - DNA, 20 bp, synthetic construct
  source 1..20: mol_type = other DNA
gtctccactgccttccggaa

SEQ ID NO: 254015 - DNA, 20 bp, synthetic construct
  source 1..20: mol_type = other DNA
ggtctccactgccttccgga

SEQ ID NO: 254016 - DNA, 20 bp, synthetic construct
  source 1..20: mol_type = other DNA
aggtctccactgccttccgg

SEQ ID NO: 254017 - DNA, 20 bp, synthetic construct
  source 1..20: mol_type = other DNA
caggtctccactgccttccg

SEQ ID NO: 254018 - DNA, 20 bp, synthetic construct
  source 1..20: mol_type = other DNA
acaggtctccactgccttcc

SEQ ID NO: 254019 - DNA, 20 bp, synthetic construct
  source 1..20: mol_type = other DNA
gacaggtctccactgccttc

SEQ ID NO: 254020 - DNA, 20 bp, synthetic construct
  source 1..20: mol_type = other DNA
ggacaggtctccactgcctt

SEQ ID NO: 254021 - DNA, 20 bp, synthetic construct
  source 1..20: mol_type = other DNA
aggacaggtctccactgcct

SEQ ID NO: 254022 - DNA, 20 bp, synthetic construct
  source 1..20: mol_type = other DNA
caggacaggtctccactgcc

SEQ ID NO: 254023 - DNA, 20 bp, synthetic construct
  source 1..20: mol_type = other DNA
acaggacaggtctccactgc

SEQ ID NO: 254024 - DNA, 20 bp, synthetic construct
  source 1..20: mol_type = other DNA
aacaggacaggtctccactg

SEQ ID NO: 254025 - DNA, 20 bp, synthetic construct
  source 1..20: mol_type = other DNA
caacaggacaggtctccact

SEQ ID NO: 254026 - DNA, 20 bp, synthetic construct
  source 1..20: mol_type = other DNA
ccaacaggacaggtctccac

SEQ ID NO: 254027 - DNA, 20 bp, synthetic construct
  source 1..20: mol_type = other DNA
cccaacaggacaggtctcca

SEQ ID NO: 254028 - DNA, 20 bp, synthetic construct
  source 1..20: mol_type = other DNA
ccccaacaggacaggtctcc

SEQ ID NO: 254029 - DNA, 20 bp, synthetic construct
  source 1..20: mol_type = other DNA
gccccaacaggacaggtctc

SEQ ID NO: 254030 - DNA, 20 bp, synthetic construct
  source 1..20: mol_type = other DNA
tgccccaacaggacaggtct

SEQ ID NO: 254031 - DNA, 20 bp, synthetic construct
  source 1..20: mol_type = other DNA
ctgccccaacaggacaggtc

SEQ ID NO: 254032 - DNA, 20 bp, synthetic construct
  source 1..20: mol_type = other DNA
gctgccccaacaggacaggt

SEQ ID NO: 254033 - DNA, 20 bp, synthetic construct
  source 1..20: mol_type = other DNA
tgctgccccaacaggacagg

SEQ ID NO: 254034 - DNA, 20 bp, synthetic construct
  source 1..20: mol_type = other DNA
atgctgccccaacaggacag

SEQ ID NO: 254035 - DNA, 20 bp, synthetic construct
  source 1..20: mol_type = other DNA
tatgctgccccaacaggaca

SEQ ID NO: 254036 - DNA, 20 bp, synthetic construct
  source 1..20: mol_type = other DNA
ctatgctgccccaacaggac

SEQ ID NO: 254037 - DNA, 20 bp, synthetic construct
  source 1..20: mol_type = other DNA
cctatgctgccccaacagga

SEQ ID NO: 254038 - DNA, 20 bp, synthetic construct
  source 1..20: mol_type = other DNA
ccctatgctgccccaacagg

SEQ ID NO: 254039 - DNA, 20 bp, synthetic construct
  source 1..20: mol_type = other DNA
cccctatgctgccccaacag

SEQ ID NO: 254040 - DNA, 20 bp, synthetic construct
  source 1..20: mol_type = other DNA
gcccctatgctgccccaaca

SEQ ID NO: 254041 - DNA, 20 bp, synthetic construct
  source 1..20: mol_type = other DNA
tgcccctatgctgccccaac

SEQ ID NO: 254042 - DNA, 20 bp, synthetic construct
  source 1..20: mol_type = other DNA
ctgcccctatgctgccccaa

SEQ ID NO: 254043 - DNA, 20 bp, synthetic construct
  source 1..20: mol_type = other DNA
gctgcccctatgctgcccca

SEQ ID NO: 254044 - DNA, 20 bp, synthetic construct
  source 1..20: mol_type = other DNA
ggctgcccctatgctgcccc

SEQ ID NO: 254045 - DNA, 20 bp, synthetic construct
  source 1..20: mol_type = other DNA
gggctgcccctatgctgccc

SEQ ID NO: 254046 - DNA, 20 bp, synthetic construct
  source 1..20: mol_type = other DNA
ggggctgcccctatgctgcc

SEQ ID NO: 254047 - DNA, 20 bp, synthetic construct
  source 1..20: mol_type = other DNA
aggggctgcccctatgctgc

SEQ ID NO: 254048 - DNA, 20 bp, synthetic construct
  source 1..20: mol_type = other DNA
caggggctgcccctatgctg

SEQ ID NO: 254049 - DNA, 20 bp, synthetic construct
  source 1..20: mol_type = other DNA
gcaggggctgcccctatgct

SEQ ID NO: 254050 - DNA, 20 bp, synthetic construct
  source 1..20: mol_type = other DNA
ggcaggggctgcccctatgc

SEQ ID NO: 254051 - DNA, 20 bp, synthetic construct
  source 1..20: mol_type = other DNA
aggcaggggctgcccctatg

SEQ ID NO: 254052 - DNA, 20 bp, synthetic construct
  source 1..20: mol_type = other DNA
gaggcaggggctgcccctat

SEQ ID NO: 254053 - DNA, 20 bp, synthetic construct
  source 1..20: mol_type = other DNA
agaggcaggggctgccccta

SEQ ID NO: 254054 - DNA, 20 bp, synthetic construct
  source 1..20: mol_type = other DNA
cagaggcaggggctgcccct

SEQ ID NO: 254055 - DNA, 20 bp, synthetic construct
  source 1..20: mol_type = other DNA
ccagaggcaggggctgcccc

SEQ ID NO: 254056 - DNA, 20 bp, synthetic construct
  source 1..20: mol_type = other DNA
accagaggcaggggctgccc

SEQ ID NO: 254057 - DNA, 20 bp, synthetic construct
  source 1..20: mol_type = other DNA
gaccagaggcaggggctgcc

SEQ ID NO: 254058 - DNA, 20 bp, synthetic construct
  source 1..20: mol_type = other DNA
tgaccagaggcaggggctgc

SEQ ID NO: 254059 - DNA, 20 bp, synthetic construct
  source 1..20: mol_type = other DNA
ctgaccagaggcaggggctg

SEQ ID NO: 254060 - DNA, 20 bp, synthetic construct
  source 1..20: mol_type = other DNA
actgaccagaggcaggggct

SEQ ID NO: 254061 - DNA, 20 bp, synthetic construct
  source 1..20: mol_type = other DNA
aactgaccagaggcaggggc

SEQ ID NO: 254062 - DNA, 20 bp, synthetic construct
  source 1..20: mol_type = other DNA
gaactgaccagaggcagggg

SEQ ID NO: 254063 - DNA, 20 bp, synthetic construct
  source 1..20: mol_type = other DNA
agaactgaccagaggcaggg

SEQ ID NO: 254064 - DNA, 20 bp, synthetic construct
  source 1..20: mol_type = other DNA
cagaactgaccagaggcagg

SEQ ID NO: 254065 - DNA, 20 bp, synthetic construct
  source 1..20: mol_type = other DNA
ccagaactgaccagaggcag

SEQ ID NO: 254066 - DNA, 20 bp, synthetic construct
  source 1..20: mol_type = other DNA
gccagaactgaccagaggca

SEQ ID NO: 254067 - DNA, 20 bp, synthetic construct
  source 1..20: mol_type = other DNA
cgccagaactgaccagaggc

SEQ ID NO: 254068 - DNA, 20 bp, synthetic construct
  source 1..20: mol_type = other DNA
gcgccagaactgaccagagg

SEQ ID NO: 254069 - DNA, 20 bp, synthetic construct
  source 1..20: mol_type = other DNA
agcgccagaactgaccagag

SEQ ID NO: 254070 - DNA, 20 bp, synthetic construct
  source 1..20: mol_type = other DNA
gagcgccagaactgaccaga

SEQ ID NO: 254071 - DNA, 20 bp, synthetic construct
  source 1..20: mol_type = other DNA
tgagcgccagaactgaccag

SEQ ID NO: 254072 - DNA, 20 bp, synthetic construct
  source 1..20: mol_type = other DNA
ctgagcgccagaactgacca

SEQ ID NO: 254073 - DNA, 20 bp, synthetic construct
  source 1..20: mol_type = other DNA
cctgagcgccagaactgacc

SEQ ID NO: 254074 - DNA, 20 bp, synthetic construct
  source 1..20: mol_type = other DNA
gcctgagcgccagaactgac

SEQ ID NO: 254075 - DNA, 20 bp, synthetic construct
  source 1..20: mol_type = other DNA
agcctgagcgccagaactga

SEQ ID NO: 254076 - DNA, 20 bp, synthetic construct
  source 1..20: mol_type = other DNA
gagcctgagcgccagaactg

SEQ ID NO: 254077 - DNA, 20 bp, synthetic construct
  source 1..20: mol_type = other DNA
tgagcctgagcgccagaact

SEQ ID NO: 254078 - DNA, 20 bp, synthetic construct
  source 1..20: mol_type = other DNA
ctgagcctgagcgccagaac

SEQ ID NO: 254079 - DNA, 20 bp, synthetic construct
  source 1..20: mol_type = other DNA
cctgagcctgagcgccagaa

SEQ ID NO: 254080 - DNA, 20 bp, synthetic construct
  source 1..20: mol_type = other DNA
ccctgagcctgagcgccaga

SEQ ID NO: 254081 - DNA, 20 bp, synthetic construct
  source 1..20: mol_type = other DNA
accctgagcctgagcgccag

SEQ ID NO: 254082 - DNA, 20 bp, synthetic construct
  source 1..20: mol_type = other DNA
aaccctgagcctgagcgcca

SEQ ID NO: 254083 - DNA, 20 bp, synthetic construct
  source 1..20: mol_type = other DNA
caaccctgagcctgagcgcc

SEQ ID NO: 254084 - DNA, 20 bp, synthetic construct
  source 1..20: mol_type = other DNA
gcaaccctgagcctgagcgc

SEQ ID NO: 254085 - DNA, 20 bp, synthetic construct
  source 1..20: mol_type = other DNA
ggcaaccctgagcctgagcg

SEQ ID NO: 254086 - DNA, 20 bp, synthetic construct
  source 1..20: mol_type = other DNA
aggcaaccctgagcctgagc

SEQ ID NO: 254087 - DNA, 20 bp, synthetic construct
  source 1..20: mol_type = other DNA
gaggcaaccctgagcctgag

SEQ ID NO: 254088 - DNA, 20 bp, synthetic construct
  source 1..20: mol_type = other DNA
agaggcaaccctgagcctga

SEQ ID NO: 254089 - DNA, 20 bp, synthetic construct
  source 1..20: mol_type = other DNA
cagaggcaaccctgagcctg

SEQ ID NO: 254090 - DNA, 20 bp, synthetic construct
  source 1..20: mol_type = other DNA
ccagaggcaaccctgagcct

SEQ ID NO: 254091 - DNA, 20 bp, synthetic construct
  source 1..20: mol_type = other DNA
cccagaggcaaccctgagcc

SEQ ID NO: 254092 - DNA, 20 bp, synthetic construct
  source 1..20: mol_type = other DNA
gcccagaggcaaccctgagc

SEQ ID NO: 254093 - DNA, 20 bp, synthetic construct
  source 1..20: mol_type = other DNA
agcccagaggcaaccctgag

SEQ ID NO: 254094 - DNA, 20 bp, synthetic construct
  source 1..20: mol_type = other DNA
cagcccagaggcaaccctga

SEQ ID NO: 254095 - DNA, 20 bp, synthetic construct
  source 1..20: mol_type = other DNA
acagcccagaggcaaccctg

SEQ ID NO: 254096 - DNA, 20 bp, synthetic construct
  source 1..20: mol_type = other DNA
aacagcccagaggcaaccct

SEQ ID NO: 254097 - DNA, 20 bp, synthetic construct
  source 1..20: mol_type = other DNA
gaacagcccagaggcaaccc

SEQ ID NO: 254098 - DNA, 20 bp, synthetic construct
  source 1..20: mol_type = other DNA
agaacagcccagaggcaacc

SEQ ID NO: 254099 - DNA, 20 bp, synthetic construct
  source 1..20: mol_type = other DNA
aagaacagcccagaggcaac

SEQ ID NO: 254100 - DNA, 20 bp, synthetic construct
  source 1..20: mol_type = other DNA
gaagaacagcccagaggcaa

SEQ ID NO: 254101 - DNA, 20 bp, synthetic construct
  source 1..20: mol_type = other DNA
ggaagaacagcccagaggca

SEQ ID NO: 254102 - DNA, 20 bp, synthetic construct
  source 1..20: mol_type = other DNA
gggaagaacagcccagaggc

SEQ ID NO: 254103 - DNA, 20 bp, synthetic construct
  source 1..20: mol_type = other DNA
tgggaagaacagcccagagg

SEQ ID NO: 254104 - DNA, 20 bp, synthetic construct
  source 1..20: mol_type = other DNA
ctgggaagaacagcccagag

SEQ ID NO: 254105 - DNA, 20 bp, synthetic construct
  source 1..20: mol_type = other DNA
tctgggaagaacagcccaga

SEQ ID NO: 254106 - DNA, 20 bp, synthetic construct
  source 1..20: mol_type = other DNA
ctctgggaagaacagcccag

SEQ ID NO: 254107 - DNA, 20 bp, synthetic construct
  source 1..20: mol_type = other DNA
tctctgggaagaacagccca

SEQ ID NO: 254108 - DNA, 20 bp, synthetic construct
  source 1..20: mol_type = other DNA
gtctctgggaagaacagccc

SEQ ID NO: 254109 - DNA, 20 bp, synthetic construct
  source 1..20: mol_type = other DNA
agtctctgggaagaacagcc

SEQ ID NO: 254110 - DNA, 20 bp, synthetic construct
  source 1..20: mol_type = other DNA
cagtctctgggaagaacagc

SEQ ID NO: 254111 - DNA, 20 bp, synthetic construct
  source 1..20: mol_type = other DNA
tcagtctctgggaagaacag

SEQ ID NO: 254112 - DNA, 20 bp, synthetic construct
  source 1..20: mol_type = other DNA
gtcagtctctgggaagaaca

SEQ ID NO: 254113 - DNA, 20 bp, synthetic construct
  source 1..20: mol_type = other DNA
tgtcagtctctgggaagaac

SEQ ID NO: 254114 - DNA, 20 bp, synthetic construct
  source 1..20: mol_type = other DNA
ttgtcagtctctgggaagaa

SEQ ID NO: 254115 - DNA, 20 bp, synthetic construct
  source 1..20: mol_type = other DNA
tttgtcagtctctgggaaga

SEQ ID NO: 254116 - DNA, 20 bp, synthetic construct
  source 1..20: mol_type = other DNA
ctttgtcagtctctgggaag

SEQ ID NO: 254117 - DNA, 20 bp, synthetic construct
  source 1..20: mol_type = other DNA
cctttgtcagtctctgggaa

SEQ ID NO: 254118 - DNA, 20 bp, synthetic construct
  source 1..20: mol_type = other DNA
ccctttgtcagtctctggga

SEQ ID NO: 254119 - DNA, 20 bp, synthetic construct
  source 1..20: mol_type = other DNA
gccctttgtcagtctctggg

SEQ ID NO: 254120 - DNA, 20 bp, synthetic construct
  source 1..20: mol_type = other DNA
agccctttgtcagtctctgg

SEQ ID NO: 254121 - DNA, 20 bp, synthetic construct
  source 1..20: mol_type = other DNA
gagccctttgtcagtctctg

SEQ ID NO: 254122 - DNA, 20 bp, synthetic construct
  source 1..20: mol_type = other DNA
ggagccctttgtcagtctct

SEQ ID NO: 254123 - DNA, 20 bp, synthetic construct
  source 1..20: mol_type = other DNA
gggagccctttgtcagtctc

SEQ ID NO: 254124 - DNA, 20 bp, synthetic construct
  source 1..20: mol_type = other DNA
tgggagccctttgtcagtct

SEQ ID NO: 254125 - DNA, 20 bp, synthetic construct
  source 1..20: mol_type = other DNA
atgggagccctttgtcagtc

SEQ ID NO: 254126 - DNA, 20 bp, synthetic construct
  source 1..20: mol_type = other DNA
tatgggagccctttgtcagt

SEQ ID NO: 254127 - DNA, 20 bp, synthetic construct
  source 1..20: mol_type = other DNA
ttatgggagccctttgtcag

SEQ ID NO: 254128 - DNA, 20 bp, synthetic construct
  source 1..20: mol_type = other DNA
cttatgggagccctttgtca

SEQ ID NO: 254129 - DNA, 20 bp, synthetic construct
  source 1..20: mol_type = other DNA
ccttatgggagccctttgtc

SEQ ID NO: 254130 - DNA, 20 bp, synthetic construct
  source 1..20: mol_type = other DNA
gccttatgggagccctttgt

SEQ ID NO: 254131 - DNA, 20 bp, synthetic construct
  source 1..20: mol_type = other DNA
tgccttatgggagccctttg

SEQ ID NO: 254132 - DNA, 20 bp, synthetic construct
  source 1..20: mol_type = other DNA
gtgccttatgggagcccttt

SEQ ID NO: 254133 - DNA, 20 bp, synthetic construct
  source 1..20: mol_type = other DNA
ggtgccttatgggagccctt

SEQ ID NO: 254134 - DNA, 20 bp, synthetic construct
  source 1..20: mol_type = other DNA
aggtgccttatgggagccct

SEQ ID NO: 254135 - DNA, 20 bp, synthetic construct
  source 1..20: mol_type = other DNA
caggtgccttatgggagccc

SEQ ID NO: 254136 - DNA, 20 bp, synthetic construct
  source 1..20: mol_type = other DNA
gcaggtgccttatgggagcc

SEQ ID NO: 254137 - DNA, 20 bp, synthetic construct
  source 1..20: mol_type = other DNA
tgcaggtgccttatgggagc

SEQ ID NO: 254138 - DNA, 20 bp, synthetic construct
  source 1..20: mol_type = other DNA
ctgcaggtgccttatgggag

SEQ ID NO: 254139 - DNA, 20 bp, synthetic construct
  source 1..20: mol_type = other DNA
tctgcaggtgccttatggga

SEQ ID NO: 254140 - DNA, 20 bp, synthetic construct
  source 1..20: mol_type = other DNA
ctctgcaggtgccttatggg

SEQ ID NO: 254141 - DNA, 20 bp, synthetic construct
  source 1..20: mol_type = other DNA
gctctgcaggtgccttatgg

SEQ ID NO: 254142 - DNA, 20 bp, synthetic construct
  source 1..20: mol_type = other DNA
ggctctgcaggtgccttatg

SEQ ID NO: 254143 - DNA, 20 bp, synthetic construct
  source 1..20: mol_type = other DNA
aggctctgcaggtgccttat

SEQ ID NO: 254144 - DNA, 20 bp, synthetic construct
  source 1..20: mol_type = other DNA
caggctctgcaggtgcctta

SEQ ID NO: 254145 - DNA, 20 bp, synthetic construct
  source 1..20: mol_type = other DNA
acaggctctgcaggtgcctt

SEQ ID NO: 254146 - DNA, 20 bp, synthetic construct
  source 1..20: mol_type = other DNA
cacaggctctgcaggtgcct

SEQ ID NO: 254147 - DNA, 20 bp, synthetic construct
  source 1..20: mol_type = other DNA
tcacaggctctgcaggtgcc

SEQ ID NO: 254148 - DNA, 20 bp, synthetic construct
  source 1..20: mol_type = other DNA
ctcacaggctctgcaggtgc

SEQ ID NO: 254149 - DNA, 20 bp, synthetic construct
  source 1..20: mol_type = other DNA
tctcacaggctctgcaggtg

SEQ ID NO: 254150 - DNA, 20 bp, synthetic construct
  source 1..20: mol_type = other DNA
ttctcacaggctctgcaggt

SEQ ID NO: 254151 - DNA, 20 bp, synthetic construct
  source 1..20: mol_type = other DNA
cttctcacaggctctgcagg

SEQ ID NO: 254152 - DNA, 20 bp, synthetic construct
  source 1..20: mol_type = other DNA
gcttctcacaggctctgcag

SEQ ID NO: 254153 - DNA, 20 bp, synthetic construct
  source 1..20: mol_type = other DNA
agcttctcacaggctctgca

SEQ ID NO: 254154 - DNA, 20 bp, synthetic construct
  source 1..20: mol_type = other DNA
cagcttctcacaggctctgc

SEQ ID NO: 254155 - DNA, 20 bp, synthetic construct
  source 1..20: mol_type = other DNA
tcagcttctcacaggctctg

SEQ ID NO: 254156 - DNA, 20 bp, synthetic construct
  source 1..20: mol_type = other DNA
ttcagcttctcacaggctct

SEQ ID NO: 254157 - DNA, 20 bp, synthetic construct
  source 1..20: mol_type = other DNA
cttcagcttctcacaggctc

SEQ ID NO: 254158 - DNA, 20 bp, synthetic construct
  source 1..20: mol_type = other DNA
acttcagcttctcacaggct

SEQ ID NO: 254159 - DNA, 20 bp, synthetic construct
  source 1..20: mol_type = other DNA
gacttcagcttctcacaggc

SEQ ID NO: 254160 - DNA, 20 bp, synthetic construct
  source 1..20: mol_type = other DNA
tgacttcagcttctcacagg

SEQ ID NO: 254161 - DNA, 20 bp, synthetic construct
  source 1..20: mol_type = other DNA
ttgacttcagcttctcacag

SEQ ID NO: 254162 - DNA, 20 bp, synthetic construct
  source 1..20: mol_type = other DNA
attgacttcagcttctcaca

SEQ ID NO: 254163 - DNA, 20 bp, synthetic construct
  source 1..20: mol_type = other DNA
cattgacttcagcttctcac

SEQ ID NO: 254164 - DNA, 20 bp, synthetic construct
  source 1..20: mol_type = other DNA
acattgacttcagcttctca

SEQ ID NO: 254165 - DNA, 20 bp, synthetic construct
  source 1..20: mol_type = other DNA
aacattgacttcagcttctc

SEQ ID NO: 254166 - DNA, 20 bp, synthetic construct
  source 1..20: mol_type = other DNA
aaacattgacttcagcttct

SEQ ID NO: 254167 - DNA, 20 bp, synthetic construct
  source 1..20: mol_type = other DNA
aaaacattgacttcagcttc

SEQ ID NO: 254168 - DNA, 20 bp, synthetic construct
  source 1..20: mol_type = other DNA
gaaaacattgacttcagctt

SEQ ID NO: 254169 - DNA, 20 bp, synthetic construct
  source 1..20: mol_type = other DNA
ggaaaacattgacttcagct

SEQ ID NO: 254170 - DNA, 20 bp, synthetic construct
  source 1..20: mol_type = other DNA
aggaaaacattgacttcagc

SEQ ID NO: 254171 - DNA, 20 bp, synthetic construct
  source 1..20: mol_type = other DNA
caggaaaacattgacttcag

SEQ ID NO: 254172 - DNA, 20 bp, synthetic construct
  source 1..20: mol_type = other DNA
tcaggaaaacattgacttca

SEQ ID NO: 254173 - DNA, 20 bp, synthetic construct
  source 1..20: mol_type = other DNA
gtcaggaaaacattgacttc

SEQ ID NO: 254174 - DNA, 20 bp, synthetic construct
  source 1..20: mol_type = other DNA
tgtcaggaaaacattgactt

SEQ ID NO: 254175 - DNA, 20 bp, synthetic construct
  source 1..20: mol_type = other DNA
gtgtcaggaaaacattgact

SEQ ID NO: 254176 - DNA, 20 bp, synthetic construct
  source 1..20: mol_type = other DNA
ggtgtcaggaaaacattgac

SEQ ID NO: 254177 - DNA, 20 bp, synthetic construct
  source 1..20: mol_type = other DNA
tggtgtcaggaaaacattga

SEQ ID NO: 254178 - DNA, 20 bp, synthetic construct
  source 1..20: mol_type = other DNA
ctggtgtcaggaaaacattg

SEQ ID NO: 254179 - DNA, 20 bp, synthetic construct
  source 1..20: mol_type = other DNA
actggtgtcaggaaaacatt

SEQ ID NO: 254180 - DNA, 20 bp, synthetic construct
  source 1..20: mol_type = other DNA
aactggtgtcaggaaaacat

SEQ ID NO: 254181 - DNA, 20 bp, synthetic construct
  source 1..20: mol_type = other DNA
caactggtgtcaggaaaaca

SEQ ID NO: 254182 - DNA, 20 bp, synthetic construct
  source 1..20: mol_type = other DNA
tcaactggtgtcaggaaaac

SEQ ID NO: 254183 - DNA, 20 bp, synthetic construct
  source 1..20: mol_type = other DNA
atcaactggtgtcaggaaaa

SEQ ID NO: 254184 - DNA, 20 bp, synthetic construct
  source 1..20: mol_type = other DNA
gatcaactggtgtcaggaaa

SEQ ID NO: 254185 - DNA, 20 bp, synthetic construct
  source 1..20: mol_type = other DNA
agatcaactggtgtcaggaa

SEQ ID NO: 254186 - DNA, 20 bp, synthetic construct
  source 1..20: mol_type = other DNA
cagatcaactggtgtcagga

SEQ ID NO: 254187 - DNA, 20 bp, synthetic construct
  source 1..20: mol_type = other DNA
acagatcaactggtgtcagg

SEQ ID NO: 254188 - DNA, 20 bp, synthetic construct
  source 1..20: mol_type = other DNA
cacagatcaactggtgtcag

SEQ ID NO: 254189 - DNA, 20 bp, synthetic construct
  source 1..20: mol_type = other DNA
gcacagatcaactggtgtca

SEQ ID NO: 254190 - DNA, 20 bp, synthetic construct
  source 1..20: mol_type = other DNA
tgcacagatcaactggtgtc

SEQ ID NO: 254191 - DNA, 20 bp, synthetic construct
  source 1..20: mol_type = other DNA
ctgcacagatcaactggtgt

SEQ ID NO: 254192 - DNA, 20 bp, synthetic construct
  source 1..20: mol_type = other DNA
cctgcacagatcaactggtg

SEQ ID NO: 254193 - DNA, 20 bp, synthetic construct
  source 1..20: mol_type = other DNA
tcctgcacagatcaactggt

SEQ ID NO: 254194 - DNA, 20 bp, synthetic construct
  source 1..20: mol_type = other DNA
atcctgcacagatcaactgg

SEQ ID NO: 254195 - DNA, 20 bp, synthetic construct
  source 1..20: mol_type = other DNA
gatcctgcacagatcaactg

SEQ ID NO: 254196 - DNA, 20 bp, synthetic construct
  source 1..20: mol_type = other DNA
ggatcctgcacagatcaact

SEQ ID NO: 254197 - DNA, 20 bp, synthetic construct
  source 1..20: mol_type = other DNA
tggatcctgcacagatcaac

SEQ ID NO: 254198 - DNA, 20 bp, synthetic construct
  source 1..20: mol_type = other DNA
atggatcctgcacagatcaa

SEQ ID NO: 254199 - DNA, 20 bp, synthetic construct
  source 1..20: mol_type = other DNA
aatggatcctgcacagatca

SEQ ID NO: 254200 - DNA, 20 bp, synthetic construct
  source 1..20: mol_type = other DNA
caatggatcctgcacagatc

SEQ ID NO: 254201 - DNA, 20 bp, synthetic construct
  source 1..20: mol_type = other DNA
tcaatggatcctgcacagat

SEQ ID NO: 254202 - DNA, 20 bp, synthetic construct
  source 1..20: mol_type = other DNA
atcaatggatcctgcacaga

SEQ ID NO: 254203 - DNA, 20 bp, synthetic construct
  source 1..20: mol_type = other DNA
aatcaatggatcctgcacag

SEQ ID NO: 254204 - DNA, 20 bp, synthetic construct
  source 1..20: mol_type = other DNA
aaatcaatggatcctgcaca

SEQ ID NO: 254205 - DNA, 20 bp, synthetic construct
  source 1..20: mol_type = other DNA
taaatcaatggatcctgcac

SEQ ID NO: 254206 - DNA, 20 bp, synthetic construct
  source 1..20: mol_type = other DNA
ttaaatcaatggatcctgca

SEQ ID NO: 254207 - DNA, 20 bp, synthetic construct
  source 1..20: mol_type = other DNA
gttaaatcaatggatcctgc

SEQ ID NO: 254208 - DNA, 20 bp, synthetic construct
  source 1..20: mol_type = other DNA
ggttaaatcaatggatcctg

SEQ ID NO: 254209 - DNA, 20 bp, synthetic construct
  source 1..20: mol_type = other DNA
tggttaaatcaatggatcct

SEQ ID NO: 254210 - DNA, 20 bp, synthetic construct
  source 1..20: mol_type = other DNA
gtggttaaatcaatggatcc

SEQ ID NO: 254211 - DNA, 20 bp, synthetic construct
  source 1..20: mol_type = other DNA
ggtggttaaatcaatggatc

SEQ ID NO: 254212 - DNA, 20 bp, synthetic construct
  source 1..20: mol_type = other DNA
aggtggttaaatcaatggat

SEQ ID NO: 254213 - DNA, 20 bp, synthetic construct
  source 1..20: mol_type = other DNA
caggtggttaaatcaatgga

SEQ ID NO: 254214 - DNA, 20 bp, synthetic construct
  source 1..20: mol_type = other DNA
gcaggtggttaaatcaatgg

SEQ ID NO: 254215 - DNA, 20 bp, synthetic construct
  source 1..20: mol_type = other DNA
agcaggtggttaaatcaatg

SEQ ID NO: 254216 - DNA, 20 bp, synthetic construct
  source 1..20: mol_type = other DNA
cagcaggtggttaaatcaat

SEQ ID NO: 254217 - DNA, 20 bp, synthetic construct
  source 1..20: mol_type = other DNA
acagcaggtggttaaatcaa

SEQ ID NO: 254218 - DNA, 20 bp, synthetic construct
  source 1..20: mol_type = other DNA
cacagcaggtggttaaatca

SEQ ID NO: 254219 - DNA, 20 bp, synthetic construct
  source 1..20: mol_type = other DNA
acacagcaggtggttaaatc

SEQ ID NO: 254220 - DNA, 20 bp, synthetic construct
  source 1..20: mol_type = other DNA
cacacagcaggtggttaaat

SEQ ID NO: 254221 - DNA, 20 bp, synthetic construct
  source 1..20: mol_type = other DNA
ccacacagcaggtggttaaa

SEQ ID NO: 254222 - DNA, 20 bp, synthetic construct
  source 1..20: mol_type = other DNA
gccacacagcaggtggttaa

SEQ ID NO: 254223 - DNA, 20 bp, synthetic construct
  source 1..20: mol_type = other DNA
tgccacacagcaggtggtta

SEQ ID NO: 254224 - DNA, 20 bp, synthetic construct
  source 1..20: mol_type = other DNA
atgccacacagcaggtggtt

SEQ ID NO: 254225 - DNA, 20 bp, synthetic construct
  source 1..20: mol_type = other DNA
catgccacacagcaggtggt

SEQ ID NO: 254226 - DNA, 20 bp, synthetic construct
  source 1..20: mol_type = other DNA
gcatgccacacagcaggtgg

SEQ ID NO: 254227 - DNA, 20 bp, synthetic construct
  source 1..20: mol_type = other DNA
tgcatgccacacagcaggtg

SEQ ID NO: 254228 - DNA, 20 bp, synthetic construct
  source 1..20: mol_type = other DNA
gtgcatgccacacagcaggt

SEQ ID NO: 254229 - DNA, 20 bp, synthetic construct
  source 1..20: mol_type = other DNA
agtgcatgccacacagcagg

SEQ ID NO: 254230 - DNA, 20 bp, synthetic construct
  source 1..20: mol_type = other DNA
cagtgcatgccacacagcag

SEQ ID NO: 254231 - DNA, 20 bp, synthetic construct
  source 1..20: mol_type = other DNA
acagtgcatgccacacagca

SEQ ID NO: 254232 - DNA, 20 bp, synthetic construct
  source 1..20: mol_type = other DNA
cacagtgcatgccacacagc

SEQ ID NO: 254233 - DNA, 20 bp, synthetic construct
  source 1..20: mol_type = other DNA
ccacagtgcatgccacacag

SEQ ID NO: 254234 - DNA, 20 bp, synthetic construct
  source 1..20: mol_type = other DNA
accacagtgcatgccacaca

SEQ ID NO: 254235 - DNA, 20 bp, synthetic construct
  source 1..20: mol_type = other DNA
gaccacagtgcatgccacac

SEQ ID NO: 254236 - DNA, 20 bp, synthetic construct
  source 1..20: mol_type = other DNA
cgaccacagtgcatgccaca

SEQ ID NO: 254237 - DNA, 20 bp, synthetic construct
  source 1..20: mol_type = other DNA
tcgaccacagtgcatgccac

SEQ ID NO: 254238 - DNA, 20 bp, synthetic construct
  source 1..20: mol_type = other DNA
atcgaccacagtgcatgcca

SEQ ID NO: 254239 - DNA, 20 bp, synthetic construct
  source 1..20: mol_type = other DNA
catcgaccacagtgcatgcc

SEQ ID NO: 254240 - DNA, 20 bp, synthetic construct
  source 1..20: mol_type = other DNA
gcatcgaccacagtgcatgc

SEQ ID NO: 254241 - DNA, 20 bp, synthetic construct
  source 1..20: mol_type = other DNA
ggcatcgaccacagtgcatg

SEQ ID NO: 254242 - DNA, 20 bp, synthetic construct
  source 1..20: mol_type = other DNA
tggcatcgaccacagtgcat

SEQ ID NO: 254243 - DNA, 20 bp, synthetic construct
  source 1..20: mol_type = other DNA
ctggcatcgaccacagtgca

SEQ ID NO: 254244 - DNA, 20 bp, synthetic construct
  source 1..20: mol_type = other DNA
cctggcatcgaccacagtgc

SEQ ID NO: 254245 - DNA, 20 bp, synthetic construct
  source 1..20: mol_type = other DNA
tcctggcatcgaccacagtg

SEQ ID NO: 254246 - DNA, 20 bp, synthetic construct
  source 1..20: mol_type = other DNA
ttcctggcatcgaccacagt

SEQ ID NO: 254247 - DNA, 20 bp, synthetic construct
  source 1..20: mol_type = other DNA
gttcctggcatcgaccacag

SEQ ID NO: 254248 - DNA, 20 bp, synthetic construct
  source 1..20: mol_type = other DNA
tgttcctggcatcgaccaca

SEQ ID NO: 254249 - DNA, 20 bp, synthetic construct
  source 1..20: mol_type = other DNA
ctgttcctggcatcgaccac

SEQ ID NO: 254250 - DNA, 20 bp, synthetic construct
  source 1..20: mol_type = other DNA
cctgttcctggcatcgacca

SEQ ID NO: 254251 - DNA, 20 bp, synthetic construct
  source 1..20: mol_type = other DNA
tcctgttcctggcatcgacc

SEQ ID NO: 254252 - DNA, 20 bp, synthetic construct
  source 1..20: mol_type = other DNA
ttcctgttcctggcatcgac

SEQ ID NO: 254253 - DNA, 20 bp, synthetic construct
  source 1..20: mol_type = other DNA
attcctgttcctggcatcga

SEQ ID NO: 254254 - DNA, 20 bp, synthetic construct
  source 1..20: mol_type = other DNA
aattcctgttcctggcatcg

SEQ ID NO: 254255 - DNA, 20 bp, synthetic construct
  source 1..20: mol_type = other DNA
caattcctgttcctggcatc

SEQ ID NO: 254256 - DNA, 20 bp, synthetic construct
  source 1..20: mol_type = other DNA
ccaattcctgttcctggcat

SEQ ID NO: 254257 - DNA, 20 bp, synthetic construct
  source 1..20: mol_type = other DNA
tccaattcctgttcctggca

SEQ ID NO: 254258 - DNA, 20 bp, synthetic construct
  source 1..20: mol_type = other DNA
ctccaattcctgttcctggc

SEQ ID NO: 254259 - DNA, 20 bp, synthetic construct
  source 1..20: mol_type = other DNA
cctccaattcctgttcctgg

SEQ ID NO: 254260 - DNA, 20 bp, synthetic construct
  source 1..20: mol_type = other DNA
ccctccaattcctgttcctg

SEQ ID NO: 254261 - DNA, 20 bp, synthetic construct
  source 1..20: mol_type = other DNA
cccctccaattcctgttcct

SEQ ID NO: 254262 - DNA, 20 bp, synthetic construct
  source 1..20: mol_type = other DNA
gcccctccaattcctgttcc

SEQ ID NO: 254263 - DNA, 20 bp, synthetic construct
  source 1..20: mol_type = other DNA
ggcccctccaattcctgttc

SEQ ID NO: 254264 - DNA, 20 bp, synthetic construct
  source 1..20: mol_type = other DNA
gggcccctccaattcctgtt

SEQ ID NO: 254265 - DNA, 20 bp, synthetic construct
  source 1..20: mol_type = other DNA
tgggcccctccaattcctgt

SEQ ID NO: 254266 - DNA, 20 bp, synthetic construct
  source 1..20: mol_type = other DNA
atgggcccctccaattcctg

SEQ ID NO: 254267 - DNA, 20 bp, synthetic construct
  source 1..20: mol_type = other DNA
catgggcccctccaattcct

SEQ ID NO: 254268 - DNA, 20 bp, synthetic construct
  source 1..20: mol_type = other DNA
tcatgggcccctccaattcc

SEQ ID NO: 254269 - DNA, 20 bp, synthetic construct
  source 1..20: mol_type = other DNA
ctcatgggcccctccaattc

SEQ ID NO: 254270 - DNA, 20 bp, synthetic construct
  source 1..20: mol_type = other DNA
gctcatgggcccctccaatt

SEQ ID NO: 254271 - DNA, 20 bp, synthetic construct
  source 1..20: mol_type = other DNA
tgctcatgggcccctccaat

SEQ ID NO: 254272 - DNA, 20 bp, synthetic construct
  source 1..20: mol_type = other DNA
atgctcatgggcccctccaa

SEQ ID NO: 254273 - DNA, 20 bp, synthetic construct
  source 1..20: mol_type = other DNA
catgctcatgggcccctcca

SEQ ID NO: 254274 - DNA, 20 bp, synthetic construct
  source 1..20: mol_type = other DNA
ccatgctcatgggcccctcc

SEQ ID NO: 254275 - DNA, 20 bp, synthetic construct
  source 1..20: mol_type = other DNA
gccatgctcatgggcccctc

SEQ ID NO: 254276 - DNA, 20 bp, synthetic construct
  source 1..20: mol_type = other DNA
ggccatgctcatgggcccct

SEQ ID NO: 254277 - DNA, 20 bp, synthetic construct
  source 1..20: mol_type = other DNA
tggccatgctcatgggcccc

SEQ ID NO: 254278 - DNA, 20 bp, synthetic construct
  source 1..20: mol_type = other DNA
ctggccatgctcatgggccc

SEQ ID NO: 254279 - DNA, 20 bp, synthetic construct
  source 1..20: mol_type = other DNA
actggccatgctcatgggcc

SEQ ID NO: 254280 - DNA, 20 bp, synthetic construct
  source 1..20: mol_type = other DNA
tactggccatgctcatgggc

SEQ ID NO: 254281 - DNA, 20 bp, synthetic construct
  source 1..20: mol_type = other DNA
atactggccatgctcatggg

SEQ ID NO: 254282 - DNA, 20 bp, synthetic construct
  source 1..20: mol_type = other DNA
gatactggccatgctcatgg

SEQ ID NO: 254283 - DNA, 20 bp, synthetic construct
  source 1..20: mol_type = other DNA
tgatactggccatgctcatg

SEQ ID NO: 254284 - DNA, 20 bp, synthetic construct
  source 1..20: mol_type = other DNA
gtgatactggccatgctcat

SEQ ID NO: 254285 - DNA, 20 bp, synthetic construct
  source 1..20: mol_type = other DNA
tgtgatactggccatgctca

SEQ ID NO: 254286 - DNA, 20 bp, synthetic construct
  source 1..20: mol_type = other DNA
ctgtgatactggccatgctc

SEQ ID NO: 254287 - DNA, 20 bp, synthetic construct
  source 1..20: mol_type = other DNA
cctgtgatactggccatgct

SEQ ID NO: 254288 - DNA, 20 bp, synthetic construct
  source 1..20: mol_type = other DNA
gcctgtgatactggccatgc

SEQ ID NO: 254289 - DNA, 20 bp, synthetic construct
  source 1..20: mol_type = other DNA
agcctgtgatactggccatg

SEQ ID NO: 254290 - DNA, 20 bp, synthetic construct
  source 1..20: mol_type = other DNA
cagcctgtgatactggccat

SEQ ID NO: 254291 - DNA, 20 bp, synthetic construct
  source 1..20: mol_type = other DNA
ccagcctgtgatactggcca

SEQ ID NO: 254292 - DNA, 20 bp, synthetic construct
  source 1..20: mol_type = other DNA
tccagcctgtgatactggcc

SEQ ID NO: 254293 - DNA, 20 bp, synthetic construct
  source 1..20: mol_type = other DNA
ctccagcctgtgatactggc

SEQ ID NO: 254294 - DNA, 20 bp, synthetic construct
  source 1..20: mol_type = other DNA
cctccagcctgtgatactgg

SEQ ID NO: 254295 - DNA, 20 bp, synthetic construct
  source 1..20: mol_type = other DNA
acctccagcctgtgatactg

SEQ ID NO: 254296 - DNA, 20 bp, synthetic construct
  source 1..20: mol_type = other DNA
cacctccagcctgtgatact

SEQ ID NO: 254297 - DNA, 20 bp, synthetic construct
  source 1..20: mol_type = other DNA
gcacctccagcctgtgatac

SEQ ID NO: 254298 - DNA, 20 bp, synthetic construct
  source 1..20: mol_type = other DNA
agcacctccagcctgtgata

SEQ ID NO: 254299 - DNA, 20 bp, synthetic construct
  source 1..20: mol_type = other DNA
cagcacctccagcctgtgat

SEQ ID NO: 254300 - DNA, 20 bp, synthetic construct
  source 1..20: mol_type = other DNA
gcagcacctccagcctgtga

SEQ ID NO: 254301 - DNA, 20 bp, synthetic construct
  source 1..20: mol_type = other DNA
agcagcacctccagcctgtg

SEQ ID NO: 254302 - DNA, 20 bp, synthetic construct
  source 1..20: mol_type = other DNA
cagcagcacctccagcctgt

SEQ ID NO: 254303 - DNA, 20 bp, synthetic construct
  source 1..20: mol_type = other DNA
gcagcagcacctccagcctg

SEQ ID NO: 254304 - DNA, 20 bp, synthetic construct
  source 1..20: mol_type = other DNA
cgcagcagcacctccagcct

SEQ ID NO: 254305 - DNA, 20 bp, synthetic construct
  source 1..20: mol_type = other DNA
gcgcagcagcacctccagcc

SEQ ID NO: 254306 - DNA, 20 bp, synthetic construct
  source 1..20: mol_type = other DNA
agcgcagcagcacctccagc

SEQ ID NO: 254307 - DNA, 20 bp, synthetic construct
  source 1..20: mol_type = other DNA
gagcgcagcagcacctccag

SEQ ID NO: 254308 - DNA, 20 bp, synthetic construct
  source 1..20: mol_type = other DNA
agagcgcagcagcacctcca

SEQ ID NO: 254309 - DNA, 20 bp, synthetic construct
  source 1..20: mol_type = other DNA
cagagcgcagcagcacctcc

SEQ ID NO: 254310 - DNA, 20 bp, synthetic construct
  source 1..20: mol_type = other DNA
tcagagcgcagcagcacctc

SEQ ID NO: 254311 - DNA, 20 bp, synthetic construct
  source 1..20: mol_type = other DNA
gtcagagcgcagcagcacct

SEQ ID NO: 254312 - DNA, 20 bp, synthetic construct
  source 1..20: mol_type = other DNA
ggtcagagcgcagcagcacc

SEQ ID NO: 254313 - DNA, 20 bp, synthetic construct
  source 1..20: mol_type = other DNA
cggtcagagcgcagcagcac

SEQ ID NO: 254314 - DNA, 20 bp, synthetic construct
  source 1..20: mol_type = other DNA
ccggtcagagcgcagcagca

SEQ ID NO: 254315 - DNA, 20 bp, synthetic construct
  source 1..20: mol_type = other DNA
cccggtcagagcgcagcagc

SEQ ID NO: 254316 - DNA, 20 bp, synthetic construct
  source 1..20: mol_type = other DNA
gcccggtcagagcgcagcag

SEQ ID NO: 254317 - DNA, 20 bp, synthetic construct
  source 1..20: mol_type = other DNA
ggcccggtcagagcgcagca

SEQ ID NO: 254318 - DNA, 20 bp, synthetic construct
  source 1..20: mol_type = other DNA
aggcccggtcagagcgcagc

SEQ ID NO: 254319 - DNA, 20 bp, synthetic construct
  source 1..20: mol_type = other DNA
gaggcccggtcagagcgcag

SEQ ID NO: 254320 - DNA, 20 bp, synthetic construct
  source 1..20: mol_type = other DNA
agaggcccggtcagagcgca

SEQ ID NO: 254321 - DNA, 20 bp, synthetic construct
  source 1..20: mol_type = other DNA
aagaggcccggtcagagcgc

SEQ ID NO: 254322 - DNA, 20 bp, synthetic construct
  source 1..20: mol_type = other DNA
caagaggcccggtcagagcg

SEQ ID NO: 254323 - DNA, 20 bp, synthetic construct
  source 1..20: mol_type = other DNA
ccaagaggcccggtcagagc

SEQ ID NO: 254324 - DNA, 20 bp, synthetic construct
  source 1..20: mol_type = other DNA
cccaagaggcccggtcagag

SEQ ID NO: 254325 - DNA, 20 bp, synthetic construct
  source 1..20: mol_type = other DNA
ccccaagaggcccggtcaga

SEQ ID NO: 254326 - DNA, 20 bp, synthetic construct
  source 1..20: mol_type = other DNA
tccccaagaggcccggtcag

SEQ ID NO: 254327 - DNA, 20 bp, synthetic construct
  source 1..20: mol_type = other DNA
atccccaagaggcccggtca

SEQ ID NO: 254328 - DNA, 20 bp, synthetic construct
  source 1..20: mol_type = other DNA
catccccaagaggcccggtc

SEQ ID NO: 254329 - DNA, 20 bp, synthetic construct
  source 1..20: mol_type = other DNA
tcatccccaagaggcccggt

SEQ ID NO: 254330 - DNA, 20 bp, synthetic construct
  source 1..20: mol_type = other DNA
ctcatccccaagaggcccgg

SEQ ID NO: 254331 - DNA, 20 bp, synthetic construct
  source 1..20: mol_type = other DNA
gctcatccccaagaggcccg

SEQ ID NO: 254332 - DNA, 20 bp, synthetic construct
  source 1..20: mol_type = other DNA
ggctcatccccaagaggccc

SEQ ID NO: 254333 - DNA, 20 bp, synthetic construct
  source 1..20: mol_type = other DNA
gggctcatccccaagaggcc

SEQ ID NO: 254334 - DNA, 20 bp, synthetic construct
  source 1..20: mol_type = other DNA
tgggctcatccccaagaggc

SEQ ID NO: 254335 - DNA, 20 bp, synthetic construct
  source 1..20: mol_type = other DNA
atgggctcatccccaagagg

SEQ ID NO: 254336 - DNA, 20 bp, synthetic construct
  source 1..20: mol_type = other DNA
catgggctcatccccaagag

SEQ ID NO: 254337 - DNA, 20 bp, synthetic construct
  source 1..20: mol_type = other DNA
acatgggctcatccccaaga

SEQ ID NO: 254338 - DNA, 20 bp, synthetic construct
  source 1..20: mol_type = other DNA
gacatgggctcatccccaag

SEQ ID NO: 254339 - DNA, 20 bp, synthetic construct
  source 1..20: mol_type = other DNA
tgacatgggctcatccccaa

SEQ ID NO: 254340 - DNA, 20 bp, synthetic construct
  source 1..20: mol_type = other DNA
ttgacatgggctcatcccca

SEQ ID NO: 254341 - DNA, 20 bp, synthetic construct
  source 1..20: mol_type = other DNA
gttgacatgggctcatcccc

SEQ ID NO: 254342 - DNA, 20 bp, synthetic construct
  source 1..20: mol_type = other DNA
ggttgacatgggctcatccc

SEQ ID NO: 254343 - DNA, 20 bp, synthetic construct
  source 1..20: mol_type = other DNA
tggttgacatgggctcatcc

SEQ ID NO: 254344 - DNA, 20 bp, synthetic construct
  source 1..20: mol_type = other DNA
gtggttgacatgggctcatc

SEQ ID NO: 254345 - DNA, 20 bp, synthetic construct
  source 1..20: mol_type = other DNA
ggtggttgacatgggctcat

SEQ ID NO: 254346 - DNA, 20 bp, synthetic construct
  source 1..20: mol_type = other DNA
aggtggttgacatgggctca

SEQ ID NO: 254347 - DNA, 20 bp, synthetic construct
  source 1..20: mol_type = other DNA
aaggtggttgacatgggctc

SEQ ID NO: 254348 - DNA, 20 bp, synthetic construct
  source 1..20: mol_type = other DNA
caaggtggttgacatgggct

SEQ ID NO: 254349 - DNA, 20 bp, synthetic construct
  source 1..20: mol_type = other DNA
gcaaggtggttgacatgggc

SEQ ID NO: 254350 - DNA, 20 bp, synthetic construct
  source 1..20: mol_type = other DNA
ggcaaggtggttgacatggg

SEQ ID NO: 254351 - DNA, 20 bp, synthetic construct
  source 1..20: mol_type = other DNA
aggcaaggtggttgacatgg

SEQ ID NO: 254352 - DNA, 20 bp, synthetic construct
  source 1..20: mol_type = other DNA
gaggcaaggtggttgacatg

SEQ ID NO: 254353 - DNA, 20 bp, synthetic construct
  source 1..20: mol_type = other DNA
ggaggcaaggtggttgacat

SEQ ID NO: 254354 - DNA, 20 bp, synthetic construct
  source 1..20: mol_type = other DNA
cggaggcaaggtggttgaca

SEQ ID NO: 254355 - DNA, 20 bp, synthetic construct
  source 1..20: mol_type = other DNA
tcggaggcaaggtggttgac

SEQ ID NO: 254356 - DNA, 20 bp, synthetic construct
  source 1..20: mol_type = other DNA
atcggaggcaaggtggttga

SEQ ID NO: 254357 - DNA, 20 bp, synthetic construct
  source 1..20: mol_type = other DNA
catcggaggcaaggtggttg

SEQ ID NO: 254358 - DNA, 20 bp, synthetic construct
  source 1..20: mol_type = other DNA
ccatcggaggcaaggtggtt

SEQ ID NO: 254359 - DNA, 20 bp, synthetic construct
  source 1..20: mol_type = other DNA
cccatcggaggcaaggtggt

SEQ ID NO: 254360 - DNA, 20 bp, synthetic construct
  source 1..20: mol_type = other DNA
ccccatcggaggcaaggtgg

SEQ ID NO: 254361 - DNA, 20 bp, synthetic construct
  source 1..20: mol_type = other DNA
accccatcggaggcaaggtg

SEQ ID NO: 254362 - DNA, 20 bp, synthetic construct
  source 1..20: mol_type = other DNA
gaccccatcggaggcaaggt

SEQ ID NO: 254363 - DNA, 20 bp, synthetic construct
  source 1..20: mol_type = other DNA
cgaccccatcggaggcaagg

SEQ ID NO: 254364 - DNA, 20 bp, synthetic construct
  source 1..20: mol_type = other DNA
ccgaccccatcggaggcaag

SEQ ID NO: 254365 - DNA, 20 bp, synthetic construct
  source 1..20: mol_type = other DNA
cccgaccccatcggaggcaa

SEQ ID NO: 254366 - DNA, 20 bp, synthetic construct
  source 1..20: mol_type = other DNA
gcccgaccccatcggaggca

SEQ ID NO: 254367 - DNA, 20 bp, synthetic construct
  source 1..20: mol_type = other DNA
ggcccgaccccatcggaggc

SEQ ID NO: 254368 - DNA, 20 bp, synthetic construct
  source 1..20: mol_type = other DNA
gggcccgaccccatcggagg

SEQ ID NO: 254369 - DNA, 20 bp, synthetic construct
  source 1..20: mol_type = other DNA
tgggcccgaccccatcggag

SEQ ID NO: 254370 - DNA, 20 bp, synthetic construct
  source 1..20: mol_type = other DNA
gtgggcccgaccccatcgga

SEQ ID NO: 254371 - DNA, 20 bp, synthetic construct
  source 1..20: mol_type = other DNA
tgtgggcccgaccccatcgg

SEQ ID NO: 254372 - DNA, 20 bp, synthetic construct
  source 1..20: mol_type = other DNA
ctgtgggcccgaccccatcg

SEQ ID NO: 254373 - DNA, 20 bp, synthetic construct
  source 1..20: mol_type = other DNA
cctgtgggcccgaccccatc

SEQ ID NO: 254374 - DNA, 20 bp, synthetic construct
  source 1..20: mol_type = other DNA
acctgtgggcccgaccccat

SEQ ID NO: 254375 - DNA, 20 bp, synthetic construct
  source 1..20: mol_type = other DNA
aacctgtgggcccgacccca

SEQ ID NO: 254376 - DNA, 20 bp, synthetic construct
  source 1..20: mol_type = other DNA
taacctgtgggcccgacccc

SEQ ID NO: 254377 - DNA, 20 bp, synthetic construct
  source 1..20: mol_type = other DNA
gtaacctgtgggcccgaccc

SEQ ID NO: 254378 - DNA, 20 bp, synthetic construct
  source 1..20: mol_type = other DNA
ggtaacctgtgggcccgacc

SEQ ID NO: 254379 - DNA, 20 bp, synthetic construct
  source 1..20: mol_type = other DNA
aggtaacctgtgggcccgac

SEQ ID NO: 254380 - DNA, 20 bp, synthetic construct
  source 1..20: mol_type = other DNA
aaggtaacctgtgggcccga

SEQ ID NO: 254381 - DNA, 20 bp, synthetic construct
  source 1..20: mol_type = other DNA
aaaggtaacctgtgggcccg

SEQ ID NO: 254382 - DNA, 20 bp, synthetic construct
  source 1..20: mol_type = other DNA
caaaggtaacctgtgggccc

SEQ ID NO: 254383 - DNA, 20 bp, synthetic construct
  source 1..20: mol_type = other DNA
acaaaggtaacctgtgggcc

SEQ ID NO: 254384 - DNA, 20 bp, synthetic construct
  source 1..20: mol_type = other DNA
cacaaaggtaacctgtgggc

SEQ ID NO: 254385 - DNA, 20 bp, synthetic construct
  source 1..20: mol_type = other DNA
acacaaaggtaacctgtggg

SEQ ID NO: 254386 - DNA, 20 bp, synthetic construct
  source 1..20: mol_type = other DNA
cacacaaaggtaacctgtgg

SEQ ID NO: 254387 - DNA, 20 bp, synthetic construct
  source 1..20: mol_type = other DNA
acacacaaaggtaacctgtg

SEQ ID NO: 254388 - DNA, 20 bp, synthetic construct
  source 1..20: mol_type = other DNA
gacacacaaaggtaacctgt

SEQ ID NO: 254389 - DNA, 20 bp, synthetic construct
  source 1..20: mol_type = other DNA
ggacacacaaaggtaacctg

SEQ ID NO: 254390 - DNA, 20 bp, synthetic construct
  source 1..20: mol_type = other DNA
tggacacacaaaggtaacct

SEQ ID NO: 254391 - DNA, 20 bp, synthetic construct
  source 1..20: mol_type = other DNA
atggacacacaaaggtaacc

SEQ ID NO: 254392 - DNA, 20 bp, synthetic construct
  source 1..20: mol_type = other DNA
catggacacacaaaggtaac

SEQ ID NO: 254393 - DNA, 20 bp, synthetic construct
  source 1..20: mol_type = other DNA
tcatggacacacaaaggtaa

SEQ ID NO: 254394 - DNA, 20 bp, synthetic construct
  source 1..20: mol_type = other DNA
gtcatggacacacaaaggta

SEQ ID NO: 254395 - DNA, 20 bp, synthetic construct
  source 1..20: mol_type = other DNA
ggtcatggacacacaaaggt

SEQ ID NO: 254396 - DNA, 20 bp, synthetic construct
  source 1..20: mol_type = other DNA
tggtcatggacacacaaagg

SEQ ID NO: 254397 - DNA, 20 bp, synthetic construct
  source 1..20: mol_type = other DNA
gtggtcatggacacacaaag

SEQ ID NO: 254398 - DNA, 20 bp, synthetic construct
  source 1..20: mol_type = other DNA
tgtggtcatggacacacaaa

SEQ ID NO: 254399 - DNA, 20 bp, synthetic construct
  source 1..20: mol_type = other DNA
gtgtggtcatggacacacaa

SEQ ID NO: 254400 - DNA, 20 bp, synthetic construct
  source 1..20: mol_type = other DNA
ggtgtggtcatggacacaca

SEQ ID NO: 254401 - DNA, 20 bp, synthetic construct
  source 1..20: mol_type = other DNA
aggtgtggtcatggacacac

SEQ ID NO: 254402 - DNA, 20 bp, synthetic construct
  source 1..20: mol_type = other DNA
aaggtgtggtcatggacaca

SEQ ID NO: 254403 - DNA, 20 bp, synthetic construct
  source 1..20: mol_type = other DNA
gaaggtgtggtcatggacac

SEQ ID NO: 254404 - DNA, 20 bp, synthetic construct
  source 1..20: mol_type = other DNA
ggaaggtgtggtcatggaca

SEQ ID NO: 254405 - DNA, 20 bp, synthetic construct
  source 1..20: mol_type = other DNA
aggaaggtgtggtcatggac

SEQ ID NO: 254406 - DNA, 20 bp, synthetic construct
  source 1..20: mol_type = other DNA
gaggaaggtgtggtcatgga

SEQ ID NO: 254407 - DNA, 20 bp, synthetic construct
  source 1..20: mol_type = other DNA
ggaggaaggtgtggtcatgg

SEQ ID NO: 254408 - DNA, 20 bp, synthetic construct
  source 1..20: mol_type = other DNA
gggaggaaggtgtggtcatg

SEQ ID NO: 254409 - DNA, 20 bp, synthetic construct
  source 1..20: mol_type = other DNA
ggggaggaaggtgtggtcat

SEQ ID NO: 254410 - DNA, 20 bp, synthetic construct
  source 1..20: mol_type = other DNA
cggggaggaaggtgtggtca

SEQ ID NO: 254411 - DNA, 20 bp, synthetic construct
  source 1..20: mol_type = other DNA
tcggggaggaaggtgtggtc

SEQ ID NO: 254412 - DNA, 20 bp, synthetic construct
  source 1..20: mol_type = other DNA
gtcggggaggaaggtgtggt

SEQ ID NO: 254413 - DNA, 20 bp, synthetic construct
  source 1..20: mol_type = other DNA
ggtcggggaggaaggtgtgg

SEQ ID NO: 254414 - DNA, 20 bp, synthetic construct
  source 1..20: mol_type = other DNA
aggtcggggaggaaggtgtg

SEQ ID NO: 254415 - DNA, 20 bp, synthetic construct
  source 1..20: mol_type = other DNA
gaggtcggggaggaaggtgt

SEQ ID NO: 254416 - DNA, 20 bp, synthetic construct
  source 1..20: mol_type = other DNA
tgaggtcggggaggaaggtg

SEQ ID NO: 254417 - DNA, 20 bp, synthetic construct
  source 1..20: mol_type = other DNA
atgaggtcggggaggaaggt

SEQ ID NO: 254418 - DNA, 20 bp, synthetic construct
  source 1..20: mol_type = other DNA
gatgaggtcggggaggaagg

SEQ ID NO: 254419 - DNA, 20 bp, synthetic construct
  source 1..20: mol_type = other DNA
ggatgaggtcggggaggaag

SEQ ID NO: 254420 - DNA, 20 bp, synthetic construct
  source 1..20: mol_type = other DNA
tggatgaggtcggggaggaa

SEQ ID NO: 254421 - DNA, 20 bp, synthetic construct
  source 1..20: mol_type = other DNA
ttggatgaggtcggggagga

SEQ ID NO: 254422 - DNA, 20 bp, synthetic construct
  source 1..20: mol_type = other DNA
tttggatgaggtcggggagg

SEQ ID NO: 254423 - DNA, 20 bp, synthetic construct
  source 1..20: mol_type = other DNA
atttggatgaggtcggggag

SEQ ID NO: 254424 - DNA, 20 bp, synthetic construct
  source 1..20: mol_type = other DNA
gatttggatgaggtcgggga

SEQ ID NO: 254425 - DNA, 20 bp, synthetic construct
  source 1..20: mol_type = other DNA
agatttggatgaggtcgggg

SEQ ID NO: 254426 - DNA, 20 bp, synthetic construct
  source 1..20: mol_type = other DNA
gagatttggatgaggtcggg

SEQ ID NO: 254427 - DNA, 20 bp, synthetic construct
  source 1..20: mol_type = other DNA
agagatttggatgaggtcgg

SEQ ID NO: 254428 - DNA, 20 bp, synthetic construct
  source 1..20: mol_type = other DNA
aagagatttggatgaggtcg

SEQ ID NO: 254429 - DNA, 20 bp, synthetic construct
  source 1..20: mol_type = other DNA
aaagagatttggatgaggtc

SEQ ID NO: 254430 - DNA, 20 bp, synthetic construct
  source 1..20: mol_type = other DNA
gaaagagatttggatgaggt

SEQ ID NO: 254431 - DNA, 20 bp, synthetic construct
  source 1..20: mol_type = other DNA
agaaagagatttggatgagg

SEQ ID NO: 254432 - DNA, 20 bp, synthetic construct
  source 1..20: mol_type = other DNA
aagaaagagatttggatgag

SEQ ID NO: 254433 - DNA, 20 bp, synthetic construct
  source 1..20: mol_type = other DNA
aaagaaagagatttggatga

SEQ ID NO: 254434 - DNA, 20 bp, synthetic construct
  source 1..20: mol_type = other DNA
aaaagaaagagatttggatg

SEQ ID NO: 254435 - DNA, 20 bp, synthetic construct
  source 1..20: mol_type = other DNA
gaaaagaaagagatttggat

SEQ ID NO: 254436 - DNA, 20 bp, synthetic construct
  source 1..20: mol_type = other DNA
ggaaaagaaagagatttgga

SEQ ID NO: 254437 - DNA, 20 bp, synthetic construct
  source 1..20: mol_type = other DNA
tggaaaagaaagagatttgg

SEQ ID NO: 254438 - DNA, 20 bp, synthetic construct
  source 1..20: mol_type = other DNA
ttggaaaagaaagagatttg

SEQ ID NO: 254439 - DNA, 20 bp, synthetic construct
  source 1..20: mol_type = other DNA
cttggaaaagaaagagattt

SEQ ID NO: 254440 - DNA, 20 bp, synthetic construct
  source 1..20: mol_type = other DNA
gcttggaaaagaaagagatt

SEQ ID NO: 254441 - DNA, 20 bp, synthetic construct
  source 1..20: mol_type = other DNA
ggcttggaaaagaaagagat

SEQ ID NO: 254442 - DNA, 20 bp, synthetic construct
  source 1..20: mol_type = other DNA
gggcttggaaaagaaagaga

SEQ ID NO: 254443 - DNA, 20 bp, synthetic construct
  source 1..20: mol_type = other DNA
ggggcttggaaaagaaagag

SEQ ID NO: 254444 - DNA, 20 bp, synthetic construct
  source 1..20: mol_type = other DNA
aggggcttggaaaagaaaga

SEQ ID NO: 254445 - DNA, 20 bp, synthetic construct
  source 1..20: mol_type = other DNA
caggggcttggaaaagaaag

SEQ ID NO: 254446 - DNA, 20 bp, synthetic construct
  source 1..20: mol_type = other DNA
tcaggggcttggaaaagaaa

SEQ ID NO: 254447 - DNA, 20 bp, synthetic construct
  source 1..20: mol_type = other DNA
ttcaggggcttggaaaagaa

SEQ ID NO: 254448 - DNA, 20 bp, synthetic construct
  source 1..20: mol_type = other DNA
attcaggggcttggaaaaga

SEQ ID NO: 254449 - DNA, 20 bp, synthetic construct
  source 1..20: mol_type = other DNA
gattcaggggcttggaaaag

SEQ ID NO: 254450 - DNA, 20 bp, synthetic construct
  source 1..20: mol_type = other DNA
ggattcaggggcttggaaaa

SEQ ID NO: 254451 - DNA, 20 bp, synthetic construct
  source 1..20: mol_type = other DNA
aggattcaggggcttggaaa

SEQ ID NO: 254452 - DNA, 20 bp, synthetic construct
  source 1..20: mol_type = other DNA
aaggattcaggggcttggaa

SEQ ID NO: 254453 - DNA, 20 bp, synthetic construct
  source 1..20: mol_type = other DNA
gaaggattcaggggcttgga

SEQ ID NO: 254454 - DNA, 20 bp, synthetic construct
  source 1..20: mol_type = other DNA
tgaaggattcaggggcttgg

SEQ ID NO: 254455 - DNA, 20 bp, synthetic construct
  source 1..20: mol_type = other DNA
ctgaaggattcaggggcttg

SEQ ID NO: 254456 - DNA, 20 bp, synthetic construct
  source 1..20: mol_type = other DNA
cctgaaggattcaggggctt

SEQ ID NO: 254457 - DNA, 20 bp, synthetic construct
  source 1..20: mol_type = other DNA
ccctgaaggattcaggggct

SEQ ID NO: 254458 - DNA, 20 bp, synthetic construct
  source 1..20: mol_type = other DNA
gccctgaaggattcaggggc

SEQ ID NO: 254459 - DNA, 20 bp, synthetic construct
  source 1..20: mol_type = other DNA
agccctgaaggattcagggg

SEQ ID NO: 254460 - DNA, 20 bp, synthetic construct
  source 1..20: mol_type = other DNA
cagccctgaaggattcaggg

SEQ ID NO: 254461 - DNA, 20 bp, synthetic construct
  source 1..20: mol_type = other DNA
gcagccctgaaggattcagg

SEQ ID NO: 254462 - DNA, 20 bp, synthetic construct
  source 1..20: mol_type = other DNA
tgcagccctgaaggattcag

SEQ ID NO: 254463 - DNA, 20 bp, synthetic construct
  source 1..20: mol_type = other DNA
ctgcagccctgaaggattca

SEQ ID NO: 254464 - DNA, 20 bp, synthetic construct
  source 1..20: mol_type = other DNA
cctgcagccctgaaggattc

SEQ ID NO: 254465 - DNA, 20 bp, synthetic construct
  source 1..20: mol_type = other DNA
acctgcagccctgaaggatt

SEQ ID NO: 254466 - DNA, 20 bp, synthetic construct
  source 1..20: mol_type = other DNA
aacctgcagccctgaaggat

SEQ ID NO: 254467 - DNA, 20 bp, synthetic construct
  source 1..20: mol_type = other DNA
aaacctgcagccctgaagga

SEQ ID NO: 254468 - DNA, 20 bp, synthetic construct
  source 1..20: mol_type = other DNA
aaaacctgcagccctgaagg

SEQ ID NO: 254469 - DNA, 20 bp, synthetic construct
  source 1..20: mol_type = other DNA
caaaacctgcagccctgaag

SEQ ID NO: 254470 - DNA, 20 bp, synthetic construct
  source 1..20: mol_type = other DNA
acaaaacctgcagccctgaa

SEQ ID NO: 254471 - DNA, 20 bp, synthetic construct
  source 1..20: mol_type = other DNA
aacaaaacctgcagccctga

SEQ ID NO: 254472 - DNA, 20 bp, synthetic construct
  source 1..20: mol_type = other DNA
aaacaaaacctgcagccctg

SEQ ID NO: 254473 - DNA, 20 bp, synthetic construct
  source 1..20: mol_type = other DNA
taaacaaaacctgcagccct

SEQ ID NO: 254474 - DNA, 20 bp, synthetic construct
  source 1..20: mol_type = other DNA
ttaaacaaaacctgcagccc

SEQ ID NO: 254475 - DNA, 20 bp, synthetic construct
  source 1..20: mol_type = other DNA
tttaaacaaaacctgcagcc

SEQ ID NO: 254476 - DNA, 20 bp, synthetic construct
  source 1..20: mol_type = other DNA
ctttaaacaaaacctgcagc

SEQ ID NO: 254477 - DNA, 20 bp, synthetic construct
  source 1..20: mol_type = other DNA
gctttaaacaaaacctgcag

SEQ ID NO: 254478 - DNA, 20 bp, synthetic construct
  source 1..20: mol_type = other DNA
tgctttaaacaaaacctgca

SEQ ID NO: 254479 - DNA, 20 bp, synthetic construct
  source 1..20: mol_type = other DNA
ctgctttaaacaaaacctgc

SEQ ID NO: 254480 - DNA, 20 bp, synthetic construct
  source 1..20: mol_type = other DNA
tctgctttaaacaaaacctg

SEQ ID NO: 254481 - DNA, 20 bp, synthetic construct
  source 1..20: mol_type = other DNA
ctctgctttaaacaaaacct

SEQ ID NO: 254482 - DNA, 20 bp, synthetic construct
  source 1..20: mol_type = other DNA
gctctgctttaaacaaaacc

SEQ ID NO: 254483 - DNA, 20 bp, synthetic construct
  source 1..20: mol_type = other DNA
agctctgctttaaacaaaac

SEQ ID NO: 254484 - DNA, 20 bp, synthetic construct
  source 1..20: mol_type = other DNA
cagctctgctttaaacaaaa

SEQ ID NO: 254485 - DNA, 20 bp, synthetic construct
  source 1..20: mol_type = other DNA
ccagctctgctttaaacaaa

SEQ ID NO: 254486 - DNA, 20 bp, synthetic construct
  source 1..20: mol_type = other DNA
accagctctgctttaaacaa

SEQ ID NO: 254487 - DNA, 20 bp, synthetic construct
  source 1..20: mol_type = other DNA
caccagctctgctttaaaca

SEQ ID NO: 254488 - DNA, 20 bp, synthetic construct
  source 1..20: mol_type = other DNA
tcaccagctctgctttaaac

SEQ ID NO: 254489 - DNA, 20 bp, synthetic construct
  source 1..20: mol_type = other DNA
ctcaccagctctgctttaaa

SEQ ID NO: 254490 - DNA, 20 bp, synthetic construct
  source 1..20: mol_type = other DNA
actcaccagctctgctttaa

SEQ ID NO: 254491 - DNA, 20 bp, synthetic construct
  source 1..20: mol_type = other DNA
aactcaccagctctgcttta

SEQ ID NO: 254492 - DNA, 20 bp, synthetic construct
  source 1..20: mol_type = other DNA
caactcaccagctctgcttt

SEQ ID NO: 254493 - DNA, 20 bp, synthetic construct
  source 1..20: mol_type = other DNA
gcaactcaccagctctgctt

SEQ ID NO: 254494 - DNA, 20 bp, synthetic construct
  source 1..20: mol_type = other DNA
tgcaactcaccagctctgct

SEQ ID NO: 254495 - DNA, 20 bp, synthetic construct
  source 1..20: mol_type = other DNA
atgcaactcaccagctctgc

SEQ ID NO: 254496 - DNA, 20 bp, synthetic construct
  source 1..20: mol_type = other DNA
tatgcaactcaccagctctg

SEQ ID NO: 254497 - DNA, 20 bp, synthetic construct
  source 1..20: mol_type = other DNA
ctatgcaactcaccagctct

SEQ ID NO: 254498 - DNA, 20 bp, synthetic construct
  source 1..20: mol_type = other DNA
cctatgcaactcaccagctc

SEQ ID NO: 254499 - DNA, 20 bp, synthetic construct
  source 1..20: mol_type = other DNA
acctatgcaactcaccagct

SEQ ID NO: 254500 - DNA, 20 bp, synthetic construct
  source 1..20: mol_type = other DNA
aacctatgcaactcaccagc

SEQ ID NO: 254501 - DNA, 20 bp, synthetic construct
  source 1..20: mol_type = other DNA
caacctatgcaactcaccag

SEQ ID NO: 254502 - DNA, 20 bp, synthetic construct
  source 1..20: mol_type = other DNA
acaacctatgcaactcacca

SEQ ID NO: 254503 - DNA, 20 bp, synthetic construct
  source 1..20: mol_type = other DNA
aacaacctatgcaactcacc

SEQ ID NO: 254504 - DNA, 20 bp, synthetic construct
  source 1..20: mol_type = other DNA
caacaacctatgcaactcac

SEQ ID NO: 254505 - DNA, 20 bp, synthetic construct
  source 1..20: mol_type = other DNA
gcaacaacctatgcaactca

SEQ ID NO: 254506 - DNA, 20 bp, synthetic construct
  source 1..20: mol_type = other DNA
tgcaacaacctatgcaactc

SEQ ID NO: 254507 - DNA, 20 bp, synthetic construct
  source 1..20: mol_type = other DNA
atgcaacaacctatgcaact

SEQ ID NO: 254508 - DNA, 20 bp, synthetic construct
  source 1..20: mol_type = other DNA
aatgcaacaacctatgcaac

SEQ ID NO: 254509 - DNA, 20 bp, synthetic construct
  source 1..20: mol_type = other DNA
caatgcaacaacctatgcaa

SEQ ID NO: 254510 - DNA, 20 bp, synthetic construct
  source 1..20: mol_type = other DNA
ccaatgcaacaacctatgca

SEQ ID NO: 254511 - DNA, 20 bp, synthetic construct
  source 1..20: mol_type = other DNA
cccaatgcaacaacctatgc

SEQ ID NO: 254512 - DNA, 20 bp, synthetic construct
  source 1..20: mol_type = other DNA
tcccaatgcaacaacctatg

SEQ ID NO: 254513 - DNA, 20 bp, synthetic construct
  source 1..20: mol_type = other DNA
gtcccaatgcaacaacctat

SEQ ID NO: 254514 - DNA, 20 bp, synthetic construct
  source 1..20: mol_type = other DNA
agtcccaatgcaacaaccta

SEQ ID NO: 254515 - DNA, 20 bp, synthetic construct
  source 1..20: mol_type = other DNA
tagtcccaatgcaacaacct

SEQ ID NO: 254516 - DNA, 20 bp, synthetic construct
  source 1..20: mol_type = other DNA
ctagtcccaatgcaacaacc

SEQ ID NO: 254517 - DNA, 20 bp, synthetic construct
  source 1..20: mol_type = other DNA
tctagtcccaatgcaacaac

SEQ ID NO: 254518 - DNA, 20 bp, synthetic construct
  source 1..20: mol_type = other DNA
atctagtcccaatgcaacaa

SEQ ID NO: 254519 - DNA, 20 bp, synthetic construct
  source 1..20: mol_type = other DNA
catctagtcccaatgcaaca

SEQ ID NO: 254520 - DNA, 20 bp, synthetic construct
  source 1..20: mol_type = other DNA
ccatctagtcccaatgcaac

SEQ ID NO: 254521 - DNA, 20 bp, synthetic construct
  source 1..20: mol_type = other DNA
cccatctagtcccaatgcaa

SEQ ID NO: 254522 - DNA, 20 bp, synthetic construct
  source 1..20: mol_type = other DNA
ccccatctagtcccaatgca

SEQ ID NO: 254523 - DNA, 20 bp, synthetic construct
  source 1..20: mol_type = other DNA
accccatctagtcccaatgc

SEQ ID NO: 254524 - DNA, 20 bp, synthetic construct
  source 1..20: mol_type = other DNA
caccccatctagtcccaatg

SEQ ID NO: 254525 - DNA, 20 bp, synthetic construct
  source 1..20: mol_type = other DNA
acaccccatctagtcccaat

SEQ ID NO: 254526 - DNA, 20 bp, synthetic construct
  source 1..20: mol_type = other DNA
aacaccccatctagtcccaa

SEQ ID NO: 254527 - DNA, 20 bp, synthetic construct
  source 1..20: mol_type = other DNA
gaacaccccatctagtccca

SEQ ID NO: 254528 - DNA, 20 bp, synthetic construct
  source 1..20: mol_type = other DNA
tgaacaccccatctagtccc

SEQ ID NO: 254529 - DNA, 20 bp, synthetic construct
  source 1..20: mol_type = other DNA
ttgaacaccccatctagtcc

SEQ ID NO: 254530 - DNA, 20 bp, synthetic construct
  source 1..20: mol_type = other DNA
tttgaacaccccatctagtc

SEQ ID NO: 254531 - DNA, 20 bp, synthetic construct
  source 1..20: mol_type = other DNA
ctttgaacaccccatctagt

SEQ ID NO: 254532 - DNA, 20 bp, synthetic construct
  source 1..20: mol_type = other DNA
tctttgaacaccccatctag

SEQ ID NO: 254533 - DNA, 20 bp, synthetic construct
  source 1..20: mol_type = other DNA
ctctttgaacaccccatcta

SEQ ID NO: 254534 - DNA, 20 bp, synthetic construct
  source 1..20: mol_type = other DNA
actctttgaacaccccatct

SEQ ID NO: 254535 - DNA, 20 bp, synthetic construct
  source 1..20: mol_type = other DNA
aactctttgaacaccccatc

SEQ ID NO: 254536 - DNA, 20 bp, synthetic construct
  source 1..20: mol_type = other DNA
caactctttgaacaccccat

SEQ ID NO: 254537 - DNA, 20 bp, synthetic construct
  source 1..20: mol_type = other DNA
ccaactctttgaacacccca

SEQ ID NO: 254538 - DNA, 20 bp, synthetic construct
  source 1..20: mol_type = other DNA
cccaactctttgaacacccc

SEQ ID NO: 254539 - DNA, 20 bp, synthetic construct
  source 1..20: mol_type = other DNA
tcccaactctttgaacaccc

SEQ ID NO: 254540 - DNA, 20 bp, synthetic construct
  source 1..20: mol_type = other DNA
ctcccaactctttgaacacc

SEQ ID NO: 254541 - DNA, 20 bp, synthetic construct
  source 1..20: mol_type = other DNA
actcccaactctttgaacac

SEQ ID NO: 254542 - DNA, 20 bp, synthetic construct
  source 1..20: mol_type = other DNA
aactcccaactctttgaaca

SEQ ID NO: 254543 - DNA, 20 bp, synthetic construct
  source 1..20: mol_type = other DNA
taactcccaactctttgaac

SEQ ID NO: 254544 - DNA, 20 bp, synthetic construct
  source 1..20: mol_type = other DNA
ttaactcccaactctttgaa

SEQ ID NO: 254545 - DNA, 20 bp, synthetic construct
  source 1..20: mol_type = other DNA
tttaactcccaactctttga

SEQ ID NO: 254546 - DNA, 20 bp, synthetic construct
  source 1..20: mol_type = other DNA
ttttaactcccaactctttg

SEQ ID NO: 254547 - DNA, 20 bp, synthetic construct
  source 1..20: mol_type = other DNA
tttttaactcccaactcttt

SEQ ID NO: 254548 - DNA, 20 bp, synthetic construct
  source 1..20: mol_type = other DNA
ttttttaactcccaactctt

SEQ ID NO: 254549 - DNA, 20 bp, synthetic construct
  source 1..20: mol_type = other DNA
gttttttaactcccaactct

SEQ ID NO: 254550 - DNA, 20 bp, synthetic construct
  source 1..20: mol_type = other DNA
tgttttttaactcccaactc

SEQ ID NO: 254551 - DNA, 20 bp, synthetic construct
  source 1..20: mol_type = other DNA
atgttttttaactcccaact

SEQ ID NO: 254552 - DNA, 20 bp, synthetic construct
  source 1..20: mol_type = other DNA
tatgttttttaactcccaac

SEQ ID NO: 254553 - DNA, 20 bp, synthetic construct
  source 1..20: mol_type = other DNA
ttatgttttttaactcccaa

SEQ ID NO: 254554 - DNA, 20 bp, synthetic construct
  source 1..20: mol_type = other DNA
tttatgttttttaactccca

SEQ ID NO: 254555 - DNA, 20 bp, synthetic construct
  source 1..20: mol_type = other DNA
ctttatgttttttaactccc

SEQ ID NO: 254556 - DNA, 20 bp, synthetic construct
  source 1..20: mol_type = other DNA
cctttatgttttttaactcc

SEQ ID NO: 254557 - DNA, 20 bp, synthetic construct
  source 1..20: mol_type = other DNA
ccctttatgttttttaactc

SEQ ID NO: 254558 - DNA, 20 bp, synthetic construct
  source 1..20: mol_type = other DNA
accctttatgttttttaact

SEQ ID NO: 254559 - DNA, 20 bp, synthetic construct
  source 1..20: mol_type = other DNA
taccctttatgttttttaac

SEQ ID NO: 254560 - DNA, 20 bp, synthetic construct
  source 1..20: mol_type = other DNA
ataccctttatgttttttaa

SEQ ID NO: 254561 - DNA, 20 bp, synthetic construct
  source 1..20: mol_type = other DNA
aataccctttatgtttttta

SEQ ID NO: 254562 - DNA, 20 bp, synthetic construct
  source 1..20: mol_type = other DNA
aaataccctttatgtttttt

SEQ ID NO: 254563 - DNA, 20 bp, synthetic construct
  source 1..20: mol_type = other DNA
taaataccctttatgttttt

SEQ ID NO: 254564 - DNA, 20 bp, synthetic construct
  source 1..20: mol_type = other DNA
ataaataccctttatgtttt

SEQ ID NO: 254565 - DNA, 20 bp, synthetic construct
  source 1..20: mol_type = other DNA
aataaataccctttatgttt

SEQ ID NO: 254566 - DNA, 20 bp, synthetic construct
  source 1..20: mol_type = other DNA
taataaataccctttatgtt

SEQ ID NO: 254567 - DNA, 20 bp, synthetic construct
  source 1..20: mol_type = other DNA
ctaataaataccctttatgt

SEQ ID NO: 254568 - DNA, 20 bp, synthetic construct
  source 1..20: mol_type = other DNA
cctaataaataccctttatg

SEQ ID NO: 254569 - DNA, 20 bp, synthetic construct
  source 1..20: mol_type = other DNA
tcctaataaataccctttat

SEQ ID NO: 254570 - DNA, 20 bp, synthetic construct
  source 1..20: mol_type = other DNA
ctcctaataaatacccttta

SEQ ID NO: 254571 - DNA, 20 bp, synthetic construct
  source 1..20: mol_type = other DNA
tctcctaataaatacccttt

SEQ ID NO: 254572 - DNA, 20 bp, synthetic construct
  source 1..20: mol_type = other DNA
ttctcctaataaataccctt

SEQ ID NO: 254573 - DNA, 20 bp, synthetic construct
  source 1..20: mol_type = other DNA
gttctcctaataaataccct

SEQ ID NO: 254574 - DNA, 20 bp, synthetic construct
  source 1..20: mol_type = other DNA
ggttctcctaataaataccc

SEQ ID NO: 254575 - DNA, 20 bp, synthetic construct
  source 1..20: mol_type = other DNA
tggttctcctaataaatacc

SEQ ID NO: 254576 - DNA, 20 bp, synthetic construct
  source 1..20: mol_type = other DNA
ttggttctcctaataaatac

SEQ ID NO: 254577 - DNA, 20 bp, synthetic construct
  source 1..20: mol_type = other DNA
cttggttctcctaataaata

SEQ ID NO: 254578 - DNA, 20 bp, synthetic construct
  source 1..20: mol_type = other DNA
ccttggttctcctaataaat

SEQ ID NO: 254579 - DNA, 20 bp, synthetic construct
  source 1..20: mol_type = other DNA
tccttggttctcctaataaa

SEQ ID NO: 254580 - DNA, 20 bp, synthetic construct
  source 1..20: mol_type = other DNA
ctccttggttctcctaataa

SEQ ID NO: 254581 - DNA, 20 bp, synthetic construct
  source 1..20: mol_type = other DNA
actccttggttctcctaata

SEQ ID NO: 254582 - DNA, 20 bp, synthetic construct
  source 1..20: mol_type = other DNA
cactccttggttctcctaat

SEQ ID NO: 254583 - DNA, 20 bp, synthetic construct
  source 1..20: mol_type = other DNA
acactccttggttctcctaa

SEQ ID NO: 254584 - DNA, 20 bp, synthetic construct
  source 1..20: mol_type = other DNA
tacactccttggttctccta

SEQ ID NO: 254585 - DNA, 20 bp, synthetic construct
  source 1..20: mol_type = other DNA
ttacactccttggttctcct

SEQ ID NO: 254586 - DNA, 20 bp, synthetic construct
  source 1..20: mol_type = other DNA
attacactccttggttctcc

SEQ ID NO: 254587 - DNA, 20 bp, synthetic construct
  source 1..20: mol_type = other DNA
aattacactccttggttctc

SEQ ID NO: 254588 - DNA, 20 bp, synthetic construct
  source 1..20: mol_type = other DNA
gaattacactccttggttct

SEQ ID NO: 254589 - DNA, 20 bp, synthetic construct
  source 1..20: mol_type = other DNA
agaattacactccttggttc

SEQ ID NO: 254590 - DNA, 20 bp, synthetic construct
  source 1..20: mol_type = other DNA
gagaattacactccttggtt

SEQ ID NO: 254591 - DNA, 20 bp, synthetic construct
  source 1..20: mol_type = other DNA
ggagaattacactccttggt

SEQ ID NO: 254592 - DNA, 20 bp, synthetic construct
  source 1..20: mol_type = other DNA
aggagaattacactccttgg

SEQ ID NO: 254593 - DNA, 20 bp, synthetic construct
  source 1..20: mol_type = other DNA
caggagaattacactccttg

SEQ ID NO: 254594 - DNA, 20 bp, synthetic construct
  source 1..20: mol_type = other DNA
acaggagaattacactcctt

SEQ ID NO: 254595 - DNA, 20 bp, synthetic construct
  source 1..20: mol_type = other DNA
aacaggagaattacactcct

SEQ ID NO: 254596 - DNA, 20 bp, synthetic construct
  source 1..20: mol_type = other DNA
gaacaggagaattacactcc

SEQ ID NO: 254597 - DNA, 20 bp, synthetic construct
  source 1..20: mol_type = other DNA
agaacaggagaattacactc

SEQ ID NO: 254598 - DNA, 20 bp, synthetic construct
  source 1..20: mol_type = other DNA
aagaacaggagaattacact

SEQ ID NO: 254599 - DNA, 20 bp, synthetic construct
  source 1..20: mol_type = other DNA
taagaacaggagaattacac

SEQ ID NO: 254600 - DNA, 20 bp, synthetic construct
  source 1..20: mol_type = other DNA
ttaagaacaggagaattaca

SEQ ID NO: 254601 - DNA, 20 bp, synthetic construct
  source 1..20: mol_type = other DNA
attaagaacaggagaattac

SEQ ID NO: 254602 - DNA, 20 bp, synthetic construct
  source 1..20: mol_type = other DNA
tattaagaacaggagaatta

SEQ ID NO: 254603 - DNA, 20 bp, synthetic construct
  source 1..20: mol_type = other DNA
atattaagaacaggagaatt

SEQ ID NO: 254604 - DNA, 20 bp, synthetic construct
  source 1..20: mol_type = other DNA
catattaagaacaggagaat

SEQ ID NO: 254605 - DNA, 20 bp, synthetic construct
  source 1..20: mol_type = other DNA
gcatattaagaacaggagaa

SEQ ID NO: 254606 - DNA, 20 bp, synthetic construct
  source 1..20: mol_type = other DNA
cgcatattaagaacaggaga

SEQ ID NO: 254607 - DNA, 20 bp, synthetic construct
  source 1..20: mol_type = other DNA
ccgcatattaagaacaggag

SEQ ID NO: 254608 - DNA, 20 bp, synthetic construct
  source 1..20: mol_type = other DNA
gccgcatattaagaacagga

SEQ ID NO: 254609 - DNA, 20 bp, synthetic construct
  source 1..20: mol_type = other DNA
ggccgcatattaagaacagg

SEQ ID NO: 254610 - DNA, 20 bp, synthetic construct
  source 1..20: mol_type = other DNA
tggccgcatattaagaacag

SEQ ID NO: 254611 - DNA, 20 bp, synthetic construct
  source 1..20: mol_type = other DNA
ctggccgcatattaagaaca

SEQ ID NO: 254612 - DNA, 20 bp, synthetic construct
  source 1..20: mol_type = other DNA
cctggccgcatattaagaac

SEQ ID NO: 254613 - DNA, 20 bp, synthetic construct
  source 1..20: mol_type = other DNA
acctggccgcatattaagaa

SEQ ID NO: 254614 - DNA, 20 bp, synthetic construct
  source 1..20: mol_type = other DNA
aacctggccgcatattaaga

SEQ ID NO: 254615 - DNA, 20 bp, synthetic construct
  source 1..20: mol_type = other DNA
taacctggccgcatattaag

SEQ ID NO: 254616 - DNA, 20 bp, synthetic construct
  source 1..20: mol_type = other DNA
ttaacctggccgcatattaa

SEQ ID NO: 254617 - DNA, 20 bp, synthetic construct
  source 1..20: mol_type = other DNA
attaacctggccgcatatta

SEQ ID NO: 254618 - DNA, 20 bp, synthetic construct
  source 1..20: mol_type = other DNA
cattaacctggccgcatatt

SEQ ID NO: 254619 - DNA, 20 bp, synthetic construct
  source 1..20: mol_type = other DNA
tcattaacctggccgcatat

SEQ ID NO: 254620 - DNA, 20 bp, synthetic construct
  source 1..20: mol_type = other DNA
ttcattaacctggccgcata

SEQ ID NO: 254621 - DNA, 20 bp, synthetic construct
  source 1..20: mol_type = other DNA
attcattaacctggccgcat

SEQ ID NO: 254622 - DNA, 20 bp, synthetic construct
  source 1..20: mol_type = other DNA
cattcattaacctggccgca

SEQ ID NO: 254623 - DNA, 20 bp, synthetic construct
  source 1..20: mol_type = other DNA
acattcattaacctggccgc

SEQ ID NO: 254624 - DNA, 20 bp, synthetic construct
  source 1..20: mol_type = other DNA
gacattcattaacctggccg

SEQ ID NO: 254625 - DNA, 20 bp, synthetic construct
  source 1..20: mol_type = other DNA
tgacattcattaacctggcc

SEQ ID NO: 254626 - DNA, 20 bp, synthetic construct
  source 1..20: mol_type = other DNA
gtgacattcattaacctggc

SEQ ID NO: 254627 - DNA, 20 bp, synthetic construct
  source 1..20: mol_type = other DNA
cgtgacattcattaacctgg

SEQ ID NO: 254628 - DNA, 20 bp, synthetic construct
  source 1..20: mol_type = other DNA
acgtgacattcattaacctg

SEQ ID NO: 254629 - DNA, 20 bp, synthetic construct
  source 1..20: mol_type = other DNA
cacgtgacattcattaacct

SEQ ID NO: 254630 - DNA, 20 bp, synthetic construct
  source 1..20: mol_type = other DNA
tcacgtgacattcattaacc

SEQ ID NO: 254631 - DNA, 20 bp, synthetic construct
  source 1..20: mol_type = other DNA
ttcacgtgacattcattaac

SEQ ID NO: 254632 - DNA, 20 bp, synthetic construct
  source 1..20: mol_type = other DNA
attcacgtgacattcattaa

SEQ ID NO: 254633 - DNA, 20 bp, synthetic construct
  source 1..20: mol_type = other DNA
cattcacgtgacattcatta

SEQ ID NO: 254634 - DNA, 20 bp, synthetic construct
  source 1..20: mol_type = other DNA
tcattcacgtgacattcatt

SEQ ID NO: 254635 - DNA, 20 bp, synthetic construct
  source 1..20: mol_type = other DNA
ttcattcacgtgacattcat

SEQ ID NO: 254636 - DNA, 20 bp, synthetic construct
  source 1..20: mol_type = other DNA
gttcattcacgtgacattca

SEQ ID NO: 254637 - DNA, 20 bp, synthetic construct
  source 1..20: mol_type = other DNA
ggttcattcacgtgacattc

SEQ ID NO: 254638 - DNA, 20 bp, synthetic construct
  source 1..20: mol_type = other DNA
tggttcattcacgtgacatt

SEQ ID NO: 254639 - DNA, 20 bp, synthetic construct
  source 1..20: mol_type = other DNA
ctggttcattcacgtgacat

SEQ ID NO: 254640 - DNA, 20 bp, synthetic construct
  source 1..20: mol_type = other DNA
tctggttcattcacgtgaca

SEQ ID NO: 254641 - DNA, 20 bp, synthetic construct
  source 1..20: mol_type = other DNA
ttctggttcattcacgtgac

SEQ ID NO: 254642 - DNA, 20 bp, synthetic construct
  source 1..20: mol_type = other DNA
tttctggttcattcacgtga

SEQ ID NO: 254643 - DNA, 20 bp, synthetic construct
  source 1..20: mol_type = other DNA
ttttctggttcattcacgtg

SEQ ID NO: 254644 - DNA, 20 bp, synthetic construct
  source 1..20: mol_type = other DNA
tttttctggttcattcacgt

SEQ ID NO: 254645 - DNA, 20 bp, synthetic construct
  source 1..20: mol_type = other DNA
ttttttctggttcattcacg

SEQ ID NO: 254646 - DNA, 20 bp, synthetic construct
  source 1..20: mol_type = other DNA
tttttttctggttcattcac

SEQ ID NO: 254647 - DNA, 20 bp, synthetic construct
  source 1..20: mol_type = other DNA
atttttttctggttcattca

SEQ ID NO: 254648 - DNA, 20 bp, synthetic construct
  source 1..20: mol_type = other DNA
catttttttctggttcattc

SEQ ID NO: 254649 - DNA, 20 bp, synthetic construct
  source 1..20: mol_type = other DNA
tcatttttttctggttcatt

SEQ ID NO: 254650 - DNA, 20 bp, synthetic construct
  source 1..20: mol_type = other DNA
ttcatttttttctggttcat

SEQ ID NO: 254651 - DNA, 20 bp, synthetic construct
  source 1..20: mol_type = other DNA
cttcatttttttctggttca

SEQ ID NO: 254652 - DNA, 20 bp, synthetic construct
  source 1..20: mol_type = other DNA
acttcatttttttctggttc

SEQ ID NO: 254653 - DNA, 20 bp, synthetic construct
  source 1..20: mol_type = other DNA
cacttcatttttttctggtt

SEQ ID NO: 254654 - DNA, 20 bp, synthetic construct
  source 1..20: mol_type = other DNA
acacttcatttttttctggt

SEQ ID NO: 254655 - DNA, 20 bp, synthetic construct
  source 1..20: mol_type = other DNA
cacacttcatttttttctgg

SEQ ID NO: 254656 - DNA, 20 bp, synthetic construct
  source 1..20: mol_type = other DNA
gcacacttcatttttttctg

SEQ ID NO: 254657 - DNA, 20 bp, synthetic construct
  source 1..20: mol_type = other DNA
ggcacacttcatttttttct

SEQ ID NO: 254658 - DNA, 20 bp, synthetic construct
  source 1..20: mol_type = other DNA
gggcacacttcatttttttc

SEQ ID NO: 254659 - DNA, 20 bp, synthetic construct
  source 1..20: mol_type = other DNA
agggcacacttcattttttt

SEQ ID NO: 254660 - DNA, 20 bp, synthetic construct
  source 1..20: mol_type = other DNA
aagggcacacttcatttttt

SEQ ID NO: 254661 - DNA, 20 bp, synthetic construct
  source 1..20: mol_type = other DNA
caagggcacacttcattttt

SEQ ID NO: 254662 - DNA, 20 bp, synthetic construct
  source 1..20: mol_type = other DNA
tcaagggcacacttcatttt

SEQ ID NO: 254663 - DNA, 20 bp, synthetic construct
  source 1..20: mol_type = other DNA
atcaagggcacacttcattt

SEQ ID NO: 254664 - DNA, 20 bp, synthetic construct
  source 1..20: mol_type = other DNA
gatcaagggcacacttcatt

SEQ ID NO: 254665 - DNA, 20 bp, synthetic construct
  source 1..20: mol_type = other DNA
tgatcaagggcacacttcat

SEQ ID NO: 254666 - DNA, 20 bp, synthetic construct
  source 1..20: mol_type = other DNA
ctgatcaagggcacacttca

SEQ ID NO: 254667 - DNA, 20 bp, synthetic construct
  source 1..20: mol_type = other DNA
gctgatcaagggcacacttc

SEQ ID NO: 254668 - DNA, 20 bp, synthetic construct
  source 1..20: mol_type = other DNA
agctgatcaagggcacactt

SEQ ID NO: 254669 - DNA, 20 bp, synthetic construct
  source 1..20: mol_type = other DNA
cagctgatcaagggcacact

SEQ ID NO: 254670 - DNA, 20 bp, synthetic construct
  source 1..20: mol_type = other DNA
ccagctgatcaagggcacac

SEQ ID NO: 254671 - DNA, 20 bp, synthetic construct
  source 1..20: mol_type = other DNA
cccagctgatcaagggcaca

SEQ ID NO: 254672 - DNA, 20 bp, synthetic construct
  source 1..20: mol_type = other DNA
acccagctgatcaagggcac

SEQ ID NO: 254673 - DNA, 20 bp, synthetic construct
  source 1..20: mol_type = other DNA
aacccagctgatcaagggca

SEQ ID NO: 254674 - DNA, 20 bp, synthetic construct
  source 1..20: mol_type = other DNA
caacccagctgatcaagggc

SEQ ID NO: 254675 - DNA, 20 bp, synthetic construct
  source 1..20: mol_type = other DNA
ccaacccagctgatcaaggg

SEQ ID NO: 254676 - DNA, 20 bp, synthetic construct
  source 1..20: mol_type = other DNA
accaacccagctgatcaagg

SEQ ID NO: 254677 - DNA, 20 bp, synthetic construct
  source 1..20: mol_type = other DNA
caccaacccagctgatcaag

SEQ ID NO: 254678 - DNA, 20 bp, synthetic construct
  source 1..20: mol_type = other DNA
acaccaacccagctgatcaa

SEQ ID NO: 254679 - DNA, 20 bp, synthetic construct
  source 1..20: mol_type = other DNA
cacaccaacccagctgatca

SEQ ID NO: 254680 - DNA, 20 bp, synthetic construct
  source 1..20: mol_type = other DNA
gcacaccaacccagctgatc

SEQ ID NO: 254681 - DNA, 20 bp, synthetic construct
  source 1..20: mol_type = other DNA
tgcacaccaacccagctgat

SEQ ID NO: 254682 - DNA, 20 bp, synthetic construct
  source 1..20: mol_type = other DNA
ctgcacaccaacccagctga

SEQ ID NO: 254683 - DNA, 20 bp, synthetic construct
  source 1..20: mol_type = other DNA
gctgcacaccaacccagctg

SEQ ID NO: 254684 - DNA, 20 bp, synthetic construct
  source 1..20: mol_type = other DNA
tgctgcacaccaacccagct

SEQ ID NO: 254685 - DNA, 20 bp, synthetic construct
  source 1..20: mol_type = other DNA
ttgctgcacaccaacccagc

SEQ ID NO: 254686 - DNA, 20 bp, synthetic construct
  source 1..20: mol_type = other DNA
cttgctgcacaccaacccag

SEQ ID NO: 254687 - DNA, 20 bp, synthetic construct
  source 1..20: mol_type = other DNA
gcttgctgcacaccaaccca

SEQ ID NO: 254688 - DNA, 20 bp, synthetic construct
  source 1..20: mol_type = other DNA
agcttgctgcacaccaaccc

SEQ ID NO: 254689 - DNA, 20 bp, synthetic construct
  source 1..20: mol_type = other DNA
cagcttgctgcacaccaacc

SEQ ID NO: 254690 - DNA, 20 bp, synthetic construct
  source 1..20: mol_type = other DNA
acagcttgctgcacaccaac

SEQ ID NO: 254691 - DNA, 20 bp, synthetic construct
  source 1..20: mol_type = other DNA
cacagcttgctgcacaccaa

SEQ ID NO: 254692 - DNA, 20 bp, synthetic construct
  source 1..20: mol_type = other DNA
acacagcttgctgcacacca

SEQ ID NO: 254693 - DNA, 20 bp, synthetic construct
  source 1..20: mol_type = other DNA
cacacagcttgctgcacacc

SEQ ID NO: 254694 - DNA, 20 bp, synthetic construct
  source 1..20: mol_type = other DNA
tcacacagcttgctgcacac

SEQ ID NO: 254695 - DNA, 20 bp, synthetic construct
  source 1..20: mol_type = other DNA
gtcacacagcttgctgcaca

SEQ ID NO: 254696 - DNA, 20 bp, synthetic construct
  source 1..20: mol_type = other DNA
ggtcacacagcttgctgcac

SEQ ID NO: 254697 - DNA, 20 bp, synthetic construct
  source 1..20: mol_type = other DNA
tggtcacacagcttgctgca

SEQ ID NO: 254698 - DNA, 20 bp, synthetic construct
  source 1..20: mol_type = other DNA
ctggtcacacagcttgctgc

SEQ ID NO: 254699 - DNA, 20 bp, synthetic construct
  source 1..20: mol_type = other DNA
cctggtcacacagcttgctg

SEQ ID NO: 254700 - DNA, 20 bp, synthetic construct
  source 1..20: mol_type = other DNA
ccctggtcacacagcttgct

SEQ ID NO: 254701 - DNA, 20 bp, synthetic construct
  source 1..20: mol_type = other DNA
cccctggtcacacagcttgc

SEQ ID NO: 254702 - DNA, 20 bp, synthetic construct
  source 1..20: mol_type = other DNA
tcccctggtcacacagcttg

SEQ ID NO: 254703 - DNA, 20 bp, synthetic construct
  source 1..20: mol_type = other DNA
gtcccctggtcacacagctt

SEQ ID NO: 254704 - DNA, 20 bp, synthetic construct
  source 1..20: mol_type = other DNA
tgtcccctggtcacacagct

SEQ ID NO: 254705 - DNA, 20 bp, synthetic construct
  source 1..20: mol_type = other DNA
ctgtcccctggtcacacagc

SEQ ID NO: 254706 - DNA, 20 bp, synthetic construct
  source 1..20: mol_type = other DNA
gctgtcccctggtcacacag

SEQ ID NO: 254707 - DNA, 20 bp, synthetic construct
  source 1..20: mol_type = other DNA
tgctgtcccctggtcacaca

SEQ ID NO: 254708 - DNA, 20 bp, synthetic construct
  source 1..20: mol_type = other DNA
ctgctgtcccctggtcacac

SEQ ID NO: 254709 - DNA, 20 bp, synthetic construct
  source 1..20: mol_type = other DNA
actgctgtcccctggtcaca

SEQ ID NO: 254710 - DNA, 20 bp, synthetic construct
  source 1..20: mol_type = other DNA
cactgctgtcccctggtcac

SEQ ID NO: 254711 - DNA, 20 bp, synthetic construct
  source 1..20: mol_type = other DNA
ccactgctgtcccctggtca

SEQ ID NO: 254712 - DNA, 20 bp, synthetic construct
  source 1..20: mol_type = other DNA
accactgctgtcccctggtc

SEQ ID NO: 254713 - DNA, 20 bp, synthetic construct
  source 1..20: mol_type = other DNA
gaccactgctgtcccctggt

SEQ ID NO: 254714 - DNA, 20 bp, synthetic construct
  source 1..20: mol_type = other DNA
ggaccactgctgtcccctgg

SEQ ID NO: 254715 - DNA, 20 bp, synthetic construct
  source 1..20: mol_type = other DNA
aggaccactgctgtcccctg

SEQ ID NO: 254716 - DNA, 20 bp, synthetic construct
  source 1..20: mol_type = other DNA
caggaccactgctgtcccct

SEQ ID NO: 254717 - DNA, 20 bp, synthetic construct
  source 1..20: mol_type = other DNA
tcaggaccactgctgtcccc

SEQ ID NO: 254718 - DNA, 20 bp, synthetic construct
  source 1..20: mol_type = other DNA
ctcaggaccactgctgtccc

SEQ ID NO: 254719 - DNA, 20 bp, synthetic construct
  source 1..20: mol_type = other DNA
cctcaggaccactgctgtcc

SEQ ID NO: 254720 - DNA, 20 bp, synthetic construct
  source 1..20: mol_type = other DNA
ccctcaggaccactgctgtc

SEQ ID NO: 254721 - DNA, 20 bp, synthetic construct
  source 1..20: mol_type = other DNA
gccctcaggaccactgctgt

SEQ ID NO: 254722 - DNA, 20 bp, synthetic construct
  source 1..20: mol_type = other DNA
ggccctcaggaccactgctg

SEQ ID NO: 254723 - DNA, 20 bp, synthetic construct
  source 1..20: mol_type = other DNA
cggccctcaggaccactgct

SEQ ID NO: 254724 - DNA, 20 bp, synthetic construct
  source 1..20: mol_type = other DNA
acggccctcaggaccactgc

SEQ ID NO: 254725 - DNA, 20 bp, synthetic construct
  source 1..20: mol_type = other DNA
gacggccctcaggaccactg

SEQ ID NO: 254726 - DNA, 20 bp, synthetic construct
  source 1..20: mol_type = other DNA
tgacggccctcaggaccact

SEQ ID NO: 254727 - DNA, 20 bp, synthetic construct
  source 1..20: mol_type = other DNA
gtgacggccctcaggaccac

SEQ ID NO: 254728 - DNA, 20 bp, synthetic construct
  source 1..20: mol_type = other DNA
agtgacggccctcaggacca

SEQ ID NO: 254729 - DNA, 20 bp, synthetic construct
  source 1..20: mol_type = other DNA
cagtgacggccctcaggacc

SEQ ID NO: 254730 - DNA, 20 bp, synthetic construct
  source 1..20: mol_type = other DNA
acagtgacggccctcaggac

SEQ ID NO: 254731 - DNA, 20 bp, synthetic construct
  source 1..20: mol_type = other DNA
gacagtgacggccctcagga

SEQ ID NO: 254732 - DNA, 20 bp, synthetic construct
  source 1..20: mol_type = other DNA
agacagtgacggccctcagg

SEQ ID NO: 254733 - DNA, 20 bp, synthetic construct
  source 1..20: mol_type = other DNA
cagacagtgacggccctcag

SEQ ID NO: 254734 - DNA, 20 bp, synthetic construct
  source 1..20: mol_type = other DNA
gcagacagtgacggccctca

SEQ ID NO: 254735 - DNA, 20 bp, synthetic construct
  source 1..20: mol_type = other DNA
ggcagacagtgacggccctc

SEQ ID NO: 254736 - DNA, 20 bp, synthetic construct
  source 1..20: mol_type = other DNA
cggcagacagtgacggccct

SEQ ID NO: 254737 - DNA, 20 bp, synthetic construct
  source 1..20: mol_type = other DNA
acggcagacagtgacggccc

SEQ ID NO: 254738 - DNA, 20 bp, synthetic construct
  source 1..20: mol_type = other DNA
cacggcagacagtgacggcc

SEQ ID NO: 254739 - DNA, 20 bp, synthetic construct
  source 1..20: mol_type = other DNA
gcacggcagacagtgacggc

SEQ ID NO: 254740 - DNA, 20 bp, synthetic construct
  source 1..20: mol_type = other DNA
tgcacggcagacagtgacgg

SEQ ID NO: 254741 - DNA, 20 bp, synthetic construct
  source 1..20: mol_type = other DNA
ctgcacggcagacagtgacg

SEQ ID NO: 254742 - DNA, 20 bp, synthetic construct
  source 1..20: mol_type = other DNA
tctgcacggcagacagtgac

SEQ ID NO: 254743 - DNA, 20 bp, synthetic construct
  source 1..20: mol_type = other DNA
ctctgcacggcagacagtga

SEQ ID NO: 254744 - DNA, 20 bp, synthetic construct
  source 1..20: mol_type = other DNA
gctctgcacggcagacagtg

SEQ ID NO: 254745 - DNA, 20 bp, synthetic construct
  source 1..20: mol_type = other DNA
ggctctgcacggcagacagt

SEQ ID NO: 254746 - DNA, 20 bp, synthetic construct
  source 1..20: mol_type = other DNA
gggctctgcacggcagacag

SEQ ID NO: 254747 - DNA, 20 bp, synthetic construct
  source 1..20: mol_type = other DNA
agggctctgcacggcagaca

SEQ ID NO: 254748 - DNA, 20 bp, synthetic construct
  source 1..20: mol_type = other DNA
aagggctctgcacggcagac

SEQ ID NO: 254749 - DNA, 20 bp, synthetic construct
  source 1..20: mol_type = other DNA
gaagggctctgcacggcaga

SEQ ID NO: 254750 - DNA, 20 bp, synthetic construct
  source 1..20: mol_type = other DNA
ggaagggctctgcacggcag

SEQ ID NO: 254751 - DNA, 20 bp, synthetic construct
  source 1..20: mol_type = other DNA
aggaagggctctgcacggca

SEQ ID NO: 254752 - DNA, 20 bp, synthetic construct
  source 1..20: mol_type = other DNA
gaggaagggctctgcacggc

SEQ ID NO: 254753 - DNA, 20 bp, synthetic construct
  source 1..20: mol_type = other DNA
ggaggaagggctctgcacgg

SEQ ID NO: 254754 - DNA, 20 bp, synthetic construct
  source 1..20: mol_type = other DNA
gggaggaagggctctgcacg

SEQ ID NO: 254755 - DNA, 20 bp, synthetic construct
  source 1..20: mol_type = other DNA
tgggaggaagggctctgcac

SEQ ID NO: 254756 - DNA, 20 bp, synthetic construct
  source 1..20: mol_type = other DNA
gtgggaggaagggctctgca

SEQ ID NO: 254757 - DNA, 20 bp, synthetic construct
  source 1..20: mol_type = other DNA
cgtgggaggaagggctctgc

SEQ ID NO: 254758 - DNA, 20 bp, synthetic construct
  source 1..20: mol_type = other DNA
ccgtgggaggaagggctctg

SEQ ID NO: 254759 - DNA, 20 bp, synthetic construct
  source 1..20: mol_type = other DNA
cccgtgggaggaagggctct

SEQ ID NO: 254760 - DNA, 20 bp, synthetic construct
  source 1..20: mol_type = other DNA
ccccgtgggaggaagggctc

SEQ ID NO: 254761 - DNA, 20 bp, synthetic construct
  source 1..20: mol_type = other DNA
cccccgtgggaggaagggct

SEQ ID NO: 254762 - DNA, 20 bp, synthetic construct
  source 1..20: mol_type = other DNA
gcccccgtgggaggaagggc

SEQ ID NO: 254763 - DNA, 20 bp, synthetic construct
  source 1..20: mol_type = other DNA
ggcccccgtgggaggaaggg

SEQ ID NO: 254764 - DNA, 20 bp, synthetic construct
  source 1..20: mol_type = other DNA
aggcccccgtgggaggaagg

SEQ ID NO: 254765 - DNA, 20 bp, synthetic construct
  source 1..20: mol_type = other DNA
taggcccccgtgggaggaag

SEQ ID NO: 254766 - DNA, 20 bp, synthetic construct
  source 1..20: mol_type = other DNA
gtaggcccccgtgggaggaa

SEQ ID NO: 254767 - DNA, 20 bp, synthetic construct
  source 1..20: mol_type = other DNA
ggtaggcccccgtgggagga

SEQ ID NO: 254768 - DNA, 20 bp, synthetic construct
  source 1..20: mol_type = other DNA
aggtaggcccccgtgggagg

SEQ ID NO: 254769 - DNA, 20 bp, synthetic construct
  source 1..20: mol_type = other DNA
gaggtaggcccccgtgggag

SEQ ID NO: 254770 - DNA, 20 bp, synthetic construct
  source 1..20: mol_type = other DNA
tgaggtaggcccccgtggga

SEQ ID NO: 254771 - DNA, 20 bp, synthetic construct
  source 1..20: mol_type = other DNA
gtgaggtaggcccccgtggg

SEQ ID NO: 254772 - DNA, 20 bp, synthetic construct
  source 1..20: mol_type = other DNA
ggtgaggtaggcccccgtgg

SEQ ID NO: 254773 - DNA, 20 bp, synthetic construct
  source 1..20: mol_type = other DNA
aggtgaggtaggcccccgtg

SEQ ID NO: 254774 - DNA, 20 bp, synthetic construct
  source 1..20: mol_type = other DNA
caggtgaggtaggcccccgt

SEQ ID NO: 254775 - DNA, 20 bp, synthetic construct
  source 1..20: mol_type = other DNA
acaggtgaggtaggcccccg

SEQ ID NO: 254776 - DNA, 20 bp, synthetic construct
  source 1..20: mol_type = other DNA
cacaggtgaggtaggccccc

SEQ ID NO: 254777 - DNA, 20 bp, synthetic construct
  source 1..20: mol_type = other DNA
gcacaggtgaggtaggcccc

SEQ ID NO: 254778 - DNA, 20 bp, synthetic construct
  source 1..20: mol_type = other DNA
ggcacaggtgaggtaggccc

SEQ ID NO: 254779 - DNA, 20 bp, synthetic construct
  source 1..20: mol_type = other DNA
tggcacaggtgaggtaggcc

SEQ ID NO: 254780 - DNA, 20 bp, synthetic construct
  source 1..20: mol_type = other DNA
ttggcacaggtgaggtaggc

SEQ ID NO: 254781 - DNA, 20 bp, synthetic construct
  source 1..20: mol_type = other DNA
cttggcacaggtgaggtagg

SEQ ID NO: 254782 - DNA, 20 bp, synthetic construct
  source 1..20: mol_type = other DNA
ccttggcacaggtgaggtag

SEQ ID NO: 254783 - DNA, 20 bp, synthetic construct
  source 1..20: mol_type = other DNA
cccttggcacaggtgaggta

SEQ ID NO: 254784 - DNA, 20 bp, synthetic construct
  source 1..20: mol_type = other DNA
gcccttggcacaggtgaggt

SEQ ID NO: 254785 - DNA, 20 bp, synthetic construct
  source 1..20: mol_type = other DNA
agcccttggcacaggtgagg

SEQ ID NO: 254786 - DNA, 20 bp, synthetic construct
  source 1..20: mol_type = other DNA
aagcccttggcacaggtgag

SEQ ID NO: 254787 - DNA, 20 bp, synthetic construct
  source 1..20: mol_type = other DNA
caagcccttggcacaggtga

SEQ ID NO: 254788 - DNA, 20 bp, synthetic construct
  source 1..20: mol_type = other DNA
acaagcccttggcacaggtg

SEQ ID NO: 254789 - DNA, 20 bp, synthetic construct
  source 1..20: mol_type = other DNA
gacaagcccttggcacaggt

SEQ ID NO: 254790 - DNA, 20 bp, synthetic construct
  source 1..20: mol_type = other DNA
agacaagcccttggcacagg

SEQ ID NO: 254791 - DNA, 20 bp, synthetic construct
  source 1..20: mol_type = other DNA
cagacaagcccttggcacag

SEQ ID NO: 254792 - DNA, 20 bp, synthetic construct
  source 1..20: mol_type = other DNA
acagacaagcccttggcaca

SEQ ID NO: 254793 - DNA, 20 bp, synthetic construct
  source 1..20: mol_type = other DNA
cacagacaagcccttggcac

SEQ ID NO: 254794 - DNA, 20 bp, synthetic construct
  source 1..20: mol_type = other DNA
ccacagacaagcccttggca

SEQ ID NO: 254795 - DNA, 20 bp, synthetic construct
  source 1..20: mol_type = other DNA
accacagacaagcccttggc

SEQ ID NO: 254796 - DNA, 20 bp, synthetic construct
  source 1..20: mol_type = other DNA
gaccacagacaagcccttgg

SEQ ID NO: 254797 - DNA, 20 bp, synthetic construct
  source 1..20: mol_type = other DNA
tgaccacagacaagcccttg

SEQ ID NO: 254798 - DNA, 20 bp, synthetic construct
  source 1..20: mol_type = other DNA
ctgaccacagacaagccctt

SEQ ID NO: 254799 - DNA, 20 bp, synthetic construct
  source 1..20: mol_type = other DNA
actgaccacagacaagccct

SEQ ID NO: 254800 - DNA, 20 bp, synthetic construct
  source 1..20: mol_type = other DNA
cactgaccacagacaagccc

SEQ ID NO: 254801 - DNA, 20 bp, synthetic construct
  source 1..20: mol_type = other DNA
tcactgaccacagacaagcc

SEQ ID NO: 254802 - DNA, 20 bp, synthetic construct
  source 1..20: mol_type = other DNA
gtcactgaccacagacaagc

SEQ ID NO: 254803 - DNA, 20 bp, synthetic construct
  source 1..20: mol_type = other DNA
ggtcactgaccacagacaag

SEQ ID NO: 254804 - DNA, 20 bp, synthetic construct
  source 1..20: mol_type = other DNA
aggtcactgaccacagacaa

SEQ ID NO: 254805 - DNA, 20 bp, synthetic construct
  source 1..20: mol_type = other DNA
caggtcactgaccacagaca

SEQ ID NO: 254806 - DNA, 20 bp, synthetic construct
  source 1..20: mol_type = other DNA
ccaggtcactgaccacagac

SEQ ID NO: 254807 - DNA, 20 bp, synthetic construct
  source 1..20: mol_type = other DNA
tccaggtcactgaccacaga

SEQ ID NO: 254808 - DNA, 20 bp, synthetic construct
  source 1..20: mol_type = other DNA
atccaggtcactgaccacag

SEQ ID NO: 254809 - DNA, 20 bp, synthetic construct
  source 1..20: mol_type = other DNA
tatccaggtcactgaccaca

SEQ ID NO: 254810 - DNA, 20 bp, synthetic construct
  source 1..20: mol_type = other DNA
ctatccaggtcactgaccac

SEQ ID NO: 254811 - DNA, 20 bp, synthetic construct
  source 1..20: mol_type = other DNA
tctatccaggtcactgacca

SEQ ID NO: 254812 - DNA, 20 bp, synthetic construct
  source 1..20: mol_type = other DNA
atctatccaggtcactgacc

SEQ ID NO: 254813 - DNA, 20 bp, synthetic construct
  source 1..20: mol_type = other DNA
gatctatccaggtcactgac

SEQ ID NO: 254814 - DNA, 20 bp, synthetic construct
  source 1..20: mol_type = other DNA
agatctatccaggtcactga

SEQ ID NO: 254815 - DNA, 20 bp, synthetic construct
  source 1..20: mol_type = other DNA
cagatctatccaggtcactg

SEQ ID NO: 254816 - DNA, 20 bp, synthetic construct
  source 1..20: mol_type = other DNA
tcagatctatccaggtcact

SEQ ID NO: 254817 - DNA, 20 bp, synthetic construct
  source 1..20: mol_type = other DNA
ttcagatctatccaggtcac

SEQ ID NO: 254818 - DNA, 20 bp, synthetic construct
  source 1..20: mol_type = other DNA
attcagatctatccaggtca

SEQ ID NO: 254819 - DNA, 20 bp, synthetic construct
  source 1..20: mol_type = other DNA
cattcagatctatccaggtc

SEQ ID NO: 254820 - DNA, 20 bp, synthetic construct
  source 1..20: mol_type = other DNA
ccattcagatctatccaggt

SEQ ID NO: 254821 - DNA, 20 bp, synthetic construct
  source 1..20: mol_type = other DNA
cccattcagatctatccagg

SEQ ID NO: 254822 - DNA, 20 bp, synthetic construct
  source 1..20: mol_type = other DNA
ccccattcagatctatccag

SEQ ID NO: 254823 - DNA, 20 bp, synthetic construct
  source 1..20: mol_type = other DNA
gccccattcagatctatcca

SEQ ID NO: 254824 - DNA, 20 bp, synthetic construct
  source 1..20: mol_type = other DNA
agccccattcagatctatcc

SEQ ID NO: 254825 - DNA, 20 bp, synthetic construct
  source 1..20: mol_type = other DNA
aagccccattcagatctatc

SEQ ID NO: 254826 - DNA, 20 bp, synthetic construct
  source 1..20: mol_type = other DNA
gaagccccattcagatctat

SEQ ID NO: 254827 - DNA, 20 bp, synthetic construct
  source 1..20: mol_type = other DNA
agaagccccattcagatcta

SEQ ID NO: 254828 - DNA, 20 bp, synthetic construct
  source 1..20: mol_type = other DNA
aagaagccccattcagatct

SEQ ID NO: 254829 - DNA, 20 bp, synthetic construct
  source 1..20: mol_type = other DNA
aaagaagccccattcagatc

SEQ ID NO: 254830 - DNA, 20 bp, synthetic construct
  source 1..20: mol_type = other DNA
aaaagaagccccattcagat

SEQ ID NO: 254831 - DNA, 20 bp, synthetic construct
  source 1..20: mol_type = other DNA
aaaaagaagccccattcaga

SEQ ID NO: 254832 - DNA, 20 bp, synthetic construct
  source 1..20: mol_type = other DNA
gaaaaagaagccccattcag

SEQ ID NO: 254833 - DNA, 20 bp, synthetic construct
  source 1..20: mol_type = other DNA
cgaaaaagaagccccattca

SEQ ID NO: 254834 - DNA, 20 bp, synthetic construct
  source 1..20: mol_type = other DNA
tcgaaaaagaagccccattc

SEQ ID NO: 254835 - DNA, 20 bp, synthetic construct
  source 1..20: mol_type = other DNA
ctcgaaaaagaagccccatt

SEQ ID NO: 254836 - DNA, 20 bp, synthetic construct
  source 1..20: mol_type = other DNA
cctcgaaaaagaagccccat

SEQ ID NO: 254837 - DNA, 20 bp, synthetic construct
  source 1..20: mol_type = other DNA
tcctcgaaaaagaagcccca

SEQ ID NO: 254838 - DNA, 20 bp, synthetic construct
  source 1..20: mol_type = other DNA
ctcctcgaaaaagaagcccc

SEQ ID NO: 254839 - DNA, 20 bp, synthetic construct
  source 1..20: mol_type = other DNA
actcctcgaaaaagaagccc

SEQ ID NO: 254840 - DNA, 20 bp, synthetic construct
  source 1..20: mol_type = other DNA
gactcctcgaaaaagaagcc

SEQ ID NO: 254841 - DNA, 20 bp, synthetic construct
  source 1..20: mol_type = other DNA
agactcctcgaaaaagaagc

SEQ ID NO: 254842 - DNA, 20 bp, synthetic construct
  source 1..20: mol_type = other DNA
aagactcctcgaaaaagaag

SEQ ID NO: 254843 - DNA, 20 bp, synthetic construct
  source 1..20: mol_type = other DNA
taagactcctcgaaaaagaa

SEQ ID NO: 254844 - DNA, 20 bp, synthetic construct
  source 1..20: mol_type = other DNA
ataagactcctcgaaaaaga

SEQ ID NO: 254845 - DNA, 20 bp, synthetic construct
  source 1..20: mol_type = other DNA
cataagactcctcgaaaaag

SEQ ID NO: 254846 - DNA, 20 bp, synthetic construct
  source 1..20: mol_type = other DNA
ccataagactcctcgaaaaa

SEQ ID NO: 254847 - DNA, 20 bp, synthetic construct
  source 1..20: mol_type = other DNA
gccataagactcctcgaaaa

SEQ ID NO: 254848 - DNA, 20 bp, synthetic construct
  source 1..20: mol_type = other DNA
tgccataagactcctcgaaa

SEQ ID NO: 254849 - DNA, 20 bp, synthetic construct
  source 1..20: mol_type = other DNA
ctgccataagactcctcgaa

SEQ ID NO: 254850 - DNA, 20 bp, synthetic construct
  source 1..20: mol_type = other DNA
cctgccataagactcctcga

SEQ ID NO: 254851 - DNA, 20 bp, synthetic construct
  source 1..20: mol_type = other DNA
acctgccataagactcctcg

SEQ ID NO: 254852 - DNA, 20 bp, synthetic construct
  source 1..20: mol_type = other DNA
gacctgccataagactcctc

SEQ ID NO: 254853 - DNA, 20 bp, synthetic construct
  source 1..20: mol_type = other DNA
agacctgccataagactcct

SEQ ID NO: 254854 - DNA, 20 bp, synthetic construct
  source 1..20: mol_type = other DNA
gagacctgccataagactcc

SEQ ID NO: 254855 - DNA, 20 bp, synthetic construct
  source 1..20: mol_type = other DNA
agagacctgccataagactc

SEQ ID NO: 254856 - DNA, 20 bp, synthetic construct
  source 1..20: mol_type = other DNA
gagagacctgccataagact

SEQ ID NO: 254857 - DNA, 20 bp, synthetic construct
  source 1..20: mol_type = other DNA
tgagagacctgccataagac

SEQ ID NO: 254858 - DNA, 20 bp, synthetic construct
  source 1..20: mol_type = other DNA
ctgagagacctgccataaga

SEQ ID NO: 254859 - DNA, 20 bp, synthetic construct
  source 1..20: mol_type = other DNA
actgagagacctgccataag

SEQ ID NO: 254860 - DNA, 20 bp, synthetic construct
  source 1..20: mol_type = other DNA
tactgagagacctgccataa

SEQ ID NO: 254861 - DNA, 20 bp, synthetic construct
  source 1..20: mol_type = other DNA
ttactgagagacctgccata

SEQ ID NO: 254862 - DNA, 20 bp, synthetic construct
  source 1..20: mol_type = other DNA
tttactgagagacctgccat

SEQ ID NO: 254863 - DNA, 20 bp, synthetic construct
  source 1..20: mol_type = other DNA
ctttactgagagacctgcca

SEQ ID NO: 254864 - DNA, 20 bp, synthetic construct
  source 1..20: mol_type = other DNA
tctttactgagagacctgcc

SEQ ID NO: 254865 - DNA, 20 bp, synthetic construct
  source 1..20: mol_type = other DNA
gtctttactgagagacctgc

SEQ ID NO: 254866 - DNA, 20 bp, synthetic construct
  source 1..20: mol_type = other DNA
agtctttactgagagacctg

SEQ ID NO: 254867 - DNA, 20 bp, synthetic construct
  source 1..20: mol_type = other DNA
gagtctttactgagagacct

SEQ ID NO: 254868 - DNA, 20 bp, synthetic construct
  source 1..20: mol_type = other DNA
ggagtctttactgagagacc

SEQ ID NO: 254869 - DNA, 20 bp, synthetic construct
  source 1..20: mol_type = other DNA
tggagtctttactgagagac

SEQ ID NO: 254870 - DNA, 20 bp, synthetic construct
  source 1..20: mol_type = other DNA
atggagtctttactgagaga

SEQ ID NO: 254871 - DNA, 20 bp, synthetic construct
  source 1..20: mol_type = other DNA
aatggagtctttactgagag

SEQ ID NO: 254872 - DNA, 20 bp, synthetic construct
  source 1..20: mol_type = other DNA
gaatggagtctttactgaga

SEQ ID NO: 254873 - DNA, 20 bp, synthetic construct
  source 1..20: mol_type = other DNA
agaatggagtctttactgag

SEQ ID NO: 254874 - DNA, 20 bp, synthetic construct
  source 1..20: mol_type = other DNA
aagaatggagtctttactga

SEQ ID NO: 254875 - DNA, 20 bp, synthetic construct
  source 1..20: mol_type = other DNA
caagaatggagtctttactg

SEQ ID NO: 254876 - DNA, 20 bp, synthetic construct
  source 1..20: mol_type = other DNA
tcaagaatggagtctttact

SEQ ID NO: 254877 - DNA, 20 bp, synthetic construct
  source 1..20: mol_type = other DNA
atcaagaatggagtctttac

SEQ ID NO: 254878 - DNA, 20 bp, synthetic construct
  source 1..20: mol_type = other DNA
catcaagaatggagtcttta

SEQ ID NO: 254879 - DNA, 20 bp, synthetic construct
  source 1..20: mol_type = other DNA
tcatcaagaatggagtcttt

SEQ ID NO: 254880 - DNA, 20 bp, synthetic construct
  source 1..20: mol_type = other DNA
atcatcaagaatggagtctt

SEQ ID NO: 254881 - DNA, 20 bp, synthetic construct
  source 1..20: mol_type = other DNA
gatcatcaagaatggagtct

SEQ ID NO: 254882 - DNA, 20 bp, synthetic construct
  source 1..20: mol_type = other DNA
tgatcatcaagaatggagtc

SEQ ID NO: 254883 - DNA, 20 bp, synthetic construct
  source 1..20: mol_type = other DNA
gtgatcatcaagaatggagt

SEQ ID NO: 254884 - DNA, 20 bp, synthetic construct
  source 1..20: mol_type = other DNA
tgtgatcatcaagaatggag

SEQ ID NO: 254885 - DNA, 20 bp, synthetic construct
  source 1..20: mol_type = other DNA
gtgtgatcatcaagaatgga

SEQ ID NO: 254886 - DNA, 20 bp, synthetic construct
  source 1..20: mol_type = other DNA
tgtgtgatcatcaagaatgg

SEQ ID NO: 254887 - DNA, 20 bp, synthetic construct
  source 1..20: mol_type = other DNA
atgtgtgatcatcaagaatg

SEQ ID NO: 254888 - DNA, 20 bp, synthetic construct
  source 1..20: mol_type = other DNA
aatgtgtgatcatcaagaat

SEQ ID NO: 254889 - DNA, 20 bp, synthetic construct
  source 1..20: mol_type = other DNA
aaatgtgtgatcatcaagaa

SEQ ID NO: 254890 - DNA, 20 bp, synthetic construct
  source 1..20: mol_type = other DNA
aaaatgtgtgatcatcaaga

SEQ ID NO: 254891 - DNA, 20 bp, synthetic construct
  source 1..20: mol_type = other DNA
caaaatgtgtgatcatcaag

SEQ ID NO: 254892 - DNA, 20 bp, synthetic construct
  source 1..20: mol_type = other DNA
ccaaaatgtgtgatcatcaa

SEQ ID NO: 254893 - DNA, 20 bp, synthetic construct
  source 1..20: mol_type = other DNA
tccaaaatgtgtgatcatca

SEQ ID NO: 254894 - DNA, 20 bp, synthetic construct
  source 1..20: mol_type = other DNA
atccaaaatgtgtgatcatc

SEQ ID NO: 254895 - DNA, 20 bp, synthetic construct
  source 1..20: mol_type = other DNA
aatccaaaatgtgtgatcat

SEQ ID NO: 254896 - DNA, 20 bp, synthetic construct
  source 1..20: mol_type = other DNA
aaatccaaaatgtgtgatca

SEQ ID NO: 254897 - DNA, 20 bp, synthetic construct
  source 1..20: mol_type = other DNA
aaaatccaaaatgtgtgatc

SEQ ID NO: 254898 - DNA, 20 bp, synthetic construct
  source 1..20: mol_type = other DNA
gaaaatccaaaatgtgtgat

SEQ ID NO: 254899 - DNA, 20 bp, synthetic construct
  source 1..20: mol_type = other DNA
ggaaaatccaaaatgtgtga

SEQ ID NO: 254900 - DNA, 20 bp, synthetic construct
  source 1..20: mol_type = other DNA
tggaaaatccaaaatgtgtg

SEQ ID NO: 254901 - DNA, 20 bp, synthetic construct
  source 1..20: mol_type = other DNA
ttggaaaatccaaaatgtgt

SEQ ID NO: 254902 - DNA, 20 bp, synthetic construct
  source 1..20: mol_type = other DNA
tttggaaaatccaaaatgtg

SEQ ID NO: 254903 - DNA, 20 bp, synthetic construct
  source 1..20: mol_type = other DNA
atttggaaaatccaaaatgt

SEQ ID NO: 254904 - DNA, 20 bp, synthetic construct
  source 1..20: mol_type = other DNA
gatttggaaaatccaaaatg

SEQ ID NO: 254905 - DNA, 20 bp, synthetic construct
  source 1..20: mol_type = other DNA
agatttggaaaatccaaaat

SEQ ID NO: 254906 - DNA, 20 bp, synthetic construct
  source 1..20: mol_type = other DNA
cagatttggaaaatccaaaa

SEQ ID NO: 254907 - DNA, 20 bp, synthetic construct
  source 1..20: mol_type = other DNA
acagatttggaaaatccaaa

SEQ ID NO: 254908 - DNA, 20 bp, synthetic construct
  source 1..20: mol_type = other DNA
gacagatttggaaaatccaa

SEQ ID NO: 254909 - DNA, 20 bp, synthetic construct
  source 1..20: mol_type = other DNA
tgacagatttggaaaatcca

SEQ ID NO: 254910 - DNA, 20 bp, synthetic construct
  source 1..20: mol_type = other DNA
ctgacagatttggaaaatcc

SEQ ID NO: 254911 - DNA, 20 bp, synthetic construct
  source 1..20: mol_type = other DNA
tctgacagatttggaaaatc

SEQ ID NO: 254912 - DNA, 20 bp, synthetic construct
  source 1..20: mol_type = other DNA
ctctgacagatttggaaaat

SEQ ID NO: 254913 - DNA, 20 bp, synthetic construct
  source 1..20: mol_type = other DNA
tctctgacagatttggaaaa

SEQ ID NO: 254914 - DNA, 20 bp, synthetic construct
  source 1..20: mol_type = other DNA
ttctctgacagatttggaaa

SEQ ID NO: 254915 - DNA, 20 bp, synthetic construct
  source 1..20: mol_type = other DNA
attctctgacagatttggaa

SEQ ID NO: 254916 - DNA, 20 bp, synthetic construct
  source 1..20: mol_type = other DNA
cattctctgacagatttgga

SEQ ID NO: 254917 - DNA, 20 bp, synthetic construct
  source 1..20: mol_type = other DNA
ccattctctgacagatttgg

SEQ ID NO: 254918 - DNA, 20 bp, synthetic construct
  source 1..20: mol_type = other DNA
cccattctctgacagatttg

SEQ ID NO: 254919 - DNA, 20 bp, synthetic construct
  source 1..20: mol_type = other DNA
gcccattctctgacagattt

SEQ ID NO: 254920 - DNA, 20 bp, synthetic construct
  source 1..20: mol_type = other DNA
agcccattctctgacagatt

SEQ ID NO: 254921 - DNA, 20 bp, synthetic construct
  source 1..20: mol_type = other DNA
aagcccattctctgacagat

SEQ ID NO: 254922 - DNA, 20 bp, synthetic construct
  source 1..20: mol_type = other DNA
caagcccattctctgacaga

SEQ ID NO: 254923 - DNA, 20 bp, synthetic construct
  source 1..20: mol_type = other DNA
tcaagcccattctctgacag

SEQ ID NO: 254924 - DNA, 20 bp, synthetic construct
  source 1..20: mol_type = other DNA
ctcaagcccattctctgaca

SEQ ID NO: 254925 - DNA, 20 bp, synthetic construct
  source 1..20: mol_type = other DNA
cctcaagcccattctctgac

SEQ ID NO: 254926 - DNA, 20 bp, synthetic construct
  source 1..20: mol_type = other DNA
gcctcaagcccattctctga

SEQ ID NO: 254927 - DNA, 20 bp, synthetic construct
  source 1..20: mol_type = other DNA
cgcctcaagcccattctctg

SEQ ID NO: 254928 - DNA, 20 bp, synthetic construct
  source 1..20: mol_type = other DNA
ccgcctcaagcccattctct

SEQ ID NO: 254929 - DNA, 20 bp, synthetic construct
  source 1..20: mol_type = other DNA
cccgcctcaagcccattctc

SEQ ID NO: 254930 - DNA, 20 bp, synthetic construct
  source 1..20: mol_type = other DNA
ccccgcctcaagcccattct

SEQ ID NO: 254931 - DNA, 20 bp, synthetic construct
  source 1..20: mol_type = other DNA
accccgcctcaagcccattc

SEQ ID NO: 254932 - DNA, 20 bp, synthetic construct
  source 1..20: mol_type = other DNA
aaccccgcctcaagcccatt

SEQ ID NO: 254933 - DNA, 20 bp, synthetic construct
  source 1..20: mol_type = other DNA
aaaccccgcctcaagcccat

SEQ ID NO: 254934 - DNA, 20 bp, synthetic construct
  source 1..20: mol_type = other DNA
caaaccccgcctcaagccca

SEQ ID NO: 254935 - DNA, 20 bp, synthetic construct
  source 1..20: mol_type = other DNA
acaaaccccgcctcaagccc

SEQ ID NO: 254936 - DNA, 20 bp, synthetic construct
  source 1..20: mol_type = other DNA
cacaaaccccgcctcaagcc

SEQ ID NO: 254937 - DNA, 20 bp, synthetic construct
  source 1..20: mol_type = other DNA
ccacaaaccccgcctcaagc

SEQ ID NO: 254938 - DNA, 20 bp, synthetic construct
  source 1..20: mol_type = other DNA
cccacaaaccccgcctcaag

SEQ ID NO: 254939 - DNA, 20 bp, synthetic construct
  source 1..20: mol_type = other DNA
gcccacaaaccccgcctcaa

SEQ ID NO: 254940 - DNA, 20 bp, synthetic construct
  source 1..20: mol_type = other DNA
tgcccacaaaccccgcctca

SEQ ID NO: 254941 - DNA, 20 bp, synthetic construct
  source 1..20: mol_type = other DNA
gtgcccacaaaccccgcctc

SEQ ID NO: 254942 - DNA, 20 bp, synthetic construct
  source 1..20: mol_type = other DNA
agtgcccacaaaccccgcct

SEQ ID NO: 254943 - DNA, 20 bp, synthetic construct
  source 1..20: mol_type = other DNA
tagtgcccacaaaccccgcc

SEQ ID NO: 254944 - DNA, 20 bp, synthetic construct
  source 1..20: mol_type = other DNA
ctagtgcccacaaaccccgc

SEQ ID NO: 254945 - DNA, 20 bp, synthetic construct
  source 1..20: mol_type = other DNA
actagtgcccacaaaccccg

SEQ ID NO: 254946 - DNA, 20 bp, synthetic construct
  source 1..20: mol_type = other DNA
aactagtgcccacaaacccc

SEQ ID NO: 254947 - DNA, 20 bp, synthetic construct
  source 1..20: mol_type = other DNA
aaactagtgcccacaaaccc

SEQ ID NO: 254948 - DNA, 20 bp, synthetic construct
  source 1..20: mol_type = other DNA
gaaactagtgcccacaaacc

SEQ ID NO: 254949 - DNA, 20 bp, synthetic construct
  source 1..20: mol_type = other DNA
tgaaactagtgcccacaaac

SEQ ID NO: 254950 - DNA, 20 bp, synthetic construct
  source 1..20: mol_type = other DNA
gtgaaactagtgcccacaaa

SEQ ID NO: 254951 - DNA, 20 bp, synthetic construct
  source 1..20: mol_type = other DNA
agtgaaactagtgcccacaa

SEQ ID NO: 254952 - DNA, 20 bp, synthetic construct
  source 1..20: mol_type = other DNA
cagtgaaactagtgcccaca

SEQ ID NO: 254953 - DNA, 20 bp, synthetic construct
  source 1..20: mol_type = other DNA
ccagtgaaactagtgcccac

SEQ ID NO: 254954 - DNA, 20 bp, synthetic construct
  source 1..20: mol_type = other DNA
accagtgaaactagtgccca

SEQ ID NO: 254955 - DNA, 20 bp, synthetic construct
  source 1..20: mol_type = other DNA
aaccagtgaaactagtgccc

SEQ ID NO: 254956 - DNA, 20 bp, synthetic construct
  source 1..20: mol_type = other DNA
aaaccagtgaaactagtgcc

SEQ ID NO: 254957 - DNA, 20 bp, synthetic construct
  source 1..20: mol_type = other DNA
gaaaccagtgaaactagtgc

SEQ ID NO: 254958 - DNA, 20 bp, synthetic construct
  source 1..20: mol_type = other DNA
tgaaaccagtgaaactagtg

SEQ ID NO: 254959 - DNA, 20 bp, synthetic construct
  source 1..20: mol_type = other DNA
atgaaaccagtgaaactagt

SEQ ID NO: 254960 - DNA, 20 bp, synthetic construct
  source 1..20: mol_type = other DNA
aatgaaaccagtgaaactag

SEQ ID NO: 254961 - DNA, 20 bp, synthetic construct
  source 1..20: mol_type = other DNA
aaatgaaaccagtgaaacta

SEQ ID NO: 254962 - DNA, 20 bp, synthetic construct
  source 1..20: mol_type = other DNA
taaatgaaaccagtgaaact

SEQ ID NO: 254963 - DNA, 20 bp, synthetic construct
  source 1..20: mol_type = other DNA
gtaaatgaaaccagtgaaac

SEQ ID NO: 254964 - DNA, 20 bp, synthetic construct
  source 1..20: mol_type = other DNA
ggtaaatgaaaccagtgaaa

SEQ ID NO: 254965 - DNA, 20 bp, synthetic construct
  source 1..20: mol_type = other DNA
tggtaaatgaaaccagtgaa

SEQ ID NO: 254966 - DNA, 20 bp, synthetic construct
  source 1..20: mol_type = other DNA
ttggtaaatgaaaccagtga

SEQ ID NO: 254967 - DNA, 20 bp, synthetic construct
  source 1..20: mol_type = other DNA
tttggtaaatgaaaccagtg

SEQ ID NO: 254968 - DNA, 20 bp, synthetic construct
  source 1..20: mol_type = other DNA
ttttggtaaatgaaaccagt

SEQ ID NO: 254969 - DNA, 20 bp, synthetic construct
  source 1..20: mol_type = other DNA
tttttggtaaatgaaaccag

SEQ ID NO: 254970 - DNA, 20 bp, synthetic construct
  source 1..20: mol_type = other DNA
ctttttggtaaatgaaacca

SEQ ID NO: 254971 - DNA, 20 bp, synthetic construct
  source 1..20: mol_type = other DNA
cctttttggtaaatgaaacc

SEQ ID NO: 254972 - DNA, 20 bp, synthetic construct
  source 1..20: mol_type = other DNA
ccctttttggtaaatgaaac

SEQ ID NO: 254973 - DNA, 20 bp, synthetic construct
  source 1..20: mol_type = other DNA
cccctttttggtaaatgaaa

SEQ ID NO: 254974 - DNA, 20 bp, synthetic construct
  source 1..20: mol_type = other DNA
tcccctttttggtaaatgaa

SEQ ID NO: 254975 - DNA, 20 bp, synthetic construct
  source 1..20: mol_type = other DNA
ctcccctttttggtaaatga

SEQ ID NO: 254976 - DNA, 20 bp, synthetic construct
  source 1..20: mol_type = other DNA
gctcccctttttggtaaatg

SEQ ID NO: 254977 - DNA, 20 bp, synthetic construct
  source 1..20: mol_type = other DNA
tgctcccctttttggtaaat

SEQ ID NO: 254978 - DNA, 20 bp, synthetic construct
  source 1..20: mol_type = other DNA
ctgctcccctttttggtaaa

SEQ ID NO: 254979 - DNA, 20 bp, synthetic construct
  source 1..20: mol_type = other DNA
tctgctcccctttttggtaa

SEQ ID NO: 254980 - DNA, 20 bp, synthetic construct
  source 1..20: mol_type = other DNA
ttctgctcccctttttggta

SEQ ID NO: 254981 - DNA, 20 bp, synthetic construct
  source 1..20: mol_type = other DNA
cttctgctcccctttttggt

SEQ ID NO: 254982 - DNA, 20 bp, synthetic construct
  source 1..20: mol_type = other DNA
acttctgctcccctttttgg

SEQ ID NO: 254983 - DNA, 20 bp, synthetic construct
  source 1..20: mol_type = other DNA
gacttctgctcccctttttg

SEQ ID NO: 254984 - DNA, 20 bp, synthetic construct
  source 1..20: mol_type = other DNA
tgacttctgctccccttttt

SEQ ID NO: 254985 - DNA, 20 bp, synthetic construct
  source 1..20: mol_type = other DNA
ttgacttctgctcccctttt

SEQ ID NO: 254986 - DNA, 20 bp, synthetic construct
  source 1..20: mol_type = other DNA
cttgacttctgctccccttt

SEQ ID NO: 254987 - DNA, 20 bp, synthetic construct
  source 1..20: mol_type = other DNA
acttgacttctgctcccctt

SEQ ID NO: 254988 - DNA, 20 bp, synthetic construct
  source 1..20: mol_type = other DNA
tacttgacttctgctcccct

SEQ ID NO: 254989 - DNA, 20 bp, synthetic construct
  source 1..20: mol_type = other DNA
atacttgacttctgctcccc

SEQ ID NO: 254990 - DNA, 20 bp, synthetic construct
  source 1..20: mol_type = other DNA
catacttgacttctgctccc

SEQ ID NO: 254991 - DNA, 20 bp, synthetic construct
  source 1..20: mol_type = other DNA
ccatacttgacttctgctcc

SEQ ID NO: 254992 - DNA, 20 bp, synthetic construct
  source 1..20: mol_type = other DNA
accatacttgacttctgctc

SEQ ID NO: 254993 - DNA, 20 bp, synthetic construct
  source 1..20: mol_type = other DNA
caccatacttgacttctgct

SEQ ID NO: 254994 - DNA, 20 bp, synthetic construct
  source 1..20: mol_type = other DNA
ccaccatacttgacttctgc

SEQ ID NO: 254995 - DNA, 20 bp, synthetic construct
  source 1..20: mol_type = other DNA
gccaccatacttgacttctg

SEQ ID NO: 254996 - DNA, 20 bp, synthetic construct
  source 1..20: mol_type = other DNA
agccaccatacttgacttct

SEQ ID NO: 254997 - DNA, 20 bp, synthetic construct
  source 1..20: mol_type = other DNA
gagccaccatacttgacttc

SEQ ID NO: 254998 - DNA, 20 bp, synthetic construct
  source 1..20: mol_type = other DNA
tgagccaccatacttgactt

SEQ ID NO: 254999 - DNA, 20 bp, synthetic construct
  source 1..20: mol_type = other DNA
atgagccaccatacttgact

SEQ ID NO: 255000 - DNA, 20 bp, synthetic construct
  source 1..20: mol_type = other DNA
gatgagccaccatacttgac

SEQ ID NO: 255001 - DNA, 20 bp, synthetic construct
  source 1..20: mol_type = other DNA
ggatgagccaccatacttga

SEQ ID NO: 255002 - DNA, 20 bp, synthetic construct
  source 1..20: mol_type = other DNA
gggatgagccaccatacttg

SEQ ID NO: 255003 - DNA, 20 bp, synthetic construct
  source 1..20: mol_type = other DNA
agggatgagccaccatactt

SEQ ID NO: 255004 - DNA, 20 bp, synthetic construct
  source 1..20: mol_type = other DNA
cagggatgagccaccatact

SEQ ID NO: 255005 - DNA, 20 bp, synthetic construct
  source 1..20: mol_type = other DNA
acagggatgagccaccatac

SEQ ID NO: 255006 - DNA, 20 bp, synthetic construct
  source 1..20: mol_type = other DNA
tacagggatgagccaccata

SEQ ID NO: 255007 - DNA, 20 bp, synthetic construct
  source 1..20: mol_type = other DNA
ttacagggatgagccaccat

SEQ ID NO: 255008 - DNA, 20 bp, synthetic construct
  source 1..20: mol_type = other DNA
attacagggatgagccacca

SEQ ID NO: 255009 - DNA, 20 bp, synthetic construct
  source 1..20: mol_type = other DNA
gattacagggatgagccacc

SEQ ID NO: 255010 - DNA, 20 bp, synthetic construct
  source 1..20: mol_type = other DNA
ggattacagggatgagccac

SEQ ID NO: 255011 - DNA, 20 bp, synthetic construct
  source 1..20: mol_type = other DNA
gggattacagggatgagcca

SEQ ID NO: 255012 - DNA, 20 bp, synthetic construct
  source 1..20: mol_type = other DNA
tgggattacagggatgagcc

SEQ ID NO: 255013 - DNA, 20 bp, synthetic construct
  source 1..20: mol_type = other DNA
ctgggattacagggatgagc

SEQ ID NO: 255014 - DNA, 20 bp, synthetic construct
  source 1..20: mol_type = other DNA
tctgggattacagggatgag

SEQ ID NO: 255015 - DNA, 20 bp, synthetic construct
  source 1..20: mol_type = other DNA
ctctgggattacagggatga

SEQ ID NO: 255016 - DNA, 20 bp, synthetic construct
  source 1..20: mol_type = other DNA
cctctgggattacagggatg

SEQ ID NO: 255017 - DNA, 20 bp, synthetic construct
  source 1..20: mol_type = other DNA
gcctctgggattacagggat

SEQ ID NO: 255018 - DNA, 20 bp, synthetic construct
  source 1..20: mol_type = other DNA
tgcctctgggattacaggga

SEQ ID NO: 255019 - DNA, 20 bp, synthetic construct
  source 1..20: mol_type = other DNA
ttgcctctgggattacaggg

SEQ ID NO: 255020 - DNA, 20 bp, synthetic construct
  source 1..20: mol_type = other DNA
cttgcctctgggattacagg

SEQ ID NO: 255021 - DNA, 20 bp, synthetic construct
  source 1..20: mol_type = other DNA
tcttgcctctgggattacag

SEQ ID NO: 255022 - DNA, 20 bp, synthetic construct
  source 1..20: mol_type = other DNA
ctcttgcctctgggattaca

SEQ ID NO: 255023 - DNA, 20 bp, synthetic construct
  source 1..20: mol_type = other DNA
tctcttgcctctgggattac

SEQ ID NO: 255024 - DNA, 20 bp, synthetic construct
  source 1..20: mol_type = other DNA
ttctcttgcctctgggatta

SEQ ID NO: 255025 - DNA, 20 bp, synthetic construct
  source 1..20: mol_type = other DNA
attctcttgcctctgggatt

SEQ ID NO: 255026 - DNA, 20 bp, synthetic construct
  source 1..20: mol_type = other DNA
aattctcttgcctctgggat

SEQ ID NO: 255027 - DNA, 20 bp, synthetic construct
  source 1..20: mol_type = other DNA
caattctcttgcctctggga

SEQ ID NO: 255028 - DNA, 20 bp, synthetic construct
  source 1..20: mol_type = other DNA
gcaattctcttgcctctggg

SEQ ID NO: 255029 - DNA, 20 bp, synthetic construct
  source 1..20: mol_type = other DNA
agcaattctcttgcctctgg

SEQ ID NO: 255030 - DNA, 20 bp, synthetic construct
  source 1..20: mol_type = other DNA
aagcaattctcttgcctctg

SEQ ID NO: 255031 - DNA, 20 bp, synthetic construct
  source 1..20: mol_type = other DNA
caagcaattctcttgcctct

SEQ ID NO: 255032 - DNA, 20 bp, synthetic construct
  source 1..20: mol_type = other DNA
tcaagcaattctcttgcctc

SEQ ID NO: 255033 - DNA, 20 bp, synthetic construct
  source 1..20: mol_type = other DNA
ctcaagcaattctcttgcct

SEQ ID NO: 255034 - DNA, 20 bp, synthetic construct
  source 1..20: mol_type = other DNA
gctcaagcaattctcttgcc

SEQ ID NO: 255035 - DNA, 20 bp, synthetic construct
  source 1..20: mol_type = other DNA
ggctcaagcaattctcttgc

SEQ ID NO: 255036 - DNA, 20 bp, synthetic construct
  source 1..20: mol_type = other DNA
gggctcaagcaattctcttg

SEQ ID NO: 255037 - DNA, 20 bp, synthetic construct
  source 1..20: mol_type = other DNA
tgggctcaagcaattctctt

SEQ ID NO: 255038 - DNA, 20 bp, synthetic construct
  source 1..20: mol_type = other DNA
ctgggctcaagcaattctct

SEQ ID NO: 255039 - DNA, 20 bp, synthetic construct
  source 1..20: mol_type = other DNA
cctgggctcaagcaattctc

SEQ ID NO: 255040 - DNA, 20 bp, synthetic construct
  source 1..20: mol_type = other DNA
tcctgggctcaagcaattct

SEQ ID NO: 255041 - DNA, 20 bp, synthetic construct
  source 1..20: mol_type = other DNA
ctcctgggctcaagcaattc

SEQ ID NO: 255042 - DNA, 20 bp, synthetic construct
  source 1..20: mol_type = other DNA
actcctgggctcaagcaatt

SEQ ID NO: 255043 - DNA, 20 bp, synthetic construct
  source 1..20: mol_type = other DNA
aactcctgggctcaagcaat

SEQ ID NO: 255044 - DNA, 20 bp, synthetic construct
  source 1..20: mol_type = other DNA
gaactcctgggctcaagcaa

SEQ ID NO: 255045 - DNA, 20 bp, synthetic construct
  source 1..20: mol_type = other DNA
cgaactcctgggctcaagca

SEQ ID NO: 255046 - DNA, 20 bp, synthetic construct
  source 1..20: mol_type = other DNA
tcgaactcctgggctcaagc

SEQ ID NO: 255047 - DNA, 20 bp, synthetic construct
  source 1..20: mol_type = other DNA
ctcgaactcctgggctcaag

SEQ ID NO: 255048 - DNA, 20 bp, synthetic construct
  source 1..20: mol_type = other DNA
tctcgaactcctgggctcaa

SEQ ID NO: 255049 - DNA, 20 bp, synthetic construct
  source 1..20: mol_type = other DNA
gtctcgaactcctgggctca

SEQ ID NO: 255050 - DNA, 20 bp, synthetic construct
  source 1..20: mol_type = other DNA
ggtctcgaactcctgggctc

SEQ ID NO: 255051 - DNA, 20 bp, synthetic construct
  source 1..20: mol_type = other DNA
tggtctcgaactcctgggct

SEQ ID NO: 255052 - DNA, 20 bp, synthetic construct
  source 1..20: mol_type = other DNA
ctggtctcgaactcctgggc

SEQ ID NO: 255053 - DNA, 20 bp, synthetic construct
  source 1..20: mol_type = other DNA
gctggtctcgaactcctggg

SEQ ID NO: 255054 - DNA, 20 bp, synthetic construct
  source 1..20: mol_type = other DNA
ggctggtctcgaactcctgg

SEQ ID NO: 255055 - DNA, 20 bp, synthetic construct
  source 1..20: mol_type = other DNA
aggctggtctcgaactcctg

SEQ ID NO: 255056 - DNA, 20 bp, synthetic construct
  source 1..20: mol_type = other DNA
caggctggtctcgaactcct

SEQ ID NO: 255057 - DNA, 20 bp, synthetic construct
  source 1..20: mol_type = other DNA
tcaggctggtctcgaactcc

SEQ ID NO: 255058 - DNA, 20 bp, synthetic construct
  source 1..20: mol_type = other DNA
ctcaggctggtctcgaactc

SEQ ID NO: 255059 - DNA, 20 bp, synthetic construct
  source 1..20: mol_type = other DNA
gctcaggctggtctcgaact

SEQ ID NO: 255060 - DNA, 20 bp, synthetic construct
  source 1..20: mol_type = other DNA
tgctcaggctggtctcgaac

SEQ ID NO: 255061 - DNA, 20 bp, synthetic construct
  source 1..20: mol_type = other DNA
ttgctcaggctggtctcgaa

SEQ ID NO: 255062 - DNA, 20 bp, synthetic construct
  source 1..20: mol_type = other DNA
gttgctcaggctggtctcga

SEQ ID NO: 255063 - DNA, 20 bp, synthetic construct
  source 1..20: mol_type = other DNA
tgttgctcaggctggtctcg

SEQ ID NO: 255064 - DNA, 20 bp, synthetic construct
  source 1..20: mol_type = other DNA
atgttgctcaggctggtctc

SEQ ID NO: 255065 - DNA, 20 bp, synthetic construct
  source 1..20: mol_type = other DNA
tatgttgctcaggctggtct

SEQ ID NO: 255066 - DNA, 20 bp, synthetic construct
  source 1..20: mol_type = other DNA
ttatgttgctcaggctggtc

SEQ ID NO: 255067 - DNA, 20 bp, synthetic construct
  source 1..20: mol_type = other DNA
cttatgttgctcaggctggt

SEQ ID NO: 255068 - DNA, 20 bp, synthetic construct
  source 1..20: mol_type = other DNA
ccttatgttgctcaggctgg

SEQ ID NO: 255069 - DNA, 20 bp, synthetic construct
  source 1..20: mol_type = other DNA
tccttatgttgctcaggctg

SEQ ID NO: 255070 - DNA, 20 bp, synthetic construct
  source 1..20: mol_type = other DNA
ctccttatgttgctcaggct

SEQ ID NO: 255071 - DNA, 20 bp, synthetic construct
  source 1..20: mol_type = other DNA
tctccttatgttgctcaggc

SEQ ID NO: 255072 - DNA, 20 bp, synthetic construct
  source 1..20: mol_type = other DNA
gtctccttatgttgctcagg

SEQ ID NO: 255073 - DNA, 20 bp, synthetic construct
  source 1..20: mol_type = other DNA
ggtctccttatgttgctcag

SEQ ID NO: 255074 - DNA, 20 bp, synthetic construct
  source 1..20: mol_type = other DNA
gggtctccttatgttgctca

SEQ ID NO: 255075 - DNA, 20 bp, synthetic construct
  source 1..20: mol_type = other DNA
ggggtctccttatgttgctc

SEQ ID NO: 255076 - DNA, 20 bp, synthetic construct
  source 1..20: mol_type = other DNA
cggggtctccttatgttgct

SEQ ID NO: 255077 - DNA, 20 bp, synthetic construct
  source 1..20: mol_type = other DNA
acggggtctccttatgttgc

SEQ ID NO: 255078 - DNA, 20 bp, synthetic construct
  source 1..20: mol_type = other DNA
gacggggtctccttatgttg

SEQ ID NO: 255079 - DNA, 20 bp, synthetic construct
  source 1..20: mol_type = other DNA
agacggggtctccttatgtt

SEQ ID NO: 255080 - DNA, 20 bp, synthetic construct
  source 1..20: mol_type = other DNA
gagacggggtctccttatgt

SEQ ID NO: 255081 - DNA, 20 bp, synthetic construct
  source 1..20: mol_type = other DNA
ggagacggggtctccttatg

SEQ ID NO: 255082 - DNA, 20 bp, synthetic construct
  source 1..20: mol_type = other DNA
tggagacggggtctccttat

SEQ ID NO: 255083 - DNA, 20 bp, synthetic construct
  source 1..20: mol_type = other DNA
gtggagacggggtctcctta

SEQ ID NO: 255084 - DNA, 20 bp, synthetic construct
  source 1..20: mol_type = other DNA
tgtggagacggggtctcctt

SEQ ID NO: 255085 - DNA, 20 bp, synthetic construct
  source 1..20: mol_type = other DNA
ttgtggagacggggtctcct

SEQ ID NO: 255086 - DNA, 20 bp, synthetic construct
  source 1..20: mol_type = other DNA
tttgtggagacggggtctcc

SEQ ID NO: 255087 - DNA, 20 bp, synthetic construct
  source 1..20: mol_type = other DNA
ttttgtggagacggggtctc

SEQ ID NO: 255088 - DNA, 20 bp, synthetic construct
  source 1..20: mol_type = other DNA
tttttgtggagacggggtct

SEQ ID NO: 255089 - DNA, 20 bp, synthetic construct
  source 1..20: mol_type = other DNA
atttttgtggagacggggtc

SEQ ID NO: 255090 - DNA, 20 bp, synthetic construct
  source 1..20: mol_type = other DNA
catttttgtggagacggggt

SEQ ID NO: 255091 - DNA, 20 bp, synthetic construct
  source 1..20: mol_type = other DNA
tcatttttgtggagacgggg

SEQ ID NO: 255092 - DNA, 20 bp, synthetic construct
  source 1..20: mol_type = other DNA
ttcatttttgtggagacggg

SEQ ID NO: 255093 - DNA, 20 bp, synthetic construct
  source 1..20: mol_type = other DNA
tttcatttttgtggagacgg

SEQ ID NO: 255094 - DNA, 20 bp, synthetic construct
  source 1..20: mol_type = other DNA
ttttcatttttgtggagacg

SEQ ID NO: 255095 - DNA, 20 bp, synthetic construct
  source 1..20: mol_type = other DNA
tttttcatttttgtggagac

SEQ ID NO: 255096 - DNA, 20 bp, synthetic construct
  source 1..20: mol_type = other DNA
atttttcatttttgtggaga

SEQ ID NO: 255097 - DNA, 20 bp, synthetic construct
  source 1..20: mol_type = other DNA
tatttttcatttttgtggag

SEQ ID NO: 255098 - DNA, 20 bp, synthetic construct
  source 1..20: mol_type = other DNA
ttatttttcatttttgtgga

SEQ ID NO: 255099 - DNA, 20 bp, synthetic construct
  source 1..20: mol_type = other DNA
gttatttttcatttttgtgg

SEQ ID NO: 255100 - DNA, 20 bp, synthetic construct
  source 1..20: mol_type = other DNA
tgttatttttcatttttgtg

SEQ ID NO: 255101 - DNA, 20 bp, synthetic construct
  source 1..20: mol_type = other DNA
atgttatttttcatttttgt

SEQ ID NO: 255102 - DNA, 20 bp, synthetic construct
  source 1..20: mol_type = other DNA
aatgttatttttcatttttg

SEQ ID NO: 255103 - DNA, 20 bp, synthetic construct
  source 1..20: mol_type = other DNA
aaatgttatttttcattttt

SEQ ID NO: 255104 - DNA, 20 bp, synthetic construct
  source 1..20: mol_type = other DNA
aaaatgttatttttcatttt

SEQ ID NO: 255105 - DNA, 20 bp, synthetic construct
  source 1..20: mol_type = other DNA
taaaatgttatttttcattt

SEQ ID NO: 255106 - DNA, 20 bp, synthetic construct
  source 1..20: mol_type = other DNA
ctaaaatgttatttttcatt

SEQ ID NO: 255107 - DNA, 20 bp, synthetic construct
  source 1..20: mol_type = other DNA
actaaaatgttatttttcat

SEQ ID NO: 255108 - DNA, 20 bp, synthetic construct
  source 1..20: mol_type = other DNA
gactaaaatgttatttttca

SEQ ID NO: 255109 - DNA, 20 bp, synthetic construct
  source 1..20: mol_type = other DNA
tgactaaaatgttatttttc

SEQ ID NO: 255110 - DNA, 20 bp, synthetic construct
  source 1..20: mol_type = other DNA
ctgactaaaatgttattttt

SEQ ID NO: 255111 - DNA, 20 bp, synthetic construct
  source 1..20: mol_type = other DNA
tctgactaaaatgttatttt

SEQ ID NO: 255112 - DNA, 20 bp, synthetic construct
  source 1..20: mol_type = other DNA
gtctgactaaaatgttattt

SEQ ID NO: 255113 - DNA, 20 bp, synthetic construct
  source 1..20: mol_type = other DNA
cgtctgactaaaatgttatt

SEQ ID NO: 255114 - DNA, 20 bp, synthetic construct
  source 1..20: mol_type = other DNA
acgtctgactaaaatgttat

SEQ ID NO: 255115 - DNA, 20 bp, synthetic construct
  source 1..20: mol_type = other DNA
cacgtctgactaaaatgtta

SEQ ID NO: 255116 - DNA, 20 bp, synthetic construct
  source 1..20: mol_type = other DNA
ccacgtctgactaaaatgtt

SEQ ID NO: 255117 - DNA, 20 bp, synthetic construct
  source 1..20: mol_type = other DNA
accacgtctgactaaaatgt

SEQ ID NO: 255118 - DNA, 20 bp, synthetic construct
  source 1..20: mol_type = other DNA
caccacgtctgactaaaatg

SEQ ID NO: 255119 - DNA, 20 bp, synthetic construct
  source 1..20: mol_type = other DNA
ccaccacgtctgactaaaat

SEQ ID NO: 255120 - DNA, 20 bp, synthetic construct
  source 1..20: mol_type = other DNA
gccaccacgtctgactaaaa

SEQ ID NO: 255121 - DNA, 20 bp, synthetic construct
  source 1..20: mol_type = other DNA
tgccaccacgtctgactaaa

SEQ ID NO: 255122 - DNA, 20 bp, synthetic construct
  source 1..20: mol_type = other DNA
atgccaccacgtctgactaa

SEQ ID NO: 255123 - DNA, 20 bp, synthetic construct
  source 1..20: mol_type = other DNA
catgccaccacgtctgacta

SEQ ID NO: 255124 - DNA, 20 bp, synthetic construct
  source 1..20: mol_type = other DNA
gcatgccaccacgtctgact

SEQ ID NO: 255125 - DNA, 20 bp, synthetic construct
  source 1..20: mol_type = other DNA
tgcatgccaccacgtctgac

SEQ ID NO: 255126 - DNA, 20 bp, synthetic construct
  source 1..20: mol_type = other DNA
atgcatgccaccacgtctga

SEQ ID NO: 255127 - DNA, 20 bp, synthetic construct
  source 1..20: mol_type = other DNA
gatgcatgccaccacgtctg

SEQ ID NO: 255128 - DNA, 20 bp, synthetic construct
  source 1..20: mol_type = other DNA
agatgcatgccaccacgtct

SEQ ID NO: 255129 - DNA, 20 bp, synthetic construct
  source 1..20: mol_type = other DNA
cagatgcatgccaccacgtc

SEQ ID NO: 255130 - DNA, 20 bp, synthetic construct
  source 1..20: mol_type = other DNA
acagatgcatgccaccacgt

SEQ ID NO: 255131 - DNA, 20 bp, synthetic construct
  source 1..20: mol_type = other DNA
cacagatgcatgccaccacg

SEQ ID NO: 255132 - DNA, 20 bp, synthetic construct
  source 1..20: mol_type = other DNA
ccacagatgcatgccaccac

SEQ ID NO: 255133 - DNA, 20 bp, synthetic construct
  source 1..20: mol_type = other DNA
accacagatgcatgccacca

SEQ ID NO: 255134 - DNA, 20 bp, synthetic construct
  source 1..20: mol_type = other DNA
gaccacagatgcatgccacc

SEQ ID NO: 255135 - DNA, 20 bp, synthetic construct
  source 1..20: mol_type = other DNA
ggaccacagatgcatgccac

SEQ ID NO: 255136 - DNA, 20 bp, synthetic construct
  source 1..20: mol_type = other DNA
gggaccacagatgcatgcca

SEQ ID NO: 255137 - DNA, 20 bp, synthetic construct
  source 1..20: mol_type = other DNA
tgggaccacagatgcatgcc

SEQ ID NO: 255138 - DNA, 20 bp, synthetic construct
  source 1..20: mol_type = other DNA
ctgggaccacagatgcatgc

SEQ ID NO: 255139 - DNA, 20 bp, synthetic construct
  source 1..20: mol_type = other DNA
gctgggaccacagatgcatg

SEQ ID NO: 255140 - DNA, 20 bp, synthetic construct
  source 1..20: mol_type = other DNA
agctgggaccacagatgcat

SEQ ID NO: 255141 - DNA, 20 bp, synthetic construct
  source 1..20: mol_type = other DNA
cagctgggaccacagatgca

SEQ ID NO: 255142 - DNA, 20 bp, synthetic construct
  source 1..20: mol_type = other DNA
gcagctgggaccacagatgc

SEQ ID NO: 255143 - DNA, 20 bp, synthetic construct
  source 1..20: mol_type = other DNA
agcagctgggaccacagatg

SEQ ID NO: 255144 - DNA, 20 bp, synthetic construct
  source 1..20: mol_type = other DNA
aagcagctgggaccacagat

SEQ ID NO: 255145 - DNA, 20 bp, synthetic construct
  source 1..20: mol_type = other DNA
caagcagctgggaccacaga

SEQ ID NO: 255146 - DNA, 20 bp, synthetic construct
  source 1..20: mol_type = other DNA
ccaagcagctgggaccacag

SEQ ID NO: 255147 - DNA, 20 bp, synthetic construct
  source 1..20: mol_type = other DNA
cccaagcagctgggaccaca

SEQ ID NO: 255148 - DNA, 20 bp, synthetic construct
  source 1..20: mol_type = other DNA
tcccaagcagctgggaccac

SEQ ID NO: 255149 - DNA, 20 bp, synthetic construct
  source 1..20: mol_type = other DNA
ctcccaagcagctgggacca

SEQ ID NO: 255150 - DNA, 20 bp, synthetic construct
  source 1..20: mol_type = other DNA
cctcccaagcagctgggacc

SEQ ID NO: 255151 - DNA, 20 bp, synthetic construct
  source 1..20: mol_type = other DNA
ccctcccaagcagctgggac

SEQ ID NO: 255152 - DNA, 20 bp, synthetic construct
  source 1..20: mol_type = other DNA
accctcccaagcagctggga

SEQ ID NO: 255153 - DNA, 20 bp, synthetic construct
  source 1..20: mol_type = other DNA
caccctcccaagcagctggg

SEQ ID NO: 255154 - DNA, 20 bp, synthetic construct
  source 1..20: mol_type = other DNA
tcaccctcccaagcagctgg

SEQ ID NO: 255155 - DNA, 20 bp, synthetic construct
  source 1..20: mol_type = other DNA
ctcaccctcccaagcagctg

SEQ ID NO: 255156 - DNA, 20 bp, synthetic construct
  source 1..20: mol_type = other DNA
tctcaccctcccaagcagct

SEQ ID NO: 255157 - DNA, 20 bp, synthetic construct
  source 1..20: mol_type = other DNA
atctcaccctcccaagcagc

SEQ ID NO: 255158 - DNA, 20 bp, synthetic construct
  source 1..20: mol_type = other DNA
catctcaccctcccaagcag

SEQ ID NO: 255159 - DNA, 20 bp, synthetic construct
  source 1..20: mol_type = other DNA
ccatctcaccctcccaagca

SEQ ID NO: 255160 - DNA, 20 bp, synthetic construct
  source 1..20: mol_type = other DNA
cccatctcaccctcccaagc

SEQ ID NO: 255161 - DNA, 20 bp, synthetic construct
  source 1..20: mol_type = other DNA
tcccatctcaccctcccaag

SEQ ID NO: 255162 - DNA, 20 bp, synthetic construct
  source 1..20: mol_type = other DNA
ctcccatctcaccctcccaa

SEQ ID NO: 255163 - DNA, 20 bp, synthetic construct
  source 1..20: mol_type = other DNA
cctcccatctcaccctccca

SEQ ID NO: 255164 - DNA, 20 bp, synthetic construct
  source 1..20: mol_type = other DNA
ccctcccatctcaccctccc

SEQ ID NO: 255165 - DNA, 20 bp, synthetic construct
  source 1..20: mol_type = other DNA
accctcccatctcaccctcc

SEQ ID NO: 255166 - DNA, 20 bp, synthetic construct
  source 1..20: mol_type = other DNA
aaccctcccatctcaccctc

SEQ ID NO: 255167 - DNA, 20 bp, synthetic construct
  source 1..20: mol_type = other DNA
caaccctcccatctcaccct

SEQ ID NO: 255168 - DNA, 20 bp, synthetic construct
  source 1..20: mol_type = other DNA
acaaccctcccatctcaccc

SEQ ID NO: 255169 - DNA, 20 bp, synthetic construct
  source 1..20: mol_type = other DNA
aacaaccctcccatctcacc

SEQ ID NO: 255170 - DNA, 20 bp, synthetic construct
  source 1..20: mol_type = other DNA
aaacaaccctcccatctcac

SEQ ID NO: 255171 - DNA, 20 bp, synthetic construct
  source 1..20: mol_type = other DNA
caaacaaccctcccatctca

SEQ ID NO: 255172 - DNA, 20 bp, synthetic construct
  source 1..20: mol_type = other DNA
tcaaacaaccctcccatctc

SEQ ID NO: 255173 - DNA, 20 bp, synthetic construct
  source 1..20: mol_type = other DNA
ctcaaacaaccctcccatct

SEQ ID NO: 255174 - DNA, 20 bp, synthetic construct
  source 1..20: mol_type = other DNA
gctcaaacaaccctcccatc

SEQ ID NO: 255175 - DNA, 20 bp, synthetic construct
  source 1..20: mol_type = other DNA
ggctcaaacaaccctcccat

SEQ ID NO: 255176 - DNA, 20 bp, synthetic construct
  source 1..20: mol_type = other DNA
gggctcaaacaaccctccca

SEQ ID NO: 255177 - DNA, 20 bp, synthetic construct
  source 1..20: mol_type = other DNA
agggctcaaacaaccctccc

SEQ ID NO: 255178 - DNA, 20 bp, synthetic construct
  source 1..20: mol_type = other DNA
cagggctcaaacaaccctcc

SEQ ID NO: 255179 - DNA, 20 bp, synthetic construct
  source 1..20: mol_type = other DNA
ccagggctcaaacaaccctc

SEQ ID NO: 255180 - DNA, 20 bp, synthetic construct
  source 1..20: mol_type = other DNA
tccagggctcaaacaaccct

SEQ ID NO: 255181 - DNA, 20 bp, synthetic construct
  source 1..20: mol_type = other DNA
ctccagggctcaaacaaccc

SEQ ID NO: 255182 - DNA, 20 bp, synthetic construct
  source 1..20: mol_type = other DNA
actccagggctcaaacaacc

SEQ ID NO: 255183 - DNA, 20 bp, synthetic construct
  source 1..20: mol_type = other DNA
aactccagggctcaaacaac

SEQ ID NO: 255184 - DNA, 20 bp, synthetic construct
  source 1..20: mol_type = other DNA
taactccagggctcaaacaa

SEQ ID NO: 255185 - DNA, 20 bp, synthetic construct
  source 1..20: mol_type = other DNA
ttaactccagggctcaaaca

SEQ ID NO: 255186 - DNA, 20 bp, synthetic construct
  source 1..20: mol_type = other DNA
tttaactccagggctcaaac

SEQ ID NO: 255187 - DNA, 20 bp, synthetic construct
  source 1..20: mol_type = other DNA
ctttaactccagggctcaaa

SEQ ID NO: 255188 - DNA, 20 bp, synthetic construct
  source 1..20: mol_type = other DNA
actttaactccagggctcaa

SEQ ID NO: 255189 - DNA, 20 bp, synthetic construct
  source 1..20: mol_type = other DNA
aactttaactccagggctca

SEQ ID NO: 255190 - DNA, 20 bp, synthetic construct
  source 1..20: mol_type = other DNA
caactttaactccagggctc

SEQ ID NO: 255191 - DNA, 20 bp, synthetic construct
  source 1..20: mol_type = other DNA
gcaactttaactccagggct

SEQ ID NO: 255192 - DNA, 20 bp, synthetic construct
  source 1..20: mol_type = other DNA
tgcaactttaactccagggc

SEQ ID NO: 255193 - DNA, 20 bp, synthetic construct
  source 1..20: mol_type = other DNA
ttgcaactttaactccaggg

SEQ ID NO: 255194 - DNA, 20 bp, synthetic construct
  source 1..20: mol_type = other DNA
attgcaactttaactccagg

SEQ ID NO: 255195 - DNA, 20 bp, synthetic construct
  source 1..20: mol_type = other DNA
cattgcaactttaactccag

SEQ ID NO: 255196 - DNA, 20 bp, synthetic construct
  source 1..20: mol_type = other DNA
tcattgcaactttaactcca

SEQ ID NO: 255197 - DNA, 20 bp, synthetic construct
  source 1..20: mol_type = other DNA
ctcattgcaactttaactcc

SEQ ID NO: 255198 - DNA, 20 bp, synthetic construct
  source 1..20: mol_type = other DNA
gctcattgcaactttaactc

SEQ ID NO: 255199 - DNA, 20 bp, synthetic construct
  source 1..20: mol_type = other DNA
agctcattgcaactttaact

SEQ ID NO: 255200 - DNA, 20 bp, synthetic construct
  source 1..20: mol_type = other DNA
cagctcattgcaactttaac

SEQ ID NO: 255201 - DNA, 20 bp, synthetic construct
  source 1..20: mol_type = other DNA
acagctcattgcaactttaa

SEQ ID NO: 255202 - DNA, 20 bp, synthetic construct
  source 1..20: mol_type = other DNA
cacagctcattgcaacttta

SEQ ID NO: 255203 - DNA, 20 bp, synthetic construct
  source 1..20: mol_type = other DNA
tcacagctcattgcaacttt

SEQ ID NO: 255204 - DNA, 20 bp, synthetic construct
  source 1..20: mol_type = other DNA
atcacagctcattgcaactt

SEQ ID NO: 255205 - DNA, 20 bp, synthetic construct
  source 1..20: mol_type = other DNA
aatcacagctcattgcaact

SEQ ID NO: 255206 - DNA, 20 bp, synthetic construct
  source 1..20: mol_type = other DNA
caatcacagctcattgcaac

SEQ ID NO: 255207 - DNA, 20 bp, synthetic construct
  source 1..20: mol_type = other DNA
gcaatcacagctcattgcaa

SEQ ID NO: 255208 - DNA, 20 bp, synthetic construct
  source 1..20: mol_type = other DNA
tgcaatcacagctcattgca

SEQ ID NO: 255209 - DNA, 20 bp, synthetic construct
  source 1..20: mol_type = other DNA
gtgcaatcacagctcattgc

SEQ ID NO: 255210 - DNA, 20 bp, synthetic construct
  source 1..20: mol_type = other DNA
ggtgcaatcacagctcattg

SEQ ID NO: 255211 - DNA, 20 bp, synthetic construct
  source 1..20: mol_type = other DNA
tggtgcaatcacagctcatt

SEQ ID NO: 255212 - DNA, 20 bp, synthetic construct
  source 1..20: mol_type = other DNA
gtggtgcaatcacagctcat

SEQ ID NO: 255213 - DNA, 20 bp, synthetic construct
  source 1..20: mol_type = other DNA
agtggtgcaatcacagctca

SEQ ID NO: 255214 - DNA, 20 bp, synthetic construct
  source 1..20: mol_type = other DNA
cagtggtgcaatcacagctc

SEQ ID NO: 255215 - DNA, 20 bp, synthetic construct
  source 1..20: mol_type = other DNA
gcagtggtgcaatcacagct

SEQ ID NO: 255216 - DNA, 20 bp, synthetic construct
  source 1..20: mol_type = other DNA
tgcagtggtgcaatcacagc

SEQ ID NO: 255217 - DNA, 20 bp, synthetic construct
  source 1..20: mol_type = other DNA
gtgcagtggtgcaatcacag

SEQ ID NO: 255218 - DNA, 20 bp, synthetic construct
  source 1..20: mol_type = other DNA
agtgcagtggtgcaatcaca

SEQ ID NO: 255219 - DNA, 20 bp, synthetic construct
  source 1..20: mol_type = other DNA
gagtgcagtggtgcaatcac

SEQ ID NO: 255220 - DNA, 20 bp, synthetic construct
  source 1..20: mol_type = other DNA
agagtgcagtggtgcaatca

SEQ ID NO: 255221 - DNA, 20 bp, synthetic construct
  source 1..20: mol_type = other DNA
tagagtgcagtggtgcaatc

SEQ ID NO: 255222 - DNA, 20 bp, synthetic construct
  source 1..20: mol_type = other DNA
ctagagtgcagtggtgcaat

SEQ ID NO: 255223 - DNA, 20 bp, synthetic construct
  source 1..20: mol_type = other DNA
gctagagtgcagtggtgcaa

SEQ ID NO: 255224 - DNA, 20 bp, synthetic construct
  source 1..20: mol_type = other DNA
ggctagagtgcagtggtgca

SEQ ID NO: 255225 - DNA, 20 bp, synthetic construct
  source 1..20: mol_type = other DNA
aggctagagtgcagtggtgc

SEQ ID NO: 255226 - DNA, 20 bp, synthetic construct
  source 1..20: mol_type = other DNA
caggctagagtgcagtggtg

SEQ ID NO: 255227 - DNA, 20 bp, synthetic construct
  source 1..20: mol_type = other DNA
ccaggctagagtgcagtggt

SEQ ID NO: 255228 - DNA, 20 bp, synthetic construct
  source 1..20: mol_type = other DNA
cccaggctagagtgcagtgg

SEQ ID NO: 255229 - DNA, 20 bp, synthetic construct
  source 1..20: mol_type = other DNA
acccaggctagagtgcagtg

SEQ ID NO: 255230 - DNA, 20 bp, synthetic construct
  source 1..20: mol_type = other DNA
cacccaggctagagtgcagt

SEQ ID NO: 255231 - DNA, 20 bp, synthetic construct
  source 1..20: mol_type = other DNA
tcacccaggctagagtgcag

SEQ ID NO: 255232 - DNA, 20 bp, synthetic construct
  source 1..20: mol_type = other DNA
gtcacccaggctagagtgca

SEQ ID NO: 255233 - DNA, 20 bp, synthetic construct
  source 1..20: mol_type = other DNA
tgtcacccaggctagagtgc

SEQ ID NO: 255234 - DNA, 20 bp, synthetic construct
  source 1..20: mol_type = other DNA
ctgtcacccaggctagagtg

SEQ ID NO: 255235 - DNA, 20 bp, synthetic construct
  source 1..20: mol_type = other DNA
tctgtcacccaggctagagt

SEQ ID NO: 255236 - DNA, 20 bp, synthetic construct
  source 1..20: mol_type = other DNA
ttctgtcacccaggctagag

SEQ ID NO: 255237 - DNA, 20 bp, synthetic construct
  source 1..20: mol_type = other DNA
gttctgtcacccaggctaga

SEQ ID NO: 255238 - DNA, 20 bp, synthetic construct
  source 1..20: mol_type = other DNA
cgttctgtcacccaggctag

SEQ ID NO: 255239 - DNA, 20 bp, synthetic construct
  source 1..20: mol_type = other DNA
tcgttctgtcacccaggcta

SEQ ID NO: 255240 - DNA, 20 bp, synthetic construct
  source 1..20: mol_type = other DNA
ctcgttctgtcacccaggct

SEQ ID NO: 255241 - DNA, 20 bp, synthetic construct
  source 1..20: mol_type = other DNA
tctcgttctgtcacccaggc

SEQ ID NO: 255242 - DNA, 20 bp, synthetic construct
  source 1..20: mol_type = other DNA
gtctcgttctgtcacccagg

SEQ ID NO: 255243 - DNA, 20 bp, synthetic construct
  source 1..20: mol_type = other DNA
ggtctcgttctgtcacccag

SEQ ID NO: 255244 - DNA, 20 bp, synthetic construct
  source 1..20: mol_type = other DNA
gggtctcgttctgtcaccca

SEQ ID NO: 255245 - DNA, 20 bp, synthetic construct
  source 1..20: mol_type = other DNA
agggtctcgttctgtcaccc

SEQ ID NO: 255246 - DNA, 20 bp, synthetic construct
  source 1..20: mol_type = other DNA
cagggtctcgttctgtcacc

SEQ ID NO: 255247 - DNA, 20 bp, synthetic construct
  source 1..20: mol_type = other DNA
acagggtctcgttctgtcac

SEQ ID NO: 255248 - DNA, 20 bp, synthetic construct
  source 1..20: mol_type = other DNA
gacagggtctcgttctgtca

SEQ ID NO: 255249 - DNA, 20 bp, synthetic construct
  source 1..20: mol_type = other DNA
agacagggtctcgttctgtc

SEQ ID NO: 255250 - DNA, 20 bp, synthetic construct
  source 1..20: mol_type = other DNA
gagacagggtctcgttctgt

SEQ ID NO: 255251 - DNA, 20 bp, synthetic construct
  source 1..20: mol_type = other DNA
tgagacagggtctcgttctg

SEQ ID NO: 255252 - DNA, 20 bp, synthetic construct
  source 1..20: mol_type = other DNA
ttgagacagggtctcgttct

SEQ ID NO: 255253 - DNA, 20 bp, synthetic construct
  source 1..20: mol_type = other DNA
tttgagacagggtctcgttc

SEQ ID NO: 255254 - DNA, 20 bp, synthetic construct
  source 1..20: mol_type = other DNA
ttttgagacagggtctcgtt

SEQ ID NO: 255255 - DNA, 20 bp, synthetic construct
  source 1..20: mol_type = other DNA
tttttgagacagggtctcgt

SEQ ID NO: 255256 - DNA, 20 bp, synthetic construct
  source 1..20: mol_type = other DNA
ttttttgagacagggtctcg

SEQ ID NO: 255257 - DNA, 20 bp, synthetic construct
  source 1..20: mol_type = other DNA
tttttttgagacagggtctc

SEQ ID NO: 255258 - DNA, 20 bp, synthetic construct
  source 1..20: mol_type = other DNA
ttttttttgagacagggtct

SEQ ID NO: 255259 - DNA, 20 bp, synthetic construct
  source 1..20: mol_type = other DNA
tttttttttgagacagggtc

SEQ ID NO: 255260 - DNA, 20 bp, synthetic construct
  source 1..20: mol_type = other DNA
ttttttttttgagacagggt

SEQ ID NO: 255261 - DNA, 20 bp, synthetic construct
  source 1..20: mol_type = other DNA
tttttttttttgagacaggg

SEQ ID NO: 255262 - DNA, 20 bp, synthetic construct
  source 1..20: mol_type = other DNA
ttttttttttttgagacagg

SEQ ID NO: 255263 - DNA, 20 bp, synthetic construct
  source 1..20: mol_type = other DNA
tttttttttttttgagacag

SEQ ID NO: 255264 - DNA, 20 bp, synthetic construct
  source 1..20: mol_type = other DNA
ttttttttttttttgagaca

SEQ ID NO: 255265 - DNA, 20 bp, synthetic construct
  source 1..20: mol_type = other DNA
tttttttttttttttgagac

SEQ ID NO: 255266 - DNA, 20 bp, synthetic construct
  source 1..20: mol_type = other DNA
ctttttttttttttttgaga

SEQ ID NO: 255267 - DNA, 20 bp, synthetic construct
  source 1..20: mol_type = other DNA
tctttttttttttttttgag

SEQ ID NO: 255268 - DNA, 20 bp, synthetic construct
  source 1..20: mol_type = other DNA
ttctttttttttttttttga

SEQ ID NO: 255269 - DNA, 20 bp, synthetic construct
  source 1..20: mol_type = other DNA
tttctttttttttttttttg

SEQ ID NO: 255270 - DNA, 20 bp, synthetic construct
  source 1..20: mol_type = other DNA
ctttcttttttttttttttt

SEQ ID NO: 255271 - DNA, 20 bp, synthetic construct
  source 1..20: mol_type = other DNA
tctttctttttttttttttt

SEQ ID NO: 255272 - DNA, 20 bp, synthetic construct
  source 1..20: mol_type = other DNA
ttctttcttttttttttttt

SEQ ID NO: 255273 - DNA, 20 bp, synthetic construct
  source 1..20: mol_type = other DNA
tttctttctttttttttttt

SEQ ID NO: 255274 - DNA, 20 bp, synthetic construct
  source 1..20: mol_type = other DNA
ctttctttcttttttttttt

SEQ ID NO: 255275 - DNA, 20 bp, synthetic construct
  source 1..20: mol_type = other DNA
tctttctttctttttttttt

SEQ ID NO: 255276 - DNA, 20 bp, synthetic construct
  source 1..20: mol_type = other DNA
ttctttctttcttttttttt

SEQ ID NO: 255277 - DNA, 20 bp, synthetic construct
  source 1..20: mol_type = other DNA
tttctttctttctttttttt

SEQ ID NO: 255278 - DNA, 20 bp, synthetic construct
  source 1..20: mol_type = other DNA
ctttctttctttcttttttt

SEQ ID NO: 255279 - DNA, 20 bp, synthetic construct
  source 1..20: mol_type = other DNA
cctttctttctttctttttt

SEQ ID NO: 255280 - DNA, 20 bp, synthetic construct
  source 1..20: mol_type = other DNA
tcctttctttctttcttttt

SEQ ID NO: 255281 - DNA, 20 bp, synthetic construct
  source 1..20: mol_type = other DNA
ttcctttctttctttctttt

SEQ ID NO: 255282 - DNA, 20 bp, synthetic construct
  source 1..20: mol_type = other DNA
tttcctttctttctttcttt

SEQ ID NO: 255283 - DNA, 20 bp, synthetic construct
  source 1..20: mol_type = other DNA
ttttcctttctttctttctt

SEQ ID NO: 255284 - DNA, 20 bp, synthetic construct
  source 1..20: mol_type = other DNA
tttttcctttctttctttct

SEQ ID NO: 255285 - DNA, 20 bp, synthetic construct
  source 1..20: mol_type = other DNA
ttttttcctttctttctttc

SEQ ID NO: 255286 - DNA, 20 bp, synthetic construct
  source 1..20: mol_type = other DNA
tttttttcctttctttcttt

SEQ ID NO: 255287 - DNA, 20 bp, synthetic construct
  source 1..20: mol_type = other DNA
ttttttttcctttctttctt

SEQ ID NO: 255288 - DNA, 20 bp, synthetic construct
  source 1..20: mol_type = other DNA
tttttttttcctttctttct

SEQ ID NO: 255289 - DNA, 20 bp, synthetic construct
  source 1..20: mol_type = other DNA
ttttttttttcctttctttc

SEQ ID NO: 255290 - DNA, 20 bp, synthetic construct
  source 1..20: mol_type = other DNA
gttttttttttcctttcttt

SEQ ID NO: 255291 - DNA, 20 bp, synthetic construct
  source 1..20: mol_type = other DNA
agttttttttttcctttctt

SEQ ID NO: 255292 - DNA, 20 bp, synthetic construct
  source 1..20: mol_type = other DNA
gagttttttttttcctttct

SEQ ID NO: 255293 - DNA, 20 bp, synthetic construct
  source 1..20: mol_type = other DNA
tgagttttttttttcctttc

SEQ ID NO: 255294 - DNA, 20 bp, synthetic construct
  source 1..20: mol_type = other DNA
atgagttttttttttccttt

SEQ ID NO: 255295 - DNA, 20 bp, synthetic construct
  source 1..20: mol_type = other DNA
catgagttttttttttcctt

SEQ ID NO: 255296 - DNA, 20 bp, synthetic construct
  source 1..20: mol_type = other DNA
gcatgagttttttttttcct

SEQ ID NO: 255297 - DNA, 20 bp, synthetic construct
  source 1..20: mol_type = other DNA
ggcatgagttttttttttcc

SEQ ID NO: 255298 - DNA, 20 bp, synthetic construct
  source 1..20: mol_type = other DNA
aggcatgagttttttttttc

SEQ ID NO: 255299 - DNA, 20 bp, synthetic construct
  source 1..20: mol_type = other DNA
caggcatgagtttttttttt

SEQ ID NO: 255300 - DNA, 20 bp, synthetic construct
  source 1..20: mol_type = other DNA
acaggcatgagttttttttt

SEQ ID NO: 255301 - DNA, 20 bp, synthetic construct
  source 1..20: mol_type = other DNA
tacaggcatgagtttttttt

SEQ ID NO: 255302 - DNA, 20 bp, synthetic construct
  source 1..20: mol_type = other DNA
ttacaggcatgagttttttt

SEQ ID NO: 255303 - DNA, 20 bp, synthetic construct
  source 1..20: mol_type = other DNA
attacaggcatgagtttttt

SEQ ID NO: 255304 - DNA, 20 bp, synthetic construct
  source 1..20: mol_type = other DNA
gattacaggcatgagttttt

SEQ ID NO: 255305 - DNA, 20 bp, synthetic construct
  source 1..20: mol_type = other DNA
ggattacaggcatgagtttt

SEQ ID NO: 255306 - DNA, 20 bp, synthetic construct
  source 1..20: mol_type = other DNA
gggattacaggcatgagttt

SEQ ID NO: 255307 - DNA, 20 bp, synthetic construct
  source 1..20: mol_type = other DNA
tgggattacaggcatgagtt

SEQ ID NO: 255308 - DNA, 20 bp, synthetic construct
  source 1..20: mol_type = other DNA
ctgggattacaggcatgagt

SEQ ID NO: 255309 - DNA, 20 bp, synthetic construct
  source 1..20: mol_type = other DNA
gctgggattacaggcatgag

SEQ ID NO: 255310 - DNA, 20 bp, synthetic construct
  source 1..20: mol_type = other DNA
tgctgggattacaggcatga

SEQ ID NO: 255311 - DNA, 20 bp, synthetic construct
  source 1..20: mol_type = other DNA
gtgctgggattacaggcatg

SEQ ID NO: 255312 - DNA, 20 bp, synthetic construct
  source 1..20: mol_type = other DNA
agtgctgggattacaggcat

SEQ ID NO: 255313 - DNA, 20 bp, synthetic construct
  source 1..20: mol_type = other DNA
aagtgctgggattacaggca

SEQ ID NO: 255314 - DNA, 20 bp, synthetic construct
  source 1..20: mol_type = other DNA
aaagtgctgggattacaggc

SEQ ID NO: 255315 - DNA, 20 bp, synthetic construct
  source 1..20: mol_type = other DNA
caaagtgctgggattacagg

SEQ ID NO: 255316 - DNA, 20 bp, synthetic construct
  source 1..20: mol_type = other DNA
ccaaagtgctgggattacag

SEQ ID NO: 255317 - DNA, 20 bp, synthetic construct
  source 1..20: mol_type = other DNA
cccaaagtgctgggattaca

SEQ ID NO: 255318 - DNA, 20 bp, synthetic construct
  source 1..20: mol_type = other DNA
ccccaaagtgctgggattac

SEQ ID NO: 255319 - DNA, 20 bp, synthetic construct
  source 1..20: mol_type = other DNA
tccccaaagtgctgggatta

SEQ ID NO: 255320 - DNA, 20 bp, synthetic construct
  source 1..20: mol_type = other DNA
gtccccaaagtgctgggatt

SEQ ID NO: 255321 - DNA, 20 bp, synthetic construct
  source 1..20: mol_type = other DNA
ggtccccaaagtgctgggat

SEQ ID NO: 255322 - DNA, 20 bp, synthetic construct
  source 1..20: mol_type = other DNA
cggtccccaaagtgctggga

SEQ ID NO: 255323 - DNA, 20 bp, synthetic construct
  source 1..20: mol_type = other DNA
ccggtccccaaagtgctggg

SEQ ID NO: 255324 - DNA, 20 bp, synthetic construct
  source 1..20: mol_type = other DNA
cccggtccccaaagtgctgg

SEQ ID NO: 255325 - DNA, 20 bp, synthetic construct
  source 1..20: mol_type = other DNA
ccccggtccccaaagtgctg

SEQ ID NO: 255326 - DNA, 20 bp, synthetic construct
  source 1..20: mol_type = other DNA
accccggtccccaaagtgct

SEQ ID NO: 255327 - DNA, 20 bp, synthetic construct
  source 1..20: mol_type = other DNA
caccccggtccccaaagtgc

SEQ ID NO: 255328 - DNA, 20 bp, synthetic construct
  source 1..20: mol_type = other DNA
ccaccccggtccccaaagtg

SEQ ID NO: 255329 - DNA, 20 bp, synthetic construct
  source 1..20: mol_type = other DNA
cccaccccggtccccaaagt

SEQ ID NO: 255330 - DNA, 20 bp, synthetic construct
  source 1..20: mol_type = other DNA
gcccaccccggtccccaaag

SEQ ID NO: 255331 - DNA, 20 bp, synthetic construct
  source 1..20: mol_type = other DNA
tgcccaccccggtccccaaa

SEQ ID NO: 255332 - DNA, 20 bp, synthetic construct
  source 1..20: mol_type = other DNA
ctgcccaccccggtccccaa

SEQ ID NO: 255333 - DNA, 20 bp, synthetic construct
  source 1..20: mol_type = other DNA
tctgcccaccccggtcccca

SEQ ID NO: 255334 - DNA, 20 bp, synthetic construct
  source 1..20: mol_type = other DNA
atctgcccaccccggtcccc

SEQ ID NO: 255335 - DNA, 20 bp, synthetic construct
  source 1..20: mol_type = other DNA
gatctgcccaccccggtccc

SEQ ID NO: 255336 - DNA, 20 bp, synthetic construct
  source 1..20: mol_type = other DNA
tgatctgcccaccccggtcc

SEQ ID NO: 255337 - DNA, 20 bp, synthetic construct
  source 1..20: mol_type = other DNA
gtgatctgcccaccccggtc

SEQ ID NO: 255338 - DNA, 20 bp, synthetic construct
  source 1..20: mol_type = other DNA
cgtgatctgcccaccccggt

SEQ ID NO: 255339 - DNA, 20 bp, synthetic construct
  source 1..20: mol_type = other DNA
tcgtgatctgcccaccccgg

SEQ ID NO: 255340 - DNA, 20 bp, synthetic construct
  source 1..20: mol_type = other DNA
ctcgtgatctgcccaccccg

SEQ ID NO: 255341 - DNA, 20 bp, synthetic construct
  source 1..20: mol_type = other DNA
cctcgtgatctgcccacccc

SEQ ID NO: 255342 - DNA, 20 bp, synthetic construct
  source 1..20: mol_type = other DNA
acctcgtgatctgcccaccc

SEQ ID NO: 255343 - DNA, 20 bp, synthetic construct
  source 1..20: mol_type = other DNA
gacctcgtgatctgcccacc

SEQ ID NO: 255344 - DNA, 20 bp, synthetic construct
  source 1..20: mol_type = other DNA
tgacctcgtgatctgcccac

SEQ ID NO: 255345 - DNA, 20 bp, synthetic construct
  source 1..20: mol_type = other DNA
ctgacctcgtgatctgccca

SEQ ID NO: 255346 - DNA, 20 bp, synthetic construct
  source 1..20: mol_type = other DNA
cctgacctcgtgatctgccc

SEQ ID NO: 255347 - DNA, 20 bp, synthetic construct
  source 1..20: mol_type = other DNA
tcctgacctcgtgatctgcc

SEQ ID NO: 255348 - DNA, 20 bp, synthetic construct
  source 1..20: mol_type = other DNA
ctcctgacctcgtgatctgc

SEQ ID NO: 255349 - DNA, 20 bp, synthetic construct
  source 1..20: mol_type = other DNA
tctcctgacctcgtgatctg

SEQ ID NO: 255350 - DNA, 20 bp, synthetic construct
  source 1..20: mol_type = other DNA
atctcctgacctcgtgatct

SEQ ID NO: 255351 - DNA, 20 bp, synthetic construct
  source 1..20: mol_type = other DNA
gatctcctgacctcgtgatc

SEQ ID NO: 255352 - DNA, 20 bp, synthetic construct
  source 1..20: mol_type = other DNA
tgatctcctgacctcgtgat

SEQ ID NO: 255353 - DNA, 20 bp, synthetic construct
  source 1..20: mol_type = other DNA
ttgatctcctgacctcgtga

SEQ ID NO: 255354 - DNA, 20 bp, synthetic construct
  source 1..20: mol_type = other DNA
cttgatctcctgacctcgtg

SEQ ID NO: 255355 - DNA, 20 bp, synthetic construct
  source 1..20: mol_type = other DNA
tcttgatctcctgacctcgt

SEQ ID NO: 255356 - DNA, 20 bp, synthetic construct
  source 1..20: mol_type = other DNA
gtcttgatctcctgacctcg

SEQ ID NO: 255357 - DNA, 20 bp, synthetic construct
  source 1..20: mol_type = other DNA
agtcttgatctcctgacctc

SEQ ID NO: 255358 - DNA, 20 bp, synthetic construct
  source 1..20: mol_type = other DNA
tagtcttgatctcctgacct

SEQ ID NO: 255359 - DNA, 20 bp, synthetic construct
  source 1..20: mol_type = other DNA
atagtcttgatctcctgacc

SEQ ID NO: 255360 - DNA, 20 bp, synthetic construct
  source 1..20: mol_type = other DNA
gatagtcttgatctcctgac

SEQ ID NO: 255361 - DNA, 20 bp, synthetic construct
  source 1..20: mol_type = other DNA
ggatagtcttgatctcctga

SEQ ID NO: 255362 - DNA, 20 bp, synthetic construct
  source 1..20: mol_type = other DNA
aggatagtcttgatctcctg

SEQ ID NO: 255363 - DNA, 20 bp, synthetic construct
  source 1..20: mol_type = other DNA
caggatagtcttgatctcct

SEQ ID NO: 255364 - DNA, 20 bp, synthetic construct
  source 1..20: mol_type = other DNA
ccaggatagtcttgatctcc

SEQ ID NO: 255365 - DNA, 20 bp, synthetic construct
  source 1..20: mol_type = other DNA
gccaggatagtcttgatctc

SEQ ID NO: 255366 - DNA, 20 bp, synthetic construct
  source 1..20: mol_type = other DNA
ggccaggatagtcttgatct

SEQ ID NO: 255367 - DNA, 20 bp, synthetic construct
  source 1..20: mol_type = other DNA
tggccaggatagtcttgatc

SEQ ID NO: 255368 - DNA, 20 bp, synthetic construct
  source 1..20: mol_type = other DNA
ttggccaggatagtcttgat

SEQ ID NO: 255369 - DNA, 20 bp, synthetic construct
  source 1..20: mol_type = other DNA
gttggccaggatagtcttga

SEQ ID NO: 255370 - DNA, 20 bp, synthetic construct
  source 1..20: mol_type = other DNA
tgttggccaggatagtcttg

SEQ ID NO: 255371 - DNA, 20 bp, synthetic construct
  source 1..20: mol_type = other DNA
atgttggccaggatagtctt

SEQ ID NO: 255372 - DNA, 20 bp, synthetic construct
  source 1..20: mol_type = other DNA
catgttggccaggatagtct

SEQ ID NO: 255373 - DNA, 20 bp, synthetic construct
  source 1..20: mol_type = other DNA
ccatgttggccaggatagtc

SEQ ID NO: 255374 - DNA, 20 bp, synthetic construct
  source 1..20: mol_type = other DNA
accatgttggccaggatagt

SEQ ID NO: 255375 - DNA, 20 bp, synthetic construct
  source 1..20: mol_type = other DNA
caccatgttggccaggatag

SEQ ID NO: 255376 - DNA, 20 bp, synthetic construct
  source 1..20: mol_type = other DNA
tcaccatgttggccaggata

SEQ ID NO: 255377 - DNA, 20 bp, synthetic construct
  source 1..20: mol_type = other DNA
ttcaccatgttggccaggat

SEQ ID NO: 255378 - DNA, 20 bp, synthetic construct
  source 1..20: mol_type = other DNA
tttcaccatgttggccagga

SEQ ID NO: 255379 - DNA, 20 bp, synthetic construct
  source 1..20: mol_type = other DNA
gtttcaccatgttggccagg

SEQ ID NO: 255380 - DNA, 20 bp, synthetic construct
  source 1..20: mol_type = other DNA
ggtttcaccatgttggccag

SEQ ID NO: 255381 - DNA, 20 bp, synthetic construct
  source 1..20: mol_type = other DNA
gggtttcaccatgttggcca

SEQ ID NO: 255382 - DNA, 20 bp, synthetic construct
  source 1..20: mol_type = other DNA
ggggtttcaccatgttggcc

SEQ ID NO: 255383 - DNA, 20 bp, synthetic construct
  source 1..20: mol_type = other DNA
cggggtttcaccatgttggc

SEQ ID NO: 255384 - DNA, 20 bp, synthetic construct
  source 1..20: mol_type = other DNA
acggggtttcaccatgttgg

SEQ ID NO: 255385 - DNA, 20 bp, synthetic construct
  source 1..20: mol_type = other DNA
aacggggtttcaccatgttg

SEQ ID NO: 255386 - DNA, 20 bp, synthetic construct
  source 1..20: mol_type = other DNA
aaacggggtttcaccatgtt

SEQ ID NO: 255387 - DNA, 20 bp, synthetic construct
  source 1..20: mol_type = other DNA
gaaacggggtttcaccatgt

SEQ ID NO: 255388 - DNA, 20 bp, synthetic construct
  source 1..20: mol_type = other DNA
agaaacggggtttcaccatg

SEQ ID NO: 255389 - DNA, 20 bp, synthetic construct
  source 1..20: mol_type = other DNA
tagaaacggggtttcaccat

SEQ ID NO: 255390 - DNA, 20 bp, synthetic construct
  source 1..20: mol_type = other DNA
gtagaaacggggtttcacca

SEQ ID NO: 255391 - DNA, 20 bp, synthetic construct
  source 1..20: mol_type = other DNA
agtagaaacggggtttcacc

SEQ ID NO: 255392 - DNA, 20 bp, synthetic construct
  source 1..20: mol_type = other DNA
tagtagaaacggggtttcac

SEQ ID NO: 255393 - DNA, 20 bp, synthetic construct
  source 1..20: mol_type = other DNA
ttagtagaaacggggtttca

SEQ ID NO: 255394 - DNA, 20 bp, synthetic construct
  source 1..20: mol_type = other DNA
tttagtagaaacggggtttc

SEQ ID NO: 255395 - DNA, 20 bp, synthetic construct
  source 1..20: mol_type = other DNA
ttttagtagaaacggggttt

SEQ ID NO: 255396 - DNA, 20 bp, synthetic construct
  source 1..20: mol_type = other DNA
tttttagtagaaacggggtt

SEQ ID NO: 255397 - DNA, 20 bp, synthetic construct
  source 1..20: mol_type = other DNA
atttttagtagaaacggggt

SEQ ID NO: 255398 - DNA, 20 bp, synthetic construct
  source 1..20: mol_type = other DNA
tatttttagtagaaacgggg

SEQ ID NO: 255399 - DNA, 20 bp, synthetic construct
  source 1..20: mol_type = other DNA
gtatttttagtagaaacggg

SEQ ID NO: 255400 - DNA, 20 bp, synthetic construct
  source 1..20: mol_type = other DNA
tgtatttttagtagaaacgg

SEQ ID NO: 255401 - DNA, 20 bp, synthetic construct
  source 1..20: mol_type = other DNA
ttgtatttttagtagaaacg

SEQ ID NO: 255402 - DNA, 20 bp, synthetic construct
  source 1..20: mol_type = other DNA
tttgtatttttagtagaaac

SEQ ID NO: 255403 - DNA, 20 bp, synthetic construct
  source 1..20: mol_type = other DNA
ttttgtatttttagtagaaa

SEQ ID NO: 255404 - DNA, 20 bp, synthetic construct
  source 1..20: mol_type = other DNA
tttttgtatttttagtagaa

SEQ ID NO: 255405 - DNA, 20 bp, synthetic construct
  source 1..20: mol_type = other DNA
atttttgtatttttagtaga

SEQ ID NO: 255406 - DNA, 20 bp, synthetic construct
  source 1..20: mol_type = other DNA
aatttttgtatttttagtag

SEQ ID NO: 255407 - DNA, 20 bp, synthetic construct
  source 1..20: mol_type = other DNA
taatttttgtatttttagta

SEQ ID NO: 255408 - DNA, 20 bp, synthetic construct
  source 1..20: mol_type = other DNA
ctaatttttgtatttttagt

SEQ ID NO: 255409 - DNA, 20 bp, synthetic construct
  source 1..20: mol_type = other DNA
gctaatttttgtatttttag

SEQ ID NO: 255410 - DNA, 20 bp, synthetic construct
  source 1..20: mol_type = other DNA
ggctaatttttgtattttta

SEQ ID NO: 255411 - DNA, 20 bp, synthetic construct
  source 1..20: mol_type = other DNA
tggctaatttttgtattttt

SEQ ID NO: 255412 - DNA, 20 bp, synthetic construct
  source 1..20: mol_type = other DNA
ctggctaatttttgtatttt

SEQ ID NO: 255413 - DNA, 20 bp, synthetic construct
  source 1..20: mol_type = other DNA
cctggctaatttttgtattt

SEQ ID NO: 255414 - DNA, 20 bp, synthetic construct
  source 1..20: mol_type = other DNA
acctggctaatttttgtatt

SEQ ID NO: 255415 - DNA, 20 bp, synthetic construct
  source 1..20: mol_type = other DNA
cacctggctaatttttgtat

SEQ ID NO: 255416 - DNA, 20 bp, synthetic construct
  source 1..20: mol_type = other DNA
acacctggctaatttttgta

SEQ ID NO: 255417 - DNA, 20 bp, synthetic construct
  source 1..20: mol_type = other DNA
cacacctggctaatttttgt

SEQ ID NO: 255418 - DNA, 20 bp, synthetic construct
  source 1..20: mol_type = other DNA
ccacacctggctaatttttg

SEQ ID NO: 255419 - DNA, 20 bp, synthetic construct
  source 1..20: mol_type = other DNA
accacacctggctaattttt

SEQ ID NO: 255420 - DNA, 20 bp, synthetic construct
  source 1..20: mol_type = other DNA
caccacacctggctaatttt

SEQ ID NO: 255421 - DNA, 20 bp, synthetic construct
  source 1..20: mol_type = other DNA
ccaccacacctggctaattt

SEQ ID NO: 255422 - DNA, 20 bp, synthetic construct
  source 1..20: mol_type = other DNA
gccaccacacctggctaatt

SEQ ID NO: 255423 - DNA, 20 bp, synthetic construct
  source 1..20: mol_type = other DNA
tgccaccacacctggctaat

SEQ ID NO: 255424 - DNA, 20 bp, synthetic construct
  source 1..20: mol_type = other DNA
gtgccaccacacctggctaa

SEQ ID NO: 255425 - DNA, 20 bp, synthetic construct
  source 1..20: mol_type = other DNA
cgtgccaccacacctggcta

SEQ ID NO: 255426 - DNA, 20 bp, synthetic construct
  source 1..20: mol_type = other DNA
acgtgccaccacacctggct

SEQ ID NO: 255427 - DNA, 20 bp, synthetic construct
  source 1..20: mol_type = other DNA
cacgtgccaccacacctggc

SEQ ID NO: 255428 - DNA, 20 bp, synthetic construct
  source 1..20: mol_type = other DNA
gcacgtgccaccacacctgg

SEQ ID NO: 255429 - DNA, 20 bp, synthetic construct
  source 1..20: mol_type = other DNA
ggcacgtgccaccacacctg

SEQ ID NO: 255430 - DNA, 20 bp, synthetic construct
  source 1..20: mol_type = other DNA
aggcacgtgccaccacacct

SEQ ID NO: 255431 - DNA, 20 bp, synthetic construct
  source 1..20: mol_type = other DNA
caggcacgtgccaccacacc

SEQ ID NO: 255432 - DNA, 20 bp, synthetic construct
  source 1..20: mol_type = other DNA
acaggcacgtgccaccacac

SEQ ID NO: 255433 - DNA, 20 bp, synthetic construct
  source 1..20: mol_type = other DNA
tacaggcacgtgccaccaca

SEQ ID NO: 255434 - DNA, 20 bp, synthetic construct
  source 1..20: mol_type = other DNA
ttacaggcacgtgccaccac

SEQ ID NO: 255435 - DNA, 20 bp, synthetic construct
  source 1..20: mol_type = other DNA
attacaggcacgtgccacca

SEQ ID NO: 255436 - DNA, 20 bp, synthetic construct
  source 1..20: mol_type = other DNA
gattacaggcacgtgccacc

SEQ ID NO: 255437 - DNA, 20 bp, synthetic construct
  source 1..20: mol_type = other DNA
ggattacaggcacgtgccac

SEQ ID NO: 255438 - DNA, 20 bp, synthetic construct
  source 1..20: mol_type = other DNA
gggattacaggcacgtgcca

SEQ ID NO: 255439 - DNA, 20 bp, synthetic construct
  source 1..20: mol_type = other DNA
tgggattacaggcacgtgcc

SEQ ID NO: 255440 - DNA, 20 bp, synthetic construct
  source 1..20: mol_type = other DNA
ctgggattacaggcacgtgc

SEQ ID NO: 255441 - DNA, 20 bp, synthetic construct
  source 1..20: mol_type = other DNA
actgggattacaggcacgtg

SEQ ID NO: 255442 - DNA, 20 bp, synthetic construct
  source 1..20: mol_type = other DNA
aactgggattacaggcacgt

SEQ ID NO: 255443 - DNA, 20 bp, synthetic construct
  source 1..20: mol_type = other DNA
taactgggattacaggcacg

SEQ ID NO: 255444 - DNA, 20 bp, synthetic construct
  source 1..20: mol_type = other DNA
gtaactgggattacaggcac

SEQ ID NO: 255445 - DNA, 20 bp, synthetic construct
  source 1..20: mol_type = other DNA
agtaactgggattacaggca

SEQ ID NO: 255446 - DNA, 20 bp, synthetic construct
  source 1..20: mol_type = other DNA
gagtaactgggattacaggc

SEQ ID NO: 255447 - DNA, 20 bp, synthetic construct
  source 1..20: mol_type = other DNA
cgagtaactgggattacagg

SEQ ID NO: 255448 - DNA, 20 bp, synthetic construct
  source 1..20: mol_type = other DNA
ccgagtaactgggattacag

SEQ ID NO: 255449 - DNA, 20 bp, synthetic construct
  source 1..20: mol_type = other DNA
cccgagtaactgggattaca

SEQ ID NO: 255450 - DNA, 20 bp, synthetic construct
  source 1..20: mol_type = other DNA
tcccgagtaactgggattac

SEQ ID NO: 255451 - DNA, 20 bp, synthetic construct
  source 1..20: mol_type = other DNA
ctcccgagtaactgggatta

SEQ ID NO: 255452 - DNA, 20 bp, synthetic construct
  source 1..20: mol_type = other DNA
cctcccgagtaactgggatt

SEQ ID NO: 255453 - DNA, 20 bp, synthetic construct
  source 1..20: mol_type = other DNA
gcctcccgagtaactgggat

SEQ ID NO: 255454 - DNA, 20 bp, synthetic construct
  source 1..20: mol_type = other DNA
agcctcccgagtaactggga

SEQ ID NO: 255455 - DNA, 20 bp, synthetic construct
  source 1..20: mol_type = other DNA
cagcctcccgagtaactggg

SEQ ID NO: 255456 - DNA, 20 bp, synthetic construct
  source 1..20: mol_type = other DNA
tcagcctcccgagtaactgg

SEQ ID NO: 255457 - DNA, 20 bp, synthetic construct
  source 1..20: mol_type = other DNA
ctcagcctcccgagtaactg

SEQ ID NO: 255458 - DNA, 20 bp, synthetic construct
  source 1..20: mol_type = other DNA
cctcagcctcccgagtaact

SEQ ID NO: 255459 - DNA, 20 bp, synthetic construct
  source 1..20: mol_type = other DNA
gcctcagcctcccgagtaac

SEQ ID NO: 255460 - DNA, 20 bp, synthetic construct
  source 1..20: mol_type = other DNA
tgcctcagcctcccgagtaa

SEQ ID NO: 255461 - DNA, 20 bp, synthetic construct
  source 1..20: mol_type = other DNA
ctgcctcagcctcccgagta

SEQ ID NO: 255462 - DNA, 20 bp, synthetic construct
  source 1..20: mol_type = other DNA
cctgcctcagcctcccgagt

SEQ ID NO: 255463 - DNA, 20 bp, synthetic construct
  source 1..20: mol_type = other DNA
tcctgcctcagcctcccgag

SEQ ID NO: 255464 - DNA, 20 bp, synthetic construct
  source 1..20: mol_type = other DNA
ctcctgcctcagcctcccga

SEQ ID NO: 255465 - DNA, 20 bp, synthetic construct
  source 1..20: mol_type = other DNA
tctcctgcctcagcctcccg

SEQ ID NO: 255466 - DNA, 20 bp, synthetic construct
  source 1..20: mol_type = other DNA
ttctcctgcctcagcctccc

SEQ ID NO: 255467 - DNA, 20 bp, synthetic construct
  source 1..20: mol_type = other DNA
attctcctgcctcagcctcc

SEQ ID NO: 255468 - DNA, 20 bp, synthetic construct
  source 1..20: mol_type = other DNA
gattctcctgcctcagcctc

SEQ ID NO: 255469 - DNA, 20 bp, synthetic construct
  source 1..20: mol_type = other DNA
cgattctcctgcctcagcct

SEQ ID NO: 255470 - DNA, 20 bp, synthetic construct
  source 1..20: mol_type = other DNA
gcgattctcctgcctcagcc

SEQ ID NO: 255471 - DNA, 20 bp, synthetic construct
  source 1..20: mol_type = other DNA
agcgattctcctgcctcagc

SEQ ID NO: 255472 - DNA, 20 bp, synthetic construct
  source 1..20: mol_type = other DNA
aagcgattctcctgcctcag

SEQ ID NO: 255473 - DNA, 20 bp, synthetic construct
  source 1..20: mol_type = other DNA
caagcgattctcctgcctca

SEQ ID NO: 255474 - DNA, 20 bp, synthetic construct
  source 1..20: mol_type = other DNA
tcaagcgattctcctgcctc

SEQ ID NO: 255475 - DNA, 20 bp, synthetic construct
  source 1..20: mol_type = other DNA
ttcaagcgattctcctgcct

SEQ ID NO: 255476 - DNA, 20 bp, synthetic construct
  source 1..20: mol_type = other DNA
gttcaagcgattctcctgcc

SEQ ID NO: 255477 - DNA, 20 bp, synthetic construct
  source 1..20: mol_type = other DNA
ggttcaagcgattctcctgc

SEQ ID NO: 255478 - DNA, 20 bp, synthetic construct
  source 1..20: mol_type = other DNA
tggttcaagcgattctcctg

SEQ ID NO: 255479 - DNA, 20 bp, synthetic construct
  source 1..20: mol_type = other DNA
ctggttcaagcgattctcct

SEQ ID NO: 255480 - DNA, 20 bp, synthetic construct
  source 1..20: mol_type = other DNA
cctggttcaagcgattctcc

SEQ ID NO: 255481 - DNA, 20 bp, synthetic construct
  source 1..20: mol_type = other DNA
ccctggttcaagcgattctc

SEQ ID NO: 255482 - DNA, 20 bp, synthetic construct
  source 1..20: mol_type = other DNA
tccctggttcaagcgattct

SEQ ID NO: 255483 - DNA, 20 bp, synthetic construct
  source 1..20: mol_type = other DNA
ctccctggttcaagcgattc

SEQ ID NO: 255484 - DNA, 20 bp, synthetic construct
  source 1..20: mol_type = other DNA
actccctggttcaagcgatt

SEQ ID NO: 255485 - DNA, 20 bp, synthetic construct
  source 1..20: mol_type = other DNA
gactccctggttcaagcgat

SEQ ID NO: 255486 - DNA, 20 bp, synthetic construct
  source 1..20: mol_type = other DNA
tgactccctggttcaagcga

SEQ ID NO: 255487 - DNA, 20 bp, synthetic construct
  source 1..20: mol_type = other DNA
ctgactccctggttcaagcg

SEQ ID NO: 255488 - DNA, 20 bp, synthetic construct
  source 1..20: mol_type = other DNA
tctgactccctggttcaagc

SEQ ID NO: 255489 - DNA, 20 bp, synthetic construct
  source 1..20: mol_type = other DNA
ctctgactccctggttcaag

SEQ ID NO: 255490 - DNA, 20 bp, synthetic construct
  source 1..20: mol_type = other DNA
cctctgactccctggttcaa

SEQ ID NO: 255491 - DNA, 20 bp, synthetic construct
  source 1..20: mol_type = other DNA
acctctgactccctggttca

SEQ ID NO: 255492 - DNA, 20 bp, synthetic construct
  source 1..20: mol_type = other DNA
aacctctgactccctggttc

SEQ ID NO: 255493 - DNA, 20 bp, synthetic construct
  source 1..20: mol_type = other DNA
caacctctgactccctggtt

SEQ ID NO: 255494 - DNA, 20 bp, synthetic construct
  source 1..20: mol_type = other DNA
gcaacctctgactccctggt

SEQ ID NO: 255495 - DNA, 20 bp, synthetic construct
  source 1..20: mol_type = other DNA
tgcaacctctgactccctgg

SEQ ID NO: 255496 - DNA, 20 bp, synthetic construct
  source 1..20: mol_type = other DNA
ctgcaacctctgactccctg

SEQ ID NO: 255497 - DNA, 20 bp, synthetic construct
  source 1..20: mol_type = other DNA
actgcaacctctgactccct

SEQ ID NO: 255498 - DNA, 20 bp, synthetic construct
  source 1..20: mol_type = other DNA
cactgcaacctctgactccc

SEQ ID NO: 255499 - DNA, 20 bp, synthetic construct
  source 1..20: mol_type = other DNA
tcactgcaacctctgactcc

SEQ ID NO: 255500 - DNA, 20 bp, synthetic construct
  source 1..20: mol_type = other DNA
ctcactgcaacctctgactc

SEQ ID NO: 255501 - DNA, 20 bp, synthetic construct
  source 1..20: mol_type = other DNA
gctcactgcaacctctgact

SEQ ID NO: 255502 - DNA, 20 bp, synthetic construct
  source 1..20: mol_type = other DNA
agctcactgcaacctctgac

SEQ ID NO: 255503 - DNA, 20 bp, synthetic construct
  source 1..20: mol_type = other DNA
cagctcactgcaacctctga

SEQ ID NO: 255504 - DNA, 20 bp, synthetic construct
  source 1..20: mol_type = other DNA
tcagctcactgcaacctctg

SEQ ID NO: 255505 - DNA, 20 bp, synthetic construct
  source 1..20: mol_type = other DNA
ctcagctcactgcaacctct

SEQ ID NO: 255506 - DNA, 20 bp, synthetic construct
  source 1..20: mol_type = other DNA
tctcagctcactgcaacctc

SEQ ID NO: 255507 - DNA, 20 bp, synthetic construct
  source 1..20: mol_type = other DNA
atctcagctcactgcaacct

SEQ ID NO: 255508 - DNA, 20 bp, synthetic construct
  source 1..20: mol_type = other DNA
gatctcagctcactgcaacc

SEQ ID NO: 255509 - DNA, 20 bp, synthetic construct
  source 1..20: mol_type = other DNA
cgatctcagctcactgcaac

SEQ ID NO: 255510 - DNA, 20 bp, synthetic construct
  source 1..20: mol_type = other DNA
acgatctcagctcactgcaa

SEQ ID NO: 255511 - DNA, 20 bp, synthetic construct
  source 1..20: mol_type = other DNA
cacgatctcagctcactgca

SEQ ID NO: 255512 - DNA, 20 bp, synthetic construct
  source 1..20: mol_type = other DNA
gcacgatctcagctcactgc

SEQ ID NO: 255513 - DNA, 20 bp, synthetic construct
  source 1..20: mol_type = other DNA
ggcacgatctcagctcactg

SEQ ID NO: 255514 - DNA, 20 bp, synthetic construct
  source 1..20: mol_type = other DNA
tggcacgatctcagctcact

SEQ ID NO: 255515 - DNA, 20 bp, synthetic construct
  source 1..20: mol_type = other DNA
gtggcacgatctcagctcac

SEQ ID NO: 255516 - DNA, 20 bp, synthetic construct
  source 1..20: mol_type = other DNA
agtggcacgatctcagctca

SEQ ID NO: 255517 - DNA, 20 bp, synthetic construct
  source 1..20: mol_type = other DNA
cagtggcacgatctcagctc

SEQ ID NO: 255518 - DNA, 20 bp, synthetic construct
  source 1..20: mol_type = other DNA
acagtggcacgatctcagct

SEQ ID NO: 255519 - DNA, 20 bp, synthetic construct
  source 1..20: mol_type = other DNA
tacagtggcacgatctcagc

SEQ ID NO: 255520 - DNA, 20 bp, synthetic construct
  source 1..20: mol_type = other DNA
gtacagtggcacgatctcag

SEQ ID NO: 255521 - DNA, 20 bp, synthetic construct
  source 1..20: mol_type = other DNA
agtacagtggcacgatctca

SEQ ID NO: 255522 - DNA, 20 bp, synthetic construct
  source 1..20: mol_type = other DNA
gagtacagtggcacgatctc

SEQ ID NO: 255523 - DNA, 20 bp, synthetic construct
  source 1..20: mol_type = other DNA
ggagtacagtggcacgatct

SEQ ID NO: 255524 - DNA, 20 bp, synthetic construct
  source 1..20: mol_type = other DNA
tggagtacagtggcacgatc

SEQ ID NO: 255525 - DNA, 20 bp, synthetic construct
  source 1..20: mol_type = other DNA
ctggagtacagtggcacgat

SEQ ID NO: 255526 - DNA, 20 bp, synthetic construct
  source 1..20: mol_type = other DNA
gctggagtacagtggcacga

SEQ ID NO: 255527 - DNA, 20 bp, synthetic construct
  source 1..20: mol_type = other DNA
ggctggagtacagtggcacg

SEQ ID NO: 255528 - DNA, 20 bp, synthetic construct
  source 1..20: mol_type = other DNA
aggctggagtacagtggcac

SEQ ID NO: 255529 - DNA, 20 bp, synthetic construct
  source 1..20: mol_type = other DNA
caggctggagtacagtggca

SEQ ID NO: 255530 - DNA, 20 bp, synthetic construct
  source 1..20: mol_type = other DNA
ccaggctggagtacagtggc

SEQ ID NO: 255531 - DNA, 20 bp, synthetic construct
  source 1..20: mol_type = other DNA
cccaggctggagtacagtgg

SEQ ID NO: 255532 - DNA, 20 bp, synthetic construct
  source 1..20: mol_type = other DNA
gcccaggctggagtacagtg

SEQ ID NO: 255533 - DNA, 20 bp, synthetic construct
  source 1..20: mol_type = other DNA
cgcccaggctggagtacagt

SEQ ID NO: 255534 - DNA, 20 bp, synthetic construct
  source 1..20: mol_type = other DNA
tcgcccaggctggagtacag

SEQ ID NO: 255535 - DNA, 20 bp, synthetic construct
  source 1..20: mol_type = other DNA
gtcgcccaggctggagtaca

SEQ ID NO: 255536 - DNA, 20 bp, synthetic construct
  source 1..20: mol_type = other DNA
tgtcgcccaggctggagtac

SEQ ID NO: 255537 - DNA, 20 bp, synthetic construct
  source 1..20: mol_type = other DNA
ctgtcgcccaggctggagta

SEQ ID NO: 255538 - DNA, 20 bp, synthetic construct
  source 1..20: mol_type = other DNA
tctgtcgcccaggctggagt

SEQ ID NO: 255539 - DNA, 20 bp, synthetic construct
  source 1..20: mol_type = other DNA
ctctgtcgcccaggctggag

SEQ ID NO: 255540 - DNA, 20 bp, synthetic construct
  source 1..20: mol_type = other DNA
actctgtcgcccaggctgga

SEQ ID NO: 255541 - DNA, 20 bp, synthetic construct
  source 1..20: mol_type = other DNA
cactctgtcgcccaggctgg

SEQ ID NO: 255542 - DNA, 20 bp, synthetic construct
  source 1..20: mol_type = other DNA
tcactctgtcgcccaggctg

SEQ ID NO: 255543 - DNA, 20 bp, synthetic construct
  source 1..20: mol_type = other DNA
ctcactctgtcgcccaggct

SEQ ID NO: 255544 - DNA, 20 bp, synthetic construct
  source 1..20: mol_type = other DNA
tctcactctgtcgcccaggc

SEQ ID NO: 255545 - DNA, 20 bp, synthetic construct
  source 1..20: mol_type = other DNA
gtctcactctgtcgcccagg

SEQ ID NO: 255546 - DNA, 20 bp, synthetic construct
  source 1..20: mol_type = other DNA
agtctcactctgtcgcccag

SEQ ID NO: 255547 - DNA, 20 bp, synthetic construct
  source 1..20: mol_type = other DNA
gagtctcactctgtcgccca

SEQ ID NO: 255548 - DNA, 20 bp, synthetic construct
  source 1..20: mol_type = other DNA
agagtctcactctgtcgccc

SEQ ID NO: 255549 - DNA, 20 bp, synthetic construct
  source 1..20: mol_type = other DNA
cagagtctcactctgtcgcc

SEQ ID NO: 255550 - DNA, 20 bp, synthetic construct
  source 1..20: mol_type = other DNA
acagagtctcactctgtcgc

SEQ ID NO: 255551 - DNA, 20 bp, synthetic construct
  source 1..20: mol_type = other DNA
gacagagtctcactctgtcg

SEQ ID NO: 255552 - DNA, 20 bp, synthetic construct
  source 1..20: mol_type = other DNA
agacagagtctcactctgtc

SEQ ID NO: 255553 - DNA, 20 bp, synthetic construct
  source 1..20: mol_type = other DNA
gagacagagtctcactctgt

SEQ ID NO: 255554 - DNA, 20 bp, synthetic construct
  source 1..20: mol_type = other DNA
tgagacagagtctcactctg

SEQ ID NO: 255555 - DNA, 20 bp, synthetic construct
  source 1..20: mol_type = other DNA
ttgagacagagtctcactct

SEQ ID NO: 255556 - DNA, 20 bp, synthetic construct
  source 1..20: mol_type = other DNA
tttgagacagagtctcactc

SEQ ID NO: 255557 - DNA, 20 bp, synthetic construct
  source 1..20: mol_type = other DNA
gtttgagacagagtctcact

SEQ ID NO: 255558 - DNA, 20 bp, synthetic construct
  source 1..20: mol_type = other DNA
ggtttgagacagagtctcac

SEQ ID NO: 255559 - DNA, 20 bp, synthetic construct
  source 1..20: mol_type = other DNA
tggtttgagacagagtctca

SEQ ID NO: 255560 - DNA, 20 bp, synthetic construct
  source 1..20: mol_type = other DNA
ttggtttgagacagagtctc

SEQ ID NO: 255561 - DNA, 20 bp, synthetic construct
  source 1..20: mol_type = other DNA
tttggtttgagacagagtct

SEQ ID NO: 255562 - DNA, 20 bp, synthetic construct
  source 1..20: mol_type = other DNA
ttttggtttgagacagagtc

SEQ ID NO: 255563 - DNA, 20 bp, synthetic construct
  source 1..20: mol_type = other DNA
tttttggtttgagacagagt

SEQ ID NO: 255564 - DNA, 20 bp, synthetic construct
  source 1..20: mol_type = other DNA
ttttttggtttgagacagag

SEQ ID NO: 255565 - DNA, 20 bp, synthetic construct
  source 1..20: mol_type = other DNA
tttttttggtttgagacaga

SEQ ID NO: 255566 - DNA, 20 bp, synthetic construct
  source 1..20: mol_type = other DNA
ttttttttggtttgagacag

SEQ ID NO: 255567 - DNA, 20 bp, synthetic construct
  source 1..20: mol_type = other DNA
cttttttttggtttgagaca

SEQ ID NO: 255568 - DNA, 20 bp, synthetic construct
  source 1..20: mol_type = other DNA
ccttttttttggtttgagac

SEQ ID NO: 255569 - DNA, 20 bp, synthetic construct
  source 1..20: mol_type = other DNA
cccttttttttggtttgaga

SEQ ID NO: 255570 - DNA, 20 bp, synthetic construct
  source 1..20: mol_type = other DNA
ccccttttttttggtttgag

SEQ ID NO: 255571 - DNA, 20 bp, synthetic construct
  source 1..20: mol_type = other DNA
accccttttttttggtttga

SEQ ID NO: 255572 - DNA, 20 bp, synthetic construct
  source 1..20: mol_type = other DNA
caccccttttttttggtttg

SEQ ID NO: 255573 - DNA, 20 bp, synthetic construct
  source 1..20: mol_type = other DNA
ccaccccttttttttggttt

SEQ ID NO: 255574 - DNA, 20 bp, synthetic construct
  source 1..20: mol_type = other DNA
cccaccccttttttttggtt

SEQ ID NO: 255575 - DNA, 20 bp, synthetic construct
  source 1..20: mol_type = other DNA
ccccaccccttttttttggt

SEQ ID NO: 255576 - DNA, 20 bp, synthetic construct
  source 1..20: mol_type = other DNA
cccccaccccttttttttgg

SEQ ID NO: 255577 - DNA, 20 bp, synthetic construct
  source 1..20: mol_type = other DNA
ccccccaccccttttttttg

SEQ ID NO: 255578 - DNA, 20 bp, synthetic construct
  source 1..20: mol_type = other DNA
gccccccacccctttttttt

SEQ ID NO: 255579 - DNA, 20 bp, synthetic construct
  source 1..20: mol_type = other DNA
cgccccccaccccttttttt

SEQ ID NO: 255580 - DNA, 20 bp, synthetic construct
  source 1..20: mol_type = other DNA
ccgccccccacccctttttt

SEQ ID NO: 255581 - DNA, 20 bp, synthetic construct
  source 1..20: mol_type = other DNA
cccgccccccaccccttttt

SEQ ID NO: 255582 - DNA, 20 bp, synthetic construct
  source 1..20: mol_type = other DNA
ccccgccccccacccctttt

SEQ ID NO: 255583 - DNA, 20 bp, synthetic construct
  source 1..20: mol_type = other DNA
cccccgccccccaccccttt

SEQ ID NO: 255584 - DNA, 20 bp, synthetic construct
  source 1..20: mol_type = other DNA
gcccccgccccccacccctt

SEQ ID NO: 255585 - DNA, 20 bp, synthetic construct
  source 1..20: mol_type = other DNA
tgcccccgccccccacccct

SEQ ID NO: 255586 - DNA, 20 bp, synthetic construct
  source 1..20: mol_type = other DNA
ctgcccccgccccccacccc

SEQ ID NO: 255587 - DNA, 20 bp, synthetic construct
  source 1..20: mol_type = other DNA
cctgcccccgccccccaccc

SEQ ID NO: 255588 - DNA, 20 bp, synthetic construct
  source 1..20: mol_type = other DNA
tcctgcccccgccccccacc

SEQ ID NO: 255589 - DNA, 20 bp, synthetic construct
  source 1..20: mol_type = other DNA
ctcctgcccccgccccccac

SEQ ID NO: 255590 - DNA, 20 bp, synthetic construct
  source 1..20: mol_type = other DNA
tctcctgcccccgcccccca

SEQ ID NO: 255591 - DNA, 20 bp, synthetic construct
  source 1..20: mol_type = other DNA
ttctcctgcccccgcccccc

SEQ ID NO: 255592 - DNA, 20 bp, synthetic construct
  source 1..20: mol_type = other DNA
gttctcctgcccccgccccc

SEQ ID NO: 255593 - DNA, 20 bp, synthetic construct
  source 1..20: mol_type = other DNA
tgttctcctgcccccgcccc

SEQ ID NO: 255594 - DNA, 20 bp, synthetic construct
  source 1..20: mol_type = other DNA
ctgttctcctgcccccgccc

SEQ ID NO: 255595 - DNA, 20 bp, synthetic construct
  source 1..20: mol_type = other DNA
actgttctcctgcccccgcc

SEQ ID NO: 255596 - DNA, 20 bp, synthetic construct
  source 1..20: mol_type = other DNA
cactgttctcctgcccccgc

SEQ ID NO: 255597 - DNA, 20 bp, synthetic construct
  source 1..20: mol_type = other DNA
tcactgttctcctgcccccg

SEQ ID NO: 255598 - DNA, 20 bp, synthetic construct
  source 1..20: mol_type = other DNA
ctcactgttctcctgccccc

SEQ ID NO: 255599 - DNA, 20 bp, synthetic construct
  source 1..20: mol_type = other DNA
tctcactgttctcctgcccc

SEQ ID NO: 255600 - DNA, 20 bp, synthetic construct
  source 1..20: mol_type = other DNA
ctctcactgttctcctgccc

SEQ ID NO: 255601 - DNA, 20 bp, synthetic construct
  source 1..20: mol_type = other DNA
cctctcactgttctcctgcc

SEQ ID NO: 255602 - DNA, 20 bp, synthetic construct
  source 1..20: mol_type = other DNA
acctctcactgttctcctgc

SEQ ID NO: 255603 - DNA, 20 bp, synthetic construct
  source 1..20: mol_type = other DNA
tacctctcactgttctcctg

SEQ ID NO: 255604 - DNA, 20 bp, synthetic construct
  source 1..20: mol_type = other DNA
ctacctctcactgttctcct

SEQ ID NO: 255605 - DNA, 20 bp, synthetic construct
  source 1..20: mol_type = other DNA
cctacctctcactgttctcc

SEQ ID NO: 255606 - DNA, 20 bp, synthetic construct
  source 1..20: mol_type = other DNA
ccctacctctcactgttctc

SEQ ID NO: 255607 - DNA, 20 bp, synthetic construct
  source 1..20: mol_type = other DNA
tccctacctctcactgttct

SEQ ID NO: 255608 - DNA, 20 bp, synthetic construct
  source 1..20: mol_type = other DNA
ctccctacctctcactgttc

SEQ ID NO: 255609 - DNA, 20 bp, synthetic construct
  source 1..20: mol_type = other DNA
tctccctacctctcactgtt

SEQ ID NO: 255610 - DNA, 20 bp, synthetic construct
  source 1..20: mol_type = other DNA
ctctccctacctctcactgt

SEQ ID NO: 255611 - DNA, 20 bp, synthetic construct
  source 1..20: mol_type = other DNA
cctctccctacctctcactg

SEQ ID NO: 255612 - DNA, 20 bp, synthetic construct
  source 1..20: mol_type = other DNA
tcctctccctacctctcact

SEQ ID NO: 255613 - DNA, 20 bp, synthetic construct
  source 1..20: mol_type = other DNA
ttcctctccctacctctcac

SEQ ID NO: 255614 - DNA, 20 bp, synthetic construct
  source 1..20: mol_type = other DNA
tttcctctccctacctctca

SEQ ID NO: 255615 - DNA, 20 bp, synthetic construct
  source 1..20: mol_type = other DNA
ctttcctctccctacctctc

SEQ ID NO: 255616 - DNA, 20 bp, synthetic construct
  source 1..20: mol_type = other DNA
cctttcctctccctacctct

SEQ ID NO: 255617 - DNA, 20 bp, synthetic construct
  source 1..20: mol_type = other DNA
ccctttcctctccctacctc

SEQ ID NO: 255618 - DNA, 20 bp, synthetic construct
  source 1..20: mol_type = other DNA
cccctttcctctccctacct

SEQ ID NO: 255619 - DNA, 20 bp, synthetic construct
  source 1..20: mol_type = other DNA
tcccctttcctctccctacc

SEQ ID NO: 255620 - DNA, 20 bp, synthetic construct
  source 1..20: mol_type = other DNA
atcccctttcctctccctac

SEQ ID NO: 255621 - DNA, 20 bp, synthetic construct
  source 1..20: mol_type = other DNA
aatcccctttcctctcccta

SEQ ID NO: 255622 - DNA, 20 bp, synthetic construct
  source 1..20: mol_type = other DNA
gaatcccctttcctctccct

SEQ ID NO: 255623 - DNA, 20 bp, synthetic construct
  source 1..20: mol_type = other DNA
agaatcccctttcctctccc

SEQ ID NO: 255624 - DNA, 20 bp, synthetic construct
  source 1..20: mol_type = other DNA
gagaatcccctttcctctcc

SEQ ID NO: 255625 - DNA, 20 bp, synthetic construct
  source 1..20: mol_type = other DNA
cgagaatcccctttcctctc

SEQ ID NO: 255626 - DNA, 20 bp, synthetic construct
  source 1..20: mol_type = other DNA
gcgagaatcccctttcctct

SEQ ID NO: 255627 - DNA, 20 bp, synthetic construct
  source 1..20: mol_type = other DNA
agcgagaatcccctttcctc

SEQ ID NO: 255628 - DNA, 20 bp, synthetic construct
  source 1..20: mol_type = other DNA
tagcgagaatcccctttcct

SEQ ID NO: 255629 - DNA, 20 bp, synthetic construct
  source 1..20: mol_type = other DNA
gtagcgagaatcccctttcc

SEQ ID NO: 255630 - DNA, 20 bp, synthetic construct
  source 1..20: mol_type = other DNA
tgtagcgagaatcccctttc

SEQ ID NO: 255631 - DNA, 20 bp, synthetic construct
  source 1..20: mol_type = other DNA
gtgtagcgagaatccccttt

SEQ ID NO: 255632 - DNA, 20 bp, synthetic construct
  source 1..20: mol_type = other DNA
ggtgtagcgagaatcccctt

SEQ ID NO: 255633 - DNA, 20 bp, synthetic construct
  source 1..20: mol_type = other DNA
gggtgtagcgagaatcccct

SEQ ID NO: 255634 - DNA, 20 bp, synthetic construct
  source 1..20: mol_type = other DNA
tgggtgtagcgagaatcccc

SEQ ID NO: 255635 - DNA, 20 bp, synthetic construct
  source 1..20: mol_type = other DNA
ttgggtgtagcgagaatccc

SEQ ID NO: 255636 - DNA, 20 bp, synthetic construct
  source 1..20: mol_type = other DNA
tttgggtgtagcgagaatcc

SEQ ID NO: 255637 - DNA, 20 bp, synthetic construct
  source 1..20: mol_type = other DNA
gtttgggtgtagcgagaatc

SEQ ID NO: 255638 - DNA, 20 bp, synthetic construct
  source 1..20: mol_type = other DNA
ggtttgggtgtagcgagaat

SEQ ID NO: 255639 - DNA, 20 bp, synthetic construct
  source 1..20: mol_type = other DNA
tggtttgggtgtagcgagaa

SEQ ID NO: 255640 - DNA, 20 bp, synthetic construct
  source 1..20: mol_type = other DNA
ctggtttgggtgtagcgaga

SEQ ID NO: 255641 - DNA, 20 bp, synthetic construct
  source 1..20: mol_type = other DNA
tctggtttgggtgtagcgag

SEQ ID NO: 255642 - DNA, 20 bp, synthetic construct
  source 1..20: mol_type = other DNA
atctggtttgggtgtagcga

SEQ ID NO: 255643 - DNA, 20 bp, synthetic construct
  source 1..20: mol_type = other DNA
tatctggtttgggtgtagcg

SEQ ID NO: 255644 - DNA, 20 bp, synthetic construct
  source 1..20: mol_type = other DNA
gtatctggtttgggtgtagc

SEQ ID NO: 255645 - DNA, 20 bp, synthetic construct
  source 1..20: mol_type = other DNA
ggtatctggtttgggtgtag

SEQ ID NO: 255646 - DNA, 20 bp, synthetic construct
  source 1..20: mol_type = other DNA
tggtatctggtttgggtgta

SEQ ID NO: 255647 - DNA, 20 bp, synthetic construct
  source 1..20: mol_type = other DNA
atggtatctggtttgggtgt

SEQ ID NO: 255648 - DNA, 20 bp, synthetic construct
  source 1..20: mol_type = other DNA
gatggtatctggtttgggtg

SEQ ID NO: 255649 - DNA, 20 bp, synthetic construct
  source 1..20: mol_type = other DNA
agatggtatctggtttgggt

SEQ ID NO: 255650 - DNA, 20 bp, synthetic construct
  source 1..20: mol_type = other DNA
tagatggtatctggtttggg

SEQ ID NO: 255651 - DNA, 20 bp, synthetic construct
  source 1..20: mol_type = other DNA
ctagatggtatctggtttgg

SEQ ID NO: 255652 - DNA, 20 bp, synthetic construct
  source 1..20: mol_type = other DNA
tctagatggtatctggtttg

SEQ ID NO: 255653 - DNA, 20 bp, synthetic construct
  source 1..20: mol_type = other DNA
ctctagatggtatctggttt

SEQ ID NO: 255654 - DNA, 20 bp, synthetic construct
  source 1..20: mol_type = other DNA
cctctagatggtatctggtt

SEQ ID NO: 255655 - DNA, 20 bp, synthetic construct
  source 1..20: mol_type = other DNA
gcctctagatggtatctggt

SEQ ID NO: 255656 - DNA, 20 bp, synthetic construct
  source 1..20: mol_type = other DNA
agcctctagatggtatctgg

SEQ ID NO: 255657 - DNA, 20 bp, synthetic construct
  source 1..20: mol_type = other DNA
tagcctctagatggtatctg

SEQ ID NO: 255658 - DNA, 20 bp, synthetic construct
  source 1..20: mol_type = other DNA
ctagcctctagatggtatct

SEQ ID NO: 255659 - DNA, 20 bp, synthetic construct
  source 1..20: mol_type = other DNA
tctagcctctagatggtatc

SEQ ID NO: 255660 - DNA, 20 bp, synthetic construct
  source 1..20: mol_type = other DNA
ttctagcctctagatggtat

SEQ ID NO: 255661 - DNA, 20 bp, synthetic construct
  source 1..20: mol_type = other DNA
attctagcctctagatggta

SEQ ID NO: 255662 - DNA, 20 bp, synthetic construct
  source 1..20: mol_type = other DNA
gattctagcctctagatggt

SEQ ID NO: 255663 - DNA, 20 bp, synthetic construct
  source 1..20: mol_type = other DNA
agattctagcctctagatgg

SEQ ID NO: 255664 - DNA, 20 bp, synthetic construct
  source 1..20: mol_type = other DNA
aagattctagcctctagatg

SEQ ID NO: 255665 - DNA, 20 bp, synthetic construct
  source 1..20: mol_type = other DNA
aaagattctagcctctagat

SEQ ID NO: 255666 - DNA, 20 bp, synthetic construct
  source 1..20: mol_type = other DNA
caaagattctagcctctaga

SEQ ID NO: 255667 - DNA, 20 bp, synthetic construct
  source 1..20: mol_type = other DNA
ccaaagattctagcctctag

SEQ ID NO: 255668 - DNA, 20 bp, synthetic construct
  source 1..20: mol_type = other DNA
cccaaagattctagcctcta

SEQ ID NO: 255669 - DNA, 20 bp, synthetic construct
  source 1..20: mol_type = other DNA
tcccaaagattctagcctct

SEQ ID NO: 255670 - DNA, 20 bp, synthetic construct
  source 1..20: mol_type = other DNA
ctcccaaagattctagcctc

SEQ ID NO: 255671 - DNA, 20 bp, synthetic construct
  source 1..20: mol_type = other DNA
cctcccaaagattctagcct

SEQ ID NO: 255672 - DNA, 20 bp, synthetic construct
  source 1..20: mol_type = other DNA
gcctcccaaagattctagcc

SEQ ID NO: 255673 - DNA, 20 bp, synthetic construct
  source 1..20: mol_type = other DNA
agcctcccaaagattctagc

SEQ ID NO: 255674 - DNA, 20 bp, synthetic construct
  source 1..20: mol_type = other DNA
gagcctcccaaagattctag

SEQ ID NO: 255675 - DNA, 20 bp, synthetic construct
  source 1..20: mol_type = other DNA
tgagcctcccaaagattcta

SEQ ID NO: 255676 - DNA, 20 bp, synthetic construct
  source 1..20: mol_type = other DNA
ttgagcctcccaaagattct

SEQ ID NO: 255677 - DNA, 20 bp, synthetic construct
  source 1..20: mol_type = other DNA
tttgagcctcccaaagattc

SEQ ID NO: 255678 - DNA, 20 bp, synthetic construct
  source 1..20: mol_type = other DNA
atttgagcctcccaaagatt

SEQ ID NO: 255679 - DNA, 20 bp, synthetic construct
  source 1..20: mol_type = other DNA
aatttgagcctcccaaagat

SEQ ID NO: 255680 - DNA, 20 bp, synthetic construct
  source 1..20: mol_type = other DNA
gaatttgagcctcccaaaga

SEQ ID NO: 255681 - DNA, 20 bp, synthetic construct
  source 1..20: mol_type = other DNA
ggaatttgagcctcccaaag

SEQ ID NO: 255682 - DNA, 20 bp, synthetic construct
  source 1..20: mol_type = other DNA
gggaatttgagcctcccaaa

SEQ ID NO: 255683 - DNA, 20 bp, synthetic construct
  source 1..20: mol_type = other DNA
agggaatttgagcctcccaa

SEQ ID NO: 255684 - DNA, 20 bp, synthetic construct
  source 1..20: mol_type = other DNA
tagggaatttgagcctccca

SEQ ID NO: 255685 - DNA, 20 bp, synthetic construct
  source 1..20: mol_type = other DNA
ctagggaatttgagcctccc

SEQ ID NO: 255686 - DNA, 20 bp, synthetic construct
  source 1..20: mol_type = other DNA
tctagggaatttgagcctcc

SEQ ID NO: 255687 - DNA, 20 bp, synthetic construct
  source 1..20: mol_type = other DNA
ttctagggaatttgagcctc

SEQ ID NO: 255688 - DNA, 20 bp, synthetic construct
  source 1..20: mol_type = other DNA
tttctagggaatttgagcct

SEQ ID NO: 255689 - DNA, 20 bp, synthetic construct
  source 1..20: mol_type = other DNA
ctttctagggaatttgagcc

SEQ ID NO: 255690 - DNA, 20 bp, synthetic construct
  source 1..20: mol_type = other DNA
gctttctagggaatttgagc

SEQ ID NO: 255691 - DNA, 20 bp, synthetic construct
  source 1..20: mol_type = other DNA
tgctttctagggaatttgag

SEQ ID NO: 255692 - DNA, 20 bp, synthetic construct
  source 1..20: mol_type = other DNA
ctgctttctagggaatttga

SEQ ID NO: 255693 - DNA, 20 bp, synthetic construct
  source 1..20: mol_type = other DNA
cctgctttctagggaatttg

SEQ ID NO: 255694 - DNA, 20 bp, synthetic construct
  source 1..20: mol_type = other DNA
tcctgctttctagggaattt

SEQ ID NO: 255695 - DNA, 20 bp, synthetic construct
  source 1..20: mol_type = other DNA
ctcctgctttctagggaatt

SEQ ID NO: 255696 - DNA, 20 bp, synthetic construct
  source 1..20: mol_type = other DNA
tctcctgctttctagggaat

SEQ ID NO: 255697 - DNA, 20 bp, synthetic construct
  source 1..20: mol_type = other DNA
ttctcctgctttctagggaa

SEQ ID NO: 255698 - DNA, 20 bp, synthetic construct
  source 1..20: mol_type = other DNA
cttctcctgctttctaggga

SEQ ID NO: 255699 - DNA, 20 bp, synthetic construct
  source 1..20: mol_type = other DNA
gcttctcctgctttctaggg

SEQ ID NO: 255700 - DNA, 20 bp, synthetic construct
  source 1..20: mol_type = other DNA
agcttctcctgctttctagg

SEQ ID NO: 255701 - DNA, 20 bp, synthetic construct
  source 1..20: mol_type = other DNA
aagcttctcctgctttctag

SEQ ID NO: 255702 - DNA, 20 bp, synthetic construct
  source 1..20: mol_type = other DNA
gaagcttctcctgctttcta

SEQ ID NO: 255703 - DNA, 20 bp, synthetic construct
  source 1..20: mol_type = other DNA
agaagcttctcctgctttct

SEQ ID NO: 255704 - DNA, 20 bp, synthetic construct
  source 1..20: mol_type = other DNA
cagaagcttctcctgctttc

SEQ ID NO: 255705 - DNA, 20 bp, synthetic construct
  source 1..20: mol_type = other DNA
acagaagcttctcctgcttt

SEQ ID NO: 255706 - DNA, 20 bp, synthetic construct
  source 1..20: mol_type = other DNA
tacagaagcttctcctgctt

SEQ ID NO: 255707 - DNA, 20 bp, synthetic construct
  source 1..20: mol_type = other DNA
ctacagaagcttctcctgct

SEQ ID NO: 255708 - DNA, 20 bp, synthetic construct
  source 1..20: mol_type = other DNA
gctacagaagcttctcctgc

SEQ ID NO: 255709 - DNA, 20 bp, synthetic construct
  source 1..20: mol_type = other DNA
ggctacagaagcttctcctg

SEQ ID NO: 255710 - DNA, 20 bp, synthetic construct
  source 1..20: mol_type = other DNA
gggctacagaagcttctcct

SEQ ID NO: 255711 - DNA, 20 bp, synthetic construct
  source 1..20: mol_type = other DNA
agggctacagaagcttctcc

SEQ ID NO: 255712 - DNA, 20 bp, synthetic construct
  source 1..20: mol_type = other DNA
gagggctacagaagcttctc

SEQ ID NO: 255713 - DNA, 20 bp, synthetic construct
  source 1..20: mol_type = other DNA
ggagggctacagaagcttct

SEQ ID NO: 255714 - DNA, 20 bp, synthetic construct
  source 1..20: mol_type = other DNA
gggagggctacagaagcttc

SEQ ID NO: 255715 - DNA, 20 bp, synthetic construct
  source 1..20: mol_type = other DNA
cgggagggctacagaagctt

SEQ ID NO: 255716 - DNA, 20 bp, synthetic construct
  source 1..20: mol_type = other DNA
gcgggagggctacagaagct

SEQ ID NO: 255717 - DNA, 20 bp, synthetic construct
  source 1..20: mol_type = other DNA
agcgggagggctacagaagc

SEQ ID NO: 255718 - DNA, 20 bp, synthetic construct
  source 1..20: mol_type = other DNA
aagcgggagggctacagaag

SEQ ID NO: 255719 - DNA, 20 bp, synthetic construct
  source 1..20: mol_type = other DNA
aaagcgggagggctacagaa

SEQ ID NO: 255720 - DNA, 20 bp, synthetic construct
  source 1..20: mol_type = other DNA
gaaagcgggagggctacaga

SEQ ID NO: 255721 - DNA, 20 bp, synthetic construct
  source 1..20: mol_type = other DNA
ggaaagcgggagggctacag

SEQ ID NO: 255722 - DNA, 20 bp, synthetic construct
  source 1..20: mol_type = other DNA
gggaaagcgggagggctaca

SEQ ID NO: 255723 - DNA, 20 bp, synthetic construct
  source 1..20: mol_type = other DNA
tgggaaagcgggagggctac

SEQ ID NO: 255724 - DNA, 20 bp, synthetic construct
  source 1..20: mol_type = other DNA
ctgggaaagcgggagggcta

SEQ ID NO: 255725 - DNA, 20 bp, synthetic construct
  source 1..20: mol_type = other DNA
actgggaaagcgggagggct

SEQ ID NO: 255726 - DNA, 20 bp, synthetic construct
  source 1..20: mol_type = other DNA
tactgggaaagcgggagggc

SEQ ID NO: 255727 - DNA, 20 bp, synthetic construct
  source 1..20: mol_type = other DNA
ctactgggaaagcgggaggg

SEQ ID NO: 255728 - DNA, 20 bp, synthetic construct
  source 1..20: mol_type = other DNA
tctactgggaaagcgggagg

SEQ ID NO: 255729 - DNA, 20 bp, synthetic construct
  source 1..20: mol_type = other DNA
atctactgggaaagcgggag

SEQ ID NO: 255730 - DNA, 20 bp, synthetic construct
  source 1..20: mol_type = other DNA
aatctactgggaaagcggga

SEQ ID NO: 255731 - DNA, 20 bp, synthetic construct
  source 1..20: mol_type = other DNA
taatctactgggaaagcggg

SEQ ID NO: 255732 - DNA, 20 bp, synthetic construct
  source 1..20: mol_type = other DNA
ttaatctactgggaaagcgg

SEQ ID NO: 255733 - DNA, 20 bp, synthetic construct
  source 1..20: mol_type = other DNA
cttaatctactgggaaagcg

SEQ ID NO: 255734 - DNA, 20 bp, synthetic construct
  source 1..20: mol_type = other DNA
gcttaatctactgggaaagc

SEQ ID NO: 255735 - DNA, 20 bp, synthetic construct
  source 1..20: mol_type = other DNA
ggcttaatctactgggaaag

SEQ ID NO: 255736 - DNA, 20 bp, synthetic construct
  source 1..20: mol_type = other DNA
gggcttaatctactgggaaa

SEQ ID NO: 255737 - DNA, 20 bp, synthetic construct
  source 1..20: mol_type = other DNA
tgggcttaatctactgggaa

SEQ ID NO: 255738 - DNA, 20 bp, synthetic construct
  source 1..20: mol_type = other DNA
ctgggcttaatctactggga

SEQ ID NO: 255739 - DNA, 20 bp, synthetic construct
  source 1..20: mol_type = other DNA
cctgggcttaatctactggg

SEQ ID NO: 255740 - DNA, 20 bp, synthetic construct
  source 1..20: mol_type = other DNA
ccctgggcttaatctactgg

SEQ ID NO: 255741 - DNA, 20 bp, synthetic construct
  source 1..20: mol_type = other DNA
gccctgggcttaatctactg

SEQ ID NO: 255742 - DNA, 20 bp, synthetic construct
  source 1..20: mol_type = other DNA
cgccctgggcttaatctact

SEQ ID NO: 255743 - DNA, 20 bp, synthetic construct
  source 1..20: mol_type = other DNA
ccgccctgggcttaatctac

SEQ ID NO: 255744 - DNA, 20 bp, synthetic construct
  source 1..20: mol_type = other DNA
gccgccctgggcttaatcta

SEQ ID NO: 255745 - DNA, 20 bp, synthetic construct
  source 1..20: mol_type = other DNA
agccgccctgggcttaatct

SEQ ID NO: 255746 - DNA, 20 bp, synthetic construct
  source 1..20: mol_type = other DNA
gagccgccctgggcttaatc

SEQ ID NO: 255747 - DNA, 20 bp, synthetic construct
  source 1..20: mol_type = other DNA
ggagccgccctgggcttaat

SEQ ID NO: 255748 - DNA, 20 bp, synthetic construct
  source 1..20: mol_type = other DNA
tggagccgccctgggcttaa

SEQ ID NO: 255749 - DNA, 20 bp, synthetic construct
  source 1..20: mol_type = other DNA
ctggagccgccctgggctta

SEQ ID NO: 255750 - DNA, 20 bp, synthetic construct
  source 1..20: mol_type = other DNA
tctggagccgccctgggctt

SEQ ID NO: 255751 - DNA, 20 bp, synthetic construct
  source 1..20: mol_type = other DNA
atctggagccgccctgggct

SEQ ID NO: 255752 - DNA, 20 bp, synthetic construct
  source 1..20: mol_type = other DNA
catctggagccgccctgggc

SEQ ID NO: 255753 - DNA, 20 bp, synthetic construct
  source 1..20: mol_type = other DNA
acatctggagccgccctggg

SEQ ID NO: 255754 - DNA, 20 bp, synthetic construct
  source 1..20: mol_type = other DNA
cacatctggagccgccctgg

SEQ ID NO: 255755 - DNA, 20 bp, synthetic construct
  source 1..20: mol_type = other DNA
acacatctggagccgccctg

SEQ ID NO: 255756 - DNA, 20 bp, synthetic construct
  source 1..20: mol_type = other DNA
cacacatctggagccgccct

SEQ ID NO: 255757 - DNA, 20 bp, synthetic construct
  source 1..20: mol_type = other DNA
tcacacatctggagccgccc

SEQ ID NO: 255758 - DNA, 20 bp, synthetic construct
  source 1..20: mol_type = other DNA
gtcacacatctggagccgcc

SEQ ID NO: 255759 - DNA, 20 bp, synthetic construct
  source 1..20: mol_type = other DNA
tgtcacacatctggagccgc

SEQ ID NO: 255760 - DNA, 20 bp, synthetic construct
  source 1..20: mol_type = other DNA
atgtcacacatctggagccg

SEQ ID NO: 255761 - DNA, 20 bp, synthetic construct
  source 1..20: mol_type = other DNA
catgtcacacatctggagcc

SEQ ID NO: 255762 - DNA, 20 bp, synthetic construct
  source 1..20: mol_type = other DNA
gcatgtcacacatctggagc

SEQ ID NO: 255763 - DNA, 20 bp, synthetic construct
  source 1..20: mol_type = other DNA
agcatgtcacacatctggag

SEQ ID NO: 255764 - DNA, 20 bp, synthetic construct
  source 1..20: mol_type = other DNA
gagcatgtcacacatctgga

SEQ ID NO: 255765 - DNA, 20 bp, synthetic construct
  source 1..20: mol_type = other DNA
agagcatgtcacacatctgg

SEQ ID NO: 255766 - DNA, 20 bp, synthetic construct
  source 1..20: mol_type = other DNA
cagagcatgtcacacatctg

SEQ ID NO: 255767 - DNA, 20 bp, synthetic construct
  source 1..20: mol_type = other DNA
acagagcatgtcacacatct

SEQ ID NO: 255768 - DNA, 20 bp, synthetic construct
  source 1..20: mol_type = other DNA
cacagagcatgtcacacatc

SEQ ID NO: 255769 - DNA, 20 bp, synthetic construct
  source 1..20: mol_type = other DNA
gcacagagcatgtcacacat

SEQ ID NO: 255770 - DNA, 20 bp, synthetic construct
  source 1..20: mol_type = other DNA
ggcacagagcatgtcacaca

SEQ ID NO: 255771 - DNA, 20 bp, synthetic construct
  source 1..20: mol_type = other DNA
gggcacagagcatgtcacac

SEQ ID NO: 255772 - DNA, 20 bp, synthetic construct
  source 1..20: mol_type = other DNA
tgggcacagagcatgtcaca

SEQ ID NO: 255773 - DNA, 20 bp, synthetic construct
  source 1..20: mol_type = other DNA
ttgggcacagagcatgtcac

SEQ ID NO: 255774 - DNA, 20 bp, synthetic construct
  source 1..20: mol_type = other DNA
gttgggcacagagcatgtca

SEQ ID NO: 255775 - DNA, 20 bp, synthetic construct
  source 1..20: mol_type = other DNA
ggttgggcacagagcatgtc

SEQ ID NO: 255776 - DNA, 20 bp, synthetic construct
  source 1..20: mol_type = other DNA
tggttgggcacagagcatgt

SEQ ID NO: 255777 - DNA, 20 bp, synthetic construct
  source 1..20: mol_type = other DNA
ctggttgggcacagagcatg

SEQ ID NO: 255778 - DNA, 20 bp, synthetic construct
  source 1..20: mol_type = other DNA
tctggttgggcacagagcat

SEQ ID NO: 255779 - DNA, 20 bp, synthetic construct
  source 1..20: mol_type = other DNA
ctctggttgggcacagagca

SEQ ID NO: 255780 - DNA, 20 bp, synthetic construct
  source 1..20: mol_type = other DNA
gctctggttgggcacagagc

SEQ ID NO: 255781 - DNA, 20 bp, synthetic construct
  source 1..20: mol_type = other DNA
ggctctggttgggcacagag

SEQ ID NO: 255782 - DNA, 20 bp, synthetic construct
  source 1..20: mol_type = other DNA
gggctctggttgggcacaga

SEQ ID NO: 255783 - DNA, 20 bp, synthetic construct
  source 1..20: mol_type = other DNA
tgggctctggttgggcacag

SEQ ID NO: 255784 - DNA, 20 bp, synthetic construct
  source 1..20: mol_type = other DNA
atgggctctggttgggcaca

SEQ ID NO: 255785 - DNA, 20 bp, synthetic construct
  source 1..20: mol_type = other DNA
gatgggctctggttgggcac

SEQ ID NO: 255786 - DNA, 20 bp, synthetic construct
  source 1..20: mol_type = other DNA
tgatgggctctggttgggca

SEQ ID NO: 255787 - DNA, 20 bp, synthetic construct
  source 1..20: mol_type = other DNA
atgatgggctctggttgggc

SEQ ID NO: 255788 - DNA, 20 bp, synthetic construct
  source 1..20: mol_type = other DNA
tatgatgggctctggttggg

SEQ ID NO: 255789 - DNA, 20 bp, synthetic construct
  source 1..20: mol_type = other DNA
ctatgatgggctctggttgg

SEQ ID NO: 255790 - DNA, 20 bp, synthetic construct
  source 1..20: mol_type = other DNA
cctatgatgggctctggttg

SEQ ID NO: 255791 - DNA, 20 bp, synthetic construct
  source 1..20: mol_type = other DNA
gcctatgatgggctctggtt

SEQ ID NO: 255792 - DNA, 20 bp, synthetic construct
  source 1..20: mol_type = other DNA
tgcctatgatgggctctggt

SEQ ID NO: 255793 - DNA, 20 bp, synthetic construct
  source 1..20: mol_type = other DNA
ctgcctatgatgggctctgg

SEQ ID NO: 255794 - DNA, 20 bp, synthetic construct
  source 1..20: mol_type = other DNA
tctgcctatgatgggctctg

SEQ ID NO: 255795 - DNA, 20 bp, synthetic construct
  source 1..20: mol_type = other DNA
ctctgcctatgatgggctct

SEQ ID NO: 255796 - DNA, 20 bp, synthetic construct
  source 1..20: mol_type = other DNA
cctctgcctatgatgggctc

SEQ ID NO: 255797 - DNA, 20 bp, synthetic construct
  source 1..20: mol_type = other DNA
tcctctgcctatgatgggct

SEQ ID NO: 255798 - DNA, 20 bp, synthetic construct
  source 1..20: mol_type = other DNA
ttcctctgcctatgatgggc

SEQ ID NO: 255799 - DNA, 20 bp, synthetic construct
  source 1..20: mol_type = other DNA
attcctctgcctatgatggg

SEQ ID NO: 255800 - DNA, 20 bp, synthetic construct
  source 1..20: mol_type = other DNA
tattcctctgcctatgatgg

SEQ ID NO: 255801 - DNA, 20 bp, synthetic construct
  source 1..20: mol_type = other DNA
ttattcctctgcctatgatg

SEQ ID NO: 255802 - DNA, 20 bp, synthetic construct
  source 1..20: mol_type = other DNA
gttattcctctgcctatgat

SEQ ID NO: 255803 - DNA, 20 bp, synthetic construct
  source 1..20: mol_type = other DNA
tgttattcctctgcctatga

SEQ ID NO: 255804 - DNA, 20 bp, synthetic construct
  source 1..20: mol_type = other DNA
gtgttattcctctgcctatg

SEQ ID NO: 255805 - DNA, 20 bp, synthetic construct
  source 1..20: mol_type = other DNA
ggtgttattcctctgcctat

SEQ ID NO: 255806 - DNA, 20 bp, synthetic construct
  source 1..20: mol_type = other DNA
gggtgttattcctctgccta

SEQ ID NO: 255807 - DNA, 20 bp, synthetic construct
  source 1..20: mol_type = other DNA
tgggtgttattcctctgcct

SEQ ID NO: 255808 - DNA, 20 bp, synthetic construct
  source 1..20: mol_type = other DNA
gtgggtgttattcctctgcc

SEQ ID NO: 255809 - DNA, 20 bp, synthetic construct
  source 1..20: mol_type = other DNA
tgtgggtgttattcctctgc

SEQ ID NO: 255810 - DNA, 20 bp, synthetic construct
  source 1..20: mol_type = other DNA
gtgtgggtgttattcctctg

SEQ ID NO: 255811 - DNA, 20 bp, synthetic construct
  source 1..20: mol_type = other DNA
ggtgtgggtgttattcctct

SEQ ID NO: 255812 - DNA, 20 bp, synthetic construct
  source 1..20: mol_type = other DNA
tggtgtgggtgttattcctc

SEQ ID NO: 255813 - DNA, 20 bp, synthetic construct
  source 1..20: mol_type = other DNA
ctggtgtgggtgttattcct

SEQ ID NO: 255814 - DNA, 20 bp, synthetic construct
  source 1..20: mol_type = other DNA
tctggtgtgggtgttattcc

SEQ ID NO: 255815 - DNA, 20 bp, synthetic construct
  source 1..20: mol_type = other DNA
ttctggtgtgggtgttattc

SEQ ID NO: 255816 - DNA, 20 bp, synthetic construct
  source 1..20: mol_type = other DNA
cttctggtgtgggtgttatt

SEQ ID NO: 255817 - DNA, 20 bp, synthetic construct
  source 1..20: mol_type = other DNA
ccttctggtgtgggtgttat

SEQ ID NO: 255818 - DNA, 20 bp, synthetic construct
  source 1..20: mol_type = other DNA
cccttctggtgtgggtgtta

SEQ ID NO: 255819 - DNA, 20 bp, synthetic construct
  source 1..20: mol_type = other DNA
gcccttctggtgtgggtgtt

SEQ ID NO: 255820 - DNA, 20 bp, synthetic construct
  source 1..20: mol_type = other DNA
ggcccttctggtgtgggtgt

SEQ ID NO: 255821 - DNA, 20 bp, synthetic construct
  source 1..20: mol_type = other DNA
gggcccttctggtgtgggtg

SEQ ID NO: 255822 - DNA, 20 bp, synthetic construct
  source 1..20: mol_type = other DNA
agggcccttctggtgtgggt

SEQ ID NO: 255823 - DNA, 20 bp, synthetic construct
  source 1..20: mol_type = other DNA
gagggcccttctggtgtggg

SEQ ID NO: 255824 - DNA, 20 bp, synthetic construct
  source 1..20: mol_type = other DNA
cgagggcccttctggtgtgg

SEQ ID NO: 255825 - DNA, 20 bp, synthetic construct
  source 1..20: mol_type = other DNA
ccgagggcccttctggtgtg

SEQ ID NO: 255826 - DNA, 20 bp, synthetic construct
  source 1..20: mol_type = other DNA
tccgagggcccttctggtgt

SEQ ID NO: 255827 - DNA, 20 bp, synthetic construct
  source 1..20: mol_type = other DNA
ctccgagggcccttctggtg

SEQ ID NO: 255828 - DNA, 20 bp, synthetic construct
  source 1..20: mol_type = other DNA
cctccgagggcccttctggt

SEQ ID NO: 255829 - DNA, 20 bp, synthetic construct
  source 1..20: mol_type = other DNA
acctccgagggcccttctgg

SEQ ID NO: 255830 - DNA, 20 bp, synthetic construct
  source 1..20: mol_type = other DNA
gacctccgagggcccttctg

SEQ ID NO: 255831 - DNA, 20 bp, synthetic construct
  source 1..20: mol_type = other DNA
tgacctccgagggcccttct

SEQ ID NO: 255832 - DNA, 20 bp, synthetic construct
  source 1..20: mol_type = other DNA
gtgacctccgagggcccttc

SEQ ID NO: 255833 - DNA, 20 bp, synthetic construct
  source 1..20: mol_type = other DNA
ggtgacctccgagggccctt

SEQ ID NO: 255834 - DNA, 20 bp, synthetic construct
  source 1..20: mol_type = other DNA
tggtgacctccgagggccct

SEQ ID NO: 255835 - DNA, 20 bp, synthetic construct
  source 1..20: mol_type = other DNA
gtggtgacctccgagggccc

SEQ ID NO: 255836 - DNA, 20 bp, synthetic construct
  source 1..20: mol_type = other DNA
cgtggtgacctccgagggcc

SEQ ID NO: 255837 - DNA, 20 bp, synthetic construct
  source 1..20: mol_type = other DNA
acgtggtgacctccgagggc

SEQ ID NO: 255838 - DNA, 20 bp, synthetic construct
  source 1..20: mol_type = other DNA
gacgtggtgacctccgaggg

SEQ ID NO: 255839 - DNA, 20 bp, synthetic construct
  source 1..20: mol_type = other DNA
ggacgtggtgacctccgagg

SEQ ID NO: 255840 - DNA, 20 bp, synthetic construct
  source 1..20: mol_type = other DNA
tggacgtggtgacctccgag

SEQ ID NO: 255841 - DNA, 20 bp, synthetic construct
  source 1..20: mol_type = other DNA
ttggacgtggtgacctccga

SEQ ID NO: 255842 - DNA, 20 bp, synthetic construct
  source 1..20: mol_type = other DNA
cttggacgtggtgacctccg

SEQ ID NO: 255843 - DNA, 20 bp, synthetic construct
  source 1..20: mol_type = other DNA
tcttggacgtggtgacctcc

SEQ ID NO: 255844 - DNA, 20 bp, synthetic construct
  source 1..20: mol_type = other DNA
ttcttggacgtggtgacctc

SEQ ID NO: 255845 - DNA, 20 bp, synthetic construct
  source 1..20: mol_type = other DNA
gttcttggacgtggtgacct

SEQ ID NO: 255846 - DNA, 20 bp, synthetic construct
  source 1..20: mol_type = other DNA
ggttcttggacgtggtgacc

SEQ ID NO: 255847 - DNA, 20 bp, synthetic construct
  source 1..20: mol_type = other DNA
gggttcttggacgtggtgac

SEQ ID NO: 255848 - DNA, 20 bp, synthetic construct
  source 1..20: mol_type = other DNA
agggttcttggacgtggtga

SEQ ID NO: 255849 - DNA, 20 bp, synthetic construct
  source 1..20: mol_type = other DNA
gagggttcttggacgtggtg

SEQ ID NO: 255850 - DNA, 20 bp, synthetic construct
  source 1..20: mol_type = other DNA
agagggttcttggacgtggt

SEQ ID NO: 255851 - DNA, 20 bp, synthetic construct
  source 1..20: mol_type = other DNA
aagagggttcttggacgtgg

SEQ ID NO: 255852 - DNA, 20 bp, synthetic construct
  source 1..20: mol_type = other DNA
aaagagggttcttggacgtg

SEQ ID NO: 255853 - DNA, 20 bp, synthetic construct
  source 1..20: mol_type = other DNA
taaagagggttcttggacgt

SEQ ID NO: 255854 - DNA, 20 bp, synthetic construct
  source 1..20: mol_type = other DNA
gtaaagagggttcttggacg

SEQ ID NO: 255855 - DNA, 20 bp, synthetic construct
  source 1..20: mol_type = other DNA
tgtaaagagggttcttggac

SEQ ID NO: 255856 - DNA, 20 bp, synthetic construct
  source 1..20: mol_type = other DNA
ctgtaaagagggttcttgga

SEQ ID NO: 255857 - DNA, 20 bp, synthetic construct
  source 1..20: mol_type = other DNA
tctgtaaagagggttcttgg

SEQ ID NO: 255858 - DNA, 20 bp, synthetic construct
  source 1..20: mol_type = other DNA
atctgtaaagagggttcttg

SEQ ID NO: 255859 - DNA, 20 bp, synthetic construct
  source 1..20: mol_type = other DNA
catctgtaaagagggttctt

SEQ ID NO: 255860 - DNA, 20 bp, synthetic construct
  source 1..20: mol_type = other DNA
tcatctgtaaagagggttct

SEQ ID NO: 255861 - DNA, 20 bp, synthetic construct
  source 1..20: mol_type = other DNA
ctcatctgtaaagagggttc

SEQ ID NO: 255862 - DNA, 20 bp, synthetic construct
  source 1..20: mol_type = other DNA
cctcatctgtaaagagggtt

SEQ ID NO: 255863 - DNA, 20 bp, synthetic construct
  source 1..20: mol_type = other DNA
tcctcatctgtaaagagggt

SEQ ID NO: 255864 - DNA, 20 bp, synthetic construct
  source 1..20: mol_type = other DNA
ttcctcatctgtaaagaggg

SEQ ID NO: 255865 - DNA, 20 bp, synthetic construct
  source 1..20: mol_type = other DNA
tttcctcatctgtaaagagg

SEQ ID NO: 255866 - DNA, 20 bp, synthetic construct
  source 1..20: mol_type = other DNA
gtttcctcatctgtaaagag

SEQ ID NO: 255867 - DNA, 20 bp, synthetic construct
  source 1..20: mol_type = other DNA
agtttcctcatctgtaaaga

SEQ ID NO: 255868 - DNA, 20 bp, synthetic construct
  source 1..20: mol_type = other DNA
cagtttcctcatctgtaaag

SEQ ID NO: 255869 - DNA, 20 bp, synthetic construct
  source 1..20: mol_type = other DNA
tcagtttcctcatctgtaaa

SEQ ID NO: 255870 - DNA, 20 bp, synthetic construct
  source 1..20: mol_type = other DNA
ctcagtttcctcatctgtaa

SEQ ID NO: 255871 - DNA, 20 bp, synthetic construct
  source 1..20: mol_type = other DNA
cctcagtttcctcatctgta

SEQ ID NO: 255872 - DNA, 20 bp, synthetic construct
  source 1..20: mol_type = other DNA
gcctcagtttcctcatctgt

SEQ ID NO: 255873 - DNA, 20 bp, synthetic construct
  source 1..20: mol_type = other DNA
ggcctcagtttcctcatctg

SEQ ID NO: 255874 - DNA, 20 bp, synthetic construct
  source 1..20: mol_type = other DNA
gggcctcagtttcctcatct

SEQ ID NO: 255875 - DNA, 20 bp, synthetic construct
  source 1..20: mol_type = other DNA
tgggcctcagtttcctcatc

SEQ ID NO: 255876 - DNA, 20 bp, synthetic construct
  source 1..20: mol_type = other DNA
ctgggcctcagtttcctcat

SEQ ID NO: 255877 - DNA, 20 bp, synthetic construct
  source 1..20: mol_type = other DNA
tctgggcctcagtttcctca

SEQ ID NO: 255878 - DNA, 20 bp, synthetic construct
  source 1..20: mol_type = other DNA
ctctgggcctcagtttcctc

SEQ ID NO: 255879 - DNA, 20 bp, synthetic construct
  source 1..20: mol_type = other DNA
tctctgggcctcagtttcct

SEQ ID NO: 255880 - DNA, 20 bp, synthetic construct
  source 1..20: mol_type = other DNA
ctctctgggcctcagtttcc

SEQ ID NO: 255881 - DNA, 20 bp, synthetic construct
  source 1..20: mol_type = other DNA
cctctctgggcctcagtttc

SEQ ID NO: 255882 - DNA, 20 bp, synthetic construct
  source 1..20: mol_type = other DNA
ccctctctgggcctcagttt

SEQ ID NO: 255883 - DNA, 20 bp, synthetic construct
  source 1..20: mol_type = other DNA
cccctctctgggcctcagtt

SEQ ID NO: 255884 - DNA, 20 bp, synthetic construct
  source 1..20: mol_type = other DNA
tcccctctctgggcctcagt

SEQ ID NO: 255885 - DNA, 20 bp, synthetic construct
  source 1..20: mol_type = other DNA
ctcccctctctgggcctcag

SEQ ID NO: 255886 - DNA, 20 bp, synthetic construct
  source 1..20: mol_type = other DNA
tctcccctctctgggcctca

SEQ ID NO: 255887 - DNA, 20 bp, synthetic construct
  source 1..20: mol_type = other DNA
ctctcccctctctgggcctc

SEQ ID NO: 255888 - DNA, 20 bp, synthetic construct
  source 1..20: mol_type = other DNA
gctctcccctctctgggcct

SEQ ID NO: 255889 - DNA, 20 bp, synthetic construct
  source 1..20: mol_type = other DNA
ggctctcccctctctgggcc

SEQ ID NO: 255890 - DNA, 20 bp, synthetic construct
  source 1..20: mol_type = other DNA
tggctctcccctctctgggc

SEQ ID NO: 255891 - DNA, 20 bp, synthetic construct
  source 1..20: mol_type = other DNA
gtggctctcccctctctggg

SEQ ID NO: 255892 - DNA, 20 bp, synthetic construct
  source 1..20: mol_type = other DNA
ggtggctctcccctctctgg

SEQ ID NO: 255893 - DNA, 20 bp, synthetic construct
  source 1..20: mol_type = other DNA
aggtggctctcccctctctg

SEQ ID NO: 255894 - DNA, 20 bp, synthetic construct
  source 1..20: mol_type = other DNA
taggtggctctcccctctct

SEQ ID NO: 255895 - DNA, 20 bp, synthetic construct
  source 1..20: mol_type = other DNA
ctaggtggctctcccctctc

SEQ ID NO: 255896 - DNA, 20 bp, synthetic construct
  source 1..20: mol_type = other DNA
gctaggtggctctcccctct

SEQ ID NO: 255897 - DNA, 20 bp, synthetic construct
  source 1..20: mol_type = other DNA
cgctaggtggctctcccctc

SEQ ID NO: 255898 - DNA, 20 bp, synthetic construct
  source 1..20: mol_type = other DNA
tcgctaggtggctctcccct

SEQ ID NO: 255899 - DNA, 20 bp, synthetic construct
  source 1..20: mol_type = other DNA
ctcgctaggtggctctcccc

SEQ ID NO: 255900 - DNA, 20 bp, synthetic construct
  source 1..20: mol_type = other DNA
gctcgctaggtggctctccc

SEQ ID NO: 255901 - DNA, 20 bp, synthetic construct
  source 1..20: mol_type = other DNA
agctcgctaggtggctctcc

SEQ ID NO: 255902 - DNA, 20 bp, synthetic construct
  source 1..20: mol_type = other DNA
cagctcgctaggtggctctc

SEQ ID NO: 255903 - DNA, 20 bp, synthetic construct
  source 1..20: mol_type = other DNA
ccagctcgctaggtggctct

SEQ ID NO: 255904 - DNA, 20 bp, synthetic construct
  source 1..20: mol_type = other DNA
accagctcgctaggtggctc

SEQ ID NO: 255905 - DNA, 20 bp, synthetic construct
  source 1..20: mol_type = other DNA
caccagctcgctaggtggct

SEQ ID NO: 255906 - DNA, 20 bp, synthetic construct
  source 1..20: mol_type = other DNA
ccaccagctcgctaggtggc

SEQ ID NO: 255907 - DNA, 20 bp, synthetic construct
  source 1..20: mol_type = other DNA
gccaccagctcgctaggtgg

SEQ ID NO: 255908 - DNA, 20 bp, synthetic construct
  source 1..20: mol_type = other DNA
cgccaccagctcgctaggtg

SEQ ID NO: 255909 - DNA, 20 bp, synthetic construct
  source 1..20: mol_type = other DNA
ccgccaccagctcgctaggt

SEQ ID NO: 255910 - DNA, 20 bp, synthetic construct
  source 1..20: mol_type = other DNA
gccgccaccagctcgctagg

SEQ ID NO: 255911 - DNA, 20 bp, synthetic construct
  source 1..20: mol_type = other DNA
agccgccaccagctcgctag

SEQ ID NO: 255912 - DNA, 20 bp, synthetic construct
  source 1..20: mol_type = other DNA
tagccgccaccagctcgcta

SEQ ID NO: 255913 - DNA, 20 bp, synthetic construct
  source 1..20: mol_type = other DNA
ctagccgccaccagctcgct

SEQ ID NO: 255914 - DNA, 20 bp, synthetic construct
  source 1..20: mol_type = other DNA
tctagccgccaccagctcgc

SEQ ID NO: 255915 - DNA, 20 bp, synthetic construct
  source 1..20: mol_type = other DNA
gtctagccgccaccagctcg

SEQ ID NO: 255916 - DNA, 20 bp, synthetic construct
  source 1..20: mol_type = other DNA
ggtctagccgccaccagctc

SEQ ID NO: 255917 - DNA, 20 bp, synthetic construct
  source 1..20: mol_type = other DNA
tggtctagccgccaccagct

SEQ ID NO: 255918 - DNA, 20 bp, synthetic construct
  source 1..20: mol_type = other DNA
ctggtctagccgccaccagc

SEQ ID NO: 255919 - DNA, 20 bp, synthetic construct
  source 1..20: mol_type = other DNA
cctggtctagccgccaccag

SEQ ID NO: 255920 - DNA, 20 bp, synthetic construct
  source 1..20: mol_type = other DNA
tcctggtctagccgccacca

SEQ ID NO: 255921 - DNA, 20 bp, synthetic construct
  source 1..20: mol_type = other DNA
ctcctggtctagccgccacc

SEQ ID NO: 255922 - DNA, 20 bp, synthetic construct
  source 1..20: mol_type = other DNA
tctcctggtctagccgccac

SEQ ID NO: 255923 - DNA, 20 bp, synthetic construct
  source 1..20: mol_type = other DNA
ctctcctggtctagccgcca

SEQ ID NO: 255924 - DNA, 20 bp, synthetic construct
  source 1..20: mol_type = other DNA
gctctcctggtctagccgcc

SEQ ID NO: 255925 - DNA, 20 bp, synthetic construct
  source 1..20: mol_type = other DNA
agctctcctggtctagccgc

SEQ ID NO: 255926 - DNA, 20 bp, synthetic construct
  source 1..20: mol_type = other DNA
cagctctcctggtctagccg

SEQ ID NO: 255927 - DNA, 20 bp, synthetic construct
  source 1..20: mol_type = other DNA
acagctctcctggtctagcc

SEQ ID NO: 255928 - DNA, 20 bp, synthetic construct
  source 1..20: mol_type = other DNA
gacagctctcctggtctagc

SEQ ID NO: 255929 - DNA, 20 bp, synthetic construct
  source 1..20: mol_type = other DNA
tgacagctctcctggtctag

SEQ ID NO: 255930 - DNA, 20 bp, synthetic construct
  source 1..20: mol_type = other DNA
atgacagctctcctggtcta

SEQ ID NO: 255931 - DNA, 20 bp, synthetic construct
  source 1..20: mol_type = other DNA
aatgacagctctcctggtct

SEQ ID NO: 255932 - DNA, 20 bp, synthetic construct
  source 1..20: mol_type = other DNA
gaatgacagctctcctggtc

SEQ ID NO: 255933 - DNA, 20 bp, synthetic construct
  source 1..20: mol_type = other DNA
ggaatgacagctctcctggt

SEQ ID NO: 255934 - DNA, 20 bp, synthetic construct
  source 1..20: mol_type = other DNA
tggaatgacagctctcctgg

SEQ ID NO: 255935 - DNA, 20 bp, synthetic construct
  source 1..20: mol_type = other DNA
ttggaatgacagctctcctg

SEQ ID NO: 255936 - DNA, 20 bp, synthetic construct
  source 1..20: mol_type = other DNA
cttggaatgacagctctcct

SEQ ID NO: 255937 - DNA, 20 bp, synthetic construct
  source 1..20: mol_type = other DNA
gcttggaatgacagctctcc

SEQ ID NO: 255938 - DNA, 20 bp, synthetic construct
  source 1..20: mol_type = other DNA
tgcttggaatgacagctctc

SEQ ID NO: 255939 - DNA, 20 bp, synthetic construct
  source 1..20: mol_type = other DNA
ttgcttggaatgacagctct

SEQ ID NO: 255940 - DNA, 20 bp, synthetic construct
  source 1..20: mol_type = other DNA
cttgcttggaatgacagctc

SEQ ID NO: 255941 - DNA, 20 bp, synthetic construct
  source 1..20: mol_type = other DNA
gcttgcttggaatgacagct

SEQ ID NO: 255942 - DNA, 20 bp, synthetic construct
  source 1..20: mol_type = other DNA
tgcttgcttggaatgacagc

SEQ ID NO: 255943 - DNA, 20 bp, synthetic construct
  source 1..20: mol_type = other DNA
ttgcttgcttggaatgacag

SEQ ID NO: 255944 - DNA, 20 bp, synthetic construct
  source 1..20: mol_type = other DNA
tttgcttgcttggaatgaca

SEQ ID NO: 255945 - DNA, 20 bp, synthetic construct
  source 1..20: mol_type = other DNA
ctttgcttgcttggaatgac

SEQ ID NO: 255946 - DNA, 20 bp, synthetic construct
  source 1..20: mol_type = other DNA
cctttgcttgcttggaatga

SEQ ID NO: 255947 - DNA, 20 bp, synthetic construct
  source 1..20: mol_type = other DNA
gcctttgcttgcttggaatg

SEQ ID NO: 255948 - DNA, 20 bp, synthetic construct
  source 1..20: mol_type = other DNA
tgcctttgcttgcttggaat

SEQ ID NO: 255949 - DNA, 20 bp, synthetic construct
  source 1..20: mol_type = other DNA
ttgcctttgcttgcttggaa

SEQ ID NO: 255950 - DNA, 20 bp, synthetic construct
  source 1..20: mol_type = other DNA
gttgcctttgcttgcttgga

SEQ ID NO: 255951 - DNA, 20 bp, synthetic construct
  source 1..20: mol_type = other DNA
cgttgcctttgcttgcttgg

SEQ ID NO: 255952 - DNA, 20 bp, synthetic construct
  source 1..20: mol_type = other DNA
tcgttgcctttgcttgcttg

SEQ ID NO: 255953 - DNA, 20 bp, synthetic construct
  source 1..20: mol_type = other DNA
ctcgttgcctttgcttgctt

SEQ ID NO: 255954 - DNA, 20 bp, synthetic construct
  source 1..20: mol_type = other DNA
tctcgttgcctttgcttgct

SEQ ID NO: 255955 - DNA, 20 bp, synthetic construct
  source 1..20: mol_type = other DNA
gtctcgttgcctttgcttgc

SEQ ID NO: 255956 - DNA, 20 bp, synthetic construct
  source 1..20: mol_type = other DNA
cgtctcgttgcctttgcttg

SEQ ID NO: 255957 - DNA, 20 bp, synthetic construct
  source 1..20: mol_type = other DNA
tcgtctcgttgcctttgctt

SEQ ID NO: 255958 - DNA, 20 bp, synthetic construct
  source 1..20: mol_type = other DNA
ctcgtctcgttgcctttgct

SEQ ID NO: 255959 - DNA, 20 bp, synthetic construct
  source 1..20: mol_type = other DNA
gctcgtctcgttgcctttgc

SEQ ID NO: 255960 - DNA, 20 bp, synthetic construct
  source 1..20: mol_type = other DNA
ggctcgtctcgttgcctttg

SEQ ID NO: 255961 - DNA, 20 bp, synthetic construct
  source 1..20: mol_type = other DNA
gggctcgtctcgttgccttt

SEQ ID NO: 255962 - DNA, 20 bp, synthetic construct
  source 1..20: mol_type = other DNA
tgggctcgtctcgttgcctt

SEQ ID NO: 255963 - DNA, 20 bp, synthetic construct
  source 1..20: mol_type = other DNA
ctgggctcgtctcgttgcct

SEQ ID NO: 255964 - DNA, 20 bp, synthetic construct
  source 1..20: mol_type = other DNA
tctgggctcgtctcgttgcc

SEQ ID NO: 255965 - DNA, 20 bp, synthetic construct
  source 1..20: mol_type = other DNA
ctctgggctcgtctcgttgc

SEQ ID NO: 255966 - DNA, 20 bp, synthetic construct
  source 1..20: mol_type = other DNA
gctctgggctcgtctcgttg

SEQ ID NO: 255967 - DNA, 20 bp, synthetic construct
  source 1..20: mol_type = other DNA
agctctgggctcgtctcgtt

SEQ ID NO: 255968 - DNA, 20 bp, synthetic construct
  source 1..20: mol_type = other DNA
cagctctgggctcgtctcgt

SEQ ID NO: 255969 - DNA, 20 bp, synthetic construct
  source 1..20: mol_type = other DNA
acagctctgggctcgtctcg

SEQ ID NO: 255970 - DNA, 20 bp, synthetic construct
  source 1..20: mol_type = other DNA
cacagctctgggctcgtctc

SEQ ID NO: 255971 - DNA, 20 bp, synthetic construct
  source 1..20: mol_type = other DNA
gcacagctctgggctcgtct

SEQ ID NO: 255972 - DNA, 20 bp, synthetic construct
  source 1..20: mol_type = other DNA
agcacagctctgggctcgtc

SEQ ID NO: 255973 - DNA, 20 bp, synthetic construct
  source 1..20: mol_type = other DNA
gagcacagctctgggctcgt

SEQ ID NO: 255974 - DNA, 20 bp, synthetic construct
  source 1..20: mol_type = other DNA
ggagcacagctctgggctcg

SEQ ID NO: 255975 - DNA, 20 bp, synthetic construct
  source 1..20: mol_type = other DNA
gggagcacagctctgggctc

SEQ ID NO: 255976 - DNA, 20 bp, synthetic construct
  source 1..20: mol_type = other DNA
tgggagcacagctctgggct

SEQ ID NO: 255977 - DNA, 20 bp, synthetic construct
  source 1..20: mol_type = other DNA
atgggagcacagctctgggc

SEQ ID NO: 255978 - DNA, 20 bp, synthetic construct
  source 1..20: mol_type = other DNA
gatgggagcacagctctggg

SEQ ID NO: 255979 - DNA, 20 bp, synthetic construct
  source 1..20: mol_type = other DNA
agatgggagcacagctctgg

SEQ ID NO: 255980 - DNA, 20 bp, synthetic construct
  source 1..20: mol_type = other DNA
gagatgggagcacagctctg

SEQ ID NO: 255981 - DNA, 20 bp, synthetic construct
  source 1..20: mol_type = other DNA
agagatgggagcacagctct

SEQ ID NO: 255982 - DNA, 20 bp, synthetic construct
  source 1..20: mol_type = other DNA
aagagatgggagcacagctc

SEQ ID NO: 255983 - DNA, 20 bp, synthetic construct
  source 1..20: mol_type = other DNA
aaagagatgggagcacagct

SEQ ID NO: 255984 - DNA, 20 bp, synthetic construct
  source 1..20: mol_type = other DNA
caaagagatgggagcacagc

SEQ ID NO: 255985 - DNA, 20 bp, synthetic construct
  source 1..20: mol_type = other DNA
acaaagagatgggagcacag

SEQ ID NO: 255986 - DNA, 20 bp, synthetic construct
  source 1..20: mol_type = other DNA
aacaaagagatgggagcaca

SEQ ID NO: 255987 - DNA, 20 bp, synthetic construct
  source 1..20: mol_type = other DNA
taacaaagagatgggagcac

SEQ ID NO: 255988 - DNA, 20 bp, synthetic construct
  source 1..20: mol_type = other DNA
ctaacaaagagatgggagca

SEQ ID NO: 255989 - DNA, 20 bp, synthetic construct
  source 1..20: mol_type = other DNA
cctaacaaagagatgggagc

SEQ ID NO: 255990 - DNA, 20 bp, synthetic construct
  source 1..20: mol_type = other DNA
ccctaacaaagagatgggag

SEQ ID NO: 255991 - DNA, 20 bp, synthetic construct
  source 1..20: mol_type = other DNA
cccctaacaaagagatggga

SEQ ID NO: 255992 - DNA, 20 bp, synthetic construct
  source 1..20: mol_type = other DNA
ccccctaacaaagagatggg

SEQ ID NO: 255993 - DNA, 20 bp, synthetic construct
  source 1..20: mol_type = other DNA
gccccctaacaaagagatgg

SEQ ID NO: 255994 - DNA, 20 bp, synthetic construct
  source 1..20: mol_type = other DNA
ggccccctaacaaagagatg

SEQ ID NO: 255995 - DNA, 20 bp, synthetic construct
  source 1..20: mol_type = other DNA
aggccccctaacaaagagat

SEQ ID NO: 255996 - DNA, 20 bp, synthetic construct
  source 1..20: mol_type = other DNA
caggccccctaacaaagaga

SEQ ID NO: 255997 - DNA, 20 bp, synthetic construct
  source 1..20: mol_type = other DNA
ccaggccccctaacaaagag

SEQ ID NO: 255998 - DNA, 20 bp, synthetic construct
  source 1..20: mol_type = other DNA
cccaggccccctaacaaaga

SEQ ID NO: 255999 - DNA, 20 bp, synthetic construct
  source 1..20: mol_type = other DNA
tcccaggccccctaacaaag

SEQ ID NO: 256000 - DNA, 20 bp, synthetic construct
  source 1..20: mol_type = other DNA
atcccaggccccctaacaaa

SEQ ID NO: 256001 - DNA, 20 bp, synthetic construct
  source 1..20: mol_type = other DNA
catcccaggccccctaacaa

SEQ ID NO: 256002 - DNA, 20 bp, synthetic construct
  source 1..20: mol_type = other DNA
gcatcccaggccccctaaca

SEQ ID NO: 256003 - DNA, 20 bp, synthetic construct
  source 1..20: mol_type = other DNA
ggcatcccaggccccctaac

SEQ ID NO: 256004 - DNA, 20 bp, synthetic construct
  source 1..20: mol_type = other DNA
gggcatcccaggccccctaa

SEQ ID NO: 256005 - DNA, 20 bp, synthetic construct
  source 1..20: mol_type = other DNA
agggcatcccaggcccccta

SEQ ID NO: 256006 - DNA, 20 bp, synthetic construct
  source 1..20: mol_type = other DNA
gagggcatcccaggccccct

SEQ ID NO: 256007 - DNA, 20 bp, synthetic construct
  source 1..20: mol_type = other DNA
agagggcatcccaggccccc

SEQ ID NO: 256008 - DNA, 20 bp, synthetic construct
  source 1..20: mol_type = other DNA
gagagggcatcccaggcccc

SEQ ID NO: 256009 - DNA, 20 bp, synthetic construct
  source 1..20: mol_type = other DNA
tgagagggcatcccaggccc

SEQ ID NO: 256010 - DNA, 20 bp, synthetic construct
  source 1..20: mol_type = other DNA
ctgagagggcatcccaggcc

SEQ ID NO: 256011 - DNA, 20 bp, synthetic construct
  source 1..20: mol_type = other DNA
actgagagggcatcccaggc

SEQ ID NO: 256012 - DNA, 20 bp, synthetic construct
  source 1..20: mol_type = other DNA
cactgagagggcatcccagg

SEQ ID NO: 256013 - DNA, 20 bp, synthetic construct
  source 1..20: mol_type = other DNA
acactgagagggcatcccag

SEQ ID NO: 256014 - DNA, 20 bp, synthetic construct
  source 1..20: mol_type = other DNA
gacactgagagggcatccca

SEQ ID NO: 256015 - DNA, 20 bp, synthetic construct
  source 1..20: mol_type = other DNA
tgacactgagagggcatccc

SEQ ID NO: 256016 - DNA, 20 bp, synthetic construct
  source 1..20: mol_type = other DNA
atgacactgagagggcatcc

SEQ ID NO: 256017 - DNA, 20 bp, synthetic construct
  source 1..20: mol_type = other DNA
aatgacactgagagggcatc

SEQ ID NO: 256018 - DNA, 20 bp, synthetic construct
  source 1..20: mol_type = other DNA
aaatgacactgagagggcat

SEQ ID NO: 256019 - DNA, 20 bp, synthetic construct
  source 1..20: mol_type = other DNA
aaaatgacactgagagggca

SEQ ID NO: 256020 - DNA, 20 bp, synthetic construct
  source 1..20: mol_type = other DNA
caaaatgacactgagagggc

SEQ ID NO: 256021 - DNA, 20 bp, synthetic construct
  source 1..20: mol_type = other DNA
acaaaatgacactgagaggg

SEQ ID NO: 256022 - DNA, 20 bp, synthetic construct
  source 1..20: mol_type = other DNA
gacaaaatgacactgagagg

SEQ ID NO: 256023 - DNA, 20 bp, synthetic construct
  source 1..20: mol_type = other DNA
ggacaaaatgacactgagag

SEQ ID NO: 256024 - DNA, 20 bp, synthetic construct
  source 1..20: mol_type = other DNA
tggacaaaatgacactgaga

SEQ ID NO: 256025 - DNA, 20 bp, synthetic construct
  source 1..20: mol_type = other DNA
ctggacaaaatgacactgag

SEQ ID NO: 256026 - DNA, 20 bp, synthetic construct
  source 1..20: mol_type = other DNA
cctggacaaaatgacactga

SEQ ID NO: 256027 - DNA, 20 bp, synthetic construct
  source 1..20: mol_type = other DNA
tcctggacaaaatgacactg

SEQ ID NO: 256028 - DNA, 20 bp, synthetic construct
  source 1..20: mol_type = other DNA
atcctggacaaaatgacact

SEQ ID NO: 256029 - DNA, 20 bp, synthetic construct
  source 1..20: mol_type = other DNA
catcctggacaaaatgacac

SEQ ID NO: 256030 - DNA, 20 bp, synthetic construct
  source 1..20: mol_type = other DNA
tcatcctggacaaaatgaca

SEQ ID NO: 256031 - DNA, 20 bp, synthetic construct
  source 1..20: mol_type = other DNA
atcatcctggacaaaatgac

SEQ ID NO: 256032 - DNA, 20 bp, synthetic construct
  source 1..20: mol_type = other DNA
catcatcctggacaaaatga

SEQ ID NO: 256033 - DNA, 20 bp, synthetic construct
  source 1..20: mol_type = other DNA
gcatcatcctggacaaaatg

SEQ ID NO: 256034 - DNA, 20 bp, synthetic construct
  source 1..20: mol_type = other DNA
agcatcatcctggacaaaat

SEQ ID NO: 256035 - DNA, 20 bp, synthetic construct
  source 1..20: mol_type = other DNA
gagcatcatcctggacaaaa

SEQ ID NO: 256036 - DNA, 20 bp, synthetic construct
  source 1..20: mol_type = other DNA
ggagcatcatcctggacaaa

SEQ ID NO: 256037 - DNA, 20 bp, synthetic construct
  source 1..20: mol_type = other DNA
gggagcatcatcctggacaa

SEQ ID NO: 256038 - DNA, 20 bp, synthetic construct
  source 1..20: mol_type = other DNA
agggagcatcatcctggaca

SEQ ID NO: 256039 - DNA, 20 bp, synthetic construct
  source 1..20: mol_type = other DNA
gagggagcatcatcctggac

SEQ ID NO: 256040 - DNA, 20 bp, synthetic construct
  source 1..20: mol_type = other DNA
agagggagcatcatcctgga

SEQ ID NO: 256041 - DNA, 20 bp, synthetic construct
  source 1..20: mol_type = other DNA
gagagggagcatcatcctgg

SEQ ID NO: 256042 - DNA, 20 bp, synthetic construct
  source 1..20: mol_type = other DNA
agagagggagcatcatcctg

SEQ ID NO: 256043 - DNA, 20 bp, synthetic construct
  source 1..20: mol_type = other DNA
aagagagggagcatcatcct

SEQ ID NO: 256044 - DNA, 20 bp, synthetic construct
  source 1..20: mol_type = other DNA
taagagagggagcatcatcc

SEQ ID NO: 256045 - DNA, 20 bp, synthetic construct
  source 1..20: mol_type = other DNA
ttaagagagggagcatcatc

SEQ ID NO: 256046 - DNA, 20 bp, synthetic construct
  source 1..20: mol_type = other DNA
cttaagagagggagcatcat

SEQ ID NO: 256047 - DNA, 20 bp, synthetic construct
  source 1..20: mol_type = other DNA
gcttaagagagggagcatca

SEQ ID NO: 256048 - DNA, 20 bp, synthetic construct
  source 1..20: mol_type = other DNA
cgcttaagagagggagcatc

SEQ ID NO: 256049 - DNA, 20 bp, synthetic construct
  source 1..20: mol_type = other DNA
tcgcttaagagagggagcat

SEQ ID NO: 256050 - DNA, 20 bp, synthetic construct
  source 1..20: mol_type = other DNA
atcgcttaagagagggagca

SEQ ID NO: 256051 - DNA, 20 bp, synthetic construct
  source 1..20: mol_type = other DNA
aatcgcttaagagagggagc

SEQ ID NO: 256052 - DNA, 20 bp, synthetic construct
  source 1..20: mol_type = other DNA
taatcgcttaagagagggag

SEQ ID NO: 256053 - DNA, 20 bp, synthetic construct
  source 1..20: mol_type = other DNA
ttaatcgcttaagagaggga

SEQ ID NO: 256054 - DNA, 20 bp, synthetic construct
  source 1..20: mol_type = other DNA
attaatcgcttaagagaggg

SEQ ID NO: 256055 - DNA, 20 bp, synthetic construct
  source 1..20: mol_type = other DNA
cattaatcgcttaagagagg

SEQ ID NO: 256056 - DNA, 20 bp, synthetic construct
  source 1..20: mol_type = other DNA
gcattaatcgcttaagagag

SEQ ID NO: 256057 - DNA, 20 bp, synthetic construct
  source 1..20: mol_type = other DNA
cgcattaatcgcttaagaga

SEQ ID NO: 256058 - DNA, 20 bp, synthetic construct
  source 1..20: mol_type = other DNA
gcgcattaatcgcttaagag

SEQ ID NO: 256059 - DNA, 20 bp, synthetic construct
  source 1..20: mol_type = other DNA
ggcgcattaatcgcttaaga

SEQ ID NO: 256060 - DNA, 20 bp, synthetic construct
  source 1..20: mol_type = other DNA
gggcgcattaatcgcttaag

SEQ ID NO: 256061 - DNA, 20 bp, synthetic construct
  source 1..20: mol_type = other DNA
agggcgcattaatcgcttaa

SEQ ID NO: 256062 - DNA, 20 bp, synthetic construct
  source 1..20: mol_type = other DNA
aagggcgcattaatcgctta

SEQ ID NO: 256063 - DNA, 20 bp, synthetic construct
  source 1..20: mol_type = other DNA
caagggcgcattaatcgctt

SEQ ID NO: 256064 - DNA, 20 bp, synthetic construct
  source 1..20: mol_type = other DNA
gcaagggcgcattaatcgct

SEQ ID NO: 256065 - DNA, 20 bp, synthetic construct
  source 1..20: mol_type = other DNA
agcaagggcgcattaatcgc

SEQ ID NO: 256066 - DNA, 20 bp, synthetic construct
  source 1..20: mol_type = other DNA
tagcaagggcgcattaatcg

SEQ ID NO: 256067 - DNA, 20 bp, synthetic construct
  source 1..20: mol_type = other DNA
ttagcaagggcgcattaatc

SEQ ID NO: 256068 - DNA, 20 bp, synthetic construct
  source 1..20: mol_type = other DNA
gttagcaagggcgcattaat

SEQ ID NO: 256069 - DNA, 20 bp, synthetic construct
  source 1..20: mol_type = other DNA
ggttagcaagggcgcattaa

SEQ ID NO: 256070 - DNA, 20 bp, synthetic construct
  source 1..20: mol_type = other DNA
aggttagcaagggcgcatta

SEQ ID NO: 256071 - DNA, 20 bp, synthetic construct
  source 1..20: mol_type = other DNA
aaggttagcaagggcgcatt

SEQ ID NO: 256072 - DNA, 20 bp, synthetic construct
  source 1..20: mol_type = other DNA
aaaggttagcaagggcgcat

SEQ ID NO: 256073 - DNA, 20 bp, synthetic construct
  source 1..20: mol_type = other DNA
aaaaggttagcaagggcgca

SEQ ID NO: 256074 - DNA, 20 bp, synthetic construct
  source 1..20: mol_type = other DNA
caaaaggttagcaagggcgc

SEQ ID NO: 256075 - DNA, 20 bp, synthetic construct
  source 1..20: mol_type = other DNA
gcaaaaggttagcaagggcg

SEQ ID NO: 256076 - DNA, 20 bp, synthetic construct
  source 1..20: mol_type = other DNA
agcaaaaggttagcaagggc

SEQ ID NO: 256077 - DNA, 20 bp, synthetic construct
  source 1..20: mol_type = other DNA
tagcaaaaggttagcaaggg

SEQ ID NO: 256078 - DNA, 20 bp, synthetic construct
  source 1..20: mol_type = other DNA
atagcaaaaggttagcaagg

SEQ ID NO: 256079 - DNA, 20 bp, synthetic construct
  source 1..20: mol_type = other DNA
gatagcaaaaggttagcaag

SEQ ID NO: 256080 - DNA, 20 bp, synthetic construct
  source 1..20: mol_type = other DNA
cgatagcaaaaggttagcaa

SEQ ID NO: 256081 - DNA, 20 bp, synthetic construct
  source 1..20: mol_type = other DNA
gcgatagcaaaaggttagca

SEQ ID NO: 256082 - DNA, 20 bp, synthetic construct
  source 1..20: mol_type = other DNA
agcgatagcaaaaggttagc

SEQ ID NO: 256083 - DNA, 20 bp, synthetic construct
  source 1..20: mol_type = other DNA
cagcgatagcaaaaggttag

SEQ ID NO: 256084 - DNA, 20 bp, synthetic construct
  source 1..20: mol_type = other DNA
gcagcgatagcaaaaggtta

SEQ ID NO: 256085 - DNA, 20 bp, synthetic construct
  source 1..20: mol_type = other DNA
ggcagcgatagcaaaaggtt

SEQ ID NO: 256086 - DNA, 20 bp, synthetic construct
  source 1..20: mol_type = other DNA
aggcagcgatagcaaaaggt

SEQ ID NO: 256087 - DNA, 20 bp, synthetic construct
  source 1..20: mol_type = other DNA
gaggcagcgatagcaaaagg

SEQ ID NO: 256088 - DNA, 20 bp, synthetic construct
  source 1..20: mol_type = other DNA
agaggcagcgatagcaaaag

SEQ ID NO: 256089 - DNA, 20 bp, synthetic construct
  source 1..20: mol_type = other DNA
aagaggcagcgatagcaaaa

SEQ ID NO: 256090 - DNA, 20 bp, synthetic construct
  source 1..20: mol_type = other DNA
gaagaggcagcgatagcaaa

SEQ ID NO: 256091 - DNA, 20 bp, synthetic construct
  source 1..20: mol_type = other DNA
tgaagaggcagcgatagcaa

SEQ ID NO: 256092 - DNA, 20 bp, synthetic construct
  source 1..20: mol_type = other DNA
ttgaagaggcagcgatagca

SEQ ID NO: 256093 - DNA, 20 bp, synthetic construct
  source 1..20: mol_type = other DNA
tttgaagaggcagcgatagc

SEQ ID NO: 256094 - DNA, 20 bp, synthetic construct
  source 1..20: mol_type = other DNA
gtttgaagaggcagcgatag

SEQ ID NO: 256095 - DNA, 20 bp, synthetic construct
  source 1..20: mol_type = other DNA
ggtttgaagaggcagcgata

SEQ ID NO: 256096 - DNA, 20 bp, synthetic construct
  source 1..20: mol_type = other DNA
tggtttgaagaggcagcgat

SEQ ID NO: 256097 - DNA, 20 bp, synthetic construct
  source 1..20: mol_type = other DNA
ctggtttgaagaggcagcga

SEQ ID NO: 256098 - DNA, 20 bp, synthetic construct
  source 1..20: mol_type = other DNA
tctggtttgaagaggcagcg

SEQ ID NO: 256099 - DNA, 20 bp, synthetic construct
  source 1..20: mol_type = other DNA
ctctggtttgaagaggcagc

SEQ ID NO: 256100 - DNA, 20 bp, synthetic construct
  source 1..20: mol_type = other DNA
cctctggtttgaagaggcag

SEQ ID NO: 256101 - DNA, 20 bp, synthetic construct
  source 1..20: mol_type = other DNA
tcctctggtttgaagaggca

SEQ ID NO: 256102 - DNA, 20 bp, synthetic construct
  source 1..20: mol_type = other DNA
ctcctctggtttgaagaggc

SEQ ID NO: 256103 - DNA, 20 bp, synthetic construct
  source 1..20: mol_type = other DNA
actcctctggtttgaagagg

SEQ ID NO: 256104 - DNA, 20 bp, synthetic construct
  source 1..20: mol_type = other DNA
aactcctctggtttgaagag

SEQ ID NO: 256105 - DNA, 20 bp, synthetic construct
  source 1..20: mol_type = other DNA
caactcctctggtttgaaga

SEQ ID NO: 256106 - DNA, 20 bp, synthetic construct
  source 1..20: mol_type = other DNA
tcaactcctctggtttgaag

SEQ ID NO: 256107 - DNA, 20 bp, synthetic construct
  source 1..20: mol_type = other DNA
ctcaactcctctggtttgaa

SEQ ID NO: 256108 - DNA, 20 bp, synthetic construct
  source 1..20: mol_type = other DNA
tctcaactcctctggtttga

SEQ ID NO: 256109 - DNA, 20 bp, synthetic construct
  source 1..20: mol_type = other DNA
ctctcaactcctctggtttg

SEQ ID NO: 256110 - DNA, 20 bp, synthetic construct
  source 1..20: mol_type = other DNA
actctcaactcctctggttt

SEQ ID NO: 256111 - DNA, 20 bp, synthetic construct
  source 1..20: mol_type = other DNA
aactctcaactcctctggtt

SEQ ID NO: 256112 - DNA, 20 bp, synthetic construct
  source 1..20: mol_type = other DNA
gaactctcaactcctctggt

SEQ ID NO: 256113 - DNA, 20 bp, synthetic construct
  source 1..20: mol_type = other DNA
ggaactctcaactcctctgg

SEQ ID NO: 256114 - DNA, 20 bp, synthetic construct
  source 1..20: mol_type = other DNA
cggaactctcaactcctctg

SEQ ID NO: 256115 - DNA, 20 bp, synthetic construct
  source 1..20: mol_type = other DNA
ccggaactctcaactcctct

SEQ ID NO: 256116 - DNA, 20 bp, synthetic construct
  source 1..20: mol_type = other DNA
cccggaactctcaactcctc

SEQ ID NO: 256117 - DNA, 20 bp, synthetic construct
  source 1..20: mol_type = other DNA
gcccggaactctcaactcct

SEQ ID NO: 256118 - DNA, 20 bp, synthetic construct
  source 1..20: mol_type = other DNA
ggcccggaactctcaactcc

SEQ ID NO: 256119 - DNA, 20 bp, synthetic construct
  source 1..20: mol_type = other DNA
cggcccggaactctcaactc

SEQ ID NO: 256120 - DNA, 20 bp, synthetic construct
  source 1..20: mol_type = other DNA
ccggcccggaactctcaact

SEQ ID NO: 256121 - DNA, 20 bp, synthetic construct
  source 1..20: mol_type = other DNA
gccggcccggaactctcaac

SEQ ID NO: 256122 - DNA, 20 bp, synthetic construct
  source 1..20: mol_type = other DNA
tgccggcccggaactctcaa

SEQ ID NO: 256123 - DNA, 20 bp, synthetic construct
  source 1..20: mol_type = other DNA
ctgccggcccggaactctca

SEQ ID NO: 256124 - DNA, 20 bp, synthetic construct
  source 1..20: mol_type = other DNA
tctgccggcccggaactctc

SEQ ID NO: 256125 - DNA, 20 bp, synthetic construct
  source 1..20: mol_type = other DNA
ctctgccggcccggaactct

SEQ ID NO: 256126 - DNA, 20 bp, synthetic construct
  source 1..20: mol_type = other DNA
cctctgccggcccggaactc

SEQ ID NO: 256127 - DNA, 20 bp, synthetic construct
  source 1..20: mol_type = other DNA
tcctctgccggcccggaact

SEQ ID NO: 256128 - DNA, 20 bp, synthetic construct
  source 1..20: mol_type = other DNA
ttcctctgccggcccggaac

SEQ ID NO: 256129 - DNA, 20 bp, synthetic construct
  source 1..20: mol_type = other DNA
cttcctctgccggcccggaa

SEQ ID NO: 256130 - DNA, 20 bp, synthetic construct
  source 1..20: mol_type = other DNA
ccttcctctgccggcccgga

SEQ ID NO: 256131 - DNA, 20 bp, synthetic construct
  source 1..20: mol_type = other DNA
gccttcctctgccggcccgg

SEQ ID NO: 256132 - DNA, 20 bp, synthetic construct
  source 1..20: mol_type = other DNA
cgccttcctctgccggcccg

SEQ ID NO: 256133 - DNA, 20 bp, synthetic construct
  source 1..20: mol_type = other DNA
gcgccttcctctgccggccc

SEQ ID NO: 256134 - DNA, 20 bp, synthetic construct
  source 1..20: mol_type = other DNA
ggcgccttcctctgccggcc

SEQ ID NO: 256135 - DNA, 20 bp, synthetic construct
  source 1..20: mol_type = other DNA
aggcgccttcctctgccggc

SEQ ID NO: 256136 - DNA, 20 bp, synthetic construct
  source 1..20: mol_type = other DNA
caggcgccttcctctgccgg

SEQ ID NO: 256137 - DNA, 20 bp, synthetic construct
  source 1..20: mol_type = other DNA
tcaggcgccttcctctgccg

SEQ ID NO: 256138 - DNA, 20 bp, synthetic construct
  source 1..20: mol_type = other DNA
ttcaggcgccttcctctgcc

SEQ ID NO: 256139 - DNA, 20 bp, synthetic construct
  source 1..20: mol_type = other DNA
tttcaggcgccttcctctgc

SEQ ID NO: 256140 - DNA, 20 bp, synthetic construct
  source 1..20: mol_type = other DNA
ctttcaggcgccttcctctg

SEQ ID NO: 256141 - DNA, 20 bp, synthetic construct
  source 1..20: mol_type = other DNA
cctttcaggcgccttcctct

SEQ ID NO: 256142 - DNA, 20 bp, synthetic construct
  source 1..20: mol_type = other DNA
gcctttcaggcgccttcctc

SEQ ID NO: 256143 - DNA, 20 bp, synthetic construct
  source 1..20: mol_type = other DNA
ggcctttcaggcgccttcct

SEQ ID NO: 256144 - DNA, 20 bp, synthetic construct
  source 1..20: mol_type = other DNA
gggcctttcaggcgccttcc

SEQ ID NO: 256145 - DNA, 20 bp, synthetic construct
  source 1..20: mol_type = other DNA
ggggcctttcaggcgccttc

SEQ ID NO: 256146 - DNA, 20 bp, synthetic construct
  source 1..20: mol_type = other DNA
aggggcctttcaggcgcctt

SEQ ID NO: 256147 - DNA, 20 bp, synthetic construct
  source 1..20: mol_type = other DNA
caggggcctttcaggcgcct

SEQ ID NO: 256148 - DNA, 20 bp, synthetic construct
  source 1..20: mol_type = other DNA
ccaggggcctttcaggcgcc

SEQ ID NO: 256149 - DNA, 20 bp, synthetic construct
  source 1..20: mol_type = other DNA
gccaggggcctttcaggcgc

SEQ ID NO: 256150 - DNA, 20 bp, synthetic construct
  source 1..20: mol_type = other DNA
ggccaggggcctttcaggcg

SEQ ID NO: 256151 - DNA, 20 bp, synthetic construct
  source 1..20: mol_type = other DNA
tggccaggggcctttcaggc

SEQ ID NO: 256152 - DNA, 20 bp, synthetic construct
  source 1..20: mol_type = other DNA
ttggccaggggcctttcagg

SEQ ID NO: 256153 - DNA, 20 bp, synthetic construct
  source 1..20: mol_type = other DNA
attggccaggggcctttcag

SEQ ID NO: 256154 - DNA, 20 bp, synthetic construct
  source 1..20: mol_type = other DNA
cattggccaggggcctttca

SEQ ID NO: 256155 - DNA, 20 bp, synthetic construct
  source 1..20: mol_type = other DNA
tcattggccaggggcctttc

SEQ ID NO: 256156 - DNA, 20 bp, synthetic construct
  source 1..20: mol_type = other DNA
ctcattggccaggggccttt

SEQ ID NO: 256157 - DNA, 20 bp, synthetic construct
  source 1..20: mol_type = other DNA
tctcattggccaggggcctt

SEQ ID NO: 256158 - DNA, 20 bp, synthetic construct
  source 1..20: mol_type = other DNA
atctcattggccaggggcct

SEQ ID NO: 256159 - DNA, 20 bp, synthetic construct
  source 1..20: mol_type = other DNA
aatctcattggccaggggcc

SEQ ID NO: 256160 - DNA, 20 bp, synthetic construct
  source 1..20: mol_type = other DNA
taatctcattggccaggggc

SEQ ID NO: 256161 - DNA, 20 bp, synthetic construct
  source 1..20: mol_type = other DNA
ctaatctcattggccagggg

SEQ ID NO: 256162 - DNA, 20 bp, synthetic construct
  source 1..20: mol_type = other DNA
gctaatctcattggccaggg

SEQ ID NO: 256163 - DNA, 20 bp, synthetic construct
  source 1..20: mol_type = other DNA
cgctaatctcattggccagg

SEQ ID NO: 256164 - DNA, 20 bp, synthetic construct
  source 1..20: mol_type = other DNA
gcgctaatctcattggccag

SEQ ID NO: 256165 - DNA, 20 bp, synthetic construct
  source 1..20: mol_type = other DNA
ggcgctaatctcattggcca

SEQ ID NO: 256166 - DNA, 20 bp, synthetic construct
  source 1..20: mol_type = other DNA
gggcgctaatctcattggcc

SEQ ID NO: 256167 - DNA, 20 bp, synthetic construct
  source 1..20: mol_type = other DNA
tgggcgctaatctcattggc

SEQ ID NO: 256168 - DNA, 20 bp, synthetic construct
  source 1..20: mol_type = other DNA
gtgggcgctaatctcattgg

SEQ ID NO: 256169 - DNA, 20 bp, synthetic construct
  source 1..20: mol_type = other DNA
cgtgggcgctaatctcattg

SEQ ID NO: 256170 - DNA, 20 bp, synthetic construct
  source 1..20: mol_type = other DNA
acgtgggcgctaatctcatt

SEQ ID NO: 256171 - DNA, 20 bp, synthetic construct
  source 1..20: mol_type = other DNA
gacgtgggcgctaatctcat

SEQ ID NO: 256172 - DNA, 20 bp, synthetic construct
  source 1..20: mol_type = other DNA
ggacgtgggcgctaatctca

SEQ ID NO: 256173 - DNA, 20 bp, synthetic construct
  source 1..20: mol_type = other DNA
tggacgtgggcgctaatctc

SEQ ID NO: 256174 - DNA, 20 bp, synthetic construct
  source 1..20: mol_type = other DNA
ctggacgtgggcgctaatct

SEQ ID NO: 256175 - DNA, 20 bp, synthetic construct
  source 1..20: mol_type = other DNA
gctggacgtgggcgctaatc

SEQ ID NO: 256176 - DNA, 20 bp, synthetic construct
  source 1..20: mol_type = other DNA
ggctggacgtgggcgctaat

SEQ ID NO: 256177 - DNA, 20 bp, synthetic construct
  source 1..20: mol_type = other DNA
aggctggacgtgggcgctaa

SEQ ID NO: 256178 - DNA, 20 bp, synthetic construct
  source 1..20: mol_type = other DNA
caggctggacgtgggcgcta

SEQ ID NO: 256179 - DNA, 20 bp, synthetic construct
  source 1..20: mol_type = other DNA
ccaggctggacgtgggcgct

SEQ ID NO: 256180 - DNA, 20 bp, synthetic construct
  source 1..20: mol_type = other DNA
tccaggctggacgtgggcgc

SEQ ID NO: 256181 - DNA, 20 bp, synthetic construct
  source 1..20: mol_type = other DNA
gtccaggctggacgtgggcg

SEQ ID NO: 256182 - DNA, 20 bp, synthetic construct
  source 1..20: mol_type = other DNA
ggtccaggctggacgtgggc

SEQ ID NO: 256183 - DNA, 20 bp, synthetic construct
  source 1..20: mol_type = other DNA
gggtccaggctggacgtggg

SEQ ID NO: 256184 - DNA, 20 bp, synthetic construct
  source 1..20: mol_type = other DNA
agggtccaggctggacgtgg

SEQ ID NO: 256185 - DNA, 20 bp, synthetic construct
  source 1..20: mol_type = other DNA
cagggtccaggctggacgtg

SEQ ID NO: 256186 - DNA, 20 bp, synthetic construct
  source 1..20: mol_type = other DNA
gcagggtccaggctggacgt

SEQ ID NO: 256187 - DNA, 20 bp, synthetic construct
  source 1..20: mol_type = other DNA
cgcagggtccaggctggacg

SEQ ID NO: 256188 - DNA, 20 bp, synthetic construct
  source 1..20: mol_type = other DNA
ccgcagggtccaggctggac

SEQ ID NO: 256189 - DNA, 20 bp, synthetic construct
  source 1..20: mol_type = other DNA
tccgcagggtccaggctgga

SEQ ID NO: 256190 - DNA, 20 bp, synthetic construct
  source 1..20: mol_type = other DNA
ctccgcagggtccaggctgg

SEQ ID NO: 256191 - DNA, 20 bp, synthetic construct
  source 1..20: mol_type = other DNA
tctccgcagggtccaggctg

SEQ ID NO: 256192 - DNA, 20 bp, synthetic construct
  source 1..20: mol_type = other DNA
ctctccgcagggtccaggct

SEQ ID NO: 256193 - DNA, 20 bp, synthetic construct
  source 1..20: mol_type = other DNA
cctctccgcagggtccaggc

SEQ ID NO: 256194 - DNA, 20 bp, synthetic construct
  source 1..20: mol_type = other DNA
gcctctccgcagggtccagg

SEQ ID NO: 256195 - DNA, 20 bp, synthetic construct
  source 1..20: mol_type = other DNA
ggcctctccgcagggtccag

SEQ ID NO: 256196 - DNA, 20 bp, synthetic construct
  source 1..20: mol_type = other DNA
aggcctctccgcagggtcca

SEQ ID NO: 256197 - DNA, 20 bp, synthetic construct
  source 1..20: mol_type = other DNA
gaggcctctccgcagggtcc

SEQ ID NO: 256198 - DNA, 20 bp, synthetic construct
  source 1..20: mol_type = other DNA
agaggcctctccgcagggtc

SEQ ID NO: 256199 - DNA, 20 bp, synthetic construct
  source 1..20: mol_type = other DNA
cagaggcctctccgcagggt

SEQ ID NO: 256200 - DNA, 20 bp, synthetic construct
  source 1..20: mol_type = other DNA
ccagaggcctctccgcaggg

SEQ ID NO: 256201 - DNA, 20 bp, synthetic construct
  source 1..20: mol_type = other DNA
cccagaggcctctccgcagg

SEQ ID NO: 256202 - DNA, 20 bp, synthetic construct
  source 1..20: mol_type = other DNA
ccccagaggcctctccgcag

SEQ ID NO: 256203 - DNA, 20 bp, synthetic construct
  source 1..20: mol_type = other DNA
accccagaggcctctccgca

SEQ ID NO: 256204 - DNA, 20 bp, synthetic construct
  source 1..20: mol_type = other DNA
gaccccagaggcctctccgc

SEQ ID NO: 256205 - DNA, 20 bp, synthetic construct
  source 1..20: mol_type = other DNA
agaccccagaggcctctccg

SEQ ID NO: 256206 - DNA, 20 bp, synthetic construct
  source 1..20: mol_type = other DNA
gagaccccagaggcctctcc

SEQ ID NO: 256207 - DNA, 20 bp, synthetic construct
  source 1..20: mol_type = other DNA
agagaccccagaggcctctc

SEQ ID NO: 256208 - DNA, 20 bp, synthetic construct
  source 1..20: mol_type = other DNA
cagagaccccagaggcctct

SEQ ID NO: 256209 - DNA, 20 bp, synthetic construct
  source 1..20: mol_type = other DNA
ccagagaccccagaggcctc

SEQ ID NO: 256210 - DNA, 20 bp, synthetic construct
  source 1..20: mol_type = other DNA
cccagagaccccagaggcct

SEQ ID NO: 256211 - DNA, 20 bp, synthetic construct
  source 1..20: mol_type = other DNA
gcccagagaccccagaggcc

SEQ ID NO: 256212 - DNA, 20 bp, synthetic construct
  source 1..20: mol_type = other DNA
ggcccagagaccccagaggc

SEQ ID NO: 256213 - DNA, 20 bp, synthetic construct
  source 1..20: mol_type = other DNA
cggcccagagaccccagagg

SEQ ID NO: 256214 - DNA, 20 bp, synthetic construct
  source 1..20: mol_type = other DNA
acggcccagagaccccagag

SEQ ID NO: 256215 - DNA, 20 bp, synthetic construct
  source 1..20: mol_type = other DNA
cacggcccagagaccccaga

SEQ ID NO: 256216 - DNA, 20 bp, synthetic construct
  source 1..20: mol_type = other DNA
gcacggcccagagaccccag

SEQ ID NO: 256217 - DNA, 20 bp, synthetic construct
  source 1..20: mol_type = other DNA
ggcacggcccagagacccca

SEQ ID NO: 256218 - DNA, 20 bp, synthetic construct
  source 1..20: mol_type = other DNA
aggcacggcccagagacccc

SEQ ID NO: 256219 - DNA, 20 bp, synthetic construct
  source 1..20: mol_type = other DNA
gaggcacggcccagagaccc

SEQ ID NO: 256220 - DNA, 20 bp, synthetic construct
  source 1..20: mol_type = other DNA
cgaggcacggcccagagacc

SEQ ID NO: 256221 - DNA, 20 bp, synthetic construct
  source 1..20: mol_type = other DNA
ccgaggcacggcccagagac

SEQ ID NO: 256222 - DNA, 20 bp, synthetic construct
  source 1..20: mol_type = other DNA
cccgaggcacggcccagaga

SEQ ID NO: 256223 - DNA, 20 bp, synthetic construct
  source 1..20: mol_type = other DNA
ccccgaggcacggcccagag

SEQ ID NO: 256224 - DNA, 20 bp, synthetic construct
  source 1..20: mol_type = other DNA
tccccgaggcacggcccaga

SEQ ID NO: 256225 - DNA, 20 bp, synthetic construct
  source 1..20: mol_type = other DNA
ctccccgaggcacggcccag

SEQ ID NO: 256226 - DNA, 20 bp, synthetic construct
  source 1..20: mol_type = other DNA
tctccccgaggcacggccca

SEQ ID NO: 256227 - DNA, 20 bp, synthetic construct
  source 1..20: mol_type = other DNA
ttctccccgaggcacggccc

SEQ ID NO: 256228 - DNA, 20 bp, synthetic construct
  source 1..20: mol_type = other DNA
tttctccccgaggcacggcc

SEQ ID NO: 256229 - DNA, 20 bp, synthetic construct
  source 1..20: mol_type = other DNA
ctttctccccgaggcacggc

SEQ ID NO: 256230 - DNA, 20 bp, synthetic construct
  source 1..20: mol_type = other DNA
tctttctccccgaggcacgg

SEQ ID NO: 256231 - DNA, 20 bp, synthetic construct
  source 1..20: mol_type = other DNA
ctctttctccccgaggcacg

SEQ ID NO: 256232 - DNA, 20 bp, synthetic construct
  source 1..20: mol_type = other DNA
gctctttctccccgaggcac

SEQ ID NO: 256233 - DNA, 20 bp, synthetic construct
  source 1..20: mol_type = other DNA
ggctctttctccccgaggca

SEQ ID NO: 256234 - DNA, 20 bp, synthetic construct
  source 1..20: mol_type = other DNA
tggctctttctccccgaggc

SEQ ID NO: 256235 - DNA, 20 bp, synthetic construct
  source 1..20: mol_type = other DNA
ctggctctttctccccgagg

SEQ ID NO: 256236 - DNA, 20 bp, synthetic construct
  source 1..20: mol_type = other DNA
tctggctctttctccccgag

SEQ ID NO: 256237 - DNA, 20 bp, synthetic construct
  source 1..20: mol_type = other DNA
ttctggctctttctccccga

SEQ ID NO: 256238 - DNA, 20 bp, synthetic construct
  source 1..20: mol_type = other DNA
cttctggctctttctccccg

SEQ ID NO: 256239 - DNA, 20 bp, synthetic construct
  source 1..20: mol_type = other DNA
gcttctggctctttctcccc

SEQ ID NO: 256240 - DNA, 20 bp, synthetic construct
  source 1..20: mol_type = other DNA
agcttctggctctttctccc

SEQ ID NO: 256241 - DNA, 20 bp, synthetic construct
  source 1..20: mol_type = other DNA
gagcttctggctctttctcc

SEQ ID NO: 256242 - DNA, 20 bp, synthetic construct
  source 1..20: mol_type = other DNA
ggagcttctggctctttctc

SEQ ID NO: 256243 - DNA, 20 bp, synthetic construct
  source 1..20: mol_type = other DNA
gggagcttctggctctttct

SEQ ID NO: 256244 - DNA, 20 bp, synthetic construct
  source 1..20: mol_type = other DNA
cgggagcttctggctctttc

SEQ ID NO: 256245 - DNA, 20 bp, synthetic construct
  source 1..20: mol_type = other DNA
acgggagcttctggctcttt

SEQ ID NO: 256246 - DNA, 20 bp, synthetic construct
  source 1..20: mol_type = other DNA
gacgggagcttctggctctt

SEQ ID NO: 256247 - DNA, 20 bp, synthetic construct
  source 1..20: mol_type = other DNA
ggacgggagcttctggctct

SEQ ID NO: 256248 - DNA, 20 bp, synthetic construct
  source 1..20: mol_type = other DNA
gggacgggagcttctggctc

SEQ ID NO: 256249 - DNA, 20 bp, synthetic construct
  source 1..20: mol_type = other DNA
cgggacgggagcttctggct

SEQ ID NO: 256250 - DNA, 20 bp, synthetic construct
  source 1..20: mol_type = other DNA
gcgggacgggagcttctggc

SEQ ID NO: 256251 - DNA, 20 bp, synthetic construct
  source 1..20: mol_type = other DNA
agcgggacgggagcttctgg

SEQ ID NO: 256252 - DNA, 20 bp, synthetic construct
  source 1..20: mol_type = other DNA
cagcgggacgggagcttctg

SEQ ID NO: 256253 - DNA, 20 bp, synthetic construct
  source 1..20: mol_type = other DNA
tcagcgggacgggagcttct

SEQ ID NO: 256254 - DNA, 20 bp, synthetic construct
  source 1..20: mol_type = other DNA
gtcagcgggacgggagcttc

SEQ ID NO: 256255 - DNA, 20 bp, synthetic construct
  source 1..20: mol_type = other DNA
ggtcagcgggacgggagctt

SEQ ID NO: 256256 - DNA, 20 bp, synthetic construct
  source 1..20: mol_type = other DNA
cggtcagcgggacgggagct

SEQ ID NO: 256257 - DNA, 20 bp, synthetic construct
  source 1..20: mol_type = other DNA
gcggtcagcgggacgggagc

SEQ ID NO: 256258 - DNA, 20 bp, synthetic construct
  source 1..20: mol_type = other DNA
cgcggtcagcgggacgggag

SEQ ID NO: 256259 - DNA, 20 bp, synthetic construct
  source 1..20: mol_type = other DNA
tcgcggtcagcgggacggga

SEQ ID NO: 256260 - DNA, 20 bp, synthetic construct
  source 1..20: mol_type = other DNA
ctcgcggtcagcgggacggg

SEQ ID NO: 256261 - DNA, 20 bp, synthetic construct
  source 1..20: mol_type = other DNA
gctcgcggtcagcgggacgg

SEQ ID NO: 256262 - DNA, 20 bp, synthetic construct
  source 1..20: mol_type = other DNA
ggctcgcggtcagcgggacg

SEQ ID NO: 256263 - DNA, 20 bp, synthetic construct
  source 1..20: mol_type = other DNA
aggctcgcggtcagcgggac

SEQ ID NO: 256264 - DNA, 20 bp, synthetic construct
  source 1..20: mol_type = other DNA
aaggctcgcggtcagcggga

SEQ ID NO: 256265 - DNA, 20 bp, synthetic construct
  source 1..20: mol_type = other DNA
gaaggctcgcggtcagcggg

SEQ ID NO: 256266 - DNA, 20 bp, synthetic construct
  source 1..20: mol_type = other DNA
ggaaggctcgcggtcagcgg

SEQ ID NO: 256267 - DNA, 20 bp, synthetic construct
  source 1..20: mol_type = other DNA
aggaaggctcgcggtcagcg

SEQ ID NO: 256268 - DNA, 20 bp, synthetic construct
  source 1..20: mol_type = other DNA
gaggaaggctcgcggtcagc

SEQ ID NO: 256269 - DNA, 20 bp, synthetic construct
  source 1..20: mol_type = other DNA
tgaggaaggctcgcggtcag

SEQ ID NO: 256270 - DNA, 20 bp, synthetic construct
  source 1..20: mol_type = other DNA
ctgaggaaggctcgcggtca

SEQ ID NO: 256271 - DNA, 20 bp, synthetic construct
  source 1..20: mol_type = other DNA
gctgaggaaggctcgcggtc

SEQ ID NO: 256272 - DNA, 20 bp, synthetic construct
  source 1..20: mol_type = other DNA
tgctgaggaaggctcgcggt

SEQ ID NO: 256273 - DNA, 20 bp, synthetic construct
  source 1..20: mol_type = other DNA
gtgctgaggaaggctcgcgg

SEQ ID NO: 256274 - DNA, 20 bp, synthetic construct
  source 1..20: mol_type = other DNA
ggtgctgaggaaggctcgcg

SEQ ID NO: 256275 - DNA, 20 bp, synthetic construct
  source 1..20: mol_type = other DNA
cggtgctgaggaaggctcgc

SEQ ID NO: 256276 - DNA, 20 bp, synthetic construct
  source 1..20: mol_type = other DNA
acggtgctgaggaaggctcg

SEQ ID NO: 256277 - DNA, 20 bp, synthetic construct
  source 1..20: mol_type = other DNA
gacggtgctgaggaaggctc

SEQ ID NO: 256278 - DNA, 20 bp, synthetic construct
  source 1..20: mol_type = other DNA
ggacggtgctgaggaaggct

SEQ ID NO: 256279 - DNA, 20 bp, synthetic construct
  source 1..20: mol_type = other DNA
gggacggtgctgaggaaggc

SEQ ID NO: 256280 - DNA, 20 bp, synthetic construct
  source 1..20: mol_type = other DNA
cgggacggtgctgaggaagg

SEQ ID NO: 256281 - DNA, 20 bp, synthetic construct
  source 1..20: mol_type = other DNA
acgggacggtgctgaggaag

SEQ ID NO: 256282 - DNA, 20 bp, synthetic construct
  source 1..20: mol_type = other DNA
aacgggacggtgctgaggaa

SEQ ID NO: 256283 - DNA, 20 bp, synthetic construct
  source 1..20: mol_type = other DNA
aaacgggacggtgctgagga

SEQ ID NO: 256284 - DNA, 20 bp, synthetic construct
  source 1..20: mol_type = other DNA
caaacgggacggtgctgagg

SEQ ID NO: 256285 - DNA, 20 bp, synthetic construct
  source 1..20: mol_type = other DNA
gcaaacgggacggtgctgag

SEQ ID NO: 256286 - DNA, 20 bp, synthetic construct
  source 1..20: mol_type = other DNA
ggcaaacgggacggtgctga

SEQ ID NO: 256287 - DNA, 20 bp, synthetic construct
  source 1..20: mol_type = other DNA
gggcaaacgggacggtgctg

SEQ ID NO: 256288 - DNA, 20 bp, synthetic construct
  source 1..20: mol_type = other DNA
tgggcaaacgggacggtgct

SEQ ID NO: 256289 - DNA, 20 bp, synthetic construct
  source 1..20: mol_type = other DNA
ctgggcaaacgggacggtgc

SEQ ID NO: 256290 - DNA, 20 bp, synthetic construct
  source 1..20: mol_type = other DNA
gctgggcaaacgggacggtg

SEQ ID NO: 256291 - DNA, 20 bp, synthetic construct
  source 1..20: mol_type = other DNA
cgctgggcaaacgggacggt

SEQ ID NO: 256292 - DNA, 20 bp, synthetic construct
  source 1..20: mol_type = other DNA
gcgctgggcaaacgggacgg

SEQ ID NO: 256293 - DNA, 20 bp, synthetic construct
  source 1..20: mol_type = other DNA
ggcgctgggcaaacgggacg

SEQ ID NO: 256294 - DNA, 20 bp, synthetic construct
  source 1..20: mol_type = other DNA
aggcgctgggcaaacgggac

SEQ ID NO: 256295 - DNA, 20 bp, synthetic construct
  source 1..20: mol_type = other DNA
gaggcgctgggcaaacggga

SEQ ID NO: 256296 - DNA, 20 bp, synthetic construct
  source 1..20: mol_type = other DNA
ggaggcgctgggcaaacggg

SEQ ID NO: 256297 - DNA, 20 bp, synthetic construct
  source 1..20: mol_type = other DNA
aggaggcgctgggcaaacgg

SEQ ID NO: 256298 - DNA, 20 bp, synthetic construct
  source 1..20: mol_type = other DNA
gaggaggcgctgggcaaacg

SEQ ID NO: 256299 - DNA, 20 bp, synthetic construct
  source 1..20: mol_type = other DNA
ggaggaggcgctgggcaaac

SEQ ID NO: 256300 - DNA, 20 bp, synthetic construct
  source 1..20: mol_type = other DNA
tggaggaggcgctgggcaaa

SEQ ID NO: 256301 - DNA, 20 bp, synthetic construct
  source 1..20: mol_type = other DNA
ttggaggaggcgctgggcaa

SEQ ID NO: 256302 - DNA, 20 bp, synthetic construct
  source 1..20: mol_type = other DNA
gttggaggaggcgctgggca

SEQ ID NO: 256303 - DNA, 20 bp, synthetic construct
  source 1..20: mol_type = other DNA
tgttggaggaggcgctgggc

SEQ ID NO: 256304 - DNA, 20 bp, synthetic construct
  source 1..20: mol_type = other DNA
ctgttggaggaggcgctggg

SEQ ID NO: 256305 - DNA, 20 bp, synthetic construct
  source 1..20: mol_type = other DNA
cctgttggaggaggcgctgg

SEQ ID NO: 256306 - DNA, 20 bp, synthetic construct
  source 1..20: mol_type = other DNA
tcctgttggaggaggcgctg

SEQ ID NO: 256307 - DNA, 20 bp, synthetic construct
  source 1..20: mol_type = other DNA
ctcctgttggaggaggcgct

SEQ ID NO: 256308 - DNA, 20 bp, synthetic construct
  source 1..20: mol_type = other DNA
cctcctgttggaggaggcgc

SEQ ID NO: 256309 - DNA, 20 bp, synthetic construct
  source 1..20: mol_type = other DNA
gcctcctgttggaggaggcg

SEQ ID NO: 256310 - DNA, 20 bp, synthetic construct
  source 1..20: mol_type = other DNA
ggcctcctgttggaggaggc

SEQ ID NO: 256311 - DNA, 20 bp, synthetic construct
  source 1..20: mol_type = other DNA
gggcctcctgttggaggagg

SEQ ID NO: 256312 - DNA, 20 bp, synthetic construct
  source 1..20: mol_type = other DNA
agggcctcctgttggaggag

SEQ ID NO: 256313 - DNA, 20 bp, synthetic construct
  source 1..20: mol_type = other DNA
gagggcctcctgttggagga

SEQ ID NO: 256314 - DNA, 20 bp, synthetic construct
  source 1..20: mol_type = other DNA
tgagggcctcctgttggagg

SEQ ID NO: 256315 - DNA, 20 bp, synthetic construct
  source 1..20: mol_type = other DNA
ctgagggcctcctgttggag

SEQ ID NO: 256316 - DNA, 20 bp, synthetic construct
  source 1..20: mol_type = other DNA
cctgagggcctcctgttgga

SEQ ID NO: 256317 - DNA, 20 bp, synthetic construct
  source 1..20: mol_type = other DNA
tcctgagggcctcctgttgg

SEQ ID NO: 256318 - DNA, 20 bp, synthetic construct
  source 1..20: mol_type = other DNA
ctcctgagggcctcctgttg

SEQ ID NO: 256319 - DNA, 20 bp, synthetic construct
  source 1..20: mol_type = other DNA
gctcctgagggcctcctgtt

SEQ ID NO: 256320 - DNA, 20 bp, synthetic construct
  source 1..20: mol_type = other DNA
ggctcctgagggcctcctgt

SEQ ID NO: 256321 - DNA, 20 bp, synthetic construct
  source 1..20: mol_type = other DNA
gggctcctgagggcctcctg

SEQ ID NO: 256322 - DNA, 20 bp, synthetic construct
  source 1..20: mol_type = other DNA
agggctcctgagggcctcct

SEQ ID NO: 256323 - DNA, 20 bp, synthetic construct
  source 1..20: mol_type = other DNA
gagggctcctgagggcctcc

SEQ ID NO: 256324 - DNA, 20 bp, synthetic construct
  source 1..20: mol_type = other DNA
ggagggctcctgagggcctc

SEQ ID NO: 256325 - DNA, 20 bp, synthetic construct
  source 1..20: mol_type = other DNA
gggagggctcctgagggcct

SEQ ID NO: 256326 - DNA, 20 bp, synthetic construct
  source 1..20: mol_type = other DNA
agggagggctcctgagggcc

SEQ ID NO: 256327 - DNA, 20 bp, synthetic construct
  source 1..20: mol_type = other DNA
cagggagggctcctgagggc

SEQ ID NO: 256328 - DNA, 20 bp, synthetic construct
  source 1..20: mol_type = other DNA
ccagggagggctcctgaggg

SEQ ID NO: 256329 - DNA, 20 bp, synthetic construct
  source 1..20: mol_type = other DNA
tccagggagggctcctgagg

SEQ ID NO: 256330 - DNA, 20 bp, synthetic construct
  source 1..20: mol_type = other DNA
ctccagggagggctcctgag

SEQ ID NO: 256331 - DNA, 20 bp, synthetic construct
  source 1..20: mol_type = other DNA
actccagggagggctcctga

SEQ ID NO: 256332 - DNA, 20 bp, synthetic construct
  source 1..20: mol_type = other DNA
cactccagggagggctcctg

SEQ ID NO: 256333 - DNA, 20 bp, synthetic construct
  source 1..20: mol_type = other DNA
ccactccagggagggctcct

SEQ ID NO: 256334 - DNA, 20 bp, synthetic construct
  source 1..20: mol_type = other DNA
cccactccagggagggctcc

SEQ ID NO: 256335 - DNA, 20 bp, synthetic construct
  source 1..20: mol_type = other DNA
ccccactccagggagggctc

SEQ ID NO: 256336 - DNA, 20 bp, synthetic construct
  source 1..20: mol_type = other DNA
tccccactccagggagggct

SEQ ID NO: 256337 - DNA, 20 bp, synthetic construct
  source 1..20: mol_type = other DNA
gtccccactccagggagggc

SEQ ID NO: 256338 - DNA, 20 bp, synthetic construct
  source 1..20: mol_type = other DNA
tgtccccactccagggaggg

SEQ ID NO: 256339 - DNA, 20 bp, synthetic construct
  source 1..20: mol_type = other DNA
ttgtccccactccagggagg

SEQ ID NO: 256340 - DNA, 20 bp, synthetic construct
  source 1..20: mol_type = other DNA
tttgtccccactccagggag

SEQ ID NO: 256341 - DNA, 20 bp, synthetic construct
  source 1..20: mol_type = other DNA
ttttgtccccactccaggga

SEQ ID NO: 256342 - DNA, 20 bp, synthetic construct
  source 1..20: mol_type = other DNA
tttttgtccccactccaggg

SEQ ID NO: 256343 - DNA, 20 bp, synthetic construct
  source 1..20: mol_type = other DNA
ctttttgtccccactccagg

SEQ ID NO: 256344 - DNA, 20 bp, synthetic construct
  source 1..20: mol_type = other DNA
cctttttgtccccactccag

SEQ ID NO: 256345 - DNA, 20 bp, synthetic construct
  source 1..20: mol_type = other DNA
gcctttttgtccccactcca

SEQ ID NO: 256346 - DNA, 20 bp, synthetic construct
  source 1..20: mol_type = other DNA
cgcctttttgtccccactcc

SEQ ID NO: 256347 - DNA, 20 bp, synthetic construct
  source 1..20: mol_type = other DNA
ccgcctttttgtccccactc

SEQ ID NO: 256348 - DNA, 20 bp, synthetic construct
  source 1..20: mol_type = other DNA
cccgcctttttgtccccact

SEQ ID NO: 256349 - DNA, 20 bp, synthetic construct
  source 1..20: mol_type = other DNA
ccccgcctttttgtccccac

SEQ ID NO: 256350 - DNA, 20 bp, synthetic construct
  source 1..20: mol_type = other DNA
tccccgcctttttgtcccca

SEQ ID NO: 256351 - DNA, 20 bp, synthetic construct
  source 1..20: mol_type = other DNA
gtccccgcctttttgtcccc

SEQ ID NO: 256352 - DNA, 20 bp, synthetic construct
  source 1..20: mol_type = other DNA
agtccccgcctttttgtccc

SEQ ID NO: 256353 - DNA, 20 bp, synthetic construct
  source 1..20: mol_type = other DNA
cagtccccgcctttttgtcc

SEQ ID NO: 256354 - DNA, 20 bp, synthetic construct
  source 1..20: mol_type = other DNA
ccagtccccgcctttttgtc

SEQ ID NO: 256355 - DNA, 20 bp, synthetic construct
  source 1..20: mol_type = other DNA
cccagtccccgcctttttgt

SEQ ID NO: 256356 - DNA, 20 bp, synthetic construct
  source 1..20: mol_type = other DNA
gcccagtccccgcctttttg

SEQ ID NO: 256357 - DNA, 20 bp, synthetic construct
  source 1..20: mol_type = other DNA
ggcccagtccccgccttttt

SEQ ID NO: 256358 - DNA, 20 bp, synthetic construct
  source 1..20: mol_type = other DNA
cggcccagtccccgcctttt

SEQ ID NO: 256359 - DNA, 20 bp, synthetic construct
  source 1..20: mol_type = other DNA
tcggcccagtccccgccttt

SEQ ID NO: 256360 - DNA, 20 bp, synthetic construct
  source 1..20: mol_type = other DNA
ctcggcccagtccccgcctt

SEQ ID NO: 256361 - DNA, 20 bp, synthetic construct
  source 1..20: mol_type = other DNA
tctcggcccagtccccgcct

SEQ ID NO: 256362 - DNA, 20 bp, synthetic construct
  source 1..20: mol_type = other DNA
ttctcggcccagtccccgcc

SEQ ID NO: 256363 - DNA, 20 bp, synthetic construct
  source 1..20: mol_type = other DNA
cttctcggcccagtccccgc

SEQ ID NO: 256364 - DNA, 20 bp, synthetic construct
  source 1..20: mol_type = other DNA
ccttctcggcccagtccccg

SEQ ID NO: 256365 - DNA, 20 bp, synthetic construct
  source 1..20: mol_type = other DNA
cccttctcggcccagtcccc

SEQ ID NO: 256366 - DNA, 20 bp, synthetic construct
  source 1..20: mol_type = other DNA
acccttctcggcccagtccc

SEQ ID NO: 256367 - DNA, 20 bp, synthetic construct
  source 1..20: mol_type = other DNA
gacccttctcggcccagtcc

SEQ ID NO: 256368 - DNA, 20 bp, synthetic construct
  source 1..20: mol_type = other DNA
ggacccttctcggcccagtc

SEQ ID NO: 256369 - DNA, 20 bp, synthetic construct
  source 1..20: mol_type = other DNA
cggacccttctcggcccagt

SEQ ID NO: 256370 - DNA, 20 bp, synthetic construct
  source 1..20: mol_type = other DNA
ccggacccttctcggcccag

SEQ ID NO: 256371 - DNA, 20 bp, synthetic construct
  source 1..20: mol_type = other DNA
gccggacccttctcggccca

SEQ ID NO: 256372 - DNA, 20 bp, synthetic construct
  source 1..20: mol_type = other DNA
ggccggacccttctcggccc

SEQ ID NO: 256373 - DNA, 20 bp, synthetic construct
  source 1..20: mol_type = other DNA
aggccggacccttctcggcc

SEQ ID NO: 256374 - DNA, 20 bp, synthetic construct
  source 1..20: mol_type = other DNA
aaggccggacccttctcggc

SEQ ID NO: 256375 - DNA, 20 bp, synthetic construct
  source 1..20: mol_type = other DNA
aaaggccggacccttctcgg

SEQ ID NO: 256376 - DNA, 20 bp, synthetic construct
  source 1..20: mol_type = other DNA
gaaaggccggacccttctcg

SEQ ID NO: 256377 - DNA, 20 bp, synthetic construct
  source 1..20: mol_type = other DNA
ggaaaggccggacccttctc

SEQ ID NO: 256378 - DNA, 20 bp, synthetic construct
  source 1..20: mol_type = other DNA
cggaaaggccggacccttct

SEQ ID NO: 256379 - DNA, 20 bp, synthetic construct
  source 1..20: mol_type = other DNA
tcggaaaggccggacccttc

SEQ ID NO: 256380 - DNA, 20 bp, synthetic construct
  source 1..20: mol_type = other DNA
ttcggaaaggccggaccctt

SEQ ID NO: 256381 - DNA, 20 bp, synthetic construct
  source 1..20: mol_type = other DNA
cttcggaaaggccggaccct

SEQ ID NO: 256382 - DNA, 20 bp, synthetic construct
  source 1..20: mol_type = other DNA
gcttcggaaaggccggaccc

SEQ ID NO: 256383 - DNA, 20 bp, synthetic construct
  source 1..20: mol_type = other DNA
ggcttcggaaaggccggacc

SEQ ID NO: 256384 - DNA, 20 bp, synthetic construct
  source 1..20: mol_type = other DNA
gggcttcggaaaggccggac

SEQ ID NO: 256385 - DNA, 20 bp, synthetic construct
  source 1..20: mol_type = other DNA
cgggcttcggaaaggccgga

SEQ ID NO: 256386 - DNA, 20 bp, synthetic construct
  source 1..20: mol_type = other DNA
gcgggcttcggaaaggccgg

SEQ ID NO: 256387 - DNA, 20 bp, synthetic construct
  source 1..20: mol_type = other DNA
ggcgggcttcggaaaggccg

SEQ ID NO: 256388 - DNA, 20 bp, synthetic construct
  source 1..20: mol_type = other DNA
tggcgggcttcggaaaggcc

SEQ ID NO: 256389 - DNA, 20 bp, synthetic construct
  source 1..20: mol_type = other DNA
gtggcgggcttcggaaaggc

SEQ ID NO: 256390 - DNA, 20 bp, synthetic construct
  source 1..20: mol_type = other DNA
ggtggcgggcttcggaaagg

SEQ ID NO: 256391 - DNA, 20 bp, synthetic construct
  source 1..20: mol_type = other DNA
tggtggcgggcttcggaaag

SEQ ID NO: 256392 - DNA, 20 bp, synthetic construct
  source 1..20: mol_type = other DNA
gtggtggcgggcttcggaaa

SEQ ID NO: 256393 - DNA, 20 bp, synthetic construct
  source 1..20: mol_type = other DNA
agtggtggcgggcttcggaa

SEQ ID NO: 256394 - DNA, 20 bp, synthetic construct
  source 1..20: mol_type = other DNA
cagtggtggcgggcttcgga

SEQ ID NO: 256395 - DNA, 20 bp, synthetic construct
  source 1..20: mol_type = other DNA
gcagtggtggcgggcttcgg

SEQ ID NO: 256396 - DNA, 20 bp, synthetic construct
  source 1..20: mol_type = other DNA
cgcagtggtggcgggcttcg

SEQ ID NO: 256397 - DNA, 20 bp, synthetic construct
  source 1..20: mol_type = other DNA
acgcagtggtggcgggcttc

SEQ ID NO: 256398 - DNA, 20 bp, synthetic construct
  source 1..20: mol_type = other DNA
tacgcagtggtggcgggctt

SEQ ID NO: 256399 - DNA, 20 bp, synthetic construct
  source 1..20: mol_type = other DNA
atacgcagtggtggcgggct

SEQ ID NO: 256400 - DNA, 20 bp, synthetic construct
  source 1..20: mol_type = other DNA
gatacgcagtggtggcgggc

SEQ ID NO: 256401 - DNA, 20 bp, synthetic construct
  source 1..20: mol_type = other DNA
agatacgcagtggtggcggg

SEQ ID NO: 256402 - DNA, 20 bp, synthetic construct
  source 1..20: mol_type = other DNA
gagatacgcagtggtggcgg

SEQ ID NO: 256403 - DNA, 20 bp, synthetic construct
  source 1..20: mol_type = other DNA
ggagatacgcagtggtggcg

SEQ ID NO: 256404 - DNA, 20 bp, synthetic construct
  source 1..20: mol_type = other DNA
tggagatacgcagtggtggc

SEQ ID NO: 256405 - DNA, 20 bp, synthetic construct
  source 1..20: mol_type = other DNA
gtggagatacgcagtggtgg

SEQ ID NO: 256406 - DNA, 20 bp, synthetic construct
  source 1..20: mol_type = other DNA
tgtggagatacgcagtggtg

SEQ ID NO: 256407 - DNA, 20 bp, synthetic construct
  source 1..20: mol_type = other DNA
gtgtggagatacgcagtggt

SEQ ID NO: 256408 - DNA, 20 bp, synthetic construct
  source 1..20: mol_type = other DNA
tgtgtggagatacgcagtgg

SEQ ID NO: 256409 - DNA, 20 bp, synthetic construct
  source 1..20: mol_type = other DNA
ctgtgtggagatacgcagtg

SEQ ID NO: 256410 - DNA, 20 bp, synthetic construct
  source 1..20: mol_type = other DNA
tctgtgtggagatacgcagt

SEQ ID NO: 256411 - DNA, 20 bp, synthetic construct
  source 1..20: mol_type = other DNA
ctctgtgtggagatacgcag

SEQ ID NO: 256412 - DNA, 20 bp, synthetic construct
  source 1..20: mol_type = other DNA
gctctgtgtggagatacgca

SEQ ID NO: 256413 - DNA, 20 bp, synthetic construct
  source 1..20: mol_type = other DNA
ggctctgtgtggagatacgc

SEQ ID NO: 256414 - DNA, 20 bp, synthetic construct
  source 1..20: mol_type = other DNA
aggctctgtgtggagatacg

SEQ ID NO: 256415 - DNA, 20 bp, synthetic construct
  source 1..20: mol_type = other DNA
caggctctgtgtggagatac

SEQ ID NO: 256416 - DNA, 20 bp, synthetic construct
  source 1..20: mol_type = other DNA
tcaggctctgtgtggagata

SEQ ID NO: 256417 - DNA, 20 bp, synthetic construct
  source 1..20: mol_type = other DNA
ttcaggctctgtgtggagat

SEQ ID NO: 256418 - DNA, 20 bp, synthetic construct
  source 1..20: mol_type = other DNA
tttcaggctctgtgtggaga

SEQ ID NO: 256419 - DNA, 20 bp, synthetic construct
  source 1..20: mol_type = other DNA
ctttcaggctctgtgtggag

SEQ ID NO: 256420 - DNA, 20 bp, synthetic construct
  source 1..20: mol_type = other DNA
actttcaggctctgtgtgga

SEQ ID NO: 256421 - DNA, 20 bp, synthetic construct
  source 1..20: mol_type = other DNA
cactttcaggctctgtgtgg

SEQ ID NO: 256422 - DNA, 20 bp, synthetic construct
  source 1..20: mol_type = other DNA
ccactttcaggctctgtgtg

SEQ ID NO: 256423 - DNA, 20 bp, synthetic construct
  source 1..20: mol_type = other DNA
accactttcaggctctgtgt

SEQ ID NO: 256424 - DNA, 20 bp, synthetic construct
  source 1..20: mol_type = other DNA
taccactttcaggctctgtg

SEQ ID NO: 256425 - DNA, 20 bp, synthetic construct
  source 1..20: mol_type = other DNA
ttaccactttcaggctctgt

SEQ ID NO: 256426 - DNA, 20 bp, synthetic construct
  source 1..20: mol_type = other DNA
cttaccactttcaggctctg

SEQ ID NO: 256427 - DNA, 20 bp, synthetic construct
  source 1..20: mol_type = other DNA
ccttaccactttcaggctct

SEQ ID NO: 256428 - DNA, 20 bp, synthetic construct
  source 1..20: mol_type = other DNA
accttaccactttcaggctc

SEQ ID NO: 256429 - DNA, 20 bp, synthetic construct
  source 1..20: mol_type = other DNA
caccttaccactttcaggct

SEQ ID NO: 256430 - DNA, 20 bp, synthetic construct
  source 1..20: mol_type = other DNA
ccaccttaccactttcaggc

SEQ ID NO: 256431 - DNA, 20 bp, synthetic construct
  source 1..20: mol_type = other DNA
accaccttaccactttcagg

SEQ ID NO: 256432 - DNA, 20 bp, synthetic construct
  source 1..20: mol_type = other DNA
gaccaccttaccactttcag

SEQ ID NO: 256433 - DNA, 20 bp, synthetic construct
  source 1..20: mol_type = other DNA
ggaccaccttaccactttca

SEQ ID NO: 256434 - DNA, 20 bp, synthetic construct
  source 1..20: mol_type = other DNA
tggaccaccttaccactttc

SEQ ID NO: 256435 - DNA, 20 bp, synthetic construct
  source 1..20: mol_type = other DNA
ctggaccaccttaccacttt

SEQ ID NO: 256436 - DNA, 20 bp, synthetic construct
  source 1..20: mol_type = other DNA
cctggaccaccttaccactt

SEQ ID NO: 256437 - DNA, 20 bp, synthetic construct
  source 1..20: mol_type = other DNA
tcctggaccaccttaccact

SEQ ID NO: 256438 - DNA, 20 bp, synthetic construct
  source 1..20: mol_type = other DNA
ttcctggaccaccttaccac

SEQ ID NO: 256439 - DNA, 20 bp, synthetic construct
  source 1..20: mol_type = other DNA
cttcctggaccaccttacca

SEQ ID NO: 256440 - DNA, 20 bp, synthetic construct
  source 1..20: mol_type = other DNA
ccttcctggaccaccttacc

SEQ ID NO: 256441 - DNA, 20 bp, synthetic construct
  source 1..20: mol_type = other DNA
gccttcctggaccaccttac

SEQ ID NO: 256442 - DNA, 20 bp, synthetic construct
  source 1..20: mol_type = other DNA
agccttcctggaccacctta

SEQ ID NO: 256443 - DNA, 20 bp, synthetic construct
  source 1..20: mol_type = other DNA
aagccttcctggaccacctt

SEQ ID NO: 256444 - DNA, 20 bp, synthetic construct
  source 1..20: mol_type = other DNA
gaagccttcctggaccacct

SEQ ID NO: 256445 - DNA, 20 bp, synthetic construct
  source 1..20: mol_type = other DNA
ggaagccttcctggaccacc

SEQ ID NO: 256446 - DNA, 20 bp, synthetic construct
  source 1..20: mol_type = other DNA
aggaagccttcctggaccac

SEQ ID NO: 256447 - DNA, 20 bp, synthetic construct
  source 1..20: mol_type = other DNA
gaggaagccttcctggacca

SEQ ID NO: 256448 - DNA, 20 bp, synthetic construct
  source 1..20: mol_type = other DNA
ggaggaagccttcctggacc

SEQ ID NO: 256449 - DNA, 20 bp, synthetic construct
  source 1..20: mol_type = other DNA
cggaggaagccttcctggac

SEQ ID NO: 256450 - DNA, 20 bp, synthetic construct
  source 1..20: mol_type = other DNA
tcggaggaagccttcctgga

SEQ ID NO: 256451 - DNA, 20 bp, synthetic construct
  source 1..20: mol_type = other DNA
ctcggaggaagccttcctgg

SEQ ID NO: 256452 - DNA, 20 bp, synthetic construct
  source 1..20: mol_type = other DNA
tctcggaggaagccttcctg

SEQ ID NO: 256453 - DNA, 20 bp, synthetic construct
  source 1..20: mol_type = other DNA
ctctcggaggaagccttcct

SEQ ID NO: 256454 - DNA, 20 bp, synthetic construct
  source 1..20: mol_type = other DNA
gctctcggaggaagccttcc

SEQ ID NO: 256455 - DNA, 20 bp, synthetic construct
  source 1..20: mol_type = other DNA
ggctctcggaggaagccttc

SEQ ID NO: 256456 - DNA, 20 bp, synthetic construct
  source 1..20: mol_type = other DNA
tggctctcggaggaagcctt

SEQ ID NO: 256457 - DNA, 20 bp, synthetic construct
  source 1..20: mol_type = other DNA
ctggctctcggaggaagcct

SEQ ID NO: 256458 - DNA, 20 bp, synthetic construct
  source 1..20: mol_type = other DNA
cctggctctcggaggaagcc

SEQ ID NO: 256459 - DNA, 20 bp, synthetic construct
  source 1..20: mol_type = other DNA
gcctggctctcggaggaagc

SEQ ID NO: 256460 - DNA, 20 bp, synthetic construct
  source 1..20: mol_type = other DNA
ggcctggctctcggaggaag

SEQ ID NO: 256461 - DNA, 20 bp, synthetic construct
  source 1..20: mol_type = other DNA
gggcctggctctcggaggaa

SEQ ID NO: 256462 - DNA, 20 bp, synthetic construct
  source 1..20: mol_type = other DNA
ggggcctggctctcggagga

SEQ ID NO: 256463 - DNA, 20 bp, synthetic construct
  source 1..20: mol_type = other DNA
gggggcctggctctcggagg

SEQ ID NO: 256464 - DNA, 20 bp, synthetic construct
  source 1..20: mol_type = other DNA
ggggggcctggctctcggag

SEQ ID NO: 256465 - DNA, 20 bp, synthetic construct
  source 1..20: mol_type = other DNA
tggggggcctggctctcgga

SEQ ID NO: 256466 - DNA, 20 bp, synthetic construct
  source 1..20: mol_type = other DNA
ctggggggcctggctctcgg

SEQ ID NO: 256467 - DNA, 20 bp, synthetic construct
  source 1..20: mol_type = other DNA
cctggggggcctggctctcg

SEQ ID NO: 256468 - DNA, 20 bp, synthetic construct
  source 1..20: mol_type = other DNA
acctggggggcctggctctc

SEQ ID NO: 256469 - DNA, 20 bp, synthetic construct
  source 1..20: mol_type = other DNA
gacctggggggcctggctct

SEQ ID NO: 256470 - DNA, 20 bp, synthetic construct
  source 1..20: mol_type = other DNA
agacctggggggcctggctc

SEQ ID NO: 256471 - DNA, 20 bp, synthetic construct
  source 1..20: mol_type = other DNA
cagacctggggggcctggct

SEQ ID NO: 256472 - DNA, 20 bp, synthetic construct
  source 1..20: mol_type = other DNA
tcagacctggggggcctggc

SEQ ID NO: 256473 - DNA, 20 bp, synthetic construct
  source 1..20: mol_type = other DNA
ctcagacctggggggcctgg

SEQ ID NO: 256474 - DNA, 20 bp, synthetic construct
  source 1..20: mol_type = other DNA
gctcagacctggggggcctg

SEQ ID NO: 256475 - DNA, 20 bp, synthetic construct
  source 1..20: mol_type = other DNA
ggctcagacctggggggcct

SEQ ID NO: 256476 - DNA, 20 bp, synthetic construct
  source 1..20: mol_type = other DNA
tggctcagacctggggggcc

SEQ ID NO: 256477 - DNA, 20 bp, synthetic construct
  source 1..20: mol_type = other DNA
gtggctcagacctggggggc

SEQ ID NO: 256478 - DNA, 20 bp, synthetic construct
  source 1..20: mol_type = other DNA
ggtggctcagacctgggggg

SEQ ID NO: 256479 - DNA, 20 bp, synthetic construct
  source 1..20: mol_type = other DNA
tggtggctcagacctggggg

SEQ ID NO: 256480 - DNA, 20 bp, synthetic construct
  source 1..20: mol_type = other DNA
ctggtggctcagacctgggg

SEQ ID NO: 256481 - DNA, 20 bp, synthetic construct
  source 1..20: mol_type = other DNA
gctggtggctcagacctggg

SEQ ID NO: 256482 - DNA, 20 bp, synthetic construct
  source 1..20: mol_type = other DNA
agctggtggctcagacctgg

SEQ ID NO: 256483 - DNA, 20 bp, synthetic construct
  source 1..20: mol_type = other DNA
gagctggtggctcagacctg

SEQ ID NO: 256484 - DNA, 20 bp, synthetic construct
  source 1..20: mol_type = other DNA
tgagctggtggctcagacct

SEQ ID NO: 256485 - DNA, 20 bp, synthetic construct
  source 1..20: mol_type = other DNA
atgagctggtggctcagacc

SEQ ID NO: 256486 - DNA, 20 bp, synthetic construct
  source 1..20: mol_type = other DNA
catgagctggtggctcagac

SEQ ID NO: 256487 - DNA, 20 bp, synthetic construct
  source 1..20: mol_type = other DNA
acatgagctggtggctcaga

SEQ ID NO: 256488 - DNA, 20 bp, synthetic construct
  source 1..20: mol_type = other DNA
gacatgagctggtggctcag

SEQ ID NO: 256489 - DNA, 20 bp, synthetic construct
  source 1..20: mol_type = other DNA
ggacatgagctggtggctca

SEQ ID NO: 256490 - DNA, 20 bp, synthetic construct
  source 1..20: mol_type = other DNA
cggacatgagctggtggctc

SEQ ID NO: 256491 - DNA, 20 bp, synthetic construct
  source 1..20: mol_type = other DNA
ccggacatgagctggtggct

SEQ ID NO: 256492 - DNA, 20 bp, synthetic construct
  source 1..20: mol_type = other DNA
gccggacatgagctggtggc

SEQ ID NO: 256493 - DNA, 20 bp, synthetic construct
  source 1..20: mol_type = other DNA
tgccggacatgagctggtgg

SEQ ID NO: 256494 - DNA, 20 bp, synthetic construct
  source 1..20: mol_type = other DNA
atgccggacatgagctggtg

SEQ ID NO: 256495 - DNA, 20 bp, synthetic construct
  source 1..20: mol_type = other DNA
catgccggacatgagctggt

SEQ ID NO: 256496 - DNA, 20 bp, synthetic construct
  source 1..20: mol_type = other DNA
gcatgccggacatgagctgg

SEQ ID NO: 256497 - DNA, 20 bp, synthetic construct
  source 1..20: mol_type = other DNA
ggcatgccggacatgagctg

SEQ ID NO: 256498 - DNA, 20 bp, synthetic construct
  source 1..20: mol_type = other DNA
aggcatgccggacatgagct

SEQ ID NO: 256499 - DNA, 20 bp, synthetic construct
  source 1..20: mol_type = other DNA
caggcatgccggacatgagc

SEQ ID NO: 256500 - DNA, 20 bp, synthetic construct
  source 1..20: mol_type = other DNA
ccaggcatgccggacatgag

SEQ ID NO: 256501 - DNA, 20 bp, synthetic construct
  source 1..20: mol_type = other DNA
cccaggcatgccggacatga

SEQ ID NO: 256502 - DNA, 20 bp, synthetic construct
  source 1..20: mol_type = other DNA
ccccaggcatgccggacatg

SEQ ID NO: 256503 - DNA, 20 bp, synthetic construct
  source 1..20: mol_type = other DNA
gccccaggcatgccggacat

SEQ ID NO: 256504 - DNA, 20 bp, synthetic construct
  source 1..20: mol_type = other DNA
agccccaggcatgccggaca

SEQ ID NO: 256505 - DNA, 20 bp, synthetic construct
  source 1..20: mol_type = other DNA
gagccccaggcatgccggac

SEQ ID NO: 256506 - DNA, 20 bp, synthetic construct
  source 1..20: mol_type = other DNA
ggagccccaggcatgccgga

SEQ ID NO: 256507 - DNA, 20 bp, synthetic construct
  source 1..20: mol_type = other DNA
gggagccccaggcatgccgg

SEQ ID NO: 256508 - DNA, 20 bp, synthetic construct
  source 1..20: mol_type = other DNA
ggggagccccaggcatgccg

SEQ ID NO: 256509 - DNA, 20 bp, synthetic construct
  source 1..20: mol_type = other DNA
aggggagccccaggcatgcc

SEQ ID NO: 256510 - DNA, 20 bp, synthetic construct
  source 1..20: mol_type = other DNA
gaggggagccccaggcatgc

SEQ ID NO: 256511 - DNA, 20 bp, synthetic construct
  source 1..20: mol_type = other DNA
ggaggggagccccaggcatg

SEQ ID NO: 256512 - DNA, 20 bp, synthetic construct
  source 1..20: mol_type = other DNA
aggaggggagccccaggcat

SEQ ID NO: 256513 - DNA, 20 bp, synthetic construct
  source 1..20: mol_type = other DNA
caggaggggagccccaggca

SEQ ID NO: 256514 - DNA, 20 bp, synthetic construct
  source 1..20: mol_type = other DNA
gcaggaggggagccccaggc

SEQ ID NO: 256515 - DNA, 20 bp, synthetic construct
  source 1..20: mol_type = other DNA
ggcaggaggggagccccagg

SEQ ID NO: 256516 - DNA, 20 bp, synthetic construct
  source 1..20: mol_type = other DNA
aggcaggaggggagccccag

SEQ ID NO: 256517 - DNA, 20 bp, synthetic construct
  source 1..20: mol_type = other DNA
caggcaggaggggagcccca

SEQ ID NO: 256518 - DNA, 20 bp, synthetic construct
  source 1..20: mol_type = other DNA
tcaggcaggaggggagcccc

SEQ ID NO: 256519 - DNA, 20 bp, synthetic construct
  source 1..20: mol_type = other DNA
ctcaggcaggaggggagccc

SEQ ID NO: 256520 - DNA, 20 bp, synthetic construct
  source 1..20: mol_type = other DNA
cctcaggcaggaggggagcc

SEQ ID NO: 256521 - DNA, 20 bp, synthetic construct
  source 1..20: mol_type = other DNA
ccctcaggcaggaggggagc

SEQ ID NO: 256522 - DNA, 20 bp, synthetic construct
  source 1..20: mol_type = other DNA
gccctcaggcaggaggggag

SEQ ID NO: 256523 - DNA, 20 bp, synthetic construct
  source 1..20: mol_type = other DNA
ggccctcaggcaggagggga

SEQ ID NO: 256524 - DNA, 20 bp, synthetic construct
  source 1..20: mol_type = other DNA
gggccctcaggcaggagggg

SEQ ID NO: 256525 - DNA, 20 bp, synthetic construct
  source 1..20: mol_type = other DNA
ggggccctcaggcaggaggg

SEQ ID NO: 256526 - DNA, 20 bp, synthetic construct
  source 1..20: mol_type = other DNA
tggggccctcaggcaggagg

SEQ ID NO: 256527 - DNA, 20 bp, synthetic construct
  source 1..20: mol_type = other DNA
ctggggccctcaggcaggag

SEQ ID NO: 256528 - DNA, 20 bp, synthetic construct
  source 1..20: mol_type = other DNA
tctggggccctcaggcagga

SEQ ID NO: 256529 - DNA, 20 bp, synthetic construct
  source 1..20: mol_type = other DNA
ctctggggccctcaggcagg

SEQ ID NO: 256530 - DNA, 20 bp, synthetic construct
  source 1..20: mol_type = other DNA
tctctggggccctcaggcag

SEQ ID NO: 256531 - DNA, 20 bp, synthetic construct
  source 1..20: mol_type = other DNA
ctctctggggccctcaggca

SEQ ID NO: 256532 - DNA, 20 bp, synthetic construct
  source 1..20: mol_type = other DNA
cctctctggggccctcaggc

SEQ ID NO: 256533 - DNA, 20 bp, synthetic construct
  source 1..20: mol_type = other DNA
gcctctctggggccctcagg

SEQ ID NO: 256534 - DNA, 20 bp, synthetic construct
  source 1..20: mol_type = other DNA
ggcctctctggggccctcag

SEQ ID NO: 256535 - DNA, 20 bp, synthetic construct
  source 1..20: mol_type = other DNA
tggcctctctggggccctca

SEQ ID NO: 256536 - DNA, 20 bp, synthetic construct
  source 1..20: mol_type = other DNA
gtggcctctctggggccctc

SEQ ID NO: 256537 - DNA, 20 bp, synthetic construct
  source 1..20: mol_type = other DNA
tgtggcctctctggggccct

SEQ ID NO: 256538 - DNA, 20 bp, synthetic construct
  source 1..20: mol_type = other DNA
gtgtggcctctctggggccc

SEQ ID NO: 256539 - DNA, 20 bp, synthetic construct
  source 1..20: mol_type = other DNA
cgtgtggcctctctggggcc

SEQ ID NO: 256540 - DNA, 20 bp, synthetic construct
  source 1..20: mol_type = other DNA
gcgtgtggcctctctggggc

SEQ ID NO: 256541 - DNA, 20 bp, synthetic construct
  source 1..20: mol_type = other DNA
ggcgtgtggcctctctgggg

SEQ ID NO: 256542 - DNA, 20 bp, synthetic construct
  source 1..20: mol_type = other DNA
tggcgtgtggcctctctggg

SEQ ID NO: 256543 - DNA, 20 bp, synthetic construct
  source 1..20: mol_type = other DNA
ttggcgtgtggcctctctgg

SEQ ID NO: 256544 - DNA, 20 bp, synthetic construct
  source 1..20: mol_type = other DNA
gttggcgtgtggcctctctg

SEQ ID NO: 256545 - DNA, 20 bp, synthetic construct
  source 1..20: mol_type = other DNA
ggttggcgtgtggcctctct

SEQ ID NO: 256546 - DNA, 20 bp, synthetic construct
  source 1..20: mol_type = other DNA
aggttggcgtgtggcctctc

SEQ ID NO: 256547 - DNA, 20 bp, synthetic construct
  source 1..20: mol_type = other DNA
aaggttggcgtgtggcctct

SEQ ID NO: 256548 - DNA, 20 bp, synthetic construct
  source 1..20: mol_type = other DNA
gaaggttggcgtgtggcctc

SEQ ID NO: 256549 - DNA, 20 bp, synthetic construct
  source 1..20: mol_type = other DNA
cgaaggttggcgtgtggcct

SEQ ID NO: 256550 - DNA, 20 bp, synthetic construct
  source 1..20: mol_type = other DNA
ccgaaggttggcgtgtggcc

SEQ ID NO: 256551 - DNA, 20 bp, synthetic construct
  source 1..20: mol_type = other DNA
cccgaaggttggcgtgtggc

SEQ ID NO: 256552 - DNA, 20 bp, synthetic construct
  source 1..20: mol_type = other DNA
ccccgaaggttggcgtgtgg

SEQ ID NO: 256553 - DNA, 20 bp, synthetic construct
  source 1..20: mol_type = other DNA
tccccgaaggttggcgtgtg

SEQ ID NO: 256554 - DNA, 20 bp, synthetic construct
  source 1..20: mol_type = other DNA
gtccccgaaggttggcgtgt

SEQ ID NO: 256555 - DNA, 20 bp, synthetic construct
  source 1..20: mol_type = other DNA
tgtccccgaaggttggcgtg

SEQ ID NO: 256556 - DNA, 20 bp, synthetic construct
  source 1..20: mol_type = other DNA
ctgtccccgaaggttggcgt

SEQ ID NO: 256557 - DNA, 20 bp, synthetic construct
  source 1..20: mol_type = other DNA
cctgtccccgaaggttggcg

SEQ ID NO: 256558 - DNA, 20 bp, synthetic construct
  source 1..20: mol_type = other DNA
tcctgtccccgaaggttggc

SEQ ID NO: 256559 - DNA, 20 bp, synthetic construct
  source 1..20: mol_type = other DNA
gtcctgtccccgaaggttgg

SEQ ID NO: 256560 - DNA, 20 bp, synthetic construct
  source 1..20: mol_type = other DNA
ggtcctgtccccgaaggttg

SEQ ID NO: 256561 - DNA, 20 bp, synthetic construct
  source 1..20: mol_type = other DNA
aggtcctgtccccgaaggtt

SEQ ID NO: 256562 - DNA, 20 bp, synthetic construct
  source 1..20: mol_type = other DNA
caggtcctgtccccgaaggt

SEQ ID NO: 256563 - DNA, 20 bp, synthetic construct
  source 1..20: mol_type = other DNA
tcaggtcctgtccccgaagg

SEQ ID NO: 256564 - DNA, 20 bp, synthetic construct
  source 1..20: mol_type = other DNA
ctcaggtcctgtccccgaag

SEQ ID NO: 256565 - DNA, 20 bp, synthetic construct
  source 1..20: mol_type = other DNA
cctcaggtcctgtccccgaa

SEQ ID NO: 256566 - DNA, 20 bp, synthetic construct
  source 1..20: mol_type = other DNA
tcctcaggtcctgtccccga

SEQ ID NO: 256567 - DNA, 20 bp, synthetic construct
  source 1..20: mol_type = other DNA
gtcctcaggtcctgtccccg

SEQ ID NO: 256568 - DNA, 20 bp, synthetic construct
  source 1..20: mol_type = other DNA
tgtcctcaggtcctgtcccc

SEQ ID NO: 256569 - DNA, 20 bp, synthetic construct
  source 1..20: mol_type = other DNA
gtgtcctcaggtcctgtccc

SEQ ID NO: 256570 - DNA, 20 bp, synthetic construct
  source 1..20: mol_type = other DNA
tgtgtcctcaggtcctgtcc

SEQ ID NO: 256571 - DNA, 20 bp, synthetic construct
  source 1..20: mol_type = other DNA
ctgtgtcctcaggtcctgtc

SEQ ID NO: 256572 - DNA, 20 bp, synthetic construct
  source 1..20: mol_type = other DNA
tctgtgtcctcaggtcctgt

SEQ ID NO: 256573 - DNA, 20 bp, synthetic construct
  source 1..20: mol_type = other DNA
ctctgtgtcctcaggtcctg

SEQ ID NO: 256574 - DNA, 20 bp, synthetic construct
  source 1..20: mol_type = other DNA
cctctgtgtcctcaggtcct

SEQ ID NO: 256575 - DNA, 20 bp, synthetic construct
  source 1..20: mol_type = other DNA
ccctctgtgtcctcaggtcc

SEQ ID NO: 256576 - DNA, 20 bp, synthetic construct
  source 1..20: mol_type = other DNA
gccctctgtgtcctcaggtc

SEQ ID NO: 256577 - DNA, 20 bp, synthetic construct
  source 1..20: mol_type = other DNA
cgccctctgtgtcctcaggt

SEQ ID NO: 256578 - DNA, 20 bp, synthetic construct
  source 1..20: mol_type = other DNA
ccgccctctgtgtcctcagg

SEQ ID NO: 256579 - DNA, 20 bp, synthetic construct
  source 1..20: mol_type = other DNA
gccgccctctgtgtcctcag

SEQ ID NO: 256580 - DNA, 20 bp, synthetic construct
  source 1..20: mol_type = other DNA
ggccgccctctgtgtcctca

SEQ ID NO: 256581 - DNA, 20 bp, synthetic construct
  source 1..20: mol_type = other DNA
cggccgccctctgtgtcctc

SEQ ID NO: 256582 - DNA, 20 bp, synthetic construct
  source 1..20: mol_type = other DNA
gcggccgccctctgtgtcct

SEQ ID NO: 256583 - DNA, 20 bp, synthetic construct
  source 1..20: mol_type = other DNA
ggcggccgccctctgtgtcc

SEQ ID NO: 256584 - DNA, 20 bp, synthetic construct
  source 1..20: mol_type = other DNA
tggcggccgccctctgtgtc

SEQ ID NO: 256585 - DNA, 20 bp, synthetic construct
  source 1..20: mol_type = other DNA
gtggcggccgccctctgtgt

SEQ ID NO: 256586 - DNA, 20 bp, synthetic construct
  source 1..20: mol_type = other DNA
cgtggcggccgccctctgtg

SEQ ID NO: 256587 - DNA, 20 bp, synthetic construct
  source 1..20: mol_type = other DNA
gcgtggcggccgccctctgt

SEQ ID NO: 256588 - DNA, 20 bp, synthetic construct
  source 1..20: mol_type = other DNA
ggcgtggcggccgccctctg

SEQ ID NO: 256589 - DNA, 20 bp, synthetic construct
  source 1..20: mol_type = other DNA
gggcgtggcggccgccctct

SEQ ID NO: 256590 - DNA, 20 bp, synthetic construct
  source 1..20: mol_type = other DNA
ggggcgtggcggccgccctc

SEQ ID NO: 256591 - DNA, 20 bp, synthetic construct
  source 1..20: mol_type = other DNA
aggggcgtggcggccgccct

SEQ ID NO: 256592 - DNA, 20 bp, synthetic construct
  source 1..20: mol_type = other DNA
caggggcgtggcggccgccc

SEQ ID NO: 256593 - DNA, 20 bp, synthetic construct
  source 1..20: mol_type = other DNA
tcaggggcgtggcggccgcc

SEQ ID NO: 256594 - DNA, 20 bp, synthetic construct
  source 1..20: mol_type = other DNA
ctcaggggcgtggcggccgc

SEQ ID NO: 256595 - DNA, 20 bp, synthetic construct
  source 1..20: mol_type = other DNA
gctcaggggcgtggcggccg

SEQ ID NO: 256596 - DNA, 20 bp, synthetic construct
  source 1..20: mol_type = other DNA
agctcaggggcgtggcggcc

SEQ ID NO: 256597 - DNA, 20 bp, synthetic construct
  source 1..20: mol_type = other DNA
cagctcaggggcgtggcggc

SEQ ID NO: 256598 - DNA, 20 bp, synthetic construct
  source 1..20: mol_type = other DNA
gcagctcaggggcgtggcgg

SEQ ID NO: 256599 - DNA, 20 bp, synthetic construct
  source 1..20: mol_type = other DNA
agcagctcaggggcgtggcg

SEQ ID NO: 256600 - DNA, 20 bp, synthetic construct
  source 1..20: mol_type = other DNA
gagcagctcaggggcgtggc

SEQ ID NO: 256601 - DNA, 20 bp, synthetic construct
  source 1..20: mol_type = other DNA
tgagcagctcaggggcgtgg

SEQ ID NO: 256602 - DNA, 20 bp, synthetic construct
  source 1..20: mol_type = other DNA
ttgagcagctcaggggcgtg

SEQ ID NO: 256603 - DNA, 20 bp, synthetic construct
  source 1..20: mol_type = other DNA
cttgagcagctcaggggcgt

SEQ ID NO: 256604 - DNA, 20 bp, synthetic construct
  source 1..20: mol_type = other DNA
gcttgagcagctcaggggcg

SEQ ID NO: 256605 - DNA, 20 bp, synthetic construct
  source 1..20: mol_type = other DNA
tgcttgagcagctcaggggc

SEQ ID NO: 256606 - DNA, 20 bp, synthetic construct
  source 1..20: mol_type = other DNA
gtgcttgagcagctcagggg

SEQ ID NO: 256607 - DNA, 20 bp, synthetic construct
  source 1..20: mol_type = other DNA
ggtgcttgagcagctcaggg

SEQ ID NO: 256608 - DNA, 20 bp, synthetic construct
  source 1..20: mol_type = other DNA
tggtgcttgagcagctcagg

SEQ ID NO: 256609 - DNA, 20 bp, synthetic construct
  source 1..20: mol_type = other DNA
ctggtgcttgagcagctcag

SEQ ID NO: 256610 - DNA, 20 bp, synthetic construct
  source 1..20: mol_type = other DNA
gctggtgcttgagcagctca

SEQ ID NO: 256611 - DNA, 20 bp, synthetic construct
  source 1..20: mol_type = other DNA
agctggtgcttgagcagctc

SEQ ID NO: 256612 - DNA, 20 bp, synthetic construct
  source 1..20: mol_type = other DNA
aagctggtgcttgagcagct

SEQ ID NO: 256613 - DNA, 20 bp, synthetic construct
  source 1..20: mol_type = other DNA
gaagctggtgcttgagcagc

SEQ ID NO: 256614 - DNA, 20 bp, synthetic construct
  source 1..20: mol_type = other DNA
agaagctggtgcttgagcag

SEQ ID NO: 256615 - DNA, 20 bp, synthetic construct
  source 1..20: mol_type = other DNA
tagaagctggtgcttgagca

SEQ ID NO: 256616 - DNA, 20 bp, synthetic construct
  source 1..20: mol_type = other DNA
ctagaagctggtgcttgagc

SEQ ID NO: 256617 - DNA, 20 bp, synthetic construct
  source 1..20: mol_type = other DNA
cctagaagctggtgcttgag

SEQ ID NO: 256618 - DNA, 20 bp, synthetic construct
  source 1..20: mol_type = other DNA
tcctagaagctggtgcttga

SEQ ID NO: 256619 - DNA, 20 bp, synthetic construct
  source 1..20: mol_type = other DNA
ctcctagaagctggtgcttg

SEQ ID NO: 256620 - DNA, 20 bp, synthetic construct
  source 1..20: mol_type = other DNA
tctcctagaagctggtgctt

SEQ ID NO: 256621 - DNA, 20 bp, synthetic construct
  source 1..20: mol_type = other DNA
gtctcctagaagctggtgct

SEQ ID NO: 256622 - DNA, 20 bp, synthetic construct
  source 1..20: mol_type = other DNA
ggtctcctagaagctggtgc

SEQ ID NO: 256623 - DNA, 20 bp, synthetic construct
  source 1..20: mol_type = other DNA
aggtctcctagaagctggtg

SEQ ID NO: 256624 - DNA, 20 bp, synthetic construct
  source 1..20: mol_type = other DNA
caggtctcctagaagctggt

SEQ ID NO: 256625 - DNA, 20 bp, synthetic construct
  source 1..20: mol_type = other DNA
gcaggtctcctagaagctgg

SEQ ID NO: 256626 - DNA, 20 bp, synthetic construct
  source 1..20: mol_type = other DNA
tgcaggtctcctagaagctg

SEQ ID NO: 256627 - DNA, 20 bp, synthetic construct
  source 1..20: mol_type = other DNA
gtgcaggtctcctagaagct

SEQ ID NO: 256628 - DNA, 20 bp, synthetic construct
  source 1..20: mol_type = other DNA
ggtgcaggtctcctagaagc

SEQ ID NO: 256629 - DNA, 20 bp, synthetic construct
  source 1..20: mol_type = other DNA
tggtgcaggtctcctagaag

SEQ ID NO: 256630 - DNA, 20 bp, synthetic construct
  source 1..20: mol_type = other DNA
ctggtgcaggtctcctagaa

SEQ ID NO: 256631 - DNA, 20 bp, synthetic construct
  source 1..20: mol_type = other DNA
cctggtgcaggtctcctaga

SEQ ID NO: 256632 - DNA, 20 bp, synthetic construct
  source 1..20: mol_type = other DNA
tcctggtgcaggtctcctag

SEQ ID NO: 256633 - DNA, 20 bp, synthetic construct
  source 1..20: mol_type = other DNA
ctcctggtgcaggtctccta

SEQ ID NO: 256634 - DNA, 20 bp, synthetic construct
  source 1..20: mol_type = other DNA
cctcctggtgcaggtctcct

SEQ ID NO: 256635 - DNA, 20 bp, synthetic construct
  source 1..20: mol_type = other DNA
ccctcctggtgcaggtctcc

SEQ ID NO: 256636 - DNA, 20 bp, synthetic construct
  source 1..20: mol_type = other DNA
cccctcctggtgcaggtctc

SEQ ID NO: 256637 - DNA, 20 bp, synthetic construct
  source 1..20: mol_type = other DNA
gcccctcctggtgcaggtct

SEQ ID NO: 256638 - DNA, 20 bp, synthetic construct
  source 1..20: mol_type = other DNA
ggcccctcctggtgcaggtc

SEQ ID NO: 256639 - DNA, 20 bp, synthetic construct
  source 1..20: mol_type = other DNA
cggcccctcctggtgcaggt

SEQ ID NO: 256640 - DNA, 20 bp, synthetic construct
  source 1..20: mol_type = other DNA
gcggcccctcctggtgcagg

SEQ ID NO: 256641 - DNA, 20 bp, synthetic construct
  source 1..20: mol_type = other DNA
ggcggcccctcctggtgcag

SEQ ID NO: 256642 - DNA, 20 bp, synthetic construct
  source 1..20: mol_type = other DNA
cggcggcccctcctggtgca

SEQ ID NO: 256643 - DNA, 20 bp, synthetic construct
  source 1..20: mol_type = other DNA
gcggcggcccctcctggtgc

SEQ ID NO: 256644 - DNA, 20 bp, synthetic construct
  source 1..20: mol_type = other DNA
agcggcggcccctcctggtg

SEQ ID NO: 256645 - DNA, 20 bp, synthetic construct
  source 1..20: mol_type = other DNA
cagcggcggcccctcctggt

SEQ ID NO: 256646 - DNA, 20 bp, synthetic construct
  source 1..20: mol_type = other DNA
tcagcggcggcccctcctgg

SEQ ID NO: 256647 - DNA, 20 bp, synthetic construct
  source 1..20: mol_type = other DNA
ttcagcggcggcccctcctg

SEQ ID NO: 256648 - DNA, 20 bp, synthetic construct
  source 1..20: mol_type = other DNA
cttcagcggcggcccctcct

SEQ ID NO: 256649 - DNA, 20 bp, synthetic construct
  source 1..20: mol_type = other DNA
ccttcagcggcggcccctcc

SEQ ID NO: 256650 - DNA, 20 bp, synthetic construct
  source 1..20: mol_type = other DNA
cccttcagcggcggcccctc

SEQ ID NO: 256651 - DNA, 20 bp, synthetic construct
  source 1..20: mol_type = other DNA
ccccttcagcggcggcccct

SEQ ID NO: 256652 - DNA, 20 bp, synthetic construct
  source 1..20: mol_type = other DNA
cccccttcagcggcggcccc

SEQ ID NO: 256653 - DNA, 20 bp, synthetic construct
  source 1..20: mol_type = other DNA
gcccccttcagcggcggccc

SEQ ID NO: 256654 - DNA, 20 bp, synthetic construct
  source 1..20: mol_type = other DNA
tgcccccttcagcggcggcc

SEQ ID NO: 256655 - DNA, 20 bp, synthetic construct
  source 1..20: mol_type = other DNA
ctgcccccttcagcggcggc

SEQ ID NO: 256656 - DNA, 20 bp, synthetic construct
  source 1..20: mol_type = other DNA
cctgcccccttcagcggcgg

SEQ ID NO: 256657 - DNA, 20 bp, synthetic construct
  source 1..20: mol_type = other DNA
ccctgcccccttcagcggcg

SEQ ID NO: 256658 - DNA, 20 bp, synthetic construct
  source 1..20: mol_type = other DNA
cccctgcccccttcagcggc

SEQ ID NO: 256659 - DNA, 20 bp, synthetic construct
  source 1..20: mol_type = other DNA
ccccctgcccccttcagcgg

SEQ ID NO: 256660 - DNA, 20 bp, synthetic construct
  source 1..20: mol_type = other DNA
gccccctgcccccttcagcg

SEQ ID NO: 256661 - DNA, 20 bp, synthetic construct
  source 1..20: mol_type = other DNA
tgccccctgcccccttcagc

SEQ ID NO: 256662 - DNA, 20 bp, synthetic construct
  source 1..20: mol_type = other DNA
ttgccccctgcccccttcag

SEQ ID NO: 256663 - DNA, 20 bp, synthetic construct
  source 1..20: mol_type = other DNA
tttgccccctgcccccttca

SEQ ID NO: 256664 - DNA, 20 bp, synthetic construct
  source 1..20: mol_type = other DNA
ctttgccccctgcccccttc

SEQ ID NO: 256665 - DNA, 20 bp, synthetic construct
  source 1..20: mol_type = other DNA
tctttgccccctgccccctt

SEQ ID NO: 256666 - DNA, 20 bp, synthetic construct
  source 1..20: mol_type = other DNA
ctctttgccccctgccccct

SEQ ID NO: 256667 - DNA, 20 bp, synthetic construct
  source 1..20: mol_type = other DNA
tctctttgccccctgccccc

SEQ ID NO: 256668 - DNA, 20 bp, synthetic construct
  source 1..20: mol_type = other DNA
ctctctttgccccctgcccc

SEQ ID NO: 256669 - DNA, 20 bp, synthetic construct
  source 1..20: mol_type = other DNA
cctctctttgccccctgccc

SEQ ID NO: 256670 - DNA, 20 bp, synthetic construct
  source 1..20: mol_type = other DNA
gcctctctttgccccctgcc

SEQ ID NO: 256671 - DNA, 20 bp, synthetic construct
  source 1..20: mol_type = other DNA
ggcctctctttgccccctgc

SEQ ID NO: 256672 - DNA, 20 bp, synthetic construct
  source 1..20: mol_type = other DNA
cggcctctctttgccccctg

SEQ ID NO: 256673 - DNA, 20 bp, synthetic construct
  source 1..20: mol_type = other DNA
ccggcctctctttgccccct

SEQ ID NO: 256674 - DNA, 20 bp, synthetic construct
  source 1..20: mol_type = other DNA
cccggcctctctttgccccc

SEQ ID NO: 256675 - DNA, 20 bp, synthetic construct
  source 1..20: mol_type = other DNA
ccccggcctctctttgcccc

SEQ ID NO: 256676 - DNA, 20 bp, synthetic construct
  source 1..20: mol_type = other DNA
tccccggcctctctttgccc

SEQ ID NO: 256677 - DNA, 20 bp, synthetic construct
  source 1..20: mol_type = other DNA
ctccccggcctctctttgcc

SEQ ID NO: 256678 - DNA, 20 bp, synthetic construct
  source 1..20: mol_type = other DNA
gctccccggcctctctttgc

SEQ ID NO: 256679 - DNA, 20 bp, synthetic construct
  source 1..20: mol_type = other DNA
tgctccccggcctctctttg

SEQ ID NO: 256680 - DNA, 20 bp, synthetic construct
  source 1..20: mol_type = other DNA
ttgctccccggcctctcttt

SEQ ID NO: 256681 - DNA, 20 bp, synthetic construct
  source 1..20: mol_type = other DNA
cttgctccccggcctctctt

SEQ ID NO: 256682 - DNA, 20 bp, synthetic construct
  source 1..20: mol_type = other DNA
ccttgctccccggcctctct

SEQ ID NO: 256683 - DNA, 20 bp, synthetic construct
  source 1..20: mol_type = other DNA
tccttgctccccggcctctc

SEQ ID NO: 256684 - DNA, 20 bp, synthetic construct
  source 1..20: mol_type = other DNA
ctccttgctccccggcctct

SEQ ID NO: 256685 - DNA, 20 bp, synthetic construct
  source 1..20: mol_type = other DNA
cctccttgctccccggcctc

SEQ ID NO: 256686 - DNA, 20 bp, synthetic construct
  source 1..20: mol_type = other DNA
tcctccttgctccccggcct

SEQ ID NO: 256687 - DNA, 20 bp, synthetic construct
  source 1..20: mol_type = other DNA
ctcctccttgctccccggcc

SEQ ID NO: 256688 - DNA, 20 bp, synthetic construct
  source 1..20: mol_type = other DNA
cctcctccttgctccccggc

SEQ ID NO: 256689 - DNA, 20 bp, synthetic construct
  source 1..20: mol_type = other DNA
acctcctccttgctccccgg

SEQ ID NO: 256690 - DNA, 20 bp, synthetic construct
  source 1..20: mol_type = other DNA
cacctcctccttgctccccg

SEQ ID NO: 256691 - DNA, 20 bp, synthetic construct
  source 1..20: mol_type = other DNA
ccacctcctccttgctcccc

SEQ ID NO: 256692 - DNA, 20 bp, synthetic construct
  source 1..20: mol_type = other DNA
tccacctcctccttgctccc

SEQ ID NO: 256693 - DNA, 20 bp, synthetic construct
  source 1..20: mol_type = other DNA
atccacctcctccttgctcc

SEQ ID NO: 256694 - DNA, 20 bp, synthetic construct
  source 1..20: mol_type = other DNA
catccacctcctccttgctc

SEQ ID NO: 256695 - DNA, 20 bp, synthetic construct
  source 1..20: mol_type = other DNA
tcatccacctcctccttgct

SEQ ID NO: 256696 - DNA, 20 bp, synthetic construct
  source 1..20: mol_type = other DNA
ttcatccacctcctccttgc

SEQ ID NO: 256697 - DNA, 20 bp, synthetic construct
  source 1..20: mol_type = other DNA
cttcatccacctcctccttg

SEQ ID NO: 256698 - DNA, 20 bp, synthetic construct
  source 1..20: mol_type = other DNA
tcttcatccacctcctcctt

SEQ ID NO: 256699 - DNA, 20 bp, synthetic construct
  source 1..20: mol_type = other DNA
gtcttcatccacctcctcct

SEQ ID NO: 256700 - DNA, 20 bp, synthetic construct
  source 1..20: mol_type = other DNA
ggtcttcatccacctcctcc

SEQ ID NO: 256701 - DNA, 20 bp, synthetic construct
  source 1..20: mol_type = other DNA
cggtcttcatccacctcctc

SEQ ID NO: 256702 - DNA, 20 bp, synthetic construct
  source 1..20: mol_type = other DNA
gcggtcttcatccacctcct

SEQ ID NO: 256703 - DNA, 20 bp, synthetic construct
  source 1..20: mol_type = other DNA
cgcggtcttcatccacctcc

SEQ ID NO: 256704 - DNA, 20 bp, synthetic construct
  source 1..20: mol_type = other DNA
tcgcggtcttcatccacctc

SEQ ID NO: 256705 - DNA, 20 bp, synthetic construct
  source 1..20: mol_type = other DNA
gtcgcggtcttcatccacct

SEQ ID NO: 256706 - DNA, 20 bp, synthetic construct
  source 1..20: mol_type = other DNA
cgtcgcggtcttcatccacc

SEQ ID NO: 256707 - DNA, 20 bp, synthetic construct
  source 1..20: mol_type = other DNA
acgtcgcggtcttcatccac

SEQ ID NO: 256708 - DNA, 20 bp, synthetic construct
  source 1..20: mol_type = other DNA
gacgtcgcggtcttcatcca

SEQ ID NO: 256709 - DNA, 20 bp, synthetic construct
  source 1..20: mol_type = other DNA
cgacgtcgcggtcttcatcc

SEQ ID NO: 256710 - DNA, 20 bp, synthetic construct
  source 1..20: mol_type = other DNA
tcgacgtcgcggtcttcatc

SEQ ID NO: 256711 - DNA, 20 bp, synthetic construct
  source 1..20: mol_type = other DNA
atcgacgtcgcggtcttcat

SEQ ID NO: 256712 - DNA, 20 bp, synthetic construct
  source 1..20: mol_type = other DNA
catcgacgtcgcggtcttca

SEQ ID NO: 256713 - DNA, 20 bp, synthetic construct
  source 1..20: mol_type = other DNA
tcatcgacgtcgcggtcttc

SEQ ID NO: 256714 - DNA, 20 bp, synthetic construct
  source 1..20: mol_type = other DNA
ctcatcgacgtcgcggtctt

SEQ ID NO: 256715 - DNA, 20 bp, synthetic construct
  source 1..20: mol_type = other DNA
actcatcgacgtcgcggtct

SEQ ID NO: 256716 - DNA, 20 bp, synthetic construct
  source 1..20: mol_type = other DNA
gactcatcgacgtcgcggtc

SEQ ID NO: 256717 - DNA, 20 bp, synthetic construct
  source 1..20: mol_type = other DNA
ggactcatcgacgtcgcggt

SEQ ID NO: 256718 - DNA, 20 bp, synthetic construct
  source 1..20: mol_type = other DNA
aggactcatcgacgtcgcgg

SEQ ID NO: 256719 - DNA, 20 bp, synthetic construct
  source 1..20: mol_type = other DNA
gaggactcatcgacgtcgcg

SEQ ID NO: 256720 - DNA, 20 bp, synthetic construct
  source 1..20: mol_type = other DNA
ggaggactcatcgacgtcgc

SEQ ID NO: 256721 - DNA, 20 bp, synthetic construct
  source 1..20: mol_type = other DNA
gggaggactcatcgacgtcg

SEQ ID NO: 256722 - DNA, 20 bp, synthetic construct
  source 1..20: mol_type = other DNA
ggggaggactcatcgacgtc

SEQ ID NO: 256723 - DNA, 20 bp, synthetic construct
  source 1..20: mol_type = other DNA
gggggaggactcatcgacgt

SEQ ID NO: 256724 - DNA, 20 bp, synthetic construct
  source 1..20: mol_type = other DNA
ggggggaggactcatcgacg

SEQ ID NO: 256725 - DNA, 20 bp, synthetic construct
  source 1..20: mol_type = other DNA
tggggggaggactcatcgac

SEQ ID NO: 256726 - DNA, 20 bp, synthetic construct
  source 1..20: mol_type = other DNA
ttggggggaggactcatcga

SEQ ID NO: 256727 - DNA, 20 bp, synthetic construct
  source 1..20: mol_type = other DNA
cttggggggaggactcatcg

SEQ ID NO: 256728 - DNA, 20 bp, synthetic construct
  source 1..20: mol_type = other DNA
tcttggggggaggactcatc

SEQ ID NO: 256729 - DNA, 20 bp, synthetic construct
  source 1..20: mol_type = other DNA
gtcttggggggaggactcat

SEQ ID NO: 256730 - DNA, 20 bp, synthetic construct
  source 1..20: mol_type = other DNA
agtcttggggggaggactca

SEQ ID NO: 256731 - DNA, 20 bp, synthetic construct
  source 1..20: mol_type = other DNA
gagtcttggggggaggactc

SEQ ID NO: 256732 - DNA, 20 bp, synthetic construct
  source 1..20: mol_type = other DNA
ggagtcttggggggaggact

SEQ ID NO: 256733 - DNA, 20 bp, synthetic construct
  source 1..20: mol_type = other DNA
gggagtcttggggggaggac

SEQ ID NO: 256734 - DNA, 20 bp, synthetic construct
  source 1..20: mol_type = other DNA
ggggagtcttggggggagga

SEQ ID NO: 256735 - DNA, 20 bp, synthetic construct
  source 1..20: mol_type = other DNA
aggggagtcttggggggagg

SEQ ID NO: 256736 - DNA, 20 bp, synthetic construct
  source 1..20: mol_type = other DNA
gaggggagtcttggggggag

SEQ ID NO: 256737 - DNA, 20 bp, synthetic construct
  source 1..20: mol_type = other DNA
ggaggggagtcttgggggga

SEQ ID NO: 256738 - DNA, 20 bp, synthetic construct
  source 1..20: mol_type = other DNA
gggaggggagtcttgggggg

SEQ ID NO: 256739 - DNA, 20 bp, synthetic construct
  source 1..20: mol_type = other DNA
agggaggggagtcttggggg

SEQ ID NO: 256740 - DNA, 20 bp, synthetic construct
  source 1..20: mol_type = other DNA
gagggaggggagtcttgggg

SEQ ID NO: 256741 - DNA, 20 bp, synthetic construct
  source 1..20: mol_type = other DNA
ggagggaggggagtcttggg

SEQ ID NO: 256742 - DNA, 20 bp, synthetic construct
  source 1..20: mol_type = other DNA
tggagggaggggagtcttgg

SEQ ID NO: 256743 - DNA, 20 bp, synthetic construct
  source 1..20: mol_type = other DNA
ttggagggaggggagtcttg

SEQ ID NO: 256744 - DNA, 20 bp, synthetic construct
  source 1..20: mol_type = other DNA
cttggagggaggggagtctt

SEQ ID NO: 256745 - DNA, 20 bp, synthetic construct
  source 1..20: mol_type = other DNA
ccttggagggaggggagtct

SEQ ID NO: 256746 - DNA, 20 bp, synthetic construct
  source 1..20: mol_type = other DNA
gccttggagggaggggagtc

SEQ ID NO: 256747 - DNA, 20 bp, synthetic construct
  source 1..20: mol_type = other DNA
ggccttggagggaggggagt

SEQ ID NO: 256748 - DNA, 20 bp, synthetic construct
  source 1..20: mol_type = other DNA
aggccttggagggaggggag

SEQ ID NO: 256749 - DNA, 20 bp, synthetic construct
  source 1..20: mol_type = other DNA
gaggccttggagggagggga

SEQ ID NO: 256750 - DNA, 20 bp, synthetic construct
  source 1..20: mol_type = other DNA
ggaggccttggagggagggg

SEQ ID NO: 256751 - DNA, 20 bp, synthetic construct
  source 1..20: mol_type = other DNA
gggaggccttggagggaggg

SEQ ID NO: 256752 - DNA, 20 bp, synthetic construct
  source 1..20: mol_type = other DNA
ggggaggccttggagggagg

SEQ ID NO: 256753 - DNA, 20 bp, synthetic construct
  source 1..20: mol_type = other DNA
tggggaggccttggagggag

SEQ ID NO: 256754 - DNA, 20 bp, synthetic construct
  source 1..20: mol_type = other DNA
ctggggaggccttggaggga

SEQ ID NO: 256755 - DNA, 20 bp, synthetic construct
  source 1..20: mol_type = other DNA
gctggggaggccttggaggg

SEQ ID NO: 256756 - DNA, 20 bp, synthetic construct
  source 1..20: mol_type = other DNA
ggctggggaggccttggagg

SEQ ID NO: 256757 - DNA, 20 bp, synthetic construct
  source 1..20: mol_type = other DNA
gggctggggaggccttggag

SEQ ID NO: 256758 - DNA, 20 bp, synthetic construct
  source 1..20: mol_type = other DNA
tgggctggggaggccttgga

SEQ ID NO: 256759 - DNA, 20 bp, synthetic construct
  source 1..20: mol_type = other DNA
ttgggctggggaggccttgg

SEQ ID NO: 256760 - DNA, 20 bp, synthetic construct
  source 1..20: mol_type = other DNA
cttgggctggggaggccttg

SEQ ID NO: 256761 - DNA, 20 bp, synthetic construct
  source 1..20: mol_type = other DNA
tcttgggctggggaggcctt

SEQ ID NO: 256762 - DNA, 20 bp, synthetic construct
  source 1..20: mol_type = other DNA
atcttgggctggggaggcct

SEQ ID NO: 256763 - DNA, 20 bp, synthetic construct
  source 1..20: mol_type = other DNA
catcttgggctggggaggcc

SEQ ID NO: 256764 - DNA, 20 bp, synthetic construct
  source 1..20: mol_type = other DNA
ccatcttgggctggggaggc

SEQ ID NO: 256765 - DNA, 20 bp, synthetic construct
  source 1..20: mol_type = other DNA
cccatcttgggctggggagg

SEQ ID NO: 256766 - DNA, 20 bp, synthetic construct
  source 1..20: mol_type = other DNA
gcccatcttgggctggggag

SEQ ID NO: 256767 - DNA, 20 bp, synthetic construct
  source 1..20: mol_type = other DNA
cgcccatcttgggctgggga

SEQ ID NO: 256768 - DNA, 20 bp, synthetic construct
  source 1..20: mol_type = other DNA
ccgcccatcttgggctgggg

SEQ ID NO: 256769 - DNA, 20 bp, synthetic construct
  source 1..20: mol_type = other DNA
gccgcccatcttgggctggg

SEQ ID NO: 256770 - DNA, 20 bp, synthetic construct
  source 1..20: mol_type = other DNA
ggccgcccatcttgggctgg

SEQ ID NO: 256771 - DNA, 20 bp, synthetic construct
  source 1..20: mol_type = other DNA
aggccgcccatcttgggctg

SEQ ID NO: 256772 - DNA, 20 bp, synthetic construct
  source 1..20: mol_type = other DNA
gaggccgcccatcttgggct

SEQ ID NO: 256773 - DNA, 20 bp, synthetic construct
  source 1..20: mol_type = other DNA
ggaggccgcccatcttgggc

SEQ ID NO: 256774 - DNA, 20 bp, synthetic construct
  source 1..20: mol_type = other DNA
gggaggccgcccatcttggg

SEQ ID NO: 256775 - DNA, 20 bp, synthetic construct
  source 1..20: mol_type = other DNA
ggggaggccgcccatcttgg

SEQ ID NO: 256776 - DNA, 20 bp, synthetic construct
  source 1..20: mol_type = other DNA
tggggaggccgcccatcttg

SEQ ID NO: 256777 - DNA, 20 bp, synthetic construct
  source 1..20: mol_type = other DNA
ctggggaggccgcccatctt

SEQ ID NO: 256778 - DNA, 20 bp, synthetic construct
  source 1..20: mol_type = other DNA
tctggggaggccgcccatct

SEQ ID NO: 256779 - DNA, 20 bp, synthetic construct
  source 1..20: mol_type = other DNA
gtctggggaggccgcccatc

SEQ ID NO: 256780 - DNA, 20 bp, synthetic construct
  source 1..20: mol_type = other DNA
tgtctggggaggccgcccat

SEQ ID NO: 256781 - DNA, 20 bp, synthetic construct
  source 1..20: mol_type = other DNA
ctgtctggggaggccgccca

SEQ ID NO: 256782 - DNA, 20 bp, synthetic construct
  source 1..20: mol_type = other DNA
gctgtctggggaggccgccc

SEQ ID NO: 256783 - DNA, 20 bp, synthetic construct
  source 1..20: mol_type = other DNA
ggctgtctggggaggccgcc

SEQ ID NO: 256784 - DNA, 20 bp, synthetic construct
  source 1..20: mol_type = other DNA
cggctgtctggggaggccgc

SEQ ID NO: 256785 - DNA, 20 bp, synthetic construct
  source 1..20: mol_type = other DNA
gcggctgtctggggaggccg

SEQ ID NO: 256786 - DNA, 20 bp, synthetic construct
  source 1..20: mol_type = other DNA
ggcggctgtctggggaggcc

SEQ ID NO: 256787 - DNA, 20 bp, synthetic construct
  source 1..20: mol_type = other DNA
tggcggctgtctggggaggc

SEQ ID NO: 256788 - DNA, 20 bp, synthetic construct
  source 1..20: mol_type = other DNA
ctggcggctgtctggggagg

SEQ ID NO: 256789 - DNA, 20 bp, synthetic construct
  source 1..20: mol_type = other DNA
tctggcggctgtctggggag

SEQ ID NO: 256790 - DNA, 20 bp, synthetic construct
  source 1..20: mol_type = other DNA
ctctggcggctgtctgggga

SEQ ID NO: 256791 - DNA, 20 bp, synthetic construct
  source 1..20: mol_type = other DNA
tctctggcggctgtctgggg

SEQ ID NO: 256792 - DNA, 20 bp, synthetic construct
  source 1..20: mol_type = other DNA
ttctctggcggctgtctggg

SEQ ID NO: 256793 - DNA, 20 bp, synthetic construct
  source 1..20: mol_type = other DNA
cttctctggcggctgtctgg

SEQ ID NO: 256794 - DNA, 20 bp, synthetic construct
  source 1..20: mol_type = other DNA
gcttctctggcggctgtctg

SEQ ID NO: 256795 - DNA, 20 bp, synthetic construct
  source 1..20: mol_type = other DNA
ggcttctctggcggctgtct

SEQ ID NO: 256796 - DNA, 20 bp, synthetic construct
  source 1..20: mol_type = other DNA
tggcttctctggcggctgtc

SEQ ID NO: 256797 - DNA, 20 bp, synthetic construct
  source 1..20: mol_type = other DNA
gtggcttctctggcggctgt

SEQ ID NO: 256798 - DNA, 20 bp, synthetic construct
  source 1..20: mol_type = other DNA
ggtggcttctctggcggctg

SEQ ID NO: 256799 - DNA, 20 bp, synthetic construct
  source 1..20: mol_type = other DNA
tggtggcttctctggcggct

SEQ ID NO: 256800 - DNA, 20 bp, synthetic construct
  source 1..20: mol_type = other DNA
ctggtggcttctctggcggc

SEQ ID NO: 256801 - DNA, 20 bp, synthetic construct
  source 1..20: mol_type = other DNA
gctggtggcttctctggcgg

SEQ ID NO: 256802 - DNA, 20 bp, synthetic construct
  source 1..20: mol_type = other DNA
tgctggtggcttctctggcg

SEQ ID NO: 256803 - DNA, 20 bp, synthetic construct
  source 1..20: mol_type = other DNA
atgctggtggcttctctggc

SEQ ID NO: 256804 - DNA, 20 bp, synthetic construct
  source 1..20: mol_type = other DNA
gatgctggtggcttctctgg

SEQ ID NO: 256805 - DNA, 20 bp, synthetic construct
  source 1..20: mol_type = other DNA
ggatgctggtggcttctctg

SEQ ID NO: 256806 - DNA, 20 bp, synthetic construct
  source 1..20: mol_type = other DNA
gggatgctggtggcttctct

SEQ ID NO: 256807 - DNA, 20 bp, synthetic construct
  source 1..20: mol_type = other DNA
tgggatgctggtggcttctc

SEQ ID NO: 256808 - DNA, 20 bp, synthetic construct
  source 1..20: mol_type = other DNA
ctgggatgctggtggcttct

SEQ ID NO: 256809 - DNA, 20 bp, synthetic construct
  source 1..20: mol_type = other DNA
cctgggatgctggtggcttc

SEQ ID NO: 256810 - DNA, 20 bp, synthetic construct
  source 1..20: mol_type = other DNA
gcctgggatgctggtggctt

SEQ ID NO: 256811 - DNA, 20 bp, synthetic construct
  source 1..20: mol_type = other DNA
agcctgggatgctggtggct

SEQ ID NO: 256812 - DNA, 20 bp, synthetic construct
  source 1..20: mol_type = other DNA
aagcctgggatgctggtggc

SEQ ID NO: 256813 - DNA, 20 bp, synthetic construct
  source 1..20: mol_type = other DNA
gaagcctgggatgctggtgg

SEQ ID NO: 256814 - DNA, 20 bp, synthetic construct
  source 1..20: mol_type = other DNA
ggaagcctgggatgctggtg

SEQ ID NO: 256815 - DNA, 20 bp, synthetic construct
  source 1..20: mol_type = other DNA
gggaagcctgggatgctggt

SEQ ID NO: 256816 - DNA, 20 bp, synthetic construct
  source 1..20: mol_type = other DNA
tgggaagcctgggatgctgg

SEQ ID NO: 256817 - DNA, 20 bp, synthetic construct
  source 1..20: mol_type = other DNA
ctgggaagcctgggatgctg

SEQ ID NO: 256818 - DNA, 20 bp, synthetic construct
  source 1..20: mol_type = other DNA
gctgggaagcctgggatgct

SEQ ID NO: 256819 - DNA, 20 bp, synthetic construct
  source 1..20: mol_type = other DNA
cgctgggaagcctgggatgc

SEQ ID NO: 256820 - DNA, 20 bp, synthetic construct
  source 1..20: mol_type = other DNA
ccgctgggaagcctgggatg

SEQ ID NO: 256821 - DNA, 20 bp, synthetic construct
  source 1..20: mol_type = other DNA
tccgctgggaagcctgggat

SEQ ID NO: 256822 - DNA, 20 bp, synthetic construct
  source 1..20: mol_type = other DNA
ctccgctgggaagcctggga

SEQ ID NO: 256823 - DNA, 20 bp, synthetic construct
  source 1..20: mol_type = other DNA
cctccgctgggaagcctggg

SEQ ID NO: 256824 - DNA, 20 bp, synthetic construct
  source 1..20: mol_type = other DNA
ccctccgctgggaagcctgg

SEQ ID NO: 256825 - DNA, 20 bp, synthetic construct
  source 1..20: mol_type = other DNA
accctccgctgggaagcctg

SEQ ID NO: 256826 - DNA, 20 bp, synthetic construct
  source 1..20: mol_type = other DNA
caccctccgctgggaagcct

SEQ ID NO: 256827 - DNA, 20 bp, synthetic construct
  source 1..20: mol_type = other DNA
gcaccctccgctgggaagcc

SEQ ID NO: 256828 - DNA, 20 bp, synthetic construct
  source 1..20: mol_type = other DNA
ggcaccctccgctgggaagc

SEQ ID NO: 256829 - DNA, 20 bp, synthetic construct
  source 1..20: mol_type = other DNA
tggcaccctccgctgggaag

SEQ ID NO: 256830 - DNA, 20 bp, synthetic construct
  source 1..20: mol_type = other DNA
atggcaccctccgctgggaa

SEQ ID NO: 256831 - DNA, 20 bp, synthetic construct
  source 1..20: mol_type = other DNA
gatggcaccctccgctggga

SEQ ID NO: 256832 - DNA, 20 bp, synthetic construct
  source 1..20: mol_type = other DNA
ggatggcaccctccgctggg

SEQ ID NO: 256833 - DNA, 20 bp, synthetic construct
  source 1..20: mol_type = other DNA
gggatggcaccctccgctgg

SEQ ID NO: 256834 - DNA, 20 bp, synthetic construct
  source 1..20: mol_type = other DNA
ggggatggcaccctccgctg

SEQ ID NO: 256835 - DNA, 20 bp, synthetic construct
  source 1..20: mol_type = other DNA
gggggatggcaccctccgct

SEQ ID NO: 256836 - DNA, 20 bp, synthetic construct
  source 1..20: mol_type = other DNA
agggggatggcaccctccgc

SEQ ID NO: 256837 - DNA, 20 bp, synthetic construct
  source 1..20: mol_type = other DNA
gagggggatggcaccctccg

SEQ ID NO: 256838 - DNA, 20 bp, synthetic construct
  source 1..20: mol_type = other DNA
ggagggggatggcaccctcc

SEQ ID NO: 256839 - DNA, 20 bp, synthetic construct
  source 1..20: mol_type = other DNA
gggagggggatggcaccctc

SEQ ID NO: 256840 - DNA, 20 bp, synthetic construct
  source 1..20: mol_type = other DNA
agggagggggatggcaccct

SEQ ID NO: 256841 - DNA, 20 bp, synthetic construct
  source 1..20: mol_type = other DNA
cagggagggggatggcaccc

SEQ ID NO: 256842 - DNA, 20 bp, synthetic construct
  source 1..20: mol_type = other DNA
acagggagggggatggcacc

SEQ ID NO: 256843 - DNA, 20 bp, synthetic construct
  source 1..20: mol_type = other DNA
cacagggagggggatggcac

SEQ ID NO: 256844 - DNA, 20 bp, synthetic construct
  source 1..20: mol_type = other DNA
ccacagggagggggatggca

SEQ ID NO: 256845 - DNA, 20 bp, synthetic construct
  source 1..20: mol_type = other DNA
tccacagggagggggatggc

SEQ ID NO: 256846 - DNA, 20 bp, synthetic construct
  source 1..20: mol_type = other DNA
atccacagggagggggatgg

SEQ ID NO: 256847 - DNA, 20 bp, synthetic construct
  source 1..20: mol_type = other DNA
aatccacagggagggggatg

SEQ ID NO: 256848 - DNA, 20 bp, synthetic construct
  source 1..20: mol_type = other DNA
aaatccacagggagggggat

SEQ ID NO: 256849 - DNA, 20 bp, synthetic construct
  source 1..20: mol_type = other DNA
gaaatccacagggaggggga

SEQ ID NO: 256850 - DNA, 20 bp, synthetic construct
  source 1..20: mol_type = other DNA
ggaaatccacagggaggggg

SEQ ID NO: 256851 - DNA, 20 bp, synthetic construct
  source 1..20: mol_type = other DNA
aggaaatccacagggagggg

SEQ ID NO: 256852 - DNA, 20 bp, synthetic construct
  source 1..20: mol_type = other DNA
gaggaaatccacagggaggg

SEQ ID NO: 256853 - DNA, 20 bp, synthetic construct
  source 1..20: mol_type = other DNA
agaggaaatccacagggagg

SEQ ID NO: 256854 - DNA, 20 bp, synthetic construct
  source 1..20: mol_type = other DNA
gagaggaaatccacagggag

SEQ ID NO: 256855 - DNA, 20 bp, synthetic construct
  source 1..20: mol_type = other DNA
ggagaggaaatccacaggga

SEQ ID NO: 256856 - DNA, 20 bp, synthetic construct
  source 1..20: mol_type = other DNA
tggagaggaaatccacaggg

SEQ ID NO: 256857 - DNA, 20 bp, synthetic construct
  source 1..20: mol_type = other DNA
ttggagaggaaatccacagg

SEQ ID NO: 256858 - DNA, 20 bp, synthetic construct
  source 1..20: mol_type = other DNA
tttggagaggaaatccacag

SEQ ID NO: 256859 - DNA, 20 bp, synthetic construct
  source 1..20: mol_type = other DNA
ctttggagaggaaatccaca

SEQ ID NO: 256860 - DNA, 20 bp, synthetic construct
  source 1..20: mol_type = other DNA
actttggagaggaaatccac

SEQ ID NO: 256861 - DNA, 20 bp, synthetic construct
  source 1..20: mol_type = other DNA
aactttggagaggaaatcca

SEQ ID NO: 256862 - DNA, 20 bp, synthetic construct
  source 1..20: mol_type = other DNA
aaactttggagaggaaatcc

SEQ ID NO: 256863 - DNA, 20 bp, synthetic construct
  source 1..20: mol_type = other DNA
gaaactttggagaggaaatc

SEQ ID NO: 256864 - DNA, 20 bp, synthetic construct
  source 1..20: mol_type = other DNA
ggaaactttggagaggaaat

SEQ ID NO: 256865 - DNA, 20 bp, synthetic construct
  source 1..20: mol_type = other DNA
tggaaactttggagaggaaa

SEQ ID NO: 256866 - DNA, 20 bp, synthetic construct
  source 1..20: mol_type = other DNA
gtggaaactttggagaggaa

SEQ ID NO: 256867 - DNA, 20 bp, synthetic construct
  source 1..20: mol_type = other DNA
tgtggaaactttggagagga

SEQ ID NO: 256868 - DNA, 20 bp, synthetic construct
  source 1..20: mol_type = other DNA
ctgtggaaactttggagagg

SEQ ID NO: 256869 - DNA, 20 bp, synthetic construct
  source 1..20: mol_type = other DNA
tctgtggaaactttggagag

SEQ ID NO: 256870 - DNA, 20 bp, synthetic construct
  source 1..20: mol_type = other DNA
ctctgtggaaactttggaga

SEQ ID NO: 256871 - DNA, 20 bp, synthetic construct
  source 1..20: mol_type = other DNA
tctctgtggaaactttggag

SEQ ID NO: 256872 - DNA, 20 bp, synthetic construct
  source 1..20: mol_type = other DNA
atctctgtggaaactttgga

SEQ ID NO: 256873 - DNA, 20 bp, synthetic construct
  source 1..20: mol_type = other DNA
gatctctgtggaaactttgg

SEQ ID NO: 256874 - DNA, 20 bp, synthetic construct
  source 1..20: mol_type = other DNA
ggatctctgtggaaactttg

SEQ ID NO: 256875 - DNA, 20 bp, synthetic construct
  source 1..20: mol_type = other DNA
gggatctctgtggaaacttt

SEQ ID NO: 256876 - DNA, 20 bp, synthetic construct
  source 1..20: mol_type = other DNA
tgggatctctgtggaaactt

SEQ ID NO: 256877 - DNA, 20 bp, synthetic construct
  source 1..20: mol_type = other DNA
ctgggatctctgtggaaact

SEQ ID NO: 256878 - DNA, 20 bp, synthetic construct
  source 1..20: mol_type = other DNA
gctgggatctctgtggaaac

SEQ ID NO: 256879 - DNA, 20 bp, synthetic construct
  source 1..20: mol_type = other DNA
ggctgggatctctgtggaaa

SEQ ID NO: 256880 - DNA, 20 bp, synthetic construct
  source 1..20: mol_type = other DNA
aggctgggatctctgtggaa

SEQ ID NO: 256881 - DNA, 20 bp, synthetic construct
  source 1..20: mol_type = other DNA
gaggctgggatctctgtgga

SEQ ID NO: 256882 - DNA, 20 bp, synthetic construct
  source 1..20: mol_type = other DNA
tgaggctgggatctctgtgg

SEQ ID NO: 256883 - DNA, 20 bp, synthetic construct
  source 1..20: mol_type = other DNA
ctgaggctgggatctctgtg

SEQ ID NO: 256884 - DNA, 20 bp, synthetic construct
  source 1..20: mol_type = other DNA
tctgaggctgggatctctgt

SEQ ID NO: 256885 - DNA, 20 bp, synthetic construct
  source 1..20: mol_type = other DNA
ctctgaggctgggatctctg

SEQ ID NO: 256886 - DNA, 20 bp, synthetic construct
  source 1..20: mol_type = other DNA
gctctgaggctgggatctct

SEQ ID NO: 256887 - DNA, 20 bp, synthetic construct
  source 1..20: mol_type = other DNA
ggctctgaggctgggatctc

SEQ ID NO: 256888 - DNA, 20 bp, synthetic construct
  source 1..20: mol_type = other DNA
gggctctgaggctgggatct

SEQ ID NO: 256889 - DNA, 20 bp, synthetic construct
  source 1..20: mol_type = other DNA
cgggctctgaggctgggatc

SEQ ID NO: 256890 - DNA, 20 bp, synthetic construct
  source 1..20: mol_type = other DNA
tcgggctctgaggctgggat

SEQ ID NO: 256891 - DNA, 20 bp, synthetic construct
  source 1..20: mol_type = other DNA
gtcgggctctgaggctggga

SEQ ID NO: 256892 - DNA, 20 bp, synthetic construct
  source 1..20: mol_type = other DNA
cgtcgggctctgaggctggg

SEQ ID NO: 256893 - DNA, 20 bp, synthetic construct
  source 1..20: mol_type = other DNA
ccgtcgggctctgaggctgg

SEQ ID NO: 256894 - DNA, 20 bp, synthetic construct
  source 1..20: mol_type = other DNA
cccgtcgggctctgaggctg

SEQ ID NO: 256895 - DNA, 20 bp, synthetic construct
  source 1..20: mol_type = other DNA
gcccgtcgggctctgaggct

SEQ ID NO: 256896 - DNA, 20 bp, synthetic construct
  source 1..20: mol_type = other DNA
ggcccgtcgggctctgaggc

SEQ ID NO: 256897 - DNA, 20 bp, synthetic construct
  source 1..20: mol_type = other DNA
gggcccgtcgggctctgagg

SEQ ID NO: 256898 - DNA, 20 bp, synthetic construct
  source 1..20: mol_type = other DNA
tgggcccgtcgggctctgag

SEQ ID NO: 256899 - DNA, 20 bp, synthetic construct
  source 1..20: mol_type = other DNA
ctgggcccgtcgggctctga

SEQ ID NO: 256900 - DNA, 20 bp, synthetic construct
  source 1..20: mol_type = other DNA
actgggcccgtcgggctctg

SEQ ID NO: 256901 - DNA, 20 bp, synthetic construct
  source 1..20: mol_type = other DNA
cactgggcccgtcgggctct

SEQ ID NO: 256902 - DNA, 20 bp, synthetic construct
  source 1..20: mol_type = other DNA
acactgggcccgtcgggctc

SEQ ID NO: 256903 - DNA, 20 bp, synthetic construct
  source 1..20: mol_type = other DNA
tacactgggcccgtcgggct

SEQ ID NO: 256904 - DNA, 20 bp, synthetic construct
  source 1..20: mol_type = other DNA
ctacactgggcccgtcgggc

SEQ ID NO: 256905 - DNA, 20 bp, synthetic construct
  source 1..20: mol_type = other DNA
cctacactgggcccgtcggg

SEQ ID NO: 256906 - DNA, 20 bp, synthetic construct
  source 1..20: mol_type = other DNA
ccctacactgggcccgtcgg

SEQ ID NO: 256907 - DNA, 20 bp, synthetic construct
  source 1..20: mol_type = other DNA
gccctacactgggcccgtcg

SEQ ID NO: 256908 - DNA, 20 bp, synthetic construct
  source 1..20: mol_type = other DNA
cgccctacactgggcccgtc

SEQ ID NO: 256909 - DNA, 20 bp, synthetic construct
  source 1..20: mol_type = other DNA
ccgccctacactgggcccgt

SEQ ID NO: 256910 - DNA, 20 bp, synthetic construct
  source 1..20: mol_type = other DNA
cccgccctacactgggcccg

SEQ ID NO: 256911 - DNA, 20 bp, synthetic construct
  source 1..20: mol_type = other DNA
gcccgccctacactgggccc

SEQ ID NO: 256912 - DNA, 20 bp, synthetic construct
  source 1..20: mol_type = other DNA
ggcccgccctacactgggcc

SEQ ID NO: 256913 - DNA, 20 bp, synthetic construct
  source 1..20: mol_type = other DNA
tggcccgccctacactgggc

SEQ ID NO: 256914 - DNA, 20 bp, synthetic construct
  source 1..20: mol_type = other DNA
ttggcccgccctacactggg

SEQ ID NO: 256915 - DNA, 20 bp, synthetic construct
  source 1..20: mol_type = other DNA
tttggcccgccctacactgg

SEQ ID NO: 256916 - DNA, 20 bp, synthetic construct
  source 1..20: mol_type = other DNA
ctttggcccgccctacactg

SEQ ID NO: 256917 - DNA, 20 bp, synthetic construct
  source 1..20: mol_type = other DNA
cctttggcccgccctacact

SEQ ID NO: 256918 - DNA, 20 bp, synthetic construct
  source 1..20: mol_type = other DNA
ccctttggcccgccctacac

SEQ ID NO: 256919 - DNA, 20 bp, synthetic construct
  source 1..20: mol_type = other DNA
gccctttggcccgccctaca

SEQ ID NO: 256920 - DNA, 20 bp, synthetic construct
  source 1..20: mol_type = other DNA
tgccctttggcccgccctac

SEQ ID NO: 256921 - DNA, 20 bp, synthetic construct
  source 1..20: mol_type = other DNA
ctgccctttggcccgcccta

SEQ ID NO: 256922 - DNA, 20 bp, synthetic construct
  source 1..20: mol_type = other DNA
cctgccctttggcccgccct

SEQ ID NO: 256923 - DNA, 20 bp, synthetic construct
  source 1..20: mol_type = other DNA
tcctgccctttggcccgccc

SEQ ID NO: 256924 - DNA, 20 bp, synthetic construct
  source 1..20: mol_type = other DNA
atcctgccctttggcccgcc

SEQ ID NO: 256925 - DNA, 20 bp, synthetic construct
  source 1..20: mol_type = other DNA
catcctgccctttggcccgc

SEQ ID NO: 256926 - DNA, 20 bp, synthetic construct
  source 1..20: mol_type = other DNA
gcatcctgccctttggcccg

SEQ ID NO: 256927 - DNA, 20 bp, synthetic construct
  source 1..20: mol_type = other DNA
ggcatcctgccctttggccc

SEQ ID NO: 256928 - DNA, 20 bp, synthetic construct
  source 1..20: mol_type = other DNA
gggcatcctgccctttggcc

SEQ ID NO: 256929 - DNA, 20 bp, synthetic construct
  source 1..20: mol_type = other DNA
ggggcatcctgccctttggc

SEQ ID NO: 256930 - DNA, 20 bp, synthetic construct
  source 1..20: mol_type = other DNA
gggggcatcctgccctttgg

SEQ ID NO: 256931 - DNA, 20 bp, synthetic construct
  source 1..20: mol_type = other DNA
ggggggcatcctgccctttg

SEQ ID NO: 256932 - DNA, 20 bp, synthetic construct
  source 1..20: mol_type = other DNA
aggggggcatcctgcccttt

SEQ ID NO: 256933 - DNA, 20 bp, synthetic construct
  source 1..20: mol_type = other DNA
caggggggcatcctgccctt

SEQ ID NO: 256934 - DNA, 20 bp, synthetic construct
  source 1..20: mol_type = other DNA
ccaggggggcatcctgccct

SEQ ID NO: 256935 - DNA, 20 bp, synthetic construct
  source 1..20: mol_type = other DNA
tccaggggggcatcctgccc

SEQ ID NO: 256936 - DNA, 20 bp, synthetic construct
  source 1..20: mol_type = other DNA
ctccaggggggcatcctgcc

SEQ ID NO: 256937 - DNA, 20 bp, synthetic construct
  source 1..20: mol_type = other DNA
actccaggggggcatcctgc

SEQ ID NO: 256938 - DNA, 20 bp, synthetic construct
  source 1..20: mol_type = other DNA
aactccaggggggcatcctg

SEQ ID NO: 256939 - DNA, 20 bp, synthetic construct
  source 1..20: mol_type = other DNA
gaactccaggggggcatcct

SEQ ID NO: 256940 - DNA, 20 bp, synthetic construct
  source 1..20: mol_type = other DNA
tgaactccaggggggcatcc

SEQ ID NO: 256941 - DNA, 20 bp, synthetic construct
  source 1..20: mol_type = other DNA
gtgaactccaggggggcatc

SEQ ID NO: 256942 - DNA, 20 bp, synthetic construct
  source 1..20: mol_type = other DNA
cgtgaactccaggggggcat

SEQ ID NO: 256943 - DNA, 20 bp, synthetic construct
  source 1..20: mol_type = other DNA
acgtgaactccaggggggca

SEQ ID NO: 256944 - DNA, 20 bp, synthetic construct
  source 1..20: mol_type = other DNA
aacgtgaactccaggggggc

SEQ ID NO: 256945 - DNA, 20 bp, synthetic construct
  source 1..20: mol_type = other DNA
aaacgtgaactccagggggg

SEQ ID NO: 256946 - DNA, 20 bp, synthetic construct
  source 1..20: mol_type = other DNA
gaaacgtgaactccaggggg

SEQ ID NO: 256947 - DNA, 20 bp, synthetic construct
  source 1..20: mol_type = other DNA
tgaaacgtgaactccagggg

SEQ ID NO: 256948 - DNA, 20 bp, synthetic construct
  source 1..20: mol_type = other DNA
gtgaaacgtgaactccaggg

SEQ ID NO: 256949 - DNA, 20 bp, synthetic construct
  source 1..20: mol_type = other DNA
cgtgaaacgtgaactccagg

SEQ ID NO: 256950 - DNA, 20 bp, synthetic construct
  source 1..20: mol_type = other DNA
acgtgaaacgtgaactccag

SEQ ID NO: 256951 - DNA, 20 bp, synthetic construct
  source 1..20: mol_type = other DNA
cacgtgaaacgtgaactcca

SEQ ID NO: 256952 - DNA, 20 bp, synthetic construct
  source 1..20: mol_type = other DNA
ccacgtgaaacgtgaactcc

SEQ ID NO: 256953 - DNA, 20 bp, synthetic construct
  source 1..20: mol_type = other DNA
tccacgtgaaacgtgaactc

SEQ ID NO: 256954 - DNA, 20 bp, synthetic construct
  source 1..20: mol_type = other DNA
ttccacgtgaaacgtgaact

SEQ ID NO: 256955 - DNA, 20 bp, synthetic construct
  source 1..20: mol_type = other DNA
tttccacgtgaaacgtgaac

SEQ ID NO: 256956 - DNA, 20 bp, synthetic construct
  source 1..20: mol_type = other DNA
atttccacgtgaaacgtgaa

SEQ ID NO: 256957 - DNA, 20 bp, synthetic construct
  source 1..20: mol_type = other DNA
gatttccacgtgaaacgtga

SEQ ID NO: 256958 - DNA, 20 bp, synthetic construct
  source 1..20: mol_type = other DNA
tgatttccacgtgaaacgtg

SEQ ID NO: 256959 - DNA, 20 bp, synthetic construct
  source 1..20: mol_type = other DNA
gtgatttccacgtgaaacgt

SEQ ID NO: 256960 - DNA, 20 bp, synthetic construct
  source 1..20: mol_type = other DNA
tgtgatttccacgtgaaacg

SEQ ID NO: 256961 - DNA, 20 bp, synthetic construct
  source 1..20: mol_type = other DNA
gtgtgatttccacgtgaaac

SEQ ID NO: 256962 - DNA, 20 bp, synthetic construct
  source 1..20: mol_type = other DNA
ggtgtgatttccacgtgaaa

SEQ ID NO: 256963 - DNA, 20 bp, synthetic construct
  source 1..20: mol_type = other DNA
gggtgtgatttccacgtgaa

SEQ ID NO: 256964 - DNA, 20 bp, synthetic construct
  source 1..20: mol_type = other DNA
tgggtgtgatttccacgtga

SEQ ID NO: 256965 - DNA, 20 bp, synthetic construct
  source 1..20: mol_type = other DNA
ttgggtgtgatttccacgtg

SEQ ID NO: 256966 - DNA, 20 bp, synthetic construct
  source 1..20: mol_type = other DNA
gttgggtgtgatttccacgt

SEQ ID NO: 256967 - DNA, 20 bp, synthetic construct
  source 1..20: mol_type = other DNA
cgttgggtgtgatttccacg

SEQ ID NO: 256968 - DNA, 20 bp, synthetic construct
  source 1..20: mol_type = other DNA
acgttgggtgtgatttccac

SEQ ID NO: 256969 - DNA, 20 bp, synthetic construct
  source 1..20: mol_type = other DNA
cacgttgggtgtgatttcca

SEQ ID NO: 256970 - DNA, 20 bp, synthetic construct
  source 1..20: mol_type = other DNA
gcacgttgggtgtgatttcc

SEQ ID NO: 256971 - DNA, 20 bp, synthetic construct
  source 1..20: mol_type = other DNA
tgcacgttgggtgtgatttc

SEQ ID NO: 256972 - DNA, 20 bp, synthetic construct
  source 1..20: mol_type = other DNA
ctgcacgttgggtgtgattt

SEQ ID NO: 256973 - DNA, 20 bp, synthetic construct
  source 1..20: mol_type = other DNA
tctgcacgttgggtgtgatt

SEQ ID NO: 256974 - DNA, 20 bp, synthetic construct
  source 1..20: mol_type = other DNA
ttctgcacgttgggtgtgat

SEQ ID NO: 256975 - DNA, 20 bp, synthetic construct
  source 1..20: mol_type = other DNA
cttctgcacgttgggtgtga

SEQ ID NO: 256976 - DNA, 20 bp, synthetic construct
  source 1..20: mol_type = other DNA
ccttctgcacgttgggtgtg

SEQ ID NO: 256977 - DNA, 20 bp, synthetic construct
  source 1..20: mol_type = other DNA
tccttctgcacgttgggtgt

SEQ ID NO: 256978 - DNA, 20 bp, synthetic construct
  source 1..20: mol_type = other DNA
ctccttctgcacgttgggtg

SEQ ID NO: 256979 - DNA, 20 bp, synthetic construct
  source 1..20: mol_type = other DNA
gctccttctgcacgttgggt

SEQ ID NO: 256980 - DNA, 20 bp, synthetic construct
  source 1..20: mol_type = other DNA
tgctccttctgcacgttggg

SEQ ID NO: 256981 - DNA, 20 bp, synthetic construct
  source 1..20: mol_type = other DNA
ctgctccttctgcacgttgg

SEQ ID NO: 256982 - DNA, 20 bp, synthetic construct
  source 1..20: mol_type = other DNA
cctgctccttctgcacgttg

SEQ ID NO: 256983 - DNA, 20 bp, synthetic construct
  source 1..20: mol_type = other DNA
gcctgctccttctgcacgtt

SEQ ID NO: 256984 - DNA, 20 bp, synthetic construct
  source 1..20: mol_type = other DNA
cgcctgctccttctgcacgt

SEQ ID NO: 256985 - DNA, 20 bp, synthetic construct
  source 1..20: mol_type = other DNA
gcgcctgctccttctgcacg

SEQ ID NO: 256986 - DNA, 20 bp, synthetic construct
  source 1..20: mol_type = other DNA
tgcgcctgctccttctgcac

SEQ ID NO: 256987 - DNA, 20 bp, synthetic construct
  source 1..20: mol_type = other DNA
gtgcgcctgctccttctgca

SEQ ID NO: 256988 - DNA, 20 bp, synthetic construct
  source 1..20: mol_type = other DNA
agtgcgcctgctccttctgc

SEQ ID NO: 256989 - DNA, 20 bp, synthetic construct
  source 1..20: mol_type = other DNA
gagtgcgcctgctccttctg

SEQ ID NO: 256990 - DNA, 20 bp, synthetic construct
  source 1..20: mol_type = other DNA
cgagtgcgcctgctccttct

SEQ ID NO: 256991 - DNA, 20 bp, synthetic construct
  source 1..20: mol_type = other DNA
ccgagtgcgcctgctccttc

SEQ ID NO: 256992 - DNA, 20 bp, synthetic construct
  source 1..20: mol_type = other DNA
tccgagtgcgcctgctcctt

SEQ ID NO: 256993 - DNA, 20 bp, synthetic construct
  source 1..20: mol_type = other DNA
ctccgagtgcgcctgctcct

SEQ ID NO: 256994 - DNA, 20 bp, synthetic construct
  source 1..20: mol_type = other DNA
cctccgagtgcgcctgctcc

SEQ ID NO: 256995 - DNA, 20 bp, synthetic construct
  source 1..20: mol_type = other DNA
tcctccgagtgcgcctgctc

SEQ ID NO: 256996 - DNA, 20 bp, synthetic construct
  source 1..20: mol_type = other DNA
ctcctccgagtgcgcctgct

SEQ ID NO: 256997 - DNA, 20 bp, synthetic construct
  source 1..20: mol_type = other DNA
gctcctccgagtgcgcctgc

SEQ ID NO: 256998 - DNA, 20 bp, synthetic construct
  source 1..20: mol_type = other DNA
tgctcctccgagtgcgcctg

SEQ ID NO: 256999 - DNA, 20 bp, synthetic construct
  source 1..20: mol_type = other DNA
atgctcctccgagtgcgcct

SEQ ID NO: 257000 - DNA, 20 bp, synthetic construct
  source 1..20: mol_type = other DNA
aatgctcctccgagtgcgcc

SEQ ID NO: 257001 - DNA, 20 bp, synthetic construct
  source 1..20: mol_type = other DNA
aaatgctcctccgagtgcgc

SEQ ID NO: 257002 - DNA, 20 bp, synthetic construct
  source 1..20: mol_type = other DNA
caaatgctcctccgagtgcg

SEQ ID NO: 257003 - DNA, 20 bp, synthetic construct
  source 1..20: mol_type = other DNA
ccaaatgctcctccgagtgc

SEQ ID NO: 257004 - DNA, 20 bp, synthetic construct
  source 1..20: mol_type = other DNA
cccaaatgctcctccgagtg

SEQ ID NO: 257005 - DNA, 20 bp, synthetic construct
  source 1..20: mol_type = other DNA
tcccaaatgctcctccgagt

SEQ ID NO: 257006 - DNA, 20 bp, synthetic construct
  source 1..20: mol_type = other DNA
ttcccaaatgctcctccgag

SEQ ID NO: 257007 - DNA, 20 bp, synthetic construct
  source 1..20: mol_type = other DNA
cttcccaaatgctcctccga

SEQ ID NO: 257008 - DNA, 20 bp, synthetic construct
  source 1..20: mol_type = other DNA
ccttcccaaatgctcctccg

SEQ ID NO: 257009 - DNA, 20 bp, synthetic construct
  source 1..20: mol_type = other DNA
cccttcccaaatgctcctcc

SEQ ID NO: 257010 - DNA, 20 bp, synthetic construct
  source 1..20: mol_type = other DNA
gcccttcccaaatgctcctc

SEQ ID NO: 257011 - DNA, 20 bp, synthetic construct
  source 1..20: mol_type = other DNA
agcccttcccaaatgctcct

SEQ ID NO: 257012 - DNA, 20 bp, synthetic construct
  source 1..20: mol_type = other DNA
cagcccttcccaaatgctcc

SEQ ID NO: 257013 - DNA, 20 bp, synthetic construct
  source 1..20: mol_type = other DNA
gcagcccttcccaaatgctc

SEQ ID NO: 257014 - DNA, 20 bp, synthetic construct
  source 1..20: mol_type = other DNA
tgcagcccttcccaaatgct

SEQ ID NO: 257015 - DNA, 20 bp, synthetic construct
  source 1..20: mol_type = other DNA
atgcagcccttcccaaatgc

SEQ ID NO: 257016 - DNA, 20 bp, synthetic construct
  source 1..20: mol_type = other DNA
aatgcagcccttcccaaatg

SEQ ID NO: 257017 - DNA, 20 bp, synthetic construct
  source 1..20: mol_type = other DNA
aaatgcagcccttcccaaat

SEQ ID NO: 257018 - DNA, 20 bp, synthetic construct
  source 1..20: mol_type = other DNA
gaaatgcagcccttcccaaa

SEQ ID NO: 257019 - DNA, 20 bp, synthetic construct
  source 1..20: mol_type = other DNA
ggaaatgcagcccttcccaa

SEQ ID NO: 257020 - DNA, 20 bp, synthetic construct
  source 1..20: mol_type = other DNA
tggaaatgcagcccttccca

SEQ ID NO: 257021 - DNA, 20 bp, synthetic construct
  source 1..20: mol_type = other DNA
ctggaaatgcagcccttccc

SEQ ID NO: 257022 - DNA, 20 bp, synthetic construct
  source 1..20: mol_type = other DNA
cctggaaatgcagcccttcc

SEQ ID NO: 257023 - DNA, 20 bp, synthetic construct
  source 1..20: mol_type = other DNA
ccctggaaatgcagcccttc

SEQ ID NO: 257024 - DNA, 20 bp, synthetic construct
  source 1..20: mol_type = other DNA
cccctggaaatgcagccctt

SEQ ID NO: 257025 - DNA, 20 bp, synthetic construct
  source 1..20: mol_type = other DNA
gcccctggaaatgcagccct

SEQ ID NO: 257026 - DNA, 20 bp, synthetic construct
  source 1..20: mol_type = other DNA
ggcccctggaaatgcagccc

SEQ ID NO: 257027 - DNA, 20 bp, synthetic construct
  source 1..20: mol_type = other DNA
gggcccctggaaatgcagcc

SEQ ID NO: 257028 - DNA, 20 bp, synthetic construct
  source 1..20: mol_type = other DNA
ggggcccctggaaatgcagc

SEQ ID NO: 257029 - DNA, 20 bp, synthetic construct
  source 1..20: mol_type = other DNA
aggggcccctggaaatgcag

SEQ ID NO: 257030 - DNA, 20 bp, synthetic construct
  source 1..20: mol_type = other DNA
caggggcccctggaaatgca

SEQ ID NO: 257031 - DNA, 20 bp, synthetic construct
  source 1..20: mol_type = other DNA
ccaggggcccctggaaatgc

SEQ ID NO: 257032 - DNA, 20 bp, synthetic construct
  source 1..20: mol_type = other DNA
tccaggggcccctggaaatg

SEQ ID NO: 257033 - DNA, 20 bp, synthetic construct
  source 1..20: mol_type = other DNA
ctccaggggcccctggaaat

SEQ ID NO: 257034 - DNA, 20 bp, synthetic construct
  source 1..20: mol_type = other DNA
tctccaggggcccctggaaa

SEQ ID NO: 257035 - DNA, 20 bp, synthetic construct
  source 1..20: mol_type = other DNA
ctctccaggggcccctggaa

SEQ ID NO: 257036 - DNA, 20 bp, synthetic construct
  source 1..20: mol_type = other DNA
cctctccaggggcccctgga

SEQ ID NO: 257037 - DNA, 20 bp, synthetic construct
  source 1..20: mol_type = other DNA
ccctctccaggggcccctgg

SEQ ID NO: 257038 - DNA, 20 bp, synthetic construct
  source 1..20: mol_type = other DNA
cccctctccaggggcccctg

SEQ ID NO: 257039 - DNA, 20 bp, synthetic construct
  source 1..20: mol_type = other DNA
gcccctctccaggggcccct

SEQ ID NO: 257040 - DNA, 20 bp, synthetic construct
  source 1..20: mol_type = other DNA
ggcccctctccaggggcccc

SEQ ID NO: 257041 - DNA, 20 bp, synthetic construct
  source 1..20: mol_type = other DNA
tggcccctctccaggggccc

SEQ ID NO: 257042 - DNA, 20 bp, synthetic construct
  source 1..20: mol_type = other DNA
ctggcccctctccaggggcc

SEQ ID NO: 257043 - DNA, 20 bp, synthetic construct
  source 1..20: mol_type = other DNA
tctggcccctctccaggggc

SEQ ID NO: 257044 - DNA, 20 bp, synthetic construct
  source 1..20: mol_type = other DNA
ctctggcccctctccagggg

SEQ ID NO: 257045 - DNA, 20 bp, synthetic construct
  source 1..20: mol_type = other DNA
cctctggcccctctccaggg

SEQ ID NO: 257046 - DNA, 20 bp, synthetic construct
  source 1..20: mol_type = other DNA
gcctctggcccctctccagg

SEQ ID NO: 257047 - DNA, 20 bp, synthetic construct
  source 1..20: mol_type = other DNA
ggcctctggcccctctccag

SEQ ID NO: 257048 - DNA, 20 bp, synthetic construct
  source 1..20: mol_type = other DNA
gggcctctggcccctctcca

SEQ ID NO: 257049 - DNA, 20 bp, synthetic construct
  source 1..20: mol_type = other DNA
cgggcctctggcccctctcc

SEQ ID NO: 257050 - DNA, 20 bp, synthetic construct
  source 1..20: mol_type = other DNA
ccgggcctctggcccctctc

SEQ ID NO: 257051 - DNA, 20 bp, synthetic construct
  source 1..20: mol_type = other DNA
cccgggcctctggcccctct

SEQ ID NO: 257052 - DNA, 20 bp, synthetic construct
  source 1..20: mol_type = other DNA
ccccgggcctctggcccctc

SEQ ID NO: 257053 - DNA, 20 bp, synthetic construct
  source 1..20: mol_type = other DNA
gccccgggcctctggcccct

SEQ ID NO: 257054 - DNA, 20 bp, synthetic construct
  source 1..20: mol_type = other DNA
ggccccgggcctctggcccc

SEQ ID NO: 257055 - DNA, 20 bp, synthetic construct
  source 1..20: mol_type = other DNA
gggccccgggcctctggccc

SEQ ID NO: 257056 - DNA, 20 bp, synthetic construct
  source 1..20: mol_type = other DNA
ggggccccgggcctctggcc

SEQ ID NO: 257057 - DNA, 20 bp, synthetic construct
  source 1..20: mol_type = other DNA
aggggccccgggcctctggc

SEQ ID NO: 257058 - DNA, 20 bp, synthetic construct
  source 1..20: mol_type = other DNA
gaggggccccgggcctctgg

SEQ ID NO: 257059 - DNA, 20 bp, synthetic construct
  source 1..20: mol_type = other DNA
agaggggccccgggcctctg

SEQ ID NO: 257060 - DNA, 20 bp, synthetic construct
  source 1..20: mol_type = other DNA
aagaggggccccgggcctct

SEQ ID NO: 257061 - DNA, 20 bp, synthetic construct
  source 1..20: mol_type = other DNA
aaagaggggccccgggcctc

SEQ ID NO: 257062 - DNA, 20 bp, synthetic construct
  source 1..20: mol_type = other DNA
caaagaggggccccgggcct

SEQ ID NO: 257063 - DNA, 20 bp, synthetic construct
  source 1..20: mol_type = other DNA
ccaaagaggggccccgggcc

SEQ ID NO: 257064 - DNA, 20 bp, synthetic construct
  source 1..20: mol_type = other DNA
cccaaagaggggccccgggc

SEQ ID NO: 257065 - DNA, 20 bp, synthetic construct
  source 1..20: mol_type = other DNA
tcccaaagaggggccccggg

SEQ ID NO: 257066 - DNA, 20 bp, synthetic construct
  source 1..20: mol_type = other DNA
ctcccaaagaggggccccgg

SEQ ID NO: 257067 - DNA, 20 bp, synthetic construct
  source 1..20: mol_type = other DNA
tctcccaaagaggggccccg

SEQ ID NO: 257068 - DNA, 20 bp, synthetic construct
  source 1..20: mol_type = other DNA
ctctcccaaagaggggcccc

SEQ ID NO: 257069 - DNA, 20 bp, synthetic construct
  source 1..20: mol_type = other DNA
cctctcccaaagaggggccc

SEQ ID NO: 257070 - DNA, 20 bp, synthetic construct
  source 1..20: mol_type = other DNA
tcctctcccaaagaggggcc

SEQ ID NO: 257071 - DNA, 20 bp, synthetic construct
  source 1..20: mol_type = other DNA
gtcctctcccaaagaggggc

SEQ ID NO: 257072 - DNA, 20 bp, synthetic construct
  source 1..20: mol_type = other DNA
tgtcctctcccaaagagggg

SEQ ID NO: 257073 - DNA, 20 bp, synthetic construct
  source 1..20: mol_type = other DNA
gtgtcctctcccaaagaggg

SEQ ID NO: 257074 - DNA, 20 bp, synthetic construct
  source 1..20: mol_type = other DNA
tgtgtcctctcccaaagagg

SEQ ID NO: 257075 - DNA, 20 bp, synthetic construct
  source 1..20: mol_type = other DNA
ttgtgtcctctcccaaagag

SEQ ID NO: 257076 - DNA, 20 bp, synthetic construct
  source 1..20: mol_type = other DNA
tttgtgtcctctcccaaaga

SEQ ID NO: 257077 - DNA, 20 bp, synthetic construct
  source 1..20: mol_type = other DNA
ttttgtgtcctctcccaaag

SEQ ID NO: 257078 - DNA, 20 bp, synthetic construct
  source 1..20: mol_type = other DNA
cttttgtgtcctctcccaaa

SEQ ID NO: 257079 - DNA, 20 bp, synthetic construct
  source 1..20: mol_type = other DNA
tcttttgtgtcctctcccaa

SEQ ID NO: 257080 - DNA, 20 bp, synthetic construct
  source 1..20: mol_type = other DNA
ctcttttgtgtcctctccca

SEQ ID NO: 257081 - DNA, 20 bp, synthetic construct
  source 1..20: mol_type = other DNA
cctcttttgtgtcctctccc

SEQ ID NO: 257082 - DNA, 20 bp, synthetic construct
  source 1..20: mol_type = other DNA
gcctcttttgtgtcctctcc

SEQ ID NO: 257083 - DNA, 20 bp, synthetic construct
  source 1..20: mol_type = other DNA
agcctcttttgtgtcctctc

SEQ ID NO: 257084 - DNA, 20 bp, synthetic construct
  source 1..20: mol_type = other DNA
cagcctcttttgtgtcctct

SEQ ID NO: 257085 - DNA, 20 bp, synthetic construct
  source 1..20: mol_type = other DNA
tcagcctcttttgtgtcctc

SEQ ID NO: 257086 - DNA, 20 bp, synthetic construct
  source 1..20: mol_type = other DNA
gtcagcctcttttgtgtcct

SEQ ID NO: 257087 - DNA, 20 bp, synthetic construct
  source 1..20: mol_type = other DNA
ggtcagcctcttttgtgtcc

SEQ ID NO: 257088 - DNA, 20 bp, synthetic construct
  source 1..20: mol_type = other DNA
aggtcagcctcttttgtgtc

SEQ ID NO: 257089 - DNA, 20 bp, synthetic construct
  source 1..20: mol_type = other DNA
aaggtcagcctcttttgtgt

SEQ ID NO: 257090 - DNA, 20 bp, synthetic construct
  source 1..20: mol_type = other DNA
gaaggtcagcctcttttgtg

SEQ ID NO: 257091 - DNA, 20 bp, synthetic construct
  source 1..20: mol_type = other DNA
ggaaggtcagcctcttttgt

SEQ ID NO: 257092 - DNA, 20 bp, synthetic construct
  source 1..20: mol_type = other DNA
tggaaggtcagcctcttttg

SEQ ID NO: 257093 - DNA, 20 bp, synthetic construct
  source 1..20: mol_type = other DNA
ctggaaggtcagcctctttt

SEQ ID NO: 257094 - DNA, 20 bp, synthetic construct
  source 1..20: mol_type = other DNA
tctggaaggtcagcctcttt

SEQ ID NO: 257095 - DNA, 20 bp, synthetic construct
  source 1..20: mol_type = other DNA
ctctggaaggtcagcctctt

SEQ ID NO: 257096 - DNA, 20 bp, synthetic construct
  source 1..20: mol_type = other DNA
gctctggaaggtcagcctct

SEQ ID NO: 257097 - DNA, 20 bp, synthetic construct
  source 1..20: mol_type = other DNA
ggctctggaaggtcagcctc

SEQ ID NO: 257098 - DNA, 20 bp, synthetic construct
  source 1..20: mol_type = other DNA
gggctctggaaggtcagcct

SEQ ID NO: 257099 - DNA, 20 bp, synthetic construct
  source 1..20: mol_type = other DNA
agggctctggaaggtcagcc

SEQ ID NO: 257100 - DNA, 20 bp, synthetic construct
  source 1..20: mol_type = other DNA
gagggctctggaaggtcagc

SEQ ID NO: 257101 - DNA, 20 bp, synthetic construct
  source 1..20: mol_type = other DNA
agagggctctggaaggtcag

SEQ ID NO: 257102 - DNA, 20 bp, synthetic construct
  source 1..20: mol_type = other DNA
cagagggctctggaaggtca

SEQ ID NO: 257103 - DNA, 20 bp, synthetic construct
  source 1..20: mol_type = other DNA
tcagagggctctggaaggtc

SEQ ID NO: 257104 - DNA, 20 bp, synthetic construct
  source 1..20: mol_type = other DNA
ttcagagggctctggaaggt

SEQ ID NO: 257105 - DNA, 20 bp, synthetic construct
  source 1..20: mol_type = other DNA
tttcagagggctctggaagg

SEQ ID NO: 257106 - DNA, 20 bp, synthetic construct
  source 1..20: mol_type = other DNA
ttttcagagggctctggaag

SEQ ID NO: 257107 - DNA, 20 bp, synthetic construct
  source 1..20: mol_type = other DNA
cttttcagagggctctggaa

SEQ ID NO: 257108 - DNA, 20 bp, synthetic construct
  source 1..20: mol_type = other DNA
gcttttcagagggctctgga

SEQ ID NO: 257109 - DNA, 20 bp, synthetic construct
  source 1..20: mol_type = other DNA
tgcttttcagagggctctgg

SEQ ID NO: 257110 - DNA, 20 bp, synthetic construct
  source 1..20: mol_type = other DNA
ctgcttttcagagggctctg

SEQ ID NO: 257111 - DNA, 20 bp, synthetic construct
  source 1..20: mol_type = other DNA
gctgcttttcagagggctct

SEQ ID NO: 257112 - DNA, 20 bp, synthetic construct
  source 1..20: mol_type = other DNA
ggctgcttttcagagggctc

SEQ ID NO: 257113 - DNA, 20 bp, synthetic construct
  source 1..20: mol_type = other DNA
aggctgcttttcagagggct

SEQ ID NO: 257114 - DNA, 20 bp, synthetic construct
  source 1..20: mol_type = other DNA
caggctgcttttcagagggc

SEQ ID NO: 257115 - DNA, 20 bp, synthetic construct
  source 1..20: mol_type = other DNA
gcaggctgcttttcagaggg

SEQ ID NO: 257116 - DNA, 20 bp, synthetic construct
  source 1..20: mol_type = other DNA
agcaggctgcttttcagagg

SEQ ID NO: 257117 - DNA, 20 bp, synthetic construct
  source 1..20: mol_type = other DNA
cagcaggctgcttttcagag

SEQ ID NO: 257118 - DNA, 20 bp, synthetic construct
  source 1..20: mol_type = other DNA
gcagcaggctgcttttcaga

SEQ ID NO: 257119 - DNA, 20 bp, synthetic construct
  source 1..20: mol_type = other DNA
agcagcaggctgcttttcag

SEQ ID NO: 257120 - DNA, 20 bp, synthetic construct
  source 1..20: mol_type = other DNA
cagcagcaggctgcttttca

SEQ ID NO: 257121 - DNA, 20 bp, synthetic construct
  source 1..20: mol_type = other DNA
gcagcagcaggctgcttttc

SEQ ID NO: 257122 - DNA, 20 bp, synthetic construct
  source 1..20: mol_type = other DNA
agcagcagcaggctgctttt

SEQ ID NO: 257123 - DNA, 20 bp, synthetic construct
  source 1..20: mol_type = other DNA
gagcagcagcaggctgcttt

SEQ ID NO: 257124 - DNA, 20 bp, synthetic construct
  source 1..20: mol_type = other DNA
ggagcagcagcaggctgctt

SEQ ID NO: 257125 - DNA, 20 bp, synthetic construct
  source 1..20: mol_type = other DNA
cggagcagcagcaggctgct

SEQ ID NO: 257126 - DNA, 20 bp, synthetic construct
  source 1..20: mol_type = other DNA
gcggagcagcagcaggctgc

SEQ ID NO: 257127 - DNA, 20 bp, synthetic construct
  source 1..20: mol_type = other DNA
cgcggagcagcagcaggctg

SEQ ID NO: 257128 - DNA, 20 bp, synthetic construct
  source 1..20: mol_type = other DNA
ccgcggagcagcagcaggct

SEQ ID NO: 257129 - DNA, 20 bp, synthetic construct
  source 1..20: mol_type = other DNA
cccgcggagcagcagcaggc

SEQ ID NO: 257130 - DNA, 20 bp, synthetic construct
  source 1..20: mol_type = other DNA
ccccgcggagcagcagcagg

SEQ ID NO: 257131 - DNA, 20 bp, synthetic construct
  source 1..20: mol_type = other DNA
cccccgcggagcagcagcag

SEQ ID NO: 257132 - DNA, 20 bp, synthetic construct
  source 1..20: mol_type = other DNA
tcccccgcggagcagcagca

SEQ ID NO: 257133 - DNA, 20 bp, synthetic construct
  source 1..20: mol_type = other DNA
ttcccccgcggagcagcagc

SEQ ID NO: 257134 - DNA, 20 bp, synthetic construct
  source 1..20: mol_type = other DNA
cttcccccgcggagcagcag

SEQ ID NO: 257135 - DNA, 20 bp, synthetic construct
  source 1..20: mol_type = other DNA
gcttcccccgcggagcagca

SEQ ID NO: 257136 - DNA, 20 bp, synthetic construct
  source 1..20: mol_type = other DNA
ggcttcccccgcggagcagc

SEQ ID NO: 257137 - DNA, 20 bp, synthetic construct
  source 1..20: mol_type = other DNA
gggcttcccccgcggagcag

SEQ ID NO: 257138 - DNA, 20 bp, synthetic construct
  source 1..20: mol_type = other DNA
cgggcttcccccgcggagca

SEQ ID NO: 257139 - DNA, 20 bp, synthetic construct
  source 1..20: mol_type = other DNA
acgggcttcccccgcggagc

SEQ ID NO: 257140 - DNA, 20 bp, synthetic construct
  source 1..20: mol_type = other DNA
gacgggcttcccccgcggag

SEQ ID NO: 257141 - DNA, 20 bp, synthetic construct
  source 1..20: mol_type = other DNA
tgacgggcttcccccgcgga

SEQ ID NO: 257142 - DNA, 20 bp, synthetic construct
  source 1..20: mol_type = other DNA
ctgacgggcttcccccgcgg

SEQ ID NO: 257143 - DNA, 20 bp, synthetic construct
  source 1..20: mol_type = other DNA
gctgacgggcttcccccgcg

SEQ ID NO: 257144 - DNA, 20 bp, synthetic construct
  source 1..20: mol_type = other DNA
ggctgacgggcttcccccgc

SEQ ID NO: 257145 - DNA, 20 bp, synthetic construct
  source 1..20: mol_type = other DNA
cggctgacgggcttcccccg

SEQ ID NO: 257146 - DNA, 20 bp, synthetic construct
  source 1..20: mol_type = other DNA
ccggctgacgggcttccccc

SEQ ID NO: 257147 - DNA, 20 bp, synthetic construct
  source 1..20: mol_type = other DNA
cccggctgacgggcttcccc

SEQ ID NO: 257148 - DNA, 20 bp, synthetic construct
  source 1..20: mol_type = other DNA
acccggctgacgggcttccc

SEQ ID NO: 257149 - DNA, 20 bp, synthetic construct
  source 1..20: mol_type = other DNA
gacccggctgacgggcttcc

SEQ ID NO: 257150 - DNA, 20 bp, synthetic construct
  source 1..20: mol_type = other DNA
ggacccggctgacgggcttc

SEQ ID NO: 257151 - DNA, 20 bp, synthetic construct
  source 1..20: mol_type = other DNA
gggacccggctgacgggctt

SEQ ID NO: 257152 - DNA, 20 bp, synthetic construct
  source 1..20: mol_type = other DNA
agggacccggctgacgggct

SEQ ID NO: 257153 - DNA, 20 bp, synthetic construct
  source 1..20: mol_type = other DNA
gagggacccggctgacgggc

SEQ ID NO: 257154 - DNA, 20 bp, synthetic construct
  source 1..20: mol_type = other DNA
tgagggacccggctgacggg

SEQ ID NO: 257155 - DNA, 20 bp, synthetic construct
  source 1..20: mol_type = other DNA
ttgagggacccggctgacgg

SEQ ID NO: 257156 - DNA, 20 bp, synthetic construct
  source 1..20: mol_type = other DNA
gttgagggacccggctgacg

SEQ ID NO: 257157 - DNA, 20 bp, synthetic construct
  source 1..20: mol_type = other DNA
agttgagggacccggctgac

SEQ ID NO: 257158 - DNA, 20 bp, synthetic construct
  source 1..20: mol_type = other DNA
gagttgagggacccggctga

SEQ ID NO: 257159 - DNA, 20 bp, synthetic construct
  source 1..20: mol_type = other DNA
tgagttgagggacccggctg

SEQ ID NO: 257160 - DNA, 20 bp, synthetic construct
  source 1..20: mol_type = other DNA
ttgagttgagggacccggct

SEQ ID NO: 257161 - DNA, 20 bp, synthetic construct
  source 1..20: mol_type = other DNA
tttgagttgagggacccggc

SEQ ID NO: 257162 - DNA, 20 bp, synthetic construct
  source 1..20: mol_type = other DNA
ctttgagttgagggacccgg

SEQ ID NO: 257163 - DNA, 20 bp, synthetic construct
  source 1..20: mol_type = other DNA
cctttgagttgagggacccg

SEQ ID NO: 257164 - DNA, 20 bp, synthetic construct
  source 1..20: mol_type = other DNA
acctttgagttgagggaccc

SEQ ID NO: 257165 - DNA, 20 bp, synthetic construct
  source 1..20: mol_type = other DNA
gacctttgagttgagggacc

SEQ ID NO: 257166 - DNA, 20 bp, synthetic construct
  source 1..20: mol_type = other DNA
agacctttgagttgagggac

SEQ ID NO: 257167 - DNA, 20 bp, synthetic construct
  source 1..20: mol_type = other DNA
cagacctttgagttgaggga

SEQ ID NO: 257168 - DNA, 20 bp, synthetic construct
  source 1..20: mol_type = other DNA
acagacctttgagttgaggg

SEQ ID NO: 257169 - DNA, 20 bp, synthetic construct
  source 1..20: mol_type = other DNA
cacagacctttgagttgagg

SEQ ID NO: 257170 - DNA, 20 bp, synthetic construct
  source 1..20: mol_type = other DNA
acacagacctttgagttgag

SEQ ID NO: 257171 - DNA, 20 bp, synthetic construct
  source 1..20: mol_type = other DNA
gacacagacctttgagttga

SEQ ID NO: 257172 - DNA, 20 bp, synthetic construct
  source 1..20: mol_type = other DNA
agacacagacctttgagttg

SEQ ID NO: 257173 - DNA, 20 bp, synthetic construct
  source 1..20: mol_type = other DNA
aagacacagacctttgagtt

SEQ ID NO: 257174 - DNA, 20 bp, synthetic construct
  source 1..20: mol_type = other DNA
caagacacagacctttgagt

SEQ ID NO: 257175 - DNA, 20 bp, synthetic construct
  source 1..20: mol_type = other DNA
tcaagacacagacctttgag

SEQ ID NO: 257176 - DNA, 20 bp, synthetic construct
  source 1..20: mol_type = other DNA
ctcaagacacagacctttga

SEQ ID NO: 257177 - DNA, 20 bp, synthetic construct
  source 1..20: mol_type = other DNA
gctcaagacacagacctttg

SEQ ID NO: 257178 - DNA, 20 bp, synthetic construct
  source 1..20: mol_type = other DNA
agctcaagacacagaccttt

SEQ ID NO: 257179 - DNA, 20 bp, synthetic construct
  source 1..20: mol_type = other DNA
aagctcaagacacagacctt

SEQ ID NO: 257180 - DNA, 20 bp, synthetic construct
  source 1..20: mol_type = other DNA
gaagctcaagacacagacct

SEQ ID NO: 257181 - DNA, 20 bp, synthetic construct
  source 1..20: mol_type = other DNA
agaagctcaagacacagacc

SEQ ID NO: 257182 - DNA, 20 bp, synthetic construct
  source 1..20: mol_type = other DNA
aagaagctcaagacacagac

SEQ ID NO: 257183 - DNA, 20 bp, synthetic construct
  source 1..20: mol_type = other DNA
gaagaagctcaagacacaga

SEQ ID NO: 257184 - DNA, 20 bp, synthetic construct
  source 1..20: mol_type = other DNA
cgaagaagctcaagacacag

SEQ ID NO: 257185 - DNA, 20 bp, synthetic construct
  source 1..20: mol_type = other DNA
gcgaagaagctcaagacaca

SEQ ID NO: 257186 - DNA, 20 bp, synthetic construct
  source 1..20: mol_type = other DNA
agcgaagaagctcaagacac

SEQ ID NO: 257187 - DNA, 20 bp, synthetic construct
  source 1..20: mol_type = other DNA
gagcgaagaagctcaagaca

SEQ ID NO: 257188 - DNA, 20 bp, synthetic construct
  source 1..20: mol_type = other DNA
ggagcgaagaagctcaagac

SEQ ID NO: 257189 - DNA, 20 bp, synthetic construct
  source 1..20: mol_type = other DNA
aggagcgaagaagctcaaga

SEQ ID NO: 257190 - DNA, 20 bp, synthetic construct
  source 1..20: mol_type = other DNA
aaggagcgaagaagctcaag

SEQ ID NO: 257191 - DNA, 20 bp, synthetic construct
  source 1..20: mol_type = other DNA
gaaggagcgaagaagctcaa

SEQ ID NO: 257192 - DNA, 20 bp, synthetic construct
  source 1..20: mol_type = other DNA
ggaaggagcgaagaagctca

SEQ ID NO: 257193 - DNA, 20 bp, synthetic construct
  source 1..20: mol_type = other DNA
gggaaggagcgaagaagctc

SEQ ID NO: 257194 - DNA, 20 bp, synthetic construct
  source 1..20: mol_type = other DNA
agggaaggagcgaagaagct

SEQ ID NO: 257195 - DNA, 20 bp, synthetic construct
  source 1..20: mol_type = other DNA
cagggaaggagcgaagaagc

SEQ ID NO: 257196 - DNA, 20 bp, synthetic construct
  source 1..20: mol_type = other DNA
ccagggaaggagcgaagaag

SEQ ID NO: 257197 - DNA, 20 bp, synthetic construct
  source 1..20: mol_type = other DNA
cccagggaaggagcgaagaa

SEQ ID NO: 257198 - DNA, 20 bp, synthetic construct
  source 1..20: mol_type = other DNA
ccccagggaaggagcgaaga

SEQ ID NO: 257199 - DNA, 20 bp, synthetic construct
  source 1..20: mol_type = other DNA
tccccagggaaggagcgaag

SEQ ID NO: 257200 - DNA, 20 bp, synthetic construct
  source 1..20: mol_type = other DNA
gtccccagggaaggagcgaa

SEQ ID NO: 257201 - DNA, 20 bp, synthetic construct
  source 1..20: mol_type = other DNA
ggtccccagggaaggagcga

SEQ ID NO: 257202 - DNA, 20 bp, synthetic construct
  source 1..20: mol_type = other DNA
aggtccccagggaaggagcg

SEQ ID NO: 257203 - DNA, 20 bp, synthetic construct
  source 1..20: mol_type = other DNA
gaggtccccagggaaggagc

SEQ ID NO: 257204 - DNA, 20 bp, synthetic construct
  source 1..20: mol_type = other DNA
ggaggtccccagggaaggag

SEQ ID NO: 257205 - DNA, 20 bp, synthetic construct
  source 1..20: mol_type = other DNA
gggaggtccccagggaagga

SEQ ID NO: 257206 - DNA, 20 bp, synthetic construct
  source 1..20: mol_type = other DNA
tgggaggtccccagggaagg

SEQ ID NO: 257207 - DNA, 20 bp, synthetic construct
  source 1..20: mol_type = other DNA
ctgggaggtccccagggaag

SEQ ID NO: 257208 - DNA, 20 bp, synthetic construct
  source 1..20: mol_type = other DNA
cctgggaggtccccagggaa

SEQ ID NO: 257209 - DNA, 20 bp, synthetic construct
  source 1..20: mol_type = other DNA
gcctgggaggtccccaggga

SEQ ID NO: 257210 - DNA, 20 bp, synthetic construct
  source 1..20: mol_type = other DNA
ggcctgggaggtccccaggg

SEQ ID NO: 257211 - DNA, 20 bp, synthetic construct
  source 1..20: mol_type = other DNA
aggcctgggaggtccccagg

SEQ ID NO: 257212 - DNA, 20 bp, synthetic construct
  source 1..20: mol_type = other DNA
gaggcctgggaggtccccag

SEQ ID NO: 257213 - DNA, 20 bp, synthetic construct
  source 1..20: mol_type = other DNA
ggaggcctgggaggtcccca

SEQ ID NO: 257214 - DNA, 20 bp, synthetic construct
  source 1..20: mol_type = other DNA
gggaggcctgggaggtcccc

SEQ ID NO: 257215 - DNA, 20 bp, synthetic construct
  source 1..20: mol_type = other DNA
tgggaggcctgggaggtccc

SEQ ID NO: 257216 - DNA, 20 bp, synthetic construct
  source 1..20: mol_type = other DNA
ctgggaggcctgggaggtcc

SEQ ID NO: 257217 - DNA, 20 bp, synthetic construct
  source 1..20: mol_type = other DNA
cctgggaggcctgggaggtc

SEQ ID NO: 257218 - DNA, 20 bp, synthetic construct
  source 1..20: mol_type = other DNA
gcctgggaggcctgggaggt

SEQ ID NO: 257219 - DNA, 20 bp, synthetic construct
  source 1..20: mol_type = other DNA
agcctgggaggcctgggagg

SEQ ID NO: 257220 - DNA, 20 bp, synthetic construct
  source 1..20: mol_type = other DNA
cagcctgggaggcctgggag

SEQ ID NO: 257221 - DNA, 20 bp, synthetic construct
  source 1..20: mol_type = other DNA
gcagcctgggaggcctggga

SEQ ID NO: 257222 - DNA, 20 bp, synthetic construct
  source 1..20: mol_type = other DNA
cgcagcctgggaggcctggg

SEQ ID NO: 257223 - DNA, 20 bp, synthetic construct
  source 1..20: mol_type = other DNA
ccgcagcctgggaggcctgg

SEQ ID NO: 257224 - DNA, 20 bp, synthetic construct
  source 1..20: mol_type = other DNA
cccgcagcctgggaggcctg

SEQ ID NO: 257225 - DNA, 20 bp, synthetic construct
  source 1..20: mol_type = other DNA
gcccgcagcctgggaggcct

SEQ ID NO: 257226 - DNA, 20 bp, synthetic construct
  source 1..20: mol_type = other DNA
tgcccgcagcctgggaggcc

SEQ ID NO: 257227 - DNA, 20 bp, synthetic construct
  source 1..20: mol_type = other DNA
gtgcccgcagcctgggaggc

SEQ ID NO: 257228 - DNA, 20 bp, synthetic construct
  source 1..20: mol_type = other DNA
agtgcccgcagcctgggagg

SEQ ID NO: 257229 - DNA, 20 bp, synthetic construct
  source 1..20: mol_type = other DNA
cagtgcccgcagcctgggag

SEQ ID NO: 257230 - DNA, 20 bp, synthetic construct
  source 1..20: mol_type = other DNA
gcagtgcccgcagcctggga

SEQ ID NO: 257231 - DNA, 20 bp, synthetic construct
  source 1..20: mol_type = other DNA
ggcagtgcccgcagcctggg

SEQ ID NO: 257232 - DNA, 20 bp, synthetic construct
  source 1..20: mol_type = other DNA
tggcagtgcccgcagcctgg

SEQ ID NO: 257233 - DNA, 20 bp, synthetic construct
  source 1..20: mol_type = other DNA
gtggcagtgcccgcagcctg

SEQ ID NO: 257234 - DNA, 20 bp, synthetic construct
  source 1..20: mol_type = other DNA
agtggcagtgcccgcagcct

SEQ ID NO: 257235 - DNA, 20 bp, synthetic construct
  source 1..20: mol_type = other DNA
cagtggcagtgcccgcagcc

SEQ ID NO: 257236 - DNA, 20 bp, synthetic construct
  source 1..20: mol_type = other DNA
tcagtggcagtgcccgcagc

SEQ ID NO: 257237 - DNA, 20 bp, synthetic construct
  source 1..20: mol_type = other DNA
ctcagtggcagtgcccgcag

SEQ ID NO: 257238 - DNA, 20 bp, synthetic construct
  source 1..20: mol_type = other DNA
gctcagtggcagtgcccgca

SEQ ID NO: 257239 - DNA, 20 bp, synthetic construct
  source 1..20: mol_type = other DNA
agctcagtggcagtgcccgc

SEQ ID NO: 257240 - DNA, 20 bp, synthetic construct
  source 1..20: mol_type = other DNA
aagctcagtggcagtgcccg

SEQ ID NO: 257241 - DNA, 20 bp, synthetic construct
  source 1..20: mol_type = other DNA
gaagctcagtggcagtgccc

SEQ ID NO: 257242 - DNA, 20 bp, synthetic construct
  source 1..20: mol_type = other DNA
ggaagctcagtggcagtgcc

SEQ ID NO: 257243 - DNA, 20 bp, synthetic construct
  source 1..20: mol_type = other DNA
tggaagctcagtggcagtgc

SEQ ID NO: 257244 - DNA, 20 bp, synthetic construct
  source 1..20: mol_type = other DNA
ctggaagctcagtggcagtg

SEQ ID NO: 257245 - DNA, 20 bp, synthetic construct
  source 1..20: mol_type = other DNA
cctggaagctcagtggcagt

SEQ ID NO: 257246 - DNA, 20 bp, synthetic construct
  source 1..20: mol_type = other DNA
gcctggaagctcagtggcag

SEQ ID NO: 257247 - DNA, 20 bp, synthetic construct
  source 1..20: mol_type = other DNA
ggcctggaagctcagtggca

SEQ ID NO: 257248 - DNA, 20 bp, synthetic construct
  source 1..20: mol_type = other DNA
aggcctggaagctcagtggc

SEQ ID NO: 257249 - DNA, 20 bp, synthetic construct
  source 1..20: mol_type = other DNA
gaggcctggaagctcagtgg

SEQ ID NO: 257250 - DNA, 20 bp, synthetic construct
  source 1..20: mol_type = other DNA
ggaggcctggaagctcagtg

SEQ ID NO: 257251 - DNA, 20 bp, synthetic construct
  source 1..20: mol_type = other DNA
gggaggcctggaagctcagt

SEQ ID NO: 257252 - DNA, 20 bp, synthetic construct
  source 1..20: mol_type = other DNA
cgggaggcctggaagctcag

SEQ ID NO: 257253 - DNA, 20 bp, synthetic construct
  source 1..20: mol_type = other DNA
tcgggaggcctggaagctca

SEQ ID NO: 257254 - DNA, 20 bp, synthetic construct
  source 1..20: mol_type = other DNA
gtcgggaggcctggaagctc

SEQ ID NO: 257255 - DNA, 20 bp, synthetic construct
  source 1..20: mol_type = other DNA
agtcgggaggcctggaagct

SEQ ID NO: 257256 - DNA, 20 bp, synthetic construct
  source 1..20: mol_type = other DNA
gagtcgggaggcctggaagc

SEQ ID NO: 257257 - DNA, 20 bp, synthetic construct
  source 1..20: mol_type = other DNA
ggagtcgggaggcctggaag

SEQ ID NO: 257258 - DNA, 20 bp, synthetic construct
  source 1..20: mol_type = other DNA
aggagtcgggaggcctggaa

SEQ ID NO: 257259 - DNA, 20 bp, synthetic construct
  source 1..20: mol_type = other DNA
caggagtcgggaggcctgga

SEQ ID NO: 257260 - DNA, 20 bp, synthetic construct
  source 1..20: mol_type = other DNA
gcaggagtcgggaggcctgg

SEQ ID NO: 257261 - DNA, 20 bp, synthetic construct
  source 1..20: mol_type = other DNA
agcaggagtcgggaggcctg

SEQ ID NO: 257262 - DNA, 20 bp, synthetic construct
  source 1..20: mol_type = other DNA
cagcaggagtcgggaggcct

SEQ ID NO: 257263 - DNA, 20 bp, synthetic construct
  source 1..20: mol_type = other DNA
gcagcaggagtcgggaggcc

SEQ ID NO: 257264 - DNA, 20 bp, synthetic construct
  source 1..20: mol_type = other DNA
agcagcaggagtcgggaggc

SEQ ID NO: 257265 - DNA, 20 bp, synthetic construct
  source 1..20: mol_type = other DNA
aagcagcaggagtcgggagg

SEQ ID NO: 257266 - DNA, 20 bp, synthetic construct
  source 1..20: mol_type = other DNA
gaagcagcaggagtcgggag

SEQ ID NO: 257267 - DNA, 20 bp, synthetic construct
  source 1..20: mol_type = other DNA
agaagcagcaggagtcggga

SEQ ID NO: 257268 - DNA, 20 bp, synthetic construct
  source 1..20: mol_type = other DNA
cagaagcagcaggagtcggg

SEQ ID NO: 257269 - DNA, 20 bp, synthetic construct
  source 1..20: mol_type = other DNA
tcagaagcagcaggagtcgg

SEQ ID NO: 257270 - DNA, 20 bp, synthetic construct
  source 1..20: mol_type = other DNA
gtcagaagcagcaggagtcg

SEQ ID NO: 257271 - DNA, 20 bp, synthetic construct
  source 1..20: mol_type = other DNA
cgtcagaagcagcaggagtc

SEQ ID NO: 257272 - DNA, 20 bp, synthetic construct
  source 1..20: mol_type = other DNA
acgtcagaagcagcaggagt

SEQ ID NO: 257273 - DNA, 20 bp, synthetic construct
  source 1..20: mol_type = other DNA
aacgtcagaagcagcaggag

SEQ ID NO: 257274 - DNA, 20 bp, synthetic construct
  source 1..20: mol_type = other DNA
gaacgtcagaagcagcagga

SEQ ID NO: 257275 - DNA, 20 bp, synthetic construct
  source 1..20: mol_type = other DNA
ggaacgtcagaagcagcagg

SEQ ID NO: 257276 - DNA, 20 bp, synthetic construct
  source 1..20: mol_type = other DNA
aggaacgtcagaagcagcag

SEQ ID NO: 257277 - DNA, 20 bp, synthetic construct
  source 1..20: mol_type = other DNA
taggaacgtcagaagcagca

SEQ ID NO: 257278 - DNA, 20 bp, synthetic construct
  source 1..20: mol_type = other DNA
ctaggaacgtcagaagcagc

SEQ ID NO: 257279 - DNA, 20 bp, synthetic construct
  source 1..20: mol_type = other DNA
cctaggaacgtcagaagcag

SEQ ID NO: 257280 - DNA, 20 bp, synthetic construct
  source 1..20: mol_type = other DNA
tcctaggaacgtcagaagca

SEQ ID NO: 257281 - DNA, 20 bp, synthetic construct
  source 1..20: mol_type = other DNA
gtcctaggaacgtcagaagc

SEQ ID NO: 257282 - DNA, 20 bp, synthetic construct
  source 1..20: mol_type = other DNA
cgtcctaggaacgtcagaag

SEQ ID NO: 257283 - DNA, 20 bp, synthetic construct
  source 1..20: mol_type = other DNA
gcgtcctaggaacgtcagaa

SEQ ID NO: 257284 - DNA, 20 bp, synthetic construct
  source 1..20: mol_type = other DNA
ggcgtcctaggaacgtcaga

SEQ ID NO: 257285 - DNA, 20 bp, synthetic construct
  source 1..20: mol_type = other DNA
tggcgtcctaggaacgtcag

SEQ ID NO: 257286 - DNA, 20 bp, synthetic construct
  source 1..20: mol_type = other DNA
gtggcgtcctaggaacgtca

SEQ ID NO: 257287 - DNA, 20 bp, synthetic construct
  source 1..20: mol_type = other DNA
agtggcgtcctaggaacgtc

SEQ ID NO: 257288 - DNA, 20 bp, synthetic construct
  source 1..20: mol_type = other DNA
tagtggcgtcctaggaacgt

SEQ ID NO: 257289 - DNA, 20 bp, synthetic construct
  source 1..20: mol_type = other DNA
ttagtggcgtcctaggaacg

SEQ ID NO: 257290 - DNA, 20 bp, synthetic construct
  source 1..20: mol_type = other DNA
tttagtggcgtcctaggaac

SEQ ID NO: 257291 - DNA, 20 bp, synthetic construct
  source 1..20: mol_type = other DNA
atttagtggcgtcctaggaa

SEQ ID NO: 257292 - DNA, 20 bp, synthetic construct
  source 1..20: mol_type = other DNA
gatttagtggcgtcctagga

SEQ ID NO: 257293 - DNA, 20 bp, synthetic construct
  source 1..20: mol_type = other DNA
cgatttagtggcgtcctagg

SEQ ID NO: 257294 - DNA, 20 bp, synthetic construct
  source 1..20: mol_type = other DNA
tcgatttagtggcgtcctag

SEQ ID NO: 257295 - DNA, 20 bp, synthetic construct
  source 1..20: mol_type = other DNA
gtcgatttagtggcgtccta

SEQ ID NO: 257296 - DNA, 20 bp, synthetic construct
  source 1..20: mol_type = other DNA
tgtcgatttagtggcgtcct

SEQ ID NO: 257297 - DNA, 20 bp, synthetic construct
  source 1..20: mol_type = other DNA
gtgtcgatttagtggcgtcc

SEQ ID NO: 257298 - DNA, 20 bp, synthetic construct
  source 1..20: mol_type = other DNA
ggtgtcgatttagtggcgtc

SEQ ID NO: 257299 - DNA, 20 bp, synthetic construct
  source 1..20: mol_type = other DNA
aggtgtcgatttagtggcgt

SEQ ID NO: 257300 - DNA, 20 bp, synthetic construct
  source 1..20: mol_type = other DNA
caggtgtcgatttagtggcg

SEQ ID NO: 257301 - DNA, 20 bp, synthetic construct
  source 1..20: mol_type = other DNA
ccaggtgtcgatttagtggc

SEQ ID NO: 257302 - DNA, 20 bp, synthetic construct
  source 1..20: mol_type = other DNA
cccaggtgtcgatttagtgg

SEQ ID NO: 257303 - DNA, 20 bp, synthetic construct
  source 1..20: mol_type = other DNA
acccaggtgtcgatttagtg

SEQ ID NO: 257304 - DNA, 20 bp, synthetic construct
  source 1..20: mol_type = other DNA
cacccaggtgtcgatttagt

SEQ ID NO: 257305 - DNA, 20 bp, synthetic construct
  source 1..20: mol_type = other DNA
gcacccaggtgtcgatttag

SEQ ID NO: 257306 - DNA, 20 bp, synthetic construct
  source 1..20: mol_type = other DNA
tgcacccaggtgtcgattta

SEQ ID NO: 257307 - DNA, 20 bp, synthetic construct
  source 1..20: mol_type = other DNA
ctgcacccaggtgtcgattt

SEQ ID NO: 257308 - DNA, 20 bp, synthetic construct
  source 1..20: mol_type = other DNA
gctgcacccaggtgtcgatt

SEQ ID NO: 257309 - DNA, 20 bp, synthetic construct
  source 1..20: mol_type = other DNA
agctgcacccaggtgtcgat

SEQ ID NO: 257310 - DNA, 20 bp, synthetic construct
  source 1..20: mol_type = other DNA
cagctgcacccaggtgtcga

SEQ ID NO: 257311 - DNA, 20 bp, synthetic construct
  source 1..20: mol_type = other DNA
gcagctgcacccaggtgtcg

SEQ ID NO: 257312 - DNA, 20 bp, synthetic construct
  source 1..20: mol_type = other DNA
agcagctgcacccaggtgtc

SEQ ID NO: 257313 - DNA, 20 bp, synthetic construct
  source 1..20: mol_type = other DNA
gagcagctgcacccaggtgt

SEQ ID NO: 257314 - DNA, 20 bp, synthetic construct
  source 1..20: mol_type = other DNA
ggagcagctgcacccaggtg

SEQ ID NO: 257315 - DNA, 20 bp, synthetic construct
  source 1..20: mol_type = other DNA
tggagcagctgcacccaggt

SEQ ID NO: 257316 - DNA, 20 bp, synthetic construct
  source 1..20: mol_type = other DNA
gtggagcagctgcacccagg

SEQ ID NO: 257317 - DNA, 20 bp, synthetic construct
  source 1..20: mol_type = other DNA
agtggagcagctgcacccag

SEQ ID NO: 257318 - DNA, 20 bp, synthetic construct
  source 1..20: mol_type = other DNA
gagtggagcagctgcaccca

SEQ ID NO: 257319 - DNA, 20 bp, synthetic construct
  source 1..20: mol_type = other DNA
ggagtggagcagctgcaccc

SEQ ID NO: 257320 - DNA, 20 bp, synthetic construct
  source 1..20: mol_type = other DNA
gggagtggagcagctgcacc

SEQ ID NO: 257321 - DNA, 20 bp, synthetic construct
  source 1..20: mol_type = other DNA
agggagtggagcagctgcac

SEQ ID NO: 257322 - DNA, 20 bp, synthetic construct
  source 1..20: mol_type = other DNA
gagggagtggagcagctgca

SEQ ID NO: 257323 - DNA, 20 bp, synthetic construct
  source 1..20: mol_type = other DNA
cgagggagtggagcagctgc

SEQ ID NO: 257324 - DNA, 20 bp, synthetic construct
  source 1..20: mol_type = other DNA
ccgagggagtggagcagctg

SEQ ID NO: 257325 - DNA, 20 bp, synthetic construct
  source 1..20: mol_type = other DNA
gccgagggagtggagcagct

SEQ ID NO: 257326 - DNA, 20 bp, synthetic construct
  source 1..20: mol_type = other DNA
ggccgagggagtggagcagc

SEQ ID NO: 257327 - DNA, 20 bp, synthetic construct
  source 1..20: mol_type = other DNA
aggccgagggagtggagcag

SEQ ID NO: 257328 - DNA, 20 bp, synthetic construct
  source 1..20: mol_type = other DNA
gaggccgagggagtggagca

SEQ ID NO: 257329 - DNA, 20 bp, synthetic construct
  source 1..20: mol_type = other DNA
ggaggccgagggagtggagc

SEQ ID NO: 257330 - DNA, 20 bp, synthetic construct
  source 1..20: mol_type = other DNA
aggaggccgagggagtggag

SEQ ID NO: 257331 - DNA, 20 bp, synthetic construct
  source 1..20: mol_type = other DNA
gaggaggccgagggagtgga

SEQ ID NO: 257332 - DNA, 20 bp, synthetic construct
  source 1..20: mol_type = other DNA
ggaggaggccgagggagtgg

SEQ ID NO: 257333 - DNA, 20 bp, synthetic construct
  source 1..20: mol_type = other DNA
gggaggaggccgagggagtg

SEQ ID NO: 257334 - DNA, 20 bp, synthetic construct
  source 1..20: mol_type = other DNA
cgggaggaggccgagggagt

SEQ ID NO: 257335 - DNA, 20 bp, synthetic construct
  source 1..20: mol_type = other DNA
acgggaggaggccgagggag

SEQ ID NO: 257336 - DNA, 20 bp, synthetic construct
  source 1..20: mol_type = other DNA
cacgggaggaggccgaggga

SEQ ID NO: 257337 - DNA, 20 bp, synthetic construct
  source 1..20: mol_type = other DNA
gcacgggaggaggccgaggg

SEQ ID NO: 257338 - DNA, 20 bp, synthetic construct
  source 1..20: mol_type = other DNA
agcacgggaggaggccgagg

SEQ ID NO: 257339 - DNA, 20 bp, synthetic construct
  source 1..20: mol_type = other DNA
gagcacgggaggaggccgag

SEQ ID NO: 257340 - DNA, 20 bp, synthetic construct
  source 1..20: mol_type = other DNA
tgagcacgggaggaggccga

SEQ ID NO: 257341 - DNA, 20 bp, synthetic construct
  source 1..20: mol_type = other DNA
ctgagcacgggaggaggccg

SEQ ID NO: 257342 - DNA, 20 bp, synthetic construct
  source 1..20: mol_type = other DNA
cctgagcacgggaggaggcc

SEQ ID NO: 257343 - DNA, 20 bp, synthetic construct
  source 1..20: mol_type = other DNA
gcctgagcacgggaggaggc

SEQ ID NO: 257344 - DNA, 20 bp, synthetic construct
  source 1..20: mol_type = other DNA
agcctgagcacgggaggagg

SEQ ID NO: 257345 - DNA, 20 bp, synthetic construct
  source 1..20: mol_type = other DNA
cagcctgagcacgggaggag

SEQ ID NO: 257346 - DNA, 20 bp, synthetic construct
  source 1..20: mol_type = other DNA
acagcctgagcacgggagga

SEQ ID NO: 257347 - DNA, 20 bp, synthetic construct
  source 1..20: mol_type = other DNA
cacagcctgagcacgggagg

SEQ ID NO: 257348 - DNA, 20 bp, synthetic construct
  source 1..20: mol_type = other DNA
ccacagcctgagcacgggag

SEQ ID NO: 257349 - DNA, 20 bp, synthetic construct
  source 1..20: mol_type = other DNA
gccacagcctgagcacggga

SEQ ID NO: 257350 - DNA, 20 bp, synthetic construct
  source 1..20: mol_type = other DNA
ggccacagcctgagcacggg

SEQ ID NO: 257351 - DNA, 20 bp, synthetic construct
  source 1..20: mol_type = other DNA
cggccacagcctgagcacgg

SEQ ID NO: 257352 - DNA, 20 bp, synthetic construct
  source 1..20: mol_type = other DNA
gcggccacagcctgagcacg

SEQ ID NO: 257353 - DNA, 20 bp, synthetic construct
  source 1..20: mol_type = other DNA
tgcggccacagcctgagcac

SEQ ID NO: 257354 - DNA, 20 bp, synthetic construct
  source 1..20: mol_type = other DNA
gtgcggccacagcctgagca

SEQ ID NO: 257355 - DNA, 20 bp, synthetic construct
  source 1..20: mol_type = other DNA
cgtgcggccacagcctgagc

SEQ ID NO: 257356 - DNA, 20 bp, synthetic construct
  source 1..20: mol_type = other DNA
gcgtgcggccacagcctgag

SEQ ID NO: 257357 - DNA, 20 bp, synthetic construct
  source 1..20: mol_type = other DNA
cgcgtgcggccacagcctga

SEQ ID NO: 257358 - DNA, 20 bp, synthetic construct
  source 1..20: mol_type = other DNA
gcgcgtgcggccacagcctg

SEQ ID NO: 257359 - DNA, 20 bp, synthetic construct
  source 1..20: mol_type = other DNA
ggcgcgtgcggccacagcct

SEQ ID NO: 257360 - DNA, 20 bp, synthetic construct
  source 1..20: mol_type = other DNA
gggcgcgtgcggccacagcc

SEQ ID NO: 257361 - DNA, 20 bp, synthetic construct
  source 1..20: mol_type = other DNA
ggggcgcgtgcggccacagc

SEQ ID NO: 257362 - DNA, 20 bp, synthetic construct
  source 1..20: mol_type = other DNA
aggggcgcgtgcggccacag

SEQ ID NO: 257363 - DNA, 20 bp, synthetic construct
  source 1..20: mol_type = other DNA
gaggggcgcgtgcggccaca

SEQ ID NO: 257364 - DNA, 20 bp, synthetic construct
  source 1..20: mol_type = other DNA
tgaggggcgcgtgcggccac

SEQ ID NO: 257365 - DNA, 20 bp, synthetic construct
  source 1..20: mol_type = other DNA
gtgaggggcgcgtgcggcca

SEQ ID NO: 257366 - DNA, 20 bp, synthetic construct
  source 1..20: mol_type = other DNA
cgtgaggggcgcgtgcggcc

SEQ ID NO: 257367 - DNA, 20 bp, synthetic construct
  source 1..20: mol_type = other DNA
gcgtgaggggcgcgtgcggc

SEQ ID NO: 257368 - DNA, 20 bp, synthetic construct
  source 1..20: mol_type = other DNA
agcgtgaggggcgcgtgcgg

SEQ ID NO: 257369 - DNA, 20 bp, synthetic construct
  source 1..20: mol_type = other DNA
aagcgtgaggggcgcgtgcg

SEQ ID NO: 257370 - DNA, 20 bp, synthetic construct
  source 1..20: mol_type = other DNA
caagcgtgaggggcgcgtgc

SEQ ID NO: 257371 - DNA, 20 bp, synthetic construct
  source 1..20: mol_type = other DNA
gcaagcgtgaggggcgcgtg

SEQ ID NO: 257372 - DNA, 20 bp, synthetic construct
  source 1..20: mol_type = other DNA
ggcaagcgtgaggggcgcgt

SEQ ID NO: 257373 - DNA, 20 bp, synthetic construct
  source 1..20: mol_type = other DNA
gggcaagcgtgaggggcgcg

SEQ ID NO: 257374 - DNA, 20 bp, synthetic construct
  source 1..20: mol_type = other DNA
cgggcaagcgtgaggggcgc

SEQ ID NO: 257375 - DNA, 20 bp, synthetic construct
  source 1..20: mol_type = other DNA
gcgggcaagcgtgaggggcg

SEQ ID NO: 257376 - DNA, 20 bp, synthetic construct
  source 1..20: mol_type = other DNA
ggcgggcaagcgtgaggggc

SEQ ID NO: 257377 - DNA, 20 bp, synthetic construct
  source 1..20: mol_type = other DNA
tggcgggcaagcgtgagggg

SEQ ID NO: 257378 - DNA, 20 bp, synthetic construct
  source 1..20: mol_type = other DNA
gtggcgggcaagcgtgaggg

SEQ ID NO: 257379 - DNA, 20 bp, synthetic construct
  source 1..20: mol_type = other DNA
agtggcgggcaagcgtgagg

SEQ ID NO: 257380 - DNA, 20 bp, synthetic construct
  source 1..20: mol_type = other DNA
gagtggcgggcaagcgtgag

SEQ ID NO: 257381 - DNA, 20 bp, synthetic construct
  source 1..20: mol_type = other DNA
agagtggcgggcaagcgtga

SEQ ID NO: 257382 - DNA, 20 bp, synthetic construct
  source 1..20: mol_type = other DNA
cagagtggcgggcaagcgtg

SEQ ID NO: 257383 - DNA, 20 bp, synthetic construct
  source 1..20: mol_type = other DNA
gcagagtggcgggcaagcgt

SEQ ID NO: 257384 - DNA, 20 bp, synthetic construct
  source 1..20: mol_type = other DNA
tgcagagtggcgggcaagcg

SEQ ID NO: 257385 - DNA, 20 bp, synthetic construct
  source 1..20: mol_type = other DNA
atgcagagtggcgggcaagc

SEQ ID NO: 257386 - DNA, 20 bp, synthetic construct
  source 1..20: mol_type = other DNA
catgcagagtggcgggcaag

SEQ ID NO: 257387 - DNA, 20 bp, synthetic construct
  source 1..20: mol_type = other DNA
acatgcagagtggcgggcaa

SEQ ID NO: 257388 - DNA, 20 bp, synthetic construct
  source 1..20: mol_type = other DNA
gacatgcagagtggcgggca

SEQ ID NO: 257389 - DNA, 20 bp, synthetic construct
  source 1..20: mol_type = other DNA
tgacatgcagagtggcgggc

SEQ ID NO: 257390 - DNA, 20 bp, synthetic construct
  source 1..20: mol_type = other DNA
gtgacatgcagagtggcggg

SEQ ID NO: 257391 - DNA, 20 bp, synthetic construct
  source 1..20: mol_type = other DNA
ggtgacatgcagagtggcgg

SEQ ID NO: 257392 - DNA, 20 bp, synthetic construct
  source 1..20: mol_type = other DNA
tggtgacatgcagagtggcg

SEQ ID NO: 257393 - DNA, 20 bp, synthetic construct
  source 1..20: mol_type = other DNA
ctggtgacatgcagagtggc

SEQ ID NO: 257394 - DNA, 20 bp, synthetic construct
  source 1..20: mol_type = other DNA
gctggtgacatgcagagtgg

SEQ ID NO: 257395 - DNA, 20 bp, synthetic construct
  source 1..20: mol_type = other DNA
tgctggtgacatgcagagtg

SEQ ID NO: 257396 - DNA, 20 bp, synthetic construct
  source 1..20: mol_type = other DNA
gtgctggtgacatgcagagt

SEQ ID NO: 257397 - DNA, 20 bp, synthetic construct
  source 1..20: mol_type = other DNA
ggtgctggtgacatgcagag

SEQ ID NO: 257398 - DNA, 20 bp, synthetic construct
  source 1..20: mol_type = other DNA
gggtgctggtgacatgcaga

SEQ ID NO: 257399 - DNA, 20 bp, synthetic construct
  source 1..20: mol_type = other DNA
ggggtgctggtgacatgcag

SEQ ID NO: 257400 - DNA, 20 bp, synthetic construct
  source 1..20: mol_type = other DNA
gggggtgctggtgacatgca

SEQ ID NO: 257401 - DNA, 20 bp, synthetic construct
  source 1..20: mol_type = other DNA
cgggggtgctggtgacatgc

SEQ ID NO: 257402 - DNA, 20 bp, synthetic construct
  source 1..20: mol_type = other DNA
gcgggggtgctggtgacatg

SEQ ID NO: 257403 - DNA, 20 bp, synthetic construct
  source 1..20: mol_type = other DNA
agcgggggtgctggtgacat

SEQ ID NO: 257404 - DNA, 20 bp, synthetic construct
  source 1..20: mol_type = other DNA
gagcgggggtgctggtgaca

SEQ ID NO: 257405 - DNA, 20 bp, synthetic construct
  source 1..20: mol_type = other DNA
ggagcgggggtgctggtgac

SEQ ID NO: 257406 - DNA, 20 bp, synthetic construct
  source 1..20: mol_type = other DNA
cggagcgggggtgctggtga

SEQ ID NO: 257407 - DNA, 20 bp, synthetic construct
  source 1..20: mol_type = other DNA
acggagcgggggtgctggtg

SEQ ID NO: 257408 - DNA, 20 bp, synthetic construct
  source 1..20: mol_type = other DNA
cacggagcgggggtgctggt

SEQ ID NO: 257409 - DNA, 20 bp, synthetic construct
  source 1..20: mol_type = other DNA
gcacggagcgggggtgctgg

SEQ ID NO: 257410 - DNA, 20 bp, synthetic construct
  source 1..20: mol_type = other DNA
agcacggagcgggggtgctg

SEQ ID NO: 257411 - DNA, 20 bp, synthetic construct
  source 1..20: mol_type = other DNA
tagcacggagcgggggtgct

SEQ ID NO: 257412 - DNA, 20 bp, synthetic construct
  source 1..20: mol_type = other DNA
gtagcacggagcgggggtgc

SEQ ID NO: 257413 - DNA, 20 bp, synthetic construct
  source 1..20: mol_type = other DNA
ggtagcacggagcgggggtg

SEQ ID NO: 257414 - DNA, 20 bp, synthetic construct
  source 1..20: mol_type = other DNA
gggtagcacggagcgggggt

SEQ ID NO: 257415 - DNA, 20 bp, synthetic construct
  source 1..20: mol_type = other DNA
tgggtagcacggagcggggg

SEQ ID NO: 257416 - DNA, 20 bp, synthetic construct
  source 1..20: mol_type = other DNA
gtgggtagcacggagcgggg

SEQ ID NO: 257417 - DNA, 20 bp, synthetic construct
  source 1..20: mol_type = other DNA
ggtgggtagcacggagcggg

SEQ ID NO: 257418 - DNA, 20 bp, synthetic construct
  source 1..20: mol_type = other DNA
aggtgggtagcacggagcgg

SEQ ID NO: 257419 - DNA, 20 bp, synthetic construct
  source 1..20: mol_type = other DNA
aaggtgggtagcacggagcg

SEQ ID NO: 257420 - DNA, 20 bp, synthetic construct
  source 1..20: mol_type = other DNA
caaggtgggtagcacggagc

SEQ ID NO: 257421 - DNA, 20 bp, synthetic construct
  source 1..20: mol_type = other DNA
acaaggtgggtagcacggag

SEQ ID NO: 257422 - DNA, 20 bp, synthetic construct
  source 1..20: mol_type = other DNA
aacaaggtgggtagcacgga

SEQ ID NO: 257423 - DNA, 20 bp, synthetic construct
  source 1..20: mol_type = other DNA
aaacaaggtgggtagcacgg

SEQ ID NO: 257424 - DNA, 20 bp, synthetic construct
  source 1..20: mol_type = other DNA
caaacaaggtgggtagcacg

SEQ ID NO: 257425 - DNA, 20 bp, synthetic construct
  source 1..20: mol_type = other DNA
tcaaacaaggtgggtagcac

SEQ ID NO: 257426 - DNA, 20 bp, synthetic construct
  source 1..20: mol_type = other DNA
gtcaaacaaggtgggtagca

SEQ ID NO: 257427 - DNA, 20 bp, synthetic construct
  source 1..20: mol_type = other DNA
agtcaaacaaggtgggtagc

SEQ ID NO: 257428 - DNA, 20 bp, synthetic construct
  source 1..20: mol_type = other DNA
gagtcaaacaaggtgggtag

SEQ ID NO: 257429 - DNA, 20 bp, synthetic construct
  source 1..20: mol_type = other DNA
agagtcaaacaaggtgggta

SEQ ID NO: 257430 - DNA, 20 bp, synthetic construct
  source 1..20: mol_type = other DNA
gagagtcaaacaaggtgggt

SEQ ID NO: 257431 - DNA, 20 bp, synthetic construct
  source 1..20: mol_type = other DNA
agagagtcaaacaaggtggg

SEQ ID NO: 257432 - DNA, 20 bp, synthetic construct
  source 1..20: mol_type = other DNA
cagagagtcaaacaaggtgg

SEQ ID NO: 257433 - DNA, 20 bp, synthetic construct
  source 1..20: mol_type = other DNA
ccagagagtcaaacaaggtg

SEQ ID NO: 257434 - DNA, 20 bp, synthetic construct
  source 1..20: mol_type = other DNA
gccagagagtcaaacaaggt

SEQ ID NO: 257435 - DNA, 20 bp, synthetic construct
  source 1..20: mol_type = other DNA
ggccagagagtcaaacaagg

SEQ ID NO: 257436 - DNA, 20 bp, synthetic construct
  source 1..20: mol_type = other DNA
tggccagagagtcaaacaag

SEQ ID NO: 257437 - DNA, 20 bp, synthetic construct
  source 1..20: mol_type = other DNA
gtggccagagagtcaaacaa

SEQ ID NO: 257438 - DNA, 20 bp, synthetic construct
  source 1..20: mol_type = other DNA
agtggccagagagtcaaaca

SEQ ID NO: 257439 - DNA, 20 bp, synthetic construct
  source 1..20: mol_type = other DNA
aagtggccagagagtcaaac

SEQ ID NO: 257440 - DNA, 20 bp, synthetic construct
  source 1..20: mol_type = other DNA
caagtggccagagagtcaaa

SEQ ID NO: 257441 - DNA, 20 bp, synthetic construct
  source 1..20: mol_type = other DNA
tcaagtggccagagagtcaa

SEQ ID NO: 257442 - DNA, 20 bp, synthetic construct
  source 1..20: mol_type = other DNA
atcaagtggccagagagtca

SEQ ID NO: 257443 - DNA, 20 bp, synthetic construct
  source 1..20: mol_type = other DNA
aatcaagtggccagagagtc

SEQ ID NO: 257444 - DNA, 20 bp, synthetic construct
  source 1..20: mol_type = other DNA
aaatcaagtggccagagagt

SEQ ID NO: 257445 - DNA, 20 bp, synthetic construct
  source 1..20: mol_type = other DNA
caaatcaagtggccagagag

SEQ ID NO: 257446 - DNA, 20 bp, synthetic construct
  source 1..20: mol_type = other DNA
acaaatcaagtggccagaga

SEQ ID NO: 257447 - DNA, 20 bp, synthetic construct
  source 1..20: mol_type = other DNA
gacaaatcaagtggccagag

SEQ ID NO: 257448 - DNA, 20 bp, synthetic construct
  source 1..20: mol_type = other DNA
ggacaaatcaagtggccaga

SEQ ID NO: 257449 - DNA, 20 bp, synthetic construct
  source 1..20: mol_type = other DNA
tggacaaatcaagtggccag

SEQ ID NO: 257450 - DNA, 20 bp, synthetic construct
  source 1..20: mol_type = other DNA
gtggacaaatcaagtggcca

SEQ ID NO: 257451 - DNA, 20 bp, synthetic construct
  source 1..20: mol_type = other DNA
tgtggacaaatcaagtggcc

SEQ ID NO: 257452 - DNA, 20 bp, synthetic construct
  source 1..20: mol_type = other DNA
ttgtggacaaatcaagtggc

SEQ ID NO: 257453 - DNA, 20 bp, synthetic construct
  source 1..20: mol_type = other DNA
gttgtggacaaatcaagtgg

SEQ ID NO: 257454 - DNA, 20 bp, synthetic construct
  source 1..20: mol_type = other DNA
cgttgtggacaaatcaagtg

SEQ ID NO: 257455 - DNA, 20 bp, synthetic construct
  source 1..20: mol_type = other DNA
ccgttgtggacaaatcaagt

SEQ ID NO: 257456 - DNA, 20 bp, synthetic construct
  source 1..20: mol_type = other DNA
gccgttgtggacaaatcaag

SEQ ID NO: 257457 - DNA, 20 bp, synthetic construct
  source 1..20: mol_type = other DNA
ggccgttgtggacaaatcaa

SEQ ID NO: 257458 - DNA, 20 bp, synthetic construct
  source 1..20: mol_type = other DNA
gggccgttgtggacaaatca

SEQ ID NO: 257459 - DNA, 20 bp, synthetic construct
  source 1..20: mol_type = other DNA
tgggccgttgtggacaaatc

SEQ ID NO: 257460 - DNA, 20 bp, synthetic construct
  source 1..20: mol_type = other DNA
atgggccgttgtggacaaat

SEQ ID NO: 257461 - DNA, 20 bp, synthetic construct
  source 1..20: mol_type = other DNA
gatgggccgttgtggacaaa

SEQ ID NO: 257462 - DNA, 20 bp, synthetic construct
  source 1..20: mol_type = other DNA
tgatgggccgttgtggacaa

SEQ ID NO: 257463 - DNA, 20 bp, synthetic construct
  source 1..20: mol_type = other DNA
ctgatgggccgttgtggaca

SEQ ID NO: 257464 - DNA, 20 bp, synthetic construct
  source 1..20: mol_type = other DNA
gctgatgggccgttgtggac

SEQ ID NO: 257465 - DNA, 20 bp, synthetic construct
  source 1..20: mol_type = other DNA
ggctgatgggccgttgtgga

SEQ ID NO: 257466 - DNA, 20 bp, synthetic construct
  source 1..20: mol_type = other DNA
gggctgatgggccgttgtgg

SEQ ID NO: 257467 - DNA, 20 bp, synthetic construct
  source 1..20: mol_type = other DNA
tgggctgatgggccgttgtg

SEQ ID NO: 257468 - DNA, 20 bp, synthetic construct
  source 1..20: mol_type = other DNA
gtgggctgatgggccgttgt

SEQ ID NO: 257469 - DNA, 20 bp, synthetic construct
  source 1..20: mol_type = other DNA
tgtgggctgatgggccgttg

SEQ ID NO: 257470 - DNA, 20 bp, synthetic construct
  source 1..20: mol_type = other DNA
ctgtgggctgatgggccgtt

SEQ ID NO: 257471 - DNA, 20 bp, synthetic construct
  source 1..20: mol_type = other DNA
cctgtgggctgatgggccgt

SEQ ID NO: 257472 - DNA, 20 bp, synthetic construct
  source 1..20: mol_type = other DNA
tcctgtgggctgatgggccg

SEQ ID NO: 257473 - DNA, 20 bp, synthetic construct
  source 1..20: mol_type = other DNA
ctcctgtgggctgatgggcc

SEQ ID NO: 257474 - DNA, 20 bp, synthetic construct
  source 1..20: mol_type = other DNA
cctcctgtgggctgatgggc

SEQ ID NO: 257475 - DNA, 20 bp, synthetic construct
  source 1..20: mol_type = other DNA
acctcctgtgggctgatggg

SEQ ID NO: 257476 - DNA, 20 bp, synthetic construct
  source 1..20: mol_type = other DNA
aacctcctgtgggctgatgg

SEQ ID NO: 257477 - DNA, 20 bp, synthetic construct
  source 1..20: mol_type = other DNA
aaacctcctgtgggctgatg

SEQ ID NO: 257478 - DNA, 20 bp, synthetic construct
  source 1..20: mol_type = other DNA
caaacctcctgtgggctgat

SEQ ID NO: 257479 - DNA, 20 bp, synthetic construct
  source 1..20: mol_type = other DNA
ccaaacctcctgtgggctga

SEQ ID NO: 257480 - DNA, 20 bp, synthetic construct
  source 1..20: mol_type = other DNA
accaaacctcctgtgggctg

SEQ ID NO: 257481 - DNA, 20 bp, synthetic construct
  source 1..20: mol_type = other DNA
caccaaacctcctgtgggct

SEQ ID NO: 257482 - DNA, 20 bp, synthetic construct
  source 1..20: mol_type = other DNA
ccaccaaacctcctgtgggc

SEQ ID NO: 257483 - DNA, 20 bp, synthetic construct
  source 1..20: mol_type = other DNA
cccaccaaacctcctgtggg

SEQ ID NO: 257484 - DNA, 20 bp, synthetic construct
  source 1..20: mol_type = other DNA
acccaccaaacctcctgtgg

SEQ ID NO: 257485 - DNA, 20 bp, synthetic construct
  source 1..20: mol_type = other DNA
cacccaccaaacctcctgtg

SEQ ID NO: 257486 - DNA, 20 bp, synthetic construct
  source 1..20: mol_type = other DNA
gcacccaccaaacctcctgt

SEQ ID NO: 257487 - DNA, 20 bp, synthetic construct
  source 1..20: mol_type = other DNA
ggcacccaccaaacctcctg

SEQ ID NO: 257488 - DNA, 20 bp, synthetic construct
  source 1..20: mol_type = other DNA
aggcacccaccaaacctcct

SEQ ID NO: 257489 - DNA, 20 bp, synthetic construct
  source 1..20: mol_type = other DNA
aaggcacccaccaaacctcc

SEQ ID NO: 257490 - DNA, 20 bp, synthetic construct
  source 1..20: mol_type = other DNA
gaaggcacccaccaaacctc

SEQ ID NO: 257491 - DNA, 20 bp, synthetic construct
  source 1..20: mol_type = other DNA
ggaaggcacccaccaaacct

SEQ ID NO: 257492 - DNA, 20 bp, synthetic construct
  source 1..20: mol_type = other DNA
tggaaggcacccaccaaacc

SEQ ID NO: 257493 - DNA, 20 bp, synthetic construct
  source 1..20: mol_type = other DNA
gtggaaggcacccaccaaac

SEQ ID NO: 257494 - DNA, 20 bp, synthetic construct
  source 1..20: mol_type = other DNA
ggtggaaggcacccaccaaa

SEQ ID NO: 257495 - DNA, 20 bp, synthetic construct
  source 1..20: mol_type = other DNA
cggtggaaggcacccaccaa

SEQ ID NO: 257496 - DNA, 20 bp, synthetic construct
  source 1..20: mol_type = other DNA
tcggtggaaggcacccacca

SEQ ID NO: 257497 - DNA, 20 bp, synthetic construct
  source 1..20: mol_type = other DNA
gtcggtggaaggcacccacc

SEQ ID NO: 257498 - DNA, 20 bp, synthetic construct
  source 1..20: mol_type = other DNA
tgtcggtggaaggcacccac

SEQ ID NO: 257499 - DNA, 20 bp, synthetic construct
  source 1..20: mol_type = other DNA
ctgtcggtggaaggcaccca

SEQ ID NO: 257500 - DNA, 20 bp, synthetic construct
  source 1..20: mol_type = other DNA
cctgtcggtggaaggcaccc

SEQ ID NO: 257501 - DNA, 20 bp, synthetic construct
  source 1..20: mol_type = other DNA
tcctgtcggtggaaggcacc

SEQ ID NO: 257502 - DNA, 20 bp, synthetic construct
  source 1..20: mol_type = other DNA
atcctgtcggtggaaggcac

SEQ ID NO: 257503 - DNA, 20 bp, synthetic construct
  source 1..20: mol_type = other DNA
catcctgtcggtggaaggca

SEQ ID NO: 257504 - DNA, 20 bp, synthetic construct
  source 1..20: mol_type = other DNA
tcatcctgtcggtggaaggc

SEQ ID NO: 257505 - DNA, 20 bp, synthetic construct
  source 1..20: mol_type = other DNA
gtcatcctgtcggtggaagg

SEQ ID NO: 257506 - DNA, 20 bp, synthetic construct
  source 1..20: mol_type = other DNA
cgtcatcctgtcggtggaag

SEQ ID NO: 257507 - DNA, 20 bp, synthetic construct
  source 1..20: mol_type = other DNA
ccgtcatcctgtcggtggaa

SEQ ID NO: 257508 - DNA, 20 bp, synthetic construct
  source 1..20: mol_type = other DNA
cccgtcatcctgtcggtgga

SEQ ID NO: 257509 - DNA, 20 bp, synthetic construct
  source 1..20: mol_type = other DNA
acccgtcatcctgtcggtgg

SEQ ID NO: 257510 - DNA, 20 bp, synthetic construct
  source 1..20: mol_type = other DNA
cacccgtcatcctgtcggtg

SEQ ID NO: 257511 - DNA, 20 bp, synthetic construct
  source 1..20: mol_type = other DNA
gcacccgtcatcctgtcggt

SEQ ID NO: 257512 - DNA, 20 bp, synthetic construct
  source 1..20: mol_type = other DNA
ggcacccgtcatcctgtcgg

SEQ ID NO: 257513 - DNA, 20 bp, synthetic construct
  source 1..20: mol_type = other DNA
gggcacccgtcatcctgtcg

SEQ ID NO: 257514 - DNA, 20 bp, synthetic construct
  source 1..20: mol_type = other DNA
agggcacccgtcatcctgtc

SEQ ID NO: 257515 - DNA, 20 bp, synthetic construct
  source 1..20: mol_type = other DNA
gagggcacccgtcatcctgt

SEQ ID NO: 257516 - DNA, 20 bp, synthetic construct
  source 1..20: mol_type = other DNA
tgagggcacccgtcatcctg

SEQ ID NO: 257517 - DNA, 20 bp, synthetic construct
  source 1..20: mol_type = other DNA
atgagggcacccgtcatcct

SEQ ID NO: 257518 - DNA, 20 bp, synthetic construct
  source 1..20: mol_type = other DNA
catgagggcacccgtcatcc

SEQ ID NO: 257519 - DNA, 20 bp, synthetic construct
  source 1..20: mol_type = other DNA
ccatgagggcacccgtcatc

SEQ ID NO: 257520 - DNA, 20 bp, synthetic construct
  source 1..20: mol_type = other DNA
accatgagggcacccgtcat

SEQ ID NO: 257521 - DNA, 20 bp, synthetic construct
  source 1..20: mol_type = other DNA
caccatgagggcacccgtca

SEQ ID NO: 257522 - DNA, 20 bp, synthetic construct
  source 1..20: mol_type = other DNA
acaccatgagggcacccgtc

SEQ ID NO: 257523 - DNA, 20 bp, synthetic construct
  source 1..20: mol_type = other DNA
gacaccatgagggcacccgt

SEQ ID NO: 257524 - DNA, 20 bp, synthetic construct
  source 1..20: mol_type = other DNA
agacaccatgagggcacccg

SEQ ID NO: 257525 - DNA, 20 bp, synthetic construct
  source 1..20: mol_type = other DNA
tagacaccatgagggcaccc

SEQ ID NO: 257526 - DNA, 20 bp, synthetic construct
  source 1..20: mol_type = other DNA
ctagacaccatgagggcacc

SEQ ID NO: 257527 - DNA, 20 bp, synthetic construct
  source 1..20: mol_type = other DNA
tctagacaccatgagggcac

SEQ ID NO: 257528 - DNA, 20 bp, synthetic construct
  source 1..20: mol_type = other DNA
ttctagacaccatgagggca

SEQ ID NO: 257529 - DNA, 20 bp, synthetic construct
  source 1..20: mol_type = other DNA
gttctagacaccatgagggc

SEQ ID NO: 257530 - DNA, 20 bp, synthetic construct
  source 1..20: mol_type = other DNA
agttctagacaccatgaggg

SEQ ID NO: 257531 - DNA, 20 bp, synthetic construct
  source 1..20: mol_type = other DNA
gagttctagacaccatgagg

SEQ ID NO: 257532 - DNA, 20 bp, synthetic construct
  source 1..20: mol_type = other DNA
agagttctagacaccatgag

SEQ ID NO: 257533 - DNA, 20 bp, synthetic construct
  source 1..20: mol_type = other DNA
gagagttctagacaccatga

SEQ ID NO: 257534 - DNA, 20 bp, synthetic construct
  source 1..20: mol_type = other DNA
ggagagttctagacaccatg

SEQ ID NO: 257535 - DNA, 20 bp, synthetic construct
  source 1..20: mol_type = other DNA
tggagagttctagacaccat

SEQ ID NO: 257536 - DNA, 20 bp, synthetic construct
  source 1..20: mol_type = other DNA
ttggagagttctagacacca

SEQ ID NO: 257537 - DNA, 20 bp, synthetic construct
  source 1..20: mol_type = other DNA
gttggagagttctagacacc

SEQ ID NO: 257538 - DNA, 20 bp, synthetic construct
  source 1..20: mol_type = other DNA
ggttggagagttctagacac

SEQ ID NO: 257539 - DNA, 20 bp, synthetic construct
  source 1..20: mol_type = other DNA
gggttggagagttctagaca

SEQ ID NO: 257540 - DNA, 20 bp, synthetic construct
  source 1..20: mol_type = other DNA
agggttggagagttctagac

SEQ ID NO: 257541 - DNA, 20 bp, synthetic construct
  source 1..20: mol_type = other DNA
gagggttggagagttctaga

SEQ ID NO: 257542 - DNA, 20 bp, synthetic construct
  source 1..20: mol_type = other DNA
ggagggttggagagttctag

SEQ ID NO: 257543 - DNA, 20 bp, synthetic construct
  source 1..20: mol_type = other DNA
gggagggttggagagttcta

SEQ ID NO: 257544 - DNA, 20 bp, synthetic construct
  source 1..20: mol_type = other DNA
tgggagggttggagagttct

SEQ ID NO: 257545 - DNA, 20 bp, synthetic construct
  source 1..20: mol_type = other DNA
atgggagggttggagagttc

SEQ ID NO: 257546 - DNA, 20 bp, synthetic construct
  source 1..20: mol_type = other DNA
catgggagggttggagagtt

SEQ ID NO: 257547 - DNA, 20 bp, synthetic construct
  source 1..20: mol_type = other DNA
acatgggagggttggagagt

SEQ ID NO: 257548 - DNA, 20 bp, synthetic construct
  source 1..20: mol_type = other DNA
tacatgggagggttggagag

SEQ ID NO: 257549 - DNA, 20 bp, synthetic construct
  source 1..20: mol_type = other DNA
ctacatgggagggttggaga

SEQ ID NO: 257550 - DNA, 20 bp, synthetic construct
  source 1..20: mol_type = other DNA
cctacatgggagggttggag

SEQ ID NO: 257551 - DNA, 20 bp, synthetic construct
  source 1..20: mol_type = other DNA
gcctacatgggagggttgga

SEQ ID NO: 257552 - DNA, 20 bp, synthetic construct
  source 1..20: mol_type = other DNA
tgcctacatgggagggttgg

SEQ ID NO: 257553 - DNA, 20 bp, synthetic construct
  source 1..20: mol_type = other DNA
atgcctacatgggagggttg

SEQ ID NO: 257554 - DNA, 20 bp, synthetic construct
  source 1..20: mol_type = other DNA
tatgcctacatgggagggtt

SEQ ID NO: 257555 - DNA, 20 bp, synthetic construct
  source 1..20: mol_type = other DNA
ttatgcctacatgggagggt

SEQ ID NO: 257556 - DNA, 20 bp, synthetic construct
  source 1..20: mol_type = other DNA
cttatgcctacatgggaggg

SEQ ID NO: 257557 - DNA, 20 bp, synthetic construct
  source 1..20: mol_type = other DNA
gcttatgcctacatgggagg

SEQ ID NO: 257558 - DNA, 20 bp, synthetic construct
  source 1..20: mol_type = other DNA
tgcttatgcctacatgggag

SEQ ID NO: 257559 - DNA, 20 bp, synthetic construct
  source 1..20: mol_type = other DNA
ctgcttatgcctacatggga

SEQ ID NO: 257560 - DNA, 20 bp, synthetic construct
  source 1..20: mol_type = other DNA
gctgcttatgcctacatggg

SEQ ID NO: 257561 - DNA, 20 bp, synthetic construct
  source 1..20: mol_type = other DNA
ggctgcttatgcctacatgg

SEQ ID NO: 257562 - DNA, 20 bp, synthetic construct
  source 1..20: mol_type = other DNA
gggctgcttatgcctacatg

SEQ ID NO: 257563 - DNA, 20 bp, synthetic construct
  source 1..20: mol_type = other DNA
ggggctgcttatgcctacat

SEQ ID NO: 257564 - DNA, 20 bp, synthetic construct
  source 1..20: mol_type = other DNA
tggggctgcttatgcctaca

SEQ ID NO: 257565 - DNA, 20 bp, synthetic construct
  source 1..20: mol_type = other DNA
gtggggctgcttatgcctac

SEQ ID NO: 257566 - DNA, 20 bp, synthetic construct
  source 1..20: mol_type = other DNA
agtggggctgcttatgccta

SEQ ID NO: 257567 - DNA, 20 bp, synthetic construct
  source 1..20: mol_type = other DNA
aagtggggctgcttatgcct

SEQ ID NO: 257568 - DNA, 20 bp, synthetic construct
  source 1..20: mol_type = other DNA
aaagtggggctgcttatgcc

SEQ ID NO: 257569 - DNA, 20 bp, synthetic construct
  source 1..20: mol_type = other DNA
caaagtggggctgcttatgc

SEQ ID NO: 257570 - DNA, 20 bp, synthetic construct
  source 1..20: mol_type = other DNA
gcaaagtggggctgcttatg

SEQ ID NO: 257571 - DNA, 20 bp, synthetic construct
  source 1..20: mol_type = other DNA
tgcaaagtggggctgcttat

SEQ ID NO: 257572 - DNA, 20 bp, synthetic construct
  source 1..20: mol_type = other DNA
ctgcaaagtggggctgctta

SEQ ID NO: 257573 - DNA, 20 bp, synthetic construct
  source 1..20: mol_type = other DNA
tctgcaaagtggggctgctt

SEQ ID NO: 257574 - DNA, 20 bp, synthetic construct
  source 1..20: mol_type = other DNA
atctgcaaagtggggctgct

SEQ ID NO: 257575 - DNA, 20 bp, synthetic construct
  source 1..20: mol_type = other DNA
catctgcaaagtggggctgc

SEQ ID NO: 257576 - DNA, 20 bp, synthetic construct
  source 1..20: mol_type = other DNA
tcatctgcaaagtggggctg

SEQ ID NO: 257577 - DNA, 20 bp, synthetic construct
  source 1..20: mol_type = other DNA
ctcatctgcaaagtggggct

SEQ ID NO: 257578 - DNA, 20 bp, synthetic construct
  source 1..20: mol_type = other DNA
cctcatctgcaaagtggggc

SEQ ID NO: 257579 - DNA, 20 bp, synthetic construct
  source 1..20: mol_type = other DNA
tcctcatctgcaaagtgggg

SEQ ID NO: 257580 - DNA, 20 bp, synthetic construct
  source 1..20: mol_type = other DNA
ttcctcatctgcaaagtggg

SEQ ID NO: 257581 - DNA, 20 bp, synthetic construct
  source 1..20: mol_type = other DNA
tttcctcatctgcaaagtgg

SEQ ID NO: 257582 - DNA, 20 bp, synthetic construct
  source 1..20: mol_type = other DNA
gtttcctcatctgcaaagtg

SEQ ID NO: 257583 - DNA, 20 bp, synthetic construct
  source 1..20: mol_type = other DNA
cgtttcctcatctgcaaagt

SEQ ID NO: 257584 - DNA, 20 bp, synthetic construct
  source 1..20: mol_type = other DNA
ccgtttcctcatctgcaaag

SEQ ID NO: 257585 - DNA, 20 bp, synthetic construct
  source 1..20: mol_type = other DNA
tccgtttcctcatctgcaaa

SEQ ID NO: 257586 - DNA, 20 bp, synthetic construct
  source 1..20: mol_type = other DNA
ctccgtttcctcatctgcaa

SEQ ID NO: 257587 - DNA, 20 bp, synthetic construct
  source 1..20: mol_type = other DNA
cctccgtttcctcatctgca

SEQ ID NO: 257588 - DNA, 20 bp, synthetic construct
  source 1..20: mol_type = other DNA
gcctccgtttcctcatctgc

SEQ ID NO: 257589 - DNA, 20 bp, synthetic construct
  source 1..20: mol_type = other DNA
agcctccgtttcctcatctg

SEQ ID NO: 257590 - DNA, 20 bp, synthetic construct
  source 1..20: mol_type = other DNA
gagcctccgtttcctcatct

SEQ ID NO: 257591 - DNA, 20 bp, synthetic construct
  source 1..20: mol_type = other DNA
tgagcctccgtttcctcatc

SEQ ID NO: 257592 - DNA, 20 bp, synthetic construct
  source 1..20: mol_type = other DNA
ctgagcctccgtttcctcat

SEQ ID NO: 257593 - DNA, 20 bp, synthetic construct
  source 1..20: mol_type = other DNA
tctgagcctccgtttcctca

SEQ ID NO: 257594 - DNA, 20 bp, synthetic construct
  source 1..20: mol_type = other DNA
ctctgagcctccgtttcctc

SEQ ID NO: 257595 - DNA, 20 bp, synthetic construct
  source 1..20: mol_type = other DNA
tctctgagcctccgtttcct

SEQ ID NO: 257596 - DNA, 20 bp, synthetic construct
  source 1..20: mol_type = other DNA
ttctctgagcctccgtttcc

SEQ ID NO: 257597 - DNA, 20 bp, synthetic construct
  source 1..20: mol_type = other DNA
cttctctgagcctccgtttc

SEQ ID NO: 257598 - DNA, 20 bp, synthetic construct
  source 1..20: mol_type = other DNA
acttctctgagcctccgttt

SEQ ID NO: 257599 - DNA, 20 bp, synthetic construct
  source 1..20: mol_type = other DNA
tacttctctgagcctccgtt

SEQ ID NO: 257600 - DNA, 20 bp, synthetic construct
  source 1..20: mol_type = other DNA
gtacttctctgagcctccgt

SEQ ID NO: 257601 - DNA, 20 bp, synthetic construct
  source 1..20: mol_type = other DNA
tgtacttctctgagcctccg

SEQ ID NO: 257602 - DNA, 20 bp, synthetic construct
  source 1..20: mol_type = other DNA
ctgtacttctctgagcctcc

SEQ ID NO: 257603 - DNA, 20 bp, synthetic construct
  source 1..20: mol_type = other DNA
actgtacttctctgagcctc

SEQ ID NO: 257604 - DNA, 20 bp, synthetic construct
  source 1..20: mol_type = other DNA
tactgtacttctctgagcct

SEQ ID NO: 257605 - DNA, 20 bp, synthetic construct
  source 1..20: mol_type = other DNA
ttactgtacttctctgagcc

SEQ ID NO: 257606 - DNA, 20 bp, synthetic construct
  source 1..20: mol_type = other DNA
gttactgtacttctctgagc

SEQ ID NO: 257607 - DNA, 20 bp, synthetic construct
  source 1..20: mol_type = other DNA
agttactgtacttctctgag

SEQ ID NO: 257608 - DNA, 20 bp, synthetic construct
  source 1..20: mol_type = other DNA
aagttactgtacttctctga

SEQ ID NO: 257609 - DNA, 20 bp, synthetic construct
  source 1..20: mol_type = other DNA
caagttactgtacttctctg

SEQ ID NO: 257610 - DNA, 20 bp, synthetic construct
  source 1..20: mol_type = other DNA
gcaagttactgtacttctct

SEQ ID NO: 257611 - DNA, 20 bp, synthetic construct
  source 1..20: mol_type = other DNA
ggcaagttactgtacttctc

SEQ ID NO: 257612 - DNA, 20 bp, synthetic construct
  source 1..20: mol_type = other DNA
cggcaagttactgtacttct

SEQ ID NO: 257613 - DNA, 20 bp, synthetic construct
  source 1..20: mol_type = other DNA
tcggcaagttactgtacttc

SEQ ID NO: 257614 - DNA, 20 bp, synthetic construct
  source 1..20: mol_type = other DNA
ttcggcaagttactgtactt

SEQ ID NO: 257615 - DNA, 20 bp, synthetic construct
  source 1..20: mol_type = other DNA
cttcggcaagttactgtact

SEQ ID NO: 257616 - DNA, 20 bp, synthetic construct
  source 1..20: mol_type = other DNA
ccttcggcaagttactgtac

SEQ ID NO: 257617 - DNA, 20 bp, synthetic construct
  source 1..20: mol_type = other DNA
gccttcggcaagttactgta

SEQ ID NO: 257618 - DNA, 20 bp, synthetic construct
  source 1..20: mol_type = other DNA
ggccttcggcaagttactgt

SEQ ID NO: 257619 - DNA, 20 bp, synthetic construct
  source 1..20: mol_type = other DNA
tggccttcggcaagttactg

SEQ ID NO: 257620 - DNA, 20 bp, synthetic construct
  source 1..20: mol_type = other DNA
ttggccttcggcaagttact

SEQ ID NO: 257621 - DNA, 20 bp, synthetic construct
  source 1..20: mol_type = other DNA
attggccttcggcaagttac

SEQ ID NO: 257622 - DNA, 20 bp, synthetic construct
  source 1..20: mol_type = other DNA
cattggccttcggcaagtta

SEQ ID NO: 257623 - DNA, 20 bp, synthetic construct
  source 1..20: mol_type = other DNA
tcattggccttcggcaagtt

SEQ ID NO: 257624 - DNA, 20 bp, synthetic construct
  source 1..20: mol_type = other DNA
ctcattggccttcggcaagt

SEQ ID NO: 257625 - DNA, 20 bp, synthetic construct
  source 1..20: mol_type = other DNA
actcattggccttcggcaag

SEQ ID NO: 257626 - DNA, 20 bp, synthetic construct
  source 1..20: mol_type = other DNA
tactcattggccttcggcaa

SEQ ID NO: 257627 - DNA, 20 bp, synthetic construct
  source 1..20: mol_type = other DNA
ctactcattggccttcggca

SEQ ID NO: 257628 - DNA, 20 bp, synthetic construct
  source 1..20: mol_type = other DNA
actactcattggccttcggc

SEQ ID NO: 257629 - DNA, 20 bp, synthetic construct
  source 1..20: mol_type = other DNA
tactactcattggccttcgg

SEQ ID NO: 257630 - DNA, 20 bp, synthetic construct
  source 1..20: mol_type = other DNA
ttactactcattggccttcg

SEQ ID NO: 257631 - DNA, 20 bp, synthetic construct
  source 1..20: mol_type = other DNA
cttactactcattggccttc

SEQ ID NO: 257632 - DNA, 20 bp, synthetic construct
  source 1..20: mol_type = other DNA
acttactactcattggcctt

SEQ ID NO: 257633 - DNA, 20 bp, synthetic construct
  source 1..20: mol_type = other DNA
cacttactactcattggcct

SEQ ID NO: 257634 - DNA, 20 bp, synthetic construct
  source 1..20: mol_type = other DNA
tcacttactactcattggcc

SEQ ID NO: 257635 - DNA, 20 bp, synthetic construct
  source 1..20: mol_type = other DNA
gtcacttactactcattggc

SEQ ID NO: 257636 - DNA, 20 bp, synthetic construct
  source 1..20: mol_type = other DNA
tgtcacttactactcattgg

SEQ ID NO: 257637 - DNA, 20 bp, synthetic construct
  source 1..20: mol_type = other DNA
ctgtcacttactactcattg

SEQ ID NO: 257638 - DNA, 20 bp, synthetic construct
  source 1..20: mol_type = other DNA
tctgtcacttactactcatt

SEQ ID NO: 257639 - DNA, 20 bp, synthetic construct
  source 1..20: mol_type = other DNA
ctctgtcacttactactcat

SEQ ID NO: 257640 - DNA, 20 bp, synthetic construct
  source 1..20: mol_type = other DNA
gctctgtcacttactactca

SEQ ID NO: 257641 - DNA, 20 bp, synthetic construct
  source 1..20: mol_type = other DNA
ggctctgtcacttactactc

SEQ ID NO: 257642 - DNA, 20 bp, synthetic construct
  source 1..20: mol_type = other DNA
tggctctgtcacttactact

SEQ ID NO: 257643 - DNA, 20 bp, synthetic construct
  source 1..20: mol_type = other DNA
ctggctctgtcacttactac

SEQ ID NO: 257644 - DNA, 20 bp, synthetic construct
  source 1..20: mol_type = other DNA
cctggctctgtcacttacta

SEQ ID NO: 257645 - DNA, 20 bp, synthetic construct
  source 1..20: mol_type = other DNA
acctggctctgtcacttact

SEQ ID NO: 257646 - DNA, 20 bp, synthetic construct
  source 1..20: mol_type = other DNA
aacctggctctgtcacttac

SEQ ID NO: 257647 - DNA, 20 bp, synthetic construct
  source 1..20: mol_type = other DNA
aaacctggctctgtcactta

SEQ ID NO: 257648 - DNA, 20 bp, synthetic construct
  source 1..20: mol_type = other DNA
caaacctggctctgtcactt

SEQ ID NO: 257649 - DNA, 20 bp, synthetic construct
  source 1..20: mol_type = other DNA
ccaaacctggctctgtcact

SEQ ID NO: 257650 - DNA, 20 bp, synthetic construct
  source 1..20: mol_type = other DNA
cccaaacctggctctgtcac

SEQ ID NO: 257651 - DNA, 20 bp, synthetic construct
  source 1..20: mol_type = other DNA
tcccaaacctggctctgtca

SEQ ID NO: 257652 - DNA, 20 bp, synthetic construct
  source 1..20: mol_type = other DNA
atcccaaacctggctctgtc

SEQ ID NO: 257653 - DNA, 20 bp, synthetic construct
  source 1..20: mol_type = other DNA
gatcccaaacctggctctgt

SEQ ID NO: 257654 - DNA, 20 bp, synthetic construct
  source 1..20: mol_type = other DNA
ggatcccaaacctggctctg

SEQ ID NO: 257655 - DNA, 20 bp, synthetic construct
  source 1..20: mol_type = other DNA
tggatcccaaacctggctct

SEQ ID NO: 257656 - DNA, 20 bp, synthetic construct
  source 1..20: mol_type = other DNA
ctggatcccaaacctggctc

SEQ ID NO: 257657 - DNA, 20 bp, synthetic construct
  source 1..20: mol_type = other DNA
cctggatcccaaacctggct

SEQ ID NO: 257658 - DNA, 20 bp, synthetic construct
  source 1..20: mol_type = other DNA
acctggatcccaaacctggc

SEQ ID NO: 257659 - DNA, 20 bp, synthetic construct
  source 1..20: mol_type = other DNA
tacctggatcccaaacctgg

SEQ ID NO: 257660 - DNA, 20 bp, synthetic construct
  source 1..20: mol_type = other DNA
ctacctggatcccaaacctg

SEQ ID NO: 257661 - DNA, 20 bp, synthetic construct
  source 1..20: mol_type = other DNA
cctacctggatcccaaacct

SEQ ID NO: 257662 - DNA, 20 bp, synthetic construct
  source 1..20: mol_type = other DNA
acctacctggatcccaaacc

SEQ ID NO: 257663 - DNA, 20 bp, synthetic construct
  source 1..20: mol_type = other DNA
aacctacctggatcccaaac

SEQ ID NO: 257664 - DNA, 20 bp, synthetic construct
  source 1..20: mol_type = other DNA
caacctacctggatcccaaa

SEQ ID NO: 257665 - DNA, 20 bp, synthetic construct
  source 1..20: mol_type = other DNA
acaacctacctggatcccaa

SEQ ID NO: 257666 - DNA, 20 bp, synthetic construct
  source 1..20: mol_type = other DNA
gacaacctacctggatccca

SEQ ID NO: 257667 - DNA, 20 bp, synthetic construct
  source 1..20: mol_type = other DNA
agacaacctacctggatccc

SEQ ID NO: 257668 - DNA, 20 bp, synthetic construct
  source 1..20: mol_type = other DNA
gagacaacctacctggatcc

SEQ ID NO: 257669 - DNA, 20 bp, synthetic construct
  source 1..20: mol_type = other DNA
agagacaacctacctggatc

SEQ ID NO: 257670 - DNA, 20 bp, synthetic construct
  source 1..20: mol_type = other DNA
cagagacaacctacctggat

SEQ ID NO: 257671 - DNA, 20 bp, synthetic construct
  source 1..20: mol_type = other DNA
tcagagacaacctacctgga

SEQ ID NO: 257672 - DNA, 20 bp, synthetic construct
  source 1..20: mol_type = other DNA
ttcagagacaacctacctgg

SEQ ID NO: 257673 - DNA, 20 bp, synthetic construct
  source 1..20: mol_type = other DNA
tttcagagacaacctacctg

SEQ ID NO: 257674 - DNA, 20 bp, synthetic construct
  source 1..20: mol_type = other DNA
ctttcagagacaacctacct

SEQ ID NO: 257675 - DNA, 20 bp, synthetic construct
  source 1..20: mol_type = other DNA
tctttcagagacaacctacc

SEQ ID NO: 257676 - DNA, 20 bp, synthetic construct
  source 1..20: mol_type = other DNA
gtctttcagagacaacctac

SEQ ID NO: 257677 - DNA, 20 bp, synthetic construct
  source 1..20: mol_type = other DNA
tgtctttcagagacaaccta

SEQ ID NO: 257678 - DNA, 20 bp, synthetic construct
  source 1..20: mol_type = other DNA
gtgtctttcagagacaacct

SEQ ID NO: 257679 - DNA, 20 bp, synthetic construct
  source 1..20: mol_type = other DNA
cgtgtctttcagagacaacc

SEQ ID NO: 257680 - DNA, 20 bp, synthetic construct
  source 1..20: mol_type = other DNA
gcgtgtctttcagagacaac

SEQ ID NO: 257681 - DNA, 20 bp, synthetic construct
  source 1..20: mol_type = other DNA
ggcgtgtctttcagagacaa

SEQ ID NO: 257682 - DNA, 20 bp, synthetic construct
  source 1..20: mol_type = other DNA
aggcgtgtctttcagagaca

SEQ ID NO: 257683 - DNA, 20 bp, synthetic construct
  source 1..20: mol_type = other DNA
caggcgtgtctttcagagac

SEQ ID NO: 257684 - DNA, 20 bp, synthetic construct
  source 1..20: mol_type = other DNA
acaggcgtgtctttcagaga

SEQ ID NO: 257685 - DNA, 20 bp, synthetic construct
  source 1..20: mol_type = other DNA
gacaggcgtgtctttcagag

SEQ ID NO: 257686 - DNA, 20 bp, synthetic construct
  source 1..20: mol_type = other DNA
ggacaggcgtgtctttcaga

SEQ ID NO: 257687 - DNA, 20 bp, synthetic construct
  source 1..20: mol_type = other DNA
aggacaggcgtgtctttcag

SEQ ID NO: 257688 - DNA, 20 bp, synthetic construct
  source 1..20: mol_type = other DNA
caggacaggcgtgtctttca

SEQ ID NO: 257689 - DNA, 20 bp, synthetic construct
  source 1..20: mol_type = other DNA
gcaggacaggcgtgtctttc

SEQ ID NO: 257690 - DNA, 20 bp, synthetic construct
  source 1..20: mol_type = other DNA
tgcaggacaggcgtgtcttt

SEQ ID NO: 257691 - DNA, 20 bp, synthetic construct
  source 1..20: mol_type = other DNA
atgcaggacaggcgtgtctt

SEQ ID NO: 257692 - DNA, 20 bp, synthetic construct
  source 1..20: mol_type = other DNA
gatgcaggacaggcgtgtct

SEQ ID NO: 257693 - DNA, 20 bp, synthetic construct
  source 1..20: mol_type = other DNA
ggatgcaggacaggcgtgtc

SEQ ID NO: 257694 - DNA, 20 bp, synthetic construct
  source 1..20: mol_type = other DNA
gggatgcaggacaggcgtgt

SEQ ID NO: 257695 - DNA, 20 bp, synthetic construct
  source 1..20: mol_type = other DNA
tgggatgcaggacaggcgtg

SEQ ID NO: 257696 - DNA, 20 bp, synthetic construct
  source 1..20: mol_type = other DNA
gtgggatgcaggacaggcgt

SEQ ID NO: 257697 - DNA, 20 bp, synthetic construct
  source 1..20: mol_type = other DNA
tgtgggatgcaggacaggcg

SEQ ID NO: 257698 - DNA, 20 bp, synthetic construct
  source 1..20: mol_type = other DNA
ttgtgggatgcaggacaggc

SEQ ID NO: 257699 - DNA, 20 bp, synthetic construct
  source 1..20: mol_type = other DNA
gttgtgggatgcaggacagg

SEQ ID NO: 257700 - DNA, 20 bp, synthetic construct
  source 1..20: mol_type = other DNA
cgttgtgggatgcaggacag

SEQ ID NO: 257701 - DNA, 20 bp, synthetic construct
  source 1..20: mol_type = other DNA
gcgttgtgggatgcaggaca

SEQ ID NO: 257702 - DNA, 20 bp, synthetic construct
  source 1..20: mol_type = other DNA
ggcgttgtgggatgcaggac

SEQ ID NO: 257703 - DNA, 20 bp, synthetic construct
  source 1..20: mol_type = other DNA
aggcgttgtgggatgcagga

SEQ ID NO: 257704 - DNA, 20 bp, synthetic construct
  source 1..20: mol_type = other DNA
gaggcgttgtgggatgcagg

SEQ ID NO: 257705 - DNA, 20 bp, synthetic construct
  source 1..20: mol_type = other DNA
ggaggcgttgtgggatgcag

SEQ ID NO: 257706 - DNA, 20 bp, synthetic construct
  source 1..20: mol_type = other DNA
gggaggcgttgtgggatgca

SEQ ID NO: 257707 - DNA, 20 bp, synthetic construct
  source 1..20: mol_type = other DNA
tgggaggcgttgtgggatgc

SEQ ID NO: 257708 - DNA, 20 bp, synthetic construct
  source 1..20: mol_type = other DNA
ctgggaggcgttgtgggatg

SEQ ID NO: 257709 - DNA, 20 bp, synthetic construct
  source 1..20: mol_type = other DNA
cctgggaggcgttgtgggat

SEQ ID NO: 257710 - DNA, 20 bp, synthetic construct
  source 1..20: mol_type = other DNA
tcctgggaggcgttgtggga

SEQ ID NO: 257711 - DNA, 20 bp, synthetic construct
  source 1..20: mol_type = other DNA
ctcctgggaggcgttgtggg

SEQ ID NO: 257712 - DNA, 20 bp, synthetic construct
  source 1..20: mol_type = other DNA
cctcctgggaggcgttgtgg

SEQ ID NO: 257713 - DNA, 20 bp, synthetic construct
  source 1..20: mol_type = other DNA
acctcctgggaggcgttgtg

SEQ ID NO: 257714 - DNA, 20 bp, synthetic construct
  source 1..20: mol_type = other DNA
cacctcctgggaggcgttgt

SEQ ID NO: 257715 - DNA, 20 bp, synthetic construct
  source 1..20: mol_type = other DNA
gcacctcctgggaggcgttg

SEQ ID NO: 257716 - DNA, 20 bp, synthetic construct
  source 1..20: mol_type = other DNA
agcacctcctgggaggcgtt

SEQ ID NO: 257717 - DNA, 20 bp, synthetic construct
  source 1..20: mol_type = other DNA
cagcacctcctgggaggcgt

SEQ ID NO: 257718 - DNA, 20 bp, synthetic construct
  source 1..20: mol_type = other DNA
ccagcacctcctgggaggcg

SEQ ID NO: 257719 - DNA, 20 bp, synthetic construct
  source 1..20: mol_type = other DNA
tccagcacctcctgggaggc

SEQ ID NO: 257720 - DNA, 20 bp, synthetic construct
  source 1..20: mol_type = other DNA
ctccagcacctcctgggagg

SEQ ID NO: 257721 - DNA, 20 bp, synthetic construct
  source 1..20: mol_type = other DNA
actccagcacctcctgggag

SEQ ID NO: 257722 - DNA, 20 bp, synthetic construct
  source 1..20: mol_type = other DNA
cactccagcacctcctggga

SEQ ID NO: 257723 - DNA, 20 bp, synthetic construct
  source 1..20: mol_type = other DNA
acactccagcacctcctggg

SEQ ID NO: 257724 - DNA, 20 bp, synthetic construct
  source 1..20: mol_type = other DNA
cacactccagcacctcctgg

SEQ ID NO: 257725 - DNA, 20 bp, synthetic construct
  source 1..20: mol_type = other DNA
ccacactccagcacctcctg

SEQ ID NO: 257726 - DNA, 20 bp, synthetic construct
  source 1..20: mol_type = other DNA
tccacactccagcacctcct

SEQ ID NO: 257727 - DNA, 20 bp, synthetic construct
  source 1..20: mol_type = other DNA
gtccacactccagcacctcc

SEQ ID NO: 257728 - DNA, 20 bp, synthetic construct
  source 1..20: mol_type = other DNA
cgtccacactccagcacctc

SEQ ID NO: 257729 - DNA, 20 bp, synthetic construct
  source 1..20: mol_type = other DNA
gcgtccacactccagcacct

SEQ ID NO: 257730 - DNA, 20 bp, synthetic construct
  source 1..20: mol_type = other DNA
ggcgtccacactccagcacc

SEQ ID NO: 257731 - DNA, 20 bp, synthetic construct
  source 1..20: mol_type = other DNA
aggcgtccacactccagcac

SEQ ID NO: 257732 - DNA, 20 bp, synthetic construct
  source 1..20: mol_type = other DNA
taggcgtccacactccagca

SEQ ID NO: 257733 - DNA, 20 bp, synthetic construct
  source 1..20: mol_type = other DNA
ttaggcgtccacactccagc

SEQ ID NO: 257734 - DNA, 20 bp, synthetic construct
  source 1..20: mol_type = other DNA
gttaggcgtccacactccag

SEQ ID NO: 257735 - DNA, 20 bp, synthetic construct
  source 1..20: mol_type = other DNA
tgttaggcgtccacactcca

SEQ ID NO: 257736 - DNA, 20 bp, synthetic construct
  source 1..20: mol_type = other DNA
gtgttaggcgtccacactcc

SEQ ID NO: 257737 - DNA, 20 bp, synthetic construct
  source 1..20: mol_type = other DNA
tgtgttaggcgtccacactc

SEQ ID NO: 257738 - DNA, 20 bp, synthetic construct
  source 1..20: mol_type = other DNA
ctgtgttaggcgtccacact

SEQ ID NO: 257739 - DNA, 20 bp, synthetic construct
  source 1..20: mol_type = other DNA
tctgtgttaggcgtccacac

SEQ ID NO: 257740 - DNA, 20 bp, synthetic construct
  source 1..20: mol_type = other DNA
ctctgtgttaggcgtccaca

SEQ ID NO: 257741 - DNA, 20 bp, synthetic construct
  source 1..20: mol_type = other DNA
tctctgtgttaggcgtccac

SEQ ID NO: 257742 - DNA, 20 bp, synthetic construct
  source 1..20: mol_type = other DNA
atctctgtgttaggcgtcca

SEQ ID NO: 257743 - DNA, 20 bp, synthetic construct
  source 1..20: mol_type = other DNA
catctctgtgttaggcgtcc

SEQ ID NO: 257744 - DNA, 20 bp, synthetic construct
  source 1..20: mol_type = other DNA
acatctctgtgttaggcgtc

SEQ ID NO: 257745 - DNA, 20 bp, synthetic construct
  source 1..20: mol_type = other DNA
cacatctctgtgttaggcgt

SEQ ID NO: 257746 - DNA, 20 bp, synthetic construct
  source 1..20: mol_type = other DNA
gcacatctctgtgttaggcg

SEQ ID NO: 257747 - DNA, 20 bp, synthetic construct
  source 1..20: mol_type = other DNA
tgcacatctctgtgttaggc

SEQ ID NO: 257748 - DNA, 20 bp, synthetic construct
  source 1..20: mol_type = other DNA
ctgcacatctctgtgttagg

SEQ ID NO: 257749 - DNA, 20 bp, synthetic construct
  source 1..20: mol_type = other DNA
cctgcacatctctgtgttag

SEQ ID NO: 257750 - DNA, 20 bp, synthetic construct
  source 1..20: mol_type = other DNA
ccctgcacatctctgtgtta

SEQ ID NO: 257751 - DNA, 20 bp, synthetic construct
  source 1..20: mol_type = other DNA
gccctgcacatctctgtgtt

SEQ ID NO: 257752 - DNA, 20 bp, synthetic construct
  source 1..20: mol_type = other DNA
tgccctgcacatctctgtgt

SEQ ID NO: 257753 - DNA, 20 bp, synthetic construct
  source 1..20: mol_type = other DNA
gtgccctgcacatctctgtg

SEQ ID NO: 257754 - DNA, 20 bp, synthetic construct
  source 1..20: mol_type = other DNA
tgtgccctgcacatctctgt

SEQ ID NO: 257755 - DNA, 20 bp, synthetic construct
  source 1..20: mol_type = other DNA
gtgtgccctgcacatctctg

SEQ ID NO: 257756 - DNA, 20 bp, synthetic construct
  source 1..20: mol_type = other DNA
tgtgtgccctgcacatctct

SEQ ID NO: 257757 - DNA, 20 bp, synthetic construct
  source 1..20: mol_type = other DNA
gtgtgtgccctgcacatctc

SEQ ID NO: 257758 - DNA, 20 bp, synthetic construct
  source 1..20: mol_type = other DNA
tgtgtgtgccctgcacatct

SEQ ID NO: 257759 - DNA, 20 bp, synthetic construct
  source 1..20: mol_type = other DNA
ctgtgtgtgccctgcacatc

SEQ ID NO: 257760 - DNA, 20 bp, synthetic construct
  source 1..20: mol_type = other DNA
gctgtgtgtgccctgcacat

SEQ ID NO: 257761 - DNA, 20 bp, synthetic construct
  source 1..20: mol_type = other DNA
tgctgtgtgtgccctgcaca

SEQ ID NO: 257762 - DNA, 20 bp, synthetic construct
  source 1..20: mol_type = other DNA
ctgctgtgtgtgccctgcac

SEQ ID NO: 257763 - DNA, 20 bp, synthetic construct
  source 1..20: mol_type = other DNA
cctgctgtgtgtgccctgca

SEQ ID NO: 257764 - DNA, 20 bp, synthetic construct
  source 1..20: mol_type = other DNA
acctgctgtgtgtgccctgc

SEQ ID NO: 257765 - DNA, 20 bp, synthetic construct
  source 1..20: mol_type = other DNA
cacctgctgtgtgtgccctg

SEQ ID NO: 257766 - DNA, 20 bp, synthetic construct
  source 1..20: mol_type = other DNA
tcacctgctgtgtgtgccct

SEQ ID NO: 257767 - DNA, 20 bp, synthetic construct
  source 1..20: mol_type = other DNA
gtcacctgctgtgtgtgccc

SEQ ID NO: 257768 - DNA, 20 bp, synthetic construct
  source 1..20: mol_type = other DNA
tgtcacctgctgtgtgtgcc

SEQ ID NO: 257769 - DNA, 20 bp, synthetic construct
  source 1..20: mol_type = other DNA
gtgtcacctgctgtgtgtgc

SEQ ID NO: 257770 - DNA, 20 bp, synthetic construct
  source 1..20: mol_type = other DNA
tgtgtcacctgctgtgtgtg

SEQ ID NO: 257771 - DNA, 20 bp, synthetic construct
  source 1..20: mol_type = other DNA
gtgtgtcacctgctgtgtgt

SEQ ID NO: 257772 - DNA, 20 bp, synthetic construct
  source 1..20: mol_type = other DNA
tgtgtgtcacctgctgtgtg

SEQ ID NO: 257773 - DNA, 20 bp, synthetic construct
  source 1..20: mol_type = other DNA
gtgtgtgtcacctgctgtgt

SEQ ID NO: 257774 - DNA, 20 bp, synthetic construct
  source 1..20: mol_type = other DNA
tgtgtgtgtcacctgctgtg

SEQ ID NO: 257775 - DNA, 20 bp, synthetic construct
  source 1..20: mol_type = other DNA
ctgtgtgtgtcacctgctgt

SEQ ID NO: 257776 - DNA, 20 bp, synthetic construct
  source 1..20: mol_type = other DNA
gctgtgtgtgtcacctgctg

SEQ ID NO: 257777 - DNA, 20 bp, synthetic construct
  source 1..20: mol_type = other DNA
tgctgtgtgtgtcacctgct

SEQ ID NO: 257778 - DNA, 20 bp, synthetic construct
  source 1..20: mol_type = other DNA
atgctgtgtgtgtcacctgc

SEQ ID NO: 257779 - DNA, 20 bp, synthetic construct
  source 1..20: mol_type = other DNA
gatgctgtgtgtgtcacctg

SEQ ID NO: 257780 - DNA, 20 bp, synthetic construct
  source 1..20: mol_type = other DNA
ggatgctgtgtgtgtcacct

SEQ ID NO: 257781 - DNA, 20 bp, synthetic construct
  source 1..20: mol_type = other DNA
tggatgctgtgtgtgtcacc

SEQ ID NO: 257782 - DNA, 20 bp, synthetic construct
  source 1..20: mol_type = other DNA
ctggatgctgtgtgtgtcac

SEQ ID NO: 257783 - DNA, 20 bp, synthetic construct
  source 1..20: mol_type = other DNA
tctggatgctgtgtgtgtca

SEQ ID NO: 257784 - DNA, 20 bp, synthetic construct
  source 1..20: mol_type = other DNA
ctctggatgctgtgtgtgtc

SEQ ID NO: 257785 - DNA, 20 bp, synthetic construct
  source 1..20: mol_type = other DNA
cctctggatgctgtgtgtgt

SEQ ID NO: 257786 - DNA, 20 bp, synthetic construct
  source 1..20: mol_type = other DNA
acctctggatgctgtgtgtg

SEQ ID NO: 257787 - DNA, 20 bp, synthetic construct
  source 1..20: mol_type = other DNA
cacctctggatgctgtgtgt

SEQ ID NO: 257788 - DNA, 20 bp, synthetic construct
  source 1..20: mol_type = other DNA
ccacctctggatgctgtgtg

SEQ ID NO: 257789 - DNA, 20 bp, synthetic construct
  source 1..20: mol_type = other DNA
gccacctctggatgctgtgt

SEQ ID NO: 257790 - DNA, 20 bp, synthetic construct
  source 1..20: mol_type = other DNA
ggccacctctggatgctgtg

SEQ ID NO: 257791 - DNA, 20 bp, synthetic construct
  source 1..20: mol_type = other DNA
gggccacctctggatgctgt

SEQ ID NO: 257792 - DNA, 20 bp, synthetic construct
  source 1..20: mol_type = other DNA
tgggccacctctggatgctg

SEQ ID NO: 257793 - DNA, 20 bp, synthetic construct
  source 1..20: mol_type = other DNA
ctgggccacctctggatgct

SEQ ID NO: 257794 - DNA, 20 bp, synthetic construct
  source 1..20: mol_type = other DNA
tctgggccacctctggatgc

SEQ ID NO: 257795 - DNA, 20 bp, synthetic construct
  source 1..20: mol_type = other DNA
ctctgggccacctctggatg

SEQ ID NO: 257796 - DNA, 20 bp, synthetic construct
  source 1..20: mol_type = other DNA
gctctgggccacctctggat

SEQ ID NO: 257797 - DNA, 20 bp, synthetic construct
  source 1..20: mol_type = other DNA
agctctgggccacctctgga

SEQ ID NO: 257798 - DNA, 20 bp, synthetic construct
  source 1..20: mol_type = other DNA
gagctctgggccacctctgg

SEQ ID NO: 257799 - DNA, 20 bp, synthetic construct
  source 1..20: mol_type = other DNA
tgagctctgggccacctctg

SEQ ID NO: 257800 - DNA, 20 bp, synthetic construct
  source 1..20: mol_type = other DNA
atgagctctgggccacctct

SEQ ID NO: 257801 - DNA, 20 bp, synthetic construct
  source 1..20: mol_type = other DNA
catgagctctgggccacctc

SEQ ID NO: 257802 - DNA, 20 bp, synthetic construct
  source 1..20: mol_type = other DNA
gcatgagctctgggccacct

SEQ ID NO: 257803 - DNA, 20 bp, synthetic construct
  source 1..20: mol_type = other DNA
agcatgagctctgggccacc

SEQ ID NO: 257804 - DNA, 20 bp, synthetic construct
  source 1..20: mol_type = other DNA
cagcatgagctctgggccac

SEQ ID NO: 257805 - DNA, 20 bp, synthetic construct
  source 1..20: mol_type = other DNA
acagcatgagctctgggcca

SEQ ID NO: 257806 - DNA, 20 bp, synthetic construct
  source 1..20: mol_type = other DNA
cacagcatgagctctgggcc

SEQ ID NO: 257807 - DNA, 20 bp, synthetic construct
  source 1..20: mol_type = other DNA
gcacagcatgagctctgggc

SEQ ID NO: 257808 - DNA, 20 bp, synthetic construct
  source 1..20: mol_type = other DNA
ggcacagcatgagctctggg

SEQ ID NO: 257809 - DNA, 20 bp, synthetic construct
  source 1..20: mol_type = other DNA
aggcacagcatgagctctgg

SEQ ID NO: 257810 - DNA, 20 bp, synthetic construct
  source 1..20: mol_type = other DNA
aaggcacagcatgagctctg

SEQ ID NO: 257811 - DNA, 20 bp, synthetic construct
  source 1..20: mol_type = other DNA
aaaggcacagcatgagctct

SEQ ID NO: 257812 - DNA, 20 bp, synthetic construct
  source 1..20: mol_type = other DNA
caaaggcacagcatgagctc

SEQ ID NO: 257813 - DNA, 20 bp, synthetic construct
  source 1..20: mol_type = other DNA
ccaaaggcacagcatgagct

SEQ ID NO: 257814 - DNA, 20 bp, synthetic construct
  source 1..20: mol_type = other DNA
gccaaaggcacagcatgagc

SEQ ID NO: 257815 - DNA, 20 bp, synthetic construct
  source 1..20: mol_type = other DNA
ggccaaaggcacagcatgag

SEQ ID NO: 257816 - DNA, 20 bp, synthetic construct
  source 1..20: mol_type = other DNA
gggccaaaggcacagcatga

SEQ ID NO: 257817 - DNA, 20 bp, synthetic construct
  source 1..20: mol_type = other DNA
tgggccaaaggcacagcatg

SEQ ID NO: 257818 - DNA, 20 bp, synthetic construct
  source 1..20: mol_type = other DNA
ctgggccaaaggcacagcat

SEQ ID NO: 257819 - DNA, 20 bp, synthetic construct
  source 1..20: mol_type = other DNA
actgggccaaaggcacagca

SEQ ID NO: 257820 - DNA, 20 bp, synthetic construct
  source 1..20: mol_type = other DNA
cactgggccaaaggcacagc

SEQ ID NO: 257821 - DNA, 20 bp, synthetic construct
  source 1..20: mol_type = other DNA
gcactgggccaaaggcacag

SEQ ID NO: 257822 - DNA, 20 bp, synthetic construct
  source 1..20: mol_type = other DNA
ggcactgggccaaaggcaca

SEQ ID NO: 257823 - DNA, 20 bp, synthetic construct
  source 1..20: mol_type = other DNA
gggcactgggccaaaggcac

SEQ ID NO: 257824 - DNA, 20 bp, synthetic construct
  source 1..20: mol_type = other DNA
agggcactgggccaaaggca

SEQ ID NO: 257825 - DNA, 20 bp, synthetic construct
  source 1..20: mol_type = other DNA
cagggcactgggccaaaggc

SEQ ID NO: 257826 - DNA, 20 bp, synthetic construct
  source 1..20: mol_type = other DNA
gcagggcactgggccaaagg

SEQ ID NO: 257827 - DNA, 20 bp, synthetic construct
  source 1..20: mol_type = other DNA
ggcagggcactgggccaaag

SEQ ID NO: 257828 - DNA, 20 bp, synthetic construct
  source 1..20: mol_type = other DNA
gggcagggcactgggccaaa

SEQ ID NO: 257829 - DNA, 20 bp, synthetic construct
  source 1..20: mol_type = other DNA
ggggcagggcactgggccaa

SEQ ID NO: 257830 - DNA, 20 bp, synthetic construct
  source 1..20: mol_type = other DNA
gggggcagggcactgggcca

SEQ ID NO: 257831 - DNA, 20 bp, synthetic construct
  source 1..20: mol_type = other DNA
tgggggcagggcactgggcc

SEQ ID NO: 257832 - DNA, 20 bp, synthetic construct
  source 1..20: mol_type = other DNA
gtgggggcagggcactgggc

SEQ ID NO: 257833 - DNA, 20 bp, synthetic construct
  source 1..20: mol_type = other DNA
ggtgggggcagggcactggg

SEQ ID NO: 257834 - DNA, 20 bp, synthetic construct
  source 1..20: mol_type = other DNA
gggtgggggcagggcactgg

SEQ ID NO: 257835 - DNA, 20 bp, synthetic construct
  source 1..20: mol_type = other DNA
tgggtgggggcagggcactg

SEQ ID NO: 257836 - DNA, 20 bp, synthetic construct
  source 1..20: mol_type = other DNA
gtgggtgggggcagggcact

SEQ ID NO: 257837 - DNA, 20 bp, synthetic construct
  source 1..20: mol_type = other DNA
agtgggtgggggcagggcac

SEQ ID NO: 257838 - DNA, 20 bp, synthetic construct
  source 1..20: mol_type = other DNA
gagtgggtgggggcagggca

SEQ ID NO: 257839 - DNA, 20 bp, synthetic construct
  source 1..20: mol_type = other DNA
agagtgggtgggggcagggc

SEQ ID NO: 257840 - DNA, 20 bp, synthetic construct
  source 1..20: mol_type = other DNA
cagagtgggtgggggcaggg

SEQ ID NO: 257841 - DNA, 20 bp, synthetic construct
  source 1..20: mol_type = other DNA
gcagagtgggtgggggcagg

SEQ ID NO: 257842 - DNA, 20 bp, synthetic construct
  source 1..20: mol_type = other DNA
ggcagagtgggtgggggcag

SEQ ID NO: 257843 - DNA, 20 bp, synthetic construct
  source 1..20: mol_type = other DNA
aggcagagtgggtgggggca

SEQ ID NO: 257844 - DNA, 20 bp, synthetic construct
  source 1..20: mol_type = other DNA
aaggcagagtgggtgggggc

SEQ ID NO: 257845 - DNA, 20 bp, synthetic construct
  source 1..20: mol_type = other DNA
caaggcagagtgggtggggg

SEQ ID NO: 257846 - DNA, 20 bp, synthetic construct
  source 1..20: mol_type = other DNA
acaaggcagagtgggtgggg

SEQ ID NO: 257847 - DNA, 20 bp, synthetic construct
  source 1..20: mol_type = other DNA
cacaaggcagagtgggtggg

SEQ ID NO: 257848 - DNA, 20 bp, synthetic construct
  source 1..20: mol_type = other DNA
ccacaaggcagagtgggtgg

SEQ ID NO: 257849 - DNA, 20 bp, synthetic construct
  source 1..20: mol_type = other DNA
gccacaaggcagagtgggtg

SEQ ID NO: 257850 - DNA, 20 bp, synthetic construct
  source 1..20: mol_type = other DNA
tgccacaaggcagagtgggt

SEQ ID NO: 257851 - DNA, 20 bp, synthetic construct
  source 1..20: mol_type = other DNA
ctgccacaaggcagagtggg

SEQ ID NO: 257852 - DNA, 20 bp, synthetic construct
  source 1..20: mol_type = other DNA
cctgccacaaggcagagtgg

SEQ ID NO: 257853 - DNA, 20 bp, synthetic construct
  source 1..20: mol_type = other DNA
tcctgccacaaggcagagtg

SEQ ID NO: 257854 - DNA, 20 bp, synthetic construct
  source 1..20: mol_type = other DNA
ttcctgccacaaggcagagt

SEQ ID NO: 257855 - DNA, 20 bp, synthetic construct
  source 1..20: mol_type = other DNA
cttcctgccacaaggcagag

SEQ ID NO: 257856 - DNA, 20 bp, synthetic construct
  source 1..20: mol_type = other DNA
tcttcctgccacaaggcaga

SEQ ID NO: 257857 - DNA, 20 bp, synthetic construct
  source 1..20: mol_type = other DNA
gtcttcctgccacaaggcag

SEQ ID NO: 257858 - DNA, 20 bp, synthetic construct
  source 1..20: mol_type = other DNA
tgtcttcctgccacaaggca

SEQ ID NO: 257859 - DNA, 20 bp, synthetic construct
  source 1..20: mol_type = other DNA
ttgtcttcctgccacaaggc

SEQ ID NO: 257860 - DNA, 20 bp, synthetic construct
  source 1..20: mol_type = other DNA
cttgtcttcctgccacaagg

SEQ ID NO: 257861 - DNA, 20 bp, synthetic construct
  source 1..20: mol_type = other DNA
ccttgtcttcctgccacaag

SEQ ID NO: 257862 - DNA, 20 bp, synthetic construct
  source 1..20: mol_type = other DNA
tccttgtcttcctgccacaa

SEQ ID NO: 257863 - DNA, 20 bp, synthetic construct
  source 1..20: mol_type = other DNA
ctccttgtcttcctgccaca

SEQ ID NO: 257864 - DNA, 20 bp, synthetic construct
  source 1..20: mol_type = other DNA
gctccttgtcttcctgccac

SEQ ID NO: 257865 - DNA, 20 bp, synthetic construct
  source 1..20: mol_type = other DNA
tgctccttgtcttcctgcca

SEQ ID NO: 257866 - DNA, 20 bp, synthetic construct
  source 1..20: mol_type = other DNA
ctgctccttgtcttcctgcc

SEQ ID NO: 257867 - DNA, 20 bp, synthetic construct
  source 1..20: mol_type = other DNA
tctgctccttgtcttcctgc

SEQ ID NO: 257868 - DNA, 20 bp, synthetic construct
  source 1..20: mol_type = other DNA
gtctgctccttgtcttcctg

SEQ ID NO: 257869 - DNA, 20 bp, synthetic construct
  source 1..20: mol_type = other DNA
tgtctgctccttgtcttcct

SEQ ID NO: 257870 - DNA, 20 bp, synthetic construct
  source 1..20: mol_type = other DNA
gtgtctgctccttgtcttcc

SEQ ID NO: 257871 - DNA, 20 bp, synthetic construct
  source 1..20: mol_type = other DNA
tgtgtctgctccttgtcttc

SEQ ID NO: 257872 - DNA, 20 bp, synthetic construct
  source 1..20: mol_type = other DNA
ttgtgtctgctccttgtctt

SEQ ID NO: 257873 - DNA, 20 bp, synthetic construct
  source 1..20: mol_type = other DNA
cttgtgtctgctccttgtct

SEQ ID NO: 257874 - DNA, 20 bp, synthetic construct
  source 1..20: mol_type = other DNA
tcttgtgtctgctccttgtc

SEQ ID NO: 257875 - DNA, 20 bp, synthetic construct
  source 1..20: mol_type = other DNA
atcttgtgtctgctccttgt

SEQ ID NO: 257876 - DNA, 20 bp, synthetic construct
  source 1..20: mol_type = other DNA
gatcttgtgtctgctccttg

SEQ ID NO: 257877 - DNA, 20 bp, synthetic construct
  source 1..20: mol_type = other DNA
agatcttgtgtctgctcctt

SEQ ID NO: 257878 - DNA, 20 bp, synthetic construct
  source 1..20: mol_type = other DNA
gagatcttgtgtctgctcct

SEQ ID NO: 257879 - DNA, 20 bp, synthetic construct
  source 1..20: mol_type = other DNA
ggagatcttgtgtctgctcc

SEQ ID NO: 257880 - DNA, 20 bp, synthetic construct
  source 1..20: mol_type = other DNA
gggagatcttgtgtctgctc

SEQ ID NO: 257881 - DNA, 20 bp, synthetic construct
  source 1..20: mol_type = other DNA
agggagatcttgtgtctgct

SEQ ID NO: 257882 - DNA, 20 bp, synthetic construct
  source 1..20: mol_type = other DNA
cagggagatcttgtgtctgc

SEQ ID NO: 257883 - DNA, 20 bp, synthetic construct
  source 1..20: mol_type = other DNA
ccagggagatcttgtgtctg

SEQ ID NO: 257884 - DNA, 20 bp, synthetic construct
  source 1..20: mol_type = other DNA
accagggagatcttgtgtct

SEQ ID NO: 257885 - DNA, 20 bp, synthetic construct
  source 1..20: mol_type = other DNA
gaccagggagatcttgtgtc

SEQ ID NO: 257886 - DNA, 20 bp, synthetic construct
  source 1..20: mol_type = other DNA
ggaccagggagatcttgtgt

SEQ ID NO: 257887 - DNA, 20 bp, synthetic construct
  source 1..20: mol_type = other DNA
tggaccagggagatcttgtg

SEQ ID NO: 257888 - DNA, 20 bp, synthetic construct
  source 1..20: mol_type = other DNA
gtggaccagggagatcttgt

SEQ ID NO: 257889 - DNA, 20 bp, synthetic construct
  source 1..20: mol_type = other DNA
tgtggaccagggagatcttg

SEQ ID NO: 257890 - DNA, 20 bp, synthetic construct
  source 1..20: mol_type = other DNA
atgtggaccagggagatctt

SEQ ID NO: 257891 - DNA, 20 bp, synthetic construct
  source 1..20: mol_type = other DNA
catgtggaccagggagatct

SEQ ID NO: 257892 - DNA, 20 bp, synthetic construct
  source 1..20: mol_type = other DNA
gcatgtggaccagggagatc

SEQ ID NO: 257893 - DNA, 20 bp, synthetic construct
  source 1..20: mol_type = other DNA
ggcatgtggaccagggagat

SEQ ID NO: 257894 - DNA, 20 bp, synthetic construct
  source 1..20: mol_type = other DNA
tggcatgtggaccagggaga

SEQ ID NO: 257895 - DNA, 20 bp, synthetic construct
  source 1..20: mol_type = other DNA
gtggcatgtggaccagggag

SEQ ID NO: 257896 - DNA, 20 bp, synthetic construct
  source 1..20: mol_type = other DNA
ggtggcatgtggaccaggga

SEQ ID NO: 257897 - DNA, 20 bp, synthetic construct
  source 1..20: mol_type = other DNA
tggtggcatgtggaccaggg

SEQ ID NO: 257898 - DNA, 20 bp, synthetic construct
  source 1..20: mol_type = other DNA
gtggtggcatgtggaccagg

SEQ ID NO: 257899 - DNA, 20 bp, synthetic construct
  source 1..20: mol_type = other DNA
ggtggtggcatgtggaccag

SEQ ID NO: 257900 - DNA, 20 bp, synthetic construct
  source 1..20: mol_type = other DNA
aggtggtggcatgtggacca

SEQ ID NO: 257901 - DNA, 20 bp, synthetic construct
  source 1..20: mol_type = other DNA
gaggtggtggcatgtggacc

SEQ ID NO: 257902 - DNA, 20 bp, synthetic construct
  source 1..20: mol_type = other DNA
ggaggtggtggcatgtggac

SEQ ID NO: 257903 - DNA, 20 bp, synthetic construct
  source 1..20: mol_type = other DNA
gggaggtggtggcatgtgga

SEQ ID NO: 257904 - DNA, 20 bp, synthetic construct
  source 1..20: mol_type = other DNA
agggaggtggtggcatgtgg

SEQ ID NO: 257905 - DNA, 20 bp, synthetic construct
  source 1..20: mol_type = other DNA
gagggaggtggtggcatgtg

SEQ ID NO: 257906 - DNA, 20 bp, synthetic construct
  source 1..20: mol_type = other DNA
agagggaggtggtggcatgt

SEQ ID NO: 257907 - DNA, 20 bp, synthetic construct
  source 1..20: mol_type = other DNA
cagagggaggtggtggcatg

SEQ ID NO: 257908 - DNA, 20 bp, synthetic construct
  source 1..20: mol_type = other DNA
gcagagggaggtggtggcat

SEQ ID NO: 257909 - DNA, 20 bp, synthetic construct
  source 1..20: mol_type = other DNA
tgcagagggaggtggtggca

SEQ ID NO: 257910 - DNA, 20 bp, synthetic construct
  source 1..20: mol_type = other DNA
ctgcagagggaggtggtggc

SEQ ID NO: 257911 - DNA, 20 bp, synthetic construct
  source 1..20: mol_type = other DNA
tctgcagagggaggtggtgg

SEQ ID NO: 257912 - DNA, 20 bp, synthetic construct
  source 1..20: mol_type = other DNA
ctctgcagagggaggtggtg

SEQ ID NO: 257913 - DNA, 20 bp, synthetic construct
  source 1..20: mol_type = other DNA
cctctgcagagggaggtggt

SEQ ID NO: 257914 - DNA, 20 bp, synthetic construct
  source 1..20: mol_type = other DNA
tcctctgcagagggaggtgg

SEQ ID NO: 257915 - DNA, 20 bp, synthetic construct
  source 1..20: mol_type = other DNA
gtcctctgcagagggaggtg

SEQ ID NO: 257916 - DNA, 20 bp, synthetic construct
  source 1..20: mol_type = other DNA
tgtcctctgcagagggaggt

SEQ ID NO: 257917 - DNA, 20 bp, synthetic construct
  source 1..20: mol_type = other DNA
ttgtcctctgcagagggagg

SEQ ID NO: 257918 - DNA, 20 bp, synthetic construct
  source 1..20: mol_type = other DNA
cttgtcctctgcagagggag

SEQ ID NO: 257919 - DNA, 20 bp, synthetic construct
  source 1..20: mol_type = other DNA
ccttgtcctctgcagaggga

SEQ ID NO: 257920 - DNA, 20 bp, synthetic construct
  source 1..20: mol_type = other DNA
cccttgtcctctgcagaggg

SEQ ID NO: 257921 - DNA, 20 bp, synthetic construct
  source 1..20: mol_type = other DNA
ccccttgtcctctgcagagg

SEQ ID NO: 257922 - DNA, 20 bp, synthetic construct
  source 1..20: mol_type = other DNA
tccccttgtcctctgcagag

SEQ ID NO: 257923 - DNA, 20 bp, synthetic construct
  source 1..20: mol_type = other DNA
atccccttgtcctctgcaga

SEQ ID NO: 257924 - DNA, 20 bp, synthetic construct
  source 1..20: mol_type = other DNA
gatccccttgtcctctgcag

SEQ ID NO: 257925 - DNA, 20 bp, synthetic construct
  source 1..20: mol_type = other DNA
ggatccccttgtcctctgca

SEQ ID NO: 257926 - DNA, 20 bp, synthetic construct
  source 1..20: mol_type = other DNA
aggatccccttgtcctctgc

SEQ ID NO: 257927 - DNA, 20 bp, synthetic construct
  source 1..20: mol_type = other DNA
gaggatccccttgtcctctg

SEQ ID NO: 257928 - DNA, 20 bp, synthetic construct
  source 1..20: mol_type = other DNA
tgaggatccccttgtcctct

SEQ ID NO: 257929 - DNA, 20 bp, synthetic construct
  source 1..20: mol_type = other DNA
atgaggatccccttgtcctc

SEQ ID NO: 257930 - DNA, 20 bp, synthetic construct
  source 1..20: mol_type = other DNA
catgaggatccccttgtcct

SEQ ID NO: 257931 - DNA, 20 bp, synthetic construct
  source 1..20: mol_type = other DNA
gcatgaggatccccttgtcc

SEQ ID NO: 257932 - DNA, 20 bp, synthetic construct
  source 1..20: mol_type = other DNA
agcatgaggatccccttgtc

SEQ ID NO: 257933 - DNA, 20 bp, synthetic construct
  source 1..20: mol_type = other DNA
cagcatgaggatccccttgt

SEQ ID NO: 257934 - DNA, 20 bp, synthetic construct
  source 1..20: mol_type = other DNA
ccagcatgaggatccccttg

SEQ ID NO: 257935 - DNA, 20 bp, synthetic construct
  source 1..20: mol_type = other DNA
gccagcatgaggatcccctt

SEQ ID NO: 257936 - DNA, 20 bp, synthetic construct
  source 1..20: mol_type = other DNA
tgccagcatgaggatcccct

SEQ ID NO: 257937 - DNA, 20 bp, synthetic construct
  source 1..20: mol_type = other DNA
atgccagcatgaggatcccc

SEQ ID NO: 257938 - DNA, 20 bp, synthetic construct
  source 1..20: mol_type = other DNA
aatgccagcatgaggatccc

SEQ ID NO: 257939 - DNA, 20 bp, synthetic construct
  source 1..20: mol_type = other DNA
caatgccagcatgaggatcc

SEQ ID NO: 257940 - DNA, 20 bp, synthetic construct
  source 1..20: mol_type = other DNA
ccaatgccagcatgaggatc

SEQ ID NO: 257941 - DNA, 20 bp, synthetic construct
  source 1..20: mol_type = other DNA
tccaatgccagcatgaggat

SEQ ID NO: 257942 - DNA, 20 bp, synthetic construct
  source 1..20: mol_type = other DNA
ctccaatgccagcatgagga

SEQ ID NO: 257943 - DNA, 20 bp, synthetic construct
  source 1..20: mol_type = other DNA
cctccaatgccagcatgagg

SEQ ID NO: 257944 - DNA, 20 bp, synthetic construct
  source 1..20: mol_type = other DNA
ccctccaatgccagcatgag

SEQ ID NO: 257945 - DNA, 20 bp, synthetic construct
  source 1..20: mol_type = other DNA
cccctccaatgccagcatga

SEQ ID NO: 257946 - DNA, 20 bp, synthetic construct
  source 1..20: mol_type = other DNA
ccccctccaatgccagcatg

SEQ ID NO: 257947 - DNA, 20 bp, synthetic construct
  source 1..20: mol_type = other DNA
accccctccaatgccagcat

SEQ ID NO: 257948 - DNA, 20 bp, synthetic construct
  source 1..20: mol_type = other DNA
aaccccctccaatgccagca

SEQ ID NO: 257949 - DNA, 20 bp, synthetic construct
  source 1..20: mol_type = other DNA
caaccccctccaatgccagc

SEQ ID NO: 257950 - DNA, 20 bp, synthetic construct
  source 1..20: mol_type = other DNA
tcaaccccctccaatgccag

SEQ ID NO: 257951 - DNA, 20 bp, synthetic construct
  source 1..20: mol_type = other DNA
ctcaaccccctccaatgcca

SEQ ID NO: 257952 - DNA, 20 bp, synthetic construct
  source 1..20: mol_type = other DNA
gctcaaccccctccaatgcc

SEQ ID NO: 257953 - DNA, 20 bp, synthetic construct
  source 1..20: mol_type = other DNA
tgctcaaccccctccaatgc

SEQ ID NO: 257954 - DNA, 20 bp, synthetic construct
  source 1..20: mol_type = other DNA
ctgctcaaccccctccaatg

SEQ ID NO: 257955 - DNA, 20 bp, synthetic construct
  source 1..20: mol_type = other DNA
cctgctcaaccccctccaat

SEQ ID NO: 257956 - DNA, 20 bp, synthetic construct
  source 1..20: mol_type = other DNA
ccctgctcaaccccctccaa

SEQ ID NO: 257957 - DNA, 20 bp, synthetic construct
  source 1..20: mol_type = other DNA
gccctgctcaaccccctcca

SEQ ID NO: 257958 - DNA, 20 bp, synthetic construct
  source 1..20: mol_type = other DNA
ggccctgctcaaccccctcc

SEQ ID NO: 257959 - DNA, 20 bp, synthetic construct
  source 1..20: mol_type = other DNA
gggccctgctcaaccccctc

SEQ ID NO: 257960 - DNA, 20 bp, synthetic construct
  source 1..20: mol_type = other DNA
tgggccctgctcaaccccct

SEQ ID NO: 257961 - DNA, 20 bp, synthetic construct
  source 1..20: mol_type = other DNA
gtgggccctgctcaaccccc

SEQ ID NO: 257962 - DNA, 20 bp, synthetic construct
  source 1..20: mol_type = other DNA
ggtgggccctgctcaacccc

SEQ ID NO: 257963 - DNA, 20 bp, synthetic construct
  source 1..20: mol_type = other DNA
aggtgggccctgctcaaccc

SEQ ID NO: 257964 - DNA, 20 bp, synthetic construct
  source 1..20: mol_type = other DNA
aaggtgggccctgctcaacc

SEQ ID NO: 257965 - DNA, 20 bp, synthetic construct
  source 1..20: mol_type = other DNA
caaggtgggccctgctcaac

SEQ ID NO: 257966 - DNA, 20 bp, synthetic construct
  source 1..20: mol_type = other DNA
tcaaggtgggccctgctcaa

SEQ ID NO: 257967 - DNA, 20 bp, synthetic construct
  source 1..20: mol_type = other DNA
ctcaaggtgggccctgctca

SEQ ID NO: 257968 - DNA, 20 bp, synthetic construct
  source 1..20: mol_type = other DNA
gctcaaggtgggccctgctc

SEQ ID NO: 257969 - DNA, 20 bp, synthetic construct
  source 1..20: mol_type = other DNA
ggctcaaggtgggccctgct

SEQ ID NO: 257970 - DNA, 20 bp, synthetic construct
  source 1..20: mol_type = other DNA
gggctcaaggtgggccctgc

SEQ ID NO: 257971 - DNA, 20 bp, synthetic construct
  source 1..20: mol_type = other DNA
agggctcaaggtgggccctg

SEQ ID NO: 257972 - DNA, 20 bp, synthetic construct
  source 1..20: mol_type = other DNA
gagggctcaaggtgggccct

SEQ ID NO: 257973 - DNA, 20 bp, synthetic construct
  source 1..20: mol_type = other DNA
tgagggctcaaggtgggccc

SEQ ID NO: 257974 - DNA, 20 bp, synthetic construct
  source 1..20: mol_type = other DNA
ctgagggctcaaggtgggcc

SEQ ID NO: 257975 - DNA, 20 bp, synthetic construct
  source 1..20: mol_type = other DNA
cctgagggctcaaggtgggc

SEQ ID NO: 257976 - DNA, 20 bp, synthetic construct
  source 1..20: mol_type = other DNA
tcctgagggctcaaggtggg

SEQ ID NO: 257977 - DNA, 20 bp, synthetic construct
  source 1..20: mol_type = other DNA
ctcctgagggctcaaggtgg

SEQ ID NO: 257978 - DNA, 20 bp, synthetic construct
  source 1..20: mol_type = other DNA
gctcctgagggctcaaggtg

SEQ ID NO: 257979 - DNA, 20 bp, synthetic construct
  source 1..20: mol_type = other DNA
tgctcctgagggctcaaggt

SEQ ID NO: 257980 - DNA, 20 bp, synthetic construct
  source 1..20: mol_type = other DNA
gtgctcctgagggctcaagg

SEQ ID NO: 257981 - DNA, 20 bp, synthetic construct
  source 1..20: mol_type = other DNA
cgtgctcctgagggctcaag

SEQ ID NO: 257982 - DNA, 20 bp, synthetic construct
  source 1..20: mol_type = other DNA
tcgtgctcctgagggctcaa

SEQ ID NO: 257983 - DNA, 20 bp, synthetic construct
  source 1..20: mol_type = other DNA
gtcgtgctcctgagggctca

SEQ ID NO: 257984 - DNA, 20 bp, synthetic construct
  source 1..20: mol_type = other DNA
ggtcgtgctcctgagggctc

SEQ ID NO: 257985 - DNA, 20 bp, synthetic construct
  source 1..20: mol_type = other DNA
tggtcgtgctcctgagggct

SEQ ID NO: 257986 - DNA, 20 bp, synthetic construct
  source 1..20: mol_type = other DNA
gtggtcgtgctcctgagggc

SEQ ID NO: 257987 - DNA, 20 bp, synthetic construct
  source 1..20: mol_type = other DNA
tgtggtcgtgctcctgaggg

SEQ ID NO: 257988 - DNA, 20 bp, synthetic construct
  source 1..20: mol_type = other DNA
ctgtggtcgtgctcctgagg

SEQ ID NO: 257989 - DNA, 20 bp, synthetic construct
  source 1..20: mol_type = other DNA
gctgtggtcgtgctcctgag

SEQ ID NO: 257990 - DNA, 20 bp, synthetic construct
  source 1..20: mol_type = other DNA
tgctgtggtcgtgctcctga

SEQ ID NO: 257991 - DNA, 20 bp, synthetic construct
  source 1..20: mol_type = other DNA
ctgctgtggtcgtgctcctg

SEQ ID NO: 257992 - DNA, 20 bp, synthetic construct
  source 1..20: mol_type = other DNA
gctgctgtggtcgtgctcct

SEQ ID NO: 257993 - DNA, 20 bp, synthetic construct
  source 1..20: mol_type = other DNA
ggctgctgtggtcgtgctcc

SEQ ID NO: 257994 - DNA, 20 bp, synthetic construct
  source 1..20: mol_type = other DNA
gggctgctgtggtcgtgctc

SEQ ID NO: 257995 - DNA, 20 bp, synthetic construct
  source 1..20: mol_type = other DNA
agggctgctgtggtcgtgct

SEQ ID NO: 257996 - DNA, 20 bp, synthetic construct
  source 1..20: mol_type = other DNA
cagggctgctgtggtcgtgc

SEQ ID NO: 257997 - DNA, 20 bp, synthetic construct
  source 1..20: mol_type = other DNA
gcagggctgctgtggtcgtg

SEQ ID NO: 257998 - DNA, 20 bp, synthetic construct
  source 1..20: mol_type = other DNA
tgcagggctgctgtggtcgt

SEQ ID NO: 257999 - DNA, 20 bp, synthetic construct
  source 1..20: mol_type = other DNA
ctgcagggctgctgtggtcg

SEQ ID NO: 258000 - DNA, 20 bp, synthetic construct
  source 1..20: mol_type = other DNA
cctgcagggctgctgtggtc

SEQ ID NO: 258001 - DNA, 20 bp, synthetic construct
  source 1..20: mol_type = other DNA
ccctgcagggctgctgtggt

SEQ ID NO: 258002 - DNA, 20 bp, synthetic construct
  source 1..20: mol_type = other DNA
tccctgcagggctgctgtgg

SEQ ID NO: 258003 - DNA, 20 bp, synthetic construct
  source 1..20: mol_type = other DNA
ctccctgcagggctgctgtg

SEQ ID NO: 258004 - DNA, 20 bp, synthetic construct
  source 1..20: mol_type = other DNA
cctccctgcagggctgctgt

SEQ ID NO: 258005 - DNA, 20 bp, synthetic construct
  source 1..20: mol_type = other DNA
ccctccctgcagggctgctg

SEQ ID NO: 258006 - DNA, 20 bp, synthetic construct
  source 1..20: mol_type = other DNA
tccctccctgcagggctgct

SEQ ID NO: 258007 - DNA, 20 bp, synthetic construct
  source 1..20: mol_type = other DNA
atccctccctgcagggctgc

SEQ ID NO: 258008 - DNA, 20 bp, synthetic construct
  source 1..20: mol_type = other DNA
aatccctccctgcagggctg

SEQ ID NO: 258009 - DNA, 20 bp, synthetic construct
  source 1..20: mol_type = other DNA
caatccctccctgcagggct

SEQ ID NO: 258010 - DNA, 20 bp, synthetic construct
  source 1..20: mol_type = other DNA
ccaatccctccctgcagggc

SEQ ID NO: 258011 - DNA, 20 bp, synthetic construct
  source 1..20: mol_type = other DNA
accaatccctccctgcaggg

SEQ ID NO: 258012 - DNA, 20 bp, synthetic construct
  source 1..20: mol_type = other DNA
caccaatccctccctgcagg

SEQ ID NO: 258013 - DNA, 20 bp, synthetic construct
  source 1..20: mol_type = other DNA
ccaccaatccctccctgcag

SEQ ID NO: 258014 - DNA, 20 bp, synthetic construct
  source 1..20: mol_type = other DNA
cccaccaatccctccctgca

SEQ ID NO: 258015 - DNA, 20 bp, synthetic construct
  source 1..20: mol_type = other DNA
tcccaccaatccctccctgc

SEQ ID NO: 258016 - DNA, 20 bp, synthetic construct
  source 1..20: mol_type = other DNA
ctcccaccaatccctccctg

SEQ ID NO: 258017 - DNA, 20 bp, synthetic construct
  source 1..20: mol_type = other DNA
cctcccaccaatccctccct

SEQ ID NO: 258018 - DNA, 20 bp, synthetic construct
  source 1..20: mol_type = other DNA
tcctcccaccaatccctccc

SEQ ID NO: 258019 - DNA, 20 bp, synthetic construct
  source 1..20: mol_type = other DNA
ctcctcccaccaatccctcc

SEQ ID NO: 258020 - DNA, 20 bp, synthetic construct
  source 1..20: mol_type = other DNA
tctcctcccaccaatccctc

SEQ ID NO: 258021 - DNA, 20 bp, synthetic construct
  source 1..20: mol_type = other DNA
ctctcctcccaccaatccct

SEQ ID NO: 258022 - DNA, 20 bp, synthetic construct
  source 1..20: mol_type = other DNA
actctcctcccaccaatccc

SEQ ID NO: 258023 - DNA, 20 bp, synthetic construct
  source 1..20: mol_type = other DNA
gactctcctcccaccaatcc

SEQ ID NO: 258024 - DNA, 20 bp, synthetic construct
  source 1..20: mol_type = other DNA
ggactctcctcccaccaatc

SEQ ID NO: 258025 - DNA, 20 bp, synthetic construct
  source 1..20: mol_type = other DNA
gggactctcctcccaccaat

SEQ ID NO: 258026 - DNA, 20 bp, synthetic construct
  source 1..20: mol_type = other DNA
tgggactctcctcccaccaa

SEQ ID NO: 258027 - DNA, 20 bp, synthetic construct
  source 1..20: mol_type = other DNA
ttgggactctcctcccacca

SEQ ID NO: 258028 - DNA, 20 bp, synthetic construct
  source 1..20: mol_type = other DNA
cttgggactctcctcccacc

SEQ ID NO: 258029 - DNA, 20 bp, synthetic construct
  source 1..20: mol_type = other DNA
acttgggactctcctcccac

SEQ ID NO: 258030 - DNA, 20 bp, synthetic construct
  source 1..20: mol_type = other DNA
tacttgggactctcctccca

SEQ ID NO: 258031 - DNA, 20 bp, synthetic construct
  source 1..20: mol_type = other DNA
atacttgggactctcctccc

SEQ ID NO: 258032 - DNA, 20 bp, synthetic construct
  source 1..20: mol_type = other DNA
gatacttgggactctcctcc

SEQ ID NO: 258033 - DNA, 20 bp, synthetic construct
  source 1..20: mol_type = other DNA
tgatacttgggactctcctc

SEQ ID NO: 258034 - DNA, 20 bp, synthetic construct
  source 1..20: mol_type = other DNA
ctgatacttgggactctcct

SEQ ID NO: 258035 - DNA, 20 bp, synthetic construct
  source 1..20: mol_type = other DNA
cctgatacttgggactctcc

SEQ ID NO: 258036 - DNA, 20 bp, synthetic construct
  source 1..20: mol_type = other DNA
ccctgatacttgggactctc

SEQ ID NO: 258037 - DNA, 20 bp, synthetic construct
  source 1..20: mol_type = other DNA
tccctgatacttgggactct

SEQ ID NO: 258038 - DNA, 20 bp, synthetic construct
  source 1..20: mol_type = other DNA
ctccctgatacttgggactc

SEQ ID NO: 258039 - DNA, 20 bp, synthetic construct
  source 1..20: mol_type = other DNA
tctccctgatacttgggact

SEQ ID NO: 258040 - DNA, 20 bp, synthetic construct
  source 1..20: mol_type = other DNA
ctctccctgatacttgggac

SEQ ID NO: 258041 - DNA, 20 bp, synthetic construct
  source 1..20: mol_type = other DNA
cctctccctgatacttggga

SEQ ID NO: 258042 - DNA, 20 bp, synthetic construct
  source 1..20: mol_type = other DNA
tcctctccctgatacttggg

SEQ ID NO: 258043 - DNA, 20 bp, synthetic construct
  source 1..20: mol_type = other DNA
ctcctctccctgatacttgg

SEQ ID NO: 258044 - DNA, 20 bp, synthetic construct
  source 1..20: mol_type = other DNA
tctcctctccctgatacttg

SEQ ID NO: 258045 - DNA, 20 bp, synthetic construct
  source 1..20: mol_type = other DNA
ctctcctctccctgatactt

SEQ ID NO: 258046 - DNA, 20 bp, synthetic construct
  source 1..20: mol_type = other DNA
actctcctctccctgatact

SEQ ID NO: 258047 - DNA, 20 bp, synthetic construct
  source 1..20: mol_type = other DNA
aactctcctctccctgatac

SEQ ID NO: 258048 - DNA, 20 bp, synthetic construct
  source 1..20: mol_type = other DNA
caactctcctctccctgata

SEQ ID NO: 258049 - DNA, 20 bp, synthetic construct
  source 1..20: mol_type = other DNA
ccaactctcctctccctgat

SEQ ID NO: 258050 - DNA, 20 bp, synthetic construct
  source 1..20: mol_type = other DNA
accaactctcctctccctga

SEQ ID NO: 258051 - DNA, 20 bp, synthetic construct
  source 1..20: mol_type = other DNA
caccaactctcctctccctg

SEQ ID NO: 258052 - DNA, 20 bp, synthetic construct
  source 1..20: mol_type = other DNA
acaccaactctcctctccct

SEQ ID NO: 258053 - DNA, 20 bp, synthetic construct
  source 1..20: mol_type = other DNA
gacaccaactctcctctccc

SEQ ID NO: 258054 - DNA, 20 bp, synthetic construct
  source 1..20: mol_type = other DNA
ggacaccaactctcctctcc

SEQ ID NO: 258055 - DNA, 20 bp, synthetic construct
  source 1..20: mol_type = other DNA
gggacaccaactctcctctc

SEQ ID NO: 258056 - DNA, 20 bp, synthetic construct
  source 1..20: mol_type = other DNA
tgggacaccaactctcctct

SEQ ID NO: 258057 - DNA, 20 bp, synthetic construct
  source 1..20: mol_type = other DNA
gtgggacaccaactctcctc

SEQ ID NO: 258058 - DNA, 20 bp, synthetic construct
  source 1..20: mol_type = other DNA
tgtgggacaccaactctcct

SEQ ID NO: 258059 - DNA, 20 bp, synthetic construct
  source 1..20: mol_type = other DNA
ctgtgggacaccaactctcc

SEQ ID NO: 258060 - DNA, 20 bp, synthetic construct
  source 1..20: mol_type = other DNA
cctgtgggacaccaactctc

SEQ ID NO: 258061 - DNA, 20 bp, synthetic construct
  source 1..20: mol_type = other DNA
tcctgtgggacaccaactct

SEQ ID NO: 258062 - DNA, 20 bp, synthetic construct
  source 1..20: mol_type = other DNA
ctcctgtgggacaccaactc

SEQ ID NO: 258063 - DNA, 20 bp, synthetic construct
  source 1..20: mol_type = other DNA
tctcctgtgggacaccaact

SEQ ID NO: 258064 - DNA, 20 bp, synthetic construct
  source 1..20: mol_type = other DNA
gtctcctgtgggacaccaac

SEQ ID NO: 258065 - DNA, 20 bp, synthetic construct
  source 1..20: mol_type = other DNA
ggtctcctgtgggacaccaa

SEQ ID NO: 258066 - DNA, 20 bp, synthetic construct
  source 1..20: mol_type = other DNA
aggtctcctgtgggacacca

SEQ ID NO: 258067 - DNA, 20 bp, synthetic construct
  source 1..20: mol_type = other DNA
gaggtctcctgtgggacacc

SEQ ID NO: 258068 - DNA, 20 bp, synthetic construct
  source 1..20: mol_type = other DNA
tgaggtctcctgtgggacac

SEQ ID NO: 258069 - DNA, 20 bp, synthetic construct
  source 1..20: mol_type = other DNA
ctgaggtctcctgtgggaca

SEQ ID NO: 258070 - DNA, 20 bp, synthetic construct
  source 1..20: mol_type = other DNA
tctgaggtctcctgtgggac

SEQ ID NO: 258071 - DNA, 20 bp, synthetic construct
  source 1..20: mol_type = other DNA
ctctgaggtctcctgtggga

SEQ ID NO: 258072 - DNA, 20 bp, synthetic construct
  source 1..20: mol_type = other DNA
gctctgaggtctcctgtggg

SEQ ID NO: 258073 - DNA, 20 bp, synthetic construct
  source 1..20: mol_type = other DNA
ggctctgaggtctcctgtgg

SEQ ID NO: 258074 - DNA, 20 bp, synthetic construct
  source 1..20: mol_type = other DNA
tggctctgaggtctcctgtg

SEQ ID NO: 258075 - DNA, 20 bp, synthetic construct
  source 1..20: mol_type = other DNA
gtggctctgaggtctcctgt

SEQ ID NO: 258076 - DNA, 20 bp, synthetic construct
  source 1..20: mol_type = other DNA
tgtggctctgaggtctcctg

SEQ ID NO: 258077 - DNA, 20 bp, synthetic construct
  source 1..20: mol_type = other DNA
ttgtggctctgaggtctcct

SEQ ID NO: 258078 - DNA, 20 bp, synthetic construct
  source 1..20: mol_type = other DNA
cttgtggctctgaggtctcc

SEQ ID NO: 258079 - DNA, 20 bp, synthetic construct
  source 1..20: mol_type = other DNA
ccttgtggctctgaggtctc

SEQ ID NO: 258080 - DNA, 20 bp, synthetic construct
  source 1..20: mol_type = other DNA
gccttgtggctctgaggtct

SEQ ID NO: 258081 - DNA, 20 bp, synthetic construct
  source 1..20: mol_type = other DNA
cgccttgtggctctgaggtc

SEQ ID NO: 258082 - DNA, 20 bp, synthetic construct
  source 1..20: mol_type = other DNA
tcgccttgtggctctgaggt

SEQ ID NO: 258083 - DNA, 20 bp, synthetic construct
  source 1..20: mol_type = other DNA
ctcgccttgtggctctgagg

SEQ ID NO: 258084 - DNA, 20 bp, synthetic construct
  source 1..20: mol_type = other DNA
gctcgccttgtggctctgag

SEQ ID NO: 258085 - DNA, 20 bp, synthetic construct
  source 1..20: mol_type = other DNA
agctcgccttgtggctctga

SEQ ID NO: 258086 - DNA, 20 bp, synthetic construct
  source 1..20: mol_type = other DNA
aagctcgccttgtggctctg

SEQ ID NO: 258087 - DNA, 20 bp, synthetic construct
  source 1..20: mol_type = other DNA
caagctcgccttgtggctct

SEQ ID NO: 258088 - DNA, 20 bp, synthetic construct
  source 1..20: mol_type = other DNA
acaagctcgccttgtggctc

SEQ ID NO: 258089 - DNA, 20 bp, synthetic construct
  source 1..20: mol_type = other DNA
aacaagctcgccttgtggct

SEQ ID NO: 258090 - DNA, 20 bp, synthetic construct
  source 1..20: mol_type = other DNA
gaacaagctcgccttgtggc

SEQ ID NO: 258091 - DNA, 20 bp, synthetic construct
  source 1..20: mol_type = other DNA
tgaacaagctcgccttgtgg

SEQ ID NO: 258092 - DNA, 20 bp, synthetic construct
  source 1..20: mol_type = other DNA
atgaacaagctcgccttgtg

SEQ ID NO: 258093 - DNA, 20 bp, synthetic construct
  source 1..20: mol_type = other DNA
tatgaacaagctcgccttgt

SEQ ID NO: 258094 - DNA, 20 bp, synthetic construct
  source 1..20: mol_type = other DNA
ttatgaacaagctcgccttg

SEQ ID NO: 258095 - DNA, 20 bp, synthetic construct
  source 1..20: mol_type = other DNA
tttatgaacaagctcgcctt

SEQ ID NO: 258096 - DNA, 20 bp, synthetic construct
  source 1..20: mol_type = other DNA
atttatgaacaagctcgcct

SEQ ID NO: 258097 - DNA, 20 bp, synthetic construct
  source 1..20: mol_type = other DNA
aatttatgaacaagctcgcc

SEQ ID NO: 258098 - DNA, 20 bp, synthetic construct
  source 1..20: mol_type = other DNA
aaatttatgaacaagctcgc

SEQ ID NO: 258099 - DNA, 20 bp, synthetic construct
  source 1..20: mol_type = other DNA
caaatttatgaacaagctcg

SEQ ID NO: 258100 - DNA, 20 bp, synthetic construct
  source 1..20: mol_type = other DNA
ccaaatttatgaacaagctc

SEQ ID NO: 258101 - DNA, 20 bp, synthetic construct
  source 1..20: mol_type = other DNA
cccaaatttatgaacaagct

SEQ ID NO: 258102 - DNA, 20 bp, synthetic construct
  source 1..20: mol_type = other DNA
tcccaaatttatgaacaagc

SEQ ID NO: 258103 - DNA, 20 bp, synthetic construct
  source 1..20: mol_type = other DNA
gtcccaaatttatgaacaag

SEQ ID NO: 258104 - DNA, 20 bp, synthetic construct
  source 1..20: mol_type = other DNA
ggtcccaaatttatgaacaa

SEQ ID NO: 258105 - DNA, 20 bp, synthetic construct
  source 1..20: mol_type = other DNA
gggtcccaaatttatgaaca

SEQ ID NO: 258106 - DNA, 20 bp, synthetic construct
  source 1..20: mol_type = other DNA
agggtcccaaatttatgaac

SEQ ID NO: 258107 - DNA, 20 bp, synthetic construct
  source 1..20: mol_type = other DNA
aagggtcccaaatttatgaa

SEQ ID NO: 258108 - DNA, 20 bp, synthetic construct
  source 1..20: mol_type = other DNA
taagggtcccaaatttatga

SEQ ID NO: 258109 - DNA, 20 bp, synthetic construct
  source 1..20: mol_type = other DNA
ctaagggtcccaaatttatg

SEQ ID NO: 258110 - DNA, 20 bp, synthetic construct
  source 1..20: mol_type = other DNA
gctaagggtcccaaatttat

SEQ ID NO: 258111 - DNA, 20 bp, synthetic construct
  source 1..20: mol_type = other DNA
tgctaagggtcccaaattta

SEQ ID NO: 258112 - DNA, 20 bp, synthetic construct
  source 1..20: mol_type = other DNA
atgctaagggtcccaaattt

SEQ ID NO: 258113 - DNA, 20 bp, synthetic construct
  source 1..20: mol_type = other DNA
aatgctaagggtcccaaatt

SEQ ID NO: 258114 - DNA, 20 bp, synthetic construct
  source 1..20: mol_type = other DNA
aaatgctaagggtcccaaat

SEQ ID NO: 258115 - DNA, 20 bp, synthetic construct
  source 1..20: mol_type = other DNA
gaaatgctaagggtcccaaa

SEQ ID NO: 258116 - DNA, 20 bp, synthetic construct
  source 1..20: mol_type = other DNA
tgaaatgctaagggtcccaa

SEQ ID NO: 258117 - DNA, 20 bp, synthetic construct
  source 1..20: mol_type = other DNA
gtgaaatgctaagggtccca

SEQ ID NO: 258118 - DNA, 20 bp, synthetic construct
  source 1..20: mol_type = other DNA
tgtgaaatgctaagggtccc

SEQ ID NO: 258119 - DNA, 20 bp, synthetic construct
  source 1..20: mol_type = other DNA
ctgtgaaatgctaagggtcc

SEQ ID NO: 258120 - DNA, 20 bp, synthetic construct
  source 1..20: mol_type = other DNA
actgtgaaatgctaagggtc

SEQ ID NO: 258121 - DNA, 20 bp, synthetic construct
  source 1..20: mol_type = other DNA
aactgtgaaatgctaagggt

SEQ ID NO: 258122 - DNA, 20 bp, synthetic construct
  source 1..20: mol_type = other DNA
taactgtgaaatgctaaggg

SEQ ID NO: 258123 - DNA, 20 bp, synthetic construct
  source 1..20: mol_type = other DNA
ataactgtgaaatgctaagg

SEQ ID NO: 258124 - DNA, 20 bp, synthetic construct
  source 1..20: mol_type = other DNA
aataactgtgaaatgctaag

SEQ ID NO: 258125 - DNA, 20 bp, synthetic construct
  source 1..20: mol_type = other DNA
aaataactgtgaaatgctaa

SEQ ID NO: 258126 - DNA, 20 bp, synthetic construct
  source 1..20: mol_type = other DNA
caaataactgtgaaatgcta

SEQ ID NO: 258127 - DNA, 20 bp, synthetic construct
  source 1..20: mol_type = other DNA
gcaaataactgtgaaatgct

SEQ ID NO: 258128 - DNA, 20 bp, synthetic construct
  source 1..20: mol_type = other DNA
tgcaaataactgtgaaatgc

SEQ ID NO: 258129 - DNA, 20 bp, synthetic construct
  source 1..20: mol_type = other DNA
ctgcaaataactgtgaaatg

SEQ ID NO: 258130 - DNA, 20 bp, synthetic construct
  source 1..20: mol_type = other DNA
tctgcaaataactgtgaaat

SEQ ID NO: 258131 - DNA, 20 bp, synthetic construct
  source 1..20: mol_type = other DNA
ctctgcaaataactgtgaaa

SEQ ID NO: 258132 - DNA, 20 bp, synthetic construct
  source 1..20: mol_type = other DNA
gctctgcaaataactgtgaa

SEQ ID NO: 258133 - DNA, 20 bp, synthetic construct
  source 1..20: mol_type = other DNA
ggctctgcaaataactgtga

SEQ ID NO: 258134 - DNA, 20 bp, synthetic construct
  source 1..20: mol_type = other DNA
gggctctgcaaataactgtg

SEQ ID NO: 258135 - DNA, 20 bp, synthetic construct
  source 1..20: mol_type = other DNA
tgggctctgcaaataactgt

SEQ ID NO: 258136 - DNA, 20 bp, synthetic construct
  source 1..20: mol_type = other DNA
ctgggctctgcaaataactg

SEQ ID NO: 258137 - DNA, 20 bp, synthetic construct
  source 1..20: mol_type = other DNA
tctgggctctgcaaataact

SEQ ID NO: 258138 - DNA, 20 bp, synthetic construct
  source 1..20: mol_type = other DNA
ttctgggctctgcaaataac

SEQ ID NO: 258139 - DNA, 20 bp, synthetic construct
  source 1..20: mol_type = other DNA
tttctgggctctgcaaataa

SEQ ID NO: 258140 - DNA, 20 bp, synthetic construct
  source 1..20: mol_type = other DNA
atttctgggctctgcaaata

SEQ ID NO: 258141 - DNA, 20 bp, synthetic construct
  source 1..20: mol_type = other DNA
catttctgggctctgcaaat

SEQ ID NO: 258142 - DNA, 20 bp, synthetic construct
  source 1..20: mol_type = other DNA
ccatttctgggctctgcaaa

SEQ ID NO: 258143 - DNA, 20 bp, synthetic construct
  source 1..20: mol_type = other DNA
tccatttctgggctctgcaa

SEQ ID NO: 258144 - DNA, 20 bp, synthetic construct
  source 1..20: mol_type = other DNA
atccatttctgggctctgca

SEQ ID NO: 258145 - DNA, 20 bp, synthetic construct
  source 1..20: mol_type = other DNA
catccatttctgggctctgc

SEQ ID NO: 258146 - DNA, 20 bp, synthetic construct
  source 1..20: mol_type = other DNA
acatccatttctgggctctg

SEQ ID NO: 258147 - DNA, 20 bp, synthetic construct
  source 1..20: mol_type = other DNA
aacatccatttctgggctct

SEQ ID NO: 258148 - DNA, 20 bp, synthetic construct
  source 1..20: mol_type = other DNA
taacatccatttctgggctc

SEQ ID NO: 258149 - DNA, 20 bp, synthetic construct
  source 1..20: mol_type = other DNA
gtaacatccatttctgggct

SEQ ID NO: 258150 - DNA, 20 bp, synthetic construct
  source 1..20: mol_type = other DNA
agtaacatccatttctgggc

SEQ ID NO: 258151 - DNA, 20 bp, synthetic construct
  source 1..20: mol_type = other DNA
cagtaacatccatttctggg

SEQ ID NO: 258152 - DNA, 20 bp, synthetic construct
  source 1..20: mol_type = other DNA
tcagtaacatccatttctgg

SEQ ID NO: 258153 - DNA, 20 bp, synthetic construct
  source 1..20: mol_type = other DNA
ttcagtaacatccatttctg

SEQ ID NO: 258154 - DNA, 20 bp, synthetic construct
  source 1..20: mol_type = other DNA
cttcagtaacatccatttct

SEQ ID NO: 258155 - DNA, 20 bp, synthetic construct
  source 1..20: mol_type = other DNA
gcttcagtaacatccatttc

SEQ ID NO: 258156 - DNA, 20 bp, synthetic construct
  source 1..20: mol_type = other DNA
agcttcagtaacatccattt

SEQ ID NO: 258157 - DNA, 20 bp, synthetic construct
  source 1..20: mol_type = other DNA
gagcttcagtaacatccatt

SEQ ID NO: 258158 - DNA, 20 bp, synthetic construct
  source 1..20: mol_type = other DNA
tgagcttcagtaacatccat

SEQ ID NO: 258159 - DNA, 20 bp, synthetic construct
  source 1..20: mol_type = other DNA
gtgagcttcagtaacatcca

SEQ ID NO: 258160 - DNA, 20 bp, synthetic construct
  source 1..20: mol_type = other DNA
tgtgagcttcagtaacatcc

SEQ ID NO: 258161 - DNA, 20 bp, synthetic construct
  source 1..20: mol_type = other DNA
ctgtgagcttcagtaacatc

SEQ ID NO: 258162 - DNA, 20 bp, synthetic construct
  source 1..20: mol_type = other DNA
actgtgagcttcagtaacat

SEQ ID NO: 258163 - DNA, 20 bp, synthetic construct
  source 1..20: mol_type = other DNA
aactgtgagcttcagtaaca

SEQ ID NO: 258164 - DNA, 20 bp, synthetic construct
  source 1..20: mol_type = other DNA
caactgtgagcttcagtaac

SEQ ID NO: 258165 - DNA, 20 bp, synthetic construct
  source 1..20: mol_type = other DNA
gcaactgtgagcttcagtaa

SEQ ID NO: 258166 - DNA, 20 bp, synthetic construct
  source 1..20: mol_type = other DNA
tgcaactgtgagcttcagta

SEQ ID NO: 258167 - DNA, 20 bp, synthetic construct
  source 1..20: mol_type = other DNA
ttgcaactgtgagcttcagt

SEQ ID NO: 258168 - DNA, 20 bp, synthetic construct
  source 1..20: mol_type = other DNA
cttgcaactgtgagcttcag

SEQ ID NO: 258169 - DNA, 20 bp, synthetic construct
  source 1..20: mol_type = other DNA
gcttgcaactgtgagcttca

SEQ ID NO: 258170 - DNA, 20 bp, synthetic construct
  source 1..20: mol_type = other DNA
tgcttgcaactgtgagcttc

SEQ ID NO: 258171 - DNA, 20 bp, synthetic construct
  source 1..20: mol_type = other DNA
atgcttgcaactgtgagctt

SEQ ID NO: 258172 - DNA, 20 bp, synthetic construct
  source 1..20: mol_type = other DNA
gatgcttgcaactgtgagct

SEQ ID NO: 258173 - DNA, 20 bp, synthetic construct
  source 1..20: mol_type = other DNA
agatgcttgcaactgtgagc

SEQ ID NO: 258174 - DNA, 20 bp, synthetic construct
  source 1..20: mol_type = other DNA
cagatgcttgcaactgtgag

SEQ ID NO: 258175 - DNA, 20 bp, synthetic construct
  source 1..20: mol_type = other DNA
acagatgcttgcaactgtga

SEQ ID NO: 258176 - DNA, 20 bp, synthetic construct
  source 1..20: mol_type = other DNA
aacagatgcttgcaactgtg

SEQ ID NO: 258177 - DNA, 20 bp, synthetic construct
  source 1..20: mol_type = other DNA
taacagatgcttgcaactgt

SEQ ID NO: 258178 - DNA, 20 bp, synthetic construct
  source 1..20: mol_type = other DNA
ttaacagatgcttgcaactg

SEQ ID NO: 258179 - DNA, 20 bp, synthetic construct
  source 1..20: mol_type = other DNA
tttaacagatgcttgcaact

SEQ ID NO: 258180 - DNA, 20 bp, synthetic construct
  source 1..20: mol_type = other DNA
atttaacagatgcttgcaac

SEQ ID NO: 258181 - DNA, 20 bp, synthetic construct
  source 1..20: mol_type = other DNA
aatttaacagatgcttgcaa

SEQ ID NO: 258182 - DNA, 20 bp, synthetic construct
  source 1..20: mol_type = other DNA
aaatttaacagatgcttgca

SEQ ID NO: 258183 - DNA, 20 bp, synthetic construct
  source 1..20: mol_type = other DNA
aaaatttaacagatgcttgc

SEQ ID NO: 258184 - DNA, 20 bp, synthetic construct
  source 1..20: mol_type = other DNA
aaaaatttaacagatgcttg

SEQ ID NO: 258185 - DNA, 20 bp, synthetic construct
  source 1..20: mol_type = other DNA
taaaaatttaacagatgctt

SEQ ID NO: 258186 - DNA, 20 bp, synthetic construct
  source 1..20: mol_type = other DNA
ataaaaatttaacagatgct

SEQ ID NO: 258187 - DNA, 20 bp, synthetic construct
  source 1..20: mol_type = other DNA
aataaaaatttaacagatgc

SEQ ID NO: 258188 - DNA, 20 bp, synthetic construct
  source 1..20: mol_type = other DNA
taataaaaatttaacagatg

SEQ ID NO: 258189 - DNA, 20 bp, synthetic construct
  source 1..20: mol_type = other DNA
ctaataaaaatttaacagat

SEQ ID NO: 258190 - DNA, 20 bp, synthetic construct
  source 1..20: mol_type = other DNA
tctaataaaaatttaacaga

SEQ ID NO: 258191 - DNA, 20 bp, synthetic construct
  source 1..20: mol_type = other DNA
atctaataaaaatttaacag

SEQ ID NO: 258192 - DNA, 20 bp, synthetic construct
  source 1..20: mol_type = other DNA
aatctaataaaaatttaaca

SEQ ID NO: 258193 - DNA, 20 bp, synthetic construct
  source 1..20: mol_type = other DNA
aaatctaataaaaatttaac

SEQ ID NO: 258194 - DNA, 20 bp, synthetic construct
  source 1..20: mol_type = other DNA
aaaatctaataaaaatttaa

SEQ ID NO: 258195 - DNA, 20 bp, synthetic construct
  source 1..20: mol_type = other DNA
taaaatctaataaaaattta

SEQ ID NO: 258196 - DNA, 20 bp, synthetic construct
  source 1..20: mol_type = other DNA
gtaaaatctaataaaaattt

SEQ ID NO: 258197 - DNA, 20 bp, synthetic construct
  source 1..20: mol_type = other DNA
agtaaaatctaataaaaatt

SEQ ID NO: 258198 - DNA, 20 bp, synthetic construct
  source 1..20: mol_type = other DNA
aagtaaaatctaataaaaat

SEQ ID NO: 258199 - DNA, 20 bp, synthetic construct
  source 1..20: mol_type = other DNA
aaagtaaaatctaataaaaa

SEQ ID NO: 258200 - DNA, 20 bp, synthetic construct
  source 1..20: mol_type = other DNA
aaaagtaaaatctaataaaa

SEQ ID NO: 258201 - DNA, 20 bp, synthetic construct
  source 1..20: mol_type = other DNA
taaaagtaaaatctaataaa

SEQ ID NO: 258202 - DNA, 20 bp, synthetic construct
  source 1..20: mol_type = other DNA
ctaaaagtaaaatctaataa

SEQ ID NO: 258203 - DNA, 20 bp, synthetic construct
  source 1..20: mol_type = other DNA
cctaaaagtaaaatctaata

SEQ ID NO: 258204 - DNA, 20 bp, synthetic construct
  source 1..20: mol_type = other DNA
ccctaaaagtaaaatctaat

SEQ ID NO: 258205 - DNA, 20 bp, synthetic construct
  source 1..20: mol_type = other DNA
tccctaaaagtaaaatctaa

SEQ ID NO: 258206 - DNA, 20 bp, synthetic construct
  source 1..20: mol_type = other DNA
ttccctaaaagtaaaatcta

SEQ ID NO: 258207 - DNA, 20 bp, synthetic construct
  source 1..20: mol_type = other DNA
tttccctaaaagtaaaatct

SEQ ID NO: 258208 - DNA, 20 bp, synthetic construct
  source 1..20: mol_type = other DNA
ttttccctaaaagtaaaatc

SEQ ID NO: 258209 - DNA, 20 bp, synthetic construct
  source 1..20: mol_type = other DNA
gttttccctaaaagtaaaat

SEQ ID NO: 258210 - DNA, 20 bp, synthetic construct
  source 1..20: mol_type = other DNA
agttttccctaaaagtaaaa

SEQ ID NO: 258211 - DNA, 20 bp, synthetic construct
  source 1..20: mol_type = other DNA
aagttttccctaaaagtaaa

SEQ ID NO: 258212 - DNA, 20 bp, synthetic construct
  source 1..20: mol_type = other DNA
aaagttttccctaaaagtaa

SEQ ID NO: 258213 - DNA, 20 bp, synthetic construct
  source 1..20: mol_type = other DNA
caaagttttccctaaaagta

SEQ ID NO: 258214 - DNA, 20 bp, synthetic construct
  source 1..20: mol_type = other DNA
tcaaagttttccctaaaagt

SEQ ID NO: 258215 - DNA, 20 bp, synthetic construct
  source 1..20: mol_type = other DNA
ttcaaagttttccctaaaag

SEQ ID NO: 258216 - DNA, 20 bp, synthetic construct
  source 1..20: mol_type = other DNA
tttcaaagttttccctaaaa

SEQ ID NO: 258217 - DNA, 20 bp, synthetic construct
  source 1..20: mol_type = other DNA
atttcaaagttttccctaaa

SEQ ID NO: 258218 - DNA, 20 bp, synthetic construct
  source 1..20: mol_type = other DNA
catttcaaagttttccctaa

SEQ ID NO: 258219 - DNA, 20 bp, synthetic construct
  source 1..20: mol_type = other DNA
gcatttcaaagttttcccta

SEQ ID NO: 258220 - DNA, 20 bp, synthetic construct
  source 1..20: mol_type = other DNA
agcatttcaaagttttccct

SEQ ID NO: 258221 - DNA, 20 bp, synthetic construct
  source 1..20: mol_type = other DNA
tagcatttcaaagttttccc

SEQ ID NO: 258222 - DNA, 20 bp, synthetic construct
  source 1..20: mol_type = other DNA
atagcatttcaaagttttcc

SEQ ID NO: 258223 - DNA, 20 bp, synthetic construct
  source 1..20: mol_type = other DNA
tatagcatttcaaagttttc

SEQ ID NO: 258224 - DNA, 20 bp, synthetic construct
  source 1..20: mol_type = other DNA
ttatagcatttcaaagtttt

SEQ ID NO: 258225 - DNA, 20 bp, synthetic construct
  source 1..20: mol_type = other DNA
tttatagcatttcaaagttt

SEQ ID NO: 258226 - DNA, 20 bp, synthetic construct
  source 1..20: mol_type = other DNA
ctttatagcatttcaaagtt

SEQ ID NO: 258227 - DNA, 20 bp, synthetic construct
  source 1..20: mol_type = other DNA
tctttatagcatttcaaagt

SEQ ID NO: 258228 - DNA, 20 bp, synthetic construct
  source 1..20: mol_type = other DNA
ttctttatagcatttcaaag

SEQ ID NO: 258229 - DNA, 20 bp, synthetic construct
  source 1..20: mol_type = other DNA
cttctttatagcatttcaaa

SEQ ID NO: 258230 - DNA, 20 bp, synthetic construct
  source 1..20: mol_type = other DNA
gcttctttatagcatttcaa

SEQ ID NO: 258231 - DNA, 20 bp, synthetic construct
  source 1..20: mol_type = other DNA
ggcttctttatagcatttca

SEQ ID NO: 258232 - DNA, 20 bp, synthetic construct
  source 1..20: mol_type = other DNA
aggcttctttatagcatttc

SEQ ID NO: 258233 - DNA, 20 bp, synthetic construct
  source 1..20: mol_type = other DNA
caggcttctttatagcattt

SEQ ID NO: 258234 - DNA, 20 bp, synthetic construct
  source 1..20: mol_type = other DNA
acaggcttctttatagcatt

SEQ ID NO: 258235 - DNA, 20 bp, synthetic construct
  source 1..20: mol_type = other DNA
cacaggcttctttatagcat

SEQ ID NO: 258236 - DNA, 20 bp, synthetic construct
  source 1..20: mol_type = other DNA
acacaggcttctttatagca

SEQ ID NO: 258237 - DNA, 20 bp, synthetic construct
  source 1..20: mol_type = other DNA
aacacaggcttctttatagc

SEQ ID NO: 258238 - DNA, 20 bp, synthetic construct
  source 1..20: mol_type = other DNA
aaacacaggcttctttatag

SEQ ID NO: 258239 - DNA, 20 bp, synthetic construct
  source 1..20: mol_type = other DNA
taaacacaggcttctttata

SEQ ID NO: 258240 - DNA, 20 bp, synthetic construct
  source 1..20: mol_type = other DNA
ttaaacacaggcttctttat

SEQ ID NO: 258241 - DNA, 20 bp, synthetic construct
  source 1..20: mol_type = other DNA
tttaaacacaggcttcttta

SEQ ID NO: 258242 - DNA, 20 bp, synthetic construct
  source 1..20: mol_type = other DNA
ttttaaacacaggcttcttt

SEQ ID NO: 258243 - DNA, 20 bp, synthetic construct
  source 1..20: mol_type = other DNA
cttttaaacacaggcttctt

SEQ ID NO: 258244 - DNA, 20 bp, synthetic construct
  source 1..20: mol_type = other DNA
acttttaaacacaggcttct

SEQ ID NO: 258245 - DNA, 20 bp, synthetic construct
  source 1..20: mol_type = other DNA
aacttttaaacacaggcttc

SEQ ID NO: 258246 - DNA, 20 bp, synthetic construct
  source 1..20: mol_type = other DNA
taacttttaaacacaggctt

SEQ ID NO: 258247 - DNA, 20 bp, synthetic construct
  source 1..20: mol_type = other DNA
ttaacttttaaacacaggct

SEQ ID NO: 258248 - DNA, 20 bp, synthetic construct
  source 1..20: mol_type = other DNA
cttaacttttaaacacaggc

SEQ ID NO: 258249 - DNA, 20 bp, synthetic construct
  source 1..20: mol_type = other DNA
tcttaacttttaaacacagg

SEQ ID NO: 258250 - DNA, 20 bp, synthetic construct
  source 1..20: mol_type = other DNA
gtcttaacttttaaacacag

SEQ ID NO: 258251 - DNA, 20 bp, synthetic construct
  source 1..20: mol_type = other DNA
tgtcttaacttttaaacaca

SEQ ID NO: 258252 - DNA, 20 bp, synthetic construct
  source 1..20: mol_type = other DNA
ctgtcttaacttttaaacac

SEQ ID NO: 258253 - DNA, 20 bp, synthetic construct
  source 1..20: mol_type = other DNA
tctgtcttaacttttaaaca

SEQ ID NO: 258254 - DNA, 20 bp, synthetic construct
  source 1..20: mol_type = other DNA
ctctgtcttaacttttaaac

SEQ ID NO: 258255 - DNA, 20 bp, synthetic construct
  source 1..20: mol_type = other DNA
cctctgtcttaacttttaaa

SEQ ID NO: 258256 - DNA, 20 bp, synthetic construct
  source 1..20: mol_type = other DNA
gcctctgtcttaacttttaa

SEQ ID NO: 258257 - DNA, 20 bp, synthetic construct
  source 1..20: mol_type = other DNA
agcctctgtcttaactttta

SEQ ID NO: 258258 - DNA, 20 bp, synthetic construct
  source 1..20: mol_type = other DNA
cagcctctgtcttaactttt

SEQ ID NO: 258259 - DNA, 20 bp, synthetic construct
  source 1..20: mol_type = other DNA
ccagcctctgtcttaacttt

SEQ ID NO: 258260 - DNA, 20 bp, synthetic construct
  source 1..20: mol_type = other DNA
cccagcctctgtcttaactt

SEQ ID NO: 258261 - DNA, 20 bp, synthetic construct
  source 1..20: mol_type = other DNA
ccccagcctctgtcttaact

SEQ ID NO: 258262 - DNA, 20 bp, synthetic construct
  source 1..20: mol_type = other DNA
cccccagcctctgtcttaac

SEQ ID NO: 258263 - DNA, 20 bp, synthetic construct
  source 1..20: mol_type = other DNA
gcccccagcctctgtcttaa

SEQ ID NO: 258264 - DNA, 20 bp, synthetic construct
  source 1..20: mol_type = other DNA
cgcccccagcctctgtctta

SEQ ID NO: 258265 - DNA, 20 bp, synthetic construct
  source 1..20: mol_type = other DNA
tcgcccccagcctctgtctt

SEQ ID NO: 258266 - DNA, 20 bp, synthetic construct
  source 1..20: mol_type = other DNA
atcgcccccagcctctgtct

SEQ ID NO: 258267 - DNA, 20 bp, synthetic construct
  source 1..20: mol_type = other DNA
catcgcccccagcctctgtc

SEQ ID NO: 258268 - DNA, 20 bp, synthetic construct
  source 1..20: mol_type = other DNA
ccatcgcccccagcctctgt

SEQ ID NO: 258269 - DNA, 20 bp, synthetic construct
  source 1..20: mol_type = other DNA
gccatcgcccccagcctctg

SEQ ID NO: 258270 - DNA, 20 bp, synthetic construct
  source 1..20: mol_type = other DNA
agccatcgcccccagcctct

SEQ ID NO: 258271 - DNA, 20 bp, synthetic construct
  source 1..20: mol_type = other DNA
gagccatcgcccccagcctc

SEQ ID NO: 258272 - DNA, 20 bp, synthetic construct
  source 1..20: mol_type = other DNA
tgagccatcgcccccagcct

SEQ ID NO: 258273 - DNA, 20 bp, synthetic construct
  source 1..20: mol_type = other DNA
gtgagccatcgcccccagcc

SEQ ID NO: 258274 - DNA, 20 bp, synthetic construct
  source 1..20: mol_type = other DNA
cgtgagccatcgcccccagc

SEQ ID NO: 258275 - DNA, 20 bp, synthetic construct
  source 1..20: mol_type = other DNA
gcgtgagccatcgcccccag

SEQ ID NO: 258276 - DNA, 20 bp, synthetic construct
  source 1..20: mol_type = other DNA
ggcgtgagccatcgccccca

SEQ ID NO: 258277 - DNA, 20 bp, synthetic construct
  source 1..20: mol_type = other DNA
aggcgtgagccatcgccccc

SEQ ID NO: 258278 - DNA, 20 bp, synthetic construct
  source 1..20: mol_type = other DNA
caggcgtgagccatcgcccc

SEQ ID NO: 258279 - DNA, 20 bp, synthetic construct
  source 1..20: mol_type = other DNA
acaggcgtgagccatcgccc

SEQ ID NO: 258280 - DNA, 20 bp, synthetic construct
  source 1..20: mol_type = other DNA
tacaggcgtgagccatcgcc

SEQ ID NO: 258281 - DNA, 20 bp, synthetic construct
  source 1..20: mol_type = other DNA
ttacaggcgtgagccatcgc

SEQ ID NO: 258282 - DNA, 20 bp, synthetic construct
  source 1..20: mol_type = other DNA
attacaggcgtgagccatcg

SEQ ID NO: 258283 - DNA, 20 bp, synthetic construct
  source 1..20: mol_type = other DNA
gattacaggcgtgagccatc

SEQ ID NO: 258284 - DNA, 20 bp, synthetic construct
  source 1..20: mol_type = other DNA
agattacaggcgtgagccat

SEQ ID NO: 258285 - DNA, 20 bp, synthetic construct
  source 1..20: mol_type = other DNA
gagattacaggcgtgagcca

SEQ ID NO: 258286 - DNA, 20 bp, synthetic construct
  source 1..20: mol_type = other DNA
tgagattacaggcgtgagcc

SEQ ID NO: 258287 - DNA, 20 bp, synthetic construct
  source 1..20: mol_type = other DNA
ctgagattacaggcgtgagc

SEQ ID NO: 258288 - DNA, 20 bp, synthetic construct
  source 1..20: mol_type = other DNA
gctgagattacaggcgtgag

SEQ ID NO: 258289 - DNA, 20 bp, synthetic construct
  source 1..20: mol_type = other DNA
tgctgagattacaggcgtga

SEQ ID NO: 258290 - DNA, 20 bp, synthetic construct
  source 1..20: mol_type = other DNA
gtgctgagattacaggcgtg

SEQ ID NO: 258291 - DNA, 20 bp, synthetic construct
  source 1..20: mol_type = other DNA
agtgctgagattacaggcgt

SEQ ID NO: 258292 - DNA, 20 bp, synthetic construct
  source 1..20: mol_type = other DNA
aagtgctgagattacaggcg

SEQ ID NO: 258293 - DNA, 20 bp, synthetic construct
  source 1..20: mol_type = other DNA
aaagtgctgagattacaggc

SEQ ID NO: 258294 - DNA, 20 bp, synthetic construct
  source 1..20: mol_type = other DNA
caaagtgctgagattacagg

SEQ ID NO: 258295 - DNA, 20 bp, synthetic construct
  source 1..20: mol_type = other DNA
ccaaagtgctgagattacag

SEQ ID NO: 258296 - DNA, 20 bp, synthetic construct
  source 1..20: mol_type = other DNA
cccaaagtgctgagattaca

SEQ ID NO: 258297 - DNA, 20 bp, synthetic construct
  source 1..20: mol_type = other DNA
tcccaaagtgctgagattac

SEQ ID NO: 258298 - DNA, 20 bp, synthetic construct
  source 1..20: mol_type = other DNA
ctcccaaagtgctgagatta

SEQ ID NO: 258299 - DNA, 20 bp, synthetic construct
  source 1..20: mol_type = other DNA
cctcccaaagtgctgagatt

SEQ ID NO: 258300 - DNA, 20 bp, synthetic construct
  source 1..20: mol_type = other DNA
gcctcccaaagtgctgagat

SEQ ID NO: 258301 - DNA, 20 bp, synthetic construct
  source 1..20: mol_type = other DNA
ggcctcccaaagtgctgaga

SEQ ID NO: 258302 - DNA, 20 bp, synthetic construct
  source 1..20: mol_type = other DNA
tggcctcccaaagtgctgag

SEQ ID NO: 258303 - DNA, 20 bp, synthetic construct
  source 1..20: mol_type = other DNA
ttggcctcccaaagtgctga

SEQ ID NO: 258304 - DNA, 20 bp, synthetic construct
  source 1..20: mol_type = other DNA
cttggcctcccaaagtgctg

SEQ ID NO: 258305 - DNA, 20 bp, synthetic construct
  source 1..20: mol_type = other DNA
ccttggcctcccaaagtgct

SEQ ID NO: 258306 - DNA, 20 bp, synthetic construct
  source 1..20: mol_type = other DNA
gccttggcctcccaaagtgc

SEQ ID NO: 258307 - DNA, 20 bp, synthetic construct
  source 1..20: mol_type = other DNA
tgccttggcctcccaaagtg

SEQ ID NO: 258308 - DNA, 20 bp, synthetic construct
  source 1..20: mol_type = other DNA
ctgccttggcctcccaaagt

SEQ ID NO: 258309 - DNA, 20 bp, synthetic construct
  source 1..20: mol_type = other DNA
cctgccttggcctcccaaag

SEQ ID NO: 258310 - DNA, 20 bp, synthetic construct
  source 1..20: mol_type = other DNA
acctgccttggcctcccaaa

SEQ ID NO: 258311 - DNA, 20 bp, synthetic construct
  source 1..20: mol_type = other DNA
cacctgccttggcctcccaa

SEQ ID NO: 258312 - DNA, 20 bp, synthetic construct
  source 1..20: mol_type = other DNA
ccacctgccttggcctccca

SEQ ID NO: 258313 - DNA, 20 bp, synthetic construct
  source 1..20: mol_type = other DNA
tccacctgccttggcctccc

SEQ ID NO: 258314 - DNA, 20 bp, synthetic construct
  source 1..20: mol_type = other DNA
atccacctgccttggcctcc

SEQ ID NO: 258315 - DNA, 20 bp, synthetic construct
  source 1..20: mol_type = other DNA
gatccacctgccttggcctc

SEQ ID NO: 258316 - DNA, 20 bp, synthetic construct
  source 1..20: mol_type = other DNA
tgatccacctgccttggcct

SEQ ID NO: 258317 - DNA, 20 bp, synthetic construct
  source 1..20: mol_type = other DNA
atgatccacctgccttggcc

SEQ ID NO: 258318 - DNA, 20 bp, synthetic construct
  source 1..20: mol_type = other DNA
aatgatccacctgccttggc

SEQ ID NO: 258319 - DNA, 20 bp, synthetic construct
  source 1..20: mol_type = other DNA
aaatgatccacctgccttgg

SEQ ID NO: 258320 - DNA, 20 bp, synthetic construct
  source 1..20: mol_type = other DNA
caaatgatccacctgccttg

SEQ ID NO: 258321 - DNA, 20 bp, synthetic construct
  source 1..20: mol_type = other DNA
tcaaatgatccacctgcctt

SEQ ID NO: 258322 - DNA, 20 bp, synthetic construct
  source 1..20: mol_type = other DNA
ctcaaatgatccacctgcct

SEQ ID NO: 258323 - DNA, 20 bp, synthetic construct
  source 1..20: mol_type = other DNA
cctcaaatgatccacctgcc

SEQ ID NO: 258324 - DNA, 20 bp, synthetic construct
  source 1..20: mol_type = other DNA
acctcaaatgatccacctgc

SEQ ID NO: 258325 - DNA, 20 bp, synthetic construct
  source 1..20: mol_type = other DNA
aacctcaaatgatccacctg

SEQ ID NO: 258326 - DNA, 20 bp, synthetic construct
  source 1..20: mol_type = other DNA
taacctcaaatgatccacct

SEQ ID NO: 258327 - DNA, 20 bp, synthetic construct
  source 1..20: mol_type = other DNA
ctaacctcaaatgatccacc

SEQ ID NO: 258328 - DNA, 20 bp, synthetic construct
  source 1..20: mol_type = other DNA
cctaacctcaaatgatccac

SEQ ID NO: 258329 - DNA, 20 bp, synthetic construct
  source 1..20: mol_type = other DNA
tcctaacctcaaatgatcca

SEQ ID NO: 258330 - DNA, 20 bp, synthetic construct
  source 1..20: mol_type = other DNA
ctcctaacctcaaatgatcc

SEQ ID NO: 258331 - DNA, 20 bp, synthetic construct
  source 1..20: mol_type = other DNA
actcctaacctcaaatgatc

SEQ ID NO: 258332 - DNA, 20 bp, synthetic construct
  source 1..20: mol_type = other DNA
aactcctaacctcaaatgat

SEQ ID NO: 258333 - DNA, 20 bp, synthetic construct
  source 1..20: mol_type = other DNA
gaactcctaacctcaaatga

SEQ ID NO: 258334 - DNA, 20 bp, synthetic construct
  source 1..20: mol_type = other DNA
cgaactcctaacctcaaatg

SEQ ID NO: 258335 - DNA, 20 bp, synthetic construct
  source 1..20: mol_type = other DNA
tcgaactcctaacctcaaat

SEQ ID NO: 258336 - DNA, 20 bp, synthetic construct
  source 1..20: mol_type = other DNA
ctcgaactcctaacctcaaa

SEQ ID NO: 258337 - DNA, 20 bp, synthetic construct
  source 1..20: mol_type = other DNA
tctcgaactcctaacctcaa

SEQ ID NO: 258338 - DNA, 20 bp, synthetic construct
  source 1..20: mol_type = other DNA
gtctcgaactcctaacctca

SEQ ID NO: 258339 - DNA, 20 bp, synthetic construct
  source 1..20: mol_type = other DNA
ggtctcgaactcctaacctc

SEQ ID NO: 258340 - DNA, 20 bp, synthetic construct
  source 1..20: mol_type = other DNA
tggtctcgaactcctaacct

SEQ ID NO: 258341 - DNA, 20 bp, synthetic construct
  source 1..20: mol_type = other DNA
ctggtctcgaactcctaacc

SEQ ID NO: 258342 - DNA, 20 bp, synthetic construct
  source 1..20: mol_type = other DNA
gctggtctcgaactcctaac

SEQ ID NO: 258343 - DNA, 20 bp, synthetic construct
  source 1..20: mol_type = other DNA
ggctggtctcgaactcctaa

SEQ ID NO: 258344 - DNA, 20 bp, synthetic construct
  source 1..20: mol_type = other DNA
aggctggtctcgaactccta

SEQ ID NO: 258345 - DNA, 20 bp, synthetic construct
  source 1..20: mol_type = other DNA
caggctggtctcgaactcct

SEQ ID NO: 258346 - DNA, 20 bp, synthetic construct
  source 1..20: mol_type = other DNA
ccaggctggtctcgaactcc

SEQ ID NO: 258347 - DNA, 20 bp, synthetic construct
  source 1..20: mol_type = other DNA
gccaggctggtctcgaactc

SEQ ID NO: 258348 - DNA, 20 bp, synthetic construct
  source 1..20: mol_type = other DNA
ggccaggctggtctcgaact

SEQ ID NO: 258349 - DNA, 20 bp, synthetic construct
  source 1..20: mol_type = other DNA
tggccaggctggtctcgaac

SEQ ID NO: 258350 - DNA, 20 bp, synthetic construct
  source 1..20: mol_type = other DNA
ttggccaggctggtctcgaa

SEQ ID NO: 258351 - DNA, 20 bp, synthetic construct
  source 1..20: mol_type = other DNA
gttggccaggctggtctcga

SEQ ID NO: 258352 - DNA, 20 bp, synthetic construct
  source 1..20: mol_type = other DNA
tgttggccaggctggtctcg

SEQ ID NO: 258353 - DNA, 20 bp, synthetic construct
  source 1..20: mol_type = other DNA
atgttggccaggctggtctc

SEQ ID NO: 258354 - DNA, 20 bp, synthetic construct
  source 1..20: mol_type = other DNA
catgttggccaggctggtct

SEQ ID NO: 258355 - DNA, 20 bp, synthetic construct
  source 1..20: mol_type = other DNA
ccatgttggccaggctggtc

SEQ ID NO: 258356 - DNA, 20 bp, synthetic construct
  source 1..20: mol_type = other DNA
accatgttggccaggctggt

SEQ ID NO: 258357 - DNA, 20 bp, synthetic construct
  source 1..20: mol_type = other DNA
caccatgttggccaggctgg

SEQ ID NO: 258358 - DNA, 20 bp, synthetic construct
  source 1..20: mol_type = other DNA
tcaccatgttggccaggctg

SEQ ID NO: 258359 - DNA, 20 bp, synthetic construct
  source 1..20: mol_type = other DNA
ctcaccatgttggccaggct

SEQ ID NO: 258360 - DNA, 20 bp, synthetic construct
  source 1..20: mol_type = other DNA
tctcaccatgttggccaggc

SEQ ID NO: 258361 - DNA, 20 bp, synthetic construct
  source 1..20: mol_type = other DNA
gtctcaccatgttggccagg

SEQ ID NO: 258362 - DNA, 20 bp, synthetic construct
  source 1..20: mol_type = other DNA
ggtctcaccatgttggccag

SEQ ID NO: 258363 - DNA, 20 bp, synthetic construct
  source 1..20: mol_type = other DNA
gggtctcaccatgttggcca

SEQ ID NO: 258364 - DNA, 20 bp, synthetic construct
  source 1..20: mol_type = other DNA
agggtctcaccatgttggcc

SEQ ID NO: 258365 - DNA, 20 bp, synthetic construct
  source 1..20: mol_type = other DNA
cagggtctcaccatgttggc

SEQ ID NO: 258366 - DNA, 20 bp, synthetic construct
  source 1..20: mol_type = other DNA
acagggtctcaccatgttgg

SEQ ID NO: 258367 - DNA, 20 bp, synthetic construct
  source 1..20: mol_type = other DNA
gacagggtctcaccatgttg

SEQ ID NO: 258368 - DNA, 20 bp, synthetic construct
  source 1..20: mol_type = other DNA
agacagggtctcaccatgtt

SEQ ID NO: 258369 - DNA, 20 bp, synthetic construct
  source 1..20: mol_type = other DNA
gagacagggtctcaccatgt

SEQ ID NO: 258370 - DNA, 20 bp, synthetic construct
  source 1..20: mol_type = other DNA
agagacagggtctcaccatg

SEQ ID NO: 258371 - DNA, 20 bp, synthetic construct
  source 1..20: mol_type = other DNA
tagagacagggtctcaccat

SEQ ID NO: 258372 - DNA, 20 bp, synthetic construct
  source 1..20: mol_type = other DNA
gtagagacagggtctcacca

SEQ ID NO: 258373 - DNA, 20 bp, synthetic construct
  source 1..20: mol_type = other DNA
agtagagacagggtctcacc

SEQ ID NO: 258374 - DNA, 20 bp, synthetic construct
  source 1..20: mol_type = other DNA
tagtagagacagggtctcac

SEQ ID NO: 258375 - DNA, 20 bp, synthetic construct
  source 1..20: mol_type = other DNA
ttagtagagacagggtctca

SEQ ID NO: 258376 - DNA, 20 bp, synthetic construct
  source 1..20: mol_type = other DNA
tttagtagagacagggtctc

SEQ ID NO: 258377 - DNA, 20 bp, synthetic construct
  source 1..20: mol_type = other DNA
ttttagtagagacagggtct

SEQ ID NO: 258378 - DNA, 20 bp, synthetic construct
  source 1..20: mol_type = other DNA
attttagtagagacagggtc

SEQ ID NO: 258379 - DNA, 20 bp, synthetic construct
  source 1..20: mol_type = other DNA
aattttagtagagacagggt

SEQ ID NO: 258380 - DNA, 20 bp, synthetic construct
  source 1..20: mol_type = other DNA
taattttagtagagacaggg

SEQ ID NO: 258381 - DNA, 20 bp, synthetic construct
  source 1..20: mol_type = other DNA
gtaattttagtagagacagg

SEQ ID NO: 258382 - DNA, 20 bp, synthetic construct
  source 1..20: mol_type = other DNA
tgtaattttagtagagacag

SEQ ID NO: 258383 - DNA, 20 bp, synthetic construct
  source 1..20: mol_type = other DNA
ttgtaattttagtagagaca

SEQ ID NO: 258384 - DNA, 20 bp, synthetic construct
  source 1..20: mol_type = other DNA
tttgtaattttagtagagac

SEQ ID NO: 258385 - DNA, 20 bp, synthetic construct
  source 1..20: mol_type = other DNA
ttttgtaattttagtagaga

SEQ ID NO: 258386 - DNA, 20 bp, synthetic construct
  source 1..20: mol_type = other DNA
tttttgtaattttagtagag

SEQ ID NO: 258387 - DNA, 20 bp, synthetic construct
  source 1..20: mol_type = other DNA
ttttttgtaattttagtaga

SEQ ID NO: 258388 - DNA, 20 bp, synthetic construct
  source 1..20: mol_type = other DNA
attttttgtaattttagtag

SEQ ID NO: 258389 - DNA, 20 bp, synthetic construct
  source 1..20: mol_type = other DNA
aattttttgtaattttagta

SEQ ID NO: 258390 - DNA, 20 bp, synthetic construct
  source 1..20: mol_type = other DNA
taattttttgtaattttagt

SEQ ID NO: 258391 - DNA, 20 bp, synthetic construct
  source 1..20: mol_type = other DNA
ctaattttttgtaattttag

SEQ ID NO: 258392 - DNA, 20 bp, synthetic construct
  source 1..20: mol_type = other DNA
gctaattttttgtaatttta

SEQ ID NO: 258393 - DNA, 20 bp, synthetic construct
  source 1..20: mol_type = other DNA
agctaattttttgtaatttt

SEQ ID NO: 258394 - DNA, 20 bp, synthetic construct
  source 1..20: mol_type = other DNA
cagctaattttttgtaattt

SEQ ID NO: 258395 - DNA, 20 bp, synthetic construct
  source 1..20: mol_type = other DNA
ccagctaattttttgtaatt

SEQ ID NO: 258396 - DNA, 20 bp, synthetic construct
  source 1..20: mol_type = other DNA
cccagctaattttttgtaat

SEQ ID NO: 258397 - DNA, 20 bp, synthetic construct
  source 1..20: mol_type = other DNA
gcccagctaattttttgtaa

SEQ ID NO: 258398 - DNA, 20 bp, synthetic construct
  source 1..20: mol_type = other DNA
cgcccagctaattttttgta

SEQ ID NO: 258399 - DNA, 20 bp, synthetic construct
  source 1..20: mol_type = other DNA
acgcccagctaattttttgt

SEQ ID NO: 258400 - DNA, 20 bp, synthetic construct
  source 1..20: mol_type = other DNA
cacgcccagctaattttttg

SEQ ID NO: 258401 - DNA, 20 bp, synthetic construct
  source 1..20: mol_type = other DNA
ccacgcccagctaatttttt

SEQ ID NO: 258402 - DNA, 20 bp, synthetic construct
  source 1..20: mol_type = other DNA
accacgcccagctaattttt

SEQ ID NO: 258403 - DNA, 20 bp, synthetic construct
  source 1..20: mol_type = other DNA
caccacgcccagctaatttt

SEQ ID NO: 258404 - DNA, 20 bp, synthetic construct
  source 1..20: mol_type = other DNA
ccaccacgcccagctaattt

SEQ ID NO: 258405 - DNA, 20 bp, synthetic construct
  source 1..20: mol_type = other DNA
gccaccacgcccagctaatt

SEQ ID NO: 258406 - DNA, 20 bp, synthetic construct
  source 1..20: mol_type = other DNA
cgccaccacgcccagctaat

SEQ ID NO: 258407 - DNA, 20 bp, synthetic construct
  source 1..20: mol_type = other DNA
ccgccaccacgcccagctaa

SEQ ID NO: 258408 - DNA, 20 bp, synthetic construct
  source 1..20: mol_type = other DNA
cccgccaccacgcccagcta

SEQ ID NO: 258409 - DNA, 20 bp, synthetic construct
  source 1..20: mol_type = other DNA
gcccgccaccacgcccagct

SEQ ID NO: 258410 - DNA, 20 bp, synthetic construct
  source 1..20: mol_type = other DNA
tgcccgccaccacgcccagc

SEQ ID NO: 258411 - DNA, 20 bp, synthetic construct
  source 1..20: mol_type = other DNA
gtgcccgccaccacgcccag

SEQ ID NO: 258412 - DNA, 20 bp, synthetic construct
  source 1..20: mol_type = other DNA
ggtgcccgccaccacgccca

SEQ ID NO: 258413 - DNA, 20 bp, synthetic construct
  source 1..20: mol_type = other DNA
aggtgcccgccaccacgccc

SEQ ID NO: 258414 - DNA, 20 bp, synthetic construct
  source 1..20: mol_type = other DNA
caggtgcccgccaccacgcc

SEQ ID NO: 258415 - DNA, 20 bp, synthetic construct
  source 1..20: mol_type = other DNA
acaggtgcccgccaccacgc

SEQ ID NO: 258416 - DNA, 20 bp, synthetic construct
  source 1..20: mol_type = other DNA
tacaggtgcccgccaccacg

SEQ ID NO: 258417 - DNA, 20 bp, synthetic construct
  source 1..20: mol_type = other DNA
ctacaggtgcccgccaccac

SEQ ID NO: 258418 - DNA, 20 bp, synthetic construct
  source 1..20: mol_type = other DNA
actacaggtgcccgccacca

SEQ ID NO: 258419 - DNA, 20 bp, synthetic construct
  source 1..20: mol_type = other DNA
gactacaggtgcccgccacc

SEQ ID NO: 258420 - DNA, 20 bp, synthetic construct
  source 1..20: mol_type = other DNA
ggactacaggtgcccgccac

SEQ ID NO: 258421 - DNA, 20 bp, synthetic construct
  source 1..20: mol_type = other DNA
gggactacaggtgcccgcca

SEQ ID NO: 258422 - DNA, 20 bp, synthetic construct
  source 1..20: mol_type = other DNA
tgggactacaggtgcccgcc

SEQ ID NO: 258423 - DNA, 20 bp, synthetic construct
  source 1..20: mol_type = other DNA
ctgggactacaggtgcccgc

SEQ ID NO: 258424 - DNA, 20 bp, synthetic construct
  source 1..20: mol_type = other DNA
gctgggactacaggtgcccg

SEQ ID NO: 258425 - DNA, 20 bp, synthetic construct
  source 1..20: mol_type = other DNA
agctgggactacaggtgccc

SEQ ID NO: 258426 - DNA, 20 bp, synthetic construct
  source 1..20: mol_type = other DNA
tagctgggactacaggtgcc

SEQ ID NO: 258427 - DNA, 20 bp, synthetic construct
  source 1..20: mol_type = other DNA
gtagctgggactacaggtgc

SEQ ID NO: 258428 - DNA, 20 bp, synthetic construct
  source 1..20: mol_type = other DNA
agtagctgggactacaggtg

SEQ ID NO: 258429 - DNA, 20 bp, synthetic construct
  source 1..20: mol_type = other DNA
cagtagctgggactacaggt

SEQ ID NO: 258430 - DNA, 20 bp, synthetic construct
  source 1..20: mol_type = other DNA
ccagtagctgggactacagg

SEQ ID NO: 258431 - DNA, 20 bp, synthetic construct
  source 1..20: mol_type = other DNA
cccagtagctgggactacag

SEQ ID NO: 258432 - DNA, 20 bp, synthetic construct
  source 1..20: mol_type = other DNA
ccccagtagctgggactaca

SEQ ID NO: 258433 - DNA, 20 bp, synthetic construct
  source 1..20: mol_type = other DNA
tccccagtagctgggactac

SEQ ID NO: 258434 - DNA, 20 bp, synthetic construct
  source 1..20: mol_type = other DNA
ctccccagtagctgggacta

SEQ ID NO: 258435 - DNA, 20 bp, synthetic construct
  source 1..20: mol_type = other DNA
cctccccagtagctgggact

SEQ ID NO: 258436 - DNA, 20 bp, synthetic construct
  source 1..20: mol_type = other DNA
gcctccccagtagctgggac

SEQ ID NO: 258437 - DNA, 20 bp, synthetic construct
  source 1..20: mol_type = other DNA
agcctccccagtagctggga

SEQ ID NO: 258438 - DNA, 20 bp, synthetic construct
  source 1..20: mol_type = other DNA
cagcctccccagtagctggg

SEQ ID NO: 258439 - DNA, 20 bp, synthetic construct
  source 1..20: mol_type = other DNA
tcagcctccccagtagctgg

SEQ ID NO: 258440 - DNA, 20 bp, synthetic construct
  source 1..20: mol_type = other DNA
ttcagcctccccagtagctg

SEQ ID NO: 258441 - DNA, 20 bp, synthetic construct
  source 1..20: mol_type = other DNA
cttcagcctccccagtagct

SEQ ID NO: 258442 - DNA, 20 bp, synthetic construct
  source 1..20: mol_type = other DNA
gcttcagcctccccagtagc

SEQ ID NO: 258443 - DNA, 20 bp, synthetic construct
  source 1..20: mol_type = other DNA
tgcttcagcctccccagtag

SEQ ID NO: 258444 - DNA, 20 bp, synthetic construct
  source 1..20: mol_type = other DNA
ctgcttcagcctccccagta

SEQ ID NO: 258445 - DNA, 20 bp, synthetic construct
  source 1..20: mol_type = other DNA
cctgcttcagcctccccagt

SEQ ID NO: 258446 - DNA, 20 bp, synthetic construct
  source 1..20: mol_type = other DNA
tcctgcttcagcctccccag

SEQ ID NO: 258447 - DNA, 20 bp, synthetic construct
  source 1..20: mol_type = other DNA
atcctgcttcagcctcccca

SEQ ID NO: 258448 - DNA, 20 bp, synthetic construct
  source 1..20: mol_type = other DNA
tatcctgcttcagcctcccc

SEQ ID NO: 258449 - DNA, 20 bp, synthetic construct
  source 1..20: mol_type = other DNA
ttatcctgcttcagcctccc

SEQ ID NO: 258450 - DNA, 20 bp, synthetic construct
  source 1..20: mol_type = other DNA
cttatcctgcttcagcctcc

SEQ ID NO: 258451 - DNA, 20 bp, synthetic construct
  source 1..20: mol_type = other DNA
acttatcctgcttcagcctc

SEQ ID NO: 258452 - DNA, 20 bp, synthetic construct
  source 1..20: mol_type = other DNA
cacttatcctgcttcagcct

SEQ ID NO: 258453 - DNA, 20 bp, synthetic construct
  source 1..20: mol_type = other DNA
gcacttatcctgcttcagcc

SEQ ID NO: 258454 - DNA, 20 bp, synthetic construct
  source 1..20: mol_type = other DNA
agcacttatcctgcttcagc

SEQ ID NO: 258455 - DNA, 20 bp, synthetic construct
  source 1..20: mol_type = other DNA
aagcacttatcctgcttcag

SEQ ID NO: 258456 - DNA, 20 bp, synthetic construct
  source 1..20: mol_type = other DNA
caagcacttatcctgcttca

SEQ ID NO: 258457 - DNA, 20 bp, synthetic construct
  source 1..20: mol_type = other DNA
tcaagcacttatcctgcttc

SEQ ID NO: 258458 - DNA, 20 bp, synthetic construct
  source 1..20: mol_type = other DNA
ttcaagcacttatcctgctt

SEQ ID NO: 258459 - DNA, 20 bp, synthetic construct
  source 1..20: mol_type = other DNA
gttcaagcacttatcctgct

SEQ ID NO: 258460 - DNA, 20 bp, synthetic construct
  source 1..20: mol_type = other DNA
ggttcaagcacttatcctgc

SEQ ID NO: 258461 - DNA, 20 bp, synthetic construct
  source 1..20: mol_type = other DNA
gggttcaagcacttatcctg

SEQ ID NO: 258462 - DNA, 20 bp, synthetic construct
  source 1..20: mol_type = other DNA
tgggttcaagcacttatcct

SEQ ID NO: 258463 - DNA, 20 bp, synthetic construct
  source 1..20: mol_type = other DNA
ctgggttcaagcacttatcc

SEQ ID NO: 258464 - DNA, 20 bp, synthetic construct
  source 1..20: mol_type = other DNA
cctgggttcaagcacttatc

SEQ ID NO: 258465 - DNA, 20 bp, synthetic construct
  source 1..20: mol_type = other DNA
tcctgggttcaagcacttat

SEQ ID NO: 258466 - DNA, 20 bp, synthetic construct
  source 1..20: mol_type = other DNA
ctcctgggttcaagcactta

SEQ ID NO: 258467 - DNA, 20 bp, synthetic construct
  source 1..20: mol_type = other DNA
cctcctgggttcaagcactt

SEQ ID NO: 258468 - DNA, 20 bp, synthetic construct
  source 1..20: mol_type = other DNA
gcctcctgggttcaagcact

SEQ ID NO: 258469 - DNA, 20 bp, synthetic construct
  source 1..20: mol_type = other DNA
tgcctcctgggttcaagcac

SEQ ID NO: 258470 - DNA, 20 bp, synthetic construct
  source 1..20: mol_type = other DNA
ctgcctcctgggttcaagca

SEQ ID NO: 258471 - DNA, 20 bp, synthetic construct
  source 1..20: mol_type = other DNA
tctgcctcctgggttcaagc

SEQ ID NO: 258472 - DNA, 20 bp, synthetic construct
  source 1..20: mol_type = other DNA
ctctgcctcctgggttcaag

SEQ ID NO: 258473 - DNA, 20 bp, synthetic construct
  source 1..20: mol_type = other DNA
cctctgcctcctgggttcaa

SEQ ID NO: 258474 - DNA, 20 bp, synthetic construct
  source 1..20: mol_type = other DNA
acctctgcctcctgggttca

SEQ ID NO: 258475 - DNA, 20 bp, synthetic construct
  source 1..20: mol_type = other DNA
aacctctgcctcctgggttc

SEQ ID NO: 258476 - DNA, 20 bp, synthetic construct
  source 1..20: mol_type = other DNA
taacctctgcctcctgggtt

SEQ ID NO: 258477 - DNA, 20 bp, synthetic construct
  source 1..20: mol_type = other DNA
gtaacctctgcctcctgggt

SEQ ID NO: 258478 - DNA, 20 bp, synthetic construct
  source 1..20: mol_type = other DNA
tgtaacctctgcctcctggg

SEQ ID NO: 258479 - DNA, 20 bp, synthetic construct
  source 1..20: mol_type = other DNA
ctgtaacctctgcctcctgg

SEQ ID NO: 258480 - DNA, 20 bp, synthetic construct
  source 1..20: mol_type = other DNA
actgtaacctctgcctcctg

SEQ ID NO: 258481 - DNA, 20 bp, synthetic construct
  source 1..20: mol_type = other DNA
cactgtaacctctgcctcct

SEQ ID NO: 258482 - DNA, 20 bp, synthetic construct
  source 1..20: mol_type = other DNA
tcactgtaacctctgcctcc

SEQ ID NO: 258483 - DNA, 20 bp, synthetic construct
  source 1..20: mol_type = other DNA
ctcactgtaacctctgcctc

SEQ ID NO: 258484 - DNA, 20 bp, synthetic construct
  source 1..20: mol_type = other DNA
gctcactgtaacctctgcct

SEQ ID NO: 258485 - DNA, 20 bp, synthetic construct
  source 1..20: mol_type = other DNA
ggctcactgtaacctctgcc

SEQ ID NO: 258486 - DNA, 20 bp, synthetic construct
  source 1..20: mol_type = other DNA
tggctcactgtaacctctgc

SEQ ID NO: 258487 - DNA, 20 bp, synthetic construct
  source 1..20: mol_type = other DNA
ttggctcactgtaacctctg

SEQ ID NO: 258488 - DNA, 20 bp, synthetic construct
  source 1..20: mol_type = other DNA
cttggctcactgtaacctct

SEQ ID NO: 258489 - DNA, 20 bp, synthetic construct
  source 1..20: mol_type = other DNA
tcttggctcactgtaacctc

SEQ ID NO: 258490 - DNA, 20 bp, synthetic construct
  source 1..20: mol_type = other DNA
atcttggctcactgtaacct

SEQ ID NO: 258491 - DNA, 20 bp, synthetic construct
  source 1..20: mol_type = other DNA
gatcttggctcactgtaacc

SEQ ID NO: 258492 - DNA, 20 bp, synthetic construct
  source 1..20: mol_type = other DNA
tgatcttggctcactgtaac

SEQ ID NO: 258493 - DNA, 20 bp, synthetic construct
  source 1..20: mol_type = other DNA
gtgatcttggctcactgtaa

SEQ ID NO: 258494 - DNA, 20 bp, synthetic construct
  source 1..20: mol_type = other DNA
tgtgatcttggctcactgta

SEQ ID NO: 258495 - DNA, 20 bp, synthetic construct
  source 1..20: mol_type = other DNA
gtgtgatcttggctcactgt

SEQ ID NO: 258496 - DNA, 20 bp, synthetic construct
  source 1..20: mol_type = other DNA
ggtgtgatcttggctcactg

SEQ ID NO: 258497 - DNA, 20 bp, synthetic construct
  source 1..20: mol_type = other DNA
tggtgtgatcttggctcact

SEQ ID NO: 258498 - DNA, 20 bp, synthetic construct
  source 1..20: mol_type = other DNA
gtggtgtgatcttggctcac

SEQ ID NO: 258499 - DNA, 20 bp, synthetic construct
  source 1..20: mol_type = other DNA
agtggtgtgatcttggctca

SEQ ID NO: 258500 - DNA, 20 bp, synthetic construct
  source 1..20: mol_type = other DNA
cagtggtgtgatcttggctc

SEQ ID NO: 258501 - DNA, 20 bp, synthetic construct
  source 1..20: mol_type = other DNA
acagtggtgtgatcttggct

SEQ ID NO: 258502 - DNA, 20 bp, synthetic construct
  source 1..20: mol_type = other DNA
tacagtggtgtgatcttggc

SEQ ID NO: 258503 - DNA, 20 bp, synthetic construct
  source 1..20: mol_type = other DNA
gtacagtggtgtgatcttgg

SEQ ID NO: 258504 - DNA, 20 bp, synthetic construct
  source 1..20: mol_type = other DNA
ggtacagtggtgtgatcttg

SEQ ID NO: 258505 - DNA, 20 bp, synthetic construct
  source 1..20: mol_type = other DNA
gggtacagtggtgtgatctt

SEQ ID NO: 258506 - DNA, 20 bp, synthetic construct
  source 1..20: mol_type = other DNA
agggtacagtggtgtgatct

SEQ ID NO: 258507 - DNA, 20 bp, synthetic construct
  source 1..20: mol_type = other DNA
tagggtacagtggtgtgatc

SEQ ID NO: 258508 - DNA, 20 bp, synthetic construct
  source 1..20: mol_type = other DNA
ttagggtacagtggtgtgat

SEQ ID NO: 258509 - DNA, 20 bp, synthetic construct
  source 1..20: mol_type = other DNA
cttagggtacagtggtgtga

SEQ ID NO: 258510 - DNA, 20 bp, synthetic construct
  source 1..20: mol_type = other DNA
gcttagggtacagtggtgtg

SEQ ID NO: 258511 - DNA, 20 bp, synthetic construct
  source 1..20: mol_type = other DNA
ggcttagggtacagtggtgt

SEQ ID NO: 258512 - DNA, 20 bp, synthetic construct
  source 1..20: mol_type = other DNA
aggcttagggtacagtggtg

SEQ ID NO: 258513 - DNA, 20 bp, synthetic construct
  source 1..20: mol_type = other DNA
caggcttagggtacagtggt

SEQ ID NO: 258514 - DNA, 20 bp, synthetic construct
  source 1..20: mol_type = other DNA
ccaggcttagggtacagtgg

SEQ ID NO: 258515 - DNA, 20 bp, synthetic construct
  source 1..20: mol_type = other DNA
cccaggcttagggtacagtg

SEQ ID NO: 258516 - DNA, 20 bp, synthetic construct
  source 1..20: mol_type = other DNA
gcccaggcttagggtacagt

SEQ ID NO: 258517 - DNA, 20 bp, synthetic construct
  source 1..20: mol_type = other DNA
cgcccaggcttagggtacag

SEQ ID NO: 258518 - DNA, 20 bp, synthetic construct
  source 1..20: mol_type = other DNA
tcgcccaggcttagggtaca

SEQ ID NO: 258519 - DNA, 20 bp, synthetic construct
  source 1..20: mol_type = other DNA
gtcgcccaggcttagggtac

SEQ ID NO: 258520 - DNA, 20 bp, synthetic construct
  source 1..20: mol_type = other DNA
tgtcgcccaggcttagggta

SEQ ID NO: 258521 - DNA, 20 bp, synthetic construct
  source 1..20: mol_type = other DNA
ctgtcgcccaggcttagggt

SEQ ID NO: 258522 - DNA, 20 bp, synthetic construct
  source 1..20: mol_type = other DNA
tctgtcgcccaggcttaggg

SEQ ID NO: 258523 - DNA, 20 bp, synthetic construct
  source 1..20: mol_type = other DNA
ctctgtcgcccaggcttagg

SEQ ID NO: 258524 - DNA, 20 bp, synthetic construct
  source 1..20: mol_type = other DNA
actctgtcgcccaggcttag

SEQ ID NO: 258525 - DNA, 20 bp, synthetic construct
  source 1..20: mol_type = other DNA
cactctgtcgcccaggctta

SEQ ID NO: 258526 - DNA, 20 bp, synthetic construct
  source 1..20: mol_type = other DNA
tcactctgtcgcccaggctt

SEQ ID NO: 258527 - DNA, 20 bp, synthetic construct
  source 1..20: mol_type = other DNA
ctcactctgtcgcccaggct

SEQ ID NO: 258528 - DNA, 20 bp, synthetic construct
  source 1..20: mol_type = other DNA
tctcactctgtcgcccaggc

SEQ ID NO: 258529 - DNA, 20 bp, synthetic construct
  source 1..20: mol_type = other DNA
gtctcactctgtcgcccagg

SEQ ID NO: 258530 - DNA, 20 bp, synthetic construct
  source 1..20: mol_type = other DNA
agtctcactctgtcgcccag

SEQ ID NO: 258531 - DNA, 20 bp, synthetic construct
  source 1..20: mol_type = other DNA
gagtctcactctgtcgccca

SEQ ID NO: 258532 - DNA, 20 bp, synthetic construct
  source 1..20: mol_type = other DNA
agagtctcactctgtcgccc

SEQ ID NO: 258533 - DNA, 20 bp, synthetic construct
  source 1..20: mol_type = other DNA
cagagtctcactctgtcgcc

SEQ ID NO: 258534 - DNA, 20 bp, synthetic construct
  source 1..20: mol_type = other DNA
acagagtctcactctgtcgc

SEQ ID NO: 258535 - DNA, 20 bp, synthetic construct
  source 1..20: mol_type = other DNA
gacagagtctcactctgtcg

SEQ ID NO: 258536 - DNA, 20 bp, synthetic construct
  source 1..20: mol_type = other DNA
agacagagtctcactctgtc

SEQ ID NO: 258537 - DNA, 20 bp, synthetic construct
  source 1..20: mol_type = other DNA
gagacagagtctcactctgt

SEQ ID NO: 258538 - DNA, 20 bp, synthetic construct
  source 1..20: mol_type = other DNA
tgagacagagtctcactctg

SEQ ID NO: 258539 - DNA, 20 bp, synthetic construct
  source 1..20: mol_type = other DNA
ttgagacagagtctcactct

SEQ ID NO: 258540 - DNA, 20 bp, synthetic construct
  source 1..20: mol_type = other DNA
tttgagacagagtctcactc

SEQ ID NO: 258541 - DNA, 20 bp, synthetic construct
  source 1..20: mol_type = other DNA
ttttgagacagagtctcact

SEQ ID NO: 258542 - DNA, 20 bp, synthetic construct
  source 1..20: mol_type = other DNA
tttttgagacagagtctcac

SEQ ID NO: 258543 - DNA, 20 bp, synthetic construct
  source 1..20: mol_type = other DNA
ttttttgagacagagtctca

SEQ ID NO: 258544 - DNA, 20 bp, synthetic construct
  source 1..20: mol_type = other DNA
attttttgagacagagtctc

SEQ ID NO: 258545 - DNA, 20 bp, synthetic construct
  source 1..20: mol_type = other DNA
tattttttgagacagagtct

SEQ ID NO: 258546 - DNA, 20 bp, synthetic construct
  source 1..20: mol_type = other DNA
ttattttttgagacagagtc

SEQ ID NO: 258547 - DNA, 20 bp, synthetic construct
  source 1..20: mol_type = other DNA
tttattttttgagacagagt

SEQ ID NO: 258548 - DNA, 20 bp, synthetic construct
  source 1..20: mol_type = other DNA
ttttattttttgagacagag

SEQ ID NO: 258549 - DNA, 20 bp, synthetic construct
  source 1..20: mol_type = other DNA
attttattttttgagacaga

SEQ ID NO: 258550 - DNA, 20 bp, synthetic construct
  source 1..20: mol_type = other DNA
tattttattttttgagacag

SEQ ID NO: 258551 - DNA, 20 bp, synthetic construct
  source 1..20: mol_type = other DNA
ttattttattttttgagaca

SEQ ID NO: 258552 - DNA, 20 bp, synthetic construct
  source 1..20: mol_type = other DNA
tttattttattttttgagac

SEQ ID NO: 258553 - DNA, 20 bp, synthetic construct
  source 1..20: mol_type = other DNA
ttttattttattttttgaga

SEQ ID NO: 258554 - DNA, 20 bp, synthetic construct
  source 1..20: mol_type = other DNA
attttattttattttttgag

SEQ ID NO: 258555 - DNA, 20 bp, synthetic construct
  source 1..20: mol_type = other DNA
tattttattttattttttga

SEQ ID NO: 258556 - DNA, 20 bp, synthetic construct
  source 1..20: mol_type = other DNA
ttattttattttattttttg

SEQ ID NO: 258557 - DNA, 20 bp, synthetic construct
  source 1..20: mol_type = other DNA
tttattttattttatttttt

SEQ ID NO: 258558 - DNA, 20 bp, synthetic construct
  source 1..20: mol_type = other DNA
ctttattttattttattttt

SEQ ID NO: 258559 - DNA, 20 bp, synthetic construct
  source 1..20: mol_type = other DNA
actttattttattttatttt

SEQ ID NO: 258560 - DNA, 20 bp, synthetic construct
  source 1..20: mol_type = other DNA
aactttattttattttattt

SEQ ID NO: 258561 - DNA, 20 bp, synthetic construct
  source 1..20: mol_type = other DNA
taactttattttattttatt

SEQ ID NO: 258562 - DNA, 20 bp, synthetic construct
  source 1..20: mol_type = other DNA
ttaactttattttattttat

SEQ ID NO: 258563 - DNA, 20 bp, synthetic construct
  source 1..20: mol_type = other DNA
cttaactttattttatttta

SEQ ID NO: 258564 - DNA, 20 bp, synthetic construct
  source 1..20: mol_type = other DNA
tcttaactttattttatttt

SEQ ID NO: 258565 - DNA, 20 bp, synthetic construct
  source 1..20: mol_type = other DNA
ctcttaactttattttattt

SEQ ID NO: 258566 - DNA, 20 bp, synthetic construct
  source 1..20: mol_type = other DNA
tctcttaactttattttatt

SEQ ID NO: 258567 - DNA, 20 bp, synthetic construct
  source 1..20: mol_type = other DNA
ctctcttaactttattttat

SEQ ID NO: 258568 - DNA, 20 bp, synthetic construct
  source 1..20: mol_type = other DNA
tctctcttaactttatttta

SEQ ID NO: 258569 - DNA, 20 bp, synthetic construct
  source 1..20: mol_type = other DNA
ttctctcttaactttatttt

SEQ ID NO: 258570 - DNA, 20 bp, synthetic construct
  source 1..20: mol_type = other DNA
tttctctcttaactttattt

SEQ ID NO: 258571 - DNA, 20 bp, synthetic construct
  source 1..20: mol_type = other DNA
ttttctctcttaactttatt

SEQ ID NO: 258572 - DNA, 20 bp, synthetic construct
  source 1..20: mol_type = other DNA
tttttctctcttaactttat

SEQ ID NO: 258573 - DNA, 20 bp, synthetic construct
  source 1..20: mol_type = other DNA
ttttttctctcttaacttta

SEQ ID NO: 258574 - DNA, 20 bp, synthetic construct
  source 1..20: mol_type = other DNA
tttttttctctcttaacttt

SEQ ID NO: 258575 - DNA, 20 bp, synthetic construct
  source 1..20: mol_type = other DNA
atttttttctctcttaactt

SEQ ID NO: 258576 - DNA, 20 bp, synthetic construct
  source 1..20: mol_type = other DNA
tatttttttctctcttaact

SEQ ID NO: 258577 - DNA, 20 bp, synthetic construct
  source 1..20: mol_type = other DNA
atatttttttctctcttaac

SEQ ID NO: 258578 - DNA, 20 bp, synthetic construct
  source 1..20: mol_type = other DNA
tatatttttttctctcttaa

SEQ ID NO: 258579 - DNA, 20 bp, synthetic construct
  source 1..20: mol_type = other DNA
atatatttttttctctctta

SEQ ID NO: 258580 - DNA, 20 bp, synthetic construct
  source 1..20: mol_type = other DNA
gatatatttttttctctctt

SEQ ID NO: 258581 - DNA, 20 bp, synthetic construct
  source 1..20: mol_type = other DNA
ggatatatttttttctctct

SEQ ID NO: 258582 - DNA, 20 bp, synthetic construct
  source 1..20: mol_type = other DNA
aggatatatttttttctctc

SEQ ID NO: 258583 - DNA, 20 bp, synthetic construct
  source 1..20: mol_type = other DNA
taggatatatttttttctct

SEQ ID NO: 258584 - DNA, 20 bp, synthetic construct
  source 1..20: mol_type = other DNA
ataggatatatttttttctc

SEQ ID NO: 258585 - DNA, 20 bp, synthetic construct
  source 1..20: mol_type = other DNA
tataggatatatttttttct

SEQ ID NO: 258586 - DNA, 20 bp, synthetic construct
  source 1..20: mol_type = other DNA
atataggatatatttttttc

SEQ ID NO: 258587 - DNA, 20 bp, synthetic construct
  source 1..20: mol_type = other DNA
gatataggatatattttttt

SEQ ID NO: 258588 - DNA, 20 bp, synthetic construct
  source 1..20: mol_type = other DNA
ggatataggatatatttttt

SEQ ID NO: 258589 - DNA, 20 bp, synthetic construct
  source 1..20: mol_type = other DNA
aggatataggatatattttt

SEQ ID NO: 258590 - DNA, 20 bp, synthetic construct
  source 1..20: mol_type = other DNA
aaggatataggatatatttt

SEQ ID NO: 258591 - DNA, 20 bp, synthetic construct
  source 1..20: mol_type = other DNA
aaaggatataggatatattt

SEQ ID NO: 258592 - DNA, 20 bp, synthetic construct
  source 1..20: mol_type = other DNA
caaaggatataggatatatt

SEQ ID NO: 258593 - DNA, 20 bp, synthetic construct
  source 1..20: mol_type = other DNA
acaaaggatataggatatat

SEQ ID NO: 258594 - DNA, 20 bp, synthetic construct
  source 1..20: mol_type = other DNA
aacaaaggatataggatata

SEQ ID NO: 258595 - DNA, 20 bp, synthetic construct
  source 1..20: mol_type = other DNA
taacaaaggatataggatat

SEQ ID NO: 258596 - DNA, 20 bp, synthetic construct
  source 1..20: mol_type = other DNA
ttaacaaaggatataggata

SEQ ID NO: 258597 - DNA, 20 bp, synthetic construct
  source 1..20: mol_type = other DNA
tttaacaaaggatataggat

SEQ ID NO: 258598 - DNA, 20 bp, synthetic construct
  source 1..20: mol_type = other DNA
atttaacaaaggatatagga

SEQ ID NO: 258599 - DNA, 20 bp, synthetic construct
  source 1..20: mol_type = other DNA
aatttaacaaaggatatagg

SEQ ID NO: 258600 - DNA, 20 bp, synthetic construct
  source 1..20: mol_type = other DNA
gaatttaacaaaggatatag

SEQ ID NO: 258601 - DNA, 20 bp, synthetic construct
  source 1..20: mol_type = other DNA
ggaatttaacaaaggatata

SEQ ID NO: 258602 - DNA, 20 bp, synthetic construct
  source 1..20: mol_type = other DNA
tggaatttaacaaaggatat

SEQ ID NO: 258603 - DNA, 20 bp, synthetic construct
  source 1..20: mol_type = other DNA
ttggaatttaacaaaggata

SEQ ID NO: 258604 - DNA, 20 bp, synthetic construct
  source 1..20: mol_type = other DNA
tttggaatttaacaaaggat

SEQ ID NO: 258605 - DNA, 20 bp, synthetic construct
  source 1..20: mol_type = other DNA
ttttggaatttaacaaagga

SEQ ID NO: 258606 - DNA, 20 bp, synthetic construct
  source 1..20: mol_type = other DNA
gttttggaatttaacaaagg

SEQ ID NO: 258607 - DNA, 20 bp, synthetic construct
  source 1..20: mol_type = other DNA
tgttttggaatttaacaaag

SEQ ID NO: 258608 - DNA, 20 bp, synthetic construct
  source 1..20: mol_type = other DNA
ctgttttggaatttaacaaa

SEQ ID NO: 258609 - DNA, 20 bp, synthetic construct
  source 1..20: mol_type = other DNA
actgttttggaatttaacaa

SEQ ID NO: 258610 - DNA, 20 bp, synthetic construct
  source 1..20: mol_type = other DNA
tactgttttggaatttaaca

SEQ ID NO: 258611 - DNA, 20 bp, synthetic construct
  source 1..20: mol_type = other DNA
ctactgttttggaatttaac

SEQ ID NO: 258612 - DNA, 20 bp, synthetic construct
  source 1..20: mol_type = other DNA
cctactgttttggaatttaa

SEQ ID NO: 258613 - DNA, 20 bp, synthetic construct
  source 1..20: mol_type = other DNA
ccctactgttttggaattta

SEQ ID NO: 258614 - DNA, 20 bp, synthetic construct
  source 1..20: mol_type = other DNA
cccctactgttttggaattt

SEQ ID NO: 258615 - DNA, 20 bp, synthetic construct
  source 1..20: mol_type = other DNA
tcccctactgttttggaatt

SEQ ID NO: 258616 - DNA, 20 bp, synthetic construct
  source 1..20: mol_type = other DNA
gtcccctactgttttggaat

SEQ ID NO: 258617 - DNA, 20 bp, synthetic construct
  source 1..20: mol_type = other DNA
tgtcccctactgttttggaa

SEQ ID NO: 258618 - DNA, 20 bp, synthetic construct
  source 1..20: mol_type = other DNA
ttgtcccctactgttttgga

SEQ ID NO: 258619 - DNA, 20 bp, synthetic construct
  source 1..20: mol_type = other DNA
tttgtcccctactgttttgg

SEQ ID NO: 258620 - DNA, 20 bp, synthetic construct
  source 1..20: mol_type = other DNA
atttgtcccctactgttttg

SEQ ID NO: 258621 - DNA, 20 bp, synthetic construct
  source 1..20: mol_type = other DNA
tatttgtcccctactgtttt

SEQ ID NO: 258622 - DNA, 20 bp, synthetic construct
  source 1..20: mol_type = other DNA
ttatttgtcccctactgttt

SEQ ID NO: 258623 - DNA, 20 bp, synthetic construct
  source 1..20: mol_type = other DNA
gttatttgtcccctactgtt

SEQ ID NO: 258624 - DNA, 20 bp, synthetic construct
  source 1..20: mol_type = other DNA
agttatttgtcccctactgt

SEQ ID NO: 258625 - DNA, 20 bp, synthetic construct
  source 1..20: mol_type = other DNA
cagttatttgtcccctactg

SEQ ID NO: 258626 - DNA, 20 bp, synthetic construct
  source 1..20: mol_type = other DNA
tcagttatttgtcccctact

SEQ ID NO: 258627 - DNA, 20 bp, synthetic construct
  source 1..20: mol_type = other DNA
gtcagttatttgtcccctac

SEQ ID NO: 258628 - DNA, 20 bp, synthetic construct
  source 1..20: mol_type = other DNA
agtcagttatttgtccccta

SEQ ID NO: 258629 - DNA, 20 bp, synthetic construct
  source 1..20: mol_type = other DNA
aagtcagttatttgtcccct

SEQ ID NO: 258630 - DNA, 20 bp, synthetic construct
  source 1..20: mol_type = other DNA
caagtcagttatttgtcccc

SEQ ID NO: 258631 - DNA, 20 bp, synthetic construct
  source 1..20: mol_type = other DNA
tcaagtcagttatttgtccc

SEQ ID NO: 258632 - DNA, 20 bp, synthetic construct
  source 1..20: mol_type = other DNA
gtcaagtcagttatttgtcc

SEQ ID NO: 258633 - DNA, 20 bp, synthetic construct
  source 1..20: mol_type = other DNA
tgtcaagtcagttatttgtc

SEQ ID NO: 258634 - DNA, 20 bp, synthetic construct
  source 1..20: mol_type = other DNA
ctgtcaagtcagttatttgt

SEQ ID NO: 258635 - DNA, 20 bp, synthetic construct
  source 1..20: mol_type = other DNA
cctgtcaagtcagttatttg

SEQ ID NO: 258636 - DNA, 20 bp, synthetic construct
  source 1..20: mol_type = other DNA
acctgtcaagtcagttattt

SEQ ID NO: 258637 - DNA, 20 bp, synthetic construct
  source 1..20: mol_type = other DNA
aacctgtcaagtcagttatt

SEQ ID NO: 258638 - DNA, 20 bp, synthetic construct
  source 1..20: mol_type = other DNA
taacctgtcaagtcagttat

SEQ ID NO: 258639 - DNA, 20 bp, synthetic construct
  source 1..20: mol_type = other DNA
gtaacctgtcaagtcagtta

SEQ ID NO: 258640 - DNA, 20 bp, synthetic construct
  source 1..20: mol_type = other DNA
agtaacctgtcaagtcagtt

SEQ ID NO: 258641 - DNA, 20 bp, synthetic construct
  source 1..20: mol_type = other DNA
tagtaacctgtcaagtcagt

SEQ ID NO: 258642 - DNA, 20 bp, synthetic construct
  source 1..20: mol_type = other DNA
gtagtaacctgtcaagtcag

SEQ ID NO: 258643 - DNA, 20 bp, synthetic construct
  source 1..20: mol_type = other DNA
tgtagtaacctgtcaagtca

SEQ ID NO: 258644 - DNA, 20 bp, synthetic construct
  source 1..20: mol_type = other DNA
ttgtagtaacctgtcaagtc

SEQ ID NO: 258645 - DNA, 20 bp, synthetic construct
  source 1..20: mol_type = other DNA
attgtagtaacctgtcaagt

SEQ ID NO: 258646 - DNA, 20 bp, synthetic construct
  source 1..20: mol_type = other DNA
tattgtagtaacctgtcaag

SEQ ID NO: 258647 - DNA, 20 bp, synthetic construct
  source 1..20: mol_type = other DNA
atattgtagtaacctgtcaa

SEQ ID NO: 258648 - DNA, 20 bp, synthetic construct
  source 1..20: mol_type = other DNA
aatattgtagtaacctgtca

SEQ ID NO: 258649 - DNA, 20 bp, synthetic construct
  source 1..20: mol_type = other DNA
aaatattgtagtaacctgtc

SEQ ID NO: 258650 - DNA, 20 bp, synthetic construct
  source 1..20: mol_type = other DNA
gaaatattgtagtaacctgt

SEQ ID NO: 258651 - DNA, 20 bp, synthetic construct
  source 1..20: mol_type = other DNA
ggaaatattgtagtaacctg

SEQ ID NO: 258652 - DNA, 20 bp, synthetic construct
  source 1..20: mol_type = other DNA
aggaaatattgtagtaacct

SEQ ID NO: 258653 - DNA, 20 bp, synthetic construct
  source 1..20: mol_type = other DNA
caggaaatattgtagtaacc

SEQ ID NO: 258654 - DNA, 20 bp, synthetic construct
  source 1..20: mol_type = other DNA
tcaggaaatattgtagtaac

SEQ ID NO: 258655 - DNA, 20 bp, synthetic construct
  source 1..20: mol_type = other DNA
ttcaggaaatattgtagtaa

SEQ ID NO: 258656 - DNA, 20 bp, synthetic construct
  source 1..20: mol_type = other DNA
tttcaggaaatattgtagta

SEQ ID NO: 258657 - DNA, 20 bp, synthetic construct
  source 1..20: mol_type = other DNA
atttcaggaaatattgtagt

SEQ ID NO: 258658 - DNA, 20 bp, synthetic construct
  source 1..20: mol_type = other DNA
catttcaggaaatattgtag

SEQ ID NO: 258659 - DNA, 20 bp, synthetic construct
  source 1..20: mol_type = other DNA
tcatttcaggaaatattgta

SEQ ID NO: 258660 - DNA, 20 bp, synthetic construct
  source 1..20: mol_type = other DNA
atcatttcaggaaatattgt

SEQ ID NO: 258661 - DNA, 20 bp, synthetic construct
  source 1..20: mol_type = other DNA
catcatttcaggaaatattg

SEQ ID NO: 258662 - DNA, 20 bp, synthetic construct
  source 1..20: mol_type = other DNA
acatcatttcaggaaatatt

SEQ ID NO: 258663 - DNA, 20 bp, synthetic construct
  source 1..20: mol_type = other DNA
aacatcatttcaggaaatat

SEQ ID NO: 258664 - DNA, 20 bp, synthetic construct
  source 1..20: mol_type = other DNA
aaacatcatttcaggaaata

SEQ ID NO: 258665 - DNA, 20 bp, synthetic construct
  source 1..20: mol_type = other DNA
aaaacatcatttcaggaaat

SEQ ID NO: 258666 - DNA, 20 bp, synthetic construct
  source 1..20: mol_type = other DNA
gaaaacatcatttcaggaaa

SEQ ID NO: 258667 - DNA, 20 bp, synthetic construct
  source 1..20: mol_type = other DNA
agaaaacatcatttcaggaa

SEQ ID NO: 258668 - DNA, 20 bp, synthetic construct
  source 1..20: mol_type = other DNA
aagaaaacatcatttcagga

SEQ ID NO: 258669 - DNA, 20 bp, synthetic construct
  source 1..20: mol_type = other DNA
caagaaaacatcatttcagg

SEQ ID NO: 258670 - DNA, 20 bp, synthetic construct
  source 1..20: mol_type = other DNA
tcaagaaaacatcatttcag

SEQ ID NO: 258671 - DNA, 20 bp, synthetic construct
  source 1..20: mol_type = other DNA
ttcaagaaaacatcatttca

SEQ ID NO: 258672 - DNA, 20 bp, synthetic construct
  source 1..20: mol_type = other DNA
attcaagaaaacatcatttc

SEQ ID NO: 258673 - DNA, 20 bp, synthetic construct
  source 1..20: mol_type = other DNA
tattcaagaaaacatcattt

SEQ ID NO: 258674 - DNA, 20 bp, synthetic construct
  source 1..20: mol_type = other DNA
gtattcaagaaaacatcatt

SEQ ID NO: 258675 - DNA, 20 bp, synthetic construct
  source 1..20: mol_type = other DNA
agtattcaagaaaacatcat

SEQ ID NO: 258676 - DNA, 20 bp, synthetic construct
  source 1..20: mol_type = other DNA
cagtattcaagaaaacatca

SEQ ID NO: 258677 - DNA, 20 bp, synthetic construct
  source 1..20: mol_type = other DNA
ccagtattcaagaaaacatc

SEQ ID NO: 258678 - DNA, 20 bp, synthetic construct
  source 1..20: mol_type = other DNA
gccagtattcaagaaaacat

SEQ ID NO: 258679 - DNA, 20 bp, synthetic construct
  source 1..20: mol_type = other DNA
ggccagtattcaagaaaaca

SEQ ID NO: 258680 - DNA, 20 bp, synthetic construct
  source 1..20: mol_type = other DNA
aggccagtattcaagaaaac

SEQ ID NO: 258681 - DNA, 20 bp, synthetic construct
  source 1..20: mol_type = other DNA
taggccagtattcaagaaaa

SEQ ID NO: 258682 - DNA, 20 bp, synthetic construct
  source 1..20: mol_type = other DNA
gtaggccagtattcaagaaa

SEQ ID NO: 258683 - DNA, 20 bp, synthetic construct
  source 1..20: mol_type = other DNA
agtaggccagtattcaagaa

SEQ ID NO: 258684 - DNA, 20 bp, synthetic construct
  source 1..20: mol_type = other DNA
tagtaggccagtattcaaga

SEQ ID NO: 258685 - DNA, 20 bp, synthetic construct
  source 1..20: mol_type = other DNA
ctagtaggccagtattcaag

SEQ ID NO: 258686 - DNA, 20 bp, synthetic construct
  source 1..20: mol_type = other DNA
tctagtaggccagtattcaa

SEQ ID NO: 258687 - DNA, 20 bp, synthetic construct
  source 1..20: mol_type = other DNA
ctctagtaggccagtattca

SEQ ID NO: 258688 - DNA, 20 bp, synthetic construct
  source 1..20: mol_type = other DNA
cctctagtaggccagtattc

SEQ ID NO: 258689 - DNA, 20 bp, synthetic construct
  source 1..20: mol_type = other DNA
acctctagtaggccagtatt

SEQ ID NO: 258690 - DNA, 20 bp, synthetic construct
  source 1..20: mol_type = other DNA
aacctctagtaggccagtat

SEQ ID NO: 258691 - DNA, 20 bp, synthetic construct
  source 1..20: mol_type = other DNA
gaacctctagtaggccagta

SEQ ID NO: 258692 - DNA, 20 bp, synthetic construct
  source 1..20: mol_type = other DNA
tgaacctctagtaggccagt

SEQ ID NO: 258693 - DNA, 20 bp, synthetic construct
  source 1..20: mol_type = other DNA
atgaacctctagtaggccag

SEQ ID NO: 258694 - DNA, 20 bp, synthetic construct
  source 1..20: mol_type = other DNA
tatgaacctctagtaggcca

SEQ ID NO: 258695 - DNA, 20 bp, synthetic construct
  source 1..20: mol_type = other DNA
ctatgaacctctagtaggcc

SEQ ID NO: 258696 - DNA, 20 bp, synthetic construct
  source 1..20: mol_type = other DNA
cctatgaacctctagtaggc

SEQ ID NO: 258697 - DNA, 20 bp, synthetic construct
  source 1..20: mol_type = other DNA
acctatgaacctctagtagg

SEQ ID NO: 258698 - DNA, 20 bp, synthetic construct
  source 1..20: mol_type = other DNA
cacctatgaacctctagtag

SEQ ID NO: 258699 - DNA, 20 bp, synthetic construct
  source 1..20: mol_type = other DNA
acacctatgaacctctagta

SEQ ID NO: 258700 - DNA, 20 bp, synthetic construct
  source 1..20: mol_type = other DNA
cacacctatgaacctctagt

SEQ ID NO: 258701 - DNA, 20 bp, synthetic construct
  source 1..20: mol_type = other DNA
acacacctatgaacctctag

SEQ ID NO: 258702 - DNA, 20 bp, synthetic construct
  source 1..20: mol_type = other DNA
aacacacctatgaacctcta

SEQ ID NO: 258703 - DNA, 20 bp, synthetic construct
  source 1..20: mol_type = other DNA
aaacacacctatgaacctct

SEQ ID NO: 258704 - DNA, 20 bp, synthetic construct
  source 1..20: mol_type = other DNA
caaacacacctatgaacctc

SEQ ID NO: 258705 - DNA, 20 bp, synthetic construct
  source 1..20: mol_type = other DNA
ccaaacacacctatgaacct

SEQ ID NO: 258706 - DNA, 20 bp, synthetic construct
  source 1..20: mol_type = other DNA
tccaaacacacctatgaacc

SEQ ID NO: 258707 - DNA, 20 bp, synthetic construct
  source 1..20: mol_type = other DNA
atccaaacacacctatgaac

SEQ ID NO: 258708 - DNA, 20 bp, synthetic construct
  source 1..20: mol_type = other DNA
aatccaaacacacctatgaa

SEQ ID NO: 258709 - DNA, 20 bp, synthetic construct
  source 1..20: mol_type = other DNA
taatccaaacacacctatga

SEQ ID NO: 258710 - DNA, 20 bp, synthetic construct
  source 1..20: mol_type = other DNA
ttaatccaaacacacctatg

SEQ ID NO: 258711 - DNA, 20 bp, synthetic construct
  source 1..20: mol_type = other DNA
tttaatccaaacacacctat

SEQ ID NO: 258712 - DNA, 20 bp, synthetic construct
  source 1..20: mol_type = other DNA
ttttaatccaaacacaccta

SEQ ID NO: 258713 - DNA, 20 bp, synthetic construct
  source 1..20: mol_type = other DNA
tttttaatccaaacacacct

SEQ ID NO: 258714 - DNA, 20 bp, synthetic construct
  source 1..20: mol_type = other DNA
ttttttaatccaaacacacc

SEQ ID NO: 258715 - DNA, 20 bp, synthetic construct
  source 1..20: mol_type = other DNA
cttttttaatccaaacacac

SEQ ID NO: 258716 - DNA, 20 bp, synthetic construct
  source 1..20: mol_type = other DNA
tcttttttaatccaaacaca

SEQ ID NO: 258717 - DNA, 20 bp, synthetic construct
  source 1..20: mol_type = other DNA
ctcttttttaatccaaacac

SEQ ID NO: 258718 - DNA, 20 bp, synthetic construct
  source 1..20: mol_type = other DNA
actcttttttaatccaaaca

SEQ ID NO: 258719 - DNA, 20 bp, synthetic construct
  source 1..20: mol_type = other DNA
aactcttttttaatccaaac

SEQ ID NO: 258720 - DNA, 20 bp, synthetic construct
  source 1..20: mol_type = other DNA
gaactcttttttaatccaaa

SEQ ID NO: 258721 - DNA, 20 bp, synthetic construct
  source 1..20: mol_type = other DNA
ggaactcttttttaatccaa

SEQ ID NO: 258722 - DNA, 20 bp, synthetic construct
  source 1..20: mol_type = other DNA
tggaactcttttttaatcca

SEQ ID NO: 258723 - DNA, 20 bp, synthetic construct
  source 1..20: mol_type = other DNA
atggaactcttttttaatcc

SEQ ID NO: 258724 - DNA, 20 bp, synthetic construct
  source 1..20: mol_type = other DNA
catggaactcttttttaatc

SEQ ID NO: 258725 - DNA, 20 bp, synthetic construct
  source 1..20: mol_type = other DNA
ccatggaactcttttttaat

SEQ ID NO: 258726 - DNA, 20 bp, synthetic construct
  source 1..20: mol_type = other DNA
gccatggaactcttttttaa

SEQ ID NO: 258727 - DNA, 20 bp, synthetic construct
  source 1..20: mol_type = other DNA
ggccatggaactctttttta

SEQ ID NO: 258728 - DNA, 20 bp, synthetic construct
  source 1..20: mol_type = other DNA
gggccatggaactctttttt

SEQ ID NO: 258729 - DNA, 20 bp, synthetic construct
  source 1..20: mol_type = other DNA
tgggccatggaactcttttt

SEQ ID NO: 258730 - DNA, 20 bp, synthetic construct
  source 1..20: mol_type = other DNA
ctgggccatggaactctttt

SEQ ID NO: 258731 - DNA, 20 bp, synthetic construct
  source 1..20: mol_type = other DNA
actgggccatggaactcttt

SEQ ID NO: 258732 - DNA, 20 bp, synthetic construct
  source 1..20: mol_type = other DNA
cactgggccatggaactctt

SEQ ID NO: 258733 - DNA, 20 bp, synthetic construct
  source 1..20: mol_type = other DNA
tcactgggccatggaactct

SEQ ID NO: 258734 - DNA, 20 bp, synthetic construct
  source 1..20: mol_type = other DNA
gtcactgggccatggaactc

SEQ ID NO: 258735 - DNA, 20 bp, synthetic construct
  source 1..20: mol_type = other DNA
agtcactgggccatggaact

SEQ ID NO: 258736 - DNA, 20 bp, synthetic construct
  source 1..20: mol_type = other DNA
cagtcactgggccatggaac

SEQ ID NO: 258737 - DNA, 20 bp, synthetic construct
  source 1..20: mol_type = other DNA
ccagtcactgggccatggaa

SEQ ID NO: 258738 - DNA, 20 bp, synthetic construct
  source 1..20: mol_type = other DNA
cccagtcactgggccatgga

SEQ ID NO: 258739 - DNA, 20 bp, synthetic construct
  source 1..20: mol_type = other DNA
ccccagtcactgggccatgg

SEQ ID NO: 258740 - DNA, 20 bp, synthetic construct
  source 1..20: mol_type = other DNA
cccccagtcactgggccatg

SEQ ID NO: 258741 - DNA, 20 bp, synthetic construct
  source 1..20: mol_type = other DNA
tcccccagtcactgggccat

SEQ ID NO: 258742 - DNA, 20 bp, synthetic construct
  source 1..20: mol_type = other DNA
ttcccccagtcactgggcca

SEQ ID NO: 258743 - DNA, 20 bp, synthetic construct
  source 1..20: mol_type = other DNA
tttcccccagtcactgggcc

SEQ ID NO: 258744 - DNA, 20 bp, synthetic construct
  source 1..20: mol_type = other DNA
ttttcccccagtcactgggc

SEQ ID NO: 258745 - DNA, 20 bp, synthetic construct
  source 1..20: mol_type = other DNA
tttttcccccagtcactggg

SEQ ID NO: 258746 - DNA, 20 bp, synthetic construct
  source 1..20: mol_type = other DNA
ttttttcccccagtcactgg

SEQ ID NO: 258747 - DNA, 20 bp, synthetic construct
  source 1..20: mol_type = other DNA
tttttttcccccagtcactg

SEQ ID NO: 258748 - DNA, 20 bp, synthetic construct
  source 1..20: mol_type = other DNA
atttttttcccccagtcact

SEQ ID NO: 258749 - DNA, 20 bp, synthetic construct
  source 1..20: mol_type = other DNA
tatttttttcccccagtcac

SEQ ID NO: 258750 - DNA, 20 bp, synthetic construct
  source 1..20: mol_type = other DNA
ttatttttttcccccagtca

SEQ ID NO: 258751 - DNA, 20 bp, synthetic construct
  source 1..20: mol_type = other DNA
tttatttttttcccccagtc

SEQ ID NO: 258752 - DNA, 20 bp, synthetic construct
  source 1..20: mol_type = other DNA
ttttatttttttcccccagt

SEQ ID NO: 258753 - DNA, 20 bp, synthetic construct
  source 1..20: mol_type = other DNA
cttttatttttttcccccag

SEQ ID NO: 258754 - DNA, 20 bp, synthetic construct
  source 1..20: mol_type = other DNA
tcttttatttttttccccca

SEQ ID NO: 258755 - DNA, 20 bp, synthetic construct
  source 1..20: mol_type = other DNA
gtcttttatttttttccccc

SEQ ID NO: 258756 - DNA, 20 bp, synthetic construct
  source 1..20: mol_type = other DNA
agtcttttatttttttcccc

SEQ ID NO: 258757 - DNA, 20 bp, synthetic construct
  source 1..20: mol_type = other DNA
tagtcttttatttttttccc

SEQ ID NO: 258758 - DNA, 20 bp, synthetic construct
  source 1..20: mol_type = other DNA
ttagtcttttatttttttcc

SEQ ID NO: 258759 - DNA, 20 bp, synthetic construct
  source 1..20: mol_type = other DNA
tttagtcttttatttttttc

SEQ ID NO: 258760 - DNA, 20 bp, synthetic construct
  source 1..20: mol_type = other DNA
ctttagtcttttattttttt

SEQ ID NO: 258761 - DNA, 20 bp, synthetic construct
  source 1..20: mol_type = other DNA
actttagtcttttatttttt

SEQ ID NO: 258762 - DNA, 20 bp, synthetic construct
  source 1..20: mol_type = other DNA
tactttagtcttttattttt

SEQ ID NO: 258763 - DNA, 20 bp, synthetic construct
  source 1..20: mol_type = other DNA
ttactttagtcttttatttt

SEQ ID NO: 258764 - DNA, 20 bp, synthetic construct
  source 1..20: mol_type = other DNA
cttactttagtcttttattt

SEQ ID NO: 258765 - DNA, 20 bp, synthetic construct
  source 1..20: mol_type = other DNA
acttactttagtcttttatt

SEQ ID NO: 258766 - DNA, 20 bp, synthetic construct
  source 1..20: mol_type = other DNA
aacttactttagtcttttat

SEQ ID NO: 258767 - DNA, 20 bp, synthetic construct
  source 1..20: mol_type = other DNA
taacttactttagtctttta

SEQ ID NO: 258768 - DNA, 20 bp, synthetic construct
  source 1..20: mol_type = other DNA
ttaacttactttagtctttt

SEQ ID NO: 258769 - DNA, 20 bp, synthetic construct
  source 1..20: mol_type = other DNA
tttaacttactttagtcttt

SEQ ID NO: 258770 - DNA, 20 bp, synthetic construct
  source 1..20: mol_type = other DNA
gtttaacttactttagtctt

SEQ ID NO: 258771 - DNA, 20 bp, synthetic construct
  source 1..20: mol_type = other DNA
tgtttaacttactttagtct

SEQ ID NO: 258772 - DNA, 20 bp, synthetic construct
  source 1..20: mol_type = other DNA
ctgtttaacttactttagtc

SEQ ID NO: 258773 - DNA, 20 bp, synthetic construct
  source 1..20: mol_type = other DNA
cctgtttaacttactttagt

SEQ ID NO: 258774 - DNA, 20 bp, synthetic construct
  source 1..20: mol_type = other DNA
gcctgtttaacttactttag

SEQ ID NO: 258775 - DNA, 20 bp, synthetic construct
  source 1..20: mol_type = other DNA
agcctgtttaacttacttta

SEQ ID NO: 258776 - DNA, 20 bp, synthetic construct
  source 1..20: mol_type = other DNA
aagcctgtttaacttacttt

SEQ ID NO: 258777 - DNA, 20 bp, synthetic construct
  source 1..20: mol_type = other DNA
aaagcctgtttaacttactt

SEQ ID NO: 258778 - DNA, 20 bp, synthetic construct
  source 1..20: mol_type = other DNA
aaaagcctgtttaacttact

SEQ ID NO: 258779 - DNA, 20 bp, synthetic construct
  source 1..20: mol_type = other DNA
gaaaagcctgtttaacttac

SEQ ID NO: 258780 - DNA, 20 bp, synthetic construct
  source 1..20: mol_type = other DNA
agaaaagcctgtttaactta

SEQ ID NO: 258781 - DNA, 20 bp, synthetic construct
  source 1..20: mol_type = other DNA
cagaaaagcctgtttaactt

SEQ ID NO: 258782 - DNA, 20 bp, synthetic construct
  source 1..20: mol_type = other DNA
gcagaaaagcctgtttaact

SEQ ID NO: 258783 - DNA, 20 bp, synthetic construct
  source 1..20: mol_type = other DNA
agcagaaaagcctgtttaac

SEQ ID NO: 258784 - DNA, 20 bp, synthetic construct
  source 1..20: mol_type = other DNA
cagcagaaaagcctgtttaa

SEQ ID NO: 258785 - DNA, 20 bp, synthetic construct
  source 1..20: mol_type = other DNA
gcagcagaaaagcctgttta

SEQ ID NO: 258786 - DNA, 20 bp, synthetic construct
  source 1..20: mol_type = other DNA
tgcagcagaaaagcctgttt

SEQ ID NO: 258787 - DNA, 20 bp, synthetic construct
  source 1..20: mol_type = other DNA
ctgcagcagaaaagcctgtt

SEQ ID NO: 258788 - DNA, 20 bp, synthetic construct
  source 1..20: mol_type = other DNA
cctgcagcagaaaagcctgt

SEQ ID NO: 258789 - DNA, 20 bp, synthetic construct
  source 1..20: mol_type = other DNA
tcctgcagcagaaaagcctg

SEQ ID NO: 258790 - DNA, 20 bp, synthetic construct
  source 1..20: mol_type = other DNA
gtcctgcagcagaaaagcct

SEQ ID NO: 258791 - DNA, 20 bp, synthetic construct
  source 1..20: mol_type = other DNA
agtcctgcagcagaaaagcc

SEQ ID NO: 258792 - DNA, 20 bp, synthetic construct
  source 1..20: mol_type = other DNA
aagtcctgcagcagaaaagc

SEQ ID NO: 258793 - DNA, 20 bp, synthetic construct
  source 1..20: mol_type = other DNA
caagtcctgcagcagaaaag

SEQ ID NO: 258794 - DNA, 20 bp, synthetic construct
  source 1..20: mol_type = other DNA
acaagtcctgcagcagaaaa

SEQ ID NO: 258795 - DNA, 20 bp, synthetic construct
  source 1..20: mol_type = other DNA
gacaagtcctgcagcagaaa

SEQ ID NO: 258796 - DNA, 20 bp, synthetic construct
  source 1..20: mol_type = other DNA
tgacaagtcctgcagcagaa

SEQ ID NO: 258797 - DNA, 20 bp, synthetic construct
  source 1..20: mol_type = other DNA
ctgacaagtcctgcagcaga

SEQ ID NO: 258798 - DNA, 20 bp, synthetic construct
  source 1..20: mol_type = other DNA
tctgacaagtcctgcagcag

SEQ ID NO: 258799 - DNA, 20 bp, synthetic construct
  source 1..20: mol_type = other DNA
ctctgacaagtcctgcagca

SEQ ID NO: 258800 - DNA, 20 bp, synthetic construct
  source 1..20: mol_type = other DNA
gctctgacaagtcctgcagc

SEQ ID NO: 258801 - DNA, 20 bp, synthetic construct
  source 1..20: mol_type = other DNA
ggctctgacaagtcctgcag

SEQ ID NO: 258802 - DNA, 20 bp, synthetic construct
  source 1..20: mol_type = other DNA
aggctctgacaagtcctgca

SEQ ID NO: 258803 - DNA, 20 bp, synthetic construct
  source 1..20: mol_type = other DNA
aaggctctgacaagtcctgc

SEQ ID NO: 258804 - DNA, 20 bp, synthetic construct
  source 1..20: mol_type = other DNA
aaaggctctgacaagtcctg

SEQ ID NO: 258805 - DNA, 20 bp, synthetic construct
  source 1..20: mol_type = other DNA
taaaggctctgacaagtcct

SEQ ID NO: 258806 - DNA, 20 bp, synthetic construct
  source 1..20: mol_type = other DNA
ttaaaggctctgacaagtcc

SEQ ID NO: 258807 - DNA, 20 bp, synthetic construct
  source 1..20: mol_type = other DNA
attaaaggctctgacaagtc

SEQ ID NO: 258808 - DNA, 20 bp, synthetic construct
  source 1..20: mol_type = other DNA
cattaaaggctctgacaagt

SEQ ID NO: 258809 - DNA, 20 bp, synthetic construct
  source 1..20: mol_type = other DNA
acattaaaggctctgacaag

SEQ ID NO: 258810 - DNA, 20 bp, synthetic construct
  source 1..20: mol_type = other DNA
tacattaaaggctctgacaa

SEQ ID NO: 258811 - DNA, 20 bp, synthetic construct
  source 1..20: mol_type = other DNA
gtacattaaaggctctgaca

SEQ ID NO: 258812 - DNA, 20 bp, synthetic construct
  source 1..20: mol_type = other DNA
agtacattaaaggctctgac

SEQ ID NO: 258813 - DNA, 20 bp, synthetic construct
  source 1..20: mol_type = other DNA
tagtacattaaaggctctga

SEQ ID NO: 258814 - DNA, 20 bp, synthetic construct
  source 1..20: mol_type = other DNA
ttagtacattaaaggctctg

SEQ ID NO: 258815 - DNA, 20 bp, synthetic construct
  source 1..20: mol_type = other DNA
attagtacattaaaggctct

SEQ ID NO: 258816 - DNA, 20 bp, synthetic construct
  source 1..20: mol_type = other DNA
cattagtacattaaaggctc

SEQ ID NO: 258817 - DNA, 20 bp, synthetic construct
  source 1..20: mol_type = other DNA
ccattagtacattaaaggct

SEQ ID NO: 258818 - DNA, 20 bp, synthetic construct
  source 1..20: mol_type = other DNA
gccattagtacattaaaggc

SEQ ID NO: 258819 - DNA, 20 bp, synthetic construct
  source 1..20: mol_type = other DNA
ggccattagtacattaaagg

SEQ ID NO: 258820 - DNA, 20 bp, synthetic construct
  source 1..20: mol_type = other DNA
tggccattagtacattaaag

SEQ ID NO: 258821 - DNA, 20 bp, synthetic construct
  source 1..20: mol_type = other DNA
atggccattagtacattaaa

SEQ ID NO: 258822 - DNA, 20 bp, synthetic construct
  source 1..20: mol_type = other DNA
aatggccattagtacattaa

SEQ ID NO: 258823 - DNA, 20 bp, synthetic construct
  source 1..20: mol_type = other DNA
caatggccattagtacatta

SEQ ID NO: 258824 - DNA, 20 bp, synthetic construct
  source 1..20: mol_type = other DNA
acaatggccattagtacatt

SEQ ID NO: 258825 - DNA, 20 bp, synthetic construct
  source 1..20: mol_type = other DNA
cacaatggccattagtacat

SEQ ID NO: 258826 - DNA, 20 bp, synthetic construct
  source 1..20: mol_type = other DNA
tcacaatggccattagtaca

SEQ ID NO: 258827 - DNA, 20 bp, synthetic construct
  source 1..20: mol_type = other DNA
gtcacaatggccattagtac

SEQ ID NO: 258828 - DNA, 20 bp, synthetic construct
  source 1..20: mol_type = other DNA
ggtcacaatggccattagta

SEQ ID NO: 258829 - DNA, 20 bp, synthetic construct
  source 1..20: mol_type = other DNA
gggtcacaatggccattagt

SEQ ID NO: 258830 - DNA, 20 bp, synthetic construct
  source 1..20: mol_type = other DNA
agggtcacaatggccattag

SEQ ID NO: 258831 - DNA, 20 bp, synthetic construct
  source 1..20: mol_type = other DNA
gagggtcacaatggccatta

SEQ ID NO: 258832 - DNA, 20 bp, synthetic construct
  source 1..20: mol_type = other DNA
agagggtcacaatggccatt

SEQ ID NO: 258833 - DNA, 20 bp, synthetic construct
  source 1..20: mol_type = other DNA
cagagggtcacaatggccat

SEQ ID NO: 258834 - DNA, 20 bp, synthetic construct
  source 1..20: mol_type = other DNA
tcagagggtcacaatggcca

SEQ ID NO: 258835 - DNA, 20 bp, synthetic construct
  source 1..20: mol_type = other DNA
ctcagagggtcacaatggcc

SEQ ID NO: 258836 - DNA, 20 bp, synthetic construct
  source 1..20: mol_type = other DNA
tctcagagggtcacaatggc

SEQ ID NO: 258837 - DNA, 20 bp, synthetic construct
  source 1..20: mol_type = other DNA
ttctcagagggtcacaatgg

SEQ ID NO: 258838 - DNA, 20 bp, synthetic construct
  source 1..20: mol_type = other DNA
cttctcagagggtcacaatg

SEQ ID NO: 258839 - DNA, 20 bp, synthetic construct
  source 1..20: mol_type = other DNA
ccttctcagagggtcacaat

SEQ ID NO: 258840 - DNA, 20 bp, synthetic construct
  source 1..20: mol_type = other DNA
accttctcagagggtcacaa

SEQ ID NO: 258841 - DNA, 20 bp, synthetic construct
  source 1..20: mol_type = other DNA
gaccttctcagagggtcaca

SEQ ID NO: 258842 - DNA, 20 bp, synthetic construct
  source 1..20: mol_type = other DNA
tgaccttctcagagggtcac

SEQ ID NO: 258843 - DNA, 20 bp, synthetic construct
  source 1..20: mol_type = other DNA
gtgaccttctcagagggtca

SEQ ID NO: 258844 - DNA, 20 bp, synthetic construct
  source 1..20: mol_type = other DNA
tgtgaccttctcagagggtc

SEQ ID NO: 258845 - DNA, 20 bp, synthetic construct
  source 1..20: mol_type = other DNA
ctgtgaccttctcagagggt

SEQ ID NO: 258846 - DNA, 20 bp, synthetic construct
  source 1..20: mol_type = other DNA
tctgtgaccttctcagaggg

SEQ ID NO: 258847 - DNA, 20 bp, synthetic construct
  source 1..20: mol_type = other DNA
ctctgtgaccttctcagagg

SEQ ID NO: 258848 - DNA, 20 bp, synthetic construct
  source 1..20: mol_type = other DNA
actctgtgaccttctcagag

SEQ ID NO: 258849 - DNA, 20 bp, synthetic construct
  source 1..20: mol_type = other DNA
cactctgtgaccttctcaga

SEQ ID NO: 258850 - DNA, 20 bp, synthetic construct
  source 1..20: mol_type = other DNA
ccactctgtgaccttctcag

SEQ ID NO: 258851 - DNA, 20 bp, synthetic construct
  source 1..20: mol_type = other DNA
cccactctgtgaccttctca

SEQ ID NO: 258852 - DNA, 20 bp, synthetic construct
  source 1..20: mol_type = other DNA
acccactctgtgaccttctc

SEQ ID NO: 258853 - DNA, 20 bp, synthetic construct
  source 1..20: mol_type = other DNA
aacccactctgtgaccttct

SEQ ID NO: 258854 - DNA, 20 bp, synthetic construct
  source 1..20: mol_type = other DNA
aaacccactctgtgaccttc

SEQ ID NO: 258855 - DNA, 20 bp, synthetic construct
  source 1..20: mol_type = other DNA
gaaacccactctgtgacctt

SEQ ID NO: 258856 - DNA, 20 bp, synthetic construct
  source 1..20: mol_type = other DNA
ggaaacccactctgtgacct

SEQ ID NO: 258857 - DNA, 20 bp, synthetic construct
  source 1..20: mol_type = other DNA
gggaaacccactctgtgacc

SEQ ID NO: 258858 - DNA, 20 bp, synthetic construct
  source 1..20: mol_type = other DNA
tgggaaacccactctgtgac

SEQ ID NO: 258859 - DNA, 20 bp, synthetic construct
  source 1..20: mol_type = other DNA
ttgggaaacccactctgtga

SEQ ID NO: 258860 - DNA, 20 bp, synthetic construct
  source 1..20: mol_type = other DNA
tttgggaaacccactctgtg

SEQ ID NO: 258861 - DNA, 20 bp, synthetic construct
  source 1..20: mol_type = other DNA
gtttgggaaacccactctgt

SEQ ID NO: 258862 - DNA, 20 bp, synthetic construct
  source 1..20: mol_type = other DNA
agtttgggaaacccactctg

SEQ ID NO: 258863 - DNA, 20 bp, synthetic construct
  source 1..20: mol_type = other DNA
aagtttgggaaacccactct

SEQ ID NO: 258864 - DNA, 20 bp, synthetic construct
  source 1..20: mol_type = other DNA
taagtttgggaaacccactc

SEQ ID NO: 258865 - DNA, 20 bp, synthetic construct
  source 1..20: mol_type = other DNA
gtaagtttgggaaacccact

SEQ ID NO: 258866 - DNA, 20 bp, synthetic construct
  source 1..20: mol_type = other DNA
agtaagtttgggaaacccac

SEQ ID NO: 258867 - DNA, 20 bp, synthetic construct
  source 1..20: mol_type = other DNA
aagtaagtttgggaaaccca

SEQ ID NO: 258868 - DNA, 20 bp, synthetic construct
  source 1..20: mol_type = other DNA
caagtaagtttgggaaaccc

SEQ ID NO: 258869 - DNA, 20 bp, synthetic construct
  source 1..20: mol_type = other DNA
tcaagtaagtttgggaaacc

SEQ ID NO: 258870 - DNA, 20 bp, synthetic construct
  source 1..20: mol_type = other DNA
atcaagtaagtttgggaaac

SEQ ID NO: 258871 - DNA, 20 bp, synthetic construct
  source 1..20: mol_type = other DNA
aatcaagtaagtttgggaaa

SEQ ID NO: 258872 - DNA, 20 bp, synthetic construct
  source 1..20: mol_type = other DNA
gaatcaagtaagtttgggaa

SEQ ID NO: 258873 - DNA, 20 bp, synthetic construct
  source 1..20: mol_type = other DNA
agaatcaagtaagtttggga

SEQ ID NO: 258874 - DNA, 20 bp, synthetic construct
  source 1..20: mol_type = other DNA
tagaatcaagtaagtttggg

SEQ ID NO: 258875 - DNA, 20 bp, synthetic construct
  source 1..20: mol_type = other DNA
gtagaatcaagtaagtttgg

SEQ ID NO: 258876 - DNA, 20 bp, synthetic construct
  source 1..20: mol_type = other DNA
ggtagaatcaagtaagtttg

SEQ ID NO: 258877 - DNA, 20 bp, synthetic construct
  source 1..20: mol_type = other DNA
aggtagaatcaagtaagttt

SEQ ID NO: 258878 - DNA, 20 bp, synthetic construct
  source 1..20: mol_type = other DNA
caggtagaatcaagtaagtt

SEQ ID NO: 258879 - DNA, 20 bp, synthetic construct
  source 1..20: mol_type = other DNA
gcaggtagaatcaagtaagt

SEQ ID NO: 258880 - DNA, 20 bp, synthetic construct
  source 1..20: mol_type = other DNA
agcaggtagaatcaagtaag

SEQ ID NO: 258881 - DNA, 20 bp, synthetic construct
  source 1..20: mol_type = other DNA
tagcaggtagaatcaagtaa

SEQ ID NO: 258882 - DNA, 20 bp, synthetic construct
  source 1..20: mol_type = other DNA
ttagcaggtagaatcaagta

SEQ ID NO: 258883 - DNA, 20 bp, synthetic construct
  source 1..20: mol_type = other DNA
gttagcaggtagaatcaagt

SEQ ID NO: 258884 - DNA, 20 bp, synthetic construct
  source 1..20: mol_type = other DNA
tgttagcaggtagaatcaag

SEQ ID NO: 258885 - DNA, 20 bp, synthetic construct
  source 1..20: mol_type = other DNA
atgttagcaggtagaatcaa

SEQ ID NO: 258886 - DNA, 20 bp, synthetic construct
  source 1..20: mol_type = other DNA
aatgttagcaggtagaatca

SEQ ID NO: 258887 - DNA, 20 bp, synthetic construct
  source 1..20: mol_type = other DNA
aaatgttagcaggtagaatc

SEQ ID NO: 258888 - DNA, 20 bp, synthetic construct
  source 1..20: mol_type = other DNA
gaaatgttagcaggtagaat

SEQ ID NO: 258889 - DNA, 20 bp, synthetic construct
  source 1..20: mol_type = other DNA
ggaaatgttagcaggtagaa

SEQ ID NO: 258890 - DNA, 20 bp, synthetic construct
  source 1..20: mol_type = other DNA
aggaaatgttagcaggtaga

SEQ ID NO: 258891 - DNA, 20 bp, synthetic construct
  source 1..20: mol_type = other DNA
caggaaatgttagcaggtag

SEQ ID NO: 258892 - DNA, 20 bp, synthetic construct
  source 1..20: mol_type = other DNA
ccaggaaatgttagcaggta

SEQ ID NO: 258893 - DNA, 20 bp, synthetic construct
  source 1..20: mol_type = other DNA
tccaggaaatgttagcaggt

SEQ ID NO: 258894 - DNA, 20 bp, synthetic construct
  source 1..20: mol_type = other DNA
ctccaggaaatgttagcagg

SEQ ID NO: 258895 - DNA, 20 bp, synthetic construct
  source 1..20: mol_type = other DNA
cctccaggaaatgttagcag

SEQ ID NO: 258896 - DNA, 20 bp, synthetic construct
  source 1..20: mol_type = other DNA
tcctccaggaaatgttagca

SEQ ID NO: 258897 - DNA, 20 bp, synthetic construct
  source 1..20: mol_type = other DNA
ttcctccaggaaatgttagc

SEQ ID NO: 258898 - DNA, 20 bp, synthetic construct
  source 1..20: mol_type = other DNA
cttcctccaggaaatgttag

SEQ ID NO: 258899 - DNA, 20 bp, synthetic construct
  source 1..20: mol_type = other DNA
acttcctccaggaaatgtta

SEQ ID NO: 258900 - DNA, 20 bp, synthetic construct
  source 1..20: mol_type = other DNA
aacttcctccaggaaatgtt

SEQ ID NO: 258901 - DNA, 20 bp, synthetic construct
  source 1..20: mol_type = other DNA
aaacttcctccaggaaatgt

SEQ ID NO: 258902 - DNA, 20 bp, synthetic construct
  source 1..20: mol_type = other DNA
caaacttcctccaggaaatg

SEQ ID NO: 258903 - DNA, 20 bp, synthetic construct
  source 1..20: mol_type = other DNA
ccaaacttcctccaggaaat

SEQ ID NO: 258904 - DNA, 20 bp, synthetic construct
  source 1..20: mol_type = other DNA
cccaaacttcctccaggaaa

SEQ ID NO: 258905 - DNA, 20 bp, synthetic construct
  source 1..20: mol_type = other DNA
tcccaaacttcctccaggaa

SEQ ID NO: 258906 - DNA, 20 bp, synthetic construct
  source 1..20: mol_type = other DNA
ttcccaaacttcctccagga

SEQ ID NO: 258907 - DNA, 20 bp, synthetic construct
  source 1..20: mol_type = other DNA
tttcccaaacttcctccagg

SEQ ID NO: 258908 - DNA, 20 bp, synthetic construct
  source 1..20: mol_type = other DNA
atttcccaaacttcctccag

SEQ ID NO: 258909 - DNA, 20 bp, synthetic construct
  source 1..20: mol_type = other DNA
catttcccaaacttcctcca

SEQ ID NO: 258910 - DNA, 20 bp, synthetic construct
  source 1..20: mol_type = other DNA
gcatttcccaaacttcctcc

SEQ ID NO: 258911 - DNA, 20 bp, synthetic construct
  source 1..20: mol_type = other DNA
ggcatttcccaaacttcctc

SEQ ID NO: 258912 - DNA, 20 bp, synthetic construct
  source 1..20: mol_type = other DNA
cggcatttcccaaacttcct

SEQ ID NO: 258913 - DNA, 20 bp, synthetic construct
  source 1..20: mol_type = other DNA
tcggcatttcccaaacttcc

SEQ ID NO: 258914 - DNA, 20 bp, synthetic construct
  source 1..20: mol_type = other DNA
atcggcatttcccaaacttc

SEQ ID NO: 258915 - DNA, 20 bp, synthetic construct
  source 1..20: mol_type = other DNA
aatcggcatttcccaaactt

SEQ ID NO: 258916 - DNA, 20 bp, synthetic construct
  source 1..20: mol_type = other DNA
aaatcggcatttcccaaact

SEQ ID NO: 258917 - DNA, 20 bp, synthetic construct
  source 1..20: mol_type = other DNA
taaatcggcatttcccaaac

SEQ ID NO: 258918 - DNA, 20 bp, synthetic construct
  source 1..20: mol_type = other DNA
ctaaatcggcatttcccaaa

SEQ ID NO: 258919 - DNA, 20 bp, synthetic construct
  source 1..20: mol_type = other DNA
gctaaatcggcatttcccaa

SEQ ID NO: 258920 - DNA, 20 bp, synthetic construct
  source 1..20: mol_type = other DNA
tgctaaatcggcatttccca

SEQ ID NO: 258921 - DNA, 20 bp, synthetic construct
  source 1..20: mol_type = other DNA
ctgctaaatcggcatttccc

SEQ ID NO: 258922 - DNA, 20 bp, synthetic construct
  source 1..20: mol_type = other DNA
tctgctaaatcggcatttcc

SEQ ID NO: 258923 - DNA, 20 bp, synthetic construct
  source 1..20: mol_type = other DNA
atctgctaaatcggcatttc

SEQ ID NO: 258924 - DNA, 20 bp, synthetic construct
  source 1..20: mol_type = other DNA
aatctgctaaatcggcattt

SEQ ID NO: 258925 - DNA, 20 bp, synthetic construct
  source 1..20: mol_type = other DNA
gaatctgctaaatcggcatt

SEQ ID NO: 258926 - DNA, 20 bp, synthetic construct
  source 1..20: mol_type = other DNA
agaatctgctaaatcggcat

SEQ ID NO: 258927 - DNA, 20 bp, synthetic construct
  source 1..20: mol_type = other DNA
aagaatctgctaaatcggca

SEQ ID NO: 258928 - DNA, 20 bp, synthetic construct
  source 1..20: mol_type = other DNA
aaagaatctgctaaatcggc

SEQ ID NO: 258929 - DNA, 20 bp, synthetic construct
  source 1..20: mol_type = other DNA
aaaagaatctgctaaatcgg

SEQ ID NO: 258930 - DNA, 20 bp, synthetic construct
  source 1..20: mol_type = other DNA
caaaagaatctgctaaatcg

SEQ ID NO: 258931 - DNA, 20 bp, synthetic construct
  source 1..20: mol_type = other DNA
acaaaagaatctgctaaatc

SEQ ID NO: 258932 - DNA, 20 bp, synthetic construct
  source 1..20: mol_type = other DNA
aacaaaagaatctgctaaat

SEQ ID NO: 258933 - DNA, 20 bp, synthetic construct
  source 1..20: mol_type = other DNA
caacaaaagaatctgctaaa

SEQ ID NO: 258934 - DNA, 20 bp, synthetic construct
  source 1..20: mol_type = other DNA
acaacaaaagaatctgctaa

SEQ ID NO: 258935 - DNA, 20 bp, synthetic construct
  source 1..20: mol_type = other DNA
cacaacaaaagaatctgcta

SEQ ID NO: 258936 - DNA, 20 bp, synthetic construct
  source 1..20: mol_type = other DNA
gcacaacaaaagaatctgct

SEQ ID NO: 258937 - DNA, 20 bp, synthetic construct
  source 1..20: mol_type = other DNA
ggcacaacaaaagaatctgc

SEQ ID NO: 258938 - DNA, 20 bp, synthetic construct
  source 1..20: mol_type = other DNA
cggcacaacaaaagaatctg

SEQ ID NO: 258939 - DNA, 20 bp, synthetic construct
  source 1..20: mol_type = other DNA
acggcacaacaaaagaatct

SEQ ID NO: 258940 - DNA, 20 bp, synthetic construct
  source 1..20: mol_type = other DNA
cacggcacaacaaaagaatc

SEQ ID NO: 258941 - DNA, 20 bp, synthetic construct
  source 1..20: mol_type = other DNA
ccacggcacaacaaaagaat

SEQ ID NO: 258942 - DNA, 20 bp, synthetic construct
  source 1..20: mol_type = other DNA
tccacggcacaacaaaagaa

SEQ ID NO: 258943 - DNA, 20 bp, synthetic construct
  source 1..20: mol_type = other DNA
atccacggcacaacaaaaga

SEQ ID NO: 258944 - DNA, 20 bp, synthetic construct
  source 1..20: mol_type = other DNA
catccacggcacaacaaaag

SEQ ID NO: 258945 - DNA, 20 bp, synthetic construct
  source 1..20: mol_type = other DNA
ccatccacggcacaacaaaa

SEQ ID NO: 258946 - DNA, 20 bp, synthetic construct
  source 1..20: mol_type = other DNA
accatccacggcacaacaaa

SEQ ID NO: 258947 - DNA, 20 bp, synthetic construct
  source 1..20: mol_type = other DNA
caccatccacggcacaacaa

SEQ ID NO: 258948 - DNA, 20 bp, synthetic construct
  source 1..20: mol_type = other DNA
gcaccatccacggcacaaca

SEQ ID NO: 258949 - DNA, 20 bp, synthetic construct
  source 1..20: mol_type = other DNA
agcaccatccacggcacaac

SEQ ID NO: 258950 - DNA, 20 bp, synthetic construct
  source 1..20: mol_type = other DNA
cagcaccatccacggcacaa

SEQ ID NO: 258951 - DNA, 20 bp, synthetic construct
  source 1..20: mol_type = other DNA
ccagcaccatccacggcaca

SEQ ID NO: 258952 - DNA, 20 bp, synthetic construct
  source 1..20: mol_type = other DNA
accagcaccatccacggcac

SEQ ID NO: 258953 - DNA, 20 bp, synthetic construct
  source 1..20: mol_type = other DNA
aaccagcaccatccacggca

SEQ ID NO: 258954 - DNA, 20 bp, synthetic construct
  source 1..20: mol_type = other DNA
caaccagcaccatccacggc

SEQ ID NO: 258955 - DNA, 20 bp, synthetic construct
  source 1..20: mol_type = other DNA
tcaaccagcaccatccacgg

SEQ ID NO: 258956 - DNA, 20 bp, synthetic construct
  source 1..20: mol_type = other DNA
atcaaccagcaccatccacg

SEQ ID NO: 258957 - DNA, 20 bp, synthetic construct
  source 1..20: mol_type = other DNA
catcaaccagcaccatccac

SEQ ID NO: 258958 - DNA, 20 bp, synthetic construct
  source 1..20: mol_type = other DNA
acatcaaccagcaccatcca

SEQ ID NO: 258959 - DNA, 20 bp, synthetic construct
  source 1..20: mol_type = other DNA
cacatcaaccagcaccatcc

SEQ ID NO: 258960 - DNA, 20 bp, synthetic construct
  source 1..20: mol_type = other DNA
ccacatcaaccagcaccatc

SEQ ID NO: 258961 - DNA, 20 bp, synthetic construct
  source 1..20: mol_type = other DNA
cccacatcaaccagcaccat

SEQ ID NO: 258962 - DNA, 20 bp, synthetic construct
  source 1..20: mol_type = other DNA
gcccacatcaaccagcacca

SEQ ID NO: 258963 - DNA, 20 bp, synthetic construct
  source 1..20: mol_type = other DNA
tgcccacatcaaccagcacc

SEQ ID NO: 258964 - DNA, 20 bp, synthetic construct
  source 1..20: mol_type = other DNA
ttgcccacatcaaccagcac

SEQ ID NO: 258965 - DNA, 20 bp, synthetic construct
  source 1..20: mol_type = other DNA
tttgcccacatcaaccagca

SEQ ID NO: 258966 - DNA, 20 bp, synthetic construct
  source 1..20: mol_type = other DNA
ttttgcccacatcaaccagc

SEQ ID NO: 258967 - DNA, 20 bp, synthetic construct
  source 1..20: mol_type = other DNA
gttttgcccacatcaaccag

SEQ ID NO: 258968 - DNA, 20 bp, synthetic construct
  source 1..20: mol_type = other DNA
tgttttgcccacatcaacca

SEQ ID NO: 258969 - DNA, 20 bp, synthetic construct
  source 1..20: mol_type = other DNA
ttgttttgcccacatcaacc

SEQ ID NO: 258970 - DNA, 20 bp, synthetic construct
  source 1..20: mol_type = other DNA
tttgttttgcccacatcaac

SEQ ID NO: 258971 - DNA, 20 bp, synthetic construct
  source 1..20: mol_type = other DNA
ctttgttttgcccacatcaa

SEQ ID NO: 258972 - DNA, 20 bp, synthetic construct
  source 1..20: mol_type = other DNA
tctttgttttgcccacatca

SEQ ID NO: 258973 - DNA, 20 bp, synthetic construct
  source 1..20: mol_type = other DNA
ttctttgttttgcccacatc

SEQ ID NO: 258974 - DNA, 20 bp, synthetic construct
  source 1..20: mol_type = other DNA
gttctttgttttgcccacat

SEQ ID NO: 258975 - DNA, 20 bp, synthetic construct
  source 1..20: mol_type = other DNA
tgttctttgttttgcccaca

SEQ ID NO: 258976 - DNA, 20 bp, synthetic construct
  source 1..20: mol_type = other DNA
gtgttctttgttttgcccac

SEQ ID NO: 258977 - DNA, 20 bp, synthetic construct
  source 1..20: mol_type = other DNA
cgtgttctttgttttgccca

SEQ ID NO: 258978 - DNA, 20 bp, synthetic construct
  source 1..20: mol_type = other DNA
acgtgttctttgttttgccc

SEQ ID NO: 258979 - DNA, 20 bp, synthetic construct
  source 1..20: mol_type = other DNA
cacgtgttctttgttttgcc

SEQ ID NO: 258980 - DNA, 20 bp, synthetic construct
  source 1..20: mol_type = other DNA
tcacgtgttctttgttttgc

SEQ ID NO: 258981 - DNA, 20 bp, synthetic construct
  source 1..20: mol_type = other DNA
ctcacgtgttctttgttttg

SEQ ID NO: 258982 - DNA, 20 bp, synthetic construct
  source 1..20: mol_type = other DNA
actcacgtgttctttgtttt

SEQ ID NO: 258983 - DNA, 20 bp, synthetic construct
  source 1..20: mol_type = other DNA
gactcacgtgttctttgttt

SEQ ID NO: 258984 - DNA, 20 bp, synthetic construct
  source 1..20: mol_type = other DNA
tgactcacgtgttctttgtt

SEQ ID NO: 258985 - DNA, 20 bp, synthetic construct
  source 1..20: mol_type = other DNA
ctgactcacgtgttctttgt

SEQ ID NO: 258986 - DNA, 20 bp, synthetic construct
  source 1..20: mol_type = other DNA
tctgactcacgtgttctttg

SEQ ID NO: 258987 - DNA, 20 bp, synthetic construct
  source 1..20: mol_type = other DNA
atctgactcacgtgttcttt

SEQ ID NO: 258988 - DNA, 20 bp, synthetic construct
  source 1..20: mol_type = other DNA
gatctgactcacgtgttctt

SEQ ID NO: 258989 - DNA, 20 bp, synthetic construct
  source 1..20: mol_type = other DNA
ggatctgactcacgtgttct

SEQ ID NO: 258990 - DNA, 20 bp, synthetic construct
  source 1..20: mol_type = other DNA
cggatctgactcacgtgttc

SEQ ID NO: 258991 - DNA, 20 bp, synthetic construct
  source 1..20: mol_type = other DNA
gcggatctgactcacgtgtt

SEQ ID NO: 258992 - DNA, 20 bp, synthetic construct
  source 1..20: mol_type = other DNA
ggcggatctgactcacgtgt

SEQ ID NO: 258993 - DNA, 20 bp, synthetic construct
  source 1..20: mol_type = other DNA
aggcggatctgactcacgtg

SEQ ID NO: 258994 - DNA, 20 bp, synthetic construct
  source 1..20: mol_type = other DNA
caggcggatctgactcacgt

SEQ ID NO: 258995 - DNA, 20 bp, synthetic construct
  source 1..20: mol_type = other DNA
ccaggcggatctgactcacg

SEQ ID NO: 258996 - DNA, 20 bp, synthetic construct
  source 1..20: mol_type = other DNA
cccaggcggatctgactcac

SEQ ID NO: 258997 - DNA, 20 bp, synthetic construct
  source 1..20: mol_type = other DNA
ccccaggcggatctgactca

SEQ ID NO: 258998 - DNA, 20 bp, synthetic construct
  source 1..20: mol_type = other DNA
gccccaggcggatctgactc

SEQ ID NO: 258999 - DNA, 20 bp, synthetic construct
  source 1..20: mol_type = other DNA
agccccaggcggatctgact

SEQ ID NO: 259000 - DNA, 20 bp, synthetic construct
  source 1..20: mol_type = other DNA
gagccccaggcggatctgac

SEQ ID NO: 259001 - DNA, 20 bp, synthetic construct
  source 1..20: mol_type = other DNA
agagccccaggcggatctga

SEQ ID NO: 259002 - DNA, 20 bp, synthetic construct
  source 1..20: mol_type = other DNA
aagagccccaggcggatctg

SEQ ID NO: 259003 - DNA, 20 bp, synthetic construct
  source 1..20: mol_type = other DNA
taagagccccaggcggatct

SEQ ID NO: 259004 - DNA, 20 bp, synthetic construct
  source 1..20: mol_type = other DNA
gtaagagccccaggcggatc

SEQ ID NO: 259005 - DNA, 20 bp, synthetic construct
  source 1..20: mol_type = other DNA
agtaagagccccaggcggat

SEQ ID NO: 259006 - DNA, 20 bp, synthetic construct
  source 1..20: mol_type = other DNA
tagtaagagccccaggcgga

SEQ ID NO: 259007 - DNA, 20 bp, synthetic construct
  source 1..20: mol_type = other DNA
ttagtaagagccccaggcgg

SEQ ID NO: 259008 - DNA, 20 bp, synthetic construct
  source 1..20: mol_type = other DNA
tttagtaagagccccaggcg

SEQ ID NO: 259009 - DNA, 20 bp, synthetic construct
  source 1..20: mol_type = other DNA
ctttagtaagagccccaggc

SEQ ID NO: 259010 - DNA, 20 bp, synthetic construct
  source 1..20: mol_type = other DNA
actttagtaagagccccagg

SEQ ID NO: 259011 - DNA, 20 bp, synthetic construct
  source 1..20: mol_type = other DNA
cactttagtaagagccccag

SEQ ID NO: 259012 - DNA, 20 bp, synthetic construct
  source 1..20: mol_type = other DNA
gcactttagtaagagcccca

SEQ ID NO: 259013 - DNA, 20 bp, synthetic construct
  source 1..20: mol_type = other DNA
tgcactttagtaagagcccc

SEQ ID NO: 259014 - DNA, 20 bp, synthetic construct
  source 1..20: mol_type = other DNA
ctgcactttagtaagagccc

SEQ ID NO: 259015 - DNA, 20 bp, synthetic construct
  source 1..20: mol_type = other DNA
cctgcactttagtaagagcc

SEQ ID NO: 259016 - DNA, 20 bp, synthetic construct
  source 1..20: mol_type = other DNA
acctgcactttagtaagagc

SEQ ID NO: 259017 - DNA, 20 bp, synthetic construct
  source 1..20: mol_type = other DNA
aacctgcactttagtaagag

SEQ ID NO: 259018 - DNA, 20 bp, synthetic construct
  source 1..20: mol_type = other DNA
gaacctgcactttagtaaga

SEQ ID NO: 259019 - DNA, 20 bp, synthetic construct
  source 1..20: mol_type = other DNA
ggaacctgcactttagtaag

SEQ ID NO: 259020 - DNA, 20 bp, synthetic construct
  source 1..20: mol_type = other DNA
gggaacctgcactttagtaa

SEQ ID NO: 259021 - DNA, 20 bp, synthetic construct
  source 1..20: mol_type = other DNA
tgggaacctgcactttagta

SEQ ID NO: 259022 - DNA, 20 bp, synthetic construct
  source 1..20: mol_type = other DNA
ctgggaacctgcactttagt

SEQ ID NO: 259023 - DNA, 20 bp, synthetic construct
  source 1..20: mol_type = other DNA
cctgggaacctgcactttag

SEQ ID NO: 259024 - DNA, 20 bp, synthetic construct
  source 1..20: mol_type = other DNA
acctgggaacctgcacttta

SEQ ID NO: 259025 - DNA, 20 bp, synthetic construct
  source 1..20: mol_type = other DNA
cacctgggaacctgcacttt

SEQ ID NO: 259026 - DNA, 20 bp, synthetic construct
  source 1..20: mol_type = other DNA
gcacctgggaacctgcactt

SEQ ID NO: 259027 - DNA, 20 bp, synthetic construct
  source 1..20: mol_type = other DNA
ggcacctgggaacctgcact

SEQ ID NO: 259028 - DNA, 20 bp, synthetic construct
  source 1..20: mol_type = other DNA
tggcacctgggaacctgcac

SEQ ID NO: 259029 - DNA, 20 bp, synthetic construct
  source 1..20: mol_type = other DNA
gtggcacctgggaacctgca

SEQ ID NO: 259030 - DNA, 20 bp, synthetic construct
  source 1..20: mol_type = other DNA
agtggcacctgggaacctgc

SEQ ID NO: 259031 - DNA, 20 bp, synthetic construct
  source 1..20: mol_type = other DNA
aagtggcacctgggaacctg

SEQ ID NO: 259032 - DNA, 20 bp, synthetic construct
  source 1..20: mol_type = other DNA
aaagtggcacctgggaacct

SEQ ID NO: 259033 - DNA, 20 bp, synthetic construct
  source 1..20: mol_type = other DNA
taaagtggcacctgggaacc

SEQ ID NO: 259034 - DNA, 20 bp, synthetic construct
  source 1..20: mol_type = other DNA
ctaaagtggcacctgggaac

SEQ ID NO: 259035 - DNA, 20 bp, synthetic construct
  source 1..20: mol_type = other DNA
cctaaagtggcacctgggaa

SEQ ID NO: 259036 - DNA, 20 bp, synthetic construct
  source 1..20: mol_type = other DNA
gcctaaagtggcacctggga

SEQ ID NO: 259037 - DNA, 20 bp, synthetic construct
  source 1..20: mol_type = other DNA
agcctaaagtggcacctggg

SEQ ID NO: 259038 - DNA, 20 bp, synthetic construct
  source 1..20: mol_type = other DNA
aagcctaaagtggcacctgg

SEQ ID NO: 259039 - DNA, 20 bp, synthetic construct
  source 1..20: mol_type = other DNA
taagcctaaagtggcacctg

SEQ ID NO: 259040 - DNA, 20 bp, synthetic construct
  source 1..20: mol_type = other DNA
gtaagcctaaagtggcacct

SEQ ID NO: 259041 - DNA, 20 bp, synthetic construct
  source 1..20: mol_type = other DNA
tgtaagcctaaagtggcacc

SEQ ID NO: 259042 - DNA, 20 bp, synthetic construct
  source 1..20: mol_type = other DNA
ctgtaagcctaaagtggcac

SEQ ID NO: 259043 - DNA, 20 bp, synthetic construct
  source 1..20: mol_type = other DNA
tctgtaagcctaaagtggca

SEQ ID NO: 259044 - DNA, 20 bp, synthetic construct
  source 1..20: mol_type = other DNA
gtctgtaagcctaaagtggc

SEQ ID NO: 259045 - DNA, 20 bp, synthetic construct
  source 1..20: mol_type = other DNA
ggtctgtaagcctaaagtgg

SEQ ID NO: 259046 - DNA, 20 bp, synthetic construct
  source 1..20: mol_type = other DNA
gggtctgtaagcctaaagtg

SEQ ID NO: 259047 - DNA, 20 bp, synthetic construct
  source 1..20: mol_type = other DNA
tgggtctgtaagcctaaagt

SEQ ID NO: 259048 - DNA, 20 bp, synthetic construct
  source 1..20: mol_type = other DNA
ctgggtctgtaagcctaaag

SEQ ID NO: 259049 - DNA, 20 bp, synthetic construct
  source 1..20: mol_type = other DNA
actgggtctgtaagcctaaa

SEQ ID NO: 259050 - DNA, 20 bp, synthetic construct
  source 1..20: mol_type = other DNA
aactgggtctgtaagcctaa

SEQ ID NO: 259051 - DNA, 20 bp, synthetic construct
  source 1..20: mol_type = other DNA
caactgggtctgtaagccta

SEQ ID NO: 259052 - DNA, 20 bp, synthetic construct
  source 1..20: mol_type = other DNA
acaactgggtctgtaagcct

SEQ ID NO: 259053 - DNA, 20 bp, synthetic construct
  source 1..20: mol_type = other DNA
cacaactgggtctgtaagcc

SEQ ID NO: 259054 - DNA, 20 bp, synthetic construct
  source 1..20: mol_type = other DNA
ccacaactgggtctgtaagc

SEQ ID NO: 259055 - DNA, 20 bp, synthetic construct
  source 1..20: mol_type = other DNA
cccacaactgggtctgtaag

SEQ ID NO: 259056 - DNA, 20 bp, synthetic construct
  source 1..20: mol_type = other DNA
ccccacaactgggtctgtaa

SEQ ID NO: 259057 - DNA, 20 bp, synthetic construct
  source 1..20: mol_type = other DNA
accccacaactgggtctgta

SEQ ID NO: 259058 - DNA, 20 bp, synthetic construct
  source 1..20: mol_type = other DNA
taccccacaactgggtctgt

SEQ ID NO: 259059 - DNA, 20 bp, synthetic construct
  source 1..20: mol_type = other DNA
ttaccccacaactgggtctg

SEQ ID NO: 259060 - DNA, 20 bp, synthetic construct
  source 1..20: mol_type = other DNA
cttaccccacaactgggtct

SEQ ID NO: 259061 - DNA, 20 bp, synthetic construct
  source 1..20: mol_type = other DNA
gcttaccccacaactgggtc

SEQ ID NO: 259062 - DNA, 20 bp, synthetic construct
  source 1..20: mol_type = other DNA
ggcttaccccacaactgggt

SEQ ID NO: 259063 - DNA, 20 bp, synthetic construct
  source 1..20: mol_type = other DNA
aggcttaccccacaactggg

SEQ ID NO: 259064 - DNA, 20 bp, synthetic construct
  source 1..20: mol_type = other DNA
caggcttaccccacaactgg

SEQ ID NO: 259065 - DNA, 20 bp, synthetic construct
  source 1..20: mol_type = other DNA
ccaggcttaccccacaactg

SEQ ID NO: 259066 - DNA, 20 bp, synthetic construct
  source 1..20: mol_type = other DNA
cccaggcttaccccacaact

SEQ ID NO: 259067 - DNA, 20 bp, synthetic construct
  source 1..20: mol_type = other DNA
tcccaggcttaccccacaac

SEQ ID NO: 259068 - DNA, 20 bp, synthetic construct
  source 1..20: mol_type = other DNA
ctcccaggcttaccccacaa

SEQ ID NO: 259069 - DNA, 20 bp, synthetic construct
  source 1..20: mol_type = other DNA
actcccaggcttaccccaca

SEQ ID NO: 259070 - DNA, 20 bp, synthetic construct
  source 1..20: mol_type = other DNA
gactcccaggcttaccccac

SEQ ID NO: 259071 - DNA, 20 bp, synthetic construct
  source 1..20: mol_type = other DNA
agactcccaggcttacccca

SEQ ID NO: 259072 - DNA, 20 bp, synthetic construct
  source 1..20: mol_type = other DNA
aagactcccaggcttacccc

SEQ ID NO: 259073 - DNA, 20 bp, synthetic construct
  source 1..20: mol_type = other DNA
aaagactcccaggcttaccc

SEQ ID NO: 259074 - DNA, 20 bp, synthetic construct
  source 1..20: mol_type = other DNA
aaaagactcccaggcttacc

SEQ ID NO: 259075 - DNA, 20 bp, synthetic construct
  source 1..20: mol_type = other DNA
taaaagactcccaggcttac

SEQ ID NO: 259076 - DNA, 20 bp, synthetic construct
  source 1..20: mol_type = other DNA
ctaaaagactcccaggctta

SEQ ID NO: 259077 - DNA, 20 bp, synthetic construct
  source 1..20: mol_type = other DNA
gctaaaagactcccaggctt

SEQ ID NO: 259078 - DNA, 20 bp, synthetic construct
  source 1..20: mol_type = other DNA
tgctaaaagactcccaggct

SEQ ID NO: 259079 - DNA, 20 bp, synthetic construct
  source 1..20: mol_type = other DNA
ctgctaaaagactcccaggc

SEQ ID NO: 259080 - DNA, 20 bp, synthetic construct
  source 1..20: mol_type = other DNA
cctgctaaaagactcccagg

SEQ ID NO: 259081 - DNA, 20 bp, synthetic construct
  source 1..20: mol_type = other DNA
acctgctaaaagactcccag

SEQ ID NO: 259082 - DNA, 20 bp, synthetic construct
  source 1..20: mol_type = other DNA
cacctgctaaaagactccca

SEQ ID NO: 259083 - DNA, 20 bp, synthetic construct
  source 1..20: mol_type = other DNA
tcacctgctaaaagactccc

SEQ ID NO: 259084 - DNA, 20 bp, synthetic construct
  source 1..20: mol_type = other DNA
atcacctgctaaaagactcc

SEQ ID NO: 259085 - DNA, 20 bp, synthetic construct
  source 1..20: mol_type = other DNA
aatcacctgctaaaagactc

SEQ ID NO: 259086 - DNA, 20 bp, synthetic construct
  source 1..20: mol_type = other DNA
gaatcacctgctaaaagact

SEQ ID NO: 259087 - DNA, 20 bp, synthetic construct
  source 1..20: mol_type = other DNA
agaatcacctgctaaaagac

SEQ ID NO: 259088 - DNA, 20 bp, synthetic construct
  source 1..20: mol_type = other DNA
cagaatcacctgctaaaaga

SEQ ID NO: 259089 - DNA, 20 bp, synthetic construct
  source 1..20: mol_type = other DNA
gcagaatcacctgctaaaag

SEQ ID NO: 259090 - DNA, 20 bp, synthetic construct
  source 1..20: mol_type = other DNA
ggcagaatcacctgctaaaa

SEQ ID NO: 259091 - DNA, 20 bp, synthetic construct
  source 1..20: mol_type = other DNA
tggcagaatcacctgctaaa

SEQ ID NO: 259092 - DNA, 20 bp, synthetic construct
  source 1..20: mol_type = other DNA
gtggcagaatcacctgctaa

SEQ ID NO: 259093 - DNA, 20 bp, synthetic construct
  source 1..20: mol_type = other DNA
tgtggcagaatcacctgcta

SEQ ID NO: 259094 - DNA, 20 bp, synthetic construct
  source 1..20: mol_type = other DNA
atgtggcagaatcacctgct

SEQ ID NO: 259095 - DNA, 20 bp, synthetic construct
  source 1..20: mol_type = other DNA
tatgtggcagaatcacctgc

SEQ ID NO: 259096 - DNA, 20 bp, synthetic construct
  source 1..20: mol_type = other DNA
ctatgtggcagaatcacctg

SEQ ID NO: 259097 - DNA, 20 bp, synthetic construct
  source 1..20: mol_type = other DNA
actatgtggcagaatcacct

SEQ ID NO: 259098 - DNA, 20 bp, synthetic construct
  source 1..20: mol_type = other DNA
tactatgtggcagaatcacc

SEQ ID NO: 259099 - DNA, 20 bp, synthetic construct
  source 1..20: mol_type = other DNA
atactatgtggcagaatcac

SEQ ID NO: 259100 - DNA, 20 bp, synthetic construct
  source 1..20: mol_type = other DNA
tatactatgtggcagaatca

SEQ ID NO: 259101 - DNA, 20 bp, synthetic construct
  source 1..20: mol_type = other DNA
ctatactatgtggcagaatc

SEQ ID NO: 259102 - DNA, 20 bp, synthetic construct
  source 1..20: mol_type = other DNA
actatactatgtggcagaat

SEQ ID NO: 259103 - DNA, 20 bp, synthetic construct
  source 1..20: mol_type = other DNA
aactatactatgtggcagaa

SEQ ID NO: 259104 - DNA, 20 bp, synthetic construct
  source 1..20: mol_type = other DNA
caactatactatgtggcaga

SEQ ID NO: 259105 - DNA, 20 bp, synthetic construct
  source 1..20: mol_type = other DNA
ccaactatactatgtggcag

SEQ ID NO: 259106 - DNA, 20 bp, synthetic construct
  source 1..20: mol_type = other DNA
tccaactatactatgtggca

SEQ ID NO: 259107 - DNA, 20 bp, synthetic construct
  source 1..20: mol_type = other DNA
ttccaactatactatgtggc

SEQ ID NO: 259108 - DNA, 20 bp, synthetic construct
  source 1..20: mol_type = other DNA
tttccaactatactatgtgg

SEQ ID NO: 259109 - DNA, 20 bp, synthetic construct
  source 1..20: mol_type = other DNA
ttttccaactatactatgtg

SEQ ID NO: 259110 - DNA, 20 bp, synthetic construct
  source 1..20: mol_type = other DNA
gttttccaactatactatgt

SEQ ID NO: 259111 - DNA, 20 bp, synthetic construct
  source 1..20: mol_type = other DNA
ggttttccaactatactatg

SEQ ID NO: 259112 - DNA, 20 bp, synthetic construct
  source 1..20: mol_type = other DNA
aggttttccaactatactat

SEQ ID NO: 259113 - DNA, 20 bp, synthetic construct
  source 1..20: mol_type = other DNA
gaggttttccaactatacta

SEQ ID NO: 259114 - DNA, 20 bp, synthetic construct
  source 1..20: mol_type = other DNA
agaggttttccaactatact

SEQ ID NO: 259115 - DNA, 20 bp, synthetic construct
  source 1..20: mol_type = other DNA
cagaggttttccaactatac

SEQ ID NO: 259116 - DNA, 20 bp, synthetic construct
  source 1..20: mol_type = other DNA
ccagaggttttccaactata

SEQ ID NO: 259117 - DNA, 20 bp, synthetic construct
  source 1..20: mol_type = other DNA
cccagaggttttccaactat

SEQ ID NO: 259118 - DNA, 20 bp, synthetic construct
  source 1..20: mol_type = other DNA
gcccagaggttttccaacta

SEQ ID NO: 259119 - DNA, 20 bp, synthetic construct
  source 1..20: mol_type = other DNA
tgcccagaggttttccaact

SEQ ID NO: 259120 - DNA, 20 bp, synthetic construct
  source 1..20: mol_type = other DNA
atgcccagaggttttccaac

SEQ ID NO: 259121 - DNA, 20 bp, synthetic construct
  source 1..20: mol_type = other DNA
tatgcccagaggttttccaa

SEQ ID NO: 259122 - DNA, 20 bp, synthetic construct
  source 1..20: mol_type = other DNA
gtatgcccagaggttttcca

SEQ ID NO: 259123 - DNA, 20 bp, synthetic construct
  source 1..20: mol_type = other DNA
agtatgcccagaggttttcc

SEQ ID NO: 259124 - DNA, 20 bp, synthetic construct
  source 1..20: mol_type = other DNA
gagtatgcccagaggttttc

SEQ ID NO: 259125 - DNA, 20 bp, synthetic construct
  source 1..20: mol_type = other DNA
tgagtatgcccagaggtttt

SEQ ID NO: 259126 - DNA, 20 bp, synthetic construct
  source 1..20: mol_type = other DNA
atgagtatgcccagaggttt

SEQ ID NO: 259127 - DNA, 20 bp, synthetic construct
  source 1..20: mol_type = other DNA
aatgagtatgcccagaggtt

SEQ ID NO: 259128 - DNA, 20 bp, synthetic construct
  source 1..20: mol_type = other DNA
caatgagtatgcccagaggt

SEQ ID NO: 259129 - DNA, 20 bp, synthetic construct
  source 1..20: mol_type = other DNA
gcaatgagtatgcccagagg

SEQ ID NO: 259130 - DNA, 20 bp, synthetic construct
  source 1..20: mol_type = other DNA
agcaatgagtatgcccagag

SEQ ID NO: 259131 - DNA, 20 bp, synthetic construct
  source 1..20: mol_type = other DNA
cagcaatgagtatgcccaga

SEQ ID NO: 259132 - DNA, 20 bp, synthetic construct
  source 1..20: mol_type = other DNA
ccagcaatgagtatgcccag

SEQ ID NO: 259133 - DNA, 20 bp, synthetic construct
  source 1..20: mol_type = other DNA
accagcaatgagtatgccca

SEQ ID NO: 259134 - DNA, 20 bp, synthetic construct
  source 1..20: mol_type = other DNA
gaccagcaatgagtatgccc

SEQ ID NO: 259135 - DNA, 20 bp, synthetic construct
  source 1..20: mol_type = other DNA
ggaccagcaatgagtatgcc

SEQ ID NO: 259136 - DNA, 20 bp, synthetic construct
  source 1..20: mol_type = other DNA
gggaccagcaatgagtatgc

SEQ ID NO: 259137 - DNA, 20 bp, synthetic construct
  source 1..20: mol_type = other DNA
agggaccagcaatgagtatg

SEQ ID NO: 259138 - DNA, 20 bp, synthetic construct
  source 1..20: mol_type = other DNA
gagggaccagcaatgagtat

SEQ ID NO: 259139 - DNA, 20 bp, synthetic construct
  source 1..20: mol_type = other DNA
agagggaccagcaatgagta

SEQ ID NO: 259140 - DNA, 20 bp, synthetic construct
  source 1..20: mol_type = other DNA
tagagggaccagcaatgagt

SEQ ID NO: 259141 - DNA, 20 bp, synthetic construct
  source 1..20: mol_type = other DNA
ctagagggaccagcaatgag

SEQ ID NO: 259142 - DNA, 20 bp, synthetic construct
  source 1..20: mol_type = other DNA
tctagagggaccagcaatga

SEQ ID NO: 259143 - DNA, 20 bp, synthetic construct
  source 1..20: mol_type = other DNA
ttctagagggaccagcaatg

SEQ ID NO: 259144 - DNA, 20 bp, synthetic construct
  source 1..20: mol_type = other DNA
tttctagagggaccagcaat

SEQ ID NO: 259145 - DNA, 20 bp, synthetic construct
  source 1..20: mol_type = other DNA
atttctagagggaccagcaa

SEQ ID NO: 259146 - DNA, 20 bp, synthetic construct
  source 1..20: mol_type = other DNA
gatttctagagggaccagca

SEQ ID NO: 259147 - DNA, 20 bp, synthetic construct
  source 1..20: mol_type = other DNA
ggatttctagagggaccagc

SEQ ID NO: 259148 - DNA, 20 bp, synthetic construct
  source 1..20: mol_type = other DNA
tggatttctagagggaccag

SEQ ID NO: 259149 - DNA, 20 bp, synthetic construct
  source 1..20: mol_type = other DNA
ctggatttctagagggacca

SEQ ID NO: 259150 - DNA, 20 bp, synthetic construct
  source 1..20: mol_type = other DNA
cctggatttctagagggacc

SEQ ID NO: 259151 - DNA, 20 bp, synthetic construct
  source 1..20: mol_type = other DNA
acctggatttctagagggac

SEQ ID NO: 259152 - DNA, 20 bp, synthetic construct
  source 1..20: mol_type = other DNA
cacctggatttctagaggga

SEQ ID NO: 259153 - DNA, 20 bp, synthetic construct
  source 1..20: mol_type = other DNA
tcacctggatttctagaggg

SEQ ID NO: 259154 - DNA, 20 bp, synthetic construct
  source 1..20: mol_type = other DNA
gtcacctggatttctagagg

SEQ ID NO: 259155 - DNA, 20 bp, synthetic construct
  source 1..20: mol_type = other DNA
tgtcacctggatttctagag

SEQ ID NO: 259156 - DNA, 20 bp, synthetic construct
  source 1..20: mol_type = other DNA
ttgtcacctggatttctaga

SEQ ID NO: 259157 - DNA, 20 bp, synthetic construct
  source 1..20: mol_type = other DNA
attgtcacctggatttctag

SEQ ID NO: 259158 - DNA, 20 bp, synthetic construct
  source 1..20: mol_type = other DNA
tattgtcacctggatttcta

SEQ ID NO: 259159 - DNA, 20 bp, synthetic construct
  source 1..20: mol_type = other DNA
ctattgtcacctggatttct

SEQ ID NO: 259160 - DNA, 20 bp, synthetic construct
  source 1..20: mol_type = other DNA
gctattgtcacctggatttc

SEQ ID NO: 259161 - DNA, 20 bp, synthetic construct
  source 1..20: mol_type = other DNA
ggctattgtcacctggattt

SEQ ID NO: 259162 - DNA, 20 bp, synthetic construct
  source 1..20: mol_type = other DNA
tggctattgtcacctggatt

SEQ ID NO: 259163 - DNA, 20 bp, synthetic construct
  source 1..20: mol_type = other DNA
ttggctattgtcacctggat

SEQ ID NO: 259164 - DNA, 20 bp, synthetic construct
  source 1..20: mol_type = other DNA
attggctattgtcacctgga

SEQ ID NO: 259165 - DNA, 20 bp, synthetic construct
  source 1..20: mol_type = other DNA
cattggctattgtcacctgg

SEQ ID NO: 259166 - DNA, 20 bp, synthetic construct
  source 1..20: mol_type = other DNA
tcattggctattgtcacctg

SEQ ID NO: 259167 - DNA, 20 bp, synthetic construct
  source 1..20: mol_type = other DNA
ctcattggctattgtcacct

SEQ ID NO: 259168 - DNA, 20 bp, synthetic construct
  source 1..20: mol_type = other DNA
tctcattggctattgtcacc

SEQ ID NO: 259169 - DNA, 20 bp, synthetic construct
  source 1..20: mol_type = other DNA
ttctcattggctattgtcac

SEQ ID NO: 259170 - DNA, 20 bp, synthetic construct
  source 1..20: mol_type = other DNA
cttctcattggctattgtca

SEQ ID NO: 259171 - DNA, 20 bp, synthetic construct
  source 1..20: mol_type = other DNA
gcttctcattggctattgtc

SEQ ID NO: 259172 - DNA, 20 bp, synthetic construct
  source 1..20: mol_type = other DNA
agcttctcattggctattgt

SEQ ID NO: 259173 - DNA, 20 bp, synthetic construct
  source 1..20: mol_type = other DNA
gagcttctcattggctattg

SEQ ID NO: 259174 - DNA, 20 bp, synthetic construct
  source 1..20: mol_type = other DNA
ggagcttctcattggctatt

SEQ ID NO: 259175 - DNA, 20 bp, synthetic construct
  source 1..20: mol_type = other DNA
tggagcttctcattggctat

SEQ ID NO: 259176 - DNA, 20 bp, synthetic construct
  source 1..20: mol_type = other DNA
ttggagcttctcattggcta

SEQ ID NO: 259177 - DNA, 20 bp, synthetic construct
  source 1..20: mol_type = other DNA
cttggagcttctcattggct

SEQ ID NO: 259178 - DNA, 20 bp, synthetic construct
  source 1..20: mol_type = other DNA
tcttggagcttctcattggc

SEQ ID NO: 259179 - DNA, 20 bp, synthetic construct
  source 1..20: mol_type = other DNA
ctcttggagcttctcattgg

SEQ ID NO: 259180 - DNA, 20 bp, synthetic construct
  source 1..20: mol_type = other DNA
tctcttggagcttctcattg

SEQ ID NO: 259181 - DNA, 20 bp, synthetic construct
  source 1..20: mol_type = other DNA
gtctcttggagcttctcatt

SEQ ID NO: 259182 - DNA, 20 bp, synthetic construct
  source 1..20: mol_type = other DNA
ggtctcttggagcttctcat

SEQ ID NO: 259183 - DNA, 20 bp, synthetic construct
  source 1..20: mol_type = other DNA
gggtctcttggagcttctca

SEQ ID NO: 259184 - DNA, 20 bp, synthetic construct
  source 1..20: mol_type = other DNA
tgggtctcttggagcttctc

SEQ ID NO: 259185 - DNA, 20 bp, synthetic construct
  source 1..20: mol_type = other DNA
ctgggtctcttggagcttct

SEQ ID NO: 259186 - DNA, 20 bp, synthetic construct
  source 1..20: mol_type = other DNA
actgggtctcttggagcttc

SEQ ID NO: 259187 - DNA, 20 bp, synthetic construct
  source 1..20: mol_type = other DNA
aactgggtctcttggagctt

SEQ ID NO: 259188 - DNA, 20 bp, synthetic construct
  source 1..20: mol_type = other DNA
caactgggtctcttggagct

SEQ ID NO: 259189 - DNA, 20 bp, synthetic construct
  source 1..20: mol_type = other DNA
acaactgggtctcttggagc

SEQ ID NO: 259190 - DNA, 20 bp, synthetic construct
  source 1..20: mol_type = other DNA
gacaactgggtctcttggag

SEQ ID NO: 259191 - DNA, 20 bp, synthetic construct
  source 1..20: mol_type = other DNA
ggacaactgggtctcttgga

SEQ ID NO: 259192 - DNA, 20 bp, synthetic construct
  source 1..20: mol_type = other DNA
tggacaactgggtctcttgg

SEQ ID NO: 259193 - DNA, 20 bp, synthetic construct
  source 1..20: mol_type = other DNA
atggacaactgggtctcttg

SEQ ID NO: 259194 - DNA, 20 bp, synthetic construct
  source 1..20: mol_type = other DNA
catggacaactgggtctctt

SEQ ID NO: 259195 - DNA, 20 bp, synthetic construct
  source 1..20: mol_type = other DNA
ccatggacaactgggtctct

SEQ ID NO: 259196 - DNA, 20 bp, synthetic construct
  source 1..20: mol_type = other DNA
cccatggacaactgggtctc

SEQ ID NO: 259197 - DNA, 20 bp, synthetic construct
  source 1..20: mol_type = other DNA
ccccatggacaactgggtct

SEQ ID NO: 259198 - DNA, 20 bp, synthetic construct
  source 1..20: mol_type = other DNA
accccatggacaactgggtc

SEQ ID NO: 259199 - DNA, 20 bp, synthetic construct
  source 1..20: mol_type = other DNA
taccccatggacaactgggt

SEQ ID NO: 259200 - DNA, 20 bp, synthetic construct
  source 1..20: mol_type = other DNA
ctaccccatggacaactggg

SEQ ID NO: 259201 - DNA, 20 bp, synthetic construct
  source 1..20: mol_type = other DNA
tctaccccatggacaactgg

SEQ ID NO: 259202 - DNA, 20 bp, synthetic construct
  source 1..20: mol_type = other DNA
ctctaccccatggacaactg

SEQ ID NO: 259203 - DNA, 20 bp, synthetic construct
  source 1..20: mol_type = other DNA
cctctaccccatggacaact

SEQ ID NO: 259204 - DNA, 20 bp, synthetic construct
  source 1..20: mol_type = other DNA
ccctctaccccatggacaac

SEQ ID NO: 259205 - DNA, 20 bp, synthetic construct
  source 1..20: mol_type = other DNA
tccctctaccccatggacaa

SEQ ID NO: 259206 - DNA, 20 bp, synthetic construct
  source 1..20: mol_type = other DNA
ttccctctaccccatggaca

SEQ ID NO: 259207 - DNA, 20 bp, synthetic construct
  source 1..20: mol_type = other DNA
attccctctaccccatggac

SEQ ID NO: 259208 - DNA, 20 bp, synthetic construct
  source 1..20: mol_type = other DNA
cattccctctaccccatgga

SEQ ID NO: 259209 - DNA, 20 bp, synthetic construct
  source 1..20: mol_type = other DNA
acattccctctaccccatgg

SEQ ID NO: 259210 - DNA, 20 bp, synthetic construct
  source 1..20: mol_type = other DNA
cacattccctctaccccatg

SEQ ID NO: 259211 - DNA, 20 bp, synthetic construct
  source 1..20: mol_type = other DNA
tcacattccctctaccccat

SEQ ID NO: 259212 - DNA, 20 bp, synthetic construct
  source 1..20: mol_type = other DNA
atcacattccctctacccca

SEQ ID NO: 259213 - DNA, 20 bp, synthetic construct
  source 1..20: mol_type = other DNA
tatcacattccctctacccc

SEQ ID NO: 259214 - DNA, 20 bp, synthetic construct
  source 1..20: mol_type = other DNA
atatcacattccctctaccc

SEQ ID NO: 259215 - DNA, 20 bp, synthetic construct
  source 1..20: mol_type = other DNA
aatatcacattccctctacc

SEQ ID NO: 259216 - DNA, 20 bp, synthetic construct
  source 1..20: mol_type = other DNA
caatatcacattccctctac

SEQ ID NO: 259217 - DNA, 20 bp, synthetic construct
  source 1..20: mol_type = other DNA
tcaatatcacattccctcta

SEQ ID NO: 259218 - DNA, 20 bp, synthetic construct
  source 1..20: mol_type = other DNA
ttcaatatcacattccctct

SEQ ID NO: 259219 - DNA, 20 bp, synthetic construct
  source 1..20: mol_type = other DNA
tttcaatatcacattccctc

SEQ ID NO: 259220 - DNA, 20 bp, synthetic construct
  source 1..20: mol_type = other DNA
gtttcaatatcacattccct

SEQ ID NO: 259221 - DNA, 20 bp, synthetic construct
  source 1..20: mol_type = other DNA
ggtttcaatatcacattccc

SEQ ID NO: 259222 - DNA, 20 bp, synthetic construct
  source 1..20: mol_type = other DNA
tggtttcaatatcacattcc

SEQ ID NO: 259223 - DNA, 20 bp, synthetic construct
  source 1..20: mol_type = other DNA
ttggtttcaatatcacattc

SEQ ID NO: 259224 - DNA, 20 bp, synthetic construct
  source 1..20: mol_type = other DNA
tttggtttcaatatcacatt

SEQ ID NO: 259225 - DNA, 20 bp, synthetic construct
  source 1..20: mol_type = other DNA
ctttggtttcaatatcacat

SEQ ID NO: 259226 - DNA, 20 bp, synthetic construct
  source 1..20: mol_type = other DNA
tctttggtttcaatatcaca

SEQ ID NO: 259227 - DNA, 20 bp, synthetic construct
  source 1..20: mol_type = other DNA
ttctttggtttcaatatcac

SEQ ID NO: 259228 - DNA, 20 bp, synthetic construct
  source 1..20: mol_type = other DNA
cttctttggtttcaatatca

SEQ ID NO: 259229 - DNA, 20 bp, synthetic construct
  source 1..20: mol_type = other DNA
tcttctttggtttcaatatc

SEQ ID NO: 259230 - DNA, 20 bp, synthetic construct
  source 1..20: mol_type = other DNA
ttcttctttggtttcaatat

SEQ ID NO: 259231 - DNA, 20 bp, synthetic construct
  source 1..20: mol_type = other DNA
tttcttctttggtttcaata

SEQ ID NO: 259232 - DNA, 20 bp, synthetic construct
  source 1..20: mol_type = other DNA
ttttcttctttggtttcaat

SEQ ID NO: 259233 - DNA, 20 bp, synthetic construct
  source 1..20: mol_type = other DNA
attttcttctttggtttcaa

SEQ ID NO: 259234 - DNA, 20 bp, synthetic construct
  source 1..20: mol_type = other DNA
gattttcttctttggtttca

SEQ ID NO: 259235 - DNA, 20 bp, synthetic construct
  source 1..20: mol_type = other DNA
agattttcttctttggtttc

SEQ ID NO: 259236 - DNA, 20 bp, synthetic construct
  source 1..20: mol_type = other DNA
tagattttcttctttggttt

SEQ ID NO: 259237 - DNA, 20 bp, synthetic construct
  source 1..20: mol_type = other DNA
atagattttcttctttggtt

SEQ ID NO: 259238 - DNA, 20 bp, synthetic construct
  source 1..20: mol_type = other DNA
catagattttcttctttggt

SEQ ID NO: 259239 - DNA, 20 bp, synthetic construct
  source 1..20: mol_type = other DNA
tcatagattttcttctttgg

SEQ ID NO: 259240 - DNA, 20 bp, synthetic construct
  source 1..20: mol_type = other DNA
atcatagattttcttctttg

SEQ ID NO: 259241 - DNA, 20 bp, synthetic construct
  source 1..20: mol_type = other DNA
gatcatagattttcttcttt

SEQ ID NO: 259242 - DNA, 20 bp, synthetic construct
  source 1..20: mol_type = other DNA
tgatcatagattttcttctt

SEQ ID NO: 259243 - DNA, 20 bp, synthetic construct
  source 1..20: mol_type = other DNA
ctgatcatagattttcttct

SEQ ID NO: 259244 - DNA, 20 bp, synthetic construct
  source 1..20: mol_type = other DNA
actgatcatagattttcttc

SEQ ID NO: 259245 - DNA, 20 bp, synthetic construct
  source 1..20: mol_type = other DNA
aactgatcatagattttctt

SEQ ID NO: 259246 - DNA, 20 bp, synthetic construct
  source 1..20: mol_type = other DNA
aaactgatcatagattttct

SEQ ID NO: 259247 - DNA, 20 bp, synthetic construct
  source 1..20: mol_type = other DNA
aaaactgatcatagattttc

SEQ ID NO: 259248 - DNA, 20 bp, synthetic construct
  source 1..20: mol_type = other DNA
gaaaactgatcatagatttt

SEQ ID NO: 259249 - DNA, 20 bp, synthetic construct
  source 1..20: mol_type = other DNA
tgaaaactgatcatagattt

SEQ ID NO: 259250 - DNA, 20 bp, synthetic construct
  source 1..20: mol_type = other DNA
ctgaaaactgatcatagatt

SEQ ID NO: 259251 - DNA, 20 bp, synthetic construct
  source 1..20: mol_type = other DNA
gctgaaaactgatcatagat

SEQ ID NO: 259252 - DNA, 20 bp, synthetic construct
  source 1..20: mol_type = other DNA
tgctgaaaactgatcataga

SEQ ID NO: 259253 - DNA, 20 bp, synthetic construct
  source 1..20: mol_type = other DNA
ctgctgaaaactgatcatag

SEQ ID NO: 259254 - DNA, 20 bp, synthetic construct
  source 1..20: mol_type = other DNA
actgctgaaaactgatcata

SEQ ID NO: 259255 - DNA, 20 bp, synthetic construct
  source 1..20: mol_type = other DNA
cactgctgaaaactgatcat

SEQ ID NO: 259256 - DNA, 20 bp, synthetic construct
  source 1..20: mol_type = other DNA
tcactgctgaaaactgatca

SEQ ID NO: 259257 - DNA, 20 bp, synthetic construct
  source 1..20: mol_type = other DNA
gtcactgctgaaaactgatc

SEQ ID NO: 259258 - DNA, 20 bp, synthetic construct
  source 1..20: mol_type = other DNA
agtcactgctgaaaactgat

SEQ ID NO: 259259 - DNA, 20 bp, synthetic construct
  source 1..20: mol_type = other DNA
cagtcactgctgaaaactga

SEQ ID NO: 259260 - DNA, 20 bp, synthetic construct
  source 1..20: mol_type = other DNA
acagtcactgctgaaaactg

SEQ ID NO: 259261 - DNA, 20 bp, synthetic construct
  source 1..20: mol_type = other DNA
gacagtcactgctgaaaact

SEQ ID NO: 259262 - DNA, 20 bp, synthetic construct
  source 1..20: mol_type = other DNA
tgacagtcactgctgaaaac

SEQ ID NO: 259263 - DNA, 20 bp, synthetic construct
  source 1..20: mol_type = other DNA
ttgacagtcactgctgaaaa

SEQ ID NO: 259264 - DNA, 20 bp, synthetic construct
  source 1..20: mol_type = other DNA
cttgacagtcactgctgaaa

SEQ ID NO: 259265 - DNA, 20 bp, synthetic construct
  source 1..20: mol_type = other DNA
tcttgacagtcactgctgaa

SEQ ID NO: 259266 - DNA, 20 bp, synthetic construct
  source 1..20: mol_type = other DNA
ctcttgacagtcactgctga

SEQ ID NO: 259267 - DNA, 20 bp, synthetic construct
  source 1..20: mol_type = other DNA
tctcttgacagtcactgctg

SEQ ID NO: 259268 - DNA, 20 bp, synthetic construct
  source 1..20: mol_type = other DNA
ttctcttgacagtcactgct

SEQ ID NO: 259269 - DNA, 20 bp, synthetic construct
  source 1..20: mol_type = other DNA
cttctcttgacagtcactgc

SEQ ID NO: 259270 - DNA, 20 bp, synthetic construct
  source 1..20: mol_type = other DNA
ccttctcttgacagtcactg

SEQ ID NO: 259271 - DNA, 20 bp, synthetic construct
  source 1..20: mol_type = other DNA
tccttctcttgacagtcact

SEQ ID NO: 259272 - DNA, 20 bp, synthetic construct
  source 1..20: mol_type = other DNA
ctccttctcttgacagtcac

SEQ ID NO: 259273 - DNA, 20 bp, synthetic construct
  source 1..20: mol_type = other DNA
tctccttctcttgacagtca

SEQ ID NO: 259274 - DNA, 20 bp, synthetic construct
  source 1..20: mol_type = other DNA
ttctccttctcttgacagtc

SEQ ID NO: 259275 - DNA, 20 bp, synthetic construct
  source 1..20: mol_type = other DNA
cttctccttctcttgacagt

SEQ ID NO: 259276 - DNA, 20 bp, synthetic construct
  source 1..20: mol_type = other DNA
ccttctccttctcttgacag

SEQ ID NO: 259277 - DNA, 20 bp, synthetic construct
  source 1..20: mol_type = other DNA
cccttctccttctcttgaca

SEQ ID NO: 259278 - DNA, 20 bp, synthetic construct
  source 1..20: mol_type = other DNA
acccttctccttctcttgac

SEQ ID NO: 259279 - DNA, 20 bp, synthetic construct
  source 1..20: mol_type = other DNA
cacccttctccttctcttga

SEQ ID NO: 259280 - DNA, 20 bp, synthetic construct
  source 1..20: mol_type = other DNA
tcacccttctccttctcttg

SEQ ID NO: 259281 - DNA, 20 bp, synthetic construct
  source 1..20: mol_type = other DNA
ctcacccttctccttctctt

SEQ ID NO: 259282 - DNA, 20 bp, synthetic construct
  source 1..20: mol_type = other DNA
actcacccttctccttctct

SEQ ID NO: 259283 - DNA, 20 bp, synthetic construct
  source 1..20: mol_type = other DNA
aactcacccttctccttctc

SEQ ID NO: 259284 - DNA, 20 bp, synthetic construct
  source 1..20: mol_type = other DNA
taactcacccttctccttct

SEQ ID NO: 259285 - DNA, 20 bp, synthetic construct
  source 1..20: mol_type = other DNA
ctaactcacccttctccttc

SEQ ID NO: 259286 - DNA, 20 bp, synthetic construct
  source 1..20: mol_type = other DNA
gctaactcacccttctcctt

SEQ ID NO: 259287 - DNA, 20 bp, synthetic construct
  source 1..20: mol_type = other DNA
cgctaactcacccttctcct

SEQ ID NO: 259288 - DNA, 20 bp, synthetic construct
  source 1..20: mol_type = other DNA
gcgctaactcacccttctcc

SEQ ID NO: 259289 - DNA, 20 bp, synthetic construct
  source 1..20: mol_type = other DNA
agcgctaactcacccttctc

SEQ ID NO: 259290 - DNA, 20 bp, synthetic construct
  source 1..20: mol_type = other DNA
cagcgctaactcacccttct

SEQ ID NO: 259291 - DNA, 20 bp, synthetic construct
  source 1..20: mol_type = other DNA
tcagcgctaactcacccttc

SEQ ID NO: 259292 - DNA, 20 bp, synthetic construct
  source 1..20: mol_type = other DNA
atcagcgctaactcaccctt

SEQ ID NO: 259293 - DNA, 20 bp, synthetic construct
  source 1..20: mol_type = other DNA
catcagcgctaactcaccct

SEQ ID NO: 259294 - DNA, 20 bp, synthetic construct
  source 1..20: mol_type = other DNA
gcatcagcgctaactcaccc

SEQ ID NO: 259295 - DNA, 20 bp, synthetic construct
  source 1..20: mol_type = other DNA
agcatcagcgctaactcacc

SEQ ID NO: 259296 - DNA, 20 bp, synthetic construct
  source 1..20: mol_type = other DNA
cagcatcagcgctaactcac

SEQ ID NO: 259297 - DNA, 20 bp, synthetic construct
  source 1..20: mol_type = other DNA
ccagcatcagcgctaactca

SEQ ID NO: 259298 - DNA, 20 bp, synthetic construct
  source 1..20: mol_type = other DNA
gccagcatcagcgctaactc

SEQ ID NO: 259299 - DNA, 20 bp, synthetic construct
  source 1..20: mol_type = other DNA
agccagcatcagcgctaact

SEQ ID NO: 259300 - DNA, 20 bp, synthetic construct
  source 1..20: mol_type = other DNA
cagccagcatcagcgctaac

SEQ ID NO: 259301 - DNA, 20 bp, synthetic construct
  source 1..20: mol_type = other DNA
tcagccagcatcagcgctaa

SEQ ID NO: 259302 - DNA, 20 bp, synthetic construct
  source 1..20: mol_type = other DNA
gtcagccagcatcagcgcta

SEQ ID NO: 259303 - DNA, 20 bp, synthetic construct
  source 1..20: mol_type = other DNA
tgtcagccagcatcagcgct

SEQ ID NO: 259304 - DNA, 20 bp, synthetic construct
  source 1..20: mol_type = other DNA
ctgtcagccagcatcagcgc

SEQ ID NO: 259305 - DNA, 20 bp, synthetic construct
  source 1..20: mol_type = other DNA
cctgtcagccagcatcagcg

SEQ ID NO: 259306 - DNA, 20 bp, synthetic construct
  source 1..20: mol_type = other DNA
acctgtcagccagcatcagc

SEQ ID NO: 259307 - DNA, 20 bp, synthetic construct
  source 1..20: mol_type = other DNA
gacctgtcagccagcatcag

SEQ ID NO: 259308 - DNA, 20 bp, synthetic construct
  source 1..20: mol_type = other DNA
tgacctgtcagccagcatca

SEQ ID NO: 259309 - DNA, 20 bp, synthetic construct
  source 1..20: mol_type = other DNA
ctgacctgtcagccagcatc

SEQ ID NO: 259310 - DNA, 20 bp, synthetic construct
  source 1..20: mol_type = other DNA
gctgacctgtcagccagcat

SEQ ID NO: 259311 - DNA, 20 bp, synthetic construct
  source 1..20: mol_type = other DNA
cgctgacctgtcagccagca

SEQ ID NO: 259312 - DNA, 20 bp, synthetic construct
  source 1..20: mol_type = other DNA
ccgctgacctgtcagccagc

SEQ ID NO: 259313 - DNA, 20 bp, synthetic construct
  source 1..20: mol_type = other DNA
cccgctgacctgtcagccag

SEQ ID NO: 259314 - DNA, 20 bp, synthetic construct
  source 1..20: mol_type = other DNA
acccgctgacctgtcagcca

SEQ ID NO: 259315 - DNA, 20 bp, synthetic construct
  source 1..20: mol_type = other DNA
aacccgctgacctgtcagcc

SEQ ID NO: 259316 - DNA, 20 bp, synthetic construct
  source 1..20: mol_type = other DNA
caacccgctgacctgtcagc

SEQ ID NO: 259317 - DNA, 20 bp, synthetic construct
  source 1..20: mol_type = other DNA
ccaacccgctgacctgtcag

SEQ ID NO: 259318 - DNA, 20 bp, synthetic construct
  source 1..20: mol_type = other DNA
accaacccgctgacctgtca

SEQ ID NO: 259319 - DNA, 20 bp, synthetic construct
  source 1..20: mol_type = other DNA
aaccaacccgctgacctgtc

SEQ ID NO: 259320 - DNA, 20 bp, synthetic construct
  source 1..20: mol_type = other DNA
aaaccaacccgctgacctgt

SEQ ID NO: 259321 - DNA, 20 bp, synthetic construct
  source 1..20: mol_type = other DNA
gaaaccaacccgctgacctg

SEQ ID NO: 259322 - DNA, 20 bp, synthetic construct
  source 1..20: mol_type = other DNA
tgaaaccaacccgctgacct

SEQ ID NO: 259323 - DNA, 20 bp, synthetic construct
  source 1..20: mol_type = other DNA
gtgaaaccaacccgctgacc

SEQ ID NO: 259324 - DNA, 20 bp, synthetic construct
  source 1..20: mol_type = other DNA
ggtgaaaccaacccgctgac

SEQ ID NO: 259325 - DNA, 20 bp, synthetic construct
  source 1..20: mol_type = other DNA
tggtgaaaccaacccgctga

SEQ ID NO: 259326 - DNA, 20 bp, synthetic construct
  source 1..20: mol_type = other DNA
ttggtgaaaccaacccgctg

SEQ ID NO: 259327 - DNA, 20 bp, synthetic construct
  source 1..20: mol_type = other DNA
cttggtgaaaccaacccgct

SEQ ID NO: 259328 - DNA, 20 bp, synthetic construct
  source 1..20: mol_type = other DNA
ccttggtgaaaccaacccgc

SEQ ID NO: 259329 - DNA, 20 bp, synthetic construct
  source 1..20: mol_type = other DNA
tccttggtgaaaccaacccg

SEQ ID NO: 259330 - DNA, 20 bp, synthetic construct
  source 1..20: mol_type = other DNA
ctccttggtgaaaccaaccc

SEQ ID NO: 259331 - DNA, 20 bp, synthetic construct
  source 1..20: mol_type = other DNA
actccttggtgaaaccaacc

SEQ ID NO: 259332 - DNA, 20 bp, synthetic construct
  source 1..20: mol_type = other DNA
cactccttggtgaaaccaac

SEQ ID NO: 259333 - DNA, 20 bp, synthetic construct
  source 1..20: mol_type = other DNA
acactccttggtgaaaccaa

SEQ ID NO: 259334 - DNA, 20 bp, synthetic construct
  source 1..20: mol_type = other DNA
cacactccttggtgaaacca

SEQ ID NO: 259335 - DNA, 20 bp, synthetic construct
  source 1..20: mol_type = other DNA
tcacactccttggtgaaacc

SEQ ID NO: 259336 - DNA, 20 bp, synthetic construct
  source 1..20: mol_type = other DNA
atcacactccttggtgaaac

SEQ ID NO: 259337 - DNA, 20 bp, synthetic construct
  source 1..20: mol_type = other DNA
catcacactccttggtgaaa

SEQ ID NO: 259338 - DNA, 20 bp, synthetic construct
  source 1..20: mol_type = other DNA
tcatcacactccttggtgaa

SEQ ID NO: 259339 - DNA, 20 bp, synthetic construct
  source 1..20: mol_type = other DNA
ttcatcacactccttggtga

SEQ ID NO: 259340 - DNA, 20 bp, synthetic construct
  source 1..20: mol_type = other DNA
cttcatcacactccttggtg

SEQ ID NO: 259341 - DNA, 20 bp, synthetic construct
  source 1..20: mol_type = other DNA
ccttcatcacactccttggt

SEQ ID NO: 259342 - DNA, 20 bp, synthetic construct
  source 1..20: mol_type = other DNA
gccttcatcacactccttgg

SEQ ID NO: 259343 - DNA, 20 bp, synthetic construct
  source 1..20: mol_type = other DNA
agccttcatcacactccttg

SEQ ID NO: 259344 - DNA, 20 bp, synthetic construct
  source 1..20: mol_type = other DNA
cagccttcatcacactcctt

SEQ ID NO: 259345 - DNA, 20 bp, synthetic construct
  source 1..20: mol_type = other DNA
tcagccttcatcacactcct

SEQ ID NO: 259346 - DNA, 20 bp, synthetic construct
  source 1..20: mol_type = other DNA
atcagccttcatcacactcc

SEQ ID NO: 259347 - DNA, 20 bp, synthetic construct
  source 1..20: mol_type = other DNA
catcagccttcatcacactc

SEQ ID NO: 259348 - DNA, 20 bp, synthetic construct
  source 1..20: mol_type = other DNA
acatcagccttcatcacact

SEQ ID NO: 259349 - DNA, 20 bp, synthetic construct
  source 1..20: mol_type = other DNA
aacatcagccttcatcacac

SEQ ID NO: 259350 - DNA, 20 bp, synthetic construct
  source 1..20: mol_type = other DNA
caacatcagccttcatcaca

SEQ ID NO: 259351 - DNA, 20 bp, synthetic construct
  source 1..20: mol_type = other DNA
acaacatcagccttcatcac

SEQ ID NO: 259352 - DNA, 20 bp, synthetic construct
  source 1..20: mol_type = other DNA
gacaacatcagccttcatca

SEQ ID NO: 259353 - DNA, 20 bp, synthetic construct
  source 1..20: mol_type = other DNA
agacaacatcagccttcatc

SEQ ID NO: 259354 - DNA, 20 bp, synthetic construct
  source 1..20: mol_type = other DNA
cagacaacatcagccttcat

SEQ ID NO: 259355 - DNA, 20 bp, synthetic construct
  source 1..20: mol_type = other DNA
acagacaacatcagccttca

SEQ ID NO: 259356 - DNA, 20 bp, synthetic construct
  source 1..20: mol_type = other DNA
cacagacaacatcagccttc

SEQ ID NO: 259357 - DNA, 20 bp, synthetic construct
  source 1..20: mol_type = other DNA
ccacagacaacatcagcctt

SEQ ID NO: 259358 - DNA, 20 bp, synthetic construct
  source 1..20: mol_type = other DNA
cccacagacaacatcagcct

SEQ ID NO: 259359 - DNA, 20 bp, synthetic construct
  source 1..20: mol_type = other DNA
tcccacagacaacatcagcc

SEQ ID NO: 259360 - DNA, 20 bp, synthetic construct
  source 1..20: mol_type = other DNA
ttcccacagacaacatcagc

SEQ ID NO: 259361 - DNA, 20 bp, synthetic construct
  source 1..20: mol_type = other DNA
attcccacagacaacatcag

SEQ ID NO: 259362 - DNA, 20 bp, synthetic construct
  source 1..20: mol_type = other DNA
cattcccacagacaacatca

SEQ ID NO: 259363 - DNA, 20 bp, synthetic construct
  source 1..20: mol_type = other DNA
acattcccacagacaacatc

SEQ ID NO: 259364 - DNA, 20 bp, synthetic construct
  source 1..20: mol_type = other DNA
tacattcccacagacaacat

SEQ ID NO: 259365 - DNA, 20 bp, synthetic construct
  source 1..20: mol_type = other DNA
atacattcccacagacaaca

SEQ ID NO: 259366 - DNA, 20 bp, synthetic construct
  source 1..20: mol_type = other DNA
catacattcccacagacaac

SEQ ID NO: 259367 - DNA, 20 bp, synthetic construct
  source 1..20: mol_type = other DNA
tcatacattcccacagacaa

SEQ ID NO: 259368 - DNA, 20 bp, synthetic construct
  source 1..20: mol_type = other DNA
atcatacattcccacagaca

SEQ ID NO: 259369 - DNA, 20 bp, synthetic construct
  source 1..20: mol_type = other DNA
catcatacattcccacagac

SEQ ID NO: 259370 - DNA, 20 bp, synthetic construct
  source 1..20: mol_type = other DNA
ccatcatacattcccacaga

SEQ ID NO: 259371 - DNA, 20 bp, synthetic construct
  source 1..20: mol_type = other DNA
accatcatacattcccacag

SEQ ID NO: 259372 - DNA, 20 bp, synthetic construct
  source 1..20: mol_type = other DNA
taccatcatacattcccaca

SEQ ID NO: 259373 - DNA, 20 bp, synthetic construct
  source 1..20: mol_type = other DNA
ttaccatcatacattcccac

SEQ ID NO: 259374 - DNA, 20 bp, synthetic construct
  source 1..20: mol_type = other DNA
gttaccatcatacattccca

SEQ ID NO: 259375 - DNA, 20 bp, synthetic construct
  source 1..20: mol_type = other DNA
agttaccatcatacattccc

SEQ ID NO: 259376 - DNA, 20 bp, synthetic construct
  source 1..20: mol_type = other DNA
cagttaccatcatacattcc

SEQ ID NO: 259377 - DNA, 20 bp, synthetic construct
  source 1..20: mol_type = other DNA
ccagttaccatcatacattc

SEQ ID NO: 259378 - DNA, 20 bp, synthetic construct
  source 1..20: mol_type = other DNA
accagttaccatcatacatt

SEQ ID NO: 259379 - DNA, 20 bp, synthetic construct
  source 1..20: mol_type = other DNA
aaccagttaccatcatacat

SEQ ID NO: 259380 - DNA, 20 bp, synthetic construct
  source 1..20: mol_type = other DNA
aaaccagttaccatcataca

SEQ ID NO: 259381 - DNA, 20 bp, synthetic construct
  source 1..20: mol_type = other DNA
caaaccagttaccatcatac

SEQ ID NO: 259382 - DNA, 20 bp, synthetic construct
  source 1..20: mol_type = other DNA
acaaaccagttaccatcata

SEQ ID NO: 259383 - DNA, 20 bp, synthetic construct
  source 1..20: mol_type = other DNA
tacaaaccagttaccatcat

SEQ ID NO: 259384 - DNA, 20 bp, synthetic construct
  source 1..20: mol_type = other DNA
ctacaaaccagttaccatca

SEQ ID NO: 259385 - DNA, 20 bp, synthetic construct
  source 1..20: mol_type = other DNA
gctacaaaccagttaccatc

SEQ ID NO: 259386 - DNA, 20 bp, synthetic construct
  source 1..20: mol_type = other DNA
agctacaaaccagttaccat

SEQ ID NO: 259387 - DNA, 20 bp, synthetic construct
  source 1..20: mol_type = other DNA
tagctacaaaccagttacca

SEQ ID NO: 259388 - DNA, 20 bp, synthetic construct
  source 1..20: mol_type = other DNA
ttagctacaaaccagttacc

SEQ ID NO: 259389 - DNA, 20 bp, synthetic construct
  source 1..20: mol_type = other DNA
attagctacaaaccagttac

SEQ ID NO: 259390 - DNA, 20 bp, synthetic construct
  source 1..20: mol_type = other DNA
aattagctacaaaccagtta

SEQ ID NO: 259391 - DNA, 20 bp, synthetic construct
  source 1..20: mol_type = other DNA
aaattagctacaaaccagtt

SEQ ID NO: 259392 - DNA, 20 bp, synthetic construct
  source 1..20: mol_type = other DNA
caaattagctacaaaccagt

SEQ ID NO: 259393 - DNA, 20 bp, synthetic construct
  source 1..20: mol_type = other DNA
ccaaattagctacaaaccag

SEQ ID NO: 259394 - DNA, 20 bp, synthetic construct
  source 1..20: mol_type = other DNA
cccaaattagctacaaacca

SEQ ID NO: 259395 - DNA, 20 bp, synthetic construct
  source 1..20: mol_type = other DNA
ccccaaattagctacaaacc

SEQ ID NO: 259396 - DNA, 20 bp, synthetic construct
  source 1..20: mol_type = other DNA
tccccaaattagctacaaac

SEQ ID NO: 259397 - DNA, 20 bp, synthetic construct
  source 1..20: mol_type = other DNA
ttccccaaattagctacaaa

SEQ ID NO: 259398 - DNA, 20 bp, synthetic construct
  source 1..20: mol_type = other DNA
cttccccaaattagctacaa

SEQ ID NO: 259399 - DNA, 20 bp, synthetic construct
  source 1..20: mol_type = other DNA
gcttccccaaattagctaca

SEQ ID NO: 259400 - DNA, 20 bp, synthetic construct
  source 1..20: mol_type = other DNA
tgcttccccaaattagctac

SEQ ID NO: 259401 - DNA, 20 bp, synthetic construct
  source 1..20: mol_type = other DNA
ctgcttccccaaattagcta

SEQ ID NO: 259402 - DNA, 20 bp, synthetic construct
  source 1..20: mol_type = other DNA
actgcttccccaaattagct

SEQ ID NO: 259403 - DNA, 20 bp, synthetic construct
  source 1..20: mol_type = other DNA
cactgcttccccaaattagc

SEQ ID NO: 259404 - DNA, 20 bp, synthetic construct
  source 1..20: mol_type = other DNA
tcactgcttccccaaattag

SEQ ID NO: 259405 - DNA, 20 bp, synthetic construct
  source 1..20: mol_type = other DNA
ctcactgcttccccaaatta

SEQ ID NO: 259406 - DNA, 20 bp, synthetic construct
  source 1..20: mol_type = other DNA
tctcactgcttccccaaatt

SEQ ID NO: 259407 - DNA, 20 bp, synthetic construct
  source 1..20: mol_type = other DNA
ttctcactgcttccccaaat

SEQ ID NO: 259408 - DNA, 20 bp, synthetic construct
  source 1..20: mol_type = other DNA
attctcactgcttccccaaa

SEQ ID NO: 259409 - DNA, 20 bp, synthetic construct
  source 1..20: mol_type = other DNA
aattctcactgcttccccaa

SEQ ID NO: 259410 - DNA, 20 bp, synthetic construct
  source 1..20: mol_type = other DNA
gaattctcactgcttcccca

SEQ ID NO: 259411 - DNA, 20 bp, synthetic construct
  source 1..20: mol_type = other DNA
cgaattctcactgcttcccc

SEQ ID NO: 259412 - DNA, 20 bp, synthetic construct
  source 1..20: mol_type = other DNA
acgaattctcactgcttccc

SEQ ID NO: 259413 - DNA, 20 bp, synthetic construct
  source 1..20: mol_type = other DNA
cacgaattctcactgcttcc

SEQ ID NO: 259414 - DNA, 20 bp, synthetic construct
  source 1..20: mol_type = other DNA
gcacgaattctcactgcttc

SEQ ID NO: 259415 - DNA, 20 bp, synthetic construct
  source 1..20: mol_type = other DNA
ggcacgaattctcactgctt

SEQ ID NO: 259416 - DNA, 20 bp, synthetic construct
  source 1..20: mol_type = other DNA
gggcacgaattctcactgct

SEQ ID NO: 259417 - DNA, 20 bp, synthetic construct
  source 1..20: mol_type = other DNA
agggcacgaattctcactgc

SEQ ID NO: 259418 - DNA, 20 bp, synthetic construct
  source 1..20: mol_type = other DNA
aagggcacgaattctcactg

SEQ ID NO: 259419 - DNA, 20 bp, synthetic construct
  source 1..20: mol_type = other DNA
aaagggcacgaattctcact

SEQ ID NO: 259420 - DNA, 20 bp, synthetic construct
  source 1..20: mol_type = other DNA
caaagggcacgaattctcac

SEQ ID NO: 259421 - DNA, 20 bp, synthetic construct
  source 1..20: mol_type = other DNA
tcaaagggcacgaattctca

SEQ ID NO: 259422 - DNA, 20 bp, synthetic construct
  source 1..20: mol_type = other DNA
ttcaaagggcacgaattctc

SEQ ID NO: 259423 - DNA, 20 bp, synthetic construct
  source 1..20: mol_type = other DNA
cttcaaagggcacgaattct

SEQ ID NO: 259424 - DNA, 20 bp, synthetic construct
  source 1..20: mol_type = other DNA
tcttcaaagggcacgaattc

SEQ ID NO: 259425 - DNA, 20 bp, synthetic construct
  source 1..20: mol_type = other DNA
gtcttcaaagggcacgaatt

SEQ ID NO: 259426 - DNA, 20 bp, synthetic construct
  source 1..20: mol_type = other DNA
ggtcttcaaagggcacgaat

SEQ ID NO: 259427 - DNA, 20 bp, synthetic construct
  source 1..20: mol_type = other DNA
tggtcttcaaagggcacgaa

SEQ ID NO: 259428 - DNA, 20 bp, synthetic construct
  source 1..20: mol_type = other DNA
ctggtcttcaaagggcacga

SEQ ID NO: 259429 - DNA, 20 bp, synthetic construct
  source 1..20: mol_type = other DNA
actggtcttcaaagggcacg

SEQ ID NO: 259430 - DNA, 20 bp, synthetic construct
  source 1..20: mol_type = other DNA
tactggtcttcaaagggcac

SEQ ID NO: 259431 - DNA, 20 bp, synthetic construct
  source 1..20: mol_type = other DNA
ttactggtcttcaaagggca

SEQ ID NO: 259432 - DNA, 20 bp, synthetic construct
  source 1..20: mol_type = other DNA
cttactggtcttcaaagggc

SEQ ID NO: 259433 - DNA, 20 bp, synthetic construct
  source 1..20: mol_type = other DNA
acttactggtcttcaaaggg

SEQ ID NO: 259434 - DNA, 20 bp, synthetic construct
  source 1..20: mol_type = other DNA
cacttactggtcttcaaagg

SEQ ID NO: 259435 - DNA, 20 bp, synthetic construct
  source 1..20: mol_type = other DNA
ccacttactggtcttcaaag

SEQ ID NO: 259436 - DNA, 20 bp, synthetic construct
  source 1..20: mol_type = other DNA
gccacttactggtcttcaaa

SEQ ID NO: 259437 - DNA, 20 bp, synthetic construct
  source 1..20: mol_type = other DNA
tgccacttactggtcttcaa

SEQ ID NO: 259438 - DNA, 20 bp, synthetic construct
  source 1..20: mol_type = other DNA
ttgccacttactggtcttca

SEQ ID NO: 259439 - DNA, 20 bp, synthetic construct
  source 1..20: mol_type = other DNA
cttgccacttactggtcttc

SEQ ID NO: 259440 - DNA, 20 bp, synthetic construct
  source 1..20: mol_type = other DNA
tcttgccacttactggtctt

SEQ ID NO: 259441 - DNA, 20 bp, synthetic construct
  source 1..20: mol_type = other DNA
ttcttgccacttactggtct

SEQ ID NO: 259442 - DNA, 20 bp, synthetic construct
  source 1..20: mol_type = other DNA
tttcttgccacttactggtc

SEQ ID NO: 259443 - DNA, 20 bp, synthetic construct
  source 1..20: mol_type = other DNA
gtttcttgccacttactggt

SEQ ID NO: 259444 - DNA, 20 bp, synthetic construct
  source 1..20: mol_type = other DNA
ggtttcttgccacttactgg

SEQ ID NO: 259445 - DNA, 20 bp, synthetic construct
  source 1..20: mol_type = other DNA
gggtttcttgccacttactg

SEQ ID NO: 259446 - DNA, 20 bp, synthetic construct
  source 1..20: mol_type = other DNA
tgggtttcttgccacttact

SEQ ID NO: 259447 - DNA, 20 bp, synthetic construct
  source 1..20: mol_type = other DNA
gtgggtttcttgccacttac

SEQ ID NO: 259448 - DNA, 20 bp, synthetic construct
  source 1..20: mol_type = other DNA
ggtgggtttcttgccactta

SEQ ID NO: 259449 - DNA, 20 bp, synthetic construct
  source 1..20: mol_type = other DNA
tggtgggtttcttgccactt

SEQ ID NO: 259450 - DNA, 20 bp, synthetic construct
  source 1..20: mol_type = other DNA
ctggtgggtttcttgccact

SEQ ID NO: 259451 - DNA, 20 bp, synthetic construct
  source 1..20: mol_type = other DNA
cctggtgggtttcttgccac

SEQ ID NO: 259452 - DNA, 20 bp, synthetic construct
  source 1..20: mol_type = other DNA
gcctggtgggtttcttgcca

SEQ ID NO: 259453 - DNA, 20 bp, synthetic construct
  source 1..20: mol_type = other DNA
ggcctggtgggtttcttgcc

SEQ ID NO: 259454 - DNA, 20 bp, synthetic construct
  source 1..20: mol_type = other DNA
aggcctggtgggtttcttgc

SEQ ID NO: 259455 - DNA, 20 bp, synthetic construct
  source 1..20: mol_type = other DNA
caggcctggtgggtttcttg

SEQ ID NO: 259456 - DNA, 20 bp, synthetic construct
  source 1..20: mol_type = other DNA
ccaggcctggtgggtttctt

SEQ ID NO: 259457 - DNA, 20 bp, synthetic construct
  source 1..20: mol_type = other DNA
gccaggcctggtgggtttct

SEQ ID NO: 259458 - DNA, 20 bp, synthetic construct
  source 1..20: mol_type = other DNA
agccaggcctggtgggtttc

SEQ ID NO: 259459 - DNA, 20 bp, synthetic construct
  source 1..20: mol_type = other DNA
gagccaggcctggtgggttt

SEQ ID NO: 259460 - DNA, 20 bp, synthetic construct
  source 1..20: mol_type = other DNA
tgagccaggcctggtgggtt

SEQ ID NO: 259461 - DNA, 20 bp, synthetic construct
  source 1..20: mol_type = other DNA
ctgagccaggcctggtgggt

SEQ ID NO: 259462 - DNA, 20 bp, synthetic construct
  source 1..20: mol_type = other DNA
cctgagccaggcctggtggg

SEQ ID NO: 259463 - DNA, 20 bp, synthetic construct
  source 1..20: mol_type = other DNA
ccctgagccaggcctggtgg

SEQ ID NO: 259464 - DNA, 20 bp, synthetic construct
  source 1..20: mol_type = other DNA
gccctgagccaggcctggtg

SEQ ID NO: 259465 - DNA, 20 bp, synthetic construct
  source 1..20: mol_type = other DNA
agccctgagccaggcctggt

SEQ ID NO: 259466 - DNA, 20 bp, synthetic construct
  source 1..20: mol_type = other DNA
cagccctgagccaggcctgg

SEQ ID NO: 259467 - DNA, 20 bp, synthetic construct
  source 1..20: mol_type = other DNA
ccagccctgagccaggcctg

SEQ ID NO: 259468 - DNA, 20 bp, synthetic construct
  source 1..20: mol_type = other DNA
cccagccctgagccaggcct

SEQ ID NO: 259469 - DNA, 20 bp, synthetic construct
  source 1..20: mol_type = other DNA
gcccagccctgagccaggcc

SEQ ID NO: 259470 - DNA, 20 bp, synthetic construct
  source 1..20: mol_type = other DNA
agcccagccctgagccaggc

SEQ ID NO: 259471 - DNA, 20 bp, synthetic construct
  source 1..20: mol_type = other DNA
cagcccagccctgagccagg

SEQ ID NO: 259472 - DNA, 20 bp, synthetic construct
  source 1..20: mol_type = other DNA
ccagcccagccctgagccag

SEQ ID NO: 259473 - DNA, 20 bp, synthetic construct
  source 1..20: mol_type = other DNA
cccagcccagccctgagcca

SEQ ID NO: 259474 - DNA, 20 bp, synthetic construct
  source 1..20: mol_type = other DNA
gcccagcccagccctgagcc

SEQ ID NO: 259475 - DNA, 20 bp, synthetic construct
  source 1..20: mol_type = other DNA
agcccagcccagccctgagc

SEQ ID NO: 259476 - DNA, 20 bp, synthetic construct
  source 1..20: mol_type = other DNA
aagcccagcccagccctgag

SEQ ID NO: 259477 - DNA, 20 bp, synthetic construct
  source 1..20: mol_type = other DNA
caagcccagcccagccctga

SEQ ID NO: 259478 - DNA, 20 bp, synthetic construct
  source 1..20: mol_type = other DNA
ccaagcccagcccagccctg

SEQ ID NO: 259479 - DNA, 20 bp, synthetic construct
  source 1..20: mol_type = other DNA
gccaagcccagcccagccct

SEQ ID NO: 259480 - DNA, 20 bp, synthetic construct
  source 1..20: mol_type = other DNA
agccaagcccagcccagccc

SEQ ID NO: 259481 - DNA, 20 bp, synthetic construct
  source 1..20: mol_type = other DNA
gagccaagcccagcccagcc

SEQ ID NO: 259482 - DNA, 20 bp, synthetic construct
  source 1..20: mol_type = other DNA
cgagccaagcccagcccagc

SEQ ID NO: 259483 - DNA, 20 bp, synthetic construct
  source 1..20: mol_type = other DNA
acgagccaagcccagcccag

SEQ ID NO: 259484 - DNA, 20 bp, synthetic construct
  source 1..20: mol_type = other DNA
gacgagccaagcccagccca

SEQ ID NO: 259485 - DNA, 20 bp, synthetic construct
  source 1..20: mol_type = other DNA
agacgagccaagcccagccc

SEQ ID NO: 259486 - DNA, 20 bp, synthetic construct
  source 1..20: mol_type = other DNA
gagacgagccaagcccagcc

SEQ ID NO: 259487 - DNA, 20 bp, synthetic construct
  source 1..20: mol_type = other DNA
tgagacgagccaagcccagc

SEQ ID NO: 259488 - DNA, 20 bp, synthetic construct
  source 1..20: mol_type = other DNA
ctgagacgagccaagcccag

SEQ ID NO: 259489 - DNA, 20 bp, synthetic construct
  source 1..20: mol_type = other DNA
tctgagacgagccaagccca

SEQ ID NO: 259490 - DNA, 20 bp, synthetic construct
  source 1..20: mol_type = other DNA
ctctgagacgagccaagccc

SEQ ID NO: 259491 - DNA, 20 bp, synthetic construct
  source 1..20: mol_type = other DNA
gctctgagacgagccaagcc

SEQ ID NO: 259492 - DNA, 20 bp, synthetic construct
  source 1..20: mol_type = other DNA
tgctctgagacgagccaagc

SEQ ID NO: 259493 - DNA, 20 bp, synthetic construct
  source 1..20: mol_type = other DNA
ctgctctgagacgagccaag

SEQ ID NO: 259494 - DNA, 20 bp, synthetic construct
  source 1..20: mol_type = other DNA
gctgctctgagacgagccaa

SEQ ID NO: 259495 - DNA, 20 bp, synthetic construct
  source 1..20: mol_type = other DNA
agctgctctgagacgagcca

SEQ ID NO: 259496 - DNA, 20 bp, synthetic construct
  source 1..20: mol_type = other DNA
cagctgctctgagacgagcc

SEQ ID NO: 259497 - DNA, 20 bp, synthetic construct
  source 1..20: mol_type = other DNA
ccagctgctctgagacgagc

SEQ ID NO: 259498 - DNA, 20 bp, synthetic construct
  source 1..20: mol_type = other DNA
cccagctgctctgagacgag

SEQ ID NO: 259499 - DNA, 20 bp, synthetic construct
  source 1..20: mol_type = other DNA
ccccagctgctctgagacga

SEQ ID NO: 259500 - DNA, 20 bp, synthetic construct
  source 1..20: mol_type = other DNA
gccccagctgctctgagacg

SEQ ID NO: 259501 - DNA, 20 bp, synthetic construct
  source 1..20: mol_type = other DNA
agccccagctgctctgagac

SEQ ID NO: 259502 - DNA, 20 bp, synthetic construct
  source 1..20: mol_type = other DNA
cagccccagctgctctgaga

SEQ ID NO: 259503 - DNA, 20 bp, synthetic construct
  source 1..20: mol_type = other DNA
ccagccccagctgctctgag

SEQ ID NO: 259504 - DNA, 20 bp, synthetic construct
  source 1..20: mol_type = other DNA
accagccccagctgctctga

SEQ ID NO: 259505 - DNA, 20 bp, synthetic construct
  source 1..20: mol_type = other DNA
caccagccccagctgctctg

SEQ ID NO: 259506 - DNA, 20 bp, synthetic construct
  source 1..20: mol_type = other DNA
ccaccagccccagctgctct

SEQ ID NO: 259507 - DNA, 20 bp, synthetic construct
  source 1..20: mol_type = other DNA
gccaccagccccagctgctc

SEQ ID NO: 259508 - DNA, 20 bp, synthetic construct
  source 1..20: mol_type = other DNA
ggccaccagccccagctgct

SEQ ID NO: 259509 - DNA, 20 bp, synthetic construct
  source 1..20: mol_type = other DNA
tggccaccagccccagctgc

SEQ ID NO: 259510 - DNA, 20 bp, synthetic construct
  source 1..20: mol_type = other DNA
ttggccaccagccccagctg

SEQ ID NO: 259511 - DNA, 20 bp, synthetic construct
  source 1..20: mol_type = other DNA
tttggccaccagccccagct

SEQ ID NO: 259512 - DNA, 20 bp, synthetic construct
  source 1..20: mol_type = other DNA
ctttggccaccagccccagc

SEQ ID NO: 259513 - DNA, 20 bp, synthetic construct
  source 1..20: mol_type = other DNA
gctttggccaccagccccag

SEQ ID NO: 259514 - DNA, 20 bp, synthetic construct
  source 1..20: mol_type = other DNA
ggctttggccaccagcccca

SEQ ID NO: 259515 - DNA, 20 bp, synthetic construct
  source 1..20: mol_type = other DNA
tggctttggccaccagcccc

SEQ ID NO: 259516 - DNA, 20 bp, synthetic construct
  source 1..20: mol_type = other DNA
gtggctttggccaccagccc

SEQ ID NO: 259517 - DNA, 20 bp, synthetic construct
  source 1..20: mol_type = other DNA
ggtggctttggccaccagcc

SEQ ID NO: 259518 - DNA, 20 bp, synthetic construct
  source 1..20: mol_type = other DNA
tggtggctttggccaccagc

SEQ ID NO: 259519 - DNA, 20 bp, synthetic construct
  source 1..20: mol_type = other DNA
atggtggctttggccaccag

SEQ ID NO: 259520 - DNA, 20 bp, synthetic construct
  source 1..20: mol_type = other DNA
aatggtggctttggccacca

SEQ ID NO: 259521 - DNA, 20 bp, synthetic construct
  source 1..20: mol_type = other DNA
taatggtggctttggccacc

SEQ ID NO: 259522 - DNA, 20 bp, synthetic construct
  source 1..20: mol_type = other DNA
ctaatggtggctttggccac

SEQ ID NO: 259523 - DNA, 20 bp, synthetic construct
  source 1..20: mol_type = other DNA
actaatggtggctttggcca

SEQ ID NO: 259524 - DNA, 20 bp, synthetic construct
  source 1..20: mol_type = other DNA
cactaatggtggctttggcc

SEQ ID NO: 259525 - DNA, 20 bp, synthetic construct
  source 1..20: mol_type = other DNA
tcactaatggtggctttggc

SEQ ID NO: 259526 - DNA, 20 bp, synthetic construct
  source 1..20: mol_type = other DNA
ctcactaatggtggctttgg

SEQ ID NO: 259527 - DNA, 20 bp, synthetic construct
  source 1..20: mol_type = other DNA
cctcactaatggtggctttg

SEQ ID NO: 259528 - DNA, 20 bp, synthetic construct
  source 1..20: mol_type = other DNA
ccctcactaatggtggcttt

SEQ ID NO: 259529 - DNA, 20 bp, synthetic construct
  source 1..20: mol_type = other DNA
cccctcactaatggtggctt

SEQ ID NO: 259530 - DNA, 20 bp, synthetic construct
  source 1..20: mol_type = other DNA
gcccctcactaatggtggct

SEQ ID NO: 259531 - DNA, 20 bp, synthetic construct
  source 1..20: mol_type = other DNA
tgcccctcactaatggtggc

SEQ ID NO: 259532 - DNA, 20 bp, synthetic construct
  source 1..20: mol_type = other DNA
ctgcccctcactaatggtgg

SEQ ID NO: 259533 - DNA, 20 bp, synthetic construct
  source 1..20: mol_type = other DNA
cctgcccctcactaatggtg

SEQ ID NO: 259534 - DNA, 20 bp, synthetic construct
  source 1..20: mol_type = other DNA
gcctgcccctcactaatggt

SEQ ID NO: 259535 - DNA, 20 bp, synthetic construct
  source 1..20: mol_type = other DNA
ggcctgcccctcactaatgg

SEQ ID NO: 259536 - DNA, 20 bp, synthetic construct
  source 1..20: mol_type = other DNA
gggcctgcccctcactaatg

SEQ ID NO: 259537 - DNA, 20 bp, synthetic construct
  source 1..20: mol_type = other DNA
agggcctgcccctcactaat

SEQ ID NO: 259538 - DNA, 20 bp, synthetic construct
  source 1..20: mol_type = other DNA
cagggcctgcccctcactaa

SEQ ID NO: 259539 - DNA, 20 bp, synthetic construct
  source 1..20: mol_type = other DNA
ccagggcctgcccctcacta

SEQ ID NO: 259540 - DNA, 20 bp, synthetic construct
  source 1..20: mol_type = other DNA
cccagggcctgcccctcact

SEQ ID NO: 259541 - DNA, 20 bp, synthetic construct
  source 1..20: mol_type = other DNA
ccccagggcctgcccctcac

SEQ ID NO: 259542 - DNA, 20 bp, synthetic construct
  source 1..20: mol_type = other DNA
cccccagggcctgcccctca

SEQ ID NO: 259543 - DNA, 20 bp, synthetic construct
  source 1..20: mol_type = other DNA
acccccagggcctgcccctc

SEQ ID NO: 259544 - DNA, 20 bp, synthetic construct
  source 1..20: mol_type = other DNA
tacccccagggcctgcccct

SEQ ID NO: 259545 - DNA, 20 bp, synthetic construct
  source 1..20: mol_type = other DNA
gtacccccagggcctgcccc

SEQ ID NO: 259546 - DNA, 20 bp, synthetic construct
  source 1..20: mol_type = other DNA
tgtacccccagggcctgccc

SEQ ID NO: 259547 - DNA, 20 bp, synthetic construct
  source 1..20: mol_type = other DNA
ttgtacccccagggcctgcc

SEQ ID NO: 259548 - DNA, 20 bp, synthetic construct
  source 1..20: mol_type = other DNA
gttgtacccccagggcctgc

SEQ ID NO: 259549 - DNA, 20 bp, synthetic construct
  source 1..20: mol_type = other DNA
ggttgtacccccagggcctg

SEQ ID NO: 259550 - DNA, 20 bp, synthetic construct
  source 1..20: mol_type = other DNA
tggttgtacccccagggcct

SEQ ID NO: 259551 - DNA, 20 bp, synthetic construct
  source 1..20: mol_type = other DNA
ctggttgtacccccagggcc

SEQ ID NO: 259552 - DNA, 20 bp, synthetic construct
  source 1..20: mol_type = other DNA
gctggttgtacccccagggc

SEQ ID NO: 259553 - DNA, 20 bp, synthetic construct
  source 1..20: mol_type = other DNA
tgctggttgtacccccaggg

SEQ ID NO: 259554 - DNA, 20 bp, synthetic construct
  source 1..20: mol_type = other DNA
ttgctggttgtacccccagg

SEQ ID NO: 259555 - DNA, 20 bp, synthetic construct
  source 1..20: mol_type = other DNA
gttgctggttgtacccccag

SEQ ID NO: 259556 - DNA, 20 bp, synthetic construct
  source 1..20: mol_type = other DNA
agttgctggttgtaccccca

SEQ ID NO: 259557 - DNA, 20 bp, synthetic construct
  source 1..20: mol_type = other DNA
tagttgctggttgtaccccc

SEQ ID NO: 259558 - DNA, 20 bp, synthetic construct
  source 1..20: mol_type = other DNA
ctagttgctggttgtacccc

SEQ ID NO: 259559 - DNA, 20 bp, synthetic construct
  source 1..20: mol_type = other DNA
cctagttgctggttgtaccc

SEQ ID NO: 259560 - DNA, 20 bp, synthetic construct
  source 1..20: mol_type = other DNA
ccctagttgctggttgtacc

SEQ ID NO: 259561 - DNA, 20 bp, synthetic construct
  source 1..20: mol_type = other DNA
cccctagttgctggttgtac

SEQ ID NO: 259562 - DNA, 20 bp, synthetic construct
  source 1..20: mol_type = other DNA
tcccctagttgctggttgta

SEQ ID NO: 259563 - DNA, 20 bp, synthetic construct
  source 1..20: mol_type = other DNA
gtcccctagttgctggttgt

SEQ ID NO: 259564 - DNA, 20 bp, synthetic construct
  source 1..20: mol_type = other DNA
tgtcccctagttgctggttg

SEQ ID NO: 259565 - DNA, 20 bp, synthetic construct
  source 1..20: mol_type = other DNA
ttgtcccctagttgctggtt

SEQ ID NO: 259566 - DNA, 20 bp, synthetic construct
  source 1..20: mol_type = other DNA
tttgtcccctagttgctggt

SEQ ID NO: 259567 - DNA, 20 bp, synthetic construct
  source 1..20: mol_type = other DNA
ctttgtcccctagttgctgg

SEQ ID NO: 259568 - DNA, 20 bp, synthetic construct
  source 1..20: mol_type = other DNA
tctttgtcccctagttgctg

SEQ ID NO: 259569 - DNA, 20 bp, synthetic construct
  source 1..20: mol_type = other DNA
gtctttgtcccctagttgct

SEQ ID NO: 259570 - DNA, 20 bp, synthetic construct
  source 1..20: mol_type = other DNA
tgtctttgtcccctagttgc

SEQ ID NO: 259571 - DNA, 20 bp, synthetic construct
  source 1..20: mol_type = other DNA
ttgtctttgtcccctagttg

SEQ ID NO: 259572 - DNA, 20 bp, synthetic construct
  source 1..20: mol_type = other DNA
gttgtctttgtcccctagtt

SEQ ID NO: 259573 - DNA, 20 bp, synthetic construct
  source 1..20: mol_type = other DNA
ggttgtctttgtcccctagt

SEQ ID NO: 259574 - DNA, 20 bp, synthetic construct
  source 1..20: mol_type = other DNA
gggttgtctttgtcccctag

SEQ ID NO: 259575 - DNA, 20 bp, synthetic construct
  source 1..20: mol_type = other DNA
agggttgtctttgtccccta

SEQ ID NO: 259576 - DNA, 20 bp, synthetic construct
  source 1..20: mol_type = other DNA
cagggttgtctttgtcccct

SEQ ID NO: 259577 - DNA, 20 bp, synthetic construct
  source 1..20: mol_type = other DNA
gcagggttgtctttgtcccc

SEQ ID NO: 259578 - DNA, 20 bp, synthetic construct
  source 1..20: mol_type = other DNA
ggcagggttgtctttgtccc

SEQ ID NO: 259579 - DNA, 20 bp, synthetic construct
  source 1..20: mol_type = other DNA
tggcagggttgtctttgtcc

SEQ ID NO: 259580 - DNA, 20 bp, synthetic construct
  source 1..20: mol_type = other DNA
ctggcagggttgtctttgtc

SEQ ID NO: 259581 - DNA, 20 bp, synthetic construct
  source 1..20: mol_type = other DNA
gctggcagggttgtctttgt

SEQ ID NO: 259582 - DNA, 20 bp, synthetic construct
  source 1..20: mol_type = other DNA
ggctggcagggttgtctttg

SEQ ID NO: 259583 - DNA, 20 bp, synthetic construct
  source 1..20: mol_type = other DNA
aggctggcagggttgtcttt

SEQ ID NO: 259584 - DNA, 20 bp, synthetic construct
  source 1..20: mol_type = other DNA
gaggctggcagggttgtctt

SEQ ID NO: 259585 - DNA, 20 bp, synthetic construct
  source 1..20: mol_type = other DNA
agaggctggcagggttgtct

SEQ ID NO: 259586 - DNA, 20 bp, synthetic construct
  source 1..20: mol_type = other DNA
gagaggctggcagggttgtc

SEQ ID NO: 259587 - DNA, 20 bp, synthetic construct
  source 1..20: mol_type = other DNA
ggagaggctggcagggttgt

SEQ ID NO: 259588 - DNA, 20 bp, synthetic construct
  source 1..20: mol_type = other DNA
aggagaggctggcagggttg

SEQ ID NO: 259589 - DNA, 20 bp, synthetic construct
  source 1..20: mol_type = other DNA
taggagaggctggcagggtt

SEQ ID NO: 259590 - DNA, 20 bp, synthetic construct
  source 1..20: mol_type = other DNA
ataggagaggctggcagggt

SEQ ID NO: 259591 - DNA, 20 bp, synthetic construct
  source 1..20: mol_type = other DNA
aataggagaggctggcaggg

SEQ ID NO: 259592 - DNA, 20 bp, synthetic construct
  source 1..20: mol_type = other DNA
gaataggagaggctggcagg

SEQ ID NO: 259593 - DNA, 20 bp, synthetic construct
  source 1..20: mol_type = other DNA
agaataggagaggctggcag

SEQ ID NO: 259594 - DNA, 20 bp, synthetic construct
  source 1..20: mol_type = other DNA
cagaataggagaggctggca

SEQ ID NO: 259595 - DNA, 20 bp, synthetic construct
  source 1..20: mol_type = other DNA
ccagaataggagaggctggc

SEQ ID NO: 259596 - DNA, 20 bp, synthetic construct
  source 1..20: mol_type = other DNA
tccagaataggagaggctgg

SEQ ID NO: 259597 - DNA, 20 bp, synthetic construct
  source 1..20: mol_type = other DNA
ctccagaataggagaggctg

SEQ ID NO: 259598 - DNA, 20 bp, synthetic construct
  source 1..20: mol_type = other DNA
cctccagaataggagaggct

SEQ ID NO: 259599 - DNA, 20 bp, synthetic construct
  source 1..20: mol_type = other DNA
gcctccagaataggagaggc

SEQ ID NO: 259600 - DNA, 20 bp, synthetic construct
  source 1..20: mol_type = other DNA
cgcctccagaataggagagg

SEQ ID NO: 259601 - DNA, 20 bp, synthetic construct
  source 1..20: mol_type = other DNA
acgcctccagaataggagag

SEQ ID NO: 259602 - DNA, 20 bp, synthetic construct
  source 1..20: mol_type = other DNA
cacgcctccagaataggaga

SEQ ID NO: 259603 - DNA, 20 bp, synthetic construct
  source 1..20: mol_type = other DNA
acacgcctccagaataggag

SEQ ID NO: 259604 - DNA, 20 bp, synthetic construct
  source 1..20: mol_type = other DNA
cacacgcctccagaatagga

SEQ ID NO: 259605 - DNA, 20 bp, synthetic construct
  source 1..20: mol_type = other DNA
tcacacgcctccagaatagg

SEQ ID NO: 259606 - DNA, 20 bp, synthetic construct
  source 1..20: mol_type = other DNA
gtcacacgcctccagaatag

SEQ ID NO: 259607 - DNA, 20 bp, synthetic construct
  source 1..20: mol_type = other DNA
ggtcacacgcctccagaata

SEQ ID NO: 259608 - DNA, 20 bp, synthetic construct
  source 1..20: mol_type = other DNA
tggtcacacgcctccagaat

SEQ ID NO: 259609 - DNA, 20 bp, synthetic construct
  source 1..20: mol_type = other DNA
ctggtcacacgcctccagaa

SEQ ID NO: 259610 - DNA, 20 bp, synthetic construct
  source 1..20: mol_type = other DNA
tctggtcacacgcctccaga

SEQ ID NO: 259611 - DNA, 20 bp, synthetic construct
  source 1..20: mol_type = other DNA
ttctggtcacacgcctccag

SEQ ID NO: 259612 - DNA, 20 bp, synthetic construct
  source 1..20: mol_type = other DNA
tttctggtcacacgcctcca

SEQ ID NO: 259613 - DNA, 20 bp, synthetic construct
  source 1..20: mol_type = other DNA
atttctggtcacacgcctcc

SEQ ID NO: 259614 - DNA, 20 bp, synthetic construct
  source 1..20: mol_type = other DNA
catttctggtcacacgcctc

SEQ ID NO: 259615 - DNA, 20 bp, synthetic construct
  source 1..20: mol_type = other DNA
ccatttctggtcacacgcct

SEQ ID NO: 259616 - DNA, 20 bp, synthetic construct
  source 1..20: mol_type = other DNA
tccatttctggtcacacgcc

SEQ ID NO: 259617 - DNA, 20 bp, synthetic construct
  source 1..20: mol_type = other DNA
ctccatttctggtcacacgc

SEQ ID NO: 259618 - DNA, 20 bp, synthetic construct
  source 1..20: mol_type = other DNA
tctccatttctggtcacacg

SEQ ID NO: 259619 - DNA, 20 bp, synthetic construct
  source 1..20: mol_type = other DNA
atctccatttctggtcacac

SEQ ID NO: 259620 - DNA, 20 bp, synthetic construct
  source 1..20: mol_type = other DNA
catctccatttctggtcaca

SEQ ID NO: 259621 - DNA, 20 bp, synthetic construct
  source 1..20: mol_type = other DNA
ccatctccatttctggtcac

SEQ ID NO: 259622 - DNA, 20 bp, synthetic construct
  source 1..20: mol_type = other DNA
cccatctccatttctggtca

SEQ ID NO: 259623 - DNA, 20 bp, synthetic construct
  source 1..20: mol_type = other DNA
acccatctccatttctggtc

SEQ ID NO: 259624 - DNA, 20 bp, synthetic construct
  source 1..20: mol_type = other DNA
aacccatctccatttctggt

SEQ ID NO: 259625 - DNA, 20 bp, synthetic construct
  source 1..20: mol_type = other DNA
caacccatctccatttctgg

SEQ ID NO: 259626 - DNA, 20 bp, synthetic construct
  source 1..20: mol_type = other DNA
ccaacccatctccatttctg

SEQ ID NO: 259627 - DNA, 20 bp, synthetic construct
  source 1..20: mol_type = other DNA
accaacccatctccatttct

SEQ ID NO: 259628 - DNA, 20 bp, synthetic construct
  source 1..20: mol_type = other DNA
gaccaacccatctccatttc

SEQ ID NO: 259629 - DNA, 20 bp, synthetic construct
  source 1..20: mol_type = other DNA
tgaccaacccatctccattt

SEQ ID NO: 259630 - DNA, 20 bp, synthetic construct
  source 1..20: mol_type = other DNA
ctgaccaacccatctccatt

SEQ ID NO: 259631 - DNA, 20 bp, synthetic construct
  source 1..20: mol_type = other DNA
gctgaccaacccatctccat

SEQ ID NO: 259632 - DNA, 20 bp, synthetic construct
  source 1..20: mol_type = other DNA
tgctgaccaacccatctcca

SEQ ID NO: 259633 - DNA, 20 bp, synthetic construct
  source 1..20: mol_type = other DNA
atgctgaccaacccatctcc

SEQ ID NO: 259634 - DNA, 20 bp, synthetic construct
  source 1..20: mol_type = other DNA
tatgctgaccaacccatctc

SEQ ID NO: 259635 - DNA, 20 bp, synthetic construct
  source 1..20: mol_type = other DNA
ttatgctgaccaacccatct

SEQ ID NO: 259636 - DNA, 20 bp, synthetic construct
  source 1..20: mol_type = other DNA
cttatgctgaccaacccatc

SEQ ID NO: 259637 - DNA, 20 bp, synthetic construct
  source 1..20: mol_type = other DNA
tcttatgctgaccaacccat

SEQ ID NO: 259638 - DNA, 20 bp, synthetic construct
  source 1..20: mol_type = other DNA
atcttatgctgaccaaccca

SEQ ID NO: 259639 - DNA, 20 bp, synthetic construct
  source 1..20: mol_type = other DNA
catcttatgctgaccaaccc

SEQ ID NO: 259640 - DNA, 20 bp, synthetic construct
  source 1..20: mol_type = other DNA
ccatcttatgctgaccaacc

SEQ ID NO: 259641 - DNA, 20 bp, synthetic construct
  source 1..20: mol_type = other DNA
gccatcttatgctgaccaac

SEQ ID NO: 259642 - DNA, 20 bp, synthetic construct
  source 1..20: mol_type = other DNA
ggccatcttatgctgaccaa

SEQ ID NO: 259643 - DNA, 20 bp, synthetic construct
  source 1..20: mol_type = other DNA
tggccatcttatgctgacca

SEQ ID NO: 259644 - DNA, 20 bp, synthetic construct
  source 1..20: mol_type = other DNA
ctggccatcttatgctgacc

SEQ ID NO: 259645 - DNA, 20 bp, synthetic construct
  source 1..20: mol_type = other DNA
cctggccatcttatgctgac

SEQ ID NO: 259646 - DNA, 20 bp, synthetic construct
  source 1..20: mol_type = other DNA
tcctggccatcttatgctga

SEQ ID NO: 259647 - DNA, 20 bp, synthetic construct
  source 1..20: mol_type = other DNA
ttcctggccatcttatgctg

SEQ ID NO: 259648 - DNA, 20 bp, synthetic construct
  source 1..20: mol_type = other DNA
cttcctggccatcttatgct

SEQ ID NO: 259649 - DNA, 20 bp, synthetic construct
  source 1..20: mol_type = other DNA
ccttcctggccatcttatgc

SEQ ID NO: 259650 - DNA, 20 bp, synthetic construct
  source 1..20: mol_type = other DNA
accttcctggccatcttatg

SEQ ID NO: 259651 - DNA, 20 bp, synthetic construct
  source 1..20: mol_type = other DNA
caccttcctggccatcttat

SEQ ID NO: 259652 - DNA, 20 bp, synthetic construct
  source 1..20: mol_type = other DNA
ccaccttcctggccatctta

SEQ ID NO: 259653 - DNA, 20 bp, synthetic construct
  source 1..20: mol_type = other DNA
tccaccttcctggccatctt

SEQ ID NO: 259654 - DNA, 20 bp, synthetic construct
  source 1..20: mol_type = other DNA
ttccaccttcctggccatct

SEQ ID NO: 259655 - DNA, 20 bp, synthetic construct
  source 1..20: mol_type = other DNA
tttccaccttcctggccatc

SEQ ID NO: 259656 - DNA, 20 bp, synthetic construct
  source 1..20: mol_type = other DNA
atttccaccttcctggccat

SEQ ID NO: 259657 - DNA, 20 bp, synthetic construct
  source 1..20: mol_type = other DNA
gatttccaccttcctggcca

SEQ ID NO: 259658 - DNA, 20 bp, synthetic construct
  source 1..20: mol_type = other DNA
tgatttccaccttcctggcc

SEQ ID NO: 259659 - DNA, 20 bp, synthetic construct
  source 1..20: mol_type = other DNA
ctgatttccaccttcctggc

SEQ ID NO: 259660 - DNA, 20 bp, synthetic construct
  source 1..20: mol_type = other DNA
cctgatttccaccttcctgg

SEQ ID NO: 259661 - DNA, 20 bp, synthetic construct
  source 1..20: mol_type = other DNA
tcctgatttccaccttcctg

SEQ ID NO: 259662 - DNA, 20 bp, synthetic construct
  source 1..20: mol_type = other DNA
gtcctgatttccaccttcct

SEQ ID NO: 259663 - DNA, 20 bp, synthetic construct
  source 1..20: mol_type = other DNA
agtcctgatttccaccttcc

SEQ ID NO: 259664 - DNA, 20 bp, synthetic construct
  source 1..20: mol_type = other DNA
cagtcctgatttccaccttc

SEQ ID NO: 259665 - DNA, 20 bp, synthetic construct
  source 1..20: mol_type = other DNA
gcagtcctgatttccacctt

SEQ ID NO: 259666 - DNA, 20 bp, synthetic construct
  source 1..20: mol_type = other DNA
agcagtcctgatttccacct

SEQ ID NO: 259667 - DNA, 20 bp, synthetic construct
  source 1..20: mol_type = other DNA
cagcagtcctgatttccacc

SEQ ID NO: 259668 - DNA, 20 bp, synthetic construct
  source 1..20: mol_type = other DNA
ccagcagtcctgatttccac

SEQ ID NO: 259669 - DNA, 20 bp, synthetic construct
  source 1..20: mol_type = other DNA
gccagcagtcctgatttcca

SEQ ID NO: 259670 - DNA, 20 bp, synthetic construct
  source 1..20: mol_type = other DNA
tgccagcagtcctgatttcc

SEQ ID NO: 259671 - DNA, 20 bp, synthetic construct
  source 1..20: mol_type = other DNA
ttgccagcagtcctgatttc

SEQ ID NO: 259672 - DNA, 20 bp, synthetic construct
  source 1..20: mol_type = other DNA
attgccagcagtcctgattt

SEQ ID NO: 259673 - DNA, 20 bp, synthetic construct
  source 1..20: mol_type = other DNA
gattgccagcagtcctgatt

SEQ ID NO: 259674 - DNA, 20 bp, synthetic construct
  source 1..20: mol_type = other DNA
agattgccagcagtcctgat

SEQ ID NO: 259675 - DNA, 20 bp, synthetic construct
  source 1..20: mol_type = other DNA
tagattgccagcagtcctga

SEQ ID NO: 259676 - DNA, 20 bp, synthetic construct
  source 1..20: mol_type = other DNA
ctagattgccagcagtcctg

SEQ ID NO: 259677 - DNA, 20 bp, synthetic construct
  source 1..20: mol_type = other DNA
gctagattgccagcagtcct

SEQ ID NO: 259678 - DNA, 20 bp, synthetic construct
  source 1..20: mol_type = other DNA
ggctagattgccagcagtcc

SEQ ID NO: 259679 - DNA, 20 bp, synthetic construct
  source 1..20: mol_type = other DNA
tggctagattgccagcagtc

SEQ ID NO: 259680 - DNA, 20 bp, synthetic construct
  source 1..20: mol_type = other DNA
gtggctagattgccagcagt

SEQ ID NO: 259681 - DNA, 20 bp, synthetic construct
  source 1..20: mol_type = other DNA
tgtggctagattgccagcag

SEQ ID NO: 259682 - DNA, 20 bp, synthetic construct
  source 1..20: mol_type = other DNA
atgtggctagattgccagca

SEQ ID NO: 259683 - DNA, 20 bp, synthetic construct
  source 1..20: mol_type = other DNA
catgtggctagattgccagc

SEQ ID NO: 259684 - DNA, 20 bp, synthetic construct
  source 1..20: mol_type = other DNA
ccatgtggctagattgccag

SEQ ID NO: 259685 - DNA, 20 bp, synthetic construct
  source 1..20: mol_type = other DNA
cccatgtggctagattgcca

SEQ ID NO: 259686 - DNA, 20 bp, synthetic construct
  source 1..20: mol_type = other DNA
gcccatgtggctagattgcc

SEQ ID NO: 259687 - DNA, 20 bp, synthetic construct
  source 1..20: mol_type = other DNA
tgcccatgtggctagattgc

SEQ ID NO: 259688 - DNA, 20 bp, synthetic construct
  source 1..20: mol_type = other DNA
ctgcccatgtggctagattg

SEQ ID NO: 259689 - DNA, 20 bp, synthetic construct
  source 1..20: mol_type = other DNA
cctgcccatgtggctagatt

SEQ ID NO: 259690 - DNA, 20 bp, synthetic construct
  source 1..20: mol_type = other DNA
ccctgcccatgtggctagat

SEQ ID NO: 259691 - DNA, 20 bp, synthetic construct
  source 1..20: mol_type = other DNA
cccctgcccatgtggctaga

SEQ ID NO: 259692 - DNA, 20 bp, synthetic construct
  source 1..20: mol_type = other DNA
tcccctgcccatgtggctag

SEQ ID NO: 259693 - DNA, 20 bp, synthetic construct
  source 1..20: mol_type = other DNA
ctcccctgcccatgtggcta

SEQ ID NO: 259694 - DNA, 20 bp, synthetic construct
  source 1..20: mol_type = other DNA
gctcccctgcccatgtggct

SEQ ID NO: 259695 - DNA, 20 bp, synthetic construct
  source 1..20: mol_type = other DNA
ggctcccctgcccatgtggc

SEQ ID NO: 259696 - DNA, 20 bp, synthetic construct
  source 1..20: mol_type = other DNA
cggctcccctgcccatgtgg

SEQ ID NO: 259697 - DNA, 20 bp, synthetic construct
  source 1..20: mol_type = other DNA
ccggctcccctgcccatgtg

SEQ ID NO: 259698 - DNA, 20 bp, synthetic construct
  source 1..20: mol_type = other DNA
cccggctcccctgcccatgt

SEQ ID NO: 259699 - DNA, 20 bp, synthetic construct
  source 1..20: mol_type = other DNA
acccggctcccctgcccatg

SEQ ID NO: 259700 - DNA, 20 bp, synthetic construct
  source 1..20: mol_type = other DNA
cacccggctcccctgcccat

SEQ ID NO: 259701 - DNA, 20 bp, synthetic construct
  source 1..20: mol_type = other DNA
ccacccggctcccctgccca

SEQ ID NO: 259702 - DNA, 20 bp, synthetic construct
  source 1..20: mol_type = other DNA
accacccggctcccctgccc

SEQ ID NO: 259703 - DNA, 20 bp, synthetic construct
  source 1..20: mol_type = other DNA
aaccacccggctcccctgcc

SEQ ID NO: 259704 - DNA, 20 bp, synthetic construct
  source 1..20: mol_type = other DNA
gaaccacccggctcccctgc

SEQ ID NO: 259705 - DNA, 20 bp, synthetic construct
  source 1..20: mol_type = other DNA
ggaaccacccggctcccctg

SEQ ID NO: 259706 - DNA, 20 bp, synthetic construct
  source 1..20: mol_type = other DNA
tggaaccacccggctcccct

SEQ ID NO: 259707 - DNA, 20 bp, synthetic construct
  source 1..20: mol_type = other DNA
ctggaaccacccggctcccc

SEQ ID NO: 259708 - DNA, 20 bp, synthetic construct
  source 1..20: mol_type = other DNA
cctggaaccacccggctccc

SEQ ID NO: 259709 - DNA, 20 bp, synthetic construct
  source 1..20: mol_type = other DNA
gcctggaaccacccggctcc

SEQ ID NO: 259710 - DNA, 20 bp, synthetic construct
  source 1..20: mol_type = other DNA
tgcctggaaccacccggctc

SEQ ID NO: 259711 - DNA, 20 bp, synthetic construct
  source 1..20: mol_type = other DNA
ctgcctggaaccacccggct

SEQ ID NO: 259712 - DNA, 20 bp, synthetic construct
  source 1..20: mol_type = other DNA
actgcctggaaccacccggc

SEQ ID NO: 259713 - DNA, 20 bp, synthetic construct
  source 1..20: mol_type = other DNA
aactgcctggaaccacccgg

SEQ ID NO: 259714 - DNA, 20 bp, synthetic construct
  source 1..20: mol_type = other DNA
aaactgcctggaaccacccg

SEQ ID NO: 259715 - DNA, 20 bp, synthetic construct
  source 1..20: mol_type = other DNA
gaaactgcctggaaccaccc

SEQ ID NO: 259716 - DNA, 20 bp, synthetic construct
  source 1..20: mol_type = other DNA
ggaaactgcctggaaccacc

SEQ ID NO: 259717 - DNA, 20 bp, synthetic construct
  source 1..20: mol_type = other DNA
tggaaactgcctggaaccac

SEQ ID NO: 259718 - DNA, 20 bp, synthetic construct
  source 1..20: mol_type = other DNA
ttggaaactgcctggaacca

SEQ ID NO: 259719 - DNA, 20 bp, synthetic construct
  source 1..20: mol_type = other DNA
cttggaaactgcctggaacc

SEQ ID NO: 259720 - DNA, 20 bp, synthetic construct
  source 1..20: mol_type = other DNA
ccttggaaactgcctggaac

SEQ ID NO: 259721 - DNA, 20 bp, synthetic construct
  source 1..20: mol_type = other DNA
gccttggaaactgcctggaa

SEQ ID NO: 259722 - DNA, 20 bp, synthetic construct
  source 1..20: mol_type = other DNA
ggccttggaaactgcctgga

SEQ ID NO: 259723 - DNA, 20 bp, synthetic construct
  source 1..20: mol_type = other DNA
tggccttggaaactgcctgg

SEQ ID NO: 259724 - DNA, 20 bp, synthetic construct
  source 1..20: mol_type = other DNA
ttggccttggaaactgcctg

SEQ ID NO: 259725 - DNA, 20 bp, synthetic construct
  source 1..20: mol_type = other DNA
cttggccttggaaactgcct

SEQ ID NO: 259726 - DNA, 20 bp, synthetic construct
  source 1..20: mol_type = other DNA
tcttggccttggaaactgcc

SEQ ID NO: 259727 - DNA, 20 bp, synthetic construct
  source 1..20: mol_type = other DNA
ctcttggccttggaaactgc

SEQ ID NO: 259728 - DNA, 20 bp, synthetic construct
  source 1..20: mol_type = other DNA
cctcttggccttggaaactg

SEQ ID NO: 259729 - DNA, 20 bp, synthetic construct
  source 1..20: mol_type = other DNA
ccctcttggccttggaaact

SEQ ID NO: 259730 - DNA, 20 bp, synthetic construct
  source 1..20: mol_type = other DNA
accctcttggccttggaaac

SEQ ID NO: 259731 - DNA, 20 bp, synthetic construct
  source 1..20: mol_type = other DNA
caccctcttggccttggaaa

SEQ ID NO: 259732 - DNA, 20 bp, synthetic construct
  source 1..20: mol_type = other DNA
tcaccctcttggccttggaa

SEQ ID NO: 259733 - DNA, 20 bp, synthetic construct
  source 1..20: mol_type = other DNA
ctcaccctcttggccttgga

SEQ ID NO: 259734 - DNA, 20 bp, synthetic construct
  source 1..20: mol_type = other DNA
gctcaccctcttggccttgg

SEQ ID NO: 259735 - DNA, 20 bp, synthetic construct
  source 1..20: mol_type = other DNA
tgctcaccctcttggccttg

SEQ ID NO: 259736 - DNA, 20 bp, synthetic construct
  source 1..20: mol_type = other DNA
ctgctcaccctcttggcctt

SEQ ID NO: 259737 - DNA, 20 bp, synthetic construct
  source 1..20: mol_type = other DNA
cctgctcaccctcttggcct

SEQ ID NO: 259738 - DNA, 20 bp, synthetic construct
  source 1..20: mol_type = other DNA
gcctgctcaccctcttggcc

SEQ ID NO: 259739 - DNA, 20 bp, synthetic construct
  source 1..20: mol_type = other DNA
tgcctgctcaccctcttggc

SEQ ID NO: 259740 - DNA, 20 bp, synthetic construct
  source 1..20: mol_type = other DNA
gtgcctgctcaccctcttgg

SEQ ID NO: 259741 - DNA, 20 bp, synthetic construct
  source 1..20: mol_type = other DNA
ggtgcctgctcaccctcttg

SEQ ID NO: 259742 - DNA, 20 bp, synthetic construct
  source 1..20: mol_type = other DNA
aggtgcctgctcaccctctt

SEQ ID NO: 259743 - DNA, 20 bp, synthetic construct
  source 1..20: mol_type = other DNA
gaggtgcctgctcaccctct

SEQ ID NO: 259744 - DNA, 20 bp, synthetic construct
  source 1..20: mol_type = other DNA
tgaggtgcctgctcaccctc

SEQ ID NO: 259745 - DNA, 20 bp, synthetic construct
  source 1..20: mol_type = other DNA
gtgaggtgcctgctcaccct

SEQ ID NO: 259746 - DNA, 20 bp, synthetic construct
  source 1..20: mol_type = other DNA
tgtgaggtgcctgctcaccc

SEQ ID NO: 259747 - DNA, 20 bp, synthetic construct
  source 1..20: mol_type = other DNA
ctgtgaggtgcctgctcacc

SEQ ID NO: 259748 - DNA, 20 bp, synthetic construct
  source 1..20: mol_type = other DNA
cctgtgaggtgcctgctcac

SEQ ID NO: 259749 - DNA, 20 bp, synthetic construct
  source 1..20: mol_type = other DNA
ccctgtgaggtgcctgctca

SEQ ID NO: 259750 - DNA, 20 bp, synthetic construct
  source 1..20: mol_type = other DNA
tccctgtgaggtgcctgctc

SEQ ID NO: 259751 - DNA, 20 bp, synthetic construct
  source 1..20: mol_type = other DNA
ttccctgtgaggtgcctgct

SEQ ID NO: 259752 - DNA, 20 bp, synthetic construct
  source 1..20: mol_type = other DNA
attccctgtgaggtgcctgc

SEQ ID NO: 259753 - DNA, 20 bp, synthetic construct
  source 1..20: mol_type = other DNA
gattccctgtgaggtgcctg

SEQ ID NO: 259754 - DNA, 20 bp, synthetic construct
  source 1..20: mol_type = other DNA
tgattccctgtgaggtgcct

SEQ ID NO: 259755 - DNA, 20 bp, synthetic construct
  source 1..20: mol_type = other DNA
ctgattccctgtgaggtgcc

SEQ ID NO: 259756 - DNA, 20 bp, synthetic construct
  source 1..20: mol_type = other DNA
cctgattccctgtgaggtgc

SEQ ID NO: 259757 - DNA, 20 bp, synthetic construct
  source 1..20: mol_type = other DNA
ccctgattccctgtgaggtg

SEQ ID NO: 259758 - DNA, 20 bp, synthetic construct
  source 1..20: mol_type = other DNA
gccctgattccctgtgaggt

SEQ ID NO: 259759 - DNA, 20 bp, synthetic construct
  source 1..20: mol_type = other DNA
ggccctgattccctgtgagg

SEQ ID NO: 259760 - DNA, 20 bp, synthetic construct
  source 1..20: mol_type = other DNA
tggccctgattccctgtgag

SEQ ID NO: 259761 - DNA, 20 bp, synthetic construct
  source 1..20: mol_type = other DNA
ttggccctgattccctgtga

SEQ ID NO: 259762 - DNA, 20 bp, synthetic construct
  source 1..20: mol_type = other DNA
cttggccctgattccctgtg

SEQ ID NO: 259763 - DNA, 20 bp, synthetic construct
  source 1..20: mol_type = other DNA
gcttggccctgattccctgt

SEQ ID NO: 259764 - DNA, 20 bp, synthetic construct
  source 1..20: mol_type = other DNA
ggcttggccctgattccctg

SEQ ID NO: 259765 - DNA, 20 bp, synthetic construct
  source 1..20: mol_type = other DNA
aggcttggccctgattccct

SEQ ID NO: 259766 - DNA, 20 bp, synthetic construct
  source 1..20: mol_type = other DNA
caggcttggccctgattccc

SEQ ID NO: 259767 - DNA, 20 bp, synthetic construct
  source 1..20: mol_type = other DNA
ccaggcttggccctgattcc

SEQ ID NO: 259768 - DNA, 20 bp, synthetic construct
  source 1..20: mol_type = other DNA
gccaggcttggccctgattc

SEQ ID NO: 259769 - DNA, 20 bp, synthetic construct
  source 1..20: mol_type = other DNA
agccaggcttggccctgatt

SEQ ID NO: 259770 - DNA, 20 bp, synthetic construct
  source 1..20: mol_type = other DNA
cagccaggcttggccctgat

SEQ ID NO: 259771 - DNA, 20 bp, synthetic construct
  source 1..20: mol_type = other DNA
gcagccaggcttggccctga

SEQ ID NO: 259772 - DNA, 20 bp, synthetic construct
  source 1..20: mol_type = other DNA
tgcagccaggcttggccctg

SEQ ID NO: 259773 - DNA, 20 bp, synthetic construct
  source 1..20: mol_type = other DNA
ctgcagccaggcttggccct

SEQ ID NO: 259774 - DNA, 20 bp, synthetic construct
  source 1..20: mol_type = other DNA
actgcagccaggcttggccc

SEQ ID NO: 259775 - DNA, 20 bp, synthetic construct
  source 1..20: mol_type = other DNA
cactgcagccaggcttggcc

SEQ ID NO: 259776 - DNA, 20 bp, synthetic construct
  source 1..20: mol_type = other DNA
acactgcagccaggcttggc

SEQ ID NO: 259777 - DNA, 20 bp, synthetic construct
  source 1..20: mol_type = other DNA
cacactgcagccaggcttgg

SEQ ID NO: 259778 - DNA, 20 bp, synthetic construct
  source 1..20: mol_type = other DNA
ccacactgcagccaggcttg

SEQ ID NO: 259779 - DNA, 20 bp, synthetic construct
  source 1..20: mol_type = other DNA
tccacactgcagccaggctt

SEQ ID NO: 259780 - DNA, 20 bp, synthetic construct
  source 1..20: mol_type = other DNA
ctccacactgcagccaggct

SEQ ID NO: 259781 - DNA, 20 bp, synthetic construct
  source 1..20: mol_type = other DNA
tctccacactgcagccaggc

SEQ ID NO: 259782 - DNA, 20 bp, synthetic construct
  source 1..20: mol_type = other DNA
gtctccacactgcagccagg

SEQ ID NO: 259783 - DNA, 20 bp, synthetic construct
  source 1..20: mol_type = other DNA
tgtctccacactgcagccag

SEQ ID NO: 259784 - DNA, 20 bp, synthetic construct
  source 1..20: mol_type = other DNA
ttgtctccacactgcagcca

SEQ ID NO: 259785 - DNA, 20 bp, synthetic construct
  source 1..20: mol_type = other DNA
attgtctccacactgcagcc

SEQ ID NO: 259786 - DNA, 20 bp, synthetic construct
  source 1..20: mol_type = other DNA
cattgtctccacactgcagc

SEQ ID NO: 259787 - DNA, 20 bp, synthetic construct
  source 1..20: mol_type = other DNA
gcattgtctccacactgcag

SEQ ID NO: 259788 - DNA, 20 bp, synthetic construct
  source 1..20: mol_type = other DNA
tgcattgtctccacactgca

SEQ ID NO: 259789 - DNA, 20 bp, synthetic construct
  source 1..20: mol_type = other DNA
gtgcattgtctccacactgc

SEQ ID NO: 259790 - DNA, 20 bp, synthetic construct
  source 1..20: mol_type = other DNA
ggtgcattgtctccacactg

SEQ ID NO: 259791 - DNA, 20 bp, synthetic construct
  source 1..20: mol_type = other DNA
gggtgcattgtctccacact

SEQ ID NO: 259792 - DNA, 20 bp, synthetic construct
  source 1..20: mol_type = other DNA
tgggtgcattgtctccacac

SEQ ID NO: 259793 - DNA, 20 bp, synthetic construct
  source 1..20: mol_type = other DNA
gtgggtgcattgtctccaca

SEQ ID NO: 259794 - DNA, 20 bp, synthetic construct
  source 1..20: mol_type = other DNA
ggtgggtgcattgtctccac

SEQ ID NO: 259795 - DNA, 20 bp, synthetic construct
  source 1..20: mol_type = other DNA
gggtgggtgcattgtctcca

SEQ ID NO: 259796 - DNA, 20 bp, synthetic construct
  source 1..20: mol_type = other DNA
ggggtgggtgcattgtctcc

SEQ ID NO: 259797 - DNA, 20 bp, synthetic construct
  source 1..20: mol_type = other DNA
gggggtgggtgcattgtctc

SEQ ID NO: 259798 - DNA, 20 bp, synthetic construct
  source 1..20: mol_type = other DNA
tgggggtgggtgcattgtct

SEQ ID NO: 259799 - DNA, 20 bp, synthetic construct
  source 1..20: mol_type = other DNA
atgggggtgggtgcattgtc

SEQ ID NO: 259800 - DNA, 20 bp, synthetic construct
  source 1..20: mol_type = other DNA
gatgggggtgggtgcattgt

SEQ ID NO: 259801 - DNA, 20 bp, synthetic construct
  source 1..20: mol_type = other DNA
ggatgggggtgggtgcattg

SEQ ID NO: 259802 - DNA, 20 bp, synthetic construct
  source 1..20: mol_type = other DNA
aggatgggggtgggtgcatt

SEQ ID NO: 259803 - DNA, 20 bp, synthetic construct
  source 1..20: mol_type = other DNA
aaggatgggggtgggtgcat

SEQ ID NO: 259804 - DNA, 20 bp, synthetic construct
  source 1..20: mol_type = other DNA
caaggatgggggtgggtgca

SEQ ID NO: 259805 - DNA, 20 bp, synthetic construct
  source 1..20: mol_type = other DNA
ccaaggatgggggtgggtgc

SEQ ID NO: 259806 - DNA, 20 bp, synthetic construct
  source 1..20: mol_type = other DNA
tccaaggatgggggtgggtg

SEQ ID NO: 259807 - DNA, 20 bp, synthetic construct
  source 1..20: mol_type = other DNA
atccaaggatgggggtgggt

SEQ ID NO: 259808 - DNA, 20 bp, synthetic construct
  source 1..20: mol_type = other DNA
gatccaaggatgggggtggg

SEQ ID NO: 259809 - DNA, 20 bp, synthetic construct
  source 1..20: mol_type = other DNA
agatccaaggatgggggtgg

SEQ ID NO: 259810 - DNA, 20 bp, synthetic construct
  source 1..20: mol_type = other DNA
aagatccaaggatgggggtg

SEQ ID NO: 259811 - DNA, 20 bp, synthetic construct
  source 1..20: mol_type = other DNA
caagatccaaggatgggggt

SEQ ID NO: 259812 - DNA, 20 bp, synthetic construct
  source 1..20: mol_type = other DNA
gcaagatccaaggatggggg

SEQ ID NO: 259813 - DNA, 20 bp, synthetic construct
  source 1..20: mol_type = other DNA
tgcaagatccaaggatgggg

SEQ ID NO: 259814 - DNA, 20 bp, synthetic construct
  source 1..20: mol_type = other DNA
ctgcaagatccaaggatggg

SEQ ID NO: 259815 - DNA, 20 bp, synthetic construct
  source 1..20: mol_type = other DNA
cctgcaagatccaaggatgg

SEQ ID NO: 259816 - DNA, 20 bp, synthetic construct
  source 1..20: mol_type = other DNA
tcctgcaagatccaaggatg

SEQ ID NO: 259817 - DNA, 20 bp, synthetic construct
  source 1..20: mol_type = other DNA
ctcctgcaagatccaaggat

SEQ ID NO: 259818 - DNA, 20 bp, synthetic construct
  source 1..20: mol_type = other DNA
cctcctgcaagatccaagga

SEQ ID NO: 259819 - DNA, 20 bp, synthetic construct
  source 1..20: mol_type = other DNA
gcctcctgcaagatccaagg

SEQ ID NO: 259820 - DNA, 20 bp, synthetic construct
  source 1..20: mol_type = other DNA
agcctcctgcaagatccaag

SEQ ID NO: 259821 - DNA, 20 bp, synthetic construct
  source 1..20: mol_type = other DNA
cagcctcctgcaagatccaa

SEQ ID NO: 259822 - DNA, 20 bp, synthetic construct
  source 1..20: mol_type = other DNA
ccagcctcctgcaagatcca

SEQ ID NO: 259823 - DNA, 20 bp, synthetic construct
  source 1..20: mol_type = other DNA
cccagcctcctgcaagatcc

SEQ ID NO: 259824 - DNA, 20 bp, synthetic construct
  source 1..20: mol_type = other DNA
acccagcctcctgcaagatc

SEQ ID NO: 259825 - DNA, 20 bp, synthetic construct
  source 1..20: mol_type = other DNA
gacccagcctcctgcaagat

SEQ ID NO: 259826 - DNA, 20 bp, synthetic construct
  source 1..20: mol_type = other DNA
ggacccagcctcctgcaaga

SEQ ID NO: 259827 - DNA, 20 bp, synthetic construct
  source 1..20: mol_type = other DNA
aggacccagcctcctgcaag

SEQ ID NO: 259828 - DNA, 20 bp, synthetic construct
  source 1..20: mol_type = other DNA
gaggacccagcctcctgcaa

SEQ ID NO: 259829 - DNA, 20 bp, synthetic construct
  source 1..20: mol_type = other DNA
tgaggacccagcctcctgca

SEQ ID NO: 259830 - DNA, 20 bp, synthetic construct
  source 1..20: mol_type = other DNA
gtgaggacccagcctcctgc

SEQ ID NO: 259831 - DNA, 20 bp, synthetic construct
  source 1..20: mol_type = other DNA
agtgaggacccagcctcctg

SEQ ID NO: 259832 - DNA, 20 bp, synthetic construct
  source 1..20: mol_type = other DNA
cagtgaggacccagcctcct

SEQ ID NO: 259833 - DNA, 20 bp, synthetic construct
  source 1..20: mol_type = other DNA
tcagtgaggacccagcctcc

SEQ ID NO: 259834 - DNA, 20 bp, synthetic construct
  source 1..20: mol_type = other DNA
ctcagtgaggacccagcctc

SEQ ID NO: 259835 - DNA, 20 bp, synthetic construct
  source 1..20: mol_type = other DNA
gctcagtgaggacccagcct

SEQ ID NO: 259836 - DNA, 20 bp, synthetic construct
  source 1..20: mol_type = other DNA
agctcagtgaggacccagcc

SEQ ID NO: 259837 - DNA, 20 bp, synthetic construct
  source 1..20: mol_type = other DNA
tagctcagtgaggacccagc

SEQ ID NO: 259838 - DNA, 20 bp, synthetic construct
  source 1..20: mol_type = other DNA
gtagctcagtgaggacccag

SEQ ID NO: 259839 - DNA, 20 bp, synthetic construct
  source 1..20: mol_type = other DNA
ggtagctcagtgaggaccca

SEQ ID NO: 259840 - DNA, 20 bp, synthetic construct
  source 1..20: mol_type = other DNA
tggtagctcagtgaggaccc

SEQ ID NO: 259841 - DNA, 20 bp, synthetic construct
  source 1..20: mol_type = other DNA
ttggtagctcagtgaggacc

SEQ ID NO: 259842 - DNA, 20 bp, synthetic construct
  source 1..20: mol_type = other DNA
gttggtagctcagtgaggac

SEQ ID NO: 259843 - DNA, 20 bp, synthetic construct
  source 1..20: mol_type = other DNA
tgttggtagctcagtgagga

SEQ ID NO: 259844 - DNA, 20 bp, synthetic construct
  source 1..20: mol_type = other DNA
atgttggtagctcagtgagg

SEQ ID NO: 259845 - DNA, 20 bp, synthetic construct
  source 1..20: mol_type = other DNA
gatgttggtagctcagtgag

SEQ ID NO: 259846 - DNA, 20 bp, synthetic construct
  source 1..20: mol_type = other DNA
ggatgttggtagctcagtga

SEQ ID NO: 259847 - DNA, 20 bp, synthetic construct
  source 1..20: mol_type = other DNA
tggatgttggtagctcagtg

SEQ ID NO: 259848 - DNA, 20 bp, synthetic construct
  source 1..20: mol_type = other DNA
atggatgttggtagctcagt

SEQ ID NO: 259849 - DNA, 20 bp, synthetic construct
  source 1..20: mol_type = other DNA
catggatgttggtagctcag

SEQ ID NO: 259850 - DNA, 20 bp, synthetic construct
  source 1..20: mol_type = other DNA
ccatggatgttggtagctca

SEQ ID NO: 259851 - DNA, 20 bp, synthetic construct
  source 1..20: mol_type = other DNA
gccatggatgttggtagctc

SEQ ID NO: 259852 - DNA, 20 bp, synthetic construct
  source 1..20: mol_type = other DNA
ggccatggatgttggtagct

SEQ ID NO: 259853 - DNA, 20 bp, synthetic construct
  source 1..20: mol_type = other DNA
gggccatggatgttggtagc

SEQ ID NO: 259854 - DNA, 20 bp, synthetic construct
  source 1..20: mol_type = other DNA
agggccatggatgttggtag

SEQ ID NO: 259855 - DNA, 20 bp, synthetic construct
  source 1..20: mol_type = other DNA
cagggccatggatgttggta

SEQ ID NO: 259856 - DNA, 20 bp, synthetic construct
  source 1..20: mol_type = other DNA
tcagggccatggatgttggt

SEQ ID NO: 259857 - DNA, 20 bp, synthetic construct
  source 1..20: mol_type = other DNA
ctcagggccatggatgttgg

SEQ ID NO: 259858 - DNA, 20 bp, synthetic construct
  source 1..20: mol_type = other DNA
cctcagggccatggatgttg

SEQ ID NO: 259859 - DNA, 20 bp, synthetic construct
  source 1..20: mol_type = other DNA
gcctcagggccatggatgtt

SEQ ID NO: 259860 - DNA, 20 bp, synthetic construct
  source 1..20: mol_type = other DNA
agcctcagggccatggatgt

SEQ ID NO: 259861 - DNA, 20 bp, synthetic construct
  source 1..20: mol_type = other DNA
aagcctcagggccatggatg

SEQ ID NO: 259862 - DNA, 20 bp, synthetic construct
  source 1..20: mol_type = other DNA
aaagcctcagggccatggat

SEQ ID NO: 259863 - DNA, 20 bp, synthetic construct
  source 1..20: mol_type = other DNA
aaaagcctcagggccatgga

SEQ ID NO: 259864 - DNA, 20 bp, synthetic construct
  source 1..20: mol_type = other DNA
taaaagcctcagggccatgg

SEQ ID NO: 259865 - DNA, 20 bp, synthetic construct
  source 1..20: mol_type = other DNA
ttaaaagcctcagggccatg

SEQ ID NO: 259866 - DNA, 20 bp, synthetic construct
  source 1..20: mol_type = other DNA
tttaaaagcctcagggccat

SEQ ID NO: 259867 - DNA, 20 bp, synthetic construct
  source 1..20: mol_type = other DNA
ttttaaaagcctcagggcca

SEQ ID NO: 259868 - DNA, 20 bp, synthetic construct
  source 1..20: mol_type = other DNA
gttttaaaagcctcagggcc

SEQ ID NO: 259869 - DNA, 20 bp, synthetic construct
  source 1..20: mol_type = other DNA
tgttttaaaagcctcagggc

SEQ ID NO: 259870 - DNA, 20 bp, synthetic construct
  source 1..20: mol_type = other DNA
gtgttttaaaagcctcaggg

SEQ ID NO: 259871 - DNA, 20 bp, synthetic construct
  source 1..20: mol_type = other DNA
ggtgttttaaaagcctcagg

SEQ ID NO: 259872 - DNA, 20 bp, synthetic construct
  source 1..20: mol_type = other DNA
gggtgttttaaaagcctcag

SEQ ID NO: 259873 - DNA, 20 bp, synthetic construct
  source 1..20: mol_type = other DNA
tgggtgttttaaaagcctca

SEQ ID NO: 259874 - DNA, 20 bp, synthetic construct
  source 1..20: mol_type = other DNA
atgggtgttttaaaagcctc

SEQ ID NO: 259875 - DNA, 20 bp, synthetic construct
  source 1..20: mol_type = other DNA
gatgggtgttttaaaagcct

SEQ ID NO: 259876 - DNA, 20 bp, synthetic construct
  source 1..20: mol_type = other DNA
ggatgggtgttttaaaagcc

SEQ ID NO: 259877 - DNA, 20 bp, synthetic construct
  source 1..20: mol_type = other DNA
tggatgggtgttttaaaagc

SEQ ID NO: 259878 - DNA, 20 bp, synthetic construct
  source 1..20: mol_type = other DNA
atggatgggtgttttaaaag

SEQ ID NO: 259879 - DNA, 20 bp, synthetic construct
  source 1..20: mol_type = other DNA
catggatgggtgttttaaaa

SEQ ID NO: 259880 - DNA, 20 bp, synthetic construct
  source 1..20: mol_type = other DNA
ccatggatgggtgttttaaa

SEQ ID NO: 259881 - DNA, 20 bp, synthetic construct
  source 1..20: mol_type = other DNA
tccatggatgggtgttttaa

SEQ ID NO: 259882 - DNA, 20 bp, synthetic construct
  source 1..20: mol_type = other DNA
ctccatggatgggtgtttta

SEQ ID NO: 259883 - DNA, 20 bp, synthetic construct
  source 1..20: mol_type = other DNA
actccatggatgggtgtttt

SEQ ID NO: 259884 - DNA, 20 bp, synthetic construct
  source 1..20: mol_type = other DNA
cactccatggatgggtgttt

SEQ ID NO: 259885 - DNA, 20 bp, synthetic construct
  source 1..20: mol_type = other DNA
ccactccatggatgggtgtt

SEQ ID NO: 259886 - DNA, 20 bp, synthetic construct
  source 1..20: mol_type = other DNA
cccactccatggatgggtgt

SEQ ID NO: 259887 - DNA, 20 bp, synthetic construct
  source 1..20: mol_type = other DNA
ccccactccatggatgggtg

SEQ ID NO: 259888 - DNA, 20 bp, synthetic construct
  source 1..20: mol_type = other DNA
gccccactccatggatgggt

SEQ ID NO: 259889 - DNA, 20 bp, synthetic construct
  source 1..20: mol_type = other DNA
agccccactccatggatggg

SEQ ID NO: 259890 - DNA, 20 bp, synthetic construct
  source 1..20: mol_type = other DNA
cagccccactccatggatgg

SEQ ID NO: 259891 - DNA, 20 bp, synthetic construct
  source 1..20: mol_type = other DNA
ccagccccactccatggatg

SEQ ID NO: 259892 - DNA, 20 bp, synthetic construct
  source 1..20: mol_type = other DNA
accagccccactccatggat

SEQ ID NO: 259893 - DNA, 20 bp, synthetic construct
  source 1..20: mol_type = other DNA
gaccagccccactccatgga

SEQ ID NO: 259894 - DNA, 20 bp, synthetic construct
  source 1..20: mol_type = other DNA
ggaccagccccactccatgg

SEQ ID NO: 259895 - DNA, 20 bp, synthetic construct
  source 1..20: mol_type = other DNA
gggaccagccccactccatg

SEQ ID NO: 259896 - DNA, 20 bp, synthetic construct
  source 1..20: mol_type = other DNA
tgggaccagccccactccat

SEQ ID NO: 259897 - DNA, 20 bp, synthetic construct
  source 1..20: mol_type = other DNA
ctgggaccagccccactcca

SEQ ID NO: 259898 - DNA, 20 bp, synthetic construct
  source 1..20: mol_type = other DNA
actgggaccagccccactcc

SEQ ID NO: 259899 - DNA, 20 bp, synthetic construct
  source 1..20: mol_type = other DNA
cactgggaccagccccactc

SEQ ID NO: 259900 - DNA, 20 bp, synthetic construct
  source 1..20: mol_type = other DNA
ccactgggaccagccccact

SEQ ID NO: 259901 - DNA, 20 bp, synthetic construct
  source 1..20: mol_type = other DNA
cccactgggaccagccccac

SEQ ID NO: 259902 - DNA, 20 bp, synthetic construct
  source 1..20: mol_type = other DNA
ccccactgggaccagcccca

SEQ ID NO: 259903 - DNA, 20 bp, synthetic construct
  source 1..20: mol_type = other DNA
accccactgggaccagcccc

SEQ ID NO: 259904 - DNA, 20 bp, synthetic construct
  source 1..20: mol_type = other DNA
caccccactgggaccagccc

SEQ ID NO: 259905 - DNA, 20 bp, synthetic construct
  source 1..20: mol_type = other DNA
tcaccccactgggaccagcc

SEQ ID NO: 259906 - DNA, 20 bp, synthetic construct
  source 1..20: mol_type = other DNA
ctcaccccactgggaccagc

SEQ ID NO: 259907 - DNA, 20 bp, synthetic construct
  source 1..20: mol_type = other DNA
cctcaccccactgggaccag

SEQ ID NO: 259908 - DNA, 20 bp, synthetic construct
  source 1..20: mol_type = other DNA
gcctcaccccactgggacca

SEQ ID NO: 259909 - DNA, 20 bp, synthetic construct
  source 1..20: mol_type = other DNA
agcctcaccccactgggacc

SEQ ID NO: 259910 - DNA, 20 bp, synthetic construct
  source 1..20: mol_type = other DNA
cagcctcaccccactgggac

SEQ ID NO: 259911 - DNA, 20 bp, synthetic construct
  source 1..20: mol_type = other DNA
tcagcctcaccccactggga

SEQ ID NO: 259912 - DNA, 20 bp, synthetic construct
  source 1..20: mol_type = other DNA
gtcagcctcaccccactggg

SEQ ID NO: 259913 - DNA, 20 bp, synthetic construct
  source 1..20: mol_type = other DNA
ggtcagcctcaccccactgg

SEQ ID NO: 259914 - DNA, 20 bp, synthetic construct
  source 1..20: mol_type = other DNA
gggtcagcctcaccccactg

SEQ ID NO: 259915 - DNA, 20 bp, synthetic construct
  source 1..20: mol_type = other DNA
agggtcagcctcaccccact

SEQ ID NO: 259916 - DNA, 20 bp, synthetic construct
  source 1..20: mol_type = other DNA
cagggtcagcctcaccccac

SEQ ID NO: 259917 - DNA, 20 bp, synthetic construct
  source 1..20: mol_type = other DNA
ccagggtcagcctcacccca

SEQ ID NO: 259918 - DNA, 20 bp, synthetic construct
  source 1..20: mol_type = other DNA
gccagggtcagcctcacccc

SEQ ID NO: 259919 - DNA, 20 bp, synthetic construct
  source 1..20: mol_type = other DNA
tgccagggtcagcctcaccc

SEQ ID NO: 259920 - DNA, 20 bp, synthetic construct
  source 1..20: mol_type = other DNA
ctgccagggtcagcctcacc

SEQ ID NO: 259921 - DNA, 20 bp, synthetic construct
  source 1..20: mol_type = other DNA
tctgccagggtcagcctcac

SEQ ID NO: 259922 - DNA, 20 bp, synthetic construct
  source 1..20: mol_type = other DNA
ttctgccagggtcagcctca

SEQ ID NO: 259923 - DNA, 20 bp, synthetic construct
  source 1..20: mol_type = other DNA
tttctgccagggtcagcctc

SEQ ID NO: 259924 - DNA, 20 bp, synthetic construct
  source 1..20: mol_type = other DNA
gtttctgccagggtcagcct

SEQ ID NO: 259925 - DNA, 20 bp, synthetic construct
  source 1..20: mol_type = other DNA
tgtttctgccagggtcagcc

SEQ ID NO: 259926 - DNA, 20 bp, synthetic construct
  source 1..20: mol_type = other DNA
ctgtttctgccagggtcagc

SEQ ID NO: 259927 - DNA, 20 bp, synthetic construct
  source 1..20: mol_type = other DNA
cctgtttctgccagggtcag

SEQ ID NO: 259928 - DNA, 20 bp, synthetic construct
  source 1..20: mol_type = other DNA
ccctgtttctgccagggtca

SEQ ID NO: 259929 - DNA, 20 bp, synthetic construct
  source 1..20: mol_type = other DNA
gccctgtttctgccagggtc

SEQ ID NO: 259930 - DNA, 20 bp, synthetic construct
  source 1..20: mol_type = other DNA
tgccctgtttctgccagggt

SEQ ID NO: 259931 - DNA, 20 bp, synthetic construct
  source 1..20: mol_type = other DNA
ctgccctgtttctgccaggg

SEQ ID NO: 259932 - DNA, 20 bp, synthetic construct
  source 1..20: mol_type = other DNA
cctgccctgtttctgccagg

SEQ ID NO: 259933 - DNA, 20 bp, synthetic construct
  source 1..20: mol_type = other DNA
tcctgccctgtttctgccag

SEQ ID NO: 259934 - DNA, 20 bp, synthetic construct
  source 1..20: mol_type = other DNA
ctcctgccctgtttctgcca

SEQ ID NO: 259935 - DNA, 20 bp, synthetic construct
  source 1..20: mol_type = other DNA
gctcctgccctgtttctgcc

SEQ ID NO: 259936 - DNA, 20 bp, synthetic construct
  source 1..20: mol_type = other DNA
ggctcctgccctgtttctgc

SEQ ID NO: 259937 - DNA, 20 bp, synthetic construct
  source 1..20: mol_type = other DNA
aggctcctgccctgtttctg

SEQ ID NO: 259938 - DNA, 20 bp, synthetic construct
  source 1..20: mol_type = other DNA
caggctcctgccctgtttct

SEQ ID NO: 259939 - DNA, 20 bp, synthetic construct
  source 1..20: mol_type = other DNA
acaggctcctgccctgtttc

SEQ ID NO: 259940 - DNA, 20 bp, synthetic construct
  source 1..20: mol_type = other DNA
cacaggctcctgccctgttt

SEQ ID NO: 259941 - DNA, 20 bp, synthetic construct
  source 1..20: mol_type = other DNA
ccacaggctcctgccctgtt

SEQ ID NO: 259942 - DNA, 20 bp, synthetic construct
  source 1..20: mol_type = other DNA
cccacaggctcctgccctgt

SEQ ID NO: 259943 - DNA, 20 bp, synthetic construct
  source 1..20: mol_type = other DNA
acccacaggctcctgccctg

SEQ ID NO: 259944 - DNA, 20 bp, synthetic construct
  source 1..20: mol_type = other DNA
aacccacaggctcctgccct

SEQ ID NO: 259945 - DNA, 20 bp, synthetic construct
  source 1..20: mol_type = other DNA
taacccacaggctcctgccc

SEQ ID NO: 259946 - DNA, 20 bp, synthetic construct
  source 1..20: mol_type = other DNA
ctaacccacaggctcctgcc

SEQ ID NO: 259947 - DNA, 20 bp, synthetic construct
  source 1..20: mol_type = other DNA
cctaacccacaggctcctgc

SEQ ID NO: 259948 - DNA, 20 bp, synthetic construct
  source 1..20: mol_type = other DNA
ccctaacccacaggctcctg

SEQ ID NO: 259949 - DNA, 20 bp, synthetic construct
  source 1..20: mol_type = other DNA
tccctaacccacaggctcct

SEQ ID NO: 259950 - DNA, 20 bp, synthetic construct
  source 1..20: mol_type = other DNA
ctccctaacccacaggctcc

SEQ ID NO: 259951 - DNA, 20 bp, synthetic construct
  source 1..20: mol_type = other DNA
tctccctaacccacaggctc

SEQ ID NO: 259952 - DNA, 20 bp, synthetic construct
  source 1..20: mol_type = other DNA
gtctccctaacccacaggct

SEQ ID NO: 259953 - DNA, 20 bp, synthetic construct
  source 1..20: mol_type = other DNA
agtctccctaacccacaggc

SEQ ID NO: 259954 - DNA, 20 bp, synthetic construct
  source 1..20: mol_type = other DNA
cagtctccctaacccacagg

SEQ ID NO: 259955 - DNA, 20 bp, synthetic construct
  source 1..20: mol_type = other DNA
gcagtctccctaacccacag

SEQ ID NO: 259956 - DNA, 20 bp, synthetic construct
  source 1..20: mol_type = other DNA
tgcagtctccctaacccaca

SEQ ID NO: 259957 - DNA, 20 bp, synthetic construct
  source 1..20: mol_type = other DNA
gtgcagtctccctaacccac

SEQ ID NO: 259958 - DNA, 20 bp, synthetic construct
  source 1..20: mol_type = other DNA
ggtgcagtctccctaaccca

SEQ ID NO: 259959 - DNA, 20 bp, synthetic construct
  source 1..20: mol_type = other DNA
aggtgcagtctccctaaccc

SEQ ID NO: 259960 - DNA, 20 bp, synthetic construct
  source 1..20: mol_type = other DNA
aaggtgcagtctccctaacc

SEQ ID NO: 259961 - DNA, 20 bp, synthetic construct
  source 1..20: mol_type = other DNA
gaaggtgcagtctccctaac

SEQ ID NO: 259962 - DNA, 20 bp, synthetic construct
  source 1..20: mol_type = other DNA
ggaaggtgcagtctccctaa

SEQ ID NO: 259963 - DNA, 20 bp, synthetic construct
  source 1..20: mol_type = other DNA
aggaaggtgcagtctcccta

SEQ ID NO: 259964 - DNA, 20 bp, synthetic construct
  source 1..20: mol_type = other DNA
aaggaaggtgcagtctccct

SEQ ID NO: 259965 - DNA, 20 bp, synthetic construct
  source 1..20: mol_type = other DNA
taaggaaggtgcagtctccc

SEQ ID NO: 259966 - DNA, 20 bp, synthetic construct
  source 1..20: mol_type = other DNA
ctaaggaaggtgcagtctcc

SEQ ID NO: 259967 - DNA, 20 bp, synthetic construct
  source 1..20: mol_type = other DNA
tctaaggaaggtgcagtctc

SEQ ID NO: 259968 - DNA, 20 bp, synthetic construct
  source 1..20: mol_type = other DNA
atctaaggaaggtgcagtct

SEQ ID NO: 259969 - DNA, 20 bp, synthetic construct
  source 1..20: mol_type = other DNA
tatctaaggaaggtgcagtc

SEQ ID NO: 259970 - DNA, 20 bp, synthetic construct
  source 1..20: mol_type = other DNA
ctatctaaggaaggtgcagt

SEQ ID NO: 259971 - DNA, 20 bp, synthetic construct
  source 1..20: mol_type = other DNA
gctatctaaggaaggtgcag

SEQ ID NO: 259972 - DNA, 20 bp, synthetic construct
  source 1..20: mol_type = other DNA
ggctatctaaggaaggtgca

SEQ ID NO: 259973 - DNA, 20 bp, synthetic construct
  source 1..20: mol_type = other DNA
aggctatctaaggaaggtgc

SEQ ID NO: 259974 - DNA, 20 bp, synthetic construct
  source 1..20: mol_type = other DNA
gaggctatctaaggaaggtg

SEQ ID NO: 259975 - DNA, 20 bp, synthetic construct
  source 1..20: mol_type = other DNA
ggaggctatctaaggaaggt

SEQ ID NO: 259976 - DNA, 20 bp, synthetic construct
  source 1..20: mol_type = other DNA
tggaggctatctaaggaagg

SEQ ID NO: 259977 - DNA, 20 bp, synthetic construct
  source 1..20: mol_type = other DNA
atggaggctatctaaggaag

SEQ ID NO: 259978 - DNA, 20 bp, synthetic construct
  source 1..20: mol_type = other DNA
catggaggctatctaaggaa

SEQ ID NO: 259979 - DNA, 20 bp, synthetic construct
  source 1..20: mol_type = other DNA
gcatggaggctatctaagga

SEQ ID NO: 259980 - DNA, 20 bp, synthetic construct
  source 1..20: mol_type = other DNA
ggcatggaggctatctaagg

SEQ ID NO: 259981 - DNA, 20 bp, synthetic construct
  source 1..20: mol_type = other DNA
tggcatggaggctatctaag

SEQ ID NO: 259982 - DNA, 20 bp, synthetic construct
  source 1..20: mol_type = other DNA
atggcatggaggctatctaa

SEQ ID NO: 259983 - DNA, 20 bp, synthetic construct
  source 1..20: mol_type = other DNA
gatggcatggaggctatcta

SEQ ID NO: 259984 - DNA, 20 bp, synthetic construct
  source 1..20: mol_type = other DNA
tgatggcatggaggctatct

SEQ ID NO: 259985 - DNA, 20 bp, synthetic construct
  source 1..20: mol_type = other DNA
atgatggcatggaggctatc

SEQ ID NO: 259986 - DNA, 20 bp, synthetic construct
  source 1..20: mol_type = other DNA
catgatggcatggaggctat

SEQ ID NO: 259987 - DNA, 20 bp, synthetic construct
  source 1..20: mol_type = other DNA
acatgatggcatggaggcta

SEQ ID NO: 259988 - DNA, 20 bp, synthetic construct
  source 1..20: mol_type = other DNA
gacatgatggcatggaggct

SEQ ID NO: 259989 - DNA, 20 bp, synthetic construct
  source 1..20: mol_type = other DNA
ggacatgatggcatggaggc

SEQ ID NO: 259990 - DNA, 20 bp, synthetic construct
  source 1..20: mol_type = other DNA
gggacatgatggcatggagg

SEQ ID NO: 259991 - DNA, 20 bp, synthetic construct
  source 1..20: mol_type = other DNA
ggggacatgatggcatggag

SEQ ID NO: 259992 - DNA, 20 bp, synthetic construct
  source 1..20: mol_type = other DNA
cggggacatgatggcatgga

SEQ ID NO: 259993 - DNA, 20 bp, synthetic construct
  source 1..20: mol_type = other DNA
acggggacatgatggcatgg

SEQ ID NO: 259994 - DNA, 20 bp, synthetic construct
  source 1..20: mol_type = other DNA
cacggggacatgatggcatg

SEQ ID NO: 259995 - DNA, 20 bp, synthetic construct
  source 1..20: mol_type = other DNA
tcacggggacatgatggcat

SEQ ID NO: 259996 - DNA, 20 bp, synthetic construct
  source 1..20: mol_type = other DNA
gtcacggggacatgatggca

SEQ ID NO: 259997 - DNA, 20 bp, synthetic construct
  source 1..20: mol_type = other DNA
tgtcacggggacatgatggc

SEQ ID NO: 259998 - DNA, 20 bp, synthetic construct
  source 1..20: mol_type = other DNA
ctgtcacggggacatgatgg

SEQ ID NO: 259999 - DNA, 20 bp, synthetic construct
  source 1..20: mol_type = other DNA
actgtcacggggacatgatg

SEQ ID NO: 260000 - DNA, 20 bp, synthetic construct
  source 1..20: mol_type = other DNA
aactgtcacggggacatgat

SEQ ID NO: 260001 - DNA, 20 bp, synthetic construct
  source 1..20: mol_type = other DNA
aaactgtcacggggacatga

SEQ ID NO: 260002 - DNA, 20 bp, synthetic construct
  source 1..20: mol_type = other DNA
gaaactgtcacggggacatg

SEQ ID NO: 260003 - DNA, 20 bp, synthetic construct
  source 1..20: mol_type = other DNA
agaaactgtcacggggacat

SEQ ID NO: 260004 - DNA, 20 bp, synthetic construct
  source 1..20: mol_type = other DNA
cagaaactgtcacggggaca

SEQ ID NO: 260005 - DNA, 20 bp, synthetic construct
  source 1..20: mol_type = other DNA
gcagaaactgtcacggggac

SEQ ID NO: 260006 - DNA, 20 bp, synthetic construct
  source 1..20: mol_type = other DNA
agcagaaactgtcacgggga

SEQ ID NO: 260007 - DNA, 20 bp, synthetic construct
  source 1..20: mol_type = other DNA
cagcagaaactgtcacgggg

SEQ ID NO: 260008 - DNA, 20 bp, synthetic construct
  source 1..20: mol_type = other DNA
gcagcagaaactgtcacggg

SEQ ID NO: 260009 - DNA, 20 bp, synthetic construct
  source 1..20: mol_type = other DNA
cgcagcagaaactgtcacgg

SEQ ID NO: 260010 - DNA, 20 bp, synthetic construct
  source 1..20: mol_type = other DNA
acgcagcagaaactgtcacg

SEQ ID NO: 260011 - DNA, 20 bp, synthetic construct
  source 1..20: mol_type = other DNA
gacgcagcagaaactgtcac

SEQ ID NO: 260012 - DNA, 20 bp, synthetic construct
  source 1..20: mol_type = other DNA
ggacgcagcagaaactgtca

SEQ ID NO: 260013 - DNA, 20 bp, synthetic construct
  source 1..20: mol_type = other DNA
gggacgcagcagaaactgtc

SEQ ID NO: 260014 - DNA, 20 bp, synthetic construct
  source 1..20: mol_type = other DNA
ggggacgcagcagaaactgt

SEQ ID NO: 260015 - DNA, 20 bp, synthetic construct
  source 1..20: mol_type = other DNA
aggggacgcagcagaaactg

SEQ ID NO: 260016 - DNA, 20 bp, synthetic construct
  source 1..20: mol_type = other DNA
gaggggacgcagcagaaact

SEQ ID NO: 260017 - DNA, 20 bp, synthetic construct
  source 1..20: mol_type = other DNA
agaggggacgcagcagaaac

SEQ ID NO: 260018 - DNA, 20 bp, synthetic construct
  source 1..20: mol_type = other DNA
cagaggggacgcagcagaaa

SEQ ID NO: 260019 - DNA, 20 bp, synthetic construct
  source 1..20: mol_type = other DNA
gcagaggggacgcagcagaa

SEQ ID NO: 260020 - DNA, 20 bp, synthetic construct
  source 1..20: mol_type = other DNA
tgcagaggggacgcagcaga

SEQ ID NO: 260021 - DNA, 20 bp, synthetic construct
  source 1..20: mol_type = other DNA
atgcagaggggacgcagcag

SEQ ID NO: 260022 - DNA, 20 bp, synthetic construct
  source 1..20: mol_type = other DNA
catgcagaggggacgcagca

SEQ ID NO: 260023 - DNA, 20 bp, synthetic construct
  source 1..20: mol_type = other DNA
ccatgcagaggggacgcagc

SEQ ID NO: 260024 - DNA, 20 bp, synthetic construct
  source 1..20: mol_type = other DNA
accatgcagaggggacgcag

SEQ ID NO: 260025 - DNA, 20 bp, synthetic construct
  source 1..20: mol_type = other DNA
gaccatgcagaggggacgca

SEQ ID NO: 260026 - DNA, 20 bp, synthetic construct
  source 1..20: mol_type = other DNA
ggaccatgcagaggggacgc

SEQ ID NO: 260027 - DNA, 20 bp, synthetic construct
  source 1..20: mol_type = other DNA
gggaccatgcagaggggacg

SEQ ID NO: 260028 - DNA, 20 bp, synthetic construct
  source 1..20: mol_type = other DNA
tgggaccatgcagaggggac

SEQ ID NO: 260029 - DNA, 20 bp, synthetic construct
  source 1..20: mol_type = other DNA
gtgggaccatgcagagggga

SEQ ID NO: 260030 - DNA, 20 bp, synthetic construct
  source 1..20: mol_type = other DNA
ggtgggaccatgcagagggg

SEQ ID NO: 260031 - DNA, 20 bp, synthetic construct
  source 1..20: mol_type = other DNA
gggtgggaccatgcagaggg

SEQ ID NO: 260032 - DNA, 20 bp, synthetic construct
  source 1..20: mol_type = other DNA
agggtgggaccatgcagagg

SEQ ID NO: 260033 - DNA, 20 bp, synthetic construct
  source 1..20: mol_type = other DNA
gagggtgggaccatgcagag

SEQ ID NO: 260034 - DNA, 20 bp, synthetic construct
  source 1..20: mol_type = other DNA
cgagggtgggaccatgcaga

SEQ ID NO: 260035 - DNA, 20 bp, synthetic construct
  source 1..20: mol_type = other DNA
ccgagggtgggaccatgcag

SEQ ID NO: 260036 - DNA, 20 bp, synthetic construct
  source 1..20: mol_type = other DNA
gccgagggtgggaccatgca

SEQ ID NO: 260037 - DNA, 20 bp, synthetic construct
  source 1..20: mol_type = other DNA
ggccgagggtgggaccatgc

SEQ ID NO: 260038 - DNA, 20 bp, synthetic construct
  source 1..20: mol_type = other DNA
tggccgagggtgggaccatg

SEQ ID NO: 260039 - DNA, 20 bp, synthetic construct
  source 1..20: mol_type = other DNA
ctggccgagggtgggaccat

SEQ ID NO: 260040 - DNA, 20 bp, synthetic construct
  source 1..20: mol_type = other DNA
gctggccgagggtgggacca

SEQ ID NO: 260041 - DNA, 20 bp, synthetic construct
  source 1..20: mol_type = other DNA
ggctggccgagggtgggacc

SEQ ID NO: 260042 - DNA, 20 bp, synthetic construct
  source 1..20: mol_type = other DNA
aggctggccgagggtgggac

SEQ ID NO: 260043 - DNA, 20 bp, synthetic construct
  source 1..20: mol_type = other DNA
caggctggccgagggtggga

SEQ ID NO: 260044 - DNA, 20 bp, synthetic construct
  source 1..20: mol_type = other DNA
gcaggctggccgagggtggg

SEQ ID NO: 260045 - DNA, 20 bp, synthetic construct
  source 1..20: mol_type = other DNA
agcaggctggccgagggtgg

SEQ ID NO: 260046 - DNA, 20 bp, synthetic construct
  source 1..20: mol_type = other DNA
cagcaggctggccgagggtg

SEQ ID NO: 260047 - DNA, 20 bp, synthetic construct
  source 1..20: mol_type = other DNA
gcagcaggctggccgagggt

SEQ ID NO: 260048 - DNA, 20 bp, synthetic construct
  source 1..20: mol_type = other DNA
ggcagcaggctggccgaggg

SEQ ID NO: 260049 - DNA, 20 bp, synthetic construct
  source 1..20: mol_type = other DNA
gggcagcaggctggccgagg

SEQ ID NO: 260050 - DNA, 20 bp, synthetic construct
  source 1..20: mol_type = other DNA
ggggcagcaggctggccgag

SEQ ID NO: 260051 - DNA, 20 bp, synthetic construct
  source 1..20: mol_type = other DNA
gggggcagcaggctggccga

SEQ ID NO: 260052 - DNA, 20 bp, synthetic construct
  source 1..20: mol_type = other DNA
agggggcagcaggctggccg

SEQ ID NO: 260053 - DNA, 20 bp, synthetic construct
  source 1..20: mol_type = other DNA
gagggggcagcaggctggcc

SEQ ID NO: 260054 - DNA, 20 bp, synthetic construct
  source 1..20: mol_type = other DNA
agagggggcagcaggctggc

SEQ ID NO: 260055 - DNA, 20 bp, synthetic construct
  source 1..20: mol_type = other DNA
aagagggggcagcaggctgg

SEQ ID NO: 260056 - DNA, 20 bp, synthetic construct
  source 1..20: mol_type = other DNA
caagagggggcagcaggctg

SEQ ID NO: 260057 - DNA, 20 bp, synthetic construct
  source 1..20: mol_type = other DNA
gcaagagggggcagcaggct

SEQ ID NO: 260058 - DNA, 20 bp, synthetic construct
  source 1..20: mol_type = other DNA
ggcaagagggggcagcaggc

SEQ ID NO: 260059 - DNA, 20 bp, synthetic construct
  source 1..20: mol_type = other DNA
tggcaagagggggcagcagg

SEQ ID NO: 260060 - DNA, 20 bp, synthetic construct
  source 1..20: mol_type = other DNA
ctggcaagagggggcagcag

SEQ ID NO: 260061 - DNA, 20 bp, synthetic construct
  source 1..20: mol_type = other DNA
cctggcaagagggggcagca

SEQ ID NO: 260062 - DNA, 20 bp, synthetic construct
  source 1..20: mol_type = other DNA
acctggcaagagggggcagc

SEQ ID NO: 260063 - DNA, 20 bp, synthetic construct
  source 1..20: mol_type = other DNA
aacctggcaagagggggcag

SEQ ID NO: 260064 - DNA, 20 bp, synthetic construct
  source 1..20: mol_type = other DNA
caacctggcaagagggggca

SEQ ID NO: 260065 - DNA, 20 bp, synthetic construct
  source 1..20: mol_type = other DNA
gcaacctggcaagagggggc

SEQ ID NO: 260066 - DNA, 20 bp, synthetic construct
  source 1..20: mol_type = other DNA
cgcaacctggcaagaggggg

SEQ ID NO: 260067 - DNA, 20 bp, synthetic construct
  source 1..20: mol_type = other DNA
gcgcaacctggcaagagggg

SEQ ID NO: 260068 - DNA, 20 bp, synthetic construct
  source 1..20: mol_type = other DNA
agcgcaacctggcaagaggg

SEQ ID NO: 260069 - DNA, 20 bp, synthetic construct
  source 1..20: mol_type = other DNA
tagcgcaacctggcaagagg

SEQ ID NO: 260070 - DNA, 20 bp, synthetic construct
  source 1..20: mol_type = other DNA
ttagcgcaacctggcaagag

SEQ ID NO: 260071 - DNA, 20 bp, synthetic construct
  source 1..20: mol_type = other DNA
attagcgcaacctggcaaga

SEQ ID NO: 260072 - DNA, 20 bp, synthetic construct
  source 1..20: mol_type = other DNA
gattagcgcaacctggcaag

SEQ ID NO: 260073 - DNA, 20 bp, synthetic construct
  source 1..20: mol_type = other DNA
tgattagcgcaacctggcaa

SEQ ID NO: 260074 - DNA, 20 bp, synthetic construct
  source 1..20: mol_type = other DNA
ctgattagcgcaacctggca

SEQ ID NO: 260075 - DNA, 20 bp, synthetic construct
  source 1..20: mol_type = other DNA
actgattagcgcaacctggc

SEQ ID NO: 260076 - DNA, 20 bp, synthetic construct
  source 1..20: mol_type = other DNA
cactgattagcgcaacctgg

SEQ ID NO: 260077 - DNA, 20 bp, synthetic construct
  source 1..20: mol_type = other DNA
tcactgattagcgcaacctg

SEQ ID NO: 260078 - DNA, 20 bp, synthetic construct
  source 1..20: mol_type = other DNA
gtcactgattagcgcaacct

SEQ ID NO: 260079 - DNA, 20 bp, synthetic construct
  source 1..20: mol_type = other DNA
ggtcactgattagcgcaacc

SEQ ID NO: 260080 - DNA, 20 bp, synthetic construct
  source 1..20: mol_type = other DNA
gggtcactgattagcgcaac

SEQ ID NO: 260081 - DNA, 20 bp, synthetic construct
  source 1..20: mol_type = other DNA
ggggtcactgattagcgcaa

SEQ ID NO: 260082 - DNA, 20 bp, synthetic construct
  source 1..20: mol_type = other DNA
tggggtcactgattagcgca

SEQ ID NO: 260083 - DNA, 20 bp, synthetic construct
  source 1..20: mol_type = other DNA
ctggggtcactgattagcgc

SEQ ID NO: 260084 - DNA, 20 bp, synthetic construct
  source 1..20: mol_type = other DNA
actggggtcactgattagcg

SEQ ID NO: 260085 - DNA, 20 bp, synthetic construct
  source 1..20: mol_type = other DNA
cactggggtcactgattagc

SEQ ID NO: 260086 - DNA, 20 bp, synthetic construct
  source 1..20: mol_type = other DNA
acactggggtcactgattag

SEQ ID NO: 260087 - DNA, 20 bp, synthetic construct
  source 1..20: mol_type = other DNA
cacactggggtcactgatta

SEQ ID NO: 260088 - DNA, 20 bp, synthetic construct
  source 1..20: mol_type = other DNA
gcacactggggtcactgatt

SEQ ID NO: 260089 - DNA, 20 bp, synthetic construct
  source 1..20: mol_type = other DNA
agcacactggggtcactgat

SEQ ID NO: 260090 - DNA, 20 bp, synthetic construct
  source 1..20: mol_type = other DNA
cagcacactggggtcactga

SEQ ID NO: 260091 - DNA, 20 bp, synthetic construct
  source 1..20: mol_type = other DNA
acagcacactggggtcactg

SEQ ID NO: 260092 - DNA, 20 bp, synthetic construct
  source 1..20: mol_type = other DNA
cacagcacactggggtcact

SEQ ID NO: 260093 - DNA, 20 bp, synthetic construct
  source 1..20: mol_type = other DNA
acacagcacactggggtcac

SEQ ID NO: 260094 - DNA, 20 bp, synthetic construct
  source 1..20: mol_type = other DNA
aacacagcacactggggtca

SEQ ID NO: 260095 - DNA, 20 bp, synthetic construct
  source 1..20: mol_type = other DNA
caacacagcacactggggtc

SEQ ID NO: 260096 - DNA, 20 bp, synthetic construct
  source 1..20: mol_type = other DNA
tcaacacagcacactggggt

SEQ ID NO: 260097 - DNA, 20 bp, synthetic construct
  source 1..20: mol_type = other DNA
atcaacacagcacactgggg

SEQ ID NO: 260098 - DNA, 20 bp, synthetic construct
  source 1..20: mol_type = other DNA
tatcaacacagcacactggg

SEQ ID NO: 260099 - DNA, 20 bp, synthetic construct
  source 1..20: mol_type = other DNA
gtatcaacacagcacactgg

SEQ ID NO: 260100 - DNA, 20 bp, synthetic construct
  source 1..20: mol_type = other DNA
agtatcaacacagcacactg

SEQ ID NO: 260101 - DNA, 20 bp, synthetic construct
  source 1..20: mol_type = other DNA
tagtatcaacacagcacact

SEQ ID NO: 260102 - DNA, 20 bp, synthetic construct
  source 1..20: mol_type = other DNA
ttagtatcaacacagcacac

SEQ ID NO: 260103 - DNA, 20 bp, synthetic construct
  source 1..20: mol_type = other DNA
gttagtatcaacacagcaca

SEQ ID NO: 260104 - DNA, 20 bp, synthetic construct
  source 1..20: mol_type = other DNA
tgttagtatcaacacagcac

SEQ ID NO: 260105 - DNA, 20 bp, synthetic construct
  source 1..20: mol_type = other DNA
ttgttagtatcaacacagca

SEQ ID NO: 260106 - DNA, 20 bp, synthetic construct
  source 1..20: mol_type = other DNA
attgttagtatcaacacagc

SEQ ID NO: 260107 - DNA, 20 bp, synthetic construct
  source 1..20: mol_type = other DNA
cattgttagtatcaacacag

SEQ ID NO: 260108 - DNA, 20 bp, synthetic construct
  source 1..20: mol_type = other DNA
gcattgttagtatcaacaca

SEQ ID NO: 260109 - DNA, 20 bp, synthetic construct
  source 1..20: mol_type = other DNA
cgcattgttagtatcaacac

SEQ ID NO: 260110 - DNA, 20 bp, synthetic construct
  source 1..20: mol_type = other DNA
tcgcattgttagtatcaaca

SEQ ID NO: 260111 - DNA, 20 bp, synthetic construct
  source 1..20: mol_type = other DNA
ctcgcattgttagtatcaac

SEQ ID NO: 260112 - DNA, 20 bp, synthetic construct
  source 1..20: mol_type = other DNA
cctcgcattgttagtatcaa

SEQ ID NO: 260113 - DNA, 20 bp, synthetic construct
  source 1..20: mol_type = other DNA
gcctcgcattgttagtatca

SEQ ID NO: 260114 - DNA, 20 bp, synthetic construct
  source 1..20: mol_type = other DNA
ggcctcgcattgttagtatc

SEQ ID NO: 260115 - DNA, 20 bp, synthetic construct
  source 1..20: mol_type = other DNA
aggcctcgcattgttagtat

SEQ ID NO: 260116 - DNA, 20 bp, synthetic construct
  source 1..20: mol_type = other DNA
taggcctcgcattgttagta

SEQ ID NO: 260117 - DNA, 20 bp, synthetic construct
  source 1..20: mol_type = other DNA
ctaggcctcgcattgttagt

SEQ ID NO: 260118 - DNA, 20 bp, synthetic construct
  source 1..20: mol_type = other DNA
gctaggcctcgcattgttag

SEQ ID NO: 260119 - DNA, 20 bp, synthetic construct
  source 1..20: mol_type = other DNA
tgctaggcctcgcattgtta

SEQ ID NO: 260120 - DNA, 20 bp, synthetic construct
  source 1..20: mol_type = other DNA
ctgctaggcctcgcattgtt

SEQ ID NO: 260121 - DNA, 20 bp, synthetic construct
  source 1..20: mol_type = other DNA
tctgctaggcctcgcattgt

SEQ ID NO: 260122 - DNA, 20 bp, synthetic construct
  source 1..20: mol_type = other DNA
atctgctaggcctcgcattg

SEQ ID NO: 260123 - DNA, 20 bp, synthetic construct
  source 1..20: mol_type = other DNA
aatctgctaggcctcgcatt

SEQ ID NO: 260124 - DNA, 20 bp, synthetic construct
  source 1..20: mol_type = other DNA
gaatctgctaggcctcgcat

SEQ ID NO: 260125 - DNA, 20 bp, synthetic construct
  source 1..20: mol_type = other DNA
tgaatctgctaggcctcgca

SEQ ID NO: 260126 - DNA, 20 bp, synthetic construct
  source 1..20: mol_type = other DNA
ttgaatctgctaggcctcgc

SEQ ID NO: 260127 - DNA, 20 bp, synthetic construct
  source 1..20: mol_type = other DNA
cttgaatctgctaggcctcg

SEQ ID NO: 260128 - DNA, 20 bp, synthetic construct
  source 1..20: mol_type = other DNA
ccttgaatctgctaggcctc

SEQ ID NO: 260129 - DNA, 20 bp, synthetic construct
  source 1..20: mol_type = other DNA
cccttgaatctgctaggcct

SEQ ID NO: 260130 - DNA, 20 bp, synthetic construct
  source 1..20: mol_type = other DNA
tcccttgaatctgctaggcc

SEQ ID NO: 260131 - DNA, 20 bp, synthetic construct
  source 1..20: mol_type = other DNA
ttcccttgaatctgctaggc

SEQ ID NO: 260132 - DNA, 20 bp, synthetic construct
  source 1..20: mol_type = other DNA
tttcccttgaatctgctagg

SEQ ID NO: 260133 - DNA, 20 bp, synthetic construct
  source 1..20: mol_type = other DNA
ttttcccttgaatctgctag

SEQ ID NO: 260134 - DNA, 20 bp, synthetic construct
  source 1..20: mol_type = other DNA
cttttcccttgaatctgcta

SEQ ID NO: 260135 - DNA, 20 bp, synthetic construct
  source 1..20: mol_type = other DNA
tcttttcccttgaatctgct

SEQ ID NO: 260136 - DNA, 20 bp, synthetic construct
  source 1..20: mol_type = other DNA
ctcttttcccttgaatctgc

SEQ ID NO: 260137 - DNA, 20 bp, synthetic construct
  source 1..20: mol_type = other DNA
tctcttttcccttgaatctg

SEQ ID NO: 260138 - DNA, 20 bp, synthetic construct
  source 1..20: mol_type = other DNA
ttctcttttcccttgaatct

SEQ ID NO: 260139 - DNA, 20 bp, synthetic construct
  source 1..20: mol_type = other DNA
gttctcttttcccttgaatc

SEQ ID NO: 260140 - DNA, 20 bp, synthetic construct
  source 1..20: mol_type = other DNA
ggttctcttttcccttgaat

SEQ ID NO: 260141 - DNA, 20 bp, synthetic construct
  source 1..20: mol_type = other DNA
tggttctcttttcccttgaa

SEQ ID NO: 260142 - DNA, 20 bp, synthetic construct
  source 1..20: mol_type = other DNA
ttggttctcttttcccttga

SEQ ID NO: 260143 - DNA, 20 bp, synthetic construct
  source 1..20: mol_type = other DNA
gttggttctcttttcccttg

SEQ ID NO: 260144 - DNA, 20 bp, synthetic construct
  source 1..20: mol_type = other DNA
agttggttctcttttccctt

SEQ ID NO: 260145 - DNA, 20 bp, synthetic construct
  source 1..20: mol_type = other DNA
cagttggttctcttttccct

SEQ ID NO: 260146 - DNA, 20 bp, synthetic construct
  source 1..20: mol_type = other DNA
ccagttggttctcttttccc

SEQ ID NO: 260147 - DNA, 20 bp, synthetic construct
  source 1..20: mol_type = other DNA
cccagttggttctcttttcc

SEQ ID NO: 260148 - DNA, 20 bp, synthetic construct
  source 1..20: mol_type = other DNA
acccagttggttctcttttc

SEQ ID NO: 260149 - DNA, 20 bp, synthetic construct
  source 1..20: mol_type = other DNA
aacccagttggttctctttt

SEQ ID NO: 260150 - DNA, 20 bp, synthetic construct
  source 1..20: mol_type = other DNA
aaacccagttggttctcttt

SEQ ID NO: 260151 - DNA, 20 bp, synthetic construct
  source 1..20: mol_type = other DNA
gaaacccagttggttctctt

SEQ ID NO: 260152 - DNA, 20 bp, synthetic construct
  source 1..20: mol_type = other DNA
ggaaacccagttggttctct

SEQ ID NO: 260153 - DNA, 20 bp, synthetic construct
  source 1..20: mol_type = other DNA
tggaaacccagttggttctc

SEQ ID NO: 260154 - DNA, 20 bp, synthetic construct
  source 1..20: mol_type = other DNA
gtggaaacccagttggttct

SEQ ID NO: 260155 - DNA, 20 bp, synthetic construct
  source 1..20: mol_type = other DNA
ggtggaaacccagttggttc

SEQ ID NO: 260156 - DNA, 20 bp, synthetic construct
  source 1..20: mol_type = other DNA
tggtggaaacccagttggtt

SEQ ID NO: 260157 - DNA, 20 bp, synthetic construct
  source 1..20: mol_type = other DNA
ctggtggaaacccagttggt

SEQ ID NO: 260158 - DNA, 20 bp, synthetic construct
  source 1..20: mol_type = other DNA
tctggtggaaacccagttgg

SEQ ID NO: 260159 - DNA, 20 bp, synthetic construct
  source 1..20: mol_type = other DNA
gtctggtggaaacccagttg

SEQ ID NO: 260160 - DNA, 20 bp, synthetic construct
  source 1..20: mol_type = other DNA
ggtctggtggaaacccagtt

SEQ ID NO: 260161 - DNA, 20 bp, synthetic construct
  source 1..20: mol_type = other DNA
gggtctggtggaaacccagt

SEQ ID NO: 260162 - DNA, 20 bp, synthetic construct
  source 1..20: mol_type = other DNA
tgggtctggtggaaacccag

SEQ ID NO: 260163 - DNA, 20 bp, synthetic construct
  source 1..20: mol_type = other DNA
ttgggtctggtggaaaccca

SEQ ID NO: 260164 - DNA, 20 bp, synthetic construct
  source 1..20: mol_type = other DNA
gttgggtctggtggaaaccc

SEQ ID NO: 260165 - DNA, 20 bp, synthetic construct
  source 1..20: mol_type = other DNA
agttgggtctggtggaaacc

SEQ ID NO: 260166 - DNA, 20 bp, synthetic construct
  source 1..20: mol_type = other DNA
tagttgggtctggtggaaac

SEQ ID NO: 260167 - DNA, 20 bp, synthetic construct
  source 1..20: mol_type = other DNA
ttagttgggtctggtggaaa

SEQ ID NO: 260168 - DNA, 20 bp, synthetic construct
  source 1..20: mol_type = other DNA
tttagttgggtctggtggaa

SEQ ID NO: 260169 - DNA, 20 bp, synthetic construct
  source 1..20: mol_type = other DNA
gtttagttgggtctggtgga

SEQ ID NO: 260170 - DNA, 20 bp, synthetic construct
  source 1..20: mol_type = other DNA
tgtttagttgggtctggtgg

SEQ ID NO: 260171 - DNA, 20 bp, synthetic construct
  source 1..20: mol_type = other DNA
ttgtttagttgggtctggtg

SEQ ID NO: 260172 - DNA, 20 bp, synthetic construct
  source 1..20: mol_type = other DNA
tttgtttagttgggtctggt

SEQ ID NO: 260173 - DNA, 20 bp, synthetic construct
  source 1..20: mol_type = other DNA
gtttgtttagttgggtctgg

SEQ ID NO: 260174 - DNA, 20 bp, synthetic construct
  source 1..20: mol_type = other DNA
tgtttgtttagttgggtctg

SEQ ID NO: 260175 - DNA, 20 bp, synthetic construct
  source 1..20: mol_type = other DNA
atgtttgtttagttgggtct

SEQ ID NO: 260176 - DNA, 20 bp, synthetic construct
  source 1..20: mol_type = other DNA
catgtttgtttagttgggtc

SEQ ID NO: 260177 - DNA, 20 bp, synthetic construct
  source 1..20: mol_type = other DNA
ccatgtttgtttagttgggt

SEQ ID NO: 260178 - DNA, 20 bp, synthetic construct
  source 1..20: mol_type = other DNA
tccatgtttgtttagttggg

SEQ ID NO: 260179 - DNA, 20 bp, synthetic construct
  source 1..20: mol_type = other DNA
gtccatgtttgtttagttgg

SEQ ID NO: 260180 - DNA, 20 bp, synthetic construct
  source 1..20: mol_type = other DNA
ggtccatgtttgtttagttg

SEQ ID NO: 260181 - DNA, 20 bp, synthetic construct
  source 1..20: mol_type = other DNA
aggtccatgtttgtttagtt

SEQ ID NO: 260182 - DNA, 20 bp, synthetic construct
  source 1..20: mol_type = other DNA
taggtccatgtttgtttagt

SEQ ID NO: 260183 - DNA, 20 bp, synthetic construct
  source 1..20: mol_type = other DNA
ataggtccatgtttgtttag

SEQ ID NO: 260184 - DNA, 20 bp, synthetic construct
  source 1..20: mol_type = other DNA
gataggtccatgtttgttta

SEQ ID NO: 260185 - DNA, 20 bp, synthetic construct
  source 1..20: mol_type = other DNA
ggataggtccatgtttgttt

SEQ ID NO: 260186 - DNA, 20 bp, synthetic construct
  source 1..20: mol_type = other DNA
gggataggtccatgtttgtt

SEQ ID NO: 260187 - DNA, 20 bp, synthetic construct
  source 1..20: mol_type = other DNA
tgggataggtccatgtttgt

SEQ ID NO: 260188 - DNA, 20 bp, synthetic construct
  source 1..20: mol_type = other DNA
ctgggataggtccatgtttg

SEQ ID NO: 260189 - DNA, 20 bp, synthetic construct
  source 1..20: mol_type = other DNA
tctgggataggtccatgttt

SEQ ID NO: 260190 - DNA, 20 bp, synthetic construct
  source 1..20: mol_type = other DNA
ctctgggataggtccatgtt

SEQ ID NO: 260191 - DNA, 20 bp, synthetic construct
  source 1..20: mol_type = other DNA
tctctgggataggtccatgt

SEQ ID NO: 260192 - DNA, 20 bp, synthetic construct
  source 1..20: mol_type = other DNA
ttctctgggataggtccatg

SEQ ID NO: 260193 - DNA, 20 bp, synthetic construct
  source 1..20: mol_type = other DNA
tttctctgggataggtccat

SEQ ID NO: 260194 - DNA, 20 bp, synthetic construct
  source 1..20: mol_type = other DNA
atttctctgggataggtcca

SEQ ID NO: 260195 - DNA, 20 bp, synthetic construct
  source 1..20: mol_type = other DNA
gatttctctgggataggtcc

SEQ ID NO: 260196 - DNA, 20 bp, synthetic construct
  source 1..20: mol_type = other DNA
ggatttctctgggataggtc

SEQ ID NO: 260197 - DNA, 20 bp, synthetic construct
  source 1..20: mol_type = other DNA
tggatttctctgggataggt

SEQ ID NO: 260198 - DNA, 20 bp, synthetic construct
  source 1..20: mol_type = other DNA
ctggatttctctgggatagg

SEQ ID NO: 260199 - DNA, 20 bp, synthetic construct
  source 1..20: mol_type = other DNA
gctggatttctctgggatag

SEQ ID NO: 260200 - DNA, 20 bp, synthetic construct
  source 1..20: mol_type = other DNA
agctggatttctctgggata

SEQ ID NO: 260201 - DNA, 20 bp, synthetic construct
  source 1..20: mol_type = other DNA
aagctggatttctctgggat

SEQ ID NO: 260202 - DNA, 20 bp, synthetic construct
  source 1..20: mol_type = other DNA
gaagctggatttctctggga

SEQ ID NO: 260203 - DNA, 20 bp, synthetic construct
  source 1..20: mol_type = other DNA
tgaagctggatttctctggg

SEQ ID NO: 260204 - DNA, 20 bp, synthetic construct
  source 1..20: mol_type = other DNA
gtgaagctggatttctctgg

SEQ ID NO: 260205 - DNA, 20 bp, synthetic construct
  source 1..20: mol_type = other DNA
ggtgaagctggatttctctg

SEQ ID NO: 260206 - DNA, 20 bp, synthetic construct
  source 1..20: mol_type = other DNA
tggtgaagctggatttctct

SEQ ID NO: 260207 - DNA, 20 bp, synthetic construct
  source 1..20: mol_type = other DNA
gtggtgaagctggatttctc

SEQ ID NO: 260208 - DNA, 20 bp, synthetic construct
  source 1..20: mol_type = other DNA
tgtggtgaagctggatttct

SEQ ID NO: 260209 - DNA, 20 bp, synthetic construct
  source 1..20: mol_type = other DNA
ctgtggtgaagctggatttc

SEQ ID NO: 260210 - DNA, 20 bp, synthetic construct
  source 1..20: mol_type = other DNA
gctgtggtgaagctggattt

SEQ ID NO: 260211 - DNA, 20 bp, synthetic construct
  source 1..20: mol_type = other DNA
agctgtggtgaagctggatt

SEQ ID NO: 260212 - DNA, 20 bp, synthetic construct
  source 1..20: mol_type = other DNA
cagctgtggtgaagctggat

SEQ ID NO: 260213 - DNA, 20 bp, synthetic construct
  source 1..20: mol_type = other DNA
ccagctgtggtgaagctgga

SEQ ID NO: 260214 - DNA, 20 bp, synthetic construct
  source 1..20: mol_type = other DNA
gccagctgtggtgaagctgg

SEQ ID NO: 260215 - DNA, 20 bp, synthetic construct
  source 1..20: mol_type = other DNA
agccagctgtggtgaagctg

SEQ ID NO: 260216 - DNA, 20 bp, synthetic construct
  source 1..20: mol_type = other DNA
aagccagctgtggtgaagct

SEQ ID NO: 260217 - DNA, 20 bp, synthetic construct
  source 1..20: mol_type = other DNA
aaagccagctgtggtgaagc

SEQ ID NO: 260218 - DNA, 20 bp, synthetic construct
  source 1..20: mol_type = other DNA
gaaagccagctgtggtgaag

SEQ ID NO: 260219 - DNA, 20 bp, synthetic construct
  source 1..20: mol_type = other DNA
agaaagccagctgtggtgaa

SEQ ID NO: 260220 - DNA, 20 bp, synthetic construct
  source 1..20: mol_type = other DNA
cagaaagccagctgtggtga

SEQ ID NO: 260221 - DNA, 20 bp, synthetic construct
  source 1..20: mol_type = other DNA
acagaaagccagctgtggtg

SEQ ID NO: 260222 - DNA, 20 bp, synthetic construct
  source 1..20: mol_type = other DNA
cacagaaagccagctgtggt

SEQ ID NO: 260223 - DNA, 20 bp, synthetic construct
  source 1..20: mol_type = other DNA
tcacagaaagccagctgtgg

SEQ ID NO: 260224 - DNA, 20 bp, synthetic construct
  source 1..20: mol_type = other DNA
ttcacagaaagccagctgtg

SEQ ID NO: 260225 - DNA, 20 bp, synthetic construct
  source 1..20: mol_type = other DNA
gttcacagaaagccagctgt

SEQ ID NO: 260226 - DNA, 20 bp, synthetic construct
  source 1..20: mol_type = other DNA
tgttcacagaaagccagctg

SEQ ID NO: 260227 - DNA, 20 bp, synthetic construct
  source 1..20: mol_type = other DNA
ctgttcacagaaagccagct

SEQ ID NO: 260228 - DNA, 20 bp, synthetic construct
  source 1..20: mol_type = other DNA
actgttcacagaaagccagc

SEQ ID NO: 260229 - DNA, 20 bp, synthetic construct
  source 1..20: mol_type = other DNA
cactgttcacagaaagccag

SEQ ID NO: 260230 - DNA, 20 bp, synthetic construct
  source 1..20: mol_type = other DNA
tcactgttcacagaaagcca

SEQ ID NO: 260231 - DNA, 20 bp, synthetic construct
  source 1..20: mol_type = other DNA
ttcactgttcacagaaagcc

SEQ ID NO: 260232 - DNA, 20 bp, synthetic construct
  source 1..20: mol_type = other DNA
tttcactgttcacagaaagc

SEQ ID NO: 260233 - DNA, 20 bp, synthetic construct
  source 1..20: mol_type = other DNA
ttttcactgttcacagaaag

SEQ ID NO: 260234 - DNA, 20 bp, synthetic construct
  source 1..20: mol_type = other DNA
attttcactgttcacagaaa

SEQ ID NO: 260235 - DNA, 20 bp, synthetic construct
  source 1..20: mol_type = other DNA
cattttcactgttcacagaa

SEQ ID NO: 260236 - DNA, 20 bp, synthetic construct
  source 1..20: mol_type = other DNA
ccattttcactgttcacaga

SEQ ID NO: 260237 - DNA, 20 bp, synthetic construct
  source 1..20: mol_type = other DNA
tccattttcactgttcacag

SEQ ID NO: 260238 - DNA, 20 bp, synthetic construct
  source 1..20: mol_type = other DNA
ctccattttcactgttcaca

SEQ ID NO: 260239 - DNA, 20 bp, synthetic construct
  source 1..20: mol_type = other DNA
actccattttcactgttcac

SEQ ID NO: 260240 - DNA, 20 bp, synthetic construct
  source 1..20: mol_type = other DNA
cactccattttcactgttca

SEQ ID NO: 260241 - DNA, 20 bp, synthetic construct
  source 1..20: mol_type = other DNA
acactccattttcactgttc

SEQ ID NO: 260242 - DNA, 20 bp, synthetic construct
  source 1..20: mol_type = other DNA
cacactccattttcactgtt

SEQ ID NO: 260243 - DNA, 20 bp, synthetic construct
  source 1..20: mol_type = other DNA
tcacactccattttcactgt

SEQ ID NO: 260244 - DNA, 20 bp, synthetic construct
  source 1..20: mol_type = other DNA
gtcacactccattttcactg

SEQ ID NO: 260245 - DNA, 20 bp, synthetic construct
  source 1..20: mol_type = other DNA
tgtcacactccattttcact

SEQ ID NO: 260246 - DNA, 20 bp, synthetic construct
  source 1..20: mol_type = other DNA
ttgtcacactccattttcac

SEQ ID NO: 260247 - DNA, 20 bp, synthetic construct
  source 1..20: mol_type = other DNA
cttgtcacactccattttca

SEQ ID NO: 260248 - DNA, 20 bp, synthetic construct
  source 1..20: mol_type = other DNA
gcttgtcacactccattttc

SEQ ID NO: 260249 - DNA, 20 bp, synthetic construct
  source 1..20: mol_type = other DNA
tgcttgtcacactccatttt

SEQ ID NO: 260250 - DNA, 20 bp, synthetic construct
  source 1..20: mol_type = other DNA
atgcttgtcacactccattt

SEQ ID NO: 260251 - DNA, 20 bp, synthetic construct
  source 1..20: mol_type = other DNA
aatgcttgtcacactccatt

SEQ ID NO: 260252 - DNA, 20 bp, synthetic construct
  source 1..20: mol_type = other DNA
gaatgcttgtcacactccat

SEQ ID NO: 260253 - DNA, 20 bp, synthetic construct
  source 1..20: mol_type = other DNA
agaatgcttgtcacactcca

SEQ ID NO: 260254 - DNA, 20 bp, synthetic construct
  source 1..20: mol_type = other DNA
aagaatgcttgtcacactcc

SEQ ID NO: 260255 - DNA, 20 bp, synthetic construct
  source 1..20: mol_type = other DNA
taagaatgcttgtcacactc

SEQ ID NO: 260256 - DNA, 20 bp, synthetic construct
  source 1..20: mol_type = other DNA
ataagaatgcttgtcacact

SEQ ID NO: 260257 - DNA, 20 bp, synthetic construct
  source 1..20: mol_type = other DNA
aataagaatgcttgtcacac

SEQ ID NO: 260258 - DNA, 20 bp, synthetic construct
  source 1..20: mol_type = other DNA
aaataagaatgcttgtcaca

SEQ ID NO: 260259 - DNA, 20 bp, synthetic construct
  source 1..20: mol_type = other DNA
aaaataagaatgcttgtcac

SEQ ID NO: 260260 - DNA, 20 bp, synthetic construct
  source 1..20: mol_type = other DNA
taaaataagaatgcttgtca

SEQ ID NO: 260261 - DNA, 20 bp, synthetic construct
  source 1..20: mol_type = other DNA
ataaaataagaatgcttgtc

SEQ ID NO: 260262 - DNA, 20 bp, synthetic construct
  source 1..20: mol_type = other DNA
tataaaataagaatgcttgt

SEQ ID NO: 260263 - DNA, 20 bp, synthetic construct
  source 1..20: mol_type = other DNA
atataaaataagaatgcttg

SEQ ID NO: 260264 - DNA, 20 bp, synthetic construct
  source 1..20: mol_type = other DNA
aatataaaataagaatgctt

SEQ ID NO: 260265 - DNA, 20 bp, synthetic construct
  source 1..20: mol_type = other DNA
aaatataaaataagaatgct

SEQ ID NO: 260266 - DNA, 20 bp, synthetic construct
  source 1..20: mol_type = other DNA
aaaatataaaataagaatgc

SEQ ID NO: 260267 - DNA, 20 bp, synthetic construct
  source 1..20: mol_type = other DNA
taaaatataaaataagaatg

SEQ ID NO: 260268 - DNA, 20 bp, synthetic construct
  source 1..20: mol_type = other DNA
ataaaatataaaataagaat

SEQ ID NO: 260269 - DNA, 20 bp, synthetic construct
  source 1..20: mol_type = other DNA
gataaaatataaaataagaa

SEQ ID NO: 260270 - DNA, 20 bp, synthetic construct
  source 1..20: mol_type = other DNA
tgataaaatataaaataaga

SEQ ID NO: 260271 - DNA, 20 bp, synthetic construct
  source 1..20: mol_type = other DNA
ctgataaaatataaaataag

SEQ ID NO: 260272 - DNA, 20 bp, synthetic construct
  source 1..20: mol_type = other DNA
gctgataaaatataaaataa

SEQ ID NO: 260273 - DNA, 20 bp, synthetic construct
  source 1..20: mol_type = other DNA
agctgataaaatataaaata

SEQ ID NO: 260274 - DNA, 20 bp, synthetic construct
  source 1..20: mol_type = other DNA
gagctgataaaatataaaat

SEQ ID NO: 260275 - DNA, 20 bp, synthetic construct
  source 1..20: mol_type = other DNA
cgagctgataaaatataaaa

SEQ ID NO: 260276 - DNA, 20 bp, synthetic construct
  source 1..20: mol_type = other DNA
gcgagctgataaaatataaa

SEQ ID NO: 260277 - DNA, 20 bp, synthetic construct
  source 1..20: mol_type = other DNA
tgcgagctgataaaatataa

SEQ ID NO: 260278 - DNA, 20 bp, synthetic construct
  source 1..20: mol_type = other DNA
atgcgagctgataaaatata

SEQ ID NO: 260279 - DNA, 20 bp, synthetic construct
  source 1..20: mol_type = other DNA
catgcgagctgataaaatat

SEQ ID NO: 260280 - DNA, 20 bp, synthetic construct
  source 1..20: mol_type = other DNA
ccatgcgagctgataaaata

SEQ ID NO: 260281 - DNA, 20 bp, synthetic construct
  source 1..20: mol_type = other DNA
accatgcgagctgataaaat

SEQ ID NO: 260282 - DNA, 20 bp, synthetic construct
  source 1..20: mol_type = other DNA
gaccatgcgagctgataaaa

SEQ ID NO: 260283 - DNA, 20 bp, synthetic construct
  source 1..20: mol_type = other DNA
tgaccatgcgagctgataaa

SEQ ID NO: 260284 - DNA, 20 bp, synthetic construct
  source 1..20: mol_type = other DNA
ctgaccatgcgagctgataa

SEQ ID NO: 260285 - DNA, 20 bp, synthetic construct
  source 1..20: mol_type = other DNA
actgaccatgcgagctgata

SEQ ID NO: 260286 - DNA, 20 bp, synthetic construct
  source 1..20: mol_type = other DNA
tactgaccatgcgagctgat

SEQ ID NO: 260287 - DNA, 20 bp, synthetic construct
  source 1..20: mol_type = other DNA
ttactgaccatgcgagctga

SEQ ID NO: 260288 - DNA, 20 bp, synthetic construct
  source 1..20: mol_type = other DNA
tttactgaccatgcgagctg

SEQ ID NO: 260289 - DNA, 20 bp, synthetic construct
  source 1..20: mol_type = other DNA
ttttactgaccatgcgagct

SEQ ID NO: 260290 - DNA, 20 bp, synthetic construct
  source 1..20: mol_type = other DNA
cttttactgaccatgcgagc

SEQ ID NO: 260291 - DNA, 20 bp, synthetic construct
  source 1..20: mol_type = other DNA
gcttttactgaccatgcgag

SEQ ID NO: 260292 - DNA, 20 bp, synthetic construct
  source 1..20: mol_type = other DNA
tgcttttactgaccatgcga

SEQ ID NO: 260293 - DNA, 20 bp, synthetic construct
  source 1..20: mol_type = other DNA
ttgcttttactgaccatgcg

SEQ ID NO: 260294 - DNA, 20 bp, synthetic construct
  source 1..20: mol_type = other DNA
tttgcttttactgaccatgc

SEQ ID NO: 260295 - DNA, 20 bp, synthetic construct
  source 1..20: mol_type = other DNA
ctttgcttttactgaccatg

SEQ ID NO: 260296 - DNA, 20 bp, synthetic construct
  source 1..20: mol_type = other DNA
tctttgcttttactgaccat

SEQ ID NO: 260297 - DNA, 20 bp, synthetic construct
  source 1..20: mol_type = other DNA
gtctttgcttttactgacca

SEQ ID NO: 260298 - DNA, 20 bp, synthetic construct
  source 1..20: mol_type = other DNA
cgtctttgcttttactgacc

SEQ ID NO: 260299 - DNA, 20 bp, synthetic construct
  source 1..20: mol_type = other DNA
ccgtctttgcttttactgac

SEQ ID NO: 260300 - DNA, 20 bp, synthetic construct
  source 1..20: mol_type = other DNA
cccgtctttgcttttactga

SEQ ID NO: 260301 - DNA, 20 bp, synthetic construct
  source 1..20: mol_type = other DNA
tcccgtctttgcttttactg

SEQ ID NO: 260302 - DNA, 20 bp, synthetic construct
  source 1..20: mol_type = other DNA
gtcccgtctttgcttttact

SEQ ID NO: 260303 - DNA, 20 bp, synthetic construct
  source 1..20: mol_type = other DNA
agtcccgtctttgcttttac

SEQ ID NO: 260304 - DNA, 20 bp, synthetic construct
  source 1..20: mol_type = other DNA
cagtcccgtctttgctttta

SEQ ID NO: 260305 - DNA, 20 bp, synthetic construct
  source 1..20: mol_type = other DNA
ccagtcccgtctttgctttt

SEQ ID NO: 260306 - DNA, 20 bp, synthetic construct
  source 1..20: mol_type = other DNA
tccagtcccgtctttgcttt

SEQ ID NO: 260307 - DNA, 20 bp, synthetic construct
  source 1..20: mol_type = other DNA
ttccagtcccgtctttgctt

SEQ ID NO: 260308 - DNA, 20 bp, synthetic construct
  source 1..20: mol_type = other DNA
cttccagtcccgtctttgct

SEQ ID NO: 260309 - DNA, 20 bp, synthetic construct
  source 1..20: mol_type = other DNA
gcttccagtcccgtctttgc

SEQ ID NO: 260310 - DNA, 20 bp, synthetic construct
  source 1..20: mol_type = other DNA
cgcttccagtcccgtctttg

SEQ ID NO: 260311 - DNA, 20 bp, synthetic construct
  source 1..20: mol_type = other DNA
tcgcttccagtcccgtcttt

SEQ ID NO: 260312 - DNA, 20 bp, synthetic construct
  source 1..20: mol_type = other DNA
atcgcttccagtcccgtctt

SEQ ID NO: 260313 - DNA, 20 bp, synthetic construct
  source 1..20: mol_type = other DNA
catcgcttccagtcccgtct

SEQ ID NO: 260314 - DNA, 20 bp, synthetic construct
  source 1..20: mol_type = other DNA
tcatcgcttccagtcccgtc

SEQ ID NO: 260315 - DNA, 20 bp, synthetic construct
  source 1..20: mol_type = other DNA
gtcatcgcttccagtcccgt

SEQ ID NO: 260316 - DNA, 20 bp, synthetic construct
  source 1..20: mol_type = other DNA
tgtcatcgcttccagtcccg

SEQ ID NO: 260317 - DNA, 20 bp, synthetic construct
  source 1..20: mol_type = other DNA
ttgtcatcgcttccagtccc

SEQ ID NO: 260318 - DNA, 20 bp, synthetic construct
  source 1..20: mol_type = other DNA
tttgtcatcgcttccagtcc

SEQ ID NO: 260319 - DNA, 20 bp, synthetic construct
  source 1..20: mol_type = other DNA
ttttgtcatcgcttccagtc

SEQ ID NO: 260320 - DNA, 20 bp, synthetic construct
  source 1..20: mol_type = other DNA
tttttgtcatcgcttccagt

SEQ ID NO: 260321 - DNA, 20 bp, synthetic construct
  source 1..20: mol_type = other DNA
ttttttgtcatcgcttccag

SEQ ID NO: 260322 - DNA, 20 bp, synthetic construct
  source 1..20: mol_type = other DNA
cttttttgtcatcgcttcca

SEQ ID NO: 260323 - DNA, 20 bp, synthetic construct
  source 1..20: mol_type = other DNA
gcttttttgtcatcgcttcc

SEQ ID NO: 260324 - DNA, 20 bp, synthetic construct
  source 1..20: mol_type = other DNA
ggcttttttgtcatcgcttc

SEQ ID NO: 260325 - DNA, 20 bp, synthetic construct
  source 1..20: mol_type = other DNA
tggcttttttgtcatcgctt

SEQ ID NO: 260326 - DNA, 20 bp, synthetic construct
  source 1..20: mol_type = other DNA
ttggcttttttgtcatcgct

SEQ ID NO: 260327 - DNA, 20 bp, synthetic construct
  source 1..20: mol_type = other DNA
cttggcttttttgtcatcgc

SEQ ID NO: 260328 - DNA, 20 bp, synthetic construct
  source 1..20: mol_type = other DNA
ccttggcttttttgtcatcg

SEQ ID NO: 260329 - DNA, 20 bp, synthetic construct
  source 1..20: mol_type = other DNA
accttggcttttttgtcatc

SEQ ID NO: 260330 - DNA, 20 bp, synthetic construct
  source 1..20: mol_type = other DNA
taccttggcttttttgtcat

SEQ ID NO: 260331 - DNA, 20 bp, synthetic construct
  source 1..20: mol_type = other DNA
ttaccttggcttttttgtca

SEQ ID NO: 260332 - DNA, 20 bp, synthetic construct
  source 1..20: mol_type = other DNA
cttaccttggcttttttgtc

SEQ ID NO: 260333 - DNA, 20 bp, synthetic construct
  source 1..20: mol_type = other DNA
gcttaccttggcttttttgt

SEQ ID NO: 260334 - DNA, 20 bp, synthetic construct
  source 1..20: mol_type = other DNA
agcttaccttggcttttttg

SEQ ID NO: 260335 - DNA, 20 bp, synthetic construct
  source 1..20: mol_type = other DNA
cagcttaccttggctttttt

SEQ ID NO: 260336 - DNA, 20 bp, synthetic construct
  source 1..20: mol_type = other DNA
tcagcttaccttggcttttt

SEQ ID NO: 260337 - DNA, 20 bp, synthetic construct
  source 1..20: mol_type = other DNA
gtcagcttaccttggctttt

SEQ ID NO: 260338 - DNA, 20 bp, synthetic construct
  source 1..20: mol_type = other DNA
cgtcagcttaccttggcttt

SEQ ID NO: 260339 - DNA, 20 bp, synthetic construct
  source 1..20: mol_type = other DNA
tcgtcagcttaccttggctt

SEQ ID NO: 260340 - DNA, 20 bp, synthetic construct
  source 1..20: mol_type = other DNA
atcgtcagcttaccttggct

SEQ ID NO: 260341 - DNA, 20 bp, synthetic construct
  source 1..20: mol_type = other DNA
catcgtcagcttaccttggc

SEQ ID NO: 260342 - DNA, 20 bp, synthetic construct
  source 1..20: mol_type = other DNA
gcatcgtcagcttaccttgg

SEQ ID NO: 260343 - DNA, 20 bp, synthetic construct
  source 1..20: mol_type = other DNA
ggcatcgtcagcttaccttg

SEQ ID NO: 260344 - DNA, 20 bp, synthetic construct
  source 1..20: mol_type = other DNA
tggcatcgtcagcttacctt

SEQ ID NO: 260345 - DNA, 20 bp, synthetic construct
  source 1..20: mol_type = other DNA
gtggcatcgtcagcttacct

SEQ ID NO: 260346 - DNA, 20 bp, synthetic construct
  source 1..20: mol_type = other DNA
cgtggcatcgtcagcttacc

SEQ ID NO: 260347 - DNA, 20 bp, synthetic construct
  source 1..20: mol_type = other DNA
ccgtggcatcgtcagcttac

SEQ ID NO: 260348 - DNA, 20 bp, synthetic construct
  source 1..20: mol_type = other DNA
tccgtggcatcgtcagctta

SEQ ID NO: 260349 - DNA, 20 bp, synthetic construct
  source 1..20: mol_type = other DNA
ctccgtggcatcgtcagctt

SEQ ID NO: 260350 - DNA, 20 bp, synthetic construct
  source 1..20: mol_type = other DNA
gctccgtggcatcgtcagct

SEQ ID NO: 260351 - DNA, 20 bp, synthetic construct
  source 1..20: mol_type = other DNA
agctccgtggcatcgtcagc

SEQ ID NO: 260352 - DNA, 20 bp, synthetic construct
  source 1..20: mol_type = other DNA
gagctccgtggcatcgtcag

SEQ ID NO: 260353 - DNA, 20 bp, synthetic construct
  source 1..20: mol_type = other DNA
agagctccgtggcatcgtca

SEQ ID NO: 260354 - DNA, 20 bp, synthetic construct
  source 1..20: mol_type = other DNA
cagagctccgtggcatcgtc

SEQ ID NO: 260355 - DNA, 20 bp, synthetic construct
  source 1..20: mol_type = other DNA
gcagagctccgtggcatcgt

SEQ ID NO: 260356 - DNA, 20 bp, synthetic construct
  source 1..20: mol_type = other DNA
tgcagagctccgtggcatcg

SEQ ID NO: 260357 - DNA, 20 bp, synthetic construct
  source 1..20: mol_type = other DNA
ctgcagagctccgtggcatc

SEQ ID NO: 260358 - DNA, 20 bp, synthetic construct
  source 1..20: mol_type = other DNA
gctgcagagctccgtggcat

SEQ ID NO: 260359 - DNA, 20 bp, synthetic construct
  source 1..20: mol_type = other DNA
agctgcagagctccgtggca

SEQ ID NO: 260360 - DNA, 20 bp, synthetic construct
  source 1..20: mol_type = other DNA
cagctgcagagctccgtggc

SEQ ID NO: 260361 - DNA, 20 bp, synthetic construct
  source 1..20: mol_type = other DNA
ccagctgcagagctccgtgg

SEQ ID NO: 260362 - DNA, 20 bp, synthetic construct
  source 1..20: mol_type = other DNA
accagctgcagagctccgtg

SEQ ID NO: 260363 - DNA, 20 bp, synthetic construct
  source 1..20: mol_type = other DNA
gaccagctgcagagctccgt

SEQ ID NO: 260364 - DNA, 20 bp, synthetic construct
  source 1..20: mol_type = other DNA
tgaccagctgcagagctccg

SEQ ID NO: 260365 - DNA, 20 bp, synthetic construct
  source 1..20: mol_type = other DNA
ttgaccagctgcagagctcc

SEQ ID NO: 260366 - DNA, 20 bp, synthetic construct
  source 1..20: mol_type = other DNA
cttgaccagctgcagagctc

SEQ ID NO: 260367 - DNA, 20 bp, synthetic construct
  source 1..20: mol_type = other DNA
acttgaccagctgcagagct

SEQ ID NO: 260368 - DNA, 20 bp, synthetic construct
  source 1..20: mol_type = other DNA
aacttgaccagctgcagagc

SEQ ID NO: 260369 - DNA, 20 bp, synthetic construct
  source 1..20: mol_type = other DNA
aaacttgaccagctgcagag

SEQ ID NO: 260370 - DNA, 20 bp, synthetic construct
  source 1..20: mol_type = other DNA
taaacttgaccagctgcaga

SEQ ID NO: 260371 - DNA, 20 bp, synthetic construct
  source 1..20: mol_type = other DNA
gtaaacttgaccagctgcag

SEQ ID NO: 260372 - DNA, 20 bp, synthetic construct
  source 1..20: mol_type = other DNA
tgtaaacttgaccagctgca

SEQ ID NO: 260373 - DNA, 20 bp, synthetic construct
  source 1..20: mol_type = other DNA
ctgtaaacttgaccagctgc

SEQ ID NO: 260374 - DNA, 20 bp, synthetic construct
  source 1..20: mol_type = other DNA
tctgtaaacttgaccagctg

SEQ ID NO: 260375 - DNA, 20 bp, synthetic construct
  source 1..20: mol_type = other DNA
ctctgtaaacttgaccagct

SEQ ID NO: 260376 - DNA, 20 bp, synthetic construct
  source 1..20: mol_type = other DNA
tctctgtaaacttgaccagc

SEQ ID NO: 260377 - DNA, 20 bp, synthetic construct
  source 1..20: mol_type = other DNA
ttctctgtaaacttgaccag

SEQ ID NO: 260378 - DNA, 20 bp, synthetic construct
  source 1..20: mol_type = other DNA
cttctctgtaaacttgacca

SEQ ID NO: 260379 - DNA, 20 bp, synthetic construct
  source 1..20: mol_type = other DNA
gcttctctgtaaacttgacc

SEQ ID NO: 260380 - DNA, 20 bp, synthetic construct
  source 1..20: mol_type = other DNA
agcttctctgtaaacttgac

SEQ ID NO: 260381 - DNA, 20 bp, synthetic construct
  source 1..20: mol_type = other DNA
cagcttctctgtaaacttga

SEQ ID NO: 260382 - DNA, 20 bp, synthetic construct
  source 1..20: mol_type = other DNA
acagcttctctgtaaacttg

SEQ ID NO: 260383 - DNA, 20 bp, synthetic construct
  source 1..20: mol_type = other DNA
cacagcttctctgtaaactt

SEQ ID NO: 260384 - DNA, 20 bp, synthetic construct
  source 1..20: mol_type = other DNA
gcacagcttctctgtaaact

SEQ ID NO: 260385 - DNA, 20 bp, synthetic construct
  source 1..20: mol_type = other DNA
agcacagcttctctgtaaac

SEQ ID NO: 260386 - DNA, 20 bp, synthetic construct
  source 1..20: mol_type = other DNA
aagcacagcttctctgtaaa

SEQ ID NO: 260387 - DNA, 20 bp, synthetic construct
  source 1..20: mol_type = other DNA
aaagcacagcttctctgtaa

SEQ ID NO: 260388 - DNA, 20 bp, synthetic construct
  source 1..20: mol_type = other DNA
taaagcacagcttctctgta

SEQ ID NO: 260389 - DNA, 20 bp, synthetic construct
  source 1..20: mol_type = other DNA
ataaagcacagcttctctgt

SEQ ID NO: 260390 - DNA, 20 bp, synthetic construct
  source 1..20: mol_type = other DNA
cataaagcacagcttctctg

SEQ ID NO: 260391 - DNA, 20 bp, synthetic construct
  source 1..20: mol_type = other DNA
acataaagcacagcttctct

SEQ ID NO: 260392 - DNA, 20 bp, synthetic construct
  source 1..20: mol_type = other DNA
gacataaagcacagcttctc

SEQ ID NO: 260393 - DNA, 20 bp, synthetic construct
  source 1..20: mol_type = other DNA
agacataaagcacagcttct

SEQ ID NO: 260394 - DNA, 20 bp, synthetic construct
  source 1..20: mol_type = other DNA
cagacataaagcacagcttc

SEQ ID NO: 260395 - DNA, 20 bp, synthetic construct
  source 1..20: mol_type = other DNA
tcagacataaagcacagctt

SEQ ID NO: 260396 - DNA, 20 bp, synthetic construct
  source 1..20: mol_type = other DNA
atcagacataaagcacagct

SEQ ID NO: 260397 - DNA, 20 bp, synthetic construct
  source 1..20: mol_type = other DNA
aatcagacataaagcacagc

SEQ ID NO: 260398 - DNA, 20 bp, synthetic construct
  source 1..20: mol_type = other DNA
gaatcagacataaagcacag

SEQ ID NO: 260399 - DNA, 20 bp, synthetic construct
  source 1..20: mol_type = other DNA
tgaatcagacataaagcaca

SEQ ID NO: 260400 - DNA, 20 bp, synthetic construct
  source 1..20: mol_type = other DNA
atgaatcagacataaagcac

SEQ ID NO: 260401 - DNA, 20 bp, synthetic construct
  source 1..20: mol_type = other DNA
aatgaatcagacataaagca

SEQ ID NO: 260402 - DNA, 20 bp, synthetic construct
  source 1..20: mol_type = other DNA
gaatgaatcagacataaagc

SEQ ID NO: 260403 - DNA, 20 bp, synthetic construct
  source 1..20: mol_type = other DNA
agaatgaatcagacataaag

SEQ ID NO: 260404 - DNA, 20 bp, synthetic construct
  source 1..20: mol_type = other DNA
gagaatgaatcagacataaa

SEQ ID NO: 260405 - DNA, 20 bp, synthetic construct
  source 1..20: mol_type = other DNA
tgagaatgaatcagacataa

SEQ ID NO: 260406 - DNA, 20 bp, synthetic construct
  source 1..20: mol_type = other DNA
atgagaatgaatcagacata

SEQ ID NO: 260407 - DNA, 20 bp, synthetic construct
  source 1..20: mol_type = other DNA
tatgagaatgaatcagacat

SEQ ID NO: 260408 - DNA, 20 bp, synthetic construct
  source 1..20: mol_type = other DNA
atatgagaatgaatcagaca

SEQ ID NO: 260409 - DNA, 20 bp, synthetic construct
  source 1..20: mol_type = other DNA
tatatgagaatgaatcagac

SEQ ID NO: 260410 - DNA, 20 bp, synthetic construct
  source 1..20: mol_type = other DNA
atatatgagaatgaatcaga

SEQ ID NO: 260411 - DNA, 20 bp, synthetic construct
  source 1..20: mol_type = other DNA
tatatatgagaatgaatcag

SEQ ID NO: 260412 - DNA, 20 bp, synthetic construct
  source 1..20: mol_type = other DNA
ttatatatgagaatgaatca

SEQ ID NO: 260413 - DNA, 20 bp, synthetic construct
  source 1..20: mol_type = other DNA
attatatatgagaatgaatc

SEQ ID NO: 260414 - DNA, 20 bp, synthetic construct
  source 1..20: mol_type = other DNA
cattatatatgagaatgaat

SEQ ID NO: 260415 - DNA, 20 bp, synthetic construct
  source 1..20: mol_type = other DNA
acattatatatgagaatgaa

SEQ ID NO: 260416 - DNA, 20 bp, synthetic construct
  source 1..20: mol_type = other DNA
cacattatatatgagaatga

SEQ ID NO: 260417 - DNA, 20 bp, synthetic construct
  source 1..20: mol_type = other DNA
ccacattatatatgagaatg

SEQ ID NO: 260418 - DNA, 20 bp, synthetic construct
  source 1..20: mol_type = other DNA
cccacattatatatgagaat

SEQ ID NO: 260419 - DNA, 20 bp, synthetic construct
  source 1..20: mol_type = other DNA
ccccacattatatatgagaa

SEQ ID NO: 260420 - DNA, 20 bp, synthetic construct
  source 1..20: mol_type = other DNA
tccccacattatatatgaga

SEQ ID NO: 260421 - DNA, 20 bp, synthetic construct
  source 1..20: mol_type = other DNA
ctccccacattatatatgag

SEQ ID NO: 260422 - DNA, 20 bp, synthetic construct
  source 1..20: mol_type = other DNA
actccccacattatatatga

SEQ ID NO: 260423 - DNA, 20 bp, synthetic construct
  source 1..20: mol_type = other DNA
tactccccacattatatatg

SEQ ID NO: 260424 - DNA, 20 bp, synthetic construct
  source 1..20: mol_type = other DNA
atactccccacattatatat

SEQ ID NO: 260425 - DNA, 20 bp, synthetic construct
  source 1..20: mol_type = other DNA
aatactccccacattatata

SEQ ID NO: 260426 - DNA, 20 bp, synthetic construct
  source 1..20: mol_type = other DNA
aaatactccccacattatat

SEQ ID NO: 260427 - DNA, 20 bp, synthetic construct
  source 1..20: mol_type = other DNA
caaatactccccacattata

SEQ ID NO: 260428 - DNA, 20 bp, synthetic construct
  source 1..20: mol_type = other DNA
acaaatactccccacattat

SEQ ID NO: 260429 - DNA, 20 bp, synthetic construct
  source 1..20: mol_type = other DNA
gacaaatactccccacatta

SEQ ID NO: 260430 - DNA, 20 bp, synthetic construct
  source 1..20: mol_type = other DNA
tgacaaatactccccacatt

SEQ ID NO: 260431 - DNA, 20 bp, synthetic construct
  source 1..20: mol_type = other DNA
gtgacaaatactccccacat

SEQ ID NO: 260432 - DNA, 20 bp, synthetic construct
  source 1..20: mol_type = other DNA
agtgacaaatactccccaca

SEQ ID NO: 260433 - DNA, 20 bp, synthetic construct
  source 1..20: mol_type = other DNA
tagtgacaaatactccccac

SEQ ID NO: 260434 - DNA, 20 bp, synthetic construct
  source 1..20: mol_type = other DNA
ttagtgacaaatactcccca

SEQ ID NO: 260435 - DNA, 20 bp, synthetic construct
  source 1..20: mol_type = other DNA
tttagtgacaaatactcccc

SEQ ID NO: 260436 - DNA, 20 bp, synthetic construct
  source 1..20: mol_type = other DNA
ctttagtgacaaatactccc

SEQ ID NO: 260437 - DNA, 20 bp, synthetic construct
  source 1..20: mol_type = other DNA
actttagtgacaaatactcc

SEQ ID NO: 260438 - DNA, 20 bp, synthetic construct
  source 1..20: mol_type = other DNA
tactttagtgacaaatactc

SEQ ID NO: 260439 - DNA, 20 bp, synthetic construct
  source 1..20: mol_type = other DNA
gtactttagtgacaaatact

SEQ ID NO: 260440 - DNA, 20 bp, synthetic construct
  source 1..20: mol_type = other DNA
tgtactttagtgacaaatac

SEQ ID NO: 260441 - DNA, 20 bp, synthetic construct
  source 1..20: mol_type = other DNA
ctgtactttagtgacaaata

SEQ ID NO: 260442 - DNA, 20 bp, synthetic construct
  source 1..20: mol_type = other DNA
gctgtactttagtgacaaat

SEQ ID NO: 260443 - DNA, 20 bp, synthetic construct
  source 1..20: mol_type = other DNA
agctgtactttagtgacaaa

SEQ ID NO: 260444 - DNA, 20 bp, synthetic construct
  source 1..20: mol_type = other DNA
cagctgtactttagtgacaa

SEQ ID NO: 260445 - DNA, 20 bp, synthetic construct
  source 1..20: mol_type = other DNA
acagctgtactttagtgaca

SEQ ID NO: 260446 - DNA, 20 bp, synthetic construct
  source 1..20: mol_type = other DNA
gacagctgtactttagtgac

SEQ ID NO: 260447 - DNA, 20 bp, synthetic construct
  source 1..20: mol_type = other DNA
tgacagctgtactttagtga

SEQ ID NO: 260448 - DNA, 20 bp, synthetic construct
  source 1..20: mol_type = other DNA
atgacagctgtactttagtg

SEQ ID NO: 260449 - DNA, 20 bp, synthetic construct
  source 1..20: mol_type = other DNA
aatgacagctgtactttagt

SEQ ID NO: 260450 - DNA, 20 bp, synthetic construct
  source 1..20: mol_type = other DNA
aaatgacagctgtactttag

SEQ ID NO: 260451 - DNA, 20 bp, synthetic construct
  source 1..20: mol_type = other DNA
taaatgacagctgtacttta

SEQ ID NO: 260452 - DNA, 20 bp, synthetic construct
  source 1..20: mol_type = other DNA
ttaaatgacagctgtacttt

SEQ ID NO: 260453 - DNA, 20 bp, synthetic construct
  source 1..20: mol_type = other DNA
tttaaatgacagctgtactt

SEQ ID NO: 260454 - DNA, 20 bp, synthetic construct
  source 1..20: mol_type = other DNA
ctttaaatgacagctgtact

SEQ ID NO: 260455 - DNA, 20 bp, synthetic construct
  source 1..20: mol_type = other DNA
actttaaatgacagctgtac

SEQ ID NO: 260456 - DNA, 20 bp, synthetic construct
  source 1..20: mol_type = other DNA
cactttaaatgacagctgta

SEQ ID NO: 260457 - DNA, 20 bp, synthetic construct
  source 1..20: mol_type = other DNA
gcactttaaatgacagctgt

SEQ ID NO: 260458 - DNA, 20 bp, synthetic construct
  source 1..20: mol_type = other DNA
agcactttaaatgacagctg

SEQ ID NO: 260459 - DNA, 20 bp, synthetic construct
  source 1..20: mol_type = other DNA
aagcactttaaatgacagct

SEQ ID NO: 260460 - DNA, 20 bp, synthetic construct
  source 1..20: mol_type = other DNA
aaagcactttaaatgacagc

SEQ ID NO: 260461 - DNA, 20 bp, synthetic construct
  source 1..20: mol_type = other DNA
caaagcactttaaatgacag

SEQ ID NO: 260462 - DNA, 20 bp, synthetic construct
  source 1..20: mol_type = other DNA
acaaagcactttaaatgaca

SEQ ID NO: 260463 - DNA, 20 bp, synthetic construct
  source 1..20: mol_type = other DNA
tacaaagcactttaaatgac

SEQ ID NO: 260464 - DNA, 20 bp, synthetic construct
  source 1..20: mol_type = other DNA
atacaaagcactttaaatga

SEQ ID NO: 260465 - DNA, 20 bp, synthetic construct
  source 1..20: mol_type = other DNA
aatacaaagcactttaaatg

SEQ ID NO: 260466 - DNA, 20 bp, synthetic construct
  source 1..20: mol_type = other DNA
aaatacaaagcactttaaat

SEQ ID NO: 260467 - DNA, 20 bp, synthetic construct
  source 1..20: mol_type = other DNA
aaaatacaaagcactttaaa

SEQ ID NO: 260468 - DNA, 20 bp, synthetic construct
  source 1..20: mol_type = other DNA
caaaatacaaagcactttaa

SEQ ID NO: 260469 - DNA, 20 bp, synthetic construct
  source 1..20: mol_type = other DNA
ccaaaatacaaagcacttta

SEQ ID NO: 260470 - DNA, 20 bp, synthetic construct
  source 1..20: mol_type = other DNA
cccaaaatacaaagcacttt

SEQ ID NO: 260471 - DNA, 20 bp, synthetic construct
  source 1..20: mol_type = other DNA
ccccaaaatacaaagcactt

SEQ ID NO: 260472 - DNA, 20 bp, synthetic construct
  source 1..20: mol_type = other DNA
gccccaaaatacaaagcact

SEQ ID NO: 260473 - DNA, 20 bp, synthetic construct
  source 1..20: mol_type = other DNA
tgccccaaaatacaaagcac

SEQ ID NO: 260474 - DNA, 20 bp, synthetic construct
  source 1..20: mol_type = other DNA
ctgccccaaaatacaaagca

SEQ ID NO: 260475 - DNA, 20 bp, synthetic construct
  source 1..20: mol_type = other DNA
cctgccccaaaatacaaagc

SEQ ID NO: 260476 - DNA, 20 bp, synthetic construct
  source 1..20: mol_type = other DNA
gcctgccccaaaatacaaag

SEQ ID NO: 260477 - DNA, 20 bp, synthetic construct
  source 1..20: mol_type = other DNA
agcctgccccaaaatacaaa

SEQ ID NO: 260478 - DNA, 20 bp, synthetic construct
  source 1..20: mol_type = other DNA
aagcctgccccaaaatacaa

SEQ ID NO: 260479 - DNA, 20 bp, synthetic construct
  source 1..20: mol_type = other DNA
aaagcctgccccaaaataca

SEQ ID NO: 260480 - DNA, 20 bp, synthetic construct
  source 1..20: mol_type = other DNA
aaaagcctgccccaaaatac

SEQ ID NO: 260481 - DNA, 20 bp, synthetic construct
  source 1..20: mol_type = other DNA
taaaagcctgccccaaaata

SEQ ID NO: 260482 - DNA, 20 bp, synthetic construct
  source 1..20: mol_type = other DNA
ttaaaagcctgccccaaaat

SEQ ID NO: 260483 - DNA, 20 bp, synthetic construct
  source 1..20: mol_type = other DNA
tttaaaagcctgccccaaaa

SEQ ID NO: 260484 - DNA, 20 bp, synthetic construct
  source 1..20: mol_type = other DNA
ttttaaaagcctgccccaaa

SEQ ID NO: 260485 - DNA, 20 bp, synthetic construct
  source 1..20: mol_type = other DNA
tttttaaaagcctgccccaa

SEQ ID NO: 260486 - DNA, 20 bp, synthetic construct
  source 1..20: mol_type = other DNA
ctttttaaaagcctgcccca

SEQ ID NO: 260487 - DNA, 20 bp, synthetic construct
  source 1..20: mol_type = other DNA
actttttaaaagcctgcccc

SEQ ID NO: 260488 - DNA, 20 bp, synthetic construct
  source 1..20: mol_type = other DNA
gactttttaaaagcctgccc

SEQ ID NO: 260489 - DNA, 20 bp, synthetic construct
  source 1..20: mol_type = other DNA
ggactttttaaaagcctgcc

SEQ ID NO: 260490 - DNA, 20 bp, synthetic construct
  source 1..20: mol_type = other DNA
tggactttttaaaagcctgc

SEQ ID NO: 260491 - DNA, 20 bp, synthetic construct
  source 1..20: mol_type = other DNA
ctggactttttaaaagcctg

SEQ ID NO: 260492 - DNA, 20 bp, synthetic construct
  source 1..20: mol_type = other DNA
gctggactttttaaaagcct

SEQ ID NO: 260493 - DNA, 20 bp, synthetic construct
  source 1..20: mol_type = other DNA
tgctggactttttaaaagcc

SEQ ID NO: 260494 - DNA, 20 bp, synthetic construct
  source 1..20: mol_type = other DNA
atgctggactttttaaaagc

SEQ ID NO: 260495 - DNA, 20 bp, synthetic construct
  source 1..20: mol_type = other DNA
aatgctggactttttaaaag

SEQ ID NO: 260496 - DNA, 20 bp, synthetic construct
  source 1..20: mol_type = other DNA
aaatgctggactttttaaaa

SEQ ID NO: 260497 - DNA, 20 bp, synthetic construct
  source 1..20: mol_type = other DNA
taaatgctggactttttaaa

SEQ ID NO: 260498 - DNA, 20 bp, synthetic construct
  source 1..20: mol_type = other DNA
ataaatgctggactttttaa

SEQ ID NO: 260499 - DNA, 20 bp, synthetic construct
  source 1..20: mol_type = other DNA
aataaatgctggacttttta

SEQ ID NO: 260500 - DNA, 20 bp, synthetic construct
  source 1..20: mol_type = other DNA
taataaatgctggacttttt

SEQ ID NO: 260501 - DNA, 20 bp, synthetic construct
  source 1..20: mol_type = other DNA
ctaataaatgctggactttt

SEQ ID NO: 260502 - DNA, 20 bp, synthetic construct
  source 1..20: mol_type = other DNA
actaataaatgctggacttt

SEQ ID NO: 260503 - DNA, 20 bp, synthetic construct
  source 1..20: mol_type = other DNA
aactaataaatgctggactt

SEQ ID NO: 260504 - DNA, 20 bp, synthetic construct
  source 1..20: mol_type = other DNA
aaactaataaatgctggact

SEQ ID NO: 260505 - DNA, 20 bp, synthetic construct
  source 1..20: mol_type = other DNA
aaaactaataaatgctggac

SEQ ID NO: 260506 - DNA, 20 bp, synthetic construct
  source 1..20: mol_type = other DNA
caaaactaataaatgctgga

SEQ ID NO: 260507 - DNA, 20 bp, synthetic construct
  source 1..20: mol_type = other DNA
tcaaaactaataaatgctgg

SEQ ID NO: 260508 - DNA, 20 bp, synthetic construct
  source 1..20: mol_type = other DNA
atcaaaactaataaatgctg

SEQ ID NO: 260509 - DNA, 20 bp, synthetic construct
  source 1..20: mol_type = other DNA
tatcaaaactaataaatgct

SEQ ID NO: 260510 - DNA, 20 bp, synthetic construct
  source 1..20: mol_type = other DNA
gtatcaaaactaataaatgc

SEQ ID NO: 260511 - DNA, 20 bp, synthetic construct
  source 1..20: mol_type = other DNA
agtatcaaaactaataaatg

SEQ ID NO: 260512 - DNA, 20 bp, synthetic construct
  source 1..20: mol_type = other DNA
aagtatcaaaactaataaat

SEQ ID NO: 260513 - DNA, 20 bp, synthetic construct
  source 1..20: mol_type = other DNA
taagtatcaaaactaataaa

SEQ ID NO: 260514 - DNA, 20 bp, synthetic construct
  source 1..20: mol_type = other DNA
gtaagtatcaaaactaataa

SEQ ID NO: 260515 - DNA, 20 bp, synthetic construct
  source 1..20: mol_type = other DNA
ggtaagtatcaaaactaata

SEQ ID NO: 260516 - DNA, 20 bp, synthetic construct
  source 1..20: mol_type = other DNA
gggtaagtatcaaaactaat

SEQ ID NO: 260517 - DNA, 20 bp, synthetic construct
  source 1..20: mol_type = other DNA
ggggtaagtatcaaaactaa

SEQ ID NO: 260518 - DNA, 20 bp, synthetic construct
  source 1..20: mol_type = other DNA
tggggtaagtatcaaaacta

SEQ ID NO: 260519 - DNA, 20 bp, synthetic construct
  source 1..20: mol_type = other DNA
ctggggtaagtatcaaaact

SEQ ID NO: 260520 - DNA, 20 bp, synthetic construct
  source 1..20: mol_type = other DNA
cctggggtaagtatcaaaac

SEQ ID NO: 260521 - DNA, 20 bp, synthetic construct
  source 1..20: mol_type = other DNA
ccctggggtaagtatcaaaa

SEQ ID NO: 260522 - DNA, 20 bp, synthetic construct
  source 1..20: mol_type = other DNA
tccctggggtaagtatcaaa

SEQ ID NO: 260523 - DNA, 20 bp, synthetic construct
  source 1..20: mol_type = other DNA
ttccctggggtaagtatcaa

SEQ ID NO: 260524 - DNA, 20 bp, synthetic construct
  source 1..20: mol_type = other DNA
cttccctggggtaagtatca

SEQ ID NO: 260525 - DNA, 20 bp, synthetic construct
  source 1..20: mol_type = other DNA
tcttccctggggtaagtatc

SEQ ID NO: 260526 - DNA, 20 bp, synthetic construct
  source 1..20: mol_type = other DNA
ctcttccctggggtaagtat

SEQ ID NO: 260527 - DNA, 20 bp, synthetic construct
  source 1..20: mol_type = other DNA
gctcttccctggggtaagta

SEQ ID NO: 260528 - DNA, 20 bp, synthetic construct
  source 1..20: mol_type = other DNA
tgctcttccctggggtaagt

SEQ ID NO: 260529 - DNA, 20 bp, synthetic construct
  source 1..20: mol_type = other DNA
ctgctcttccctggggtaag

SEQ ID NO: 260530 - DNA, 20 bp, synthetic construct
  source 1..20: mol_type = other DNA
actgctcttccctggggtaa

SEQ ID NO: 260531 - DNA, 20 bp, synthetic construct
  source 1..20: mol_type = other DNA
aactgctcttccctggggta

SEQ ID NO: 260532 - DNA, 20 bp, synthetic construct
  source 1..20: mol_type = other DNA
caactgctcttccctggggt

SEQ ID NO: 260533 - DNA, 20 bp, synthetic construct
  source 1..20: mol_type = other DNA
ccaactgctcttccctgggg

SEQ ID NO: 260534 - DNA, 20 bp, synthetic construct
  source 1..20: mol_type = other DNA
gccaactgctcttccctggg

SEQ ID NO: 260535 - DNA, 20 bp, synthetic construct
  source 1..20: mol_type = other DNA
tgccaactgctcttccctgg

SEQ ID NO: 260536 - DNA, 20 bp, synthetic construct
  source 1..20: mol_type = other DNA
ctgccaactgctcttccctg

SEQ ID NO: 260537 - DNA, 20 bp, synthetic construct
  source 1..20: mol_type = other DNA
cctgccaactgctcttccct

SEQ ID NO: 260538 - DNA, 20 bp, synthetic construct
  source 1..20: mol_type = other DNA
acctgccaactgctcttccc

SEQ ID NO: 260539 - DNA, 20 bp, synthetic construct
  source 1..20: mol_type = other DNA
aacctgccaactgctcttcc

SEQ ID NO: 260540 - DNA, 20 bp, synthetic construct
  source 1..20: mol_type = other DNA
gaacctgccaactgctcttc

SEQ ID NO: 260541 - DNA, 20 bp, synthetic construct
  source 1..20: mol_type = other DNA
tgaacctgccaactgctctt

SEQ ID NO: 260542 - DNA, 20 bp, synthetic construct
  source 1..20: mol_type = other DNA
atgaacctgccaactgctct

SEQ ID NO: 260543 - DNA, 20 bp, synthetic construct
  source 1..20: mol_type = other DNA
catgaacctgccaactgctc

SEQ ID NO: 260544 - DNA, 20 bp, synthetic construct
  source 1..20: mol_type = other DNA
tcatgaacctgccaactgct

SEQ ID NO: 260545 - DNA, 20 bp, synthetic construct
  source 1..20: mol_type = other DNA
ttcatgaacctgccaactgc

SEQ ID NO: 260546 - DNA, 20 bp, synthetic construct
  source 1..20: mol_type = other DNA
cttcatgaacctgccaactg

SEQ ID NO: 260547 - DNA, 20 bp, synthetic construct
  source 1..20: mol_type = other DNA
acttcatgaacctgccaact

SEQ ID NO: 260548 - DNA, 20 bp, synthetic construct
  source 1..20: mol_type = other DNA
gacttcatgaacctgccaac

SEQ ID NO: 260549 - DNA, 20 bp, synthetic construct
  source 1..20: mol_type = other DNA
tgacttcatgaacctgccaa

SEQ ID NO: 260550 - DNA, 20 bp, synthetic construct
  source 1..20: mol_type = other DNA
atgacttcatgaacctgcca

SEQ ID NO: 260551 - DNA, 20 bp, synthetic construct
  source 1..20: mol_type = other DNA
catgacttcatgaacctgcc

SEQ ID NO: 260552 - DNA, 20 bp, synthetic construct
  source 1..20: mol_type = other DNA
gcatgacttcatgaacctgc

SEQ ID NO: 260553 - DNA, 20 bp, synthetic construct
  source 1..20: mol_type = other DNA
agcatgacttcatgaacctg

SEQ ID NO: 260554 - DNA, 20 bp, synthetic construct
  source 1..20: mol_type = other DNA
gagcatgacttcatgaacct

SEQ ID NO: 260555 - DNA, 20 bp, synthetic construct
  source 1..20: mol_type = other DNA
ggagcatgacttcatgaacc

SEQ ID NO: 260556 - DNA, 20 bp, synthetic construct
  source 1..20: mol_type = other DNA
aggagcatgacttcatgaac

SEQ ID NO: 260557 - DNA, 20 bp, synthetic construct
  source 1..20: mol_type = other DNA
taggagcatgacttcatgaa

SEQ ID NO: 260558 - DNA, 20 bp, synthetic construct
  source 1..20: mol_type = other DNA
ttaggagcatgacttcatga

SEQ ID NO: 260559 - DNA, 20 bp, synthetic construct
  source 1..20: mol_type = other DNA
attaggagcatgacttcatg

SEQ ID NO: 260560 - DNA, 20 bp, synthetic construct
  source 1..20: mol_type = other DNA
aattaggagcatgacttcat

SEQ ID NO: 260561 - DNA, 20 bp, synthetic construct
  source 1..20: mol_type = other DNA
gaattaggagcatgacttca

SEQ ID NO: 260562 - DNA, 20 bp, synthetic construct
  source 1..20: mol_type = other DNA
ggaattaggagcatgacttc

SEQ ID NO: 260563 - DNA, 20 bp, synthetic construct
  source 1..20: mol_type = other DNA
tggaattaggagcatgactt

SEQ ID NO: 260564 - DNA, 20 bp, synthetic construct
  source 1..20: mol_type = other DNA
ctggaattaggagcatgact

SEQ ID NO: 260565 - DNA, 20 bp, synthetic construct
  source 1..20: mol_type = other DNA
gctggaattaggagcatgac

SEQ ID NO: 260566 - DNA, 20 bp, synthetic construct
  source 1..20: mol_type = other DNA
agctggaattaggagcatga

SEQ ID NO: 260567 - DNA, 20 bp, synthetic construct
  source 1..20: mol_type = other DNA
aagctggaattaggagcatg

SEQ ID NO: 260568 - DNA, 20 bp, synthetic construct
  source 1..20: mol_type = other DNA
aaagctggaattaggagcat

SEQ ID NO: 260569 - DNA, 20 bp, synthetic construct
  source 1..20: mol_type = other DNA
gaaagctggaattaggagca

SEQ ID NO: 260570 - DNA, 20 bp, synthetic construct
  source 1..20: mol_type = other DNA
agaaagctggaattaggagc

SEQ ID NO: 260571 - DNA, 20 bp, synthetic construct
  source 1..20: mol_type = other DNA
aagaaagctggaattaggag

SEQ ID NO: 260572 - DNA, 20 bp, synthetic construct
  source 1..20: mol_type = other DNA
taagaaagctggaattagga

SEQ ID NO: 260573 - DNA, 20 bp, synthetic construct
  source 1..20: mol_type = other DNA
ctaagaaagctggaattagg

SEQ ID NO: 260574 - DNA, 20 bp, synthetic construct
  source 1..20: mol_type = other DNA
actaagaaagctggaattag

SEQ ID NO: 260575 - DNA, 20 bp, synthetic construct
  source 1..20: mol_type = other DNA
cactaagaaagctggaatta

SEQ ID NO: 260576 - DNA, 20 bp, synthetic construct
  source 1..20: mol_type = other DNA
acactaagaaagctggaatt

SEQ ID NO: 260577 - DNA, 20 bp, synthetic construct
  source 1..20: mol_type = other DNA
tacactaagaaagctggaat

SEQ ID NO: 260578 - DNA, 20 bp, synthetic construct
  source 1..20: mol_type = other DNA
gtacactaagaaagctggaa

SEQ ID NO: 260579 - DNA, 20 bp, synthetic construct
  source 1..20: mol_type = other DNA
agtacactaagaaagctgga

SEQ ID NO: 260580 - DNA, 20 bp, synthetic construct
  source 1..20: mol_type = other DNA
aagtacactaagaaagctgg

SEQ ID NO: 260581 - DNA, 20 bp, synthetic construct
  source 1..20: mol_type = other DNA
aaagtacactaagaaagctg

SEQ ID NO: 260582 - DNA, 20 bp, synthetic construct
  source 1..20: mol_type = other DNA
gaaagtacactaagaaagct

SEQ ID NO: 260583 - DNA, 20 bp, synthetic construct
  source 1..20: mol_type = other DNA
tgaaagtacactaagaaagc

SEQ ID NO: 260584 - DNA, 20 bp, synthetic construct
  source 1..20: mol_type = other DNA
ctgaaagtacactaagaaag

SEQ ID NO: 260585 - DNA, 20 bp, synthetic construct
  source 1..20: mol_type = other DNA
actgaaagtacactaagaaa

SEQ ID NO: 260586 - DNA, 20 bp, synthetic construct
  source 1..20: mol_type = other DNA
cactgaaagtacactaagaa

SEQ ID NO: 260587 - DNA, 20 bp, synthetic construct
  source 1..20: mol_type = other DNA
tcactgaaagtacactaaga

SEQ ID NO: 260588 - DNA, 20 bp, synthetic construct
  source 1..20: mol_type = other DNA
ctcactgaaagtacactaag

SEQ ID NO: 260589 - DNA, 20 bp, synthetic construct
  source 1..20: mol_type = other DNA
tctcactgaaagtacactaa

SEQ ID NO: 260590 - DNA, 20 bp, synthetic construct
  source 1..20: mol_type = other DNA
gtctcactgaaagtacacta

SEQ ID NO: 260591 - DNA, 20 bp, synthetic construct
  source 1..20: mol_type = other DNA
ggtctcactgaaagtacact

SEQ ID NO: 260592 - DNA, 20 bp, synthetic construct
  source 1..20: mol_type = other DNA
gggtctcactgaaagtacac

SEQ ID NO: 260593 - DNA, 20 bp, synthetic construct
  source 1..20: mol_type = other DNA
agggtctcactgaaagtaca

SEQ ID NO: 260594 - DNA, 20 bp, synthetic construct
  source 1..20: mol_type = other DNA
cagggtctcactgaaagtac

SEQ ID NO: 260595 - DNA, 20 bp, synthetic construct
  source 1..20: mol_type = other DNA
tcagggtctcactgaaagta

SEQ ID NO: 260596 - DNA, 20 bp, synthetic construct
  source 1..20: mol_type = other DNA
gtcagggtctcactgaaagt

SEQ ID NO: 260597 - DNA, 20 bp, synthetic construct
  source 1..20: mol_type = other DNA
tgtcagggtctcactgaaag

SEQ ID NO: 260598 - DNA, 20 bp, synthetic construct
  source 1..20: mol_type = other DNA
ctgtcagggtctcactgaaa

SEQ ID NO: 260599 - DNA, 20 bp, synthetic construct
  source 1..20: mol_type = other DNA
actgtcagggtctcactgaa

SEQ ID NO: 260600 - DNA, 20 bp, synthetic construct
  source 1..20: mol_type = other DNA
tactgtcagggtctcactga

SEQ ID NO: 260601 - DNA, 20 bp, synthetic construct
  source 1..20: mol_type = other DNA
ttactgtcagggtctcactg

SEQ ID NO: 260602 - DNA, 20 bp, synthetic construct
  source 1..20: mol_type = other DNA
tttactgtcagggtctcact

SEQ ID NO: 260603 - DNA, 20 bp, synthetic construct
  source 1..20: mol_type = other DNA
atttactgtcagggtctcac

SEQ ID NO: 260604 - DNA, 20 bp, synthetic construct
  source 1..20: mol_type = other DNA
catttactgtcagggtctca

SEQ ID NO: 260605 - DNA, 20 bp, synthetic construct
  source 1..20: mol_type = other DNA
tcatttactgtcagggtctc

SEQ ID NO: 260606 - DNA, 20 bp, synthetic construct
  source 1..20: mol_type = other DNA
ttcatttactgtcagggtct

SEQ ID NO: 260607 - DNA, 20 bp, synthetic construct
  source 1..20: mol_type = other DNA
cttcatttactgtcagggtc

SEQ ID NO: 260608 - DNA, 20 bp, synthetic construct
  source 1..20: mol_type = other DNA
ccttcatttactgtcagggt

SEQ ID NO: 260609 - DNA, 20 bp, synthetic construct
  source 1..20: mol_type = other DNA
accttcatttactgtcaggg

SEQ ID NO: 260610 - DNA, 20 bp, synthetic construct
  source 1..20: mol_type = other DNA
caccttcatttactgtcagg

SEQ ID NO: 260611 - DNA, 20 bp, synthetic construct
  source 1..20: mol_type = other DNA
acaccttcatttactgtcag

SEQ ID NO: 260612 - DNA, 20 bp, synthetic construct
  source 1..20: mol_type = other DNA
cacaccttcatttactgtca

SEQ ID NO: 260613 - DNA, 20 bp, synthetic construct
  source 1..20: mol_type = other DNA
acacaccttcatttactgtc

SEQ ID NO: 260614 - DNA, 20 bp, synthetic construct
  source 1..20: mol_type = other DNA
aacacaccttcatttactgt

SEQ ID NO: 260615 - DNA, 20 bp, synthetic construct
  source 1..20: mol_type = other DNA
aaacacaccttcatttactg

SEQ ID NO: 260616 - DNA, 20 bp, synthetic construct
  source 1..20: mol_type = other DNA
caaacacaccttcatttact

SEQ ID NO: 260617 - DNA, 20 bp, synthetic construct
  source 1..20: mol_type = other DNA
tcaaacacaccttcatttac

SEQ ID NO: 260618 - DNA, 20 bp, synthetic construct
  source 1..20: mol_type = other DNA
ttcaaacacaccttcattta

SEQ ID NO: 260619 - DNA, 20 bp, synthetic construct
  source 1..20: mol_type = other DNA
tttcaaacacaccttcattt

SEQ ID NO: 260620 - DNA, 20 bp, synthetic construct
  source 1..20: mol_type = other DNA
ttttcaaacacaccttcatt

SEQ ID NO: 260621 - DNA, 20 bp, synthetic construct
  source 1..20: mol_type = other DNA
gttttcaaacacaccttcat

SEQ ID NO: 260622 - DNA, 20 bp, synthetic construct
  source 1..20: mol_type = other DNA
ggttttcaaacacaccttca

SEQ ID NO: 260623 - DNA, 20 bp, synthetic construct
  source 1..20: mol_type = other DNA
tggttttcaaacacaccttc

SEQ ID NO: 260624 - DNA, 20 bp, synthetic construct
  source 1..20: mol_type = other DNA
ttggttttcaaacacacctt

SEQ ID NO: 260625 - DNA, 20 bp, synthetic construct
  source 1..20: mol_type = other DNA
tttggttttcaaacacacct

SEQ ID NO: 260626 - DNA, 20 bp, synthetic construct
  source 1..20: mol_type = other DNA
gtttggttttcaaacacacc

SEQ ID NO: 260627 - DNA, 20 bp, synthetic construct
  source 1..20: mol_type = other DNA
ggtttggttttcaaacacac

SEQ ID NO: 260628 - DNA, 20 bp, synthetic construct
  source 1..20: mol_type = other DNA
gggtttggttttcaaacaca

SEQ ID NO: 260629 - DNA, 20 bp, synthetic construct
  source 1..20: mol_type = other DNA
tgggtttggttttcaaacac

SEQ ID NO: 260630 - DNA, 20 bp, synthetic construct
  source 1..20: mol_type = other DNA
ctgggtttggttttcaaaca

SEQ ID NO: 260631 - DNA, 20 bp, synthetic construct
  source 1..20: mol_type = other DNA
cctgggtttggttttcaaac

SEQ ID NO: 260632 - DNA, 20 bp, synthetic construct
  source 1..20: mol_type = other DNA
tcctgggtttggttttcaaa

SEQ ID NO: 260633 - DNA, 20 bp, synthetic construct
  source 1..20: mol_type = other DNA
gtcctgggtttggttttcaa

SEQ ID NO: 260634 - DNA, 20 bp, synthetic construct
  source 1..20: mol_type = other DNA
tgtcctgggtttggttttca

SEQ ID NO: 260635 - DNA, 20 bp, synthetic construct
  source 1..20: mol_type = other DNA
ctgtcctgggtttggttttc

SEQ ID NO: 260636 - DNA, 20 bp, synthetic construct
  source 1..20: mol_type = other DNA
actgtcctgggtttggtttt

SEQ ID NO: 260637 - DNA, 20 bp, synthetic construct
  source 1..20: mol_type = other DNA
tactgtcctgggtttggttt

SEQ ID NO: 260638 - DNA, 20 bp, synthetic construct
  source 1..20: mol_type = other DNA
ttactgtcctgggtttggtt

SEQ ID NO: 260639 - DNA, 20 bp, synthetic construct
  source 1..20: mol_type = other DNA
tttactgtcctgggtttggt

SEQ ID NO: 260640 - DNA, 20 bp, synthetic construct
  source 1..20: mol_type = other DNA
atttactgtcctgggtttgg

SEQ ID NO: 260641 - DNA, 20 bp, synthetic construct
  source 1..20: mol_type = other DNA
catttactgtcctgggtttg

SEQ ID NO: 260642 - DNA, 20 bp, synthetic construct
  source 1..20: mol_type = other DNA
tcatttactgtcctgggttt

SEQ ID NO: 260643 - DNA, 20 bp, synthetic construct
  source 1..20: mol_type = other DNA
ttcatttactgtcctgggtt

SEQ ID NO: 260644 - DNA, 20 bp, synthetic construct
  source 1..20: mol_type = other DNA
cttcatttactgtcctgggt

SEQ ID NO: 260645 - DNA, 20 bp, synthetic construct
  source 1..20: mol_type = other DNA
ccttcatttactgtcctggg

SEQ ID NO: 260646 - DNA, 20 bp, synthetic construct
  source 1..20: mol_type = other DNA
accttcatttactgtcctgg

SEQ ID NO: 260647 - DNA, 20 bp, synthetic construct
  source 1..20: mol_type = other DNA
caccttcatttactgtcctg

SEQ ID NO: 260648 - DNA, 20 bp, synthetic construct
  source 1..20: mol_type = other DNA
acaccttcatttactgtcct

SEQ ID NO: 260649 - DNA, 20 bp, synthetic construct
  source 1..20: mol_type = other DNA
cacaccttcatttactgtcc

SEQ ID NO: 260650 - DNA, 20 bp, synthetic construct
  source 1..20: mol_type = other DNA
acacaccttcatttactgtc

SEQ ID NO: 260651 - DNA, 20 bp, synthetic construct
  source 1..20: mol_type = other DNA
aacacaccttcatttactgt

SEQ ID NO: 260652 - DNA, 20 bp, synthetic construct
  source 1..20: mol_type = other DNA
aaacacaccttcatttactg

SEQ ID NO: 260653 - DNA, 20 bp, synthetic construct
  source 1..20: mol_type = other DNA
caaacacaccttcatttact

SEQ ID NO: 260654 - DNA, 20 bp, synthetic construct
  source 1..20: mol_type = other DNA
tcaaacacaccttcatttac

SEQ ID NO: 260655 - DNA, 20 bp, synthetic construct
  source 1..20: mol_type = other DNA
ttcaaacacaccttcattta

SEQ ID NO: 260656 - DNA, 20 bp, synthetic construct
  source 1..20: mol_type = other DNA
tttcaaacacaccttcattt

SEQ ID NO: 260657 - DNA, 20 bp, synthetic construct
  source 1..20: mol_type = other DNA
ttttcaaacacaccttcatt

SEQ ID NO: 260658 - DNA, 20 bp, synthetic construct
  source 1..20: mol_type = other DNA
gttttcaaacacaccttcat

SEQ ID NO: 260659 - DNA, 20 bp, synthetic construct
  source 1..20: mol_type = other DNA
ggttttcaaacacaccttca

SEQ ID NO: 260660 - DNA, 20 bp, synthetic construct
  source 1..20: mol_type = other DNA
tggttttcaaacacaccttc

SEQ ID NO: 260661 - DNA, 20 bp, synthetic construct
  source 1..20: mol_type = other DNA
ctggttttcaaacacacctt

SEQ ID NO: 260662 - DNA, 20 bp, synthetic construct
  source 1..20: mol_type = other DNA
gctggttttcaaacacacct

SEQ ID NO: 260663 - DNA, 20 bp, synthetic construct
  source 1..20: mol_type = other DNA
ggctggttttcaaacacacc

SEQ ID NO: 260664 - DNA, 20 bp, synthetic construct
  source 1..20: mol_type = other DNA
gggctggttttcaaacacac

SEQ ID NO: 260665 - DNA, 20 bp, synthetic construct
  source 1..20: mol_type = other DNA
agggctggttttcaaacaca

SEQ ID NO: 260666 - DNA, 20 bp, synthetic construct
  source 1..20: mol_type = other DNA
tagggctggttttcaaacac

SEQ ID NO: 260667 - DNA, 20 bp, synthetic construct
  source 1..20: mol_type = other DNA
ctagggctggttttcaaaca

SEQ ID NO: 260668 - DNA, 20 bp, synthetic construct
  source 1..20: mol_type = other DNA
cctagggctggttttcaaac

SEQ ID NO: 260669 - DNA, 20 bp, synthetic construct
  source 1..20: mol_type = other DNA
tcctagggctggttttcaaa

SEQ ID NO: 260670 - DNA, 20 bp, synthetic construct
  source 1..20: mol_type = other DNA
gtcctagggctggttttcaa

SEQ ID NO: 260671 - DNA, 20 bp, synthetic construct
  source 1..20: mol_type = other DNA
tgtcctagggctggttttca

SEQ ID NO: 260672 - DNA, 20 bp, synthetic construct
  source 1..20: mol_type = other DNA
ctgtcctagggctggttttc

SEQ ID NO: 260673 - DNA, 20 bp, synthetic construct
  source 1..20: mol_type = other DNA
actgtcctagggctggtttt

SEQ ID NO: 260674 - DNA, 20 bp, synthetic construct
  source 1..20: mol_type = other DNA
tactgtcctagggctggttt

SEQ ID NO: 260675 - DNA, 20 bp, synthetic construct
  source 1..20: mol_type = other DNA
ttactgtcctagggctggtt

SEQ ID NO: 260676 - DNA, 20 bp, synthetic construct
  source 1..20: mol_type = other DNA
tttactgtcctagggctggt

SEQ ID NO: 260677 - DNA, 20 bp, synthetic construct
  source 1..20: mol_type = other DNA
atttactgtcctagggctgg

SEQ ID NO: 260678 - DNA, 20 bp, synthetic construct
  source 1..20: mol_type = other DNA
catttactgtcctagggctg

SEQ ID NO: 260679 - DNA, 20 bp, synthetic construct
  source 1..20: mol_type = other DNA
tcatttactgtcctagggct

SEQ ID NO: 260680 - DNA, 20 bp, synthetic construct
  source 1..20: mol_type = other DNA
ttcatttactgtcctagggc

SEQ ID NO: 260681 - DNA, 20 bp, synthetic construct
  source 1..20: mol_type = other DNA
cttcatttactgtcctaggg

SEQ ID NO: 260682 - DNA, 20 bp, synthetic construct
  source 1..20: mol_type = other DNA
gcttcatttactgtcctagg

SEQ ID NO: 260683 - DNA, 20 bp, synthetic construct
  source 1..20: mol_type = other DNA
ggcttcatttactgtcctag

SEQ ID NO: 260684 - DNA, 20 bp, synthetic construct
  source 1..20: mol_type = other DNA
tggcttcatttactgtccta

SEQ ID NO: 260685 - DNA, 20 bp, synthetic construct
  source 1..20: mol_type = other DNA
atggcttcatttactgtcct

SEQ ID NO: 260686 - DNA, 20 bp, synthetic construct
  source 1..20: mol_type = other DNA
gatggcttcatttactgtcc

SEQ ID NO: 260687 - DNA, 20 bp, synthetic construct
  source 1..20: mol_type = other DNA
agatggcttcatttactgtc

SEQ ID NO: 260688 - DNA, 20 bp, synthetic construct
  source 1..20: mol_type = other DNA
aagatggcttcatttactgt

SEQ ID NO: 260689 - DNA, 20 bp, synthetic construct
  source 1..20: mol_type = other DNA
gaagatggcttcatttactg

SEQ ID NO: 260690 - DNA, 20 bp, synthetic construct
  source 1..20: mol_type = other DNA
agaagatggcttcatttact

SEQ ID NO: 260691 - DNA, 20 bp, synthetic construct
  source 1..20: mol_type = other DNA
gagaagatggcttcatttac

SEQ ID NO: 260692 - DNA, 20 bp, synthetic construct
  source 1..20: mol_type = other DNA
tgagaagatggcttcattta

SEQ ID NO: 260693 - DNA, 20 bp, synthetic construct
  source 1..20: mol_type = other DNA
gtgagaagatggcttcattt

SEQ ID NO: 260694 - DNA, 20 bp, synthetic construct
  source 1..20: mol_type = other DNA
agtgagaagatggcttcatt

SEQ ID NO: 260695 - DNA, 20 bp, synthetic construct
  source 1..20: mol_type = other DNA
cagtgagaagatggcttcat

SEQ ID NO: 260696 - DNA, 20 bp, synthetic construct
  source 1..20: mol_type = other DNA
gcagtgagaagatggcttca

SEQ ID NO: 260697 - DNA, 20 bp, synthetic construct
  source 1..20: mol_type = other DNA
tgcagtgagaagatggcttc

SEQ ID NO: 260698 - DNA, 20 bp, synthetic construct
  source 1..20: mol_type = other DNA
atgcagtgagaagatggctt

SEQ ID NO: 260699 - DNA, 20 bp, synthetic construct
  source 1..20: mol_type = other DNA
tatgcagtgagaagatggct

SEQ ID NO: 260700 - DNA, 20 bp, synthetic construct
  source 1..20: mol_type = other DNA
ttatgcagtgagaagatggc

SEQ ID NO: 260701 - DNA, 20 bp, synthetic construct
  source 1..20: mol_type = other DNA
tttatgcagtgagaagatgg

SEQ ID NO: 260702 - DNA, 20 bp, synthetic construct
  source 1..20: mol_type = other DNA
gtttatgcagtgagaagatg

SEQ ID NO: 260703 - DNA, 20 bp, synthetic construct
  source 1..20: mol_type = other DNA
agtttatgcagtgagaagat

SEQ ID NO: 260704 - DNA, 20 bp, synthetic construct
  source 1..20: mol_type = other DNA
cagtttatgcagtgagaaga

SEQ ID NO: 260705 - DNA, 20 bp, synthetic construct
  source 1..20: mol_type = other DNA
gcagtttatgcagtgagaag

SEQ ID NO: 260706 - DNA, 20 bp, synthetic construct
  source 1..20: mol_type = other DNA
tgcagtttatgcagtgagaa

SEQ ID NO: 260707 - DNA, 20 bp, synthetic construct
  source 1..20: mol_type = other DNA
gtgcagtttatgcagtgaga

SEQ ID NO: 260708 - DNA, 20 bp, synthetic construct
  source 1..20: mol_type = other DNA
ggtgcagtttatgcagtgag

SEQ ID NO: 260709 - DNA, 20 bp, synthetic construct
  source 1..20: mol_type = other DNA
gggtgcagtttatgcagtga

SEQ ID NO: 260710 - DNA, 20 bp, synthetic construct
  source 1..20: mol_type = other DNA
tgggtgcagtttatgcagtg

SEQ ID NO: 260711 - DNA, 20 bp, synthetic construct
  source 1..20: mol_type = other DNA
ctgggtgcagtttatgcagt

SEQ ID NO: 260712 - DNA, 20 bp, synthetic construct
  source 1..20: mol_type = other DNA
tctgggtgcagtttatgcag

SEQ ID NO: 260713 - DNA, 20 bp, synthetic construct
  source 1..20: mol_type = other DNA
atctgggtgcagtttatgca

SEQ ID NO: 260714 - DNA, 20 bp, synthetic construct
  source 1..20: mol_type = other DNA
gatctgggtgcagtttatgc

SEQ ID NO: 260715 - DNA, 20 bp, synthetic construct
  source 1..20: mol_type = other DNA
agatctgggtgcagtttatg

SEQ ID NO: 260716 - DNA, 20 bp, synthetic construct
  source 1..20: mol_type = other DNA
aagatctgggtgcagtttat

SEQ ID NO: 260717 - DNA, 20 bp, synthetic construct
  source 1..20: mol_type = other DNA
gaagatctgggtgcagttta

SEQ ID NO: 260718 - DNA, 20 bp, synthetic construct
  source 1..20: mol_type = other DNA
cgaagatctgggtgcagttt

SEQ ID NO: 260719 - DNA, 20 bp, synthetic construct
  source 1..20: mol_type = other DNA
gcgaagatctgggtgcagtt

SEQ ID NO: 260720 - DNA, 20 bp, synthetic construct
  source 1..20: mol_type = other DNA
ggcgaagatctgggtgcagt

SEQ ID NO: 260721 - DNA, 20 bp, synthetic construct
  source 1..20: mol_type = other DNA
gggcgaagatctgggtgcag

SEQ ID NO: 260722 - DNA, 20 bp, synthetic construct
  source 1..20: mol_type = other DNA
tgggcgaagatctgggtgca

SEQ ID NO: 260723 - DNA, 20 bp, synthetic construct
  source 1..20: mol_type = other DNA
atgggcgaagatctgggtgc

SEQ ID NO: 260724 - DNA, 20 bp, synthetic construct
  source 1..20: mol_type = other DNA
gatgggcgaagatctgggtg

SEQ ID NO: 260725 - DNA, 20 bp, synthetic construct
  source 1..20: mol_type = other DNA
ggatgggcgaagatctgggt

SEQ ID NO: 260726 - DNA, 20 bp, synthetic construct
  source 1..20: mol_type = other DNA
aggatgggcgaagatctggg

SEQ ID NO: 260727 - DNA, 20 bp, synthetic construct
  source 1..20: mol_type = other DNA
aaggatgggcgaagatctgg

SEQ ID NO: 260728 - DNA, 20 bp, synthetic construct
  source 1..20: mol_type = other DNA
gaaggatgggcgaagatctg

SEQ ID NO: 260729 - DNA, 20 bp, synthetic construct
  source 1..20: mol_type = other DNA
agaaggatgggcgaagatct

SEQ ID NO: 260730 - DNA, 20 bp, synthetic construct
  source 1..20: mol_type = other DNA
gagaaggatgggcgaagatc

SEQ ID NO: 260731 - DNA, 20 bp, synthetic construct
  source 1..20: mol_type = other DNA
tgagaaggatgggcgaagat

SEQ ID NO: 260732 - DNA, 20 bp, synthetic construct
  source 1..20: mol_type = other DNA
ctgagaaggatgggcgaaga

SEQ ID NO: 260733 - DNA, 20 bp, synthetic construct
  source 1..20: mol_type = other DNA
actgagaaggatgggcgaag

SEQ ID NO: 260734 - DNA, 20 bp, synthetic construct
  source 1..20: mol_type = other DNA
tactgagaaggatgggcgaa

SEQ ID NO: 260735 - DNA, 20 bp, synthetic construct
  source 1..20: mol_type = other DNA
atactgagaaggatgggcga

SEQ ID NO: 260736 - DNA, 20 bp, synthetic construct
  source 1..20: mol_type = other DNA
aatactgagaaggatgggcg

SEQ ID NO: 260737 - DNA, 20 bp, synthetic construct
  source 1..20: mol_type = other DNA
aaatactgagaaggatgggc

SEQ ID NO: 260738 - DNA, 20 bp, synthetic construct
  source 1..20: mol_type = other DNA
gaaatactgagaaggatggg

SEQ ID NO: 260739 - DNA, 20 bp, synthetic construct
  source 1..20: mol_type = other DNA
tgaaatactgagaaggatgg

SEQ ID NO: 260740 - DNA, 20 bp, synthetic construct
  source 1..20: mol_type = other DNA
gtgaaatactgagaaggatg

SEQ ID NO: 260741 - DNA, 20 bp, synthetic construct
  source 1..20: mol_type = other DNA
agtgaaatactgagaaggat

SEQ ID NO: 260742 - DNA, 20 bp, synthetic construct
  source 1..20: mol_type = other DNA
aagtgaaatactgagaagga

SEQ ID NO: 260743 - DNA, 20 bp, synthetic construct
  source 1..20: mol_type = other DNA
gaagtgaaatactgagaagg

SEQ ID NO: 260744 - DNA, 20 bp, synthetic construct
  source 1..20: mol_type = other DNA
tgaagtgaaatactgagaag

SEQ ID NO: 260745 - DNA, 20 bp, synthetic construct
  source 1..20: mol_type = other DNA
gtgaagtgaaatactgagaa

SEQ ID NO: 260746 - DNA, 20 bp, synthetic construct
  source 1..20: mol_type = other DNA
ggtgaagtgaaatactgaga

SEQ ID NO: 260747 - DNA, 20 bp, synthetic construct
  source 1..20: mol_type = other DNA
gggtgaagtgaaatactgag

SEQ ID NO: 260748 - DNA, 20 bp, synthetic construct
  source 1..20: mol_type = other DNA
tgggtgaagtgaaatactga

SEQ ID NO: 260749 - DNA, 20 bp, synthetic construct
  source 1..20: mol_type = other DNA
atgggtgaagtgaaatactg

SEQ ID NO: 260750 - DNA, 20 bp, synthetic construct
  source 1..20: mol_type = other DNA
aatgggtgaagtgaaatact

SEQ ID NO: 260751 - DNA, 20 bp, synthetic construct
  source 1..20: mol_type = other DNA
caatgggtgaagtgaaatac

SEQ ID NO: 260752 - DNA, 20 bp, synthetic construct
  source 1..20: mol_type = other DNA
acaatgggtgaagtgaaata

SEQ ID NO: 260753 - DNA, 20 bp, synthetic construct
  source 1..20: mol_type = other DNA
aacaatgggtgaagtgaaat

SEQ ID NO: 260754 - DNA, 20 bp, synthetic construct
  source 1..20: mol_type = other DNA
aaacaatgggtgaagtgaaa

SEQ ID NO: 260755 - DNA, 20 bp, synthetic construct
  source 1..20: mol_type = other DNA
taaacaatgggtgaagtgaa

SEQ ID NO: 260756 - DNA, 20 bp, synthetic construct
  source 1..20: mol_type = other DNA
gtaaacaatgggtgaagtga

SEQ ID NO: 260757 - DNA, 20 bp, synthetic construct
  source 1..20: mol_type = other DNA
agtaaacaatgggtgaagtg

SEQ ID NO: 260758 - DNA, 20 bp, synthetic construct
  source 1..20: mol_type = other DNA
cagtaaacaatgggtgaagt

SEQ ID NO: 260759 - DNA, 20 bp, synthetic construct
  source 1..20: mol_type = other DNA
acagtaaacaatgggtgaag

SEQ ID NO: 260760 - DNA, 20 bp, synthetic construct
  source 1..20: mol_type = other DNA
gacagtaaacaatgggtgaa

SEQ ID NO: 260761 - DNA, 20 bp, synthetic construct
  source 1..20: mol_type = other DNA
agacagtaaacaatgggtga

SEQ ID NO: 260762 - DNA, 20 bp, synthetic construct
  source 1..20: mol_type = other DNA
gagacagtaaacaatgggtg

SEQ ID NO: 260763 - DNA, 20 bp, synthetic construct
  source 1..20: mol_type = other DNA
tgagacagtaaacaatgggt

SEQ ID NO: 260764 - DNA, 20 bp, synthetic construct
  source 1..20: mol_type = other DNA
ttgagacagtaaacaatggg

SEQ ID NO: 260765 - DNA, 20 bp, synthetic construct
  source 1..20: mol_type = other DNA
attgagacagtaaacaatgg

SEQ ID NO: 260766 - DNA, 20 bp, synthetic construct
  source 1..20: mol_type = other DNA
cattgagacagtaaacaatg

SEQ ID NO: 260767 - DNA, 20 bp, synthetic construct
  source 1..20: mol_type = other DNA
tcattgagacagtaaacaat

SEQ ID NO: 260768 - DNA, 20 bp, synthetic construct
  source 1..20: mol_type = other DNA
gtcattgagacagtaaacaa

SEQ ID NO: 260769 - DNA, 20 bp, synthetic construct
  source 1..20: mol_type = other DNA
agtcattgagacagtaaaca

SEQ ID NO: 260770 - DNA, 20 bp, synthetic construct
  source 1..20: mol_type = other DNA
cagtcattgagacagtaaac

SEQ ID NO: 260771 - DNA, 20 bp, synthetic construct
  source 1..20: mol_type = other DNA
ccagtcattgagacagtaaa

SEQ ID NO: 260772 - DNA, 20 bp, synthetic construct
  source 1..20: mol_type = other DNA
cccagtcattgagacagtaa

SEQ ID NO: 260773 - DNA, 20 bp, synthetic construct
  source 1..20: mol_type = other DNA
ccccagtcattgagacagta

SEQ ID NO: 260774 - DNA, 20 bp, synthetic construct
  source 1..20: mol_type = other DNA
tccccagtcattgagacagt

SEQ ID NO: 260775 - DNA, 20 bp, synthetic construct
  source 1..20: mol_type = other DNA
ttccccagtcattgagacag

SEQ ID NO: 260776 - DNA, 20 bp, synthetic construct
  source 1..20: mol_type = other DNA
tttccccagtcattgagaca

SEQ ID NO: 260777 - DNA, 20 bp, synthetic construct
  source 1..20: mol_type = other DNA
atttccccagtcattgagac

SEQ ID NO: 260778 - DNA, 20 bp, synthetic construct
  source 1..20: mol_type = other DNA
catttccccagtcattgaga

SEQ ID NO: 260779 - DNA, 20 bp, synthetic construct
  source 1..20: mol_type = other DNA
acatttccccagtcattgag

SEQ ID NO: 260780 - DNA, 20 bp, synthetic construct
  source 1..20: mol_type = other DNA
gacatttccccagtcattga

SEQ ID NO: 260781 - DNA, 20 bp, synthetic construct
  source 1..20: mol_type = other DNA
agacatttccccagtcattg

SEQ ID NO: 260782 - DNA, 20 bp, synthetic construct
  source 1..20: mol_type = other DNA
cagacatttccccagtcatt

SEQ ID NO: 260783 - DNA, 20 bp, synthetic construct
  source 1..20: mol_type = other DNA
ccagacatttccccagtcat

SEQ ID NO: 260784 - DNA, 20 bp, synthetic construct
  source 1..20: mol_type = other DNA
cccagacatttccccagtca

SEQ ID NO: 260785 - DNA, 20 bp, synthetic construct
  source 1..20: mol_type = other DNA
ccccagacatttccccagtc

SEQ ID NO: 260786 - DNA, 20 bp, synthetic construct
  source 1..20: mol_type = other DNA
tccccagacatttccccagt

SEQ ID NO: 260787 - DNA, 20 bp, synthetic construct
  source 1..20: mol_type = other DNA
ttccccagacatttccccag

SEQ ID NO: 260788 - DNA, 20 bp, synthetic construct
  source 1..20: mol_type = other DNA
tttccccagacatttcccca

SEQ ID NO: 260789 - DNA, 20 bp, synthetic construct
  source 1..20: mol_type = other DNA
atttccccagacatttcccc

SEQ ID NO: 260790 - DNA, 20 bp, synthetic construct
  source 1..20: mol_type = other DNA
catttccccagacatttccc

SEQ ID NO: 260791 - DNA, 20 bp, synthetic construct
  source 1..20: mol_type = other DNA
gcatttccccagacatttcc

SEQ ID NO: 260792 - DNA, 20 bp, synthetic construct
  source 1..20: mol_type = other DNA
agcatttccccagacatttc

SEQ ID NO: 260793 - DNA, 20 bp, synthetic construct
  source 1..20: mol_type = other DNA
gagcatttccccagacattt

SEQ ID NO: 260794 - DNA, 20 bp, synthetic construct
  source 1..20: mol_type = other DNA
ggagcatttccccagacatt

SEQ ID NO: 260795 - DNA, 20 bp, synthetic construct
  source 1..20: mol_type = other DNA
gggagcatttccccagacat

SEQ ID NO: 260796 - DNA, 20 bp, synthetic construct
  source 1..20: mol_type = other DNA
cgggagcatttccccagaca

SEQ ID NO: 260797 - DNA, 20 bp, synthetic construct
  source 1..20: mol_type = other DNA
acgggagcatttccccagac

SEQ ID NO: 260798 - DNA, 20 bp, synthetic construct
  source 1..20: mol_type = other DNA
tacgggagcatttccccaga

SEQ ID NO: 260799 - DNA, 20 bp, synthetic construct
  source 1..20: mol_type = other DNA
ttacgggagcatttccccag

SEQ ID NO: 260800 - DNA, 20 bp, synthetic construct
  source 1..20: mol_type = other DNA
attacgggagcatttcccca

SEQ ID NO: 260801 - DNA, 20 bp, synthetic construct
  source 1..20: mol_type = other DNA
aattacgggagcatttcccc

SEQ ID NO: 260802 - DNA, 20 bp, synthetic construct
  source 1..20: mol_type = other DNA
caattacgggagcatttccc

SEQ ID NO: 260803 - DNA, 20 bp, synthetic construct
  source 1..20: mol_type = other DNA
gcaattacgggagcatttcc

SEQ ID NO: 260804 - DNA, 20 bp, synthetic construct
  source 1..20: mol_type = other DNA
tgcaattacgggagcatttc

SEQ ID NO: 260805 - DNA, 20 bp, synthetic construct
  source 1..20: mol_type = other DNA
gtgcaattacgggagcattt

SEQ ID NO: 260806 - DNA, 20 bp, synthetic construct
  source 1..20: mol_type = other DNA
tgtgcaattacgggagcatt

SEQ ID NO: 260807 - DNA, 20 bp, synthetic construct
  source 1..20: mol_type = other DNA
ctgtgcaattacgggagcat

SEQ ID NO: 260808 - DNA, 20 bp, synthetic construct
  source 1..20: mol_type = other DNA
actgtgcaattacgggagca

SEQ ID NO: 260809 - DNA, 20 bp, synthetic construct
  source 1..20: mol_type = other DNA
cactgtgcaattacgggagc

SEQ ID NO: 260810 - DNA, 20 bp, synthetic construct
  source 1..20: mol_type = other DNA
ccactgtgcaattacgggag

SEQ ID NO: 260811 - DNA, 20 bp, synthetic construct
  source 1..20: mol_type = other DNA
gccactgtgcaattacggga

SEQ ID NO: 260812 - DNA, 20 bp, synthetic construct
  source 1..20: mol_type = other DNA
cgccactgtgcaattacggg

SEQ ID NO: 260813 - DNA, 20 bp, synthetic construct
  source 1..20: mol_type = other DNA
acgccactgtgcaattacgg

SEQ ID NO: 260814 - DNA, 20 bp, synthetic construct
  source 1..20: mol_type = other DNA
aacgccactgtgcaattacg

SEQ ID NO: 260815 - DNA, 20 bp, synthetic construct
  source 1..20: mol_type = other DNA
aaacgccactgtgcaattac

SEQ ID NO: 260816 - DNA, 20 bp, synthetic construct
  source 1..20: mol_type = other DNA
aaaacgccactgtgcaatta

SEQ ID NO: 260817 - DNA, 20 bp, synthetic construct
  source 1..20: mol_type = other DNA
aaaaacgccactgtgcaatt

SEQ ID NO: 260818 - DNA, 20 bp, synthetic construct
  source 1..20: mol_type = other DNA
gaaaaacgccactgtgcaat

SEQ ID NO: 260819 - DNA, 20 bp, synthetic construct
  source 1..20: mol_type = other DNA
ggaaaaacgccactgtgcaa

SEQ ID NO: 260820 - DNA, 20 bp, synthetic construct
  source 1..20: mol_type = other DNA
aggaaaaacgccactgtgca

SEQ ID NO: 260821 - DNA, 20 bp, synthetic construct
  source 1..20: mol_type = other DNA
caggaaaaacgccactgtgc

SEQ ID NO: 260822 - DNA, 20 bp, synthetic construct
  source 1..20: mol_type = other DNA
ccaggaaaaacgccactgtg

SEQ ID NO: 260823 - DNA, 20 bp, synthetic construct
  source 1..20: mol_type = other DNA
tccaggaaaaacgccactgt

SEQ ID NO: 260824 - DNA, 20 bp, synthetic construct
  source 1..20: mol_type = other DNA
ttccaggaaaaacgccactg

SEQ ID NO: 260825 - DNA, 20 bp, synthetic construct
  source 1..20: mol_type = other DNA
tttccaggaaaaacgccact

SEQ ID NO: 260826 - DNA, 20 bp, synthetic construct
  source 1..20: mol_type = other DNA
ttttccaggaaaaacgccac

SEQ ID NO: 260827 - DNA, 20 bp, synthetic construct
  source 1..20: mol_type = other DNA
attttccaggaaaaacgcca

SEQ ID NO: 260828 - DNA, 20 bp, synthetic construct
  source 1..20: mol_type = other DNA
gattttccaggaaaaacgcc

SEQ ID NO: 260829 - DNA, 20 bp, synthetic construct
  source 1..20: mol_type = other DNA
ggattttccaggaaaaacgc

SEQ ID NO: 260830 - DNA, 20 bp, synthetic construct
  source 1..20: mol_type = other DNA
gggattttccaggaaaaacg

SEQ ID NO: 260831 - DNA, 20 bp, synthetic construct
  source 1..20: mol_type = other DNA
tgggattttccaggaaaaac

SEQ ID NO: 260832 - DNA, 20 bp, synthetic construct
  source 1..20: mol_type = other DNA
gtgggattttccaggaaaaa

SEQ ID NO: 260833 - DNA, 20 bp, synthetic construct
  source 1..20: mol_type = other DNA
ggtgggattttccaggaaaa

SEQ ID NO: 260834 - DNA, 20 bp, synthetic construct
  source 1..20: mol_type = other DNA
tggtgggattttccaggaaa

SEQ ID NO: 260835 - DNA, 20 bp, synthetic construct
  source 1..20: mol_type = other DNA
atggtgggattttccaggaa

SEQ ID NO: 260836 - DNA, 20 bp, synthetic construct
  source 1..20: mol_type = other DNA
catggtgggattttccagga

SEQ ID NO: 260837 - DNA, 20 bp, synthetic construct
  source 1..20: mol_type = other DNA
ccatggtgggattttccagg

SEQ ID NO: 260838 - DNA, 20 bp, synthetic construct
  source 1..20: mol_type = other DNA
gccatggtgggattttccag

SEQ ID NO: 260839 - DNA, 20 bp, synthetic construct
  source 1..20: mol_type = other DNA
agccatggtgggattttcca

SEQ ID NO: 260840 - DNA, 20 bp, synthetic construct
  source 1..20: mol_type = other DNA
gagccatggtgggattttcc

SEQ ID NO: 260841 - DNA, 20 bp, synthetic construct
  source 1..20: mol_type = other DNA
agagccatggtgggattttc

SEQ ID NO: 260842 - DNA, 20 bp, synthetic construct
  source 1..20: mol_type = other DNA
tagagccatggtgggatttt

SEQ ID NO: 260843 - DNA, 20 bp, synthetic construct
  source 1..20: mol_type = other DNA
ctagagccatggtgggattt

SEQ ID NO: 260844 - DNA, 20 bp, synthetic construct
  source 1..20: mol_type = other DNA
tctagagccatggtgggatt

SEQ ID NO: 260845 - DNA, 20 bp, synthetic construct
  source 1..20: mol_type = other DNA
atctagagccatggtgggat

SEQ ID NO: 260846 - DNA, 20 bp, synthetic construct
  source 1..20: mol_type = other DNA
tatctagagccatggtggga

SEQ ID NO: 260847 - DNA, 20 bp, synthetic construct
  source 1..20: mol_type = other DNA
ttatctagagccatggtggg

SEQ ID NO: 260848 - DNA, 20 bp, synthetic construct
  source 1..20: mol_type = other DNA
cttatctagagccatggtgg

SEQ ID NO: 260849 - DNA, 20 bp, synthetic construct
  source 1..20: mol_type = other DNA
tcttatctagagccatggtg

SEQ ID NO: 260850 - DNA, 20 bp, synthetic construct
  source 1..20: mol_type = other DNA
gtcttatctagagccatggt

SEQ ID NO: 260851 - DNA, 20 bp, synthetic construct
  source 1..20: mol_type = other DNA
ggtcttatctagagccatgg

SEQ ID NO: 260852 - DNA, 20 bp, synthetic construct
  source 1..20: mol_type = other DNA
aggtcttatctagagccatg

SEQ ID NO: 260853 - DNA, 20 bp, synthetic construct
  source 1..20: mol_type = other DNA
taggtcttatctagagccat

SEQ ID NO: 260854 - DNA, 20 bp, synthetic construct
  source 1..20: mol_type = other DNA
ataggtcttatctagagcca

SEQ ID NO: 260855 - DNA, 20 bp, synthetic construct
  source 1..20: mol_type = other DNA
aataggtcttatctagagcc

SEQ ID NO: 260856 - DNA, 20 bp, synthetic construct
  source 1..20: mol_type = other DNA
aaataggtcttatctagagc

SEQ ID NO: 260857 - DNA, 20 bp, synthetic construct
  source 1..20: mol_type = other DNA
aaaataggtcttatctagag

SEQ ID NO: 260858 - DNA, 20 bp, synthetic construct
  source 1..20: mol_type = other DNA
aaaaataggtcttatctaga

SEQ ID NO: 260859 - DNA, 20 bp, synthetic construct
  source 1..20: mol_type = other DNA
gaaaaataggtcttatctag

SEQ ID NO: 260860 - DNA, 20 bp, synthetic construct
  source 1..20: mol_type = other DNA
agaaaaataggtcttatcta

SEQ ID NO: 260861 - DNA, 20 bp, synthetic construct
  source 1..20: mol_type = other DNA
aagaaaaataggtcttatct

SEQ ID NO: 260862 - DNA, 20 bp, synthetic construct
  source 1..20: mol_type = other DNA
taagaaaaataggtcttatc

SEQ ID NO: 260863 - DNA, 20 bp, synthetic construct
  source 1..20: mol_type = other DNA
ttaagaaaaataggtcttat

SEQ ID NO: 260864 - DNA, 20 bp, synthetic construct
  source 1..20: mol_type = other DNA
tttaagaaaaataggtctta

SEQ ID NO: 260865 - DNA, 20 bp, synthetic construct
  source 1..20: mol_type = other DNA
ctttaagaaaaataggtctt

SEQ ID NO: 260866 - DNA, 20 bp, synthetic construct
  source 1..20: mol_type = other DNA
cctttaagaaaaataggtct

SEQ ID NO: 260867 - DNA, 20 bp, synthetic construct
  source 1..20: mol_type = other DNA
acctttaagaaaaataggtc

SEQ ID NO: 260868 - DNA, 20 bp, synthetic construct
  source 1..20: mol_type = other DNA
tacctttaagaaaaataggt

SEQ ID NO: 260869 - DNA, 20 bp, synthetic construct
  source 1..20: mol_type = other DNA
atacctttaagaaaaatagg

SEQ ID NO: 260870 - DNA, 20 bp, synthetic construct
  source 1..20: mol_type = other DNA
gatacctttaagaaaaatag

SEQ ID NO: 260871 - DNA, 20 bp, synthetic construct
  source 1..20: mol_type = other DNA
agatacctttaagaaaaata

SEQ ID NO: 260872 - DNA, 20 bp, synthetic construct
  source 1..20: mol_type = other DNA
tagatacctttaagaaaaat

SEQ ID NO: 260873 - DNA, 20 bp, synthetic construct
  source 1..20: mol_type = other DNA
ttagatacctttaagaaaaa

SEQ ID NO: 260874 - DNA, 20 bp, synthetic construct
  source 1..20: mol_type = other DNA
tttagatacctttaagaaaa

SEQ ID NO: 260875 - DNA, 20 bp, synthetic construct
  source 1..20: mol_type = other DNA
ttttagatacctttaagaaa

SEQ ID NO: 260876 - DNA, 20 bp, synthetic construct
  source 1..20: mol_type = other DNA
attttagatacctttaagaa

SEQ ID NO: 260877 - DNA, 20 bp, synthetic construct
  source 1..20: mol_type = other DNA
aattttagatacctttaaga

SEQ ID NO: 260878 - DNA, 20 bp, synthetic construct
  source 1..20: mol_type = other DNA
aaattttagatacctttaag

SEQ ID NO: 260879 - DNA, 20 bp, synthetic construct
  source 1..20: mol_type = other DNA
gaaattttagatacctttaa

SEQ ID NO: 260880 - DNA, 20 bp, synthetic construct
  source 1..20: mol_type = other DNA
ggaaattttagataccttta

SEQ ID NO: 260881 - DNA, 20 bp, synthetic construct
  source 1..20: mol_type = other DNA
tggaaattttagataccttt

SEQ ID NO: 260882 - DNA, 20 bp, synthetic construct
  source 1..20: mol_type = other DNA
ctggaaattttagatacctt

SEQ ID NO: 260883 - DNA, 20 bp, synthetic construct
  source 1..20: mol_type = other DNA
gctggaaattttagatacct

SEQ ID NO: 260884 - DNA, 20 bp, synthetic construct
  source 1..20: mol_type = other DNA
tgctggaaattttagatacc

SEQ ID NO: 260885 - DNA, 20 bp, synthetic construct
  source 1..20: mol_type = other DNA
atgctggaaattttagatac

SEQ ID NO: 260886 - DNA, 20 bp, synthetic construct
  source 1..20: mol_type = other DNA
tatgctggaaattttagata

SEQ ID NO: 260887 - DNA, 20 bp, synthetic construct
  source 1..20: mol_type = other DNA
ttatgctggaaattttagat

SEQ ID NO: 260888 - DNA, 20 bp, synthetic construct
  source 1..20: mol_type = other DNA
tttatgctggaaattttaga

SEQ ID NO: 260889 - DNA, 20 bp, synthetic construct
  source 1..20: mol_type = other DNA
atttatgctggaaattttag

SEQ ID NO: 260890 - DNA, 20 bp, synthetic construct
  source 1..20: mol_type = other DNA
aatttatgctggaaatttta

SEQ ID NO: 260891 - DNA, 20 bp, synthetic construct
  source 1..20: mol_type = other DNA
gaatttatgctggaaatttt

SEQ ID NO: 260892 - DNA, 20 bp, synthetic construct
  source 1..20: mol_type = other DNA
agaatttatgctggaaattt

SEQ ID NO: 260893 - DNA, 20 bp, synthetic construct
  source 1..20: mol_type = other DNA
cagaatttatgctggaaatt

SEQ ID NO: 260894 - DNA, 20 bp, synthetic construct
  source 1..20: mol_type = other DNA
acagaatttatgctggaaat

SEQ ID NO: 260895 - DNA, 20 bp, synthetic construct
  source 1..20: mol_type = other DNA
gacagaatttatgctggaaa

SEQ ID NO: 260896 - DNA, 20 bp, synthetic construct
  source 1..20: mol_type = other DNA
agacagaatttatgctggaa

SEQ ID NO: 260897 - DNA, 20 bp, synthetic construct
  source 1..20: mol_type = other DNA
cagacagaatttatgctgga

SEQ ID NO: 260898 - DNA, 20 bp, synthetic construct
  source 1..20: mol_type = other DNA
tcagacagaatttatgctgg

SEQ ID NO: 260899 - DNA, 20 bp, synthetic construct
  source 1..20: mol_type = other DNA
ttcagacagaatttatgctg

SEQ ID NO: 260900 - DNA, 20 bp, synthetic construct
  source 1..20: mol_type = other DNA
tttcagacagaatttatgct

SEQ ID NO: 260901 - DNA, 20 bp, synthetic construct
  source 1..20: mol_type = other DNA
gtttcagacagaatttatgc

SEQ ID NO: 260902 - DNA, 20 bp, synthetic construct
  source 1..20: mol_type = other DNA
tgtttcagacagaatttatg

SEQ ID NO: 260903 - DNA, 20 bp, synthetic construct
  source 1..20: mol_type = other DNA
gtgtttcagacagaatttat

SEQ ID NO: 260904 - DNA, 20 bp, synthetic construct
  source 1..20: mol_type = other DNA
ggtgtttcagacagaattta

SEQ ID NO: 260905 - DNA, 20 bp, synthetic construct
  source 1..20: mol_type = other DNA
aggtgtttcagacagaattt

SEQ ID NO: 260906 - DNA, 20 bp, synthetic construct
  source 1..20: mol_type = other DNA
caggtgtttcagacagaatt

SEQ ID NO: 260907 - DNA, 20 bp, synthetic construct
  source 1..20: mol_type = other DNA
tcaggtgtttcagacagaat

SEQ ID NO: 260908 - DNA, 20 bp, synthetic construct
  source 1..20: mol_type = other DNA
ttcaggtgtttcagacagaa

SEQ ID NO: 260909 - DNA, 20 bp, synthetic construct
  source 1..20: mol_type = other DNA
attcaggtgtttcagacaga

SEQ ID NO: 260910 - DNA, 20 bp, synthetic construct
  source 1..20: mol_type = other DNA
aattcaggtgtttcagacag

SEQ ID NO: 260911 - DNA, 20 bp, synthetic construct
  source 1..20: mol_type = other DNA
aaattcaggtgtttcagaca

SEQ ID NO: 260912 - DNA, 20 bp, synthetic construct
  source 1..20: mol_type = other DNA
aaaattcaggtgtttcagac

SEQ ID NO: 260913 - DNA, 20 bp, synthetic construct
  source 1..20: mol_type = other DNA
taaaattcaggtgtttcaga

SEQ ID NO: 260914 - DNA, 20 bp, synthetic construct
  source 1..20: mol_type = other DNA
ttaaaattcaggtgtttcag

SEQ ID NO: 260915 - DNA, 20 bp, synthetic construct
  source 1..20: mol_type = other DNA
attaaaattcaggtgtttca

SEQ ID NO: 260916 - DNA, 20 bp, synthetic construct
  source 1..20: mol_type = other DNA
gattaaaattcaggtgtttc

SEQ ID NO: 260917 - DNA, 20 bp, synthetic construct
  source 1..20: mol_type = other DNA
tgattaaaattcaggtgttt

SEQ ID NO: 260918 - DNA, 20 bp, synthetic construct
  source 1..20: mol_type = other DNA
ctgattaaaattcaggtgtt

SEQ ID NO: 260919 - DNA, 20 bp, synthetic construct
  source 1..20: mol_type = other DNA
actgattaaaattcaggtgt

SEQ ID NO: 260920 - DNA, 20 bp, synthetic construct
  source 1..20: mol_type = other DNA
tactgattaaaattcaggtg

SEQ ID NO: 260921 - DNA, 20 bp, synthetic construct
  source 1..20: mol_type = other DNA
gtactgattaaaattcaggt

SEQ ID NO: 260922 - DNA, 20 bp, synthetic construct
  source 1..20: mol_type = other DNA
agtactgattaaaattcagg

SEQ ID NO: 260923 - DNA, 20 bp, synthetic construct
  source 1..20: mol_type = other DNA
cagtactgattaaaattcag

SEQ ID NO: 260924 - DNA, 20 bp, synthetic construct
  source 1..20: mol_type = other DNA
ccagtactgattaaaattca

SEQ ID NO: 260925 - DNA, 20 bp, synthetic construct
  source 1..20: mol_type = other DNA
tccagtactgattaaaattc

SEQ ID NO: 260926 - DNA, 20 bp, synthetic construct
  source 1..20: mol_type = other DNA
ctccagtactgattaaaatt

SEQ ID NO: 260927 - DNA, 20 bp, synthetic construct
  source 1..20: mol_type = other DNA
gctccagtactgattaaaat

SEQ ID NO: 260928 - DNA, 20 bp, synthetic construct
  source 1..20: mol_type = other DNA
ggctccagtactgattaaaa

SEQ ID NO: 260929 - DNA, 20 bp, synthetic construct
  source 1..20: mol_type = other DNA
gggctccagtactgattaaa

SEQ ID NO: 260930 - DNA, 20 bp, synthetic construct
  source 1..20: mol_type = other DNA
cgggctccagtactgattaa

SEQ ID NO: 260931 - DNA, 20 bp, synthetic construct
  source 1..20: mol_type = other DNA
ccgggctccagtactgatta

SEQ ID NO: 260932 - DNA, 20 bp, synthetic construct
  source 1..20: mol_type = other DNA
tccgggctccagtactgatt

SEQ ID NO: 260933 - DNA, 20 bp, synthetic construct
  source 1..20: mol_type = other DNA
ctccgggctccagtactgat

SEQ ID NO: 260934 - DNA, 20 bp, synthetic construct
  source 1..20: mol_type = other DNA
cctccgggctccagtactga

SEQ ID NO: 260935 - DNA, 20 bp, synthetic construct
  source 1..20: mol_type = other DNA
ccctccgggctccagtactg

SEQ ID NO: 260936 - DNA, 20 bp, synthetic construct
  source 1..20: mol_type = other DNA
gccctccgggctccagtact

SEQ ID NO: 260937 - DNA, 20 bp, synthetic construct
  source 1..20: mol_type = other DNA
tgccctccgggctccagtac

SEQ ID NO: 260938 - DNA, 20 bp, synthetic construct
  source 1..20: mol_type = other DNA
atgccctccgggctccagta

SEQ ID NO: 260939 - DNA, 20 bp, synthetic construct
  source 1..20: mol_type = other DNA
gatgccctccgggctccagt

SEQ ID NO: 260940 - DNA, 20 bp, synthetic construct
  source 1..20: mol_type = other DNA
agatgccctccgggctccag

SEQ ID NO: 260941 - DNA, 20 bp, synthetic construct
  source 1..20: mol_type = other DNA
gagatgccctccgggctcca

SEQ ID NO: 260942 - DNA, 20 bp, synthetic construct
  source 1..20: mol_type = other DNA
ggagatgccctccgggctcc

SEQ ID NO: 260943 - DNA, 20 bp, synthetic construct
  source 1..20: mol_type = other DNA
tggagatgccctccgggctc

SEQ ID NO: 260944 - DNA, 20 bp, synthetic construct
  source 1..20: mol_type = other DNA
ctggagatgccctccgggct

SEQ ID NO: 260945 - DNA, 20 bp, synthetic construct
  source 1..20: mol_type = other DNA
actggagatgccctccgggc

SEQ ID NO: 260946 - DNA, 20 bp, synthetic construct
  source 1..20: mol_type = other DNA
aactggagatgccctccggg

SEQ ID NO: 260947 - DNA, 20 bp, synthetic construct
  source 1..20: mol_type = other DNA
caactggagatgccctccgg

SEQ ID NO: 260948 - DNA, 20 bp, synthetic construct
  source 1..20: mol_type = other DNA
gcaactggagatgccctccg

SEQ ID NO: 260949 - DNA, 20 bp, synthetic construct
  source 1..20: mol_type = other DNA
ggcaactggagatgccctcc

SEQ ID NO: 260950 - DNA, 20 bp, synthetic construct
  source 1..20: mol_type = other DNA
tggcaactggagatgccctc

SEQ ID NO: 260951 - DNA, 20 bp, synthetic construct
  source 1..20: mol_type = other DNA
gtggcaactggagatgccct

SEQ ID NO: 260952 - DNA, 20 bp, synthetic construct
  source 1..20: mol_type = other DNA
tgtggcaactggagatgccc

SEQ ID NO: 260953 - DNA, 20 bp, synthetic construct
  source 1..20: mol_type = other DNA
atgtggcaactggagatgcc

SEQ ID NO: 260954 - DNA, 20 bp, synthetic construct
  source 1..20: mol_type = other DNA
tatgtggcaactggagatgc

SEQ ID NO: 260955 - DNA, 20 bp, synthetic construct
  source 1..20: mol_type = other DNA
ctatgtggcaactggagatg

SEQ ID NO: 260956 - DNA, 20 bp, synthetic construct
  source 1..20: mol_type = other DNA
gctatgtggcaactggagat

SEQ ID NO: 260957 - DNA, 20 bp, synthetic construct
  source 1..20: mol_type = other DNA
agctatgtggcaactggaga

SEQ ID NO: 260958 - DNA, 20 bp, synthetic construct
  source 1..20: mol_type = other DNA
gagctatgtggcaactggag

SEQ ID NO: 260959 - DNA, 20 bp, synthetic construct
  source 1..20: mol_type = other DNA
agagctatgtggcaactgga

SEQ ID NO: 260960 - DNA, 20 bp, synthetic construct
  source 1..20: mol_type = other DNA
cagagctatgtggcaactgg

SEQ ID NO: 260961 - DNA, 20 bp, synthetic construct
  source 1..20: mol_type = other DNA
tcagagctatgtggcaactg

SEQ ID NO: 260962 - DNA, 20 bp, synthetic construct
  source 1..20: mol_type = other DNA
ctcagagctatgtggcaact

SEQ ID NO: 260963 - DNA, 20 bp, synthetic construct
  source 1..20: mol_type = other DNA
gctcagagctatgtggcaac

SEQ ID NO: 260964 - DNA, 20 bp, synthetic construct
  source 1..20: mol_type = other DNA
tgctcagagctatgtggcaa

SEQ ID NO: 260965 - DNA, 20 bp, synthetic construct
  source 1..20: mol_type = other DNA
atgctcagagctatgtggca

SEQ ID NO: 260966 - DNA, 20 bp, synthetic construct
  source 1..20: mol_type = other DNA
aatgctcagagctatgtggc

SEQ ID NO: 260967 - DNA, 20 bp, synthetic construct
  source 1..20: mol_type = other DNA
gaatgctcagagctatgtgg

SEQ ID NO: 260968 - DNA, 20 bp, synthetic construct
  source 1..20: mol_type = other DNA
tgaatgctcagagctatgtg

SEQ ID NO: 260969 - DNA, 20 bp, synthetic construct
  source 1..20: mol_type = other DNA
ctgaatgctcagagctatgt

SEQ ID NO: 260970 - DNA, 20 bp, synthetic construct
  source 1..20: mol_type = other DNA
actgaatgctcagagctatg

SEQ ID NO: 260971 - DNA, 20 bp, synthetic construct
  source 1..20: mol_type = other DNA
cactgaatgctcagagctat

SEQ ID NO: 260972 - DNA, 20 bp, synthetic construct
  source 1..20: mol_type = other DNA
ccactgaatgctcagagcta

SEQ ID NO: 260973 - DNA, 20 bp, synthetic construct
  source 1..20: mol_type = other DNA
accactgaatgctcagagct

SEQ ID NO: 260974 - DNA, 20 bp, synthetic construct
  source 1..20: mol_type = other DNA
caccactgaatgctcagagc

SEQ ID NO: 260975 - DNA, 20 bp, synthetic construct
  source 1..20: mol_type = other DNA
acaccactgaatgctcagag

SEQ ID NO: 260976 - DNA, 20 bp, synthetic construct
  source 1..20: mol_type = other DNA
cacaccactgaatgctcaga

SEQ ID NO: 260977 - DNA, 20 bp, synthetic construct
  source 1..20: mol_type = other DNA
acacaccactgaatgctcag

SEQ ID NO: 260978 - DNA, 20 bp, synthetic construct
  source 1..20: mol_type = other DNA
aacacaccactgaatgctca

SEQ ID NO: 260979 - DNA, 20 bp, synthetic construct
  source 1..20: mol_type = other DNA
caacacaccactgaatgctc

SEQ ID NO: 260980 - DNA, 20 bp, synthetic construct
  source 1..20: mol_type = other DNA
tcaacacaccactgaatgct

SEQ ID NO: 260981 - DNA, 20 bp, synthetic construct
  source 1..20: mol_type = other DNA
ctcaacacaccactgaatgc

SEQ ID NO: 260982 - DNA, 20 bp, synthetic construct
  source 1..20: mol_type = other DNA
cctcaacacaccactgaatg

SEQ ID NO: 260983 - DNA, 20 bp, synthetic construct
  source 1..20: mol_type = other DNA
ccctcaacacaccactgaat

SEQ ID NO: 260984 - DNA, 20 bp, synthetic construct
  source 1..20: mol_type = other DNA
gccctcaacacaccactgaa

SEQ ID NO: 260985 - DNA, 20 bp, synthetic construct
  source 1..20: mol_type = other DNA
agccctcaacacaccactga

SEQ ID NO: 260986 - DNA, 20 bp, synthetic construct
  source 1..20: mol_type = other DNA
cagccctcaacacaccactg

SEQ ID NO: 260987 - DNA, 20 bp, synthetic construct
  source 1..20: mol_type = other DNA
gcagccctcaacacaccact

SEQ ID NO: 260988 - DNA, 20 bp, synthetic construct
  source 1..20: mol_type = other DNA
agcagccctcaacacaccac

SEQ ID NO: 260989 - DNA, 20 bp, synthetic construct
  source 1..20: mol_type = other DNA
gagcagccctcaacacacca

SEQ ID NO: 260990 - DNA, 20 bp, synthetic construct
  source 1..20: mol_type = other DNA
ggagcagccctcaacacacc

SEQ ID NO: 260991 - DNA, 20 bp, synthetic construct
  source 1..20: mol_type = other DNA
gggagcagccctcaacacac

SEQ ID NO: 260992 - DNA, 20 bp, synthetic construct
  source 1..20: mol_type = other DNA
cgggagcagccctcaacaca

SEQ ID NO: 260993 - DNA, 20 bp, synthetic construct
  source 1..20: mol_type = other DNA
ccgggagcagccctcaacac

SEQ ID NO: 260994 - DNA, 20 bp, synthetic construct
  source 1..20: mol_type = other DNA
tccgggagcagccctcaaca

SEQ ID NO: 260995 - DNA, 20 bp, synthetic construct
  source 1..20: mol_type = other DNA
ttccgggagcagccctcaac

SEQ ID NO: 260996 - DNA, 20 bp, synthetic construct
  source 1..20: mol_type = other DNA
cttccgggagcagccctcaa

SEQ ID NO: 260997 - DNA, 20 bp, synthetic construct
  source 1..20: mol_type = other DNA
acttccgggagcagccctca

SEQ ID NO: 260998 - DNA, 20 bp, synthetic construct
  source 1..20: mol_type = other DNA
cacttccgggagcagccctc

SEQ ID NO: 260999 - DNA, 20 bp, synthetic construct
  source 1..20: mol_type = other DNA
gcacttccgggagcagccct

SEQ ID NO: 261000 - DNA, 20 bp, synthetic construct
  source 1..20: mol_type = other DNA
ggcacttccgggagcagccc

SEQ ID NO: 261001 - DNA, 20 bp, synthetic construct
  source 1..20: mol_type = other DNA
aggcacttccgggagcagcc

SEQ ID NO: 261002 - DNA, 20 bp, synthetic construct
  source 1..20: mol_type = other DNA
caggcacttccgggagcagc

SEQ ID NO: 261003 - DNA, 20 bp, synthetic construct
  source 1..20: mol_type = other DNA
gcaggcacttccgggagcag

SEQ ID NO: 261004 - DNA, 20 bp, synthetic construct
  source 1..20: mol_type = other DNA
tgcaggcacttccgggagca

SEQ ID NO: 261005 - DNA, 20 bp, synthetic construct
  source 1..20: mol_type = other DNA
ctgcaggcacttccgggagc

SEQ ID NO: 261006 - DNA, 20 bp, synthetic construct
  source 1..20: mol_type = other DNA
tctgcaggcacttccgggag

SEQ ID NO: 261007 - DNA, 20 bp, synthetic construct
  source 1..20: mol_type = other DNA
ctctgcaggcacttccggga

SEQ ID NO: 261008 - DNA, 20 bp, synthetic construct
  source 1..20: mol_type = other DNA
actctgcaggcacttccggg

SEQ ID NO: 261009 - DNA, 20 bp, synthetic construct
  source 1..20: mol_type = other DNA
gactctgcaggcacttccgg

SEQ ID NO: 261010 - DNA, 20 bp, synthetic construct
  source 1..20: mol_type = other DNA
tgactctgcaggcacttccg

SEQ ID NO: 261011 - DNA, 20 bp, synthetic construct
  source 1..20: mol_type = other DNA
ctgactctgcaggcacttcc

SEQ ID NO: 261012 - DNA, 20 bp, synthetic construct
  source 1..20: mol_type = other DNA
cctgactctgcaggcacttc

SEQ ID NO: 261013 - DNA, 20 bp, synthetic construct
  source 1..20: mol_type = other DNA
ccctgactctgcaggcactt

SEQ ID NO: 261014 - DNA, 20 bp, synthetic construct
  source 1..20: mol_type = other DNA
gccctgactctgcaggcact

SEQ ID NO: 261015 - DNA, 20 bp, synthetic construct
  source 1..20: mol_type = other DNA
agccctgactctgcaggcac

SEQ ID NO: 261016 - DNA, 20 bp, synthetic construct
  source 1..20: mol_type = other DNA
gagccctgactctgcaggca

SEQ ID NO: 261017 - DNA, 20 bp, synthetic construct
  source 1..20: mol_type = other DNA
ggagccctgactctgcaggc

SEQ ID NO: 261018 - DNA, 20 bp, synthetic construct
  source 1..20: mol_type = other DNA
gggagccctgactctgcagg

SEQ ID NO: 261019 - DNA, 20 bp, synthetic construct
  source 1..20: mol_type = other DNA
ggggagccctgactctgcag

SEQ ID NO: 261020 - DNA, 20 bp, synthetic construct
  source 1..20: mol_type = other DNA
tggggagccctgactctgca

SEQ ID NO: 261021 - DNA, 20 bp, synthetic construct
  source 1..20: mol_type = other DNA
ctggggagccctgactctgc

SEQ ID NO: 261022 - DNA, 20 bp, synthetic construct
  source 1..20: mol_type = other DNA
gctggggagccctgactctg

SEQ ID NO: 261023 - DNA, 20 bp, synthetic construct
  source 1..20: mol_type = other DNA
ggctggggagccctgactct

SEQ ID NO: 261024 - DNA, 20 bp, synthetic construct
  source 1..20: mol_type = other DNA
aggctggggagccctgactc

SEQ ID NO: 261025 - DNA, 20 bp, synthetic construct
  source 1..20: mol_type = other DNA
gaggctggggagccctgact

SEQ ID NO: 261026 - DNA, 20 bp, synthetic construct
  source 1..20: mol_type = other DNA
tgaggctggggagccctgac

SEQ ID NO: 261027 - DNA, 20 bp, synthetic construct
  source 1..20: mol_type = other DNA
atgaggctggggagccctga

SEQ ID NO: 261028 - DNA, 20 bp, synthetic construct
  source 1..20: mol_type = other DNA
gatgaggctggggagccctg

SEQ ID NO: 261029 - DNA, 20 bp, synthetic construct
  source 1..20: mol_type = other DNA
agatgaggctggggagccct

SEQ ID NO: 261030 - DNA, 20 bp, synthetic construct
  source 1..20: mol_type = other DNA
tagatgaggctggggagccc

SEQ ID NO: 261031 - DNA, 20 bp, synthetic construct
  source 1..20: mol_type = other DNA
ctagatgaggctggggagcc

SEQ ID NO: 261032 - DNA, 20 bp, synthetic construct
  source 1..20: mol_type = other DNA
actagatgaggctggggagc

SEQ ID NO: 261033 - DNA, 20 bp, synthetic construct
  source 1..20: mol_type = other DNA
cactagatgaggctggggag

SEQ ID NO: 261034 - DNA, 20 bp, synthetic construct
  source 1..20: mol_type = other DNA
tcactagatgaggctgggga

SEQ ID NO: 261035 - DNA, 20 bp, synthetic construct
  source 1..20: mol_type = other DNA
ctcactagatgaggctgggg

SEQ ID NO: 261036 - DNA, 20 bp, synthetic construct
  source 1..20: mol_type = other DNA
cctcactagatgaggctggg

SEQ ID NO: 261037 - DNA, 20 bp, synthetic construct
  source 1..20: mol_type = other DNA
gcctcactagatgaggctgg

SEQ ID NO: 261038 - DNA, 20 bp, synthetic construct
  source 1..20: mol_type = other DNA
tgcctcactagatgaggctg

SEQ ID NO: 261039 - DNA, 20 bp, synthetic construct
  source 1..20: mol_type = other DNA
ctgcctcactagatgaggct

SEQ ID NO: 261040 - DNA, 20 bp, synthetic construct
  source 1..20: mol_type = other DNA
actgcctcactagatgaggc

SEQ ID NO: 261041 - DNA, 20 bp, synthetic construct
  source 1..20: mol_type = other DNA
cactgcctcactagatgagg

SEQ ID NO: 261042 - DNA, 20 bp, synthetic construct
  source 1..20: mol_type = other DNA
ccactgcctcactagatgag

SEQ ID NO: 261043 - DNA, 20 bp, synthetic construct
  source 1..20: mol_type = other DNA
tccactgcctcactagatga

SEQ ID NO: 261044 - DNA, 20 bp, synthetic construct
  source 1..20: mol_type = other DNA
ttccactgcctcactagatg

SEQ ID NO: 261045 - DNA, 20 bp, synthetic construct
  source 1..20: mol_type = other DNA
cttccactgcctcactagat

SEQ ID NO: 261046 - DNA, 20 bp, synthetic construct
  source 1..20: mol_type = other DNA
ccttccactgcctcactaga

SEQ ID NO: 261047 - DNA, 20 bp, synthetic construct
  source 1..20: mol_type = other DNA
cccttccactgcctcactag

SEQ ID NO: 261048 - DNA, 20 bp, synthetic construct
  source 1..20: mol_type = other DNA
gcccttccactgcctcacta

SEQ ID NO: 261049 - DNA, 20 bp, synthetic construct
  source 1..20: mol_type = other DNA
ggcccttccactgcctcact

SEQ ID NO: 261050 - DNA, 20 bp, synthetic construct
  source 1..20: mol_type = other DNA
aggcccttccactgcctcac

SEQ ID NO: 261051 - DNA, 20 bp, synthetic construct
  source 1..20: mol_type = other DNA
caggcccttccactgcctca

SEQ ID NO: 261052 - DNA, 20 bp, synthetic construct
  source 1..20: mol_type = other DNA
acaggcccttccactgcctc

SEQ ID NO: 261053 - DNA, 20 bp, synthetic construct
  source 1..20: mol_type = other DNA
cacaggcccttccactgcct

SEQ ID NO: 261054 - DNA, 20 bp, synthetic construct
  source 1..20: mol_type = other DNA
ccacaggcccttccactgcc

SEQ ID NO: 261055 - DNA, 20 bp, synthetic construct
  source 1..20: mol_type = other DNA
cccacaggcccttccactgc

SEQ ID NO: 261056 - DNA, 20 bp, synthetic construct
  source 1..20: mol_type = other DNA
ccccacaggcccttccactg

SEQ ID NO: 261057 - DNA, 20 bp, synthetic construct
  source 1..20: mol_type = other DNA
tccccacaggcccttccact

SEQ ID NO: 261058 - DNA, 20 bp, synthetic construct
  source 1..20: mol_type = other DNA
atccccacaggcccttccac

SEQ ID NO: 261059 - DNA, 20 bp, synthetic construct
  source 1..20: mol_type = other DNA
aatccccacaggcccttcca

SEQ ID NO: 261060 - DNA, 20 bp, synthetic construct
  source 1..20: mol_type = other DNA
aaatccccacaggcccttcc

SEQ ID NO: 261061 - DNA, 20 bp, synthetic construct
  source 1..20: mol_type = other DNA
caaatccccacaggcccttc

SEQ ID NO: 261062 - DNA, 20 bp, synthetic construct
  source 1..20: mol_type = other DNA
ccaaatccccacaggccctt

SEQ ID NO: 261063 - DNA, 20 bp, synthetic construct
  source 1..20: mol_type = other DNA
tccaaatccccacaggccct

SEQ ID NO: 261064 - DNA, 20 bp, synthetic construct
  source 1..20: mol_type = other DNA
ctccaaatccccacaggccc

SEQ ID NO: 261065 - DNA, 20 bp, synthetic construct
  source 1..20: mol_type = other DNA
tctccaaatccccacaggcc

SEQ ID NO: 261066 - DNA, 20 bp, synthetic construct
  source 1..20: mol_type = other DNA
ctctccaaatccccacaggc

SEQ ID NO: 261067 - DNA, 20 bp, synthetic construct
  source 1..20: mol_type = other DNA
gctctccaaatccccacagg

SEQ ID NO: 261068 - DNA, 20 bp, synthetic construct
  source 1..20: mol_type = other DNA
agctctccaaatccccacag

SEQ ID NO: 261069 - DNA, 20 bp, synthetic construct
  source 1..20: mol_type = other DNA
cagctctccaaatccccaca

SEQ ID NO: 261070 - DNA, 20 bp, synthetic construct
  source 1..20: mol_type = other DNA
ccagctctccaaatccccac

SEQ ID NO: 261071 - DNA, 20 bp, synthetic construct
  source 1..20: mol_type = other DNA
gccagctctccaaatcccca

SEQ ID NO: 261072 - DNA, 20 bp, synthetic construct
  source 1..20: mol_type = other DNA
ggccagctctccaaatcccc

SEQ ID NO: 261073 - DNA, 20 bp, synthetic construct
  source 1..20: mol_type = other DNA
aggccagctctccaaatccc

SEQ ID NO: 261074 - DNA, 20 bp, synthetic construct
  source 1..20: mol_type = other DNA
caggccagctctccaaatcc

SEQ ID NO: 261075 - DNA, 20 bp, synthetic construct
  source 1..20: mol_type = other DNA
ccaggccagctctccaaatc

SEQ ID NO: 261076 - DNA, 20 bp, synthetic construct
  source 1..20: mol_type = other DNA
cccaggccagctctccaaat

SEQ ID NO: 261077 - DNA, 20 bp, synthetic construct
  source 1..20: mol_type = other DNA
acccaggccagctctccaaa

SEQ ID NO: 261078 - DNA, 20 bp, synthetic construct
  source 1..20: mol_type = other DNA
gacccaggccagctctccaa

SEQ ID NO: 261079 - DNA, 20 bp, synthetic construct
  source 1..20: mol_type = other DNA
agacccaggccagctctcca

SEQ ID NO: 261080 - DNA, 20 bp, synthetic construct
  source 1..20: mol_type = other DNA
gagacccaggccagctctcc

SEQ ID NO: 261081 - DNA, 20 bp, synthetic construct
  source 1..20: mol_type = other DNA
agagacccaggccagctctc

SEQ ID NO: 261082 - DNA, 20 bp, synthetic construct
  source 1..20: mol_type = other DNA
cagagacccaggccagctct

SEQ ID NO: 261083 - DNA, 20 bp, synthetic construct
  source 1..20: mol_type = other DNA
tcagagacccaggccagctc

SEQ ID NO: 261084 - DNA, 20 bp, synthetic construct
  source 1..20: mol_type = other DNA
ttcagagacccaggccagct

SEQ ID NO: 261085 - DNA, 20 bp, synthetic construct
  source 1..20: mol_type = other DNA
cttcagagacccaggccagc

SEQ ID NO: 261086 - DNA, 20 bp, synthetic construct
  source 1..20: mol_type = other DNA
acttcagagacccaggccag

SEQ ID NO: 261087 - DNA, 20 bp, synthetic construct
  source 1..20: mol_type = other DNA
cacttcagagacccaggcca

SEQ ID NO: 261088 - DNA, 20 bp, synthetic construct
  source 1..20: mol_type = other DNA
tcacttcagagacccaggcc

SEQ ID NO: 261089 - DNA, 20 bp, synthetic construct
  source 1..20: mol_type = other DNA
atcacttcagagacccaggc

SEQ ID NO: 261090 - DNA, 20 bp, synthetic construct
  source 1..20: mol_type = other DNA
tatcacttcagagacccagg

SEQ ID NO: 261091 - DNA, 20 bp, synthetic construct
  source 1..20: mol_type = other DNA
ctatcacttcagagacccag

SEQ ID NO: 261092 - DNA, 20 bp, synthetic construct
  source 1..20: mol_type = other DNA
actatcacttcagagaccca

SEQ ID NO: 261093 - DNA, 20 bp, synthetic construct
  source 1..20: mol_type = other DNA
cactatcacttcagagaccc

SEQ ID NO: 261094 - DNA, 20 bp, synthetic construct
  source 1..20: mol_type = other DNA
tcactatcacttcagagacc

SEQ ID NO: 261095 - DNA, 20 bp, synthetic construct
  source 1..20: mol_type = other DNA
gtcactatcacttcagagac

SEQ ID NO: 261096 - DNA, 20 bp, synthetic construct
  source 1..20: mol_type = other DNA
tgtcactatcacttcagaga

SEQ ID NO: 261097 - DNA, 20 bp, synthetic construct
  source 1..20: mol_type = other DNA
ctgtcactatcacttcagag

SEQ ID NO: 261098 - DNA, 20 bp, synthetic construct
  source 1..20: mol_type = other DNA
gctgtcactatcacttcaga

SEQ ID NO: 261099 - DNA, 20 bp, synthetic construct
  source 1..20: mol_type = other DNA
agctgtcactatcacttcag

SEQ ID NO: 261100 - DNA, 20 bp, synthetic construct
  source 1..20: mol_type = other DNA
cagctgtcactatcacttca

SEQ ID NO: 261101 - DNA, 20 bp, synthetic construct
  source 1..20: mol_type = other DNA
gcagctgtcactatcacttc

SEQ ID NO: 261102 - DNA, 20 bp, synthetic construct
  source 1..20: mol_type = other DNA
agcagctgtcactatcactt

SEQ ID NO: 261103 - DNA, 20 bp, synthetic construct
  source 1..20: mol_type = other DNA
aagcagctgtcactatcact

SEQ ID NO: 261104 - DNA, 20 bp, synthetic construct
  source 1..20: mol_type = other DNA
caagcagctgtcactatcac

SEQ ID NO: 261105 - DNA, 20 bp, synthetic construct
  source 1..20: mol_type = other DNA
acaagcagctgtcactatca

SEQ ID NO: 261106 - DNA, 20 bp, synthetic construct
  source 1..20: mol_type = other DNA
gacaagcagctgtcactatc

SEQ ID NO: 261107 - DNA, 20 bp, synthetic construct
  source 1..20: mol_type = other DNA
tgacaagcagctgtcactat

SEQ ID NO: 261108 - DNA, 20 bp, synthetic construct
  source 1..20: mol_type = other DNA
ttgacaagcagctgtcacta

SEQ ID NO: 261109 - DNA, 20 bp, synthetic construct
  source 1..20: mol_type = other DNA
attgacaagcagctgtcact

SEQ ID NO: 261110 - DNA, 20 bp, synthetic construct
  source 1..20: mol_type = other DNA
gattgacaagcagctgtcac

SEQ ID NO: 261111 - DNA, 20 bp, synthetic construct
  source 1..20: mol_type = other DNA
tgattgacaagcagctgtca

SEQ ID NO: 261112 - DNA, 20 bp, synthetic construct
  source 1..20: mol_type = other DNA
gtgattgacaagcagctgtc

SEQ ID NO: 261113 - DNA, 20 bp, synthetic construct
  source 1..20: mol_type = other DNA
cgtgattgacaagcagctgt

SEQ ID NO: 261114 - DNA, 20 bp, synthetic construct
  source 1..20: mol_type = other DNA
ccgtgattgacaagcagctg

SEQ ID NO: 261115 - DNA, 20 bp, synthetic construct
  source 1..20: mol_type = other DNA
accgtgattgacaagcagct

SEQ ID NO: 261116 - DNA, 20 bp, synthetic construct
  source 1..20: mol_type = other DNA
caccgtgattgacaagcagc

SEQ ID NO: 261117 - DNA, 20 bp, synthetic construct
  source 1..20: mol_type = other DNA
gcaccgtgattgacaagcag

SEQ ID NO: 261118 - DNA, 20 bp, synthetic construct
  source 1..20: mol_type = other DNA
tgcaccgtgattgacaagca

SEQ ID NO: 261119 - DNA, 20 bp, synthetic construct
  source 1..20: mol_type = other DNA
gtgcaccgtgattgacaagc

SEQ ID NO: 261120 - DNA, 20 bp, synthetic construct
  source 1..20: mol_type = other DNA
tgtgcaccgtgattgacaag

SEQ ID NO: 261121 - DNA, 20 bp, synthetic construct
  source 1..20: mol_type = other DNA
atgtgcaccgtgattgacaa

SEQ ID NO: 261122 - DNA, 20 bp, synthetic construct
  source 1..20: mol_type = other DNA
aatgtgcaccgtgattgaca

SEQ ID NO: 261123 - DNA, 20 bp, synthetic construct
  source 1..20: mol_type = other DNA
aaatgtgcaccgtgattgac

SEQ ID NO: 261124 - DNA, 20 bp, synthetic construct
  source 1..20: mol_type = other DNA
taaatgtgcaccgtgattga

SEQ ID NO: 261125 - DNA, 20 bp, synthetic construct
  source 1..20: mol_type = other DNA
ctaaatgtgcaccgtgattg

SEQ ID NO: 261126 - DNA, 20 bp, synthetic construct
  source 1..20: mol_type = other DNA
actaaatgtgcaccgtgatt

SEQ ID NO: 261127 - DNA, 20 bp, synthetic construct
  source 1..20: mol_type = other DNA
cactaaatgtgcaccgtgat

SEQ ID NO: 261128 - DNA, 20 bp, synthetic construct
  source 1..20: mol_type = other DNA
gcactaaatgtgcaccgtga

SEQ ID NO: 261129 - DNA, 20 bp, synthetic construct
  source 1..20: mol_type = other DNA
agcactaaatgtgcaccgtg

SEQ ID NO: 261130 - DNA, 20 bp, synthetic construct
  source 1..20: mol_type = other DNA
cagcactaaatgtgcaccgt

SEQ ID NO: 261131 - DNA, 20 bp, synthetic construct
  source 1..20: mol_type = other DNA
ccagcactaaatgtgcaccg

SEQ ID NO: 261132 - DNA, 20 bp, synthetic construct
  source 1..20: mol_type = other DNA
cccagcactaaatgtgcacc

SEQ ID NO: 261133 - DNA, 20 bp, synthetic construct
  source 1..20: mol_type = other DNA
ccccagcactaaatgtgcac

SEQ ID NO: 261134 - DNA, 20 bp, synthetic construct
  source 1..20: mol_type = other DNA
cccccagcactaaatgtgca

SEQ ID NO: 261135 - DNA, 20 bp, synthetic construct
  source 1..20: mol_type = other DNA
gcccccagcactaaatgtgc

SEQ ID NO: 261136 - DNA, 20 bp, synthetic construct
  source 1..20: mol_type = other DNA
tgcccccagcactaaatgtg

SEQ ID NO: 261137 - DNA, 20 bp, synthetic construct
  source 1..20: mol_type = other DNA
ctgcccccagcactaaatgt

SEQ ID NO: 261138 - DNA, 20 bp, synthetic construct
  source 1..20: mol_type = other DNA
cctgcccccagcactaaatg

SEQ ID NO: 261139 - DNA, 20 bp, synthetic construct
  source 1..20: mol_type = other DNA
ccctgcccccagcactaaat

SEQ ID NO: 261140 - DNA, 20 bp, synthetic construct
  source 1..20: mol_type = other DNA
cccctgcccccagcactaaa

SEQ ID NO: 261141 - DNA, 20 bp, synthetic construct
  source 1..20: mol_type = other DNA
ccccctgcccccagcactaa

SEQ ID NO: 261142 - DNA, 20 bp, synthetic construct
  source 1..20: mol_type = other DNA
gccccctgcccccagcacta

SEQ ID NO: 261143 - DNA, 20 bp, synthetic construct
  source 1..20: mol_type = other DNA
tgccccctgcccccagcact

SEQ ID NO: 261144 - DNA, 20 bp, synthetic construct
  source 1..20: mol_type = other DNA
ctgccccctgcccccagcac

SEQ ID NO: 261145 - DNA, 20 bp, synthetic construct
  source 1..20: mol_type = other DNA
cctgccccctgcccccagca

SEQ ID NO: 261146 - DNA, 20 bp, synthetic construct
  source 1..20: mol_type = other DNA
ccctgccccctgcccccagc

SEQ ID NO: 261147 - DNA, 20 bp, synthetic construct
  source 1..20: mol_type = other DNA
tccctgccccctgcccccag

SEQ ID NO: 261148 - DNA, 20 bp, synthetic construct
  source 1..20: mol_type = other DNA
ttccctgccccctgccccca

SEQ ID NO: 261149 - DNA, 20 bp, synthetic construct
  source 1..20: mol_type = other DNA
attccctgccccctgccccc

SEQ ID NO: 261150 - DNA, 20 bp, synthetic construct
  source 1..20: mol_type = other DNA
tattccctgccccctgcccc

SEQ ID NO: 261151 - DNA, 20 bp, synthetic construct
  source 1..20: mol_type = other DNA
gtattccctgccccctgccc

SEQ ID NO: 261152 - DNA, 20 bp, synthetic construct
  source 1..20: mol_type = other DNA
ggtattccctgccccctgcc

SEQ ID NO: 261153 - DNA, 20 bp, synthetic construct
  source 1..20: mol_type = other DNA
tggtattccctgccccctgc

SEQ ID NO: 261154 - DNA, 20 bp, synthetic construct
  source 1..20: mol_type = other DNA
ctggtattccctgccccctg

SEQ ID NO: 261155 - DNA, 20 bp, synthetic construct
  source 1..20: mol_type = other DNA
gctggtattccctgccccct

SEQ ID NO: 261156 - DNA, 20 bp, synthetic construct
  source 1..20: mol_type = other DNA
ggctggtattccctgccccc

SEQ ID NO: 261157 - DNA, 20 bp, synthetic construct
  source 1..20: mol_type = other DNA
aggctggtattccctgcccc

SEQ ID NO: 261158 - DNA, 20 bp, synthetic construct
  source 1..20: mol_type = other DNA
gaggctggtattccctgccc

SEQ ID NO: 261159 - DNA, 20 bp, synthetic construct
  source 1..20: mol_type = other DNA
tgaggctggtattccctgcc

SEQ ID NO: 261160 - DNA, 20 bp, synthetic construct
  source 1..20: mol_type = other DNA
atgaggctggtattccctgc

SEQ ID NO: 261161 - DNA, 20 bp, synthetic construct
  source 1..20: mol_type = other DNA
catgaggctggtattccctg

SEQ ID NO: 261162 - DNA, 20 bp, synthetic construct
  source 1..20: mol_type = other DNA
gcatgaggctggtattccct

SEQ ID NO: 261163 - DNA, 20 bp, synthetic construct
  source 1..20: mol_type = other DNA
tgcatgaggctggtattccc

SEQ ID NO: 261164 - DNA, 20 bp, synthetic construct
  source 1..20: mol_type = other DNA
atgcatgaggctggtattcc

SEQ ID NO: 261165 - DNA, 20 bp, synthetic construct
  source 1..20: mol_type = other DNA
catgcatgaggctggtattc

SEQ ID NO: 261166 - DNA, 20 bp, synthetic construct
  source 1..20: mol_type = other DNA
gcatgcatgaggctggtatt

SEQ ID NO: 261167 - DNA, 20 bp, synthetic construct
  source 1..20: mol_type = other DNA
tgcatgcatgaggctggtat

SEQ ID NO: 261168 - DNA, 20 bp, synthetic construct
  source 1..20: mol_type = other DNA
atgcatgcatgaggctggta

SEQ ID NO: 261169 - DNA, 20 bp, synthetic construct
  source 1..20: mol_type = other DNA
catgcatgcatgaggctggt

SEQ ID NO: 261170 - DNA, 20 bp, synthetic construct
  source 1..20: mol_type = other DNA
gcatgcatgcatgaggctgg

SEQ ID NO: 261171 - DNA, 20 bp, synthetic construct
  source 1..20: mol_type = other DNA
tgcatgcatgcatgaggctg

SEQ ID NO: 261172 - DNA, 20 bp, synthetic construct
  source 1..20: mol_type = other DNA
atgcatgcatgcatgaggct

SEQ ID NO: 261173 - DNA, 20 bp, synthetic construct
  source 1..20: mol_type = other DNA
aatgcatgcatgcatgaggc

SEQ ID NO: 261174 - DNA, 20 bp, synthetic construct
  source 1..20: mol_type = other DNA
gaatgcatgcatgcatgagg

SEQ ID NO: 261175 - DNA, 20 bp, synthetic construct
  source 1..20: mol_type = other DNA
tgaatgcatgcatgcatgag

SEQ ID NO: 261176 - DNA, 20 bp, synthetic construct
  source 1..20: mol_type = other DNA
atgaatgcatgcatgcatga

SEQ ID NO: 261177 - DNA, 20 bp, synthetic construct
  source 1..20: mol_type = other DNA
aatgaatgcatgcatgcatg

SEQ ID NO: 261178 - DNA, 20 bp, synthetic construct
  source 1..20: mol_type = other DNA
aaatgaatgcatgcatgcat

SEQ ID NO: 261179 - DNA, 20 bp, synthetic construct
  source 1..20: mol_type = other DNA
caaatgaatgcatgcatgca

SEQ ID NO: 261180 - DNA, 20 bp, synthetic construct
  source 1..20: mol_type = other DNA
acaaatgaatgcatgcatgc

SEQ ID NO: 261181 - DNA, 20 bp, synthetic construct
  source 1..20: mol_type = other DNA
aacaaatgaatgcatgcatg

SEQ ID NO: 261182 - DNA, 20 bp, synthetic construct
  source 1..20: mol_type = other DNA
gaacaaatgaatgcatgcat

SEQ ID NO: 261183 - DNA, 20 bp, synthetic construct
  source 1..20: mol_type = other DNA
ggaacaaatgaatgcatgca

SEQ ID NO: 261184 - DNA, 20 bp, synthetic construct
  source 1..20: mol_type = other DNA
aggaacaaatgaatgcatgc

SEQ ID NO: 261185 - DNA, 20 bp, synthetic construct
  source 1..20: mol_type = other DNA
aaggaacaaatgaatgcatg

SEQ ID NO: 261186 - DNA, 20 bp, synthetic construct
  source 1..20: mol_type = other DNA
gaaggaacaaatgaatgcat

SEQ ID NO: 261187 - DNA, 20 bp, synthetic construct
  source 1..20: mol_type = other DNA
ggaaggaacaaatgaatgca

SEQ ID NO: 261188 - DNA, 20 bp, synthetic construct
  source 1..20: mol_type = other DNA
aggaaggaacaaatgaatgc

SEQ ID NO: 261189 - DNA, 20 bp, synthetic construct
  source 1..20: mol_type = other DNA
aaggaaggaacaaatgaatg

SEQ ID NO: 261190 - DNA, 20 bp, synthetic construct
  source 1..20: mol_type = other DNA
gaaggaaggaacaaatgaat

SEQ ID NO: 261191 - DNA, 20 bp, synthetic construct
  source 1..20: mol_type = other DNA
tgaaggaaggaacaaatgaa

SEQ ID NO: 261192 - DNA, 20 bp, synthetic construct
  source 1..20: mol_type = other DNA
atgaaggaaggaacaaatga

SEQ ID NO: 261193 - DNA, 20 bp, synthetic construct
  source 1..20: mol_type = other DNA
aatgaaggaaggaacaaatg

SEQ ID NO: 261194 - DNA, 20 bp, synthetic construct
  source 1..20: mol_type = other DNA
gaatgaaggaaggaacaaat

SEQ ID NO: 261195 - DNA, 20 bp, synthetic construct
  source 1..20: mol_type = other DNA
tgaatgaaggaaggaacaaa

SEQ ID NO: 261196 - DNA, 20 bp, synthetic construct
  source 1..20: mol_type = other DNA
atgaatgaaggaaggaacaa

SEQ ID NO: 261197 - DNA, 20 bp, synthetic construct
  source 1..20: mol_type = other DNA
aatgaatgaaggaaggaaca

SEQ ID NO: 261198 - DNA, 20 bp, synthetic construct
  source 1..20: mol_type = other DNA
gaatgaatgaaggaaggaac

SEQ ID NO: 261199 - DNA, 20 bp, synthetic construct
  source 1..20: mol_type = other DNA
tgaatgaatgaaggaaggaa

SEQ ID NO: 261200 - DNA, 20 bp, synthetic construct
  source 1..20: mol_type = other DNA
atgaatgaatgaaggaagga

SEQ ID NO: 261201 - DNA, 20 bp, synthetic construct
  source 1..20: mol_type = other DNA
aatgaatgaatgaaggaagg

SEQ ID NO: 261202 - DNA, 20 bp, synthetic construct
  source 1..20: mol_type = other DNA
gaatgaatgaatgaaggaag

SEQ ID NO: 261203 - DNA, 20 bp, synthetic construct
  source 1..20: mol_type = other DNA
tgaatgaatgaatgaaggaa

SEQ ID NO: 261204 - DNA, 20 bp, synthetic construct
  source 1..20: mol_type = other DNA
ctgaatgaatgaatgaagga

SEQ ID NO: 261205 - DNA, 20 bp, synthetic construct
  source 1..20: mol_type = other DNA
actgaatgaatgaatgaagg

SEQ ID NO: 261206 - DNA, 20 bp, synthetic construct
  source 1..20: mol_type = other DNA
tactgaatgaatgaatgaag

SEQ ID NO: 261207 - DNA, 20 bp, synthetic construct
  source 1..20: mol_type = other DNA
gtactgaatgaatgaatgaa

SEQ ID NO: 261208 - DNA, 20 bp, synthetic construct
  source 1..20: mol_type = other DNA
tgtactgaatgaatgaatga

SEQ ID NO: 261209 - DNA, 20 bp, synthetic construct
  source 1..20: mol_type = other DNA
gtgtactgaatgaatgaatg

SEQ ID NO: 261210 - DNA, 20 bp, synthetic construct
  source 1..20: mol_type = other DNA
tgtgtactgaatgaatgaat

SEQ ID NO: 261211 - DNA, 20 bp, synthetic construct
  source 1..20: mol_type = other DNA
atgtgtactgaatgaatgaa

SEQ ID NO: 261212 - DNA, 20 bp, synthetic construct
  source 1..20: mol_type = other DNA
catgtgtactgaatgaatga

SEQ ID NO: 261213 - DNA, 20 bp, synthetic construct
  source 1..20: mol_type = other DNA
ccatgtgtactgaatgaatg

SEQ ID NO: 261214 - DNA, 20 bp, synthetic construct
  source 1..20: mol_type = other DNA
cccatgtgtactgaatgaat

SEQ ID NO: 261215 - DNA, 20 bp, synthetic construct
  source 1..20: mol_type = other DNA
acccatgtgtactgaatgaa

SEQ ID NO: 261216 - DNA, 20 bp, synthetic construct
  source 1..20: mol_type = other DNA
tacccatgtgtactgaatga

SEQ ID NO: 261217 - DNA, 20 bp, synthetic construct
  source 1..20: mol_type = other DNA
gtacccatgtgtactgaatg

SEQ ID NO: 261218 - DNA, 20 bp, synthetic construct
  source 1..20: mol_type = other DNA
tgtacccatgtgtactgaat

SEQ ID NO: 261219 - DNA, 20 bp, synthetic construct
  source 1..20: mol_type = other DNA
ttgtacccatgtgtactgaa

SEQ ID NO: 261220 - DNA, 20 bp, synthetic construct
  source 1..20: mol_type = other DNA
gttgtacccatgtgtactga

SEQ ID NO: 261221 - DNA, 20 bp, synthetic construct
  source 1..20: mol_type = other DNA
tgttgtacccatgtgtactg

SEQ ID NO: 261222 - DNA, 20 bp, synthetic construct
  source 1..20: mol_type = other DNA
atgttgtacccatgtgtact

SEQ ID NO: 261223 - DNA, 20 bp, synthetic construct
  source 1..20: mol_type = other DNA
gatgttgtacccatgtgtac

SEQ ID NO: 261224 - DNA, 20 bp, synthetic construct
  source 1..20: mol_type = other DNA
ggatgttgtacccatgtgta

SEQ ID NO: 261225 - DNA, 20 bp, synthetic construct
  source 1..20: mol_type = other DNA
gggatgttgtacccatgtgt

SEQ ID NO: 261226 - DNA, 20 bp, synthetic construct
  source 1..20: mol_type = other DNA
agggatgttgtacccatgtg

SEQ ID NO: 261227 - DNA, 20 bp, synthetic construct
  source 1..20: mol_type = other DNA
cagggatgttgtacccatgt

SEQ ID NO: 261228 - DNA, 20 bp, synthetic construct
  source 1..20: mol_type = other DNA
gcagggatgttgtacccatg

SEQ ID NO: 261229 - DNA, 20 bp, synthetic construct
  source 1..20: mol_type = other DNA
ggcagggatgttgtacccat

SEQ ID NO: 261230 - DNA, 20 bp, synthetic construct
  source 1..20: mol_type = other DNA
gggcagggatgttgtaccca

SEQ ID NO: 261231 - DNA, 20 bp, synthetic construct
  source 1..20: mol_type = other DNA
agggcagggatgttgtaccc

SEQ ID NO: 261232 - DNA, 20 bp, synthetic construct
  source 1..20: mol_type = other DNA
cagggcagggatgttgtacc

SEQ ID NO: 261233 - DNA, 20 bp, synthetic construct
  source 1..20: mol_type = other DNA
ccagggcagggatgttgtac

SEQ ID NO: 261234 - DNA, 20 bp, synthetic construct
  source 1..20: mol_type = other DNA
tccagggcagggatgttgta

SEQ ID NO: 261235 - DNA, 20 bp, synthetic construct
  source 1..20: mol_type = other DNA
ctccagggcagggatgttgt

SEQ ID NO: 261236 - DNA, 20 bp, synthetic construct
  source 1..20: mol_type = other DNA
actccagggcagggatgttg

SEQ ID NO: 261237 - DNA, 20 bp, synthetic construct
  source 1..20: mol_type = other DNA
aactccagggcagggatgtt

SEQ ID NO: 261238 - DNA, 20 bp, synthetic construct
  source 1..20: mol_type = other DNA
caactccagggcagggatgt

SEQ ID NO: 261239 - DNA, 20 bp, synthetic construct
  source 1..20: mol_type = other DNA
gcaactccagggcagggatg

SEQ ID NO: 261240 - DNA, 20 bp, synthetic construct
  source 1..20: mol_type = other DNA
ggcaactccagggcagggat

SEQ ID NO: 261241 - DNA, 20 bp, synthetic construct
  source 1..20: mol_type = other DNA
gggcaactccagggcaggga

SEQ ID NO: 261242 - DNA, 20 bp, synthetic construct
  source 1..20: mol_type = other DNA
tgggcaactccagggcaggg

SEQ ID NO: 261243 - DNA, 20 bp, synthetic construct
  source 1..20: mol_type = other DNA
ctgggcaactccagggcagg

SEQ ID NO: 261244 - DNA, 20 bp, synthetic construct
  source 1..20: mol_type = other DNA
tctgggcaactccagggcag

SEQ ID NO: 261245 - DNA, 20 bp, synthetic construct
  source 1..20: mol_type = other DNA
ctctgggcaactccagggca

SEQ ID NO: 261246 - DNA, 20 bp, synthetic construct
  source 1..20: mol_type = other DNA
actctgggcaactccagggc

SEQ ID NO: 261247 - DNA, 20 bp, synthetic construct
  source 1..20: mol_type = other DNA
gactctgggcaactccaggg

SEQ ID NO: 261248 - DNA, 20 bp, synthetic construct
  source 1..20: mol_type = other DNA
agactctgggcaactccagg

SEQ ID NO: 261249 - DNA, 20 bp, synthetic construct
  source 1..20: mol_type = other DNA
tagactctgggcaactccag

SEQ ID NO: 261250 - DNA, 20 bp, synthetic construct
  source 1..20: mol_type = other DNA
ctagactctgggcaactcca

SEQ ID NO: 261251 - DNA, 20 bp, synthetic construct
  source 1..20: mol_type = other DNA
cctagactctgggcaactcc

SEQ ID NO: 261252 - DNA, 20 bp, synthetic construct
  source 1..20: mol_type = other DNA
ccctagactctgggcaactc

SEQ ID NO: 261253 - DNA, 20 bp, synthetic construct
  source 1..20: mol_type = other DNA
tccctagactctgggcaact

SEQ ID NO: 261254 - DNA, 20 bp, synthetic construct
  source 1..20: mol_type = other DNA
ctccctagactctgggcaac

SEQ ID NO: 261255 - DNA, 20 bp, synthetic construct
  source 1..20: mol_type = other DNA
cctccctagactctgggcaa

SEQ ID NO: 261256 - DNA, 20 bp, synthetic construct
  source 1..20: mol_type = other DNA
ccctccctagactctgggca

SEQ ID NO: 261257 - DNA, 20 bp, synthetic construct
  source 1..20: mol_type = other DNA
cccctccctagactctgggc

SEQ ID NO: 261258 - DNA, 20 bp, synthetic construct
  source 1..20: mol_type = other DNA
tcccctccctagactctggg

SEQ ID NO: 261259 - DNA, 20 bp, synthetic construct
  source 1..20: mol_type = other DNA
ttcccctccctagactctgg

SEQ ID NO: 261260 - DNA, 20 bp, synthetic construct
  source 1..20: mol_type = other DNA
tttcccctccctagactctg

SEQ ID NO: 261261 - DNA, 20 bp, synthetic construct
  source 1..20: mol_type = other DNA
ctttcccctccctagactct

SEQ ID NO: 261262 - DNA, 20 bp, synthetic construct
  source 1..20: mol_type = other DNA
tctttcccctccctagactc

SEQ ID NO: 261263 - DNA, 20 bp, synthetic construct
  source 1..20: mol_type = other DNA
atctttcccctccctagact

SEQ ID NO: 261264 - DNA, 20 bp, synthetic construct
  source 1..20: mol_type = other DNA
gatctttcccctccctagac

SEQ ID NO: 261265 - DNA, 20 bp, synthetic construct
  source 1..20: mol_type = other DNA
agatctttcccctccctaga

SEQ ID NO: 261266 - DNA, 20 bp, synthetic construct
  source 1..20: mol_type = other DNA
tagatctttcccctccctag

SEQ ID NO: 261267 - DNA, 20 bp, synthetic construct
  source 1..20: mol_type = other DNA
atagatctttcccctcccta

SEQ ID NO: 261268 - DNA, 20 bp, synthetic construct
  source 1..20: mol_type = other DNA
aatagatctttcccctccct

SEQ ID NO: 261269 - DNA, 20 bp, synthetic construct
  source 1..20: mol_type = other DNA
taatagatctttcccctccc

SEQ ID NO: 261270 - DNA, 20 bp, synthetic construct
  source 1..20: mol_type = other DNA
gtaatagatctttcccctcc

SEQ ID NO: 261271 - DNA, 20 bp, synthetic construct
  source 1..20: mol_type = other DNA
ggtaatagatctttcccctc

SEQ ID NO: 261272 - DNA, 20 bp, synthetic construct
  source 1..20: mol_type = other DNA
gggtaatagatctttcccct

SEQ ID NO: 261273 - DNA, 20 bp, synthetic construct
  source 1..20: mol_type = other DNA
agggtaatagatctttcccc

SEQ ID NO: 261274 - DNA, 20 bp, synthetic construct
  source 1..20: mol_type = other DNA
cagggtaatagatctttccc

SEQ ID NO: 261275 - DNA, 20 bp, synthetic construct
  source 1..20: mol_type = other DNA
ccagggtaatagatctttcc

SEQ ID NO: 261276 - DNA, 20 bp, synthetic construct
  source 1..20: mol_type = other DNA
cccagggtaatagatctttc

SEQ ID NO: 261277 - DNA, 20 bp, synthetic construct
  source 1..20: mol_type = other DNA
gcccagggtaatagatcttt

SEQ ID NO: 261278 - DNA, 20 bp, synthetic construct
  source 1..20: mol_type = other DNA
ggcccagggtaatagatctt

SEQ ID NO: 261279 - DNA, 20 bp, synthetic construct
  source 1..20: mol_type = other DNA
aggcccagggtaatagatct

SEQ ID NO: 261280 - DNA, 20 bp, synthetic construct
  source 1..20: mol_type = other DNA
gaggcccagggtaatagatc

SEQ ID NO: 261281 - DNA, 20 bp, synthetic construct
  source 1..20: mol_type = other DNA
cgaggcccagggtaatagat

SEQ ID NO: 261282 - DNA, 20 bp, synthetic construct
  source 1..20: mol_type = other DNA
ccgaggcccagggtaataga

SEQ ID NO: 261283 - DNA, 20 bp, synthetic construct
  source 1..20: mol_type = other DNA
gccgaggcccagggtaatag

SEQ ID NO: 261284 - DNA, 20 bp, synthetic construct
  source 1..20: mol_type = other DNA
ggccgaggcccagggtaata

SEQ ID NO: 261285 - DNA, 20 bp, synthetic construct
  source 1..20: mol_type = other DNA
tggccgaggcccagggtaat

SEQ ID NO: 261286 - DNA, 20 bp, synthetic construct
  source 1..20: mol_type = other DNA
ctggccgaggcccagggtaa

SEQ ID NO: 261287 - DNA, 20 bp, synthetic construct
  source 1..20: mol_type = other DNA
gctggccgaggcccagggta

SEQ ID NO: 261288 - DNA, 20 bp, synthetic construct
  source 1..20: mol_type = other DNA
agctggccgaggcccagggt

SEQ ID NO: 261289 - DNA, 20 bp, synthetic construct
  source 1..20: mol_type = other DNA
cagctggccgaggcccaggg

SEQ ID NO: 261290 - DNA, 20 bp, synthetic construct
  source 1..20: mol_type = other DNA
ccagctggccgaggcccagg

SEQ ID NO: 261291 - DNA, 20 bp, synthetic construct
  source 1..20: mol_type = other DNA
cccagctggccgaggcccag

SEQ ID NO: 261292 - DNA, 20 bp, synthetic construct
  source 1..20: mol_type = other DNA
ccccagctggccgaggccca

SEQ ID NO: 261293 - DNA, 20 bp, synthetic construct
  source 1..20: mol_type = other DNA
tccccagctggccgaggccc

SEQ ID NO: 261294 - DNA, 20 bp, synthetic construct
  source 1..20: mol_type = other DNA
ctccccagctggccgaggcc

SEQ ID NO: 261295 - DNA, 20 bp, synthetic construct
  source 1..20: mol_type = other DNA
actccccagctggccgaggc

SEQ ID NO: 261296 - DNA, 20 bp, synthetic construct
  source 1..20: mol_type = other DNA
cactccccagctggccgagg

SEQ ID NO: 261297 - DNA, 20 bp, synthetic construct
  source 1..20: mol_type = other DNA
gcactccccagctggccgag

SEQ ID NO: 261298 - DNA, 20 bp, synthetic construct
  source 1..20: mol_type = other DNA
agcactccccagctggccga

SEQ ID NO: 261299 - DNA, 20 bp, synthetic construct
  source 1..20: mol_type = other DNA
cagcactccccagctggccg

SEQ ID NO: 261300 - DNA, 20 bp, synthetic construct
  source 1..20: mol_type = other DNA
gcagcactccccagctggcc

SEQ ID NO: 261301 - DNA, 20 bp, synthetic construct
  source 1..20: mol_type = other DNA
agcagcactccccagctggc

SEQ ID NO: 261302 - DNA, 20 bp, synthetic construct
  source 1..20: mol_type = other DNA
cagcagcactccccagctgg

SEQ ID NO: 261303 - DNA, 20 bp, synthetic construct
  source 1..20: mol_type = other DNA
ccagcagcactccccagctg

SEQ ID NO: 261304 - DNA, 20 bp, synthetic construct
  source 1..20: mol_type = other DNA
accagcagcactccccagct

SEQ ID NO: 261305 - DNA, 20 bp, synthetic construct
  source 1..20: mol_type = other DNA
caccagcagcactccccagc

SEQ ID NO: 261306 - DNA, 20 bp, synthetic construct
  source 1..20: mol_type = other DNA
ccaccagcagcactccccag

SEQ ID NO: 261307 - DNA, 20 bp, synthetic construct
  source 1..20: mol_type = other DNA
tccaccagcagcactcccca

SEQ ID NO: 261308 - DNA, 20 bp, synthetic construct
  source 1..20: mol_type = other DNA
ctccaccagcagcactcccc

SEQ ID NO: 261309 - DNA, 20 bp, synthetic construct
  source 1..20: mol_type = other DNA
tctccaccagcagcactccc

SEQ ID NO: 261310 - DNA, 20 bp, synthetic construct
  source 1..20: mol_type = other DNA
ctctccaccagcagcactcc

SEQ ID NO: 261311 - DNA, 20 bp, synthetic construct
  source 1..20: mol_type = other DNA
cctctccaccagcagcactc

SEQ ID NO: 261312 - DNA, 20 bp, synthetic construct
  source 1..20: mol_type = other DNA
ccctctccaccagcagcact

SEQ ID NO: 261313 - DNA, 20 bp, synthetic construct
  source 1..20: mol_type = other DNA
cccctctccaccagcagcac

SEQ ID NO: 261314 - DNA, 20 bp, synthetic construct
  source 1..20: mol_type = other DNA
gcccctctccaccagcagca

SEQ ID NO: 261315 - DNA, 20 bp, synthetic construct
  source 1..20: mol_type = other DNA
ggcccctctccaccagcagc

SEQ ID NO: 261316 - DNA, 20 bp, synthetic construct
  source 1..20: mol_type = other DNA
cggcccctctccaccagcag

SEQ ID NO: 261317 - DNA, 20 bp, synthetic construct
  source 1..20: mol_type = other DNA
acggcccctctccaccagca

SEQ ID NO: 261318 - DNA, 20 bp, synthetic construct
  source 1..20: mol_type = other DNA
cacggcccctctccaccagc

SEQ ID NO: 261319 - DNA, 20 bp, synthetic construct
  source 1..20: mol_type = other DNA
acacggcccctctccaccag

SEQ ID NO: 261320 - DNA, 20 bp, synthetic construct
  source 1..20: mol_type = other DNA
cacacggcccctctccacca

SEQ ID NO: 261321 - DNA, 20 bp, synthetic construct
  source 1..20: mol_type = other DNA
gcacacggcccctctccacc

SEQ ID NO: 261322 - DNA, 20 bp, synthetic construct
  source 1..20: mol_type = other DNA
tgcacacggcccctctccac

SEQ ID NO: 261323 - DNA, 20 bp, synthetic construct
  source 1..20: mol_type = other DNA
ctgcacacggcccctctcca

SEQ ID NO: 261324 - DNA, 20 bp, synthetic construct
  source 1..20: mol_type = other DNA
gctgcacacggcccctctcc

SEQ ID NO: 261325 - DNA, 20 bp, synthetic construct
  source 1..20: mol_type = other DNA
cgctgcacacggcccctctc

SEQ ID NO: 261326 - DNA, 20 bp, synthetic construct
  source 1..20: mol_type = other DNA
tcgctgcacacggcccctct

SEQ ID NO: 261327 - DNA, 20 bp, synthetic construct
  source 1..20: mol_type = other DNA
ctcgctgcacacggcccctc

SEQ ID NO: 261328 - DNA, 20 bp, synthetic construct
  source 1..20: mol_type = other DNA
cctcgctgcacacggcccct

SEQ ID NO: 261329 - DNA, 20 bp, synthetic construct
  source 1..20: mol_type = other DNA
ccctcgctgcacacggcccc

SEQ ID NO: 261330 - DNA, 20 bp, synthetic construct
  source 1..20: mol_type = other DNA
tccctcgctgcacacggccc

SEQ ID NO: 261331 - DNA, 20 bp, synthetic construct
  source 1..20: mol_type = other DNA
ttccctcgctgcacacggcc

SEQ ID NO: 261332 - DNA, 20 bp, synthetic construct
  source 1..20: mol_type = other DNA
cttccctcgctgcacacggc

SEQ ID NO: 261333 - DNA, 20 bp, synthetic construct
  source 1..20: mol_type = other DNA
ccttccctcgctgcacacgg

SEQ ID NO: 261334 - DNA, 20 bp, synthetic construct
  source 1..20: mol_type = other DNA
tccttccctcgctgcacacg

SEQ ID NO: 261335 - DNA, 20 bp, synthetic construct
  source 1..20: mol_type = other DNA
ctccttccctcgctgcacac

SEQ ID NO: 261336 - DNA, 20 bp, synthetic construct
  source 1..20: mol_type = other DNA
cctccttccctcgctgcaca

SEQ ID NO: 261337 - DNA, 20 bp, synthetic construct
  source 1..20: mol_type = other DNA
tcctccttccctcgctgcac

SEQ ID NO: 261338 - DNA, 20 bp, synthetic construct
  source 1..20: mol_type = other DNA
ctcctccttccctcgctgca

SEQ ID NO: 261339 - DNA, 20 bp, synthetic construct
  source 1..20: mol_type = other DNA
actcctccttccctcgctgc

SEQ ID NO: 261340 - DNA, 20 bp, synthetic construct
  source 1..20: mol_type = other DNA
gactcctccttccctcgctg

SEQ ID NO: 261341 - DNA, 20 bp, synthetic construct
  source 1..20: mol_type = other DNA
cgactcctccttccctcgct

SEQ ID NO: 261342 - DNA, 20 bp, synthetic construct
  source 1..20: mol_type = other DNA
acgactcctccttccctcgc

SEQ ID NO: 261343 - DNA, 20 bp, synthetic construct
  source 1..20: mol_type = other DNA
gacgactcctccttccctcg

SEQ ID NO: 261344 - DNA, 20 bp, synthetic construct
  source 1..20: mol_type = other DNA
tgacgactcctccttccctc

SEQ ID NO: 261345 - DNA, 20 bp, synthetic construct
  source 1..20: mol_type = other DNA
ttgacgactcctccttccct

SEQ ID NO: 261346 - DNA, 20 bp, synthetic construct
  source 1..20: mol_type = other DNA
attgacgactcctccttccc

SEQ ID NO: 261347 - DNA, 20 bp, synthetic construct
  source 1..20: mol_type = other DNA
tattgacgactcctccttcc

SEQ ID NO: 261348 - DNA, 20 bp, synthetic construct
  source 1..20: mol_type = other DNA
gtattgacgactcctccttc

SEQ ID NO: 261349 - DNA, 20 bp, synthetic construct
  source 1..20: mol_type = other DNA
ggtattgacgactcctcctt

SEQ ID NO: 261350 - DNA, 20 bp, synthetic construct
  source 1..20: mol_type = other DNA
gggtattgacgactcctcct

SEQ ID NO: 261351 - DNA, 20 bp, synthetic construct
  source 1..20: mol_type = other DNA
ggggtattgacgactcctcc

SEQ ID NO: 261352 - DNA, 20 bp, synthetic construct
  source 1..20: mol_type = other DNA
gggggtattgacgactcctc

SEQ ID NO: 261353 - DNA, 20 bp, synthetic construct
  source 1..20: mol_type = other DNA
tgggggtattgacgactcct

SEQ ID NO: 261354 - DNA, 20 bp, synthetic construct
  source 1..20: mol_type = other DNA
gtgggggtattgacgactcc

SEQ ID NO: 261355 - DNA, 20 bp, synthetic construct
  source 1..20: mol_type = other DNA
ggtgggggtattgacgactc

SEQ ID NO: 261356 - DNA, 20 bp, synthetic construct
  source 1..20: mol_type = other DNA
gggtgggggtattgacgact

SEQ ID NO: 261357 - DNA, 20 bp, synthetic construct
  source 1..20: mol_type = other DNA
ggggtgggggtattgacgac

SEQ ID NO: 261358 - DNA, 20 bp, synthetic construct
  source 1..20: mol_type = other DNA
tggggtgggggtattgacga

SEQ ID NO: 261359 - DNA, 20 bp, synthetic construct
  source 1..20: mol_type = other DNA
ctggggtgggggtattgacg

SEQ ID NO: 261360 - DNA, 20 bp, synthetic construct
  source 1..20: mol_type = other DNA
gctggggtgggggtattgac

SEQ ID NO: 261361 - DNA, 20 bp, synthetic construct
  source 1..20: mol_type = other DNA
agctggggtgggggtattga

SEQ ID NO: 261362 - DNA, 20 bp, synthetic construct
  source 1..20: mol_type = other DNA
aagctggggtgggggtattg

SEQ ID NO: 261363 - DNA, 20 bp, synthetic construct
  source 1..20: mol_type = other DNA
aaagctggggtgggggtatt

SEQ ID NO: 261364 - DNA, 20 bp, synthetic construct
  source 1..20: mol_type = other DNA
caaagctggggtgggggtat

SEQ ID NO: 261365 - DNA, 20 bp, synthetic construct
  source 1..20: mol_type = other DNA
gcaaagctggggtgggggta

SEQ ID NO: 261366 - DNA, 20 bp, synthetic construct
  source 1..20: mol_type = other DNA
agcaaagctggggtgggggt

SEQ ID NO: 261367 - DNA, 20 bp, synthetic construct
  source 1..20: mol_type = other DNA
aagcaaagctggggtggggg

SEQ ID NO: 261368 - DNA, 20 bp, synthetic construct
  source 1..20: mol_type = other DNA
aaagcaaagctggggtgggg

SEQ ID NO: 261369 - DNA, 20 bp, synthetic construct
  source 1..20: mol_type = other DNA
gaaagcaaagctggggtggg

SEQ ID NO: 261370 - DNA, 20 bp, synthetic construct
  source 1..20: mol_type = other DNA
agaaagcaaagctggggtgg

SEQ ID NO: 261371 - DNA, 20 bp, synthetic construct
  source 1..20: mol_type = other DNA
aagaaagcaaagctggggtg

SEQ ID NO: 261372 - DNA, 20 bp, synthetic construct
  source 1..20: mol_type = other DNA
caagaaagcaaagctggggt

SEQ ID NO: 261373 - DNA, 20 bp, synthetic construct
  source 1..20: mol_type = other DNA
acaagaaagcaaagctgggg

SEQ ID NO: 261374 - DNA, 20 bp, synthetic construct
  source 1..20: mol_type = other DNA
gacaagaaagcaaagctggg

SEQ ID NO: 261375 - DNA, 20 bp, synthetic construct
  source 1..20: mol_type = other DNA
tgacaagaaagcaaagctgg

SEQ ID NO: 261376 - DNA, 20 bp, synthetic construct
  source 1..20: mol_type = other DNA
atgacaagaaagcaaagctg

SEQ ID NO: 261377 - DNA, 20 bp, synthetic construct
  source 1..20: mol_type = other DNA
gatgacaagaaagcaaagct

SEQ ID NO: 261378 - DNA, 20 bp, synthetic construct
  source 1..20: mol_type = other DNA
tgatgacaagaaagcaaagc

SEQ ID NO: 261379 - DNA, 20 bp, synthetic construct
  source 1..20: mol_type = other DNA
ctgatgacaagaaagcaaag

SEQ ID NO: 261380 - DNA, 20 bp, synthetic construct
  source 1..20: mol_type = other DNA
gctgatgacaagaaagcaaa

SEQ ID NO: 261381 - DNA, 20 bp, synthetic construct
  source 1..20: mol_type = other DNA
ggctgatgacaagaaagcaa

SEQ ID NO: 261382 - DNA, 20 bp, synthetic construct
  source 1..20: mol_type = other DNA
gggctgatgacaagaaagca

SEQ ID NO: 261383 - DNA, 20 bp, synthetic construct
  source 1..20: mol_type = other DNA
ggggctgatgacaagaaagc

SEQ ID NO: 261384 - DNA, 20 bp, synthetic construct
  source 1..20: mol_type = other DNA
tggggctgatgacaagaaag

SEQ ID NO: 261385 - DNA, 20 bp, synthetic construct
  source 1..20: mol_type = other DNA
ctggggctgatgacaagaaa

SEQ ID NO: 261386 - DNA, 20 bp, synthetic construct
  source 1..20: mol_type = other DNA
cctggggctgatgacaagaa

SEQ ID NO: 261387 - DNA, 20 bp, synthetic construct
  source 1..20: mol_type = other DNA
ccctggggctgatgacaaga

SEQ ID NO: 261388 - DNA, 20 bp, synthetic construct
  source 1..20: mol_type = other DNA
gccctggggctgatgacaag

SEQ ID NO: 261389 - DNA, 20 bp, synthetic construct
  source 1..20: mol_type = other DNA
ggccctggggctgatgacaa

SEQ ID NO: 261390 - DNA, 20 bp, synthetic construct
  source 1..20: mol_type = other DNA
gggccctggggctgatgaca

SEQ ID NO: 261391 - DNA, 20 bp, synthetic construct
  source 1..20: mol_type = other DNA
ggggccctggggctgatgac

SEQ ID NO: 261392 - DNA, 20 bp, synthetic construct
  source 1..20: mol_type = other DNA
tggggccctggggctgatga

SEQ ID NO: 261393 - DNA, 20 bp, synthetic construct
  source 1..20: mol_type = other DNA
ctggggccctggggctgatg

SEQ ID NO: 261394 - DNA, 20 bp, synthetic construct
  source 1..20: mol_type = other DNA
gctggggccctggggctgat

SEQ ID NO: 261395 - DNA, 20 bp, synthetic construct
  source 1..20: mol_type = other DNA
ggctggggccctggggctga

SEQ ID NO: 261396 - DNA, 20 bp, synthetic construct
  source 1..20: mol_type = other DNA
aggctggggccctggggctg

SEQ ID NO: 261397 - DNA, 20 bp, synthetic construct
  source 1..20: mol_type = other DNA
caggctggggccctggggct

SEQ ID NO: 261398 - DNA, 20 bp, synthetic construct
  source 1..20: mol_type = other DNA
acaggctggggccctggggc

SEQ ID NO: 261399 - DNA, 20 bp, synthetic construct
  source 1..20: mol_type = other DNA
cacaggctggggccctgggg

SEQ ID NO: 261400 - DNA, 20 bp, synthetic construct
  source 1..20: mol_type = other DNA
acacaggctggggccctggg

SEQ ID NO: 261401 - DNA, 20 bp, synthetic construct
  source 1..20: mol_type = other DNA
gacacaggctggggccctgg

SEQ ID NO: 261402 - DNA, 20 bp, synthetic construct
  source 1..20: mol_type = other DNA
ggacacaggctggggccctg

SEQ ID NO: 261403 - DNA, 20 bp, synthetic construct
  source 1..20: mol_type = other DNA
gggacacaggctggggccct

SEQ ID NO: 261404 - DNA, 20 bp, synthetic construct
  source 1..20: mol_type = other DNA
agggacacaggctggggccc

SEQ ID NO: 261405 - DNA, 20 bp, synthetic construct
  source 1..20: mol_type = other DNA
gagggacacaggctggggcc

SEQ ID NO: 261406 - DNA, 20 bp, synthetic construct
  source 1..20: mol_type = other DNA
ggagggacacaggctggggc

SEQ ID NO: 261407 - DNA, 20 bp, synthetic construct
  source 1..20: mol_type = other DNA
aggagggacacaggctgggg

SEQ ID NO: 261408 - DNA, 20 bp, synthetic construct
  source 1..20: mol_type = other DNA
gaggagggacacaggctggg

SEQ ID NO: 261409 - DNA, 20 bp, synthetic construct
  source 1..20: mol_type = other DNA
agaggagggacacaggctgg

SEQ ID NO: 261410 - DNA, 20 bp, synthetic construct
  source 1..20: mol_type = other DNA
gagaggagggacacaggctg

SEQ ID NO: 261411 - DNA, 20 bp, synthetic construct
  source 1..20: mol_type = other DNA
ggagaggagggacacaggct

SEQ ID NO: 261412 - DNA, 20 bp, synthetic construct
  source 1..20: mol_type = other DNA
gggagaggagggacacaggc

SEQ ID NO: 261413 - DNA, 20 bp, synthetic construct
  source 1..20: mol_type = other DNA
tgggagaggagggacacagg

SEQ ID NO: 261414 - DNA, 20 bp, synthetic construct
  source 1..20: mol_type = other DNA
atgggagaggagggacacag

SEQ ID NO: 261415 - DNA, 20 bp, synthetic construct
  source 1..20: mol_type = other DNA
aatgggagaggagggacaca

SEQ ID NO: 261416 - DNA, 20 bp, synthetic construct
  source 1..20: mol_type = other DNA
caatgggagaggagggacac

SEQ ID NO: 261417 - DNA, 20 bp, synthetic construct
  source 1..20: mol_type = other DNA
gcaatgggagaggagggaca

SEQ ID NO: 261418 - DNA, 20 bp, synthetic construct
  source 1..20: mol_type = other DNA
agcaatgggagaggagggac

SEQ ID NO: 261419 - DNA, 20 bp, synthetic construct
  source 1..20: mol_type = other DNA
tagcaatgggagaggaggga

SEQ ID NO: 261420 - DNA, 20 bp, synthetic construct
  source 1..20: mol_type = other DNA
gtagcaatgggagaggaggg

SEQ ID NO: 261421 - DNA, 20 bp, synthetic construct
  source 1..20: mol_type = other DNA
agtagcaatgggagaggagg

SEQ ID NO: 261422 - DNA, 20 bp, synthetic construct
  source 1..20: mol_type = other DNA
aagtagcaatgggagaggag

SEQ ID NO: 261423 - DNA, 20 bp, synthetic construct
  source 1..20: mol_type = other DNA
gaagtagcaatgggagagga

SEQ ID NO: 261424 - DNA, 20 bp, synthetic construct
  source 1..20: mol_type = other DNA
tgaagtagcaatgggagagg

SEQ ID NO: 261425 - DNA, 20 bp, synthetic construct
  source 1..20: mol_type = other DNA
atgaagtagcaatgggagag

SEQ ID NO: 261426 - DNA, 20 bp, synthetic construct
  source 1..20: mol_type = other DNA
gatgaagtagcaatgggaga

SEQ ID NO: 261427 - DNA, 20 bp, synthetic construct
  source 1..20: mol_type = other DNA
agatgaagtagcaatgggag

SEQ ID NO: 261428 - DNA, 20 bp, synthetic construct
  source 1..20: mol_type = other DNA
gagatgaagtagcaatggga

SEQ ID NO: 261429 - DNA, 20 bp, synthetic construct
  source 1..20: mol_type = other DNA
ggagatgaagtagcaatggg

SEQ ID NO: 261430 - DNA, 20 bp, synthetic construct
  source 1..20: mol_type = other DNA
aggagatgaagtagcaatgg

SEQ ID NO: 261431 - DNA, 20 bp, synthetic construct
  source 1..20: mol_type = other DNA
caggagatgaagtagcaatg

SEQ ID NO: 261432 - DNA, 20 bp, synthetic construct
  source 1..20: mol_type = other DNA
ccaggagatgaagtagcaat

SEQ ID NO: 261433 - DNA, 20 bp, synthetic construct
  source 1..20: mol_type = other DNA
cccaggagatgaagtagcaa

SEQ ID NO: 261434 - DNA, 20 bp, synthetic construct
  source 1..20: mol_type = other DNA
acccaggagatgaagtagca

SEQ ID NO: 261435 - DNA, 20 bp, synthetic construct
  source 1..20: mol_type = other DNA
gacccaggagatgaagtagc

SEQ ID NO: 261436 - DNA, 20 bp, synthetic construct
  source 1..20: mol_type = other DNA
ggacccaggagatgaagtag

SEQ ID NO: 261437 - DNA, 20 bp, synthetic construct
  source 1..20: mol_type = other DNA
aggacccaggagatgaagta

SEQ ID NO: 261438 - DNA, 20 bp, synthetic construct
  source 1..20: mol_type = other DNA
gaggacccaggagatgaagt

SEQ ID NO: 261439 - DNA, 20 bp, synthetic construct
  source 1..20: mol_type = other DNA
ggaggacccaggagatgaag

SEQ ID NO: 261440 - DNA, 20 bp, synthetic construct
  source 1..20: mol_type = other DNA
aggaggacccaggagatgaa

SEQ ID NO: 261441 - DNA, 20 bp, synthetic construct
  source 1..20: mol_type = other DNA
aaggaggacccaggagatga

SEQ ID NO: 261442 - DNA, 20 bp, synthetic construct
  source 1..20: mol_type = other DNA
taaggaggacccaggagatg

SEQ ID NO: 261443 - DNA, 20 bp, synthetic construct
  source 1..20: mol_type = other DNA
gtaaggaggacccaggagat

SEQ ID NO: 261444 - DNA, 20 bp, synthetic construct
  source 1..20: mol_type = other DNA
ggtaaggaggacccaggaga

SEQ ID NO: 261445 - DNA, 20 bp, synthetic construct
  source 1..20: mol_type = other DNA
tggtaaggaggacccaggag

SEQ ID NO: 261446 - DNA, 20 bp, synthetic construct
  source 1..20: mol_type = other DNA
ttggtaaggaggacccagga

SEQ ID NO: 261447 - DNA, 20 bp, synthetic construct
  source 1..20: mol_type = other DNA
cttggtaaggaggacccagg

SEQ ID NO: 261448 - DNA, 20 bp, synthetic construct
  source 1..20: mol_type = other DNA
gcttggtaaggaggacccag

SEQ ID NO: 261449 - DNA, 20 bp, synthetic construct
  source 1..20: mol_type = other DNA
ggcttggtaaggaggaccca

SEQ ID NO: 261450 - DNA, 20 bp, synthetic construct
  source 1..20: mol_type = other DNA
aggcttggtaaggaggaccc

SEQ ID NO: 261451 - DNA, 20 bp, synthetic construct
  source 1..20: mol_type = other DNA
caggcttggtaaggaggacc

SEQ ID NO: 261452 - DNA, 20 bp, synthetic construct
  source 1..20: mol_type = other DNA
tcaggcttggtaaggaggac

SEQ ID NO: 261453 - DNA, 20 bp, synthetic construct
  source 1..20: mol_type = other DNA
gtcaggcttggtaaggagga

SEQ ID NO: 261454 - DNA, 20 bp, synthetic construct
  source 1..20: mol_type = other DNA
ggtcaggcttggtaaggagg

SEQ ID NO: 261455 - DNA, 20 bp, synthetic construct
  source 1..20: mol_type = other DNA
tggtcaggcttggtaaggag

SEQ ID NO: 261456 - DNA, 20 bp, synthetic construct
  source 1..20: mol_type = other DNA
gtggtcaggcttggtaagga

SEQ ID NO: 261457 - DNA, 20 bp, synthetic construct
  source 1..20: mol_type = other DNA
tgtggtcaggcttggtaagg

SEQ ID NO: 261458 - DNA, 20 bp, synthetic construct
  source 1..20: mol_type = other DNA
gtgtggtcaggcttggtaag

SEQ ID NO: 261459 - DNA, 20 bp, synthetic construct
  source 1..20: mol_type = other DNA
tgtgtggtcaggcttggtaa

SEQ ID NO: 261460 - DNA, 20 bp, synthetic construct
  source 1..20: mol_type = other DNA
ctgtgtggtcaggcttggta

SEQ ID NO: 261461 - DNA, 20 bp, synthetic construct
  source 1..20: mol_type = other DNA
tctgtgtggtcaggcttggt

SEQ ID NO: 261462 - DNA, 20 bp, synthetic construct
  source 1..20: mol_type = other DNA
ctctgtgtggtcaggcttgg

SEQ ID NO: 261463 - DNA, 20 bp, synthetic construct
  source 1..20: mol_type = other DNA
cctctgtgtggtcaggcttg

SEQ ID NO: 261464 - DNA, 20 bp, synthetic construct
  source 1..20: mol_type = other DNA
ccctctgtgtggtcaggctt

SEQ ID NO: 261465 - DNA, 20 bp, synthetic construct
  source 1..20: mol_type = other DNA
gccctctgtgtggtcaggct

SEQ ID NO: 261466 - DNA, 20 bp, synthetic construct
  source 1..20: mol_type = other DNA
ggccctctgtgtggtcaggc

SEQ ID NO: 261467 - DNA, 20 bp, synthetic construct
  source 1..20: mol_type = other DNA
aggccctctgtgtggtcagg

SEQ ID NO: 261468 - DNA, 20 bp, synthetic construct
  source 1..20: mol_type = other DNA
aaggccctctgtgtggtcag

SEQ ID NO: 261469 - DNA, 20 bp, synthetic construct
  source 1..20: mol_type = other DNA
caaggccctctgtgtggtca

SEQ ID NO: 261470 - DNA, 20 bp, synthetic construct
  source 1..20: mol_type = other DNA
ccaaggccctctgtgtggtc

SEQ ID NO: 261471 - DNA, 20 bp, synthetic construct
  source 1..20: mol_type = other DNA
gccaaggccctctgtgtggt

SEQ ID NO: 261472 - DNA, 20 bp, synthetic construct
  source 1..20: mol_type = other DNA
ggccaaggccctctgtgtgg

SEQ ID NO: 261473 - DNA, 20 bp, synthetic construct
  source 1..20: mol_type = other DNA
cggccaaggccctctgtgtg

SEQ ID NO: 261474 - DNA, 20 bp, synthetic construct
  source 1..20: mol_type = other DNA
gcggccaaggccctctgtgt

SEQ ID NO: 261475 - DNA, 20 bp, synthetic construct
  source 1..20: mol_type = other DNA
agcggccaaggccctctgtg

SEQ ID NO: 261476 - DNA, 20 bp, synthetic construct
  source 1..20: mol_type = other DNA
aagcggccaaggccctctgt

SEQ ID NO: 261477 - DNA, 20 bp, synthetic construct
  source 1..20: mol_type = other DNA
gaagcggccaaggccctctg

SEQ ID NO: 261478 - DNA, 20 bp, synthetic construct
  source 1..20: mol_type = other DNA
ggaagcggccaaggccctct

SEQ ID NO: 261479 - DNA, 20 bp, synthetic construct
  source 1..20: mol_type = other DNA
tggaagcggccaaggccctc

SEQ ID NO: 261480 - DNA, 20 bp, synthetic construct
  source 1..20: mol_type = other DNA
atggaagcggccaaggccct

SEQ ID NO: 261481 - DNA, 20 bp, synthetic construct
  source 1..20: mol_type = other DNA
catggaagcggccaaggccc

SEQ ID NO: 261482 - DNA, 20 bp, synthetic construct
  source 1..20: mol_type = other DNA
ccatggaagcggccaaggcc

SEQ ID NO: 261483 - DNA, 20 bp, synthetic construct
  source 1..20: mol_type = other DNA
cccatggaagcggccaaggc

SEQ ID NO: 261484 - DNA, 20 bp, synthetic construct
  source 1..20: mol_type = other DNA
ccccatggaagcggccaagg

SEQ ID NO: 261485 - DNA, 20 bp, synthetic construct
  source 1..20: mol_type = other DNA
tccccatggaagcggccaag

SEQ ID NO: 261486 - DNA, 20 bp, synthetic construct
  source 1..20: mol_type = other DNA
ttccccatggaagcggccaa

SEQ ID NO: 261487 - DNA, 20 bp, synthetic construct
  source 1..20: mol_type = other DNA
attccccatggaagcggcca

SEQ ID NO: 261488 - DNA, 20 bp, synthetic construct
  source 1..20: mol_type = other DNA
aattccccatggaagcggcc

SEQ ID NO: 261489 - DNA, 20 bp, synthetic construct
  source 1..20: mol_type = other DNA
caattccccatggaagcggc

SEQ ID NO: 261490 - DNA, 20 bp, synthetic construct
  source 1..20: mol_type = other DNA
ccaattccccatggaagcgg

SEQ ID NO: 261491 - DNA, 20 bp, synthetic construct
  source 1..20: mol_type = other DNA
tccaattccccatggaagcg

SEQ ID NO: 261492 - DNA, 20 bp, synthetic construct
  source 1..20: mol_type = other DNA
ttccaattccccatggaagc

SEQ ID NO: 261493 - DNA, 20 bp, synthetic construct
  source 1..20: mol_type = other DNA
tttccaattccccatggaag

SEQ ID NO: 261494 - DNA, 20 bp, synthetic construct
  source 1..20: mol_type = other DNA
ctttccaattccccatggaa

SEQ ID NO: 261495 - DNA, 20 bp, synthetic construct
  source 1..20: mol_type = other DNA
gctttccaattccccatgga

SEQ ID NO: 261496 - DNA, 20 bp, synthetic construct
  source 1..20: mol_type = other DNA
tgctttccaattccccatgg

SEQ ID NO: 261497 - DNA, 20 bp, synthetic construct
  source 1..20: mol_type = other DNA
ttgctttccaattccccatg

SEQ ID NO: 261498 - DNA, 20 bp, synthetic construct
  source 1..20: mol_type = other DNA
attgctttccaattccccat

SEQ ID NO: 261499 - DNA, 20 bp, synthetic construct
  source 1..20: mol_type = other DNA
tattgctttccaattcccca

SEQ ID NO: 261500 - DNA, 20 bp, synthetic construct
  source 1..20: mol_type = other DNA
ttattgctttccaattcccc

SEQ ID NO: 261501 - DNA, 20 bp, synthetic construct
  source 1..20: mol_type = other DNA
cttattgctttccaattccc

SEQ ID NO: 261502 - DNA, 20 bp, synthetic construct
  source 1..20: mol_type = other DNA
tcttattgctttccaattcc

SEQ ID NO: 261503 - DNA, 20 bp, synthetic construct
  source 1..20: mol_type = other DNA
atcttattgctttccaattc

SEQ ID NO: 261504 - DNA, 20 bp, synthetic construct
  source 1..20: mol_type = other DNA
tatcttattgctttccaatt

SEQ ID NO: 261505 - DNA, 20 bp, synthetic construct
  source 1..20: mol_type = other DNA
ctatcttattgctttccaat

SEQ ID NO: 261506 - DNA, 20 bp, synthetic construct
  source 1..20: mol_type = other DNA
gctatcttattgctttccaa

SEQ ID NO: 261507 - DNA, 20 bp, synthetic construct
  source 1..20: mol_type = other DNA
tgctatcttattgctttcca

SEQ ID NO: 261508 - DNA, 20 bp, synthetic construct
  source 1..20: mol_type = other DNA
atgctatcttattgctttcc

SEQ ID NO: 261509 - DNA, 20 bp, synthetic construct
  source 1..20: mol_type = other DNA
gatgctatcttattgctttc

SEQ ID NO: 261510 - DNA, 20 bp, synthetic construct
  source 1..20: mol_type = other DNA
ggatgctatcttattgcttt

SEQ ID NO: 261511 - DNA, 20 bp, synthetic construct
  source 1..20: mol_type = other DNA
gggatgctatcttattgctt

SEQ ID NO: 261512 - DNA, 20 bp, synthetic construct
  source 1..20: mol_type = other DNA
ggggatgctatcttattgct

SEQ ID NO: 261513 - DNA, 20 bp, synthetic construct
  source 1..20: mol_type = other DNA
aggggatgctatcttattgc

SEQ ID NO: 261514 - DNA, 20 bp, synthetic construct
  source 1..20: mol_type = other DNA
taggggatgctatcttattg

SEQ ID NO: 261515 - DNA, 20 bp, synthetic construct
  source 1..20: mol_type = other DNA
ctaggggatgctatcttatt

SEQ ID NO: 261516 - DNA, 20 bp, synthetic construct
  source 1..20: mol_type = other DNA
tctaggggatgctatcttat

SEQ ID NO: 261517 - DNA, 20 bp, synthetic construct
  source 1..20: mol_type = other DNA
ttctaggggatgctatctta

SEQ ID NO: 261518 - DNA, 20 bp, synthetic construct
  source 1..20: mol_type = other DNA
cttctaggggatgctatctt

SEQ ID NO: 261519 - DNA, 20 bp, synthetic construct
  source 1..20: mol_type = other DNA
gcttctaggggatgctatct

SEQ ID NO: 261520 - DNA, 20 bp, synthetic construct
  source 1..20: mol_type = other DNA
ggcttctaggggatgctatc

SEQ ID NO: 261521 - DNA, 20 bp, synthetic construct
  source 1..20: mol_type = other DNA
gggcttctaggggatgctat

SEQ ID NO: 261522 - DNA, 20 bp, synthetic construct
  source 1..20: mol_type = other DNA
tgggcttctaggggatgcta

SEQ ID NO: 261523 - DNA, 20 bp, synthetic construct
  source 1..20: mol_type = other DNA
ctgggcttctaggggatgct

SEQ ID NO: 261524 - DNA, 20 bp, synthetic construct
  source 1..20: mol_type = other DNA
actgggcttctaggggatgc

SEQ ID NO: 261525 - DNA, 20 bp, synthetic construct
  source 1..20: mol_type = other DNA
cactgggcttctaggggatg

SEQ ID NO: 261526 - DNA, 20 bp, synthetic construct
  source 1..20: mol_type = other DNA
tcactgggcttctaggggat

SEQ ID NO: 261527 - DNA, 20 bp, synthetic construct
  source 1..20: mol_type = other DNA
ttcactgggcttctagggga

SEQ ID NO: 261528 - DNA, 20 bp, synthetic construct
  source 1..20: mol_type = other DNA
cttcactgggcttctagggg

SEQ ID NO: 261529 - DNA, 20 bp, synthetic construct
  source 1..20: mol_type = other DNA
acttcactgggcttctaggg

SEQ ID NO: 261530 - DNA, 20 bp, synthetic construct
  source 1..20: mol_type = other DNA
gacttcactgggcttctagg

SEQ ID NO: 261531 - DNA, 20 bp, synthetic construct
  source 1..20: mol_type = other DNA
agacttcactgggcttctag

SEQ ID NO: 261532 - DNA, 20 bp, synthetic construct
  source 1..20: mol_type = other DNA
cagacttcactgggcttcta

SEQ ID NO: 261533 - DNA, 20 bp, synthetic construct
  source 1..20: mol_type = other DNA
ccagacttcactgggcttct

SEQ ID NO: 261534 - DNA, 20 bp, synthetic construct
  source 1..20: mol_type = other DNA
cccagacttcactgggcttc

SEQ ID NO: 261535 - DNA, 20 bp, synthetic construct
  source 1..20: mol_type = other DNA
tcccagacttcactgggctt

SEQ ID NO: 261536 - DNA, 20 bp, synthetic construct
  source 1..20: mol_type = other DNA
gtcccagacttcactgggct

SEQ ID NO: 261537 - DNA, 20 bp, synthetic construct
  source 1..20: mol_type = other DNA
tgtcccagacttcactgggc

SEQ ID NO: 261538 - DNA, 20 bp, synthetic construct
  source 1..20: mol_type = other DNA
ctgtcccagacttcactggg

SEQ ID NO: 261539 - DNA, 20 bp, synthetic construct
  source 1..20: mol_type = other DNA
cctgtcccagacttcactgg

SEQ ID NO: 261540 - DNA, 20 bp, synthetic construct
  source 1..20: mol_type = other DNA
tcctgtcccagacttcactg

SEQ ID NO: 261541 - DNA, 20 bp, synthetic construct
  source 1..20: mol_type = other DNA
gtcctgtcccagacttcact

SEQ ID NO: 261542 - DNA, 20 bp, synthetic construct
  source 1..20: mol_type = other DNA
ggtcctgtcccagacttcac

SEQ ID NO: 261543 - DNA, 20 bp, synthetic construct
  source 1..20: mol_type = other DNA
gggtcctgtcccagacttca

SEQ ID NO: 261544 - DNA, 20 bp, synthetic construct
  source 1..20: mol_type = other DNA
agggtcctgtcccagacttc

SEQ ID NO: 261545 - DNA, 20 bp, synthetic construct
  source 1..20: mol_type = other DNA
aagggtcctgtcccagactt

SEQ ID NO: 261546 - DNA, 20 bp, synthetic construct
  source 1..20: mol_type = other DNA
gaagggtcctgtcccagact

SEQ ID NO: 261547 - DNA, 20 bp, synthetic construct
  source 1..20: mol_type = other DNA
agaagggtcctgtcccagac

SEQ ID NO: 261548 - DNA, 20 bp, synthetic construct
  source 1..20: mol_type = other DNA
gagaagggtcctgtcccaga

SEQ ID NO: 261549 - DNA, 20 bp, synthetic construct
  source 1..20: mol_type = other DNA
agagaagggtcctgtcccag

SEQ ID NO: 261550 - DNA, 20 bp, synthetic construct
  source 1..20: mol_type = other DNA
cagagaagggtcctgtccca

SEQ ID NO: 261551 - DNA, 20 bp, synthetic construct
  source 1..20: mol_type = other DNA
tcagagaagggtcctgtccc

SEQ ID NO: 261552 - DNA, 20 bp, synthetic construct
  source 1..20: mol_type = other DNA
ctcagagaagggtcctgtcc

SEQ ID NO: 261553 - DNA, 20 bp, synthetic construct
  source 1..20: mol_type = other DNA
gctcagagaagggtcctgtc

SEQ ID NO: 261554 - DNA, 20 bp, synthetic construct
  source 1..20: mol_type = other DNA
agctcagagaagggtcctgt

SEQ ID NO: 261555 - DNA, 20 bp, synthetic construct
  source 1..20: mol_type = other DNA
gagctcagagaagggtcctg

SEQ ID NO: 261556 - DNA, 20 bp, synthetic construct
  source 1..20: mol_type = other DNA
agagctcagagaagggtcct

SEQ ID NO: 261557 - DNA, 20 bp, synthetic construct
  source 1..20: mol_type = other DNA
cagagctcagagaagggtcc

SEQ ID NO: 261558 - DNA, 20 bp, synthetic construct
  source 1..20: mol_type = other DNA
tcagagctcagagaagggtc

SEQ ID NO: 261559 - DNA, 20 bp, synthetic construct
  source 1..20: mol_type = other DNA
gtcagagctcagagaagggt

SEQ ID NO: 261560 - DNA, 20 bp, synthetic construct
  source 1..20: mol_type = other DNA
agtcagagctcagagaaggg

SEQ ID NO: 261561 - DNA, 20 bp, synthetic construct
  source 1..20: mol_type = other DNA
aagtcagagctcagagaagg

SEQ ID NO: 261562 - DNA, 20 bp, synthetic construct
  source 1..20: mol_type = other DNA
caagtcagagctcagagaag

SEQ ID NO: 261563 - DNA, 20 bp, synthetic construct
  source 1..20: mol_type = other DNA
gcaagtcagagctcagagaa

SEQ ID NO: 261564 - DNA, 20 bp, synthetic construct
  source 1..20: mol_type = other DNA
agcaagtcagagctcagaga

SEQ ID NO: 261565 - DNA, 20 bp, synthetic construct
  source 1..20: mol_type = other DNA
gagcaagtcagagctcagag

SEQ ID NO: 261566 - DNA, 20 bp, synthetic construct
  source 1..20: mol_type = other DNA
agagcaagtcagagctcaga

SEQ ID NO: 261567 - DNA, 20 bp, synthetic construct
  source 1..20: mol_type = other DNA
aagagcaagtcagagctcag

SEQ ID NO: 261568 - DNA, 20 bp, synthetic construct
  source 1..20: mol_type = other DNA
caagagcaagtcagagctca

SEQ ID NO: 261569 - DNA, 20 bp, synthetic construct
  source 1..20: mol_type = other DNA
ccaagagcaagtcagagctc

SEQ ID NO: 261570 - DNA, 20 bp, synthetic construct
  source 1..20: mol_type = other DNA
tccaagagcaagtcagagct

SEQ ID NO: 261571 - DNA, 20 bp, synthetic construct
  source 1..20: mol_type = other DNA
ttccaagagcaagtcagagc

SEQ ID NO: 261572 - DNA, 20 bp, synthetic construct
  source 1..20: mol_type = other DNA
tttccaagagcaagtcagag

SEQ ID NO: 261573 - DNA, 20 bp, synthetic construct
  source 1..20: mol_type = other DNA
gtttccaagagcaagtcaga

SEQ ID NO: 261574 - DNA, 20 bp, synthetic construct
  source 1..20: mol_type = other DNA
tgtttccaagagcaagtcag

SEQ ID NO: 261575 - DNA, 20 bp, synthetic construct
  source 1..20: mol_type = other DNA
gtgtttccaagagcaagtca

SEQ ID NO: 261576 - DNA, 20 bp, synthetic construct
  source 1..20: mol_type = other DNA
agtgtttccaagagcaagtc

SEQ ID NO: 261577 - DNA, 20 bp, synthetic construct
  source 1..20: mol_type = other DNA
aagtgtttccaagagcaagt

SEQ ID NO: 261578 - DNA, 20 bp, synthetic construct
  source 1..20: mol_type = other DNA
gaagtgtttccaagagcaag

SEQ ID NO: 261579 - DNA, 20 bp, synthetic construct
  source 1..20: mol_type = other DNA
cgaagtgtttccaagagcaa

SEQ ID NO: 261580 - DNA, 20 bp, synthetic construct
  source 1..20: mol_type = other DNA
tcgaagtgtttccaagagca

SEQ ID NO: 261581 - DNA, 20 bp, synthetic construct
  source 1..20: mol_type = other DNA
ctcgaagtgtttccaagagc

SEQ ID NO: 261582 - DNA, 20 bp, synthetic construct
  source 1..20: mol_type = other DNA
cctcgaagtgtttccaagag

SEQ ID NO: 261583 - DNA, 20 bp, synthetic construct
  source 1..20: mol_type = other DNA
gcctcgaagtgtttccaaga

SEQ ID NO: 261584 - DNA, 20 bp, synthetic construct
  source 1..20: mol_type = other DNA
agcctcgaagtgtttccaag

SEQ ID NO: 261585 - DNA, 20 bp, synthetic construct
  source 1..20: mol_type = other DNA
aagcctcgaagtgtttccaa

SEQ ID NO: 261586 - DNA, 20 bp, synthetic construct
  source 1..20: mol_type = other DNA
taagcctcgaagtgtttcca

SEQ ID NO: 261587 - DNA, 20 bp, synthetic construct
  source 1..20: mol_type = other DNA
ctaagcctcgaagtgtttcc

SEQ ID NO: 261588 - DNA, 20 bp, synthetic construct
  source 1..20: mol_type = other DNA
gctaagcctcgaagtgtttc

SEQ ID NO: 261589 - DNA, 20 bp, synthetic construct
  source 1..20: mol_type = other DNA
ggctaagcctcgaagtgttt

SEQ ID NO: 261590 - DNA, 20 bp, synthetic construct
  source 1..20: mol_type = other DNA
aggctaagcctcgaagtgtt

SEQ ID NO: 261591 - DNA, 20 bp, synthetic construct
  source 1..20: mol_type = other DNA
gaggctaagcctcgaagtgt

SEQ ID NO: 261592 - DNA, 20 bp, synthetic construct
  source 1..20: mol_type = other DNA
ggaggctaagcctcgaagtg

SEQ ID NO: 261593 - DNA, 20 bp, synthetic construct
  source 1..20: mol_type = other DNA
gggaggctaagcctcgaagt

SEQ ID NO: 261594 - DNA, 20 bp, synthetic construct
  source 1..20: mol_type = other DNA
ggggaggctaagcctcgaag

SEQ ID NO: 261595 - DNA, 20 bp, synthetic construct
  source 1..20: mol_type = other DNA
tggggaggctaagcctcgaa

SEQ ID NO: 261596 - DNA, 20 bp, synthetic construct
  source 1..20: mol_type = other DNA
gtggggaggctaagcctcga

SEQ ID NO: 261597 - DNA, 20 bp, synthetic construct
  source 1..20: mol_type = other DNA
agtggggaggctaagcctcg

SEQ ID NO: 261598 - DNA, 20 bp, synthetic construct
  source 1..20: mol_type = other DNA
aagtggggaggctaagcctc

SEQ ID NO: 261599 - DNA, 20 bp, synthetic construct
  source 1..20: mol_type = other DNA
aaagtggggaggctaagcct

SEQ ID NO: 261600 - DNA, 20 bp, synthetic construct
  source 1..20: mol_type = other DNA
caaagtggggaggctaagcc

SEQ ID NO: 261601 - DNA, 20 bp, synthetic construct
  source 1..20: mol_type = other DNA
acaaagtggggaggctaagc

SEQ ID NO: 261602 - DNA, 20 bp, synthetic construct
  source 1..20: mol_type = other DNA
aacaaagtggggaggctaag

SEQ ID NO: 261603 - DNA, 20 bp, synthetic construct
  source 1..20: mol_type = other DNA
aaacaaagtggggaggctaa

SEQ ID NO: 261604 - DNA, 20 bp, synthetic construct
  source 1..20: mol_type = other DNA
gaaacaaagtggggaggcta

SEQ ID NO: 261605 - DNA, 20 bp, synthetic construct
  source 1..20: mol_type = other DNA
ggaaacaaagtggggaggct

SEQ ID NO: 261606 - DNA, 20 bp, synthetic construct
  source 1..20: mol_type = other DNA
gggaaacaaagtggggaggc

SEQ ID NO: 261607 - DNA, 20 bp, synthetic construct
  source 1..20: mol_type = other DNA
cgggaaacaaagtggggagg

SEQ ID NO: 261608 - DNA, 20 bp, synthetic construct
  source 1..20: mol_type = other DNA
tcgggaaacaaagtggggag

SEQ ID NO: 261609 - DNA, 20 bp, synthetic construct
  source 1..20: mol_type = other DNA
ctcgggaaacaaagtgggga

SEQ ID NO: 261610 - DNA, 20 bp, synthetic construct
  source 1..20: mol_type = other DNA
tctcgggaaacaaagtgggg

SEQ ID NO: 261611 - DNA, 20 bp, synthetic construct
  source 1..20: mol_type = other DNA
ctctcgggaaacaaagtggg

SEQ ID NO: 261612 - DNA, 20 bp, synthetic construct
  source 1..20: mol_type = other DNA
actctcgggaaacaaagtgg

SEQ ID NO: 261613 - DNA, 20 bp, synthetic construct
  source 1..20: mol_type = other DNA
cactctcgggaaacaaagtg

SEQ ID NO: 261614 - DNA, 20 bp, synthetic construct
  source 1..20: mol_type = other DNA
acactctcgggaaacaaagt

SEQ ID NO: 261615 - DNA, 20 bp, synthetic construct
  source 1..20: mol_type = other DNA
cacactctcgggaaacaaag

SEQ ID NO: 261616 - DNA, 20 bp, synthetic construct
  source 1..20: mol_type = other DNA
tcacactctcgggaaacaaa

SEQ ID NO: 261617 - DNA, 20 bp, synthetic construct
  source 1..20: mol_type = other DNA
gtcacactctcgggaaacaa

SEQ ID NO: 261618 - DNA, 20 bp, synthetic construct
  source 1..20: mol_type = other DNA
ggtcacactctcgggaaaca

SEQ ID NO: 261619 - DNA, 20 bp, synthetic construct
  source 1..20: mol_type = other DNA
aggtcacactctcgggaaac

SEQ ID NO: 261620 - DNA, 20 bp, synthetic construct
  source 1..20: mol_type = other DNA
caggtcacactctcgggaaa

SEQ ID NO: 261621 - DNA, 20 bp, synthetic construct
  source 1..20: mol_type = other DNA
acaggtcacactctcgggaa

SEQ ID NO: 261622 - DNA, 20 bp, synthetic construct
  source 1..20: mol_type = other DNA
aacaggtcacactctcggga

SEQ ID NO: 261623 - DNA, 20 bp, synthetic construct
  source 1..20: mol_type = other DNA
gaacaggtcacactctcggg

SEQ ID NO: 261624 - DNA, 20 bp, synthetic construct
  source 1..20: mol_type = other DNA
ggaacaggtcacactctcgg

SEQ ID NO: 261625 - DNA, 20 bp, synthetic construct
  source 1..20: mol_type = other DNA
gggaacaggtcacactctcg

SEQ ID NO: 261626 - DNA, 20 bp, synthetic construct
  source 1..20: mol_type = other DNA
ggggaacaggtcacactctc

SEQ ID NO: 261627 - DNA, 20 bp, synthetic construct
  source 1..20: mol_type = other DNA
aggggaacaggtcacactct

SEQ ID NO: 261628 - DNA, 20 bp, synthetic construct
  source 1..20: mol_type = other DNA
gaggggaacaggtcacactc

SEQ ID NO: 261629 - DNA, 20 bp, synthetic construct
  source 1..20: mol_type = other DNA
ggaggggaacaggtcacact

SEQ ID NO: 261630 - DNA, 20 bp, synthetic construct
  source 1..20: mol_type = other DNA
tggaggggaacaggtcacac

SEQ ID NO: 261631 - DNA, 20 bp, synthetic construct
  source 1..20: mol_type = other DNA
ttggaggggaacaggtcaca

SEQ ID NO: 261632 - DNA, 20 bp, synthetic construct
  source 1..20: mol_type = other DNA
tttggaggggaacaggtcac

SEQ ID NO: 261633 - DNA, 20 bp, synthetic construct
  source 1..20: mol_type = other DNA
gtttggaggggaacaggtca

SEQ ID NO: 261634 - DNA, 20 bp, synthetic construct
  source 1..20: mol_type = other DNA
tgtttggaggggaacaggtc

SEQ ID NO: 261635 - DNA, 20 bp, synthetic construct
  source 1..20: mol_type = other DNA
gtgtttggaggggaacaggt

SEQ ID NO: 261636 - DNA, 20 bp, synthetic construct
  source 1..20: mol_type = other DNA
ggtgtttggaggggaacagg

SEQ ID NO: 261637 - DNA, 20 bp, synthetic construct
  source 1..20: mol_type = other DNA
gggtgtttggaggggaacag

SEQ ID NO: 261638 - DNA, 20 bp, synthetic construct
  source 1..20: mol_type = other DNA
ggggtgtttggaggggaaca

SEQ ID NO: 261639 - DNA, 20 bp, synthetic construct
  source 1..20: mol_type = other DNA
gggggtgtttggaggggaac

SEQ ID NO: 261640 - DNA, 20 bp, synthetic construct
  source 1..20: mol_type = other DNA
agggggtgtttggaggggaa

SEQ ID NO: 261641 - DNA, 20 bp, synthetic construct
  source 1..20: mol_type = other DNA
aagggggtgtttggagggga

SEQ ID NO: 261642 - DNA, 20 bp, synthetic construct
  source 1..20: mol_type = other DNA
gaagggggtgtttggagggg

SEQ ID NO: 261643 - DNA, 20 bp, synthetic construct
  source 1..20: mol_type = other DNA
agaagggggtgtttggaggg

SEQ ID NO: 261644 - DNA, 20 bp, synthetic construct
  source 1..20: mol_type = other DNA
gagaagggggtgtttggagg

SEQ ID NO: 261645 - DNA, 20 bp, synthetic construct
  source 1..20: mol_type = other DNA
ggagaagggggtgtttggag

SEQ ID NO: 261646 - DNA, 20 bp, synthetic construct
  source 1..20: mol_type = other DNA
aggagaagggggtgtttgga

SEQ ID NO: 261647 - DNA, 20 bp, synthetic construct
  source 1..20: mol_type = other DNA
gaggagaagggggtgtttgg

SEQ ID NO: 261648 - DNA, 20 bp, synthetic construct
  source 1..20: mol_type = other DNA
ggaggagaagggggtgtttg

SEQ ID NO: 261649 - DNA, 20 bp, synthetic construct
  source 1..20: mol_type = other DNA
tggaggagaagggggtgttt

SEQ ID NO: 261650 - DNA, 20 bp, synthetic construct
  source 1..20: mol_type = other DNA
ctggaggagaagggggtgtt

SEQ ID NO: 261651 - DNA, 20 bp, synthetic construct
  source 1..20: mol_type = other DNA
cctggaggagaagggggtgt

SEQ ID NO: 261652 - DNA, 20 bp, synthetic construct
  source 1..20: mol_type = other DNA
ccctggaggagaagggggtg

SEQ ID NO: 261653 - DNA, 20 bp, synthetic construct
  source 1..20: mol_type = other DNA
gccctggaggagaagggggt

SEQ ID NO: 261654 - DNA, 20 bp, synthetic construct
  source 1..20: mol_type = other DNA
ggccctggaggagaaggggg

SEQ ID NO: 261655 - DNA, 20 bp, synthetic construct
  source 1..20: mol_type = other DNA
tggccctggaggagaagggg

SEQ ID NO: 261656 - DNA, 20 bp, synthetic construct
  source 1..20: mol_type = other DNA
atggccctggaggagaaggg

SEQ ID NO: 261657 - DNA, 20 bp, synthetic construct
  source 1..20: mol_type = other DNA
catggccctggaggagaagg

SEQ ID NO: 261658 - DNA, 20 bp, synthetic construct
  source 1..20: mol_type = other DNA
gcatggccctggaggagaag

SEQ ID NO: 261659 - DNA, 20 bp, synthetic construct
  source 1..20: mol_type = other DNA
ggcatggccctggaggagaa

SEQ ID NO: 261660 - DNA, 20 bp, synthetic construct
  source 1..20: mol_type = other DNA
gggcatggccctggaggaga

SEQ ID NO: 261661 - DNA, 20 bp, synthetic construct
  source 1..20: mol_type = other DNA
tgggcatggccctggaggag

SEQ ID NO: 261662 - DNA, 20 bp, synthetic construct
  source 1..20: mol_type = other DNA
gtgggcatggccctggagga

SEQ ID NO: 261663 - DNA, 20 bp, synthetic construct
  source 1..20: mol_type = other DNA
ggtgggcatggccctggagg

SEQ ID NO: 261664 - DNA, 20 bp, synthetic construct
  source 1..20: mol_type = other DNA
gggtgggcatggccctggag

SEQ ID NO: 261665 - DNA, 20 bp, synthetic construct
  source 1..20: mol_type = other DNA
cgggtgggcatggccctgga

SEQ ID NO: 261666 - DNA, 20 bp, synthetic construct
  source 1..20: mol_type = other DNA
acgggtgggcatggccctgg

SEQ ID NO: 261667 - DNA, 20 bp, synthetic construct
  source 1..20: mol_type = other DNA
gacgggtgggcatggccctg

SEQ ID NO: 261668 - DNA, 20 bp, synthetic construct
  source 1..20: mol_type = other DNA
tgacgggtgggcatggccct

SEQ ID NO: 261669 - DNA, 20 bp, synthetic construct
  source 1..20: mol_type = other DNA
ttgacgggtgggcatggccc

SEQ ID NO: 261670 - DNA, 20 bp, synthetic construct
  source 1..20: mol_type = other DNA
tttgacgggtgggcatggcc

SEQ ID NO: 261671 - DNA, 20 bp, synthetic construct
  source 1..20: mol_type = other DNA
ttttgacgggtgggcatggc

SEQ ID NO: 261672 - DNA, 20 bp, synthetic construct
  source 1..20: mol_type = other DNA
attttgacgggtgggcatgg

SEQ ID NO: 261673 - DNA, 20 bp, synthetic construct
  source 1..20: mol_type = other DNA
gattttgacgggtgggcatg

SEQ ID NO: 261674 - DNA, 20 bp, synthetic construct
  source 1..20: mol_type = other DNA
ggattttgacgggtgggcat

SEQ ID NO: 261675 - DNA, 20 bp, synthetic construct
  source 1..20: mol_type = other DNA
gggattttgacgggtgggca

SEQ ID NO: 261676 - DNA, 20 bp, synthetic construct
  source 1..20: mol_type = other DNA
ggggattttgacgggtgggc

SEQ ID NO: 261677 - DNA, 20 bp, synthetic construct
  source 1..20: mol_type = other DNA
gggggattttgacgggtggg

SEQ ID NO: 261678 - DNA, 20 bp, synthetic construct
  source 1..20: mol_type = other DNA
tgggggattttgacgggtgg

SEQ ID NO: 261679 - DNA, 20 bp, synthetic construct
  source 1..20: mol_type = other DNA
gtgggggattttgacgggtg

SEQ ID NO: 261680 - DNA, 20 bp, synthetic construct
  source 1..20: mol_type = other DNA
cgtgggggattttgacgggt

SEQ ID NO: 261681 - DNA, 20 bp, synthetic construct
  source 1..20: mol_type = other DNA
ccgtgggggattttgacggg

SEQ ID NO: 261682 - DNA, 20 bp, synthetic construct
  source 1..20: mol_type = other DNA
cccgtgggggattttgacgg

SEQ ID NO: 261683 - DNA, 20 bp, synthetic construct
  source 1..20: mol_type = other DNA
gcccgtgggggattttgacg

SEQ ID NO: 261684 - DNA, 20 bp, synthetic construct
  source 1..20: mol_type = other DNA
tgcccgtgggggattttgac

SEQ ID NO: 261685 - DNA, 20 bp, synthetic construct
  source 1..20: mol_type = other DNA
ctgcccgtgggggattttga

SEQ ID NO: 261686 - DNA, 20 bp, synthetic construct
  source 1..20: mol_type = other DNA
cctgcccgtgggggattttg

SEQ ID NO: 261687 - DNA, 20 bp, synthetic construct
  source 1..20: mol_type = other DNA
tcctgcccgtgggggatttt

SEQ ID NO: 261688 - DNA, 20 bp, synthetic construct
  source 1..20: mol_type = other DNA
gtcctgcccgtgggggattt

SEQ ID NO: 261689 - DNA, 20 bp, synthetic construct
  source 1..20: mol_type = other DNA
cgtcctgcccgtgggggatt

SEQ ID NO: 261690 - DNA, 20 bp, synthetic construct
  source 1..20: mol_type = other DNA
tcgtcctgcccgtgggggat

SEQ ID NO: 261691 - DNA, 20 bp, synthetic construct
  source 1..20: mol_type = other DNA
ttcgtcctgcccgtggggga

SEQ ID NO: 261692 - DNA, 20 bp, synthetic construct
  source 1..20: mol_type = other DNA
gttcgtcctgcccgtggggg

SEQ ID NO: 261693 - DNA, 20 bp, synthetic construct
  source 1..20: mol_type = other DNA
agttcgtcctgcccgtgggg

SEQ ID NO: 261694 - DNA, 20 bp, synthetic construct
  source 1..20: mol_type = other DNA
cagttcgtcctgcccgtggg

SEQ ID NO: 261695 - DNA, 20 bp, synthetic construct
  source 1..20: mol_type = other DNA
acagttcgtcctgcccgtgg

SEQ ID NO: 261696 - DNA, 20 bp, synthetic construct
  source 1..20: mol_type = other DNA
cacagttcgtcctgcccgtg

SEQ ID NO: 261697 - DNA, 20 bp, synthetic construct
  source 1..20: mol_type = other DNA
ccacagttcgtcctgcccgt

SEQ ID NO: 261698 - DNA, 20 bp, synthetic construct
  source 1..20: mol_type = other DNA
cccacagttcgtcctgcccg

SEQ ID NO: 261699 - DNA, 20 bp, synthetic construct
  source 1..20: mol_type = other DNA
acccacagttcgtcctgccc

SEQ ID NO: 261700 - DNA, 20 bp, synthetic construct
  source 1..20: mol_type = other DNA
cacccacagttcgtcctgcc

SEQ ID NO: 261701 - DNA, 20 bp, synthetic construct
  source 1..20: mol_type = other DNA
acacccacagttcgtcctgc

SEQ ID NO: 261702 - DNA, 20 bp, synthetic construct
  source 1..20: mol_type = other DNA
gacacccacagttcgtcctg

SEQ ID NO: 261703 - DNA, 20 bp, synthetic construct
  source 1..20: mol_type = other DNA
tgacacccacagttcgtcct

SEQ ID NO: 261704 - DNA, 20 bp, synthetic construct
  source 1..20: mol_type = other DNA
ctgacacccacagttcgtcc

SEQ ID NO: 261705 - DNA, 20 bp, synthetic construct
  source 1..20: mol_type = other DNA
actgacacccacagttcgtc

SEQ ID NO: 261706 - DNA, 20 bp, synthetic construct
  source 1..20: mol_type = other DNA
gactgacacccacagttcgt

SEQ ID NO: 261707 - DNA, 20 bp, synthetic construct
  source 1..20: mol_type = other DNA
tgactgacacccacagttcg

SEQ ID NO: 261708 - DNA, 20 bp, synthetic construct
  source 1..20: mol_type = other DNA
gtgactgacacccacagttc

SEQ ID NO: 261709 - DNA, 20 bp, synthetic construct
  source 1..20: mol_type = other DNA
ggtgactgacacccacagtt

SEQ ID NO: 261710 - DNA, 20 bp, synthetic construct
  source 1..20: mol_type = other DNA
tggtgactgacacccacagt

SEQ ID NO: 261711 - DNA, 20 bp, synthetic construct
  source 1..20: mol_type = other DNA
atggtgactgacacccacag

SEQ ID NO: 261712 - DNA, 20 bp, synthetic construct
  source 1..20: mol_type = other DNA
gatggtgactgacacccaca

SEQ ID NO: 261713 - DNA, 20 bp, synthetic construct
  source 1..20: mol_type = other DNA
agatggtgactgacacccac

SEQ ID NO: 261714 - DNA, 20 bp, synthetic construct
  source 1..20: mol_type = other DNA
tagatggtgactgacaccca

SEQ ID NO: 261715 - DNA, 20 bp, synthetic construct
  source 1..20: mol_type = other DNA
atagatggtgactgacaccc

SEQ ID NO: 261716 - DNA, 20 bp, synthetic construct
  source 1..20: mol_type = other DNA
gatagatggtgactgacacc

SEQ ID NO: 261717 - DNA, 20 bp, synthetic construct
  source 1..20: mol_type = other DNA
ggatagatggtgactgacac

SEQ ID NO: 261718 - DNA, 20 bp, synthetic construct
  source 1..20: mol_type = other DNA
aggatagatggtgactgaca

SEQ ID NO: 261719 - DNA, 20 bp, synthetic construct
  source 1..20: mol_type = other DNA
caggatagatggtgactgac

SEQ ID NO: 261720 - DNA, 20 bp, synthetic construct
  source 1..20: mol_type = other DNA
gcaggatagatggtgactga

SEQ ID NO: 261721 - DNA, 20 bp, synthetic construct
  source 1..20: mol_type = other DNA
tgcaggatagatggtgactg

SEQ ID NO: 261722 - DNA, 20 bp, synthetic construct
  source 1..20: mol_type = other DNA
atgcaggatagatggtgact

SEQ ID NO: 261723 - DNA, 20 bp, synthetic construct
  source 1..20: mol_type = other DNA
gatgcaggatagatggtgac

SEQ ID NO: 261724 - DNA, 20 bp, synthetic construct
  source 1..20: mol_type = other DNA
ggatgcaggatagatggtga

SEQ ID NO: 261725 - DNA, 20 bp, synthetic construct
  source 1..20: mol_type = other DNA
aggatgcaggatagatggtg

SEQ ID NO: 261726 - DNA, 20 bp, synthetic construct
  source 1..20: mol_type = other DNA
caggatgcaggatagatggt

SEQ ID NO: 261727 - DNA, 20 bp, synthetic construct
  source 1..20: mol_type = other DNA
ccaggatgcaggatagatgg

SEQ ID NO: 261728 - DNA, 20 bp, synthetic construct
  source 1..20: mol_type = other DNA
accaggatgcaggatagatg

SEQ ID NO: 261729 - DNA, 20 bp, synthetic construct
  source 1..20: mol_type = other DNA
aaccaggatgcaggatagat

SEQ ID NO: 261730 - DNA, 20 bp, synthetic construct
  source 1..20: mol_type = other DNA
gaaccaggatgcaggataga

SEQ ID NO: 261731 - DNA, 20 bp, synthetic construct
  source 1..20: mol_type = other DNA
ggaaccaggatgcaggatag

SEQ ID NO: 261732 - DNA, 20 bp, synthetic construct
  source 1..20: mol_type = other DNA
tggaaccaggatgcaggata

SEQ ID NO: 261733 - DNA, 20 bp, synthetic construct
  source 1..20: mol_type = other DNA
ctggaaccaggatgcaggat

SEQ ID NO: 261734 - DNA, 20 bp, synthetic construct
  source 1..20: mol_type = other DNA
cctggaaccaggatgcagga

SEQ ID NO: 261735 - DNA, 20 bp, synthetic construct
  source 1..20: mol_type = other DNA
ccctggaaccaggatgcagg

SEQ ID NO: 261736 - DNA, 20 bp, synthetic construct
  source 1..20: mol_type = other DNA
gccctggaaccaggatgcag

SEQ ID NO: 261737 - DNA, 20 bp, synthetic construct
  source 1..20: mol_type = other DNA
ggccctggaaccaggatgca

SEQ ID NO: 261738 - DNA, 20 bp, synthetic construct
  source 1..20: mol_type = other DNA
gggccctggaaccaggatgc

SEQ ID NO: 261739 - DNA, 20 bp, synthetic construct
  source 1..20: mol_type = other DNA
ggggccctggaaccaggatg

SEQ ID NO: 261740 - DNA, 20 bp, synthetic construct
  source 1..20: mol_type = other DNA
gggggccctggaaccaggat

SEQ ID NO: 261741 - DNA, 20 bp, synthetic construct
  source 1..20: mol_type = other DNA
ggggggccctggaaccagga

SEQ ID NO: 261742 - DNA, 20 bp, synthetic construct
  source 1..20: mol_type = other DNA
gggggggccctggaaccagg

SEQ ID NO: 261743 - DNA, 20 bp, synthetic construct
  source 1..20: mol_type = other DNA
ggggggggccctggaaccag

SEQ ID NO: 261744 - DNA, 20 bp, synthetic construct
  source 1..20: mol_type = other DNA
tggggggggccctggaacca

SEQ ID NO: 261745 - DNA, 20 bp, synthetic construct
  source 1..20: mol_type = other DNA
ctggggggggccctggaacc

SEQ ID NO: 261746 - DNA, 20 bp, synthetic construct
  source 1..20: mol_type = other DNA
gctggggggggccctggaac

SEQ ID NO: 261747 - DNA, 20 bp, synthetic construct
  source 1..20: mol_type = other DNA
ggctggggggggccctggaa

SEQ ID NO: 261748 - DNA, 20 bp, synthetic construct
  source 1..20: mol_type = other DNA
gggctggggggggccctgga

SEQ ID NO: 261749 - DNA, 20 bp, synthetic construct
  source 1..20: mol_type = other DNA
ggggctggggggggccctgg

SEQ ID NO: 261750 - DNA, 20 bp, synthetic construct
  source 1..20: mol_type = other DNA
cggggctggggggggccctg

SEQ ID NO: 261751 - DNA, 20 bp, synthetic construct
  source 1..20: mol_type = other DNA
gcggggctggggggggccct

SEQ ID NO: 261752 - DNA, 20 bp, synthetic construct
  source 1..20: mol_type = other DNA
ggcggggctggggggggccc

SEQ ID NO: 261753 - DNA, 20 bp, synthetic construct
  source 1..20: mol_type = other DNA
aggcggggctggggggggcc

SEQ ID NO: 261754 - DNA, 20 bp, synthetic construct
  source 1..20: mol_type = other DNA
gaggcggggctggggggggc

SEQ ID NO: 261755 - DNA, 20 bp, synthetic construct
  source 1..20: mol_type = other DNA
ggaggcggggctgggggggg

SEQ ID NO: 261756 - DNA, 20 bp, synthetic construct
  source 1..20: mol_type = other DNA
tggaggcggggctggggggg

SEQ ID NO: 261757 - DNA, 20 bp, synthetic construct
  source 1..20: mol_type = other DNA
atggaggcggggctgggggg

SEQ ID NO: 261758 - DNA, 20 bp, synthetic construct
  source 1..20: mol_type = other DNA
tatggaggcggggctggggg

SEQ ID NO: 261759 - DNA, 20 bp, synthetic construct
  source 1..20: mol_type = other DNA
ctatggaggcggggctgggg

SEQ ID NO: 261760 - DNA, 20 bp, synthetic construct
  source 1..20: mol_type = other DNA
cctatggaggcggggctggg

SEQ ID NO: 261761 - DNA, 20 bp, synthetic construct
  source 1..20: mol_type = other DNA
ccctatggaggcggggctgg

SEQ ID NO: 261762 - DNA, 20 bp, synthetic construct
  source 1..20: mol_type = other DNA
tccctatggaggcggggctg

SEQ ID NO: 261763 - DNA, 20 bp, synthetic construct
  source 1..20: mol_type = other DNA
gtccctatggaggcggggct

SEQ ID NO: 261764 - DNA, 20 bp, synthetic construct
  source 1..20: mol_type = other DNA
tgtccctatggaggcggggc

SEQ ID NO: 261765 - DNA, 20 bp, synthetic construct
  source 1..20: mol_type = other DNA
ctgtccctatggaggcgggg

SEQ ID NO: 261766 - DNA, 20 bp, synthetic construct
  source 1..20: mol_type = other DNA
cctgtccctatggaggcggg

SEQ ID NO: 261767 - DNA, 20 bp, synthetic construct
  source 1..20: mol_type = other DNA
gcctgtccctatggaggcgg

SEQ ID NO: 261768 - DNA, 20 bp, synthetic construct
  source 1..20: mol_type = other DNA
cgcctgtccctatggaggcg

SEQ ID NO: 261769 - DNA, 20 bp, synthetic construct
  source 1..20: mol_type = other DNA
acgcctgtccctatggaggc

SEQ ID NO: 261770 - DNA, 20 bp, synthetic construct
  source 1..20: mol_type = other DNA
cacgcctgtccctatggagg

SEQ ID NO: 261771 - DNA, 20 bp, synthetic construct
  source 1..20: mol_type = other DNA
gcacgcctgtccctatggag

SEQ ID NO: 261772 - DNA, 20 bp, synthetic construct
  source 1..20: mol_type = other DNA
tgcacgcctgtccctatgga

SEQ ID NO: 261773 - DNA, 20 bp, synthetic construct
  source 1..20: mol_type = other DNA
ctgcacgcctgtccctatgg

SEQ ID NO: 261774 - DNA, 20 bp, synthetic construct
  source 1..20: mol_type = other DNA
tctgcacgcctgtccctatg

SEQ ID NO: 261775 - DNA, 20 bp, synthetic construct
  source 1..20: mol_type = other DNA
gtctgcacgcctgtccctat

SEQ ID NO: 261776 - DNA, 20 bp, synthetic construct
  source 1..20: mol_type = other DNA
tgtctgcacgcctgtcccta

SEQ ID NO: 261777 - DNA, 20 bp, synthetic construct
  source 1..20: mol_type = other DNA
gtgtctgcacgcctgtccct

SEQ ID NO: 261778 - DNA, 20 bp, synthetic construct
  source 1..20: mol_type = other DNA
ggtgtctgcacgcctgtccc

SEQ ID NO: 261779 - DNA, 20 bp, synthetic construct
  source 1..20: mol_type = other DNA
gggtgtctgcacgcctgtcc

SEQ ID NO: 261780 - DNA, 20 bp, synthetic construct
  source 1..20: mol_type = other DNA
cgggtgtctgcacgcctgtc

SEQ ID NO: 261781 - DNA, 20 bp, synthetic construct
  source 1..20: mol_type = other DNA
acgggtgtctgcacgcctgt

SEQ ID NO: 261782 - DNA, 20 bp, synthetic construct
  source 1..20: mol_type = other DNA
gacgggtgtctgcacgcctg

SEQ ID NO: 261783 - DNA, 20 bp, synthetic construct
  source 1..20: mol_type = other DNA
ggacgggtgtctgcacgcct

SEQ ID NO: 261784 - DNA, 20 bp, synthetic construct
  source 1..20: mol_type = other DNA
gggacgggtgtctgcacgcc

SEQ ID NO: 261785 - DNA, 20 bp, synthetic construct
  source 1..20: mol_type = other DNA
agggacgggtgtctgcacgc

SEQ ID NO: 261786 - DNA, 20 bp, synthetic construct
  source 1..20: mol_type = other DNA
cagggacgggtgtctgcacg

SEQ ID NO: 261787 - DNA, 20 bp, synthetic construct
  source 1..20: mol_type = other DNA
ccagggacgggtgtctgcac

SEQ ID NO: 261788 - DNA, 20 bp, synthetic construct
  source 1..20: mol_type = other DNA
gccagggacgggtgtctgca

SEQ ID NO: 261789 - DNA, 20 bp, synthetic construct
  source 1..20: mol_type = other DNA
agccagggacgggtgtctgc

SEQ ID NO: 261790 - DNA, 20 bp, synthetic construct
  source 1..20: mol_type = other DNA
cagccagggacgggtgtctg

SEQ ID NO: 261791 - DNA, 20 bp, synthetic construct
  source 1..20: mol_type = other DNA
gcagccagggacgggtgtct

SEQ ID NO: 261792 - DNA, 20 bp, synthetic construct
  source 1..20: mol_type = other DNA
agcagccagggacgggtgtc

SEQ ID NO: 261793 - DNA, 20 bp, synthetic construct
  source 1..20: mol_type = other DNA
aagcagccagggacgggtgt

SEQ ID NO: 261794 - DNA, 20 bp, synthetic construct
  source 1..20: mol_type = other DNA
gaagcagccagggacgggtg

SEQ ID NO: 261795 - DNA, 20 bp, synthetic construct
  source 1..20: mol_type = other DNA
ggaagcagccagggacgggt

SEQ ID NO: 261796 - DNA, 20 bp, synthetic construct
  source 1..20: mol_type = other DNA
aggaagcagccagggacggg

SEQ ID NO: 261797 - DNA, 20 bp, synthetic construct
  source 1..20: mol_type = other DNA
gaggaagcagccagggacgg

SEQ ID NO: 261798 - DNA, 20 bp, synthetic construct
  source 1..20: mol_type = other DNA
agaggaagcagccagggacg

SEQ ID NO: 261799 - DNA, 20 bp, synthetic construct
  source 1..20: mol_type = other DNA
aagaggaagcagccagggac

SEQ ID NO: 261800 - DNA, 20 bp, synthetic construct
  source 1..20: mol_type = other DNA
caagaggaagcagccaggga

SEQ ID NO: 261801 - DNA, 20 bp, synthetic construct
  source 1..20: mol_type = other DNA
acaagaggaagcagccaggg

SEQ ID NO: 261802 - DNA, 20 bp, synthetic construct
  source 1..20: mol_type = other DNA
cacaagaggaagcagccagg

SEQ ID NO: 261803 - DNA, 20 bp, synthetic construct
  source 1..20: mol_type = other DNA
ccacaagaggaagcagccag

SEQ ID NO: 261804 - DNA, 20 bp, synthetic construct
  source 1..20: mol_type = other DNA
tccacaagaggaagcagcca

SEQ ID NO: 261805 - DNA, 20 bp, synthetic construct
  source 1..20: mol_type = other DNA
ttccacaagaggaagcagcc

SEQ ID NO: 261806 - DNA, 20 bp, synthetic construct
  source 1..20: mol_type = other DNA
attccacaagaggaagcagc

SEQ ID NO: 261807 - DNA, 20 bp, synthetic construct
  source 1..20: mol_type = other DNA
cattccacaagaggaagcag

SEQ ID NO: 261808 - DNA, 20 bp, synthetic construct
  source 1..20: mol_type = other DNA
ccattccacaagaggaagca

SEQ ID NO: 261809 - DNA, 20 bp, synthetic construct
  source 1..20: mol_type = other DNA
cccattccacaagaggaagc

SEQ ID NO: 261810 - DNA, 20 bp, synthetic construct
  source 1..20: mol_type = other DNA
acccattccacaagaggaag

SEQ ID NO: 261811 - DNA, 20 bp, synthetic construct
  source 1..20: mol_type = other DNA
aacccattccacaagaggaa

SEQ ID NO: 261812 - DNA, 20 bp, synthetic construct
  source 1..20: mol_type = other DNA
gaacccattccacaagagga

SEQ ID NO: 261813 - DNA, 20 bp, synthetic construct
  source 1..20: mol_type = other DNA
tgaacccattccacaagagg

SEQ ID NO: 261814 - DNA, 20 bp, synthetic construct
  source 1..20: mol_type = other DNA
ttgaacccattccacaagag

SEQ ID NO: 261815 - DNA, 20 bp, synthetic construct
  source 1..20: mol_type = other DNA
tttgaacccattccacaaga

SEQ ID NO: 261816 - DNA, 20 bp, synthetic construct
  source 1..20: mol_type = other DNA
ttttgaacccattccacaag

SEQ ID NO: 261817 - DNA, 20 bp, synthetic construct
  source 1..20: mol_type = other DNA
cttttgaacccattccacaa

SEQ ID NO: 261818 - DNA, 20 bp, synthetic construct
  source 1..20: mol_type = other DNA
acttttgaacccattccaca

SEQ ID NO: 261819 - DNA, 20 bp, synthetic construct
  source 1..20: mol_type = other DNA
tacttttgaacccattccac

SEQ ID NO: 261820 - DNA, 20 bp, synthetic construct
  source 1..20: mol_type = other DNA
ttacttttgaacccattcca

SEQ ID NO: 261821 - DNA, 20 bp, synthetic construct
  source 1..20: mol_type = other DNA
cttacttttgaacccattcc

SEQ ID NO: 261822 - DNA, 20 bp, synthetic construct
  source 1..20: mol_type = other DNA
gcttacttttgaacccattc

SEQ ID NO: 261823 - DNA, 20 bp, synthetic construct
  source 1..20: mol_type = other DNA
tgcttacttttgaacccatt

SEQ ID NO: 261824 - DNA, 20 bp, synthetic construct
  source 1..20: mol_type = other DNA
ctgcttacttttgaacccat

SEQ ID NO: 261825 - DNA, 20 bp, synthetic construct
  source 1..20: mol_type = other DNA
actgcttacttttgaaccca

SEQ ID NO: 261826 - DNA, 20 bp, synthetic construct
  source 1..20: mol_type = other DNA
cactgcttacttttgaaccc

SEQ ID NO: 261827 - DNA, 20 bp, synthetic construct
  source 1..20: mol_type = other DNA
acactgcttacttttgaacc

SEQ ID NO: 261828 - DNA, 20 bp, synthetic construct
  source 1..20: mol_type = other DNA
aacactgcttacttttgaac

SEQ ID NO: 261829 - DNA, 20 bp, synthetic construct
  source 1..20: mol_type = other DNA
caacactgcttacttttgaa

SEQ ID NO: 261830 - DNA, 20 bp, synthetic construct
  source 1..20: mol_type = other DNA
acaacactgcttacttttga

SEQ ID NO: 261831 - DNA, 20 bp, synthetic construct
  source 1..20: mol_type = other DNA
aacaacactgcttacttttg

SEQ ID NO: 261832 - DNA, 20 bp, synthetic construct
  source 1..20: mol_type = other DNA
aaacaacactgcttactttt

SEQ ID NO: 261833 - DNA, 20 bp, synthetic construct
  source 1..20: mol_type = other DNA
taaacaacactgcttacttt

SEQ ID NO: 261834 - DNA, 20 bp, synthetic construct
  source 1..20: mol_type = other DNA
gtaaacaacactgcttactt

SEQ ID NO: 261835 - DNA, 20 bp, synthetic construct
  source 1..20: mol_type = other DNA
tgtaaacaacactgcttact

SEQ ID NO: 261836 - DNA, 20 bp, synthetic construct
  source 1..20: mol_type = other DNA
gtgtaaacaacactgcttac

SEQ ID NO: 261837 - DNA, 20 bp, synthetic construct
  source 1..20: mol_type = other DNA
agtgtaaacaacactgctta

SEQ ID NO: 261838 - DNA, 20 bp, synthetic construct
  source 1..20: mol_type = other DNA
cagtgtaaacaacactgctt

SEQ ID NO: 261839 - DNA, 20 bp, synthetic construct
  source 1..20: mol_type = other DNA
tcagtgtaaacaacactgct

SEQ ID NO: 261840 - DNA, 20 bp, synthetic construct
  source 1..20: mol_type = other DNA
gtcagtgtaaacaacactgc

SEQ ID NO: 261841 - DNA, 20 bp, synthetic construct
  source 1..20: mol_type = other DNA
tgtcagtgtaaacaacactg

SEQ ID NO: 261842 - DNA, 20 bp, synthetic construct
  source 1..20: mol_type = other DNA
ttgtcagtgtaaacaacact

SEQ ID NO: 261843 - DNA, 20 bp, synthetic construct
  source 1..20: mol_type = other DNA
tttgtcagtgtaaacaacac

SEQ ID NO: 261844 - DNA, 20 bp, synthetic construct
  source 1..20: mol_type = other DNA
gtttgtcagtgtaaacaaca

SEQ ID NO: 261845 - DNA, 20 bp, synthetic construct
  source 1..20: mol_type = other DNA
agtttgtcagtgtaaacaac

SEQ ID NO: 261846 - DNA, 20 bp, synthetic construct
  source 1..20: mol_type = other DNA
cagtttgtcagtgtaaacaa

SEQ ID NO: 261847 - DNA, 20 bp, synthetic construct
  source 1..20: mol_type = other DNA
tcagtttgtcagtgtaaaca

SEQ ID NO: 261848 - DNA, 20 bp, synthetic construct
  source 1..20: mol_type = other DNA
ttcagtttgtcagtgtaaac

SEQ ID NO: 261849 - DNA, 20 bp, synthetic construct
  source 1..20: mol_type = other DNA
tttcagtttgtcagtgtaaa

SEQ ID NO: 261850 - DNA, 20 bp, synthetic construct
  source 1..20: mol_type = other DNA
ttttcagtttgtcagtgtaa

SEQ ID NO: 261851 - DNA, 20 bp, synthetic construct
  source 1..20: mol_type = other DNA
tttttcagtttgtcagtgta

SEQ ID NO: 261852 - DNA, 20 bp, synthetic construct
  source 1..20: mol_type = other DNA
ttttttcagtttgtcagtgt

SEQ ID NO: 261853 - DNA, 20 bp, synthetic construct
  source 1..20: mol_type = other DNA
tttttttcagtttgtcagtg

SEQ ID NO: 261854 - DNA, 20 bp, synthetic construct
  source 1..20: mol_type = other DNA
ttttttttcagtttgtcagt

SEQ ID NO: 261855 - DNA, 20 bp, synthetic construct
  source 1..20: mol_type = other DNA
tttttttttcagtttgtcag

SEQ ID NO: 261856 - DNA, 20 bp, synthetic construct
  source 1..20: mol_type = other DNA
ctttttttttcagtttgtca

SEQ ID NO: 261857 - DNA, 20 bp, synthetic construct
  source 1..20: mol_type = other DNA
tctttttttttcagtttgtc

SEQ ID NO: 261858 - DNA, 20 bp, synthetic construct
  source 1..20: mol_type = other DNA
ttctttttttttcagtttgt

SEQ ID NO: 261859 - DNA, 20 bp, synthetic construct
  source 1..20: mol_type = other DNA
tttctttttttttcagtttg

SEQ ID NO: 261860 - DNA, 20 bp, synthetic construct
  source 1..20: mol_type = other DNA
ttttctttttttttcagttt

SEQ ID NO: 261861 - DNA, 20 bp, synthetic construct
  source 1..20: mol_type = other DNA
tttttctttttttttcagtt

SEQ ID NO: 261862 - DNA, 20 bp, synthetic construct
  source 1..20: mol_type = other DNA
ctttttctttttttttcagt

SEQ ID NO: 261863 - DNA, 20 bp, synthetic construct
  source 1..20: mol_type = other DNA
tctttttctttttttttcag

SEQ ID NO: 261864 - DNA, 20 bp, synthetic construct
  source 1..20: mol_type = other DNA
ctctttttctttttttttca

SEQ ID NO: 261865 - DNA, 20 bp, synthetic construct
  source 1..20: mol_type = other DNA
tctctttttctttttttttc

SEQ ID NO: 261866 - DNA, 20 bp, synthetic construct
  source 1..20: mol_type = other DNA
atctctttttcttttttttt

SEQ ID NO: 261867 - DNA, 20 bp, synthetic construct
  source 1..20: mol_type = other DNA
tatctctttttctttttttt

SEQ ID NO: 261868 - DNA, 20 bp, synthetic construct
  source 1..20: mol_type = other DNA
ttatctctttttcttttttt

SEQ ID NO: 261869 - DNA, 20 bp, synthetic construct
  source 1..20: mol_type = other DNA
gttatctctttttctttttt

SEQ ID NO: 261870 - DNA, 20 bp, synthetic construct
  source 1..20: mol_type = other DNA
tgttatctctttttcttttt

SEQ ID NO: 261871 - DNA, 20 bp, synthetic construct
  source 1..20: mol_type = other DNA
atgttatctctttttctttt

SEQ ID NO: 261872 - DNA, 20 bp, synthetic construct
  source 1..20: mol_type = other DNA
aatgttatctctttttcttt

SEQ ID NO: 261873 - DNA, 20 bp, synthetic construct
  source 1..20: mol_type = other DNA
caatgttatctctttttctt

SEQ ID NO: 261874 - DNA, 20 bp, synthetic construct
  source 1..20: mol_type = other DNA
ccaatgttatctctttttct

SEQ ID NO: 261875 - DNA, 20 bp, synthetic construct
  source 1..20: mol_type = other DNA
tccaatgttatctctttttc

SEQ ID NO: 261876 - DNA, 20 bp, synthetic construct
  source 1..20: mol_type = other DNA
ctccaatgttatctcttttt

SEQ ID NO: 261877 - DNA, 20 bp, synthetic construct
  source 1..20: mol_type = other DNA
cctccaatgttatctctttt

SEQ ID NO: 261878 - DNA, 20 bp, synthetic construct
  source 1..20: mol_type = other DNA
gcctccaatgttatctcttt

SEQ ID NO: 261879 - DNA, 20 bp, synthetic construct
  source 1..20: mol_type = other DNA
agcctccaatgttatctctt

SEQ ID NO: 261880 - DNA, 20 bp, synthetic construct
  source 1..20: mol_type = other DNA
aagcctccaatgttatctct

SEQ ID NO: 261881 - DNA, 20 bp, synthetic construct
  source 1..20: mol_type = other DNA
caagcctccaatgttatctc

SEQ ID NO: 261882 - DNA, 20 bp, synthetic construct
  source 1..20: mol_type = other DNA
ccaagcctccaatgttatct

SEQ ID NO: 261883 - DNA, 20 bp, synthetic construct
  source 1..20: mol_type = other DNA
gccaagcctccaatgttatc

SEQ ID NO: 261884 - DNA, 20 bp, synthetic construct
  source 1..20: mol_type = other DNA
tgccaagcctccaatgttat

SEQ ID NO: 261885 - DNA, 20 bp, synthetic construct
  source 1..20: mol_type = other DNA
gtgccaagcctccaatgtta

SEQ ID NO: 261886 - DNA, 20 bp, synthetic construct
  source 1..20: mol_type = other DNA
tgtgccaagcctccaatgtt

SEQ ID NO: 261887 - DNA, 20 bp, synthetic construct
  source 1..20: mol_type = other DNA
ctgtgccaagcctccaatgt

SEQ ID NO: 261888 - DNA, 20 bp, synthetic construct
  source 1..20: mol_type = other DNA
actgtgccaagcctccaatg

SEQ ID NO: 261889 - DNA, 20 bp, synthetic construct
  source 1..20: mol_type = other DNA
cactgtgccaagcctccaat

SEQ ID NO: 261890 - DNA, 20 bp, synthetic construct
  source 1..20: mol_type = other DNA
ccactgtgccaagcctccaa

SEQ ID NO: 261891 - DNA, 20 bp, synthetic construct
  source 1..20: mol_type = other DNA
gccactgtgccaagcctcca

SEQ ID NO: 261892 - DNA, 20 bp, synthetic construct
  source 1..20: mol_type = other DNA
agccactgtgccaagcctcc

SEQ ID NO: 261893 - DNA, 20 bp, synthetic construct
  source 1..20: mol_type = other DNA
gagccactgtgccaagcctc

SEQ ID NO: 261894 - DNA, 20 bp, synthetic construct
  source 1..20: mol_type = other DNA
tgagccactgtgccaagcct

SEQ ID NO: 261895 - DNA, 20 bp, synthetic construct
  source 1..20: mol_type = other DNA
atgagccactgtgccaagcc

SEQ ID NO: 261896 - DNA, 20 bp, synthetic construct
  source 1..20: mol_type = other DNA
catgagccactgtgccaagc

SEQ ID NO: 261897 - DNA, 20 bp, synthetic construct
  source 1..20: mol_type = other DNA
gcatgagccactgtgccaag

SEQ ID NO: 261898 - DNA, 20 bp, synthetic construct
  source 1..20: mol_type = other DNA
ggcatgagccactgtgccaa

SEQ ID NO: 261899 - DNA, 20 bp, synthetic construct
  source 1..20: mol_type = other DNA
aggcatgagccactgtgcca

SEQ ID NO: 261900 - DNA, 20 bp, synthetic construct
  source 1..20: mol_type = other DNA
caggcatgagccactgtgcc

SEQ ID NO: 261901 - DNA, 20 bp, synthetic construct
  source 1..20: mol_type = other DNA
acaggcatgagccactgtgc

SEQ ID NO: 261902 - DNA, 20 bp, synthetic construct
  source 1..20: mol_type = other DNA
tacaggcatgagccactgtg

SEQ ID NO: 261903 - DNA, 20 bp, synthetic construct
  source 1..20: mol_type = other DNA
ttacaggcatgagccactgt

SEQ ID NO: 261904 - DNA, 20 bp, synthetic construct
  source 1..20: mol_type = other DNA
attacaggcatgagccactg

SEQ ID NO: 261905 - DNA, 20 bp, synthetic construct
  source 1..20: mol_type = other DNA
gattacaggcatgagccact

SEQ ID NO: 261906 - DNA, 20 bp, synthetic construct
  source 1..20: mol_type = other DNA
ggattacaggcatgagccac

SEQ ID NO: 261907 - DNA, 20 bp, synthetic construct
  source 1..20: mol_type = other DNA
gggattacaggcatgagcca

SEQ ID NO: 261908 - DNA, 20 bp, synthetic construct
  source 1..20: mol_type = other DNA
tgggattacaggcatgagcc

SEQ ID NO: 261909 - DNA, 20 bp, synthetic construct
  source 1..20: mol_type = other DNA
ctgggattacaggcatgagc

SEQ ID NO: 261910 - DNA, 20 bp, synthetic construct
  source 1..20: mol_type = other DNA
gctgggattacaggcatgag

SEQ ID NO: 261911 - DNA, 20 bp, synthetic construct
  source 1..20: mol_type = other DNA
tgctgggattacaggcatga

SEQ ID NO: 261912 - DNA, 20 bp, synthetic construct
  source 1..20: mol_type = other DNA
gtgctgggattacaggcatg

SEQ ID NO: 261913 - DNA, 20 bp, synthetic construct
  source 1..20: mol_type = other DNA
agtgctgggattacaggcat

SEQ ID NO: 261914 - DNA, 20 bp, synthetic construct
  source 1..20: mol_type = other DNA
aagtgctgggattacaggca

SEQ ID NO: 261915 - DNA, 20 bp, synthetic construct
  source 1..20: mol_type = other DNA
aaagtgctgggattacaggc

SEQ ID NO: 261916 - DNA, 20 bp, synthetic construct
  source 1..20: mol_type = other DNA
caaagtgctgggattacagg

SEQ ID NO: 261917 - DNA, 20 bp, synthetic construct
  source 1..20: mol_type = other DNA
ccaaagtgctgggattacag

SEQ ID NO: 261918 - DNA, 20 bp, synthetic construct
  source 1..20: mol_type = other DNA
cccaaagtgctgggattaca

SEQ ID NO: 261919 - DNA, 20 bp, synthetic construct
  source 1..20: mol_type = other DNA
tcccaaagtgctgggattac

SEQ ID NO: 261920 - DNA, 20 bp, synthetic construct
  source 1..20: mol_type = other DNA
ctcccaaagtgctgggatta

SEQ ID NO: 261921 - DNA, 20 bp, synthetic construct
  source 1..20: mol_type = other DNA
cctcccaaagtgctgggatt

SEQ ID NO: 261922 - DNA, 20 bp, synthetic construct
  source 1..20: mol_type = other DNA
gcctcccaaagtgctgggat

SEQ ID NO: 261923 - DNA, 20 bp, synthetic construct
  source 1..20: mol_type = other DNA
agcctcccaaagtgctggga

SEQ ID NO: 261924 - DNA, 20 bp, synthetic construct
  source 1..20: mol_type = other DNA
tagcctcccaaagtgctggg

SEQ ID NO: 261925 - DNA, 20 bp, synthetic construct
  source 1..20: mol_type = other DNA
ttagcctcccaaagtgctgg

SEQ ID NO: 261926 - DNA, 20 bp, synthetic construct
  source 1..20: mol_type = other DNA
cttagcctcccaaagtgctg

SEQ ID NO: 261927 - DNA, 20 bp, synthetic construct
  source 1..20: mol_type = other DNA
ccttagcctcccaaagtgct

SEQ ID NO: 261928 - DNA, 20 bp, synthetic construct
  source 1..20: mol_type = other DNA
accttagcctcccaaagtgc

SEQ ID NO: 261929 - DNA, 20 bp, synthetic construct
  source 1..20: mol_type = other DNA
caccttagcctcccaaagtg

SEQ ID NO: 261930 - DNA, 20 bp, synthetic construct
  source 1..20: mol_type = other DNA
ccaccttagcctcccaaagt

SEQ ID NO: 261931 - DNA, 20 bp, synthetic construct
  source 1..20: mol_type = other DNA
cccaccttagcctcccaaag

SEQ ID NO: 261932 - DNA, 20 bp, synthetic construct
  source 1..20: mol_type = other DNA
tcccaccttagcctcccaaa

SEQ ID NO: 261933 - DNA, 20 bp, synthetic construct
  source 1..20: mol_type = other DNA
ctcccaccttagcctcccaa

SEQ ID NO: 261934 - DNA, 20 bp, synthetic construct
  source 1..20: mol_type = other DNA
cctcccaccttagcctccca

SEQ ID NO: 261935 - DNA, 20 bp, synthetic construct
  source 1..20: mol_type = other DNA
tcctcccaccttagcctccc

SEQ ID NO: 261936 - DNA, 20 bp, synthetic construct
  source 1..20: mol_type = other DNA
atcctcccaccttagcctcc

SEQ ID NO: 261937 - DNA, 20 bp, synthetic construct
  source 1..20: mol_type = other DNA
catcctcccaccttagcctc

SEQ ID NO: 261938 - DNA, 20 bp, synthetic construct
  source 1..20: mol_type = other DNA
acatcctcccaccttagcct

SEQ ID NO: 261939 - DNA, 20 bp, synthetic construct
  source 1..20: mol_type = other DNA
gacatcctcccaccttagcc

SEQ ID NO: 261940 - DNA, 20 bp, synthetic construct
  source 1..20: mol_type = other DNA
ggacatcctcccaccttagc

SEQ ID NO: 261941 - DNA, 20 bp, synthetic construct
  source 1..20: mol_type = other DNA
gggacatcctcccaccttag

SEQ ID NO: 261942 - DNA, 20 bp, synthetic construct
  source 1..20: mol_type = other DNA
ggggacatcctcccacctta

SEQ ID NO: 261943 - DNA, 20 bp, synthetic construct
  source 1..20: mol_type = other DNA
tggggacatcctcccacctt

SEQ ID NO: 261944 - DNA, 20 bp, synthetic construct
  source 1..20: mol_type = other DNA
ctggggacatcctcccacct

SEQ ID NO: 261945 - DNA, 20 bp, synthetic construct
  source 1..20: mol_type = other DNA
gctggggacatcctcccacc

SEQ ID NO: 261946 - DNA, 20 bp, synthetic construct
  source 1..20: mol_type = other DNA
ggctggggacatcctcccac

SEQ ID NO: 261947 - DNA, 20 bp, synthetic construct
  source 1..20: mol_type = other DNA
gggctggggacatcctccca

SEQ ID NO: 261948 - DNA, 20 bp, synthetic construct
  source 1..20: mol_type = other DNA
tgggctggggacatcctccc

SEQ ID NO: 261949 - DNA, 20 bp, synthetic construct
  source 1..20: mol_type = other DNA
ttgggctggggacatcctcc

SEQ ID NO: 261950 - DNA, 20 bp, synthetic construct
  source 1..20: mol_type = other DNA
cttgggctggggacatcctc

SEQ ID NO: 261951 - DNA, 20 bp, synthetic construct
  source 1..20: mol_type = other DNA
tcttgggctggggacatcct

SEQ ID NO: 261952 - DNA, 20 bp, synthetic construct
  source 1..20: mol_type = other DNA
ctcttgggctggggacatcc

SEQ ID NO: 261953 - DNA, 20 bp, synthetic construct
  source 1..20: mol_type = other DNA
actcttgggctggggacatc

SEQ ID NO: 261954 - DNA, 20 bp, synthetic construct
  source 1..20: mol_type = other DNA
aactcttgggctggggacat

SEQ ID NO: 261955 - DNA, 20 bp, synthetic construct
  source 1..20: mol_type = other DNA
gaactcttgggctggggaca

SEQ ID NO: 261956 - DNA, 20 bp, synthetic construct
  source 1..20: mol_type = other DNA
agaactcttgggctggggac

SEQ ID NO: 261957 - DNA, 20 bp, synthetic construct
  source 1..20: mol_type = other DNA
tagaactcttgggctgggga

SEQ ID NO: 261958 - DNA, 20 bp, synthetic construct
  source 1..20: mol_type = other DNA
ctagaactcttgggctgggg

SEQ ID NO: 261959 - DNA, 20 bp, synthetic construct
  source 1..20: mol_type = other DNA
tctagaactcttgggctggg

SEQ ID NO: 261960 - DNA, 20 bp, synthetic construct
  source 1..20: mol_type = other DNA
gtctagaactcttgggctgg

SEQ ID NO: 261961 - DNA, 20 bp, synthetic construct
  source 1..20: mol_type = other DNA
ggtctagaactcttgggctg

SEQ ID NO: 261962 - DNA, 20 bp, synthetic construct
  source 1..20: mol_type = other DNA
tggtctagaactcttgggct

SEQ ID NO: 261963 - DNA, 20 bp, synthetic construct
  source 1..20: mol_type = other DNA
ctggtctagaactcttgggc

SEQ ID NO: 261964 - DNA, 20 bp, synthetic construct
  source 1..20: mol_type = other DNA
gctggtctagaactcttggg

SEQ ID NO: 261965 - DNA, 20 bp, synthetic construct
  source 1..20: mol_type = other DNA
ggctggtctagaactcttgg

SEQ ID NO: 261966 - DNA, 20 bp, synthetic construct
  source 1..20: mol_type = other DNA
aggctggtctagaactcttg

SEQ ID NO: 261967 - DNA, 20 bp, synthetic construct
  source 1..20: mol_type = other DNA
caggctggtctagaactctt

SEQ ID NO: 261968 - DNA, 20 bp, synthetic construct
  source 1..20: mol_type = other DNA
ccaggctggtctagaactct

SEQ ID NO: 261969 - DNA, 20 bp, synthetic construct
  source 1..20: mol_type = other DNA
cccaggctggtctagaactc

SEQ ID NO: 261970 - DNA, 20 bp, synthetic construct
  source 1..20: mol_type = other DNA
gcccaggctggtctagaact

SEQ ID NO: 261971 - DNA, 20 bp, synthetic construct
  source 1..20: mol_type = other DNA
tgcccaggctggtctagaac

SEQ ID NO: 261972 - DNA, 20 bp, synthetic construct
  source 1..20: mol_type = other DNA
ttgcccaggctggtctagaa

SEQ ID NO: 261973 - DNA, 20 bp, synthetic construct
  source 1..20: mol_type = other DNA
gttgcccaggctggtctaga

SEQ ID NO: 261974 - DNA, 20 bp, synthetic construct
  source 1..20: mol_type = other DNA
tgttgcccaggctggtctag

SEQ ID NO: 261975 - DNA, 20 bp, synthetic construct
  source 1..20: mol_type = other DNA
atgttgcccaggctggtcta

SEQ ID NO: 261976 - DNA, 20 bp, synthetic construct
  source 1..20: mol_type = other DNA
tatgttgcccaggctggtct

SEQ ID NO: 261977 - DNA, 20 bp, synthetic construct
  source 1..20: mol_type = other DNA
ctatgttgcccaggctggtc

SEQ ID NO: 261978 - DNA, 20 bp, synthetic construct
  source 1..20: mol_type = other DNA
gctatgttgcccaggctggt

SEQ ID NO: 261979 - DNA, 20 bp, synthetic construct
  source 1..20: mol_type = other DNA
tgctatgttgcccaggctgg

SEQ ID NO: 261980 - DNA, 20 bp, synthetic construct
  source 1..20: mol_type = other DNA
ttgctatgttgcccaggctg

SEQ ID NO: 261981 - DNA, 20 bp, synthetic construct
  source 1..20: mol_type = other DNA
cttgctatgttgcccaggct

SEQ ID NO: 261982 - DNA, 20 bp, synthetic construct
  source 1..20: mol_type = other DNA
tcttgctatgttgcccaggc

SEQ ID NO: 261983 - DNA, 20 bp, synthetic construct
  source 1..20: mol_type = other DNA
gtcttgctatgttgcccagg

SEQ ID NO: 261984 - DNA, 20 bp, synthetic construct
  source 1..20: mol_type = other DNA
ggtcttgctatgttgcccag

SEQ ID NO: 261985 - DNA, 20 bp, synthetic construct
  source 1..20: mol_type = other DNA
gggtcttgctatgttgccca

SEQ ID NO: 261986 - DNA, 20 bp, synthetic construct
  source 1..20: mol_type = other DNA
ggggtcttgctatgttgccc

SEQ ID NO: 261987 - DNA, 20 bp, synthetic construct
  source 1..20: mol_type = other DNA
tggggtcttgctatgttgcc

SEQ ID NO: 261988 - DNA, 20 bp, synthetic construct
  source 1..20: mol_type = other DNA
atggggtcttgctatgttgc

SEQ ID NO: 261989 - DNA, 20 bp, synthetic construct
  source 1..20: mol_type = other DNA
gatggggtcttgctatgttg

SEQ ID NO: 261990 - DNA, 20 bp, synthetic construct
  source 1..20: mol_type = other DNA
agatggggtcttgctatgtt

SEQ ID NO: 261991 - DNA, 20 bp, synthetic construct
  source 1..20: mol_type = other DNA
gagatggggtcttgctatgt

SEQ ID NO: 261992 - DNA, 20 bp, synthetic construct
  source 1..20: mol_type = other DNA
tgagatggggtcttgctatg

SEQ ID NO: 261993 - DNA, 20 bp, synthetic construct
  source 1..20: mol_type = other DNA
ttgagatggggtcttgctat

SEQ ID NO: 261994 - DNA, 20 bp, synthetic construct
  source 1..20: mol_type = other DNA
tttgagatggggtcttgcta

SEQ ID NO: 261995 - DNA, 20 bp, synthetic construct
  source 1..20: mol_type = other DNA
ttttgagatggggtcttgct

SEQ ID NO: 261996 - DNA, 20 bp, synthetic construct
  source 1..20: mol_type = other DNA
tttttgagatggggtcttgc

SEQ ID NO: 261997 - DNA, 20 bp, synthetic construct
  source 1..20: mol_type = other DNA
ttttttgagatggggtcttg

SEQ ID NO: 261998 - DNA, 20 bp, synthetic construct
  source 1..20: mol_type = other DNA
tttttttgagatggggtctt

SEQ ID NO: 261999 - DNA, 20 bp, synthetic construct
  source 1..20: mol_type = other DNA
ttttttttgagatggggtct

SEQ ID NO: 262000 - DNA, 20 bp, synthetic construct
  source 1..20: mol_type = other DNA
tttttttttgagatggggtc

SEQ ID NO: 262001 - DNA, 20 bp, synthetic construct
  source 1..20: mol_type = other DNA
ttttttttttgagatggggt

SEQ ID NO: 262002 - DNA, 20 bp, synthetic construct
  source 1..20: mol_type = other DNA
attttttttttgagatgggg

SEQ ID NO: 262003 - DNA, 20 bp, synthetic construct
  source 1..20: mol_type = other DNA
aattttttttttgagatggg

SEQ ID NO: 262004 - DNA, 20 bp, synthetic construct
  source 1..20: mol_type = other DNA
aaattttttttttgagatgg

SEQ ID NO: 262005 - DNA, 20 bp, synthetic construct
  source 1..20: mol_type = other DNA
taaattttttttttgagatg

SEQ ID NO: 262006 - DNA, 20 bp, synthetic construct
  source 1..20: mol_type = other DNA
ttaaattttttttttgagat

SEQ ID NO: 262007 - DNA, 20 bp, synthetic construct
  source 1..20: mol_type = other DNA
attaaattttttttttgaga

SEQ ID NO: 262008 - DNA, 20 bp, synthetic construct
  source 1..20: mol_type = other DNA
aattaaattttttttttgag

SEQ ID NO: 262009 - DNA, 20 bp, synthetic construct
  source 1..20: mol_type = other DNA
caattaaattttttttttga

SEQ ID NO: 262010 - DNA, 20 bp, synthetic construct
  source 1..20: mol_type = other DNA
ccaattaaattttttttttg

SEQ ID NO: 262011 - DNA, 20 bp, synthetic construct
  source 1..20: mol_type = other DNA
gccaattaaatttttttttt

SEQ ID NO: 262012 - DNA, 20 bp, synthetic construct
  source 1..20: mol_type = other DNA
ggccaattaaattttttttt

SEQ ID NO: 262013 - DNA, 20 bp, synthetic construct
  source 1..20: mol_type = other DNA
tggccaattaaatttttttt

SEQ ID NO: 262014 - DNA, 20 bp, synthetic construct
  source 1..20: mol_type = other DNA
ctggccaattaaattttttt

SEQ ID NO: 262015 - DNA, 20 bp, synthetic construct
  source 1..20: mol_type = other DNA
cctggccaattaaatttttt

SEQ ID NO: 262016 - DNA, 20 bp, synthetic construct
  source 1..20: mol_type = other DNA
gcctggccaattaaattttt

SEQ ID NO: 262017 - DNA, 20 bp, synthetic construct
  source 1..20: mol_type = other DNA
tgcctggccaattaaatttt

SEQ ID NO: 262018 - DNA, 20 bp, synthetic construct
  source 1..20: mol_type = other DNA
ctgcctggccaattaaattt

SEQ ID NO: 262019 - DNA, 20 bp, synthetic construct
  source 1..20: mol_type = other DNA
tctgcctggccaattaaatt

SEQ ID NO: 262020 - DNA, 20 bp, synthetic construct
  source 1..20: mol_type = other DNA
ctctgcctggccaattaaat

SEQ ID NO: 262021 - DNA, 20 bp, synthetic construct
  source 1..20: mol_type = other DNA
cctctgcctggccaattaaa

SEQ ID NO: 262022 - DNA, 20 bp, synthetic construct
  source 1..20: mol_type = other DNA
acctctgcctggccaattaa

SEQ ID NO: 262023 - DNA, 20 bp, synthetic construct
  source 1..20: mol_type = other DNA
cacctctgcctggccaatta

SEQ ID NO: 262024 - DNA, 20 bp, synthetic construct
  source 1..20: mol_type = other DNA
ccacctctgcctggccaatt

SEQ ID NO: 262025 - DNA, 20 bp, synthetic construct
  source 1..20: mol_type = other DNA
cccacctctgcctggccaat

SEQ ID NO: 262026 - DNA, 20 bp, synthetic construct
  source 1..20: mol_type = other DNA
tcccacctctgcctggccaa

SEQ ID NO: 262027 - DNA, 20 bp, synthetic construct
  source 1..20: mol_type = other DNA
ctcccacctctgcctggcca

SEQ ID NO: 262028 - DNA, 20 bp, synthetic construct
  source 1..20: mol_type = other DNA
cctcccacctctgcctggcc

SEQ ID NO: 262029 - DNA, 20 bp, synthetic construct
  source 1..20: mol_type = other DNA
tcctcccacctctgcctggc

SEQ ID NO: 262030 - DNA, 20 bp, synthetic construct
  source 1..20: mol_type = other DNA
atcctcccacctctgcctgg

SEQ ID NO: 262031 - DNA, 20 bp, synthetic construct
  source 1..20: mol_type = other DNA
gatcctcccacctctgcctg

SEQ ID NO: 262032 - DNA, 20 bp, synthetic construct
  source 1..20: mol_type = other DNA
tgatcctcccacctctgcct

SEQ ID NO: 262033 - DNA, 20 bp, synthetic construct
  source 1..20: mol_type = other DNA
gtgatcctcccacctctgcc

SEQ ID NO: 262034 - DNA, 20 bp, synthetic construct
  source 1..20: mol_type = other DNA
agtgatcctcccacctctgc

SEQ ID NO: 262035 - DNA, 20 bp, synthetic construct
  source 1..20: mol_type = other DNA
aagtgatcctcccacctctg

SEQ ID NO: 262036 - DNA, 20 bp, synthetic construct
  source 1..20: mol_type = other DNA
caagtgatcctcccacctct

SEQ ID NO: 262037 - DNA, 20 bp, synthetic construct
  source 1..20: mol_type = other DNA
tcaagtgatcctcccacctc

SEQ ID NO: 262038 - DNA, 20 bp, synthetic construct
  source 1..20: mol_type = other DNA
ttcaagtgatcctcccacct

SEQ ID NO: 262039 - DNA, 20 bp, synthetic construct
  source 1..20: mol_type = other DNA
gttcaagtgatcctcccacc

SEQ ID NO: 262040 - DNA, 20 bp, synthetic construct
  source 1..20: mol_type = other DNA
ggttcaagtgatcctcccac

SEQ ID NO: 262041 - DNA, 20 bp, synthetic construct
  source 1..20: mol_type = other DNA
gggttcaagtgatcctccca

SEQ ID NO: 262042 - DNA, 20 bp, synthetic construct
  source 1..20: mol_type = other DNA
tgggttcaagtgatcctccc

SEQ ID NO: 262043 - DNA, 20 bp, synthetic construct
  source 1..20: mol_type = other DNA
ttgggttcaagtgatcctcc

SEQ ID NO: 262044 - DNA, 20 bp, synthetic construct
  source 1..20: mol_type = other DNA
tttgggttcaagtgatcctc

SEQ ID NO: 262045 - DNA, 20 bp, synthetic construct
  source 1..20: mol_type = other DNA
ctttgggttcaagtgatcct

SEQ ID NO: 262046 - DNA, 20 bp, synthetic construct
  source 1..20: mol_type = other DNA
cctttgggttcaagtgatcc

SEQ ID NO: 262047 - DNA, 20 bp, synthetic construct
  source 1..20: mol_type = other DNA
ccctttgggttcaagtgatc

SEQ ID NO: 262048 - DNA, 20 bp, synthetic construct
  source 1..20: mol_type = other DNA
accctttgggttcaagtgat

SEQ ID NO: 262049 - DNA, 20 bp, synthetic construct
  source 1..20: mol_type = other DNA
caccctttgggttcaagtga

SEQ ID NO: 262050 - DNA, 20 bp, synthetic construct
  source 1..20: mol_type = other DNA
ccaccctttgggttcaagtg

SEQ ID NO: 262051 - DNA, 20 bp, synthetic construct
  source 1..20: mol_type = other DNA
tccaccctttgggttcaagt

SEQ ID NO: 262052 - DNA, 20 bp, synthetic construct
  source 1..20: mol_type = other DNA
ctccaccctttgggttcaag

SEQ ID NO: 262053 - DNA, 20 bp, synthetic construct
  source 1..20: mol_type = other DNA
cctccaccctttgggttcaa

SEQ ID NO: 262054 - DNA, 20 bp, synthetic construct
  source 1..20: mol_type = other DNA
gcctccaccctttgggttca

SEQ ID NO: 262055 - DNA, 20 bp, synthetic construct
  source 1..20: mol_type = other DNA
agcctccaccctttgggttc

SEQ ID NO: 262056 - DNA, 20 bp, synthetic construct
  source 1..20: mol_type = other DNA
cagcctccaccctttgggtt

SEQ ID NO: 262057 - DNA, 20 bp, synthetic construct
  source 1..20: mol_type = other DNA
gcagcctccaccctttgggt

SEQ ID NO: 262058 - DNA, 20 bp, synthetic construct
  source 1..20: mol_type = other DNA
tgcagcctccaccctttggg

SEQ ID NO: 262059 - DNA, 20 bp, synthetic construct
  source 1..20: mol_type = other DNA
ctgcagcctccaccctttgg

SEQ ID NO: 262060 - DNA, 20 bp, synthetic construct
  source 1..20: mol_type = other DNA
actgcagcctccaccctttg

SEQ ID NO: 262061 - DNA, 20 bp, synthetic construct
  source 1..20: mol_type = other DNA
cactgcagcctccacccttt

SEQ ID NO: 262062 - DNA, 20 bp, synthetic construct
  source 1..20: mol_type = other DNA
tcactgcagcctccaccctt

SEQ ID NO: 262063 - DNA, 20 bp, synthetic construct
  source 1..20: mol_type = other DNA
ctcactgcagcctccaccct

SEQ ID NO: 262064 - DNA, 20 bp, synthetic construct
  source 1..20: mol_type = other DNA
gctcactgcagcctccaccc

SEQ ID NO: 262065 - DNA, 20 bp, synthetic construct
  source 1..20: mol_type = other DNA
ggctcactgcagcctccacc

SEQ ID NO: 262066 - DNA, 20 bp, synthetic construct
  source 1..20: mol_type = other DNA
cggctcactgcagcctccac

SEQ ID NO: 262067 - DNA, 20 bp, synthetic construct
  source 1..20: mol_type = other DNA
acggctcactgcagcctcca

SEQ ID NO: 262068 - DNA, 20 bp, synthetic construct
  source 1..20: mol_type = other DNA
cacggctcactgcagcctcc

SEQ ID NO: 262069 - DNA, 20 bp, synthetic construct
  source 1..20: mol_type = other DNA
tcacggctcactgcagcctc

SEQ ID NO: 262070 - DNA, 20 bp, synthetic construct
  source 1..20: mol_type = other DNA
atcacggctcactgcagcct

SEQ ID NO: 262071 - DNA, 20 bp, synthetic construct
  source 1..20: mol_type = other DNA
catcacggctcactgcagcc

SEQ ID NO: 262072 - DNA, 20 bp, synthetic construct
  source 1..20: mol_type = other DNA
ccatcacggctcactgcagc

SEQ ID NO: 262073 - DNA, 20 bp, synthetic construct
  source 1..20: mol_type = other DNA
gccatcacggctcactgcag

SEQ ID NO: 262074 - DNA, 20 bp, synthetic construct
  source 1..20: mol_type = other DNA
tgccatcacggctcactgca

SEQ ID NO: 262075 - DNA, 20 bp, synthetic construct
  source 1..20: mol_type = other DNA
gtgccatcacggctcactgc

SEQ ID NO: 262076 - DNA, 20 bp, synthetic construct
  source 1..20: mol_type = other DNA
ggtgccatcacggctcactg

SEQ ID NO: 262077 - DNA, 20 bp, synthetic construct
  source 1..20: mol_type = other DNA
tggtgccatcacggctcact

SEQ ID NO: 262078 - DNA, 20 bp, synthetic construct
  source 1..20: mol_type = other DNA
gtggtgccatcacggctcac

SEQ ID NO: 262079 - DNA, 20 bp, synthetic construct
  source 1..20: mol_type = other DNA
agtggtgccatcacggctca

SEQ ID NO: 262080 - DNA, 20 bp, synthetic construct
  source 1..20: mol_type = other DNA
cagtggtgccatcacggctc

SEQ ID NO: 262081 - DNA, 20 bp, synthetic construct
  source 1..20: mol_type = other DNA
gcagtggtgccatcacggct

SEQ ID NO: 262082 - DNA, 20 bp, synthetic construct
  source 1..20: mol_type = other DNA
tgcagtggtgccatcacggc

SEQ ID NO: 262083 - DNA, 20 bp, synthetic construct
  source 1..20: mol_type = other DNA
gtgcagtggtgccatcacgg

SEQ ID NO: 262084 - DNA, 20 bp, synthetic construct
  source 1..20: mol_type = other DNA
agtgcagtggtgccatcacg

SEQ ID NO: 262085 - DNA, 20 bp, synthetic construct
  source 1..20: mol_type = other DNA
gagtgcagtggtgccatcac

SEQ ID NO: 262086 - DNA, 20 bp, synthetic construct
  source 1..20: mol_type = other DNA
ggagtgcagtggtgccatca

SEQ ID NO: 262087 - DNA, 20 bp, synthetic construct
  source 1..20: mol_type = other DNA
tggagtgcagtggtgccatc

SEQ ID NO: 262088 - DNA, 20 bp, synthetic construct
  source 1..20: mol_type = other DNA
ctggagtgcagtggtgccat

SEQ ID NO: 262089 - DNA, 20 bp, synthetic construct
  source 1..20: mol_type = other DNA
gctggagtgcagtggtgcca

SEQ ID NO: 262090 - DNA, 20 bp, synthetic construct
  source 1..20: mol_type = other DNA
ggctggagtgcagtggtgcc

SEQ ID NO: 262091 - DNA, 20 bp, synthetic construct
  source 1..20: mol_type = other DNA
tggctggagtgcagtggtgc

SEQ ID NO: 262092 - DNA, 20 bp, synthetic construct
  source 1..20: mol_type = other DNA
ctggctggagtgcagtggtg

SEQ ID NO: 262093 - DNA, 20 bp, synthetic construct
  source 1..20: mol_type = other DNA
cctggctggagtgcagtggt

SEQ ID NO: 262094 - DNA, 20 bp, synthetic construct
  source 1..20: mol_type = other DNA
ccctggctggagtgcagtgg

SEQ ID NO: 262095 - DNA, 20 bp, synthetic construct
  source 1..20: mol_type = other DNA
gccctggctggagtgcagtg

SEQ ID NO: 262096 - DNA, 20 bp, synthetic construct
  source 1..20: mol_type = other DNA
tgccctggctggagtgcagt

SEQ ID NO: 262097 - DNA, 20 bp, synthetic construct
  source 1..20: mol_type = other DNA
ttgccctggctggagtgcag

SEQ ID NO: 262098 - DNA, 20 bp, synthetic construct
  source 1..20: mol_type = other DNA
gttgccctggctggagtgca

SEQ ID NO: 262099 - DNA, 20 bp, synthetic construct
  source 1..20: mol_type = other DNA
tgttgccctggctggagtgc

SEQ ID NO: 262100 - DNA, 20 bp, synthetic construct
  source 1..20: mol_type = other DNA
ctgttgccctggctggagtg

SEQ ID NO: 262101 - DNA, 20 bp, synthetic construct
  source 1..20: mol_type = other DNA
tctgttgccctggctggagt

SEQ ID NO: 262102 - DNA, 20 bp, synthetic construct
  source 1..20: mol_type = other DNA
ctctgttgccctggctggag

SEQ ID NO: 262103 - DNA, 20 bp, synthetic construct
  source 1..20: mol_type = other DNA
cctctgttgccctggctgga

SEQ ID NO: 262104 - DNA, 20 bp, synthetic construct
  source 1..20: mol_type = other DNA
ccctctgttgccctggctgg

SEQ ID NO: 262105 - DNA, 20 bp, synthetic construct
  source 1..20: mol_type = other DNA
tccctctgttgccctggctg

SEQ ID NO: 262106 - DNA, 20 bp, synthetic construct
  source 1..20: mol_type = other DNA
ctccctctgttgccctggct

SEQ ID NO: 262107 - DNA, 20 bp, synthetic construct
  source 1..20: mol_type = other DNA
tctccctctgttgccctggc

SEQ ID NO: 262108 - DNA, 20 bp, synthetic construct
  source 1..20: mol_type = other DNA
gtctccctctgttgccctgg

SEQ ID NO: 262109 - DNA, 20 bp, synthetic construct
  source 1..20: mol_type = other DNA
ggtctccctctgttgccctg

SEQ ID NO: 262110 - DNA, 20 bp, synthetic construct
  source 1..20: mol_type = other DNA
gggtctccctctgttgccct

SEQ ID NO: 262111 - DNA, 20 bp, synthetic construct
  source 1..20: mol_type = other DNA
agggtctccctctgttgccc

SEQ ID NO: 262112 - DNA, 20 bp, synthetic construct
  source 1..20: mol_type = other DNA
cagggtctccctctgttgcc

SEQ ID NO: 262113 - DNA, 20 bp, synthetic construct
  source 1..20: mol_type = other DNA
acagggtctccctctgttgc

SEQ ID NO: 262114 - DNA, 20 bp, synthetic construct
  source 1..20: mol_type = other DNA
gacagggtctccctctgttg

SEQ ID NO: 262115 - DNA, 20 bp, synthetic construct
  source 1..20: mol_type = other DNA
agacagggtctccctctgtt

SEQ ID NO: 262116 - DNA, 20 bp, synthetic construct
  source 1..20: mol_type = other DNA
gagacagggtctccctctgt

SEQ ID NO: 262117 - DNA, 20 bp, synthetic construct
  source 1..20: mol_type = other DNA
agagacagggtctccctctg

SEQ ID NO: 262118 - DNA, 20 bp, synthetic construct
  source 1..20: mol_type = other DNA
tagagacagggtctccctct

SEQ ID NO: 262119 - DNA, 20 bp, synthetic construct
  source 1..20: mol_type = other DNA
ttagagacagggtctccctc

SEQ ID NO: 262120 - DNA, 20 bp, synthetic construct
  source 1..20: mol_type = other DNA
tttagagacagggtctccct

SEQ ID NO: 262121 - DNA, 20 bp, synthetic construct
  source 1..20: mol_type = other DNA
ttttagagacagggtctccc

SEQ ID NO: 262122 - DNA, 20 bp, synthetic construct
  source 1..20: mol_type = other DNA
gttttagagacagggtctcc

SEQ ID NO: 262123 - DNA, 20 bp, synthetic construct
  source 1..20: mol_type = other DNA
tgttttagagacagggtctc

SEQ ID NO: 262124 - DNA, 20 bp, synthetic construct
  source 1..20: mol_type = other DNA
ttgttttagagacagggtct

SEQ ID NO: 262125 - DNA, 20 bp, synthetic construct
  source 1..20: mol_type = other DNA
tttgttttagagacagggtc

SEQ ID NO: 262126 - DNA, 20 bp, synthetic construct
  source 1..20: mol_type = other DNA
gtttgttttagagacagggt

SEQ ID NO: 262127 - DNA, 20 bp, synthetic construct
  source 1..20: mol_type = other DNA
tgtttgttttagagacaggg

SEQ ID NO: 262128 - DNA, 20 bp, synthetic construct
  source 1..20: mol_type = other DNA
ttgtttgttttagagacagg

SEQ ID NO: 262129 - DNA, 20 bp, synthetic construct
  source 1..20: mol_type = other DNA
tttgtttgttttagagacag

SEQ ID NO: 262130 - DNA, 20 bp, synthetic construct
  source 1..20: mol_type = other DNA
gtttgtttgttttagagaca

SEQ ID NO: 262131 - DNA, 20 bp, synthetic construct
  source 1..20: mol_type = other DNA
tgtttgtttgttttagagac

SEQ ID NO: 262132 - DNA, 20 bp, synthetic construct
  source 1..20: mol_type = other DNA
ttgtttgtttgttttagaga

SEQ ID NO: 262133 - DNA, 20 bp, synthetic construct
  source 1..20: mol_type = other DNA
tttgtttgtttgttttagag

SEQ ID NO: 262134 - DNA, 20 bp, synthetic construct
  source 1..20: mol_type = other DNA
gtttgtttgtttgttttaga

SEQ ID NO: 262135 - DNA, 20 bp, synthetic construct
  source 1..20: mol_type = other DNA
tgtttgtttgtttgttttag

SEQ ID NO: 262136 - DNA, 20 bp, synthetic construct
  source 1..20: mol_type = other DNA
ttgtttgtttgtttgtttta

SEQ ID NO: 262137 - DNA, 20 bp, synthetic construct
  source 1..20: mol_type = other DNA
tttgtttgtttgtttgtttt

SEQ ID NO: 262138 - DNA, 20 bp, synthetic construct
  source 1..20: mol_type = other DNA
gtttgtttgtttgtttgttt

SEQ ID NO: 262139 - DNA, 20 bp, synthetic construct
  source 1..20: mol_type = other DNA
tgtttgtttgtttgtttgtt

SEQ ID NO: 262140 - DNA, 20 bp, synthetic construct
  source 1..20: mol_type = other DNA
ttgtttgtttgtttgtttgt

SEQ ID NO: 262141 - DNA, 20 bp, synthetic construct
  source 1..20: mol_type = other DNA
tttgtttgtttgtttgtttg

SEQ ID NO: 262142 - DNA, 20 bp, synthetic construct
  source 1..20: mol_type = other DNA
gtttgtttgtttgtttgttt

SEQ ID NO: 262143 - DNA, 20 bp, synthetic construct
  source 1..20: mol_type = other DNA
tgtttgtttgtttgtttgtt

SEQ ID NO: 262144 - DNA, 20 bp, synthetic construct
  source 1..20: mol_type = other DNA
ttgtttgtttgtttgtttgt

SEQ ID NO: 262145 - DNA, 20 bp, synthetic construct
  source 1..20: mol_type = other DNA
tttgtttgtttgtttgtttg

SEQ ID NO: 262146 - DNA, 20 bp, synthetic construct
  source 1..20: mol_type = other DNA
ttttgtttgtttgtttgttt

SEQ ID NO: 262147 - DNA, 20 bp, synthetic construct
  source 1..20: mol_type = other DNA
cttttgtttgtttgtttgtt

SEQ ID NO: 262148 - DNA, 20 bp, synthetic construct
  source 1..20: mol_type = other DNA
tcttttgtttgtttgtttgt

SEQ ID NO: 262149 - DNA, 20 bp, synthetic construct
  source 1..20: mol_type = other DNA
ctcttttgtttgtttgtttg

SEQ ID NO: 262150 - DNA, 20 bp, synthetic construct
  source 1..20: mol_type = other DNA
actcttttgtttgtttgttt

SEQ ID NO: 262151 - DNA, 20 bp, synthetic construct
  source 1..20: mol_type = other DNA
aactcttttgtttgtttgtt

SEQ ID NO: 262152 - DNA, 20 bp, synthetic construct
  source 1..20: mol_type = other DNA
taactcttttgtttgtttgt

SEQ ID NO: 262153 - DNA, 20 bp, synthetic construct
  source 1..20: mol_type = other DNA
ttaactcttttgtttgtttg

SEQ ID NO: 262154 - DNA, 20 bp, synthetic construct
  source 1..20: mol_type = other DNA
gttaactcttttgtttgttt

SEQ ID NO: 262155 - DNA, 20 bp, synthetic construct
  source 1..20: mol_type = other DNA
tgttaactcttttgtttgtt

SEQ ID NO: 262156 - DNA, 20 bp, synthetic construct
  source 1..20: mol_type = other DNA
atgttaactcttttgtttgt

SEQ ID NO: 262157 - DNA, 20 bp, synthetic construct
  source 1..20: mol_type = other DNA
aatgttaactcttttgtttg

SEQ ID NO: 262158 - DNA, 20 bp, synthetic construct
  source 1..20: mol_type = other DNA
caatgttaactcttttgttt

SEQ ID NO: 262159 - DNA, 20 bp, synthetic construct
  source 1..20: mol_type = other DNA
ccaatgttaactcttttgtt

SEQ ID NO: 262160 - DNA, 20 bp, synthetic construct
  source 1..20: mol_type = other DNA
gccaatgttaactcttttgt

SEQ ID NO: 262161 - DNA, 20 bp, synthetic construct
  source 1..20: mol_type = other DNA
ggccaatgttaactcttttg

SEQ ID NO: 262162 - DNA, 20 bp, synthetic construct
  source 1..20: mol_type = other DNA
tggccaatgttaactctttt

SEQ ID NO: 262163 - DNA, 20 bp, synthetic construct
  source 1..20: mol_type = other DNA
ctggccaatgttaactcttt

SEQ ID NO: 262164 - DNA, 20 bp, synthetic construct
  source 1..20: mol_type = other DNA
tctggccaatgttaactctt

SEQ ID NO: 262165 - DNA, 20 bp, synthetic construct
  source 1..20: mol_type = other DNA
atctggccaatgttaactct

SEQ ID NO: 262166 - DNA, 20 bp, synthetic construct
  source 1..20: mol_type = other DNA
aatctggccaatgttaactc

SEQ ID NO: 262167 - DNA, 20 bp, synthetic construct
  source 1..20: mol_type = other DNA
taatctggccaatgttaact

SEQ ID NO: 262168 - DNA, 20 bp, synthetic construct
  source 1..20: mol_type = other DNA
ctaatctggccaatgttaac

SEQ ID NO: 262169 - DNA, 20 bp, synthetic construct
  source 1..20: mol_type = other DNA
cctaatctggccaatgttaa

SEQ ID NO: 262170 - DNA, 20 bp, synthetic construct
  source 1..20: mol_type = other DNA
tcctaatctggccaatgtta

SEQ ID NO: 262171 - DNA, 20 bp, synthetic construct
  source 1..20: mol_type = other DNA
atcctaatctggccaatgtt

SEQ ID NO: 262172 - DNA, 20 bp, synthetic construct
  source 1..20: mol_type = other DNA
aatcctaatctggccaatgt

SEQ ID NO: 262173 - DNA, 20 bp, synthetic construct
  source 1..20: mol_type = other DNA
gaatcctaatctggccaatg

SEQ ID NO: 262174 - DNA, 20 bp, synthetic construct
  source 1..20: mol_type = other DNA
tgaatcctaatctggccaat

SEQ ID NO: 262175 - DNA, 20 bp, synthetic construct
  source 1..20: mol_type = other DNA
gtgaatcctaatctggccaa

SEQ ID NO: 262176 - DNA, 20 bp, synthetic construct
  source 1..20: mol_type = other DNA
ggtgaatcctaatctggcca

SEQ ID NO: 262177 - DNA, 20 bp, synthetic construct
  source 1..20: mol_type = other DNA
tggtgaatcctaatctggcc

SEQ ID NO: 262178 - DNA, 20 bp, synthetic construct
  source 1..20: mol_type = other DNA
ctggtgaatcctaatctggc

SEQ ID NO: 262179 - DNA, 20 bp, synthetic construct
  source 1..20: mol_type = other DNA
tctggtgaatcctaatctgg

SEQ ID NO: 262180 - DNA, 20 bp, synthetic construct
  source 1..20: mol_type = other DNA
atctggtgaatcctaatctg

SEQ ID NO: 262181 - DNA, 20 bp, synthetic construct
  source 1..20: mol_type = other DNA
tatctggtgaatcctaatct

SEQ ID NO: 262182 - DNA, 20 bp, synthetic construct
  source 1..20: mol_type = other DNA
ctatctggtgaatcctaatc

SEQ ID NO: 262183 - DNA, 20 bp, synthetic construct
  source 1..20: mol_type = other DNA
actatctggtgaatcctaat

SEQ ID NO: 262184 - DNA, 20 bp, synthetic construct
  source 1..20: mol_type = other DNA
cactatctggtgaatcctaa

SEQ ID NO: 262185 - DNA, 20 bp, synthetic construct
  source 1..20: mol_type = other DNA
acactatctggtgaatccta

SEQ ID NO: 262186 - DNA, 20 bp, synthetic construct
  source 1..20: mol_type = other DNA
aacactatctggtgaatcct

SEQ ID NO: 262187 - DNA, 20 bp, synthetic construct
  source 1..20: mol_type = other DNA
taacactatctggtgaatcc

SEQ ID NO: 262188 - DNA, 20 bp, synthetic construct
  source 1..20: mol_type = other DNA
ttaacactatctggtgaatc

SEQ ID NO: 262189 - DNA, 20 bp, synthetic construct
  source 1..20: mol_type = other DNA
attaacactatctggtgaat

SEQ ID NO: 262190 - DNA, 20 bp, synthetic construct
  source 1..20: mol_type = other DNA
tattaacactatctggtgaa

SEQ ID NO: 262191 - DNA, 20 bp, synthetic construct
  source 1..20: mol_type = other DNA
atattaacactatctggtga

SEQ ID NO: 262192 - DNA, 20 bp, synthetic construct
  source 1..20: mol_type = other DNA
aatattaacactatctggtg

SEQ ID NO: 262193 - DNA, 20 bp, synthetic construct
  source 1..20: mol_type = other DNA
taatattaacactatctggt

SEQ ID NO: 262194 - DNA, 20 bp, synthetic construct
  source 1..20: mol_type = other DNA
ctaatattaacactatctgg

SEQ ID NO: 262195 - DNA, 20 bp, synthetic construct
  source 1..20: mol_type = other DNA
actaatattaacactatctg

SEQ ID NO: 262196 - DNA, 20 bp, synthetic construct
  source 1..20: mol_type = other DNA
aactaatattaacactatct

SEQ ID NO: 262197 - DNA, 20 bp, synthetic construct
  source 1..20: mol_type = other DNA
aaactaatattaacactatc

SEQ ID NO: 262198 - DNA, 20 bp, synthetic construct
  source 1..20: mol_type = other DNA
caaactaatattaacactat

SEQ ID NO: 262199 - DNA, 20 bp, synthetic construct
  source 1..20: mol_type = other DNA
tcaaactaatattaacacta

SEQ ID NO: 262200 - DNA, 20 bp, synthetic construct
  source 1..20: mol_type = other DNA
atcaaactaatattaacact

SEQ ID NO: 262201 - DNA, 20 bp, synthetic construct
  source 1..20: mol_type = other DNA
aatcaaactaatattaacac

SEQ ID NO: 262202 - DNA, 20 bp, synthetic construct
  source 1..20: mol_type = other DNA
aaatcaaactaatattaaca

SEQ ID NO: 262203 - DNA, 20 bp, synthetic construct
  source 1..20: mol_type = other DNA
caaatcaaactaatattaac

SEQ ID NO: 262204 - DNA, 20 bp, synthetic construct
  source 1..20: mol_type = other DNA
tcaaatcaaactaatattaa

SEQ ID NO: 262205 - DNA, 20 bp, synthetic construct
  source 1..20: mol_type = other DNA
ctcaaatcaaactaatatta

SEQ ID NO: 262206 - DNA, 20 bp, synthetic construct
  source 1..20: mol_type = other DNA
tctcaaatcaaactaatatt

SEQ ID NO: 262207 - DNA, 20 bp, synthetic construct
  source 1..20: mol_type = other DNA
gtctcaaatcaaactaatat

SEQ ID NO: 262208 - DNA, 20 bp, synthetic construct
  source 1..20: mol_type = other DNA
agtctcaaatcaaactaata

SEQ ID NO: 262209 - DNA, 20 bp, synthetic construct
  source 1..20: mol_type = other DNA
aagtctcaaatcaaactaat

SEQ ID NO: 262210 - DNA, 20 bp, synthetic construct
  source 1..20: mol_type = other DNA
aaagtctcaaatcaaactaa

SEQ ID NO: 262211 - DNA, 20 bp, synthetic construct
  source 1..20: mol_type = other DNA
taaagtctcaaatcaaacta

SEQ ID NO: 262212 - DNA, 20 bp, synthetic construct
  source 1..20: mol_type = other DNA
ttaaagtctcaaatcaaact

SEQ ID NO: 262213 - DNA, 20 bp, synthetic construct
  source 1..20: mol_type = other DNA
attaaagtctcaaatcaaac

SEQ ID NO: 262214 - DNA, 20 bp, synthetic construct
  source 1..20: mol_type = other DNA
gattaaagtctcaaatcaaa

SEQ ID NO: 262215 - DNA, 20 bp, synthetic construct
  source 1..20: mol_type = other DNA
tgattaaagtctcaaatcaa

SEQ ID NO: 262216 - DNA, 20 bp, synthetic construct
  source 1..20: mol_type = other DNA
ctgattaaagtctcaaatca

SEQ ID NO: 262217 - DNA, 20 bp, synthetic construct
  source 1..20: mol_type = other DNA
tctgattaaagtctcaaatc

SEQ ID NO: 262218 - DNA, 20 bp, synthetic construct
  source 1..20: mol_type = other DNA
ttctgattaaagtctcaaat

SEQ ID NO: 262219 - DNA, 20 bp, synthetic construct
  source 1..20: mol_type = other DNA
tttctgattaaagtctcaaa

SEQ ID NO: 262220 - DNA, 20 bp, synthetic construct
  source 1..20: mol_type = other DNA
ctttctgattaaagtctcaa

SEQ ID NO: 262221 - DNA, 20 bp, synthetic construct
  source 1..20: mol_type = other DNA
gctttctgattaaagtctca

SEQ ID NO: 262222 - DNA, 20 bp, synthetic construct
  source 1..20: mol_type = other DNA
tgctttctgattaaagtctc

SEQ ID NO: 262223 - DNA, 20 bp, synthetic construct
  source 1..20: mol_type = other DNA
gtgctttctgattaaagtct

SEQ ID NO: 262224 - DNA, 20 bp, synthetic construct
  source 1..20: mol_type = other DNA
tgtgctttctgattaaagtc

SEQ ID NO: 262225 - DNA, 20 bp, synthetic construct
  source 1..20: mol_type = other DNA
atgtgctttctgattaaagt

SEQ ID NO: 262226 - DNA, 20 bp, synthetic construct
  source 1..20: mol_type = other DNA
catgtgctttctgattaaag

SEQ ID NO: 262227 - DNA, 20 bp, synthetic construct
  source 1..20: mol_type = other DNA
acatgtgctttctgattaaa

SEQ ID NO: 262228 - DNA, 20 bp, synthetic construct
  source 1..20: mol_type = other DNA
cacatgtgctttctgattaa

SEQ ID NO: 262229 - DNA, 20 bp, synthetic construct
  source 1..20: mol_type = other DNA
acacatgtgctttctgatta

SEQ ID NO: 262230 - DNA, 20 bp, synthetic construct
  source 1..20: mol_type = other DNA
cacacatgtgctttctgatt

SEQ ID NO: 262231 - DNA, 20 bp, synthetic construct
  source 1..20: mol_type = other DNA
ccacacatgtgctttctgat

SEQ ID NO: 262232 - DNA, 20 bp, synthetic construct
  source 1..20: mol_type = other DNA
accacacatgtgctttctga

SEQ ID NO: 262233 - DNA, 20 bp, synthetic construct
  source 1..20: mol_type = other DNA
caccacacatgtgctttctg

SEQ ID NO: 262234 - DNA, 20 bp, synthetic construct
  source 1..20: mol_type = other DNA
ccaccacacatgtgctttct

SEQ ID NO: 262235 - DNA, 20 bp, synthetic construct
  source 1..20: mol_type = other DNA
cccaccacacatgtgctttc

SEQ ID NO: 262236 - DNA, 20 bp, synthetic construct
  source 1..20: mol_type = other DNA
ccccaccacacatgtgcttt

SEQ ID NO: 262237 - DNA, 20 bp, synthetic construct
  source 1..20: mol_type = other DNA
cccccaccacacatgtgctt

SEQ ID NO: 262238 - DNA, 20 bp, synthetic construct
  source 1..20: mol_type = other DNA
acccccaccacacatgtgct

SEQ ID NO: 262239 - DNA, 20 bp, synthetic construct
  source 1..20: mol_type = other DNA
cacccccaccacacatgtgc

SEQ ID NO: 262240 - DNA, 20 bp, synthetic construct
  source 1..20: mol_type = other DNA
ccacccccaccacacatgtg

SEQ ID NO: 262241 - DNA, 20 bp, synthetic construct
  source 1..20: mol_type = other DNA
cccacccccaccacacatgt

SEQ ID NO: 262242 - DNA, 20 bp, synthetic construct
  source 1..20: mol_type = other DNA
acccacccccaccacacatg

SEQ ID NO: 262243 - DNA, 20 bp, synthetic construct
  source 1..20: mol_type = other DNA
cacccacccccaccacacat

SEQ ID NO: 262244 - DNA, 20 bp, synthetic construct
  source 1..20: mol_type = other DNA
acacccacccccaccacaca

SEQ ID NO: 262245 - DNA, 20 bp, synthetic construct
  source 1..20: mol_type = other DNA
tacacccacccccaccacac

SEQ ID NO: 262246 - DNA, 20 bp, synthetic construct
  source 1..20: mol_type = other DNA
ttacacccacccccaccaca

SEQ ID NO: 262247 - DNA, 20 bp, synthetic construct
  source 1..20: mol_type = other DNA
gttacacccacccccaccac

SEQ ID NO: 262248 - DNA, 20 bp, synthetic construct
  source 1..20: mol_type = other DNA
ggttacacccacccccacca

SEQ ID NO: 262249 - DNA, 20 bp, synthetic construct
  source 1..20: mol_type = other DNA
aggttacacccacccccacc

SEQ ID NO: 262250 - DNA, 20 bp, synthetic construct
  source 1..20: mol_type = other DNA
taggttacacccacccccac

SEQ ID NO: 262251 - DNA, 20 bp, synthetic construct
  source 1..20: mol_type = other DNA
ttaggttacacccaccccca

SEQ ID NO: 262252 - DNA, 20 bp, synthetic construct
  source 1..20: mol_type = other DNA
cttaggttacacccaccccc

SEQ ID NO: 262253 - DNA, 20 bp, synthetic construct
  source 1..20: mol_type = other DNA
acttaggttacacccacccc

SEQ ID NO: 262254 - DNA, 20 bp, synthetic construct
  source 1..20: mol_type = other DNA
gacttaggttacacccaccc

SEQ ID NO: 262255 - DNA, 20 bp, synthetic construct
  source 1..20: mol_type = other DNA
tgacttaggttacacccacc

SEQ ID NO: 262256 - DNA, 20 bp, synthetic construct
  source 1..20: mol_type = other DNA
ctgacttaggttacacccac

SEQ ID NO: 262257 - DNA, 20 bp, synthetic construct
  source 1..20: mol_type = other DNA
cctgacttaggttacaccca

SEQ ID NO: 262258 - DNA, 20 bp, synthetic construct
  source 1..20: mol_type = other DNA
acctgacttaggttacaccc

SEQ ID NO: 262259 - DNA, 20 bp, synthetic construct
  source 1..20: mol_type = other DNA
tacctgacttaggttacacc

SEQ ID NO: 262260 - DNA, 20 bp, synthetic construct
  source 1..20: mol_type = other DNA
ctacctgacttaggttacac

SEQ ID NO: 262261 - DNA, 20 bp, synthetic construct
  source 1..20: mol_type = other DNA
tctacctgacttaggttaca

SEQ ID NO: 262262 - DNA, 20 bp, synthetic construct
  source 1..20: mol_type = other DNA
ttctacctgacttaggttac

SEQ ID NO: 262263 - DNA, 20 bp, synthetic construct
  source 1..20: mol_type = other DNA
attctacctgacttaggtta

SEQ ID NO: 262264 - DNA, 20 bp, synthetic construct
  source 1..20: mol_type = other DNA
gattctacctgacttaggtt

SEQ ID NO: 262265 - DNA, 20 bp, synthetic construct
  source 1..20: mol_type = other DNA
agattctacctgacttaggt

SEQ ID NO: 262266 - DNA, 20 bp, synthetic construct
  source 1..20: mol_type = other DNA
aagattctacctgacttagg

SEQ ID NO: 262267 - DNA, 20 bp, synthetic construct
  source 1..20: mol_type = other DNA
aaagattctacctgacttag

SEQ ID NO: 262268 - DNA, 20 bp, synthetic construct
  source 1..20: mol_type = other DNA
gaaagattctacctgactta

SEQ ID NO: 262269 - DNA, 20 bp, synthetic construct
  source 1..20: mol_type = other DNA
ggaaagattctacctgactt

SEQ ID NO: 262270 - DNA, 20 bp, synthetic construct
  source 1..20: mol_type = other DNA
tggaaagattctacctgact

SEQ ID NO: 262271 - DNA, 20 bp, synthetic construct
  source 1..20: mol_type = other DNA
ttggaaagattctacctgac

SEQ ID NO: 262272 - DNA, 20 bp, synthetic construct
  source 1..20: mol_type = other DNA
gttggaaagattctacctga

SEQ ID NO: 262273 - DNA, 20 bp, synthetic construct
  source 1..20: mol_type = other DNA
agttggaaagattctacctg

SEQ ID NO: 262274 - DNA, 20 bp, synthetic construct
  source 1..20: mol_type = other DNA
aagttggaaagattctacct

SEQ ID NO: 262275 - DNA, 20 bp, synthetic construct
  source 1..20: mol_type = other DNA
caagttggaaagattctacc

SEQ ID NO: 262276 - DNA, 20 bp, synthetic construct
  source 1..20: mol_type = other DNA
ccaagttggaaagattctac

SEQ ID NO: 262277 - DNA, 20 bp, synthetic construct
  source 1..20: mol_type = other DNA
cccaagttggaaagattcta

SEQ ID NO: 262278 - DNA, 20 bp, synthetic construct
  source 1..20: mol_type = other DNA
ccccaagttggaaagattct

SEQ ID NO: 262279 - DNA, 20 bp, synthetic construct
  source 1..20: mol_type = other DNA
cccccaagttggaaagattc

SEQ ID NO: 262280 - DNA, 20 bp, synthetic construct
  source 1..20: mol_type = other DNA
ccccccaagttggaaagatt

SEQ ID NO: 262281 - DNA, 20 bp, synthetic construct
  source 1..20: mol_type = other DNA
cccccccaagttggaaagat

SEQ ID NO: 262282 - DNA, 20 bp, synthetic construct
  source 1..20: mol_type = other DNA
ccccccccaagttggaaaga

SEQ ID NO: 262283 - DNA, 20 bp, synthetic construct
  source 1..20: mol_type = other DNA
gccccccccaagttggaaag

SEQ ID NO: 262284 - DNA, 20 bp, synthetic construct
  source 1..20: mol_type = other DNA
tgccccccccaagttggaaa

SEQ ID NO: 262285 - DNA, 20 bp, synthetic construct
  source 1..20: mol_type = other DNA
gtgccccccccaagttggaa

SEQ ID NO: 262286 - DNA, 20 bp, synthetic construct
  source 1..20: mol_type = other DNA
tgtgccccccccaagttgga

SEQ ID NO: 262287 - DNA, 20 bp, synthetic construct
  source 1..20: mol_type = other DNA
gtgtgccccccccaagttgg

SEQ ID NO: 262288 - DNA, 20 bp, synthetic construct
  source 1..20: mol_type = other DNA
agtgtgccccccccaagttg

SEQ ID NO: 262289 - DNA, 20 bp, synthetic construct
  source 1..20: mol_type = other DNA
gagtgtgccccccccaagtt

SEQ ID NO: 262290 - DNA, 20 bp, synthetic construct
  source 1..20: mol_type = other DNA
ggagtgtgccccccccaagt

SEQ ID NO: 262291 - DNA, 20 bp, synthetic construct
  source 1..20: mol_type = other DNA
aggagtgtgccccccccaag

SEQ ID NO: 262292 - DNA, 20 bp, synthetic construct
  source 1..20: mol_type = other DNA
caggagtgtgccccccccaa

SEQ ID NO: 262293 - DNA, 20 bp, synthetic construct
  source 1..20: mol_type = other DNA
tcaggagtgtgcccccccca

SEQ ID NO: 262294 - DNA, 20 bp, synthetic construct
  source 1..20: mol_type = other DNA
atcaggagtgtgcccccccc

SEQ ID NO: 262295 - DNA, 20 bp, synthetic construct
  source 1..20: mol_type = other DNA
aatcaggagtgtgccccccc

SEQ ID NO: 262296 - DNA, 20 bp, synthetic construct
  source 1..20: mol_type = other DNA
caatcaggagtgtgcccccc

SEQ ID NO: 262297 - DNA, 20 bp, synthetic construct
  source 1..20: mol_type = other DNA
acaatcaggagtgtgccccc

SEQ ID NO: 262298 - DNA, 20 bp, synthetic construct
  source 1..20: mol_type = other DNA
tacaatcaggagtgtgcccc

SEQ ID NO: 262299 - DNA, 20 bp, synthetic construct
  source 1..20: mol_type = other DNA
ctacaatcaggagtgtgccc

SEQ ID NO: 262300 - DNA, 20 bp, synthetic construct
  source 1..20: mol_type = other DNA
gctacaatcaggagtgtgcc

SEQ ID NO: 262301 - DNA, 20 bp, synthetic construct
  source 1..20: mol_type = other DNA
ggctacaatcaggagtgtgc

SEQ ID NO: 262302 - DNA, 20 bp, synthetic construct
  source 1..20: mol_type = other DNA
tggctacaatcaggagtgtg

SEQ ID NO: 262303 - DNA, 20 bp, synthetic construct
  source 1..20: mol_type = other DNA
atggctacaatcaggagtgt

SEQ ID NO: 262304 - DNA, 20 bp, synthetic construct
  source 1..20: mol_type = other DNA
tatggctacaatcaggagtg

SEQ ID NO: 262305 - DNA, 20 bp, synthetic construct
  source 1..20: mol_type = other DNA
atatggctacaatcaggagt

SEQ ID NO: 262306 - DNA, 20 bp, synthetic construct
  source 1..20: mol_type = other DNA
catatggctacaatcaggag

SEQ ID NO: 262307 - DNA, 20 bp, synthetic construct
  source 1..20: mol_type = other DNA
tcatatggctacaatcagga

SEQ ID NO: 262308 - DNA, 20 bp, synthetic construct
  source 1..20: mol_type = other DNA
ctcatatggctacaatcagg

SEQ ID NO: 262309 - DNA, 20 bp, synthetic construct
  source 1..20: mol_type = other DNA
actcatatggctacaatcag

SEQ ID NO: 262310 - DNA, 20 bp, synthetic construct
  source 1..20: mol_type = other DNA
gactcatatggctacaatca

SEQ ID NO: 262311 - DNA, 20 bp, synthetic construct
  source 1..20: mol_type = other DNA
agactcatatggctacaatc

SEQ ID NO: 262312 - DNA, 20 bp, synthetic construct
  source 1..20: mol_type = other DNA
cagactcatatggctacaat

SEQ ID NO: 262313 - DNA, 20 bp, synthetic construct
  source 1..20: mol_type = other DNA
acagactcatatggctacaa

SEQ ID NO: 262314 - DNA, 20 bp, synthetic construct
  source 1..20: mol_type = other DNA
gacagactcatatggctaca

SEQ ID NO: 262315 - DNA, 20 bp, synthetic construct
  source 1..20: mol_type = other DNA
tgacagactcatatggctac

SEQ ID NO: 262316 - DNA, 20 bp, synthetic construct
  source 1..20: mol_type = other DNA
ctgacagactcatatggcta

SEQ ID NO: 262317 - DNA, 20 bp, synthetic construct
  source 1..20: mol_type = other DNA
actgacagactcatatggct

SEQ ID NO: 262318 - DNA, 20 bp, synthetic construct
  source 1..20: mol_type = other DNA
cactgacagactcatatggc

SEQ ID NO: 262319 - DNA, 20 bp, synthetic construct
  source 1..20: mol_type = other DNA
acactgacagactcatatgg

SEQ ID NO: 262320 - DNA, 20 bp, synthetic construct
  source 1..20: mol_type = other DNA
cacactgacagactcatatg

SEQ ID NO: 262321 - DNA, 20 bp, synthetic construct
  source 1..20: mol_type = other DNA
ccacactgacagactcatat

SEQ ID NO: 262322 - DNA, 20 bp, synthetic construct
  source 1..20: mol_type = other DNA
accacactgacagactcata

SEQ ID NO: 262323 - DNA, 20 bp, synthetic construct
  source 1..20: mol_type = other DNA
caccacactgacagactcat

SEQ ID NO: 262324 - DNA, 20 bp, synthetic construct
  source 1..20: mol_type = other DNA
ccaccacactgacagactca

SEQ ID NO: 262325 - DNA, 20 bp, synthetic construct
  source 1..20: mol_type = other DNA
tccaccacactgacagactc

SEQ ID NO: 262326 - DNA, 20 bp, synthetic construct
  source 1..20: mol_type = other DNA
ttccaccacactgacagact

SEQ ID NO: 262327 - DNA, 20 bp, synthetic construct
  source 1..20: mol_type = other DNA
cttccaccacactgacagac

SEQ ID NO: 262328 - DNA, 20 bp, synthetic construct
  source 1..20: mol_type = other DNA
tcttccaccacactgacaga

SEQ ID NO: 262329 - DNA, 20 bp, synthetic construct
  source 1..20: mol_type = other DNA
ctcttccaccacactgacag

SEQ ID NO: 262330 - DNA, 20 bp, synthetic construct
  source 1..20: mol_type = other DNA
cctcttccaccacactgaca

SEQ ID NO: 262331 - DNA, 20 bp, synthetic construct
  source 1..20: mol_type = other DNA
gcctcttccaccacactgac

SEQ ID NO: 262332 - DNA, 20 bp, synthetic construct
  source 1..20: mol_type = other DNA
ggcctcttccaccacactga

SEQ ID NO: 262333 - DNA, 20 bp, synthetic construct
  source 1..20: mol_type = other DNA
tggcctcttccaccacactg

SEQ ID NO: 262334 - DNA, 20 bp, synthetic construct
  source 1..20: mol_type = other DNA
atggcctcttccaccacact

SEQ ID NO: 262335 - DNA, 20 bp, synthetic construct
  source 1..20: mol_type = other DNA
catggcctcttccaccacac

SEQ ID NO: 262336 - DNA, 20 bp, synthetic construct
  source 1..20: mol_type = other DNA
ccatggcctcttccaccaca

SEQ ID NO: 262337 - DNA, 20 bp, synthetic construct
  source 1..20: mol_type = other DNA
cccatggcctcttccaccac

SEQ ID NO: 262338 - DNA, 20 bp, synthetic construct
  source 1..20: mol_type = other DNA
acccatggcctcttccacca

SEQ ID NO: 262339 - DNA, 20 bp, synthetic construct
  source 1..20: mol_type = other DNA
aacccatggcctcttccacc

SEQ ID NO: 262340 - DNA, 20 bp, synthetic construct
  source 1..20: mol_type = other DNA
taacccatggcctcttccac

SEQ ID NO: 262341 - DNA, 20 bp, synthetic construct
  source 1..20: mol_type = other DNA
ttaacccatggcctcttcca

SEQ ID NO: 262342 - DNA, 20 bp, synthetic construct
  source 1..20: mol_type = other DNA
attaacccatggcctcttcc

SEQ ID NO: 262343 - DNA, 20 bp, synthetic construct
  source 1..20: mol_type = other DNA
cattaacccatggcctcttc

SEQ ID NO: 262344 - DNA, 20 bp, synthetic construct
  source 1..20: mol_type = other DNA
ccattaacccatggcctctt

SEQ ID NO: 262345 - DNA, 20 bp, synthetic construct
  source 1..20: mol_type = other DNA
cccattaacccatggcctct

SEQ ID NO: 262346 - DNA, 20 bp, synthetic construct
  source 1..20: mol_type = other DNA
gcccattaacccatggcctc

SEQ ID NO: 262347 - DNA, 20 bp, synthetic construct
  source 1..20: mol_type = other DNA
tgcccattaacccatggcct

SEQ ID NO: 262348 - DNA, 20 bp, synthetic construct
  source 1..20: mol_type = other DNA
ctgcccattaacccatggcc

SEQ ID NO: 262349 - DNA, 20 bp, synthetic construct
  source 1..20: mol_type = other DNA
cctgcccattaacccatggc

SEQ ID NO: 262350 - DNA, 20 bp, synthetic construct
  source 1..20: mol_type = other DNA
acctgcccattaacccatgg

SEQ ID NO: 262351 - DNA, 20 bp, synthetic construct
  source 1..20: mol_type = other DNA
tacctgcccattaacccatg

SEQ ID NO: 262352 - DNA, 20 bp, synthetic construct
  source 1..20: mol_type = other DNA
ttacctgcccattaacccat

SEQ ID NO: 262353 - DNA, 20 bp, synthetic construct
  source 1..20: mol_type = other DNA
tttacctgcccattaaccca

SEQ ID NO: 262354 - DNA, 20 bp, synthetic construct
  source 1..20: mol_type = other DNA
ttttacctgcccattaaccc

SEQ ID NO: 262355 - DNA, 20 bp, synthetic construct
  source 1..20: mol_type = other DNA
tttttacctgcccattaacc

SEQ ID NO: 262356 - DNA, 20 bp, synthetic construct
  source 1..20: mol_type = other DNA
ttttttacctgcccattaac

SEQ ID NO: 262357 - DNA, 20 bp, synthetic construct
  source 1..20: mol_type = other DNA
cttttttacctgcccattaa

SEQ ID NO: 262358 - DNA, 20 bp, synthetic construct
  source 1..20: mol_type = other DNA
gcttttttacctgcccatta

SEQ ID NO: 262359 - DNA, 20 bp, synthetic construct
  source 1..20: mol_type = other DNA
tgcttttttacctgcccatt

SEQ ID NO: 262360 - DNA, 20 bp, synthetic construct
  source 1..20: mol_type = other DNA
gtgcttttttacctgcccat

SEQ ID NO: 262361 - DNA, 20 bp, synthetic construct
  source 1..20: mol_type = other DNA
ggtgcttttttacctgccca

SEQ ID NO: 262362 - DNA, 20 bp, synthetic construct
  source 1..20: mol_type = other DNA
aggtgcttttttacctgccc

SEQ ID NO: 262363 - DNA, 20 bp, synthetic construct
  source 1..20: mol_type = other DNA
aaggtgcttttttacctgcc

SEQ ID NO: 262364 - DNA, 20 bp, synthetic construct
  source 1..20: mol_type = other DNA
caaggtgcttttttacctgc

SEQ ID NO: 262365 - DNA, 20 bp, synthetic construct
  source 1..20: mol_type = other DNA
gcaaggtgcttttttacctg

SEQ ID NO: 262366 - DNA, 20 bp, synthetic construct
  source 1..20: mol_type = other DNA
ggcaaggtgcttttttacct

SEQ ID NO: 262367 - DNA, 20 bp, synthetic construct
  source 1..20: mol_type = other DNA
aggcaaggtgcttttttacc

SEQ ID NO: 262368 - DNA, 20 bp, synthetic construct
  source 1..20: mol_type = other DNA
caggcaaggtgcttttttac

SEQ ID NO: 262369 - DNA, 20 bp, synthetic construct
  source 1..20: mol_type = other DNA
ccaggcaaggtgctttttta

SEQ ID NO: 262370 - DNA, 20 bp, synthetic construct
  source 1..20: mol_type = other DNA
tccaggcaaggtgctttttt

SEQ ID NO: 262371 - DNA, 20 bp, synthetic construct
  source 1..20: mol_type = other DNA
ttccaggcaaggtgcttttt

SEQ ID NO: 262372 - DNA, 20 bp, synthetic construct
  source 1..20: mol_type = other DNA
attccaggcaaggtgctttt

SEQ ID NO: 262373 - DNA, 20 bp, synthetic construct
  source 1..20: mol_type = other DNA
aattccaggcaaggtgcttt

SEQ ID NO: 262374 - DNA, 20 bp, synthetic construct
  source 1..20: mol_type = other DNA
caattccaggcaaggtgctt

SEQ ID NO: 262375 - DNA, 20 bp, synthetic construct
  source 1..20: mol_type = other DNA
tcaattccaggcaaggtgct

SEQ ID NO: 262376 - DNA, 20 bp, synthetic construct
  source 1..20: mol_type = other DNA
ctcaattccaggcaaggtgc

SEQ ID NO: 262377 - DNA, 20 bp, synthetic construct
  source 1..20: mol_type = other DNA
actcaattccaggcaaggtg

SEQ ID NO: 262378 - DNA, 20 bp, synthetic construct
  source 1..20: mol_type = other DNA
tactcaattccaggcaaggt

SEQ ID NO: 262379 - DNA, 20 bp, synthetic construct
  source 1..20: mol_type = other DNA
ctactcaattccaggcaagg

SEQ ID NO: 262380 - DNA, 20 bp, synthetic construct
  source 1..20: mol_type = other DNA
tctactcaattccaggcaag

SEQ ID NO: 262381 - DNA, 20 bp, synthetic construct
  source 1..20: mol_type = other DNA
ttctactcaattccaggcaa

SEQ ID NO: 262382 - DNA, 20 bp, synthetic construct
  source 1..20: mol_type = other DNA
tttctactcaattccaggca

SEQ ID NO: 262383 - DNA, 20 bp, synthetic construct
  source 1..20: mol_type = other DNA
ctttctactcaattccaggc

SEQ ID NO: 262384 - DNA, 20 bp, synthetic construct
  source 1..20: mol_type = other DNA
actttctactcaattccagg

SEQ ID NO: 262385 - DNA, 20 bp, synthetic construct
  source 1..20: mol_type = other DNA
tactttctactcaattccag

SEQ ID NO: 262386 - DNA, 20 bp, synthetic construct
  source 1..20: mol_type = other DNA
ttactttctactcaattcca

SEQ ID NO: 262387 - DNA, 20 bp, synthetic construct
  source 1..20: mol_type = other DNA
cttactttctactcaattcc

SEQ ID NO: 262388 - DNA, 20 bp, synthetic construct
  source 1..20: mol_type = other DNA
ccttactttctactcaattc

SEQ ID NO: 262389 - DNA, 20 bp, synthetic construct
  source 1..20: mol_type = other DNA
gccttactttctactcaatt

SEQ ID NO: 262390 - DNA, 20 bp, synthetic construct
  source 1..20: mol_type = other DNA
ggccttactttctactcaat

SEQ ID NO: 262391 - DNA, 20 bp, synthetic construct
  source 1..20: mol_type = other DNA
gggccttactttctactcaa

SEQ ID NO: 262392 - DNA, 20 bp, synthetic construct
  source 1..20: mol_type = other DNA
agggccttactttctactca

SEQ ID NO: 262393 - DNA, 20 bp, synthetic construct
  source 1..20: mol_type = other DNA
aagggccttactttctactc

SEQ ID NO: 262394 - DNA, 20 bp, synthetic construct
  source 1..20: mol_type = other DNA
gaagggccttactttctact

SEQ ID NO: 262395 - DNA, 20 bp, synthetic construct
  source 1..20: mol_type = other DNA
tgaagggccttactttctac

SEQ ID NO: 262396 - DNA, 20 bp, synthetic construct
  source 1..20: mol_type = other DNA
ctgaagggccttactttcta

SEQ ID NO: 262397 - DNA, 20 bp, synthetic construct
  source 1..20: mol_type = other DNA
tctgaagggccttactttct

SEQ ID NO: 262398 - DNA, 20 bp, synthetic construct
  source 1..20: mol_type = other DNA
gtctgaagggccttactttc

SEQ ID NO: 262399 - DNA, 20 bp, synthetic construct
  source 1..20: mol_type = other DNA
ggtctgaagggccttacttt

SEQ ID NO: 262400 - DNA, 20 bp, synthetic construct
  source 1..20: mol_type = other DNA
gggtctgaagggccttactt

SEQ ID NO: 262401 - DNA, 20 bp, synthetic construct
  source 1..20: mol_type = other DNA
ggggtctgaagggccttact

SEQ ID NO: 262402 - DNA, 20 bp, synthetic construct
  source 1..20: mol_type = other DNA
cggggtctgaagggccttac

SEQ ID NO: 262403 - DNA, 20 bp, synthetic construct
  source 1..20: mol_type = other DNA
acggggtctgaagggcctta

SEQ ID NO: 262404 - DNA, 20 bp, synthetic construct
  source 1..20: mol_type = other DNA
cacggggtctgaagggcctt

SEQ ID NO: 262405 - DNA, 20 bp, synthetic construct
  source 1..20: mol_type = other DNA
tcacggggtctgaagggcct

SEQ ID NO: 262406 - DNA, 20 bp, synthetic construct
  source 1..20: mol_type = other DNA
gtcacggggtctgaagggcc

SEQ ID NO: 262407 - DNA, 20 bp, synthetic construct
  source 1..20: mol_type = other DNA
tgtcacggggtctgaagggc

SEQ ID NO: 262408 - DNA, 20 bp, synthetic construct
  source 1..20: mol_type = other DNA
gtgtcacggggtctgaaggg

SEQ ID NO: 262409 - DNA, 20 bp, synthetic construct
  source 1..20: mol_type = other DNA
tgtgtcacggggtctgaagg

SEQ ID NO: 262410 - DNA, 20 bp, synthetic construct
  source 1..20: mol_type = other DNA
gtgtgtcacggggtctgaag

SEQ ID NO: 262411 - DNA, 20 bp, synthetic construct
  source 1..20: mol_type = other DNA
agtgtgtcacggggtctgaa

SEQ ID NO: 262412 - DNA, 20 bp, synthetic construct
  source 1..20: mol_type = other DNA
aagtgtgtcacggggtctga

SEQ ID NO: 262413 - DNA, 20 bp, synthetic construct
  source 1..20: mol_type = other DNA
caagtgtgtcacggggtctg

SEQ ID NO: 262414 - DNA, 20 bp, synthetic construct
  source 1..20: mol_type = other DNA
ccaagtgtgtcacggggtct

SEQ ID NO: 262415 - DNA, 20 bp, synthetic construct
  source 1..20: mol_type = other DNA
cccaagtgtgtcacggggtc

SEQ ID NO: 262416 - DNA, 20 bp, synthetic construct
  source 1..20: mol_type = other DNA
ccccaagtgtgtcacggggt

SEQ ID NO: 262417 - DNA, 20 bp, synthetic construct
  source 1..20: mol_type = other DNA
tccccaagtgtgtcacgggg

SEQ ID NO: 262418 - DNA, 20 bp, synthetic construct
  source 1..20: mol_type = other DNA
gtccccaagtgtgtcacggg

SEQ ID NO: 262419 - DNA, 20 bp, synthetic construct
  source 1..20: mol_type = other DNA
tgtccccaagtgtgtcacgg

SEQ ID NO: 262420 - DNA, 20 bp, synthetic construct
  source 1..20: mol_type = other DNA
atgtccccaagtgtgtcacg

SEQ ID NO: 262421 - DNA, 20 bp, synthetic construct
  source 1..20: mol_type = other DNA
aatgtccccaagtgtgtcac

SEQ ID NO: 262422 - DNA, 20 bp, synthetic construct
  source 1..20: mol_type = other DNA
aaatgtccccaagtgtgtca

SEQ ID NO: 262423 - DNA, 20 bp, synthetic construct
  source 1..20: mol_type = other DNA
aaaatgtccccaagtgtgtc

SEQ ID NO: 262424 - DNA, 20 bp, synthetic construct
  source 1..20: mol_type = other DNA
gaaaatgtccccaagtgtgt

SEQ ID NO: 262425 - DNA, 20 bp, synthetic construct
  source 1..20: mol_type = other DNA
agaaaatgtccccaagtgtg

SEQ ID NO: 262426 - DNA, 20 bp, synthetic construct
  source 1..20: mol_type = other DNA
aagaaaatgtccccaagtgt

SEQ ID NO: 262427 - DNA, 20 bp, synthetic construct
  source 1..20: mol_type = other DNA
caagaaaatgtccccaagtg

SEQ ID NO: 262428 - DNA, 20 bp, synthetic construct
  source 1..20: mol_type = other DNA
tcaagaaaatgtccccaagt

SEQ ID NO: 262429 - DNA, 20 bp, synthetic construct
  source 1..20: mol_type = other DNA
ctcaagaaaatgtccccaag

SEQ ID NO: 262430 - DNA, 20 bp, synthetic construct
  source 1..20: mol_type = other DNA
actcaagaaaatgtccccaa

SEQ ID NO: 262431 - DNA, 20 bp, synthetic construct
  source 1..20: mol_type = other DNA
tactcaagaaaatgtcccca

SEQ ID NO: 262432 - DNA, 20 bp, synthetic construct
  source 1..20: mol_type = other DNA
ttactcaagaaaatgtcccc

SEQ ID NO: 262433 - DNA, 20 bp, synthetic construct
  source 1..20: mol_type = other DNA
gttactcaagaaaatgtccc

SEQ ID NO: 262434 - DNA, 20 bp, synthetic construct
  source 1..20: mol_type = other DNA
tgttactcaagaaaatgtcc

SEQ ID NO: 262435 - DNA, 20 bp, synthetic construct
  source 1..20: mol_type = other DNA
atgttactcaagaaaatgtc

SEQ ID NO: 262436 - DNA, 20 bp, synthetic construct
  source 1..20: mol_type = other DNA
gatgttactcaagaaaatgt

SEQ ID NO: 262437 - DNA, 20 bp, synthetic construct
  source 1..20: mol_type = other DNA
ggatgttactcaagaaaatg

SEQ ID NO: 262438 - DNA, 20 bp, synthetic construct
  source 1..20: mol_type = other DNA
aggatgttactcaagaaaat

SEQ ID NO: 262439 - DNA, 20 bp, synthetic construct
  source 1..20: mol_type = other DNA
taggatgttactcaagaaaa

SEQ ID NO: 262440 - DNA, 20 bp, synthetic construct
  source 1..20: mol_type = other DNA
ttaggatgttactcaagaaa

SEQ ID NO: 262441 - DNA, 20 bp, synthetic construct
  source 1..20: mol_type = other DNA
cttaggatgttactcaagaa

SEQ ID NO: 262442 - DNA, 20 bp, synthetic construct
  source 1..20: mol_type = other DNA
tcttaggatgttactcaaga

SEQ ID NO: 262443 - DNA, 20 bp, synthetic construct
  source 1..20: mol_type = other DNA
atcttaggatgttactcaag

SEQ ID NO: 262444 - DNA, 20 bp, synthetic construct
  source 1..20: mol_type = other DNA
aatcttaggatgttactcaa

SEQ ID NO: 262445 - DNA, 20 bp, synthetic construct
  source 1..20: mol_type = other DNA
gaatcttaggatgttactca

SEQ ID NO: 262446 - DNA, 20 bp, synthetic construct
  source 1..20: mol_type = other DNA
tgaatcttaggatgttactc

SEQ ID NO: 262447 - DNA, 20 bp, synthetic construct
  source 1..20: mol_type = other DNA
atgaatcttaggatgttact

SEQ ID NO: 262448 - DNA, 20 bp, synthetic construct
  source 1..20: mol_type = other DNA
catgaatcttaggatgttac

SEQ ID NO: 262449 - DNA, 20 bp, synthetic construct
  source 1..20: mol_type = other DNA
acatgaatcttaggatgtta

SEQ ID NO: 262450 - DNA, 20 bp, synthetic construct
  source 1..20: mol_type = other DNA
tacatgaatcttaggatgtt

SEQ ID NO: 262451 - DNA, 20 bp, synthetic construct
  source 1..20: mol_type = other DNA
gtacatgaatcttaggatgt

SEQ ID NO: 262452 - DNA, 20 bp, synthetic construct
  source 1..20: mol_type = other DNA
ggtacatgaatcttaggatg

SEQ ID NO: 262453 - DNA, 20 bp, synthetic construct
  source 1..20: mol_type = other DNA
aggtacatgaatcttaggat

SEQ ID NO: 262454 - DNA, 20 bp, synthetic construct
  source 1..20: mol_type = other DNA
aaggtacatgaatcttagga

SEQ ID NO: 262455 - DNA, 20 bp, synthetic construct
  source 1..20: mol_type = other DNA
caaggtacatgaatcttagg

SEQ ID NO: 262456 - DNA, 20 bp, synthetic construct
  source 1..20: mol_type = other DNA
tcaaggtacatgaatcttag

SEQ ID NO: 262457 - DNA, 20 bp, synthetic construct
  source 1..20: mol_type = other DNA
atcaaggtacatgaatctta

SEQ ID NO: 262458 - DNA, 20 bp, synthetic construct
  source 1..20: mol_type = other DNA
catcaaggtacatgaatctt

SEQ ID NO: 262459 - DNA, 20 bp, synthetic construct
  source 1..20: mol_type = other DNA
tcatcaaggtacatgaatct

SEQ ID NO: 262460 - DNA, 20 bp, synthetic construct
  source 1..20: mol_type = other DNA
atcatcaaggtacatgaatc

SEQ ID NO: 262461 - DNA, 20 bp, synthetic construct
  source 1..20: mol_type = other DNA
gatcatcaaggtacatgaat

SEQ ID NO: 262462 - DNA, 20 bp, synthetic construct
  source 1..20: mol_type = other DNA
agatcatcaaggtacatgaa

SEQ ID NO: 262463 - DNA, 20 bp, synthetic construct
  source 1..20: mol_type = other DNA
gagatcatcaaggtacatga

SEQ ID NO: 262464 - DNA, 20 bp, synthetic construct
  source 1..20: mol_type = other DNA
ggagatcatcaaggtacatg

SEQ ID NO: 262465 - DNA, 20 bp, synthetic construct
  source 1..20: mol_type = other DNA
tggagatcatcaaggtacat

SEQ ID NO: 262466 - DNA, 20 bp, synthetic construct
  source 1..20: mol_type = other DNA
atggagatcatcaaggtaca

SEQ ID NO: 262467 - DNA, 20 bp, synthetic construct
  source 1..20: mol_type = other DNA
gatggagatcatcaaggtac

SEQ ID NO: 262468 - DNA, 20 bp, synthetic construct
  source 1..20: mol_type = other DNA
tgatggagatcatcaaggta

SEQ ID NO: 262469 - DNA, 20 bp, synthetic construct
  source 1..20: mol_type = other DNA
ttgatggagatcatcaaggt

SEQ ID NO: 262470 - DNA, 20 bp, synthetic construct
  source 1..20: mol_type = other DNA
gttgatggagatcatcaagg

SEQ ID NO: 262471 - DNA, 20 bp, synthetic construct
  source 1..20: mol_type = other DNA
agttgatggagatcatcaag

SEQ ID NO: 262472 - DNA, 20 bp, synthetic construct
  source 1..20: mol_type = other DNA
aagttgatggagatcatcaa

SEQ ID NO: 262473 - DNA, 20 bp, synthetic construct
  source 1..20: mol_type = other DNA
taagttgatggagatcatca

SEQ ID NO: 262474 - DNA, 20 bp, synthetic construct
  source 1..20: mol_type = other DNA
gtaagttgatggagatcatc

SEQ ID NO: 262475 - DNA, 20 bp, synthetic construct
  source 1..20: mol_type = other DNA
agtaagttgatggagatcat

SEQ ID NO: 262476 - DNA, 20 bp, synthetic construct
  source 1..20: mol_type = other DNA
gagtaagttgatggagatca

SEQ ID NO: 262477 - DNA, 20 bp, synthetic construct
  source 1..20: mol_type = other DNA
tgagtaagttgatggagatc

SEQ ID NO: 262478 - DNA, 20 bp, synthetic construct
  source 1..20: mol_type = other DNA
atgagtaagttgatggagat

SEQ ID NO: 262479 - DNA, 20 bp, synthetic construct
  source 1..20: mol_type = other DNA
catgagtaagttgatggaga

SEQ ID NO: 262480 - DNA, 20 bp, synthetic construct
  source 1..20: mol_type = other DNA
acatgagtaagttgatggag

SEQ ID NO: 262481 - DNA, 20 bp, synthetic construct
  source 1..20: mol_type = other DNA
cacatgagtaagttgatgga

SEQ ID NO: 262482 - DNA, 20 bp, synthetic construct
  source 1..20: mol_type = other DNA
tcacatgagtaagttgatgg

SEQ ID NO: 262483 - DNA, 20 bp, synthetic construct
  source 1..20: mol_type = other DNA
ttcacatgagtaagttgatg

SEQ ID NO: 262484 - DNA, 20 bp, synthetic construct
  source 1..20: mol_type = other DNA
cttcacatgagtaagttgat

SEQ ID NO: 262485 - DNA, 20 bp, synthetic construct
  source 1..20: mol_type = other DNA
gcttcacatgagtaagttga

SEQ ID NO: 262486 - DNA, 20 bp, synthetic construct
  source 1..20: mol_type = other DNA
tgcttcacatgagtaagttg

SEQ ID NO: 262487 - DNA, 20 bp, synthetic construct
  source 1..20: mol_type = other DNA
gtgcttcacatgagtaagtt

SEQ ID NO: 262488 - DNA, 20 bp, synthetic construct
  source 1..20: mol_type = other DNA
ggtgcttcacatgagtaagt

SEQ ID NO: 262489 - DNA, 20 bp, synthetic construct
  source 1..20: mol_type = other DNA
aggtgcttcacatgagtaag

SEQ ID NO: 262490 - DNA, 20 bp, synthetic construct
  source 1..20: mol_type = other DNA
aaggtgcttcacatgagtaa

SEQ ID NO: 262491 - DNA, 20 bp, synthetic construct
  source 1..20: mol_type = other DNA
aaaggtgcttcacatgagta

SEQ ID NO: 262492 - DNA, 20 bp, synthetic construct
  source 1..20: mol_type = other DNA
taaaggtgcttcacatgagt

SEQ ID NO: 262493 - DNA, 20 bp, synthetic construct
  source 1..20: mol_type = other DNA
ttaaaggtgcttcacatgag

SEQ ID NO: 262494 - DNA, 20 bp, synthetic construct
  source 1..20: mol_type = other DNA
tttaaaggtgcttcacatga

SEQ ID NO: 262495 - DNA, 20 bp, synthetic construct
  source 1..20: mol_type = other DNA
gtttaaaggtgcttcacatg

SEQ ID NO: 262496 - DNA, 20 bp, synthetic construct
  source 1..20: mol_type = other DNA
ggtttaaaggtgcttcacat

SEQ ID NO: 262497 - DNA, 20 bp, synthetic construct
  source 1..20: mol_type = other DNA
tggtttaaaggtgcttcaca

SEQ ID NO: 262498 - DNA, 20 bp, synthetic construct
  source 1..20: mol_type = other DNA
ctggtttaaaggtgcttcac

SEQ ID NO: 262499 - DNA, 20 bp, synthetic construct
  source 1..20: mol_type = other DNA
actggtttaaaggtgcttca

SEQ ID NO: 262500 - DNA, 20 bp, synthetic construct
  source 1..20: mol_type = other DNA
gactggtttaaaggtgcttc

SEQ ID NO: 262501 - DNA, 20 bp, synthetic construct
  source 1..20: mol_type = other DNA
cgactggtttaaaggtgctt

SEQ ID NO: 262502 - DNA, 20 bp, synthetic construct
  source 1..20: mol_type = other DNA
acgactggtttaaaggtgct

SEQ ID NO: 262503 - DNA, 20 bp, synthetic construct
  source 1..20: mol_type = other DNA
gacgactggtttaaaggtgc

SEQ ID NO: 262504 - DNA, 20 bp, synthetic construct
  source 1..20: mol_type = other DNA
agacgactggtttaaaggtg

SEQ ID NO: 262505 - DNA, 20 bp, synthetic construct
  source 1..20: mol_type = other DNA
gagacgactggtttaaaggt

SEQ ID NO: 262506 - DNA, 20 bp, synthetic construct
  source 1..20: mol_type = other DNA
ggagacgactggtttaaagg

SEQ ID NO: 262507 - DNA, 20 bp, synthetic construct
  source 1..20: mol_type = other DNA
tggagacgactggtttaaag

SEQ ID NO: 262508 - DNA, 20 bp, synthetic construct
  source 1..20: mol_type = other DNA
ttggagacgactggtttaaa

SEQ ID NO: 262509 - DNA, 20 bp, synthetic construct
  source 1..20: mol_type = other DNA
tttggagacgactggtttaa

SEQ ID NO: 262510 - DNA, 20 bp, synthetic construct
  source 1..20: mol_type = other DNA
atttggagacgactggttta

SEQ ID NO: 262511 - DNA, 20 bp, synthetic construct
  source 1..20: mol_type = other DNA
aatttggagacgactggttt

SEQ ID NO: 262512 - DNA, 20 bp, synthetic construct
  source 1..20: mol_type = other DNA
gaatttggagacgactggtt

SEQ ID NO: 262513 - DNA, 20 bp, synthetic construct
  source 1..20: mol_type = other DNA
tgaatttggagacgactggt

SEQ ID NO: 262514 - DNA, 20 bp, synthetic construct
  source 1..20: mol_type = other DNA
ctgaatttggagacgactgg

SEQ ID NO: 262515 - DNA, 20 bp, synthetic construct
  source 1..20: mol_type = other DNA
cctgaatttggagacgactg

SEQ ID NO: 262516 - DNA, 20 bp, synthetic construct
  source 1..20: mol_type = other DNA
ccctgaatttggagacgact

SEQ ID NO: 262517 - DNA, 20 bp, synthetic construct
  source 1..20: mol_type = other DNA
cccctgaatttggagacgac

SEQ ID NO: 262518 - DNA, 20 bp, synthetic construct
  source 1..20: mol_type = other DNA
gcccctgaatttggagacga

SEQ ID NO: 262519 - DNA, 20 bp, synthetic construct
  source 1..20: mol_type = other DNA
tgcccctgaatttggagacg

SEQ ID NO: 262520 - DNA, 20 bp, synthetic construct
  source 1..20: mol_type = other DNA
gtgcccctgaatttggagac

SEQ ID NO: 262521 - DNA, 20 bp, synthetic construct
  source 1..20: mol_type = other DNA
tgtgcccctgaatttggaga

SEQ ID NO: 262522 - DNA, 20 bp, synthetic construct
  source 1..20: mol_type = other DNA
ctgtgcccctgaatttggag

SEQ ID NO: 262523 - DNA, 20 bp, synthetic construct
  source 1..20: mol_type = other DNA
actgtgcccctgaatttgga

SEQ ID NO: 262524 - DNA, 20 bp, synthetic construct
  source 1..20: mol_type = other DNA
tactgtgcccctgaatttgg

SEQ ID NO: 262525 - DNA, 20 bp, synthetic construct
  source 1..20: mol_type = other DNA
ttactgtgcccctgaatttg

SEQ ID NO: 262526 - DNA, 20 bp, synthetic construct
  source 1..20: mol_type = other DNA
gttactgtgcccctgaattt

SEQ ID NO: 262527 - DNA, 20 bp, synthetic construct
  source 1..20: mol_type = other DNA
tgttactgtgcccctgaatt

SEQ ID NO: 262528 - DNA, 20 bp, synthetic construct
  source 1..20: mol_type = other DNA
atgttactgtgcccctgaat

SEQ ID NO: 262529 - DNA, 20 bp, synthetic construct
  source 1..20: mol_type = other DNA
gatgttactgtgcccctgaa

SEQ ID NO: 262530 - DNA, 20 bp, synthetic construct
  source 1..20: mol_type = other DNA
ggatgttactgtgcccctga

SEQ ID NO: 262531 - DNA, 20 bp, synthetic construct
  source 1..20: mol_type = other DNA
tggatgttactgtgcccctg

SEQ ID NO: 262532 - DNA, 20 bp, synthetic construct
  source 1..20: mol_type = other DNA
ttggatgttactgtgcccct

SEQ ID NO: 262533 - DNA, 20 bp, synthetic construct
  source 1..20: mol_type = other DNA
gttggatgttactgtgcccc

SEQ ID NO: 262534 - DNA, 20 bp, synthetic construct
  source 1..20: mol_type = other DNA
tgttggatgttactgtgccc

SEQ ID NO: 262535 - DNA, 20 bp, synthetic construct
  source 1..20: mol_type = other DNA
ctgttggatgttactgtgcc

SEQ ID NO: 262536 - DNA, 20 bp, synthetic construct
  source 1..20: mol_type = other DNA
cctgttggatgttactgtgc

SEQ ID NO: 262537 - DNA, 20 bp, synthetic construct
  source 1..20: mol_type = other DNA
gcctgttggatgttactgtg

SEQ ID NO: 262538 - DNA, 20 bp, synthetic construct
  source 1..20: mol_type = other DNA
agcctgttggatgttactgt

SEQ ID NO: 262539 - DNA, 20 bp, synthetic construct
  source 1..20: mol_type = other DNA
cagcctgttggatgttactg

SEQ ID NO: 262540 - DNA, 20 bp, synthetic construct
  source 1..20: mol_type = other DNA
ccagcctgttggatgttact

SEQ ID NO: 262541 - DNA, 20 bp, synthetic construct
  source 1..20: mol_type = other DNA
tccagcctgttggatgttac

SEQ ID NO: 262542 - DNA, 20 bp, synthetic construct
  source 1..20: mol_type = other DNA
ctccagcctgttggatgtta

SEQ ID NO: 262543 - DNA, 20 bp, synthetic construct
  source 1..20: mol_type = other DNA
tctccagcctgttggatgtt

SEQ ID NO: 262544 - DNA, 20 bp, synthetic construct
  source 1..20: mol_type = other DNA
ttctccagcctgttggatgt

SEQ ID NO: 262545 - DNA, 20 bp, synthetic construct
  source 1..20: mol_type = other DNA
tttctccagcctgttggatg

SEQ ID NO: 262546 - DNA, 20 bp, synthetic construct
  source 1..20: mol_type = other DNA
ctttctccagcctgttggat

SEQ ID NO: 262547 - DNA, 20 bp, synthetic construct
  source 1..20: mol_type = other DNA
tctttctccagcctgttgga

SEQ ID NO: 262548 - DNA, 20 bp, synthetic construct
  source 1..20: mol_type = other DNA
ttctttctccagcctgttgg

SEQ ID NO: 262549 - DNA, 20 bp, synthetic construct
  source 1..20: mol_type = other DNA
gttctttctccagcctgttg

SEQ ID NO: 262550 - DNA, 20 bp, synthetic construct
  source 1..20: mol_type = other DNA
cgttctttctccagcctgtt

SEQ ID NO: 262551 - DNA, 20 bp, synthetic construct
  source 1..20: mol_type = other DNA
acgttctttctccagcctgt

SEQ ID NO: 262552 - DNA, 20 bp, synthetic construct
  source 1..20: mol_type = other DNA
tacgttctttctccagcctg

SEQ ID NO: 262553 - DNA, 20 bp, synthetic construct
  source 1..20: mol_type = other DNA
gtacgttctttctccagcct

SEQ ID NO: 262554 - DNA, 20 bp, synthetic construct
  source 1..20: mol_type = other DNA
agtacgttctttctccagcc

SEQ ID NO: 262555 - DNA, 20 bp, synthetic construct
  source 1..20: mol_type = other DNA
tagtacgttctttctccagc

SEQ ID NO: 262556 - DNA, 20 bp, synthetic construct
  source 1..20: mol_type = other DNA
ctagtacgttctttctccag

SEQ ID NO: 262557 - DNA, 20 bp, synthetic construct
  source 1..20: mol_type = other DNA
tctagtacgttctttctcca

SEQ ID NO: 262558 - DNA, 20 bp, synthetic construct
  source 1..20: mol_type = other DNA
ttctagtacgttctttctcc

SEQ ID NO: 262559 - DNA, 20 bp, synthetic construct
  source 1..20: mol_type = other DNA
gttctagtacgttctttctc

SEQ ID NO: 262560 - DNA, 20 bp, synthetic construct
  source 1..20: mol_type = other DNA
agttctagtacgttctttct

SEQ ID NO: 262561 - DNA, 20 bp, synthetic construct
  source 1..20: mol_type = other DNA
aagttctagtacgttctttc

SEQ ID NO: 262562 - DNA, 20 bp, synthetic construct
  source 1..20: mol_type = other DNA
gaagttctagtacgttcttt

SEQ ID NO: 262563 - DNA, 20 bp, synthetic construct
  source 1..20: mol_type = other DNA
ggaagttctagtacgttctt

SEQ ID NO: 262564 - DNA, 20 bp, synthetic construct
  source 1..20: mol_type = other DNA
tggaagttctagtacgttct

SEQ ID NO: 262565 - DNA, 20 bp, synthetic construct
  source 1..20: mol_type = other DNA
atggaagttctagtacgttc

SEQ ID NO: 262566 - DNA, 20 bp, synthetic construct
  source 1..20: mol_type = other DNA
aatggaagttctagtacgtt

SEQ ID NO: 262567 - DNA, 20 bp, synthetic construct
  source 1..20: mol_type = other DNA
gaatggaagttctagtacgt

SEQ ID NO: 262568 - DNA, 20 bp, synthetic construct
  source 1..20: mol_type = other DNA
ggaatggaagttctagtacg

SEQ ID NO: 262569 - DNA, 20 bp, synthetic construct
  source 1..20: mol_type = other DNA
aggaatggaagttctagtac

SEQ ID NO: 262570 - DNA, 20 bp, synthetic construct
  source 1..20: mol_type = other DNA
aaggaatggaagttctagta

SEQ ID NO: 262571 - DNA, 20 bp, synthetic construct
  source 1..20: mol_type = other DNA
aaaggaatggaagttctagt

SEQ ID NO: 262572 - DNA, 20 bp, synthetic construct
  source 1..20: mol_type = other DNA
aaaaggaatggaagttctag

SEQ ID NO: 262573 - DNA, 20 bp, synthetic construct
  source 1..20: mol_type = other DNA
aaaaaggaatggaagttcta

SEQ ID NO: 262574 - DNA, 20 bp, synthetic construct
  source 1..20: mol_type = other DNA
gaaaaaggaatggaagttct

SEQ ID NO: 262575 - DNA, 20 bp, synthetic construct
  source 1..20: mol_type = other DNA
tgaaaaaggaatggaagttc

SEQ ID NO: 262576 - DNA, 20 bp, synthetic construct
  source 1..20: mol_type = other DNA
atgaaaaaggaatggaagtt

SEQ ID NO: 262577 - DNA, 20 bp, synthetic construct
  source 1..20: mol_type = other DNA
catgaaaaaggaatggaagt

SEQ ID NO: 262578 - DNA, 20 bp, synthetic construct
  source 1..20: mol_type = other DNA
acatgaaaaaggaatggaag

SEQ ID NO: 262579 - DNA, 20 bp, synthetic construct
  source 1..20: mol_type = other DNA
gacatgaaaaaggaatggaa

SEQ ID NO: 262580 - DNA, 20 bp, synthetic construct
  source 1..20: mol_type = other DNA
ggacatgaaaaaggaatgga

SEQ ID NO: 262581 - DNA, 20 bp, synthetic construct
  source 1..20: mol_type = other DNA
aggacatgaaaaaggaatgg

SEQ ID NO: 262582 - DNA, 20 bp, synthetic construct
  source 1..20: mol_type = other DNA
gaggacatgaaaaaggaatg

SEQ ID NO: 262583 - DNA, 20 bp, synthetic construct
  source 1..20: mol_type = other DNA
agaggacatgaaaaaggaat

SEQ ID NO: 262584 - DNA, 20 bp, synthetic construct
  source 1..20: mol_type = other DNA
aagaggacatgaaaaaggaa

SEQ ID NO: 262585 - DNA, 20 bp, synthetic construct
  source 1..20: mol_type = other DNA
gaagaggacatgaaaaagga

SEQ ID NO: 262586 - DNA, 20 bp, synthetic construct
  source 1..20: mol_type = other DNA
agaagaggacatgaaaaagg

SEQ ID NO: 262587 - DNA, 20 bp, synthetic construct
  source 1..20: mol_type = other DNA
tagaagaggacatgaaaaag

SEQ ID NO: 262588 - DNA, 20 bp, synthetic construct
  source 1..20: mol_type = other DNA
ttagaagaggacatgaaaaa

SEQ ID NO: 262589 - DNA, 20 bp, synthetic construct
  source 1..20: mol_type = other DNA
tttagaagaggacatgaaaa

SEQ ID NO: 262590 - DNA, 20 bp, synthetic construct
  source 1..20: mol_type = other DNA
ttttagaagaggacatgaaa

SEQ ID NO: 262591 - DNA, 20 bp, synthetic construct
  source 1..20: mol_type = other DNA
cttttagaagaggacatgaa

SEQ ID NO: 262592 - DNA, 20 bp, synthetic construct
  source 1..20: mol_type = other DNA
gcttttagaagaggacatga

SEQ ID NO: 262593 - DNA, 20 bp, synthetic construct
  source 1..20: mol_type = other DNA
agcttttagaagaggacatg

SEQ ID NO: 262594 - DNA, 20 bp, synthetic construct
  source 1..20: mol_type = other DNA
aagcttttagaagaggacat

SEQ ID NO: 262595 - DNA, 20 bp, synthetic construct
  source 1..20: mol_type = other DNA
aaagcttttagaagaggaca

SEQ ID NO: 262596 - DNA, 20 bp, synthetic construct
  source 1..20: mol_type = other DNA
caaagcttttagaagaggac

SEQ ID NO: 262597 - DNA, 20 bp, synthetic construct
  source 1..20: mol_type = other DNA
acaaagcttttagaagagga

SEQ ID NO: 262598 - DNA, 20 bp, synthetic construct
  source 1..20: mol_type = other DNA
gacaaagcttttagaagagg

SEQ ID NO: 262599 - DNA, 20 bp, synthetic construct
  source 1..20: mol_type = other DNA
tgacaaagcttttagaagag

SEQ ID NO: 262600 - DNA, 20 bp, synthetic construct
  source 1..20: mol_type = other DNA
ctgacaaagcttttagaaga

SEQ ID NO: 262601 - DNA, 20 bp, synthetic construct
  source 1..20: mol_type = other DNA
cctgacaaagcttttagaag

SEQ ID NO: 262602 - DNA, 20 bp, synthetic construct
  source 1..20: mol_type = other DNA
ccctgacaaagcttttagaa

SEQ ID NO: 262603 - DNA, 20 bp, synthetic construct
  source 1..20: mol_type = other DNA
gccctgacaaagcttttaga

SEQ ID NO: 262604 - DNA, 20 bp, synthetic construct
  source 1..20: mol_type = other DNA
ggccctgacaaagcttttag

SEQ ID NO: 262605 - DNA, 20 bp, synthetic construct
  source 1..20: mol_type = other DNA
tggccctgacaaagctttta

SEQ ID NO: 262606 - DNA, 20 bp, synthetic construct
  source 1..20: mol_type = other DNA
ctggccctgacaaagctttt

SEQ ID NO: 262607 - DNA, 20 bp, synthetic construct
  source 1..20: mol_type = other DNA
cctggccctgacaaagcttt

SEQ ID NO: 262608 - DNA, 20 bp, synthetic construct
  source 1..20: mol_type = other DNA
gcctggccctgacaaagctt

SEQ ID NO: 262609 - DNA, 20 bp, synthetic construct
  source 1..20: mol_type = other DNA
cgcctggccctgacaaagct

SEQ ID NO: 262610 - DNA, 20 bp, synthetic construct
  source 1..20: mol_type = other DNA
gcgcctggccctgacaaagc

SEQ ID NO: 262611 - DNA, 20 bp, synthetic construct
  source 1..20: mol_type = other DNA
cgcgcctggccctgacaaag

SEQ ID NO: 262612 - DNA, 20 bp, synthetic construct
  source 1..20: mol_type = other DNA
ccgcgcctggccctgacaaa

SEQ ID NO: 262613 - DNA, 20 bp, synthetic construct
  source 1..20: mol_type = other DNA
accgcgcctggccctgacaa

SEQ ID NO: 262614 - DNA, 20 bp, synthetic construct
  source 1..20: mol_type = other DNA
caccgcgcctggccctgaca

SEQ ID NO: 262615 - DNA, 20 bp, synthetic construct
  source 1..20: mol_type = other DNA
ccaccgcgcctggccctgac

SEQ ID NO: 262616 - DNA, 20 bp, synthetic construct
  source 1..20: mol_type = other DNA
gccaccgcgcctggccctga

SEQ ID NO: 262617 - DNA, 20 bp, synthetic construct
  source 1..20: mol_type = other DNA
agccaccgcgcctggccctg

SEQ ID NO: 262618 - DNA, 20 bp, synthetic construct
  source 1..20: mol_type = other DNA
gagccaccgcgcctggccct

SEQ ID NO: 262619 - DNA, 20 bp, synthetic construct
  source 1..20: mol_type = other DNA
tgagccaccgcgcctggccc

SEQ ID NO: 262620 - DNA, 20 bp, synthetic construct
  source 1..20: mol_type = other DNA
gtgagccaccgcgcctggcc

SEQ ID NO: 262621 - DNA, 20 bp, synthetic construct
  source 1..20: mol_type = other DNA
cgtgagccaccgcgcctggc

SEQ ID NO: 262622 - DNA, 20 bp, synthetic construct
  source 1..20: mol_type = other DNA
gcgtgagccaccgcgcctgg

SEQ ID NO: 262623 - DNA, 20 bp, synthetic construct
  source 1..20: mol_type = other DNA
ggcgtgagccaccgcgcctg

SEQ ID NO: 262624 - DNA, 20 bp, synthetic construct
  source 1..20: mol_type = other DNA
aggcgtgagccaccgcgcct

SEQ ID NO: 262625 - DNA, 20 bp, synthetic construct
  source 1..20: mol_type = other DNA
caggcgtgagccaccgcgcc

SEQ ID NO: 262626 - DNA, 20 bp, synthetic construct
  source 1..20: mol_type = other DNA
acaggcgtgagccaccgcgc

SEQ ID NO: 262627 - DNA, 20 bp, synthetic construct
  source 1..20: mol_type = other DNA
tacaggcgtgagccaccgcg

SEQ ID NO: 262628 - DNA, 20 bp, synthetic construct
  source 1..20: mol_type = other DNA
ttacaggcgtgagccaccgc

SEQ ID NO: 262629 - DNA, 20 bp, synthetic construct
  source 1..20: mol_type = other DNA
attacaggcgtgagccaccg

SEQ ID NO: 262630 - DNA, 20 bp, synthetic construct
  source 1..20: mol_type = other DNA
gattacaggcgtgagccacc

SEQ ID NO: 262631 - DNA, 20 bp, synthetic construct
  source 1..20: mol_type = other DNA
ggattacaggcgtgagccac

SEQ ID NO: 262632 - DNA, 20 bp, synthetic construct
  source 1..20: mol_type = other DNA
gggattacaggcgtgagcca

SEQ ID NO: 262633 - DNA, 20 bp, synthetic construct
  source 1..20: mol_type = other DNA
tgggattacaggcgtgagcc

SEQ ID NO: 262634 - DNA, 20 bp, synthetic construct
  source 1..20: mol_type = other DNA
ctgggattacaggcgtgagc

SEQ ID NO: 262635 - DNA, 20 bp, synthetic construct
  source 1..20: mol_type = other DNA
gctgggattacaggcgtgag

SEQ ID NO: 262636 - DNA, 20 bp, synthetic construct
  source 1..20: mol_type = other DNA
tgctgggattacaggcgtga

SEQ ID NO: 262637 - DNA, 20 bp, synthetic construct
  source 1..20: mol_type = other DNA
gtgctgggattacaggcgtg

SEQ ID NO: 262638 - DNA, 20 bp, synthetic construct
  source 1..20: mol_type = other DNA
agtgctgggattacaggcgt

SEQ ID NO: 262639 - DNA, 20 bp, synthetic construct
  source 1..20: mol_type = other DNA
aagtgctgggattacaggcg

SEQ ID NO: 262640 - DNA, 20 bp, synthetic construct
  source 1..20: mol_type = other DNA
aaagtgctgggattacaggc

SEQ ID NO: 262641 - DNA, 20 bp, synthetic construct
  source 1..20: mol_type = other DNA
caaagtgctgggattacagg

SEQ ID NO: 262642 - DNA, 20 bp, synthetic construct
  source 1..20: mol_type = other DNA
ccaaagtgctgggattacag

SEQ ID NO: 262643 - DNA, 20 bp, synthetic construct
  source 1..20: mol_type = other DNA
cccaaagtgctgggattaca

SEQ ID NO: 262644 - DNA, 20 bp, synthetic construct
  source 1..20: mol_type = other DNA
tcccaaagtgctgggattac

SEQ ID NO: 262645 - DNA, 20 bp, synthetic construct
  source 1..20: mol_type = other DNA
ctcccaaagtgctgggatta

SEQ ID NO: 262646 - DNA, 20 bp, synthetic construct
  source 1..20: mol_type = other DNA
cctcccaaagtgctgggatt

SEQ ID NO: 262647 - DNA, 20 bp, synthetic construct
  source 1..20: mol_type = other DNA
gcctcccaaagtgctgggat

SEQ ID NO: 262648 - DNA, 20 bp, synthetic construct
  source 1..20: mol_type = other DNA
ggcctcccaaagtgctggga

SEQ ID NO: 262649 - DNA, 20 bp, synthetic construct
  source 1..20: mol_type = other DNA
cggcctcccaaagtgctggg

SEQ ID NO: 262650 - DNA, 20 bp, synthetic construct
  source 1..20: mol_type = other DNA
tcggcctcccaaagtgctgg

SEQ ID NO: 262651 - DNA, 20 bp, synthetic construct
  source 1..20: mol_type = other DNA
ctcggcctcccaaagtgctg

SEQ ID NO: 262652 - DNA, 20 bp, synthetic construct
  source 1..20: mol_type = other DNA
tctcggcctcccaaagtgct

SEQ ID NO: 262653 - DNA, 20 bp, synthetic construct
  source 1..20: mol_type = other DNA
gtctcggcctcccaaagtgc

SEQ ID NO: 262654 - DNA, 20 bp, synthetic construct
  source 1..20: mol_type = other DNA
cgtctcggcctcccaaagtg

SEQ ID NO: 262655 - DNA, 20 bp, synthetic construct
  source 1..20: mol_type = other DNA
ccgtctcggcctcccaaagt

SEQ ID NO: 262656 - DNA, 20 bp, synthetic construct
  source 1..20: mol_type = other DNA
cccgtctcggcctcccaaag

SEQ ID NO: 262657 - DNA, 20 bp, synthetic construct
  source 1..20: mol_type = other DNA
acccgtctcggcctcccaaa

SEQ ID NO: 262658 - DNA, 20 bp, synthetic construct
  source 1..20: mol_type = other DNA
cacccgtctcggcctcccaa

SEQ ID NO: 262659 - DNA, 20 bp, synthetic construct
  source 1..20: mol_type = other DNA
ccacccgtctcggcctccca

SEQ ID NO: 262660 - DNA, 20 bp, synthetic construct
  source 1..20: mol_type = other DNA
tccacccgtctcggcctccc

SEQ ID NO: 262661 - DNA, 20 bp, synthetic construct
  source 1..20: mol_type = other DNA
atccacccgtctcggcctcc

SEQ ID NO: 262662 - DNA, 20 bp, synthetic construct
  source 1..20: mol_type = other DNA
gatccacccgtctcggcctc

SEQ ID NO: 262663 - DNA, 20 bp, synthetic construct
  source 1..20: mol_type = other DNA
tgatccacccgtctcggcct

SEQ ID NO: 262664 - DNA, 20 bp, synthetic construct
  source 1..20: mol_type = other DNA
gtgatccacccgtctcggcc

SEQ ID NO: 262665 - DNA, 20 bp, synthetic construct
  source 1..20: mol_type = other DNA
cgtgatccacccgtctcggc

SEQ ID NO: 262666 - DNA, 20 bp, synthetic construct
  source 1..20: mol_type = other DNA
tcgtgatccacccgtctcgg

SEQ ID NO: 262667 - DNA, 20 bp, synthetic construct
  source 1..20: mol_type = other DNA
ctcgtgatccacccgtctcg

SEQ ID NO: 262668 - DNA, 20 bp, synthetic construct
  source 1..20: mol_type = other DNA
cctcgtgatccacccgtctc

SEQ ID NO: 262669 - DNA, 20 bp, synthetic construct
  source 1..20: mol_type = other DNA
acctcgtgatccacccgtct

SEQ ID NO: 262670 - DNA, 20 bp, synthetic construct
  source 1..20: mol_type = other DNA
gacctcgtgatccacccgtc

SEQ ID NO: 262671 - DNA, 20 bp, synthetic construct
  source 1..20: mol_type = other DNA
tgacctcgtgatccacccgt

SEQ ID NO: 262672 - DNA, 20 bp, synthetic construct
  source 1..20: mol_type = other DNA
ctgacctcgtgatccacccg

SEQ ID NO: 262673 - DNA, 20 bp, synthetic construct
  source 1..20: mol_type = other DNA
cctgacctcgtgatccaccc

SEQ ID NO: 262674 - DNA, 20 bp, synthetic construct
  source 1..20: mol_type = other DNA
tcctgacctcgtgatccacc

SEQ ID NO: 262675 - DNA, 20 bp, synthetic construct
  source 1..20: mol_type = other DNA
ctcctgacctcgtgatccac

SEQ ID NO: 262676 - DNA, 20 bp, synthetic construct
  source 1..20: mol_type = other DNA
tctcctgacctcgtgatcca

SEQ ID NO: 262677 - DNA, 20 bp, synthetic construct
  source 1..20: mol_type = other DNA
atctcctgacctcgtgatcc

SEQ ID NO: 262678 - DNA, 20 bp, synthetic construct
  source 1..20: mol_type = other DNA
gatctcctgacctcgtgatc

SEQ ID NO: 262679 - DNA, 20 bp, synthetic construct
  source 1..20: mol_type = other DNA
cgatctcctgacctcgtgat

SEQ ID NO: 262680 - DNA, 20 bp, synthetic construct
  source 1..20: mol_type = other DNA
tcgatctcctgacctcgtga

SEQ ID NO: 262681 - DNA, 20 bp, synthetic construct
  source 1..20: mol_type = other DNA
ctcgatctcctgacctcgtg

SEQ ID NO: 262682 - DNA, 20 bp, synthetic construct
  source 1..20: mol_type = other DNA
tctcgatctcctgacctcgt

SEQ ID NO: 262683 - DNA, 20 bp, synthetic construct
  source 1..20: mol_type = other DNA
gtctcgatctcctgacctcg

SEQ ID NO: 262684 - DNA, 20 bp, synthetic construct
  source 1..20: mol_type = other DNA
ggtctcgatctcctgacctc

SEQ ID NO: 262685 - DNA, 20 bp, synthetic construct
  source 1..20: mol_type = other DNA
tggtctcgatctcctgacct

SEQ ID NO: 262686 - DNA, 20 bp, synthetic construct
  source 1..20: mol_type = other DNA
atggtctcgatctcctgacc

SEQ ID NO: 262687 - DNA, 20 bp, synthetic construct
  source 1..20: mol_type = other DNA
gatggtctcgatctcctgac

SEQ ID NO: 262688 - DNA, 20 bp, synthetic construct
  source 1..20: mol_type = other DNA
ggatggtctcgatctcctga

SEQ ID NO: 262689 - DNA, 20 bp, synthetic construct
  source 1..20: mol_type = other DNA
aggatggtctcgatctcctg

SEQ ID NO: 262690 - DNA, 20 bp, synthetic construct
  source 1..20: mol_type = other DNA
caggatggtctcgatctcct

SEQ ID NO: 262691 - DNA, 20 bp, synthetic construct
  source 1..20: mol_type = other DNA
ccaggatggtctcgatctcc

SEQ ID NO: 262692 - DNA, 20 bp, synthetic construct
  source 1..20: mol_type = other DNA
gccaggatggtctcgatctc

SEQ ID NO: 262693 - DNA, 20 bp, synthetic construct
  source 1..20: mol_type = other DNA
agccaggatggtctcgatct

SEQ ID NO: 262694 - DNA, 20 bp, synthetic construct
  source 1..20: mol_type = other DNA
tagccaggatggtctcgatc

SEQ ID NO: 262695 - DNA, 20 bp, synthetic construct
  source 1..20: mol_type = other DNA
ttagccaggatggtctcgat

SEQ ID NO: 262696 - DNA, 20 bp, synthetic construct
  source 1..20: mol_type = other DNA
gttagccaggatggtctcga

SEQ ID NO: 262697 - DNA, 20 bp, synthetic construct
  source 1..20: mol_type = other DNA
tgttagccaggatggtctcg

SEQ ID NO: 262698 - DNA, 20 bp, synthetic construct
  source 1..20: mol_type = other DNA
gtgttagccaggatggtctc

SEQ ID NO: 262699 - DNA, 20 bp, synthetic construct
  source 1..20: mol_type = other DNA
tgtgttagccaggatggtct

SEQ ID NO: 262700 - DNA, 20 bp, synthetic construct
  source 1..20: mol_type = other DNA
ctgtgttagccaggatggtc

SEQ ID NO: 262701 - DNA, 20 bp, synthetic construct
  source 1..20: mol_type = other DNA
actgtgttagccaggatggt

SEQ ID NO: 262702 - DNA, 20 bp, synthetic construct
  source 1..20: mol_type = other DNA
cactgtgttagccaggatgg

SEQ ID NO: 262703 - DNA, 20 bp, synthetic construct
  source 1..20: mol_type = other DNA
tcactgtgttagccaggatg

SEQ ID NO: 262704 - DNA, 20 bp, synthetic construct
  source 1..20: mol_type = other DNA
ttcactgtgttagccaggat

SEQ ID NO: 262705 - DNA, 20 bp, synthetic construct
  source 1..20: mol_type = other DNA
tttcactgtgttagccagga

SEQ ID NO: 262706 - DNA, 20 bp, synthetic construct
  source 1..20: mol_type = other DNA
gtttcactgtgttagccagg

SEQ ID NO: 262707 - DNA, 20 bp, synthetic construct
  source 1..20: mol_type = other DNA
ggtttcactgtgttagccag

SEQ ID NO: 262708 - DNA, 20 bp, synthetic construct
  source 1..20: mol_type = other DNA
gggtttcactgtgttagcca

SEQ ID NO: 262709 - DNA, 20 bp, synthetic construct
  source 1..20: mol_type = other DNA
ggggtttcactgtgttagcc

SEQ ID NO: 262710 - DNA, 20 bp, synthetic construct
  source 1..20: mol_type = other DNA
tggggtttcactgtgttagc

SEQ ID NO: 262711 - DNA, 20 bp, synthetic construct
  source 1..20: mol_type = other DNA
atggggtttcactgtgttag

SEQ ID NO: 262712 - DNA, 20 bp, synthetic construct
  source 1..20: mol_type = other DNA
gatggggtttcactgtgtta

SEQ ID NO: 262713 - DNA, 20 bp, synthetic construct
  source 1..20: mol_type = other DNA
agatggggtttcactgtgtt

SEQ ID NO: 262714 - DNA, 20 bp, synthetic construct
  source 1..20: mol_type = other DNA
gagatggggtttcactgtgt

SEQ ID NO: 262715 - DNA, 20 bp, synthetic construct
  source 1..20: mol_type = other DNA
agagatggggtttcactgtg

SEQ ID NO: 262716 - DNA, 20 bp, synthetic construct
  source 1..20: mol_type = other DNA
tagagatggggtttcactgt

SEQ ID NO: 262717 - DNA, 20 bp, synthetic construct
  source 1..20: mol_type = other DNA
gtagagatggggtttcactg

SEQ ID NO: 262718 - DNA, 20 bp, synthetic construct
  source 1..20: mol_type = other DNA
agtagagatggggtttcact

SEQ ID NO: 262719 - DNA, 20 bp, synthetic construct
  source 1..20: mol_type = other DNA
tagtagagatggggtttcac

SEQ ID NO: 262720 - DNA, 20 bp, synthetic construct
  source 1..20: mol_type = other DNA
ttagtagagatggggtttca

SEQ ID NO: 262721 - DNA, 20 bp, synthetic construct
  source 1..20: mol_type = other DNA
tttagtagagatggggtttc

SEQ ID NO: 262722 - DNA, 20 bp, synthetic construct
  source 1..20: mol_type = other DNA
ttttagtagagatggggttt

SEQ ID NO: 262723 - DNA, 20 bp, synthetic construct
  source 1..20: mol_type = other DNA
tttttagtagagatggggtt

SEQ ID NO: 262724 - DNA, 20 bp, synthetic construct
  source 1..20: mol_type = other DNA
atttttagtagagatggggt

SEQ ID NO: 262725 - DNA, 20 bp, synthetic construct
  source 1..20: mol_type = other DNA
tatttttagtagagatgggg

SEQ ID NO: 262726 - DNA, 20 bp, synthetic construct
  source 1..20: mol_type = other DNA
gtatttttagtagagatggg

SEQ ID NO: 262727 - DNA, 20 bp, synthetic construct
  source 1..20: mol_type = other DNA
tgtatttttagtagagatgg

SEQ ID NO: 262728 - DNA, 20 bp, synthetic construct
  source 1..20: mol_type = other DNA
ttgtatttttagtagagatg

SEQ ID NO: 262729 - DNA, 20 bp, synthetic construct
  source 1..20: mol_type = other DNA
tttgtatttttagtagagat

SEQ ID NO: 262730 - DNA, 20 bp, synthetic construct
  source 1..20: mol_type = other DNA
ttttgtatttttagtagaga

SEQ ID NO: 262731 - DNA, 20 bp, synthetic construct
  source 1..20: mol_type = other DNA
tttttgtatttttagtagag

SEQ ID NO: 262732 - DNA, 20 bp, synthetic construct
  source 1..20: mol_type = other DNA
ttttttgtatttttagtaga

SEQ ID NO: 262733 - DNA, 20 bp, synthetic construct
  source 1..20: mol_type = other DNA
tttttttgtatttttagtag

SEQ ID NO: 262734 - DNA, 20 bp, synthetic construct
  source 1..20: mol_type = other DNA
gtttttttgtatttttagta

SEQ ID NO: 262735 - DNA, 20 bp, synthetic construct
  source 1..20: mol_type = other DNA
cgtttttttgtatttttagt

SEQ ID NO: 262736 - DNA, 20 bp, synthetic construct
  source 1..20: mol_type = other DNA
tcgtttttttgtatttttag

SEQ ID NO: 262737 - DNA, 20 bp, synthetic construct
  source 1..20: mol_type = other DNA
ctcgtttttttgtattttta

SEQ ID NO: 262738 - DNA, 20 bp, synthetic construct
  source 1..20: mol_type = other DNA
gctcgtttttttgtattttt

SEQ ID NO: 262739 - DNA, 20 bp, synthetic construct
  source 1..20: mol_type = other DNA
ggctcgtttttttgtatttt

SEQ ID NO: 262740 - DNA, 20 bp, synthetic construct
  source 1..20: mol_type = other DNA
cggctcgtttttttgtattt

SEQ ID NO: 262741 - DNA, 20 bp, synthetic construct
  source 1..20: mol_type = other DNA
ccggctcgtttttttgtatt

SEQ ID NO: 262742 - DNA, 20 bp, synthetic construct
  source 1..20: mol_type = other DNA
cccggctcgtttttttgtat

SEQ ID NO: 262743 - DNA, 20 bp, synthetic construct
  source 1..20: mol_type = other DNA
gcccggctcgtttttttgta

SEQ ID NO: 262744 - DNA, 20 bp, synthetic construct
  source 1..20: mol_type = other DNA
cgcccggctcgtttttttgt

SEQ ID NO: 262745 - DNA, 20 bp, synthetic construct
  source 1..20: mol_type = other DNA
acgcccggctcgtttttttg

SEQ ID NO: 262746 - DNA, 20 bp, synthetic construct
  source 1..20: mol_type = other DNA
cacgcccggctcgttttttt

SEQ ID NO: 262747 - DNA, 20 bp, synthetic construct
  source 1..20: mol_type = other DNA
ccacgcccggctcgtttttt

SEQ ID NO: 262748 - DNA, 20 bp, synthetic construct
  source 1..20: mol_type = other DNA
accacgcccggctcgttttt

SEQ ID NO: 262749 - DNA, 20 bp, synthetic construct
  source 1..20: mol_type = other DNA
caccacgcccggctcgtttt

SEQ ID NO: 262750 - DNA, 20 bp, synthetic construct
  source 1..20: mol_type = other DNA
ccaccacgcccggctcgttt

SEQ ID NO: 262751 - DNA, 20 bp, synthetic construct
  source 1..20: mol_type = other DNA
accaccacgcccggctcgtt

SEQ ID NO: 262752 - DNA, 20 bp, synthetic construct
  source 1..20: mol_type = other DNA
caccaccacgcccggctcgt

SEQ ID NO: 262753 - DNA, 20 bp, synthetic construct
  source 1..20: mol_type = other DNA
ccaccaccacgcccggctcg

SEQ ID NO: 262754 - DNA, 20 bp, synthetic construct
  source 1..20: mol_type = other DNA
cccaccaccacgcccggctc

SEQ ID NO: 262755 - DNA, 20 bp, synthetic construct
  source 1..20: mol_type = other DNA
gcccaccaccacgcccggct

SEQ ID NO: 262756 - DNA, 20 bp, synthetic construct
  source 1..20: mol_type = other DNA
cgcccaccaccacgcccggc

SEQ ID NO: 262757 - DNA, 20 bp, synthetic construct
  source 1..20: mol_type = other DNA
gcgcccaccaccacgcccgg

SEQ ID NO: 262758 - DNA, 20 bp, synthetic construct
  source 1..20: mol_type = other DNA
ggcgcccaccaccacgcccg

SEQ ID NO: 262759 - DNA, 20 bp, synthetic construct
  source 1..20: mol_type = other DNA
aggcgcccaccaccacgccc

SEQ ID NO: 262760 - DNA, 20 bp, synthetic construct
  source 1..20: mol_type = other DNA
caggcgcccaccaccacgcc

SEQ ID NO: 262761 - DNA, 20 bp, synthetic construct
  source 1..20: mol_type = other DNA
acaggcgcccaccaccacgc

SEQ ID NO: 262762 - DNA, 20 bp, synthetic construct
  source 1..20: mol_type = other DNA
tacaggcgcccaccaccacg

SEQ ID NO: 262763 - DNA, 20 bp, synthetic construct
  source 1..20: mol_type = other DNA
ctacaggcgcccaccaccac

SEQ ID NO: 262764 - DNA, 20 bp, synthetic construct
  source 1..20: mol_type = other DNA
actacaggcgcccaccacca

SEQ ID NO: 262765 - DNA, 20 bp, synthetic construct
  source 1..20: mol_type = other DNA
gactacaggcgcccaccacc

SEQ ID NO: 262766 - DNA, 20 bp, synthetic construct
  source 1..20: mol_type = other DNA
ggactacaggcgcccaccac

SEQ ID NO: 262767 - DNA, 20 bp, synthetic construct
  source 1..20: mol_type = other DNA
gggactacaggcgcccacca

SEQ ID NO: 262768 - DNA, 20 bp, synthetic construct
  source 1..20: mol_type = other DNA
tgggactacaggcgcccacc

SEQ ID NO: 262769 - DNA, 20 bp, synthetic construct
  source 1..20: mol_type = other DNA
ctgggactacaggcgcccac

SEQ ID NO: 262770 - DNA, 20 bp, synthetic construct
  source 1..20: mol_type = other DNA
gctgggactacaggcgccca

SEQ ID NO: 262771 - DNA, 20 bp, synthetic construct
  source 1..20: mol_type = other DNA
agctgggactacaggcgccc

SEQ ID NO: 262772 - DNA, 20 bp, synthetic construct
  source 1..20: mol_type = other DNA
tagctgggactacaggcgcc

SEQ ID NO: 262773 - DNA, 20 bp, synthetic construct
  source 1..20: mol_type = other DNA
gtagctgggactacaggcgc

SEQ ID NO: 262774 - DNA, 20 bp, synthetic construct
  source 1..20: mol_type = other DNA
agtagctgggactacaggcg

SEQ ID NO: 262775 - DNA, 20 bp, synthetic construct
  source 1..20: mol_type = other DNA
gagtagctgggactacaggc

SEQ ID NO: 262776 - DNA, 20 bp, synthetic construct
  source 1..20: mol_type = other DNA
cgagtagctgggactacagg

SEQ ID NO: 262777 - DNA, 20 bp, synthetic construct
  source 1..20: mol_type = other DNA
ccgagtagctgggactacag

SEQ ID NO: 262778 - DNA, 20 bp, synthetic construct
  source 1..20: mol_type = other DNA
cccgagtagctgggactaca

SEQ ID NO: 262779 - DNA, 20 bp, synthetic construct
  source 1..20: mol_type = other DNA
tcccgagtagctgggactac

SEQ ID NO: 262780 - DNA, 20 bp, synthetic construct
  source 1..20: mol_type = other DNA
ctcccgagtagctgggacta

SEQ ID NO: 262781 - DNA, 20 bp, synthetic construct
  source 1..20: mol_type = other DNA
cctcccgagtagctgggact

SEQ ID NO: 262782 - DNA, 20 bp, synthetic construct
  source 1..20: mol_type = other DNA
gcctcccgagtagctgggac

SEQ ID NO: 262783 - DNA, 20 bp, synthetic construct
  source 1..20: mol_type = other DNA
agcctcccgagtagctggga

SEQ ID NO: 262784 - DNA, 20 bp, synthetic construct
  source 1..20: mol_type = other DNA
cagcctcccgagtagctggg

SEQ ID NO: 262785 - DNA, 20 bp, synthetic construct
  source 1..20: mol_type = other DNA
tcagcctcccgagtagctgg

SEQ ID NO: 262786 - DNA, 20 bp, synthetic construct
  source 1..20: mol_type = other DNA
ctcagcctcccgagtagctg

SEQ ID NO: 262787 - DNA, 20 bp, synthetic construct
  source 1..20: mol_type = other DNA
cctcagcctcccgagtagct

SEQ ID NO: 262788 - DNA, 20 bp, synthetic construct
  source 1..20: mol_type = other DNA
gcctcagcctcccgagtagc

SEQ ID NO: 262789 - DNA, 20 bp, synthetic construct
  source 1..20: mol_type = other DNA
tgcctcagcctcccgagtag

SEQ ID NO: 262790 - DNA, 20 bp, synthetic construct
  source 1..20: mol_type = other DNA
ctgcctcagcctcccgagta

SEQ ID NO: 262791 - DNA, 20 bp, synthetic construct
  source 1..20: mol_type = other DNA
cctgcctcagcctcccgagt

SEQ ID NO: 262792 - DNA, 20 bp, synthetic construct
  source 1..20: mol_type = other DNA
tcctgcctcagcctcccgag

SEQ ID NO: 262793 - DNA, 20 bp, synthetic construct
  source 1..20: mol_type = other DNA
ctcctgcctcagcctcccga

SEQ ID NO: 262794 - DNA, 20 bp, synthetic construct
  source 1..20: mol_type = other DNA
tctcctgcctcagcctcccg

SEQ ID NO: 262795 - DNA, 20 bp, synthetic construct
  source 1..20: mol_type = other DNA
ttctcctgcctcagcctccc

SEQ ID NO: 262796 - DNA, 20 bp, synthetic construct
  source 1..20: mol_type = other DNA
attctcctgcctcagcctcc

SEQ ID NO: 262797 - DNA, 20 bp, synthetic construct
  source 1..20: mol_type = other DNA
cattctcctgcctcagcctc

SEQ ID NO: 262798 - DNA, 20 bp, synthetic construct
  source 1..20: mol_type = other DNA
ccattctcctgcctcagcct

SEQ ID NO: 262799 - DNA, 20 bp, synthetic construct
  source 1..20: mol_type = other DNA
gccattctcctgcctcagcc

SEQ ID NO: 262800 - DNA, 20 bp, synthetic construct
  source 1..20: mol_type = other DNA
cgccattctcctgcctcagc

SEQ ID NO: 262801 - DNA, 20 bp, synthetic construct
  source 1..20: mol_type = other DNA
acgccattctcctgcctcag

SEQ ID NO: 262802 - DNA, 20 bp, synthetic construct
  source 1..20: mol_type = other DNA
cacgccattctcctgcctca

SEQ ID NO: 262803 - DNA, 20 bp, synthetic construct
  source 1..20: mol_type = other DNA
tcacgccattctcctgcctc

SEQ ID NO: 262804 - DNA, 20 bp, synthetic construct
  source 1..20: mol_type = other DNA
ttcacgccattctcctgcct

SEQ ID NO: 262805 - DNA, 20 bp, synthetic construct
  source 1..20: mol_type = other DNA
gttcacgccattctcctgcc

SEQ ID NO: 262806 - DNA, 20 bp, synthetic construct
  source 1..20: mol_type = other DNA
ggttcacgccattctcctgc

SEQ ID NO: 262807 - DNA, 20 bp, synthetic construct
  source 1..20: mol_type = other DNA
gggttcacgccattctcctg

SEQ ID NO: 262808 - DNA, 20 bp, synthetic construct
  source 1..20: mol_type = other DNA
tgggttcacgccattctcct

SEQ ID NO: 262809 - DNA, 20 bp, synthetic construct
  source 1..20: mol_type = other DNA
ctgggttcacgccattctcc

SEQ ID NO: 262810 - DNA, 20 bp, synthetic construct
  source 1..20: mol_type = other DNA
cctgggttcacgccattctc

SEQ ID NO: 262811 - DNA, 20 bp, synthetic construct
  source 1..20: mol_type = other DNA
tcctgggttcacgccattct

SEQ ID NO: 262812 - DNA, 20 bp, synthetic construct
  source 1..20: mol_type = other DNA
ctcctgggttcacgccattc

SEQ ID NO: 262813 - DNA, 20 bp, synthetic construct
  source 1..20: mol_type = other DNA
cctcctgggttcacgccatt

SEQ ID NO: 262814 - DNA, 20 bp, synthetic construct
  source 1..20: mol_type = other DNA
gcctcctgggttcacgccat

SEQ ID NO: 262815 - DNA, 20 bp, synthetic construct
  source 1..20: mol_type = other DNA
tgcctcctgggttcacgcca

SEQ ID NO: 262816 - DNA, 20 bp, synthetic construct
  source 1..20: mol_type = other DNA
ctgcctcctgggttcacgcc

SEQ ID NO: 262817 - DNA, 20 bp, synthetic construct
  source 1..20: mol_type = other DNA
tctgcctcctgggttcacgc

SEQ ID NO: 262818 - DNA, 20 bp, synthetic construct
  source 1..20: mol_type = other DNA
ctctgcctcctgggttcacg

SEQ ID NO: 262819 - DNA, 20 bp, synthetic construct
  source 1..20: mol_type = other DNA
gctctgcctcctgggttcac

SEQ ID NO: 262820 - DNA, 20 bp, synthetic construct
  source 1..20: mol_type = other DNA
agctctgcctcctgggttca

SEQ ID NO: 262821 - DNA, 20 bp, synthetic construct
  source 1..20: mol_type = other DNA
aagctctgcctcctgggttc

SEQ ID NO: 262822 - DNA, 20 bp, synthetic construct
  source 1..20: mol_type = other DNA
caagctctgcctcctgggtt

SEQ ID NO: 262823 - DNA, 20 bp, synthetic construct
  source 1..20: mol_type = other DNA
gcaagctctgcctcctgggt

SEQ ID NO: 262824 - DNA, 20 bp, synthetic construct
  source 1..20: mol_type = other DNA
tgcaagctctgcctcctggg

SEQ ID NO: 262825 - DNA, 20 bp, synthetic construct
  source 1..20: mol_type = other DNA
ctgcaagctctgcctcctgg

SEQ ID NO: 262826 - DNA, 20 bp, synthetic construct
  source 1..20: mol_type = other DNA
actgcaagctctgcctcctg

SEQ ID NO: 262827 - DNA, 20 bp, synthetic construct
  source 1..20: mol_type = other DNA
cactgcaagctctgcctcct

SEQ ID NO: 262828 - DNA, 20 bp, synthetic construct
  source 1..20: mol_type = other DNA
tcactgcaagctctgcctcc

SEQ ID NO: 262829 - DNA, 20 bp, synthetic construct
  source 1..20: mol_type = other DNA
ctcactgcaagctctgcctc

SEQ ID NO: 262830 - DNA, 20 bp, synthetic construct
  source 1..20: mol_type = other DNA
gctcactgcaagctctgcct

SEQ ID NO: 262831 - DNA, 20 bp, synthetic construct
  source 1..20: mol_type = other DNA
ggctcactgcaagctctgcc

SEQ ID NO: 262832 - DNA, 20 bp, synthetic construct
  source 1..20: mol_type = other DNA
cggctcactgcaagctctgc

SEQ ID NO: 262833 - DNA, 20 bp, synthetic construct
  source 1..20: mol_type = other DNA
tcggctcactgcaagctctg

SEQ ID NO: 262834 - DNA, 20 bp, synthetic construct
  source 1..20: mol_type = other DNA
ctcggctcactgcaagctct

SEQ ID NO: 262835 - DNA, 20 bp, synthetic construct
  source 1..20: mol_type = other DNA
tctcggctcactgcaagctc

SEQ ID NO: 262836 - DNA, 20 bp, synthetic construct
  source 1..20: mol_type = other DNA
atctcggctcactgcaagct

SEQ ID NO: 262837 - DNA, 20 bp, synthetic construct
  source 1..20: mol_type = other DNA
aatctcggctcactgcaagc

SEQ ID NO: 262838 - DNA, 20 bp, synthetic construct
  source 1..20: mol_type = other DNA
caatctcggctcactgcaag

SEQ ID NO: 262839 - DNA, 20 bp, synthetic construct
  source 1..20: mol_type = other DNA
gcaatctcggctcactgcaa

SEQ ID NO: 262840 - DNA, 20 bp, synthetic construct
  source 1..20: mol_type = other DNA
tgcaatctcggctcactgca

SEQ ID NO: 262841 - DNA, 20 bp, synthetic construct
  source 1..20: mol_type = other DNA
gtgcaatctcggctcactgc

SEQ ID NO: 262842 - DNA, 20 bp, synthetic construct
  source 1..20: mol_type = other DNA
ggtgcaatctcggctcactg

SEQ ID NO: 262843 - DNA, 20 bp, synthetic construct
  source 1..20: mol_type = other DNA
tggtgcaatctcggctcact

SEQ ID NO: 262844 - DNA, 20 bp, synthetic construct
  source 1..20: mol_type = other DNA
gtggtgcaatctcggctcac

SEQ ID NO: 262845 - DNA, 20 bp, synthetic construct
  source 1..20: mol_type = other DNA
agtggtgcaatctcggctca

SEQ ID NO: 262846 - DNA, 20 bp, synthetic construct
  source 1..20: mol_type = other DNA
cagtggtgcaatctcggctc

SEQ ID NO: 262847 - DNA, 20 bp, synthetic construct
  source 1..20: mol_type = other DNA
gcagtggtgcaatctcggct

SEQ ID NO: 262848 - DNA, 20 bp, synthetic construct
  source 1..20: mol_type = other DNA
tgcagtggtgcaatctcggc

SEQ ID NO: 262849 - DNA, 20 bp, synthetic construct
  source 1..20: mol_type = other DNA
ctgcagtggtgcaatctcgg

SEQ ID NO: 262850 - DNA, 20 bp, synthetic construct
  source 1..20: mol_type = other DNA
actgcagtggtgcaatctcg

SEQ ID NO: 262851 - DNA, 20 bp, synthetic construct
  source 1..20: mol_type = other DNA
gactgcagtggtgcaatctc

SEQ ID NO: 262852 - DNA, 20 bp, synthetic construct
  source 1..20: mol_type = other DNA
ggactgcagtggtgcaatct

SEQ ID NO: 262853 - DNA, 20 bp, synthetic construct
  source 1..20: mol_type = other DNA
tggactgcagtggtgcaatc

SEQ ID NO: 262854 - DNA, 20 bp, synthetic construct
  source 1..20: mol_type = other DNA
ctggactgcagtggtgcaat

SEQ ID NO: 262855 - DNA, 20 bp, synthetic construct
  source 1..20: mol_type = other DNA
gctggactgcagtggtgcaa

SEQ ID NO: 262856 - DNA, 20 bp, synthetic construct
  source 1..20: mol_type = other DNA
ggctggactgcagtggtgca

SEQ ID NO: 262857 - DNA, 20 bp, synthetic construct
  source 1..20: mol_type = other DNA
aggctggactgcagtggtgc

SEQ ID NO: 262858 - DNA, 20 bp, synthetic construct
  source 1..20: mol_type = other DNA
caggctggactgcagtggtg

SEQ ID NO: 262859 - DNA, 20 bp, synthetic construct
  source 1..20: mol_type = other DNA
ccaggctggactgcagtggt

SEQ ID NO: 262860 - DNA, 20 bp, synthetic construct
  source 1..20: mol_type = other DNA
cccaggctggactgcagtgg

SEQ ID NO: 262861 - DNA, 20 bp, synthetic construct
  source 1..20: mol_type = other DNA
gcccaggctggactgcagtg

SEQ ID NO: 262862 - DNA, 20 bp, synthetic construct
  source 1..20: mol_type = other DNA
cgcccaggctggactgcagt

SEQ ID NO: 262863 - DNA, 20 bp, synthetic construct
  source 1..20: mol_type = other DNA
tcgcccaggctggactgcag

SEQ ID NO: 262864 - DNA, 20 bp, synthetic construct
  source 1..20: mol_type = other DNA
gtcgcccaggctggactgca

SEQ ID NO: 262865 - DNA, 20 bp, synthetic construct
  source 1..20: mol_type = other DNA
tgtcgcccaggctggactgc

SEQ ID NO: 262866 - DNA, 20 bp, synthetic construct
  source 1..20: mol_type = other DNA
ctgtcgcccaggctggactg

SEQ ID NO: 262867 - DNA, 20 bp, synthetic construct
  source 1..20: mol_type = other DNA
tctgtcgcccaggctggact

SEQ ID NO: 262868 - DNA, 20 bp, synthetic construct
  source 1..20: mol_type = other DNA
ctctgtcgcccaggctggac

SEQ ID NO: 262869 - DNA, 20 bp, synthetic construct
  source 1..20: mol_type = other DNA
gctctgtcgcccaggctgga

SEQ ID NO: 262870 - DNA, 20 bp, synthetic construct
  source 1..20: mol_type = other DNA
cgctctgtcgcccaggctgg

SEQ ID NO: 262871 - DNA, 20 bp, synthetic construct
  source 1..20: mol_type = other DNA
tcgctctgtcgcccaggctg

SEQ ID NO: 262872 - DNA, 20 bp, synthetic construct
  source 1..20: mol_type = other DNA
ctcgctctgtcgcccaggct

SEQ ID NO: 262873 - DNA, 20 bp, synthetic construct
  source 1..20: mol_type = other DNA
tctcgctctgtcgcccaggc

SEQ ID NO: 262874 - DNA, 20 bp, synthetic construct
  source 1..20: mol_type = other DNA
gtctcgctctgtcgcccagg

SEQ ID NO: 262875 - DNA, 20 bp, synthetic construct
  source 1..20: mol_type = other DNA
agtctcgctctgtcgcccag

SEQ ID NO: 262876 - DNA, 20 bp, synthetic construct
  source 1..20: mol_type = other DNA
gagtctcgctctgtcgccca

SEQ ID NO: 262877 - DNA, 20 bp, synthetic construct
  source 1..20: mol_type = other DNA
ggagtctcgctctgtcgccc

SEQ ID NO: 262878 - DNA, 20 bp, synthetic construct
  source 1..20: mol_type = other DNA
cggagtctcgctctgtcgcc

SEQ ID NO: 262879 - DNA, 20 bp, synthetic construct
  source 1..20: mol_type = other DNA
acggagtctcgctctgtcgc

SEQ ID NO: 262880 - DNA, 20 bp, synthetic construct
  source 1..20: mol_type = other DNA
gacggagtctcgctctgtcg

SEQ ID NO: 262881 - DNA, 20 bp, synthetic construct
  source 1..20: mol_type = other DNA
agacggagtctcgctctgtc

SEQ ID NO: 262882 - DNA, 20 bp, synthetic construct
  source 1..20: mol_type = other DNA
gagacggagtctcgctctgt

SEQ ID NO: 262883 - DNA, 20 bp, synthetic construct
  source 1..20: mol_type = other DNA
tgagacggagtctcgctctg

SEQ ID NO: 262884 - DNA, 20 bp, synthetic construct
  source 1..20: mol_type = other DNA
ttgagacggagtctcgctct

SEQ ID NO: 262885 - DNA, 20 bp, synthetic construct
  source 1..20: mol_type = other DNA
tttgagacggagtctcgctc

SEQ ID NO: 262886 - DNA, 20 bp, synthetic construct
  source 1..20: mol_type = other DNA
ttttgagacggagtctcgct

SEQ ID NO: 262887 - DNA, 20 bp, synthetic construct
  source 1..20: mol_type = other DNA
tttttgagacggagtctcgc

SEQ ID NO: 262888 - DNA, 20 bp, synthetic construct
  source 1..20: mol_type = other DNA
ttttttgagacggagtctcg

SEQ ID NO: 262889 - DNA, 20 bp, synthetic construct
  source 1..20: mol_type = other DNA
cttttttgagacggagtctc

SEQ ID NO: 262890 - DNA, 20 bp, synthetic construct
  source 1..20: mol_type = other DNA
tcttttttgagacggagtct

SEQ ID NO: 262891 - DNA, 20 bp, synthetic construct
  source 1..20: mol_type = other DNA
ttcttttttgagacggagtc

SEQ ID NO: 262892 - DNA, 20 bp, synthetic construct
  source 1..20: mol_type = other DNA
tttcttttttgagacggagt

SEQ ID NO: 262893 - DNA, 20 bp, synthetic construct
  source 1..20: mol_type = other DNA
ttttcttttttgagacggag

SEQ ID NO: 262894 - DNA, 20 bp, synthetic construct
  source 1..20: mol_type = other DNA
tttttcttttttgagacgga

SEQ ID NO: 262895 - DNA, 20 bp, synthetic construct
  source 1..20: mol_type = other DNA
ctttttcttttttgagacgg

SEQ ID NO: 262896 - DNA, 20 bp, synthetic construct
  source 1..20: mol_type = other DNA
tctttttcttttttgagacg

SEQ ID NO: 262897 - DNA, 20 bp, synthetic construct
  source 1..20: mol_type = other DNA
ttctttttcttttttgagac

SEQ ID NO: 262898 - DNA, 20 bp, synthetic construct
  source 1..20: mol_type = other DNA
tttctttttcttttttgaga

SEQ ID NO: 262899 - DNA, 20 bp, synthetic construct
  source 1..20: mol_type = other DNA
ttttctttttcttttttgag

SEQ ID NO: 262900 - DNA, 20 bp, synthetic construct
  source 1..20: mol_type = other DNA
tttttctttttcttttttga

SEQ ID NO: 262901 - DNA, 20 bp, synthetic construct
  source 1..20: mol_type = other DNA
ctttttctttttcttttttg

SEQ ID NO: 262902 - DNA, 20 bp, synthetic construct
  source 1..20: mol_type = other DNA
tctttttctttttctttttt

SEQ ID NO: 262903 - DNA, 20 bp, synthetic construct
  source 1..20: mol_type = other DNA
ttctttttctttttcttttt

SEQ ID NO: 262904 - DNA, 20 bp, synthetic construct
  source 1..20: mol_type = other DNA
tttctttttctttttctttt

SEQ ID NO: 262905 - DNA, 20 bp, synthetic construct
  source 1..20: mol_type = other DNA
ttttctttttctttttcttt

SEQ ID NO: 262906 - DNA, 20 bp, synthetic construct
  source 1..20: mol_type = other DNA
tttttctttttctttttctt

SEQ ID NO: 262907 - DNA, 20 bp, synthetic construct
  source 1..20: mol_type = other DNA
ctttttctttttctttttct

SEQ ID NO: 262908 - DNA, 20 bp, synthetic construct
  source 1..20: mol_type = other DNA
tctttttctttttctttttc

SEQ ID NO: 262909 - DNA, 20 bp, synthetic construct
  source 1..20: mol_type = other DNA
ttctttttctttttcttttt

SEQ ID NO: 262910 - DNA, 20 bp, synthetic construct
  source 1..20: mol_type = other DNA
gttctttttctttttctttt

SEQ ID NO: 262911 - DNA, 20 bp, synthetic construct
  source 1..20: mol_type = other DNA
agttctttttctttttcttt

SEQ ID NO: 262912 - DNA, 20 bp, synthetic construct
  source 1..20: mol_type = other DNA
cagttctttttctttttctt

SEQ ID NO: 262913 - DNA, 20 bp, synthetic construct
  source 1..20: mol_type = other DNA
acagttctttttctttttct

SEQ ID NO: 262914 - DNA, 20 bp, synthetic construct
  source 1..20: mol_type = other DNA
cacagttctttttctttttc

SEQ ID NO: 262915 - DNA, 20 bp, synthetic construct
  source 1..20: mol_type = other DNA
tcacagttctttttcttttt

SEQ ID NO: 262916 - DNA, 20 bp, synthetic construct
  source 1..20: mol_type = other DNA
atcacagttctttttctttt

SEQ ID NO: 262917 - DNA, 20 bp, synthetic construct
  source 1..20: mol_type = other DNA
aatcacagttctttttcttt

SEQ ID NO: 262918 - DNA, 20 bp, synthetic construct
  source 1..20: mol_type = other DNA
caatcacagttctttttctt

SEQ ID NO: 262919 - DNA, 20 bp, synthetic construct
  source 1..20: mol_type = other DNA
ccaatcacagttctttttct

SEQ ID NO: 262920 - DNA, 20 bp, synthetic construct
  source 1..20: mol_type = other DNA
cccaatcacagttctttttc

SEQ ID NO: 262921 - DNA, 20 bp, synthetic construct
  source 1..20: mol_type = other DNA
ccccaatcacagttcttttt

SEQ ID NO: 262922 - DNA, 20 bp, synthetic construct
  source 1..20: mol_type = other DNA
tccccaatcacagttctttt

SEQ ID NO: 262923 - DNA, 20 bp, synthetic construct
  source 1..20: mol_type = other DNA
ctccccaatcacagttcttt

SEQ ID NO: 262924 - DNA, 20 bp, synthetic construct
  source 1..20: mol_type = other DNA
cctccccaatcacagttctt

SEQ ID NO: 262925 - DNA, 20 bp, synthetic construct
  source 1..20: mol_type = other DNA
tcctccccaatcacagttct

SEQ ID NO: 262926 - DNA, 20 bp, synthetic construct
  source 1..20: mol_type = other DNA
gtcctccccaatcacagttc

SEQ ID NO: 262927 - DNA, 20 bp, synthetic construct
  source 1..20: mol_type = other DNA
cgtcctccccaatcacagtt

SEQ ID NO: 262928 - DNA, 20 bp, synthetic construct
  source 1..20: mol_type = other DNA
ccgtcctccccaatcacagt

SEQ ID NO: 262929 - DNA, 20 bp, synthetic construct
  source 1..20: mol_type = other DNA
accgtcctccccaatcacag

SEQ ID NO: 262930 - DNA, 20 bp, synthetic construct
  source 1..20: mol_type = other DNA
gaccgtcctccccaatcaca

SEQ ID NO: 262931 - DNA, 20 bp, synthetic construct
  source 1..20: mol_type = other DNA
tgaccgtcctccccaatcac

SEQ ID NO: 262932 - DNA, 20 bp, synthetic construct
  source 1..20: mol_type = other DNA
gtgaccgtcctccccaatca

SEQ ID NO: 262933 - DNA, 20 bp, synthetic construct
  source 1..20: mol_type = other DNA
agtgaccgtcctccccaatc

SEQ ID NO: 262934 - DNA, 20 bp, synthetic construct
  source 1..20: mol_type = other DNA
aagtgaccgtcctccccaat

SEQ ID NO: 262935 - DNA, 20 bp, synthetic construct
  source 1..20: mol_type = other DNA
aaagtgaccgtcctccccaa

SEQ ID NO: 262936 - DNA, 20 bp, synthetic construct
  source 1..20: mol_type = other DNA
gaaagtgaccgtcctcccca

SEQ ID NO: 262937 - DNA, 20 bp, synthetic construct
  source 1..20: mol_type = other DNA
ggaaagtgaccgtcctcccc

SEQ ID NO: 262938 - DNA, 20 bp, synthetic construct
  source 1..20: mol_type = other DNA
aggaaagtgaccgtcctccc

SEQ ID NO: 262939 - DNA, 20 bp, synthetic construct
  source 1..20: mol_type = other DNA
caggaaagtgaccgtcctcc

SEQ ID NO: 262940 - DNA, 20 bp, synthetic construct
  source 1..20: mol_type = other DNA
acaggaaagtgaccgtcctc

SEQ ID NO: 262941 - DNA, 20 bp, synthetic construct
  source 1..20: mol_type = other DNA
aacaggaaagtgaccgtcct

SEQ ID NO: 262942 - DNA, 20 bp, synthetic construct
  source 1..20: mol_type = other DNA
gaacaggaaagtgaccgtcc

SEQ ID NO: 262943 - DNA, 20 bp, synthetic construct
  source 1..20: mol_type = other DNA
agaacaggaaagtgaccgtc

SEQ ID NO: 262944 - DNA, 20 bp, synthetic construct
  source 1..20: mol_type = other DNA
aagaacaggaaagtgaccgt

SEQ ID NO: 262945 - DNA, 20 bp, synthetic construct
  source 1..20: mol_type = other DNA
taagaacaggaaagtgaccg

SEQ ID NO: 262946 - DNA, 20 bp, synthetic construct
  source 1..20: mol_type = other DNA
gtaagaacaggaaagtgacc

SEQ ID NO: 262947 - DNA, 20 bp, synthetic construct
  source 1..20: mol_type = other DNA
agtaagaacaggaaagtgac

SEQ ID NO: 262948 - DNA, 20 bp, synthetic construct
  source 1..20: mol_type = other DNA
cagtaagaacaggaaagtga

SEQ ID NO: 262949 - DNA, 20 bp, synthetic construct
  source 1..20: mol_type = other DNA
tcagtaagaacaggaaagtg

SEQ ID NO: 262950 - DNA, 20 bp, synthetic construct
  source 1..20: mol_type = other DNA
atcagtaagaacaggaaagt

SEQ ID NO: 262951 - DNA, 20 bp, synthetic construct
  source 1..20: mol_type = other DNA
gatcagtaagaacaggaaag

SEQ ID NO: 262952 - DNA, 20 bp, synthetic construct
  source 1..20: mol_type = other DNA
tgatcagtaagaacaggaaa

SEQ ID NO: 262953 - DNA, 20 bp, synthetic construct
  source 1..20: mol_type = other DNA
ctgatcagtaagaacaggaa

SEQ ID NO: 262954 - DNA, 20 bp, synthetic construct
  source 1..20: mol_type = other DNA
tctgatcagtaagaacagga

SEQ ID NO: 262955 - DNA, 20 bp, synthetic construct
  source 1..20: mol_type = other DNA
ttctgatcagtaagaacagg

SEQ ID NO: 262956 - DNA, 20 bp, synthetic construct
  source 1..20: mol_type = other DNA
cttctgatcagtaagaacag

SEQ ID NO: 262957 - DNA, 20 bp, synthetic construct
  source 1..20: mol_type = other DNA
ccttctgatcagtaagaaca

SEQ ID NO: 262958 - DNA, 20 bp, synthetic construct
  source 1..20: mol_type = other DNA
cccttctgatcagtaagaac

SEQ ID NO: 262959 - DNA, 20 bp, synthetic construct
  source 1..20: mol_type = other DNA
tcccttctgatcagtaagaa

SEQ ID NO: 262960 - DNA, 20 bp, synthetic construct
  source 1..20: mol_type = other DNA
atcccttctgatcagtaaga

SEQ ID NO: 262961 - DNA, 20 bp, synthetic construct
  source 1..20: mol_type = other DNA
tatcccttctgatcagtaag

SEQ ID NO: 262962 - DNA, 20 bp, synthetic construct
  source 1..20: mol_type = other DNA
atatcccttctgatcagtaa

SEQ ID NO: 262963 - DNA, 20 bp, synthetic construct
  source 1..20: mol_type = other DNA
aatatcccttctgatcagta

SEQ ID NO: 262964 - DNA, 20 bp, synthetic construct
  source 1..20: mol_type = other DNA
taatatcccttctgatcagt

SEQ ID NO: 262965 - DNA, 20 bp, synthetic construct
  source 1..20: mol_type = other DNA
ttaatatcccttctgatcag

SEQ ID NO: 262966 - DNA, 20 bp, synthetic construct
  source 1..20: mol_type = other DNA
cttaatatcccttctgatca

SEQ ID NO: 262967 - DNA, 20 bp, synthetic construct
  source 1..20: mol_type = other DNA
ccttaatatcccttctgatc

SEQ ID NO: 262968 - DNA, 20 bp, synthetic construct
  source 1..20: mol_type = other DNA
cccttaatatcccttctgat

SEQ ID NO: 262969 - DNA, 20 bp, synthetic construct
  source 1..20: mol_type = other DNA
acccttaatatcccttctga

SEQ ID NO: 262970 - DNA, 20 bp, synthetic construct
  source 1..20: mol_type = other DNA
tacccttaatatcccttctg

SEQ ID NO: 262971 - DNA, 20 bp, synthetic construct
  source 1..20: mol_type = other DNA
gtacccttaatatcccttct

SEQ ID NO: 262972 - DNA, 20 bp, synthetic construct
  source 1..20: mol_type = other DNA
ggtacccttaatatcccttc

SEQ ID NO: 262973 - DNA, 20 bp, synthetic construct
  source 1..20: mol_type = other DNA
aggtacccttaatatccctt

SEQ ID NO: 262974 - DNA, 20 bp, synthetic construct
  source 1..20: mol_type = other DNA
caggtacccttaatatccct

SEQ ID NO: 262975 - DNA, 20 bp, synthetic construct
  source 1..20: mol_type = other DNA
tcaggtacccttaatatccc

SEQ ID NO: 262976 - DNA, 20 bp, synthetic construct
  source 1..20: mol_type = other DNA
atcaggtacccttaatatcc

SEQ ID NO: 262977 - DNA, 20 bp, synthetic construct
  source 1..20: mol_type = other DNA
aatcaggtacccttaatatc

SEQ ID NO: 262978 - DNA, 20 bp, synthetic construct
  source 1..20: mol_type = other DNA
gaatcaggtacccttaatat

SEQ ID NO: 262979 - DNA, 20 bp, synthetic construct
  source 1..20: mol_type = other DNA
tgaatcaggtacccttaata

SEQ ID NO: 262980 - DNA, 20 bp, synthetic construct
  source 1..20: mol_type = other DNA
ttgaatcaggtacccttaat

SEQ ID NO: 262981 - DNA, 20 bp, synthetic construct
  source 1..20: mol_type = other DNA
tttgaatcaggtacccttaa

SEQ ID NO: 262982 - DNA, 20 bp, synthetic construct
  source 1..20: mol_type = other DNA
gtttgaatcaggtaccctta

SEQ ID NO: 262983 - DNA, 20 bp, synthetic construct
  source 1..20: mol_type = other DNA
tgtttgaatcaggtaccctt

SEQ ID NO: 262984 - DNA, 20 bp, synthetic construct
  source 1..20: mol_type = other DNA
ctgtttgaatcaggtaccct

SEQ ID NO: 262985 - DNA, 20 bp, synthetic construct
  source 1..20: mol_type = other DNA
gctgtttgaatcaggtaccc

SEQ ID NO: 262986 - DNA, 20 bp, synthetic construct
  source 1..20: mol_type = other DNA
ggctgtttgaatcaggtacc

SEQ ID NO: 262987 - DNA, 20 bp, synthetic construct
  source 1..20: mol_type = other DNA
aggctgtttgaatcaggtac

SEQ ID NO: 262988 - DNA, 20 bp, synthetic construct
  source 1..20: mol_type = other DNA
caggctgtttgaatcaggta

SEQ ID NO: 262989 - DNA, 20 bp, synthetic construct
  source 1..20: mol_type = other DNA
ccaggctgtttgaatcaggt

SEQ ID NO: 262990 - DNA, 20 bp, synthetic construct
  source 1..20: mol_type = other DNA
tccaggctgtttgaatcagg

SEQ ID NO: 262991 - DNA, 20 bp, synthetic construct
  source 1..20: mol_type = other DNA
ctccaggctgtttgaatcag

SEQ ID NO: 262992 - DNA, 20 bp, synthetic construct
  source 1..20: mol_type = other DNA
tctccaggctgtttgaatca

SEQ ID NO: 262993 - DNA, 20 bp, synthetic construct
  source 1..20: mol_type = other DNA
atctccaggctgtttgaatc

SEQ ID NO: 262994 - DNA, 20 bp, synthetic construct
  source 1..20: mol_type = other DNA
gatctccaggctgtttgaat

SEQ ID NO: 262995 - DNA, 20 bp, synthetic construct
  source 1..20: mol_type = other DNA
tgatctccaggctgtttgaa

SEQ ID NO: 262996 - DNA, 20 bp, synthetic construct
  source 1..20: mol_type = other DNA
gtgatctccaggctgtttga

SEQ ID NO: 262997 - DNA, 20 bp, synthetic construct
  source 1..20: mol_type = other DNA
agtgatctccaggctgtttg

SEQ ID NO: 262998 - DNA, 20 bp, synthetic construct
  source 1..20: mol_type = other DNA
cagtgatctccaggctgttt

SEQ ID NO: 262999 - DNA, 20 bp, synthetic construct
  source 1..20: mol_type = other DNA
gcagtgatctccaggctgtt

SEQ ID NO: 263000 - DNA, 20 bp, synthetic construct
  source 1..20: mol_type = other DNA
agcagtgatctccaggctgt

SEQ ID NO: 263001 - DNA, 20 bp, synthetic construct
  source 1..20: mol_type = other DNA
aagcagtgatctccaggctg

SEQ ID NO: 263002 - DNA, 20 bp, synthetic construct
  source 1..20: mol_type = other DNA
aaagcagtgatctccaggct

SEQ ID NO: 263003 - DNA, 20 bp, synthetic construct
  source 1..20: mol_type = other DNA
gaaagcagtgatctccaggc

SEQ ID NO: 263004 - DNA, 20 bp, synthetic construct
  source 1..20: mol_type = other DNA
tgaaagcagtgatctccagg

SEQ ID NO: 263005 - DNA, 20 bp, synthetic construct
  source 1..20: mol_type = other DNA
ttgaaagcagtgatctccag

SEQ ID NO: 263006 - DNA, 20 bp, synthetic construct
  source 1..20: mol_type = other DNA
gttgaaagcagtgatctcca

SEQ ID NO: 263007 - DNA, 20 bp, synthetic construct
  source 1..20: mol_type = other DNA
ggttgaaagcagtgatctcc

SEQ ID NO: 263008 - DNA, 20 bp, synthetic construct
  source 1..20: mol_type = other DNA
tggttgaaagcagtgatctc

SEQ ID NO: 263009 - DNA, 20 bp, synthetic construct
  source 1..20: mol_type = other DNA
atggttgaaagcagtgatct

SEQ ID NO: 263010 - DNA, 20 bp, synthetic construct
  source 1..20: mol_type = other DNA
aatggttgaaagcagtgatc

SEQ ID NO: 263011 - DNA, 20 bp, synthetic construct
  source 1..20: mol_type = other DNA
taatggttgaaagcagtgat

SEQ ID NO: 263012 - DNA, 20 bp, synthetic construct
  source 1..20: mol_type = other DNA
gtaatggttgaaagcagtga

SEQ ID NO: 263013 - DNA, 20 bp, synthetic construct
  source 1..20: mol_type = other DNA
ggtaatggttgaaagcagtg

SEQ ID NO: 263014 - DNA, 20 bp, synthetic construct
  source 1..20: mol_type = other DNA
aggtaatggttgaaagcagt

SEQ ID NO: 263015 - DNA, 20 bp, synthetic construct
  source 1..20: mol_type = other DNA
caggtaatggttgaaagcag

SEQ ID NO: 263016 - DNA, 20 bp, synthetic construct
  source 1..20: mol_type = other DNA
gcaggtaatggttgaaagca

SEQ ID NO: 263017 - DNA, 20 bp, synthetic construct
  source 1..20: mol_type = other DNA
ggcaggtaatggttgaaagc

SEQ ID NO: 263018 - DNA, 20 bp, synthetic construct
  source 1..20: mol_type = other DNA
aggcaggtaatggttgaaag

SEQ ID NO: 263019 - DNA, 20 bp, synthetic construct
  source 1..20: mol_type = other DNA
aaggcaggtaatggttgaaa

SEQ ID NO: 263020 - DNA, 20 bp, synthetic construct
  source 1..20: mol_type = other DNA
taaggcaggtaatggttgaa

SEQ ID NO: 263021 - DNA, 20 bp, synthetic construct
  source 1..20: mol_type = other DNA
ataaggcaggtaatggttga

SEQ ID NO: 263022 - DNA, 20 bp, synthetic construct
  source 1..20: mol_type = other DNA
aataaggcaggtaatggttg

SEQ ID NO: 263023 - DNA, 20 bp, synthetic construct
  source 1..20: mol_type = other DNA
aaataaggcaggtaatggtt

SEQ ID NO: 263024 - DNA, 20 bp, synthetic construct
  source 1..20: mol_type = other DNA
taaataaggcaggtaatggt

SEQ ID NO: 263025 - DNA, 20 bp, synthetic construct
  source 1..20: mol_type = other DNA
ataaataaggcaggtaatgg

SEQ ID NO: 263026 - DNA, 20 bp, synthetic construct
  source 1..20: mol_type = other DNA
aataaataaggcaggtaatg

SEQ ID NO: 263027 - DNA, 20 bp, synthetic construct
  source 1..20: mol_type = other DNA
aaataaataaggcaggtaat

SEQ ID NO: 263028 - DNA, 20 bp, synthetic construct
  source 1..20: mol_type = other DNA
aaaataaataaggcaggtaa

SEQ ID NO: 263029 - DNA, 20 bp, synthetic construct
  source 1..20: mol_type = other DNA
aaaaataaataaggcaggta

SEQ ID NO: 263030 - DNA, 20 bp, synthetic construct
  source 1..20: mol_type = other DNA
taaaaataaataaggcaggt

SEQ ID NO: 263031 - DNA, 20 bp, synthetic construct
  source 1..20: mol_type = other DNA
ctaaaaataaataaggcagg

SEQ ID NO: 263032 - DNA, 20 bp, synthetic construct
  source 1..20: mol_type = other DNA
actaaaaataaataaggcag

SEQ ID NO: 263033 - DNA, 20 bp, synthetic construct
  source 1..20: mol_type = other DNA
aactaaaaataaataaggca

SEQ ID NO: 263034 - DNA, 20 bp, synthetic construct
  source 1..20: mol_type = other DNA
taactaaaaataaataaggc

SEQ ID NO: 263035 - DNA, 20 bp, synthetic construct
  source 1..20: mol_type = other DNA
gtaactaaaaataaataagg

SEQ ID NO: 263036 - DNA, 20 bp, synthetic construct
  source 1..20: mol_type = other DNA
agtaactaaaaataaataag

SEQ ID NO: 263037 - DNA, 20 bp, synthetic construct
  source 1..20: mol_type = other DNA
cagtaactaaaaataaataa

SEQ ID NO: 263038 - DNA, 20 bp, synthetic construct
  source 1..20: mol_type = other DNA
acagtaactaaaaataaata

SEQ ID NO: 263039 - DNA, 20 bp, synthetic construct
  source 1..20: mol_type = other DNA
gacagtaactaaaaataaat

SEQ ID NO: 263040 - DNA, 20 bp, synthetic construct
  source 1..20: mol_type = other DNA
ggacagtaactaaaaataaa

SEQ ID NO: 263041 - DNA, 20 bp, synthetic construct
  source 1..20: mol_type = other DNA
aggacagtaactaaaaataa

SEQ ID NO: 263042 - DNA, 20 bp, synthetic construct
  source 1..20: mol_type = other DNA
aaggacagtaactaaaaata

SEQ ID NO: 263043 - DNA, 20 bp, synthetic construct
  source 1..20: mol_type = other DNA
aaaggacagtaactaaaaat

SEQ ID NO: 263044 - DNA, 20 bp, synthetic construct
  source 1..20: mol_type = other DNA
aaaaggacagtaactaaaaa

SEQ ID NO: 263045 - DNA, 20 bp, synthetic construct
  source 1..20: mol_type = other DNA
aaaaaggacagtaactaaaa

SEQ ID NO: 263046 - DNA, 20 bp, synthetic construct
  source 1..20: mol_type = other DNA
aaaaaaggacagtaactaaa

SEQ ID NO: 263047 - DNA, 20 bp, synthetic construct
  source 1..20: mol_type = other DNA
gaaaaaaggacagtaactaa

SEQ ID NO: 263048 - DNA, 20 bp, synthetic construct
  source 1..20: mol_type = other DNA
tgaaaaaaggacagtaacta

SEQ ID NO: 263049 - DNA, 20 bp, synthetic construct
  source 1..20: mol_type = other DNA
ctgaaaaaaggacagtaact

SEQ ID NO: 263050 - DNA, 20 bp, synthetic construct
  source 1..20: mol_type = other DNA
actgaaaaaaggacagtaac

SEQ ID NO: 263051 - DNA, 20 bp, synthetic construct
  source 1..20: mol_type = other DNA
aactgaaaaaaggacagtaa

SEQ ID NO: 263052 - DNA, 20 bp, synthetic construct
  source 1..20: mol_type = other DNA
aaactgaaaaaaggacagta

SEQ ID NO: 263053 - DNA, 20 bp, synthetic construct
  source 1..20: mol_type = other DNA
caaactgaaaaaaggacagt

SEQ ID NO: 263054 - DNA, 20 bp, synthetic construct
  source 1..20: mol_type = other DNA
acaaactgaaaaaaggacag

SEQ ID NO: 263055 - DNA, 20 bp, synthetic construct
  source 1..20: mol_type = other DNA
aacaaactgaaaaaaggaca

SEQ ID NO: 263056 - DNA, 20 bp, synthetic construct
  source 1..20: mol_type = other DNA
aaacaaactgaaaaaaggac

SEQ ID NO: 263057 - DNA, 20 bp, synthetic construct
  source 1..20: mol_type = other DNA
gaaacaaactgaaaaaagga

SEQ ID NO: 263058 - DNA, 20 bp, synthetic construct
  source 1..20: mol_type = other DNA
ggaaacaaactgaaaaaagg

SEQ ID NO: 263059 - DNA, 20 bp, synthetic construct
  source 1..20: mol_type = other DNA
gggaaacaaactgaaaaaag

SEQ ID NO: 263060 - DNA, 20 bp, synthetic construct
  source 1..20: mol_type = other DNA
agggaaacaaactgaaaaaa

SEQ ID NO: 263061 - DNA, 20 bp, synthetic construct
  source 1..20: mol_type = other DNA
gagggaaacaaactgaaaaa

SEQ ID NO: 263062 - DNA, 20 bp, synthetic construct
  source 1..20: mol_type = other DNA
ggagggaaacaaactgaaaa

SEQ ID NO: 263063 - DNA, 20 bp, synthetic construct
  source 1..20: mol_type = other DNA
aggagggaaacaaactgaaa

SEQ ID NO: 263064 - DNA, 20 bp, synthetic construct
  source 1..20: mol_type = other DNA
gaggagggaaacaaactgaa

SEQ ID NO: 263065 - DNA, 20 bp, synthetic construct
  source 1..20: mol_type = other DNA
ggaggagggaaacaaactga

SEQ ID NO: 263066 - DNA, 20 bp, synthetic construct
  source 1..20: mol_type = other DNA
tggaggagggaaacaaactg

SEQ ID NO: 263067 - DNA, 20 bp, synthetic construct
  source 1..20: mol_type = other DNA
atggaggagggaaacaaact

SEQ ID NO: 263068 - DNA, 20 bp, synthetic construct
  source 1..20: mol_type = other DNA
catggaggagggaaacaaac

SEQ ID NO: 263069 - DNA, 20 bp, synthetic construct
  source 1..20: mol_type = other DNA
acatggaggagggaaacaaa

SEQ ID NO: 263070 - DNA, 20 bp, synthetic construct
  source 1..20: mol_type = other DNA
cacatggaggagggaaacaa

SEQ ID NO: 263071 - DNA, 20 bp, synthetic construct
  source 1..20: mol_type = other DNA
gcacatggaggagggaaaca

SEQ ID NO: 263072 - DNA, 20 bp, synthetic construct
  source 1..20: mol_type = other DNA
agcacatggaggagggaaac

SEQ ID NO: 263073 - DNA, 20 bp, synthetic construct
  source 1..20: mol_type = other DNA
cagcacatggaggagggaaa

SEQ ID NO: 263074 - DNA, 20 bp, synthetic construct
  source 1..20: mol_type = other DNA
tcagcacatggaggagggaa

SEQ ID NO: 263075 - DNA, 20 bp, synthetic construct
  source 1..20: mol_type = other DNA
gtcagcacatggaggaggga

SEQ ID NO: 263076 - DNA, 20 bp, synthetic construct
  source 1..20: mol_type = other DNA
agtcagcacatggaggaggg

SEQ ID NO: 263077 - DNA, 20 bp, synthetic construct
  source 1..20: mol_type = other DNA
aagtcagcacatggaggagg

SEQ ID NO: 263078 - DNA, 20 bp, synthetic construct
  source 1..20: mol_type = other DNA
aaagtcagcacatggaggag

SEQ ID NO: 263079 - DNA, 20 bp, synthetic construct
  source 1..20: mol_type = other DNA
aaaagtcagcacatggagga

SEQ ID NO: 263080 - DNA, 20 bp, synthetic construct
  source 1..20: mol_type = other DNA
taaaagtcagcacatggagg

SEQ ID NO: 263081 - DNA, 20 bp, synthetic construct
  source 1..20: mol_type = other DNA
ataaaagtcagcacatggag

SEQ ID NO: 263082 - DNA, 20 bp, synthetic construct
  source 1..20: mol_type = other DNA
aataaaagtcagcacatgga

SEQ ID NO: 263083 - DNA, 20 bp, synthetic construct
  source 1..20: mol_type = other DNA
aaataaaagtcagcacatgg

SEQ ID NO: 263084 - DNA, 20 bp, synthetic construct
  source 1..20: mol_type = other DNA
aaaataaaagtcagcacatg

SEQ ID NO: 263085 - DNA, 20 bp, synthetic construct
  source 1..20: mol_type = other DNA
caaaataaaagtcagcacat

SEQ ID NO: 263086 - DNA, 20 bp, synthetic construct
  source 1..20: mol_type = other DNA
tcaaaataaaagtcagcaca

SEQ ID NO: 263087 - DNA, 20 bp, synthetic construct
  source 1..20: mol_type = other DNA
atcaaaataaaagtcagcac

SEQ ID NO: 263088 - DNA, 20 bp, synthetic construct
  source 1..20: mol_type = other DNA
aatcaaaataaaagtcagca

SEQ ID NO: 263089 - DNA, 20 bp, synthetic construct
  source 1..20: mol_type = other DNA
aaatcaaaataaaagtcagc

SEQ ID NO: 263090 - DNA, 20 bp, synthetic construct
  source 1..20: mol_type = other DNA
aaaatcaaaataaaagtcag

SEQ ID NO: 263091 - DNA, 20 bp, synthetic construct
  source 1..20: mol_type = other DNA
taaaatcaaaataaaagtca

SEQ ID NO: 263092 - DNA, 20 bp, synthetic construct
  source 1..20: mol_type = other DNA
ataaaatcaaaataaaagtc

SEQ ID NO: 263093 - DNA, 20 bp, synthetic construct
  source 1..20: mol_type = other DNA
aataaaatcaaaataaaagt

SEQ ID NO: 263094 - DNA, 20 bp, synthetic construct
  source 1..20: mol_type = other DNA
aaataaaatcaaaataaaag

SEQ ID NO: 263095 - DNA, 20 bp, synthetic construct
  source 1..20: mol_type = other DNA
taaataaaatcaaaataaaa

SEQ ID NO: 263096 - DNA, 20 bp, synthetic construct
  source 1..20: mol_type = other DNA
ataaataaaatcaaaataaa

SEQ ID NO: 263097 - DNA, 20 bp, synthetic construct
  source 1..20: mol_type = other DNA
cataaataaaatcaaaataa

SEQ ID NO: 263098 - DNA, 20 bp, synthetic construct
  source 1..20: mol_type = other DNA
acataaataaaatcaaaata

SEQ ID NO: 263099 - DNA, 20 bp, synthetic construct
  source 1..20: mol_type = other DNA
aacataaataaaatcaaaat

SEQ ID NO: 263100 - DNA, 20 bp, synthetic construct
  source 1..20: mol_type = other DNA
aaacataaataaaatcaaaa

SEQ ID NO: 263101 - DNA, 20 bp, synthetic construct
  source 1..20: mol_type = other DNA
taaacataaataaaatcaaa

SEQ ID NO: 263102 - DNA, 20 bp, synthetic construct
  source 1..20: mol_type = other DNA
ataaacataaataaaatcaa

SEQ ID NO: 263103 - DNA, 20 bp, synthetic construct
  source 1..20: mol_type = other DNA
cataaacataaataaaatca

SEQ ID NO: 263104 - DNA, 20 bp, synthetic construct
  source 1..20: mol_type = other DNA
acataaacataaataaaatc

SEQ ID NO: 263105 - DNA, 20 bp, synthetic construct
  source 1..20: mol_type = other DNA
aacataaacataaataaaat

SEQ ID NO: 263106 - DNA, 20 bp, synthetic construct
  source 1..20: mol_type = other DNA
aaacataaacataaataaaa

SEQ ID NO: 263107 - DNA, 20 bp, synthetic construct
  source 1..20: mol_type = other DNA
taaacataaacataaataaa

SEQ ID NO: 263108 - DNA, 20 bp, synthetic construct
  source 1..20: mol_type = other DNA
ttaaacataaacataaataa

SEQ ID NO: 263109 - DNA, 20 bp, synthetic construct
  source 1..20: mol_type = other DNA
cttaaacataaacataaata

SEQ ID NO: 263110 - DNA, 20 bp, synthetic construct
  source 1..20: mol_type = other DNA
tcttaaacataaacataaat

SEQ ID NO: 263111 - DNA, 20 bp, synthetic construct
  source 1..20: mol_type = other DNA
gtcttaaacataaacataaa

SEQ ID NO: 263112 - DNA, 20 bp, synthetic construct
  source 1..20: mol_type = other DNA
tgtcttaaacataaacataa

SEQ ID NO: 263113 - DNA, 20 bp, synthetic construct
  source 1..20: mol_type = other DNA
atgtcttaaacataaacata

SEQ ID NO: 263114 - DNA, 20 bp, synthetic construct
  source 1..20: mol_type = other DNA
gatgtcttaaacataaacat

SEQ ID NO: 263115 - DNA, 20 bp, synthetic construct
  source 1..20: mol_type = other DNA
ggatgtcttaaacataaaca

SEQ ID NO: 263116 - DNA, 20 bp, synthetic construct
  source 1..20: mol_type = other DNA
tggatgtcttaaacataaac

SEQ ID NO: 263117 - DNA, 20 bp, synthetic construct
  source 1..20: mol_type = other DNA
gtggatgtcttaaacataaa

SEQ ID NO: 263118 - DNA, 20 bp, synthetic construct
  source 1..20: mol_type = other DNA
tgtggatgtcttaaacataa

SEQ ID NO: 263119 - DNA, 20 bp, synthetic construct
  source 1..20: mol_type = other DNA
gtgtggatgtcttaaacata

SEQ ID NO: 263120 - DNA, 20 bp, synthetic construct
  source 1..20: mol_type = other DNA
cgtgtggatgtcttaaacat

SEQ ID NO: 263121 - DNA, 20 bp, synthetic construct
  source 1..20: mol_type = other DNA
acgtgtggatgtcttaaaca

SEQ ID NO: 263122 - DNA, 20 bp, synthetic construct
  source 1..20: mol_type = other DNA
aacgtgtggatgtcttaaac

SEQ ID NO: 263123 - DNA, 20 bp, synthetic construct
  source 1..20: mol_type = other DNA
gaacgtgtggatgtcttaaa

SEQ ID NO: 263124 - DNA, 20 bp, synthetic construct
  source 1..20: mol_type = other DNA
ggaacgtgtggatgtcttaa

SEQ ID NO: 263125 - DNA, 20 bp, synthetic construct
  source 1..20: mol_type = other DNA
aggaacgtgtggatgtctta

SEQ ID NO: 263126 - DNA, 20 bp, synthetic construct
  source 1..20: mol_type = other DNA
gaggaacgtgtggatgtctt

SEQ ID NO: 263127 - DNA, 20 bp, synthetic construct
  source 1..20: mol_type = other DNA
agaggaacgtgtggatgtct

SEQ ID NO: 263128 - DNA, 20 bp, synthetic construct
  source 1..20: mol_type = other DNA
cagaggaacgtgtggatgtc

SEQ ID NO: 263129 - DNA, 20 bp, synthetic construct
  source 1..20: mol_type = other DNA
gcagaggaacgtgtggatgt

SEQ ID NO: 263130 - DNA, 20 bp, synthetic construct
  source 1..20: mol_type = other DNA
agcagaggaacgtgtggatg

SEQ ID NO: 263131 - DNA, 20 bp, synthetic construct
  source 1..20: mol_type = other DNA
tagcagaggaacgtgtggat

SEQ ID NO: 263132 - DNA, 20 bp, synthetic construct
  source 1..20: mol_type = other DNA
ttagcagaggaacgtgtgga

SEQ ID NO: 263133 - DNA, 20 bp, synthetic construct
  source 1..20: mol_type = other DNA
tttagcagaggaacgtgtgg

SEQ ID NO: 263134 - DNA, 20 bp, synthetic construct
  source 1..20: mol_type = other DNA
ttttagcagaggaacgtgtg

SEQ ID NO: 263135 - DNA, 20 bp, synthetic construct
  source 1..20: mol_type = other DNA
gttttagcagaggaacgtgt

SEQ ID NO: 263136 - DNA, 20 bp, synthetic construct
  source 1..20: mol_type = other DNA
ggttttagcagaggaacgtg

SEQ ID NO: 263137 - DNA, 20 bp, synthetic construct
  source 1..20: mol_type = other DNA
aggttttagcagaggaacgt

SEQ ID NO: 263138 - DNA, 20 bp, synthetic construct
  source 1..20: mol_type = other DNA
aaggttttagcagaggaacg

SEQ ID NO: 263139 - DNA, 20 bp, synthetic construct
  source 1..20: mol_type = other DNA
caaggttttagcagaggaac

SEQ ID NO: 263140 - DNA, 20 bp, synthetic construct
  source 1..20: mol_type = other DNA
tcaaggttttagcagaggaa

SEQ ID NO: 263141 - DNA, 20 bp, synthetic construct
  source 1..20: mol_type = other DNA
ttcaaggttttagcagagga

SEQ ID NO: 263142 - DNA, 20 bp, synthetic construct
  source 1..20: mol_type = other DNA
tttcaaggttttagcagagg

SEQ ID NO: 263143 - DNA, 20 bp, synthetic construct
  source 1..20: mol_type = other DNA
ttttcaaggttttagcagag

SEQ ID NO: 263144 - DNA, 20 bp, synthetic construct
  source 1..20: mol_type = other DNA
tttttcaaggttttagcaga

SEQ ID NO: 263145 - DNA, 20 bp, synthetic construct
  source 1..20: mol_type = other DNA
atttttcaaggttttagcag

SEQ ID NO: 263146 - DNA, 20 bp, synthetic construct
  source 1..20: mol_type = other DNA
tatttttcaaggttttagca

SEQ ID NO: 263147 - DNA, 20 bp, synthetic construct
  source 1..20: mol_type = other DNA
ctatttttcaaggttttagc

SEQ ID NO: 263148 - DNA, 20 bp, synthetic construct
  source 1..20: mol_type = other DNA
cctatttttcaaggttttag

SEQ ID NO: 263149 - DNA, 20 bp, synthetic construct
  source 1..20: mol_type = other DNA
gcctatttttcaaggtttta

SEQ ID NO: 263150 - DNA, 20 bp, synthetic construct
  source 1..20: mol_type = other DNA
ggcctatttttcaaggtttt

SEQ ID NO: 263151 - DNA, 20 bp, synthetic construct
  source 1..20: mol_type = other DNA
aggcctatttttcaaggttt

SEQ ID NO: 263152 - DNA, 20 bp, synthetic construct
  source 1..20: mol_type = other DNA
aaggcctatttttcaaggtt

SEQ ID NO: 263153 - DNA, 20 bp, synthetic construct
  source 1..20: mol_type = other DNA
caaggcctatttttcaaggt

SEQ ID NO: 263154 - DNA, 20 bp, synthetic construct
  source 1..20: mol_type = other DNA
gcaaggcctatttttcaagg

SEQ ID NO: 263155 - DNA, 20 bp, synthetic construct
  source 1..20: mol_type = other DNA
ggcaaggcctatttttcaag

SEQ ID NO: 263156 - DNA, 20 bp, synthetic construct
  source 1..20: mol_type = other DNA
aggcaaggcctatttttcaa

SEQ ID NO: 263157 - DNA, 20 bp, synthetic construct
  source 1..20: mol_type = other DNA
aaggcaaggcctatttttca

SEQ ID NO: 263158 - DNA, 20 bp, synthetic construct
  source 1..20: mol_type = other DNA
taaggcaaggcctatttttc

SEQ ID NO: 263159 - DNA, 20 bp, synthetic construct
  source 1..20: mol_type = other DNA
ctaaggcaaggcctattttt

SEQ ID NO: 263160 - DNA, 20 bp, synthetic construct
  source 1..20: mol_type = other DNA
gctaaggcaaggcctatttt

SEQ ID NO: 263161 - DNA, 20 bp, synthetic construct
  source 1..20: mol_type = other DNA
ggctaaggcaaggcctattt

SEQ ID NO: 263162 - DNA, 20 bp, synthetic construct
  source 1..20: mol_type = other DNA
gggctaaggcaaggcctatt

SEQ ID NO: 263163 - DNA, 20 bp, synthetic construct
  source 1..20: mol_type = other DNA
ggggctaaggcaaggcctat

SEQ ID NO: 263164 - DNA, 20 bp, synthetic construct
  source 1..20: mol_type = other DNA
tggggctaaggcaaggccta

SEQ ID NO: 263165 - DNA, 20 bp, synthetic construct
  source 1..20: mol_type = other DNA
ttggggctaaggcaaggcct

SEQ ID NO: 263166 - DNA, 20 bp, synthetic construct
  source 1..20: mol_type = other DNA
tttggggctaaggcaaggcc

SEQ ID NO: 263167 - DNA, 20 bp, synthetic construct
  source 1..20: mol_type = other DNA
gtttggggctaaggcaaggc

SEQ ID NO: 263168 - DNA, 20 bp, synthetic construct
  source 1..20: mol_type = other DNA
tgtttggggctaaggcaagg

SEQ ID NO: 263169 - DNA, 20 bp, synthetic construct
  source 1..20: mol_type = other DNA
gtgtttggggctaaggcaag

SEQ ID NO: 263170 - DNA, 20 bp, synthetic construct
  source 1..20: mol_type = other DNA
ggtgtttggggctaaggcaa

SEQ ID NO: 263171 - DNA, 20 bp, synthetic construct
  source 1..20: mol_type = other DNA
gggtgtttggggctaaggca

SEQ ID NO: 263172 - DNA, 20 bp, synthetic construct
  source 1..20: mol_type = other DNA
ggggtgtttggggctaaggc

SEQ ID NO: 263173 - DNA, 20 bp, synthetic construct
  source 1..20: mol_type = other DNA
tggggtgtttggggctaagg

SEQ ID NO: 263174 - DNA, 20 bp, synthetic construct
  source 1..20: mol_type = other DNA
gtggggtgtttggggctaag

SEQ ID NO: 263175 - DNA, 20 bp, synthetic construct
  source 1..20: mol_type = other DNA
agtggggtgtttggggctaa

SEQ ID NO: 263176 - DNA, 20 bp, synthetic construct
  source 1..20: mol_type = other DNA
gagtggggtgtttggggcta

SEQ ID NO: 263177 - DNA, 20 bp, synthetic construct
  source 1..20: mol_type = other DNA
ggagtggggtgtttggggct

SEQ ID NO: 263178 - DNA, 20 bp, synthetic construct
  source 1..20: mol_type = other DNA
aggagtggggtgtttggggc

SEQ ID NO: 263179 - DNA, 20 bp, synthetic construct
  source 1..20: mol_type = other DNA
caggagtggggtgtttgggg

SEQ ID NO: 263180 - DNA, 20 bp, synthetic construct
  source 1..20: mol_type = other DNA
ccaggagtggggtgtttggg

SEQ ID NO: 263181 - DNA, 20 bp, synthetic construct
  source 1..20: mol_type = other DNA
accaggagtggggtgtttgg

SEQ ID NO: 263182 - DNA, 20 bp, synthetic construct
  source 1..20: mol_type = other DNA
taccaggagtggggtgtttg

SEQ ID NO: 263183 - DNA, 20 bp, synthetic construct
  source 1..20: mol_type = other DNA
ctaccaggagtggggtgttt

SEQ ID NO: 263184 - DNA, 20 bp, synthetic construct
  source 1..20: mol_type = other DNA
gctaccaggagtggggtgtt

SEQ ID NO: 263185 - DNA, 20 bp, synthetic construct
  source 1..20: mol_type = other DNA
agctaccaggagtggggtgt

SEQ ID NO: 263186 - DNA, 20 bp, synthetic construct
  source 1..20: mol_type = other DNA
gagctaccaggagtggggtg

SEQ ID NO: 263187 - DNA, 20 bp, synthetic construct
  source 1..20: mol_type = other DNA
tgagctaccaggagtggggt

SEQ ID NO: 263188 - DNA, 20 bp, synthetic construct
  source 1..20: mol_type = other DNA
ctgagctaccaggagtgggg

SEQ ID NO: 263189 - DNA, 20 bp, synthetic construct
  source 1..20: mol_type = other DNA
tctgagctaccaggagtggg

SEQ ID NO: 263190 - DNA, 20 bp, synthetic construct
  source 1..20: mol_type = other DNA
gtctgagctaccaggagtgg

SEQ ID NO: 263191 - DNA, 20 bp, synthetic construct
  source 1..20: mol_type = other DNA
ggtctgagctaccaggagtg

SEQ ID NO: 263192 - DNA, 20 bp, synthetic construct
  source 1..20: mol_type = other DNA
gggtctgagctaccaggagt

SEQ ID NO: 263193 - DNA, 20 bp, synthetic construct
  source 1..20: mol_type = other DNA
agggtctgagctaccaggag

SEQ ID NO: 263194 - DNA, 20 bp, synthetic construct
  source 1..20: mol_type = other DNA
gagggtctgagctaccagga

SEQ ID NO: 263195 - DNA, 20 bp, synthetic construct
  source 1..20: mol_type = other DNA
agagggtctgagctaccagg

SEQ ID NO: 263196 - DNA, 20 bp, synthetic construct
  source 1..20: mol_type = other DNA
cagagggtctgagctaccag

SEQ ID NO: 263197 - DNA, 20 bp, synthetic construct
  source 1..20: mol_type = other DNA
tcagagggtctgagctacca

SEQ ID NO: 263198 - DNA, 20 bp, synthetic construct
  source 1..20: mol_type = other DNA
atcagagggtctgagctacc

SEQ ID NO: 263199 - DNA, 20 bp, synthetic construct
  source 1..20: mol_type = other DNA
gatcagagggtctgagctac

SEQ ID NO: 263200 - DNA, 20 bp, synthetic construct
  source 1..20: mol_type = other DNA
ggatcagagggtctgagcta

SEQ ID NO: 263201 - DNA, 20 bp, synthetic construct
  source 1..20: mol_type = other DNA
tggatcagagggtctgagct

SEQ ID NO: 263202 - DNA, 20 bp, synthetic construct
  source 1..20: mol_type = other DNA
ttggatcagagggtctgagc

SEQ ID NO: 263203 - DNA, 20 bp, synthetic construct
  source 1..20: mol_type = other DNA
gttggatcagagggtctgag

SEQ ID NO: 263204 - DNA, 20 bp, synthetic construct
  source 1..20: mol_type = other DNA
ggttggatcagagggtctga

SEQ ID NO: 263205 - DNA, 20 bp, synthetic construct
  source 1..20: mol_type = other DNA
gggttggatcagagggtctg

SEQ ID NO: 263206 - DNA, 20 bp, synthetic construct
  source 1..20: mol_type = other DNA
agggttggatcagagggtct

SEQ ID NO: 263207 - DNA, 20 bp, synthetic construct
  source 1..20: mol_type = other DNA
gagggttggatcagagggtc

SEQ ID NO: 263208 - DNA, 20 bp, synthetic construct
  source 1..20: mol_type = other DNA
ggagggttggatcagagggt

SEQ ID NO: 263209 - DNA, 20 bp, synthetic construct
  source 1..20: mol_type = other DNA
tggagggttggatcagaggg

SEQ ID NO: 263210 - DNA, 20 bp, synthetic construct
  source 1..20: mol_type = other DNA
ctggagggttggatcagagg

SEQ ID NO: 263211 - DNA, 20 bp, synthetic construct
  source 1..20: mol_type = other DNA
gctggagggttggatcagag

SEQ ID NO: 263212 - DNA, 20 bp, synthetic construct
  source 1..20: mol_type = other DNA
ggctggagggttggatcaga

SEQ ID NO: 263213 - DNA, 20 bp, synthetic construct
  source 1..20: mol_type = other DNA
gggctggagggttggatcag

SEQ ID NO: 263214 - DNA, 20 bp, synthetic construct
  source 1..20: mol_type = other DNA
agggctggagggttggatca

SEQ ID NO: 263215 - DNA, 20 bp, synthetic construct
  source 1..20: mol_type = other DNA
cagggctggagggttggatc

SEQ ID NO: 263216 - DNA, 20 bp, synthetic construct
  source 1..20: mol_type = other DNA
gcagggctggagggttggat

SEQ ID NO: 263217 - DNA, 20 bp, synthetic construct
  source 1..20: mol_type = other DNA
agcagggctggagggttgga

SEQ ID NO: 263218 - DNA, 20 bp, synthetic construct
  source 1..20: mol_type = other DNA
cagcagggctggagggttgg

SEQ ID NO: 263219 - DNA, 20 bp, synthetic construct
  source 1..20: mol_type = other DNA
acagcagggctggagggttg

SEQ ID NO: 263220 - DNA, 20 bp, synthetic construct
  source 1..20: mol_type = other DNA
cacagcagggctggagggtt

SEQ ID NO: 263221 - DNA, 20 bp, synthetic construct
  source 1..20: mol_type = other DNA
acacagcagggctggagggt

SEQ ID NO: 263222 - DNA, 20 bp, synthetic construct
  source 1..20: mol_type = other DNA
cacacagcagggctggaggg

SEQ ID NO: 263223 - DNA, 20 bp, synthetic construct
  source 1..20: mol_type = other DNA
gcacacagcagggctggagg

SEQ ID NO: 263224 - DNA, 20 bp, synthetic construct
  source 1..20: mol_type = other DNA
ggcacacagcagggctggag

SEQ ID NO: 263225 - DNA, 20 bp, synthetic construct
  source 1..20: mol_type = other DNA
gggcacacagcagggctgga

SEQ ID NO: 263226 - DNA, 20 bp, synthetic construct
  source 1..20: mol_type = other DNA
tgggcacacagcagggctgg

SEQ ID NO: 263227 - DNA, 20 bp, synthetic construct
  source 1..20: mol_type = other DNA
ctgggcacacagcagggctg

SEQ ID NO: 263228 - DNA, 20 bp, synthetic construct
  source 1..20: mol_type = other DNA
tctgggcacacagcagggct

SEQ ID NO: 263229 - DNA, 20 bp, synthetic construct
  source 1..20: mol_type = other DNA
ctctgggcacacagcagggc

SEQ ID NO: 263230 - DNA, 20 bp, synthetic construct
  source 1..20: mol_type = other DNA
gctctgggcacacagcaggg

SEQ ID NO: 263231 - DNA, 20 bp, synthetic construct
  source 1..20: mol_type = other DNA
ggctctgggcacacagcagg

SEQ ID NO: 263232 - DNA, 20 bp, synthetic construct
  source 1..20: mol_type = other DNA
tggctctgggcacacagcag

SEQ ID NO: 263233 - DNA, 20 bp, synthetic construct
  source 1..20: mol_type = other DNA
gtggctctgggcacacagca

SEQ ID NO: 263234 - DNA, 20 bp, synthetic construct
  source 1..20: mol_type = other DNA
ggtggctctgggcacacagc

SEQ ID NO: 263235 - DNA, 20 bp, synthetic construct
  source 1..20: mol_type = other DNA
aggtggctctgggcacacag

SEQ ID NO: 263236 - DNA, 20 bp, synthetic construct
  source 1..20: mol_type = other DNA
aaggtggctctgggcacaca

SEQ ID NO: 263237 - DNA, 20 bp, synthetic construct
  source 1..20: mol_type = other DNA
gaaggtggctctgggcacac

SEQ ID NO: 263238 - DNA, 20 bp, synthetic construct
  source 1..20: mol_type = other DNA
ggaaggtggctctgggcaca

SEQ ID NO: 263239 - DNA, 20 bp, synthetic construct
  source 1..20: mol_type = other DNA
aggaaggtggctctgggcac

SEQ ID NO: 263240 - DNA, 20 bp, synthetic construct
  source 1..20: mol_type = other DNA
gaggaaggtggctctgggca

SEQ ID NO: 263241 - DNA, 20 bp, synthetic construct
  source 1..20: mol_type = other DNA
agaggaaggtggctctgggc

SEQ ID NO: 263242 - DNA, 20 bp, synthetic construct
  source 1..20: mol_type = other DNA
gagaggaaggtggctctggg

SEQ ID NO: 263243 - DNA, 20 bp, synthetic construct
  source 1..20: mol_type = other DNA
ggagaggaaggtggctctgg

SEQ ID NO: 263244 - DNA, 20 bp, synthetic construct
  source 1..20: mol_type = other DNA
aggagaggaaggtggctctg

SEQ ID NO: 263245 - DNA, 20 bp, synthetic construct
  source 1..20: mol_type = other DNA
taggagaggaaggtggctct

SEQ ID NO: 263246 - DNA, 20 bp, synthetic construct
  source 1..20: mol_type = other DNA
ttaggagaggaaggtggctc

SEQ ID NO: 263247 - DNA, 20 bp, synthetic construct
  source 1..20: mol_type = other DNA
tttaggagaggaaggtggct

SEQ ID NO: 263248 - DNA, 20 bp, synthetic construct
  source 1..20: mol_type = other DNA
atttaggagaggaaggtggc

SEQ ID NO: 263249 - DNA, 20 bp, synthetic construct
  source 1..20: mol_type = other DNA
tatttaggagaggaaggtgg

SEQ ID NO: 263250 - DNA, 20 bp, synthetic construct
  source 1..20: mol_type = other DNA
gtatttaggagaggaaggtg

SEQ ID NO: 263251 - DNA, 20 bp, synthetic construct
  source 1..20: mol_type = other DNA
cgtatttaggagaggaaggt

SEQ ID NO: 263252 - DNA, 20 bp, synthetic construct
  source 1..20: mol_type = other DNA
acgtatttaggagaggaagg

SEQ ID NO: 263253 - DNA, 20 bp, synthetic construct
  source 1..20: mol_type = other DNA
gacgtatttaggagaggaag

SEQ ID NO: 263254 - DNA, 20 bp, synthetic construct
  source 1..20: mol_type = other DNA
agacgtatttaggagaggaa

SEQ ID NO: 263255 - DNA, 20 bp, synthetic construct
  source 1..20: mol_type = other DNA
gagacgtatttaggagagga

SEQ ID NO: 263256 - DNA, 20 bp, synthetic construct
  source 1..20: mol_type = other DNA
agagacgtatttaggagagg

SEQ ID NO: 263257 - DNA, 20 bp, synthetic construct
  source 1..20: mol_type = other DNA
aagagacgtatttaggagag

SEQ ID NO: 263258 - DNA, 20 bp, synthetic construct
  source 1..20: mol_type = other DNA
gaagagacgtatttaggaga

SEQ ID NO: 263259 - DNA, 20 bp, synthetic construct
  source 1..20: mol_type = other DNA
agaagagacgtatttaggag

SEQ ID NO: 263260 - DNA, 20 bp, synthetic construct
  source 1..20: mol_type = other DNA
cagaagagacgtatttagga

SEQ ID NO: 263261 - DNA, 20 bp, synthetic construct
  source 1..20: mol_type = other DNA
acagaagagacgtatttagg

SEQ ID NO: 263262 - DNA, 20 bp, synthetic construct
  source 1..20: mol_type = other DNA
gacagaagagacgtatttag

SEQ ID NO: 263263 - DNA, 20 bp, synthetic construct
  source 1..20: mol_type = other DNA
tgacagaagagacgtattta

SEQ ID NO: 263264 - DNA, 20 bp, synthetic construct
  source 1..20: mol_type = other DNA
gtgacagaagagacgtattt

SEQ ID NO: 263265 - DNA, 20 bp, synthetic construct
  source 1..20: mol_type = other DNA
agtgacagaagagacgtatt

SEQ ID NO: 263266 - DNA, 20 bp, synthetic construct
  source 1..20: mol_type = other DNA
aagtgacagaagagacgtat

SEQ ID NO: 263267 - DNA, 20 bp, synthetic construct
  source 1..20: mol_type = other DNA
gaagtgacagaagagacgta

SEQ ID NO: 263268 - DNA, 20 bp, synthetic construct
  source 1..20: mol_type = other DNA
ggaagtgacagaagagacgt

SEQ ID NO: 263269 - DNA, 20 bp, synthetic construct
  source 1..20: mol_type = other DNA
gggaagtgacagaagagacg

SEQ ID NO: 263270 - DNA, 20 bp, synthetic construct
  source 1..20: mol_type = other DNA
cgggaagtgacagaagagac

SEQ ID NO: 263271 - DNA, 20 bp, synthetic construct
  source 1..20: mol_type = other DNA
tcgggaagtgacagaagaga

SEQ ID NO: 263272 - DNA, 20 bp, synthetic construct
  source 1..20: mol_type = other DNA
ttcgggaagtgacagaagag

SEQ ID NO: 263273 - DNA, 20 bp, synthetic construct
  source 1..20: mol_type = other DNA
gttcgggaagtgacagaaga

SEQ ID NO: 263274 - DNA, 20 bp, synthetic construct
  source 1..20: mol_type = other DNA
agttcgggaagtgacagaag

SEQ ID NO: 263275 - DNA, 20 bp, synthetic construct
  source 1..20: mol_type = other DNA
cagttcgggaagtgacagaa

SEQ ID NO: 263276 - DNA, 20 bp, synthetic construct
  source 1..20: mol_type = other DNA
ccagttcgggaagtgacaga

SEQ ID NO: 263277 - DNA, 20 bp, synthetic construct
  source 1..20: mol_type = other DNA
gccagttcgggaagtgacag

SEQ ID NO: 263278 - DNA, 20 bp, synthetic construct
  source 1..20: mol_type = other DNA
tgccagttcgggaagtgaca

SEQ ID NO: 263279 - DNA, 20 bp, synthetic construct
  source 1..20: mol_type = other DNA
ctgccagttcgggaagtgac

SEQ ID NO: 263280 - DNA, 20 bp, synthetic construct
  source 1..20: mol_type = other DNA
actgccagttcgggaagtga

SEQ ID NO: 263281 - DNA, 20 bp, synthetic construct
  source 1..20: mol_type = other DNA
aactgccagttcgggaagtg

SEQ ID NO: 263282 - DNA, 20 bp, synthetic construct
  source 1..20: mol_type = other DNA
gaactgccagttcgggaagt

SEQ ID NO: 263283 - DNA, 20 bp, synthetic construct
  source 1..20: mol_type = other DNA
agaactgccagttcgggaag

SEQ ID NO: 263284 - DNA, 20 bp, synthetic construct
  source 1..20: mol_type = other DNA
cagaactgccagttcgggaa

SEQ ID NO: 263285 - DNA, 20 bp, synthetic construct
  source 1..20: mol_type = other DNA
ccagaactgccagttcggga

SEQ ID NO: 263286 - DNA, 20 bp, synthetic construct
  source 1..20: mol_type = other DNA
tccagaactgccagttcggg

SEQ ID NO: 263287 - DNA, 20 bp, synthetic construct
  source 1..20: mol_type = other DNA
ctccagaactgccagttcgg

SEQ ID NO: 263288 - DNA, 20 bp, synthetic construct
  source 1..20: mol_type = other DNA
gctccagaactgccagttcg

SEQ ID NO: 263289 - DNA, 20 bp, synthetic construct
  source 1..20: mol_type = other DNA
tgctccagaactgccagttc

SEQ ID NO: 263290 - DNA, 20 bp, synthetic construct
  source 1..20: mol_type = other DNA
ttgctccagaactgccagtt

SEQ ID NO: 263291 - DNA, 20 bp, synthetic construct
  source 1..20: mol_type = other DNA
tttgctccagaactgccagt

SEQ ID NO: 263292 - DNA, 20 bp, synthetic construct
  source 1..20: mol_type = other DNA
ctttgctccagaactgccag

SEQ ID NO: 263293 - DNA, 20 bp, synthetic construct
  source 1..20: mol_type = other DNA
cctttgctccagaactgcca

SEQ ID NO: 263294 - DNA, 20 bp, synthetic construct
  source 1..20: mol_type = other DNA
tcctttgctccagaactgcc

SEQ ID NO: 263295 - DNA, 20 bp, synthetic construct
  source 1..20: mol_type = other DNA
ctcctttgctccagaactgc

SEQ ID NO: 263296 - DNA, 20 bp, synthetic construct
  source 1..20: mol_type = other DNA
tctcctttgctccagaactg

SEQ ID NO: 263297 - DNA, 20 bp, synthetic construct
  source 1..20: mol_type = other DNA
atctcctttgctccagaact

SEQ ID NO: 263298 - DNA, 20 bp, synthetic construct
  source 1..20: mol_type = other DNA
catctcctttgctccagaac

SEQ ID NO: 263299 - DNA, 20 bp, synthetic construct
  source 1..20: mol_type = other DNA
tcatctcctttgctccagaa

SEQ ID NO: 263300 - DNA, 20 bp, synthetic construct
  source 1..20: mol_type = other DNA
ttcatctcctttgctccaga

SEQ ID NO: 263301 - DNA, 20 bp, synthetic construct
  source 1..20: mol_type = other DNA
tttcatctcctttgctccag

SEQ ID NO: 263302 - DNA, 20 bp, synthetic construct
  source 1..20: mol_type = other DNA
gtttcatctcctttgctcca

SEQ ID NO: 263303 - DNA, 20 bp, synthetic construct
  source 1..20: mol_type = other DNA
agtttcatctcctttgctcc

SEQ ID NO: 263304 - DNA, 20 bp, synthetic construct
  source 1..20: mol_type = other DNA
gagtttcatctcctttgctc

SEQ ID NO: 263305 - DNA, 20 bp, synthetic construct
  source 1..20: mol_type = other DNA
tgagtttcatctcctttgct

SEQ ID NO: 263306 - DNA, 20 bp, synthetic construct
  source 1..20: mol_type = other DNA
ttgagtttcatctcctttgc

SEQ ID NO: 263307 - DNA, 20 bp, synthetic construct
  source 1..20: mol_type = other DNA
cttgagtttcatctcctttg

SEQ ID NO: 263308 - DNA, 20 bp, synthetic construct
  source 1..20: mol_type = other DNA
ccttgagtttcatctccttt

SEQ ID NO: 263309 - DNA, 20 bp, synthetic construct
  source 1..20: mol_type = other DNA
accttgagtttcatctcctt

SEQ ID NO: 263310 - DNA, 20 bp, synthetic construct
  source 1..20: mol_type = other DNA
taccttgagtttcatctcct

SEQ ID NO: 263311 - DNA, 20 bp, synthetic construct
  source 1..20: mol_type = other DNA
ttaccttgagtttcatctcc

SEQ ID NO: 263312 - DNA, 20 bp, synthetic construct
  source 1..20: mol_type = other DNA
cttaccttgagtttcatctc

SEQ ID NO: 263313 - DNA, 20 bp, synthetic construct
  source 1..20: mol_type = other DNA
ccttaccttgagtttcatct

SEQ ID NO: 263314 - DNA, 20 bp, synthetic construct
  source 1..20: mol_type = other DNA
tccttaccttgagtttcatc

SEQ ID NO: 263315 - DNA, 20 bp, synthetic construct
  source 1..20: mol_type = other DNA
ttccttaccttgagtttcat

SEQ ID NO: 263316 - DNA, 20 bp, synthetic construct
  source 1..20: mol_type = other DNA
tttccttaccttgagtttca

SEQ ID NO: 263317 - DNA, 20 bp, synthetic construct
  source 1..20: mol_type = other DNA
gtttccttaccttgagtttc

SEQ ID NO: 263318 - DNA, 20 bp, synthetic construct
  source 1..20: mol_type = other DNA
ggtttccttaccttgagttt

SEQ ID NO: 263319 - DNA, 20 bp, synthetic construct
  source 1..20: mol_type = other DNA
tggtttccttaccttgagtt

SEQ ID NO: 263320 - DNA, 20 bp, synthetic construct
  source 1..20: mol_type = other DNA
gtggtttccttaccttgagt

SEQ ID NO: 263321 - DNA, 20 bp, synthetic construct
  source 1..20: mol_type = other DNA
ggtggtttccttaccttgag

SEQ ID NO: 263322 - DNA, 20 bp, synthetic construct
  source 1..20: mol_type = other DNA
aggtggtttccttaccttga

SEQ ID NO: 263323 - DNA, 20 bp, synthetic construct
  source 1..20: mol_type = other DNA
aaggtggtttccttaccttg

SEQ ID NO: 263324 - DNA, 20 bp, synthetic construct
  source 1..20: mol_type = other DNA
aaaggtggtttccttacctt

SEQ ID NO: 263325 - DNA, 20 bp, synthetic construct
  source 1..20: mol_type = other DNA
caaaggtggtttccttacct

SEQ ID NO: 263326 - DNA, 20 bp, synthetic construct
  source 1..20: mol_type = other DNA
tcaaaggtggtttccttacc

SEQ ID NO: 263327 - DNA, 20 bp, synthetic construct
  source 1..20: mol_type = other DNA
ttcaaaggtggtttccttac

SEQ ID NO: 263328 - DNA, 20 bp, synthetic construct
  source 1..20: mol_type = other DNA
tttcaaaggtggtttcctta

SEQ ID NO: 263329 - DNA, 20 bp, synthetic construct
  source 1..20: mol_type = other DNA
ttttcaaaggtggtttcctt

SEQ ID NO: 263330 - DNA, 20 bp, synthetic construct
  source 1..20: mol_type = other DNA
cttttcaaaggtggtttcct

SEQ ID NO: 263331 - DNA, 20 bp, synthetic construct
  source 1..20: mol_type = other DNA
tcttttcaaaggtggtttcc

SEQ ID NO: 263332 - DNA, 20 bp, synthetic construct
  source 1..20: mol_type = other DNA
ttcttttcaaaggtggtttc

SEQ ID NO: 263333 - DNA, 20 bp, synthetic construct
  source 1..20: mol_type = other DNA
gttcttttcaaaggtggttt

SEQ ID NO: 263334 - DNA, 20 bp, synthetic construct
  source 1..20: mol_type = other DNA
ggttcttttcaaaggtggtt

SEQ ID NO: 263335 - DNA, 20 bp, synthetic construct
  source 1..20: mol_type = other DNA
tggttcttttcaaaggtggt

SEQ ID NO: 263336 - DNA, 20 bp, synthetic construct
  source 1..20: mol_type = other DNA
ctggttcttttcaaaggtgg

SEQ ID NO: 263337 - DNA, 20 bp, synthetic construct
  source 1..20: mol_type = other DNA
cctggttcttttcaaaggtg

SEQ ID NO: 263338 - DNA, 20 bp, synthetic construct
  source 1..20: mol_type = other DNA
gcctggttcttttcaaaggt

SEQ ID NO: 263339 - DNA, 20 bp, synthetic construct
  source 1..20: mol_type = other DNA
agcctggttcttttcaaagg

SEQ ID NO: 263340 - DNA, 20 bp, synthetic construct
  source 1..20: mol_type = other DNA
cagcctggttcttttcaaag

SEQ ID NO: 263341 - DNA, 20 bp, synthetic construct
  source 1..20: mol_type = other DNA
gcagcctggttcttttcaaa

SEQ ID NO: 263342 - DNA, 20 bp, synthetic construct
  source 1..20: mol_type = other DNA
agcagcctggttcttttcaa

SEQ ID NO: 263343 - DNA, 20 bp, synthetic construct
  source 1..20: mol_type = other DNA
gagcagcctggttcttttca

SEQ ID NO: 263344 - DNA, 20 bp, synthetic construct
  source 1..20: mol_type = other DNA
agagcagcctggttcttttc

SEQ ID NO: 263345 - DNA, 20 bp, synthetic construct
  source 1..20: mol_type = other DNA
cagagcagcctggttctttt

SEQ ID NO: 263346 - DNA, 20 bp, synthetic construct
  source 1..20: mol_type = other DNA
gcagagcagcctggttcttt

SEQ ID NO: 263347 - DNA, 20 bp, synthetic construct
  source 1..20: mol_type = other DNA
agcagagcagcctggttctt

SEQ ID NO: 263348 - DNA, 20 bp, synthetic construct
  source 1..20: mol_type = other DNA
cagcagagcagcctggttct

SEQ ID NO: 263349 - DNA, 20 bp, synthetic construct
  source 1..20: mol_type = other DNA
acagcagagcagcctggttc

SEQ ID NO: 263350 - DNA, 20 bp, synthetic construct
  source 1..20: mol_type = other DNA
cacagcagagcagcctggtt

SEQ ID NO: 263351 - DNA, 20 bp, synthetic construct
  source 1..20: mol_type = other DNA
ccacagcagagcagcctggt

SEQ ID NO: 263352 - DNA, 20 bp, synthetic construct
  source 1..20: mol_type = other DNA
accacagcagagcagcctgg

SEQ ID NO: 263353 - DNA, 20 bp, synthetic construct
  source 1..20: mol_type = other DNA
aaccacagcagagcagcctg

SEQ ID NO: 263354 - DNA, 20 bp, synthetic construct
  source 1..20: mol_type = other DNA
aaaccacagcagagcagcct

SEQ ID NO: 263355 - DNA, 20 bp, synthetic construct
  source 1..20: mol_type = other DNA
caaaccacagcagagcagcc

SEQ ID NO: 263356 - DNA, 20 bp, synthetic construct
  source 1..20: mol_type = other DNA
gcaaaccacagcagagcagc

SEQ ID NO: 263357 - DNA, 20 bp, synthetic construct
  source 1..20: mol_type = other DNA
tgcaaaccacagcagagcag

SEQ ID NO: 263358 - DNA, 20 bp, synthetic construct
  source 1..20: mol_type = other DNA
ttgcaaaccacagcagagca

SEQ ID NO: 263359 - DNA, 20 bp, synthetic construct
  source 1..20: mol_type = other DNA
tttgcaaaccacagcagagc

SEQ ID NO: 263360 - DNA, 20 bp, synthetic construct
  source 1..20: mol_type = other DNA
atttgcaaaccacagcagag

SEQ ID NO: 263361 - DNA, 20 bp, synthetic construct
  source 1..20: mol_type = other DNA
catttgcaaaccacagcaga

SEQ ID NO: 263362 - DNA, 20 bp, synthetic construct
  source 1..20: mol_type = other DNA
acatttgcaaaccacagcag

SEQ ID NO: 263363 - DNA, 20 bp, synthetic construct
  source 1..20: mol_type = other DNA
cacatttgcaaaccacagca

SEQ ID NO: 263364 - DNA, 20 bp, synthetic construct
  source 1..20: mol_type = other DNA
ccacatttgcaaaccacagc

SEQ ID NO: 263365 - DNA, 20 bp, synthetic construct
  source 1..20: mol_type = other DNA
cccacatttgcaaaccacag

SEQ ID NO: 263366 - DNA, 20 bp, synthetic construct
  source 1..20: mol_type = other DNA
ccccacatttgcaaaccaca

SEQ ID NO: 263367 - DNA, 20 bp, synthetic construct
  source 1..20: mol_type = other DNA
accccacatttgcaaaccac

SEQ ID NO: 263368 - DNA, 20 bp, synthetic construct
  source 1..20: mol_type = other DNA
aaccccacatttgcaaacca

SEQ ID NO: 263369 - DNA, 20 bp, synthetic construct
  source 1..20: mol_type = other DNA
aaaccccacatttgcaaacc

SEQ ID NO: 263370 - DNA, 20 bp, synthetic construct
  source 1..20: mol_type = other DNA
caaaccccacatttgcaaac

SEQ ID NO: 263371 - DNA, 20 bp, synthetic construct
  source 1..20: mol_type = other DNA
acaaaccccacatttgcaaa

SEQ ID NO: 263372 - DNA, 20 bp, synthetic construct
  source 1..20: mol_type = other DNA
aacaaaccccacatttgcaa

SEQ ID NO: 263373 - DNA, 20 bp, synthetic construct
  source 1..20: mol_type = other DNA
aaacaaaccccacatttgca

SEQ ID NO: 263374 - DNA, 20 bp, synthetic construct
  source 1..20: mol_type = other DNA
taaacaaaccccacatttgc

SEQ ID NO: 263375 - DNA, 20 bp, synthetic construct
  source 1..20: mol_type = other DNA
ataaacaaaccccacatttg

SEQ ID NO: 263376 - DNA, 20 bp, synthetic construct
  source 1..20: mol_type = other DNA
aataaacaaaccccacattt

SEQ ID NO: 263377 - DNA, 20 bp, synthetic construct
  source 1..20: mol_type = other DNA
aaataaacaaaccccacatt

SEQ ID NO: 263378 - DNA, 20 bp, synthetic construct
  source 1..20: mol_type = other DNA
caaataaacaaaccccacat

SEQ ID NO: 263379 - DNA, 20 bp, synthetic construct
  source 1..20: mol_type = other DNA
acaaataaacaaaccccaca

SEQ ID NO: 263380 - DNA, 20 bp, synthetic construct
  source 1..20: mol_type = other DNA
aacaaataaacaaaccccac

SEQ ID NO: 263381 - DNA, 20 bp, synthetic construct
  source 1..20: mol_type = other DNA
aaacaaataaacaaacccca

SEQ ID NO: 263382 - DNA, 20 bp, synthetic construct
  source 1..20: mol_type = other DNA
aaaacaaataaacaaacccc

SEQ ID NO: 263383 - DNA, 20 bp, synthetic construct
  source 1..20: mol_type = other DNA
aaaaacaaataaacaaaccc

SEQ ID NO: 263384 - DNA, 20 bp, synthetic construct
  source 1..20: mol_type = other DNA
aaaaaacaaataaacaaacc

SEQ ID NO: 263385 - DNA, 20 bp, synthetic construct
  source 1..20: mol_type = other DNA
taaaaaacaaataaacaaac

SEQ ID NO: 263386 - DNA, 20 bp, synthetic construct
  source 1..20: mol_type = other DNA
ctaaaaaacaaataaacaaa

SEQ ID NO: 263387 - DNA, 20 bp, synthetic construct
  source 1..20: mol_type = other DNA
gctaaaaaacaaataaacaa

SEQ ID NO: 263388 - DNA, 20 bp, synthetic construct
  source 1..20: mol_type = other DNA
ggctaaaaaacaaataaaca

SEQ ID NO: 263389 - DNA, 20 bp, synthetic construct
  source 1..20: mol_type = other DNA
aggctaaaaaacaaataaac

SEQ ID NO: 263390 - DNA, 20 bp, synthetic construct
  source 1..20: mol_type = other DNA
gaggctaaaaaacaaataaa

SEQ ID NO: 263391 - DNA, 20 bp, synthetic construct
  source 1..20: mol_type = other DNA
tgaggctaaaaaacaaataa

SEQ ID NO: 263392 - DNA, 20 bp, synthetic construct
  source 1..20: mol_type = other DNA
ttgaggctaaaaaacaaata

SEQ ID NO: 263393 - DNA, 20 bp, synthetic construct
  source 1..20: mol_type = other DNA
tttgaggctaaaaaacaaat

SEQ ID NO: 263394 - DNA, 20 bp, synthetic construct
  source 1..20: mol_type = other DNA
ctttgaggctaaaaaacaaa

SEQ ID NO: 263395 - DNA, 20 bp, synthetic construct
  source 1..20: mol_type = other DNA
tctttgaggctaaaaaacaa

SEQ ID NO: 263396 - DNA, 20 bp, synthetic construct
  source 1..20: mol_type = other DNA
gtctttgaggctaaaaaaca

SEQ ID NO: 263397 - DNA, 20 bp, synthetic construct
  source 1..20: mol_type = other DNA
ggtctttgaggctaaaaaac

SEQ ID NO: 263398 - DNA, 20 bp, synthetic construct
  source 1..20: mol_type = other DNA
aggtctttgaggctaaaaaa

SEQ ID NO: 263399 - DNA, 20 bp, synthetic construct
  source 1..20: mol_type = other DNA
aaggtctttgaggctaaaaa

SEQ ID NO: 263400 - DNA, 20 bp, synthetic construct
  source 1..20: mol_type = other DNA
aaaggtctttgaggctaaaa

SEQ ID NO: 263401 - DNA, 20 bp, synthetic construct
  source 1..20: mol_type = other DNA
gaaaggtctttgaggctaaa

SEQ ID NO: 263402 - DNA, 20 bp, synthetic construct
  source 1..20: mol_type = other DNA
agaaaggtctttgaggctaa

SEQ ID NO: 263403 - DNA, 20 bp, synthetic construct
  source 1..20: mol_type = other DNA
aagaaaggtctttgaggcta

SEQ ID NO: 263404 - DNA, 20 bp, synthetic construct
  source 1..20: mol_type = other DNA
gaagaaaggtctttgaggct

SEQ ID NO: 263405 - DNA, 20 bp, synthetic construct
  source 1..20: mol_type = other DNA
tgaagaaaggtctttgaggc

SEQ ID NO: 263406 - DNA, 20 bp, synthetic construct
  source 1..20: mol_type = other DNA
ttgaagaaaggtctttgagg

SEQ ID NO: 263407 - DNA, 20 bp, synthetic construct
  source 1..20: mol_type = other DNA
tttgaagaaaggtctttgag

SEQ ID NO: 263408 - DNA, 20 bp, synthetic construct
  source 1..20: mol_type = other DNA
atttgaagaaaggtctttga

SEQ ID NO: 263409 - DNA, 20 bp, synthetic construct
  source 1..20: mol_type = other DNA
catttgaagaaaggtctttg

SEQ ID NO: 263410 - DNA, 20 bp, synthetic construct
  source 1..20: mol_type = other DNA
tcatttgaagaaaggtcttt

SEQ ID NO: 263411 - DNA, 20 bp, synthetic construct
  source 1..20: mol_type = other DNA
ctcatttgaagaaaggtctt

SEQ ID NO: 263412 - DNA, 20 bp, synthetic construct
  source 1..20: mol_type = other DNA
actcatttgaagaaaggtct

SEQ ID NO: 263413 - DNA, 20 bp, synthetic construct
  source 1..20: mol_type = other DNA
aactcatttgaagaaaggtc

SEQ ID NO: 263414 - DNA, 20 bp, synthetic construct
  source 1..20: mol_type = other DNA
gaactcatttgaagaaaggt

SEQ ID NO: 263415 - DNA, 20 bp, synthetic construct
  source 1..20: mol_type = other DNA
agaactcatttgaagaaagg

SEQ ID NO: 263416 - DNA, 20 bp, synthetic construct
  source 1..20: mol_type = other DNA
cagaactcatttgaagaaag

SEQ ID NO: 263417 - DNA, 20 bp, synthetic construct
  source 1..20: mol_type = other DNA
ccagaactcatttgaagaaa

SEQ ID NO: 263418 - DNA, 20 bp, synthetic construct
  source 1..20: mol_type = other DNA
gccagaactcatttgaagaa

SEQ ID NO: 263419 - DNA, 20 bp, synthetic construct
  source 1..20: mol_type = other DNA
tgccagaactcatttgaaga

SEQ ID NO: 263420 - DNA, 20 bp, synthetic construct
  source 1..20: mol_type = other DNA
atgccagaactcatttgaag

SEQ ID NO: 263421 - DNA, 20 bp, synthetic construct
  source 1..20: mol_type = other DNA
tatgccagaactcatttgaa

SEQ ID NO: 263422 - DNA, 20 bp, synthetic construct
  source 1..20: mol_type = other DNA
ctatgccagaactcatttga

SEQ ID NO: 263423 - DNA, 20 bp, synthetic construct
  source 1..20: mol_type = other DNA
tctatgccagaactcatttg

SEQ ID NO: 263424 - DNA, 20 bp, synthetic construct
  source 1..20: mol_type = other DNA
ttctatgccagaactcattt

SEQ ID NO: 263425 - DNA, 20 bp, synthetic construct
  source 1..20: mol_type = other DNA
cttctatgccagaactcatt

SEQ ID NO: 263426 - DNA, 20 bp, synthetic construct
  source 1..20: mol_type = other DNA
gcttctatgccagaactcat

SEQ ID NO: 263427 - DNA, 20 bp, synthetic construct
  source 1..20: mol_type = other DNA
tgcttctatgccagaactca

SEQ ID NO: 263428 - DNA, 20 bp, synthetic construct
  source 1..20: mol_type = other DNA
gtgcttctatgccagaactc

SEQ ID NO: 263429 - DNA, 20 bp, synthetic construct
  source 1..20: mol_type = other DNA
ggtgcttctatgccagaact

SEQ ID NO: 263430 - DNA, 20 bp, synthetic construct
  source 1..20: mol_type = other DNA
cggtgcttctatgccagaac

SEQ ID NO: 263431 - DNA, 20 bp, synthetic construct
  source 1..20: mol_type = other DNA
acggtgcttctatgccagaa

SEQ ID NO: 263432 - DNA, 20 bp, synthetic construct
  source 1..20: mol_type = other DNA
cacggtgcttctatgccaga

SEQ ID NO: 263433 - DNA, 20 bp, synthetic construct
  source 1..20: mol_type = other DNA
acacggtgcttctatgccag

SEQ ID NO: 263434 - DNA, 20 bp, synthetic construct
  source 1..20: mol_type = other DNA
tacacggtgcttctatgcca

SEQ ID NO: 263435 - DNA, 20 bp, synthetic construct
  source 1..20: mol_type = other DNA
ttacacggtgcttctatgcc

SEQ ID NO: 263436 - DNA, 20 bp, synthetic construct
  source 1..20: mol_type = other DNA
tttacacggtgcttctatgc

SEQ ID NO: 263437 - DNA, 20 bp, synthetic construct
  source 1..20: mol_type = other DNA
ttttacacggtgcttctatg

SEQ ID NO: 263438 - DNA, 20 bp, synthetic construct
  source 1..20: mol_type = other DNA
attttacacggtgcttctat

SEQ ID NO: 263439 - DNA, 20 bp, synthetic construct
  source 1..20: mol_type = other DNA
tattttacacggtgcttcta

SEQ ID NO: 263440 - DNA, 20 bp, synthetic construct
  source 1..20: mol_type = other DNA
ctattttacacggtgcttct

SEQ ID NO: 263441 - DNA, 20 bp, synthetic construct
  source 1..20: mol_type = other DNA
actattttacacggtgcttc

SEQ ID NO: 263442 - DNA, 20 bp, synthetic construct
  source 1..20: mol_type = other DNA
aactattttacacggtgctt

SEQ ID NO: 263443 - DNA, 20 bp, synthetic construct
  source 1..20: mol_type = other DNA
taactattttacacggtgct

SEQ ID NO: 263444 - DNA, 20 bp, synthetic construct
  source 1..20: mol_type = other DNA
ctaactattttacacggtgc

SEQ ID NO: 263445 - DNA, 20 bp, synthetic construct
  source 1..20: mol_type = other DNA
tctaactattttacacggtg

SEQ ID NO: 263446 - DNA, 20 bp, synthetic construct
  source 1..20: mol_type = other DNA
ttctaactattttacacggt

SEQ ID NO: 263447 - DNA, 20 bp, synthetic construct
  source 1..20: mol_type = other DNA
attctaactattttacacgg

SEQ ID NO: 263448 - DNA, 20 bp, synthetic construct
  source 1..20: mol_type = other DNA
aattctaactattttacacg

SEQ ID NO: 263449 - DNA, 20 bp, synthetic construct
  source 1..20: mol_type = other DNA
gaattctaactattttacac

SEQ ID NO: 263450 - DNA, 20 bp, synthetic construct
  source 1..20: mol_type = other DNA
agaattctaactattttaca

SEQ ID NO: 263451 - DNA, 20 bp, synthetic construct
  source 1..20: mol_type = other DNA
cagaattctaactattttac

SEQ ID NO: 263452 - DNA, 20 bp, synthetic construct
  source 1..20: mol_type = other DNA
ccagaattctaactatttta

SEQ ID NO: 263453 - DNA, 20 bp, synthetic construct
  source 1..20: mol_type = other DNA
cccagaattctaactatttt

SEQ ID NO: 263454 - DNA, 20 bp, synthetic construct
  source 1..20: mol_type = other DNA
gcccagaattctaactattt

SEQ ID NO: 263455 - DNA, 20 bp, synthetic construct
  source 1..20: mol_type = other DNA
tgcccagaattctaactatt

SEQ ID NO: 263456 - DNA, 20 bp, synthetic construct
  source 1..20: mol_type = other DNA
ttgcccagaattctaactat

SEQ ID NO: 263457 - DNA, 20 bp, synthetic construct
  source 1..20: mol_type = other DNA
tttgcccagaattctaacta

SEQ ID NO: 263458 - DNA, 20 bp, synthetic construct
  source 1..20: mol_type = other DNA
ctttgcccagaattctaact

SEQ ID NO: 263459 - DNA, 20 bp, synthetic construct
  source 1..20: mol_type = other DNA
cctttgcccagaattctaac

SEQ ID NO: 263460 - DNA, 20 bp, synthetic construct
  source 1..20: mol_type = other DNA
ccctttgcccagaattctaa

SEQ ID NO: 263461 - DNA, 20 bp, synthetic construct
  source 1..20: mol_type = other DNA
cccctttgcccagaattcta

SEQ ID NO: 263462 - DNA, 20 bp, synthetic construct
  source 1..20: mol_type = other DNA
tcccctttgcccagaattct

SEQ ID NO: 263463 - DNA, 20 bp, synthetic construct
  source 1..20: mol_type = other DNA
ttcccctttgcccagaattc

SEQ ID NO: 263464 - DNA, 20 bp, synthetic construct
  source 1..20: mol_type = other DNA
tttcccctttgcccagaatt

SEQ ID NO: 263465 - DNA, 20 bp, synthetic construct
  source 1..20: mol_type = other DNA
ttttcccctttgcccagaat

SEQ ID NO: 263466 - DNA, 20 bp, synthetic construct
  source 1..20: mol_type = other DNA
cttttcccctttgcccagaa

SEQ ID NO: 263467 - DNA, 20 bp, synthetic construct
  source 1..20: mol_type = other DNA
tcttttcccctttgcccaga

SEQ ID NO: 263468 - DNA, 20 bp, synthetic construct
  source 1..20: mol_type = other DNA
ctcttttcccctttgcccag

SEQ ID NO: 263469 - DNA, 20 bp, synthetic construct
  source 1..20: mol_type = other DNA
tctcttttcccctttgccca

SEQ ID NO: 263470 - DNA, 20 bp, synthetic construct
  source 1..20: mol_type = other DNA
ctctcttttcccctttgccc

SEQ ID NO: 263471 - DNA, 20 bp, synthetic construct
  source 1..20: mol_type = other DNA
gctctcttttcccctttgcc

SEQ ID NO: 263472 - DNA, 20 bp, synthetic construct
  source 1..20: mol_type = other DNA
agctctcttttcccctttgc

SEQ ID NO: 263473 - DNA, 20 bp, synthetic construct
  source 1..20: mol_type = other DNA
cagctctcttttcccctttg

SEQ ID NO: 263474 - DNA, 20 bp, synthetic construct
  source 1..20: mol_type = other DNA
ccagctctcttttccccttt

SEQ ID NO: 263475 - DNA, 20 bp, synthetic construct
  source 1..20: mol_type = other DNA
cccagctctcttttcccctt

SEQ ID NO: 263476 - DNA, 20 bp, synthetic construct
  source 1..20: mol_type = other DNA
ccccagctctcttttcccct

SEQ ID NO: 263477 - DNA, 20 bp, synthetic construct
  source 1..20: mol_type = other DNA
cccccagctctcttttcccc

SEQ ID NO: 263478 - DNA, 20 bp, synthetic construct
  source 1..20: mol_type = other DNA
gcccccagctctcttttccc

SEQ ID NO: 263479 - DNA, 20 bp, synthetic construct
  source 1..20: mol_type = other DNA
ggcccccagctctcttttcc

SEQ ID NO: 263480 - DNA, 20 bp, synthetic construct
  source 1..20: mol_type = other DNA
tggcccccagctctcttttc

SEQ ID NO: 263481 - DNA, 20 bp, synthetic construct
  source 1..20: mol_type = other DNA
atggcccccagctctctttt

SEQ ID NO: 263482 - DNA, 20 bp, synthetic construct
  source 1..20: mol_type = other DNA
gatggcccccagctctcttt

SEQ ID NO: 263483 - DNA, 20 bp, synthetic construct
  source 1..20: mol_type = other DNA
ggatggcccccagctctctt

SEQ ID NO: 263484 - DNA, 20 bp, synthetic construct
  source 1..20: mol_type = other DNA
gggatggcccccagctctct

SEQ ID NO: 263485 - DNA, 20 bp, synthetic construct
  source 1..20: mol_type = other DNA
agggatggcccccagctctc

SEQ ID NO: 263486 - DNA, 20 bp, synthetic construct
  source 1..20: mol_type = other DNA
gagggatggcccccagctct

SEQ ID NO: 263487 - DNA, 20 bp, synthetic construct
  source 1..20: mol_type = other DNA
agagggatggcccccagctc

SEQ ID NO: 263488 - DNA, 20 bp, synthetic construct
  source 1..20: mol_type = other DNA
gagagggatggcccccagct

SEQ ID NO: 263489 - DNA, 20 bp, synthetic construct
  source 1..20: mol_type = other DNA
tgagagggatggcccccagc

SEQ ID NO: 263490 - DNA, 20 bp, synthetic construct
  source 1..20: mol_type = other DNA
ctgagagggatggcccccag

SEQ ID NO: 263491 - DNA, 20 bp, synthetic construct
  source 1..20: mol_type = other DNA
gctgagagggatggccccca

SEQ ID NO: 263492 - DNA, 20 bp, synthetic construct
  source 1..20: mol_type = other DNA
tgctgagagggatggccccc

SEQ ID NO: 263493 - DNA, 20 bp, synthetic construct
  source 1..20: mol_type = other DNA
gtgctgagagggatggcccc

SEQ ID NO: 263494 - DNA, 20 bp, synthetic construct
  source 1..20: mol_type = other DNA
ggtgctgagagggatggccc

SEQ ID NO: 263495 - DNA, 20 bp, synthetic construct
  source 1..20: mol_type = other DNA
gggtgctgagagggatggcc

SEQ ID NO: 263496 - DNA, 20 bp, synthetic construct
  source 1..20: mol_type = other DNA
ggggtgctgagagggatggc

SEQ ID NO: 263497 - DNA, 20 bp, synthetic construct
  source 1..20: mol_type = other DNA
tggggtgctgagagggatgg

SEQ ID NO: 263498 - DNA, 20 bp, synthetic construct
  source 1..20: mol_type = other DNA
gtggggtgctgagagggatg

SEQ ID NO: 263499 - DNA, 20 bp, synthetic construct
  source 1..20: mol_type = other DNA
tgtggggtgctgagagggat

SEQ ID NO: 263500 - DNA, 20 bp, synthetic construct
  source 1..20: mol_type = other DNA
ctgtggggtgctgagaggga

SEQ ID NO: 263501 - DNA, 20 bp, synthetic construct
  source 1..20: mol_type = other DNA
cctgtggggtgctgagaggg

SEQ ID NO: 263502 - DNA, 20 bp, synthetic construct
  source 1..20: mol_type = other DNA
gcctgtggggtgctgagagg

SEQ ID NO: 263503 - DNA, 20 bp, synthetic construct
  source 1..20: mol_type = other DNA
agcctgtggggtgctgagag

SEQ ID NO: 263504 - DNA, 20 bp, synthetic construct
  source 1..20: mol_type = other DNA
gagcctgtggggtgctgaga

SEQ ID NO: 263505 - DNA, 20 bp, synthetic construct
  source 1..20: mol_type = other DNA
agagcctgtggggtgctgag

SEQ ID NO: 263506 - DNA, 20 bp, synthetic construct
  source 1..20: mol_type = other DNA
gagagcctgtggggtgctga

SEQ ID NO: 263507 - DNA, 20 bp, synthetic construct
  source 1..20: mol_type = other DNA
tgagagcctgtggggtgctg

SEQ ID NO: 263508 - DNA, 20 bp, synthetic construct
  source 1..20: mol_type = other DNA
atgagagcctgtggggtgct

SEQ ID NO: 263509 - DNA, 20 bp, synthetic construct
  source 1..20: mol_type = other DNA
tatgagagcctgtggggtgc

SEQ ID NO: 263510 - DNA, 20 bp, synthetic construct
  source 1..20: mol_type = other DNA
ctatgagagcctgtggggtg

SEQ ID NO: 263511 - DNA, 20 bp, synthetic construct
  source 1..20: mol_type = other DNA
gctatgagagcctgtggggt

SEQ ID NO: 263512 - DNA, 20 bp, synthetic construct
  source 1..20: mol_type = other DNA
tgctatgagagcctgtgggg

SEQ ID NO: 263513 - DNA, 20 bp, synthetic construct
  source 1..20: mol_type = other DNA
ctgctatgagagcctgtggg

SEQ ID NO: 263514 - DNA, 20 bp, synthetic construct
  source 1..20: mol_type = other DNA
gctgctatgagagcctgtgg

SEQ ID NO: 263515 - DNA, 20 bp, synthetic construct
  source 1..20: mol_type = other DNA
tgctgctatgagagcctgtg

SEQ ID NO: 263516 - DNA, 20 bp, synthetic construct
  source 1..20: mol_type = other DNA
ctgctgctatgagagcctgt

SEQ ID NO: 263517 - DNA, 20 bp, synthetic construct
  source 1..20: mol_type = other DNA
gctgctgctatgagagcctg

SEQ ID NO: 263518 - DNA, 20 bp, synthetic construct
  source 1..20: mol_type = other DNA
agctgctgctatgagagcct

SEQ ID NO: 263519 - DNA, 20 bp, synthetic construct
  source 1..20: mol_type = other DNA
gagctgctgctatgagagcc

SEQ ID NO: 263520 - DNA, 20 bp, synthetic construct
  source 1..20: mol_type = other DNA
ggagctgctgctatgagagc

SEQ ID NO: 263521 - DNA, 20 bp, synthetic construct
  source 1..20: mol_type = other DNA
aggagctgctgctatgagag

SEQ ID NO: 263522 - DNA, 20 bp, synthetic construct
  source 1..20: mol_type = other DNA
taggagctgctgctatgaga

SEQ ID NO: 263523 - DNA, 20 bp, synthetic construct
  source 1..20: mol_type = other DNA
ttaggagctgctgctatgag

SEQ ID NO: 263524 - DNA, 20 bp, synthetic construct
  source 1..20: mol_type = other DNA
cttaggagctgctgctatga

SEQ ID NO: 263525 - DNA, 20 bp, synthetic construct
  source 1..20: mol_type = other DNA
tcttaggagctgctgctatg

SEQ ID NO: 263526 - DNA, 20 bp, synthetic construct
  source 1..20: mol_type = other DNA
gtcttaggagctgctgctat

SEQ ID NO: 263527 - DNA, 20 bp, synthetic construct
  source 1..20: mol_type = other DNA
tgtcttaggagctgctgcta

SEQ ID NO: 263528 - DNA, 20 bp, synthetic construct
  source 1..20: mol_type = other DNA
gtgtcttaggagctgctgct

SEQ ID NO: 263529 - DNA, 20 bp, synthetic construct
  source 1..20: mol_type = other DNA
ggtgtcttaggagctgctgc

SEQ ID NO: 263530 - DNA, 20 bp, synthetic construct
  source 1..20: mol_type = other DNA
aggtgtcttaggagctgctg

SEQ ID NO: 263531 - DNA, 20 bp, synthetic construct
  source 1..20: mol_type = other DNA
caggtgtcttaggagctgct

SEQ ID NO: 263532 - DNA, 20 bp, synthetic construct
  source 1..20: mol_type = other DNA
ccaggtgtcttaggagctgc

SEQ ID NO: 263533 - DNA, 20 bp, synthetic construct
  source 1..20: mol_type = other DNA
accaggtgtcttaggagctg

SEQ ID NO: 263534 - DNA, 20 bp, synthetic construct
  source 1..20: mol_type = other DNA
caccaggtgtcttaggagct

SEQ ID NO: 263535 - DNA, 20 bp, synthetic construct
  source 1..20: mol_type = other DNA
ccaccaggtgtcttaggagc

SEQ ID NO: 263536 - DNA, 20 bp, synthetic construct
  source 1..20: mol_type = other DNA
cccaccaggtgtcttaggag

SEQ ID NO: 263537 - DNA, 20 bp, synthetic construct
  source 1..20: mol_type = other DNA
tcccaccaggtgtcttagga

SEQ ID NO: 263538 - DNA, 20 bp, synthetic construct
  source 1..20: mol_type = other DNA
gtcccaccaggtgtcttagg

SEQ ID NO: 263539 - DNA, 20 bp, synthetic construct
  source 1..20: mol_type = other DNA
ggtcccaccaggtgtcttag

SEQ ID NO: 263540 - DNA, 20 bp, synthetic construct
  source 1..20: mol_type = other DNA
aggtcccaccaggtgtctta

SEQ ID NO: 263541 - DNA, 20 bp, synthetic construct
  source 1..20: mol_type = other DNA
aaggtcccaccaggtgtctt

SEQ ID NO: 263542 - DNA, 20 bp, synthetic construct
  source 1..20: mol_type = other DNA
caaggtcccaccaggtgtct

SEQ ID NO: 263543 - DNA, 20 bp, synthetic construct
  source 1..20: mol_type = other DNA
ccaaggtcccaccaggtgtc

SEQ ID NO: 263544 - DNA, 20 bp, synthetic construct
  source 1..20: mol_type = other DNA
accaaggtcccaccaggtgt

SEQ ID NO: 263545 - DNA, 20 bp, synthetic construct
  source 1..20: mol_type = other DNA
aaccaaggtcccaccaggtg

SEQ ID NO: 263546 - DNA, 20 bp, synthetic construct
  source 1..20: mol_type = other DNA
aaaccaaggtcccaccaggt

SEQ ID NO: 263547 - DNA, 20 bp, synthetic construct
  source 1..20: mol_type = other DNA
gaaaccaaggtcccaccagg

SEQ ID NO: 263548 - DNA, 20 bp, synthetic construct
  source 1..20: mol_type = other DNA
cgaaaccaaggtcccaccag

SEQ ID NO: 263549 - DNA, 20 bp, synthetic construct
  source 1..20: mol_type = other DNA
tcgaaaccaaggtcccacca

SEQ ID NO: 263550 - DNA, 20 bp, synthetic construct
  source 1..20: mol_type = other DNA
ttcgaaaccaaggtcccacc

SEQ ID NO: 263551 - DNA, 20 bp, synthetic construct
  source 1..20: mol_type = other DNA
tttcgaaaccaaggtcccac

SEQ ID NO: 263552 - DNA, 20 bp, synthetic construct
  source 1..20: mol_type = other DNA
atttcgaaaccaaggtccca

SEQ ID NO: 263553 - DNA, 20 bp, synthetic construct
  source 1..20: mol_type = other DNA
gatttcgaaaccaaggtccc

SEQ ID NO: 263554 - DNA, 20 bp, synthetic construct
  source 1..20: mol_type = other DNA
cgatttcgaaaccaaggtcc

SEQ ID NO: 263555 - DNA, 20 bp, synthetic construct
  source 1..20: mol_type = other DNA
gcgatttcgaaaccaaggtc

SEQ ID NO: 263556 - DNA, 20 bp, synthetic construct
  source 1..20: mol_type = other DNA
agcgatttcgaaaccaaggt

SEQ ID NO: 263557 - DNA, 20 bp, synthetic construct
  source 1..20: mol_type = other DNA
tagcgatttcgaaaccaagg

SEQ ID NO: 263558 - DNA, 20 bp, synthetic construct
  source 1..20: mol_type = other DNA
gtagcgatttcgaaaccaag

SEQ ID NO: 263559 - DNA, 20 bp, synthetic construct
  source 1..20: mol_type = other DNA
agtagcgatttcgaaaccaa

SEQ ID NO: 263560 - DNA, 20 bp, synthetic construct
  source 1..20: mol_type = other DNA
gagtagcgatttcgaaacca

SEQ ID NO: 263561 - DNA, 20 bp, synthetic construct
  source 1..20: mol_type = other DNA
agagtagcgatttcgaaacc

SEQ ID NO: 263562 - DNA, 20 bp, synthetic construct
  source 1..20: mol_type = other DNA
tagagtagcgatttcgaaac

SEQ ID NO: 263563 - DNA, 20 bp, synthetic construct
  source 1..20: mol_type = other DNA
ttagagtagcgatttcgaaa

SEQ ID NO: 263564 - DNA, 20 bp, synthetic construct
  source 1..20: mol_type = other DNA
cttagagtagcgatttcgaa

SEQ ID NO: 263565 - DNA, 20 bp, synthetic construct
  source 1..20: mol_type = other DNA
ccttagagtagcgatttcga

SEQ ID NO: 263566 - DNA, 20 bp, synthetic construct
  source 1..20: mol_type = other DNA
gccttagagtagcgatttcg

SEQ ID NO: 263567 - DNA, 20 bp, synthetic construct
  source 1..20: mol_type = other DNA
agccttagagtagcgatttc

SEQ ID NO: 263568 - DNA, 20 bp, synthetic construct
  source 1..20: mol_type = other DNA
cagccttagagtagcgattt

SEQ ID NO: 263569 - DNA, 20 bp, synthetic construct
  source 1..20: mol_type = other DNA
ccagccttagagtagcgatt

SEQ ID NO: 263570 - DNA, 20 bp, synthetic construct
  source 1..20: mol_type = other DNA
cccagccttagagtagcgat

SEQ ID NO: 263571 - DNA, 20 bp, synthetic construct
  source 1..20: mol_type = other DNA
gcccagccttagagtagcga

SEQ ID NO: 263572 - DNA, 20 bp, synthetic construct
  source 1..20: mol_type = other DNA
tgcccagccttagagtagcg

SEQ ID NO: 263573 - DNA, 20 bp, synthetic construct
  source 1..20: mol_type = other DNA
gtgcccagccttagagtagc

SEQ ID NO: 263574 - DNA, 20 bp, synthetic construct
  source 1..20: mol_type = other DNA
cgtgcccagccttagagtag

SEQ ID NO: 263575 - DNA, 20 bp, synthetic construct
  source 1..20: mol_type = other DNA
ccgtgcccagccttagagta

SEQ ID NO: 263576 - DNA, 20 bp, synthetic construct
  source 1..20: mol_type = other DNA
accgtgcccagccttagagt

SEQ ID NO: 263577 - DNA, 20 bp, synthetic construct
  source 1..20: mol_type = other DNA
caccgtgcccagccttagag

SEQ ID NO: 263578 - DNA, 20 bp, synthetic construct
  source 1..20: mol_type = other DNA
ccaccgtgcccagccttaga

SEQ ID NO: 263579 - DNA, 20 bp, synthetic construct
  source 1..20: mol_type = other DNA
gccaccgtgcccagccttag

SEQ ID NO: 263580 - DNA, 20 bp, synthetic construct
  source 1..20: mol_type = other DNA
agccaccgtgcccagcctta

SEQ ID NO: 263581 - DNA, 20 bp, synthetic construct
  source 1..20: mol_type = other DNA
gagccaccgtgcccagcctt

SEQ ID NO: 263582 - DNA, 20 bp, synthetic construct
  source 1..20: mol_type = other DNA
tgagccaccgtgcccagcct

SEQ ID NO: 263583 - DNA, 20 bp, synthetic construct
  source 1..20: mol_type = other DNA
gtgagccaccgtgcccagcc

SEQ ID NO: 263584 - DNA, 20 bp, synthetic construct
  source 1..20: mol_type = other DNA
tgtgagccaccgtgcccagc

SEQ ID NO: 263585 - DNA, 20 bp, synthetic construct
  source 1..20: mol_type = other DNA
gtgtgagccaccgtgcccag

SEQ ID NO: 263586 - DNA, 20 bp, synthetic construct
  source 1..20: mol_type = other DNA
ggtgtgagccaccgtgccca

SEQ ID NO: 263587 - DNA, 20 bp, synthetic construct
  source 1..20: mol_type = other DNA
aggtgtgagccaccgtgccc

SEQ ID NO: 263588 - DNA, 20 bp, synthetic construct
  source 1..20: mol_type = other DNA
caggtgtgagccaccgtgcc

SEQ ID NO: 263589 - DNA, 20 bp, synthetic construct
  source 1..20: mol_type = other DNA
acaggtgtgagccaccgtgc

SEQ ID NO: 263590 - DNA, 20 bp, synthetic construct
  source 1..20: mol_type = other DNA
tacaggtgtgagccaccgtg

SEQ ID NO: 263591 - DNA, 20 bp, synthetic construct
  source 1..20: mol_type = other DNA
ttacaggtgtgagccaccgt

SEQ ID NO: 263592 - DNA, 20 bp, synthetic construct
  source 1..20: mol_type = other DNA
attacaggtgtgagccaccg

SEQ ID NO: 263593 - DNA, 20 bp, synthetic construct
  source 1..20: mol_type = other DNA
gattacaggtgtgagccacc

SEQ ID NO: 263594 - DNA, 20 bp, synthetic construct
  source 1..20: mol_type = other DNA
ggattacaggtgtgagccac

SEQ ID NO: 263595 - DNA, 20 bp, synthetic construct
  source 1..20: mol_type = other DNA
gggattacaggtgtgagcca

SEQ ID NO: 263596 - DNA, 20 bp, synthetic construct
  source 1..20: mol_type = other DNA
tgggattacaggtgtgagcc

SEQ ID NO: 263597 - DNA, 20 bp, synthetic construct
  source 1..20: mol_type = other DNA
ctgggattacaggtgtgagc

SEQ ID NO: 263598 - DNA, 20 bp, synthetic construct
  source 1..20: mol_type = other DNA
gctgggattacaggtgtgag

SEQ ID NO: 263599 - DNA, 20 bp, synthetic construct
  source 1..20: mol_type = other DNA
agctgggattacaggtgtga

SEQ ID NO: 263600 - DNA, 20 bp, synthetic construct
  source 1..20: mol_type = other DNA
gagctgggattacaggtgtg

SEQ ID NO: 263601 - DNA, 20 bp, synthetic construct
  source 1..20: mol_type = other DNA
agagctgggattacaggtgt

SEQ ID NO: 263602 - DNA, 20 bp, synthetic construct
  source 1..20: mol_type = other DNA
aagagctgggattacaggtg

SEQ ID NO: 263603 - DNA, 20 bp, synthetic construct
  source 1..20: mol_type = other DNA
aaagagctgggattacaggt

SEQ ID NO: 263604 - DNA, 20 bp, synthetic construct
  source 1..20: mol_type = other DNA
taaagagctgggattacagg

SEQ ID NO: 263605 - DNA, 20 bp, synthetic construct
  source 1..20: mol_type = other DNA
ctaaagagctgggattacag

SEQ ID NO: 263606 - DNA, 20 bp, synthetic construct
  source 1..20: mol_type = other DNA
cctaaagagctgggattaca

SEQ ID NO: 263607 - DNA, 20 bp, synthetic construct
  source 1..20: mol_type = other DNA
tcctaaagagctgggattac

SEQ ID NO: 263608 - DNA, 20 bp, synthetic construct
  source 1..20: mol_type = other DNA
ctcctaaagagctgggatta

SEQ ID NO: 263609 - DNA, 20 bp, synthetic construct
  source 1..20: mol_type = other DNA
cctcctaaagagctgggatt

SEQ ID NO: 263610 - DNA, 20 bp, synthetic construct
  source 1..20: mol_type = other DNA
gcctcctaaagagctgggat

SEQ ID NO: 263611 - DNA, 20 bp, synthetic construct
  source 1..20: mol_type = other DNA
ggcctcctaaagagctggga

SEQ ID NO: 263612 - DNA, 20 bp, synthetic construct
  source 1..20: mol_type = other DNA
cggcctcctaaagagctggg

SEQ ID NO: 263613 - DNA, 20 bp, synthetic construct
  source 1..20: mol_type = other DNA
tcggcctcctaaagagctgg

SEQ ID NO: 263614 - DNA, 20 bp, synthetic construct
  source 1..20: mol_type = other DNA
ctcggcctcctaaagagctg

SEQ ID NO: 263615 - DNA, 20 bp, synthetic construct
  source 1..20: mol_type = other DNA
cctcggcctcctaaagagct

SEQ ID NO: 263616 - DNA, 20 bp, synthetic construct
  source 1..20: mol_type = other DNA
tcctcggcctcctaaagagc

SEQ ID NO: 263617 - DNA, 20 bp, synthetic construct
  source 1..20: mol_type = other DNA
ctcctcggcctcctaaagag

SEQ ID NO: 263618 - DNA, 20 bp, synthetic construct
  source 1..20: mol_type = other DNA
cctcctcggcctcctaaaga

SEQ ID NO: 263619 - DNA, 20 bp, synthetic construct
  source 1..20: mol_type = other DNA
ccctcctcggcctcctaaag

SEQ ID NO: 263620 - DNA, 20 bp, synthetic construct
  source 1..20: mol_type = other DNA
accctcctcggcctcctaaa

SEQ ID NO: 263621 - DNA, 20 bp, synthetic construct
  source 1..20: mol_type = other DNA
caccctcctcggcctcctaa

SEQ ID NO: 263622 - DNA, 20 bp, synthetic construct
  source 1..20: mol_type = other DNA
ccaccctcctcggcctccta

SEQ ID NO: 263623 - DNA, 20 bp, synthetic construct
  source 1..20: mol_type = other DNA
tccaccctcctcggcctcct

SEQ ID NO: 263624 - DNA, 20 bp, synthetic construct
  source 1..20: mol_type = other DNA
atccaccctcctcggcctcc

SEQ ID NO: 263625 - DNA, 20 bp, synthetic construct
  source 1..20: mol_type = other DNA
gatccaccctcctcggcctc

SEQ ID NO: 263626 - DNA, 20 bp, synthetic construct
  source 1..20: mol_type = other DNA
tgatccaccctcctcggcct

SEQ ID NO: 263627 - DNA, 20 bp, synthetic construct
  source 1..20: mol_type = other DNA
gtgatccaccctcctcggcc

SEQ ID NO: 263628 - DNA, 20 bp, synthetic construct
  source 1..20: mol_type = other DNA
ggtgatccaccctcctcggc

SEQ ID NO: 263629 - DNA, 20 bp, synthetic construct
  source 1..20: mol_type = other DNA
aggtgatccaccctcctcgg

SEQ ID NO: 263630 - DNA, 20 bp, synthetic construct
  source 1..20: mol_type = other DNA
caggtgatccaccctcctcg

SEQ ID NO: 263631 - DNA, 20 bp, synthetic construct
  source 1..20: mol_type = other DNA
tcaggtgatccaccctcctc

SEQ ID NO: 263632 - DNA, 20 bp, synthetic construct
  source 1..20: mol_type = other DNA
ctcaggtgatccaccctcct

SEQ ID NO: 263633 - DNA, 20 bp, synthetic construct
  source 1..20: mol_type = other DNA
tctcaggtgatccaccctcc

SEQ ID NO: 263634 - DNA, 20 bp, synthetic construct
  source 1..20: mol_type = other DNA
atctcaggtgatccaccctc

SEQ ID NO: 263635 - DNA, 20 bp, synthetic construct
  source 1..20: mol_type = other DNA
gatctcaggtgatccaccct

SEQ ID NO: 263636 - DNA, 20 bp, synthetic construct
  source 1..20: mol_type = other DNA
tgatctcaggtgatccaccc

SEQ ID NO: 263637 - DNA, 20 bp, synthetic construct
  source 1..20: mol_type = other DNA
ctgatctcaggtgatccacc

SEQ ID NO: 263638 - DNA, 20 bp, synthetic construct
  source 1..20: mol_type = other DNA
cctgatctcaggtgatccac

SEQ ID NO: 263639 - DNA, 20 bp, synthetic construct
  source 1..20: mol_type = other DNA
tcctgatctcaggtgatcca

SEQ ID NO: 263640 - DNA, 20 bp, synthetic construct
  source 1..20: mol_type = other DNA
ctcctgatctcaggtgatcc

SEQ ID NO: 263641 - DNA, 20 bp, synthetic construct
  source 1..20: mol_type = other DNA
actcctgatctcaggtgatc

SEQ ID NO: 263642 - DNA, 20 bp, synthetic construct
  source 1..20: mol_type = other DNA
aactcctgatctcaggtgat

SEQ ID NO: 263643 - DNA, 20 bp, synthetic construct
  source 1..20: mol_type = other DNA
gaactcctgatctcaggtga

SEQ ID NO: 263644 - DNA, 20 bp, synthetic construct
  source 1..20: mol_type = other DNA
cgaactcctgatctcaggtg

SEQ ID NO: 263645 - DNA, 20 bp, synthetic construct
  source 1..20: mol_type = other DNA
tcgaactcctgatctcaggt

SEQ ID NO: 263646 - DNA, 20 bp, synthetic construct
  source 1..20: mol_type = other DNA
ctcgaactcctgatctcagg

SEQ ID NO: 263647 - DNA, 20 bp, synthetic construct
  source 1..20: mol_type = other DNA
tctcgaactcctgatctcag

SEQ ID NO: 263648 - DNA, 20 bp, synthetic construct
  source 1..20: mol_type = other DNA
gtctcgaactcctgatctca

SEQ ID NO: 263649 - DNA, 20 bp, synthetic construct
  source 1..20: mol_type = other DNA
ggtctcgaactcctgatctc

SEQ ID NO: 263650 - DNA, 20 bp, synthetic construct
  source 1..20: mol_type = other DNA
tggtctcgaactcctgatct

SEQ ID NO: 263651 - DNA, 20 bp, synthetic construct
  source 1..20: mol_type = other DNA
ctggtctcgaactcctgatc

SEQ ID NO: 263652 - DNA, 20 bp, synthetic construct
  source 1..20: mol_type = other DNA
gctggtctcgaactcctgat

SEQ ID NO: 263653 - DNA, 20 bp, synthetic construct
  source 1..20: mol_type = other DNA
ggctggtctcgaactcctga

SEQ ID NO: 263654 - DNA, 20 bp, synthetic construct
  source 1..20: mol_type = other DNA
aggctggtctcgaactcctg

SEQ ID NO: 263655 - DNA, 20 bp, synthetic construct
  source 1..20: mol_type = other DNA
caggctggtctcgaactcct

SEQ ID NO: 263656 - DNA, 20 bp, synthetic construct
  source 1..20: mol_type = other DNA
ccaggctggtctcgaactcc

SEQ ID NO: 263657 - DNA, 20 bp, synthetic construct
  source 1..20: mol_type = other DNA
gccaggctggtctcgaactc

SEQ ID NO: 263658 - DNA, 20 bp, synthetic construct
  source 1..20: mol_type = other DNA
agccaggctggtctcgaact

SEQ ID NO: 263659 - DNA, 20 bp, synthetic construct
  source 1..20: mol_type = other DNA
tagccaggctggtctcgaac

SEQ ID NO: 263660 - DNA, 20 bp, synthetic construct
  source 1..20: mol_type = other DNA
ttagccaggctggtctcgaa

SEQ ID NO: 263661 - DNA, 20 bp, synthetic construct
  source 1..20: mol_type = other DNA
gttagccaggctggtctcga

SEQ ID NO: 263662 - DNA, 20 bp, synthetic construct
  source 1..20: mol_type = other DNA
tgttagccaggctggtctcg

SEQ ID NO: 263663 - DNA, 20 bp, synthetic construct
  source 1..20: mol_type = other DNA
atgttagccaggctggtctc

SEQ ID NO: 263664 - DNA, 20 bp, synthetic construct
  source 1..20: mol_type = other DNA
catgttagccaggctggtct

SEQ ID NO: 263665 - DNA, 20 bp, synthetic construct
  source 1..20: mol_type = other DNA
ccatgttagccaggctggtc

SEQ ID NO: 263666 - DNA, 20 bp, synthetic construct
  source 1..20: mol_type = other DNA
gccatgttagccaggctggt

SEQ ID NO: 263667 - DNA, 20 bp, synthetic construct
  source 1..20: mol_type = other DNA
tgccatgttagccaggctgg

SEQ ID NO: 263668 - DNA, 20 bp, synthetic construct
  source 1..20: mol_type = other DNA
ttgccatgttagccaggctg

SEQ ID NO: 263669 - DNA, 20 bp, synthetic construct
  source 1..20: mol_type = other DNA
tttgccatgttagccaggct

SEQ ID NO: 263670 - DNA, 20 bp, synthetic construct
  source 1..20: mol_type = other DNA
ttttgccatgttagccaggc

SEQ ID NO: 263671 - DNA, 20 bp, synthetic construct
  source 1..20: mol_type = other DNA
gttttgccatgttagccagg

SEQ ID NO: 263672 - DNA, 20 bp, synthetic construct
  source 1..20: mol_type = other DNA
ggttttgccatgttagccag

SEQ ID NO: 263673 - DNA, 20 bp, synthetic construct
  source 1..20: mol_type = other DNA
gggttttgccatgttagcca

SEQ ID NO: 263674 - DNA, 20 bp, synthetic construct
  source 1..20: mol_type = other DNA
agggttttgccatgttagcc

SEQ ID NO: 263675 - DNA, 20 bp, synthetic construct
  source 1..20: mol_type = other DNA
cagggttttgccatgttagc

SEQ ID NO: 263676 - DNA, 20 bp, synthetic construct
  source 1..20: mol_type = other DNA
acagggttttgccatgttag

SEQ ID NO: 263677 - DNA, 20 bp, synthetic construct
  source 1..20: mol_type = other DNA
gacagggttttgccatgtta

SEQ ID NO: 263678 - DNA, 20 bp, synthetic construct
  source 1..20: mol_type = other DNA
agacagggttttgccatgtt

SEQ ID NO: 263679 - DNA, 20 bp, synthetic construct
  source 1..20: mol_type = other DNA
gagacagggttttgccatgt

SEQ ID NO: 263680 - DNA, 20 bp, synthetic construct
  source 1..20: mol_type = other DNA
agagacagggttttgccatg

SEQ ID NO: 263681 - DNA, 20 bp, synthetic construct
  source 1..20: mol_type = other DNA
tagagacagggttttgccat

SEQ ID NO: 263682 - DNA, 20 bp, synthetic construct
  source 1..20: mol_type = other DNA
gtagagacagggttttgcca

SEQ ID NO: 263683 - DNA, 20 bp, synthetic construct
  source 1..20: mol_type = other DNA
agtagagacagggttttgcc

SEQ ID NO: 263684 - DNA, 20 bp, synthetic construct
  source 1..20: mol_type = other DNA
tagtagagacagggttttgc

SEQ ID NO: 263685 - DNA, 20 bp, synthetic construct
  source 1..20: mol_type = other DNA
ttagtagagacagggttttg

SEQ ID NO: 263686 - DNA, 20 bp, synthetic construct
  source 1..20: mol_type = other DNA
tttagtagagacagggtttt

SEQ ID NO: 263687 - DNA, 20 bp, synthetic construct
  source 1..20: mol_type = other DNA
ttttagtagagacagggttt

SEQ ID NO: 263688 - DNA, 20 bp, synthetic construct
  source 1..20: mol_type = other DNA
tttttagtagagacagggtt

SEQ ID NO: 263689 - DNA, 20 bp, synthetic construct
  source 1..20: mol_type = other DNA
atttttagtagagacagggt

SEQ ID NO: 263690 - DNA, 20 bp, synthetic construct
  source 1..20: mol_type = other DNA
tatttttagtagagacaggg

SEQ ID NO: 263691 - DNA, 20 bp, synthetic construct
  source 1..20: mol_type = other DNA
gtatttttagtagagacagg

SEQ ID NO: 263692 - DNA, 20 bp, synthetic construct
  source 1..20: mol_type = other DNA
tgtatttttagtagagacag

SEQ ID NO: 263693 - DNA, 20 bp, synthetic construct
  source 1..20: mol_type = other DNA
ttgtatttttagtagagaca

SEQ ID NO: 263694 - DNA, 20 bp, synthetic construct
  source 1..20: mol_type = other DNA
tttgtatttttagtagagac

SEQ ID NO: 263695 - DNA, 20 bp, synthetic construct
  source 1..20: mol_type = other DNA
ttttgtatttttagtagaga

SEQ ID NO: 263696 - DNA, 20 bp, synthetic construct
  source 1..20: mol_type = other DNA
tttttgtatttttagtagag

SEQ ID NO: 263697 - DNA, 20 bp, synthetic construct
  source 1..20: mol_type = other DNA
atttttgtatttttagtaga

SEQ ID NO: 263698 - DNA, 20 bp, synthetic construct
  source 1..20: mol_type = other DNA
aatttttgtatttttagtag

SEQ ID NO: 263699 - DNA, 20 bp, synthetic construct
  source 1..20: mol_type = other DNA
taatttttgtatttttagta

SEQ ID NO: 263700 - DNA, 20 bp, synthetic construct
  source 1..20: mol_type = other DNA
ctaatttttgtatttttagt

SEQ ID NO: 263701 - DNA, 20 bp, synthetic construct
  source 1..20: mol_type = other DNA
gctaatttttgtatttttag

SEQ ID NO: 263702 - DNA, 20 bp, synthetic construct
  source 1..20: mol_type = other DNA
ggctaatttttgtattttta

SEQ ID NO: 263703 - DNA, 20 bp, synthetic construct
  source 1..20: mol_type = other DNA
cggctaatttttgtattttt

SEQ ID NO: 263704 - DNA, 20 bp, synthetic construct
  source 1..20: mol_type = other DNA
ccggctaatttttgtatttt

SEQ ID NO: 263705 - DNA, 20 bp, synthetic construct
  source 1..20: mol_type = other DNA
cccggctaatttttgtattt

SEQ ID NO: 263706 - DNA, 20 bp, synthetic construct
  source 1..20: mol_type = other DNA
gcccggctaatttttgtatt

SEQ ID NO: 263707 - DNA, 20 bp, synthetic construct
  source 1..20: mol_type = other DNA
cgcccggctaatttttgtat

SEQ ID NO: 263708 - DNA, 20 bp, synthetic construct
  source 1..20: mol_type = other DNA
acgcccggctaatttttgta

SEQ ID NO: 263709 - DNA, 20 bp, synthetic construct
  source 1..20: mol_type = other DNA
cacgcccggctaatttttgt

SEQ ID NO: 263710 - DNA, 20 bp, synthetic construct
  source 1..20: mol_type = other DNA
ccacgcccggctaatttttg

SEQ ID NO: 263711 - DNA, 20 bp, synthetic construct
  source 1..20: mol_type = other DNA
accacgcccggctaattttt

SEQ ID NO: 263712 - DNA, 20 bp, synthetic construct
  source 1..20: mol_type = other DNA
caccacgcccggctaatttt

SEQ ID NO: 263713 - DNA, 20 bp, synthetic construct
  source 1..20: mol_type = other DNA
ccaccacgcccggctaattt

SEQ ID NO: 263714 - DNA, 20 bp, synthetic construct
  source 1..20: mol_type = other DNA
accaccacgcccggctaatt

SEQ ID NO: 263715 - DNA, 20 bp, synthetic construct
  source 1..20: mol_type = other DNA
taccaccacgcccggctaat

SEQ ID NO: 263716 - DNA, 20 bp, synthetic construct
  source 1..20: mol_type = other DNA
ataccaccacgcccggctaa

SEQ ID NO: 263717 - DNA, 20 bp, synthetic construct
  source 1..20: mol_type = other DNA
cataccaccacgcccggcta

SEQ ID NO: 263718 - DNA, 20 bp, synthetic construct
  source 1..20: mol_type = other DNA
gcataccaccacgcccggct

SEQ ID NO: 263719 - DNA, 20 bp, synthetic construct
  source 1..20: mol_type = other DNA
cgcataccaccacgcccggc

SEQ ID NO: 263720 - DNA, 20 bp, synthetic construct
  source 1..20: mol_type = other DNA
acgcataccaccacgcccgg

SEQ ID NO: 263721 - DNA, 20 bp, synthetic construct
  source 1..20: mol_type = other DNA
cacgcataccaccacgcccg

SEQ ID NO: 263722 - DNA, 20 bp, synthetic construct
  source 1..20: mol_type = other DNA
ccacgcataccaccacgccc

SEQ ID NO: 263723 - DNA, 20 bp, synthetic construct
  source 1..20: mol_type = other DNA
accacgcataccaccacgcc

SEQ ID NO: 263724 - DNA, 20 bp, synthetic construct
  source 1..20: mol_type = other DNA
caccacgcataccaccacgc

SEQ ID NO: 263725 - DNA, 20 bp, synthetic construct
  source 1..20: mol_type = other DNA
ccaccacgcataccaccacg

SEQ ID NO: 263726 - DNA, 20 bp, synthetic construct
  source 1..20: mol_type = other DNA
accaccacgcataccaccac

SEQ ID NO: 263727 - DNA, 20 bp, synthetic construct
  source 1..20: mol_type = other DNA
taccaccacgcataccacca

SEQ ID NO: 263728 - DNA, 20 bp, synthetic construct
  source 1..20: mol_type = other DNA
ttaccaccacgcataccacc

SEQ ID NO: 263729 - DNA, 20 bp, synthetic construct
  source 1..20: mol_type = other DNA
attaccaccacgcataccac

SEQ ID NO: 263730 - DNA, 20 bp, synthetic construct
  source 1..20: mol_type = other DNA
gattaccaccacgcatacca

SEQ ID NO: 263731 - DNA, 20 bp, synthetic construct
  source 1..20: mol_type = other DNA
cgattaccaccacgcatacc

SEQ ID NO: 263732 - DNA, 20 bp, synthetic construct
  source 1..20: mol_type = other DNA
gcgattaccaccacgcatac

SEQ ID NO: 263733 - DNA, 20 bp, synthetic construct
  source 1..20: mol_type = other DNA
tgcgattaccaccacgcata

SEQ ID NO: 263734 - DNA, 20 bp, synthetic construct
  source 1..20: mol_type = other DNA
ctgcgattaccaccacgcat

SEQ ID NO: 263735 - DNA, 20 bp, synthetic construct
  source 1..20: mol_type = other DNA
gctgcgattaccaccacgca

SEQ ID NO: 263736 - DNA, 20 bp, synthetic construct
  source 1..20: mol_type = other DNA
agctgcgattaccaccacgc

SEQ ID NO: 263737 - DNA, 20 bp, synthetic construct
  source 1..20: mol_type = other DNA
tagctgcgattaccaccacg

SEQ ID NO: 263738 - DNA, 20 bp, synthetic construct
  source 1..20: mol_type = other DNA
gtagctgcgattaccaccac

SEQ ID NO: 263739 - DNA, 20 bp, synthetic construct
  source 1..20: mol_type = other DNA
agtagctgcgattaccacca

SEQ ID NO: 263740 - DNA, 20 bp, synthetic construct
  source 1..20: mol_type = other DNA
gagtagctgcgattaccacc

SEQ ID NO: 263741 - DNA, 20 bp, synthetic construct
  source 1..20: mol_type = other DNA
cgagtagctgcgattaccac

SEQ ID NO: 263742 - DNA, 20 bp, synthetic construct
  source 1..20: mol_type = other DNA
ccgagtagctgcgattacca

SEQ ID NO: 263743 - DNA, 20 bp, synthetic construct
  source 1..20: mol_type = other DNA
cccgagtagctgcgattacc

SEQ ID NO: 263744 - DNA, 20 bp, synthetic construct
  source 1..20: mol_type = other DNA
tcccgagtagctgcgattac

SEQ ID NO: 263745 - DNA, 20 bp, synthetic construct
  source 1..20: mol_type = other DNA
ctcccgagtagctgcgatta

SEQ ID NO: 263746 - DNA, 20 bp, synthetic construct
  source 1..20: mol_type = other DNA
cctcccgagtagctgcgatt

SEQ ID NO: 263747 - DNA, 20 bp, synthetic construct
  source 1..20: mol_type = other DNA
gcctcccgagtagctgcgat

SEQ ID NO: 263748 - DNA, 20 bp, synthetic construct
  source 1..20: mol_type = other DNA
agcctcccgagtagctgcga

SEQ ID NO: 263749 - DNA, 20 bp, synthetic construct
  source 1..20: mol_type = other DNA
cagcctcccgagtagctgcg

SEQ ID NO: 263750 - DNA, 20 bp, synthetic construct
  source 1..20: mol_type = other DNA
tcagcctcccgagtagctgc

SEQ ID NO: 263751 - DNA, 20 bp, synthetic construct
  source 1..20: mol_type = other DNA
ctcagcctcccgagtagctg

SEQ ID NO: 263752 - DNA, 20 bp, synthetic construct
  source 1..20: mol_type = other DNA
cctcagcctcccgagtagct

SEQ ID NO: 263753 - DNA, 20 bp, synthetic construct
  source 1..20: mol_type = other DNA
gcctcagcctcccgagtagc

SEQ ID NO: 263754 - DNA, 20 bp, synthetic construct
  source 1..20: mol_type = other DNA
tgcctcagcctcccgagtag

SEQ ID NO: 263755 - DNA, 20 bp, synthetic construct
  source 1..20: mol_type = other DNA
gtgcctcagcctcccgagta

SEQ ID NO: 263756 - DNA, 20 bp, synthetic construct
  source 1..20: mol_type = other DNA
tgtgcctcagcctcccgagt

SEQ ID NO: 263757 - DNA, 20 bp, synthetic construct
  source 1..20: mol_type = other DNA
ttgtgcctcagcctcccgag

SEQ ID NO: 263758 - DNA, 20 bp, synthetic construct
  source 1..20: mol_type = other DNA
cttgtgcctcagcctcccga

SEQ ID NO: 263759 - DNA, 20 bp, synthetic construct
  source 1..20: mol_type = other DNA
ccttgtgcctcagcctcccg

SEQ ID NO: 263760 - DNA, 20 bp, synthetic construct
  source 1..20: mol_type = other DNA
tccttgtgcctcagcctccc

SEQ ID NO: 263761 - DNA, 20 bp, synthetic construct
  source 1..20: mol_type = other DNA
atccttgtgcctcagcctcc

SEQ ID NO: 263762 - DNA, 20 bp, synthetic construct
  source 1..20: mol_type = other DNA
aatccttgtgcctcagcctc

SEQ ID NO: 263763 - DNA, 20 bp, synthetic construct
  source 1..20: mol_type = other DNA
caatccttgtgcctcagcct

SEQ ID NO: 263764 - DNA, 20 bp, synthetic construct
  source 1..20: mol_type = other DNA
gcaatccttgtgcctcagcc

SEQ ID NO: 263765 - DNA, 20 bp, synthetic construct
  source 1..20: mol_type = other DNA
agcaatccttgtgcctcagc

SEQ ID NO: 263766 - DNA, 20 bp, synthetic construct
  source 1..20: mol_type = other DNA
aagcaatccttgtgcctcag

SEQ ID NO: 263767 - DNA, 20 bp, synthetic construct
  source 1..20: mol_type = other DNA
caagcaatccttgtgcctca

SEQ ID NO: 263768 - DNA, 20 bp, synthetic construct
  source 1..20: mol_type = other DNA
tcaagcaatccttgtgcctc

SEQ ID NO: 263769 - DNA, 20 bp, synthetic construct
  source 1..20: mol_type = other DNA
ttcaagcaatccttgtgcct

SEQ ID NO: 263770 - DNA, 20 bp, synthetic construct
  source 1..20: mol_type = other DNA
gttcaagcaatccttgtgcc

SEQ ID NO: 263771 - DNA, 20 bp, synthetic construct
  source 1..20: mol_type = other DNA
ggttcaagcaatccttgtgc

SEQ ID NO: 263772 - DNA, 20 bp, synthetic construct
  source 1..20: mol_type = other DNA
gggttcaagcaatccttgtg

SEQ ID NO: 263773 - DNA, 20 bp, synthetic construct
  source 1..20: mol_type = other DNA
ggggttcaagcaatccttgt

SEQ ID NO: 263774 - DNA, 20 bp, synthetic construct
  source 1..20: mol_type = other DNA
tggggttcaagcaatccttg

SEQ ID NO: 263775 - DNA, 20 bp, synthetic construct
  source 1..20: mol_type = other DNA
ctggggttcaagcaatcctt

SEQ ID NO: 263776 - DNA, 20 bp, synthetic construct
  source 1..20: mol_type = other DNA
tctggggttcaagcaatcct

SEQ ID NO: 263777 - DNA, 20 bp, synthetic construct
  source 1..20: mol_type = other DNA
ctctggggttcaagcaatcc

SEQ ID NO: 263778 - DNA, 20 bp, synthetic construct
  source 1..20: mol_type = other DNA
cctctggggttcaagcaatc

SEQ ID NO: 263779 - DNA, 20 bp, synthetic construct
  source 1..20: mol_type = other DNA
gcctctggggttcaagcaat

SEQ ID NO: 263780 - DNA, 20 bp, synthetic construct
  source 1..20: mol_type = other DNA
tgcctctggggttcaagcaa

SEQ ID NO: 263781 - DNA, 20 bp, synthetic construct
  source 1..20: mol_type = other DNA
ctgcctctggggttcaagca

SEQ ID NO: 263782 - DNA, 20 bp, synthetic construct
  source 1..20: mol_type = other DNA
tctgcctctggggttcaagc

SEQ ID NO: 263783 - DNA, 20 bp, synthetic construct
  source 1..20: mol_type = other DNA
ctctgcctctggggttcaag

SEQ ID NO: 263784 - DNA, 20 bp, synthetic construct
  source 1..20: mol_type = other DNA
cctctgcctctggggttcaa

SEQ ID NO: 263785 - DNA, 20 bp, synthetic construct
  source 1..20: mol_type = other DNA
acctctgcctctggggttca

SEQ ID NO: 263786 - DNA, 20 bp, synthetic construct
  source 1..20: mol_type = other DNA
aacctctgcctctggggttc

SEQ ID NO: 263787 - DNA, 20 bp, synthetic construct
  source 1..20: mol_type = other DNA
caacctctgcctctggggtt

SEQ ID NO: 263788 - DNA, 20 bp, synthetic construct
  source 1..20: mol_type = other DNA
acaacctctgcctctggggt

SEQ ID NO: 263789 - DNA, 20 bp, synthetic construct
  source 1..20: mol_type = other DNA
tacaacctctgcctctgggg

SEQ ID NO: 263790 - DNA, 20 bp, synthetic construct
  source 1..20: mol_type = other DNA
ctacaacctctgcctctggg

SEQ ID NO: 263791 - DNA, 20 bp, synthetic construct
  source 1..20: mol_type = other DNA
actacaacctctgcctctgg

SEQ ID NO: 263792 - DNA, 20 bp, synthetic construct
  source 1..20: mol_type = other DNA
aactacaacctctgcctctg

SEQ ID NO: 263793 - DNA, 20 bp, synthetic construct
  source 1..20: mol_type = other DNA
taactacaacctctgcctct

SEQ ID NO: 263794 - DNA, 20 bp, synthetic construct
  source 1..20: mol_type = other DNA
ctaactacaacctctgcctc

SEQ ID NO: 263795 - DNA, 20 bp, synthetic construct
  source 1..20: mol_type = other DNA
gctaactacaacctctgcct

SEQ ID NO: 263796 - DNA, 20 bp, synthetic construct
  source 1..20: mol_type = other DNA
agctaactacaacctctgcc

SEQ ID NO: 263797 - DNA, 20 bp, synthetic construct
  source 1..20: mol_type = other DNA
gagctaactacaacctctgc

SEQ ID NO: 263798 - DNA, 20 bp, synthetic construct
  source 1..20: mol_type = other DNA
ggagctaactacaacctctg

SEQ ID NO: 263799 - DNA, 20 bp, synthetic construct
  source 1..20: mol_type = other DNA
tggagctaactacaacctct

SEQ ID NO: 263800 - DNA, 20 bp, synthetic construct
  source 1..20: mol_type = other DNA
ctggagctaactacaacctc

SEQ ID NO: 263801 - DNA, 20 bp, synthetic construct
  source 1..20: mol_type = other DNA
gctggagctaactacaacct

SEQ ID NO: 263802 - DNA, 20 bp, synthetic construct
  source 1..20: mol_type = other DNA
agctggagctaactacaacc

SEQ ID NO: 263803 - DNA, 20 bp, synthetic construct
  source 1..20: mol_type = other DNA
aagctggagctaactacaac

SEQ ID NO: 263804 - DNA, 20 bp, synthetic construct
  source 1..20: mol_type = other DNA
caagctggagctaactacaa

SEQ ID NO: 263805 - DNA, 20 bp, synthetic construct
  source 1..20: mol_type = other DNA
ccaagctggagctaactaca

SEQ ID NO: 263806 - DNA, 20 bp, synthetic construct
  source 1..20: mol_type = other DNA
cccaagctggagctaactac

SEQ ID NO: 263807 - DNA, 20 bp, synthetic construct
  source 1..20: mol_type = other DNA
gcccaagctggagctaacta

SEQ ID NO: 263808 - DNA, 20 bp, synthetic construct
  source 1..20: mol_type = other DNA
cgcccaagctggagctaact

SEQ ID NO: 263809 - DNA, 20 bp, synthetic construct
  source 1..20: mol_type = other DNA
tcgcccaagctggagctaac

SEQ ID NO: 263810 - DNA, 20 bp, synthetic construct
  source 1..20: mol_type = other DNA
gtcgcccaagctggagctaa

SEQ ID NO: 263811 - DNA, 20 bp, synthetic construct
  source 1..20: mol_type = other DNA
tgtcgcccaagctggagcta

SEQ ID NO: 263812 - DNA, 20 bp, synthetic construct
  source 1..20: mol_type = other DNA
ctgtcgcccaagctggagct

SEQ ID NO: 263813 - DNA, 20 bp, synthetic construct
  source 1..20: mol_type = other DNA
tctgtcgcccaagctggagc

SEQ ID NO: 263814 - DNA, 20 bp, synthetic construct
  source 1..20: mol_type = other DNA
ctctgtcgcccaagctggag

SEQ ID NO: 263815 - DNA, 20 bp, synthetic construct
  source 1..20: mol_type = other DNA
gctctgtcgcccaagctgga

SEQ ID NO: 263816 - DNA, 20 bp, synthetic construct
  source 1..20: mol_type = other DNA
tgctctgtcgcccaagctgg

SEQ ID NO: 263817 - DNA, 20 bp, synthetic construct
  source 1..20: mol_type = other DNA
ttgctctgtcgcccaagctg

SEQ ID NO: 263818 - DNA, 20 bp, synthetic construct
  source 1..20: mol_type = other DNA
cttgctctgtcgcccaagct

SEQ ID NO: 263819 - DNA, 20 bp, synthetic construct
  source 1..20: mol_type = other DNA
tcttgctctgtcgcccaagc

SEQ ID NO: 263820 - DNA, 20 bp, synthetic construct
  source 1..20: mol_type = other DNA
gtcttgctctgtcgcccaag

SEQ ID NO: 263821 - DNA, 20 bp, synthetic construct
  source 1..20: mol_type = other DNA
ggtcttgctctgtcgcccaa

SEQ ID NO: 263822 - DNA, 20 bp, synthetic construct
  source 1..20: mol_type = other DNA
gggtcttgctctgtcgccca

SEQ ID NO: 263823 - DNA, 20 bp, synthetic construct
  source 1..20: mol_type = other DNA
agggtcttgctctgtcgccc

SEQ ID NO: 263824 - DNA, 20 bp, synthetic construct
  source 1..20: mol_type = other DNA
cagggtcttgctctgtcgcc

SEQ ID NO: 263825 - DNA, 20 bp, synthetic construct
  source 1..20: mol_type = other DNA
acagggtcttgctctgtcgc

SEQ ID NO: 263826 - DNA, 20 bp, synthetic construct
  source 1..20: mol_type = other DNA
gacagggtcttgctctgtcg

SEQ ID NO: 263827 - DNA, 20 bp, synthetic construct
  source 1..20: mol_type = other DNA
cgacagggtcttgctctgtc

SEQ ID NO: 263828 - DNA, 20 bp, synthetic construct
  source 1..20: mol_type = other DNA
gcgacagggtcttgctctgt

SEQ ID NO: 263829 - DNA, 20 bp, synthetic construct
  source 1..20: mol_type = other DNA
tgcgacagggtcttgctctg

SEQ ID NO: 263830 - DNA, 20 bp, synthetic construct
  source 1..20: mol_type = other DNA
ttgcgacagggtcttgctct

SEQ ID NO: 263831 - DNA, 20 bp, synthetic construct
  source 1..20: mol_type = other DNA
tttgcgacagggtcttgctc

SEQ ID NO: 263832 - DNA, 20 bp, synthetic construct
  source 1..20: mol_type = other DNA
ttttgcgacagggtcttgct

SEQ ID NO: 263833 - DNA, 20 bp, synthetic construct
  source 1..20: mol_type = other DNA
tttttgcgacagggtcttgc

SEQ ID NO: 263834 - DNA, 20 bp, synthetic construct
  source 1..20: mol_type = other DNA
atttttgcgacagggtcttg

SEQ ID NO: 263835 - DNA, 20 bp, synthetic construct
  source 1..20: mol_type = other DNA
aatttttgcgacagggtctt

SEQ ID NO: 263836 - DNA, 20 bp, synthetic construct
  source 1..20: mol_type = other DNA
caatttttgcgacagggtct

SEQ ID NO: 263837 - DNA, 20 bp, synthetic construct
  source 1..20: mol_type = other DNA
acaatttttgcgacagggtc

SEQ ID NO: 263838 - DNA, 20 bp, synthetic construct
  source 1..20: mol_type = other DNA
aacaatttttgcgacagggt

SEQ ID NO: 263839 - DNA, 20 bp, synthetic construct
  source 1..20: mol_type = other DNA
aaacaatttttgcgacaggg

SEQ ID NO: 263840 - DNA, 20 bp, synthetic construct
  source 1..20: mol_type = other DNA
taaacaatttttgcgacagg

SEQ ID NO: 263841 - DNA, 20 bp, synthetic construct
  source 1..20: mol_type = other DNA
ttaaacaatttttgcgacag

SEQ ID NO: 263842 - DNA, 20 bp, synthetic construct
  source 1..20: mol_type = other DNA
tttaaacaatttttgcgaca

SEQ ID NO: 263843 - DNA, 20 bp, synthetic construct
  source 1..20: mol_type = other DNA
ttttaaacaatttttgcgac

SEQ ID NO: 263844 - DNA, 20 bp, synthetic construct
  source 1..20: mol_type = other DNA
tttttaaacaatttttgcga

SEQ ID NO: 263845 - DNA, 20 bp, synthetic construct
  source 1..20: mol_type = other DNA
ttttttaaacaatttttgcg

SEQ ID NO: 263846 - DNA, 20 bp, synthetic construct
  source 1..20: mol_type = other DNA
gttttttaaacaatttttgc

SEQ ID NO: 263847 - DNA, 20 bp, synthetic construct
  source 1..20: mol_type = other DNA
tgttttttaaacaatttttg

SEQ ID NO: 263848 - DNA, 20 bp, synthetic construct
  source 1..20: mol_type = other DNA
ttgttttttaaacaattttt

SEQ ID NO: 263849 - DNA, 20 bp, synthetic construct
  source 1..20: mol_type = other DNA
tttgttttttaaacaatttt

SEQ ID NO: 263850 - DNA, 20 bp, synthetic construct
  source 1..20: mol_type = other DNA
gtttgttttttaaacaattt

SEQ ID NO: 263851 - DNA, 20 bp, synthetic construct
  source 1..20: mol_type = other DNA
ggtttgttttttaaacaatt

SEQ ID NO: 263852 - DNA, 20 bp, synthetic construct
  source 1..20: mol_type = other DNA
gggtttgttttttaaacaat

SEQ ID NO: 263853 - DNA, 20 bp, synthetic construct
  source 1..20: mol_type = other DNA
tgggtttgttttttaaacaa

SEQ ID NO: 263854 - DNA, 20 bp, synthetic construct
  source 1..20: mol_type = other DNA
ttgggtttgttttttaaaca

SEQ ID NO: 263855 - DNA, 20 bp, synthetic construct
  source 1..20: mol_type = other DNA
tttgggtttgttttttaaac

SEQ ID NO: 263856 - DNA, 20 bp, synthetic construct
  source 1..20: mol_type = other DNA
ttttgggtttgttttttaaa

SEQ ID NO: 263857 - DNA, 20 bp, synthetic construct
  source 1..20: mol_type = other DNA
attttgggtttgttttttaa

SEQ ID NO: 263858 - DNA, 20 bp, synthetic construct
  source 1..20: mol_type = other DNA
aattttgggtttgtttttta

SEQ ID NO: 263859 - DNA, 20 bp, synthetic construct
  source 1..20: mol_type = other DNA
caattttgggtttgtttttt

SEQ ID NO: 263860 - DNA, 20 bp, synthetic construct
  source 1..20: mol_type = other DNA
gcaattttgggtttgttttt

SEQ ID NO: 263861 - DNA, 20 bp, synthetic construct
  source 1..20: mol_type = other DNA
agcaattttgggtttgtttt

SEQ ID NO: 263862 - DNA, 20 bp, synthetic construct
  source 1..20: mol_type = other DNA
tagcaattttgggtttgttt

SEQ ID NO: 263863 - DNA, 20 bp, synthetic construct
  source 1..20: mol_type = other DNA
gtagcaattttgggtttgtt

SEQ ID NO: 263864 - DNA, 20 bp, synthetic construct
  source 1..20: mol_type = other DNA
agtagcaattttgggtttgt

SEQ ID NO: 263865 - DNA, 20 bp, synthetic construct
  source 1..20: mol_type = other DNA
gagtagcaattttgggtttg

SEQ ID NO: 263866 - DNA, 20 bp, synthetic construct
  source 1..20: mol_type = other DNA
agagtagcaattttgggttt

SEQ ID NO: 263867 - DNA, 20 bp, synthetic construct
  source 1..20: mol_type = other DNA
gagagtagcaattttgggtt

SEQ ID NO: 263868 - DNA, 20 bp, synthetic construct
  source 1..20: mol_type = other DNA
tgagagtagcaattttgggt

SEQ ID NO: 263869 - DNA, 20 bp, synthetic construct
  source 1..20: mol_type = other DNA
atgagagtagcaattttggg

SEQ ID NO: 263870 - DNA, 20 bp, synthetic construct
  source 1..20: mol_type = other DNA
aatgagagtagcaattttgg

SEQ ID NO: 263871 - DNA, 20 bp, synthetic construct
  source 1..20: mol_type = other DNA
caatgagagtagcaattttg

SEQ ID NO: 263872 - DNA, 20 bp, synthetic construct
  source 1..20: mol_type = other DNA
ccaatgagagtagcaatttt

SEQ ID NO: 263873 - DNA, 20 bp, synthetic construct
  source 1..20: mol_type = other DNA
cccaatgagagtagcaattt

SEQ ID NO: 263874 - DNA, 20 bp, synthetic construct
  source 1..20: mol_type = other DNA
acccaatgagagtagcaatt

SEQ ID NO: 263875 - DNA, 20 bp, synthetic construct
  source 1..20: mol_type = other DNA
aacccaatgagagtagcaat

SEQ ID NO: 263876 - DNA, 20 bp, synthetic construct
  source 1..20: mol_type = other DNA
gaacccaatgagagtagcaa

SEQ ID NO: 263877 - DNA, 20 bp, synthetic construct
  source 1..20: mol_type = other DNA
ggaacccaatgagagtagca

SEQ ID NO: 263878 - DNA, 20 bp, synthetic construct
  source 1..20: mol_type = other DNA
aggaacccaatgagagtagc

SEQ ID NO: 263879 - DNA, 20 bp, synthetic construct
  source 1..20: mol_type = other DNA
aaggaacccaatgagagtag

SEQ ID NO: 263880 - DNA, 20 bp, synthetic construct
  source 1..20: mol_type = other DNA
aaaggaacccaatgagagta

SEQ ID NO: 263881 - DNA, 20 bp, synthetic construct
  source 1..20: mol_type = other DNA
caaaggaacccaatgagagt

SEQ ID NO: 263882 - DNA, 20 bp, synthetic construct
  source 1..20: mol_type = other DNA
gcaaaggaacccaatgagag

SEQ ID NO: 263883 - DNA, 20 bp, synthetic construct
  source 1..20: mol_type = other DNA
ggcaaaggaacccaatgaga

SEQ ID NO: 263884 - DNA, 20 bp, synthetic construct
  source 1..20: mol_type = other DNA
gggcaaaggaacccaatgag

SEQ ID NO: 263885 - DNA, 20 bp, synthetic construct
  source 1..20: mol_type = other DNA
tgggcaaaggaacccaatga

SEQ ID NO: 263886 - DNA, 20 bp, synthetic construct
  source 1..20: mol_type = other DNA
atgggcaaaggaacccaatg

SEQ ID NO: 263887 - DNA, 20 bp, synthetic construct
  source 1..20: mol_type = other DNA
aatgggcaaaggaacccaat

SEQ ID NO: 263888 - DNA, 20 bp, synthetic construct
  source 1..20: mol_type = other DNA
gaatgggcaaaggaacccaa

SEQ ID NO: 263889 - DNA, 20 bp, synthetic construct
  source 1..20: mol_type = other DNA
ggaatgggcaaaggaaccca

SEQ ID NO: 263890 - DNA, 20 bp, synthetic construct
  source 1..20: mol_type = other DNA
aggaatgggcaaaggaaccc

SEQ ID NO: 263891 - DNA, 20 bp, synthetic construct
  source 1..20: mol_type = other DNA
caggaatgggcaaaggaacc

SEQ ID NO: 263892 - DNA, 20 bp, synthetic construct
  source 1..20: mol_type = other DNA
tcaggaatgggcaaaggaac

SEQ ID NO: 263893 - DNA, 20 bp, synthetic construct
  source 1..20: mol_type = other DNA
atcaggaatgggcaaaggaa

SEQ ID NO: 263894 - DNA, 20 bp, synthetic construct
  source 1..20: mol_type = other DNA
aatcaggaatgggcaaagga

SEQ ID NO: 263895 - DNA, 20 bp, synthetic construct
  source 1..20: mol_type = other DNA
aaatcaggaatgggcaaagg

SEQ ID NO: 263896 - DNA, 20 bp, synthetic construct
  source 1..20: mol_type = other DNA
aaaatcaggaatgggcaaag

SEQ ID NO: 263897 - DNA, 20 bp, synthetic construct
  source 1..20: mol_type = other DNA
caaaatcaggaatgggcaaa

SEQ ID NO: 263898 - DNA, 20 bp, synthetic construct
  source 1..20: mol_type = other DNA
ccaaaatcaggaatgggcaa

SEQ ID NO: 263899 - DNA, 20 bp, synthetic construct
  source 1..20: mol_type = other DNA
gccaaaatcaggaatgggca

SEQ ID NO: 263900 - DNA, 20 bp, synthetic construct
  source 1..20: mol_type = other DNA
tgccaaaatcaggaatgggc

SEQ ID NO: 263901 - DNA, 20 bp, synthetic construct
  source 1..20: mol_type = other DNA
ttgccaaaatcaggaatggg

SEQ ID NO: 263902 - DNA, 20 bp, synthetic construct
  source 1..20: mol_type = other DNA
cttgccaaaatcaggaatgg

SEQ ID NO: 263903 - DNA, 20 bp, synthetic construct
  source 1..20: mol_type = other DNA
tcttgccaaaatcaggaatg

SEQ ID NO: 263904 - DNA, 20 bp, synthetic construct
  source 1..20: mol_type = other DNA
ctcttgccaaaatcaggaat

SEQ ID NO: 263905 - DNA, 20 bp, synthetic construct
  source 1..20: mol_type = other DNA
tctcttgccaaaatcaggaa

SEQ ID NO: 263906 - DNA, 20 bp, synthetic construct
  source 1..20: mol_type = other DNA
ttctcttgccaaaatcagga

SEQ ID NO: 263907 - DNA, 20 bp, synthetic construct
  source 1..20: mol_type = other DNA
tttctcttgccaaaatcagg

SEQ ID NO: 263908 - DNA, 20 bp, synthetic construct
  source 1..20: mol_type = other DNA
atttctcttgccaaaatcag

SEQ ID NO: 263909 - DNA, 20 bp, synthetic construct
  source 1..20: mol_type = other DNA
catttctcttgccaaaatca

SEQ ID NO: 263910 - DNA, 20 bp, synthetic construct
  source 1..20: mol_type = other DNA
gcatttctcttgccaaaatc

SEQ ID NO: 263911 - DNA, 20 bp, synthetic construct
  source 1..20: mol_type = other DNA
agcatttctcttgccaaaat

SEQ ID NO: 263912 - DNA, 20 bp, synthetic construct
  source 1..20: mol_type = other DNA
aagcatttctcttgccaaaa

SEQ ID NO: 263913 - DNA, 20 bp, synthetic construct
  source 1..20: mol_type = other DNA
gaagcatttctcttgccaaa

SEQ ID NO: 263914 - DNA, 20 bp, synthetic construct
  source 1..20: mol_type = other DNA
ggaagcatttctcttgccaa

SEQ ID NO: 263915 - DNA, 20 bp, synthetic construct
  source 1..20: mol_type = other DNA
tggaagcatttctcttgcca

SEQ ID NO: 263916 - DNA, 20 bp, synthetic construct
  source 1..20: mol_type = other DNA
ctggaagcatttctcttgcc

SEQ ID NO: 263917 - DNA, 20 bp, synthetic construct
  source 1..20: mol_type = other DNA
tctggaagcatttctcttgc

SEQ ID NO: 263918 - DNA, 20 bp, synthetic construct
  source 1..20: mol_type = other DNA
atctggaagcatttctcttg

SEQ ID NO: 263919 - DNA, 20 bp, synthetic construct
  source 1..20: mol_type = other DNA
aatctggaagcatttctctt

SEQ ID NO: 263920 - DNA, 20 bp, synthetic construct
  source 1..20: mol_type = other DNA
caatctggaagcatttctct

SEQ ID NO: 263921 - DNA, 20 bp, synthetic construct
  source 1..20: mol_type = other DNA
gcaatctggaagcatttctc

SEQ ID NO: 263922 - DNA, 20 bp, synthetic construct
  source 1..20: mol_type = other DNA
ggcaatctggaagcatttct

SEQ ID NO: 263923 - DNA, 20 bp, synthetic construct
  source 1..20: mol_type = other DNA
gggcaatctggaagcatttc

SEQ ID NO: 263924 - DNA, 20 bp, synthetic construct
  source 1..20: mol_type = other DNA
agggcaatctggaagcattt

SEQ ID NO: 263925 - DNA, 20 bp, synthetic construct
  source 1..20: mol_type = other DNA
cagggcaatctggaagcatt

SEQ ID NO: 263926 - DNA, 20 bp, synthetic construct
  source 1..20: mol_type = other DNA
tcagggcaatctggaagcat

SEQ ID NO: 263927 - DNA, 20 bp, synthetic construct
  source 1..20: mol_type = other DNA
atcagggcaatctggaagca

SEQ ID NO: 263928 - DNA, 20 bp, synthetic construct
  source 1..20: mol_type = other DNA
gatcagggcaatctggaagc

SEQ ID NO: 263929 - DNA, 20 bp, synthetic construct
  source 1..20: mol_type = other DNA
agatcagggcaatctggaag

SEQ ID NO: 263930 - DNA, 20 bp, synthetic construct
  source 1..20: mol_type = other DNA
cagatcagggcaatctggaa

SEQ ID NO: 263931 - DNA, 20 bp, synthetic construct
  source 1..20: mol_type = other DNA
ccagatcagggcaatctgga

SEQ ID NO: 263932 - DNA, 20 bp, synthetic construct
  source 1..20: mol_type = other DNA
cccagatcagggcaatctgg

SEQ ID NO: 263933 - DNA, 20 bp, synthetic construct
  source 1..20: mol_type = other DNA
acccagatcagggcaatctg

SEQ ID NO: 263934 - DNA, 20 bp, synthetic construct
  source 1..20: mol_type = other DNA
tacccagatcagggcaatct

SEQ ID NO: 263935 - DNA, 20 bp, synthetic construct
  source 1..20: mol_type = other DNA
ctacccagatcagggcaatc

SEQ ID NO: 263936 - DNA, 20 bp, synthetic construct
  source 1..20: mol_type = other DNA
cctacccagatcagggcaat

SEQ ID NO: 263937 - DNA, 20 bp, synthetic construct
  source 1..20: mol_type = other DNA
tcctacccagatcagggcaa

SEQ ID NO: 263938 - DNA, 20 bp, synthetic construct
  source 1..20: mol_type = other DNA
gtcctacccagatcagggca

SEQ ID NO: 263939 - DNA, 20 bp, synthetic construct
  source 1..20: mol_type = other DNA
tgtcctacccagatcagggc

SEQ ID NO: 263940 - DNA, 20 bp, synthetic construct
  source 1..20: mol_type = other DNA
ctgtcctacccagatcaggg

SEQ ID NO: 263941 - DNA, 20 bp, synthetic construct
  source 1..20: mol_type = other DNA
gctgtcctacccagatcagg

SEQ ID NO: 263942 - DNA, 20 bp, synthetic construct
  source 1..20: mol_type = other DNA
tgctgtcctacccagatcag

SEQ ID NO: 263943 - DNA, 20 bp, synthetic construct
  source 1..20: mol_type = other DNA
atgctgtcctacccagatca

SEQ ID NO: 263944 - DNA, 20 bp, synthetic construct
  source 1..20: mol_type = other DNA
gatgctgtcctacccagatc

SEQ ID NO: 263945 - DNA, 20 bp, synthetic construct
  source 1..20: mol_type = other DNA
tgatgctgtcctacccagat

SEQ ID NO: 263946 - DNA, 20 bp, synthetic construct
  source 1..20: mol_type = other DNA
gtgatgctgtcctacccaga

SEQ ID NO: 263947 - DNA, 20 bp, synthetic construct
  source 1..20: mol_type = other DNA
cgtgatgctgtcctacccag

SEQ ID NO: 263948 - DNA, 20 bp, synthetic construct
  source 1..20: mol_type = other DNA
gcgtgatgctgtcctaccca

SEQ ID NO: 263949 - DNA, 20 bp, synthetic construct
  source 1..20: mol_type = other DNA
ggcgtgatgctgtcctaccc

SEQ ID NO: 263950 - DNA, 20 bp, synthetic construct
  source 1..20: mol_type = other DNA
tggcgtgatgctgtcctacc

SEQ ID NO: 263951 - DNA, 20 bp, synthetic construct
  source 1..20: mol_type = other DNA
atggcgtgatgctgtcctac

SEQ ID NO: 263952 - DNA, 20 bp, synthetic construct
  source 1..20: mol_type = other DNA
tatggcgtgatgctgtccta

SEQ ID NO: 263953 - DNA, 20 bp, synthetic construct
  source 1..20: mol_type = other DNA
ctatggcgtgatgctgtcct

SEQ ID NO: 263954 - DNA, 20 bp, synthetic construct
  source 1..20: mol_type = other DNA
gctatggcgtgatgctgtcc

SEQ ID NO: 263955 - DNA, 20 bp, synthetic construct
  source 1..20: mol_type = other DNA
tgctatggcgtgatgctgtc

SEQ ID NO: 263956 - DNA, 20 bp, synthetic construct
  source 1..20: mol_type = other DNA
ttgctatggcgtgatgctgt

SEQ ID NO: 263957 - DNA, 20 bp, synthetic construct
  source 1..20: mol_type = other DNA
gttgctatggcgtgatgctg

SEQ ID NO: 263958 - DNA, 20 bp, synthetic construct
  source 1..20: mol_type = other DNA
tgttgctatggcgtgatgct

SEQ ID NO: 263959 - DNA, 20 bp, synthetic construct
  source 1..20: mol_type = other DNA
gtgttgctatggcgtgatgc

SEQ ID NO: 263960 - DNA, 20 bp, synthetic construct
  source 1..20: mol_type = other DNA
agtgttgctatggcgtgatg

SEQ ID NO: 263961 - DNA, 20 bp, synthetic construct
  source 1..20: mol_type = other DNA
cagtgttgctatggcgtgat

SEQ ID NO: 263962 - DNA, 20 bp, synthetic construct
  source 1..20: mol_type = other DNA
gcagtgttgctatggcgtga

SEQ ID NO: 263963 - DNA, 20 bp, synthetic construct
  source 1..20: mol_type = other DNA
ggcagtgttgctatggcgtg

SEQ ID NO: 263964 - DNA, 20 bp, synthetic construct
  source 1..20: mol_type = other DNA
gggcagtgttgctatggcgt

SEQ ID NO: 263965 - DNA, 20 bp, synthetic construct
  source 1..20: mol_type = other DNA
ggggcagtgttgctatggcg

SEQ ID NO: 263966 - DNA, 20 bp, synthetic construct
  source 1..20: mol_type = other DNA
cggggcagtgttgctatggc

SEQ ID NO: 263967 - DNA, 20 bp, synthetic construct
  source 1..20: mol_type = other DNA
acggggcagtgttgctatgg

SEQ ID NO: 263968 - DNA, 20 bp, synthetic construct
  source 1..20: mol_type = other DNA
cacggggcagtgttgctatg

SEQ ID NO: 263969 - DNA, 20 bp, synthetic construct
  source 1..20: mol_type = other DNA
tcacggggcagtgttgctat

SEQ ID NO: 263970 - DNA, 20 bp, synthetic construct
  source 1..20: mol_type = other DNA
ctcacggggcagtgttgcta

SEQ ID NO: 263971 - DNA, 20 bp, synthetic construct
  source 1..20: mol_type = other DNA
gctcacggggcagtgttgct

SEQ ID NO: 263972 - DNA, 20 bp, synthetic construct
  source 1..20: mol_type = other DNA
agctcacggggcagtgttgc

SEQ ID NO: 263973 - DNA, 20 bp, synthetic construct
  source 1..20: mol_type = other DNA
gagctcacggggcagtgttg

SEQ ID NO: 263974 - DNA, 20 bp, synthetic construct
  source 1..20: mol_type = other DNA
tgagctcacggggcagtgtt

SEQ ID NO: 263975 - DNA, 20 bp, synthetic construct
  source 1..20: mol_type = other DNA
gtgagctcacggggcagtgt

SEQ ID NO: 263976 - DNA, 20 bp, synthetic construct
  source 1..20: mol_type = other DNA
agtgagctcacggggcagtg

SEQ ID NO: 263977 - DNA, 20 bp, synthetic construct
  source 1..20: mol_type = other DNA
cagtgagctcacggggcagt

SEQ ID NO: 263978 - DNA, 20 bp, synthetic construct
  source 1..20: mol_type = other DNA
gcagtgagctcacggggcag

SEQ ID NO: 263979 - DNA, 20 bp, synthetic construct
  source 1..20: mol_type = other DNA
ggcagtgagctcacggggca

SEQ ID NO: 263980 - DNA, 20 bp, synthetic construct
  source 1..20: mol_type = other DNA
gggcagtgagctcacggggc

SEQ ID NO: 263981 - DNA, 20 bp, synthetic construct
  source 1..20: mol_type = other DNA
ggggcagtgagctcacgggg

SEQ ID NO: 263982 - DNA, 20 bp, synthetic construct
  source 1..20: mol_type = other DNA
gggggcagtgagctcacggg

SEQ ID NO: 263983 - DNA, 20 bp, synthetic construct
  source 1..20: mol_type = other DNA
agggggcagtgagctcacgg

SEQ ID NO: 263984 - DNA, 20 bp, synthetic construct
  source 1..20: mol_type = other DNA
gagggggcagtgagctcacg

SEQ ID NO: 263985 - DNA, 20 bp, synthetic construct
  source 1..20: mol_type = other DNA
tgagggggcagtgagctcac

SEQ ID NO: 263986 - DNA, 20 bp, synthetic construct
  source 1..20: mol_type = other DNA
ttgagggggcagtgagctca

SEQ ID NO: 263987 - DNA, 20 bp, synthetic construct
  source 1..20: mol_type = other DNA
gttgagggggcagtgagctc

SEQ ID NO: 263988 - DNA, 20 bp, synthetic construct
  source 1..20: mol_type = other DNA
agttgagggggcagtgagct

SEQ ID NO: 263989 - DNA, 20 bp, synthetic construct
  source 1..20: mol_type = other DNA
tagttgagggggcagtgagc

SEQ ID NO: 263990 - DNA, 20 bp, synthetic construct
  source 1..20: mol_type = other DNA
ctagttgagggggcagtgag

SEQ ID NO: 263991 - DNA, 20 bp, synthetic construct
  source 1..20: mol_type = other DNA
gctagttgagggggcagtga

SEQ ID NO: 263992 - DNA, 20 bp, synthetic construct
  source 1..20: mol_type = other DNA
agctagttgagggggcagtg

SEQ ID NO: 263993 - DNA, 20 bp, synthetic construct
  source 1..20: mol_type = other DNA
aagctagttgagggggcagt

SEQ ID NO: 263994 - DNA, 20 bp, synthetic construct
  source 1..20: mol_type = other DNA
caagctagttgagggggcag

SEQ ID NO: 263995 - DNA, 20 bp, synthetic construct
  source 1..20: mol_type = other DNA
acaagctagttgagggggca

SEQ ID NO: 263996 - DNA, 20 bp, synthetic construct
  source 1..20: mol_type = other DNA
cacaagctagttgagggggc

SEQ ID NO: 263997 - DNA, 20 bp, synthetic construct
  source 1..20: mol_type = other DNA
ccacaagctagttgaggggg

SEQ ID NO: 263998 - DNA, 20 bp, synthetic construct
  source 1..20: mol_type = other DNA
accacaagctagttgagggg

SEQ ID NO: 263999 - DNA, 20 bp, synthetic construct
  source 1..20: mol_type = other DNA
gaccacaagctagttgaggg

SEQ ID NO: 264000 - DNA, 20 bp, synthetic construct
  source 1..20: mol_type = other DNA
ggaccacaagctagttgagg

SEQ ID NO: 264001 - DNA, 20 bp, synthetic construct
  source 1..20: mol_type = other DNA
aggaccacaagctagttgag

SEQ ID NO: 264002 - DNA, 20 bp, synthetic construct
  source 1..20: mol_type = other DNA
aaggaccacaagctagttga

SEQ ID NO: 264003 - DNA, 20 bp, synthetic construct
  source 1..20: mol_type = other DNA
caaggaccacaagctagttg

SEQ ID NO: 264004 - DNA, 20 bp, synthetic construct
  source 1..20: mol_type = other DNA
ccaaggaccacaagctagtt

SEQ ID NO: 264005 - DNA, 20 bp, synthetic construct
  source 1..20: mol_type = other DNA
accaaggaccacaagctagt

SEQ ID NO: 264006 - DNA, 20 bp, synthetic construct
  source 1..20: mol_type = other DNA
aaccaaggaccacaagctag

SEQ ID NO: 264007 - DNA, 20 bp, synthetic construct
  source 1..20: mol_type = other DNA
taaccaaggaccacaagcta

SEQ ID NO: 264008 - DNA, 20 bp, synthetic construct
  source 1..20: mol_type = other DNA
ttaaccaaggaccacaagct

SEQ ID NO: 264009 - DNA, 20 bp, synthetic construct
  source 1..20: mol_type = other DNA
attaaccaaggaccacaagc

SEQ ID NO: 264010 - DNA, 20 bp, synthetic construct
  source 1..20: mol_type = other DNA
cattaaccaaggaccacaag

SEQ ID NO: 264011 - DNA, 20 bp, synthetic construct
  source 1..20: mol_type = other DNA
acattaaccaaggaccacaa

SEQ ID NO: 264012 - DNA, 20 bp, synthetic construct
  source 1..20: mol_type = other DNA
gacattaaccaaggaccaca

SEQ ID NO: 264013 - DNA, 20 bp, synthetic construct
  source 1..20: mol_type = other DNA
tgacattaaccaaggaccac

SEQ ID NO: 264014 - DNA, 20 bp, synthetic construct
  source 1..20: mol_type = other DNA
ctgacattaaccaaggacca

SEQ ID NO: 264015 - DNA, 20 bp, synthetic construct
  source 1..20: mol_type = other DNA
actgacattaaccaaggacc

SEQ ID NO: 264016 - DNA, 20 bp, synthetic construct
  source 1..20: mol_type = other DNA
aactgacattaaccaaggac

SEQ ID NO: 264017 - DNA, 20 bp, synthetic construct
  source 1..20: mol_type = other DNA
aaactgacattaaccaagga

SEQ ID NO: 264018 - DNA, 20 bp, synthetic construct
  source 1..20: mol_type = other DNA
gaaactgacattaaccaagg

SEQ ID NO: 264019 - DNA, 20 bp, synthetic construct
  source 1..20: mol_type = other DNA
agaaactgacattaaccaag

SEQ ID NO: 264020 - DNA, 20 bp, synthetic construct
  source 1..20: mol_type = other DNA
aagaaactgacattaaccaa

SEQ ID NO: 264021 - DNA, 20 bp, synthetic construct
  source 1..20: mol_type = other DNA
aaagaaactgacattaacca

SEQ ID NO: 264022 - DNA, 20 bp, synthetic construct
  source 1..20: mol_type = other DNA
aaaagaaactgacattaacc

SEQ ID NO: 264023 - DNA, 20 bp, synthetic construct
  source 1..20: mol_type = other DNA
aaaaagaaactgacattaac

SEQ ID NO: 264024 - DNA, 20 bp, synthetic construct
  source 1..20: mol_type = other DNA
aaaaaagaaactgacattaa

SEQ ID NO: 264025 - DNA, 20 bp, synthetic construct
  source 1..20: mol_type = other DNA
caaaaaagaaactgacatta

SEQ ID NO: 264026 - DNA, 20 bp, synthetic construct
  source 1..20: mol_type = other DNA
tcaaaaaagaaactgacatt

SEQ ID NO: 264027 - DNA, 20 bp, synthetic construct
  source 1..20: mol_type = other DNA
ctcaaaaaagaaactgacat

SEQ ID NO: 264028 - DNA, 20 bp, synthetic construct
  source 1..20: mol_type = other DNA
actcaaaaaagaaactgaca

SEQ ID NO: 264029 - DNA, 20 bp, synthetic construct
  source 1..20: mol_type = other DNA
aactcaaaaaagaaactgac

SEQ ID NO: 264030 - DNA, 20 bp, synthetic construct
  source 1..20: mol_type = other DNA
aaactcaaaaaagaaactga

SEQ ID NO: 264031 - DNA, 20 bp, synthetic construct
  source 1..20: mol_type = other DNA
caaactcaaaaaagaaactg

SEQ ID NO: 264032 - DNA, 20 bp, synthetic construct
  source 1..20: mol_type = other DNA
acaaactcaaaaaagaaact

SEQ ID NO: 264033 - DNA, 20 bp, synthetic construct
  source 1..20: mol_type = other DNA
cacaaactcaaaaaagaaac

SEQ ID NO: 264034 - DNA, 20 bp, synthetic construct
  source 1..20: mol_type = other DNA
acacaaactcaaaaaagaaa

SEQ ID NO: 264035 - DNA, 20 bp, synthetic construct
  source 1..20: mol_type = other DNA
aacacaaactcaaaaaagaa

SEQ ID NO: 264036 - DNA, 20 bp, synthetic construct
  source 1..20: mol_type = other DNA
taacacaaactcaaaaaaga

SEQ ID NO: 264037 - DNA, 20 bp, synthetic construct
  source 1..20: mol_type = other DNA
ataacacaaactcaaaaaag

SEQ ID NO: 264038 - DNA, 20 bp, synthetic construct
  source 1..20: mol_type = other DNA
cataacacaaactcaaaaaa

SEQ ID NO: 264039 - DNA, 20 bp, synthetic construct
  source 1..20: mol_type = other DNA
acataacacaaactcaaaaa

SEQ ID NO: 264040 - DNA, 20 bp, synthetic construct
  source 1..20: mol_type = other DNA
gacataacacaaactcaaaa

SEQ ID NO: 264041 - DNA, 20 bp, synthetic construct
  source 1..20: mol_type = other DNA
agacataacacaaactcaaa

SEQ ID NO: 264042 - DNA, 20 bp, synthetic construct
  source 1..20: mol_type = other DNA
tagacataacacaaactcaa

SEQ ID NO: 264043 - DNA, 20 bp, synthetic construct
  source 1..20: mol_type = other DNA
ttagacataacacaaactca

SEQ ID NO: 264044 - DNA, 20 bp, synthetic construct
  source 1..20: mol_type = other DNA
cttagacataacacaaactc

SEQ ID NO: 264045 - DNA, 20 bp, synthetic construct
  source 1..20: mol_type = other DNA
ccttagacataacacaaact

SEQ ID NO: 264046 - DNA, 20 bp, synthetic construct
  source 1..20: mol_type = other DNA
cccttagacataacacaaac

SEQ ID NO: 264047 - DNA, 20 bp, synthetic construct
  source 1..20: mol_type = other DNA
acccttagacataacacaaa

SEQ ID NO: 264048 - DNA, 20 bp, synthetic construct
  source 1..20: mol_type = other DNA
gacccttagacataacacaa

SEQ ID NO: 264049 - DNA, 20 bp, synthetic construct
  source 1..20: mol_type = other DNA
tgacccttagacataacaca

SEQ ID NO: 264050 - DNA, 20 bp, synthetic construct
  source 1..20: mol_type = other DNA
atgacccttagacataacac

SEQ ID NO: 264051 - DNA, 20 bp, synthetic construct
  source 1..20: mol_type = other DNA
gatgacccttagacataaca

SEQ ID NO: 264052 - DNA, 20 bp, synthetic construct
  source 1..20: mol_type = other DNA
agatgacccttagacataac

SEQ ID NO: 264053 - DNA, 20 bp, synthetic construct
  source 1..20: mol_type = other DNA
cagatgacccttagacataa

SEQ ID NO: 264054 - DNA, 20 bp, synthetic construct
  source 1..20: mol_type = other DNA
gcagatgacccttagacata

SEQ ID NO: 264055 - DNA, 20 bp, synthetic construct
  source 1..20: mol_type = other DNA
agcagatgacccttagacat

SEQ ID NO: 264056 - DNA, 20 bp, synthetic construct
  source 1..20: mol_type = other DNA
cagcagatgacccttagaca

SEQ ID NO: 264057 - DNA, 20 bp, synthetic construct
  source 1..20: mol_type = other DNA
ccagcagatgacccttagac

SEQ ID NO: 264058 - DNA, 20 bp, synthetic construct
  source 1..20: mol_type = other DNA
cccagcagatgacccttaga

SEQ ID NO: 264059 - DNA, 20 bp, synthetic construct
  source 1..20: mol_type = other DNA
acccagcagatgacccttag

SEQ ID NO: 264060 - DNA, 20 bp, synthetic construct
  source 1..20: mol_type = other DNA
tacccagcagatgaccctta

SEQ ID NO: 264061 - DNA, 20 bp, synthetic construct
  source 1..20: mol_type = other DNA
ttacccagcagatgaccctt

SEQ ID NO: 264062 - DNA, 20 bp, synthetic construct
  source 1..20: mol_type = other DNA
gttacccagcagatgaccct

SEQ ID NO: 264063 - DNA, 20 bp, synthetic construct
  source 1..20: mol_type = other DNA
cgttacccagcagatgaccc

SEQ ID NO: 264064 - DNA, 20 bp, synthetic construct
  source 1..20: mol_type = other DNA
ccgttacccagcagatgacc

SEQ ID NO: 264065 - DNA, 20 bp, synthetic construct
  source 1..20: mol_type = other DNA
tccgttacccagcagatgac

SEQ ID NO: 264066 - DNA, 20 bp, synthetic construct
  source 1..20: mol_type = other DNA
ttccgttacccagcagatga

SEQ ID NO: 264067 - DNA, 20 bp, synthetic construct
  source 1..20: mol_type = other DNA
gttccgttacccagcagatg

SEQ ID NO: 264068 - DNA, 20 bp, synthetic construct
  source 1..20: mol_type = other DNA
ggttccgttacccagcagat

SEQ ID NO: 264069 - DNA, 20 bp, synthetic construct
  source 1..20: mol_type = other DNA
gggttccgttacccagcaga

SEQ ID NO: 264070 - DNA, 20 bp, synthetic construct
  source 1..20: mol_type = other DNA
tgggttccgttacccagcag

SEQ ID NO: 264071 - DNA, 20 bp, synthetic construct
  source 1..20: mol_type = other DNA
ctgggttccgttacccagca

SEQ ID NO: 264072 - DNA, 20 bp, synthetic construct
  source 1..20: mol_type = other DNA
cctgggttccgttacccagc

SEQ ID NO: 264073 - DNA, 20 bp, synthetic construct
  source 1..20: mol_type = other DNA
ccctgggttccgttacccag

SEQ ID NO: 264074 - DNA, 20 bp, synthetic construct
  source 1..20: mol_type = other DNA
tccctgggttccgttaccca

SEQ ID NO: 264075 - DNA, 20 bp, synthetic construct
  source 1..20: mol_type = other DNA
gtccctgggttccgttaccc

SEQ ID NO: 264076 - DNA, 20 bp, synthetic construct
  source 1..20: mol_type = other DNA
agtccctgggttccgttacc

SEQ ID NO: 264077 - DNA, 20 bp, synthetic construct
  source 1..20: mol_type = other DNA
cagtccctgggttccgttac

SEQ ID NO: 264078 - DNA, 20 bp, synthetic construct
  source 1..20: mol_type = other DNA
gcagtccctgggttccgtta

SEQ ID NO: 264079 - DNA, 20 bp, synthetic construct
  source 1..20: mol_type = other DNA
ggcagtccctgggttccgtt

SEQ ID NO: 264080 - DNA, 20 bp, synthetic construct
  source 1..20: mol_type = other DNA
gggcagtccctgggttccgt

SEQ ID NO: 264081 - DNA, 20 bp, synthetic construct
  source 1..20: mol_type = other DNA
agggcagtccctgggttccg

SEQ ID NO: 264082 - DNA, 20 bp, synthetic construct
  source 1..20: mol_type = other DNA
tagggcagtccctgggttcc

SEQ ID NO: 264083 - DNA, 20 bp, synthetic construct
  source 1..20: mol_type = other DNA
ctagggcagtccctgggttc

SEQ ID NO: 264084 - DNA, 20 bp, synthetic construct
  source 1..20: mol_type = other DNA
actagggcagtccctgggtt

SEQ ID NO: 264085 - DNA, 20 bp, synthetic construct
  source 1..20: mol_type = other DNA
gactagggcagtccctgggt

SEQ ID NO: 264086 - DNA, 20 bp, synthetic construct
  source 1..20: mol_type = other DNA
ggactagggcagtccctggg

SEQ ID NO: 264087 - DNA, 20 bp, synthetic construct
  source 1..20: mol_type = other DNA
gggactagggcagtccctgg

SEQ ID NO: 264088 - DNA, 20 bp, synthetic construct
  source 1..20: mol_type = other DNA
agggactagggcagtccctg

SEQ ID NO: 264089 - DNA, 20 bp, synthetic construct
  source 1..20: mol_type = other DNA
tagggactagggcagtccct

SEQ ID NO: 264090 - DNA, 20 bp, synthetic construct
  source 1..20: mol_type = other DNA
ctagggactagggcagtccc

SEQ ID NO: 264091 - DNA, 20 bp, synthetic construct
  source 1..20: mol_type = other DNA
tctagggactagggcagtcc

SEQ ID NO: 264092 - DNA, 20 bp, synthetic construct
  source 1..20: mol_type = other DNA
gtctagggactagggcagtc

SEQ ID NO: 264093 - DNA, 20 bp, synthetic construct
  source 1..20: mol_type = other DNA
agtctagggactagggcagt

SEQ ID NO: 264094 - DNA, 20 bp, synthetic construct
  source 1..20: mol_type = other DNA
cagtctagggactagggcag

SEQ ID NO: 264095 - DNA, 20 bp, synthetic construct
  source 1..20: mol_type = other DNA
acagtctagggactagggca

SEQ ID NO: 264096 - DNA, 20 bp, synthetic construct
  source 1..20: mol_type = other DNA
cacagtctagggactagggc

SEQ ID NO: 264097 - DNA, 20 bp, synthetic construct
  source 1..20: mol_type = other DNA
gcacagtctagggactaggg

SEQ ID NO: 264098 - DNA, 20 bp, synthetic construct
  source 1..20: mol_type = other DNA
ggcacagtctagggactagg

SEQ ID NO: 264099 - DNA, 20 bp, synthetic construct
  source 1..20: mol_type = other DNA
tggcacagtctagggactag

SEQ ID NO: 264100 - DNA, 20 bp, synthetic construct
  source 1..20: mol_type = other DNA
atggcacagtctagggacta

SEQ ID NO: 264101 - DNA, 20 bp, synthetic construct
  source 1..20: mol_type = other DNA
catggcacagtctagggact

SEQ ID NO: 264102 - DNA, 20 bp, synthetic construct
  source 1..20: mol_type = other DNA
gcatggcacagtctagggac

SEQ ID NO: 264103 - DNA, 20 bp, synthetic construct
  source 1..20: mol_type = other DNA
ggcatggcacagtctaggga

SEQ ID NO: 264104 - DNA, 20 bp, synthetic construct
  source 1..20: mol_type = other DNA
gggcatggcacagtctaggg

SEQ ID NO: 264105 - DNA, 20 bp, synthetic construct
  source 1..20: mol_type = other DNA
cgggcatggcacagtctagg

SEQ ID NO: 264106 - DNA, 20 bp, synthetic construct
  source 1..20: mol_type = other DNA
tcgggcatggcacagtctag

SEQ ID NO: 264107 - DNA, 20 bp, synthetic construct
  source 1..20: mol_type = other DNA
gtcgggcatggcacagtcta

SEQ ID NO: 264108 - DNA, 20 bp, synthetic construct
  source 1..20: mol_type = other DNA
agtcgggcatggcacagtct

SEQ ID NO: 264109 - DNA, 20 bp, synthetic construct
  source 1..20: mol_type = other DNA
gagtcgggcatggcacagtc

SEQ ID NO: 264110 - DNA, 20 bp, synthetic construct
  source 1..20: mol_type = other DNA
agagtcgggcatggcacagt

SEQ ID NO: 264111 - DNA, 20 bp, synthetic construct
  source 1..20: mol_type = other DNA
cagagtcgggcatggcacag

SEQ ID NO: 264112 - DNA, 20 bp, synthetic construct
  source 1..20: mol_type = other DNA
gcagagtcgggcatggcaca

SEQ ID NO: 264113 - DNA, 20 bp, synthetic construct
  source 1..20: mol_type = other DNA
ggcagagtcgggcatggcac

SEQ ID NO: 264114 - DNA, 20 bp, synthetic construct
  source 1..20: mol_type = other DNA
tggcagagtcgggcatggca

SEQ ID NO: 264115 - DNA, 20 bp, synthetic construct
  source 1..20: mol_type = other DNA
ctggcagagtcgggcatggc

SEQ ID NO: 264116 - DNA, 20 bp, synthetic construct
  source 1..20: mol_type = other DNA
gctggcagagtcgggcatgg

SEQ ID NO: 264117 - DNA, 20 bp, synthetic construct
  source 1..20: mol_type = other DNA
agctggcagagtcgggcatg

SEQ ID NO: 264118 - DNA, 20 bp, synthetic construct
  source 1..20: mol_type = other DNA
aagctggcagagtcgggcat

SEQ ID NO: 264119 - DNA, 20 bp, synthetic construct
  source 1..20: mol_type = other DNA
aaagctggcagagtcgggca

SEQ ID NO: 264120 - DNA, 20 bp, synthetic construct
  source 1..20: mol_type = other DNA
caaagctggcagagtcgggc

SEQ ID NO: 264121 - DNA, 20 bp, synthetic construct
  source 1..20: mol_type = other DNA
acaaagctggcagagtcggg

SEQ ID NO: 264122 - DNA, 20 bp, synthetic construct
  source 1..20: mol_type = other DNA
gacaaagctggcagagtcgg

SEQ ID NO: 264123 - DNA, 20 bp, synthetic construct
  source 1..20: mol_type = other DNA
tgacaaagctggcagagtcg

SEQ ID NO: 264124 - DNA, 20 bp, synthetic construct
  source 1..20: mol_type = other DNA
ctgacaaagctggcagagtc

SEQ ID NO: 264125 - DNA, 20 bp, synthetic construct
  source 1..20: mol_type = other DNA
actgacaaagctggcagagt

SEQ ID NO: 264126 - DNA, 20 bp, synthetic construct
  source 1..20: mol_type = other DNA
cactgacaaagctggcagag

SEQ ID NO: 264127 - DNA, 20 bp, synthetic construct
  source 1..20: mol_type = other DNA
tcactgacaaagctggcaga

SEQ ID NO: 264128 - DNA, 20 bp, synthetic construct
  source 1..20: mol_type = other DNA
atcactgacaaagctggcag

SEQ ID NO: 264129 - DNA, 20 bp, synthetic construct
  source 1..20: mol_type = other DNA
catcactgacaaagctggca

SEQ ID NO: 264130 - DNA, 20 bp, synthetic construct
  source 1..20: mol_type = other DNA
gcatcactgacaaagctggc

SEQ ID NO: 264131 - DNA, 20 bp, synthetic construct
  source 1..20: mol_type = other DNA
agcatcactgacaaagctgg

SEQ ID NO: 264132 - DNA, 20 bp, synthetic construct
  source 1..20: mol_type = other DNA
cagcatcactgacaaagctg

SEQ ID NO: 264133 - DNA, 20 bp, synthetic construct
  source 1..20: mol_type = other DNA
ccagcatcactgacaaagct

SEQ ID NO: 264134 - DNA, 20 bp, synthetic construct
  source 1..20: mol_type = other DNA
accagcatcactgacaaagc

SEQ ID NO: 264135 - DNA, 20 bp, synthetic construct
  source 1..20: mol_type = other DNA
caccagcatcactgacaaag

SEQ ID NO: 264136 - DNA, 20 bp, synthetic construct
  source 1..20: mol_type = other DNA
gcaccagcatcactgacaaa

SEQ ID NO: 264137 - DNA, 20 bp, synthetic construct
  source 1..20: mol_type = other DNA
agcaccagcatcactgacaa

SEQ ID NO: 264138 - DNA, 20 bp, synthetic construct
  source 1..20: mol_type = other DNA
gagcaccagcatcactgaca

SEQ ID NO: 264139 - DNA, 20 bp, synthetic construct
  source 1..20: mol_type = other DNA
cgagcaccagcatcactgac

SEQ ID NO: 264140 - DNA, 20 bp, synthetic construct
  source 1..20: mol_type = other DNA
gcgagcaccagcatcactga

SEQ ID NO: 264141 - DNA, 20 bp, synthetic construct
  source 1..20: mol_type = other DNA
ggcgagcaccagcatcactg

SEQ ID NO: 264142 - DNA, 20 bp, synthetic construct
  source 1..20: mol_type = other DNA
aggcgagcaccagcatcact

SEQ ID NO: 264143 - DNA, 20 bp, synthetic construct
  source 1..20: mol_type = other DNA
gaggcgagcaccagcatcac

SEQ ID NO: 264144 - DNA, 20 bp, synthetic construct
  source 1..20: mol_type = other DNA
ggaggcgagcaccagcatca

SEQ ID NO: 264145 - DNA, 20 bp, synthetic construct
  source 1..20: mol_type = other DNA
aggaggcgagcaccagcatc

SEQ ID NO: 264146 - DNA, 20 bp, synthetic construct
  source 1..20: mol_type = other DNA
gaggaggcgagcaccagcat

SEQ ID NO: 264147 - DNA, 20 bp, synthetic construct
  source 1..20: mol_type = other DNA
cgaggaggcgagcaccagca

SEQ ID NO: 264148 - DNA, 20 bp, synthetic construct
  source 1..20: mol_type = other DNA
ccgaggaggcgagcaccagc

SEQ ID NO: 264149 - DNA, 20 bp, synthetic construct
  source 1..20: mol_type = other DNA
cccgaggaggcgagcaccag

SEQ ID NO: 264150 - DNA, 20 bp, synthetic construct
  source 1..20: mol_type = other DNA
acccgaggaggcgagcacca

SEQ ID NO: 264151 - DNA, 20 bp, synthetic construct
  source 1..20: mol_type = other DNA
cacccgaggaggcgagcacc

SEQ ID NO: 264152 - DNA, 20 bp, synthetic construct
  source 1..20: mol_type = other DNA
gcacccgaggaggcgagcac

SEQ ID NO: 264153 - DNA, 20 bp, synthetic construct
  source 1..20: mol_type = other DNA
agcacccgaggaggcgagca

SEQ ID NO: 264154 - DNA, 20 bp, synthetic construct
  source 1..20: mol_type = other DNA
gagcacccgaggaggcgagc

SEQ ID NO: 264155 - DNA, 20 bp, synthetic construct
  source 1..20: mol_type = other DNA
cgagcacccgaggaggcgag

SEQ ID NO: 264156 - DNA, 20 bp, synthetic construct
  source 1..20: mol_type = other DNA
gcgagcacccgaggaggcga

SEQ ID NO: 264157 - DNA, 20 bp, synthetic construct
  source 1..20: mol_type = other DNA
ggcgagcacccgaggaggcg

SEQ ID NO: 264158 - DNA, 20 bp, synthetic construct
  source 1..20: mol_type = other DNA
aggcgagcacccgaggaggc

SEQ ID NO: 264159 - DNA, 20 bp, synthetic construct
  source 1..20: mol_type = other DNA
caggcgagcacccgaggagg

SEQ ID NO: 264160 - DNA, 20 bp, synthetic construct
  source 1..20: mol_type = other DNA
ccaggcgagcacccgaggag

SEQ ID NO: 264161 - DNA, 20 bp, synthetic construct
  source 1..20: mol_type = other DNA
accaggcgagcacccgagga

SEQ ID NO: 264162 - DNA, 20 bp, synthetic construct
  source 1..20: mol_type = other DNA
gaccaggcgagcacccgagg

SEQ ID NO: 264163 - DNA, 20 bp, synthetic construct
  source 1..20: mol_type = other DNA
agaccaggcgagcacccgag

SEQ ID NO: 264164 - DNA, 20 bp, synthetic construct
  source 1..20: mol_type = other DNA
cagaccaggcgagcacccga

SEQ ID NO: 264165 - DNA, 20 bp, synthetic construct
  source 1..20: mol_type = other DNA
tcagaccaggcgagcacccg

SEQ ID NO: 264166 - DNA, 20 bp, synthetic construct
  source 1..20: mol_type = other DNA
ctcagaccaggcgagcaccc

SEQ ID NO: 264167 - DNA, 20 bp, synthetic construct
  source 1..20: mol_type = other DNA
gctcagaccaggcgagcacc

SEQ ID NO: 264168 - DNA, 20 bp, synthetic construct
  source 1..20: mol_type = other DNA
tgctcagaccaggcgagcac

SEQ ID NO: 264169 - DNA, 20 bp, synthetic construct
  source 1..20: mol_type = other DNA
gtgctcagaccaggcgagca

SEQ ID NO: 264170 - DNA, 20 bp, synthetic construct
  source 1..20: mol_type = other DNA
tgtgctcagaccaggcgagc

SEQ ID NO: 264171 - DNA, 20 bp, synthetic construct
  source 1..20: mol_type = other DNA
gtgtgctcagaccaggcgag

SEQ ID NO: 264172 - DNA, 20 bp, synthetic construct
  source 1..20: mol_type = other DNA
ggtgtgctcagaccaggcga

SEQ ID NO: 264173 - DNA, 20 bp, synthetic construct
  source 1..20: mol_type = other DNA
gggtgtgctcagaccaggcg

SEQ ID NO: 264174 - DNA, 20 bp, synthetic construct
  source 1..20: mol_type = other DNA
tgggtgtgctcagaccaggc

SEQ ID NO: 264175 - DNA, 20 bp, synthetic construct
  source 1..20: mol_type = other DNA
ttgggtgtgctcagaccagg

SEQ ID NO: 264176 - DNA, 20 bp, synthetic construct
  source 1..20: mol_type = other DNA
cttgggtgtgctcagaccag

SEQ ID NO: 264177 - DNA, 20 bp, synthetic construct
  source 1..20: mol_type = other DNA
ccttgggtgtgctcagacca

SEQ ID NO: 264178 - DNA, 20 bp, synthetic construct
  source 1..20: mol_type = other DNA
tccttgggtgtgctcagacc

SEQ ID NO: 264179 - DNA, 20 bp, synthetic construct
  source 1..20: mol_type = other DNA
ctccttgggtgtgctcagac

SEQ ID NO: 264180 - DNA, 20 bp, synthetic construct
  source 1..20: mol_type = other DNA
actccttgggtgtgctcaga

SEQ ID NO: 264181 - DNA, 20 bp, synthetic construct
  source 1..20: mol_type = other DNA
aactccttgggtgtgctcag

SEQ ID NO: 264182 - DNA, 20 bp, synthetic construct
  source 1..20: mol_type = other DNA
gaactccttgggtgtgctca

SEQ ID NO: 264183 - DNA, 20 bp, synthetic construct
  source 1..20: mol_type = other DNA
agaactccttgggtgtgctc

SEQ ID NO: 264184 - DNA, 20 bp, synthetic construct
  source 1..20: mol_type = other DNA
aagaactccttgggtgtgct

SEQ ID NO: 264185 - DNA, 20 bp, synthetic construct
  source 1..20: mol_type = other DNA
caagaactccttgggtgtgc

SEQ ID NO: 264186 - DNA, 20 bp, synthetic construct
  source 1..20: mol_type = other DNA
tcaagaactccttgggtgtg

SEQ ID NO: 264187 - DNA, 20 bp, synthetic construct
  source 1..20: mol_type = other DNA
ctcaagaactccttgggtgt

SEQ ID NO: 264188 - DNA, 20 bp, synthetic construct
  source 1..20: mol_type = other DNA
cctcaagaactccttgggtg

SEQ ID NO: 264189 - DNA, 20 bp, synthetic construct
  source 1..20: mol_type = other DNA
gcctcaagaactccttgggt

SEQ ID NO: 264190 - DNA, 20 bp, synthetic construct
  source 1..20: mol_type = other DNA
ggcctcaagaactccttggg

SEQ ID NO: 264191 - DNA, 20 bp, synthetic construct
  source 1..20: mol_type = other DNA
aggcctcaagaactccttgg

SEQ ID NO: 264192 - DNA, 20 bp, synthetic construct
  source 1..20: mol_type = other DNA
aaggcctcaagaactccttg

SEQ ID NO: 264193 - DNA, 20 bp, synthetic construct
  source 1..20: mol_type = other DNA
taaggcctcaagaactcctt

SEQ ID NO: 264194 - DNA, 20 bp, synthetic construct
  source 1..20: mol_type = other DNA
ctaaggcctcaagaactcct

SEQ ID NO: 264195 - DNA, 20 bp, synthetic construct
  source 1..20: mol_type = other DNA
cctaaggcctcaagaactcc

SEQ ID NO: 264196 - DNA, 20 bp, synthetic construct
  source 1..20: mol_type = other DNA
ccctaaggcctcaagaactc

SEQ ID NO: 264197 - DNA, 20 bp, synthetic construct
  source 1..20: mol_type = other DNA
accctaaggcctcaagaact

SEQ ID NO: 264198 - DNA, 20 bp, synthetic construct
  source 1..20: mol_type = other DNA
aaccctaaggcctcaagaac

SEQ ID NO: 264199 - DNA, 20 bp, synthetic construct
  source 1..20: mol_type = other DNA
caaccctaaggcctcaagaa

SEQ ID NO: 264200 - DNA, 20 bp, synthetic construct
  source 1..20: mol_type = other DNA
acaaccctaaggcctcaaga

SEQ ID NO: 264201 - DNA, 20 bp, synthetic construct
  source 1..20: mol_type = other DNA
aacaaccctaaggcctcaag

SEQ ID NO: 264202 - DNA, 20 bp, synthetic construct
  source 1..20: mol_type = other DNA
aaacaaccctaaggcctcaa

SEQ ID NO: 264203 - DNA, 20 bp, synthetic construct
  source 1..20: mol_type = other DNA
caaacaaccctaaggcctca

SEQ ID NO: 264204 - DNA, 20 bp, synthetic construct
  source 1..20: mol_type = other DNA
gcaaacaaccctaaggcctc

SEQ ID NO: 264205 - DNA, 20 bp, synthetic construct
  source 1..20: mol_type = other DNA
cgcaaacaaccctaaggcct

SEQ ID NO: 264206 - DNA, 20 bp, synthetic construct
  source 1..20: mol_type = other DNA
tcgcaaacaaccctaaggcc

SEQ ID NO: 264207 - DNA, 20 bp, synthetic construct
  source 1..20: mol_type = other DNA
ctcgcaaacaaccctaaggc

SEQ ID NO: 264208 - DNA, 20 bp, synthetic construct
  source 1..20: mol_type = other DNA
tctcgcaaacaaccctaagg

SEQ ID NO: 264209 - DNA, 20 bp, synthetic construct
  source 1..20: mol_type = other DNA
ctctcgcaaacaaccctaag

SEQ ID NO: 264210 - DNA, 20 bp, synthetic construct
  source 1..20: mol_type = other DNA
tctctcgcaaacaaccctaa

SEQ ID NO: 264211 - DNA, 20 bp, synthetic construct
  source 1..20: mol_type = other DNA
ttctctcgcaaacaacccta

SEQ ID NO: 264212 - DNA, 20 bp, synthetic construct
  source 1..20: mol_type = other DNA
attctctcgcaaacaaccct

SEQ ID NO: 264213 - DNA, 20 bp, synthetic construct
  source 1..20: mol_type = other DNA
cattctctcgcaaacaaccc

SEQ ID NO: 264214 - DNA, 20 bp, synthetic construct
  source 1..20: mol_type = other DNA
tcattctctcgcaaacaacc

SEQ ID NO: 264215 - DNA, 20 bp, synthetic construct
  source 1..20: mol_type = other DNA
ttcattctctcgcaaacaac

SEQ ID NO: 264216 - DNA, 20 bp, synthetic construct
  source 1..20: mol_type = other DNA
tttcattctctcgcaaacaa

SEQ ID NO: 264217 - DNA, 20 bp, synthetic construct
  source 1..20: mol_type = other DNA
ctttcattctctcgcaaaca

SEQ ID NO: 264218 - DNA, 20 bp, synthetic construct
  source 1..20: mol_type = other DNA
tctttcattctctcgcaaac

SEQ ID NO: 264219 - DNA, 20 bp, synthetic construct
  source 1..20: mol_type = other DNA
ttctttcattctctcgcaaa

SEQ ID NO: 264220 - DNA, 20 bp, synthetic construct
  source 1..20: mol_type = other DNA
gttctttcattctctcgcaa

SEQ ID NO: 264221 - DNA, 20 bp, synthetic construct
  source 1..20: mol_type = other DNA
tgttctttcattctctcgca

SEQ ID NO: 264222 - DNA, 20 bp, synthetic construct
  source 1..20: mol_type = other DNA
gtgttctttcattctctcgc

SEQ ID NO: 264223 - DNA, 20 bp, synthetic construct
  source 1..20: mol_type = other DNA
cgtgttctttcattctctcg

SEQ ID NO: 264224 - DNA, 20 bp, synthetic construct
  source 1..20: mol_type = other DNA
tcgtgttctttcattctctc

SEQ ID NO: 264225 - DNA, 20 bp, synthetic construct
  source 1..20: mol_type = other DNA
gtcgtgttctttcattctct

SEQ ID NO: 264226 - DNA, 20 bp, synthetic construct
  source 1..20: mol_type = other DNA
ggtcgtgttctttcattctc

SEQ ID NO: 264227 - DNA, 20 bp, synthetic construct
  source 1..20: mol_type = other DNA
aggtcgtgttctttcattct

SEQ ID NO: 264228 - DNA, 20 bp, synthetic construct
  source 1..20: mol_type = other DNA
taggtcgtgttctttcattc

SEQ ID NO: 264229 - DNA, 20 bp, synthetic construct
  source 1..20: mol_type = other DNA
ctaggtcgtgttctttcatt

SEQ ID NO: 264230 - DNA, 20 bp, synthetic construct
  source 1..20: mol_type = other DNA
gctaggtcgtgttctttcat

SEQ ID NO: 264231 - DNA, 20 bp, synthetic construct
  source 1..20: mol_type = other DNA
agctaggtcgtgttctttca

SEQ ID NO: 264232 - DNA, 20 bp, synthetic construct
  source 1..20: mol_type = other DNA
gagctaggtcgtgttctttc

SEQ ID NO: 264233 - DNA, 20 bp, synthetic construct
  source 1..20: mol_type = other DNA
agagctaggtcgtgttcttt

SEQ ID NO: 264234 - DNA, 20 bp, synthetic construct
  source 1..20: mol_type = other DNA
gagagctaggtcgtgttctt

SEQ ID NO: 264235 - DNA, 20 bp, synthetic construct
  source 1..20: mol_type = other DNA
agagagctaggtcgtgttct

SEQ ID NO: 264236 - DNA, 20 bp, synthetic construct
  source 1..20: mol_type = other DNA
aagagagctaggtcgtgttc

SEQ ID NO: 264237 - DNA, 20 bp, synthetic construct
  source 1..20: mol_type = other DNA
aaagagagctaggtcgtgtt

SEQ ID NO: 264238 - DNA, 20 bp, synthetic construct
  source 1..20: mol_type = other DNA
taaagagagctaggtcgtgt

SEQ ID NO: 264239 - DNA, 20 bp, synthetic construct
  source 1..20: mol_type = other DNA
ctaaagagagctaggtcgtg

SEQ ID NO: 264240 - DNA, 20 bp, synthetic construct
  source 1..20: mol_type = other DNA
gctaaagagagctaggtcgt

SEQ ID NO: 264241 - DNA, 20 bp, synthetic construct
  source 1..20: mol_type = other DNA
tgctaaagagagctaggtcg

SEQ ID NO: 264242 - DNA, 20 bp, synthetic construct
  source 1..20: mol_type = other DNA
atgctaaagagagctaggtc

SEQ ID NO: 264243 - DNA, 20 bp, synthetic construct
  source 1..20: mol_type = other DNA
gatgctaaagagagctaggt

SEQ ID NO: 264244 - DNA, 20 bp, synthetic construct
  source 1..20: mol_type = other DNA
ggatgctaaagagagctagg

SEQ ID NO: 264245 - DNA, 20 bp, synthetic construct
  source 1..20: mol_type = other DNA
aggatgctaaagagagctag

SEQ ID NO: 264246 - DNA, 20 bp, synthetic construct
  source 1..20: mol_type = other DNA
aaggatgctaaagagagcta

SEQ ID NO: 264247 - DNA, 20 bp, synthetic construct
  source 1..20: mol_type = other DNA
caaggatgctaaagagagct

SEQ ID NO: 264248 - DNA, 20 bp, synthetic construct
  source 1..20: mol_type = other DNA
ccaaggatgctaaagagagc

SEQ ID NO: 264249 - DNA, 20 bp, synthetic construct
  source 1..20: mol_type = other DNA
accaaggatgctaaagagag

SEQ ID NO: 264250 - DNA, 20 bp, synthetic construct
  source 1..20: mol_type = other DNA
gaccaaggatgctaaagaga

SEQ ID NO: 264251 - DNA, 20 bp, synthetic construct
  source 1..20: mol_type = other DNA
tgaccaaggatgctaaagag

SEQ ID NO: 264252 - DNA, 20 bp, synthetic construct
  source 1..20: mol_type = other DNA
ctgaccaaggatgctaaaga

SEQ ID NO: 264253 - DNA, 20 bp, synthetic construct
  source 1..20: mol_type = other DNA
cctgaccaaggatgctaaag

SEQ ID NO: 264254 - DNA, 20 bp, synthetic construct
  source 1..20: mol_type = other DNA
acctgaccaaggatgctaaa

SEQ ID NO: 264255 - DNA, 20 bp, synthetic construct
  source 1..20: mol_type = other DNA
aacctgaccaaggatgctaa

SEQ ID NO: 264256 - DNA, 20 bp, synthetic construct
  source 1..20: mol_type = other DNA
gaacctgaccaaggatgcta

SEQ ID NO: 264257 - DNA, 20 bp, synthetic construct
  source 1..20: mol_type = other DNA
tgaacctgaccaaggatgct

SEQ ID NO: 264258 - DNA, 20 bp, synthetic construct
  source 1..20: mol_type = other DNA
ttgaacctgaccaaggatgc

SEQ ID NO: 264259 - DNA, 20 bp, synthetic construct
  source 1..20: mol_type = other DNA
gttgaacctgaccaaggatg

SEQ ID NO: 264260 - DNA, 20 bp, synthetic construct
  source 1..20: mol_type = other DNA
tgttgaacctgaccaaggat

SEQ ID NO: 264261 - DNA, 20 bp, synthetic construct
  source 1..20: mol_type = other DNA
gtgttgaacctgaccaagga

SEQ ID NO: 264262 - DNA, 20 bp, synthetic construct
  source 1..20: mol_type = other DNA
agtgttgaacctgaccaagg

SEQ ID NO: 264263 - DNA, 20 bp, synthetic construct
  source 1..20: mol_type = other DNA
cagtgttgaacctgaccaag

SEQ ID NO: 264264 - DNA, 20 bp, synthetic construct
  source 1..20: mol_type = other DNA
gcagtgttgaacctgaccaa

SEQ ID NO: 264265 - DNA, 20 bp, synthetic construct
  source 1..20: mol_type = other DNA
ggcagtgttgaacctgacca

SEQ ID NO: 264266 - DNA, 20 bp, synthetic construct
  source 1..20: mol_type = other DNA
gggcagtgttgaacctgacc

SEQ ID NO: 264267 - DNA, 20 bp, synthetic construct
  source 1..20: mol_type = other DNA
ggggcagtgttgaacctgac

SEQ ID NO: 264268 - DNA, 20 bp, synthetic construct
  source 1..20: mol_type = other DNA
gggggcagtgttgaacctga

SEQ ID NO: 264269 - DNA, 20 bp, synthetic construct
  source 1..20: mol_type = other DNA
tgggggcagtgttgaacctg

SEQ ID NO: 264270 - DNA, 20 bp, synthetic construct
  source 1..20: mol_type = other DNA
ctgggggcagtgttgaacct

SEQ ID NO: 264271 - DNA, 20 bp, synthetic construct
  source 1..20: mol_type = other DNA
cctgggggcagtgttgaacc

SEQ ID NO: 264272 - DNA, 20 bp, synthetic construct
  source 1..20: mol_type = other DNA
ccctgggggcagtgttgaac

SEQ ID NO: 264273 - DNA, 20 bp, synthetic construct
  source 1..20: mol_type = other DNA
cccctgggggcagtgttgaa

SEQ ID NO: 264274 - DNA, 20 bp, synthetic construct
  source 1..20: mol_type = other DNA
gcccctgggggcagtgttga

SEQ ID NO: 264275 - DNA, 20 bp, synthetic construct
  source 1..20: mol_type = other DNA
ggcccctgggggcagtgttg

SEQ ID NO: 264276 - DNA, 20 bp, synthetic construct
  source 1..20: mol_type = other DNA
aggcccctgggggcagtgtt

SEQ ID NO: 264277 - DNA, 20 bp, synthetic construct
  source 1..20: mol_type = other DNA
gaggcccctgggggcagtgt

SEQ ID NO: 264278 - DNA, 20 bp, synthetic construct
  source 1..20: mol_type = other DNA
agaggcccctgggggcagtg

SEQ ID NO: 264279 - DNA, 20 bp, synthetic construct
  source 1..20: mol_type = other DNA
cagaggcccctgggggcagt

SEQ ID NO: 264280 - DNA, 20 bp, synthetic construct
  source 1..20: mol_type = other DNA
ccagaggcccctgggggcag

SEQ ID NO: 264281 - DNA, 20 bp, synthetic construct
  source 1..20: mol_type = other DNA
accagaggcccctgggggca

SEQ ID NO: 264282 - DNA, 20 bp, synthetic construct
  source 1..20: mol_type = other DNA
caccagaggcccctgggggc

SEQ ID NO: 264283 - DNA, 20 bp, synthetic construct
  source 1..20: mol_type = other DNA
ccaccagaggcccctggggg

SEQ ID NO: 264284 - DNA, 20 bp, synthetic construct
  source 1..20: mol_type = other DNA
tccaccagaggcccctgggg

SEQ ID NO: 264285 - DNA, 20 bp, synthetic construct
  source 1..20: mol_type = other DNA
ctccaccagaggcccctggg

SEQ ID NO: 264286 - DNA, 20 bp, synthetic construct
  source 1..20: mol_type = other DNA
gctccaccagaggcccctgg

SEQ ID NO: 264287 - DNA, 20 bp, synthetic construct
  source 1..20: mol_type = other DNA
ggctccaccagaggcccctg

SEQ ID NO: 264288 - DNA, 20 bp, synthetic construct
  source 1..20: mol_type = other DNA
tggctccaccagaggcccct

SEQ ID NO: 264289 - DNA, 20 bp, synthetic construct
  source 1..20: mol_type = other DNA
ttggctccaccagaggcccc

SEQ ID NO: 264290 - DNA, 20 bp, synthetic construct
  source 1..20: mol_type = other DNA
gttggctccaccagaggccc

SEQ ID NO: 264291 - DNA, 20 bp, synthetic construct
  source 1..20: mol_type = other DNA
ggttggctccaccagaggcc

SEQ ID NO: 264292 - DNA, 20 bp, synthetic construct
  source 1..20: mol_type = other DNA
tggttggctccaccagaggc

SEQ ID NO: 264293 - DNA, 20 bp, synthetic construct
  source 1..20: mol_type = other DNA
gtggttggctccaccagagg

SEQ ID NO: 264294 - DNA, 20 bp, synthetic construct
  source 1..20: mol_type = other DNA
ggtggttggctccaccagag

SEQ ID NO: 264295 - DNA, 20 bp, synthetic construct
  source 1..20: mol_type = other DNA
tggtggttggctccaccaga

SEQ ID NO: 264296 - DNA, 20 bp, synthetic construct
  source 1..20: mol_type = other DNA
atggtggttggctccaccag

SEQ ID NO: 264297 - DNA, 20 bp, synthetic construct
  source 1..20: mol_type = other DNA
gatggtggttggctccacca

SEQ ID NO: 264298 - DNA, 20 bp, synthetic construct
  source 1..20: mol_type = other DNA
tgatggtggttggctccacc

SEQ ID NO: 264299 - DNA, 20 bp, synthetic construct
  source 1..20: mol_type = other DNA
ctgatggtggttggctccac

SEQ ID NO: 264300 - DNA, 20 bp, synthetic construct
  source 1..20: mol_type = other DNA
gctgatggtggttggctcca

SEQ ID NO: 264301 - DNA, 20 bp, synthetic construct
  source 1..20: mol_type = other DNA
ggctgatggtggttggctcc

SEQ ID NO: 264302 - DNA, 20 bp, synthetic construct
  source 1..20: mol_type = other DNA
tggctgatggtggttggctc

SEQ ID NO: 264303 - DNA, 20 bp, synthetic construct
  source 1..20: mol_type = other DNA
ttggctgatggtggttggct

SEQ ID NO: 264304 - DNA, 20 bp, synthetic construct
  source 1..20: mol_type = other DNA
tttggctgatggtggttggc

SEQ ID NO: 264305 - DNA, 20 bp, synthetic construct
  source 1..20: mol_type = other DNA
atttggctgatggtggttgg

SEQ ID NO: 264306 - DNA, 20 bp, synthetic construct
  source 1..20: mol_type = other DNA
tatttggctgatggtggttg

SEQ ID NO: 264307 - DNA, 20 bp, synthetic construct
  source 1..20: mol_type = other DNA
ttatttggctgatggtggtt

SEQ ID NO: 264308 - DNA, 20 bp, synthetic construct
  source 1..20: mol_type = other DNA
tttatttggctgatggtggt

SEQ ID NO: 264309 - DNA, 20 bp, synthetic construct
  source 1..20: mol_type = other DNA
atttatttggctgatggtgg

SEQ ID NO: 264310 - DNA, 20 bp, synthetic construct
  source 1..20: mol_type = other DNA
gatttatttggctgatggtg

SEQ ID NO: 264311 - DNA, 20 bp, synthetic construct
  source 1..20: mol_type = other DNA
ggatttatttggctgatggt

SEQ ID NO: 264312 - DNA, 20 bp, synthetic construct
  source 1..20: mol_type = other DNA
tggatttatttggctgatgg

SEQ ID NO: 264313 - DNA, 20 bp, synthetic construct
  source 1..20: mol_type = other DNA
atggatttatttggctgatg

SEQ ID NO: 264314 - DNA, 20 bp, synthetic construct
  source 1..20: mol_type = other DNA
tatggatttatttggctgat

SEQ ID NO: 264315 - DNA, 20 bp, synthetic construct
  source 1..20: mol_type = other DNA
ttatggatttatttggctga

SEQ ID NO: 264316 - DNA, 20 bp, synthetic construct
  source 1..20: mol_type = other DNA
attatggatttatttggctg

SEQ ID NO: 264317 - DNA, 20 bp, synthetic construct
  source 1..20: mol_type = other DNA
aattatggatttatttggct

SEQ ID NO: 264318 - DNA, 20 bp, synthetic construct
  source 1..20: mol_type = other DNA
taattatggatttatttggc

SEQ ID NO: 264319 - DNA, 20 bp, synthetic construct
  source 1..20: mol_type = other DNA
ctaattatggatttatttgg

SEQ ID NO: 264320 - DNA, 20 bp, synthetic construct
  source 1..20: mol_type = other DNA
tctaattatggatttatttg

SEQ ID NO: 264321 - DNA, 20 bp, synthetic construct
  source 1..20: mol_type = other DNA
ctctaattatggatttattt

SEQ ID NO: 264322 - DNA, 20 bp, synthetic construct
  source 1..20: mol_type = other DNA
actctaattatggatttatt

SEQ ID NO: 264323 - DNA, 20 bp, synthetic construct
  source 1..20: mol_type = other DNA
gactctaattatggatttat

SEQ ID NO: 264324 - DNA, 20 bp, synthetic construct
  source 1..20: mol_type = other DNA
tgactctaattatggattta

SEQ ID NO: 264325 - DNA, 20 bp, synthetic construct
  source 1..20: mol_type = other DNA
ctgactctaattatggattt

SEQ ID NO: 264326 - DNA, 20 bp, synthetic construct
  source 1..20: mol_type = other DNA
tctgactctaattatggatt

SEQ ID NO: 264327 - DNA, 20 bp, synthetic construct
  source 1..20: mol_type = other DNA
ttctgactctaattatggat

SEQ ID NO: 264328 - DNA, 20 bp, synthetic construct
  source 1..20: mol_type = other DNA
tttctgactctaattatgga

SEQ ID NO: 264329 - DNA, 20 bp, synthetic construct
  source 1..20: mol_type = other DNA
ttttctgactctaattatgg

SEQ ID NO: 264330 - DNA, 20 bp, synthetic construct
  source 1..20: mol_type = other DNA
attttctgactctaattatg

SEQ ID NO: 264331 - DNA, 20 bp, synthetic construct
  source 1..20: mol_type = other DNA
cattttctgactctaattat

SEQ ID NO: 264332 - DNA, 20 bp, synthetic construct
  source 1..20: mol_type = other DNA
ccattttctgactctaatta

SEQ ID NO: 264333 - DNA, 20 bp, synthetic construct
  source 1..20: mol_type = other DNA
tccattttctgactctaatt

SEQ ID NO: 264334 - DNA, 20 bp, synthetic construct
  source 1..20: mol_type = other DNA
atccattttctgactctaat

SEQ ID NO: 264335 - DNA, 20 bp, synthetic construct
  source 1..20: mol_type = other DNA
catccattttctgactctaa

SEQ ID NO: 264336 - DNA, 20 bp, synthetic construct
  source 1..20: mol_type = other DNA
acatccattttctgactcta

SEQ ID NO: 264337 - DNA, 20 bp, synthetic construct
  source 1..20: mol_type = other DNA
gacatccattttctgactct

SEQ ID NO: 264338 - DNA, 20 bp, synthetic construct
  source 1..20: mol_type = other DNA
agacatccattttctgactc

SEQ ID NO: 264339 - DNA, 20 bp, synthetic construct
  source 1..20: mol_type = other DNA
cagacatccattttctgact

SEQ ID NO: 264340 - DNA, 20 bp, synthetic construct
  source 1..20: mol_type = other DNA
gcagacatccattttctgac

SEQ ID NO: 264341 - DNA, 20 bp, synthetic construct
  source 1..20: mol_type = other DNA
tgcagacatccattttctga

SEQ ID NO: 264342 - DNA, 20 bp, synthetic construct
  source 1..20: mol_type = other DNA
atgcagacatccattttctg

SEQ ID NO: 264343 - DNA, 20 bp, synthetic construct
  source 1..20: mol_type = other DNA
tatgcagacatccattttct

SEQ ID NO: 264344 - DNA, 20 bp, synthetic construct
  source 1..20: mol_type = other DNA
atatgcagacatccattttc

SEQ ID NO: 264345 - DNA, 20 bp, synthetic construct
  source 1..20: mol_type = other DNA
catatgcagacatccatttt

SEQ ID NO: 264346 - DNA, 20 bp, synthetic construct
  source 1..20: mol_type = other DNA
acatatgcagacatccattt

SEQ ID NO: 264347 - DNA, 20 bp, synthetic construct
  source 1..20: mol_type = other DNA
cacatatgcagacatccatt

SEQ ID NO: 264348 - DNA, 20 bp, synthetic construct
  source 1..20: mol_type = other DNA
acacatatgcagacatccat

SEQ ID NO: 264349 - DNA, 20 bp, synthetic construct
  source 1..20: mol_type = other DNA
tacacatatgcagacatcca

SEQ ID NO: 264350 - DNA, 20 bp, synthetic construct
  source 1..20: mol_type = other DNA
ctacacatatgcagacatcc

SEQ ID NO: 264351 - DNA, 20 bp, synthetic construct
  source 1..20: mol_type = other DNA
actacacatatgcagacatc

SEQ ID NO: 264352 - DNA, 20 bp, synthetic construct
  source 1..20: mol_type = other DNA
cactacacatatgcagacat

SEQ ID NO: 264353 - DNA, 20 bp, synthetic construct
  source 1..20: mol_type = other DNA
gcactacacatatgcagaca

SEQ ID NO: 264354 - DNA, 20 bp, synthetic construct
  source 1..20: mol_type = other DNA
tgcactacacatatgcagac

SEQ ID NO: 264355 - DNA, 20 bp, synthetic construct
  source 1..20: mol_type = other DNA
gtgcactacacatatgcaga

SEQ ID NO: 264356 - DNA, 20 bp, synthetic construct
  source 1..20: mol_type = other DNA
agtgcactacacatatgcag

SEQ ID NO: 264357 - DNA, 20 bp, synthetic construct
  source 1..20: mol_type = other DNA
tagtgcactacacatatgca

SEQ ID NO: 264358 - DNA, 20 bp, synthetic construct
  source 1..20: mol_type = other DNA
ttagtgcactacacatatgc

SEQ ID NO: 264359 - DNA, 20 bp, synthetic construct
  source 1..20: mol_type = other DNA
attagtgcactacacatatg

SEQ ID NO: 264360 - DNA, 20 bp, synthetic construct
  source 1..20: mol_type = other DNA
cattagtgcactacacatat

SEQ ID NO: 264361 - DNA, 20 bp, synthetic construct
  source 1..20: mol_type = other DNA
acattagtgcactacacata

SEQ ID NO: 264362 - DNA, 20 bp, synthetic construct
  source 1..20: mol_type = other DNA
gacattagtgcactacacat

SEQ ID NO: 264363 - DNA, 20 bp, synthetic construct
  source 1..20: mol_type = other DNA
ggacattagtgcactacaca

SEQ ID NO: 264364 - DNA, 20 bp, synthetic construct
  source 1..20: mol_type = other DNA
aggacattagtgcactacac

SEQ ID NO: 264365 - DNA, 20 bp, synthetic construct
  source 1..20: mol_type = other DNA
caggacattagtgcactaca

SEQ ID NO: 264366 - DNA, 20 bp, synthetic construct
  source 1..20: mol_type = other DNA
gcaggacattagtgcactac

SEQ ID NO: 264367 - DNA, 20 bp, synthetic construct
  source 1..20: mol_type = other DNA
ggcaggacattagtgcacta

SEQ ID NO: 264368 - DNA, 20 bp, synthetic construct
  source 1..20: mol_type = other DNA
cggcaggacattagtgcact

SEQ ID NO: 264369 - DNA, 20 bp, synthetic construct
  source 1..20: mol_type = other DNA
tcggcaggacattagtgcac

SEQ ID NO: 264370 - DNA, 20 bp, synthetic construct
  source 1..20: mol_type = other DNA
atcggcaggacattagtgca

SEQ ID NO: 264371 - DNA, 20 bp, synthetic construct
  source 1..20: mol_type = other DNA
catcggcaggacattagtgc

SEQ ID NO: 264372 - DNA, 20 bp, synthetic construct
  source 1..20: mol_type = other DNA
tcatcggcaggacattagtg

SEQ ID NO: 264373 - DNA, 20 bp, synthetic construct
  source 1..20: mol_type = other DNA
atcatcggcaggacattagt

SEQ ID NO: 264374 - DNA, 20 bp, synthetic construct
  source 1..20: mol_type = other DNA
aatcatcggcaggacattag

SEQ ID NO: 264375 - DNA, 20 bp, synthetic construct
  source 1..20: mol_type = other DNA
caatcatcggcaggacatta

SEQ ID NO: 264376 - DNA, 20 bp, synthetic construct
  source 1..20: mol_type = other DNA
tcaatcatcggcaggacatt

SEQ ID NO: 264377 - DNA, 20 bp, synthetic construct
  source 1..20: mol_type = other DNA
gtcaatcatcggcaggacat

SEQ ID NO: 264378 - DNA, 20 bp, synthetic construct
  source 1..20: mol_type = other DNA
tgtcaatcatcggcaggaca

SEQ ID NO: 264379 - DNA, 20 bp, synthetic construct
  source 1..20: mol_type = other DNA
atgtcaatcatcggcaggac

SEQ ID NO: 264380 - DNA, 20 bp, synthetic construct
  source 1..20: mol_type = other DNA
catgtcaatcatcggcagga

SEQ ID NO: 264381 - DNA, 20 bp, synthetic construct
  source 1..20: mol_type = other DNA
ccatgtcaatcatcggcagg

SEQ ID NO: 264382 - DNA, 20 bp, synthetic construct
  source 1..20: mol_type = other DNA
tccatgtcaatcatcggcag

SEQ ID NO: 264383 - DNA, 20 bp, synthetic construct
  source 1..20: mol_type = other DNA
ctccatgtcaatcatcggca

SEQ ID NO: 264384 - DNA, 20 bp, synthetic construct
  source 1..20: mol_type = other DNA
actccatgtcaatcatcggc

SEQ ID NO: 264385 - DNA, 20 bp, synthetic construct
  source 1..20: mol_type = other DNA
cactccatgtcaatcatcgg

SEQ ID NO: 264386 - DNA, 20 bp, synthetic construct
  source 1..20: mol_type = other DNA
ccactccatgtcaatcatcg

SEQ ID NO: 264387 - DNA, 20 bp, synthetic construct
  source 1..20: mol_type = other DNA
tccactccatgtcaatcatc

SEQ ID NO: 264388 - DNA, 20 bp, synthetic construct
  source 1..20: mol_type = other DNA
ctccactccatgtcaatcat

SEQ ID NO: 264389 - DNA, 20 bp, synthetic construct
  source 1..20: mol_type = other DNA
tctccactccatgtcaatca

SEQ ID NO: 264390 - DNA, 20 bp, synthetic construct
  source 1..20: mol_type = other DNA
ctctccactccatgtcaatc

SEQ ID NO: 264391 - DNA, 20 bp, synthetic construct
  source 1..20: mol_type = other DNA
actctccactccatgtcaat

SEQ ID NO: 264392 - DNA, 20 bp, synthetic construct
  source 1..20: mol_type = other DNA
cactctccactccatgtcaa

SEQ ID NO: 264393 - DNA, 20 bp, synthetic construct
  source 1..20: mol_type = other DNA
tcactctccactccatgtca

SEQ ID NO: 264394 - DNA, 20 bp, synthetic construct
  source 1..20: mol_type = other DNA
gtcactctccactccatgtc

SEQ ID NO: 264395 - DNA, 20 bp, synthetic construct
  source 1..20: mol_type = other DNA
ggtcactctccactccatgt

SEQ ID NO: 264396 - DNA, 20 bp, synthetic construct
  source 1..20: mol_type = other DNA
aggtcactctccactccatg

SEQ ID NO: 264397 - DNA, 20 bp, synthetic construct
  source 1..20: mol_type = other DNA
caggtcactctccactccat

SEQ ID NO: 264398 - DNA, 20 bp, synthetic construct
  source 1..20: mol_type = other DNA
tcaggtcactctccactcca

SEQ ID NO: 264399 - DNA, 20 bp, synthetic construct
  source 1..20: mol_type = other DNA
atcaggtcactctccactcc

SEQ ID NO: 264400 - DNA, 20 bp, synthetic construct
  source 1..20: mol_type = other DNA
gatcaggtcactctccactc

SEQ ID NO: 264401 - DNA, 20 bp, synthetic construct
  source 1..20: mol_type = other DNA
tgatcaggtcactctccact

SEQ ID NO: 264402 - DNA, 20 bp, synthetic construct
  source 1..20: mol_type = other DNA
atgatcaggtcactctccac

SEQ ID NO: 264403 - DNA, 20 bp, synthetic construct
  source 1..20: mol_type = other DNA
aatgatcaggtcactctcca

SEQ ID NO: 264404 - DNA, 20 bp, synthetic construct
  source 1..20: mol_type = other DNA
caatgatcaggtcactctcc

SEQ ID NO: 264405 - DNA, 20 bp, synthetic construct
  source 1..20: mol_type = other DNA
gcaatgatcaggtcactctc

SEQ ID NO: 264406 - DNA, 20 bp, synthetic construct
  source 1..20: mol_type = other DNA
agcaatgatcaggtcactct

SEQ ID NO: 264407 - DNA, 20 bp, synthetic construct
  source 1..20: mol_type = other DNA
cagcaatgatcaggtcactc

SEQ ID NO: 264408 - DNA, 20 bp, synthetic construct
  source 1..20: mol_type = other DNA
acagcaatgatcaggtcact

SEQ ID NO: 264409 - DNA, 20 bp, synthetic construct
  source 1..20: mol_type = other DNA
cacagcaatgatcaggtcac

SEQ ID NO: 264410 - DNA, 20 bp, synthetic construct
  source 1..20: mol_type = other DNA
tcacagcaatgatcaggtca

SEQ ID NO: 264411 - DNA, 20 bp, synthetic construct
  source 1..20: mol_type = other DNA
ctcacagcaatgatcaggtc

SEQ ID NO: 264412 - DNA, 20 bp, synthetic construct
  source 1..20: mol_type = other DNA
gctcacagcaatgatcaggt

SEQ ID NO: 264413 - DNA, 20 bp, synthetic construct
  source 1..20: mol_type = other DNA
agctcacagcaatgatcagg

SEQ ID NO: 264414 - DNA, 20 bp, synthetic construct
  source 1..20: mol_type = other DNA
gagctcacagcaatgatcag

SEQ ID NO: 264415 - DNA, 20 bp, synthetic construct
  source 1..20: mol_type = other DNA
agagctcacagcaatgatca

SEQ ID NO: 264416 - DNA, 20 bp, synthetic construct
  source 1..20: mol_type = other DNA
cagagctcacagcaatgatc

SEQ ID NO: 264417 - DNA, 20 bp, synthetic construct
  source 1..20: mol_type = other DNA
gcagagctcacagcaatgat

SEQ ID NO: 264418 - DNA, 20 bp, synthetic construct
  source 1..20: mol_type = other DNA
agcagagctcacagcaatga

SEQ ID NO: 264419 - DNA, 20 bp, synthetic construct
  source 1..20: mol_type = other DNA
cagcagagctcacagcaatg

SEQ ID NO: 264420 - DNA, 20 bp, synthetic construct
  source 1..20: mol_type = other DNA
ccagcagagctcacagcaat

SEQ ID NO: 264421 - DNA, 20 bp, synthetic construct
  source 1..20: mol_type = other DNA
gccagcagagctcacagcaa

SEQ ID NO: 264422 - DNA, 20 bp, synthetic construct
  source 1..20: mol_type = other DNA
ggccagcagagctcacagca

SEQ ID NO: 264423 - DNA, 20 bp, synthetic construct
  source 1..20: mol_type = other DNA
aggccagcagagctcacagc

SEQ ID NO: 264424 - DNA, 20 bp, synthetic construct
  source 1..20: mol_type = other DNA
aaggccagcagagctcacag

SEQ ID NO: 264425 - DNA, 20 bp, synthetic construct
  source 1..20: mol_type = other DNA
caaggccagcagagctcaca

SEQ ID NO: 264426 - DNA, 20 bp, synthetic construct
  source 1..20: mol_type = other DNA
ccaaggccagcagagctcac

SEQ ID NO: 264427 - DNA, 20 bp, synthetic construct
  source 1..20: mol_type = other DNA
gccaaggccagcagagctca

SEQ ID NO: 264428 - DNA, 20 bp, synthetic construct
  source 1..20: mol_type = other DNA
tgccaaggccagcagagctc

SEQ ID NO: 264429 - DNA, 20 bp, synthetic construct
  source 1..20: mol_type = other DNA
gtgccaaggccagcagagct

SEQ ID NO: 264430 - DNA, 20 bp, synthetic construct
  source 1..20: mol_type = other DNA
tgtgccaaggccagcagagc

SEQ ID NO: 264431 - DNA, 20 bp, synthetic construct
  source 1..20: mol_type = other DNA
ttgtgccaaggccagcagag

SEQ ID NO: 264432 - DNA, 20 bp, synthetic construct
  source 1..20: mol_type = other DNA
gttgtgccaaggccagcaga

SEQ ID NO: 264433 - DNA, 20 bp, synthetic construct
  source 1..20: mol_type = other DNA
agttgtgccaaggccagcag

SEQ ID NO: 264434 - DNA, 20 bp, synthetic construct
  source 1..20: mol_type = other DNA
gagttgtgccaaggccagca

SEQ ID NO: 264435 - DNA, 20 bp, synthetic construct
  source 1..20: mol_type = other DNA
tgagttgtgccaaggccagc

SEQ ID NO: 264436 - DNA, 20 bp, synthetic construct
  source 1..20: mol_type = other DNA
atgagttgtgccaaggccag

SEQ ID NO: 264437 - DNA, 20 bp, synthetic construct
  source 1..20: mol_type = other DNA
catgagttgtgccaaggcca

SEQ ID NO: 264438 - DNA, 20 bp, synthetic construct
  source 1..20: mol_type = other DNA
gcatgagttgtgccaaggcc

SEQ ID NO: 264439 - DNA, 20 bp, synthetic construct
  source 1..20: mol_type = other DNA
agcatgagttgtgccaaggc

SEQ ID NO: 264440 - DNA, 20 bp, synthetic construct
  source 1..20: mol_type = other DNA
cagcatgagttgtgccaagg

SEQ ID NO: 264441 - DNA, 20 bp, synthetic construct
  source 1..20: mol_type = other DNA
tcagcatgagttgtgccaag

SEQ ID NO: 264442 - DNA, 20 bp, synthetic construct
  source 1..20: mol_type = other DNA
atcagcatgagttgtgccaa

SEQ ID NO: 264443 - DNA, 20 bp, synthetic construct
  source 1..20: mol_type = other DNA
tatcagcatgagttgtgcca

SEQ ID NO: 264444 - DNA, 20 bp, synthetic construct
  source 1..20: mol_type = other DNA
ttatcagcatgagttgtgcc

SEQ ID NO: 264445 - DNA, 20 bp, synthetic construct
  source 1..20: mol_type = other DNA
gttatcagcatgagttgtgc

SEQ ID NO: 264446 - DNA, 20 bp, synthetic construct
  source 1..20: mol_type = other DNA
agttatcagcatgagttgtg

SEQ ID NO: 264447 - DNA, 20 bp, synthetic construct
  source 1..20: mol_type = other DNA
tagttatcagcatgagttgt

SEQ ID NO: 264448 - DNA, 20 bp, synthetic construct
  source 1..20: mol_type = other DNA
ttagttatcagcatgagttg

SEQ ID NO: 264449 - DNA, 20 bp, synthetic construct
  source 1..20: mol_type = other DNA
attagttatcagcatgagtt

SEQ ID NO: 264450 - DNA, 20 bp, synthetic construct
  source 1..20: mol_type = other DNA
cattagttatcagcatgagt

SEQ ID NO: 264451 - DNA, 20 bp, synthetic construct
  source 1..20: mol_type = other DNA
gcattagttatcagcatgag

SEQ ID NO: 264452 - DNA, 20 bp, synthetic construct
  source 1..20: mol_type = other DNA
tgcattagttatcagcatga

SEQ ID NO: 264453 - DNA, 20 bp, synthetic construct
  source 1..20: mol_type = other DNA
gtgcattagttatcagcatg

SEQ ID NO: 264454 - DNA, 20 bp, synthetic construct
  source 1..20: mol_type = other DNA
tgtgcattagttatcagcat

SEQ ID NO: 264455 - DNA, 20 bp, synthetic construct
  source 1..20: mol_type = other DNA
gtgtgcattagttatcagca

SEQ ID NO: 264456 - DNA, 20 bp, synthetic construct
  source 1..20: mol_type = other DNA
tgtgtgcattagttatcagc

SEQ ID NO: 264457 - DNA, 20 bp, synthetic construct
  source 1..20: mol_type = other DNA
ctgtgtgcattagttatcag

SEQ ID NO: 264458 - DNA, 20 bp, synthetic construct
  source 1..20: mol_type = other DNA
actgtgtgcattagttatca

SEQ ID NO: 264459 - DNA, 20 bp, synthetic construct
  source 1..20: mol_type = other DNA
aactgtgtgcattagttatc

SEQ ID NO: 264460 - DNA, 20 bp, synthetic construct
  source 1..20: mol_type = other DNA
gaactgtgtgcattagttat

SEQ ID NO: 264461 - DNA, 20 bp, synthetic construct
  source 1..20: mol_type = other DNA
ggaactgtgtgcattagtta

SEQ ID NO: 264462 - DNA, 20 bp, synthetic construct
  source 1..20: mol_type = other DNA
aggaactgtgtgcattagtt

SEQ ID NO: 264463 - DNA, 20 bp, synthetic construct
  source 1..20: mol_type = other DNA
gaggaactgtgtgcattagt

SEQ ID NO: 264464 - DNA, 20 bp, synthetic construct
  source 1..20: mol_type = other DNA
agaggaactgtgtgcattag

SEQ ID NO: 264465 - DNA, 20 bp, synthetic construct
  source 1..20: mol_type = other DNA
cagaggaactgtgtgcatta

SEQ ID NO: 264466 - DNA, 20 bp, synthetic construct
  source 1..20: mol_type = other DNA
ccagaggaactgtgtgcatt

SEQ ID NO: 264467 - DNA, 20 bp, synthetic construct
  source 1..20: mol_type = other DNA
cccagaggaactgtgtgcat

SEQ ID NO: 264468 - DNA, 20 bp, synthetic construct
  source 1..20: mol_type = other DNA
tcccagaggaactgtgtgca

SEQ ID NO: 264469 - DNA, 20 bp, synthetic construct
  source 1..20: mol_type = other DNA
ctcccagaggaactgtgtgc

SEQ ID NO: 264470 - DNA, 20 bp, synthetic construct
  source 1..20: mol_type = other DNA
cctcccagaggaactgtgtg

SEQ ID NO: 264471 - DNA, 20 bp, synthetic construct
  source 1..20: mol_type = other DNA
tcctcccagaggaactgtgt

SEQ ID NO: 264472 - DNA, 20 bp, synthetic construct
  source 1..20: mol_type = other DNA
ttcctcccagaggaactgtg

SEQ ID NO: 264473 - DNA, 20 bp, synthetic construct
  source 1..20: mol_type = other DNA
tttcctcccagaggaactgt

SEQ ID NO: 264474 - DNA, 20 bp, synthetic construct
  source 1..20: mol_type = other DNA
atttcctcccagaggaactg

SEQ ID NO: 264475 - DNA, 20 bp, synthetic construct
  source 1..20: mol_type = other DNA
catttcctcccagaggaact

SEQ ID NO: 264476 - DNA, 20 bp, synthetic construct
  source 1..20: mol_type = other DNA
acatttcctcccagaggaac

SEQ ID NO: 264477 - DNA, 20 bp, synthetic construct
  source 1..20: mol_type = other DNA
gacatttcctcccagaggaa

SEQ ID NO: 264478 - DNA, 20 bp, synthetic construct
  source 1..20: mol_type = other DNA
ggacatttcctcccagagga

SEQ ID NO: 264479 - DNA, 20 bp, synthetic construct
  source 1..20: mol_type = other DNA
aggacatttcctcccagagg

SEQ ID NO: 264480 - DNA, 20 bp, synthetic construct
  source 1..20: mol_type = other DNA
gaggacatttcctcccagag

SEQ ID NO: 264481 - DNA, 20 bp, synthetic construct
  source 1..20: mol_type = other DNA
tgaggacatttcctcccaga

SEQ ID NO: 264482 - DNA, 20 bp, synthetic construct
  source 1..20: mol_type = other DNA
ctgaggacatttcctcccag

SEQ ID NO: 264483 - DNA, 20 bp, synthetic construct
  source 1..20: mol_type = other DNA
cctgaggacatttcctccca

SEQ ID NO: 264484 - DNA, 20 bp, synthetic construct
  source 1..20: mol_type = other DNA
ccctgaggacatttcctccc

SEQ ID NO: 264485 - DNA, 20 bp, synthetic construct
  source 1..20: mol_type = other DNA
tccctgaggacatttcctcc

SEQ ID NO: 264486 - DNA, 20 bp, synthetic construct
  source 1..20: mol_type = other DNA
ttccctgaggacatttcctc

SEQ ID NO: 264487 - DNA, 20 bp, synthetic construct
  source 1..20: mol_type = other DNA
gttccctgaggacatttcct

SEQ ID NO: 264488 - DNA, 20 bp, synthetic construct
  source 1..20: mol_type = other DNA
agttccctgaggacatttcc

SEQ ID NO: 264489 - DNA, 20 bp, synthetic construct
  source 1..20: mol_type = other DNA
aagttccctgaggacatttc

SEQ ID NO: 264490 - DNA, 20 bp, synthetic construct
  source 1..20: mol_type = other DNA
caagttccctgaggacattt

SEQ ID NO: 264491 - DNA, 20 bp, synthetic construct
  source 1..20: mol_type = other DNA
ccaagttccctgaggacatt

SEQ ID NO: 264492 - DNA, 20 bp, synthetic construct
  source 1..20: mol_type = other DNA
tccaagttccctgaggacat

SEQ ID NO: 264493 - DNA, 20 bp, synthetic construct
  source 1..20: mol_type = other DNA
ctccaagttccctgaggaca

SEQ ID NO: 264494 - DNA, 20 bp, synthetic construct
  source 1..20: mol_type = other DNA
actccaagttccctgaggac

SEQ ID NO: 264495 - DNA, 20 bp, synthetic construct
  source 1..20: mol_type = other DNA
aactccaagttccctgagga

SEQ ID NO: 264496 - DNA, 20 bp, synthetic construct
  source 1..20: mol_type = other DNA
aaactccaagttccctgagg

SEQ ID NO: 264497 - DNA, 20 bp, synthetic construct
  source 1..20: mol_type = other DNA
caaactccaagttccctgag

SEQ ID NO: 264498 - DNA, 20 bp, synthetic construct
  source 1..20: mol_type = other DNA
ccaaactccaagttccctga

SEQ ID NO: 264499 - DNA, 20 bp, synthetic construct
  source 1..20: mol_type = other DNA
cccaaactccaagttccctg

SEQ ID NO: 264500 - DNA, 20 bp, synthetic construct
  source 1..20: mol_type = other DNA
acccaaactccaagttccct

SEQ ID NO: 264501 - DNA, 20 bp, synthetic construct
  source 1..20: mol_type = other DNA
cacccaaactccaagttccc

SEQ ID NO: 264502 - DNA, 20 bp, synthetic construct
  source 1..20: mol_type = other DNA
ccacccaaactccaagttcc

SEQ ID NO: 264503 - DNA, 20 bp, synthetic construct
  source 1..20: mol_type = other DNA
cccacccaaactccaagttc

SEQ ID NO: 264504 - DNA, 20 bp, synthetic construct
  source 1..20: mol_type = other DNA
ccccacccaaactccaagtt

SEQ ID NO: 264505 - DNA, 20 bp, synthetic construct
  source 1..20: mol_type = other DNA
tccccacccaaactccaagt

SEQ ID NO: 264506 - DNA, 20 bp, synthetic construct
  source 1..20: mol_type = other DNA
atccccacccaaactccaag

SEQ ID NO: 264507 - DNA, 20 bp, synthetic construct
  source 1..20: mol_type = other DNA
catccccacccaaactccaa

SEQ ID NO: 264508 - DNA, 20 bp, synthetic construct
  source 1..20: mol_type = other DNA
acatccccacccaaactcca

SEQ ID NO: 264509 - DNA, 20 bp, synthetic construct
  source 1..20: mol_type = other DNA
cacatccccacccaaactcc

SEQ ID NO: 264510 - DNA, 20 bp, synthetic construct
  source 1..20: mol_type = other DNA
ccacatccccacccaaactc

SEQ ID NO: 264511 - DNA, 20 bp, synthetic construct
  source 1..20: mol_type = other DNA
cccacatccccacccaaact

SEQ ID NO: 264512 - DNA, 20 bp, synthetic construct
  source 1..20: mol_type = other DNA
acccacatccccacccaaac

SEQ ID NO: 264513 - DNA, 20 bp, synthetic construct
  source 1..20: mol_type = other DNA
aacccacatccccacccaaa

SEQ ID NO: 264514 - DNA, 20 bp, synthetic construct
  source 1..20: mol_type = other DNA
aaacccacatccccacccaa

SEQ ID NO: 264515 - DNA, 20 bp, synthetic construct
  source 1..20: mol_type = other DNA
caaacccacatccccaccca

SEQ ID NO: 264516 - DNA, 20 bp, synthetic construct
  source 1..20: mol_type = other DNA
acaaacccacatccccaccc

SEQ ID NO: 264517 - DNA, 20 bp, synthetic construct
  source 1..20: mol_type = other DNA
cacaaacccacatccccacc

SEQ ID NO: 264518 - DNA, 20 bp, synthetic construct
  source 1..20: mol_type = other DNA
acacaaacccacatccccac

SEQ ID NO: 264519 - DNA, 20 bp, synthetic construct
  source 1..20: mol_type = other DNA
cacacaaacccacatcccca

SEQ ID NO: 264520 - DNA, 20 bp, synthetic construct
  source 1..20: mol_type = other DNA
gcacacaaacccacatcccc

SEQ ID NO: 264521 - DNA, 20 bp, synthetic construct
  source 1..20: mol_type = other DNA
ggcacacaaacccacatccc

SEQ ID NO: 264522 - DNA, 20 bp, synthetic construct
  source 1..20: mol_type = other DNA
gggcacacaaacccacatcc

SEQ ID NO: 264523 - DNA, 20 bp, synthetic construct
  source 1..20: mol_type = other DNA
tgggcacacaaacccacatc

SEQ ID NO: 264524 - DNA, 20 bp, synthetic construct
  source 1..20: mol_type = other DNA
ctgggcacacaaacccacat

SEQ ID NO: 264525 - DNA, 20 bp, synthetic construct
  source 1..20: mol_type = other DNA
gctgggcacacaaacccaca

SEQ ID NO: 264526 - DNA, 20 bp, synthetic construct
  source 1..20: mol_type = other DNA
tgctgggcacacaaacccac

SEQ ID NO: 264527 - DNA, 20 bp, synthetic construct
  source 1..20: mol_type = other DNA
ttgctgggcacacaaaccca

SEQ ID NO: 264528 - DNA, 20 bp, synthetic construct
  source 1..20: mol_type = other DNA
cttgctgggcacacaaaccc

SEQ ID NO: 264529 - DNA, 20 bp, synthetic construct
  source 1..20: mol_type = other DNA
gcttgctgggcacacaaacc

SEQ ID NO: 264530 - DNA, 20 bp, synthetic construct
  source 1..20: mol_type = other DNA
ggcttgctgggcacacaaac

SEQ ID NO: 264531 - DNA, 20 bp, synthetic construct
  source 1..20: mol_type = other DNA
gggcttgctgggcacacaaa

SEQ ID NO: 264532 - DNA, 20 bp, synthetic construct
  source 1..20: mol_type = other DNA
agggcttgctgggcacacaa

SEQ ID NO: 264533 - DNA, 20 bp, synthetic construct
  source 1..20: mol_type = other DNA
aagggcttgctgggcacaca

SEQ ID NO: 264534 - DNA, 20 bp, synthetic construct
  source 1..20: mol_type = other DNA
caagggcttgctgggcacac

SEQ ID NO: 264535 - DNA, 20 bp, synthetic construct
  source 1..20: mol_type = other DNA
acaagggcttgctgggcaca

SEQ ID NO: 264536 - DNA, 20 bp, synthetic construct
  source 1..20: mol_type = other DNA
cacaagggcttgctgggcac

SEQ ID NO: 264537 - DNA, 20 bp, synthetic construct
  source 1..20: mol_type = other DNA
ccacaagggcttgctgggca

SEQ ID NO: 264538 - DNA, 20 bp, synthetic construct
  source 1..20: mol_type = other DNA
accacaagggcttgctgggc

SEQ ID NO: 264539 - DNA, 20 bp, synthetic construct
  source 1..20: mol_type = other DNA
aaccacaagggcttgctggg

SEQ ID NO: 264540 - DNA, 20 bp, synthetic construct
  source 1..20: mol_type = other DNA
caaccacaagggcttgctgg

SEQ ID NO: 264541 - DNA, 20 bp, synthetic construct
  source 1..20: mol_type = other DNA
acaaccacaagggcttgctg

SEQ ID NO: 264542 - DNA, 20 bp, synthetic construct
  source 1..20: mol_type = other DNA
tacaaccacaagggcttgct

SEQ ID NO: 264543 - DNA, 20 bp, synthetic construct
  source 1..20: mol_type = other DNA
ctacaaccacaagggcttgc

SEQ ID NO: 264544 - DNA, 20 bp, synthetic construct
  source 1..20: mol_type = other DNA
gctacaaccacaagggcttg

SEQ ID NO: 264545 - DNA, 20 bp, synthetic construct
  source 1..20: mol_type = other DNA
tgctacaaccacaagggctt

SEQ ID NO: 264546 - DNA, 20 bp, synthetic construct
  source 1..20: mol_type = other DNA
ctgctacaaccacaagggct

SEQ ID NO: 264547 - DNA, 20 bp, synthetic construct
  source 1..20: mol_type = other DNA
tctgctacaaccacaagggc

SEQ ID NO: 264548 - DNA, 20 bp, synthetic construct
  source 1..20: mol_type = other DNA
gtctgctacaaccacaaggg

SEQ ID NO: 264549 - DNA, 20 bp, synthetic construct
  source 1..20: mol_type = other DNA
tgtctgctacaaccacaagg

SEQ ID NO: 264550 - DNA, 20 bp, synthetic construct
  source 1..20: mol_type = other DNA
gtgtctgctacaaccacaag

SEQ ID NO: 264551 - DNA, 20 bp, synthetic construct
  source 1..20: mol_type = other DNA
agtgtctgctacaaccacaa

SEQ ID NO: 264552 - DNA, 20 bp, synthetic construct
  source 1..20: mol_type = other DNA
tagtgtctgctacaaccaca

SEQ ID NO: 264553 - DNA, 20 bp, synthetic construct
  source 1..20: mol_type = other DNA
ctagtgtctgctacaaccac

SEQ ID NO: 264554 - DNA, 20 bp, synthetic construct
  source 1..20: mol_type = other DNA
actagtgtctgctacaacca

SEQ ID NO: 264555 - DNA, 20 bp, synthetic construct
  source 1..20: mol_type = other DNA
cactagtgtctgctacaacc

SEQ ID NO: 264556 - DNA, 20 bp, synthetic construct
  source 1..20: mol_type = other DNA
ccactagtgtctgctacaac

SEQ ID NO: 264557 - DNA, 20 bp, synthetic construct
  source 1..20: mol_type = other DNA
gccactagtgtctgctacaa

SEQ ID NO: 264558 - DNA, 20 bp, synthetic construct
  source 1..20: mol_type = other DNA
tgccactagtgtctgctaca

SEQ ID NO: 264559 - DNA, 20 bp, synthetic construct
  source 1..20: mol_type = other DNA
atgccactagtgtctgctac

SEQ ID NO: 264560 - DNA, 20 bp, synthetic construct
  source 1..20: mol_type = other DNA
gatgccactagtgtctgcta

SEQ ID NO: 264561 - DNA, 20 bp, synthetic construct
  source 1..20: mol_type = other DNA
agatgccactagtgtctgct

SEQ ID NO: 264562 - DNA, 20 bp, synthetic construct
  source 1..20: mol_type = other DNA
tagatgccactagtgtctgc

SEQ ID NO: 264563 - DNA, 20 bp, synthetic construct
  source 1..20: mol_type = other DNA
ctagatgccactagtgtctg

SEQ ID NO: 264564 - DNA, 20 bp, synthetic construct
  source 1..20: mol_type = other DNA
cctagatgccactagtgtct

SEQ ID NO: 264565 - DNA, 20 bp, synthetic construct
  source 1..20: mol_type = other DNA
tcctagatgccactagtgtc

SEQ ID NO: 264566 - DNA, 20 bp, synthetic construct
  source 1..20: mol_type = other DNA
ctcctagatgccactagtgt

SEQ ID NO: 264567 - DNA, 20 bp, synthetic construct
  source 1..20: mol_type = other DNA
cctcctagatgccactagtg

SEQ ID NO: 264568 - DNA, 20 bp, synthetic construct
  source 1..20: mol_type = other DNA
gcctcctagatgccactagt

SEQ ID NO: 264569 - DNA, 20 bp, synthetic construct
  source 1..20: mol_type = other DNA
tgcctcctagatgccactag

SEQ ID NO: 264570 - DNA, 20 bp, synthetic construct
  source 1..20: mol_type = other DNA
ttgcctcctagatgccacta

SEQ ID NO: 264571 - DNA, 20 bp, synthetic construct
  source 1..20: mol_type = other DNA
tttgcctcctagatgccact

SEQ ID NO: 264572 - DNA, 20 bp, synthetic construct
  source 1..20: mol_type = other DNA
ctttgcctcctagatgccac

SEQ ID NO: 264573 - DNA, 20 bp, synthetic construct
  source 1..20: mol_type = other DNA
cctttgcctcctagatgcca

SEQ ID NO: 264574 - DNA, 20 bp, synthetic construct
  source 1..20: mol_type = other DNA
ccctttgcctcctagatgcc

SEQ ID NO: 264575 - DNA, 20 bp, synthetic construct
  source 1..20: mol_type = other DNA
accctttgcctcctagatgc

SEQ ID NO: 264576 - DNA, 20 bp, synthetic construct
  source 1..20: mol_type = other DNA
gaccctttgcctcctagatg

SEQ ID NO: 264577 - DNA, 20 bp, synthetic construct
  source 1..20: mol_type = other DNA
tgaccctttgcctcctagat

SEQ ID NO: 264578 - DNA, 20 bp, synthetic construct
  source 1..20: mol_type = other DNA
gtgaccctttgcctcctaga

SEQ ID NO: 264579 - DNA, 20 bp, synthetic construct
  source 1..20: mol_type = other DNA
ggtgaccctttgcctcctag

SEQ ID NO: 264580 - DNA, 20 bp, synthetic construct
  source 1..20: mol_type = other DNA
gggtgaccctttgcctccta

SEQ ID NO: 264581 - DNA, 20 bp, synthetic construct
  source 1..20: mol_type = other DNA
ggggtgaccctttgcctcct

SEQ ID NO: 264582 - DNA, 20 bp, synthetic construct
  source 1..20: mol_type = other DNA
tggggtgaccctttgcctcc

SEQ ID NO: 264583 - DNA, 20 bp, synthetic construct
  source 1..20: mol_type = other DNA
ctggggtgaccctttgcctc

SEQ ID NO: 264584 - DNA, 20 bp, synthetic construct
  source 1..20: mol_type = other DNA
actggggtgaccctttgcct

SEQ ID NO: 264585 - DNA, 20 bp, synthetic construct
  source 1..20: mol_type = other DNA
gactggggtgaccctttgcc

SEQ ID NO: 264586 - DNA, 20 bp, synthetic construct
  source 1..20: mol_type = other DNA
agactggggtgaccctttgc

SEQ ID NO: 264587 - DNA, 20 bp, synthetic construct
  source 1..20: mol_type = other DNA
aagactggggtgaccctttg

SEQ ID NO: 264588 - DNA, 20 bp, synthetic construct
  source 1..20: mol_type = other DNA
taagactggggtgacccttt

SEQ ID NO: 264589 - DNA, 20 bp, synthetic construct
  source 1..20: mol_type = other DNA
ctaagactggggtgaccctt

SEQ ID NO: 264590 - DNA, 20 bp, synthetic construct
  source 1..20: mol_type = other DNA
gctaagactggggtgaccct

SEQ ID NO: 264591 - DNA, 20 bp, synthetic construct
  source 1..20: mol_type = other DNA
ggctaagactggggtgaccc

SEQ ID NO: 264592 - DNA, 20 bp, synthetic construct
  source 1..20: mol_type = other DNA
tggctaagactggggtgacc

SEQ ID NO: 264593 - DNA, 20 bp, synthetic construct
  source 1..20: mol_type = other DNA
gtggctaagactggggtgac

SEQ ID NO: 264594 - DNA, 20 bp, synthetic construct
  source 1..20: mol_type = other DNA
cgtggctaagactggggtga

SEQ ID NO: 264595 - DNA, 20 bp, synthetic construct
  source 1..20: mol_type = other DNA
acgtggctaagactggggtg

SEQ ID NO: 264596 - DNA, 20 bp, synthetic construct
  source 1..20: mol_type = other DNA
aacgtggctaagactggggt

SEQ ID NO: 264597 - DNA, 20 bp, synthetic construct
  source 1..20: mol_type = other DNA
aaacgtggctaagactgggg

SEQ ID NO: 264598 - DNA, 20 bp, synthetic construct
  source 1..20: mol_type = other DNA
aaaacgtggctaagactggg

SEQ ID NO: 264599 - DNA, 20 bp, synthetic construct
  source 1..20: mol_type = other DNA
caaaacgtggctaagactgg

SEQ ID NO: 264600 - DNA, 20 bp, synthetic construct
  source 1..20: mol_type = other DNA
tcaaaacgtggctaagactg

SEQ ID NO: 264601 - DNA, 20 bp, synthetic construct
  source 1..20: mol_type = other DNA
ctcaaaacgtggctaagact

SEQ ID NO: 264602 - DNA, 20 bp, synthetic construct
  source 1..20: mol_type = other DNA
actcaaaacgtggctaagac

SEQ ID NO: 264603 - DNA, 20 bp, synthetic construct
  source 1..20: mol_type = other DNA
gactcaaaacgtggctaaga

SEQ ID NO: 264604 - DNA, 20 bp, synthetic construct
  source 1..20: mol_type = other DNA
tgactcaaaacgtggctaag

SEQ ID NO: 264605 - DNA, 20 bp, synthetic construct
  source 1..20: mol_type = other DNA
ttgactcaaaacgtggctaa

SEQ ID NO: 264606 - DNA, 20 bp, synthetic construct
  source 1..20: mol_type = other DNA
cttgactcaaaacgtggcta

SEQ ID NO: 264607 - DNA, 20 bp, synthetic construct
  source 1..20: mol_type = other DNA
ccttgactcaaaacgtggct

SEQ ID NO: 264608 - DNA, 20 bp, synthetic construct
  source 1..20: mol_type = other DNA
accttgactcaaaacgtggc

SEQ ID NO: 264609 - DNA, 20 bp, synthetic construct
  source 1..20: mol_type = other DNA
caccttgactcaaaacgtgg

SEQ ID NO: 264610 - DNA, 20 bp, synthetic construct
  source 1..20: mol_type = other DNA
ccaccttgactcaaaacgtg

SEQ ID NO: 264611 - DNA, 20 bp, synthetic construct
  source 1..20: mol_type = other DNA
gccaccttgactcaaaacgt

SEQ ID NO: 264612 - DNA, 20 bp, synthetic construct
  source 1..20: mol_type = other DNA
cgccaccttgactcaaaacg

SEQ ID NO: 264613 - DNA, 20 bp, synthetic construct
  source 1..20: mol_type = other DNA
ccgccaccttgactcaaaac

SEQ ID NO: 264614 - DNA, 20 bp, synthetic construct
  source 1..20: mol_type = other DNA
tccgccaccttgactcaaaa

SEQ ID NO: 264615 - DNA, 20 bp, synthetic construct
  source 1..20: mol_type = other DNA
ctccgccaccttgactcaaa

SEQ ID NO: 264616 - DNA, 20 bp, synthetic construct
  source 1..20: mol_type = other DNA
actccgccaccttgactcaa

SEQ ID NO: 264617 - DNA, 20 bp, synthetic construct
  source 1..20: mol_type = other DNA
cactccgccaccttgactca

SEQ ID NO: 264618 - DNA, 20 bp, synthetic construct
  source 1..20: mol_type = other DNA
ccactccgccaccttgactc

SEQ ID NO: 264619 - DNA, 20 bp, synthetic construct
  source 1..20: mol_type = other DNA
cccactccgccaccttgact

SEQ ID NO: 264620 - DNA, 20 bp, synthetic construct
  source 1..20: mol_type = other DNA
ccccactccgccaccttgac

SEQ ID NO: 264621 - DNA, 20 bp, synthetic construct
  source 1..20: mol_type = other DNA
gccccactccgccaccttga

SEQ ID NO: 264622 - DNA, 20 bp, synthetic construct
  source 1..20: mol_type = other DNA
agccccactccgccaccttg

SEQ ID NO: 264623 - DNA, 20 bp, synthetic construct
  source 1..20: mol_type = other DNA
cagccccactccgccacctt

SEQ ID NO: 264624 - DNA, 20 bp, synthetic construct
  source 1..20: mol_type = other DNA
ccagccccactccgccacct

SEQ ID NO: 264625 - DNA, 20 bp, synthetic construct
  source 1..20: mol_type = other DNA
accagccccactccgccacc

SEQ ID NO: 264626 - DNA, 20 bp, synthetic construct
  source 1..20: mol_type = other DNA
caccagccccactccgccac

SEQ ID NO: 264627 - DNA, 20 bp, synthetic construct
  source 1..20: mol_type = other DNA
acaccagccccactccgcca

SEQ ID NO: 264628 - DNA, 20 bp, synthetic construct
  source 1..20: mol_type = other DNA
aacaccagccccactccgcc

SEQ ID NO: 264629 - DNA, 20 bp, synthetic construct
  source 1..20: mol_type = other DNA
caacaccagccccactccgc

SEQ ID NO: 264630 - DNA, 20 bp, synthetic construct
  source 1..20: mol_type = other DNA
tcaacaccagccccactccg

SEQ ID NO: 264631 - DNA, 20 bp, synthetic construct
  source 1..20: mol_type = other DNA
gtcaacaccagccccactcc

SEQ ID NO: 264632 - DNA, 20 bp, synthetic construct
  source 1..20: mol_type = other DNA
agtcaacaccagccccactc

SEQ ID NO: 264633 - DNA, 20 bp, synthetic construct
  source 1..20: mol_type = other DNA
gagtcaacaccagccccact

SEQ ID NO: 264634 - DNA, 20 bp, synthetic construct
  source 1..20: mol_type = other DNA
agagtcaacaccagccccac

SEQ ID NO: 264635 - DNA, 20 bp, synthetic construct
  source 1..20: mol_type = other DNA
aagagtcaacaccagcccca

SEQ ID NO: 264636 - DNA, 20 bp, synthetic construct
  source 1..20: mol_type = other DNA
caagagtcaacaccagcccc

SEQ ID NO: 264637 - DNA, 20 bp, synthetic construct
  source 1..20: mol_type = other DNA
ccaagagtcaacaccagccc

SEQ ID NO: 264638 - DNA, 20 bp, synthetic construct
  source 1..20: mol_type = other DNA
accaagagtcaacaccagcc

SEQ ID NO: 264639 - DNA, 20 bp, synthetic construct
  source 1..20: mol_type = other DNA
caccaagagtcaacaccagc

SEQ ID NO: 264640 - DNA, 20 bp, synthetic construct
  source 1..20: mol_type = other DNA
ccaccaagagtcaacaccag

SEQ ID NO: 264641 - DNA, 20 bp, synthetic construct
  source 1..20: mol_type = other DNA
gccaccaagagtcaacacca

SEQ ID NO: 264642 - DNA, 20 bp, synthetic construct
  source 1..20: mol_type = other DNA
tgccaccaagagtcaacacc

SEQ ID NO: 264643 - DNA, 20 bp, synthetic construct
  source 1..20: mol_type = other DNA
ctgccaccaagagtcaacac

SEQ ID NO: 264644 - DNA, 20 bp, synthetic construct
  source 1..20: mol_type = other DNA
actgccaccaagagtcaaca

SEQ ID NO: 264645 - DNA, 20 bp, synthetic construct
  source 1..20: mol_type = other DNA
tactgccaccaagagtcaac

SEQ ID NO: 264646 - DNA, 20 bp, synthetic construct
  source 1..20: mol_type = other DNA
ttactgccaccaagagtcaa

SEQ ID NO: 264647 - DNA, 20 bp, synthetic construct
  source 1..20: mol_type = other DNA
gttactgccaccaagagtca

SEQ ID NO: 264648 - DNA, 20 bp, synthetic construct
  source 1..20: mol_type = other DNA
agttactgccaccaagagtc

SEQ ID NO: 264649 - DNA, 20 bp, synthetic construct
  source 1..20: mol_type = other DNA
aagttactgccaccaagagt

SEQ ID NO: 264650 - DNA, 20 bp, synthetic construct
  source 1..20: mol_type = other DNA
aaagttactgccaccaagag

SEQ ID NO: 264651 - DNA, 20 bp, synthetic construct
  source 1..20: mol_type = other DNA
aaaagttactgccaccaaga

SEQ ID NO: 264652 - DNA, 20 bp, synthetic construct
  source 1..20: mol_type = other DNA
gaaaagttactgccaccaag

SEQ ID NO: 264653 - DNA, 20 bp, synthetic construct
  source 1..20: mol_type = other DNA
ggaaaagttactgccaccaa

SEQ ID NO: 264654 - DNA, 20 bp, synthetic construct
  source 1..20: mol_type = other DNA
gggaaaagttactgccacca

SEQ ID NO: 264655 - DNA, 20 bp, synthetic construct
  source 1..20: mol_type = other DNA
tgggaaaagttactgccacc

SEQ ID NO: 264656 - DNA, 20 bp, synthetic construct
  source 1..20: mol_type = other DNA
ttgggaaaagttactgccac

SEQ ID NO: 264657 - DNA, 20 bp, synthetic construct
  source 1..20: mol_type = other DNA
attgggaaaagttactgcca

SEQ ID NO: 264658 - DNA, 20 bp, synthetic construct
  source 1..20: mol_type = other DNA
cattgggaaaagttactgcc

SEQ ID NO: 264659 - DNA, 20 bp, synthetic construct
  source 1..20: mol_type = other DNA
ccattgggaaaagttactgc

SEQ ID NO: 264660 - DNA, 20 bp, synthetic construct
  source 1..20: mol_type = other DNA
accattgggaaaagttactg

SEQ ID NO: 264661 - DNA, 20 bp, synthetic construct
  source 1..20: mol_type = other DNA
caccattgggaaaagttact

SEQ ID NO: 264662 - DNA, 20 bp, synthetic construct
  source 1..20: mol_type = other DNA
tcaccattgggaaaagttac

SEQ ID NO: 264663 - DNA, 20 bp, synthetic construct
  source 1..20: mol_type = other DNA
ttcaccattgggaaaagtta

SEQ ID NO: 264664 - DNA, 20 bp, synthetic construct
  source 1..20: mol_type = other DNA
tttcaccattgggaaaagtt

SEQ ID NO: 264665 - DNA, 20 bp, synthetic construct
  source 1..20: mol_type = other DNA
ttttcaccattgggaaaagt

SEQ ID NO: 264666 - DNA, 20 bp, synthetic construct
  source 1..20: mol_type = other DNA
tttttcaccattgggaaaag

SEQ ID NO: 264667 - DNA, 20 bp, synthetic construct
  source 1..20: mol_type = other DNA
gtttttcaccattgggaaaa

SEQ ID NO: 264668 - DNA, 20 bp, synthetic construct
  source 1..20: mol_type = other DNA
ggtttttcaccattgggaaa

SEQ ID NO: 264669 - DNA, 20 bp, synthetic construct
  source 1..20: mol_type = other DNA
gggtttttcaccattgggaa

SEQ ID NO: 264670 - DNA, 20 bp, synthetic construct
  source 1..20: mol_type = other DNA
ggggtttttcaccattggga

SEQ ID NO: 264671 - DNA, 20 bp, synthetic construct
  source 1..20: mol_type = other DNA
aggggtttttcaccattggg

SEQ ID NO: 264672 - DNA, 20 bp, synthetic construct
  source 1..20: mol_type = other DNA
gaggggtttttcaccattgg

SEQ ID NO: 264673 - DNA, 20 bp, synthetic construct
  source 1..20: mol_type = other DNA
agaggggtttttcaccattg

SEQ ID NO: 264674 - DNA, 20 bp, synthetic construct
  source 1..20: mol_type = other DNA
tagaggggtttttcaccatt

SEQ ID NO: 264675 - DNA, 20 bp, synthetic construct
  source 1..20: mol_type = other DNA
atagaggggtttttcaccat

SEQ ID NO: 264676 - DNA, 20 bp, synthetic construct
  source 1..20: mol_type = other DNA
gatagaggggtttttcacca

SEQ ID NO: 264677 - DNA, 20 bp, synthetic construct
  source 1..20: mol_type = other DNA
tgatagaggggtttttcacc

SEQ ID NO: 264678 - DNA, 20 bp, synthetic construct
  source 1..20: mol_type = other DNA
atgatagaggggtttttcac

SEQ ID NO: 264679 - DNA, 20 bp, synthetic construct
  source 1..20: mol_type = other DNA
catgatagaggggtttttca

SEQ ID NO: 264680 - DNA, 20 bp, synthetic construct
  source 1..20: mol_type = other DNA
acatgatagaggggtttttc

SEQ ID NO: 264681 - DNA, 20 bp, synthetic construct
  source 1..20: mol_type = other DNA
aacatgatagaggggttttt

SEQ ID NO: 264682 - DNA, 20 bp, synthetic construct
  source 1..20: mol_type = other DNA
aaacatgatagaggggtttt

SEQ ID NO: 264683 - DNA, 20 bp, synthetic construct
  source 1..20: mol_type = other DNA
gaaacatgatagaggggttt

SEQ ID NO: 264684 - DNA, 20 bp, synthetic construct
  source 1..20: mol_type = other DNA
tgaaacatgatagaggggtt

SEQ ID NO: 264685 - DNA, 20 bp, synthetic construct
  source 1..20: mol_type = other DNA
atgaaacatgatagaggggt

SEQ ID NO: 264686 - DNA, 20 bp, synthetic construct
  source 1..20: mol_type = other DNA
aatgaaacatgatagagggg

SEQ ID NO: 264687 - DNA, 20 bp, synthetic construct
  source 1..20: mol_type = other DNA
aaatgaaacatgatagaggg

SEQ ID NO: 264688 - DNA, 20 bp, synthetic construct
  source 1..20: mol_type = other DNA
taaatgaaacatgatagagg

SEQ ID NO: 264689 - DNA, 20 bp, synthetic construct
  source 1..20: mol_type = other DNA
gtaaatgaaacatgatagag

SEQ ID NO: 264690 - DNA, 20 bp, synthetic construct
  source 1..20: mol_type = other DNA
tgtaaatgaaacatgataga

SEQ ID NO: 264691 - DNA, 20 bp, synthetic construct
  source 1..20: mol_type = other DNA
ctgtaaatgaaacatgatag

SEQ ID NO: 264692 - DNA, 20 bp, synthetic construct
  source 1..20: mol_type = other DNA
cctgtaaatgaaacatgata

SEQ ID NO: 264693 - DNA, 20 bp, synthetic construct
  source 1..20: mol_type = other DNA
ccctgtaaatgaaacatgat

SEQ ID NO: 264694 - DNA, 20 bp, synthetic construct
  source 1..20: mol_type = other DNA
cccctgtaaatgaaacatga

SEQ ID NO: 264695 - DNA, 20 bp, synthetic construct
  source 1..20: mol_type = other DNA
ccccctgtaaatgaaacatg

SEQ ID NO: 264696 - DNA, 20 bp, synthetic construct
  source 1..20: mol_type = other DNA
gccccctgtaaatgaaacat

SEQ ID NO: 264697 - DNA, 20 bp, synthetic construct
  source 1..20: mol_type = other DNA
agccccctgtaaatgaaaca

SEQ ID NO: 264698 - DNA, 20 bp, synthetic construct
  source 1..20: mol_type = other DNA
cagccccctgtaaatgaaac

SEQ ID NO: 264699 - DNA, 20 bp, synthetic construct
  source 1..20: mol_type = other DNA
tcagccccctgtaaatgaaa

SEQ ID NO: 264700 - DNA, 20 bp, synthetic construct
  source 1..20: mol_type = other DNA
atcagccccctgtaaatgaa

SEQ ID NO: 264701 - DNA, 20 bp, synthetic construct
  source 1..20: mol_type = other DNA
catcagccccctgtaaatga

SEQ ID NO: 264702 - DNA, 20 bp, synthetic construct
  source 1..20: mol_type = other DNA
ccatcagccccctgtaaatg

SEQ ID NO: 264703 - DNA, 20 bp, synthetic construct
  source 1..20: mol_type = other DNA
accatcagccccctgtaaat

SEQ ID NO: 264704 - DNA, 20 bp, synthetic construct
  source 1..20: mol_type = other DNA
taccatcagccccctgtaaa

SEQ ID NO: 264705 - DNA, 20 bp, synthetic construct
  source 1..20: mol_type = other DNA
ttaccatcagccccctgtaa

SEQ ID NO: 264706 - DNA, 20 bp, synthetic construct
  source 1..20: mol_type = other DNA
tttaccatcagccccctgta

SEQ ID NO: 264707 - DNA, 20 bp, synthetic construct
  source 1..20: mol_type = other DNA
ttttaccatcagccccctgt

SEQ ID NO: 264708 - DNA, 20 bp, synthetic construct
  source 1..20: mol_type = other DNA
gttttaccatcagccccctg

SEQ ID NO: 264709 - DNA, 20 bp, synthetic construct
  source 1..20: mol_type = other DNA
cgttttaccatcagccccct

SEQ ID NO: 264710 - DNA, 20 bp, synthetic construct
  source 1..20: mol_type = other DNA
tcgttttaccatcagccccc

SEQ ID NO: 264711 - DNA, 20 bp, synthetic construct
  source 1..20: mol_type = other DNA
ttcgttttaccatcagcccc

SEQ ID NO: 264712 - DNA, 20 bp, synthetic construct
  source 1..20: mol_type = other DNA
cttcgttttaccatcagccc

SEQ ID NO: 264713 - DNA, 20 bp, synthetic construct
  source 1..20: mol_type = other DNA
tcttcgttttaccatcagcc

SEQ ID NO: 264714 - DNA, 20 bp, synthetic construct
  source 1..20: mol_type = other DNA
atcttcgttttaccatcagc

SEQ ID NO: 264715 - DNA, 20 bp, synthetic construct
  source 1..20: mol_type = other DNA
gatcttcgttttaccatcag

SEQ ID NO: 264716 - DNA, 20 bp, synthetic construct
  source 1..20: mol_type = other DNA
cgatcttcgttttaccatca

SEQ ID NO: 264717 - DNA, 20 bp, synthetic construct
  source 1..20: mol_type = other DNA
gcgatcttcgttttaccatc

SEQ ID NO: 264718 - DNA, 20 bp, synthetic construct
  source 1..20: mol_type = other DNA
ggcgatcttcgttttaccat

SEQ ID NO: 264719 - DNA, 20 bp, synthetic construct
  source 1..20: mol_type = other DNA
tggcgatcttcgttttacca

SEQ ID NO: 264720 - DNA, 20 bp, synthetic construct
  source 1..20: mol_type = other DNA
gtggcgatcttcgttttacc

SEQ ID NO: 264721 - DNA, 20 bp, synthetic construct
  source 1..20: mol_type = other DNA
tgtggcgatcttcgttttac

SEQ ID NO: 264722 - DNA, 20 bp, synthetic construct
  source 1..20: mol_type = other DNA
gtgtggcgatcttcgtttta

SEQ ID NO: 264723 - DNA, 20 bp, synthetic construct
  source 1..20: mol_type = other DNA
ggtgtggcgatcttcgtttt

SEQ ID NO: 264724 - DNA, 20 bp, synthetic construct
  source 1..20: mol_type = other DNA
cggtgtggcgatcttcgttt

SEQ ID NO: 264725 - DNA, 20 bp, synthetic construct
  source 1..20: mol_type = other DNA
gcggtgtggcgatcttcgtt

SEQ ID NO: 264726 - DNA, 20 bp, synthetic construct
  source 1..20: mol_type = other DNA
cgcggtgtggcgatcttcgt

SEQ ID NO: 264727 - DNA, 20 bp, synthetic construct
  source 1..20: mol_type = other DNA
ccgcggtgtggcgatcttcg

SEQ ID NO: 264728 - DNA, 20 bp, synthetic construct
  source 1..20: mol_type = other DNA
cccgcggtgtggcgatcttc

SEQ ID NO: 264729 - DNA, 20 bp, synthetic construct
  source 1..20: mol_type = other DNA
ccccgcggtgtggcgatctt

SEQ ID NO: 264730 - DNA, 20 bp, synthetic construct
  source 1..20: mol_type = other DNA
tccccgcggtgtggcgatct

SEQ ID NO: 264731 - DNA, 20 bp, synthetic construct
  source 1..20: mol_type = other DNA
ctccccgcggtgtggcgatc

SEQ ID NO: 264732 - DNA, 20 bp, synthetic construct
  source 1..20: mol_type = other DNA
gctccccgcggtgtggcgat

SEQ ID NO: 264733 - DNA, 20 bp, synthetic construct
  source 1..20: mol_type = other DNA
tgctccccgcggtgtggcga

SEQ ID NO: 264734 - DNA, 20 bp, synthetic construct
  source 1..20: mol_type = other DNA
ctgctccccgcggtgtggcg

SEQ ID NO: 264735 - DNA, 20 bp, synthetic construct
  source 1..20: mol_type = other DNA
gctgctccccgcggtgtggc

SEQ ID NO: 264736 - DNA, 20 bp, synthetic construct
  source 1..20: mol_type = other DNA
ggctgctccccgcggtgtgg

SEQ ID NO: 264737 - DNA, 20 bp, synthetic construct
  source 1..20: mol_type = other DNA
gggctgctccccgcggtgtg

SEQ ID NO: 264738 - DNA, 20 bp, synthetic construct
  source 1..20: mol_type = other DNA
ggggctgctccccgcggtgt

SEQ ID NO: 264739 - DNA, 20 bp, synthetic construct
  source 1..20: mol_type = other DNA
aggggctgctccccgcggtg

SEQ ID NO: 264740 - DNA, 20 bp, synthetic construct
  source 1..20: mol_type = other DNA
gaggggctgctccccgcggt

SEQ ID NO: 264741 - DNA, 20 bp, synthetic construct
  source 1..20: mol_type = other DNA
ggaggggctgctccccgcgg

SEQ ID NO: 264742 - DNA, 20 bp, synthetic construct
  source 1..20: mol_type = other DNA
tggaggggctgctccccgcg

SEQ ID NO: 264743 - DNA, 20 bp, synthetic construct
  source 1..20: mol_type = other DNA
ctggaggggctgctccccgc

SEQ ID NO: 264744 - DNA, 20 bp, synthetic construct
  source 1..20: mol_type = other DNA
cctggaggggctgctccccg

SEQ ID NO: 264745 - DNA, 20 bp, synthetic construct
  source 1..20: mol_type = other DNA
gcctggaggggctgctcccc

SEQ ID NO: 264746 - DNA, 20 bp, synthetic construct
  source 1..20: mol_type = other DNA
ggcctggaggggctgctccc

SEQ ID NO: 264747 - DNA, 20 bp, synthetic construct
  source 1..20: mol_type = other DNA
tggcctggaggggctgctcc

SEQ ID NO: 264748 - DNA, 20 bp, synthetic construct
  source 1..20: mol_type = other DNA
ctggcctggaggggctgctc

SEQ ID NO: 264749 - DNA, 20 bp, synthetic construct
  source 1..20: mol_type = other DNA
tctggcctggaggggctgct

SEQ ID NO: 264750 - DNA, 20 bp, synthetic construct
  source 1..20: mol_type = other DNA
ttctggcctggaggggctgc

SEQ ID NO: 264751 - DNA, 20 bp, synthetic construct
  source 1..20: mol_type = other DNA
cttctggcctggaggggctg

SEQ ID NO: 264752 - DNA, 20 bp, synthetic construct
  source 1..20: mol_type = other DNA
ccttctggcctggaggggct

SEQ ID NO: 264753 - DNA, 20 bp, synthetic construct
  source 1..20: mol_type = other DNA
cccttctggcctggaggggc

SEQ ID NO: 264754 - DNA, 20 bp, synthetic construct
  source 1..20: mol_type = other DNA
gcccttctggcctggagggg

SEQ ID NO: 264755 - DNA, 20 bp, synthetic construct
  source 1..20: mol_type = other DNA
ggcccttctggcctggaggg

SEQ ID NO: 264756 - DNA, 20 bp, synthetic construct
  source 1..20: mol_type = other DNA
tggcccttctggcctggagg

SEQ ID NO: 264757 - DNA, 20 bp, synthetic construct
  source 1..20: mol_type = other DNA
ctggcccttctggcctggag

SEQ ID NO: 264758 - DNA, 20 bp, synthetic construct
  source 1..20: mol_type = other DNA
cctggcccttctggcctgga

SEQ ID NO: 264759 - DNA, 20 bp, synthetic construct
  source 1..20: mol_type = other DNA
gcctggcccttctggcctgg

SEQ ID NO: 264760 - DNA, 20 bp, synthetic construct
  source 1..20: mol_type = other DNA
ggcctggcccttctggcctg

SEQ ID NO: 264761 - DNA, 20 bp, synthetic construct
  source 1..20: mol_type = other DNA
tggcctggcccttctggcct

SEQ ID NO: 264762 - DNA, 20 bp, synthetic construct
  source 1..20: mol_type = other DNA
ttggcctggcccttctggcc

SEQ ID NO: 264763 - DNA, 20 bp, synthetic construct
  source 1..20: mol_type = other DNA
gttggcctggcccttctggc

SEQ ID NO: 264764 - DNA, 20 bp, synthetic construct
  source 1..20: mol_type = other DNA
cgttggcctggcccttctgg

SEQ ID NO: 264765 - DNA, 20 bp, synthetic construct
  source 1..20: mol_type = other DNA
gcgttggcctggcccttctg

SEQ ID NO: 264766 - DNA, 20 bp, synthetic construct
  source 1..20: mol_type = other DNA
ggcgttggcctggcccttct

SEQ ID NO: 264767 - DNA, 20 bp, synthetic construct
  source 1..20: mol_type = other DNA
tggcgttggcctggcccttc

SEQ ID NO: 264768 - DNA, 20 bp, synthetic construct
  source 1..20: mol_type = other DNA
gtggcgttggcctggccctt

SEQ ID NO: 264769 - DNA, 20 bp, synthetic construct
  source 1..20: mol_type = other DNA
ggtggcgttggcctggccct

SEQ ID NO: 264770 - DNA, 20 bp, synthetic construct
  source 1..20: mol_type = other DNA
tggtggcgttggcctggccc

SEQ ID NO: 264771 - DNA, 20 bp, synthetic construct
  source 1..20: mol_type = other DNA
ctggtggcgttggcctggcc

SEQ ID NO: 264772 - DNA, 20 bp, synthetic construct
  source 1..20: mol_type = other DNA
cctggtggcgttggcctggc

SEQ ID NO: 264773 - DNA, 20 bp, synthetic construct
  source 1..20: mol_type = other DNA
tcctggtggcgttggcctgg

SEQ ID NO: 264774 - DNA, 20 bp, synthetic construct
  source 1..20: mol_type = other DNA
atcctggtggcgttggcctg

SEQ ID NO: 264775 - DNA, 20 bp, synthetic construct
  source 1..20: mol_type = other DNA
aatcctggtggcgttggcct

SEQ ID NO: 264776 - DNA, 20 bp, synthetic construct
  source 1..20: mol_type = other DNA
gaatcctggtggcgttggcc

SEQ ID NO: 264777 - DNA, 20 bp, synthetic construct
  source 1..20: mol_type = other DNA
ggaatcctggtggcgttggc

SEQ ID NO: 264778 - DNA, 20 bp, synthetic construct
  source 1..20: mol_type = other DNA
tggaatcctggtggcgttgg

SEQ ID NO: 264779 - DNA, 20 bp, synthetic construct
  source 1..20: mol_type = other DNA
ctggaatcctggtggcgttg

SEQ ID NO: 264780 - DNA, 20 bp, synthetic construct
  source 1..20: mol_type = other DNA
gctggaatcctggtggcgtt

SEQ ID NO: 264781 - DNA, 20 bp, synthetic construct
  source 1..20: mol_type = other DNA
tgctggaatcctggtggcgt

SEQ ID NO: 264782 - DNA, 20 bp, synthetic construct
  source 1..20: mol_type = other DNA
ttgctggaatcctggtggcg

SEQ ID NO: 264783 - DNA, 20 bp, synthetic construct
  source 1..20: mol_type = other DNA
tttgctggaatcctggtggc

SEQ ID NO: 264784 - DNA, 20 bp, synthetic construct
  source 1..20: mol_type = other DNA
ttttgctggaatcctggtgg

SEQ ID NO: 264785 - DNA, 20 bp, synthetic construct
  source 1..20: mol_type = other DNA
tttttgctggaatcctggtg

SEQ ID NO: 264786 - DNA, 20 bp, synthetic construct
  source 1..20: mol_type = other DNA
gtttttgctggaatcctggt

SEQ ID NO: 264787 - DNA, 20 bp, synthetic construct
  source 1..20: mol_type = other DNA
ggtttttgctggaatcctgg

SEQ ID NO: 264788 - DNA, 20 bp, synthetic construct
  source 1..20: mol_type = other DNA
gggtttttgctggaatcctg

SEQ ID NO: 264789 - DNA, 20 bp, synthetic construct
  source 1..20: mol_type = other DNA
ggggtttttgctggaatcct

SEQ ID NO: 264790 - DNA, 20 bp, synthetic construct
  source 1..20: mol_type = other DNA
cggggtttttgctggaatcc

SEQ ID NO: 264791 - DNA, 20 bp, synthetic construct
  source 1..20: mol_type = other DNA
gcggggtttttgctggaatc

SEQ ID NO: 264792 - DNA, 20 bp, synthetic construct
  source 1..20: mol_type = other DNA
ggcggggtttttgctggaat

SEQ ID NO: 264793 - DNA, 20 bp, synthetic construct
  source 1..20: mol_type = other DNA
gggcggggtttttgctggaa

SEQ ID NO: 264794 - DNA, 20 bp, synthetic construct
  source 1..20: mol_type = other DNA
cgggcggggtttttgctgga

SEQ ID NO: 264795 - DNA, 20 bp, synthetic construct
  source 1..20: mol_type = other DNA
gcgggcggggtttttgctgg

SEQ ID NO: 264796 - DNA, 20 bp, synthetic construct
  source 1..20: mol_type = other DNA
agcgggcggggtttttgctg

SEQ ID NO: 264797 - DNA, 20 bp, synthetic construct
  source 1..20: mol_type = other DNA
gagcgggcggggtttttgct

SEQ ID NO: 264798 - DNA, 20 bp, synthetic construct
  source 1..20: mol_type = other DNA
ggagcgggcggggtttttgc

SEQ ID NO: 264799 - DNA, 20 bp, synthetic construct
  source 1..20: mol_type = other DNA
tggagcgggcggggtttttg

SEQ ID NO: 264800 - DNA, 20 bp, synthetic construct
  source 1..20: mol_type = other DNA
ttggagcgggcggggttttt

SEQ ID NO: 264801 - DNA, 20 bp, synthetic construct
  source 1..20: mol_type = other DNA
tttggagcgggcggggtttt

SEQ ID NO: 264802 - DNA, 20 bp, synthetic construct
  source 1..20: mol_type = other DNA
ctttggagcgggcggggttt

SEQ ID NO: 264803 - DNA, 20 bp, synthetic construct
  source 1..20: mol_type = other DNA
tctttggagcgggcggggtt

SEQ ID NO: 264804 - DNA, 20 bp, synthetic construct
  source 1..20: mol_type = other DNA
gtctttggagcgggcggggt

SEQ ID NO: 264805 - DNA, 20 bp, synthetic construct
  source 1..20: mol_type = other DNA
tgtctttggagcgggcgggg

SEQ ID NO: 264806 - DNA, 20 bp, synthetic construct
  source 1..20: mol_type = other DNA
gtgtctttggagcgggcggg

SEQ ID NO: 264807 - DNA, 20 bp, synthetic construct
  source 1..20: mol_type = other DNA
ggtgtctttggagcgggcgg

SEQ ID NO: 264808 - DNA, 20 bp, synthetic construct
  source 1..20: mol_type = other DNA
tggtgtctttggagcgggcg

SEQ ID NO: 264809 - DNA, 20 bp, synthetic construct
  source 1..20: mol_type = other DNA
gtggtgtctttggagcgggc

SEQ ID NO: 264810 - DNA, 20 bp, synthetic construct
  source 1..20: mol_type = other DNA
ggtggtgtctttggagcggg

SEQ ID NO: 264811 - DNA, 20 bp, synthetic construct
  source 1..20: mol_type = other DNA
gggtggtgtctttggagcgg

SEQ ID NO: 264812 - DNA, 20 bp, synthetic construct
  source 1..20: mol_type = other DNA
tgggtggtgtctttggagcg

SEQ ID NO: 264813 - DNA, 20 bp, synthetic construct
  source 1..20: mol_type = other DNA
ctgggtggtgtctttggagc

SEQ ID NO: 264814 - DNA, 20 bp, synthetic construct
  source 1..20: mol_type = other DNA
gctgggtggtgtctttggag

SEQ ID NO: 264815 - DNA, 20 bp, synthetic construct
  source 1..20: mol_type = other DNA
agctgggtggtgtctttgga

SEQ ID NO: 264816 - DNA, 20 bp, synthetic construct
  source 1..20: mol_type = other DNA
gagctgggtggtgtctttgg

SEQ ID NO: 264817 - DNA, 20 bp, synthetic construct
  source 1..20: mol_type = other DNA
agagctgggtggtgtctttg

SEQ ID NO: 264818 - DNA, 20 bp, synthetic construct
  source 1..20: mol_type = other DNA
cagagctgggtggtgtcttt

SEQ ID NO: 264819 - DNA, 20 bp, synthetic construct
  source 1..20: mol_type = other DNA
ccagagctgggtggtgtctt

SEQ ID NO: 264820 - DNA, 20 bp, synthetic construct
  source 1..20: mol_type = other DNA
accagagctgggtggtgtct

SEQ ID NO: 264821 - DNA, 20 bp, synthetic construct
  source 1..20: mol_type = other DNA
taccagagctgggtggtgtc

SEQ ID NO: 264822 - DNA, 20 bp, synthetic construct
  source 1..20: mol_type = other DNA
ttaccagagctgggtggtgt

SEQ ID NO: 264823 - DNA, 20 bp, synthetic construct
  source 1..20: mol_type = other DNA
cttaccagagctgggtggtg

SEQ ID NO: 264824 - DNA, 20 bp, synthetic construct
  source 1..20: mol_type = other DNA
tcttaccagagctgggtggt

SEQ ID NO: 264825 - DNA, 20 bp, synthetic construct
  source 1..20: mol_type = other DNA
ttcttaccagagctgggtgg

SEQ ID NO: 264826 - DNA, 20 bp, synthetic construct
  source 1..20: mol_type = other DNA
cttcttaccagagctgggtg

SEQ ID NO: 264827 - DNA, 20 bp, synthetic construct
  source 1..20: mol_type = other DNA
tcttcttaccagagctgggt

SEQ ID NO: 264828 - DNA, 20 bp, synthetic construct
  source 1..20: mol_type = other DNA
ttcttcttaccagagctggg

SEQ ID NO: 264829 - DNA, 20 bp, synthetic construct
  source 1..20: mol_type = other DNA
gttcttcttaccagagctgg

SEQ ID NO: 264830 - DNA, 20 bp, synthetic construct
  source 1..20: mol_type = other DNA
cgttcttcttaccagagctg

SEQ ID NO: 264831 - DNA, 20 bp, synthetic construct
  source 1..20: mol_type = other DNA
acgttcttcttaccagagct

SEQ ID NO: 264832 - DNA, 20 bp, synthetic construct
  source 1..20: mol_type = other DNA
aacgttcttcttaccagagc

SEQ ID NO: 264833 - DNA, 20 bp, synthetic construct
  source 1..20: mol_type = other DNA
gaacgttcttcttaccagag

SEQ ID NO: 264834 - DNA, 20 bp, synthetic construct
  source 1..20: mol_type = other DNA
agaacgttcttcttaccaga

SEQ ID NO: 264835 - DNA, 20 bp, synthetic construct
  source 1..20: mol_type = other DNA
gagaacgttcttcttaccag

SEQ ID NO: 264836 - DNA, 20 bp, synthetic construct
  source 1..20: mol_type = other DNA
agagaacgttcttcttacca

SEQ ID NO: 264837 - DNA, 20 bp, synthetic construct
  source 1..20: mol_type = other DNA
aagagaacgttcttcttacc

SEQ ID NO: 264838 - DNA, 20 bp, synthetic construct
  source 1..20: mol_type = other DNA
caagagaacgttcttcttac

SEQ ID NO: 264839 - DNA, 20 bp, synthetic construct
  source 1..20: mol_type = other DNA
tcaagagaacgttcttctta

SEQ ID NO: 264840 - DNA, 20 bp, synthetic construct
  source 1..20: mol_type = other DNA
ttcaagagaacgttcttctt

SEQ ID NO: 264841 - DNA, 20 bp, synthetic construct
  source 1..20: mol_type = other DNA
attcaagagaacgttcttct

SEQ ID NO: 264842 - DNA, 20 bp, synthetic construct
  source 1..20: mol_type = other DNA
gattcaagagaacgttcttc

SEQ ID NO: 264843 - DNA, 20 bp, synthetic construct
  source 1..20: mol_type = other DNA
agattcaagagaacgttctt

SEQ ID NO: 264844 - DNA, 20 bp, synthetic construct
  source 1..20: mol_type = other DNA
aagattcaagagaacgttct

SEQ ID NO: 264845 - DNA, 20 bp, synthetic construct
  source 1..20: mol_type = other DNA
taagattcaagagaacgttc

SEQ ID NO: 264846 - DNA, 20 bp, synthetic construct
  source 1..20: mol_type = other DNA
ctaagattcaagagaacgtt

SEQ ID NO: 264847 - DNA, 20 bp, synthetic construct
  source 1..20: mol_type = other DNA
tctaagattcaagagaacgt

SEQ ID NO: 264848 - DNA, 20 bp, synthetic construct
  source 1..20: mol_type = other DNA
ctctaagattcaagagaacg

SEQ ID NO: 264849 - DNA, 20 bp, synthetic construct
  source 1..20: mol_type = other DNA
cctctaagattcaagagaac

SEQ ID NO: 264850 - DNA, 20 bp, synthetic construct
  source 1..20: mol_type = other DNA
tcctctaagattcaagagaa

SEQ ID NO: 264851 - DNA, 20 bp, synthetic construct
  source 1..20: mol_type = other DNA
ttcctctaagattcaagaga

SEQ ID NO: 264852 - DNA, 20 bp, synthetic construct
  source 1..20: mol_type = other DNA
cttcctctaagattcaagag

SEQ ID NO: 264853 - DNA, 20 bp, synthetic construct
  source 1..20: mol_type = other DNA
gcttcctctaagattcaaga

SEQ ID NO: 264854 - DNA, 20 bp, synthetic construct
  source 1..20: mol_type = other DNA
agcttcctctaagattcaag

SEQ ID NO: 264855 - DNA, 20 bp, synthetic construct
  source 1..20: mol_type = other DNA
cagcttcctctaagattcaa

SEQ ID NO: 264856 - DNA, 20 bp, synthetic construct
  source 1..20: mol_type = other DNA
tcagcttcctctaagattca

SEQ ID NO: 264857 - DNA, 20 bp, synthetic construct
  source 1..20: mol_type = other DNA
ttcagcttcctctaagattc

SEQ ID NO: 264858 - DNA, 20 bp, synthetic construct
  source 1..20: mol_type = other DNA
cttcagcttcctctaagatt

SEQ ID NO: 264859 - DNA, 20 bp, synthetic construct
  source 1..20: mol_type = other DNA
gcttcagcttcctctaagat

SEQ ID NO: 264860 - DNA, 20 bp, synthetic construct
  source 1..20: mol_type = other DNA
agcttcagcttcctctaaga

SEQ ID NO: 264861 - DNA, 20 bp, synthetic construct
  source 1..20: mol_type = other DNA
gagcttcagcttcctctaag

SEQ ID NO: 264862 - DNA, 20 bp, synthetic construct
  source 1..20: mol_type = other DNA
agagcttcagcttcctctaa

SEQ ID NO: 264863 - DNA, 20 bp, synthetic construct
  source 1..20: mol_type = other DNA
gagagcttcagcttcctcta

SEQ ID NO: 264864 - DNA, 20 bp, synthetic construct
  source 1..20: mol_type = other DNA
tgagagcttcagcttcctct

SEQ ID NO: 264865 - DNA, 20 bp, synthetic construct
  source 1..20: mol_type = other DNA
ctgagagcttcagcttcctc

SEQ ID NO: 264866 - DNA, 20 bp, synthetic construct
  source 1..20: mol_type = other DNA
tctgagagcttcagcttcct

SEQ ID NO: 264867 - DNA, 20 bp, synthetic construct
  source 1..20: mol_type = other DNA
ctctgagagcttcagcttcc

SEQ ID NO: 264868 - DNA, 20 bp, synthetic construct
  source 1..20: mol_type = other DNA
cctctgagagcttcagcttc

SEQ ID NO: 264869 - DNA, 20 bp, synthetic construct
  source 1..20: mol_type = other DNA
acctctgagagcttcagctt

SEQ ID NO: 264870 - DNA, 20 bp, synthetic construct
  source 1..20: mol_type = other DNA
tacctctgagagcttcagct

SEQ ID NO: 264871 - DNA, 20 bp, synthetic construct
  source 1..20: mol_type = other DNA
gtacctctgagagcttcagc

SEQ ID NO: 264872 - DNA, 20 bp, synthetic construct
  source 1..20: mol_type = other DNA
tgtacctctgagagcttcag

SEQ ID NO: 264873 - DNA, 20 bp, synthetic construct
  source 1..20: mol_type = other DNA
ctgtacctctgagagcttca

SEQ ID NO: 264874 - DNA, 20 bp, synthetic construct
  source 1..20: mol_type = other DNA
gctgtacctctgagagcttc

SEQ ID NO: 264875 - DNA, 20 bp, synthetic construct
  source 1..20: mol_type = other DNA
ggctgtacctctgagagctt

SEQ ID NO: 264876 - DNA, 20 bp, synthetic construct
  source 1..20: mol_type = other DNA
aggctgtacctctgagagct

SEQ ID NO: 264877 - DNA, 20 bp, synthetic construct
  source 1..20: mol_type = other DNA
aaggctgtacctctgagagc

SEQ ID NO: 264878 - DNA, 20 bp, synthetic construct
  source 1..20: mol_type = other DNA
gaaggctgtacctctgagag

SEQ ID NO: 264879 - DNA, 20 bp, synthetic construct
  source 1..20: mol_type = other DNA
tgaaggctgtacctctgaga

SEQ ID NO: 264880 - DNA, 20 bp, synthetic construct
  source 1..20: mol_type = other DNA
atgaaggctgtacctctgag

SEQ ID NO: 264881 - DNA, 20 bp, synthetic construct
  source 1..20: mol_type = other DNA
aatgaaggctgtacctctga

SEQ ID NO: 264882 - DNA, 20 bp, synthetic construct
  source 1..20: mol_type = other DNA
aaatgaaggctgtacctctg

SEQ ID NO: 264883 - DNA, 20 bp, synthetic construct
  source 1..20: mol_type = other DNA
aaaatgaaggctgtacctct

SEQ ID NO: 264884 - DNA, 20 bp, synthetic construct
  source 1..20: mol_type = other DNA
taaaatgaaggctgtacctc

SEQ ID NO: 264885 - DNA, 20 bp, synthetic construct
  source 1..20: mol_type = other DNA
ctaaaatgaaggctgtacct

SEQ ID NO: 264886 - DNA, 20 bp, synthetic construct
  source 1..20: mol_type = other DNA
cctaaaatgaaggctgtacc

SEQ ID NO: 264887 - DNA, 20 bp, synthetic construct
  source 1..20: mol_type = other DNA
tcctaaaatgaaggctgtac

SEQ ID NO: 264888 - DNA, 20 bp, synthetic construct
  source 1..20: mol_type = other DNA
ctcctaaaatgaaggctgta

SEQ ID NO: 264889 - DNA, 20 bp, synthetic construct
  source 1..20: mol_type = other DNA
cctcctaaaatgaaggctgt

SEQ ID NO: 264890 - DNA, 20 bp, synthetic construct
  source 1..20: mol_type = other DNA
gcctcctaaaatgaaggctg

SEQ ID NO: 264891 - DNA, 20 bp, synthetic construct
  source 1..20: mol_type = other DNA
ggcctcctaaaatgaaggct

SEQ ID NO: 264892 - DNA, 20 bp, synthetic construct
  source 1..20: mol_type = other DNA
aggcctcctaaaatgaaggc

SEQ ID NO: 264893 - DNA, 20 bp, synthetic construct
  source 1..20: mol_type = other DNA
aaggcctcctaaaatgaagg

SEQ ID NO: 264894 - DNA, 20 bp, synthetic construct
  source 1..20: mol_type = other DNA
taaggcctcctaaaatgaag

SEQ ID NO: 264895 - DNA, 20 bp, synthetic construct
  source 1..20: mol_type = other DNA
ctaaggcctcctaaaatgaa

SEQ ID NO: 264896 - DNA, 20 bp, synthetic construct
  source 1..20: mol_type = other DNA
cctaaggcctcctaaaatga

SEQ ID NO: 264897 - DNA, 20 bp, synthetic construct
  source 1..20: mol_type = other DNA
gcctaaggcctcctaaaatg

SEQ ID NO: 264898 - DNA, 20 bp, synthetic construct
  source 1..20: mol_type = other DNA
ggcctaaggcctcctaaaat

SEQ ID NO: 264899 - DNA, 20 bp, synthetic construct
  source 1..20: mol_type = other DNA
tggcctaaggcctcctaaaa

SEQ ID NO: 264900 - DNA, 20 bp, synthetic construct
  source 1..20: mol_type = other DNA
gtggcctaaggcctcctaaa

SEQ ID NO: 264901 - DNA, 20 bp, synthetic construct
  source 1..20: mol_type = other DNA
agtggcctaaggcctcctaa

SEQ ID NO: 264902 - DNA, 20 bp, synthetic construct
  source 1..20: mol_type = other DNA
cagtggcctaaggcctccta

SEQ ID NO: 264903 - DNA, 20 bp, synthetic construct
  source 1..20: mol_type = other DNA
tcagtggcctaaggcctcct

SEQ ID NO: 264904 - DNA, 20 bp, synthetic construct
  source 1..20: mol_type = other DNA
ctcagtggcctaaggcctcc

SEQ ID NO: 264905 - DNA, 20 bp, synthetic construct
  source 1..20: mol_type = other DNA
tctcagtggcctaaggcctc

SEQ ID NO: 264906 - DNA, 20 bp, synthetic construct
  source 1..20: mol_type = other DNA
ttctcagtggcctaaggcct

SEQ ID NO: 264907 - DNA, 20 bp, synthetic construct
  source 1..20: mol_type = other DNA
attctcagtggcctaaggcc

SEQ ID NO: 264908 - DNA, 20 bp, synthetic construct
  source 1..20: mol_type = other DNA
cattctcagtggcctaaggc

SEQ ID NO: 264909 - DNA, 20 bp, synthetic construct
  source 1..20: mol_type = other DNA
tcattctcagtggcctaagg

SEQ ID NO: 264910 - DNA, 20 bp, synthetic construct
  source 1..20: mol_type = other DNA
ttcattctcagtggcctaag

SEQ ID NO: 264911 - DNA, 20 bp, synthetic construct
  source 1..20: mol_type = other DNA
attcattctcagtggcctaa

SEQ ID NO: 264912 - DNA, 20 bp, synthetic construct
  source 1..20: mol_type = other DNA
tattcattctcagtggccta

SEQ ID NO: 264913 - DNA, 20 bp, synthetic construct
  source 1..20: mol_type = other DNA
ttattcattctcagtggcct

SEQ ID NO: 264914 - DNA, 20 bp, synthetic construct
  source 1..20: mol_type = other DNA
gttattcattctcagtggcc

SEQ ID NO: 264915 - DNA, 20 bp, synthetic construct
  source 1..20: mol_type = other DNA
ggttattcattctcagtggc

SEQ ID NO: 264916 - DNA, 20 bp, synthetic construct
  source 1..20: mol_type = other DNA
gggttattcattctcagtgg

SEQ ID NO: 264917 - DNA, 20 bp, synthetic construct
  source 1..20: mol_type = other DNA
ggggttattcattctcagtg

SEQ ID NO: 264918 - DNA, 20 bp, synthetic construct
  source 1..20: mol_type = other DNA
aggggttattcattctcagt

SEQ ID NO: 264919 - DNA, 20 bp, synthetic construct
  source 1..20: mol_type = other DNA
caggggttattcattctcag

SEQ ID NO: 264920 - DNA, 20 bp, synthetic construct
  source 1..20: mol_type = other DNA
ccaggggttattcattctca

SEQ ID NO: 264921 - DNA, 20 bp, synthetic construct
  source 1..20: mol_type = other DNA
gccaggggttattcattctc

SEQ ID NO: 264922 - DNA, 20 bp, synthetic construct
  source 1..20: mol_type = other DNA
tgccaggggttattcattct

SEQ ID NO: 264923 - DNA, 20 bp, synthetic construct
  source 1..20: mol_type = other DNA
ctgccaggggttattcattc

SEQ ID NO: 264924 - DNA, 20 bp, synthetic construct
  source 1..20: mol_type = other DNA
gctgccaggggttattcatt

SEQ ID NO: 264925 - DNA, 20 bp, synthetic construct
  source 1..20: mol_type = other DNA
agctgccaggggttattcat

SEQ ID NO: 264926 - DNA, 20 bp, synthetic construct
  source 1..20: mol_type = other DNA
cagctgccaggggttattca

SEQ ID NO: 264927 - DNA, 20 bp, synthetic construct
  source 1..20: mol_type = other DNA
ccagctgccaggggttattc

SEQ ID NO: 264928 - DNA, 20 bp, synthetic construct
  source 1..20: mol_type = other DNA
accagctgccaggggttatt

SEQ ID NO: 264929 - DNA, 20 bp, synthetic construct
  source 1..20: mol_type = other DNA
gaccagctgccaggggttat

SEQ ID NO: 264930 - DNA, 20 bp, synthetic construct
  source 1..20: mol_type = other DNA
tgaccagctgccaggggtta

SEQ ID NO: 264931 - DNA, 20 bp, synthetic construct
  source 1..20: mol_type = other DNA
ctgaccagctgccaggggtt

SEQ ID NO: 264932 - DNA, 20 bp, synthetic construct
  source 1..20: mol_type = other DNA
gctgaccagctgccaggggt

SEQ ID NO: 264933 - DNA, 20 bp, synthetic construct
  source 1..20: mol_type = other DNA
tgctgaccagctgccagggg

SEQ ID NO: 264934 - DNA, 20 bp, synthetic construct
  source 1..20: mol_type = other DNA
ctgctgaccagctgccaggg

SEQ ID NO: 264935 - DNA, 20 bp, synthetic construct
  source 1..20: mol_type = other DNA
gctgctgaccagctgccagg

SEQ ID NO: 264936 - DNA, 20 bp, synthetic construct
  source 1..20: mol_type = other DNA
agctgctgaccagctgccag

SEQ ID NO: 264937 - DNA, 20 bp, synthetic construct
  source 1..20: mol_type = other DNA
aagctgctgaccagctgcca

SEQ ID NO: 264938 - DNA, 20 bp, synthetic construct
  source 1..20: mol_type = other DNA
caagctgctgaccagctgcc

SEQ ID NO: 264939 - DNA, 20 bp, synthetic construct
  source 1..20: mol_type = other DNA
gcaagctgctgaccagctgc

SEQ ID NO: 264940 - DNA, 20 bp, synthetic construct
  source 1..20: mol_type = other DNA
tgcaagctgctgaccagctg

SEQ ID NO: 264941 - DNA, 20 bp, synthetic construct
  source 1..20: mol_type = other DNA
ctgcaagctgctgaccagct

SEQ ID NO: 264942 - DNA, 20 bp, synthetic construct
  source 1..20: mol_type = other DNA
actgcaagctgctgaccagc

SEQ ID NO: 264943 - DNA, 20 bp, synthetic construct
  source 1..20: mol_type = other DNA
aactgcaagctgctgaccag

SEQ ID NO: 264944 - DNA, 20 bp, synthetic construct
  source 1..20: mol_type = other DNA
aaactgcaagctgctgacca

SEQ ID NO: 264945 - DNA, 20 bp, synthetic construct
  source 1..20: mol_type = other DNA
taaactgcaagctgctgacc

SEQ ID NO: 264946 - DNA, 20 bp, synthetic construct
  source 1..20: mol_type = other DNA
gtaaactgcaagctgctgac

SEQ ID NO: 264947 - DNA, 20 bp, synthetic construct
  source 1..20: mol_type = other DNA
agtaaactgcaagctgctga

SEQ ID NO: 264948 - DNA, 20 bp, synthetic construct
  source 1..20: mol_type = other DNA
tagtaaactgcaagctgctg

SEQ ID NO: 264949 - DNA, 20 bp, synthetic construct
  source 1..20: mol_type = other DNA
ttagtaaactgcaagctgct

SEQ ID NO: 264950 - DNA, 20 bp, synthetic construct
  source 1..20: mol_type = other DNA
cttagtaaactgcaagctgc

SEQ ID NO: 264951 - DNA, 20 bp, synthetic construct
  source 1..20: mol_type = other DNA
gcttagtaaactgcaagctg

SEQ ID NO: 264952 - DNA, 20 bp, synthetic construct
  source 1..20: mol_type = other DNA
tgcttagtaaactgcaagct

SEQ ID NO: 264953 - DNA, 20 bp, synthetic construct
  source 1..20: mol_type = other DNA
gtgcttagtaaactgcaagc

SEQ ID NO: 264954 - DNA, 20 bp, synthetic construct
  source 1..20: mol_type = other DNA
agtgcttagtaaactgcaag

SEQ ID NO: 264955 - DNA, 20 bp, synthetic construct
  source 1..20: mol_type = other DNA
cagtgcttagtaaactgcaa

SEQ ID NO: 264956 - DNA, 20 bp, synthetic construct
  source 1..20: mol_type = other DNA
ccagtgcttagtaaactgca

SEQ ID NO: 264957 - DNA, 20 bp, synthetic construct
  source 1..20: mol_type = other DNA
tccagtgcttagtaaactgc

SEQ ID NO: 264958 - DNA, 20 bp, synthetic construct
  source 1..20: mol_type = other DNA
ctccagtgcttagtaaactg

SEQ ID NO: 264959 - DNA, 20 bp, synthetic construct
  source 1..20: mol_type = other DNA
actccagtgcttagtaaact

SEQ ID NO: 264960 - DNA, 20 bp, synthetic construct
  source 1..20: mol_type = other DNA
gactccagtgcttagtaaac

SEQ ID NO: 264961 - DNA, 20 bp, synthetic construct
  source 1..20: mol_type = other DNA
agactccagtgcttagtaaa

SEQ ID NO: 264962 - DNA, 20 bp, synthetic construct
  source 1..20: mol_type = other DNA
aagactccagtgcttagtaa

SEQ ID NO: 264963 - DNA, 20 bp, synthetic construct
  source 1..20: mol_type = other DNA
gaagactccagtgcttagta

SEQ ID NO: 264964 - DNA, 20 bp, synthetic construct
  source 1..20: mol_type = other DNA
tgaagactccagtgcttagt

SEQ ID NO: 264965 - DNA, 20 bp, synthetic construct
  source 1..20: mol_type = other DNA
atgaagactccagtgcttag

SEQ ID NO: 264966 - DNA, 20 bp, synthetic construct
  source 1..20: mol_type = other DNA
aatgaagactccagtgctta

SEQ ID NO: 264967 - DNA, 20 bp, synthetic construct
  source 1..20: mol_type = other DNA
caatgaagactccagtgctt

SEQ ID NO: 264968 - DNA, 20 bp, synthetic construct
  source 1..20: mol_type = other DNA
gcaatgaagactccagtgct

SEQ ID NO: 264969 - DNA, 20 bp, synthetic construct
  source 1..20: mol_type = other DNA
ggcaatgaagactccagtgc

SEQ ID NO: 264970 - DNA, 20 bp, synthetic construct
  source 1..20: mol_type = other DNA
aggcaatgaagactccagtg

SEQ ID NO: 264971 - DNA, 20 bp, synthetic construct
  source 1..20: mol_type = other DNA
aaggcaatgaagactccagt

SEQ ID NO: 264972 - DNA, 20 bp, synthetic construct
  source 1..20: mol_type = other DNA
gaaggcaatgaagactccag

SEQ ID NO: 264973 - DNA, 20 bp, synthetic construct
  source 1..20: mol_type = other DNA
agaaggcaatgaagactcca

SEQ ID NO: 264974 - DNA, 20 bp, synthetic construct
  source 1..20: mol_type = other DNA
gagaaggcaatgaagactcc

SEQ ID NO: 264975 - DNA, 20 bp, synthetic construct
  source 1..20: mol_type = other DNA
tgagaaggcaatgaagactc

SEQ ID NO: 264976 - DNA, 20 bp, synthetic construct
  source 1..20: mol_type = other DNA
ctgagaaggcaatgaagact

SEQ ID NO: 264977 - DNA, 20 bp, synthetic construct
  source 1..20: mol_type = other DNA
actgagaaggcaatgaagac

SEQ ID NO: 264978 - DNA, 20 bp, synthetic construct
  source 1..20: mol_type = other DNA
gactgagaaggcaatgaaga

SEQ ID NO: 264979 - DNA, 20 bp, synthetic construct
  source 1..20: mol_type = other DNA
ggactgagaaggcaatgaag

SEQ ID NO: 264980 - DNA, 20 bp, synthetic construct
  source 1..20: mol_type = other DNA
aggactgagaaggcaatgaa

SEQ ID NO: 264981 - DNA, 20 bp, synthetic construct
  source 1..20: mol_type = other DNA
aaggactgagaaggcaatga

SEQ ID NO: 264982 - DNA, 20 bp, synthetic construct
  source 1..20: mol_type = other DNA
aaaggactgagaaggcaatg

SEQ ID NO: 264983 - DNA, 20 bp, synthetic construct
  source 1..20: mol_type = other DNA
aaaaggactgagaaggcaat

SEQ ID NO: 264984 - DNA, 20 bp, synthetic construct
  source 1..20: mol_type = other DNA
caaaaggactgagaaggcaa

SEQ ID NO: 264985 - DNA, 20 bp, synthetic construct
  source 1..20: mol_type = other DNA
tcaaaaggactgagaaggca

SEQ ID NO: 264986 - DNA, 20 bp, synthetic construct
  source 1..20: mol_type = other DNA
atcaaaaggactgagaaggc

SEQ ID NO: 264987 - DNA, 20 bp, synthetic construct
  source 1..20: mol_type = other DNA
aatcaaaaggactgagaagg

SEQ ID NO: 264988 - DNA, 20 bp, synthetic construct
  source 1..20: mol_type = other DNA
aaatcaaaaggactgagaag

SEQ ID NO: 264989 - DNA, 20 bp, synthetic construct
  source 1..20: mol_type = other DNA
gaaatcaaaaggactgagaa

SEQ ID NO: 264990 - DNA, 20 bp, synthetic construct
  source 1..20: mol_type = other DNA
agaaatcaaaaggactgaga

SEQ ID NO: 264991 - DNA, 20 bp, synthetic construct
  source 1..20: mol_type = other DNA
cagaaatcaaaaggactgag

SEQ ID NO: 264992 - DNA, 20 bp, synthetic construct
  source 1..20: mol_type = other DNA
tcagaaatcaaaaggactga

SEQ ID NO: 264993 - DNA, 20 bp, synthetic construct
  source 1..20: mol_type = other DNA
ctcagaaatcaaaaggactg

SEQ ID NO: 264994 - DNA, 20 bp, synthetic construct
  source 1..20: mol_type = other DNA
cctcagaaatcaaaaggact

SEQ ID NO: 264995 - DNA, 20 bp, synthetic construct
  source 1..20: mol_type = other DNA
gcctcagaaatcaaaaggac

SEQ ID NO: 264996 - DNA, 20 bp, synthetic construct
  source 1..20: mol_type = other DNA
tgcctcagaaatcaaaagga

SEQ ID NO: 264997 - DNA, 20 bp, synthetic construct
  source 1..20: mol_type = other DNA
ttgcctcagaaatcaaaagg

SEQ ID NO: 264998 - DNA, 20 bp, synthetic construct
  source 1..20: mol_type = other DNA
tttgcctcagaaatcaaaag

SEQ ID NO: 264999 - DNA, 20 bp, synthetic construct
  source 1..20: mol_type = other DNA
atttgcctcagaaatcaaaa

SEQ ID NO: 265000 - DNA, 20 bp, synthetic construct
  source 1..20: mol_type = other DNA
catttgcctcagaaatcaaa

SEQ ID NO: 265001 - DNA, 20 bp, synthetic construct
  source 1..20: mol_type = other DNA
acatttgcctcagaaatcaa

SEQ ID NO: 265002 - DNA, 20 bp, synthetic construct
  source 1..20: mol_type = other DNA
aacatttgcctcagaaatca

SEQ ID NO: 265003 - DNA, 20 bp, synthetic construct
  source 1..20: mol_type = other DNA
caacatttgcctcagaaatc

SEQ ID NO: 265004 - DNA, 20 bp, synthetic construct
  source 1..20: mol_type = other DNA
tcaacatttgcctcagaaat

SEQ ID NO: 265005 - DNA, 20 bp, synthetic construct
  source 1..20: mol_type = other DNA
ttcaacatttgcctcagaaa

SEQ ID NO: 265006 - DNA, 20 bp, synthetic construct
  source 1..20: mol_type = other DNA
attcaacatttgcctcagaa

SEQ ID NO: 265007 - DNA, 20 bp, synthetic construct
  source 1..20: mol_type = other DNA
gattcaacatttgcctcaga

SEQ ID NO: 265008 - DNA, 20 bp, synthetic construct
  source 1..20: mol_type = other DNA
ggattcaacatttgcctcag

SEQ ID NO: 265009 - DNA, 20 bp, synthetic construct
  source 1..20: mol_type = other DNA
gggattcaacatttgcctca

SEQ ID NO: 265010 - DNA, 20 bp, synthetic construct
  source 1..20: mol_type = other DNA
agggattcaacatttgcctc

SEQ ID NO: 265011 - DNA, 20 bp, synthetic construct
  source 1..20: mol_type = other DNA
tagggattcaacatttgcct

SEQ ID NO: 265012 - DNA, 20 bp, synthetic construct
  source 1..20: mol_type = other DNA
gtagggattcaacatttgcc

SEQ ID NO: 265013 - DNA, 20 bp, synthetic construct
  source 1..20: mol_type = other DNA
ggtagggattcaacatttgc

SEQ ID NO: 265014 - DNA, 20 bp, synthetic construct
  source 1..20: mol_type = other DNA
aggtagggattcaacatttg

SEQ ID NO: 265015 - DNA, 20 bp, synthetic construct
  source 1..20: mol_type = other DNA
aaggtagggattcaacattt

SEQ ID NO: 265016 - DNA, 20 bp, synthetic construct
  source 1..20: mol_type = other DNA
aaaggtagggattcaacatt

SEQ ID NO: 265017 - DNA, 20 bp, synthetic construct
  source 1..20: mol_type = other DNA
aaaaggtagggattcaacat

SEQ ID NO: 265018 - DNA, 20 bp, synthetic construct
  source 1..20: mol_type = other DNA
aaaaaggtagggattcaaca

SEQ ID NO: 265019 - DNA, 20 bp, synthetic construct
  source 1..20: mol_type = other DNA
aaaaaaggtagggattcaac

SEQ ID NO: 265020 - DNA, 20 bp, synthetic construct
  source 1..20: mol_type = other DNA
aaaaaaaggtagggattcaa

SEQ ID NO: 265021 - DNA, 20 bp, synthetic construct
  source 1..20: mol_type = other DNA
aaaaaaaaggtagggattca

SEQ ID NO: 265022 - DNA, 20 bp, synthetic construct
  source 1..20: mol_type = other DNA
aaaaaaaaaggtagggattc

SEQ ID NO: 265023 - DNA, 20 bp, synthetic construct
  source 1..20: mol_type = other DNA
aaaaaaaaaaggtagggatt

SEQ ID NO: 265024 - DNA, 20 bp, synthetic construct
  source 1..20: mol_type = other DNA
aaaaaaaaaaaggtagggat

SEQ ID NO: 265025 - DNA, 20 bp, synthetic construct
  source 1..20: mol_type = other DNA
aaaaaaaaaaaaggtaggga

SEQ ID NO: 265026 - DNA, 20 bp, synthetic construct
  source 1..20: mol_type = other DNA
aaaaaaaaaaaaaggtaggg

SEQ ID NO: 265027 - DNA, 20 bp, synthetic construct
  source 1..20: mol_type = other DNA
aaaaaaaaaaaaaaggtagg

SEQ ID NO: 265028 - DNA, 20 bp, synthetic construct
  source 1..20: mol_type = other DNA
aaaaaaaaaaaaaaaggtag

SEQ ID NO: 265029 - DNA, 20 bp, synthetic construct
  source 1..20: mol_type = other DNA
gaaaaaaaaaaaaaaaggta

SEQ ID NO: 265030 - DNA, 20 bp, synthetic construct
  source 1..20: mol_type = other DNA
agaaaaaaaaaaaaaaaggt

SEQ ID NO: 265031 - DNA, 20 bp, synthetic construct
  source 1..20: mol_type = other DNA
aagaaaaaaaaaaaaaaagg

SEQ ID NO: 265032 - DNA, 20 bp, synthetic construct
  source 1..20: mol_type = other DNA
aaagaaaaaaaaaaaaaaag

SEQ ID NO: 265033 - DNA, 20 bp, synthetic construct
  source 1..20: mol_type = other DNA
aaaagaaaaaaaaaaaaaaa

SEQ ID NO: 265034 - DNA, 20 bp, synthetic construct
  source 1..20: mol_type = other DNA
caaaagaaaaaaaaaaaaaa

SEQ ID NO: 265035 - DNA, 20 bp, synthetic construct
  source 1..20: mol_type = other DNA
tcaaaagaaaaaaaaaaaaa

SEQ ID NO: 265036 - DNA, 20 bp, synthetic construct
  source 1..20: mol_type = other DNA
ctcaaaagaaaaaaaaaaaa

SEQ ID NO: 265037 - DNA, 20 bp, synthetic construct
  source 1..20: mol_type = other DNA
tctcaaaagaaaaaaaaaaa

SEQ ID NO: 265038 - DNA, 20 bp, synthetic construct
  source 1..20: mol_type = other DNA
gtctcaaaagaaaaaaaaaa

SEQ ID NO: 265039 - DNA, 20 bp, synthetic construct
  source 1..20: mol_type = other DNA
tgtctcaaaagaaaaaaaaa

SEQ ID NO: 265040 - DNA, 20 bp, synthetic construct
  source 1..20: mol_type = other DNA
ctgtctcaaaagaaaaaaaa

SEQ ID NO: 265041 - DNA, 20 bp, synthetic construct
  source 1..20: mol_type = other DNA
tctgtctcaaaagaaaaaaa

SEQ ID NO: 265042 - DNA, 20 bp, synthetic construct
  source 1..20: mol_type = other DNA
ctctgtctcaaaagaaaaaa

SEQ ID NO: 265043 - DNA, 20 bp, synthetic construct
  source 1..20: mol_type = other DNA
actctgtctcaaaagaaaaa

SEQ ID NO: 265044 - DNA, 20 bp, synthetic construct
  source 1..20: mol_type = other DNA
aactctgtctcaaaagaaaa

SEQ ID NO: 265045 - DNA, 20 bp, synthetic construct
  source 1..20: mol_type = other DNA
aaactctgtctcaaaagaaa

SEQ ID NO: 265046 - DNA, 20 bp, synthetic construct
  source 1..20: mol_type = other DNA
gaaactctgtctcaaaagaa

SEQ ID NO: 265047 - DNA, 20 bp, synthetic construct
  source 1..20: mol_type = other DNA
cgaaactctgtctcaaaaga

SEQ ID NO: 265048 - DNA, 20 bp, synthetic construct
  source 1..20: mol_type = other DNA
gcgaaactctgtctcaaaag

SEQ ID NO: 265049 - DNA, 20 bp, synthetic construct
  source 1..20: mol_type = other DNA
agcgaaactctgtctcaaaa

SEQ ID NO: 265050 - DNA, 20 bp, synthetic construct
  source 1..20: mol_type = other DNA
aagcgaaactctgtctcaaa

SEQ ID NO: 265051 - DNA, 20 bp, synthetic construct
  source 1..20: mol_type = other DNA
aaagcgaaactctgtctcaa

SEQ ID NO: 265052 - DNA, 20 bp, synthetic construct
  source 1..20: mol_type = other DNA
aaaagcgaaactctgtctca

SEQ ID NO: 265053 - DNA, 20 bp, synthetic construct
  source 1..20: mol_type = other DNA
caaaagcgaaactctgtctc

SEQ ID NO: 265054 - DNA, 20 bp, synthetic construct
  source 1..20: mol_type = other DNA
acaaaagcgaaactctgtct

SEQ ID NO: 265055 - DNA, 20 bp, synthetic construct
  source 1..20: mol_type = other DNA
aacaaaagcgaaactctgtc

SEQ ID NO: 265056 - DNA, 20 bp, synthetic construct
  source 1..20: mol_type = other DNA
taacaaaagcgaaactctgt

SEQ ID NO: 265057 - DNA, 20 bp, synthetic construct
  source 1..20: mol_type = other DNA
ataacaaaagcgaaactctg

SEQ ID NO: 265058 - DNA, 20 bp, synthetic construct
  source 1..20: mol_type = other DNA
gataacaaaagcgaaactct

SEQ ID NO: 265059 - DNA, 20 bp, synthetic construct
  source 1..20: mol_type = other DNA
ggataacaaaagcgaaactc

SEQ ID NO: 265060 - DNA, 20 bp, synthetic construct
  source 1..20: mol_type = other DNA
tggataacaaaagcgaaact

SEQ ID NO: 265061 - DNA, 20 bp, synthetic construct
  source 1..20: mol_type = other DNA
ctggataacaaaagcgaaac

SEQ ID NO: 265062 - DNA, 20 bp, synthetic construct
  source 1..20: mol_type = other DNA
cctggataacaaaagcgaaa

SEQ ID NO: 265063 - DNA, 20 bp, synthetic construct
  source 1..20: mol_type = other DNA
gcctggataacaaaagcgaa

SEQ ID NO: 265064 - DNA, 20 bp, synthetic construct
  source 1..20: mol_type = other DNA
ggcctggataacaaaagcga

SEQ ID NO: 265065 - DNA, 20 bp, synthetic construct
  source 1..20: mol_type = other DNA
cggcctggataacaaaagcg

SEQ ID NO: 265066 - DNA, 20 bp, synthetic construct
  source 1..20: mol_type = other DNA
ccggcctggataacaaaagc

SEQ ID NO: 265067 - DNA, 20 bp, synthetic construct
  source 1..20: mol_type = other DNA
tccggcctggataacaaaag

SEQ ID NO: 265068 - DNA, 20 bp, synthetic construct
  source 1..20: mol_type = other DNA
ctccggcctggataacaaaa

SEQ ID NO: 265069 - DNA, 20 bp, synthetic construct
  source 1..20: mol_type = other DNA
actccggcctggataacaaa

SEQ ID NO: 265070 - DNA, 20 bp, synthetic construct
  source 1..20: mol_type = other DNA
cactccggcctggataacaa

SEQ ID NO: 265071 - DNA, 20 bp, synthetic construct
  source 1..20: mol_type = other DNA
gcactccggcctggataaca

SEQ ID NO: 265072 - DNA, 20 bp, synthetic construct
  source 1..20: mol_type = other DNA
tgcactccggcctggataac

SEQ ID NO: 265073 - DNA, 20 bp, synthetic construct
  source 1..20: mol_type = other DNA
ctgcactccggcctggataa

SEQ ID NO: 265074 - DNA, 20 bp, synthetic construct
  source 1..20: mol_type = other DNA
actgcactccggcctggata

SEQ ID NO: 265075 - DNA, 20 bp, synthetic construct
  source 1..20: mol_type = other DNA
cactgcactccggcctggat

SEQ ID NO: 265076 - DNA, 20 bp, synthetic construct
  source 1..20: mol_type = other DNA
ccactgcactccggcctgga

SEQ ID NO: 265077 - DNA, 20 bp, synthetic construct
  source 1..20: mol_type = other DNA
accactgcactccggcctgg

SEQ ID NO: 265078 - DNA, 20 bp, synthetic construct
  source 1..20: mol_type = other DNA
caccactgcactccggcctg

SEQ ID NO: 265079 - DNA, 20 bp, synthetic construct
  source 1..20: mol_type = other DNA
acaccactgcactccggcct

SEQ ID NO: 265080 - DNA, 20 bp, synthetic construct
  source 1..20: mol_type = other DNA
cacaccactgcactccggcc

SEQ ID NO: 265081 - DNA, 20 bp, synthetic construct
  source 1..20: mol_type = other DNA
tcacaccactgcactccggc

SEQ ID NO: 265082 - DNA, 20 bp, synthetic construct
  source 1..20: mol_type = other DNA
atcacaccactgcactccgg

SEQ ID NO: 265083 - DNA, 20 bp, synthetic construct
  source 1..20: mol_type = other DNA
gatcacaccactgcactccg

SEQ ID NO: 265084 - DNA, 20 bp, synthetic construct
  source 1..20: mol_type = other DNA
agatcacaccactgcactcc

SEQ ID NO: 265085 - DNA, 20 bp, synthetic construct
  source 1..20: mol_type = other DNA
gagatcacaccactgcactc

SEQ ID NO: 265086 - DNA, 20 bp, synthetic construct
  source 1..20: mol_type = other DNA
tgagatcacaccactgcact

SEQ ID NO: 265087 - DNA, 20 bp, synthetic construct
  source 1..20: mol_type = other DNA
ctgagatcacaccactgcac

SEQ ID NO: 265088 - DNA, 20 bp, synthetic construct
  source 1..20: mol_type = other DNA
gctgagatcacaccactgca

SEQ ID NO: 265089 - DNA, 20 bp, synthetic construct
  source 1..20: mol_type = other DNA
agctgagatcacaccactgc

SEQ ID NO: 265090 - DNA, 20 bp, synthetic construct
  source 1..20: mol_type = other DNA
gagctgagatcacaccactg

SEQ ID NO: 265091 - DNA, 20 bp, synthetic construct
  source 1..20: mol_type = other DNA
tgagctgagatcacaccact

SEQ ID NO: 265092 - DNA, 20 bp, synthetic construct
  source 1..20: mol_type = other DNA
gtgagctgagatcacaccac

SEQ ID NO: 265093 - DNA, 20 bp, synthetic construct
  source 1..20: mol_type = other DNA
agtgagctgagatcacacca

SEQ ID NO: 265094 - DNA, 20 bp, synthetic construct
  source 1..20: mol_type = other DNA
cagtgagctgagatcacacc

SEQ ID NO: 265095 - DNA, 20 bp, synthetic construct
  source 1..20: mol_type = other DNA
gcagtgagctgagatcacac

SEQ ID NO: 265096 - DNA, 20 bp, synthetic construct
  source 1..20: mol_type = other DNA
tgcagtgagctgagatcaca

SEQ ID NO: 265097 - DNA, 20 bp, synthetic construct
  source 1..20: mol_type = other DNA
atgcagtgagctgagatcac

SEQ ID NO: 265098 - DNA, 20 bp, synthetic construct
  source 1..20: mol_type = other DNA
gatgcagtgagctgagatca

SEQ ID NO: 265099 - DNA, 20 bp, synthetic construct
  source 1..20: mol_type = other DNA
ggatgcagtgagctgagatc

SEQ ID NO: 265100 - DNA, 20 bp, synthetic construct
  source 1..20: mol_type = other DNA
aggatgcagtgagctgagat

SEQ ID NO: 265101 - DNA, 20 bp, synthetic construct
  source 1..20: mol_type = other DNA
gaggatgcagtgagctgaga

SEQ ID NO: 265102 - DNA, 20 bp, synthetic construct
  source 1..20: mol_type = other DNA
ggaggatgcagtgagctgag

SEQ ID NO: 265103 - DNA, 20 bp, synthetic construct
  source 1..20: mol_type = other DNA
tggaggatgcagtgagctga

SEQ ID NO: 265104 - DNA, 20 bp, synthetic construct
  source 1..20: mol_type = other DNA
gtggaggatgcagtgagctg

SEQ ID NO: 265105 - DNA, 20 bp, synthetic construct
  source 1..20: mol_type = other DNA
ggtggaggatgcagtgagct

SEQ ID NO: 265106 - DNA, 20 bp, synthetic construct
  source 1..20: mol_type = other DNA
aggtggaggatgcagtgagc

SEQ ID NO: 265107 - DNA, 20 bp, synthetic construct
  source 1..20: mol_type = other DNA
gaggtggaggatgcagtgag

SEQ ID NO: 265108 - DNA, 20 bp, synthetic construct
  source 1..20: mol_type = other DNA
ggaggtggaggatgcagtga

SEQ ID NO: 265109 - DNA, 20 bp, synthetic construct
  source 1..20: mol_type = other DNA
gggaggtggaggatgcagtg

SEQ ID NO: 265110 - DNA, 20 bp, synthetic construct
  source 1..20: mol_type = other DNA
tgggaggtggaggatgcagt

SEQ ID NO: 265111 - DNA, 20 bp, synthetic construct
  source 1..20: mol_type = other DNA
ctgggaggtggaggatgcag

SEQ ID NO: 265112 - DNA, 20 bp, synthetic construct
  source 1..20: mol_type = other DNA
cctgggaggtggaggatgca

SEQ ID NO: 265113 - DNA, 20 bp, synthetic construct
  source 1..20: mol_type = other DNA
acctgggaggtggaggatgc

SEQ ID NO: 265114 - DNA, 20 bp, synthetic construct
  source 1..20: mol_type = other DNA
aacctgggaggtggaggatg

SEQ ID NO: 265115 - DNA, 20 bp, synthetic construct
  source 1..20: mol_type = other DNA
gaacctgggaggtggaggat

SEQ ID NO: 265116 - DNA, 20 bp, synthetic construct
  source 1..20: mol_type = other DNA
tgaacctgggaggtggagga

SEQ ID NO: 265117 - DNA, 20 bp, synthetic construct
  source 1..20: mol_type = other DNA
ttgaacctgggaggtggagg

SEQ ID NO: 265118 - DNA, 20 bp, synthetic construct
  source 1..20: mol_type = other DNA
cttgaacctgggaggtggag

SEQ ID NO: 265119 - DNA, 20 bp, synthetic construct
  source 1..20: mol_type = other DNA
gcttgaacctgggaggtgga

SEQ ID NO: 265120 - DNA, 20 bp, synthetic construct
  source 1..20: mol_type = other DNA
cgcttgaacctgggaggtgg

SEQ ID NO: 265121 - DNA, 20 bp, synthetic construct
  source 1..20: mol_type = other DNA
tcgcttgaacctgggaggtg

SEQ ID NO: 265122 - DNA, 20 bp, synthetic construct
  source 1..20: mol_type = other DNA
atcgcttgaacctgggaggt

SEQ ID NO: 265123 - DNA, 20 bp, synthetic construct
  source 1..20: mol_type = other DNA
aatcgcttgaacctgggagg

SEQ ID NO: 265124 - DNA, 20 bp, synthetic construct
  source 1..20: mol_type = other DNA
gaatcgcttgaacctgggag

SEQ ID NO: 265125 - DNA, 20 bp, synthetic construct
  source 1..20: mol_type = other DNA
agaatcgcttgaacctggga

SEQ ID NO: 265126 - DNA, 20 bp, synthetic construct
  source 1..20: mol_type = other DNA
gagaatcgcttgaacctggg

SEQ ID NO: 265127 - DNA, 20 bp, synthetic construct
  source 1..20: mol_type = other DNA
ggagaatcgcttgaacctgg

SEQ ID NO: 265128 - DNA, 20 bp, synthetic construct
  source 1..20: mol_type = other DNA
aggagaatcgcttgaacctg

SEQ ID NO: 265129 - DNA, 20 bp, synthetic construct
  source 1..20: mol_type = other DNA
taggagaatcgcttgaacct

SEQ ID NO: 265130 - DNA, 20 bp, synthetic construct
  source 1..20: mol_type = other DNA
gtaggagaatcgcttgaacc

SEQ ID NO: 265131 - DNA, 20 bp, synthetic construct
  source 1..20: mol_type = other DNA
ggtaggagaatcgcttgaac

SEQ ID NO: 265132 - DNA, 20 bp, synthetic construct
  source 1..20: mol_type = other DNA
aggtaggagaatcgcttgaa

SEQ ID NO: 265133 - DNA, 20 bp, synthetic construct
  source 1..20: mol_type = other DNA
gaggtaggagaatcgcttga

SEQ ID NO: 265134 - DNA, 20 bp, synthetic construct
  source 1..20: mol_type = other DNA
tgaggtaggagaatcgcttg

SEQ ID NO: 265135 - DNA, 20 bp, synthetic construct
  source 1..20: mol_type = other DNA
ctgaggtaggagaatcgctt

SEQ ID NO: 265136 - DNA, 20 bp, synthetic construct
  source 1..20: mol_type = other DNA
gctgaggtaggagaatcgct

SEQ ID NO: 265137 - DNA, 20 bp, synthetic construct
  source 1..20: mol_type = other DNA
ggctgaggtaggagaatcgc

SEQ ID NO: 265138 - DNA, 20 bp, synthetic construct
  source 1..20: mol_type = other DNA
aggctgaggtaggagaatcg

SEQ ID NO: 265139 - DNA, 20 bp, synthetic construct
  source 1..20: mol_type = other DNA
gaggctgaggtaggagaatc

SEQ ID NO: 265140 - DNA, 20 bp, synthetic construct
  source 1..20: mol_type = other DNA
ggaggctgaggtaggagaat

SEQ ID NO: 265141 - DNA, 20 bp, synthetic construct
  source 1..20: mol_type = other DNA
gggaggctgaggtaggagaa

SEQ ID NO: 265142 - DNA, 20 bp, synthetic construct
  source 1..20: mol_type = other DNA
agggaggctgaggtaggaga

SEQ ID NO: 265143 - DNA, 20 bp, synthetic construct
  source 1..20: mol_type = other DNA
tagggaggctgaggtaggag

SEQ ID NO: 265144 - DNA, 20 bp, synthetic construct
  source 1..20: mol_type = other DNA
ctagggaggctgaggtagga

SEQ ID NO: 265145 - DNA, 20 bp, synthetic construct
  source 1..20: mol_type = other DNA
actagggaggctgaggtagg

SEQ ID NO: 265146 - DNA, 20 bp, synthetic construct
  source 1..20: mol_type = other DNA
tactagggaggctgaggtag

SEQ ID NO: 265147 - DNA, 20 bp, synthetic construct
  source 1..20: mol_type = other DNA
ctactagggaggctgaggta

SEQ ID NO: 265148 - DNA, 20 bp, synthetic construct
  source 1..20: mol_type = other DNA
gctactagggaggctgaggt

SEQ ID NO: 265149 - DNA, 20 bp, synthetic construct
  source 1..20: mol_type = other DNA
agctactagggaggctgagg

SEQ ID NO: 265150 - DNA, 20 bp, synthetic construct
  source 1..20: mol_type = other DNA
cagctactagggaggctgag

SEQ ID NO: 265151 - DNA, 20 bp, synthetic construct
  source 1..20: mol_type = other DNA
ccagctactagggaggctga

SEQ ID NO: 265152 - DNA, 20 bp, synthetic construct
  source 1..20: mol_type = other DNA
cccagctactagggaggctg

SEQ ID NO: 265153 - DNA, 20 bp, synthetic construct
  source 1..20: mol_type = other DNA
tcccagctactagggaggct

SEQ ID NO: 265154 - DNA, 20 bp, synthetic construct
  source 1..20: mol_type = other DNA
atcccagctactagggaggc

SEQ ID NO: 265155 - DNA, 20 bp, synthetic construct
  source 1..20: mol_type = other DNA
aatcccagctactagggagg

SEQ ID NO: 265156 - DNA, 20 bp, synthetic construct
  source 1..20: mol_type = other DNA
taatcccagctactagggag

SEQ ID NO: 265157 - DNA, 20 bp, synthetic construct
  source 1..20: mol_type = other DNA
gtaatcccagctactaggga

SEQ ID NO: 265158 - DNA, 20 bp, synthetic construct
  source 1..20: mol_type = other DNA
tgtaatcccagctactaggg

SEQ ID NO: 265159 - DNA, 20 bp, synthetic construct
  source 1..20: mol_type = other DNA
ctgtaatcccagctactagg

SEQ ID NO: 265160 - DNA, 20 bp, synthetic construct
  source 1..20: mol_type = other DNA
cctgtaatcccagctactag

SEQ ID NO: 265161 - DNA, 20 bp, synthetic construct
  source 1..20: mol_type = other DNA
gcctgtaatcccagctacta

SEQ ID NO: 265162 - DNA, 20 bp, synthetic construct
  source 1..20: mol_type = other DNA
tgcctgtaatcccagctact

SEQ ID NO: 265163 - DNA, 20 bp, synthetic construct
  source 1..20: mol_type = other DNA
gtgcctgtaatcccagctac

SEQ ID NO: 265164 - DNA, 20 bp, synthetic construct
  source 1..20: mol_type = other DNA
ggtgcctgtaatcccagcta

SEQ ID NO: 265165 - DNA, 20 bp, synthetic construct
  source 1..20: mol_type = other DNA
aggtgcctgtaatcccagct

SEQ ID NO: 265166 - DNA, 20 bp, synthetic construct
  source 1..20: mol_type = other DNA
caggtgcctgtaatcccagc

SEQ ID NO: 265167 - DNA, 20 bp, synthetic construct
  source 1..20: mol_type = other DNA
gcaggtgcctgtaatcccag

SEQ ID NO: 265168 - DNA, 20 bp, synthetic construct
  source 1..20: mol_type = other DNA
ggcaggtgcctgtaatccca

SEQ ID NO: 265169 - DNA, 20 bp, synthetic construct
  source 1..20: mol_type = other DNA
tggcaggtgcctgtaatccc

SEQ ID NO: 265170 - DNA, 20 bp, synthetic construct
  source 1..20: mol_type = other DNA
gtggcaggtgcctgtaatcc

SEQ ID NO: 265171 - DNA, 20 bp, synthetic construct
  source 1..20: mol_type = other DNA
agtggcaggtgcctgtaatc

SEQ ID NO: 265172 - DNA, 20 bp, synthetic construct
  source 1..20: mol_type = other DNA
tagtggcaggtgcctgtaat

SEQ ID NO: 265173 - DNA, 20 bp, synthetic construct
  source 1..20: mol_type = other DNA
atagtggcaggtgcctgtaa

SEQ ID NO: 265174 - DNA, 20 bp, synthetic construct
  source 1..20: mol_type = other DNA
catagtggcaggtgcctgta

SEQ ID NO: 265175 - DNA, 20 bp, synthetic construct
  source 1..20: mol_type = other DNA
gcatagtggcaggtgcctgt

SEQ ID NO: 265176 - DNA, 20 bp, synthetic construct
  source 1..20: mol_type = other DNA
ggcatagtggcaggtgcctg

SEQ ID NO: 265177 - DNA, 20 bp, synthetic construct
  source 1..20: mol_type = other DNA
gggcatagtggcaggtgcct

SEQ ID NO: 265178 - DNA, 20 bp, synthetic construct
  source 1..20: mol_type = other DNA
cgggcatagtggcaggtgcc

SEQ ID NO: 265179 - DNA, 20 bp, synthetic construct
  source 1..20: mol_type = other DNA
ccgggcatagtggcaggtgc

SEQ ID NO: 265180 - DNA, 20 bp, synthetic construct
  source 1..20: mol_type = other DNA
gccgggcatagtggcaggtg

SEQ ID NO: 265181 - DNA, 20 bp, synthetic construct
  source 1..20: mol_type = other DNA
agccgggcatagtggcaggt

SEQ ID NO: 265182 - DNA, 20 bp, synthetic construct
  source 1..20: mol_type = other DNA
tagccgggcatagtggcagg

SEQ ID NO: 265183 - DNA, 20 bp, synthetic construct
  source 1..20: mol_type = other DNA
ttagccgggcatagtggcag

SEQ ID NO: 265184 - DNA, 20 bp, synthetic construct
  source 1..20: mol_type = other DNA
attagccgggcatagtggca

SEQ ID NO: 265185 - DNA, 20 bp, synthetic construct
  source 1..20: mol_type = other DNA
aattagccgggcatagtggc

SEQ ID NO: 265186 - DNA, 20 bp, synthetic construct
  source 1..20: mol_type = other DNA
aaattagccgggcatagtgg

SEQ ID NO: 265187 - DNA, 20 bp, synthetic construct
  source 1..20: mol_type = other DNA
aaaattagccgggcatagtg

SEQ ID NO: 265188 - DNA, 20 bp, synthetic construct
  source 1..20: mol_type = other DNA
aaaaattagccgggcatagt

SEQ ID NO: 265189 - DNA, 20 bp, synthetic construct
  source 1..20: mol_type = other DNA
aaaaaattagccgggcatag

SEQ ID NO: 265190 - DNA, 20 bp, synthetic construct
  source 1..20: mol_type = other DNA
caaaaaattagccgggcata

SEQ ID NO: 265191 - DNA, 20 bp, synthetic construct
  source 1..20: mol_type = other DNA
acaaaaaattagccgggcat

SEQ ID NO: 265192 - DNA, 20 bp, synthetic construct
  source 1..20: mol_type = other DNA
tacaaaaaattagccgggca

SEQ ID NO: 265193 - DNA, 20 bp, synthetic construct
  source 1..20: mol_type = other DNA
atacaaaaaattagccgggc

SEQ ID NO: 265194 - DNA, 20 bp, synthetic construct
  source 1..20: mol_type = other DNA
aatacaaaaaattagccggg

SEQ ID NO: 265195 - DNA, 20 bp, synthetic construct
  source 1..20: mol_type = other DNA
aaatacaaaaaattagccgg

SEQ ID NO: 265196 - DNA, 20 bp, synthetic construct
  source 1..20: mol_type = other DNA
aaaatacaaaaaattagccg

SEQ ID NO: 265197 - DNA, 20 bp, synthetic construct
  source 1..20: mol_type = other DNA
aaaaatacaaaaaattagcc

SEQ ID NO: 265198 - DNA, 20 bp, synthetic construct
  source 1..20: mol_type = other DNA
taaaaatacaaaaaattagc

SEQ ID NO: 265199 - DNA, 20 bp, synthetic construct
  source 1..20: mol_type = other DNA
ctaaaaatacaaaaaattag

SEQ ID NO: 265200 - DNA, 20 bp, synthetic construct
  source 1..20: mol_type = other DNA
actaaaaatacaaaaaatta

SEQ ID NO: 265201 - DNA, 20 bp, synthetic construct
  source 1..20: mol_type = other DNA
tactaaaaatacaaaaaatt

SEQ ID NO: 265202 - DNA, 20 bp, synthetic construct
  source 1..20: mol_type = other DNA
ctactaaaaatacaaaaaat

SEQ ID NO: 265203 - DNA, 20 bp, synthetic construct
  source 1..20: mol_type = other DNA
tctactaaaaatacaaaaaa

SEQ ID NO: 265204 - DNA, 20 bp, synthetic construct
  source 1..20: mol_type = other DNA
ctctactaaaaatacaaaaa

SEQ ID NO: 265205 - DNA, 20 bp, synthetic construct
  source 1..20: mol_type = other DNA
tctctactaaaaatacaaaa

SEQ ID NO: 265206 - DNA, 20 bp, synthetic construct
  source 1..20: mol_type = other DNA
gtctctactaaaaatacaaa

SEQ ID NO: 265207 - DNA, 20 bp, synthetic construct
  source 1..20: mol_type = other DNA
tgtctctactaaaaatacaa

SEQ ID NO: 265208 - DNA, 20 bp, synthetic construct
  source 1..20: mol_type = other DNA
ctgtctctactaaaaataca

SEQ ID NO: 265209 - DNA, 20 bp, synthetic construct
  source 1..20: mol_type = other DNA
cctgtctctactaaaaatac

SEQ ID NO: 265210 - DNA, 20 bp, synthetic construct
  source 1..20: mol_type = other DNA
ccctgtctctactaaaaata

SEQ ID NO: 265211 - DNA, 20 bp, synthetic construct
  source 1..20: mol_type = other DNA
accctgtctctactaaaaat

SEQ ID NO: 265212 - DNA, 20 bp, synthetic construct
  source 1..20: mol_type = other DNA
aaccctgtctctactaaaaa

SEQ ID NO: 265213 - DNA, 20 bp, synthetic construct
  source 1..20: mol_type = other DNA
aaaccctgtctctactaaaa

SEQ ID NO: 265214 - DNA, 20 bp, synthetic construct
  source 1..20: mol_type = other DNA
gaaaccctgtctctactaaa

SEQ ID NO: 265215 - DNA, 20 bp, synthetic construct
  source 1..20: mol_type = other DNA
tgaaaccctgtctctactaa

SEQ ID NO: 265216 - DNA, 20 bp, synthetic construct
  source 1..20: mol_type = other DNA
gtgaaaccctgtctctacta

SEQ ID NO: 265217 - DNA, 20 bp, synthetic construct
  source 1..20: mol_type = other DNA
ggtgaaaccctgtctctact

SEQ ID NO: 265218 - DNA, 20 bp, synthetic construct
  source 1..20: mol_type = other DNA
tggtgaaaccctgtctctac

SEQ ID NO: 265219 - DNA, 20 bp, synthetic construct
  source 1..20: mol_type = other DNA
atggtgaaaccctgtctcta

SEQ ID NO: 265220 - DNA, 20 bp, synthetic construct
  source 1..20: mol_type = other DNA
catggtgaaaccctgtctct

SEQ ID NO: 265221 - DNA, 20 bp, synthetic construct
  source 1..20: mol_type = other DNA
acatggtgaaaccctgtctc

SEQ ID NO: 265222 - DNA, 20 bp, synthetic construct
  source 1..20: mol_type = other DNA
aacatggtgaaaccctgtct

SEQ ID NO: 265223 - DNA, 20 bp, synthetic construct
  source 1..20: mol_type = other DNA
caacatggtgaaaccctgtc

SEQ ID NO: 265224 - DNA, 20 bp, synthetic construct
  source 1..20: mol_type = other DNA
ccaacatggtgaaaccctgt

SEQ ID NO: 265225 - DNA, 20 bp, synthetic construct
  source 1..20: mol_type = other DNA
gccaacatggtgaaaccctg

SEQ ID NO: 265226 - DNA, 20 bp, synthetic construct
  source 1..20: mol_type = other DNA
ggccaacatggtgaaaccct

SEQ ID NO: 265227 - DNA, 20 bp, synthetic construct
  source 1..20: mol_type = other DNA
tggccaacatggtgaaaccc

SEQ ID NO: 265228 - DNA, 20 bp, synthetic construct
  source 1..20: mol_type = other DNA
ctggccaacatggtgaaacc

SEQ ID NO: 265229 - DNA, 20 bp, synthetic construct
  source 1..20: mol_type = other DNA
cctggccaacatggtgaaac

SEQ ID NO: 265230 - DNA, 20 bp, synthetic construct
  source 1..20: mol_type = other DNA
gcctggccaacatggtgaaa

SEQ ID NO: 265231 - DNA, 20 bp, synthetic construct
  source 1..20: mol_type = other DNA
agcctggccaacatggtgaa

SEQ ID NO: 265232 - DNA, 20 bp, synthetic construct
  source 1..20: mol_type = other DNA
cagcctggccaacatggtga

SEQ ID NO: 265233 - DNA, 20 bp, synthetic construct
  source 1..20: mol_type = other DNA
ccagcctggccaacatggtg

SEQ ID NO: 265234 - DNA, 20 bp, synthetic construct
  source 1..20: mol_type = other DNA
accagcctggccaacatggt

SEQ ID NO: 265235 - DNA, 20 bp, synthetic construct
  source 1..20: mol_type = other DNA
gaccagcctggccaacatgg

SEQ ID NO: 265236 - DNA, 20 bp, synthetic construct
  source 1..20: mol_type = other DNA
agaccagcctggccaacatg

SEQ ID NO: 265237 - DNA, 20 bp, synthetic construct
  source 1..20: mol_type = other DNA
gagaccagcctggccaacat

SEQ ID NO: 265238 - DNA, 20 bp, synthetic construct
  source 1..20: mol_type = other DNA
cgagaccagcctggccaaca

SEQ ID NO: 265239 - DNA, 20 bp, synthetic construct
  source 1..20: mol_type = other DNA
tcgagaccagcctggccaac

SEQ ID NO: 265240 - DNA, 20 bp, synthetic construct
  source 1..20: mol_type = other DNA
ttcgagaccagcctggccaa

SEQ ID NO: 265241 - DNA, 20 bp, synthetic construct
  source 1..20: mol_type = other DNA
gttcgagaccagcctggcca

SEQ ID NO: 265242 - DNA, 20 bp, synthetic construct
  source 1..20: mol_type = other DNA
cgttcgagaccagcctggcc

SEQ ID NO: 265243 - DNA, 20 bp, synthetic construct
  source 1..20: mol_type = other DNA
gcgttcgagaccagcctggc

SEQ ID NO: 265244 - DNA, 20 bp, synthetic construct
  source 1..20: mol_type = other DNA
ggcgttcgagaccagcctgg

SEQ ID NO: 265245 - DNA, 20 bp, synthetic construct
  source 1..20: mol_type = other DNA
aggcgttcgagaccagcctg

SEQ ID NO: 265246 - DNA, 20 bp, synthetic construct
  source 1..20: mol_type = other DNA
caggcgttcgagaccagcct

SEQ ID NO: 265247 - DNA, 20 bp, synthetic construct
  source 1..20: mol_type = other DNA
tcaggcgttcgagaccagcc

SEQ ID NO: 265248 - DNA, 20 bp, synthetic construct
  source 1..20: mol_type = other DNA
gtcaggcgttcgagaccagc

SEQ ID NO: 265249 - DNA, 20 bp, synthetic construct
  source 1..20: mol_type = other DNA
ggtcaggcgttcgagaccag

SEQ ID NO: 265250 - DNA, 20 bp, synthetic construct
  source 1..20: mol_type = other DNA
aggtcaggcgttcgagacca

SEQ ID NO: 265251 - DNA, 20 bp, synthetic construct
  source 1..20: mol_type = other DNA
gaggtcaggcgttcgagacc

SEQ ID NO: 265252 - DNA, 20 bp, synthetic construct
  source 1..20: mol_type = other DNA
tgaggtcaggcgttcgagac

SEQ ID NO: 265253 - DNA, 20 bp, synthetic construct
  source 1..20: mol_type = other DNA
ctgaggtcaggcgttcgaga

SEQ ID NO: 265254 - DNA, 20 bp, synthetic construct
  source 1..20: mol_type = other DNA
cctgaggtcaggcgttcgag

SEQ ID NO: 265255 - DNA, 20 bp, synthetic construct
  source 1..20: mol_type = other DNA
acctgaggtcaggcgttcga

SEQ ID NO: 265256 - DNA, 20 bp, synthetic construct
  source 1..20: mol_type = other DNA
cacctgaggtcaggcgttcg

SEQ ID NO: 265257 - DNA, 20 bp, synthetic construct
  source 1..20: mol_type = other DNA
tcacctgaggtcaggcgttc

SEQ ID NO: 265258 - DNA, 20 bp, synthetic construct
  source 1..20: mol_type = other DNA
atcacctgaggtcaggcgtt

SEQ ID NO: 265259 - DNA, 20 bp, synthetic construct
  source 1..20: mol_type = other DNA
gatcacctgaggtcaggcgt

SEQ ID NO: 265260 - DNA, 20 bp, synthetic construct
  source 1..20: mol_type = other DNA
ggatcacctgaggtcaggcg

SEQ ID NO: 265261 - DNA, 20 bp, synthetic construct
  source 1..20: mol_type = other DNA
tggatcacctgaggtcaggc

SEQ ID NO: 265262 - DNA, 20 bp, synthetic construct
  source 1..20: mol_type = other DNA
gtggatcacctgaggtcagg

SEQ ID NO: 265263 - DNA, 20 bp, synthetic construct
  source 1..20: mol_type = other DNA
ggtggatcacctgaggtcag

SEQ ID NO: 265264 - DNA, 20 bp, synthetic construct
  source 1..20: mol_type = other DNA
aggtggatcacctgaggtca

SEQ ID NO: 265265 - DNA, 20 bp, synthetic construct
  source 1..20: mol_type = other DNA
caggtggatcacctgaggtc

SEQ ID NO: 265266 - DNA, 20 bp, synthetic construct
  source 1..20: mol_type = other DNA
gcaggtggatcacctgaggt

SEQ ID NO: 265267 - DNA, 20 bp, synthetic construct
  source 1..20: mol_type = other DNA
ggcaggtggatcacctgagg

SEQ ID NO: 265268 - DNA, 20 bp, synthetic construct
  source 1..20: mol_type = other DNA
aggcaggtggatcacctgag

SEQ ID NO: 265269 - DNA, 20 bp, synthetic construct
  source 1..20: mol_type = other DNA
gaggcaggtggatcacctga

SEQ ID NO: 265270 - DNA, 20 bp, synthetic construct
  source 1..20: mol_type = other DNA
cgaggcaggtggatcacctg

SEQ ID NO: 265271 - DNA, 20 bp, synthetic construct
  source 1..20: mol_type = other DNA
ccgaggcaggtggatcacct

SEQ ID NO: 265272 - DNA, 20 bp, synthetic construct
  source 1..20: mol_type = other DNA
gccgaggcaggtggatcacc

SEQ ID NO: 265273 - DNA, 20 bp, synthetic construct
  source 1..20: mol_type = other DNA
ggccgaggcaggtggatcac

SEQ ID NO: 265274 - DNA, 20 bp, synthetic construct
  source 1..20: mol_type = other DNA
aggccgaggcaggtggatca

SEQ ID NO: 265275 - DNA, 20 bp, synthetic construct
  source 1..20: mol_type = other DNA
gaggccgaggcaggtggatc

SEQ ID NO: 265276 - DNA, 20 bp, synthetic construct
  source 1..20: mol_type = other DNA
ggaggccgaggcaggtggat

SEQ ID NO: 265277 - DNA, 20 bp, synthetic construct
  source 1..20: mol_type = other DNA
gggaggccgaggcaggtgga

SEQ ID NO: 265278 - DNA, 20 bp, synthetic construct
  source 1..20: mol_type = other DNA
tgggaggccgaggcaggtgg

SEQ ID NO: 265279 - DNA, 20 bp, synthetic construct
  source 1..20: mol_type = other DNA
ttgggaggccgaggcaggtg

SEQ ID NO: 265280 - DNA, 20 bp, synthetic construct
  source 1..20: mol_type = other DNA
tttgggaggccgaggcaggt

SEQ ID NO: 265281 - DNA, 20 bp, synthetic construct
  source 1..20: mol_type = other DNA
ctttgggaggccgaggcagg

SEQ ID NO: 265282 - DNA, 20 bp, synthetic construct
  source 1..20: mol_type = other DNA
actttgggaggccgaggcag

SEQ ID NO: 265283 - DNA, 20 bp, synthetic construct
  source 1..20: mol_type = other DNA
cactttgggaggccgaggca

SEQ ID NO: 265284 - DNA, 20 bp, synthetic construct
  source 1..20: mol_type = other DNA
gcactttgggaggccgaggc

SEQ ID NO: 265285 - DNA, 20 bp, synthetic construct
  source 1..20: mol_type = other DNA
agcactttgggaggccgagg

SEQ ID NO: 265286 - DNA, 20 bp, synthetic construct
  source 1..20: mol_type = other DNA
cagcactttgggaggccgag

SEQ ID NO: 265287 - DNA, 20 bp, synthetic construct
  source 1..20: mol_type = other DNA
ccagcactttgggaggccga

SEQ ID NO: 265288 - DNA, 20 bp, synthetic construct
  source 1..20: mol_type = other DNA
cccagcactttgggaggccg

SEQ ID NO: 265289 - DNA, 20 bp, synthetic construct
  source 1..20: mol_type = other DNA
tcccagcactttgggaggcc

SEQ ID NO: 265290 - DNA, 20 bp, synthetic construct
  source 1..20: mol_type = other DNA
atcccagcactttgggaggc

SEQ ID NO: 265291 - DNA, 20 bp, synthetic construct
  source 1..20: mol_type = other DNA
aatcccagcactttgggagg

SEQ ID NO: 265292 - DNA, 20 bp, synthetic construct
  source 1..20: mol_type = other DNA
taatcccagcactttgggag

SEQ ID NO: 265293 - DNA, 20 bp, synthetic construct
  source 1..20: mol_type = other DNA
gtaatcccagcactttggga

SEQ ID NO: 265294 - DNA, 20 bp, synthetic construct
  source 1..20: mol_type = other DNA
tgtaatcccagcactttggg

SEQ ID NO: 265295 - DNA, 20 bp, synthetic construct
  source 1..20: mol_type = other DNA
ctgtaatcccagcactttgg

SEQ ID NO: 265296 - DNA, 20 bp, synthetic construct
  source 1..20: mol_type = other DNA
cctgtaatcccagcactttg

SEQ ID NO: 265297 - DNA, 20 bp, synthetic construct
  source 1..20: mol_type = other DNA
gcctgtaatcccagcacttt

SEQ ID NO: 265298 - DNA, 20 bp, synthetic construct
  source 1..20: mol_type = other DNA
tgcctgtaatcccagcactt

SEQ ID NO: 265299 - DNA, 20 bp, synthetic construct
  source 1..20: mol_type = other DNA
atgcctgtaatcccagcact

SEQ ID NO: 265300 - DNA, 20 bp, synthetic construct
  source 1..20: mol_type = other DNA
catgcctgtaatcccagcac

SEQ ID NO: 265301 - DNA, 20 bp, synthetic construct
  source 1..20: mol_type = other DNA
tcatgcctgtaatcccagca

SEQ ID NO: 265302 - DNA, 20 bp, synthetic construct
  source 1..20: mol_type = other DNA
ctcatgcctgtaatcccagc

SEQ ID NO: 265303 - DNA, 20 bp, synthetic construct
  source 1..20: mol_type = other DNA
gctcatgcctgtaatcccag

SEQ ID NO: 265304 - DNA, 20 bp, synthetic construct
  source 1..20: mol_type = other DNA
ggctcatgcctgtaatccca

SEQ ID NO: 265305 - DNA, 20 bp, synthetic construct
  source 1..20: mol_type = other DNA
tggctcatgcctgtaatccc

SEQ ID NO: 265306 - DNA, 20 bp, synthetic construct
  source 1..20: mol_type = other DNA
gtggctcatgcctgtaatcc

SEQ ID NO: 265307 - DNA, 20 bp, synthetic construct
  source 1..20: mol_type = other DNA
ggtggctcatgcctgtaatc

SEQ ID NO: 265308 - DNA, 20 bp, synthetic construct
  source 1..20: mol_type = other DNA
tggtggctcatgcctgtaat

SEQ ID NO: 265309 - DNA, 20 bp, synthetic construct
  source 1..20: mol_type = other DNA
gtggtggctcatgcctgtaa

SEQ ID NO: 265310 - DNA, 20 bp, synthetic construct
  source 1..20: mol_type = other DNA
agtggtggctcatgcctgta

SEQ ID NO: 265311 - DNA, 20 bp, synthetic construct
  source 1..20: mol_type = other DNA
gagtggtggctcatgcctgt

SEQ ID NO: 265312 - DNA, 20 bp, synthetic construct
  source 1..20: mol_type = other DNA
ggagtggtggctcatgcctg

SEQ ID NO: 265313 - DNA, 20 bp, synthetic construct
  source 1..20: mol_type = other DNA
gggagtggtggctcatgcct

SEQ ID NO: 265314 - DNA, 20 bp, synthetic construct
  source 1..20: mol_type = other DNA
tgggagtggtggctcatgcc

SEQ ID NO: 265315 - DNA, 20 bp, synthetic construct
  source 1..20: mol_type = other DNA
ctgggagtggtggctcatgc

SEQ ID NO: 265316 - DNA, 20 bp, synthetic construct
  source 1..20: mol_type = other DNA
gctgggagtggtggctcatg

SEQ ID NO: 265317 - DNA, 20 bp, synthetic construct
  source 1..20: mol_type = other DNA
ggctgggagtggtggctcat

SEQ ID NO: 265318 - DNA, 20 bp, synthetic construct
  source 1..20: mol_type = other DNA
aggctgggagtggtggctca

SEQ ID NO: 265319 - DNA, 20 bp, synthetic construct
  source 1..20: mol_type = other DNA
caggctgggagtggtggctc

SEQ ID NO: 265320 - DNA, 20 bp, synthetic construct
  source 1..20: mol_type = other DNA
tcaggctgggagtggtggct

SEQ ID NO: 265321 - DNA, 20 bp, synthetic construct
  source 1..20: mol_type = other DNA
ttcaggctgggagtggtggc

SEQ ID NO: 265322 - DNA, 20 bp, synthetic construct
  source 1..20: mol_type = other DNA
attcaggctgggagtggtgg

SEQ ID NO: 265323 - DNA, 20 bp, synthetic construct
  source 1..20: mol_type = other DNA
gattcaggctgggagtggtg

SEQ ID NO: 265324 - DNA, 20 bp, synthetic construct
  source 1..20: mol_type = other DNA
ggattcaggctgggagtggt

SEQ ID NO: 265325 - DNA, 20 bp, synthetic construct
  source 1..20: mol_type = other DNA
aggattcaggctgggagtgg

SEQ ID NO: 265326 - DNA, 20 bp, synthetic construct
  source 1..20: mol_type = other DNA
gaggattcaggctgggagtg

SEQ ID NO: 265327 - DNA, 20 bp, synthetic construct
  source 1..20: mol_type = other DNA
tgaggattcaggctgggagt

SEQ ID NO: 265328 - DNA, 20 bp, synthetic construct
  source 1..20: mol_type = other DNA
gtgaggattcaggctgggag

SEQ ID NO: 265329 - DNA, 20 bp, synthetic construct
  source 1..20: mol_type = other DNA
agtgaggattcaggctggga

SEQ ID NO: 265330 - DNA, 20 bp, synthetic construct
  source 1..20: mol_type = other DNA
aagtgaggattcaggctggg

SEQ ID NO: 265331 - DNA, 20 bp, synthetic construct
  source 1..20: mol_type = other DNA
aaagtgaggattcaggctgg

SEQ ID NO: 265332 - DNA, 20 bp, synthetic construct
  source 1..20: mol_type = other DNA
aaaagtgaggattcaggctg

SEQ ID NO: 265333 - DNA, 20 bp, synthetic construct
  source 1..20: mol_type = other DNA
aaaaagtgaggattcaggct

SEQ ID NO: 265334 - DNA, 20 bp, synthetic construct
  source 1..20: mol_type = other DNA
taaaaagtgaggattcaggc

SEQ ID NO: 265335 - DNA, 20 bp, synthetic construct
  source 1..20: mol_type = other DNA
ataaaaagtgaggattcagg

SEQ ID NO: 265336 - DNA, 20 bp, synthetic construct
  source 1..20: mol_type = other DNA
gataaaaagtgaggattcag

SEQ ID NO: 265337 - DNA, 20 bp, synthetic construct
  source 1..20: mol_type = other DNA
tgataaaaagtgaggattca

SEQ ID NO: 265338 - DNA, 20 bp, synthetic construct
  source 1..20: mol_type = other DNA
ttgataaaaagtgaggattc

SEQ ID NO: 265339 - DNA, 20 bp, synthetic construct
  source 1..20: mol_type = other DNA
attgataaaaagtgaggatt

SEQ ID NO: 265340 - DNA, 20 bp, synthetic construct
  source 1..20: mol_type = other DNA
cattgataaaaagtgaggat

SEQ ID NO: 265341 - DNA, 20 bp, synthetic construct
  source 1..20: mol_type = other DNA
tcattgataaaaagtgagga

SEQ ID NO: 265342 - DNA, 20 bp, synthetic construct
  source 1..20: mol_type = other DNA
ttcattgataaaaagtgagg

SEQ ID NO: 265343 - DNA, 20 bp, synthetic construct
  source 1..20: mol_type = other DNA
cttcattgataaaaagtgag

SEQ ID NO: 265344 - DNA, 20 bp, synthetic construct
  source 1..20: mol_type = other DNA
tcttcattgataaaaagtga

SEQ ID NO: 265345 - DNA, 20 bp, synthetic construct
  source 1..20: mol_type = other DNA
ttcttcattgataaaaagtg

SEQ ID NO: 265346 - DNA, 20 bp, synthetic construct
  source 1..20: mol_type = other DNA
tttcttcattgataaaaagt

SEQ ID NO: 265347 - DNA, 20 bp, synthetic construct
  source 1..20: mol_type = other DNA
atttcttcattgataaaaag

SEQ ID NO: 265348 - DNA, 20 bp, synthetic construct
  source 1..20: mol_type = other DNA
aatttcttcattgataaaaa

SEQ ID NO: 265349 - DNA, 20 bp, synthetic construct
  source 1..20: mol_type = other DNA
caatttcttcattgataaaa

SEQ ID NO: 265350 - DNA, 20 bp, synthetic construct
  source 1..20: mol_type = other DNA
tcaatttcttcattgataaa

SEQ ID NO: 265351 - DNA, 20 bp, synthetic construct
  source 1..20: mol_type = other DNA
ctcaatttcttcattgataa

SEQ ID NO: 265352 - DNA, 20 bp, synthetic construct
  source 1..20: mol_type = other DNA
cctcaatttcttcattgata

SEQ ID NO: 265353 - DNA, 20 bp, synthetic construct
  source 1..20: mol_type = other DNA
gcctcaatttcttcattgat

SEQ ID NO: 265354 - DNA, 20 bp, synthetic construct
  source 1..20: mol_type = other DNA
agcctcaatttcttcattga

SEQ ID NO: 265355 - DNA, 20 bp, synthetic construct
  source 1..20: mol_type = other DNA
cagcctcaatttcttcattg

SEQ ID NO: 265356 - DNA, 20 bp, synthetic construct
  source 1..20: mol_type = other DNA
tcagcctcaatttcttcatt

SEQ ID NO: 265357 - DNA, 20 bp, synthetic construct
  source 1..20: mol_type = other DNA
atcagcctcaatttcttcat

SEQ ID NO: 265358 - DNA, 20 bp, synthetic construct
  source 1..20: mol_type = other DNA
aatcagcctcaatttcttca

SEQ ID NO: 265359 - DNA, 20 bp, synthetic construct
  source 1..20: mol_type = other DNA
gaatcagcctcaatttcttc

SEQ ID NO: 265360 - DNA, 20 bp, synthetic construct
  source 1..20: mol_type = other DNA
agaatcagcctcaatttctt

SEQ ID NO: 265361 - DNA, 20 bp, synthetic construct
  source 1..20: mol_type = other DNA
cagaatcagcctcaatttct

SEQ ID NO: 265362 - DNA, 20 bp, synthetic construct
  source 1..20: mol_type = other DNA
gcagaatcagcctcaatttc

SEQ ID NO: 265363 - DNA, 20 bp, synthetic construct
  source 1..20: mol_type = other DNA
tgcagaatcagcctcaattt

SEQ ID NO: 265364 - DNA, 20 bp, synthetic construct
  source 1..20: mol_type = other DNA
ctgcagaatcagcctcaatt

SEQ ID NO: 265365 - DNA, 20 bp, synthetic construct
  source 1..20: mol_type = other DNA
gctgcagaatcagcctcaat

SEQ ID NO: 265366 - DNA, 20 bp, synthetic construct
  source 1..20: mol_type = other DNA
tgctgcagaatcagcctcaa

SEQ ID NO: 265367 - DNA, 20 bp, synthetic construct
  source 1..20: mol_type = other DNA
atgctgcagaatcagcctca

SEQ ID NO: 265368 - DNA, 20 bp, synthetic construct
  source 1..20: mol_type = other DNA
catgctgcagaatcagcctc

SEQ ID NO: 265369 - DNA, 20 bp, synthetic construct
  source 1..20: mol_type = other DNA
tcatgctgcagaatcagcct

SEQ ID NO: 265370 - DNA, 20 bp, synthetic construct
  source 1..20: mol_type = other DNA
atcatgctgcagaatcagcc

SEQ ID NO: 265371 - DNA, 20 bp, synthetic construct
  source 1..20: mol_type = other DNA
tatcatgctgcagaatcagc

SEQ ID NO: 265372 - DNA, 20 bp, synthetic construct
  source 1..20: mol_type = other DNA
ttatcatgctgcagaatcag

SEQ ID NO: 265373 - DNA, 20 bp, synthetic construct
  source 1..20: mol_type = other DNA
tttatcatgctgcagaatca

SEQ ID NO: 265374 - DNA, 20 bp, synthetic construct
  source 1..20: mol_type = other DNA
ttttatcatgctgcagaatc

SEQ ID NO: 265375 - DNA, 20 bp, synthetic construct
  source 1..20: mol_type = other DNA
tttttatcatgctgcagaat

SEQ ID NO: 265376 - DNA, 20 bp, synthetic construct
  source 1..20: mol_type = other DNA
ttttttatcatgctgcagaa

SEQ ID NO: 265377 - DNA, 20 bp, synthetic construct
  source 1..20: mol_type = other DNA
tttttttatcatgctgcaga

SEQ ID NO: 265378 - DNA, 20 bp, synthetic construct
  source 1..20: mol_type = other DNA
ttttttttatcatgctgcag

SEQ ID NO: 265379 - DNA, 20 bp, synthetic construct
  source 1..20: mol_type = other DNA
tttttttttatcatgctgca

SEQ ID NO: 265380 - DNA, 20 bp, synthetic construct
  source 1..20: mol_type = other DNA
atttttttttatcatgctgc

SEQ ID NO: 265381 - DNA, 20 bp, synthetic construct
  source 1..20: mol_type = other DNA
tatttttttttatcatgctg

SEQ ID NO: 265382 - DNA, 20 bp, synthetic construct
  source 1..20: mol_type = other DNA
gtatttttttttatcatgct

SEQ ID NO: 265383 - DNA, 20 bp, synthetic construct
  source 1..20: mol_type = other DNA
tgtatttttttttatcatgc

SEQ ID NO: 265384 - DNA, 20 bp, synthetic construct
  source 1..20: mol_type = other DNA
ctgtatttttttttatcatg

SEQ ID NO: 265385 - DNA, 20 bp, synthetic construct
  source 1..20: mol_type = other DNA
tctgtatttttttttatcat

SEQ ID NO: 265386 - DNA, 20 bp, synthetic construct
  source 1..20: mol_type = other DNA
ttctgtatttttttttatca

SEQ ID NO: 265387 - DNA, 20 bp, synthetic construct
  source 1..20: mol_type = other DNA
tttctgtatttttttttatc

SEQ ID NO: 265388 - DNA, 20 bp, synthetic construct
  source 1..20: mol_type = other DNA
ttttctgtatttttttttat

SEQ ID NO: 265389 - DNA, 20 bp, synthetic construct
  source 1..20: mol_type = other DNA
tttttctgtattttttttta

SEQ ID NO: 265390 - DNA, 20 bp, synthetic construct
  source 1..20: mol_type = other DNA
ctttttctgtattttttttt

SEQ ID NO: 265391 - DNA, 20 bp, synthetic construct
  source 1..20: mol_type = other DNA
cctttttctgtatttttttt

SEQ ID NO: 265392 - DNA, 20 bp, synthetic construct
  source 1..20: mol_type = other DNA
tcctttttctgtattttttt

SEQ ID NO: 265393 - DNA, 20 bp, synthetic construct
  source 1..20: mol_type = other DNA
ttcctttttctgtatttttt

SEQ ID NO: 265394 - DNA, 20 bp, synthetic construct
  source 1..20: mol_type = other DNA
tttcctttttctgtattttt

SEQ ID NO: 265395 - DNA, 20 bp, synthetic construct
  source 1..20: mol_type = other DNA
ttttcctttttctgtatttt

SEQ ID NO: 265396 - DNA, 20 bp, synthetic construct
  source 1..20: mol_type = other DNA
tttttcctttttctgtattt

SEQ ID NO: 265397 - DNA, 20 bp, synthetic construct
  source 1..20: mol_type = other DNA
ttttttcctttttctgtatt

SEQ ID NO: 265398 - DNA, 20 bp, synthetic construct
  source 1..20: mol_type = other DNA
tttttttcctttttctgtat

SEQ ID NO: 265399 - DNA, 20 bp, synthetic construct
  source 1..20: mol_type = other DNA
ttttttttcctttttctgta

SEQ ID NO: 265400 - DNA, 20 bp, synthetic construct
  source 1..20: mol_type = other DNA
cttttttttcctttttctgt

SEQ ID NO: 265401 - DNA, 20 bp, synthetic construct
  source 1..20: mol_type = other DNA
tcttttttttcctttttctg

SEQ ID NO: 265402 - DNA, 20 bp, synthetic construct
  source 1..20: mol_type = other DNA
ttcttttttttcctttttct

SEQ ID NO: 265403 - DNA, 20 bp, synthetic construct
  source 1..20: mol_type = other DNA
tttcttttttttcctttttc

SEQ ID NO: 265404 - DNA, 20 bp, synthetic construct
  source 1..20: mol_type = other DNA
ctttcttttttttccttttt

SEQ ID NO: 265405 - DNA, 20 bp, synthetic construct
  source 1..20: mol_type = other DNA
tctttcttttttttcctttt

SEQ ID NO: 265406 - DNA, 20 bp, synthetic construct
  source 1..20: mol_type = other DNA
ttctttcttttttttccttt

SEQ ID NO: 265407 - DNA, 20 bp, synthetic construct
  source 1..20: mol_type = other DNA
tttctttcttttttttcctt

SEQ ID NO: 265408 - DNA, 20 bp, synthetic construct
  source 1..20: mol_type = other DNA
atttctttcttttttttcct

SEQ ID NO: 265409 - DNA, 20 bp, synthetic construct
  source 1..20: mol_type = other DNA
gatttctttcttttttttcc

SEQ ID NO: 265410 - DNA, 20 bp, synthetic construct
  source 1..20: mol_type = other DNA
cgatttctttcttttttttc

SEQ ID NO: 265411 - DNA, 20 bp, synthetic construct
  source 1..20: mol_type = other DNA
tcgatttctttctttttttt

SEQ ID NO: 265412 - DNA, 20 bp, synthetic construct
  source 1..20: mol_type = other DNA
ctcgatttctttcttttttt

SEQ ID NO: 265413 - DNA, 20 bp, synthetic construct
  source 1..20: mol_type = other DNA
gctcgatttctttctttttt

SEQ ID NO: 265414 - DNA, 20 bp, synthetic construct
  source 1..20: mol_type = other DNA
ggctcgatttctttcttttt

SEQ ID NO: 265415 - DNA, 20 bp, synthetic construct
  source 1..20: mol_type = other DNA
aggctcgatttctttctttt

SEQ ID NO: 265416 - DNA, 20 bp, synthetic construct
  source 1..20: mol_type = other DNA
gaggctcgatttctttcttt

SEQ ID NO: 265417 - DNA, 20 bp, synthetic construct
  source 1..20: mol_type = other DNA
agaggctcgatttctttctt

SEQ ID NO: 265418 - DNA, 20 bp, synthetic construct
  source 1..20: mol_type = other DNA
cagaggctcgatttctttct

SEQ ID NO: 265419 - DNA, 20 bp, synthetic construct
  source 1..20: mol_type = other DNA
tcagaggctcgatttctttc

SEQ ID NO: 265420 - DNA, 20 bp, synthetic construct
  source 1..20: mol_type = other DNA
ctcagaggctcgatttcttt

SEQ ID NO: 265421 - DNA, 20 bp, synthetic construct
  source 1..20: mol_type = other DNA
tctcagaggctcgatttctt

SEQ ID NO: 265422 - DNA, 20 bp, synthetic construct
  source 1..20: mol_type = other DNA
ctctcagaggctcgatttct

SEQ ID NO: 265423 - DNA, 20 bp, synthetic construct
  source 1..20: mol_type = other DNA
actctcagaggctcgatttc

SEQ ID NO: 265424 - DNA, 20 bp, synthetic construct
  source 1..20: mol_type = other DNA
aactctcagaggctcgattt

SEQ ID NO: 265425 - DNA, 20 bp, synthetic construct
  source 1..20: mol_type = other DNA
aaactctcagaggctcgatt

SEQ ID NO: 265426 - DNA, 20 bp, synthetic construct
  source 1..20: mol_type = other DNA
caaactctcagaggctcgat

SEQ ID NO: 265427 - DNA, 20 bp, synthetic construct
  source 1..20: mol_type = other DNA
gcaaactctcagaggctcga

SEQ ID NO: 265428 - DNA, 20 bp, synthetic construct
  source 1..20: mol_type = other DNA
agcaaactctcagaggctcg

SEQ ID NO: 265429 - DNA, 20 bp, synthetic construct
  source 1..20: mol_type = other DNA
aagcaaactctcagaggctc

SEQ ID NO: 265430 - DNA, 20 bp, synthetic construct
  source 1..20: mol_type = other DNA
caagcaaactctcagaggct

SEQ ID NO: 265431 - DNA, 20 bp, synthetic construct
  source 1..20: mol_type = other DNA
tcaagcaaactctcagaggc

SEQ ID NO: 265432 - DNA, 20 bp, synthetic construct
  source 1..20: mol_type = other DNA
gtcaagcaaactctcagagg

SEQ ID NO: 265433 - DNA, 20 bp, synthetic construct
  source 1..20: mol_type = other DNA
agtcaagcaaactctcagag

SEQ ID NO: 265434 - DNA, 20 bp, synthetic construct
  source 1..20: mol_type = other DNA
cagtcaagcaaactctcaga

SEQ ID NO: 265435 - DNA, 20 bp, synthetic construct
  source 1..20: mol_type = other DNA
tcagtcaagcaaactctcag

SEQ ID NO: 265436 - DNA, 20 bp, synthetic construct
  source 1..20: mol_type = other DNA
ctcagtcaagcaaactctca

SEQ ID NO: 265437 - DNA, 20 bp, synthetic construct
  source 1..20: mol_type = other DNA
actcagtcaagcaaactctc

SEQ ID NO: 265438 - DNA, 20 bp, synthetic construct
  source 1..20: mol_type = other DNA
gactcagtcaagcaaactct

SEQ ID NO: 265439 - DNA, 20 bp, synthetic construct
  source 1..20: mol_type = other DNA
agactcagtcaagcaaactc

SEQ ID NO: 265440 - DNA, 20 bp, synthetic construct
  source 1..20: mol_type = other DNA
tagactcagtcaagcaaact

SEQ ID NO: 265441 - DNA, 20 bp, synthetic construct
  source 1..20: mol_type = other DNA
ttagactcagtcaagcaaac

SEQ ID NO: 265442 - DNA, 20 bp, synthetic construct
  source 1..20: mol_type = other DNA
gttagactcagtcaagcaaa

SEQ ID NO: 265443 - DNA, 20 bp, synthetic construct
  source 1..20: mol_type = other DNA
ggttagactcagtcaagcaa

SEQ ID NO: 265444 - DNA, 20 bp, synthetic construct
  source 1..20: mol_type = other DNA
tggttagactcagtcaagca

SEQ ID NO: 265445 - DNA, 20 bp, synthetic construct
  source 1..20: mol_type = other DNA
ctggttagactcagtcaagc

SEQ ID NO: 265446 - DNA, 20 bp, synthetic construct
  source 1..20: mol_type = other DNA
gctggttagactcagtcaag

SEQ ID NO: 265447 - DNA, 20 bp, synthetic construct
  source 1..20: mol_type = other DNA
agctggttagactcagtcaa

SEQ ID NO: 265448 - DNA, 20 bp, synthetic construct
  source 1..20: mol_type = other DNA
gagctggttagactcagtca

SEQ ID NO: 265449 - DNA, 20 bp, synthetic construct
  source 1..20: mol_type = other DNA
tgagctggttagactcagtc

SEQ ID NO: 265450 - DNA, 20 bp, synthetic construct
  source 1..20: mol_type = other DNA
atgagctggttagactcagt

SEQ ID NO: 265451 - DNA, 20 bp, synthetic construct
  source 1..20: mol_type = other DNA
aatgagctggttagactcag

SEQ ID NO: 265452 - DNA, 20 bp, synthetic construct
  source 1..20: mol_type = other DNA
aaatgagctggttagactca

SEQ ID NO: 265453 - DNA, 20 bp, synthetic construct
  source 1..20: mol_type = other DNA
aaaatgagctggttagactc

SEQ ID NO: 265454 - DNA, 20 bp, synthetic construct
  source 1..20: mol_type = other DNA
taaaatgagctggttagact

SEQ ID NO: 265455 - DNA, 20 bp, synthetic construct
  source 1..20: mol_type = other DNA
ttaaaatgagctggttagac

SEQ ID NO: 265456 - DNA, 20 bp, synthetic construct
  source 1..20: mol_type = other DNA
tttaaaatgagctggttaga

SEQ ID NO: 265457 - DNA, 20 bp, synthetic construct
  source 1..20: mol_type = other DNA
gtttaaaatgagctggttag

SEQ ID NO: 265458 - DNA, 20 bp, synthetic construct
  source 1..20: mol_type = other DNA
ggtttaaaatgagctggtta

SEQ ID NO: 265459 - DNA, 20 bp, synthetic construct
  source 1..20: mol_type = other DNA
gggtttaaaatgagctggtt

SEQ ID NO: 265460 - DNA, 20 bp, synthetic construct
  source 1..20: mol_type = other DNA
cgggtttaaaatgagctggt

SEQ ID NO: 265461 - DNA, 20 bp, synthetic construct
  source 1..20: mol_type = other DNA
tcgggtttaaaatgagctgg

SEQ ID NO: 265462 - DNA, 20 bp, synthetic construct
  source 1..20: mol_type = other DNA
ctcgggtttaaaatgagctg

SEQ ID NO: 265463 - DNA, 20 bp, synthetic construct
  source 1..20: mol_type = other DNA
cctcgggtttaaaatgagct

SEQ ID NO: 265464 - DNA, 20 bp, synthetic construct
  source 1..20: mol_type = other DNA
tcctcgggtttaaaatgagc

SEQ ID NO: 265465 - DNA, 20 bp, synthetic construct
  source 1..20: mol_type = other DNA
ttcctcgggtttaaaatgag

SEQ ID NO: 265466 - DNA, 20 bp, synthetic construct
  source 1..20: mol_type = other DNA
tttcctcgggtttaaaatga

SEQ ID NO: 265467 - DNA, 20 bp, synthetic construct
  source 1..20: mol_type = other DNA
ttttcctcgggtttaaaatg

SEQ ID NO: 265468 - DNA, 20 bp, synthetic construct
  source 1..20: mol_type = other DNA
attttcctcgggtttaaaat

SEQ ID NO: 265469 - DNA, 20 bp, synthetic construct
  source 1..20: mol_type = other DNA
cattttcctcgggtttaaaa

SEQ ID NO: 265470 - DNA, 20 bp, synthetic construct
  source 1..20: mol_type = other DNA
gcattttcctcgggtttaaa

SEQ ID NO: 265471 - DNA, 20 bp, synthetic construct
  source 1..20: mol_type = other DNA
tgcattttcctcgggtttaa

SEQ ID NO: 265472 - DNA, 20 bp, synthetic construct
  source 1..20: mol_type = other DNA
ctgcattttcctcgggttta

SEQ ID NO: 265473 - DNA, 20 bp, synthetic construct
  source 1..20: mol_type = other DNA
actgcattttcctcgggttt

SEQ ID NO: 265474 - DNA, 20 bp, synthetic construct
  source 1..20: mol_type = other DNA
gactgcattttcctcgggtt

SEQ ID NO: 265475 - DNA, 20 bp, synthetic construct
  source 1..20: mol_type = other DNA
tgactgcattttcctcgggt

SEQ ID NO: 265476 - DNA, 20 bp, synthetic construct
  source 1..20: mol_type = other DNA
gtgactgcattttcctcggg

SEQ ID NO: 265477 - DNA, 20 bp, synthetic construct
  source 1..20: mol_type = other DNA
tgtgactgcattttcctcgg

SEQ ID NO: 265478 - DNA, 20 bp, synthetic construct
  source 1..20: mol_type = other DNA
atgtgactgcattttcctcg

SEQ ID NO: 265479 - DNA, 20 bp, synthetic construct
  source 1..20: mol_type = other DNA
catgtgactgcattttcctc

SEQ ID NO: 265480 - DNA, 20 bp, synthetic construct
  source 1..20: mol_type = other DNA
tcatgtgactgcattttcct

SEQ ID NO: 265481 - DNA, 20 bp, synthetic construct
  source 1..20: mol_type = other DNA
gtcatgtgactgcattttcc

SEQ ID NO: 265482 - DNA, 20 bp, synthetic construct
  source 1..20: mol_type = other DNA
agtcatgtgactgcattttc

SEQ ID NO: 265483 - DNA, 20 bp, synthetic construct
  source 1..20: mol_type = other DNA
tagtcatgtgactgcatttt

SEQ ID NO: 265484 - DNA, 20 bp, synthetic construct
  source 1..20: mol_type = other DNA
gtagtcatgtgactgcattt

SEQ ID NO: 265485 - DNA, 20 bp, synthetic construct
  source 1..20: mol_type = other DNA
agtagtcatgtgactgcatt

SEQ ID NO: 265486 - DNA, 20 bp, synthetic construct
  source 1..20: mol_type = other DNA
tagtagtcatgtgactgcat

SEQ ID NO: 265487 - DNA, 20 bp, synthetic construct
  source 1..20: mol_type = other DNA
ttagtagtcatgtgactgca

SEQ ID NO: 265488 - DNA, 20 bp, synthetic construct
  source 1..20: mol_type = other DNA
cttagtagtcatgtgactgc

SEQ ID NO: 265489 - DNA, 20 bp, synthetic construct
  source 1..20: mol_type = other DNA
acttagtagtcatgtgactg

SEQ ID NO: 265490 - DNA, 20 bp, synthetic construct
  source 1..20: mol_type = other DNA
cacttagtagtcatgtgact

SEQ ID NO: 265491 - DNA, 20 bp, synthetic construct
  source 1..20: mol_type = other DNA
ccacttagtagtcatgtgac

SEQ ID NO: 265492 - DNA, 20 bp, synthetic construct
  source 1..20: mol_type = other DNA
gccacttagtagtcatgtga

SEQ ID NO: 265493 - DNA, 20 bp, synthetic construct
  source 1..20: mol_type = other DNA
tgccacttagtagtcatgtg

SEQ ID NO: 265494 - DNA, 20 bp, synthetic construct
  source 1..20: mol_type = other DNA
ctgccacttagtagtcatgt

SEQ ID NO: 265495 - DNA, 20 bp, synthetic construct
  source 1..20: mol_type = other DNA
gctgccacttagtagtcatg

SEQ ID NO: 265496 - DNA, 20 bp, synthetic construct
  source 1..20: mol_type = other DNA
agctgccacttagtagtcat

SEQ ID NO: 265497 - DNA, 20 bp, synthetic construct
  source 1..20: mol_type = other DNA
gagctgccacttagtagtca

SEQ ID NO: 265498 - DNA, 20 bp, synthetic construct
  source 1..20: mol_type = other DNA
agagctgccacttagtagtc

SEQ ID NO: 265499 - DNA, 20 bp, synthetic construct
  source 1..20: mol_type = other DNA
gagagctgccacttagtagt

SEQ ID NO: 265500 - DNA, 20 bp, synthetic construct
  source 1..20: mol_type = other DNA
cgagagctgccacttagtag

SEQ ID NO: 265501 - DNA, 20 bp, synthetic construct
  source 1..20: mol_type = other DNA
ccgagagctgccacttagta

SEQ ID NO: 265502 - DNA, 20 bp, synthetic construct
  source 1..20: mol_type = other DNA
tccgagagctgccacttagt

SEQ ID NO: 265503 - DNA, 20 bp, synthetic construct
  source 1..20: mol_type = other DNA
ctccgagagctgccacttag

SEQ ID NO: 265504 - DNA, 20 bp, synthetic construct
  source 1..20: mol_type = other DNA
gctccgagagctgccactta

SEQ ID NO: 265505 - DNA, 20 bp, synthetic construct
  source 1..20: mol_type = other DNA
ggctccgagagctgccactt

SEQ ID NO: 265506 - DNA, 20 bp, synthetic construct
  source 1..20: mol_type = other DNA
aggctccgagagctgccact

SEQ ID NO: 265507 - DNA, 20 bp, synthetic construct
  source 1..20: mol_type = other DNA
gaggctccgagagctgccac

SEQ ID NO: 265508 - DNA, 20 bp, synthetic construct
  source 1..20: mol_type = other DNA
agaggctccgagagctgcca

SEQ ID NO: 265509 - DNA, 20 bp, synthetic construct
  source 1..20: mol_type = other DNA
gagaggctccgagagctgcc

SEQ ID NO: 265510 - DNA, 20 bp, synthetic construct
  source 1..20: mol_type = other DNA
agagaggctccgagagctgc

SEQ ID NO: 265511 - DNA, 20 bp, synthetic construct
  source 1..20: mol_type = other DNA
cagagaggctccgagagctg

SEQ ID NO: 265512 - DNA, 20 bp, synthetic construct
  source 1..20: mol_type = other DNA
ccagagaggctccgagagct

SEQ ID NO: 265513 - DNA, 20 bp, synthetic construct
  source 1..20: mol_type = other DNA
gccagagaggctccgagagc

SEQ ID NO: 265514 - DNA, 20 bp, synthetic construct
  source 1..20: mol_type = other DNA
ggccagagaggctccgagag

SEQ ID NO: 265515 - DNA, 20 bp, synthetic construct
  source 1..20: mol_type = other DNA
gggccagagaggctccgaga

SEQ ID NO: 265516 - DNA, 20 bp, synthetic construct
  source 1..20: mol_type = other DNA
ggggccagagaggctccgag

SEQ ID NO: 265517 - DNA, 20 bp, synthetic construct
  source 1..20: mol_type = other DNA
tggggccagagaggctccga

SEQ ID NO: 265518 - DNA, 20 bp, synthetic construct
  source 1..20: mol_type = other DNA
ttggggccagagaggctccg

SEQ ID NO: 265519 - DNA, 20 bp, synthetic construct
  source 1..20: mol_type = other DNA
cttggggccagagaggctcc

SEQ ID NO: 265520 - DNA, 20 bp, synthetic construct
  source 1..20: mol_type = other DNA
acttggggccagagaggctc

SEQ ID NO: 265521 - DNA, 20 bp, synthetic construct
  source 1..20: mol_type = other DNA
gacttggggccagagaggct

SEQ ID NO: 265522 - DNA, 20 bp, synthetic construct
  source 1..20: mol_type = other DNA
ggacttggggccagagaggc

SEQ ID NO: 265523 - DNA, 20 bp, synthetic construct
  source 1..20: mol_type = other DNA
tggacttggggccagagagg

SEQ ID NO: 265524 - DNA, 20 bp, synthetic construct
  source 1..20: mol_type = other DNA
ctggacttggggccagagag

SEQ ID NO: 265525 - DNA, 20 bp, synthetic construct
  source 1..20: mol_type = other DNA
cctggacttggggccagaga

SEQ ID NO: 265526 - DNA, 20 bp, synthetic construct
  source 1..20: mol_type = other DNA
ccctggacttggggccagag

SEQ ID NO: 265527 - DNA, 20 bp, synthetic construct
  source 1..20: mol_type = other DNA
accctggacttggggccaga

SEQ ID NO: 265528 - DNA, 20 bp, synthetic construct
  source 1..20: mol_type = other DNA
aaccctggacttggggccag

SEQ ID NO: 265529 - DNA, 20 bp, synthetic construct
  source 1..20: mol_type = other DNA
gaaccctggacttggggcca

SEQ ID NO: 265530 - DNA, 20 bp, synthetic construct
  source 1..20: mol_type = other DNA
ggaaccctggacttggggcc

SEQ ID NO: 265531 - DNA, 20 bp, synthetic construct
  source 1..20: mol_type = other DNA
tggaaccctggacttggggc

SEQ ID NO: 265532 - DNA, 20 bp, synthetic construct
  source 1..20: mol_type = other DNA
atggaaccctggacttgggg

SEQ ID NO: 265533 - DNA, 20 bp, synthetic construct
  source 1..20: mol_type = other DNA
tatggaaccctggacttggg

SEQ ID NO: 265534 - DNA, 20 bp, synthetic construct
  source 1..20: mol_type = other DNA
ctatggaaccctggacttgg

SEQ ID NO: 265535 - DNA, 20 bp, synthetic construct
  source 1..20: mol_type = other DNA
tctatggaaccctggacttg

SEQ ID NO: 265536 - DNA, 20 bp, synthetic construct
  source 1..20: mol_type = other DNA
ctctatggaaccctggactt

SEQ ID NO: 265537 - DNA, 20 bp, synthetic construct
  source 1..20: mol_type = other DNA
cctctatggaaccctggact

SEQ ID NO: 265538 - DNA, 20 bp, synthetic construct
  source 1..20: mol_type = other DNA
gcctctatggaaccctggac

SEQ ID NO: 265539 - DNA, 20 bp, synthetic construct
  source 1..20: mol_type = other DNA
tgcctctatggaaccctgga

SEQ ID NO: 265540 - DNA, 20 bp, synthetic construct
  source 1..20: mol_type = other DNA
ctgcctctatggaaccctgg

SEQ ID NO: 265541 - DNA, 20 bp, synthetic construct
  source 1..20: mol_type = other DNA
gctgcctctatggaaccctg

SEQ ID NO: 265542 - DNA, 20 bp, synthetic construct
  source 1..20: mol_type = other DNA
ggctgcctctatggaaccct

SEQ ID NO: 265543 - DNA, 20 bp, synthetic construct
  source 1..20: mol_type = other DNA
gggctgcctctatggaaccc

SEQ ID NO: 265544 - DNA, 20 bp, synthetic construct
  source 1..20: mol_type = other DNA
ggggctgcctctatggaacc

SEQ ID NO: 265545 - DNA, 20 bp, synthetic construct
  source 1..20: mol_type = other DNA
tggggctgcctctatggaac

SEQ ID NO: 265546 - DNA, 20 bp, synthetic construct
  source 1..20: mol_type = other DNA
ctggggctgcctctatggaa

SEQ ID NO: 265547 - DNA, 20 bp, synthetic construct
  source 1..20: mol_type = other DNA
gctggggctgcctctatgga

SEQ ID NO: 265548 - DNA, 20 bp, synthetic construct
  source 1..20: mol_type = other DNA
tgctggggctgcctctatgg

SEQ ID NO: 265549 - DNA, 20 bp, synthetic construct
  source 1..20: mol_type = other DNA
atgctggggctgcctctatg

SEQ ID NO: 265550 - DNA, 20 bp, synthetic construct
  source 1..20: mol_type = other DNA
catgctggggctgcctctat

SEQ ID NO: 265551 - DNA, 20 bp, synthetic construct
  source 1..20: mol_type = other DNA
ccatgctggggctgcctcta

SEQ ID NO: 265552 - DNA, 20 bp, synthetic construct
  source 1..20: mol_type = other DNA
gccatgctggggctgcctct

SEQ ID NO: 265553 - DNA, 20 bp, synthetic construct
  source 1..20: mol_type = other DNA
tgccatgctggggctgcctc

SEQ ID NO: 265554 - DNA, 20 bp, synthetic construct
  source 1..20: mol_type = other DNA
atgccatgctggggctgcct

SEQ ID NO: 265555 - DNA, 20 bp, synthetic construct
  source 1..20: mol_type = other DNA
catgccatgctggggctgcc

SEQ ID NO: 265556 - DNA, 20 bp, synthetic construct
  source 1..20: mol_type = other DNA
acatgccatgctggggctgc

SEQ ID NO: 265557 - DNA, 20 bp, synthetic construct
  source 1..20: mol_type = other DNA
aacatgccatgctggggctg

SEQ ID NO: 265558 - DNA, 20 bp, synthetic construct
  source 1..20: mol_type = other DNA
aaacatgccatgctggggct

SEQ ID NO: 265559 - DNA, 20 bp, synthetic construct
  source 1..20: mol_type = other DNA
aaaacatgccatgctggggc

SEQ ID NO: 265560 - DNA, 20 bp, synthetic construct
  source 1..20: mol_type = other DNA
gaaaacatgccatgctgggg

SEQ ID NO: 265561 - DNA, 20 bp, synthetic construct
  source 1..20: mol_type = other DNA
tgaaaacatgccatgctggg

SEQ ID NO: 265562 - DNA, 20 bp, synthetic construct
  source 1..20: mol_type = other DNA
ctgaaaacatgccatgctgg

SEQ ID NO: 265563 - DNA, 20 bp, synthetic construct
  source 1..20: mol_type = other DNA
actgaaaacatgccatgctg

SEQ ID NO: 265564 - DNA, 20 bp, synthetic construct
  source 1..20: mol_type = other DNA
gactgaaaacatgccatgct

SEQ ID NO: 265565 - DNA, 20 bp, synthetic construct
  source 1..20: mol_type = other DNA
ggactgaaaacatgccatgc

SEQ ID NO: 265566 - DNA, 20 bp, synthetic construct
  source 1..20: mol_type = other DNA
gggactgaaaacatgccatg

SEQ ID NO: 265567 - DNA, 20 bp, synthetic construct
  source 1..20: mol_type = other DNA
ggggactgaaaacatgccat

SEQ ID NO: 265568 - DNA, 20 bp, synthetic construct
  source 1..20: mol_type = other DNA
tggggactgaaaacatgcca

SEQ ID NO: 265569 - DNA, 20 bp, synthetic construct
  source 1..20: mol_type = other DNA
ttggggactgaaaacatgcc

SEQ ID NO: 265570 - DNA, 20 bp, synthetic construct
  source 1..20: mol_type = other DNA
tttggggactgaaaacatgc

SEQ ID NO: 265571 - DNA, 20 bp, synthetic construct
  source 1..20: mol_type = other DNA
atttggggactgaaaacatg

SEQ ID NO: 265572 - DNA, 20 bp, synthetic construct
  source 1..20: mol_type = other DNA
catttggggactgaaaacat

SEQ ID NO: 265573 - DNA, 20 bp, synthetic construct
  source 1..20: mol_type = other DNA
tcatttggggactgaaaaca

SEQ ID NO: 265574 - DNA, 20 bp, synthetic construct
  source 1..20: mol_type = other DNA
ctcatttggggactgaaaac

SEQ ID NO: 265575 - DNA, 20 bp, synthetic construct
  source 1..20: mol_type = other DNA
tctcatttggggactgaaaa

SEQ ID NO: 265576 - DNA, 20 bp, synthetic construct
  source 1..20: mol_type = other DNA
gtctcatttggggactgaaa

SEQ ID NO: 265577 - DNA, 20 bp, synthetic construct
  source 1..20: mol_type = other DNA
agtctcatttggggactgaa

SEQ ID NO: 265578 - DNA, 20 bp, synthetic construct
  source 1..20: mol_type = other DNA
gagtctcatttggggactga

SEQ ID NO: 265579 - DNA, 20 bp, synthetic construct
  source 1..20: mol_type = other DNA
agagtctcatttggggactg

SEQ ID NO: 265580 - DNA, 20 bp, synthetic construct
  source 1..20: mol_type = other DNA
cagagtctcatttggggact

SEQ ID NO: 265581 - DNA, 20 bp, synthetic construct
  source 1..20: mol_type = other DNA
ccagagtctcatttggggac

SEQ ID NO: 265582 - DNA, 20 bp, synthetic construct
  source 1..20: mol_type = other DNA
tccagagtctcatttgggga

SEQ ID NO: 265583 - DNA, 20 bp, synthetic construct
  source 1..20: mol_type = other DNA
ctccagagtctcatttgggg

SEQ ID NO: 265584 - DNA, 20 bp, synthetic construct
  source 1..20: mol_type = other DNA
tctccagagtctcatttggg

SEQ ID NO: 265585 - DNA, 20 bp, synthetic construct
  source 1..20: mol_type = other DNA
gtctccagagtctcatttgg

SEQ ID NO: 265586 - DNA, 20 bp, synthetic construct
  source 1..20: mol_type = other DNA
tgtctccagagtctcatttg

SEQ ID NO: 265587 - DNA, 20 bp, synthetic construct
  source 1..20: mol_type = other DNA
ttgtctccagagtctcattt

SEQ ID NO: 265588 - DNA, 20 bp, synthetic construct
  source 1..20: mol_type = other DNA
tttgtctccagagtctcatt

SEQ ID NO: 265589 - DNA, 20 bp, synthetic construct
  source 1..20: mol_type = other DNA
atttgtctccagagtctcat

SEQ ID NO: 265590 - DNA, 20 bp, synthetic construct
  source 1..20: mol_type = other DNA
catttgtctccagagtctca

SEQ ID NO: 265591 - DNA, 20 bp, synthetic construct
  source 1..20: mol_type = other DNA
acatttgtctccagagtctc

SEQ ID NO: 265592 - DNA, 20 bp, synthetic construct
  source 1..20: mol_type = other DNA
gacatttgtctccagagtct

SEQ ID NO: 265593 - DNA, 20 bp, synthetic construct
  source 1..20: mol_type = other DNA
agacatttgtctccagagtc

SEQ ID NO: 265594 - DNA, 20 bp, synthetic construct
  source 1..20: mol_type = other DNA
gagacatttgtctccagagt

SEQ ID NO: 265595 - DNA, 20 bp, synthetic construct
  source 1..20: mol_type = other DNA
agagacatttgtctccagag

SEQ ID NO: 265596 - DNA, 20 bp, synthetic construct
  source 1..20: mol_type = other DNA
cagagacatttgtctccaga

SEQ ID NO: 265597 - DNA, 20 bp, synthetic construct
  source 1..20: mol_type = other DNA
ccagagacatttgtctccag

SEQ ID NO: 265598 - DNA, 20 bp, synthetic construct
  source 1..20: mol_type = other DNA
tccagagacatttgtctcca

SEQ ID NO: 265599 - DNA, 20 bp, synthetic construct
  source 1..20: mol_type = other DNA
ctccagagacatttgtctcc

SEQ ID NO: 265600 - DNA, 20 bp, synthetic construct
  source 1..20: mol_type = other DNA
tctccagagacatttgtctc

SEQ ID NO: 265601 - DNA, 20 bp, synthetic construct
  source 1..20: mol_type = other DNA
gtctccagagacatttgtct

SEQ ID NO: 265602 - DNA, 20 bp, synthetic construct
  source 1..20: mol_type = other DNA
tgtctccagagacatttgtc

SEQ ID NO: 265603 - DNA, 20 bp, synthetic construct
  source 1..20: mol_type = other DNA
ctgtctccagagacatttgt

SEQ ID NO: 265604 - DNA, 20 bp, synthetic construct
  source 1..20: mol_type = other DNA
tctgtctccagagacatttg

SEQ ID NO: 265605 - DNA, 20 bp, synthetic construct
  source 1..20: mol_type = other DNA
ctctgtctccagagacattt

SEQ ID NO: 265606 - DNA, 20 bp, synthetic construct
  source 1..20: mol_type = other DNA
gctctgtctccagagacatt

SEQ ID NO: 265607 - DNA, 20 bp, synthetic construct
  source 1..20: mol_type = other DNA
tgctctgtctccagagacat

SEQ ID NO: 265608 - DNA, 20 bp, synthetic construct
  source 1..20: mol_type = other DNA
ctgctctgtctccagagaca

SEQ ID NO: 265609 - DNA, 20 bp, synthetic construct
  source 1..20: mol_type = other DNA
gctgctctgtctccagagac

SEQ ID NO: 265610 - DNA, 20 bp, synthetic construct
  source 1..20: mol_type = other DNA
tgctgctctgtctccagaga

SEQ ID NO: 265611 - DNA, 20 bp, synthetic construct
  source 1..20: mol_type = other DNA
ctgctgctctgtctccagag

SEQ ID NO: 265612 - DNA, 20 bp, synthetic construct
  source 1..20: mol_type = other DNA
gctgctgctctgtctccaga

SEQ ID NO: 265613 - DNA, 20 bp, synthetic construct
  source 1..20: mol_type = other DNA
ggctgctgctctgtctccag

SEQ ID NO: 265614 - DNA, 20 bp, synthetic construct
  source 1..20: mol_type = other DNA
aggctgctgctctgtctcca

SEQ ID NO: 265615 - DNA, 20 bp, synthetic construct
  source 1..20: mol_type = other DNA
caggctgctgctctgtctcc

SEQ ID NO: 265616 - DNA, 20 bp, synthetic construct
  source 1..20: mol_type = other DNA
ccaggctgctgctctgtctc

SEQ ID NO: 265617 - DNA, 20 bp, synthetic construct
  source 1..20: mol_type = other DNA
tccaggctgctgctctgtct

SEQ ID NO: 265618 - DNA, 20 bp, synthetic construct
  source 1..20: mol_type = other DNA
atccaggctgctgctctgtc

SEQ ID NO: 265619 - DNA, 20 bp, synthetic construct
  source 1..20: mol_type = other DNA
tatccaggctgctgctctgt

SEQ ID NO: 265620 - DNA, 20 bp, synthetic construct
  source 1..20: mol_type = other DNA
ttatccaggctgctgctctg

SEQ ID NO: 265621 - DNA, 20 bp, synthetic construct
  source 1..20: mol_type = other DNA
cttatccaggctgctgctct

SEQ ID NO: 265622 - DNA, 20 bp, synthetic construct
  source 1..20: mol_type = other DNA
acttatccaggctgctgctc

SEQ ID NO: 265623 - DNA, 20 bp, synthetic construct
  source 1..20: mol_type = other DNA
gacttatccaggctgctgct

SEQ ID NO: 265624 - DNA, 20 bp, synthetic construct
  source 1..20: mol_type = other DNA
tgacttatccaggctgctgc

SEQ ID NO: 265625 - DNA, 20 bp, synthetic construct
  source 1..20: mol_type = other DNA
gtgacttatccaggctgctg

SEQ ID NO: 265626 - DNA, 20 bp, synthetic construct
  source 1..20: mol_type = other DNA
tgtgacttatccaggctgct

SEQ ID NO: 265627 - DNA, 20 bp, synthetic construct
  source 1..20: mol_type = other DNA
ttgtgacttatccaggctgc

SEQ ID NO: 265628 - DNA, 20 bp, synthetic construct
  source 1..20: mol_type = other DNA
attgtgacttatccaggctg

SEQ ID NO: 265629 - DNA, 20 bp, synthetic construct
  source 1..20: mol_type = other DNA
cattgtgacttatccaggct

SEQ ID NO: 265630 - DNA, 20 bp, synthetic construct
  source 1..20: mol_type = other DNA
ccattgtgacttatccaggc

SEQ ID NO: 265631 - DNA, 20 bp, synthetic construct
  source 1..20: mol_type = other DNA
cccattgtgacttatccagg

SEQ ID NO: 265632 - DNA, 20 bp, synthetic construct
  source 1..20: mol_type = other DNA
acccattgtgacttatccag

SEQ ID NO: 265633 - DNA, 20 bp, synthetic construct
  source 1..20: mol_type = other DNA
cacccattgtgacttatcca

SEQ ID NO: 265634 - DNA, 20 bp, synthetic construct
  source 1..20: mol_type = other DNA
tcacccattgtgacttatcc

SEQ ID NO: 265635 - DNA, 20 bp, synthetic construct
  source 1..20: mol_type = other DNA
gtcacccattgtgacttatc

SEQ ID NO: 265636 - DNA, 20 bp, synthetic construct
  source 1..20: mol_type = other DNA
cgtcacccattgtgacttat

SEQ ID NO: 265637 - DNA, 20 bp, synthetic construct
  source 1..20: mol_type = other DNA
acgtcacccattgtgactta

SEQ ID NO: 265638 - DNA, 20 bp, synthetic construct
  source 1..20: mol_type = other DNA
gacgtcacccattgtgactt

SEQ ID NO: 265639 - DNA, 20 bp, synthetic construct
  source 1..20: mol_type = other DNA
tgacgtcacccattgtgact

SEQ ID NO: 265640 - DNA, 20 bp, synthetic construct
  source 1..20: mol_type = other DNA
gtgacgtcacccattgtgac

SEQ ID NO: 265641 - DNA, 20 bp, synthetic construct
  source 1..20: mol_type = other DNA
agtgacgtcacccattgtga

SEQ ID NO: 265642 - DNA, 20 bp, synthetic construct
  source 1..20: mol_type = other DNA
gagtgacgtcacccattgtg

SEQ ID NO: 265643 - DNA, 20 bp, synthetic construct
  source 1..20: mol_type = other DNA
tgagtgacgtcacccattgt

SEQ ID NO: 265644 - DNA, 20 bp, synthetic construct
  source 1..20: mol_type = other DNA
ctgagtgacgtcacccattg

SEQ ID NO: 265645 - DNA, 20 bp, synthetic construct
  source 1..20: mol_type = other DNA
cctgagtgacgtcacccatt

SEQ ID NO: 265646 - DNA, 20 bp, synthetic construct
  source 1..20: mol_type = other DNA
ccctgagtgacgtcacccat

SEQ ID NO: 265647 - DNA, 20 bp, synthetic construct
  source 1..20: mol_type = other DNA
gccctgagtgacgtcaccca

SEQ ID NO: 265648 - DNA, 20 bp, synthetic construct
  source 1..20: mol_type = other DNA
agccctgagtgacgtcaccc

SEQ ID NO: 265649 - DNA, 20 bp, synthetic construct
  source 1..20: mol_type = other DNA
gagccctgagtgacgtcacc

SEQ ID NO: 265650 - DNA, 20 bp, synthetic construct
  source 1..20: mol_type = other DNA
tgagccctgagtgacgtcac

SEQ ID NO: 265651 - DNA, 20 bp, synthetic construct
  source 1..20: mol_type = other DNA
ttgagccctgagtgacgtca

SEQ ID NO: 265652 - DNA, 20 bp, synthetic construct
  source 1..20: mol_type = other DNA
gttgagccctgagtgacgtc

SEQ ID NO: 265653 - DNA, 20 bp, synthetic construct
  source 1..20: mol_type = other DNA
ggttgagccctgagtgacgt

SEQ ID NO: 265654 - DNA, 20 bp, synthetic construct
  source 1..20: mol_type = other DNA
gggttgagccctgagtgacg

SEQ ID NO: 265655 - DNA, 20 bp, synthetic construct
  source 1..20: mol_type = other DNA
ggggttgagccctgagtgac

SEQ ID NO: 265656 - DNA, 20 bp, synthetic construct
  source 1..20: mol_type = other DNA
aggggttgagccctgagtga

SEQ ID NO: 265657 - DNA, 20 bp, synthetic construct
  source 1..20: mol_type = other DNA
caggggttgagccctgagtg

SEQ ID NO: 265658 - DNA, 20 bp, synthetic construct
  source 1..20: mol_type = other DNA
ccaggggttgagccctgagt

SEQ ID NO: 265659 - DNA, 20 bp, synthetic construct
  source 1..20: mol_type = other DNA
cccaggggttgagccctgag

SEQ ID NO: 265660 - DNA, 20 bp, synthetic construct
  source 1..20: mol_type = other DNA
gcccaggggttgagccctga

SEQ ID NO: 265661 - DNA, 20 bp, synthetic construct
  source 1..20: mol_type = other DNA
tgcccaggggttgagccctg

SEQ ID NO: 265662 - DNA, 20 bp, synthetic construct
  source 1..20: mol_type = other DNA
ctgcccaggggttgagccct

SEQ ID NO: 265663 - DNA, 20 bp, synthetic construct
  source 1..20: mol_type = other DNA
gctgcccaggggttgagccc

SEQ ID NO: 265664 - DNA, 20 bp, synthetic construct
  source 1..20: mol_type = other DNA
agctgcccaggggttgagcc

SEQ ID NO: 265665 - DNA, 20 bp, synthetic construct
  source 1..20: mol_type = other DNA
aagctgcccaggggttgagc

SEQ ID NO: 265666 - DNA, 20 bp, synthetic construct
  source 1..20: mol_type = other DNA
taagctgcccaggggttgag

SEQ ID NO: 265667 - DNA, 20 bp, synthetic construct
  source 1..20: mol_type = other DNA
ttaagctgcccaggggttga

SEQ ID NO: 265668 - DNA, 20 bp, synthetic construct
  source 1..20: mol_type = other DNA
gttaagctgcccaggggttg

SEQ ID NO: 265669 - DNA, 20 bp, synthetic construct
  source 1..20: mol_type = other DNA
agttaagctgcccaggggtt

SEQ ID NO: 265670 - DNA, 20 bp, synthetic construct
  source 1..20: mol_type = other DNA
aagttaagctgcccaggggt

SEQ ID NO: 265671 - DNA, 20 bp, synthetic construct
  source 1..20: mol_type = other DNA
caagttaagctgcccagggg

SEQ ID NO: 265672 - DNA, 20 bp, synthetic construct
  source 1..20: mol_type = other DNA
gcaagttaagctgcccaggg

SEQ ID NO: 265673 - DNA, 20 bp, synthetic construct
  source 1..20: mol_type = other DNA
agcaagttaagctgcccagg

SEQ ID NO: 265674 - DNA, 20 bp, synthetic construct
  source 1..20: mol_type = other DNA
tagcaagttaagctgcccag

SEQ ID NO: 265675 - DNA, 20 bp, synthetic construct
  source 1..20: mol_type = other DNA
ctagcaagttaagctgccca

SEQ ID NO: 265676 - DNA, 20 bp, synthetic construct
  source 1..20: mol_type = other DNA
cctagcaagttaagctgccc

SEQ ID NO: 265677 - DNA, 20 bp, synthetic construct
  source 1..20: mol_type = other DNA
ccctagcaagttaagctgcc

SEQ ID NO: 265678 - DNA, 20 bp, synthetic construct
  source 1..20: mol_type = other DNA
tccctagcaagttaagctgc

SEQ ID NO: 265679 - DNA, 20 bp, synthetic construct
  source 1..20: mol_type = other DNA
gtccctagcaagttaagctg

SEQ ID NO: 265680 - DNA, 20 bp, synthetic construct
  source 1..20: mol_type = other DNA
cgtccctagcaagttaagct

SEQ ID NO: 265681 - DNA, 20 bp, synthetic construct
  source 1..20: mol_type = other DNA
acgtccctagcaagttaagc

SEQ ID NO: 265682 - DNA, 20 bp, synthetic construct
  source 1..20: mol_type = other DNA
aacgtccctagcaagttaag

SEQ ID NO: 265683 - DNA, 20 bp, synthetic construct
  source 1..20: mol_type = other DNA
taacgtccctagcaagttaa

SEQ ID NO: 265684 - DNA, 20 bp, synthetic construct
  source 1..20: mol_type = other DNA
ctaacgtccctagcaagtta

SEQ ID NO: 265685 - DNA, 20 bp, synthetic construct
  source 1..20: mol_type = other DNA
cctaacgtccctagcaagtt

SEQ ID NO: 265686 - DNA, 20 bp, synthetic construct
  source 1..20: mol_type = other DNA
tcctaacgtccctagcaagt

SEQ ID NO: 265687 - DNA, 20 bp, synthetic construct
  source 1..20: mol_type = other DNA
ctcctaacgtccctagcaag

SEQ ID NO: 265688 - DNA, 20 bp, synthetic construct
  source 1..20: mol_type = other DNA
actcctaacgtccctagcaa

SEQ ID NO: 265689 - DNA, 20 bp, synthetic construct
  source 1..20: mol_type = other DNA
gactcctaacgtccctagca

SEQ ID NO: 265690 - DNA, 20 bp, synthetic construct
  source 1..20: mol_type = other DNA
agactcctaacgtccctagc

SEQ ID NO: 265691 - DNA, 20 bp, synthetic construct
  source 1..20: mol_type = other DNA
cagactcctaacgtccctag

SEQ ID NO: 265692 - DNA, 20 bp, synthetic construct
  source 1..20: mol_type = other DNA
gcagactcctaacgtcccta

SEQ ID NO: 265693 - DNA, 20 bp, synthetic construct
  source 1..20: mol_type = other DNA
agcagactcctaacgtccct

SEQ ID NO: 265694 - DNA, 20 bp, synthetic construct
  source 1..20: mol_type = other DNA
cagcagactcctaacgtccc

SEQ ID NO: 265695 - DNA, 20 bp, synthetic construct
  source 1..20: mol_type = other DNA
gcagcagactcctaacgtcc

SEQ ID NO: 265696 - DNA, 20 bp, synthetic construct
  source 1..20: mol_type = other DNA
tgcagcagactcctaacgtc

SEQ ID NO: 265697 - DNA, 20 bp, synthetic construct
  source 1..20: mol_type = other DNA
ttgcagcagactcctaacgt

SEQ ID NO: 265698 - DNA, 20 bp, synthetic construct
  source 1..20: mol_type = other DNA
tttgcagcagactcctaacg

SEQ ID NO: 265699 - DNA, 20 bp, synthetic construct
  source 1..20: mol_type = other DNA
ttttgcagcagactcctaac

SEQ ID NO: 265700 - DNA, 20 bp, synthetic construct
  source 1..20: mol_type = other DNA
gttttgcagcagactcctaa

SEQ ID NO: 265701 - DNA, 20 bp, synthetic construct
  source 1..20: mol_type = other DNA
ggttttgcagcagactccta

SEQ ID NO: 265702 - DNA, 20 bp, synthetic construct
  source 1..20: mol_type = other DNA
aggttttgcagcagactcct

SEQ ID NO: 265703 - DNA, 20 bp, synthetic construct
  source 1..20: mol_type = other DNA
caggttttgcagcagactcc

SEQ ID NO: 265704 - DNA, 20 bp, synthetic construct
  source 1..20: mol_type = other DNA
tcaggttttgcagcagactc

SEQ ID NO: 265705 - DNA, 20 bp, synthetic construct
  source 1..20: mol_type = other DNA
ctcaggttttgcagcagact

SEQ ID NO: 265706 - DNA, 20 bp, synthetic construct
  source 1..20: mol_type = other DNA
cctcaggttttgcagcagac

SEQ ID NO: 265707 - DNA, 20 bp, synthetic construct
  source 1..20: mol_type = other DNA
ccctcaggttttgcagcaga

SEQ ID NO: 265708 - DNA, 20 bp, synthetic construct
  source 1..20: mol_type = other DNA
accctcaggttttgcagcag

SEQ ID NO: 265709 - DNA, 20 bp, synthetic construct
  source 1..20: mol_type = other DNA
gaccctcaggttttgcagca

SEQ ID NO: 265710 - DNA, 20 bp, synthetic construct
  source 1..20: mol_type = other DNA
agaccctcaggttttgcagc

SEQ ID NO: 265711 - DNA, 20 bp, synthetic construct
  source 1..20: mol_type = other DNA
aagaccctcaggttttgcag

SEQ ID NO: 265712 - DNA, 20 bp, synthetic construct
  source 1..20: mol_type = other DNA
taagaccctcaggttttgca

SEQ ID NO: 265713 - DNA, 20 bp, synthetic construct
  source 1..20: mol_type = other DNA
ctaagaccctcaggttttgc

SEQ ID NO: 265714 - DNA, 20 bp, synthetic construct
  source 1..20: mol_type = other DNA
gctaagaccctcaggttttg

SEQ ID NO: 265715 - DNA, 20 bp, synthetic construct
  source 1..20: mol_type = other DNA
agctaagaccctcaggtttt

SEQ ID NO: 265716 - DNA, 20 bp, synthetic construct
  source 1..20: mol_type = other DNA
cagctaagaccctcaggttt

SEQ ID NO: 265717 - DNA, 20 bp, synthetic construct
  source 1..20: mol_type = other DNA
tcagctaagaccctcaggtt

SEQ ID NO: 265718 - DNA, 20 bp, synthetic construct
  source 1..20: mol_type = other DNA
ctcagctaagaccctcaggt

SEQ ID NO: 265719 - DNA, 20 bp, synthetic construct
  source 1..20: mol_type = other DNA
gctcagctaagaccctcagg

SEQ ID NO: 265720 - DNA, 20 bp, synthetic construct
  source 1..20: mol_type = other DNA
tgctcagctaagaccctcag

SEQ ID NO: 265721 - DNA, 20 bp, synthetic construct
  source 1..20: mol_type = other DNA
ctgctcagctaagaccctca

SEQ ID NO: 265722 - DNA, 20 bp, synthetic construct
  source 1..20: mol_type = other DNA
actgctcagctaagaccctc

SEQ ID NO: 265723 - DNA, 20 bp, synthetic construct
  source 1..20: mol_type = other DNA
gactgctcagctaagaccct

SEQ ID NO: 265724 - DNA, 20 bp, synthetic construct
  source 1..20: mol_type = other DNA
tgactgctcagctaagaccc

SEQ ID NO: 265725 - DNA, 20 bp, synthetic construct
  source 1..20: mol_type = other DNA
gtgactgctcagctaagacc

SEQ ID NO: 265726 - DNA, 20 bp, synthetic construct
  source 1..20: mol_type = other DNA
tgtgactgctcagctaagac

SEQ ID NO: 265727 - DNA, 20 bp, synthetic construct
  source 1..20: mol_type = other DNA
ctgtgactgctcagctaaga

SEQ ID NO: 265728 - DNA, 20 bp, synthetic construct
  source 1..20: mol_type = other DNA
cctgtgactgctcagctaag

SEQ ID NO: 265729 - DNA, 20 bp, synthetic construct
  source 1..20: mol_type = other DNA
gcctgtgactgctcagctaa

SEQ ID NO: 265730 - DNA, 20 bp, synthetic construct
  source 1..20: mol_type = other DNA
agcctgtgactgctcagcta

SEQ ID NO: 265731 - DNA, 20 bp, synthetic construct
  source 1..20: mol_type = other DNA
cagcctgtgactgctcagct

SEQ ID NO: 265732 - DNA, 20 bp, synthetic construct
  source 1..20: mol_type = other DNA
ccagcctgtgactgctcagc

SEQ ID NO: 265733 - DNA, 20 bp, synthetic construct
  source 1..20: mol_type = other DNA
cccagcctgtgactgctcag

SEQ ID NO: 265734 - DNA, 20 bp, synthetic construct
  source 1..20: mol_type = other DNA
gcccagcctgtgactgctca

SEQ ID NO: 265735 - DNA, 20 bp, synthetic construct
  source 1..20: mol_type = other DNA
ggcccagcctgtgactgctc

SEQ ID NO: 265736 - DNA, 20 bp, synthetic construct
  source 1..20: mol_type = other DNA
gggcccagcctgtgactgct

SEQ ID NO: 265737 - DNA, 20 bp, synthetic construct
  source 1..20: mol_type = other DNA
cgggcccagcctgtgactgc

SEQ ID NO: 265738 - DNA, 20 bp, synthetic construct
  source 1..20: mol_type = other DNA
acgggcccagcctgtgactg

SEQ ID NO: 265739 - DNA, 20 bp, synthetic construct
  source 1..20: mol_type = other DNA
aacgggcccagcctgtgact

SEQ ID NO: 265740 - DNA, 20 bp, synthetic construct
  source 1..20: mol_type = other DNA
caacgggcccagcctgtgac

SEQ ID NO: 265741 - DNA, 20 bp, synthetic construct
  source 1..20: mol_type = other DNA
gcaacgggcccagcctgtga

SEQ ID NO: 265742 - DNA, 20 bp, synthetic construct
  source 1..20: mol_type = other DNA
ggcaacgggcccagcctgtg

SEQ ID NO: 265743 - DNA, 20 bp, synthetic construct
  source 1..20: mol_type = other DNA
gggcaacgggcccagcctgt

SEQ ID NO: 265744 - DNA, 20 bp, synthetic construct
  source 1..20: mol_type = other DNA
agggcaacgggcccagcctg

SEQ ID NO: 265745 - DNA, 20 bp, synthetic construct
  source 1..20: mol_type = other DNA
cagggcaacgggcccagcct

SEQ ID NO: 265746 - DNA, 20 bp, synthetic construct
  source 1..20: mol_type = other DNA
ccagggcaacgggcccagcc

SEQ ID NO: 265747 - DNA, 20 bp, synthetic construct
  source 1..20: mol_type = other DNA
cccagggcaacgggcccagc

SEQ ID NO: 265748 - DNA, 20 bp, synthetic construct
  source 1..20: mol_type = other DNA
gcccagggcaacgggcccag

SEQ ID NO: 265749 - DNA, 20 bp, synthetic construct
  source 1..20: mol_type = other DNA
agcccagggcaacgggccca

SEQ ID NO: 265750 - DNA, 20 bp, synthetic construct
  source 1..20: mol_type = other DNA
gagcccagggcaacgggccc

SEQ ID NO: 265751 - DNA, 20 bp, synthetic construct
  source 1..20: mol_type = other DNA
ggagcccagggcaacgggcc

SEQ ID NO: 265752 - DNA, 20 bp, synthetic construct
  source 1..20: mol_type = other DNA
aggagcccagggcaacgggc

SEQ ID NO: 265753 - DNA, 20 bp, synthetic construct
  source 1..20: mol_type = other DNA
caggagcccagggcaacggg

SEQ ID NO: 265754 - DNA, 20 bp, synthetic construct
  source 1..20: mol_type = other DNA
acaggagcccagggcaacgg

SEQ ID NO: 265755 - DNA, 20 bp, synthetic construct
  source 1..20: mol_type = other DNA
cacaggagcccagggcaacg

SEQ ID NO: 265756 - DNA, 20 bp, synthetic construct
  source 1..20: mol_type = other DNA
tcacaggagcccagggcaac

SEQ ID NO: 265757 - DNA, 20 bp, synthetic construct
  source 1..20: mol_type = other DNA
ctcacaggagcccagggcaa

SEQ ID NO: 265758 - DNA, 20 bp, synthetic construct
  source 1..20: mol_type = other DNA
actcacaggagcccagggca

SEQ ID NO: 265759 - DNA, 20 bp, synthetic construct
  source 1..20: mol_type = other DNA
tactcacaggagcccagggc

SEQ ID NO: 265760 - DNA, 20 bp, synthetic construct
  source 1..20: mol_type = other DNA
ttactcacaggagcccaggg

SEQ ID NO: 265761 - DNA, 20 bp, synthetic construct
  source 1..20: mol_type = other DNA
tttactcacaggagcccagg

SEQ ID NO: 265762 - DNA, 20 bp, synthetic construct
  source 1..20: mol_type = other DNA
ttttactcacaggagcccag

SEQ ID NO: 265763 - DNA, 20 bp, synthetic construct
  source 1..20: mol_type = other DNA
gttttactcacaggagccca

SEQ ID NO: 265764 - DNA, 20 bp, synthetic construct
  source 1..20: mol_type = other DNA
ggttttactcacaggagccc

SEQ ID NO: 265765 - DNA, 20 bp, synthetic construct
  source 1..20: mol_type = other DNA
gggttttactcacaggagcc

SEQ ID NO: 265766 - DNA, 20 bp, synthetic construct
  source 1..20: mol_type = other DNA
tgggttttactcacaggagc

SEQ ID NO: 265767 - DNA, 20 bp, synthetic construct
  source 1..20: mol_type = other DNA
ctgggttttactcacaggag

SEQ ID NO: 265768 - DNA, 20 bp, synthetic construct
  source 1..20: mol_type = other DNA
actgggttttactcacagga

SEQ ID NO: 265769 - DNA, 20 bp, synthetic construct
  source 1..20: mol_type = other DNA
gactgggttttactcacagg

SEQ ID NO: 265770 - DNA, 20 bp, synthetic construct
  source 1..20: mol_type = other DNA
tgactgggttttactcacag

SEQ ID NO: 265771 - DNA, 20 bp, synthetic construct
  source 1..20: mol_type = other DNA
ttgactgggttttactcaca

SEQ ID NO: 265772 - DNA, 20 bp, synthetic construct
  source 1..20: mol_type = other DNA
attgactgggttttactcac

SEQ ID NO: 265773 - DNA, 20 bp, synthetic construct
  source 1..20: mol_type = other DNA
aattgactgggttttactca

SEQ ID NO: 265774 - DNA, 20 bp, synthetic construct
  source 1..20: mol_type = other DNA
aaattgactgggttttactc

SEQ ID NO: 265775 - DNA, 20 bp, synthetic construct
  source 1..20: mol_type = other DNA
aaaattgactgggttttact

SEQ ID NO: 265776 - DNA, 20 bp, synthetic construct
  source 1..20: mol_type = other DNA
caaaattgactgggttttac

SEQ ID NO: 265777 - DNA, 20 bp, synthetic construct
  source 1..20: mol_type = other DNA
tcaaaattgactgggtttta

SEQ ID NO: 265778 - DNA, 20 bp, synthetic construct
  source 1..20: mol_type = other DNA
ctcaaaattgactgggtttt

SEQ ID NO: 265779 - DNA, 20 bp, synthetic construct
  source 1..20: mol_type = other DNA
actcaaaattgactgggttt

SEQ ID NO: 265780 - DNA, 20 bp, synthetic construct
  source 1..20: mol_type = other DNA
tactcaaaattgactgggtt

SEQ ID NO: 265781 - DNA, 20 bp, synthetic construct
  source 1..20: mol_type = other DNA
gtactcaaaattgactgggt

SEQ ID NO: 265782 - DNA, 20 bp, synthetic construct
  source 1..20: mol_type = other DNA
ggtactcaaaattgactggg

SEQ ID NO: 265783 - DNA, 20 bp, synthetic construct
  source 1..20: mol_type = other DNA
gggtactcaaaattgactgg

SEQ ID NO: 265784 - DNA, 20 bp, synthetic construct
  source 1..20: mol_type = other DNA
tgggtactcaaaattgactg

SEQ ID NO: 265785 - DNA, 20 bp, synthetic construct
  source 1..20: mol_type = other DNA
ctgggtactcaaaattgact

SEQ ID NO: 265786 - DNA, 20 bp, synthetic construct
  source 1..20: mol_type = other DNA
actgggtactcaaaattgac

SEQ ID NO: 265787 - DNA, 20 bp, synthetic construct
  source 1..20: mol_type = other DNA
tactgggtactcaaaattga

SEQ ID NO: 265788 - DNA, 20 bp, synthetic construct
  source 1..20: mol_type = other DNA
ttactgggtactcaaaattg

SEQ ID NO: 265789 - DNA, 20 bp, synthetic construct
  source 1..20: mol_type = other DNA
cttactgggtactcaaaatt

SEQ ID NO: 265790 - DNA, 20 bp, synthetic construct
  source 1..20: mol_type = other DNA
ccttactgggtactcaaaat

SEQ ID NO: 265791 - DNA, 20 bp, synthetic construct
  source 1..20: mol_type = other DNA
gccttactgggtactcaaaa

SEQ ID NO: 265792 - DNA, 20 bp, synthetic construct
  source 1..20: mol_type = other DNA
tgccttactgggtactcaaa

SEQ ID NO: 265793 - DNA, 20 bp, synthetic construct
  source 1..20: mol_type = other DNA
atgccttactgggtactcaa

SEQ ID NO: 265794 - DNA, 20 bp, synthetic construct
  source 1..20: mol_type = other DNA
gatgccttactgggtactca

SEQ ID NO: 265795 - DNA, 20 bp, synthetic construct
  source 1..20: mol_type = other DNA
ggatgccttactgggtactc

SEQ ID NO: 265796 - DNA, 20 bp, synthetic construct
  source 1..20: mol_type = other DNA
tggatgccttactgggtact

SEQ ID NO: 265797 - DNA, 20 bp, synthetic construct
  source 1..20: mol_type = other DNA
atggatgccttactgggtac

SEQ ID NO: 265798 - DNA, 20 bp, synthetic construct
  source 1..20: mol_type = other DNA
aatggatgccttactgggta

SEQ ID NO: 265799 - DNA, 20 bp, synthetic construct
  source 1..20: mol_type = other DNA
caatggatgccttactgggt

SEQ ID NO: 265800 - DNA, 20 bp, synthetic construct
  source 1..20: mol_type = other DNA
tcaatggatgccttactggg

SEQ ID NO: 265801 - DNA, 20 bp, synthetic construct
  source 1..20: mol_type = other DNA
ctcaatggatgccttactgg

SEQ ID NO: 265802 - DNA, 20 bp, synthetic construct
  source 1..20: mol_type = other DNA
actcaatggatgccttactg

SEQ ID NO: 265803 - DNA, 20 bp, synthetic construct
  source 1..20: mol_type = other DNA
aactcaatggatgccttact

SEQ ID NO: 265804 - DNA, 20 bp, synthetic construct
  source 1..20: mol_type = other DNA
taactcaatggatgccttac

SEQ ID NO: 265805 - DNA, 20 bp, synthetic construct
  source 1..20: mol_type = other DNA
ataactcaatggatgcctta

SEQ ID NO: 265806 - DNA, 20 bp, synthetic construct
  source 1..20: mol_type = other DNA
aataactcaatggatgcctt

SEQ ID NO: 265807 - DNA, 20 bp, synthetic construct
  source 1..20: mol_type = other DNA
aaataactcaatggatgcct

SEQ ID NO: 265808 - DNA, 20 bp, synthetic construct
  source 1..20: mol_type = other DNA
aaaataactcaatggatgcc

SEQ ID NO: 265809 - DNA, 20 bp, synthetic construct
  source 1..20: mol_type = other DNA
caaaataactcaatggatgc

SEQ ID NO: 265810 - DNA, 20 bp, synthetic construct
  source 1..20: mol_type = other DNA
gcaaaataactcaatggatg

SEQ ID NO: 265811 - DNA, 20 bp, synthetic construct
  source 1..20: mol_type = other DNA
tgcaaaataactcaatggat

SEQ ID NO: 265812 - DNA, 20 bp, synthetic construct
  source 1..20: mol_type = other DNA
ctgcaaaataactcaatgga

SEQ ID NO: 265813 - DNA, 20 bp, synthetic construct
  source 1..20: mol_type = other DNA
gctgcaaaataactcaatgg

SEQ ID NO: 265814 - DNA, 20 bp, synthetic construct
  source 1..20: mol_type = other DNA
ggctgcaaaataactcaatg

SEQ ID NO: 265815 - DNA, 20 bp, synthetic construct
  source 1..20: mol_type = other DNA
tggctgcaaaataactcaat

SEQ ID NO: 265816 - DNA, 20 bp, synthetic construct
  source 1..20: mol_type = other DNA
ctggctgcaaaataactcaa

SEQ ID NO: 265817 - DNA, 20 bp, synthetic construct
  source 1..20: mol_type = other DNA
cctggctgcaaaataactca

SEQ ID NO: 265818 - DNA, 20 bp, synthetic construct
  source 1..20: mol_type = other DNA
tcctggctgcaaaataactc

SEQ ID NO: 265819 - DNA, 20 bp, synthetic construct
  source 1..20: mol_type = other DNA
ctcctggctgcaaaataact

SEQ ID NO: 265820 - DNA, 20 bp, synthetic construct
  source 1..20: mol_type = other DNA
actcctggctgcaaaataac

SEQ ID NO: 265821 - DNA, 20 bp, synthetic construct
  source 1..20: mol_type = other DNA
cactcctggctgcaaaataa

SEQ ID NO: 265822 - DNA, 20 bp, synthetic construct
  source 1..20: mol_type = other DNA
gcactcctggctgcaaaata

SEQ ID NO: 265823 - DNA, 20 bp, synthetic construct
  source 1..20: mol_type = other DNA
agcactcctggctgcaaaat

SEQ ID NO: 265824 - DNA, 20 bp, synthetic construct
  source 1..20: mol_type = other DNA
tagcactcctggctgcaaaa

SEQ ID NO: 265825 - DNA, 20 bp, synthetic construct
  source 1..20: mol_type = other DNA
atagcactcctggctgcaaa

SEQ ID NO: 265826 - DNA, 20 bp, synthetic construct
  source 1..20: mol_type = other DNA
aatagcactcctggctgcaa

SEQ ID NO: 265827 - DNA, 20 bp, synthetic construct
  source 1..20: mol_type = other DNA
taatagcactcctggctgca

SEQ ID NO: 265828 - DNA, 20 bp, synthetic construct
  source 1..20: mol_type = other DNA
ttaatagcactcctggctgc

SEQ ID NO: 265829 - DNA, 20 bp, synthetic construct
  source 1..20: mol_type = other DNA
cttaatagcactcctggctg

SEQ ID NO: 265830 - DNA, 20 bp, synthetic construct
  source 1..20: mol_type = other DNA
tcttaatagcactcctggct

SEQ ID NO: 265831 - DNA, 20 bp, synthetic construct
  source 1..20: mol_type = other DNA
ttcttaatagcactcctggc

SEQ ID NO: 265832 - DNA, 20 bp, synthetic construct
  source 1..20: mol_type = other DNA
gttcttaatagcactcctgg

SEQ ID NO: 265833 - DNA, 20 bp, synthetic construct
  source 1..20: mol_type = other DNA
tgttcttaatagcactcctg

SEQ ID NO: 265834 - DNA, 20 bp, synthetic construct
  source 1..20: mol_type = other DNA
ctgttcttaatagcactcct

SEQ ID NO: 265835 - DNA, 20 bp, synthetic construct
  source 1..20: mol_type = other DNA
actgttcttaatagcactcc

SEQ ID NO: 265836 - DNA, 20 bp, synthetic construct
  source 1..20: mol_type = other DNA
gactgttcttaatagcactc

SEQ ID NO: 265837 - DNA, 20 bp, synthetic construct
  source 1..20: mol_type = other DNA
cgactgttcttaatagcact

SEQ ID NO: 265838 - DNA, 20 bp, synthetic construct
  source 1..20: mol_type = other DNA
gcgactgttcttaatagcac

SEQ ID NO: 265839 - DNA, 20 bp, synthetic construct
  source 1..20: mol_type = other DNA
cgcgactgttcttaatagca

SEQ ID NO: 265840 - DNA, 20 bp, synthetic construct
  source 1..20: mol_type = other DNA
ccgcgactgttcttaatagc

SEQ ID NO: 265841 - DNA, 20 bp, synthetic construct
  source 1..20: mol_type = other DNA
gccgcgactgttcttaatag

SEQ ID NO: 265842 - DNA, 20 bp, synthetic construct
  source 1..20: mol_type = other DNA
agccgcgactgttcttaata

SEQ ID NO: 265843 - DNA, 20 bp, synthetic construct
  source 1..20: mol_type = other DNA
cagccgcgactgttcttaat

SEQ ID NO: 265844 - DNA, 20 bp, synthetic construct
  source 1..20: mol_type = other DNA
ccagccgcgactgttcttaa

SEQ ID NO: 265845 - DNA, 20 bp, synthetic construct
  source 1..20: mol_type = other DNA
cccagccgcgactgttctta

SEQ ID NO: 265846 - DNA, 20 bp, synthetic construct
  source 1..20: mol_type = other DNA
gcccagccgcgactgttctt

SEQ ID NO: 265847 - DNA, 20 bp, synthetic construct
  source 1..20: mol_type = other DNA
cgcccagccgcgactgttct

SEQ ID NO: 265848 - DNA, 20 bp, synthetic construct
  source 1..20: mol_type = other DNA
acgcccagccgcgactgttc

SEQ ID NO: 265849 - DNA, 20 bp, synthetic construct
  source 1..20: mol_type = other DNA
cacgcccagccgcgactgtt

SEQ ID NO: 265850 - DNA, 20 bp, synthetic construct
  source 1..20: mol_type = other DNA
ccacgcccagccgcgactgt

SEQ ID NO: 265851 - DNA, 20 bp, synthetic construct
  source 1..20: mol_type = other DNA
accacgcccagccgcgactg

SEQ ID NO: 265852 - DNA, 20 bp, synthetic construct
  source 1..20: mol_type = other DNA
caccacgcccagccgcgact

SEQ ID NO: 265853 - DNA, 20 bp, synthetic construct
  source 1..20: mol_type = other DNA
ccaccacgcccagccgcgac

SEQ ID NO: 265854 - DNA, 20 bp, synthetic construct
  source 1..20: mol_type = other DNA
gccaccacgcccagccgcga

SEQ ID NO: 265855 - DNA, 20 bp, synthetic construct
  source 1..20: mol_type = other DNA
agccaccacgcccagccgcg

SEQ ID NO: 265856 - DNA, 20 bp, synthetic construct
  source 1..20: mol_type = other DNA
gagccaccacgcccagccgc

SEQ ID NO: 265857 - DNA, 20 bp, synthetic construct
  source 1..20: mol_type = other DNA
tgagccaccacgcccagccg

SEQ ID NO: 265858 - DNA, 20 bp, synthetic construct
  source 1..20: mol_type = other DNA
atgagccaccacgcccagcc

SEQ ID NO: 265859 - DNA, 20 bp, synthetic construct
  source 1..20: mol_type = other DNA
catgagccaccacgcccagc

SEQ ID NO: 265860 - DNA, 20 bp, synthetic construct
  source 1..20: mol_type = other DNA
gcatgagccaccacgcccag

SEQ ID NO: 265861 - DNA, 20 bp, synthetic construct
  source 1..20: mol_type = other DNA
ggcatgagccaccacgccca

SEQ ID NO: 265862 - DNA, 20 bp, synthetic construct
  source 1..20: mol_type = other DNA
aggcatgagccaccacgccc

SEQ ID NO: 265863 - DNA, 20 bp, synthetic construct
  source 1..20: mol_type = other DNA
caggcatgagccaccacgcc

SEQ ID NO: 265864 - DNA, 20 bp, synthetic construct
  source 1..20: mol_type = other DNA
acaggcatgagccaccacgc

SEQ ID NO: 265865 - DNA, 20 bp, synthetic construct
  source 1..20: mol_type = other DNA
tacaggcatgagccaccacg

SEQ ID NO: 265866 - DNA, 20 bp, synthetic construct
  source 1..20: mol_type = other DNA
ttacaggcatgagccaccac

SEQ ID NO: 265867 - DNA, 20 bp, synthetic construct
  source 1..20: mol_type = other DNA
attacaggcatgagccacca

SEQ ID NO: 265868 - DNA, 20 bp, synthetic construct
  source 1..20: mol_type = other DNA
gattacaggcatgagccacc

SEQ ID NO: 265869 - DNA, 20 bp, synthetic construct
  source 1..20: mol_type = other DNA
ggattacaggcatgagccac

SEQ ID NO: 265870 - DNA, 20 bp, synthetic construct
  source 1..20: mol_type = other DNA
gggattacaggcatgagcca

SEQ ID NO: 265871 - DNA, 20 bp, synthetic construct
  source 1..20: mol_type = other DNA
tgggattacaggcatgagcc

SEQ ID NO: 265872 - DNA, 20 bp, synthetic construct
  source 1..20: mol_type = other DNA
ctgggattacaggcatgagc

SEQ ID NO: 265873 - DNA, 20 bp, synthetic construct
  source 1..20: mol_type = other DNA
gctgggattacaggcatgag

SEQ ID NO: 265874 - DNA, 20 bp, synthetic construct
  source 1..20: mol_type = other DNA
tgctgggattacaggcatga

SEQ ID NO: 265875 - DNA, 20 bp, synthetic construct
  source 1..20: mol_type = other DNA
gtgctgggattacaggcatg

SEQ ID NO: 265876 - DNA, 20 bp, synthetic construct
  source 1..20: mol_type = other DNA
agtgctgggattacaggcat

SEQ ID NO: 265877 - DNA, 20 bp, synthetic construct
  source 1..20: mol_type = other DNA
aagtgctgggattacaggca

SEQ ID NO: 265878 - DNA, 20 bp, synthetic construct
  source 1..20: mol_type = other DNA
aaagtgctgggattacaggc

SEQ ID NO: 265879 - DNA, 20 bp, synthetic construct
  source 1..20: mol_type = other DNA
caaagtgctgggattacagg

SEQ ID NO: 265880 - DNA, 20 bp, synthetic construct
  source 1..20: mol_type = other DNA
ccaaagtgctgggattacag

SEQ ID NO: 265881 - DNA, 20 bp, synthetic construct
  source 1..20: mol_type = other DNA
cccaaagtgctgggattaca

SEQ ID NO: 265882 - DNA, 20 bp, synthetic construct
  source 1..20: mol_type = other DNA
tcccaaagtgctgggattac

SEQ ID NO: 265883 - DNA, 20 bp, synthetic construct
  source 1..20: mol_type = other DNA
ctcccaaagtgctgggatta

SEQ ID NO: 265884 - DNA, 20 bp, synthetic construct
  source 1..20: mol_type = other DNA
cctcccaaagtgctgggatt

SEQ ID NO: 265885 - DNA, 20 bp, synthetic construct
  source 1..20: mol_type = other DNA
gcctcccaaagtgctgggat

SEQ ID NO: 265886 - DNA, 20 bp, synthetic construct
  source 1..20: mol_type = other DNA
ggcctcccaaagtgctggga

SEQ ID NO: 265887 - DNA, 20 bp, synthetic construct
  source 1..20: mol_type = other DNA
tggcctcccaaagtgctggg

SEQ ID NO: 265888 - DNA, 20 bp, synthetic construct
  source 1..20: mol_type = other DNA
ttggcctcccaaagtgctgg

SEQ ID NO: 265889 - DNA, 20 bp, synthetic construct
  source 1..20: mol_type = other DNA
cttggcctcccaaagtgctg

SEQ ID NO: 265890 - DNA, 20 bp, synthetic construct
  source 1..20: mol_type = other DNA
ccttggcctcccaaagtgct

SEQ ID NO: 265891 - DNA, 20 bp, synthetic construct
  source 1..20: mol_type = other DNA
accttggcctcccaaagtgc

SEQ ID NO: 265892 - DNA, 20 bp, synthetic construct
  source 1..20: mol_type = other DNA
caccttggcctcccaaagtg

SEQ ID NO: 265893 - DNA, 20 bp, synthetic construct
  source 1..20: mol_type = other DNA
ccaccttggcctcccaaagt

SEQ ID NO: 265894 - DNA, 20 bp, synthetic construct
  source 1..20: mol_type = other DNA
cccaccttggcctcccaaag

SEQ ID NO: 265895 - DNA, 20 bp, synthetic construct
  source 1..20: mol_type = other DNA
gcccaccttggcctcccaaa

SEQ ID NO: 265896 - DNA, 20 bp, synthetic construct
  source 1..20: mol_type = other DNA
cgcccaccttggcctcccaa

SEQ ID NO: 265897 - DNA, 20 bp, synthetic construct
  source 1..20: mol_type = other DNA
ccgcccaccttggcctccca

SEQ ID NO: 265898 - DNA, 20 bp, synthetic construct
  source 1..20: mol_type = other DNA
tccgcccaccttggcctccc

SEQ ID NO: 265899 - DNA, 20 bp, synthetic construct
  source 1..20: mol_type = other DNA
atccgcccaccttggcctcc

SEQ ID NO: 265900 - DNA, 20 bp, synthetic construct
  source 1..20: mol_type = other DNA
gatccgcccaccttggcctc

SEQ ID NO: 265901 - DNA, 20 bp, synthetic construct
  source 1..20: mol_type = other DNA
tgatccgcccaccttggcct

SEQ ID NO: 265902 - DNA, 20 bp, synthetic construct
  source 1..20: mol_type = other DNA
gtgatccgcccaccttggcc

SEQ ID NO: 265903 - DNA, 20 bp, synthetic construct
  source 1..20: mol_type = other DNA
ggtgatccgcccaccttggc

SEQ ID NO: 265904 - DNA, 20 bp, synthetic construct
  source 1..20: mol_type = other DNA
aggtgatccgcccaccttgg

SEQ ID NO: 265905 - DNA, 20 bp, synthetic construct
  source 1..20: mol_type = other DNA
caggtgatccgcccaccttg

SEQ ID NO: 265906 - DNA, 20 bp, synthetic construct
  source 1..20: mol_type = other DNA
tcaggtgatccgcccacctt

SEQ ID NO: 265907 - DNA, 20 bp, synthetic construct
  source 1..20: mol_type = other DNA
ctcaggtgatccgcccacct

SEQ ID NO: 265908 - DNA, 20 bp, synthetic construct
  source 1..20: mol_type = other DNA
cctcaggtgatccgcccacc

SEQ ID NO: 265909 - DNA, 20 bp, synthetic construct
  source 1..20: mol_type = other DNA
acctcaggtgatccgcccac

SEQ ID NO: 265910 - DNA, 20 bp, synthetic construct
  source 1..20: mol_type = other DNA
gacctcaggtgatccgccca

SEQ ID NO: 265911 - DNA, 20 bp, synthetic construct
  source 1..20: mol_type = other DNA
tgacctcaggtgatccgccc

SEQ ID NO: 265912 - DNA, 20 bp, synthetic construct
  source 1..20: mol_type = other DNA
ctgacctcaggtgatccgcc

SEQ ID NO: 265913 - DNA, 20 bp, synthetic construct
  source 1..20: mol_type = other DNA
cctgacctcaggtgatccgc

SEQ ID NO: 265914 - DNA, 20 bp, synthetic construct
  source 1..20: mol_type = other DNA
tcctgacctcaggtgatccg

SEQ ID NO: 265915 - DNA, 20 bp, synthetic construct
  source 1..20: mol_type = other DNA
ctcctgacctcaggtgatcc

SEQ ID NO: 265916 - DNA, 20 bp, synthetic construct
  source 1..20: mol_type = other DNA
actcctgacctcaggtgatc

SEQ ID NO: 265917 - DNA, 20 bp, synthetic construct
  source 1..20: mol_type = other DNA
aactcctgacctcaggtgat

SEQ ID NO: 265918 - DNA, 20 bp, synthetic construct
  source 1..20: mol_type = other DNA
gaactcctgacctcaggtga

SEQ ID NO: 265919 - DNA, 20 bp, synthetic construct
  source 1..20: mol_type = other DNA
cgaactcctgacctcaggtg

SEQ ID NO: 265920 - DNA, 20 bp, synthetic construct
  source 1..20: mol_type = other DNA
tcgaactcctgacctcaggt

SEQ ID NO: 265921 - DNA, 20 bp, synthetic construct
  source 1..20: mol_type = other DNA
ctcgaactcctgacctcagg

SEQ ID NO: 265922 - DNA, 20 bp, synthetic construct
  source 1..20: mol_type = other DNA
tctcgaactcctgacctcag

SEQ ID NO: 265923 - DNA, 20 bp, synthetic construct
  source 1..20: mol_type = other DNA
gtctcgaactcctgacctca

SEQ ID NO: 265924 - DNA, 20 bp, synthetic construct
  source 1..20: mol_type = other DNA
ggtctcgaactcctgacctc

SEQ ID NO: 265925 - DNA, 20 bp, synthetic construct
  source 1..20: mol_type = other DNA
tggtctcgaactcctgacct

SEQ ID NO: 265926 - DNA, 20 bp, synthetic construct
  source 1..20: mol_type = other DNA
ctggtctcgaactcctgacc

SEQ ID NO: 265927 - DNA, 20 bp, synthetic construct
  source 1..20: mol_type = other DNA
gctggtctcgaactcctgac

SEQ ID NO: 265928 - DNA, 20 bp, synthetic construct
  source 1..20: mol_type = other DNA
agctggtctcgaactcctga

SEQ ID NO: 265929 - DNA, 20 bp, synthetic construct
  source 1..20: mol_type = other DNA
aagctggtctcgaactcctg

SEQ ID NO: 265930 - DNA, 20 bp, synthetic construct
  source 1..20: mol_type = other DNA
caagctggtctcgaactcct

SEQ ID NO: 265931 - DNA, 20 bp, synthetic construct
  source 1..20: mol_type = other DNA
ccaagctggtctcgaactcc

SEQ ID NO: 265932 - DNA, 20 bp, synthetic construct
  source 1..20: mol_type = other DNA
gccaagctggtctcgaactc

SEQ ID NO: 265933 - DNA, 20 bp, synthetic construct
  source 1..20: mol_type = other DNA
ggccaagctggtctcgaact

SEQ ID NO: 265934 - DNA, 20 bp, synthetic construct
  source 1..20: mol_type = other DNA
tggccaagctggtctcgaac

SEQ ID NO: 265935 - DNA, 20 bp, synthetic construct
  source 1..20: mol_type = other DNA
ttggccaagctggtctcgaa

SEQ ID NO: 265936 - DNA, 20 bp, synthetic construct
  source 1..20: mol_type = other DNA
gttggccaagctggtctcga

SEQ ID NO: 265937 - DNA, 20 bp, synthetic construct
  source 1..20: mol_type = other DNA
tgttggccaagctggtctcg

SEQ ID NO: 265938 - DNA, 20 bp, synthetic construct
  source 1..20: mol_type = other DNA
atgttggccaagctggtctc

SEQ ID NO: 265939 - DNA, 20 bp, synthetic construct
  source 1..20: mol_type = other DNA
catgttggccaagctggtct

SEQ ID NO: 265940 - DNA, 20 bp, synthetic construct
  source 1..20: mol_type = other DNA
ccatgttggccaagctggtc

SEQ ID NO: 265941 - DNA, 20 bp, synthetic construct
  source 1..20: mol_type = other DNA
gccatgttggccaagctggt

SEQ ID NO: 265942 - DNA, 20 bp, synthetic construct
  source 1..20: mol_type = other DNA
tgccatgttggccaagctgg

SEQ ID NO: 265943 - DNA, 20 bp, synthetic construct
  source 1..20: mol_type = other DNA
ttgccatgttggccaagctg

SEQ ID NO: 265944 - DNA, 20 bp, synthetic construct
  source 1..20: mol_type = other DNA
tttgccatgttggccaagct

SEQ ID NO: 265945 - DNA, 20 bp, synthetic construct
  source 1..20: mol_type = other DNA
ttttgccatgttggccaagc

SEQ ID NO: 265946 - DNA, 20 bp, synthetic construct
  source 1..20: mol_type = other DNA
gttttgccatgttggccaag

SEQ ID NO: 265947 - DNA, 20 bp, synthetic construct
  source 1..20: mol_type = other DNA
ggttttgccatgttggccaa

SEQ ID NO: 265948 - DNA, 20 bp, synthetic construct
  source 1..20: mol_type = other DNA
gggttttgccatgttggcca

SEQ ID NO: 265949 - DNA, 20 bp, synthetic construct
  source 1..20: mol_type = other DNA
ggggttttgccatgttggcc

SEQ ID NO: 265950 - DNA, 20 bp, synthetic construct
  source 1..20: mol_type = other DNA
cggggttttgccatgttggc

SEQ ID NO: 265951 - DNA, 20 bp, synthetic construct
  source 1..20: mol_type = other DNA
acggggttttgccatgttgg

SEQ ID NO: 265952 - DNA, 20 bp, synthetic construct
  source 1..20: mol_type = other DNA
gacggggttttgccatgttg

SEQ ID NO: 265953 - DNA, 20 bp, synthetic construct
  source 1..20: mol_type = other DNA
agacggggttttgccatgtt

SEQ ID NO: 265954 - DNA, 20 bp, synthetic construct
  source 1..20: mol_type = other DNA
gagacggggttttgccatgt

SEQ ID NO: 265955 - DNA, 20 bp, synthetic construct
  source 1..20: mol_type = other DNA
agagacggggttttgccatg

SEQ ID NO: 265956 - DNA, 20 bp, synthetic construct
  source 1..20: mol_type = other DNA
tagagacggggttttgccat

SEQ ID NO: 265957 - DNA, 20 bp, synthetic construct
  source 1..20: mol_type = other DNA
ttagagacggggttttgcca

SEQ ID NO: 265958 - DNA, 20 bp, synthetic construct
  source 1..20: mol_type = other DNA
attagagacggggttttgcc

SEQ ID NO: 265959 - DNA, 20 bp, synthetic construct
  source 1..20: mol_type = other DNA
tattagagacggggttttgc

SEQ ID NO: 265960 - DNA, 20 bp, synthetic construct
  source 1..20: mol_type = other DNA
ttattagagacggggttttg

SEQ ID NO: 265961 - DNA, 20 bp, synthetic construct
  source 1..20: mol_type = other DNA
tttattagagacggggtttt

SEQ ID NO: 265962 - DNA, 20 bp, synthetic construct
  source 1..20: mol_type = other DNA
ttttattagagacggggttt

SEQ ID NO: 265963 - DNA, 20 bp, synthetic construct
  source 1..20: mol_type = other DNA
tttttattagagacggggtt

SEQ ID NO: 265964 - DNA, 20 bp, synthetic construct
  source 1..20: mol_type = other DNA
atttttattagagacggggt

SEQ ID NO: 265965 - DNA, 20 bp, synthetic construct
  source 1..20: mol_type = other DNA
tatttttattagagacgggg

SEQ ID NO: 265966 - DNA, 20 bp, synthetic construct
  source 1..20: mol_type = other DNA
gtatttttattagagacggg

SEQ ID NO: 265967 - DNA, 20 bp, synthetic construct
  source 1..20: mol_type = other DNA
tgtatttttattagagacgg

SEQ ID NO: 265968 - DNA, 20 bp, synthetic construct
  source 1..20: mol_type = other DNA
ttgtatttttattagagacg

SEQ ID NO: 265969 - DNA, 20 bp, synthetic construct
  source 1..20: mol_type = other DNA
tttgtatttttattagagac

SEQ ID NO: 265970 - DNA, 20 bp, synthetic construct
  source 1..20: mol_type = other DNA
ttttgtatttttattagaga

SEQ ID NO: 265971 - DNA, 20 bp, synthetic construct
  source 1..20: mol_type = other DNA
attttgtatttttattagag

SEQ ID NO: 265972 - DNA, 20 bp, synthetic construct
  source 1..20: mol_type = other DNA
tattttgtatttttattaga

SEQ ID NO: 265973 - DNA, 20 bp, synthetic construct
  source 1..20: mol_type = other DNA
ttattttgtatttttattag

SEQ ID NO: 265974 - DNA, 20 bp, synthetic construct
  source 1..20: mol_type = other DNA
attattttgtatttttatta

SEQ ID NO: 265975 - DNA, 20 bp, synthetic construct
  source 1..20: mol_type = other DNA
aattattttgtatttttatt

SEQ ID NO: 265976 - DNA, 20 bp, synthetic construct
  source 1..20: mol_type = other DNA
taattattttgtatttttat

SEQ ID NO: 265977 - DNA, 20 bp, synthetic construct
  source 1..20: mol_type = other DNA
ctaattattttgtattttta

SEQ ID NO: 265978 - DNA, 20 bp, synthetic construct
  source 1..20: mol_type = other DNA
gctaattattttgtattttt

SEQ ID NO: 265979 - DNA, 20 bp, synthetic construct
  source 1..20: mol_type = other DNA
agctaattattttgtatttt

SEQ ID NO: 265980 - DNA, 20 bp, synthetic construct
  source 1..20: mol_type = other DNA
cagctaattattttgtattt

SEQ ID NO: 265981 - DNA, 20 bp, synthetic construct
  source 1..20: mol_type = other DNA
ccagctaattattttgtatt

SEQ ID NO: 265982 - DNA, 20 bp, synthetic construct
  source 1..20: mol_type = other DNA
cccagctaattattttgtat

SEQ ID NO: 265983 - DNA, 20 bp, synthetic construct
  source 1..20: mol_type = other DNA
gcccagctaattattttgta

SEQ ID NO: 265984 - DNA, 20 bp, synthetic construct
  source 1..20: mol_type = other DNA
cgcccagctaattattttgt

SEQ ID NO: 265985 - DNA, 20 bp, synthetic construct
  source 1..20: mol_type = other DNA
acgcccagctaattattttg

SEQ ID NO: 265986 - DNA, 20 bp, synthetic construct
  source 1..20: mol_type = other DNA
cacgcccagctaattatttt

SEQ ID NO: 265987 - DNA, 20 bp, synthetic construct
  source 1..20: mol_type = other DNA
ccacgcccagctaattattt

SEQ ID NO: 265988 - DNA, 20 bp, synthetic construct
  source 1..20: mol_type = other DNA
accacgcccagctaattatt

SEQ ID NO: 265989 - DNA, 20 bp, synthetic construct
  source 1..20: mol_type = other DNA
caccacgcccagctaattat

SEQ ID NO: 265990 - DNA, 20 bp, synthetic construct
  source 1..20: mol_type = other DNA
ccaccacgcccagctaatta

SEQ ID NO: 265991 - DNA, 20 bp, synthetic construct
  source 1..20: mol_type = other DNA
gccaccacgcccagctaatt

SEQ ID NO: 265992 - DNA, 20 bp, synthetic construct
  source 1..20: mol_type = other DNA
cgccaccacgcccagctaat

SEQ ID NO: 265993 - DNA, 20 bp, synthetic construct
  source 1..20: mol_type = other DNA
ccgccaccacgcccagctaa

SEQ ID NO: 265994 - DNA, 20 bp, synthetic construct
  source 1..20: mol_type = other DNA
cccgccaccacgcccagcta

SEQ ID NO: 265995 - DNA, 20 bp, synthetic construct
  source 1..20: mol_type = other DNA
gcccgccaccacgcccagct

SEQ ID NO: 265996 - DNA, 20 bp, synthetic construct
  source 1..20: mol_type = other DNA
cgcccgccaccacgcccagc

SEQ ID NO: 265997 - DNA, 20 bp, synthetic construct
  source 1..20: mol_type = other DNA
gcgcccgccaccacgcccag

SEQ ID NO: 265998 - DNA, 20 bp, synthetic construct
  source 1..20: mol_type = other DNA
ggcgcccgccaccacgccca

SEQ ID NO: 265999 - DNA, 20 bp, synthetic construct
  source 1..20: mol_type = other DNA
aggcgcccgccaccacgccc

SEQ ID NO: 266000 - DNA, 20 bp, synthetic construct
  source 1..20: mol_type = other DNA
caggcgcccgccaccacgcc

SEQ ID NO: 266001 - DNA, 20 bp, synthetic construct
  source 1..20: mol_type = other DNA
acaggcgcccgccaccacgc

SEQ ID NO: 266002 - DNA, 20 bp, synthetic construct
  source 1..20: mol_type = other DNA
tacaggcgcccgccaccacg

SEQ ID NO: 266003 - DNA, 20 bp, synthetic construct
  source 1..20: mol_type = other DNA
ttacaggcgcccgccaccac

SEQ ID NO: 266004 - DNA, 20 bp, synthetic construct
  source 1..20: mol_type = other DNA
attacaggcgcccgccacca

SEQ ID NO: 266005 - DNA, 20 bp, synthetic construct
  source 1..20: mol_type = other DNA
gattacaggcgcccgccacc

SEQ ID NO: 266006 - DNA, 20 bp, synthetic construct
  source 1..20: mol_type = other DNA
ggattacaggcgcccgccac

SEQ ID NO: 266007 - DNA, 20 bp, synthetic construct
  source 1..20: mol_type = other DNA
gggattacaggcgcccgcca

SEQ ID NO: 266008 - DNA, 20 bp, synthetic construct
  source 1..20: mol_type = other DNA
tgggattacaggcgcccgcc

SEQ ID NO: 266009 - DNA, 20 bp, synthetic construct
  source 1..20: mol_type = other DNA
ctgggattacaggcgcccgc

SEQ ID NO: 266010 - DNA, 20 bp, synthetic construct
  source 1..20: mol_type = other DNA
gctgggattacaggcgcccg

SEQ ID NO: 266011 - DNA, 20 bp, synthetic construct
  source 1..20: mol_type = other DNA
agctgggattacaggcgccc

SEQ ID NO: 266012 - DNA, 20 bp, synthetic construct
  source 1..20: mol_type = other DNA
aagctgggattacaggcgcc

SEQ ID NO: 266013 - DNA, 20 bp, synthetic construct
  source 1..20: mol_type = other DNA
gaagctgggattacaggcgc

SEQ ID NO: 266014 - DNA, 20 bp, synthetic construct
  source 1..20: mol_type = other DNA
agaagctgggattacaggcg

SEQ ID NO: 266015 - DNA, 20 bp, synthetic construct
  source 1..20: mol_type = other DNA
gagaagctgggattacaggc

SEQ ID NO: 266016 - DNA, 20 bp, synthetic construct
  source 1..20: mol_type = other DNA
tgagaagctgggattacagg

SEQ ID NO: 266017 - DNA, 20 bp, synthetic construct
  source 1..20: mol_type = other DNA
ctgagaagctgggattacag

SEQ ID NO: 266018 - DNA, 20 bp, synthetic construct
  source 1..20: mol_type = other DNA
cctgagaagctgggattaca

SEQ ID NO: 266019 - DNA, 20 bp, synthetic construct
  source 1..20: mol_type = other DNA
tcctgagaagctgggattac

SEQ ID NO: 266020 - DNA, 20 bp, synthetic construct
  source 1..20: mol_type = other DNA
ctcctgagaagctgggatta

SEQ ID NO: 266021 - DNA, 20 bp, synthetic construct
  source 1..20: mol_type = other DNA
cctcctgagaagctgggatt

SEQ ID NO: 266022 - DNA, 20 bp, synthetic construct
  source 1..20: mol_type = other DNA
ccctcctgagaagctgggat

SEQ ID NO: 266023 - DNA, 20 bp, synthetic construct
  source 1..20: mol_type = other DNA
accctcctgagaagctggga

SEQ ID NO: 266024 - DNA, 20 bp, synthetic construct
  source 1..20: mol_type = other DNA
caccctcctgagaagctggg

SEQ ID NO: 266025 - DNA, 20 bp, synthetic construct
  source 1..20: mol_type = other DNA
tcaccctcctgagaagctgg

SEQ ID NO: 266026 - DNA, 20 bp, synthetic construct
  source 1..20: mol_type = other DNA
ctcaccctcctgagaagctg

SEQ ID NO: 266027 - DNA, 20 bp, synthetic construct
  source 1..20: mol_type = other DNA
cctcaccctcctgagaagct

SEQ ID NO: 266028 - DNA, 20 bp, synthetic construct
  source 1..20: mol_type = other DNA
tcctcaccctcctgagaagc

SEQ ID NO: 266029 - DNA, 20 bp, synthetic construct
  source 1..20: mol_type = other DNA
ttcctcaccctcctgagaag

SEQ ID NO: 266030 - DNA, 20 bp, synthetic construct
  source 1..20: mol_type = other DNA
cttcctcaccctcctgagaa

SEQ ID NO: 266031 - DNA, 20 bp, synthetic construct
  source 1..20: mol_type = other DNA
ccttcctcaccctcctgaga

SEQ ID NO: 266032 - DNA, 20 bp, synthetic construct
  source 1..20: mol_type = other DNA
tccttcctcaccctcctgag

SEQ ID NO: 266033 - DNA, 20 bp, synthetic construct
  source 1..20: mol_type = other DNA
ctccttcctcaccctcctga

SEQ ID NO: 266034 - DNA, 20 bp, synthetic construct
  source 1..20: mol_type = other DNA
tctccttcctcaccctcctg

SEQ ID NO: 266035 - DNA, 20 bp, synthetic construct
  source 1..20: mol_type = other DNA
ttctccttcctcaccctcct

SEQ ID NO: 266036 - DNA, 20 bp, synthetic construct
  source 1..20: mol_type = other DNA
attctccttcctcaccctcc

SEQ ID NO: 266037 - DNA, 20 bp, synthetic construct
  source 1..20: mol_type = other DNA
gattctccttcctcaccctc

SEQ ID NO: 266038 - DNA, 20 bp, synthetic construct
  source 1..20: mol_type = other DNA
tgattctccttcctcaccct

SEQ ID NO: 266039 - DNA, 20 bp, synthetic construct
  source 1..20: mol_type = other DNA
gtgattctccttcctcaccc

SEQ ID NO: 266040 - DNA, 20 bp, synthetic construct
  source 1..20: mol_type = other DNA
agtgattctccttcctcacc

SEQ ID NO: 266041 - DNA, 20 bp, synthetic construct
  source 1..20: mol_type = other DNA
aagtgattctccttcctcac

SEQ ID NO: 266042 - DNA, 20 bp, synthetic construct
  source 1..20: mol_type = other DNA
caagtgattctccttcctca

SEQ ID NO: 266043 - DNA, 20 bp, synthetic construct
  source 1..20: mol_type = other DNA
tcaagtgattctccttcctc

SEQ ID NO: 266044 - DNA, 20 bp, synthetic construct
  source 1..20: mol_type = other DNA
ttcaagtgattctccttcct

SEQ ID NO: 266045 - DNA, 20 bp, synthetic construct
  source 1..20: mol_type = other DNA
gttcaagtgattctccttcc

SEQ ID NO: 266046 - DNA, 20 bp, synthetic construct
  source 1..20: mol_type = other DNA
ggttcaagtgattctccttc

SEQ ID NO: 266047 - DNA, 20 bp, synthetic construct
  source 1..20: mol_type = other DNA
gggttcaagtgattctcctt

SEQ ID NO: 266048 - DNA, 20 bp, synthetic construct
  source 1..20: mol_type = other DNA
tgggttcaagtgattctcct

SEQ ID NO: 266049 - DNA, 20 bp, synthetic construct
  source 1..20: mol_type = other DNA
ctgggttcaagtgattctcc

SEQ ID NO: 266050 - DNA, 20 bp, synthetic construct
  source 1..20: mol_type = other DNA
cctgggttcaagtgattctc

SEQ ID NO: 266051 - DNA, 20 bp, synthetic construct
  source 1..20: mol_type = other DNA
tcctgggttcaagtgattct

SEQ ID NO: 266052 - DNA, 20 bp, synthetic construct
  source 1..20: mol_type = other DNA
ctcctgggttcaagtgattc

SEQ ID NO: 266053 - DNA, 20 bp, synthetic construct
  source 1..20: mol_type = other DNA
cctcctgggttcaagtgatt

SEQ ID NO: 266054 - DNA, 20 bp, synthetic construct
  source 1..20: mol_type = other DNA
gcctcctgggttcaagtgat

SEQ ID NO: 266055 - DNA, 20 bp, synthetic construct
  source 1..20: mol_type = other DNA
tgcctcctgggttcaagtga

SEQ ID NO: 266056 - DNA, 20 bp, synthetic construct
  source 1..20: mol_type = other DNA
ctgcctcctgggttcaagtg

SEQ ID NO: 266057 - DNA, 20 bp, synthetic construct
  source 1..20: mol_type = other DNA
tctgcctcctgggttcaagt

SEQ ID NO: 266058 - DNA, 20 bp, synthetic construct
  source 1..20: mol_type = other DNA
ctctgcctcctgggttcaag

SEQ ID NO: 266059 - DNA, 20 bp, synthetic construct
  source 1..20: mol_type = other DNA
cctctgcctcctgggttcaa

SEQ ID NO: 266060 - DNA, 20 bp, synthetic construct
  source 1..20: mol_type = other DNA
acctctgcctcctgggttca

SEQ ID NO: 266061 - DNA, 20 bp, synthetic construct
  source 1..20: mol_type = other DNA
aacctctgcctcctgggttc

SEQ ID NO: 266062 - DNA, 20 bp, synthetic construct
  source 1..20: mol_type = other DNA
caacctctgcctcctgggtt

SEQ ID NO: 266063 - DNA, 20 bp, synthetic construct
  source 1..20: mol_type = other DNA
gcaacctctgcctcctgggt

SEQ ID NO: 266064 - DNA, 20 bp, synthetic construct
  source 1..20: mol_type = other DNA
tgcaacctctgcctcctggg

SEQ ID NO: 266065 - DNA, 20 bp, synthetic construct
  source 1..20: mol_type = other DNA
ctgcaacctctgcctcctgg

SEQ ID NO: 266066 - DNA, 20 bp, synthetic construct
  source 1..20: mol_type = other DNA
actgcaacctctgcctcctg

SEQ ID NO: 266067 - DNA, 20 bp, synthetic construct
  source 1..20: mol_type = other DNA
cactgcaacctctgcctcct

SEQ ID NO: 266068 - DNA, 20 bp, synthetic construct
  source 1..20: mol_type = other DNA
tcactgcaacctctgcctcc

SEQ ID NO: 266069 - DNA, 20 bp, synthetic construct
  source 1..20: mol_type = other DNA
ctcactgcaacctctgcctc

SEQ ID NO: 266070 - DNA, 20 bp, synthetic construct
  source 1..20: mol_type = other DNA
gctcactgcaacctctgcct

SEQ ID NO: 266071 - DNA, 20 bp, synthetic construct
  source 1..20: mol_type = other DNA
agctcactgcaacctctgcc

SEQ ID NO: 266072 - DNA, 20 bp, synthetic construct
  source 1..20: mol_type = other DNA
cagctcactgcaacctctgc

SEQ ID NO: 266073 - DNA, 20 bp, synthetic construct
  source 1..20: mol_type = other DNA
tcagctcactgcaacctctg

SEQ ID NO: 266074 - DNA, 20 bp, synthetic construct
  source 1..20: mol_type = other DNA
ctcagctcactgcaacctct

SEQ ID NO: 266075 - DNA, 20 bp, synthetic construct
  source 1..20: mol_type = other DNA
tctcagctcactgcaacctc

SEQ ID NO: 266076 - DNA, 20 bp, synthetic construct
  source 1..20: mol_type = other DNA
atctcagctcactgcaacct

SEQ ID NO: 266077 - DNA, 20 bp, synthetic construct
  source 1..20: mol_type = other DNA
gatctcagctcactgcaacc

SEQ ID NO: 266078 - DNA, 20 bp, synthetic construct
  source 1..20: mol_type = other DNA
cgatctcagctcactgcaac

SEQ ID NO: 266079 - DNA, 20 bp, synthetic construct
  source 1..20: mol_type = other DNA
gcgatctcagctcactgcaa

SEQ ID NO: 266080 - DNA, 20 bp, synthetic construct
  source 1..20: mol_type = other DNA
tgcgatctcagctcactgca

SEQ ID NO: 266081 - DNA, 20 bp, synthetic construct
  source 1..20: mol_type = other DNA
gtgcgatctcagctcactgc

SEQ ID NO: 266082 - DNA, 20 bp, synthetic construct
  source 1..20: mol_type = other DNA
ggtgcgatctcagctcactg

SEQ ID NO: 266083 - DNA, 20 bp, synthetic construct
  source 1..20: mol_type = other DNA
tggtgcgatctcagctcact

SEQ ID NO: 266084 - DNA, 20 bp, synthetic construct
  source 1..20: mol_type = other DNA
atggtgcgatctcagctcac

SEQ ID NO: 266085 - DNA, 20 bp, synthetic construct
  source 1..20: mol_type = other DNA
aatggtgcgatctcagctca

SEQ ID NO: 266086 - DNA, 20 bp, synthetic construct
  source 1..20: mol_type = other DNA
caatggtgcgatctcagctc

SEQ ID NO: 266087 - DNA, 20 bp, synthetic construct
  source 1..20: mol_type = other DNA
gcaatggtgcgatctcagct

SEQ ID NO: 266088 - DNA, 20 bp, synthetic construct
  source 1..20: mol_type = other DNA
tgcaatggtgcgatctcagc

SEQ ID NO: 266089 - DNA, 20 bp, synthetic construct
  source 1..20: mol_type = other DNA
gtgcaatggtgcgatctcag

SEQ ID NO: 266090 - DNA, 20 bp, synthetic construct
  source 1..20: mol_type = other DNA
agtgcaatggtgcgatctca

SEQ ID NO: 266091 - DNA, 20 bp, synthetic construct
  source 1..20: mol_type = other DNA
gagtgcaatggtgcgatctc

SEQ ID NO: 266092 - DNA, 20 bp, synthetic construct
  source 1..20: mol_type = other DNA
ggagtgcaatggtgcgatct

SEQ ID NO: 266093 - DNA, 20 bp, synthetic construct
  source 1..20: mol_type = other DNA
tggagtgcaatggtgcgatc

SEQ ID NO: 266094 - DNA, 20 bp, synthetic construct
  source 1..20: mol_type = other DNA
ctggagtgcaatggtgcgat

SEQ ID NO: 266095 - DNA, 20 bp, synthetic construct
  source 1..20: mol_type = other DNA
gctggagtgcaatggtgcga

SEQ ID NO: 266096 - DNA, 20 bp, synthetic construct
  source 1..20: mol_type = other DNA
ggctggagtgcaatggtgcg

SEQ ID NO: 266097 - DNA, 20 bp, synthetic construct
  source 1..20: mol_type = other DNA
aggctggagtgcaatggtgc

SEQ ID NO: 266098 - DNA, 20 bp, synthetic construct
  source 1..20: mol_type = other DNA
caggctggagtgcaatggtg

SEQ ID NO: 266099 - DNA, 20 bp, synthetic construct
  source 1..20: mol_type = other DNA
ccaggctggagtgcaatggt

SEQ ID NO: 266100 - DNA, 20 bp, synthetic construct
  source 1..20: mol_type = other DNA
tccaggctggagtgcaatgg

SEQ ID NO: 266101 - DNA, 20 bp, synthetic construct
  source 1..20: mol_type = other DNA
atccaggctggagtgcaatg

SEQ ID NO: 266102 - DNA, 20 bp, synthetic construct
  source 1..20: mol_type = other DNA
catccaggctggagtgcaat

SEQ ID NO: 266103 - DNA, 20 bp, synthetic construct
  source 1..20: mol_type = other DNA
tcatccaggctggagtgcaa

SEQ ID NO: 266104 - DNA, 20 bp, synthetic construct
  source 1..20: mol_type = other DNA
gtcatccaggctggagtgca

SEQ ID NO: 266105 - DNA, 20 bp, synthetic construct
  source 1..20: mol_type = other DNA
tgtcatccaggctggagtgc

SEQ ID NO: 266106 - DNA, 20 bp, synthetic construct
  source 1..20: mol_type = other DNA
ttgtcatccaggctggagtg

SEQ ID NO: 266107 - DNA, 20 bp, synthetic construct
  source 1..20: mol_type = other DNA
tttgtcatccaggctggagt

SEQ ID NO: 266108 - DNA, 20 bp, synthetic construct
  source 1..20: mol_type = other DNA
ttttgtcatccaggctggag

SEQ ID NO: 266109 - DNA, 20 bp, synthetic construct
  source 1..20: mol_type = other DNA
cttttgtcatccaggctgga

SEQ ID NO: 266110 - DNA, 20 bp, synthetic construct
  source 1..20: mol_type = other DNA
acttttgtcatccaggctgg

SEQ ID NO: 266111 - DNA, 20 bp, synthetic construct
  source 1..20: mol_type = other DNA
cacttttgtcatccaggctg

SEQ ID NO: 266112 - DNA, 20 bp, synthetic construct
  source 1..20: mol_type = other DNA
tcacttttgtcatccaggct

SEQ ID NO: 266113 - DNA, 20 bp, synthetic construct
  source 1..20: mol_type = other DNA
ctcacttttgtcatccaggc

SEQ ID NO: 266114 - DNA, 20 bp, synthetic construct
  source 1..20: mol_type = other DNA
tctcacttttgtcatccagg

SEQ ID NO: 266115 - DNA, 20 bp, synthetic construct
  source 1..20: mol_type = other DNA
atctcacttttgtcatccag

SEQ ID NO: 266116 - DNA, 20 bp, synthetic construct
  source 1..20: mol_type = other DNA
aatctcacttttgtcatcca

SEQ ID NO: 266117 - DNA, 20 bp, synthetic construct
  source 1..20: mol_type = other DNA
gaatctcacttttgtcatcc

SEQ ID NO: 266118 - DNA, 20 bp, synthetic construct
  source 1..20: mol_type = other DNA
ggaatctcacttttgtcatc

SEQ ID NO: 266119 - DNA, 20 bp, synthetic construct
  source 1..20: mol_type = other DNA
aggaatctcacttttgtcat

SEQ ID NO: 266120 - DNA, 20 bp, synthetic construct
  source 1..20: mol_type = other DNA
aaggaatctcacttttgtca

SEQ ID NO: 266121 - DNA, 20 bp, synthetic construct
  source 1..20: mol_type = other DNA
gaaggaatctcacttttgtc

SEQ ID NO: 266122 - DNA, 20 bp, synthetic construct
  source 1..20: mol_type = other DNA
agaaggaatctcacttttgt

SEQ ID NO: 266123 - DNA, 20 bp, synthetic construct
  source 1..20: mol_type = other DNA
gagaaggaatctcacttttg

SEQ ID NO: 266124 - DNA, 20 bp, synthetic construct
  source 1..20: mol_type = other DNA
tgagaaggaatctcactttt

SEQ ID NO: 266125 - DNA, 20 bp, synthetic construct
  source 1..20: mol_type = other DNA
ttgagaaggaatctcacttt

SEQ ID NO: 266126 - DNA, 20 bp, synthetic construct
  source 1..20: mol_type = other DNA
tttgagaaggaatctcactt

SEQ ID NO: 266127 - DNA, 20 bp, synthetic construct
  source 1..20: mol_type = other DNA
ttttgagaaggaatctcact

SEQ ID NO: 266128 - DNA, 20 bp, synthetic construct
  source 1..20: mol_type = other DNA
tttttgagaaggaatctcac

SEQ ID NO: 266129 - DNA, 20 bp, synthetic construct
  source 1..20: mol_type = other DNA
ttttttgagaaggaatctca

SEQ ID NO: 266130 - DNA, 20 bp, synthetic construct
  source 1..20: mol_type = other DNA
tttttttgagaaggaatctc

SEQ ID NO: 266131 - DNA, 20 bp, synthetic construct
  source 1..20: mol_type = other DNA
ttttttttgagaaggaatct

SEQ ID NO: 266132 - DNA, 20 bp, synthetic construct
  source 1..20: mol_type = other DNA
tttttttttgagaaggaatc

SEQ ID NO: 266133 - DNA, 20 bp, synthetic construct
  source 1..20: mol_type = other DNA
ttttttttttgagaaggaat

SEQ ID NO: 266134 - DNA, 20 bp, synthetic construct
  source 1..20: mol_type = other DNA
tttttttttttgagaaggaa

SEQ ID NO: 266135 - DNA, 20 bp, synthetic construct
  source 1..20: mol_type = other DNA
ttttttttttttgagaagga

SEQ ID NO: 266136 - DNA, 20 bp, synthetic construct
  source 1..20: mol_type = other DNA
tttttttttttttgagaagg

SEQ ID NO: 266137 - DNA, 20 bp, synthetic construct
  source 1..20: mol_type = other DNA
ttttttttttttttgagaag

SEQ ID NO: 266138 - DNA, 20 bp, synthetic construct
  source 1..20: mol_type = other DNA
tttttttttttttttgagaa

SEQ ID NO: 266139 - DNA, 20 bp, synthetic construct
  source 1..20: mol_type = other DNA
ttttttttttttttttgaga

SEQ ID NO: 266140 - DNA, 20 bp, synthetic construct
  source 1..20: mol_type = other DNA
tttttttttttttttttgag

SEQ ID NO: 266141 - DNA, 20 bp, synthetic construct
  source 1..20: mol_type = other DNA
ttttttttttttttttttga

SEQ ID NO: 266142 - DNA, 20 bp, synthetic construct
  source 1..20: mol_type = other DNA
tttttttttttttttttttg

SEQ ID NO: 266143 - DNA, 20 bp, synthetic construct
  source 1..20: mol_type = other DNA
gttttttttttttttttttt

SEQ ID NO: 266144 - DNA, 20 bp, synthetic construct
  source 1..20: mol_type = other DNA
tgtttttttttttttttttt

SEQ ID NO: 266145 - DNA, 20 bp, synthetic construct
  source 1..20: mol_type = other DNA
ctgttttttttttttttttt

SEQ ID NO: 266146 - DNA, 20 bp, synthetic construct
  source 1..20: mol_type = other DNA
actgtttttttttttttttt

SEQ ID NO: 266147 - DNA, 20 bp, synthetic construct
  source 1..20: mol_type = other DNA
gactgttttttttttttttt

SEQ ID NO: 266148 - DNA, 20 bp, synthetic construct
  source 1..20: mol_type = other DNA
cgactgtttttttttttttt

SEQ ID NO: 266149 - DNA, 20 bp, synthetic construct
  source 1..20: mol_type = other DNA
acgactgttttttttttttt

SEQ ID NO: 266150 - DNA, 20 bp, synthetic construct
  source 1..20: mol_type = other DNA
gacgactgtttttttttttt

SEQ ID NO: 266151 - DNA, 20 bp, synthetic construct
  source 1..20: mol_type = other DNA
ggacgactgttttttttttt

SEQ ID NO: 266152 - DNA, 20 bp, synthetic construct
  source 1..20: mol_type = other DNA
aggacgactgtttttttttt

SEQ ID NO: 266153 - DNA, 20 bp, synthetic construct
  source 1..20: mol_type = other DNA
gaggacgactgttttttttt

SEQ ID NO: 266154 - DNA, 20 bp, synthetic construct
  source 1..20: mol_type = other DNA
agaggacgactgtttttttt

SEQ ID NO: 266155 - DNA, 20 bp, synthetic construct
  source 1..20: mol_type = other DNA
aagaggacgactgttttttt

SEQ ID NO: 266156 - DNA, 20 bp, synthetic construct
  source 1..20: mol_type = other DNA
aaagaggacgactgtttttt

SEQ ID NO: 266157 - DNA, 20 bp, synthetic construct
  source 1..20: mol_type = other DNA
caaagaggacgactgttttt

SEQ ID NO: 266158 - DNA, 20 bp, synthetic construct
  source 1..20: mol_type = other DNA
ccaaagaggacgactgtttt

SEQ ID NO: 266159 - DNA, 20 bp, synthetic construct
  source 1..20: mol_type = other DNA
cccaaagaggacgactgttt

SEQ ID NO: 266160 - DNA, 20 bp, synthetic construct
  source 1..20: mol_type = other DNA
ccccaaagaggacgactgtt

SEQ ID NO: 266161 - DNA, 20 bp, synthetic construct
  source 1..20: mol_type = other DNA
tccccaaagaggacgactgt

SEQ ID NO: 266162 - DNA, 20 bp, synthetic construct
  source 1..20: mol_type = other DNA
atccccaaagaggacgactg

SEQ ID NO: 266163 - DNA, 20 bp, synthetic construct
  source 1..20: mol_type = other DNA
aatccccaaagaggacgact

SEQ ID NO: 266164 - DNA, 20 bp, synthetic construct
  source 1..20: mol_type = other DNA
taatccccaaagaggacgac

SEQ ID NO: 266165 - DNA, 20 bp, synthetic construct
  source 1..20: mol_type = other DNA
ctaatccccaaagaggacga

SEQ ID NO: 266166 - DNA, 20 bp, synthetic construct
  source 1..20: mol_type = other DNA
cctaatccccaaagaggacg

SEQ ID NO: 266167 - DNA, 20 bp, synthetic construct
  source 1..20: mol_type = other DNA
ccctaatccccaaagaggac

SEQ ID NO: 266168 - DNA, 20 bp, synthetic construct
  source 1..20: mol_type = other DNA
tccctaatccccaaagagga

SEQ ID NO: 266169 - DNA, 20 bp, synthetic construct
  source 1..20: mol_type = other DNA
gtccctaatccccaaagagg

SEQ ID NO: 266170 - DNA, 20 bp, synthetic construct
  source 1..20: mol_type = other DNA
tgtccctaatccccaaagag

SEQ ID NO: 266171 - DNA, 20 bp, synthetic construct
  source 1..20: mol_type = other DNA
ctgtccctaatccccaaaga

SEQ ID NO: 266172 - DNA, 20 bp, synthetic construct
  source 1..20: mol_type = other DNA
gctgtccctaatccccaaag

SEQ ID NO: 266173 - DNA, 20 bp, synthetic construct
  source 1..20: mol_type = other DNA
ggctgtccctaatccccaaa

SEQ ID NO: 266174 - DNA, 20 bp, synthetic construct
  source 1..20: mol_type = other DNA
aggctgtccctaatccccaa

SEQ ID NO: 266175 - DNA, 20 bp, synthetic construct
  source 1..20: mol_type = other DNA
caggctgtccctaatcccca

SEQ ID NO: 266176 - DNA, 20 bp, synthetic construct
  source 1..20: mol_type = other DNA
gcaggctgtccctaatcccc

SEQ ID NO: 266177 - DNA, 20 bp, synthetic construct
  source 1..20: mol_type = other DNA
ggcaggctgtccctaatccc

SEQ ID NO: 266178 - DNA, 20 bp, synthetic construct
  source 1..20: mol_type = other DNA
aggcaggctgtccctaatcc

SEQ ID NO: 266179 - DNA, 20 bp, synthetic construct
  source 1..20: mol_type = other DNA
caggcaggctgtccctaatc

SEQ ID NO: 266180 - DNA, 20 bp, synthetic construct
  source 1..20: mol_type = other DNA
gcaggcaggctgtccctaat

SEQ ID NO: 266181 - DNA, 20 bp, synthetic construct
  source 1..20: mol_type = other DNA
ggcaggcaggctgtccctaa

SEQ ID NO: 266182 - DNA, 20 bp, synthetic construct
  source 1..20: mol_type = other DNA
aggcaggcaggctgtcccta

SEQ ID NO: 266183 - DNA, 20 bp, synthetic construct
  source 1..20: mol_type = other DNA
caggcaggcaggctgtccct

SEQ ID NO: 266184 - DNA, 20 bp, synthetic construct
  source 1..20: mol_type = other DNA
gcaggcaggcaggctgtccc

SEQ ID NO: 266185 - DNA, 20 bp, synthetic construct
  source 1..20: mol_type = other DNA
ggcaggcaggcaggctgtcc

SEQ ID NO: 266186 - DNA, 20 bp, synthetic construct
  source 1..20: mol_type = other DNA
gggcaggcaggcaggctgtc

SEQ ID NO: 266187 - DNA, 20 bp, synthetic construct
  source 1..20: mol_type = other DNA
cgggcaggcaggcaggctgt

SEQ ID NO: 266188 - DNA, 20 bp, synthetic construct
  source 1..20: mol_type = other DNA
tcgggcaggcaggcaggctg

SEQ ID NO: 266189 - DNA, 20 bp, synthetic construct
  source 1..20: mol_type = other DNA
ctcgggcaggcaggcaggct

SEQ ID NO: 266190 - DNA, 20 bp, synthetic construct
  source 1..20: mol_type = other DNA
gctcgggcaggcaggcaggc

SEQ ID NO: 266191 - DNA, 20 bp, synthetic construct
  source 1..20: mol_type = other DNA
tgctcgggcaggcaggcagg

SEQ ID NO: 266192 - DNA, 20 bp, synthetic construct
  source 1..20: mol_type = other DNA
gtgctcgggcaggcaggcag

SEQ ID NO: 266193 - DNA, 20 bp, synthetic construct
  source 1..20: mol_type = other DNA
agtgctcgggcaggcaggca

SEQ ID NO: 266194 - DNA, 20 bp, synthetic construct
  source 1..20: mol_type = other DNA
aagtgctcgggcaggcaggc

SEQ ID NO: 266195 - DNA, 20 bp, synthetic construct
  source 1..20: mol_type = other DNA
gaagtgctcgggcaggcagg

SEQ ID NO: 266196 - DNA, 20 bp, synthetic construct
  source 1..20: mol_type = other DNA
agaagtgctcgggcaggcag

SEQ ID NO: 266197 - DNA, 20 bp, synthetic construct
  source 1..20: mol_type = other DNA
gagaagtgctcgggcaggca

SEQ ID NO: 266198 - DNA, 20 bp, synthetic construct
  source 1..20: mol_type = other DNA
agagaagtgctcgggcaggc

SEQ ID NO: 266199 - DNA, 20 bp, synthetic construct
  source 1..20: mol_type = other DNA
gagagaagtgctcgggcagg

SEQ ID NO: 266200 - DNA, 20 bp, synthetic construct
  source 1..20: mol_type = other DNA
agagagaagtgctcgggcag

SEQ ID NO: 266201 - DNA, 20 bp, synthetic construct
  source 1..20: mol_type = other DNA
aagagagaagtgctcgggca

SEQ ID NO: 266202 - DNA, 20 bp, synthetic construct
  source 1..20: mol_type = other DNA
gaagagagaagtgctcgggc

SEQ ID NO: 266203 - DNA, 20 bp, synthetic construct
  source 1..20: mol_type = other DNA
ggaagagagaagtgctcggg

SEQ ID NO: 266204 - DNA, 20 bp, synthetic construct
  source 1..20: mol_type = other DNA
tggaagagagaagtgctcgg

SEQ ID NO: 266205 - DNA, 20 bp, synthetic construct
  source 1..20: mol_type = other DNA
atggaagagagaagtgctcg

SEQ ID NO: 266206 - DNA, 20 bp, synthetic construct
  source 1..20: mol_type = other DNA
aatggaagagagaagtgctc

SEQ ID NO: 266207 - DNA, 20 bp, synthetic construct
  source 1..20: mol_type = other DNA
caatggaagagagaagtgct

SEQ ID NO: 266208 - DNA, 20 bp, synthetic construct
  source 1..20: mol_type = other DNA
gcaatggaagagagaagtgc

SEQ ID NO: 266209 - DNA, 20 bp, synthetic construct
  source 1..20: mol_type = other DNA
ggcaatggaagagagaagtg

SEQ ID NO: 266210 - DNA, 20 bp, synthetic construct
  source 1..20: mol_type = other DNA
gggcaatggaagagagaagt

SEQ ID NO: 266211 - DNA, 20 bp, synthetic construct
  source 1..20: mol_type = other DNA
ggggcaatggaagagagaag

SEQ ID NO: 266212 - DNA, 20 bp, synthetic construct
  source 1..20: mol_type = other DNA
tggggcaatggaagagagaa

SEQ ID NO: 266213 - DNA, 20 bp, synthetic construct
  source 1..20: mol_type = other DNA
ctggggcaatggaagagaga

SEQ ID NO: 266214 - DNA, 20 bp, synthetic construct
  source 1..20: mol_type = other DNA
actggggcaatggaagagag

SEQ ID NO: 266215 - DNA, 20 bp, synthetic construct
  source 1..20: mol_type = other DNA
cactggggcaatggaagaga

SEQ ID NO: 266216 - DNA, 20 bp, synthetic construct
  source 1..20: mol_type = other DNA
tcactggggcaatggaagag

SEQ ID NO: 266217 - DNA, 20 bp, synthetic construct
  source 1..20: mol_type = other DNA
ttcactggggcaatggaaga

SEQ ID NO: 266218 - DNA, 20 bp, synthetic construct
  source 1..20: mol_type = other DNA
cttcactggggcaatggaag

SEQ ID NO: 266219 - DNA, 20 bp, synthetic construct
  source 1..20: mol_type = other DNA
acttcactggggcaatggaa

SEQ ID NO: 266220 - DNA, 20 bp, synthetic construct
  source 1..20: mol_type = other DNA
tacttcactggggcaatgga

SEQ ID NO: 266221 - DNA, 20 bp, synthetic construct
  source 1..20: mol_type = other DNA
atacttcactggggcaatgg

SEQ ID NO: 266222 - DNA, 20 bp, synthetic construct
  source 1..20: mol_type = other DNA
aatacttcactggggcaatg

SEQ ID NO: 266223 - DNA, 20 bp, synthetic construct
  source 1..20: mol_type = other DNA
gaatacttcactggggcaat

SEQ ID NO: 266224 - DNA, 20 bp, synthetic construct
  source 1..20: mol_type = other DNA
ggaatacttcactggggcaa

SEQ ID NO: 266225 - DNA, 20 bp, synthetic construct
  source 1..20: mol_type = other DNA
tggaatacttcactggggca

SEQ ID NO: 266226 - DNA, 20 bp, synthetic construct
  source 1..20: mol_type = other DNA
ctggaatacttcactggggc

SEQ ID NO: 266227 - DNA, 20 bp, synthetic construct
  source 1..20: mol_type = other DNA
cctggaatacttcactgggg

SEQ ID NO: 266228 - DNA, 20 bp, synthetic construct
  source 1..20: mol_type = other DNA
gcctggaatacttcactggg

SEQ ID NO: 266229 - DNA, 20 bp, synthetic construct
  source 1..20: mol_type = other DNA
ggcctggaatacttcactgg

SEQ ID NO: 266230 - DNA, 20 bp, synthetic construct
  source 1..20: mol_type = other DNA
gggcctggaatacttcactg

SEQ ID NO: 266231 - DNA, 20 bp, synthetic construct
  source 1..20: mol_type = other DNA
ggggcctggaatacttcact

SEQ ID NO: 266232 - DNA, 20 bp, synthetic construct
  source 1..20: mol_type = other DNA
aggggcctggaatacttcac

SEQ ID NO: 266233 - DNA, 20 bp, synthetic construct
  source 1..20: mol_type = other DNA
caggggcctggaatacttca

SEQ ID NO: 266234 - DNA, 20 bp, synthetic construct
  source 1..20: mol_type = other DNA
ccaggggcctggaatacttc

SEQ ID NO: 266235 - DNA, 20 bp, synthetic construct
  source 1..20: mol_type = other DNA
cccaggggcctggaatactt

SEQ ID NO: 266236 - DNA, 20 bp, synthetic construct
  source 1..20: mol_type = other DNA
acccaggggcctggaatact

SEQ ID NO: 266237 - DNA, 20 bp, synthetic construct
  source 1..20: mol_type = other DNA
aacccaggggcctggaatac

SEQ ID NO: 266238 - DNA, 20 bp, synthetic construct
  source 1..20: mol_type = other DNA
aaacccaggggcctggaata

SEQ ID NO: 266239 - DNA, 20 bp, synthetic construct
  source 1..20: mol_type = other DNA
taaacccaggggcctggaat

SEQ ID NO: 266240 - DNA, 20 bp, synthetic construct
  source 1..20: mol_type = other DNA
ctaaacccaggggcctggaa

SEQ ID NO: 266241 - DNA, 20 bp, synthetic construct
  source 1..20: mol_type = other DNA
tctaaacccaggggcctgga

SEQ ID NO: 266242 - DNA, 20 bp, synthetic construct
  source 1..20: mol_type = other DNA
gtctaaacccaggggcctgg

SEQ ID NO: 266243 - DNA, 20 bp, synthetic construct
  source 1..20: mol_type = other DNA
agtctaaacccaggggcctg

SEQ ID NO: 266244 - DNA, 20 bp, synthetic construct
  source 1..20: mol_type = other DNA
gagtctaaacccaggggcct

SEQ ID NO: 266245 - DNA, 20 bp, synthetic construct
  source 1..20: mol_type = other DNA
agagtctaaacccaggggcc

SEQ ID NO: 266246 - DNA, 20 bp, synthetic construct
  source 1..20: mol_type = other DNA
cagagtctaaacccaggggc

SEQ ID NO: 266247 - DNA, 20 bp, synthetic construct
  source 1..20: mol_type = other DNA
gcagagtctaaacccagggg

SEQ ID NO: 266248 - DNA, 20 bp, synthetic construct
  source 1..20: mol_type = other DNA
tgcagagtctaaacccaggg

SEQ ID NO: 266249 - DNA, 20 bp, synthetic construct
  source 1..20: mol_type = other DNA
gtgcagagtctaaacccagg

SEQ ID NO: 266250 - DNA, 20 bp, synthetic construct
  source 1..20: mol_type = other DNA
ggtgcagagtctaaacccag

SEQ ID NO: 266251 - DNA, 20 bp, synthetic construct
  source 1..20: mol_type = other DNA
tggtgcagagtctaaaccca

SEQ ID NO: 266252 - DNA, 20 bp, synthetic construct
  source 1..20: mol_type = other DNA
atggtgcagagtctaaaccc

SEQ ID NO: 266253 - DNA, 20 bp, synthetic construct
  source 1..20: mol_type = other DNA
catggtgcagagtctaaacc

SEQ ID NO: 266254 - DNA, 20 bp, synthetic construct
  source 1..20: mol_type = other DNA
acatggtgcagagtctaaac

SEQ ID NO: 266255 - DNA, 20 bp, synthetic construct
  source 1..20: mol_type = other DNA
tacatggtgcagagtctaaa

SEQ ID NO: 266256 - DNA, 20 bp, synthetic construct
  source 1..20: mol_type = other DNA
ctacatggtgcagagtctaa

SEQ ID NO: 266257 - DNA, 20 bp, synthetic construct
  source 1..20: mol_type = other DNA
cctacatggtgcagagtcta

SEQ ID NO: 266258 - DNA, 20 bp, synthetic construct
  source 1..20: mol_type = other DNA
ccctacatggtgcagagtct

SEQ ID NO: 266259 - DNA, 20 bp, synthetic construct
  source 1..20: mol_type = other DNA
cccctacatggtgcagagtc

SEQ ID NO: 266260 - DNA, 20 bp, synthetic construct
  source 1..20: mol_type = other DNA
acccctacatggtgcagagt

SEQ ID NO: 266261 - DNA, 20 bp, synthetic construct
  source 1..20: mol_type = other DNA
cacccctacatggtgcagag

SEQ ID NO: 266262 - DNA, 20 bp, synthetic construct
  source 1..20: mol_type = other DNA
acacccctacatggtgcaga

SEQ ID NO: 266263 - DNA, 20 bp, synthetic construct
  source 1..20: mol_type = other DNA
gacacccctacatggtgcag

SEQ ID NO: 266264 - DNA, 20 bp, synthetic construct
  source 1..20: mol_type = other DNA
agacacccctacatggtgca

SEQ ID NO: 266265 - DNA, 20 bp, synthetic construct
  source 1..20: mol_type = other DNA
cagacacccctacatggtgc

SEQ ID NO: 266266 - DNA, 20 bp, synthetic construct
  source 1..20: mol_type = other DNA
tcagacacccctacatggtg

SEQ ID NO: 266267 - DNA, 20 bp, synthetic construct
  source 1..20: mol_type = other DNA
gtcagacacccctacatggt

SEQ ID NO: 266268 - DNA, 20 bp, synthetic construct
  source 1..20: mol_type = other DNA
ggtcagacacccctacatgg

SEQ ID NO: 266269 - DNA, 20 bp, synthetic construct
  source 1..20: mol_type = other DNA
aggtcagacacccctacatg

SEQ ID NO: 266270 - DNA, 20 bp, synthetic construct
  source 1..20: mol_type = other DNA
caggtcagacacccctacat

SEQ ID NO: 266271 - DNA, 20 bp, synthetic construct
  source 1..20: mol_type = other DNA
gcaggtcagacacccctaca

SEQ ID NO: 266272 - DNA, 20 bp, synthetic construct
  source 1..20: mol_type = other DNA
tgcaggtcagacacccctac

SEQ ID NO: 266273 - DNA, 20 bp, synthetic construct
  source 1..20: mol_type = other DNA
gtgcaggtcagacaccccta

SEQ ID NO: 266274 - DNA, 20 bp, synthetic construct
  source 1..20: mol_type = other DNA
agtgcaggtcagacacccct

SEQ ID NO: 266275 - DNA, 20 bp, synthetic construct
  source 1..20: mol_type = other DNA
aagtgcaggtcagacacccc

SEQ ID NO: 266276 - DNA, 20 bp, synthetic construct
  source 1..20: mol_type = other DNA
caagtgcaggtcagacaccc

SEQ ID NO: 266277 - DNA, 20 bp, synthetic construct
  source 1..20: mol_type = other DNA
gcaagtgcaggtcagacacc

SEQ ID NO: 266278 - DNA, 20 bp, synthetic construct
  source 1..20: mol_type = other DNA
agcaagtgcaggtcagacac

SEQ ID NO: 266279 - DNA, 20 bp, synthetic construct
  source 1..20: mol_type = other DNA
gagcaagtgcaggtcagaca

SEQ ID NO: 266280 - DNA, 20 bp, synthetic construct
  source 1..20: mol_type = other DNA
ggagcaagtgcaggtcagac

SEQ ID NO: 266281 - DNA, 20 bp, synthetic construct
  source 1..20: mol_type = other DNA
aggagcaagtgcaggtcaga

SEQ ID NO: 266282 - DNA, 20 bp, synthetic construct
  source 1..20: mol_type = other DNA
aaggagcaagtgcaggtcag

SEQ ID NO: 266283 - DNA, 20 bp, synthetic construct
  source 1..20: mol_type = other DNA
caaggagcaagtgcaggtca

SEQ ID NO: 266284 - DNA, 20 bp, synthetic construct
  source 1..20: mol_type = other DNA
ccaaggagcaagtgcaggtc

SEQ ID NO: 266285 - DNA, 20 bp, synthetic construct
  source 1..20: mol_type = other DNA
accaaggagcaagtgcaggt

SEQ ID NO: 266286 - DNA, 20 bp, synthetic construct
  source 1..20: mol_type = other DNA
caccaaggagcaagtgcagg

SEQ ID NO: 266287 - DNA, 20 bp, synthetic construct
  source 1..20: mol_type = other DNA
ccaccaaggagcaagtgcag

SEQ ID NO: 266288 - DNA, 20 bp, synthetic construct
  source 1..20: mol_type = other DNA
gccaccaaggagcaagtgca

SEQ ID NO: 266289 - DNA, 20 bp, synthetic construct
  source 1..20: mol_type = other DNA
tgccaccaaggagcaagtgc

SEQ ID NO: 266290 - DNA, 20 bp, synthetic construct
  source 1..20: mol_type = other DNA
gtgccaccaaggagcaagtg

SEQ ID NO: 266291 - DNA, 20 bp, synthetic construct
  source 1..20: mol_type = other DNA
cgtgccaccaaggagcaagt

SEQ ID NO: 266292 - DNA, 20 bp, synthetic construct
  source 1..20: mol_type = other DNA
ccgtgccaccaaggagcaag

SEQ ID NO: 266293 - DNA, 20 bp, synthetic construct
  source 1..20: mol_type = other DNA
cccgtgccaccaaggagcaa

SEQ ID NO: 266294 - DNA, 20 bp, synthetic construct
  source 1..20: mol_type = other DNA
gcccgtgccaccaaggagca

SEQ ID NO: 266295 - DNA, 20 bp, synthetic construct
  source 1..20: mol_type = other DNA
tgcccgtgccaccaaggagc

SEQ ID NO: 266296 - DNA, 20 bp, synthetic construct
  source 1..20: mol_type = other DNA
ctgcccgtgccaccaaggag

SEQ ID NO: 266297 - DNA, 20 bp, synthetic construct
  source 1..20: mol_type = other DNA
gctgcccgtgccaccaagga

SEQ ID NO: 266298 - DNA, 20 bp, synthetic construct
  source 1..20: mol_type = other DNA
ggctgcccgtgccaccaagg

SEQ ID NO: 266299 - DNA, 20 bp, synthetic construct
  source 1..20: mol_type = other DNA
aggctgcccgtgccaccaag

SEQ ID NO: 266300 - DNA, 20 bp, synthetic construct
  source 1..20: mol_type = other DNA
taggctgcccgtgccaccaa

SEQ ID NO: 266301 - DNA, 20 bp, synthetic construct
  source 1..20: mol_type = other DNA
ataggctgcccgtgccacca

SEQ ID NO: 266302 - DNA, 20 bp, synthetic construct
  source 1..20: mol_type = other DNA
cataggctgcccgtgccacc

SEQ ID NO: 266303 - DNA, 20 bp, synthetic construct
  source 1..20: mol_type = other DNA
ccataggctgcccgtgccac

SEQ ID NO: 266304 - DNA, 20 bp, synthetic construct
  source 1..20: mol_type = other DNA
gccataggctgcccgtgcca

SEQ ID NO: 266305 - DNA, 20 bp, synthetic construct
  source 1..20: mol_type = other DNA
tgccataggctgcccgtgcc

SEQ ID NO: 266306 - DNA, 20 bp, synthetic construct
  source 1..20: mol_type = other DNA
gtgccataggctgcccgtgc

SEQ ID NO: 266307 - DNA, 20 bp, synthetic construct
  source 1..20: mol_type = other DNA
agtgccataggctgcccgtg

SEQ ID NO: 266308 - DNA, 20 bp, synthetic construct
  source 1..20: mol_type = other DNA
aagtgccataggctgcccgt

SEQ ID NO: 266309 - DNA, 20 bp, synthetic construct
  source 1..20: mol_type = other DNA
caagtgccataggctgcccg

SEQ ID NO: 266310 - DNA, 20 bp, synthetic construct
  source 1..20: mol_type = other DNA
gcaagtgccataggctgccc

SEQ ID NO: 266311 - DNA, 20 bp, synthetic construct
  source 1..20: mol_type = other DNA
agcaagtgccataggctgcc

SEQ ID NO: 266312 - DNA, 20 bp, synthetic construct
  source 1..20: mol_type = other DNA
cagcaagtgccataggctgc

SEQ ID NO: 266313 - DNA, 20 bp, synthetic construct
  source 1..20: mol_type = other DNA
gcagcaagtgccataggctg

SEQ ID NO: 266314 - DNA, 20 bp, synthetic construct
  source 1..20: mol_type = other DNA
cgcagcaagtgccataggct

SEQ ID NO: 266315 - DNA, 20 bp, synthetic construct
  source 1..20: mol_type = other DNA
ccgcagcaagtgccataggc

SEQ ID NO: 266316 - DNA, 20 bp, synthetic construct
  source 1..20: mol_type = other DNA
cccgcagcaagtgccatagg

SEQ ID NO: 266317 - DNA, 20 bp, synthetic construct
  source 1..20: mol_type = other DNA
gcccgcagcaagtgccatag

SEQ ID NO: 266318 - DNA, 20 bp, synthetic construct
  source 1..20: mol_type = other DNA
agcccgcagcaagtgccata

SEQ ID NO: 266319 - DNA, 20 bp, synthetic construct
  source 1..20: mol_type = other DNA
cagcccgcagcaagtgccat

SEQ ID NO: 266320 - DNA, 20 bp, synthetic construct
  source 1..20: mol_type = other DNA
acagcccgcagcaagtgcca

SEQ ID NO: 266321 - DNA, 20 bp, synthetic construct
  source 1..20: mol_type = other DNA
cacagcccgcagcaagtgcc

SEQ ID NO: 266322 - DNA, 20 bp, synthetic construct
  source 1..20: mol_type = other DNA
tcacagcccgcagcaagtgc

SEQ ID NO: 266323 - DNA, 20 bp, synthetic construct
  source 1..20: mol_type = other DNA
gtcacagcccgcagcaagtg

SEQ ID NO: 266324 - DNA, 20 bp, synthetic construct
  source 1..20: mol_type = other DNA
ggtcacagcccgcagcaagt

SEQ ID NO: 266325 - DNA, 20 bp, synthetic construct
  source 1..20: mol_type = other DNA
tggtcacagcccgcagcaag

SEQ ID NO: 266326 - DNA, 20 bp, synthetic construct
  source 1..20: mol_type = other DNA
ttggtcacagcccgcagcaa

SEQ ID NO: 266327 - DNA, 20 bp, synthetic construct
  source 1..20: mol_type = other DNA
tttggtcacagcccgcagca

SEQ ID NO: 266328 - DNA, 20 bp, synthetic construct
  source 1..20: mol_type = other DNA
ctttggtcacagcccgcagc

SEQ ID NO: 266329 - DNA, 20 bp, synthetic construct
  source 1..20: mol_type = other DNA
gctttggtcacagcccgcag

SEQ ID NO: 266330 - DNA, 20 bp, synthetic construct
  source 1..20: mol_type = other DNA
ggctttggtcacagcccgca

SEQ ID NO: 266331 - DNA, 20 bp, synthetic construct
  source 1..20: mol_type = other DNA
aggctttggtcacagcccgc

SEQ ID NO: 266332 - DNA, 20 bp, synthetic construct
  source 1..20: mol_type = other DNA
caggctttggtcacagcccg

SEQ ID NO: 266333 - DNA, 20 bp, synthetic construct
  source 1..20: mol_type = other DNA
ccaggctttggtcacagccc

SEQ ID NO: 266334 - DNA, 20 bp, synthetic construct
  source 1..20: mol_type = other DNA
gccaggctttggtcacagcc

SEQ ID NO: 266335 - DNA, 20 bp, synthetic construct
  source 1..20: mol_type = other DNA
ggccaggctttggtcacagc

SEQ ID NO: 266336 - DNA, 20 bp, synthetic construct
  source 1..20: mol_type = other DNA
aggccaggctttggtcacag

SEQ ID NO: 266337 - DNA, 20 bp, synthetic construct
  source 1..20: mol_type = other DNA
caggccaggctttggtcaca

SEQ ID NO: 266338 - DNA, 20 bp, synthetic construct
  source 1..20: mol_type = other DNA
ccaggccaggctttggtcac

SEQ ID NO: 266339 - DNA, 20 bp, synthetic construct
  source 1..20: mol_type = other DNA
tccaggccaggctttggtca

SEQ ID NO: 266340 - DNA, 20 bp, synthetic construct
  source 1..20: mol_type = other DNA
atccaggccaggctttggtc

SEQ ID NO: 266341 - DNA, 20 bp, synthetic construct
  source 1..20: mol_type = other DNA
gatccaggccaggctttggt

SEQ ID NO: 266342 - DNA, 20 bp, synthetic construct
  source 1..20: mol_type = other DNA
agatccaggccaggctttgg

SEQ ID NO: 266343 - DNA, 20 bp, synthetic construct
  source 1..20: mol_type = other DNA
aagatccaggccaggctttg

SEQ ID NO: 266344 - DNA, 20 bp, synthetic construct
  source 1..20: mol_type = other DNA
caagatccaggccaggcttt

SEQ ID NO: 266345 - DNA, 20 bp, synthetic construct
  source 1..20: mol_type = other DNA
ccaagatccaggccaggctt

SEQ ID NO: 266346 - DNA, 20 bp, synthetic construct
  source 1..20: mol_type = other DNA
tccaagatccaggccaggct

SEQ ID NO: 266347 - DNA, 20 bp, synthetic construct
  source 1..20: mol_type = other DNA
atccaagatccaggccaggc

SEQ ID NO: 266348 - DNA, 20 bp, synthetic construct
  source 1..20: mol_type = other DNA
gatccaagatccaggccagg

SEQ ID NO: 266349 - DNA, 20 bp, synthetic construct
  source 1..20: mol_type = other DNA
agatccaagatccaggccag

SEQ ID NO: 266350 - DNA, 20 bp, synthetic construct
  source 1..20: mol_type = other DNA
aagatccaagatccaggcca

SEQ ID NO: 266351 - DNA, 20 bp, synthetic construct
  source 1..20: mol_type = other DNA
caagatccaagatccaggcc

SEQ ID NO: 266352 - DNA, 20 bp, synthetic construct
  source 1..20: mol_type = other DNA
ccaagatccaagatccaggc

SEQ ID NO: 266353 - DNA, 20 bp, synthetic construct
  source 1..20: mol_type = other DNA
accaagatccaagatccagg

SEQ ID NO: 266354 - DNA, 20 bp, synthetic construct
  source 1..20: mol_type = other DNA
caccaagatccaagatccag

SEQ ID NO: 266355 - DNA, 20 bp, synthetic construct
  source 1..20: mol_type = other DNA
tcaccaagatccaagatcca

SEQ ID NO: 266356 - DNA, 20 bp, synthetic construct
  source 1..20: mol_type = other DNA
gtcaccaagatccaagatcc

SEQ ID NO: 266357 - DNA, 20 bp, synthetic construct
  source 1..20: mol_type = other DNA
agtcaccaagatccaagatc

SEQ ID NO: 266358 - DNA, 20 bp, synthetic construct
  source 1..20: mol_type = other DNA
gagtcaccaagatccaagat

SEQ ID NO: 266359 - DNA, 20 bp, synthetic construct
  source 1..20: mol_type = other DNA
agagtcaccaagatccaaga

SEQ ID NO: 266360 - DNA, 20 bp, synthetic construct
  source 1..20: mol_type = other DNA
cagagtcaccaagatccaag

SEQ ID NO: 266361 - DNA, 20 bp, synthetic construct
  source 1..20: mol_type = other DNA
gcagagtcaccaagatccaa

SEQ ID NO: 266362 - DNA, 20 bp, synthetic construct
  source 1..20: mol_type = other DNA
agcagagtcaccaagatcca

SEQ ID NO: 266363 - DNA, 20 bp, synthetic construct
  source 1..20: mol_type = other DNA
aagcagagtcaccaagatcc

SEQ ID NO: 266364 - DNA, 20 bp, synthetic construct
  source 1..20: mol_type = other DNA
gaagcagagtcaccaagatc

SEQ ID NO: 266365 - DNA, 20 bp, synthetic construct
  source 1..20: mol_type = other DNA
agaagcagagtcaccaagat

SEQ ID NO: 266366 - DNA, 20 bp, synthetic construct
  source 1..20: mol_type = other DNA
gagaagcagagtcaccaaga

SEQ ID NO: 266367 - DNA, 20 bp, synthetic construct
  source 1..20: mol_type = other DNA
ggagaagcagagtcaccaag

SEQ ID NO: 266368 - DNA, 20 bp, synthetic construct
  source 1..20: mol_type = other DNA
gggagaagcagagtcaccaa

SEQ ID NO: 266369 - DNA, 20 bp, synthetic construct
  source 1..20: mol_type = other DNA
agggagaagcagagtcacca

SEQ ID NO: 266370 - DNA, 20 bp, synthetic construct
  source 1..20: mol_type = other DNA
cagggagaagcagagtcacc

SEQ ID NO: 266371 - DNA, 20 bp, synthetic construct
  source 1..20: mol_type = other DNA
ccagggagaagcagagtcac

SEQ ID NO: 266372 - DNA, 20 bp, synthetic construct
  source 1..20: mol_type = other DNA
gccagggagaagcagagtca

SEQ ID NO: 266373 - DNA, 20 bp, synthetic construct
  source 1..20: mol_type = other DNA
ggccagggagaagcagagtc

SEQ ID NO: 266374 - DNA, 20 bp, synthetic construct
  source 1..20: mol_type = other DNA
aggccagggagaagcagagt

SEQ ID NO: 266375 - DNA, 20 bp, synthetic construct
  source 1..20: mol_type = other DNA
caggccagggagaagcagag

SEQ ID NO: 266376 - DNA, 20 bp, synthetic construct
  source 1..20: mol_type = other DNA
tcaggccagggagaagcaga

SEQ ID NO: 266377 - DNA, 20 bp, synthetic construct
  source 1..20: mol_type = other DNA
ctcaggccagggagaagcag

SEQ ID NO: 266378 - DNA, 20 bp, synthetic construct
  source 1..20: mol_type = other DNA
cctcaggccagggagaagca

SEQ ID NO: 266379 - DNA, 20 bp, synthetic construct
  source 1..20: mol_type = other DNA
ccctcaggccagggagaagc

SEQ ID NO: 266380 - DNA, 20 bp, synthetic construct
  source 1..20: mol_type = other DNA
tccctcaggccagggagaag

SEQ ID NO: 266381 - DNA, 20 bp, synthetic construct
  source 1..20: mol_type = other DNA
ctccctcaggccagggagaa

SEQ ID NO: 266382 - DNA, 20 bp, synthetic construct
  source 1..20: mol_type = other DNA
gctccctcaggccagggaga

SEQ ID NO: 266383 - DNA, 20 bp, synthetic construct
  source 1..20: mol_type = other DNA
agctccctcaggccagggag

SEQ ID NO: 266384 - DNA, 20 bp, synthetic construct
  source 1..20: mol_type = other DNA
cagctccctcaggccaggga

SEQ ID NO: 266385 - DNA, 20 bp, synthetic construct
  source 1..20: mol_type = other DNA
gcagctccctcaggccaggg

SEQ ID NO: 266386 - DNA, 20 bp, synthetic construct
  source 1..20: mol_type = other DNA
ggcagctccctcaggccagg

SEQ ID NO: 266387 - DNA, 20 bp, synthetic construct
  source 1..20: mol_type = other DNA
gggcagctccctcaggccag

SEQ ID NO: 266388 - DNA, 20 bp, synthetic construct
  source 1..20: mol_type = other DNA
tgggcagctccctcaggcca

SEQ ID NO: 266389 - DNA, 20 bp, synthetic construct
  source 1..20: mol_type = other DNA
ctgggcagctccctcaggcc

SEQ ID NO: 266390 - DNA, 20 bp, synthetic construct
  source 1..20: mol_type = other DNA
tctgggcagctccctcaggc

SEQ ID NO: 266391 - DNA, 20 bp, synthetic construct
  source 1..20: mol_type = other DNA
ctctgggcagctccctcagg

SEQ ID NO: 266392 - DNA, 20 bp, synthetic construct
  source 1..20: mol_type = other DNA
gctctgggcagctccctcag

SEQ ID NO: 266393 - DNA, 20 bp, synthetic construct
  source 1..20: mol_type = other DNA
ggctctgggcagctccctca

SEQ ID NO: 266394 - DNA, 20 bp, synthetic construct
  source 1..20: mol_type = other DNA
aggctctgggcagctccctc

SEQ ID NO: 266395 - DNA, 20 bp, synthetic construct
  source 1..20: mol_type = other DNA
caggctctgggcagctccct

SEQ ID NO: 266396 - DNA, 20 bp, synthetic construct
  source 1..20: mol_type = other DNA
gcaggctctgggcagctccc

SEQ ID NO: 266397 - DNA, 20 bp, synthetic construct
  source 1..20: mol_type = other DNA
ggcaggctctgggcagctcc

SEQ ID NO: 266398 - DNA, 20 bp, synthetic construct
  source 1..20: mol_type = other DNA
gggcaggctctgggcagctc

SEQ ID NO: 266399 - DNA, 20 bp, synthetic construct
  source 1..20: mol_type = other DNA
tgggcaggctctgggcagct

SEQ ID NO: 266400 - DNA, 20 bp, synthetic construct
  source 1..20: mol_type = other DNA
gtgggcaggctctgggcagc

SEQ ID NO: 266401 - DNA, 20 bp, synthetic construct
  source 1..20: mol_type = other DNA
ggtgggcaggctctgggcag

SEQ ID NO: 266402 - DNA, 20 bp, synthetic construct
  source 1..20: mol_type = other DNA
tggtgggcaggctctgggca

SEQ ID NO: 266403 - DNA, 20 bp, synthetic construct
  source 1..20: mol_type = other DNA
gtggtgggcaggctctgggc

SEQ ID NO: 266404 - DNA, 20 bp, synthetic construct
  source 1..20: mol_type = other DNA
ggtggtgggcaggctctggg

SEQ ID NO: 266405 - DNA, 20 bp, synthetic construct
  source 1..20: mol_type = other DNA
aggtggtgggcaggctctgg

SEQ ID NO: 266406 - DNA, 20 bp, synthetic construct
  source 1..20: mol_type = other DNA
caggtggtgggcaggctctg

SEQ ID NO: 266407 - DNA, 20 bp, synthetic construct
  source 1..20: mol_type = other DNA
gcaggtggtgggcaggctct

SEQ ID NO: 266408 - DNA, 20 bp, synthetic construct
  source 1..20: mol_type = other DNA
agcaggtggtgggcaggctc

SEQ ID NO: 266409 - DNA, 20 bp, synthetic construct
  source 1..20: mol_type = other DNA
cagcaggtggtgggcaggct

SEQ ID NO: 266410 - DNA, 20 bp, synthetic construct
  source 1..20: mol_type = other DNA
gcagcaggtggtgggcaggc

SEQ ID NO: 266411 - DNA, 20 bp, synthetic construct
  source 1..20: mol_type = other DNA
cgcagcaggtggtgggcagg

SEQ ID NO: 266412 - DNA, 20 bp, synthetic construct
  source 1..20: mol_type = other DNA
acgcagcaggtggtgggcag

SEQ ID NO: 266413 - DNA, 20 bp, synthetic construct
  source 1..20: mol_type = other DNA
cacgcagcaggtggtgggca

SEQ ID NO: 266414 - DNA, 20 bp, synthetic construct
  source 1..20: mol_type = other DNA
acacgcagcaggtggtgggc

SEQ ID NO: 266415 - DNA, 20 bp, synthetic construct
  source 1..20: mol_type = other DNA
gacacgcagcaggtggtggg

SEQ ID NO: 266416 - DNA, 20 bp, synthetic construct
  source 1..20: mol_type = other DNA
agacacgcagcaggtggtgg

SEQ ID NO: 266417 - DNA, 20 bp, synthetic construct
  source 1..20: mol_type = other DNA
aagacacgcagcaggtggtg

SEQ ID NO: 266418 - DNA, 20 bp, synthetic construct
  source 1..20: mol_type = other DNA
aaagacacgcagcaggtggt

SEQ ID NO: 266419 - DNA, 20 bp, synthetic construct
  source 1..20: mol_type = other DNA
caaagacacgcagcaggtgg

SEQ ID NO: 266420 - DNA, 20 bp, synthetic construct
  source 1..20: mol_type = other DNA
gcaaagacacgcagcaggtg

SEQ ID NO: 266421 - DNA, 20 bp, synthetic construct
  source 1..20: mol_type = other DNA
cgcaaagacacgcagcaggt

SEQ ID NO: 266422 - DNA, 20 bp, synthetic construct
  source 1..20: mol_type = other DNA
ccgcaaagacacgcagcagg

SEQ ID NO: 266423 - DNA, 20 bp, synthetic construct
  source 1..20: mol_type = other DNA
accgcaaagacacgcagcag

SEQ ID NO: 266424 - DNA, 20 bp, synthetic construct
  source 1..20: mol_type = other DNA
caccgcaaagacacgcagca

SEQ ID NO: 266425 - DNA, 20 bp, synthetic construct
  source 1..20: mol_type = other DNA
ccaccgcaaagacacgcagc

SEQ ID NO: 266426 - DNA, 20 bp, synthetic construct
  source 1..20: mol_type = other DNA
gccaccgcaaagacacgcag

SEQ ID NO: 266427 - DNA, 20 bp, synthetic construct
  source 1..20: mol_type = other DNA
tgccaccgcaaagacacgca

SEQ ID NO: 266428 - DNA, 20 bp, synthetic construct
  source 1..20: mol_type = other DNA
atgccaccgcaaagacacgc

SEQ ID NO: 266429 - DNA, 20 bp, synthetic construct
  source 1..20: mol_type = other DNA
aatgccaccgcaaagacacg

SEQ ID NO: 266430 - DNA, 20 bp, synthetic construct
  source 1..20: mol_type = other DNA
aaatgccaccgcaaagacac

SEQ ID NO: 266431 - DNA, 20 bp, synthetic construct
  source 1..20: mol_type = other DNA
gaaatgccaccgcaaagaca

SEQ ID NO: 266432 - DNA, 20 bp, synthetic construct
  source 1..20: mol_type = other DNA
agaaatgccaccgcaaagac

SEQ ID NO: 266433 - DNA, 20 bp, synthetic construct
  source 1..20: mol_type = other DNA
gagaaatgccaccgcaaaga

SEQ ID NO: 266434 - DNA, 20 bp, synthetic construct
  source 1..20: mol_type = other DNA
cgagaaatgccaccgcaaag

SEQ ID NO: 266435 - DNA, 20 bp, synthetic construct
  source 1..20: mol_type = other DNA
gcgagaaatgccaccgcaaa

SEQ ID NO: 266436 - DNA, 20 bp, synthetic construct
  source 1..20: mol_type = other DNA
tgcgagaaatgccaccgcaa

SEQ ID NO: 266437 - DNA, 20 bp, synthetic construct
  source 1..20: mol_type = other DNA
gtgcgagaaatgccaccgca

SEQ ID NO: 266438 - DNA, 20 bp, synthetic construct
  source 1..20: mol_type = other DNA
tgtgcgagaaatgccaccgc

SEQ ID NO: 266439 - DNA, 20 bp, synthetic construct
  source 1..20: mol_type = other DNA
gtgtgcgagaaatgccaccg

SEQ ID NO: 266440 - DNA, 20 bp, synthetic construct
  source 1..20: mol_type = other DNA
tgtgtgcgagaaatgccacc

SEQ ID NO: 266441 - DNA, 20 bp, synthetic construct
  source 1..20: mol_type = other DNA
atgtgtgcgagaaatgccac

SEQ ID NO: 266442 - DNA, 20 bp, synthetic construct
  source 1..20: mol_type = other DNA
catgtgtgcgagaaatgcca

SEQ ID NO: 266443 - DNA, 20 bp, synthetic construct
  source 1..20: mol_type = other DNA
gcatgtgtgcgagaaatgcc

SEQ ID NO: 266444 - DNA, 20 bp, synthetic construct
  source 1..20: mol_type = other DNA
ggcatgtgtgcgagaaatgc

SEQ ID NO: 266445 - DNA, 20 bp, synthetic construct
  source 1..20: mol_type = other DNA
cggcatgtgtgcgagaaatg

SEQ ID NO: 266446 - DNA, 20 bp, synthetic construct
  source 1..20: mol_type = other DNA
acggcatgtgtgcgagaaat

SEQ ID NO: 266447 - DNA, 20 bp, synthetic construct
  source 1..20: mol_type = other DNA
cacggcatgtgtgcgagaaa

SEQ ID NO: 266448 - DNA, 20 bp, synthetic construct
  source 1..20: mol_type = other DNA
gcacggcatgtgtgcgagaa

SEQ ID NO: 266449 - DNA, 20 bp, synthetic construct
  source 1..20: mol_type = other DNA
tgcacggcatgtgtgcgaga

SEQ ID NO: 266450 - DNA, 20 bp, synthetic construct
  source 1..20: mol_type = other DNA
ctgcacggcatgtgtgcgag

SEQ ID NO: 266451 - DNA, 20 bp, synthetic construct
  source 1..20: mol_type = other DNA
actgcacggcatgtgtgcga

SEQ ID NO: 266452 - DNA, 20 bp, synthetic construct
  source 1..20: mol_type = other DNA
cactgcacggcatgtgtgcg

SEQ ID NO: 266453 - DNA, 20 bp, synthetic construct
  source 1..20: mol_type = other DNA
ccactgcacggcatgtgtgc

SEQ ID NO: 266454 - DNA, 20 bp, synthetic construct
  source 1..20: mol_type = other DNA
gccactgcacggcatgtgtg

SEQ ID NO: 266455 - DNA, 20 bp, synthetic construct
  source 1..20: mol_type = other DNA
tgccactgcacggcatgtgt

SEQ ID NO: 266456 - DNA, 20 bp, synthetic construct
  source 1..20: mol_type = other DNA
gtgccactgcacggcatgtg

SEQ ID NO: 266457 - DNA, 20 bp, synthetic construct
  source 1..20: mol_type = other DNA
ggtgccactgcacggcatgt

SEQ ID NO: 266458 - DNA, 20 bp, synthetic construct
  source 1..20: mol_type = other DNA
gggtgccactgcacggcatg

SEQ ID NO: 266459 - DNA, 20 bp, synthetic construct
  source 1..20: mol_type = other DNA
ggggtgccactgcacggcat

SEQ ID NO: 266460 - DNA, 20 bp, synthetic construct
  source 1..20: mol_type = other DNA
gggggtgccactgcacggca

SEQ ID NO: 266461 - DNA, 20 bp, synthetic construct
  source 1..20: mol_type = other DNA
tgggggtgccactgcacggc

SEQ ID NO: 266462 - DNA, 20 bp, synthetic construct
  source 1..20: mol_type = other DNA
ttgggggtgccactgcacgg

SEQ ID NO: 266463 - DNA, 20 bp, synthetic construct
  source 1..20: mol_type = other DNA
cttgggggtgccactgcacg

SEQ ID NO: 266464 - DNA, 20 bp, synthetic construct
  source 1..20: mol_type = other DNA
ccttgggggtgccactgcac

SEQ ID NO: 266465 - DNA, 20 bp, synthetic construct
  source 1..20: mol_type = other DNA
tccttgggggtgccactgca

SEQ ID NO: 266466 - DNA, 20 bp, synthetic construct
  source 1..20: mol_type = other DNA
atccttgggggtgccactgc

SEQ ID NO: 266467 - DNA, 20 bp, synthetic construct
  source 1..20: mol_type = other DNA
catccttgggggtgccactg

SEQ ID NO: 266468 - DNA, 20 bp, synthetic construct
  source 1..20: mol_type = other DNA
ccatccttgggggtgccact

SEQ ID NO: 266469 - DNA, 20 bp, synthetic construct
  source 1..20: mol_type = other DNA
gccatccttgggggtgccac

SEQ ID NO: 266470 - DNA, 20 bp, synthetic construct
  source 1..20: mol_type = other DNA
ggccatccttgggggtgcca

SEQ ID NO: 266471 - DNA, 20 bp, synthetic construct
  source 1..20: mol_type = other DNA
tggccatccttgggggtgcc

SEQ ID NO: 266472 - DNA, 20 bp, synthetic construct
  source 1..20: mol_type = other DNA
atggccatccttgggggtgc

SEQ ID NO: 266473 - DNA, 20 bp, synthetic construct
  source 1..20: mol_type = other DNA
aatggccatccttgggggtg

SEQ ID NO: 266474 - DNA, 20 bp, synthetic construct
  source 1..20: mol_type = other DNA
gaatggccatccttgggggt

SEQ ID NO: 266475 - DNA, 20 bp, synthetic construct
  source 1..20: mol_type = other DNA
tgaatggccatccttggggg

SEQ ID NO: 266476 - DNA, 20 bp, synthetic construct
  source 1..20: mol_type = other DNA
gtgaatggccatccttgggg

SEQ ID NO: 266477 - DNA, 20 bp, synthetic construct
  source 1..20: mol_type = other DNA
agtgaatggccatccttggg

SEQ ID NO: 266478 - DNA, 20 bp, synthetic construct
  source 1..20: mol_type = other DNA
tagtgaatggccatccttgg

SEQ ID NO: 266479 - DNA, 20 bp, synthetic construct
  source 1..20: mol_type = other DNA
ttagtgaatggccatccttg

SEQ ID NO: 266480 - DNA, 20 bp, synthetic construct
  source 1..20: mol_type = other DNA
cttagtgaatggccatcctt

SEQ ID NO: 266481 - DNA, 20 bp, synthetic construct
  source 1..20: mol_type = other DNA
ccttagtgaatggccatcct

SEQ ID NO: 266482 - DNA, 20 bp, synthetic construct
  source 1..20: mol_type = other DNA
gccttagtgaatggccatcc

SEQ ID NO: 266483 - DNA, 20 bp, synthetic construct
  source 1..20: mol_type = other DNA
ggccttagtgaatggccatc

SEQ ID NO: 266484 - DNA, 20 bp, synthetic construct
  source 1..20: mol_type = other DNA
gggccttagtgaatggccat

SEQ ID NO: 266485 - DNA, 20 bp, synthetic construct
  source 1..20: mol_type = other DNA
tgggccttagtgaatggcca

SEQ ID NO: 266486 - DNA, 20 bp, synthetic construct
  source 1..20: mol_type = other DNA
atgggccttagtgaatggcc

SEQ ID NO: 266487 - DNA, 20 bp, synthetic construct
  source 1..20: mol_type = other DNA
aatgggccttagtgaatggc

SEQ ID NO: 266488 - DNA, 20 bp, synthetic construct
  source 1..20: mol_type = other DNA
caatgggccttagtgaatgg

SEQ ID NO: 266489 - DNA, 20 bp, synthetic construct
  source 1..20: mol_type = other DNA
acaatgggccttagtgaatg

SEQ ID NO: 266490 - DNA, 20 bp, synthetic construct
  source 1..20: mol_type = other DNA
aacaatgggccttagtgaat

SEQ ID NO: 266491 - DNA, 20 bp, synthetic construct
  source 1..20: mol_type = other DNA
aaacaatgggccttagtgaa

SEQ ID NO: 266492 - DNA, 20 bp, synthetic construct
  source 1..20: mol_type = other DNA
aaaacaatgggccttagtga

SEQ ID NO: 266493 - DNA, 20 bp, synthetic construct
  source 1..20: mol_type = other DNA
aaaaacaatgggccttagtg

SEQ ID NO: 266494 - DNA, 20 bp, synthetic construct
  source 1..20: mol_type = other DNA
caaaaacaatgggccttagt

SEQ ID NO: 266495 - DNA, 20 bp, synthetic construct
  source 1..20: mol_type = other DNA
acaaaaacaatgggccttag

SEQ ID NO: 266496 - DNA, 20 bp, synthetic construct
  source 1..20: mol_type = other DNA
gacaaaaacaatgggcctta

SEQ ID NO: 266497 - DNA, 20 bp, synthetic construct
  source 1..20: mol_type = other DNA
agacaaaaacaatgggcctt

SEQ ID NO: 266498 - DNA, 20 bp, synthetic construct
  source 1..20: mol_type = other DNA
aagacaaaaacaatgggcct

SEQ ID NO: 266499 - DNA, 20 bp, synthetic construct
  source 1..20: mol_type = other DNA
aaagacaaaaacaatgggcc

SEQ ID NO: 266500 - DNA, 20 bp, synthetic construct
  source 1..20: mol_type = other DNA
aaaagacaaaaacaatgggc

SEQ ID NO: 266501 - DNA, 20 bp, synthetic construct
  source 1..20: mol_type = other DNA
gaaaagacaaaaacaatggg

SEQ ID NO: 266502 - DNA, 20 bp, synthetic construct
  source 1..20: mol_type = other DNA
cgaaaagacaaaaacaatgg

SEQ ID NO: 266503 - DNA, 20 bp, synthetic construct
  source 1..20: mol_type = other DNA
gcgaaaagacaaaaacaatg

SEQ ID NO: 266504 - DNA, 20 bp, synthetic construct
  source 1..20: mol_type = other DNA
agcgaaaagacaaaaacaat

SEQ ID NO: 266505 - DNA, 20 bp, synthetic construct
  source 1..20: mol_type = other DNA
aagcgaaaagacaaaaacaa

SEQ ID NO: 266506 - DNA, 20 bp, synthetic construct
  source 1..20: mol_type = other DNA
gaagcgaaaagacaaaaaca

SEQ ID NO: 266507 - DNA, 20 bp, synthetic construct
  source 1..20: mol_type = other DNA
cgaagcgaaaagacaaaaac

SEQ ID NO: 266508 - DNA, 20 bp, synthetic construct
  source 1..20: mol_type = other DNA
acgaagcgaaaagacaaaaa

SEQ ID NO: 266509 - DNA, 20 bp, synthetic construct
  source 1..20: mol_type = other DNA
cacgaagcgaaaagacaaaa

SEQ ID NO: 266510 - DNA, 20 bp, synthetic construct
  source 1..20: mol_type = other DNA
acacgaagcgaaaagacaaa

SEQ ID NO: 266511 - DNA, 20 bp, synthetic construct
  source 1..20: mol_type = other DNA
aacacgaagcgaaaagacaa

SEQ ID NO: 266512 - DNA, 20 bp, synthetic construct
  source 1..20: mol_type = other DNA
aaacacgaagcgaaaagaca

SEQ ID NO: 266513 - DNA, 20 bp, synthetic construct
  source 1..20: mol_type = other DNA
aaaacacgaagcgaaaagac

SEQ ID NO: 266514 - DNA, 20 bp, synthetic construct
  source 1..20: mol_type = other DNA
gaaaacacgaagcgaaaaga

SEQ ID NO: 266515 - DNA, 20 bp, synthetic construct
  source 1..20: mol_type = other DNA
agaaaacacgaagcgaaaag

SEQ ID NO: 266516 - DNA, 20 bp, synthetic construct
  source 1..20: mol_type = other DNA
cagaaaacacgaagcgaaaa

SEQ ID NO: 266517 - DNA, 20 bp, synthetic construct
  source 1..20: mol_type = other DNA
ccagaaaacacgaagcgaaa

SEQ ID NO: 266518 - DNA, 20 bp, synthetic construct
  source 1..20: mol_type = other DNA
gccagaaaacacgaagcgaa

SEQ ID NO: 266519 - DNA, 20 bp, synthetic construct
  source 1..20: mol_type = other DNA
ggccagaaaacacgaagcga

SEQ ID NO: 266520 - DNA, 20 bp, synthetic construct
  source 1..20: mol_type = other DNA
aggccagaaaacacgaagcg

SEQ ID NO: 266521 - DNA, 20 bp, synthetic construct
  source 1..20: mol_type = other DNA
caggccagaaaacacgaagc

SEQ ID NO: 266522 - DNA, 20 bp, synthetic construct
  source 1..20: mol_type = other DNA
ccaggccagaaaacacgaag

SEQ ID NO: 266523 - DNA, 20 bp, synthetic construct
  source 1..20: mol_type = other DNA
accaggccagaaaacacgaa

SEQ ID NO: 266524 - DNA, 20 bp, synthetic construct
  source 1..20: mol_type = other DNA
caccaggccagaaaacacga

SEQ ID NO: 266525 - DNA, 20 bp, synthetic construct
  source 1..20: mol_type = other DNA
acaccaggccagaaaacacg

SEQ ID NO: 266526 - DNA, 20 bp, synthetic construct
  source 1..20: mol_type = other DNA
aacaccaggccagaaaacac

SEQ ID NO: 266527 - DNA, 20 bp, synthetic construct
  source 1..20: mol_type = other DNA
aaacaccaggccagaaaaca

SEQ ID NO: 266528 - DNA, 20 bp, synthetic construct
  source 1..20: mol_type = other DNA
aaaacaccaggccagaaaac

SEQ ID NO: 266529 - DNA, 20 bp, synthetic construct
  source 1..20: mol_type = other DNA
aaaaacaccaggccagaaaa

SEQ ID NO: 266530 - DNA, 20 bp, synthetic construct
  source 1..20: mol_type = other DNA
gaaaaacaccaggccagaaa

SEQ ID NO: 266531 - DNA, 20 bp, synthetic construct
  source 1..20: mol_type = other DNA
agaaaaacaccaggccagaa

SEQ ID NO: 266532 - DNA, 20 bp, synthetic construct
  source 1..20: mol_type = other DNA
gagaaaaacaccaggccaga

SEQ ID NO: 266533 - DNA, 20 bp, synthetic construct
  source 1..20: mol_type = other DNA
tgagaaaaacaccaggccag

SEQ ID NO: 266534 - DNA, 20 bp, synthetic construct
  source 1..20: mol_type = other DNA
atgagaaaaacaccaggcca

SEQ ID NO: 266535 - DNA, 20 bp, synthetic construct
  source 1..20: mol_type = other DNA
tatgagaaaaacaccaggcc

SEQ ID NO: 266536 - DNA, 20 bp, synthetic construct
  source 1..20: mol_type = other DNA
atatgagaaaaacaccaggc

SEQ ID NO: 266537 - DNA, 20 bp, synthetic construct
  source 1..20: mol_type = other DNA
tatatgagaaaaacaccagg

SEQ ID NO: 266538 - DNA, 20 bp, synthetic construct
  source 1..20: mol_type = other DNA
gtatatgagaaaaacaccag

SEQ ID NO: 266539 - DNA, 20 bp, synthetic construct
  source 1..20: mol_type = other DNA
tgtatatgagaaaaacacca

SEQ ID NO: 266540 - DNA, 20 bp, synthetic construct
  source 1..20: mol_type = other DNA
atgtatatgagaaaaacacc

SEQ ID NO: 266541 - DNA, 20 bp, synthetic construct
  source 1..20: mol_type = other DNA
catgtatatgagaaaaacac

SEQ ID NO: 266542 - DNA, 20 bp, synthetic construct
  source 1..20: mol_type = other DNA
acatgtatatgagaaaaaca

SEQ ID NO: 266543 - DNA, 20 bp, synthetic construct
  source 1..20: mol_type = other DNA
cacatgtatatgagaaaaac

SEQ ID NO: 266544 - DNA, 20 bp, synthetic construct
  source 1..20: mol_type = other DNA
tcacatgtatatgagaaaaa

SEQ ID NO: 266545 - DNA, 20 bp, synthetic construct
  source 1..20: mol_type = other DNA
atcacatgtatatgagaaaa

SEQ ID NO: 266546 - DNA, 20 bp, synthetic construct
  source 1..20: mol_type = other DNA
gatcacatgtatatgagaaa

SEQ ID NO: 266547 - DNA, 20 bp, synthetic construct
  source 1..20: mol_type = other DNA
ggatcacatgtatatgagaa

SEQ ID NO: 266548 - DNA, 20 bp, synthetic construct
  source 1..20: mol_type = other DNA
tggatcacatgtatatgaga

SEQ ID NO: 266549 - DNA, 20 bp, synthetic construct
  source 1..20: mol_type = other DNA
ctggatcacatgtatatgag

SEQ ID NO: 266550 - DNA, 20 bp, synthetic construct
  source 1..20: mol_type = other DNA
cctggatcacatgtatatga

SEQ ID NO: 266551 - DNA, 20 bp, synthetic construct
  source 1..20: mol_type = other DNA
ccctggatcacatgtatatg

SEQ ID NO: 266552 - DNA, 20 bp, synthetic construct
  source 1..20: mol_type = other DNA
tccctggatcacatgtatat

SEQ ID NO: 266553 - DNA, 20 bp, synthetic construct
  source 1..20: mol_type = other DNA
atccctggatcacatgtata

SEQ ID NO: 266554 - DNA, 20 bp, synthetic construct
  source 1..20: mol_type = other DNA
tatccctggatcacatgtat

SEQ ID NO: 266555 - DNA, 20 bp, synthetic construct
  source 1..20: mol_type = other DNA
ttatccctggatcacatgta

SEQ ID NO: 266556 - DNA, 20 bp, synthetic construct
  source 1..20: mol_type = other DNA
attatccctggatcacatgt

SEQ ID NO: 266557 - DNA, 20 bp, synthetic construct
  source 1..20: mol_type = other DNA
aattatccctggatcacatg

SEQ ID NO: 266558 - DNA, 20 bp, synthetic construct
  source 1..20: mol_type = other DNA
gaattatccctggatcacat

SEQ ID NO: 266559 - DNA, 20 bp, synthetic construct
  source 1..20: mol_type = other DNA
ggaattatccctggatcaca

SEQ ID NO: 266560 - DNA, 20 bp, synthetic construct
  source 1..20: mol_type = other DNA
gggaattatccctggatcac

SEQ ID NO: 266561 - DNA, 20 bp, synthetic construct
  source 1..20: mol_type = other DNA
tgggaattatccctggatca

SEQ ID NO: 266562 - DNA, 20 bp, synthetic construct
  source 1..20: mol_type = other DNA
ctgggaattatccctggatc

SEQ ID NO: 266563 - DNA, 20 bp, synthetic construct
  source 1..20: mol_type = other DNA
tctgggaattatccctggat

SEQ ID NO: 266564 - DNA, 20 bp, synthetic construct
  source 1..20: mol_type = other DNA
ttctgggaattatccctgga

SEQ ID NO: 266565 - DNA, 20 bp, synthetic construct
  source 1..20: mol_type = other DNA
attctgggaattatccctgg

SEQ ID NO: 266566 - DNA, 20 bp, synthetic construct
  source 1..20: mol_type = other DNA
aattctgggaattatccctg

SEQ ID NO: 266567 - DNA, 20 bp, synthetic construct
  source 1..20: mol_type = other DNA
aaattctgggaattatccct

SEQ ID NO: 266568 - DNA, 20 bp, synthetic construct
  source 1..20: mol_type = other DNA
aaaattctgggaattatccc

SEQ ID NO: 266569 - DNA, 20 bp, synthetic construct
  source 1..20: mol_type = other DNA
caaaattctgggaattatcc

SEQ ID NO: 266570 - DNA, 20 bp, synthetic construct
  source 1..20: mol_type = other DNA
tcaaaattctgggaattatc

SEQ ID NO: 266571 - DNA, 20 bp, synthetic construct
  source 1..20: mol_type = other DNA
gtcaaaattctgggaattat

SEQ ID NO: 266572 - DNA, 20 bp, synthetic construct
  source 1..20: mol_type = other DNA
tgtcaaaattctgggaatta

SEQ ID NO: 266573 - DNA, 20 bp, synthetic construct
  source 1..20: mol_type = other DNA
ctgtcaaaattctgggaatt

SEQ ID NO: 266574 - DNA, 20 bp, synthetic construct
  source 1..20: mol_type = other DNA
cctgtcaaaattctgggaat

SEQ ID NO: 266575 - DNA, 20 bp, synthetic construct
  source 1..20: mol_type = other DNA
tcctgtcaaaattctgggaa

SEQ ID NO: 266576 - DNA, 20 bp, synthetic construct
  source 1..20: mol_type = other DNA
atcctgtcaaaattctggga

SEQ ID NO: 266577 - DNA, 20 bp, synthetic construct
  source 1..20: mol_type = other DNA
aatcctgtcaaaattctggg

SEQ ID NO: 266578 - DNA, 20 bp, synthetic construct
  source 1..20: mol_type = other DNA
aaatcctgtcaaaattctgg

SEQ ID NO: 266579 - DNA, 20 bp, synthetic construct
  source 1..20: mol_type = other DNA
aaaatcctgtcaaaattctg

SEQ ID NO: 266580 - DNA, 20 bp, synthetic construct
  source 1..20: mol_type = other DNA
taaaatcctgtcaaaattct

SEQ ID NO: 266581 - DNA, 20 bp, synthetic construct
  source 1..20: mol_type = other DNA
ttaaaatcctgtcaaaattc

SEQ ID NO: 266582 - DNA, 20 bp, synthetic construct
  source 1..20: mol_type = other DNA
cttaaaatcctgtcaaaatt

SEQ ID NO: 266583 - DNA, 20 bp, synthetic construct
  source 1..20: mol_type = other DNA
acttaaaatcctgtcaaaat

SEQ ID NO: 266584 - DNA, 20 bp, synthetic construct
  source 1..20: mol_type = other DNA
tacttaaaatcctgtcaaaa

SEQ ID NO: 266585 - DNA, 20 bp, synthetic construct
  source 1..20: mol_type = other DNA
ctacttaaaatcctgtcaaa

SEQ ID NO: 266586 - DNA, 20 bp, synthetic construct
  source 1..20: mol_type = other DNA
gctacttaaaatcctgtcaa

SEQ ID NO: 266587 - DNA, 20 bp, synthetic construct
  source 1..20: mol_type = other DNA
cgctacttaaaatcctgtca

SEQ ID NO: 266588 - DNA, 20 bp, synthetic construct
  source 1..20: mol_type = other DNA
acgctacttaaaatcctgtc

SEQ ID NO: 266589 - DNA, 20 bp, synthetic construct
  source 1..20: mol_type = other DNA
aacgctacttaaaatcctgt

SEQ ID NO: 266590 - DNA, 20 bp, synthetic construct
  source 1..20: mol_type = other DNA
aaacgctacttaaaatcctg

SEQ ID NO: 266591 - DNA, 20 bp, synthetic construct
  source 1..20: mol_type = other DNA
caaacgctacttaaaatcct

SEQ ID NO: 266592 - DNA, 20 bp, synthetic construct
  source 1..20: mol_type = other DNA
ccaaacgctacttaaaatcc

SEQ ID NO: 266593 - DNA, 20 bp, synthetic construct
  source 1..20: mol_type = other DNA
tccaaacgctacttaaaatc

SEQ ID NO: 266594 - DNA, 20 bp, synthetic construct
  source 1..20: mol_type = other DNA
atccaaacgctacttaaaat

SEQ ID NO: 266595 - DNA, 20 bp, synthetic construct
  source 1..20: mol_type = other DNA
gatccaaacgctacttaaaa

SEQ ID NO: 266596 - DNA, 20 bp, synthetic construct
  source 1..20: mol_type = other DNA
ggatccaaacgctacttaaa

SEQ ID NO: 266597 - DNA, 20 bp, synthetic construct
  source 1..20: mol_type = other DNA
aggatccaaacgctacttaa

SEQ ID NO: 266598 - DNA, 20 bp, synthetic construct
  source 1..20: mol_type = other DNA
caggatccaaacgctactta

SEQ ID NO: 266599 - DNA, 20 bp, synthetic construct
  source 1..20: mol_type = other DNA
gcaggatccaaacgctactt

SEQ ID NO: 266600 - DNA, 20 bp, synthetic construct
  source 1..20: mol_type = other DNA
agcaggatccaaacgctact

SEQ ID NO: 266601 - DNA, 20 bp, synthetic construct
  source 1..20: mol_type = other DNA
cagcaggatccaaacgctac

SEQ ID NO: 266602 - DNA, 20 bp, synthetic construct
  source 1..20: mol_type = other DNA
acagcaggatccaaacgcta

SEQ ID NO: 266603 - DNA, 20 bp, synthetic construct
  source 1..20: mol_type = other DNA
aacagcaggatccaaacgct

SEQ ID NO: 266604 - DNA, 20 bp, synthetic construct
  source 1..20: mol_type = other DNA
aaacagcaggatccaaacgc

SEQ ID NO: 266605 - DNA, 20 bp, synthetic construct
  source 1..20: mol_type = other DNA
aaaacagcaggatccaaacg

SEQ ID NO: 266606 - DNA, 20 bp, synthetic construct
  source 1..20: mol_type = other DNA
aaaaacagcaggatccaaac

SEQ ID NO: 266607 - DNA, 20 bp, synthetic construct
  source 1..20: mol_type = other DNA
aaaaaacagcaggatccaaa

SEQ ID NO: 266608 - DNA, 20 bp, synthetic construct
  source 1..20: mol_type = other DNA
aaaaaaacagcaggatccaa

SEQ ID NO: 266609 - DNA, 20 bp, synthetic construct
  source 1..20: mol_type = other DNA
aaaaaaaacagcaggatcca

SEQ ID NO: 266610 - DNA, 20 bp, synthetic construct
  source 1..20: mol_type = other DNA
aaaaaaaaacagcaggatcc

SEQ ID NO: 266611 - DNA, 20 bp, synthetic construct
  source 1..20: mol_type = other DNA
gaaaaaaaaacagcaggatc

SEQ ID NO: 266612 - DNA, 20 bp, synthetic construct
  source 1..20: mol_type = other DNA
tgaaaaaaaaacagcaggat

SEQ ID NO: 266613 - DNA, 20 bp, synthetic construct
  source 1..20: mol_type = other DNA
gtgaaaaaaaaacagcagga

SEQ ID NO: 266614 - DNA, 20 bp, synthetic construct
  source 1..20: mol_type = other DNA
agtgaaaaaaaaacagcagg

SEQ ID NO: 266615 - DNA, 20 bp, synthetic construct
  source 1..20: mol_type = other DNA
aagtgaaaaaaaaacagcag

SEQ ID NO: 266616 - DNA, 20 bp, synthetic construct
  source 1..20: mol_type = other DNA
taagtgaaaaaaaaacagca

SEQ ID NO: 266617 - DNA, 20 bp, synthetic construct
  source 1..20: mol_type = other DNA
ttaagtgaaaaaaaaacagc

SEQ ID NO: 266618 - DNA, 20 bp, synthetic construct
  source 1..20: mol_type = other DNA
gttaagtgaaaaaaaaacag

SEQ ID NO: 266619 - DNA, 20 bp, synthetic construct
  source 1..20: mol_type = other DNA
tgttaagtgaaaaaaaaaca

SEQ ID NO: 266620 - DNA, 20 bp, synthetic construct
  source 1..20: mol_type = other DNA
atgttaagtgaaaaaaaaac

SEQ ID NO: 266621 - DNA, 20 bp, synthetic construct
  source 1..20: mol_type = other DNA
gatgttaagtgaaaaaaaaa

SEQ ID NO: 266622 - DNA, 20 bp, synthetic construct
  source 1..20: mol_type = other DNA
cgatgttaagtgaaaaaaaa

SEQ ID NO: 266623 - DNA, 20 bp, synthetic construct
  source 1..20: mol_type = other DNA
ccgatgttaagtgaaaaaaa

SEQ ID NO: 266624 - DNA, 20 bp, synthetic construct
  source 1..20: mol_type = other DNA
cccgatgttaagtgaaaaaa

SEQ ID NO: 266625 - DNA, 20 bp, synthetic construct
  source 1..20: mol_type = other DNA
gcccgatgttaagtgaaaaa

SEQ ID NO: 266626 - DNA, 20 bp, synthetic construct
  source 1..20: mol_type = other DNA
ggcccgatgttaagtgaaaa

SEQ ID NO: 266627 - DNA, 20 bp, synthetic construct
  source 1..20: mol_type = other DNA
tggcccgatgttaagtgaaa

SEQ ID NO: 266628 - DNA, 20 bp, synthetic construct
  source 1..20: mol_type = other DNA
ctggcccgatgttaagtgaa

SEQ ID NO: 266629 - DNA, 20 bp, synthetic construct
  source 1..20: mol_type = other DNA
actggcccgatgttaagtga

SEQ ID NO: 266630 - DNA, 20 bp, synthetic construct
  source 1..20: mol_type = other DNA
aactggcccgatgttaagtg

SEQ ID NO: 266631 - DNA, 20 bp, synthetic construct
  source 1..20: mol_type = other DNA
caactggcccgatgttaagt

SEQ ID NO: 266632 - DNA, 20 bp, synthetic construct
  source 1..20: mol_type = other DNA
tcaactggcccgatgttaag

SEQ ID NO: 266633 - DNA, 20 bp, synthetic construct
  source 1..20: mol_type = other DNA
gtcaactggcccgatgttaa

SEQ ID NO: 266634 - DNA, 20 bp, synthetic construct
  source 1..20: mol_type = other DNA
agtcaactggcccgatgtta

SEQ ID NO: 266635 - DNA, 20 bp, synthetic construct
  source 1..20: mol_type = other DNA
gagtcaactggcccgatgtt

SEQ ID NO: 266636 - DNA, 20 bp, synthetic construct
  source 1..20: mol_type = other DNA
tgagtcaactggcccgatgt

SEQ ID NO: 266637 - DNA, 20 bp, synthetic construct
  source 1..20: mol_type = other DNA
gtgagtcaactggcccgatg

SEQ ID NO: 266638 - DNA, 20 bp, synthetic construct
  source 1..20: mol_type = other DNA
tgtgagtcaactggcccgat

SEQ ID NO: 266639 - DNA, 20 bp, synthetic construct
  source 1..20: mol_type = other DNA
gtgtgagtcaactggcccga

SEQ ID NO: 266640 - DNA, 20 bp, synthetic construct
  source 1..20: mol_type = other DNA
agtgtgagtcaactggcccg

SEQ ID NO: 266641 - DNA, 20 bp, synthetic construct
  source 1..20: mol_type = other DNA
gagtgtgagtcaactggccc

SEQ ID NO: 266642 - DNA, 20 bp, synthetic construct
  source 1..20: mol_type = other DNA
agagtgtgagtcaactggcc

SEQ ID NO: 266643 - DNA, 20 bp, synthetic construct
  source 1..20: mol_type = other DNA
cagagtgtgagtcaactggc

SEQ ID NO: 266644 - DNA, 20 bp, synthetic construct
  source 1..20: mol_type = other DNA
acagagtgtgagtcaactgg

SEQ ID NO: 266645 - DNA, 20 bp, synthetic construct
  source 1..20: mol_type = other DNA
aacagagtgtgagtcaactg

SEQ ID NO: 266646 - DNA, 20 bp, synthetic construct
  source 1..20: mol_type = other DNA
aaacagagtgtgagtcaact

SEQ ID NO: 266647 - DNA, 20 bp, synthetic construct
  source 1..20: mol_type = other DNA
aaaacagagtgtgagtcaac

SEQ ID NO: 266648 - DNA, 20 bp, synthetic construct
  source 1..20: mol_type = other DNA
aaaaacagagtgtgagtcaa

SEQ ID NO: 266649 - DNA, 20 bp, synthetic construct
  source 1..20: mol_type = other DNA
aaaaaacagagtgtgagtca

SEQ ID NO: 266650 - DNA, 20 bp, synthetic construct
  source 1..20: mol_type = other DNA
caaaaaacagagtgtgagtc

SEQ ID NO: 266651 - DNA, 20 bp, synthetic construct
  source 1..20: mol_type = other DNA
acaaaaaacagagtgtgagt

SEQ ID NO: 266652 - DNA, 20 bp, synthetic construct
  source 1..20: mol_type = other DNA
aacaaaaaacagagtgtgag

SEQ ID NO: 266653 - DNA, 20 bp, synthetic construct
  source 1..20: mol_type = other DNA
caacaaaaaacagagtgtga

SEQ ID NO: 266654 - DNA, 20 bp, synthetic construct
  source 1..20: mol_type = other DNA
acaacaaaaaacagagtgtg

SEQ ID NO: 266655 - DNA, 20 bp, synthetic construct
  source 1..20: mol_type = other DNA
aacaacaaaaaacagagtgt

SEQ ID NO: 266656 - DNA, 20 bp, synthetic construct
  source 1..20: mol_type = other DNA
caacaacaaaaaacagagtg

SEQ ID NO: 266657 - DNA, 20 bp, synthetic construct
  source 1..20: mol_type = other DNA
acaacaacaaaaaacagagt

SEQ ID NO: 266658 - DNA, 20 bp, synthetic construct
  source 1..20: mol_type = other DNA
aacaacaacaaaaaacagag

SEQ ID NO: 266659 - DNA, 20 bp, synthetic construct
  source 1..20: mol_type = other DNA
aaacaacaacaaaaaacaga

SEQ ID NO: 266660 - DNA, 20 bp, synthetic construct
  source 1..20: mol_type = other DNA
aaaacaacaacaaaaaacag

SEQ ID NO: 266661 - DNA, 20 bp, synthetic construct
  source 1..20: mol_type = other DNA
aaaaacaacaacaaaaaaca

SEQ ID NO: 266662 - DNA, 20 bp, synthetic construct
  source 1..20: mol_type = other DNA
aaaaaacaacaacaaaaaac

SEQ ID NO: 266663 - DNA, 20 bp, synthetic construct
  source 1..20: mol_type = other DNA
aaaaaaacaacaacaaaaaa

SEQ ID NO: 266664 - DNA, 20 bp, synthetic construct
  source 1..20: mol_type = other DNA
caaaaaaacaacaacaaaaa

SEQ ID NO: 266665 - DNA, 20 bp, synthetic construct
  source 1..20: mol_type = other DNA
tcaaaaaaacaacaacaaaa

SEQ ID NO: 266666 - DNA, 20 bp, synthetic construct
  source 1..20: mol_type = other DNA
ctcaaaaaaacaacaacaaa

SEQ ID NO: 266667 - DNA, 20 bp, synthetic construct
  source 1..20: mol_type = other DNA
tctcaaaaaaacaacaacaa

SEQ ID NO: 266668 - DNA, 20 bp, synthetic construct
  source 1..20: mol_type = other DNA
gtctcaaaaaaacaacaaca

SEQ ID NO: 266669 - DNA, 20 bp, synthetic construct
  source 1..20: mol_type = other DNA
cgtctcaaaaaaacaacaac

SEQ ID NO: 266670 - DNA, 20 bp, synthetic construct
  source 1..20: mol_type = other DNA
ccgtctcaaaaaaacaacaa

SEQ ID NO: 266671 - DNA, 20 bp, synthetic construct
  source 1..20: mol_type = other DNA
tccgtctcaaaaaaacaaca

SEQ ID NO: 266672 - DNA, 20 bp, synthetic construct
  source 1..20: mol_type = other DNA
ctccgtctcaaaaaaacaac

SEQ ID NO: 266673 - DNA, 20 bp, synthetic construct
  source 1..20: mol_type = other DNA
actccgtctcaaaaaaacaa

SEQ ID NO: 266674 - DNA, 20 bp, synthetic construct
  source 1..20: mol_type = other DNA
gactccgtctcaaaaaaaca

SEQ ID NO: 266675 - DNA, 20 bp, synthetic construct
  source 1..20: mol_type = other DNA
agactccgtctcaaaaaaac

SEQ ID NO: 266676 - DNA, 20 bp, synthetic construct
  source 1..20: mol_type = other DNA
gagactccgtctcaaaaaaa

SEQ ID NO: 266677 - DNA, 20 bp, synthetic construct
  source 1..20: mol_type = other DNA
tgagactccgtctcaaaaaa

SEQ ID NO: 266678 - DNA, 20 bp, synthetic construct
  source 1..20: mol_type = other DNA
gtgagactccgtctcaaaaa

SEQ ID NO: 266679 - DNA, 20 bp, synthetic construct
  source 1..20: mol_type = other DNA
agtgagactccgtctcaaaa

SEQ ID NO: 266680 - DNA, 20 bp, synthetic construct
  source 1..20: mol_type = other DNA
cagtgagactccgtctcaaa

SEQ ID NO: 266681 - DNA, 20 bp, synthetic construct
  source 1..20: mol_type = other DNA
acagtgagactccgtctcaa

SEQ ID NO: 266682 - DNA, 20 bp, synthetic construct
  source 1..20: mol_type = other DNA
cacagtgagactccgtctca

SEQ ID NO: 266683 - DNA, 20 bp, synthetic construct
  source 1..20: mol_type = other DNA
acacagtgagactccgtctc

SEQ ID NO: 266684 - DNA, 20 bp, synthetic construct
  source 1..20: mol_type = other DNA
gacacagtgagactccgtct

SEQ ID NO: 266685 - DNA, 20 bp, synthetic construct
  source 1..20: mol_type = other DNA
tgacacagtgagactccgtc

SEQ ID NO: 266686 - DNA, 20 bp, synthetic construct
  source 1..20: mol_type = other DNA
gtgacacagtgagactccgt

SEQ ID NO: 266687 - DNA, 20 bp, synthetic construct
  source 1..20: mol_type = other DNA
ggtgacacagtgagactccg

SEQ ID NO: 266688 - DNA, 20 bp, synthetic construct
  source 1..20: mol_type = other DNA
gggtgacacagtgagactcc

SEQ ID NO: 266689 - DNA, 20 bp, synthetic construct
  source 1..20: mol_type = other DNA
tgggtgacacagtgagactc

SEQ ID NO: 266690 - DNA, 20 bp, synthetic construct
  source 1..20: mol_type = other DNA
ctgggtgacacagtgagact

SEQ ID NO: 266691 - DNA, 20 bp, synthetic construct
  source 1..20: mol_type = other DNA
cctgggtgacacagtgagac

SEQ ID NO: 266692 - DNA, 20 bp, synthetic construct
  source 1..20: mol_type = other DNA
gcctgggtgacacagtgaga

SEQ ID NO: 266693 - DNA, 20 bp, synthetic construct
  source 1..20: mol_type = other DNA
agcctgggtgacacagtgag

SEQ ID NO: 266694 - DNA, 20 bp, synthetic construct
  source 1..20: mol_type = other DNA
cagcctgggtgacacagtga

SEQ ID NO: 266695 - DNA, 20 bp, synthetic construct
  source 1..20: mol_type = other DNA
tcagcctgggtgacacagtg

SEQ ID NO: 266696 - DNA, 20 bp, synthetic construct
  source 1..20: mol_type = other DNA
ttcagcctgggtgacacagt

SEQ ID NO: 266697 - DNA, 20 bp, synthetic construct
  source 1..20: mol_type = other DNA
cttcagcctgggtgacacag

SEQ ID NO: 266698 - DNA, 20 bp, synthetic construct
  source 1..20: mol_type = other DNA
acttcagcctgggtgacaca

SEQ ID NO: 266699 - DNA, 20 bp, synthetic construct
  source 1..20: mol_type = other DNA
cacttcagcctgggtgacac

SEQ ID NO: 266700 - DNA, 20 bp, synthetic construct
  source 1..20: mol_type = other DNA
gcacttcagcctgggtgaca

SEQ ID NO: 266701 - DNA, 20 bp, synthetic construct
  source 1..20: mol_type = other DNA
tgcacttcagcctgggtgac

SEQ ID NO: 266702 - DNA, 20 bp, synthetic construct
  source 1..20: mol_type = other DNA
ctgcacttcagcctgggtga

SEQ ID NO: 266703 - DNA, 20 bp, synthetic construct
  source 1..20: mol_type = other DNA
actgcacttcagcctgggtg

SEQ ID NO: 266704 - DNA, 20 bp, synthetic construct
  source 1..20: mol_type = other DNA
cactgcacttcagcctgggt

SEQ ID NO: 266705 - DNA, 20 bp, synthetic construct
  source 1..20: mol_type = other DNA
ccactgcacttcagcctggg

SEQ ID NO: 266706 - DNA, 20 bp, synthetic construct
  source 1..20: mol_type = other DNA
gccactgcacttcagcctgg

SEQ ID NO: 266707 - DNA, 20 bp, synthetic construct
  source 1..20: mol_type = other DNA
tgccactgcacttcagcctg

SEQ ID NO: 266708 - DNA, 20 bp, synthetic construct
  source 1..20: mol_type = other DNA
gtgccactgcacttcagcct

SEQ ID NO: 266709 - DNA, 20 bp, synthetic construct
  source 1..20: mol_type = other DNA
tgtgccactgcacttcagcc

SEQ ID NO: 266710 - DNA, 20 bp, synthetic construct
  source 1..20: mol_type = other DNA
ttgtgccactgcacttcagc

SEQ ID NO: 266711 - DNA, 20 bp, synthetic construct
  source 1..20: mol_type = other DNA
attgtgccactgcacttcag

SEQ ID NO: 266712 - DNA, 20 bp, synthetic construct
  source 1..20: mol_type = other DNA
gattgtgccactgcacttca

SEQ ID NO: 266713 - DNA, 20 bp, synthetic construct
  source 1..20: mol_type = other DNA
agattgtgccactgcacttc

SEQ ID NO: 266714 - DNA, 20 bp, synthetic construct
  source 1..20: mol_type = other DNA
aagattgtgccactgcactt

SEQ ID NO: 266715 - DNA, 20 bp, synthetic construct
  source 1..20: mol_type = other DNA
caagattgtgccactgcact

SEQ ID NO: 266716 - DNA, 20 bp, synthetic construct
  source 1..20: mol_type = other DNA
ccaagattgtgccactgcac

SEQ ID NO: 266717 - DNA, 20 bp, synthetic construct
  source 1..20: mol_type = other DNA
gccaagattgtgccactgca

SEQ ID NO: 266718 - DNA, 20 bp, synthetic construct
  source 1..20: mol_type = other DNA
tgccaagattgtgccactgc

SEQ ID NO: 266719 - DNA, 20 bp, synthetic construct
  source 1..20: mol_type = other DNA
atgccaagattgtgccactg

SEQ ID NO: 266720 - DNA, 20 bp, synthetic construct
  source 1..20: mol_type = other DNA
tatgccaagattgtgccact

SEQ ID NO: 266721 - DNA, 20 bp, synthetic construct
  source 1..20: mol_type = other DNA
gtatgccaagattgtgccac

SEQ ID NO: 266722 - DNA, 20 bp, synthetic construct
  source 1..20: mol_type = other DNA
agtatgccaagattgtgcca

SEQ ID NO: 266723 - DNA, 20 bp, synthetic construct
  source 1..20: mol_type = other DNA
cagtatgccaagattgtgcc

SEQ ID NO: 266724 - DNA, 20 bp, synthetic construct
  source 1..20: mol_type = other DNA
gcagtatgccaagattgtgc

SEQ ID NO: 266725 - DNA, 20 bp, synthetic construct
  source 1..20: mol_type = other DNA
tgcagtatgccaagattgtg

SEQ ID NO: 266726 - DNA, 20 bp, synthetic construct
  source 1..20: mol_type = other DNA
ttgcagtatgccaagattgt

SEQ ID NO: 266727 - DNA, 20 bp, synthetic construct
  source 1..20: mol_type = other DNA
gttgcagtatgccaagattg

SEQ ID NO: 266728 - DNA, 20 bp, synthetic construct
  source 1..20: mol_type = other DNA
ggttgcagtatgccaagatt

SEQ ID NO: 266729 - DNA, 20 bp, synthetic construct
  source 1..20: mol_type = other DNA
aggttgcagtatgccaagat

SEQ ID NO: 266730 - DNA, 20 bp, synthetic construct
  source 1..20: mol_type = other DNA
gaggttgcagtatgccaaga

SEQ ID NO: 266731 - DNA, 20 bp, synthetic construct
  source 1..20: mol_type = other DNA
agaggttgcagtatgccaag

SEQ ID NO: 266732 - DNA, 20 bp, synthetic construct
  source 1..20: mol_type = other DNA
cagaggttgcagtatgccaa

SEQ ID NO: 266733 - DNA, 20 bp, synthetic construct
  source 1..20: mol_type = other DNA
gcagaggttgcagtatgcca

SEQ ID NO: 266734 - DNA, 20 bp, synthetic construct
  source 1..20: mol_type = other DNA
agcagaggttgcagtatgcc

SEQ ID NO: 266735 - DNA, 20 bp, synthetic construct
  source 1..20: mol_type = other DNA
aagcagaggttgcagtatgc

SEQ ID NO: 266736 - DNA, 20 bp, synthetic construct
  source 1..20: mol_type = other DNA
gaagcagaggttgcagtatg

SEQ ID NO: 266737 - DNA, 20 bp, synthetic construct
  source 1..20: mol_type = other DNA
ggaagcagaggttgcagtat

SEQ ID NO: 266738 - DNA, 20 bp, synthetic construct
  source 1..20: mol_type = other DNA
gggaagcagaggttgcagta

SEQ ID NO: 266739 - DNA, 20 bp, synthetic construct
  source 1..20: mol_type = other DNA
tgggaagcagaggttgcagt

SEQ ID NO: 266740 - DNA, 20 bp, synthetic construct
  source 1..20: mol_type = other DNA
ttgggaagcagaggttgcag

SEQ ID NO: 266741 - DNA, 20 bp, synthetic construct
  source 1..20: mol_type = other DNA
tttgggaagcagaggttgca

SEQ ID NO: 266742 - DNA, 20 bp, synthetic construct
  source 1..20: mol_type = other DNA
atttgggaagcagaggttgc

SEQ ID NO: 266743 - DNA, 20 bp, synthetic construct
  source 1..20: mol_type = other DNA
aatttgggaagcagaggttg

SEQ ID NO: 266744 - DNA, 20 bp, synthetic construct
  source 1..20: mol_type = other DNA
gaatttgggaagcagaggtt

SEQ ID NO: 266745 - DNA, 20 bp, synthetic construct
  source 1..20: mol_type = other DNA
tgaatttgggaagcagaggt

SEQ ID NO: 266746 - DNA, 20 bp, synthetic construct
  source 1..20: mol_type = other DNA
ttgaatttgggaagcagagg

SEQ ID NO: 266747 - DNA, 20 bp, synthetic construct
  source 1..20: mol_type = other DNA
cttgaatttgggaagcagag

SEQ ID NO: 266748 - DNA, 20 bp, synthetic construct
  source 1..20: mol_type = other DNA
gcttgaatttgggaagcaga

SEQ ID NO: 266749 - DNA, 20 bp, synthetic construct
  source 1..20: mol_type = other DNA
tgcttgaatttgggaagcag

SEQ ID NO: 266750 - DNA, 20 bp, synthetic construct
  source 1..20: mol_type = other DNA
ctgcttgaatttgggaagca

SEQ ID NO: 266751 - DNA, 20 bp, synthetic construct
  source 1..20: mol_type = other DNA
actgcttgaatttgggaagc

SEQ ID NO: 266752 - DNA, 20 bp, synthetic construct
  source 1..20: mol_type = other DNA
aactgcttgaatttgggaag

SEQ ID NO: 266753 - DNA, 20 bp, synthetic construct
  source 1..20: mol_type = other DNA
aaactgcttgaatttgggaa

SEQ ID NO: 266754 - DNA, 20 bp, synthetic construct
  source 1..20: mol_type = other DNA
aaaactgcttgaatttggga

SEQ ID NO: 266755 - DNA, 20 bp, synthetic construct
  source 1..20: mol_type = other DNA
gaaaactgcttgaatttggg

SEQ ID NO: 266756 - DNA, 20 bp, synthetic construct
  source 1..20: mol_type = other DNA
ggaaaactgcttgaatttgg

SEQ ID NO: 266757 - DNA, 20 bp, synthetic construct
  source 1..20: mol_type = other DNA
aggaaaactgcttgaatttg

SEQ ID NO: 266758 - DNA, 20 bp, synthetic construct
  source 1..20: mol_type = other DNA
caggaaaactgcttgaattt

SEQ ID NO: 266759 - DNA, 20 bp, synthetic construct
  source 1..20: mol_type = other DNA
gcaggaaaactgcttgaatt

SEQ ID NO: 266760 - DNA, 20 bp, synthetic construct
  source 1..20: mol_type = other DNA
ggcaggaaaactgcttgaat

SEQ ID NO: 266761 - DNA, 20 bp, synthetic construct
  source 1..20: mol_type = other DNA
aggcaggaaaactgcttgaa

SEQ ID NO: 266762 - DNA, 20 bp, synthetic construct
  source 1..20: mol_type = other DNA
gaggcaggaaaactgcttga

SEQ ID NO: 266763 - DNA, 20 bp, synthetic construct
  source 1..20: mol_type = other DNA
tgaggcaggaaaactgcttg

SEQ ID NO: 266764 - DNA, 20 bp, synthetic construct
  source 1..20: mol_type = other DNA
ctgaggcaggaaaactgctt

SEQ ID NO: 266765 - DNA, 20 bp, synthetic construct
  source 1..20: mol_type = other DNA
gctgaggcaggaaaactgct

SEQ ID NO: 266766 - DNA, 20 bp, synthetic construct
  source 1..20: mol_type = other DNA
ggctgaggcaggaaaactgc

SEQ ID NO: 266767 - DNA, 20 bp, synthetic construct
  source 1..20: mol_type = other DNA
aggctgaggcaggaaaactg

SEQ ID NO: 266768 - DNA, 20 bp, synthetic construct
  source 1..20: mol_type = other DNA
gaggctgaggcaggaaaact

SEQ ID NO: 266769 - DNA, 20 bp, synthetic construct
  source 1..20: mol_type = other DNA
ggaggctgaggcaggaaaac

SEQ ID NO: 266770 - DNA, 20 bp, synthetic construct
  source 1..20: mol_type = other DNA
aggaggctgaggcaggaaaa

SEQ ID NO: 266771 - DNA, 20 bp, synthetic construct
  source 1..20: mol_type = other DNA
caggaggctgaggcaggaaa

SEQ ID NO: 266772 - DNA, 20 bp, synthetic construct
  source 1..20: mol_type = other DNA
tcaggaggctgaggcaggaa

SEQ ID NO: 266773 - DNA, 20 bp, synthetic construct
  source 1..20: mol_type = other DNA
ctcaggaggctgaggcagga

SEQ ID NO: 266774 - DNA, 20 bp, synthetic construct
  source 1..20: mol_type = other DNA
actcaggaggctgaggcagg

SEQ ID NO: 266775 - DNA, 20 bp, synthetic construct
  source 1..20: mol_type = other DNA
tactcaggaggctgaggcag

SEQ ID NO: 266776 - DNA, 20 bp, synthetic construct
  source 1..20: mol_type = other DNA
ctactcaggaggctgaggca

SEQ ID NO: 266777 - DNA, 20 bp, synthetic construct
  source 1..20: mol_type = other DNA
gctactcaggaggctgaggc

SEQ ID NO: 266778 - DNA, 20 bp, synthetic construct
  source 1..20: mol_type = other DNA
agctactcaggaggctgagg

SEQ ID NO: 266779 - DNA, 20 bp, synthetic construct
  source 1..20: mol_type = other DNA
cagctactcaggaggctgag

SEQ ID NO: 266780 - DNA, 20 bp, synthetic construct
  source 1..20: mol_type = other DNA
ccagctactcaggaggctga

SEQ ID NO: 266781 - DNA, 20 bp, synthetic construct
  source 1..20: mol_type = other DNA
cccagctactcaggaggctg

SEQ ID NO: 266782 - DNA, 20 bp, synthetic construct
  source 1..20: mol_type = other DNA
tcccagctactcaggaggct

SEQ ID NO: 266783 - DNA, 20 bp, synthetic construct
  source 1..20: mol_type = other DNA
gtcccagctactcaggaggc

SEQ ID NO: 266784 - DNA, 20 bp, synthetic construct
  source 1..20: mol_type = other DNA
agtcccagctactcaggagg

SEQ ID NO: 266785 - DNA, 20 bp, synthetic construct
  source 1..20: mol_type = other DNA
tagtcccagctactcaggag

SEQ ID NO: 266786 - DNA, 20 bp, synthetic construct
  source 1..20: mol_type = other DNA
gtagtcccagctactcagga

SEQ ID NO: 266787 - DNA, 20 bp, synthetic construct
  source 1..20: mol_type = other DNA
tgtagtcccagctactcagg

SEQ ID NO: 266788 - DNA, 20 bp, synthetic construct
  source 1..20: mol_type = other DNA
ctgtagtcccagctactcag

SEQ ID NO: 266789 - DNA, 20 bp, synthetic construct
  source 1..20: mol_type = other DNA
cctgtagtcccagctactca

SEQ ID NO: 266790 - DNA, 20 bp, synthetic construct
  source 1..20: mol_type = other DNA
gcctgtagtcccagctactc

SEQ ID NO: 266791 - DNA, 20 bp, synthetic construct
  source 1..20: mol_type = other DNA
tgcctgtagtcccagctact

SEQ ID NO: 266792 - DNA, 20 bp, synthetic construct
  source 1..20: mol_type = other DNA
gtgcctgtagtcccagctac

SEQ ID NO: 266793 - DNA, 20 bp, synthetic construct
  source 1..20: mol_type = other DNA
tgtgcctgtagtcccagcta

SEQ ID NO: 266794 - DNA, 20 bp, synthetic construct
  source 1..20: mol_type = other DNA
ctgtgcctgtagtcccagct

SEQ ID NO: 266795 - DNA, 20 bp, synthetic construct
  source 1..20: mol_type = other DNA
cctgtgcctgtagtcccagc

SEQ ID NO: 266796 - DNA, 20 bp, synthetic construct
  source 1..20: mol_type = other DNA
gcctgtgcctgtagtcccag

SEQ ID NO: 266797 - DNA, 20 bp, synthetic construct
  source 1..20: mol_type = other DNA
ggcctgtgcctgtagtccca

SEQ ID NO: 266798 - DNA, 20 bp, synthetic construct
  source 1..20: mol_type = other DNA
tggcctgtgcctgtagtccc

SEQ ID NO: 266799 - DNA, 20 bp, synthetic construct
  source 1..20: mol_type = other DNA
gtggcctgtgcctgtagtcc

SEQ ID NO: 266800 - DNA, 20 bp, synthetic construct
  source 1..20: mol_type = other DNA
ggtggcctgtgcctgtagtc

SEQ ID NO: 266801 - DNA, 20 bp, synthetic construct
  source 1..20: mol_type = other DNA
tggtggcctgtgcctgtagt

SEQ ID NO: 266802 - DNA, 20 bp, synthetic construct
  source 1..20: mol_type = other DNA
gtggtggcctgtgcctgtag

SEQ ID NO: 266803 - DNA, 20 bp, synthetic construct
  source 1..20: mol_type = other DNA
cgtggtggcctgtgcctgta

SEQ ID NO: 266804 - DNA, 20 bp, synthetic construct
  source 1..20: mol_type = other DNA
gcgtggtggcctgtgcctgt

SEQ ID NO: 266805 - DNA, 20 bp, synthetic construct
  source 1..20: mol_type = other DNA
ggcgtggtggcctgtgcctg

SEQ ID NO: 266806 - DNA, 20 bp, synthetic construct
  source 1..20: mol_type = other DNA
gggcgtggtggcctgtgcct

SEQ ID NO: 266807 - DNA, 20 bp, synthetic construct
  source 1..20: mol_type = other DNA
agggcgtggtggcctgtgcc

SEQ ID NO: 266808 - DNA, 20 bp, synthetic construct
  source 1..20: mol_type = other DNA
cagggcgtggtggcctgtgc

SEQ ID NO: 266809 - DNA, 20 bp, synthetic construct
  source 1..20: mol_type = other DNA
gcagggcgtggtggcctgtg

SEQ ID NO: 266810 - DNA, 20 bp, synthetic construct
  source 1..20: mol_type = other DNA
agcagggcgtggtggcctgt

SEQ ID NO: 266811 - DNA, 20 bp, synthetic construct
  source 1..20: mol_type = other DNA
tagcagggcgtggtggcctg

SEQ ID NO: 266812 - DNA, 20 bp, synthetic construct
  source 1..20: mol_type = other DNA
ttagcagggcgtggtggcct

SEQ ID NO: 266813 - DNA, 20 bp, synthetic construct
  source 1..20: mol_type = other DNA
attagcagggcgtggtggcc

SEQ ID NO: 266814 - DNA, 20 bp, synthetic construct
  source 1..20: mol_type = other DNA
aattagcagggcgtggtggc

SEQ ID NO: 266815 - DNA, 20 bp, synthetic construct
  source 1..20: mol_type = other DNA
aaattagcagggcgtggtgg

SEQ ID NO: 266816 - DNA, 20 bp, synthetic construct
  source 1..20: mol_type = other DNA
aaaattagcagggcgtggtg

SEQ ID NO: 266817 - DNA, 20 bp, synthetic construct
  source 1..20: mol_type = other DNA
aaaaattagcagggcgtggt

SEQ ID NO: 266818 - DNA, 20 bp, synthetic construct
  source 1..20: mol_type = other DNA
caaaaattagcagggcgtgg

SEQ ID NO: 266819 - DNA, 20 bp, synthetic construct
  source 1..20: mol_type = other DNA
acaaaaattagcagggcgtg

SEQ ID NO: 266820 - DNA, 20 bp, synthetic construct
  source 1..20: mol_type = other DNA
tacaaaaattagcagggcgt

SEQ ID NO: 266821 - DNA, 20 bp, synthetic construct
  source 1..20: mol_type = other DNA
atacaaaaattagcagggcg

SEQ ID NO: 266822 - DNA, 20 bp, synthetic construct
  source 1..20: mol_type = other DNA
aatacaaaaattagcagggc

SEQ ID NO: 266823 - DNA, 20 bp, synthetic construct
  source 1..20: mol_type = other DNA
aaatacaaaaattagcaggg

SEQ ID NO: 266824 - DNA, 20 bp, synthetic construct
  source 1..20: mol_type = other DNA
aaaatacaaaaattagcagg

SEQ ID NO: 266825 - DNA, 20 bp, synthetic construct
  source 1..20: mol_type = other DNA
aaaaatacaaaaattagcag

SEQ ID NO: 266826 - DNA, 20 bp, synthetic construct
  source 1..20: mol_type = other DNA
taaaaatacaaaaattagca

SEQ ID NO: 266827 - DNA, 20 bp, synthetic construct
  source 1..20: mol_type = other DNA
ctaaaaatacaaaaattagc

SEQ ID NO: 266828 - DNA, 20 bp, synthetic construct
  source 1..20: mol_type = other DNA
actaaaaatacaaaaattag

SEQ ID NO: 266829 - DNA, 20 bp, synthetic construct
  source 1..20: mol_type = other DNA
tactaaaaatacaaaaatta

SEQ ID NO: 266830 - DNA, 20 bp, synthetic construct
  source 1..20: mol_type = other DNA
ttactaaaaatacaaaaatt

SEQ ID NO: 266831 - DNA, 20 bp, synthetic construct
  source 1..20: mol_type = other DNA
tttactaaaaatacaaaaat

SEQ ID NO: 266832 - DNA, 20 bp, synthetic construct
  source 1..20: mol_type = other DNA
ctttactaaaaatacaaaaa

SEQ ID NO: 266833 - DNA, 20 bp, synthetic construct
  source 1..20: mol_type = other DNA
tctttactaaaaatacaaaa

SEQ ID NO: 266834 - DNA, 20 bp, synthetic construct
  source 1..20: mol_type = other DNA
gtctttactaaaaatacaaa

SEQ ID NO: 266835 - DNA, 20 bp, synthetic construct
  source 1..20: mol_type = other DNA
tgtctttactaaaaatacaa

SEQ ID NO: 266836 - DNA, 20 bp, synthetic construct
  source 1..20: mol_type = other DNA
ctgtctttactaaaaataca

SEQ ID NO: 266837 - DNA, 20 bp, synthetic construct
  source 1..20: mol_type = other DNA
cctgtctttactaaaaatac

SEQ ID NO: 266838 - DNA, 20 bp, synthetic construct
  source 1..20: mol_type = other DNA
ccctgtctttactaaaaata

SEQ ID NO: 266839 - DNA, 20 bp, synthetic construct
  source 1..20: mol_type = other DNA
accctgtctttactaaaaat

SEQ ID NO: 266840 - DNA, 20 bp, synthetic construct
  source 1..20: mol_type = other DNA
aaccctgtctttactaaaaa

SEQ ID NO: 266841 - DNA, 20 bp, synthetic construct
  source 1..20: mol_type = other DNA
aaaccctgtctttactaaaa

SEQ ID NO: 266842 - DNA, 20 bp, synthetic construct
  source 1..20: mol_type = other DNA
gaaaccctgtctttactaaa

SEQ ID NO: 266843 - DNA, 20 bp, synthetic construct
  source 1..20: mol_type = other DNA
tgaaaccctgtctttactaa

SEQ ID NO: 266844 - DNA, 20 bp, synthetic construct
  source 1..20: mol_type = other DNA
gtgaaaccctgtctttacta

SEQ ID NO: 266845 - DNA, 20 bp, synthetic construct
  source 1..20: mol_type = other DNA
ggtgaaaccctgtctttact

SEQ ID NO: 266846 - DNA, 20 bp, synthetic construct
  source 1..20: mol_type = other DNA
tggtgaaaccctgtctttac

SEQ ID NO: 266847 - DNA, 20 bp, synthetic construct
  source 1..20: mol_type = other DNA
atggtgaaaccctgtcttta

SEQ ID NO: 266848 - DNA, 20 bp, synthetic construct
  source 1..20: mol_type = other DNA
aatggtgaaaccctgtcttt

SEQ ID NO: 266849 - DNA, 20 bp, synthetic construct
  source 1..20: mol_type = other DNA
aaatggtgaaaccctgtctt

SEQ ID NO: 266850 - DNA, 20 bp, synthetic construct
  source 1..20: mol_type = other DNA
aaaatggtgaaaccctgtct

SEQ ID NO: 266851 - DNA, 20 bp, synthetic construct
  source 1..20: mol_type = other DNA
caaaatggtgaaaccctgtc

SEQ ID NO: 266852 - DNA, 20 bp, synthetic construct
  source 1..20: mol_type = other DNA
ccaaaatggtgaaaccctgt

SEQ ID NO: 266853 - DNA, 20 bp, synthetic construct
  source 1..20: mol_type = other DNA
gccaaaatggtgaaaccctg

SEQ ID NO: 266854 - DNA, 20 bp, synthetic construct
  source 1..20: mol_type = other DNA
ggccaaaatggtgaaaccct

SEQ ID NO: 266855 - DNA, 20 bp, synthetic construct
  source 1..20: mol_type = other DNA
tggccaaaatggtgaaaccc

SEQ ID NO: 266856 - DNA, 20 bp, synthetic construct
  source 1..20: mol_type = other DNA
ctggccaaaatggtgaaacc

SEQ ID NO: 266857 - DNA, 20 bp, synthetic construct
  source 1..20: mol_type = other DNA
gctggccaaaatggtgaaac

SEQ ID NO: 266858 - DNA, 20 bp, synthetic construct
  source 1..20: mol_type = other DNA
ggctggccaaaatggtgaaa

SEQ ID NO: 266859 - DNA, 20 bp, synthetic construct
  source 1..20: mol_type = other DNA
aggctggccaaaatggtgaa

SEQ ID NO: 266860 - DNA, 20 bp, synthetic construct
  source 1..20: mol_type = other DNA
taggctggccaaaatggtga

SEQ ID NO: 266861 - DNA, 20 bp, synthetic construct
  source 1..20: mol_type = other DNA
ctaggctggccaaaatggtg

SEQ ID NO: 266862 - DNA, 20 bp, synthetic construct
  source 1..20: mol_type = other DNA
actaggctggccaaaatggt

SEQ ID NO: 266863 - DNA, 20 bp, synthetic construct
  source 1..20: mol_type = other DNA
gactaggctggccaaaatgg

SEQ ID NO: 266864 - DNA, 20 bp, synthetic construct
  source 1..20: mol_type = other DNA
agactaggctggccaaaatg

SEQ ID NO: 266865 - DNA, 20 bp, synthetic construct
  source 1..20: mol_type = other DNA
gagactaggctggccaaaat

SEQ ID NO: 266866 - DNA, 20 bp, synthetic construct
  source 1..20: mol_type = other DNA
cgagactaggctggccaaaa

SEQ ID NO: 266867 - DNA, 20 bp, synthetic construct
  source 1..20: mol_type = other DNA
tcgagactaggctggccaaa

SEQ ID NO: 266868 - DNA, 20 bp, synthetic construct
  source 1..20: mol_type = other DNA
ttcgagactaggctggccaa

SEQ ID NO: 266869 - DNA, 20 bp, synthetic construct
  source 1..20: mol_type = other DNA
gttcgagactaggctggcca

SEQ ID NO: 266870 - DNA, 20 bp, synthetic construct
  source 1..20: mol_type = other DNA
agttcgagactaggctggcc

SEQ ID NO: 266871 - DNA, 20 bp, synthetic construct
  source 1..20: mol_type = other DNA
gagttcgagactaggctggc

SEQ ID NO: 266872 - DNA, 20 bp, synthetic construct
  source 1..20: mol_type = other DNA
ggagttcgagactaggctgg

SEQ ID NO: 266873 - DNA, 20 bp, synthetic construct
  source 1..20: mol_type = other DNA
aggagttcgagactaggctg

SEQ ID NO: 266874 - DNA, 20 bp, synthetic construct
  source 1..20: mol_type = other DNA
caggagttcgagactaggct

SEQ ID NO: 266875 - DNA, 20 bp, synthetic construct
  source 1..20: mol_type = other DNA
tcaggagttcgagactaggc

SEQ ID NO: 266876 - DNA, 20 bp, synthetic construct
  source 1..20: mol_type = other DNA
gtcaggagttcgagactagg

SEQ ID NO: 266877 - DNA, 20 bp, synthetic construct
  source 1..20: mol_type = other DNA
ggtcaggagttcgagactag

SEQ ID NO: 266878 - DNA, 20 bp, synthetic construct
  source 1..20: mol_type = other DNA
aggtcaggagttcgagacta

SEQ ID NO: 266879 - DNA, 20 bp, synthetic construct
  source 1..20: mol_type = other DNA
gaggtcaggagttcgagact

SEQ ID NO: 266880 - DNA, 20 bp, synthetic construct
  source 1..20: mol_type = other DNA
tgaggtcaggagttcgagac

SEQ ID NO: 266881 - DNA, 20 bp, synthetic construct
  source 1..20: mol_type = other DNA
ttgaggtcaggagttcgaga

SEQ ID NO: 266882 - DNA, 20 bp, synthetic construct
  source 1..20: mol_type = other DNA
cttgaggtcaggagttcgag

SEQ ID NO: 266883 - DNA, 20 bp, synthetic construct
  source 1..20: mol_type = other DNA
acttgaggtcaggagttcga

SEQ ID NO: 266884 - DNA, 20 bp, synthetic construct
  source 1..20: mol_type = other DNA
cacttgaggtcaggagttcg

SEQ ID NO: 266885 - DNA, 20 bp, synthetic construct
  source 1..20: mol_type = other DNA
tcacttgaggtcaggagttc

SEQ ID NO: 266886 - DNA, 20 bp, synthetic construct
  source 1..20: mol_type = other DNA
atcacttgaggtcaggagtt

SEQ ID NO: 266887 - DNA, 20 bp, synthetic construct
  source 1..20: mol_type = other DNA
gatcacttgaggtcaggagt

SEQ ID NO: 266888 - DNA, 20 bp, synthetic construct
  source 1..20: mol_type = other DNA
ggatcacttgaggtcaggag

SEQ ID NO: 266889 - DNA, 20 bp, synthetic construct
  source 1..20: mol_type = other DNA
cggatcacttgaggtcagga

SEQ ID NO: 266890 - DNA, 20 bp, synthetic construct
  source 1..20: mol_type = other DNA
gcggatcacttgaggtcagg

SEQ ID NO: 266891 - DNA, 20 bp, synthetic construct
  source 1..20: mol_type = other DNA
ggcggatcacttgaggtcag

SEQ ID NO: 266892 - DNA, 20 bp, synthetic construct
  source 1..20: mol_type = other DNA
gggcggatcacttgaggtca

SEQ ID NO: 266893 - DNA, 20 bp, synthetic construct
  source 1..20: mol_type = other DNA
tgggcggatcacttgaggtc

SEQ ID NO: 266894 - DNA, 20 bp, synthetic construct
  source 1..20: mol_type = other DNA
gtgggcggatcacttgaggt

SEQ ID NO: 266895 - DNA, 20 bp, synthetic construct
  source 1..20: mol_type = other DNA
ggtgggcggatcacttgagg

SEQ ID NO: 266896 - DNA, 20 bp, synthetic construct
  source 1..20: mol_type = other DNA
aggtgggcggatcacttgag

SEQ ID NO: 266897 - DNA, 20 bp, synthetic construct
  source 1..20: mol_type = other DNA
gaggtgggcggatcacttga

SEQ ID NO: 266898 - DNA, 20 bp, synthetic construct
  source 1..20: mol_type = other DNA
cgaggtgggcggatcacttg

SEQ ID NO: 266899 - DNA, 20 bp, synthetic construct
  source 1..20: mol_type = other DNA
ccgaggtgggcggatcactt

SEQ ID NO: 266900 - DNA, 20 bp, synthetic construct
  source 1..20: mol_type = other DNA
gccgaggtgggcggatcact

SEQ ID NO: 266901 - DNA, 20 bp, synthetic construct
  source 1..20: mol_type = other DNA
ggccgaggtgggcggatcac

SEQ ID NO: 266902 - DNA, 20 bp, synthetic construct
  source 1..20: mol_type = other DNA
aggccgaggtgggcggatca

SEQ ID NO: 266903 - DNA, 20 bp, synthetic construct
  source 1..20: mol_type = other DNA
gaggccgaggtgggcggatc

SEQ ID NO: 266904 - DNA, 20 bp, synthetic construct
  source 1..20: mol_type = other DNA
ggaggccgaggtgggcggat

SEQ ID NO: 266905 - DNA, 20 bp, synthetic construct
  source 1..20: mol_type = other DNA
gggaggccgaggtgggcgga

SEQ ID NO: 266906 - DNA, 20 bp, synthetic construct
  source 1..20: mol_type = other DNA
tgggaggccgaggtgggcgg

SEQ ID NO: 266907 - DNA, 20 bp, synthetic construct
  source 1..20: mol_type = other DNA
ttgggaggccgaggtgggcg

SEQ ID NO: 266908 - DNA, 20 bp, synthetic construct
  source 1..20: mol_type = other DNA
tttgggaggccgaggtgggc

SEQ ID NO: 266909 - DNA, 20 bp, synthetic construct
  source 1..20: mol_type = other DNA
ctttgggaggccgaggtggg

SEQ ID NO: 266910 - DNA, 20 bp, synthetic construct
  source 1..20: mol_type = other DNA
actttgggaggccgaggtgg

SEQ ID NO: 266911 - DNA, 20 bp, synthetic construct
  source 1..20: mol_type = other DNA
cactttgggaggccgaggtg

SEQ ID NO: 266912 - DNA, 20 bp, synthetic construct
  source 1..20: mol_type = other DNA
gcactttgggaggccgaggt

SEQ ID NO: 266913 - DNA, 20 bp, synthetic construct
  source 1..20: mol_type = other DNA
agcactttgggaggccgagg

SEQ ID NO: 266914 - DNA, 20 bp, synthetic construct
  source 1..20: mol_type = other DNA
cagcactttgggaggccgag

SEQ ID NO: 266915 - DNA, 20 bp, synthetic construct
  source 1..20: mol_type = other DNA
ccagcactttgggaggccga

SEQ ID NO: 266916 - DNA, 20 bp, synthetic construct
  source 1..20: mol_type = other DNA
cccagcactttgggaggccg

SEQ ID NO: 266917 - DNA, 20 bp, synthetic construct
  source 1..20: mol_type = other DNA
tcccagcactttgggaggcc

SEQ ID NO: 266918 - DNA, 20 bp, synthetic construct
  source 1..20: mol_type = other DNA
atcccagcactttgggaggc

SEQ ID NO: 266919 - DNA, 20 bp, synthetic construct
  source 1..20: mol_type = other DNA
aatcccagcactttgggagg

SEQ ID NO: 266920 - DNA, 20 bp, synthetic construct
  source 1..20: mol_type = other DNA
taatcccagcactttgggag

SEQ ID NO: 266921 - DNA, 20 bp, synthetic construct
  source 1..20: mol_type = other DNA
gtaatcccagcactttggga

SEQ ID NO: 266922 - DNA, 20 bp, synthetic construct
  source 1..20: mol_type = other DNA
tgtaatcccagcactttggg

SEQ ID NO: 266923 - DNA, 20 bp, synthetic construct
  source 1..20: mol_type = other DNA
ctgtaatcccagcactttgg

SEQ ID NO: 266924 - DNA, 20 bp, synthetic construct
  source 1..20: mol_type = other DNA
cctgtaatcccagcactttg

SEQ ID NO: 266925 - DNA, 20 bp, synthetic construct
  source 1..20: mol_type = other DNA
ccctgtaatcccagcacttt

SEQ ID NO: 266926 - DNA, 20 bp, synthetic construct
  source 1..20: mol_type = other DNA
cccctgtaatcccagcactt

SEQ ID NO: 266927 - DNA, 20 bp, synthetic construct
  source 1..20: mol_type = other DNA
tcccctgtaatcccagcact

SEQ ID NO: 266928 - DNA, 20 bp, synthetic construct
  source 1..20: mol_type = other DNA
gtcccctgtaatcccagcac

SEQ ID NO: 266929 - DNA, 20 bp, synthetic construct
  source 1..20: mol_type = other DNA
agtcccctgtaatcccagca

SEQ ID NO: 266930 - DNA, 20 bp, synthetic construct
  source 1..20: mol_type = other DNA
gagtcccctgtaatcccagc

SEQ ID NO: 266931 - DNA, 20 bp, synthetic construct
  source 1..20: mol_type = other DNA
tgagtcccctgtaatcccag

SEQ ID NO: 266932 - DNA, 20 bp, synthetic construct
  source 1..20: mol_type = other DNA
gtgagtcccctgtaatccca

SEQ ID NO: 266933 - DNA, 20 bp, synthetic construct
  source 1..20: mol_type = other DNA
tgtgagtcccctgtaatccc

SEQ ID NO: 266934 - DNA, 20 bp, synthetic construct
  source 1..20: mol_type = other DNA
gtgtgagtcccctgtaatcc

SEQ ID NO: 266935 - DNA, 20 bp, synthetic construct
  source 1..20: mol_type = other DNA
agtgtgagtcccctgtaatc

SEQ ID NO: 266936 - DNA, 20 bp, synthetic construct
  source 1..20: mol_type = other DNA
aagtgtgagtcccctgtaat

SEQ ID NO: 266937 - DNA, 20 bp, synthetic construct
  source 1..20: mol_type = other DNA
aaagtgtgagtcccctgtaa

SEQ ID NO: 266938 - DNA, 20 bp, synthetic construct
  source 1..20: mol_type = other DNA
caaagtgtgagtcccctgta

SEQ ID NO: 266939 - DNA, 20 bp, synthetic construct
  source 1..20: mol_type = other DNA
acaaagtgtgagtcccctgt

SEQ ID NO: 266940 - DNA, 20 bp, synthetic construct
  source 1..20: mol_type = other DNA
tacaaagtgtgagtcccctg

SEQ ID NO: 266941 - DNA, 20 bp, synthetic construct
  source 1..20: mol_type = other DNA
ttacaaagtgtgagtcccct

SEQ ID NO: 266942 - DNA, 20 bp, synthetic construct
  source 1..20: mol_type = other DNA
gttacaaagtgtgagtcccc

SEQ ID NO: 266943 - DNA, 20 bp, synthetic construct
  source 1..20: mol_type = other DNA
tgttacaaagtgtgagtccc

SEQ ID NO: 266944 - DNA, 20 bp, synthetic construct
  source 1..20: mol_type = other DNA
ttgttacaaagtgtgagtcc

SEQ ID NO: 266945 - DNA, 20 bp, synthetic construct
  source 1..20: mol_type = other DNA
gttgttacaaagtgtgagtc

SEQ ID NO: 266946 - DNA, 20 bp, synthetic construct
  source 1..20: mol_type = other DNA
ggttgttacaaagtgtgagt

SEQ ID NO: 266947 - DNA, 20 bp, synthetic construct
  source 1..20: mol_type = other DNA
aggttgttacaaagtgtgag

SEQ ID NO: 266948 - DNA, 20 bp, synthetic construct
  source 1..20: mol_type = other DNA
caggttgttacaaagtgtga

SEQ ID NO: 266949 - DNA, 20 bp, synthetic construct
  source 1..20: mol_type = other DNA
tcaggttgttacaaagtgtg

SEQ ID NO: 266950 - DNA, 20 bp, synthetic construct
  source 1..20: mol_type = other DNA
ttcaggttgttacaaagtgt

SEQ ID NO: 266951 - DNA, 20 bp, synthetic construct
  source 1..20: mol_type = other DNA
tttcaggttgttacaaagtg

SEQ ID NO: 266952 - DNA, 20 bp, synthetic construct
  source 1..20: mol_type = other DNA
gtttcaggttgttacaaagt

SEQ ID NO: 266953 - DNA, 20 bp, synthetic construct
  source 1..20: mol_type = other DNA
tgtttcaggttgttacaaag

SEQ ID NO: 266954 - DNA, 20 bp, synthetic construct
  source 1..20: mol_type = other DNA
ttgtttcaggttgttacaaa

SEQ ID NO: 266955 - DNA, 20 bp, synthetic construct
  source 1..20: mol_type = other DNA
gttgtttcaggttgttacaa

SEQ ID NO: 266956 - DNA, 20 bp, synthetic construct
  source 1..20: mol_type = other DNA
cgttgtttcaggttgttaca

SEQ ID NO: 266957 - DNA, 20 bp, synthetic construct
  source 1..20: mol_type = other DNA
acgttgtttcaggttgttac

SEQ ID NO: 266958 - DNA, 20 bp, synthetic construct
  source 1..20: mol_type = other DNA
cacgttgtttcaggttgtta

SEQ ID NO: 266959 - DNA, 20 bp, synthetic construct
  source 1..20: mol_type = other DNA
tcacgttgtttcaggttgtt

SEQ ID NO: 266960 - DNA, 20 bp, synthetic construct
  source 1..20: mol_type = other DNA
atcacgttgtttcaggttgt

SEQ ID NO: 266961 - DNA, 20 bp, synthetic construct
  source 1..20: mol_type = other DNA
catcacgttgtttcaggttg

SEQ ID NO: 266962 - DNA, 20 bp, synthetic construct
  source 1..20: mol_type = other DNA
gcatcacgttgtttcaggtt

SEQ ID NO: 266963 - DNA, 20 bp, synthetic construct
  source 1..20: mol_type = other DNA
tgcatcacgttgtttcaggt

SEQ ID NO: 266964 - DNA, 20 bp, synthetic construct
  source 1..20: mol_type = other DNA
atgcatcacgttgtttcagg

SEQ ID NO: 266965 - DNA, 20 bp, synthetic construct
  source 1..20: mol_type = other DNA
aatgcatcacgttgtttcag

SEQ ID NO: 266966 - DNA, 20 bp, synthetic construct
  source 1..20: mol_type = other DNA
aaatgcatcacgttgtttca

SEQ ID NO: 266967 - DNA, 20 bp, synthetic construct
  source 1..20: mol_type = other DNA
gaaatgcatcacgttgtttc

SEQ ID NO: 266968 - DNA, 20 bp, synthetic construct
  source 1..20: mol_type = other DNA
ggaaatgcatcacgttgttt

SEQ ID NO: 266969 - DNA, 20 bp, synthetic construct
  source 1..20: mol_type = other DNA
gggaaatgcatcacgttgtt

SEQ ID NO: 266970 - DNA, 20 bp, synthetic construct
  source 1..20: mol_type = other DNA
agggaaatgcatcacgttgt

SEQ ID NO: 266971 - DNA, 20 bp, synthetic construct
  source 1..20: mol_type = other DNA
aagggaaatgcatcacgttg

SEQ ID NO: 266972 - DNA, 20 bp, synthetic construct
  source 1..20: mol_type = other DNA
aaagggaaatgcatcacgtt

SEQ ID NO: 266973 - DNA, 20 bp, synthetic construct
  source 1..20: mol_type = other DNA
caaagggaaatgcatcacgt

SEQ ID NO: 266974 - DNA, 20 bp, synthetic construct
  source 1..20: mol_type = other DNA
ccaaagggaaatgcatcacg

SEQ ID NO: 266975 - DNA, 20 bp, synthetic construct
  source 1..20: mol_type = other DNA
cccaaagggaaatgcatcac

SEQ ID NO: 266976 - DNA, 20 bp, synthetic construct
  source 1..20: mol_type = other DNA
acccaaagggaaatgcatca

SEQ ID NO: 266977 - DNA, 20 bp, synthetic construct
  source 1..20: mol_type = other DNA
gacccaaagggaaatgcatc

SEQ ID NO: 266978 - DNA, 20 bp, synthetic construct
  source 1..20: mol_type = other DNA
agacccaaagggaaatgcat

SEQ ID NO: 266979 - DNA, 20 bp, synthetic construct
  source 1..20: mol_type = other DNA
aagacccaaagggaaatgca

SEQ ID NO: 266980 - DNA, 20 bp, synthetic construct
  source 1..20: mol_type = other DNA
taagacccaaagggaaatgc

SEQ ID NO: 266981 - DNA, 20 bp, synthetic construct
  source 1..20: mol_type = other DNA
gtaagacccaaagggaaatg

SEQ ID NO: 266982 - DNA, 20 bp, synthetic construct
  source 1..20: mol_type = other DNA
ggtaagacccaaagggaaat

SEQ ID NO: 266983 - DNA, 20 bp, synthetic construct
  source 1..20: mol_type = other DNA
aggtaagacccaaagggaaa

SEQ ID NO: 266984 - DNA, 20 bp, synthetic construct
  source 1..20: mol_type = other DNA
caggtaagacccaaagggaa

SEQ ID NO: 266985 - DNA, 20 bp, synthetic construct
  source 1..20: mol_type = other DNA
gcaggtaagacccaaaggga

SEQ ID NO: 266986 - DNA, 20 bp, synthetic construct
  source 1..20: mol_type = other DNA
agcaggtaagacccaaaggg

SEQ ID NO: 266987 - DNA, 20 bp, synthetic construct
  source 1..20: mol_type = other DNA
gagcaggtaagacccaaagg

SEQ ID NO: 266988 - DNA, 20 bp, synthetic construct
  source 1..20: mol_type = other DNA
agagcaggtaagacccaaag

SEQ ID NO: 266989 - DNA, 20 bp, synthetic construct
  source 1..20: mol_type = other DNA
aagagcaggtaagacccaaa

SEQ ID NO: 266990 - DNA, 20 bp, synthetic construct
  source 1..20: mol_type = other DNA
gaagagcaggtaagacccaa

SEQ ID NO: 266991 - DNA, 20 bp, synthetic construct
  source 1..20: mol_type = other DNA
cgaagagcaggtaagaccca

SEQ ID NO: 266992 - DNA, 20 bp, synthetic construct
  source 1..20: mol_type = other DNA
ccgaagagcaggtaagaccc

SEQ ID NO: 266993 - DNA, 20 bp, synthetic construct
  source 1..20: mol_type = other DNA
accgaagagcaggtaagacc

SEQ ID NO: 266994 - DNA, 20 bp, synthetic construct
  source 1..20: mol_type = other DNA
caccgaagagcaggtaagac

SEQ ID NO: 266995 - DNA, 20 bp, synthetic construct
  source 1..20: mol_type = other DNA
ccaccgaagagcaggtaaga

SEQ ID NO: 266996 - DNA, 20 bp, synthetic construct
  source 1..20: mol_type = other DNA
gccaccgaagagcaggtaag

SEQ ID NO: 266997 - DNA, 20 bp, synthetic construct
  source 1..20: mol_type = other DNA
agccaccgaagagcaggtaa

SEQ ID NO: 266998 - DNA, 20 bp, synthetic construct
  source 1..20: mol_type = other DNA
cagccaccgaagagcaggta

SEQ ID NO: 266999 - DNA, 20 bp, synthetic construct
  source 1..20: mol_type = other DNA
gcagccaccgaagagcaggt

SEQ ID NO: 267000 - DNA, 20 bp, synthetic construct
  source 1..20: mol_type = other DNA
ggcagccaccgaagagcagg

SEQ ID NO: 267001 - DNA, 20 bp, synthetic construct
  source 1..20: mol_type = other DNA
aggcagccaccgaagagcag

SEQ ID NO: 267002 - DNA, 20 bp, synthetic construct
  source 1..20: mol_type = other DNA
caggcagccaccgaagagca

SEQ ID NO: 267003 - DNA, 20 bp, synthetic construct
  source 1..20: mol_type = other DNA
gcaggcagccaccgaagagc

SEQ ID NO: 267004 - DNA, 20 bp, synthetic construct
  source 1..20: mol_type = other DNA
tgcaggcagccaccgaagag

SEQ ID NO: 267005 - DNA, 20 bp, synthetic construct
  source 1..20: mol_type = other DNA
ctgcaggcagccaccgaaga

SEQ ID NO: 267006 - DNA, 20 bp, synthetic construct
  source 1..20: mol_type = other DNA
cctgcaggcagccaccgaag

SEQ ID NO: 267007 - DNA, 20 bp, synthetic construct
  source 1..20: mol_type = other DNA
acctgcaggcagccaccgaa

SEQ ID NO: 267008 - DNA, 20 bp, synthetic construct
  source 1..20: mol_type = other DNA
cacctgcaggcagccaccga

SEQ ID NO: 267009 - DNA, 20 bp, synthetic construct
  source 1..20: mol_type = other DNA
ccacctgcaggcagccaccg

SEQ ID NO: 267010 - DNA, 20 bp, synthetic construct
  source 1..20: mol_type = other DNA
tccacctgcaggcagccacc

SEQ ID NO: 267011 - DNA, 20 bp, synthetic construct
  source 1..20: mol_type = other DNA
ctccacctgcaggcagccac

SEQ ID NO: 267012 - DNA, 20 bp, synthetic construct
  source 1..20: mol_type = other DNA
tctccacctgcaggcagcca

SEQ ID NO: 267013 - DNA, 20 bp, synthetic construct
  source 1..20: mol_type = other DNA
ctctccacctgcaggcagcc

SEQ ID NO: 267014 - DNA, 20 bp, synthetic construct
  source 1..20: mol_type = other DNA
tctctccacctgcaggcagc

SEQ ID NO: 267015 - DNA, 20 bp, synthetic construct
  source 1..20: mol_type = other DNA
gtctctccacctgcaggcag

SEQ ID NO: 267016 - DNA, 20 bp, synthetic construct
  source 1..20: mol_type = other DNA
ggtctctccacctgcaggca

SEQ ID NO: 267017 - DNA, 20 bp, synthetic construct
  source 1..20: mol_type = other DNA
gggtctctccacctgcaggc

SEQ ID NO: 267018 - DNA, 20 bp, synthetic construct
  source 1..20: mol_type = other DNA
agggtctctccacctgcagg

SEQ ID NO: 267019 - DNA, 20 bp, synthetic construct
  source 1..20: mol_type = other DNA
gagggtctctccacctgcag

SEQ ID NO: 267020 - DNA, 20 bp, synthetic construct
  source 1..20: mol_type = other DNA
ggagggtctctccacctgca

SEQ ID NO: 267021 - DNA, 20 bp, synthetic construct
  source 1..20: mol_type = other DNA
gggagggtctctccacctgc

SEQ ID NO: 267022 - DNA, 20 bp, synthetic construct
  source 1..20: mol_type = other DNA
ggggagggtctctccacctg

SEQ ID NO: 267023 - DNA, 20 bp, synthetic construct
  source 1..20: mol_type = other DNA
gggggagggtctctccacct

SEQ ID NO: 267024 - DNA, 20 bp, synthetic construct
  source 1..20: mol_type = other DNA
agggggagggtctctccacc

SEQ ID NO: 267025 - DNA, 20 bp, synthetic construct
  source 1..20: mol_type = other DNA
aagggggagggtctctccac

SEQ ID NO: 267026 - DNA, 20 bp, synthetic construct
  source 1..20: mol_type = other DNA
caagggggagggtctctcca

SEQ ID NO: 267027 - DNA, 20 bp, synthetic construct
  source 1..20: mol_type = other DNA
ccaagggggagggtctctcc

SEQ ID NO: 267028 - DNA, 20 bp, synthetic construct
  source 1..20: mol_type = other DNA
cccaagggggagggtctctc

SEQ ID NO: 267029 - DNA, 20 bp, synthetic construct
  source 1..20: mol_type = other DNA
gcccaagggggagggtctct

SEQ ID NO: 267030 - DNA, 20 bp, synthetic construct
  source 1..20: mol_type = other DNA
ggcccaagggggagggtctc

SEQ ID NO: 267031 - DNA, 20 bp, synthetic construct
  source 1..20: mol_type = other DNA
gggcccaagggggagggtct

SEQ ID NO: 267032 - DNA, 20 bp, synthetic construct
  source 1..20: mol_type = other DNA
ggggcccaagggggagggtc

SEQ ID NO: 267033 - DNA, 20 bp, synthetic construct
  source 1..20: mol_type = other DNA
aggggcccaagggggagggt

SEQ ID NO: 267034 - DNA, 20 bp, synthetic construct
  source 1..20: mol_type = other DNA
gaggggcccaagggggaggg

SEQ ID NO: 267035 - DNA, 20 bp, synthetic construct
  source 1..20: mol_type = other DNA
cgaggggcccaagggggagg

SEQ ID NO: 267036 - DNA, 20 bp, synthetic construct
  source 1..20: mol_type = other DNA
tcgaggggcccaagggggag

SEQ ID NO: 267037 - DNA, 20 bp, synthetic construct
  source 1..20: mol_type = other DNA
gtcgaggggcccaaggggga

SEQ ID NO: 267038 - DNA, 20 bp, synthetic construct
  source 1..20: mol_type = other DNA
ggtcgaggggcccaaggggg

SEQ ID NO: 267039 - DNA, 20 bp, synthetic construct
  source 1..20: mol_type = other DNA
aggtcgaggggcccaagggg

SEQ ID NO: 267040 - DNA, 20 bp, synthetic construct
  source 1..20: mol_type = other DNA
aaggtcgaggggcccaaggg

SEQ ID NO: 267041 - DNA, 20 bp, synthetic construct
  source 1..20: mol_type = other DNA
caaggtcgaggggcccaagg

SEQ ID NO: 267042 - DNA, 20 bp, synthetic construct
  source 1..20: mol_type = other DNA
acaaggtcgaggggcccaag

SEQ ID NO: 267043 - DNA, 20 bp, synthetic construct
  source 1..20: mol_type = other DNA
aacaaggtcgaggggcccaa

SEQ ID NO: 267044 - DNA, 20 bp, synthetic construct
  source 1..20: mol_type = other DNA
aaacaaggtcgaggggccca

SEQ ID NO: 267045 - DNA, 20 bp, synthetic construct
  source 1..20: mol_type = other DNA
gaaacaaggtcgaggggccc

SEQ ID NO: 267046 - DNA, 20 bp, synthetic construct
  source 1..20: mol_type = other DNA
tgaaacaaggtcgaggggcc

SEQ ID NO: 267047 - DNA, 20 bp, synthetic construct
  source 1..20: mol_type = other DNA
ctgaaacaaggtcgaggggc

SEQ ID NO: 267048 - DNA, 20 bp, synthetic construct
  source 1..20: mol_type = other DNA
tctgaaacaaggtcgagggg

SEQ ID NO: 267049 - DNA, 20 bp, synthetic construct
  source 1..20: mol_type = other DNA
ttctgaaacaaggtcgaggg

SEQ ID NO: 267050 - DNA, 20 bp, synthetic construct
  source 1..20: mol_type = other DNA
attctgaaacaaggtcgagg

SEQ ID NO: 267051 - DNA, 20 bp, synthetic construct
  source 1..20: mol_type = other DNA
cattctgaaacaaggtcgag

SEQ ID NO: 267052 - DNA, 20 bp, synthetic construct
  source 1..20: mol_type = other DNA
ccattctgaaacaaggtcga

SEQ ID NO: 267053 - DNA, 20 bp, synthetic construct
  source 1..20: mol_type = other DNA
cccattctgaaacaaggtcg

SEQ ID NO: 267054 - DNA, 20 bp, synthetic construct
  source 1..20: mol_type = other DNA
ccccattctgaaacaaggtc

SEQ ID NO: 267055 - DNA, 20 bp, synthetic construct
  source 1..20: mol_type = other DNA
gccccattctgaaacaaggt

SEQ ID NO: 267056 - DNA, 20 bp, synthetic construct
  source 1..20: mol_type = other DNA
ggccccattctgaaacaagg

SEQ ID NO: 267057 - DNA, 20 bp, synthetic construct
  source 1..20: mol_type = other DNA
gggccccattctgaaacaag

SEQ ID NO: 267058 - DNA, 20 bp, synthetic construct
  source 1..20: mol_type = other DNA
ggggccccattctgaaacaa

SEQ ID NO: 267059 - DNA, 20 bp, synthetic construct
  source 1..20: mol_type = other DNA
aggggccccattctgaaaca

SEQ ID NO: 267060 - DNA, 20 bp, synthetic construct
  source 1..20: mol_type = other DNA
caggggccccattctgaaac

SEQ ID NO: 267061 - DNA, 20 bp, synthetic construct
  source 1..20: mol_type = other DNA
gcaggggccccattctgaaa

SEQ ID NO: 267062 - DNA, 20 bp, synthetic construct
  source 1..20: mol_type = other DNA
agcaggggccccattctgaa

SEQ ID NO: 267063 - DNA, 20 bp, synthetic construct
  source 1..20: mol_type = other DNA
cagcaggggccccattctga

SEQ ID NO: 267064 - DNA, 20 bp, synthetic construct
  source 1..20: mol_type = other DNA
ccagcaggggccccattctg

SEQ ID NO: 267065 - DNA, 20 bp, synthetic construct
  source 1..20: mol_type = other DNA
cccagcaggggccccattct

SEQ ID NO: 267066 - DNA, 20 bp, synthetic construct
  source 1..20: mol_type = other DNA
gcccagcaggggccccattc

SEQ ID NO: 267067 - DNA, 20 bp, synthetic construct
  source 1..20: mol_type = other DNA
ggcccagcaggggccccatt

SEQ ID NO: 267068 - DNA, 20 bp, synthetic construct
  source 1..20: mol_type = other DNA
tggcccagcaggggccccat

SEQ ID NO: 267069 - DNA, 20 bp, synthetic construct
  source 1..20: mol_type = other DNA
ctggcccagcaggggcccca

SEQ ID NO: 267070 - DNA, 20 bp, synthetic construct
  source 1..20: mol_type = other DNA
gctggcccagcaggggcccc

SEQ ID NO: 267071 - DNA, 20 bp, synthetic construct
  source 1..20: mol_type = other DNA
agctggcccagcaggggccc

SEQ ID NO: 267072 - DNA, 20 bp, synthetic construct
  source 1..20: mol_type = other DNA
cagctggcccagcaggggcc

SEQ ID NO: 267073 - DNA, 20 bp, synthetic construct
  source 1..20: mol_type = other DNA
acagctggcccagcaggggc

SEQ ID NO: 267074 - DNA, 20 bp, synthetic construct
  source 1..20: mol_type = other DNA
cacagctggcccagcagggg

SEQ ID NO: 267075 - DNA, 20 bp, synthetic construct
  source 1..20: mol_type = other DNA
ccacagctggcccagcaggg

SEQ ID NO: 267076 - DNA, 20 bp, synthetic construct
  source 1..20: mol_type = other DNA
cccacagctggcccagcagg

SEQ ID NO: 267077 - DNA, 20 bp, synthetic construct
  source 1..20: mol_type = other DNA
acccacagctggcccagcag

SEQ ID NO: 267078 - DNA, 20 bp, synthetic construct
  source 1..20: mol_type = other DNA
cacccacagctggcccagca

SEQ ID NO: 267079 - DNA, 20 bp, synthetic construct
  source 1..20: mol_type = other DNA
gcacccacagctggcccagc

SEQ ID NO: 267080 - DNA, 20 bp, synthetic construct
  source 1..20: mol_type = other DNA
ggcacccacagctggcccag

SEQ ID NO: 267081 - DNA, 20 bp, synthetic construct
  source 1..20: mol_type = other DNA
aggcacccacagctggccca

SEQ ID NO: 267082 - DNA, 20 bp, synthetic construct
  source 1..20: mol_type = other DNA
caggcacccacagctggccc

SEQ ID NO: 267083 - DNA, 20 bp, synthetic construct
  source 1..20: mol_type = other DNA
gcaggcacccacagctggcc

SEQ ID NO: 267084 - DNA, 20 bp, synthetic construct
  source 1..20: mol_type = other DNA
ggcaggcacccacagctggc

SEQ ID NO: 267085 - DNA, 20 bp, synthetic construct
  source 1..20: mol_type = other DNA
tggcaggcacccacagctgg

SEQ ID NO: 267086 - DNA, 20 bp, synthetic construct
  source 1..20: mol_type = other DNA
gtggcaggcacccacagctg

SEQ ID NO: 267087 - DNA, 20 bp, synthetic construct
  source 1..20: mol_type = other DNA
cgtggcaggcacccacagct

SEQ ID NO: 267088 - DNA, 20 bp, synthetic construct
  source 1..20: mol_type = other DNA
acgtggcaggcacccacagc

SEQ ID NO: 267089 - DNA, 20 bp, synthetic construct
  source 1..20: mol_type = other DNA
cacgtggcaggcacccacag

SEQ ID NO: 267090 - DNA, 20 bp, synthetic construct
  source 1..20: mol_type = other DNA
tcacgtggcaggcacccaca

SEQ ID NO: 267091 - DNA, 20 bp, synthetic construct
  source 1..20: mol_type = other DNA
ttcacgtggcaggcacccac

SEQ ID NO: 267092 - DNA, 20 bp, synthetic construct
  source 1..20: mol_type = other DNA
cttcacgtggcaggcaccca

SEQ ID NO: 267093 - DNA, 20 bp, synthetic construct
  source 1..20: mol_type = other DNA
ccttcacgtggcaggcaccc

SEQ ID NO: 267094 - DNA, 20 bp, synthetic construct
  source 1..20: mol_type = other DNA
tccttcacgtggcaggcacc

SEQ ID NO: 267095 - DNA, 20 bp, synthetic construct
  source 1..20: mol_type = other DNA
gtccttcacgtggcaggcac

SEQ ID NO: 267096 - DNA, 20 bp, synthetic construct
  source 1..20: mol_type = other DNA
agtccttcacgtggcaggca

SEQ ID NO: 267097 - DNA, 20 bp, synthetic construct
  source 1..20: mol_type = other DNA
gagtccttcacgtggcaggc

SEQ ID NO: 267098 - DNA, 20 bp, synthetic construct
  source 1..20: mol_type = other DNA
tgagtccttcacgtggcagg

SEQ ID NO: 267099 - DNA, 20 bp, synthetic construct
  source 1..20: mol_type = other DNA
atgagtccttcacgtggcag

SEQ ID NO: 267100 - DNA, 20 bp, synthetic construct
  source 1..20: mol_type = other DNA
aatgagtccttcacgtggca

SEQ ID NO: 267101 - DNA, 20 bp, synthetic construct
  source 1..20: mol_type = other DNA
taatgagtccttcacgtggc

SEQ ID NO: 267102 - DNA, 20 bp, synthetic construct
  source 1..20: mol_type = other DNA
ttaatgagtccttcacgtgg

SEQ ID NO: 267103 - DNA, 20 bp, synthetic construct
  source 1..20: mol_type = other DNA
cttaatgagtccttcacgtg

SEQ ID NO: 267104 - DNA, 20 bp, synthetic construct
  source 1..20: mol_type = other DNA
ccttaatgagtccttcacgt

SEQ ID NO: 267105 - DNA, 20 bp, synthetic construct
  source 1..20: mol_type = other DNA
gccttaatgagtccttcacg

SEQ ID NO: 267106 - DNA, 20 bp, synthetic construct
  source 1..20: mol_type = other DNA
ggccttaatgagtccttcac

SEQ ID NO: 267107 - DNA, 20 bp, synthetic construct
  source 1..20: mol_type = other DNA
gggccttaatgagtccttca

SEQ ID NO: 267108 - DNA, 20 bp, synthetic construct
  source 1..20: mol_type = other DNA
agggccttaatgagtccttc

SEQ ID NO: 267109 - DNA, 20 bp, synthetic construct
  source 1..20: mol_type = other DNA
cagggccttaatgagtcctt

SEQ ID NO: 267110 - DNA, 20 bp, synthetic construct
  source 1..20: mol_type = other DNA
acagggccttaatgagtcct

SEQ ID NO: 267111 - DNA, 20 bp, synthetic construct
  source 1..20: mol_type = other DNA
aacagggccttaatgagtcc

SEQ ID NO: 267112 - DNA, 20 bp, synthetic construct
  source 1..20: mol_type = other DNA
aaacagggccttaatgagtc

SEQ ID NO: 267113 - DNA, 20 bp, synthetic construct
  source 1..20: mol_type = other DNA
taaacagggccttaatgagt

SEQ ID NO: 267114 - DNA, 20 bp, synthetic construct
  source 1..20: mol_type = other DNA
ttaaacagggccttaatgag

SEQ ID NO: 267115 - DNA, 20 bp, synthetic construct
  source 1..20: mol_type = other DNA
cttaaacagggccttaatga

SEQ ID NO: 267116 - DNA, 20 bp, synthetic construct
  source 1..20: mol_type = other DNA
gcttaaacagggccttaatg

SEQ ID NO: 267117 - DNA, 20 bp, synthetic construct
  source 1..20: mol_type = other DNA
ggcttaaacagggccttaat

SEQ ID NO: 267118 - DNA, 20 bp, synthetic construct
  source 1..20: mol_type = other DNA
aggcttaaacagggccttaa

SEQ ID NO: 267119 - DNA, 20 bp, synthetic construct
  source 1..20: mol_type = other DNA
caggcttaaacagggcctta

SEQ ID NO: 267120 - DNA, 20 bp, synthetic construct
  source 1..20: mol_type = other DNA
tcaggcttaaacagggcctt

SEQ ID NO: 267121 - DNA, 20 bp, synthetic construct
  source 1..20: mol_type = other DNA
atcaggcttaaacagggcct

SEQ ID NO: 267122 - DNA, 20 bp, synthetic construct
  source 1..20: mol_type = other DNA
catcaggcttaaacagggcc

SEQ ID NO: 267123 - DNA, 20 bp, synthetic construct
  source 1..20: mol_type = other DNA
tcatcaggcttaaacagggc

SEQ ID NO: 267124 - DNA, 20 bp, synthetic construct
  source 1..20: mol_type = other DNA
atcatcaggcttaaacaggg

SEQ ID NO: 267125 - DNA, 20 bp, synthetic construct
  source 1..20: mol_type = other DNA
tatcatcaggcttaaacagg

SEQ ID NO: 267126 - DNA, 20 bp, synthetic construct
  source 1..20: mol_type = other DNA
ttatcatcaggcttaaacag

SEQ ID NO: 267127 - DNA, 20 bp, synthetic construct
  source 1..20: mol_type = other DNA
attatcatcaggcttaaaca

SEQ ID NO: 267128 - DNA, 20 bp, synthetic construct
  source 1..20: mol_type = other DNA
tattatcatcaggcttaaac

SEQ ID NO: 267129 - DNA, 20 bp, synthetic construct
  source 1..20: mol_type = other DNA
ttattatcatcaggcttaaa

SEQ ID NO: 267130 - DNA, 20 bp, synthetic construct
  source 1..20: mol_type = other DNA
cttattatcatcaggcttaa

SEQ ID NO: 267131 - DNA, 20 bp, synthetic construct
  source 1..20: mol_type = other DNA
ccttattatcatcaggctta

SEQ ID NO: 267132 - DNA, 20 bp, synthetic construct
  source 1..20: mol_type = other DNA
gccttattatcatcaggctt

SEQ ID NO: 267133 - DNA, 20 bp, synthetic construct
  source 1..20: mol_type = other DNA
agccttattatcatcaggct

SEQ ID NO: 267134 - DNA, 20 bp, synthetic construct
  source 1..20: mol_type = other DNA
aagccttattatcatcaggc

SEQ ID NO: 267135 - DNA, 20 bp, synthetic construct
  source 1..20: mol_type = other DNA
aaagccttattatcatcagg

SEQ ID NO: 267136 - DNA, 20 bp, synthetic construct
  source 1..20: mol_type = other DNA
gaaagccttattatcatcag

SEQ ID NO: 267137 - DNA, 20 bp, synthetic construct
  source 1..20: mol_type = other DNA
cgaaagccttattatcatca

SEQ ID NO: 267138 - DNA, 20 bp, synthetic construct
  source 1..20: mol_type = other DNA
acgaaagccttattatcatc

SEQ ID NO: 267139 - DNA, 20 bp, synthetic construct
  source 1..20: mol_type = other DNA
cacgaaagccttattatcat

SEQ ID NO: 267140 - DNA, 20 bp, synthetic construct
  source 1..20: mol_type = other DNA
ccacgaaagccttattatca

SEQ ID NO: 267141 - DNA, 20 bp, synthetic construct
  source 1..20: mol_type = other DNA
tccacgaaagccttattatc

SEQ ID NO: 267142 - DNA, 20 bp, synthetic construct
  source 1..20: mol_type = other DNA
atccacgaaagccttattat

SEQ ID NO: 267143 - DNA, 20 bp, synthetic construct
  source 1..20: mol_type = other DNA
aatccacgaaagccttatta

SEQ ID NO: 267144 - DNA, 20 bp, synthetic construct
  source 1..20: mol_type = other DNA
aaatccacgaaagccttatt

SEQ ID NO: 267145 - DNA, 20 bp, synthetic construct
  source 1..20: mol_type = other DNA
aaaatccacgaaagccttat

SEQ ID NO: 267146 - DNA, 20 bp, synthetic construct
  source 1..20: mol_type = other DNA
aaaaatccacgaaagcctta

SEQ ID NO: 267147 - DNA, 20 bp, synthetic construct
  source 1..20: mol_type = other DNA
gaaaaatccacgaaagcctt

SEQ ID NO: 267148 - DNA, 20 bp, synthetic construct
  source 1..20: mol_type = other DNA
agaaaaatccacgaaagcct

SEQ ID NO: 267149 - DNA, 20 bp, synthetic construct
  source 1..20: mol_type = other DNA
gagaaaaatccacgaaagcc

SEQ ID NO: 267150 - DNA, 20 bp, synthetic construct
  source 1..20: mol_type = other DNA
agagaaaaatccacgaaagc

SEQ ID NO: 267151 - DNA, 20 bp, synthetic construct
  source 1..20: mol_type = other DNA
aagagaaaaatccacgaaag

SEQ ID NO: 267152 - DNA, 20 bp, synthetic construct
  source 1..20: mol_type = other DNA
aaagagaaaaatccacgaaa

SEQ ID NO: 267153 - DNA, 20 bp, synthetic construct
  source 1..20: mol_type = other DNA
taaagagaaaaatccacgaa

SEQ ID NO: 267154 - DNA, 20 bp, synthetic construct
  source 1..20: mol_type = other DNA
ttaaagagaaaaatccacga

SEQ ID NO: 267155 - DNA, 20 bp, synthetic construct
  source 1..20: mol_type = other DNA
cttaaagagaaaaatccacg

SEQ ID NO: 267156 - DNA, 20 bp, synthetic construct
  source 1..20: mol_type = other DNA
gcttaaagagaaaaatccac

SEQ ID NO: 267157 - DNA, 20 bp, synthetic construct
  source 1..20: mol_type = other DNA
cgcttaaagagaaaaatcca

SEQ ID NO: 267158 - DNA, 20 bp, synthetic construct
  source 1..20: mol_type = other DNA
tcgcttaaagagaaaaatcc

SEQ ID NO: 267159 - DNA, 20 bp, synthetic construct
  source 1..20: mol_type = other DNA
gtcgcttaaagagaaaaatc

SEQ ID NO: 267160 - DNA, 20 bp, synthetic construct
  source 1..20: mol_type = other DNA
agtcgcttaaagagaaaaat

SEQ ID NO: 267161 - DNA, 20 bp, synthetic construct
  source 1..20: mol_type = other DNA
tagtcgcttaaagagaaaaa

SEQ ID NO: 267162 - DNA, 20 bp, synthetic construct
  source 1..20: mol_type = other DNA
ttagtcgcttaaagagaaaa

SEQ ID NO: 267163 - DNA, 20 bp, synthetic construct
  source 1..20: mol_type = other DNA
cttagtcgcttaaagagaaa

SEQ ID NO: 267164 - DNA, 20 bp, synthetic construct
  source 1..20: mol_type = other DNA
gcttagtcgcttaaagagaa

SEQ ID NO: 267165 - DNA, 20 bp, synthetic construct
  source 1..20: mol_type = other DNA
tgcttagtcgcttaaagaga

SEQ ID NO: 267166 - DNA, 20 bp, synthetic construct
  source 1..20: mol_type = other DNA
ttgcttagtcgcttaaagag

SEQ ID NO: 267167 - DNA, 20 bp, synthetic construct
  source 1..20: mol_type = other DNA
cttgcttagtcgcttaaaga

SEQ ID NO: 267168 - DNA, 20 bp, synthetic construct
  source 1..20: mol_type = other DNA
acttgcttagtcgcttaaag

SEQ ID NO: 267169 - DNA, 20 bp, synthetic construct
  source 1..20: mol_type = other DNA
gacttgcttagtcgcttaaa

SEQ ID NO: 267170 - DNA, 20 bp, synthetic construct
  source 1..20: mol_type = other DNA
ggacttgcttagtcgcttaa

SEQ ID NO: 267171 - DNA, 20 bp, synthetic construct
  source 1..20: mol_type = other DNA
tggacttgcttagtcgctta

SEQ ID NO: 267172 - DNA, 20 bp, synthetic construct
  source 1..20: mol_type = other DNA
ctggacttgcttagtcgctt

SEQ ID NO: 267173 - DNA, 20 bp, synthetic construct
  source 1..20: mol_type = other DNA
tctggacttgcttagtcgct

SEQ ID NO: 267174 - DNA, 20 bp, synthetic construct
  source 1..20: mol_type = other DNA
ctctggacttgcttagtcgc

SEQ ID NO: 267175 - DNA, 20 bp, synthetic construct
  source 1..20: mol_type = other DNA
tctctggacttgcttagtcg

SEQ ID NO: 267176 - DNA, 20 bp, synthetic construct
  source 1..20: mol_type = other DNA
ttctctggacttgcttagtc

SEQ ID NO: 267177 - DNA, 20 bp, synthetic construct
  source 1..20: mol_type = other DNA
cttctctggacttgcttagt

SEQ ID NO: 267178 - DNA, 20 bp, synthetic construct
  source 1..20: mol_type = other DNA
tcttctctggacttgcttag

SEQ ID NO: 267179 - DNA, 20 bp, synthetic construct
  source 1..20: mol_type = other DNA
gtcttctctggacttgctta

SEQ ID NO: 267180 - DNA, 20 bp, synthetic construct
  source 1..20: mol_type = other DNA
ggtcttctctggacttgctt

SEQ ID NO: 267181 - DNA, 20 bp, synthetic construct
  source 1..20: mol_type = other DNA
tggtcttctctggacttgct

SEQ ID NO: 267182 - DNA, 20 bp, synthetic construct
  source 1..20: mol_type = other DNA
gtggtcttctctggacttgc

SEQ ID NO: 267183 - DNA, 20 bp, synthetic construct
  source 1..20: mol_type = other DNA
ggtggtcttctctggacttg

SEQ ID NO: 267184 - DNA, 20 bp, synthetic construct
  source 1..20: mol_type = other DNA
gggtggtcttctctggactt

SEQ ID NO: 267185 - DNA, 20 bp, synthetic construct
  source 1..20: mol_type = other DNA
ggggtggtcttctctggact

SEQ ID NO: 267186 - DNA, 20 bp, synthetic construct
  source 1..20: mol_type = other DNA
gggggtggtcttctctggac

SEQ ID NO: 267187 - DNA, 20 bp, synthetic construct
  source 1..20: mol_type = other DNA
agggggtggtcttctctgga

SEQ ID NO: 267188 - DNA, 20 bp, synthetic construct
  source 1..20: mol_type = other DNA
cagggggtggtcttctctgg

SEQ ID NO: 267189 - DNA, 20 bp, synthetic construct
  source 1..20: mol_type = other DNA
gcagggggtggtcttctctg

SEQ ID NO: 267190 - DNA, 20 bp, synthetic construct
  source 1..20: mol_type = other DNA
tgcagggggtggtcttctct

SEQ ID NO: 267191 - DNA, 20 bp, synthetic construct
  source 1..20: mol_type = other DNA
ctgcagggggtggtcttctc

SEQ ID NO: 267192 - DNA, 20 bp, synthetic construct
  source 1..20: mol_type = other DNA
cctgcagggggtggtcttct

SEQ ID NO: 267193 - DNA, 20 bp, synthetic construct
  source 1..20: mol_type = other DNA
ccctgcagggggtggtcttc

SEQ ID NO: 267194 - DNA, 20 bp, synthetic construct
  source 1..20: mol_type = other DNA
gccctgcagggggtggtctt

SEQ ID NO: 267195 - DNA, 20 bp, synthetic construct
  source 1..20: mol_type = other DNA
ggccctgcagggggtggtct

SEQ ID NO: 267196 - DNA, 20 bp, synthetic construct
  source 1..20: mol_type = other DNA
gggccctgcagggggtggtc

SEQ ID NO: 267197 - DNA, 20 bp, synthetic construct
  source 1..20: mol_type = other DNA
tgggccctgcagggggtggt

SEQ ID NO: 267198 - DNA, 20 bp, synthetic construct
  source 1..20: mol_type = other DNA
ctgggccctgcagggggtgg

SEQ ID NO: 267199 - DNA, 20 bp, synthetic construct
  source 1..20: mol_type = other DNA
tctgggccctgcagggggtg

SEQ ID NO: 267200 - DNA, 20 bp, synthetic construct
  source 1..20: mol_type = other DNA
atctgggccctgcagggggt

SEQ ID NO: 267201 - DNA, 20 bp, synthetic construct
  source 1..20: mol_type = other DNA
gatctgggccctgcaggggg

SEQ ID NO: 267202 - DNA, 20 bp, synthetic construct
  source 1..20: mol_type = other DNA
agatctgggccctgcagggg

SEQ ID NO: 267203 - DNA, 20 bp, synthetic construct
  source 1..20: mol_type = other DNA
cagatctgggccctgcaggg

SEQ ID NO: 267204 - DNA, 20 bp, synthetic construct
  source 1..20: mol_type = other DNA
tcagatctgggccctgcagg

SEQ ID NO: 267205 - DNA, 20 bp, synthetic construct
  source 1..20: mol_type = other DNA
ctcagatctgggccctgcag

SEQ ID NO: 267206 - DNA, 20 bp, synthetic construct
  source 1..20: mol_type = other DNA
tctcagatctgggccctgca

SEQ ID NO: 267207 - DNA, 20 bp, synthetic construct
  source 1..20: mol_type = other DNA
ctctcagatctgggccctgc

SEQ ID NO: 267208 - DNA, 20 bp, synthetic construct
  source 1..20: mol_type = other DNA
tctctcagatctgggccctg

SEQ ID NO: 267209 - DNA, 20 bp, synthetic construct
  source 1..20: mol_type = other DNA
ctctctcagatctgggccct

SEQ ID NO: 267210 - DNA, 20 bp, synthetic construct
  source 1..20: mol_type = other DNA
cctctctcagatctgggccc

SEQ ID NO: 267211 - DNA, 20 bp, synthetic construct
  source 1..20: mol_type = other DNA
acctctctcagatctgggcc

SEQ ID NO: 267212 - DNA, 20 bp, synthetic construct
  source 1..20: mol_type = other DNA
tacctctctcagatctgggc

SEQ ID NO: 267213 - DNA, 20 bp, synthetic construct
  source 1..20: mol_type = other DNA
gtacctctctcagatctggg

SEQ ID NO: 267214 - DNA, 20 bp, synthetic construct
  source 1..20: mol_type = other DNA
agtacctctctcagatctgg

SEQ ID NO: 267215 - DNA, 20 bp, synthetic construct
  source 1..20: mol_type = other DNA
gagtacctctctcagatctg

SEQ ID NO: 267216 - DNA, 20 bp, synthetic construct
  source 1..20: mol_type = other DNA
cgagtacctctctcagatct

SEQ ID NO: 267217 - DNA, 20 bp, synthetic construct
  source 1..20: mol_type = other DNA
ccgagtacctctctcagatc

SEQ ID NO: 267218 - DNA, 20 bp, synthetic construct
  source 1..20: mol_type = other DNA
cccgagtacctctctcagat

SEQ ID NO: 267219 - DNA, 20 bp, synthetic construct
  source 1..20: mol_type = other DNA
tcccgagtacctctctcaga

SEQ ID NO: 267220 - DNA, 20 bp, synthetic construct
  source 1..20: mol_type = other DNA
ctcccgagtacctctctcag

SEQ ID NO: 267221 - DNA, 20 bp, synthetic construct
  source 1..20: mol_type = other DNA
gctcccgagtacctctctca

SEQ ID NO: 267222 - DNA, 20 bp, synthetic construct
  source 1..20: mol_type = other DNA
ggctcccgagtacctctctc

SEQ ID NO: 267223 - DNA, 20 bp, synthetic construct
  source 1..20: mol_type = other DNA
aggctcccgagtacctctct

SEQ ID NO: 267224 - DNA, 20 bp, synthetic construct
  source 1..20: mol_type = other DNA
taggctcccgagtacctctc

SEQ ID NO: 267225 - DNA, 20 bp, synthetic construct
  source 1..20: mol_type = other DNA
gtaggctcccgagtacctct

SEQ ID NO: 267226 - DNA, 20 bp, synthetic construct
  source 1..20: mol_type = other DNA
agtaggctcccgagtacctc

SEQ ID NO: 267227 - DNA, 20 bp, synthetic construct
  source 1..20: mol_type = other DNA
aagtaggctcccgagtacct

SEQ ID NO: 267228 - DNA, 20 bp, synthetic construct
  source 1..20: mol_type = other DNA
gaagtaggctcccgagtacc

SEQ ID NO: 267229 - DNA, 20 bp, synthetic construct
  source 1..20: mol_type = other DNA
cgaagtaggctcccgagtac

SEQ ID NO: 267230 - DNA, 20 bp, synthetic construct
  source 1..20: mol_type = other DNA
gcgaagtaggctcccgagta

SEQ ID NO: 267231 - DNA, 20 bp, synthetic construct
  source 1..20: mol_type = other DNA
agcgaagtaggctcccgagt

SEQ ID NO: 267232 - DNA, 20 bp, synthetic construct
  source 1..20: mol_type = other DNA
cagcgaagtaggctcccgag

SEQ ID NO: 267233 - DNA, 20 bp, synthetic construct
  source 1..20: mol_type = other DNA
ccagcgaagtaggctcccga

SEQ ID NO: 267234 - DNA, 20 bp, synthetic construct
  source 1..20: mol_type = other DNA
cccagcgaagtaggctcccg

SEQ ID NO: 267235 - DNA, 20 bp, synthetic construct
  source 1..20: mol_type = other DNA
tcccagcgaagtaggctccc

SEQ ID NO: 267236 - DNA, 20 bp, synthetic construct
  source 1..20: mol_type = other DNA
ctcccagcgaagtaggctcc

SEQ ID NO: 267237 - DNA, 20 bp, synthetic construct
  source 1..20: mol_type = other DNA
gctcccagcgaagtaggctc

SEQ ID NO: 267238 - DNA, 20 bp, synthetic construct
  source 1..20: mol_type = other DNA
tgctcccagcgaagtaggct

SEQ ID NO: 267239 - DNA, 20 bp, synthetic construct
  source 1..20: mol_type = other DNA
ctgctcccagcgaagtaggc

SEQ ID NO: 267240 - DNA, 20 bp, synthetic construct
  source 1..20: mol_type = other DNA
gctgctcccagcgaagtagg

SEQ ID NO: 267241 - DNA, 20 bp, synthetic construct
  source 1..20: mol_type = other DNA
ggctgctcccagcgaagtag

SEQ ID NO: 267242 - DNA, 20 bp, synthetic construct
  source 1..20: mol_type = other DNA
aggctgctcccagcgaagta

SEQ ID NO: 267243 - DNA, 20 bp, synthetic construct
  source 1..20: mol_type = other DNA
gaggctgctcccagcgaagt

SEQ ID NO: 267244 - DNA, 20 bp, synthetic construct
  source 1..20: mol_type = other DNA
ggaggctgctcccagcgaag

SEQ ID NO: 267245 - DNA, 20 bp, synthetic construct
  source 1..20: mol_type = other DNA
gggaggctgctcccagcgaa

SEQ ID NO: 267246 - DNA, 20 bp, synthetic construct
  source 1..20: mol_type = other DNA
agggaggctgctcccagcga

SEQ ID NO: 267247 - DNA, 20 bp, synthetic construct
  source 1..20: mol_type = other DNA
aagggaggctgctcccagcg

SEQ ID NO: 267248 - DNA, 20 bp, synthetic construct
  source 1..20: mol_type = other DNA
aaagggaggctgctcccagc

SEQ ID NO: 267249 - DNA, 20 bp, synthetic construct
  source 1..20: mol_type = other DNA
caaagggaggctgctcccag

SEQ ID NO: 267250 - DNA, 20 bp, synthetic construct
  source 1..20: mol_type = other DNA
gcaaagggaggctgctccca

SEQ ID NO: 267251 - DNA, 20 bp, synthetic construct
  source 1..20: mol_type = other DNA
cgcaaagggaggctgctccc

SEQ ID NO: 267252 - DNA, 20 bp, synthetic construct
  source 1..20: mol_type = other DNA
acgcaaagggaggctgctcc

SEQ ID NO: 267253 - DNA, 20 bp, synthetic construct
  source 1..20: mol_type = other DNA
cacgcaaagggaggctgctc

SEQ ID NO: 267254 - DNA, 20 bp, synthetic construct
  source 1..20: mol_type = other DNA
acacgcaaagggaggctgct

SEQ ID NO: 267255 - DNA, 20 bp, synthetic construct
  source 1..20: mol_type = other DNA
cacacgcaaagggaggctgc

SEQ ID NO: 267256 - DNA, 20 bp, synthetic construct
  source 1..20: mol_type = other DNA
acacacgcaaagggaggctg

SEQ ID NO: 267257 - DNA, 20 bp, synthetic construct
  source 1..20: mol_type = other DNA
cacacacgcaaagggaggct

SEQ ID NO: 267258 - DNA, 20 bp, synthetic construct
  source 1..20: mol_type = other DNA
ccacacacgcaaagggaggc

SEQ ID NO: 267259 - DNA, 20 bp, synthetic construct
  source 1..20: mol_type = other DNA
gccacacacgcaaagggagg

SEQ ID NO: 267260 - DNA, 20 bp, synthetic construct
  source 1..20: mol_type = other DNA
ggccacacacgcaaagggag

SEQ ID NO: 267261 - DNA, 20 bp, synthetic construct
  source 1..20: mol_type = other DNA
tggccacacacgcaaaggga

SEQ ID NO: 267262 - DNA, 20 bp, synthetic construct
  source 1..20: mol_type = other DNA
atggccacacacgcaaaggg

SEQ ID NO: 267263 - DNA, 20 bp, synthetic construct
  source 1..20: mol_type = other DNA
aatggccacacacgcaaagg

SEQ ID NO: 267264 - DNA, 20 bp, synthetic construct
  source 1..20: mol_type = other DNA
gaatggccacacacgcaaag

SEQ ID NO: 267265 - DNA, 20 bp, synthetic construct
  source 1..20: mol_type = other DNA
tgaatggccacacacgcaaa

SEQ ID NO: 267266 - DNA, 20 bp, synthetic construct
  source 1..20: mol_type = other DNA
gtgaatggccacacacgcaa

SEQ ID NO: 267267 - DNA, 20 bp, synthetic construct
  source 1..20: mol_type = other DNA
agtgaatggccacacacgca

SEQ ID NO: 267268 - DNA, 20 bp, synthetic construct
  source 1..20: mol_type = other DNA
cagtgaatggccacacacgc

SEQ ID NO: 267269 - DNA, 20 bp, synthetic construct
  source 1..20: mol_type = other DNA
ccagtgaatggccacacacg

SEQ ID NO: 267270 - DNA, 20 bp, synthetic construct
  source 1..20: mol_type = other DNA
gccagtgaatggccacacac

SEQ ID NO: 267271 - DNA, 20 bp, synthetic construct
  source 1..20: mol_type = other DNA
agccagtgaatggccacaca

SEQ ID NO: 267272 - DNA, 20 bp, synthetic construct
  source 1..20: mol_type = other DNA
aagccagtgaatggccacac

SEQ ID NO: 267273 - DNA, 20 bp, synthetic construct
  source 1..20: mol_type = other DNA
caagccagtgaatggccaca

SEQ ID NO: 267274 - DNA, 20 bp, synthetic construct
  source 1..20: mol_type = other DNA
acaagccagtgaatggccac

SEQ ID NO: 267275 - DNA, 20 bp, synthetic construct
  source 1..20: mol_type = other DNA
cacaagccagtgaatggcca

SEQ ID NO: 267276 - DNA, 20 bp, synthetic construct
  source 1..20: mol_type = other DNA
acacaagccagtgaatggcc

SEQ ID NO: 267277 - DNA, 20 bp, synthetic construct
  source 1..20: mol_type = other DNA
aacacaagccagtgaatggc

SEQ ID NO: 267278 - DNA, 20 bp, synthetic construct
  source 1..20: mol_type = other DNA
aaacacaagccagtgaatgg

SEQ ID NO: 267279 - DNA, 20 bp, synthetic construct
  source 1..20: mol_type = other DNA
gaaacacaagccagtgaatg

SEQ ID NO: 267280 - DNA, 20 bp, synthetic construct
  source 1..20: mol_type = other DNA
agaaacacaagccagtgaat

SEQ ID NO: 267281 - DNA, 20 bp, synthetic construct
  source 1..20: mol_type = other DNA
tagaaacacaagccagtgaa

SEQ ID NO: 267282 - DNA, 20 bp, synthetic construct
  source 1..20: mol_type = other DNA
ctagaaacacaagccagtga

SEQ ID NO: 267283 - DNA, 20 bp, synthetic construct
  source 1..20: mol_type = other DNA
tctagaaacacaagccagtg

SEQ ID NO: 267284 - DNA, 20 bp, synthetic construct
  source 1..20: mol_type = other DNA
ctctagaaacacaagccagt

SEQ ID NO: 267285 - DNA, 20 bp, synthetic construct
  source 1..20: mol_type = other DNA
gctctagaaacacaagccag

SEQ ID NO: 267286 - DNA, 20 bp, synthetic construct
  source 1..20: mol_type = other DNA
ggctctagaaacacaagcca

SEQ ID NO: 267287 - DNA, 20 bp, synthetic construct
  source 1..20: mol_type = other DNA
cggctctagaaacacaagcc

SEQ ID NO: 267288 - DNA, 20 bp, synthetic construct
  source 1..20: mol_type = other DNA
ccggctctagaaacacaagc

SEQ ID NO: 267289 - DNA, 20 bp, synthetic construct
  source 1..20: mol_type = other DNA
cccggctctagaaacacaag

SEQ ID NO: 267290 - DNA, 20 bp, synthetic construct
  source 1..20: mol_type = other DNA
tcccggctctagaaacacaa

SEQ ID NO: 267291 - DNA, 20 bp, synthetic construct
  source 1..20: mol_type = other DNA
ctcccggctctagaaacaca

SEQ ID NO: 267292 - DNA, 20 bp, synthetic construct
  source 1..20: mol_type = other DNA
cctcccggctctagaaacac

SEQ ID NO: 267293 - DNA, 20 bp, synthetic construct
  source 1..20: mol_type = other DNA
tcctcccggctctagaaaca

SEQ ID NO: 267294 - DNA, 20 bp, synthetic construct
  source 1..20: mol_type = other DNA
gtcctcccggctctagaaac

SEQ ID NO: 267295 - DNA, 20 bp, synthetic construct
  source 1..20: mol_type = other DNA
ggtcctcccggctctagaaa

SEQ ID NO: 267296 - DNA, 20 bp, synthetic construct
  source 1..20: mol_type = other DNA
gggtcctcccggctctagaa

SEQ ID NO: 267297 - DNA, 20 bp, synthetic construct
  source 1..20: mol_type = other DNA
agggtcctcccggctctaga

SEQ ID NO: 267298 - DNA, 20 bp, synthetic construct
  source 1..20: mol_type = other DNA
aagggtcctcccggctctag

SEQ ID NO: 267299 - DNA, 20 bp, synthetic construct
  source 1..20: mol_type = other DNA
aaagggtcctcccggctcta

SEQ ID NO: 267300 - DNA, 20 bp, synthetic construct
  source 1..20: mol_type = other DNA
aaaagggtcctcccggctct

SEQ ID NO: 267301 - DNA, 20 bp, synthetic construct
  source 1..20: mol_type = other DNA
gaaaagggtcctcccggctc

SEQ ID NO: 267302 - DNA, 20 bp, synthetic construct
  source 1..20: mol_type = other DNA
agaaaagggtcctcccggct

SEQ ID NO: 267303 - DNA, 20 bp, synthetic construct
  source 1..20: mol_type = other DNA
cagaaaagggtcctcccggc

SEQ ID NO: 267304 - DNA, 20 bp, synthetic construct
  source 1..20: mol_type = other DNA
gcagaaaagggtcctcccgg

SEQ ID NO: 267305 - DNA, 20 bp, synthetic construct
  source 1..20: mol_type = other DNA
tgcagaaaagggtcctcccg

SEQ ID NO: 267306 - DNA, 20 bp, synthetic construct
  source 1..20: mol_type = other DNA
ttgcagaaaagggtcctccc

SEQ ID NO: 267307 - DNA, 20 bp, synthetic construct
  source 1..20: mol_type = other DNA
attgcagaaaagggtcctcc

SEQ ID NO: 267308 - DNA, 20 bp, synthetic construct
  source 1..20: mol_type = other DNA
cattgcagaaaagggtcctc

SEQ ID NO: 267309 - DNA, 20 bp, synthetic construct
  source 1..20: mol_type = other DNA
gcattgcagaaaagggtcct

SEQ ID NO: 267310 - DNA, 20 bp, synthetic construct
  source 1..20: mol_type = other DNA
tgcattgcagaaaagggtcc

SEQ ID NO: 267311 - DNA, 20 bp, synthetic construct
  source 1..20: mol_type = other DNA
ctgcattgcagaaaagggtc

SEQ ID NO: 267312 - DNA, 20 bp, synthetic construct
  source 1..20: mol_type = other DNA
cctgcattgcagaaaagggt

SEQ ID NO: 267313 - DNA, 20 bp, synthetic construct
  source 1..20: mol_type = other DNA
ccctgcattgcagaaaaggg

SEQ ID NO: 267314 - DNA, 20 bp, synthetic construct
  source 1..20: mol_type = other DNA
accctgcattgcagaaaagg

SEQ ID NO: 267315 - DNA, 20 bp, synthetic construct
  source 1..20: mol_type = other DNA
aaccctgcattgcagaaaag

SEQ ID NO: 267316 - DNA, 20 bp, synthetic construct
  source 1..20: mol_type = other DNA
gaaccctgcattgcagaaaa

SEQ ID NO: 267317 - DNA, 20 bp, synthetic construct
  source 1..20: mol_type = other DNA
tgaaccctgcattgcagaaa

SEQ ID NO: 267318 - DNA, 20 bp, synthetic construct
  source 1..20: mol_type = other DNA
gtgaaccctgcattgcagaa

SEQ ID NO: 267319 - DNA, 20 bp, synthetic construct
  source 1..20: mol_type = other DNA
tgtgaaccctgcattgcaga

SEQ ID NO: 267320 - DNA, 20 bp, synthetic construct
  source 1..20: mol_type = other DNA
gtgtgaaccctgcattgcag

SEQ ID NO: 267321 - DNA, 20 bp, synthetic construct
  source 1..20: mol_type = other DNA
tgtgtgaaccctgcattgca

SEQ ID NO: 267322 - DNA, 20 bp, synthetic construct
  source 1..20: mol_type = other DNA
ctgtgtgaaccctgcattgc

SEQ ID NO: 267323 - DNA, 20 bp, synthetic construct
  source 1..20: mol_type = other DNA
cctgtgtgaaccctgcattg

SEQ ID NO: 267324 - DNA, 20 bp, synthetic construct
  source 1..20: mol_type = other DNA
ccctgtgtgaaccctgcatt

SEQ ID NO: 267325 - DNA, 20 bp, synthetic construct
  source 1..20: mol_type = other DNA
accctgtgtgaaccctgcat

SEQ ID NO: 267326 - DNA, 20 bp, synthetic construct
  source 1..20: mol_type = other DNA
aaccctgtgtgaaccctgca

SEQ ID NO: 267327 - DNA, 20 bp, synthetic construct
  source 1..20: mol_type = other DNA
gaaccctgtgtgaaccctgc

SEQ ID NO: 267328 - DNA, 20 bp, synthetic construct
  source 1..20: mol_type = other DNA
cgaaccctgtgtgaaccctg

SEQ ID NO: 267329 - DNA, 20 bp, synthetic construct
  source 1..20: mol_type = other DNA
gcgaaccctgtgtgaaccct

SEQ ID NO: 267330 - DNA, 20 bp, synthetic construct
  source 1..20: mol_type = other DNA
tgcgaaccctgtgtgaaccc

SEQ ID NO: 267331 - DNA, 20 bp, synthetic construct
  source 1..20: mol_type = other DNA
ctgcgaaccctgtgtgaacc

SEQ ID NO: 267332 - DNA, 20 bp, synthetic construct
  source 1..20: mol_type = other DNA
gctgcgaaccctgtgtgaac

SEQ ID NO: 267333 - DNA, 20 bp, synthetic construct
  source 1..20: mol_type = other DNA
ggctgcgaaccctgtgtgaa

SEQ ID NO: 267334 - DNA, 20 bp, synthetic construct
  source 1..20: mol_type = other DNA
aggctgcgaaccctgtgtga

SEQ ID NO: 267335 - DNA, 20 bp, synthetic construct
  source 1..20: mol_type = other DNA
caggctgcgaaccctgtgtg

SEQ ID NO: 267336 - DNA, 20 bp, synthetic construct
  source 1..20: mol_type = other DNA
tcaggctgcgaaccctgtgt

SEQ ID NO: 267337 - DNA, 20 bp, synthetic construct
  source 1..20: mol_type = other DNA
ttcaggctgcgaaccctgtg

SEQ ID NO: 267338 - DNA, 20 bp, synthetic construct
  source 1..20: mol_type = other DNA
cttcaggctgcgaaccctgt

SEQ ID NO: 267339 - DNA, 20 bp, synthetic construct
  source 1..20: mol_type = other DNA
tcttcaggctgcgaaccctg

SEQ ID NO: 267340 - DNA, 20 bp, synthetic construct
  source 1..20: mol_type = other DNA
atcttcaggctgcgaaccct

SEQ ID NO: 267341 - DNA, 20 bp, synthetic construct
  source 1..20: mol_type = other DNA
catcttcaggctgcgaaccc

SEQ ID NO: 267342 - DNA, 20 bp, synthetic construct
  source 1..20: mol_type = other DNA
ccatcttcaggctgcgaacc

SEQ ID NO: 267343 - DNA, 20 bp, synthetic construct
  source 1..20: mol_type = other DNA
tccatcttcaggctgcgaac

SEQ ID NO: 267344 - DNA, 20 bp, synthetic construct
  source 1..20: mol_type = other DNA
ctccatcttcaggctgcgaa

SEQ ID NO: 267345 - DNA, 20 bp, synthetic construct
  source 1..20: mol_type = other DNA
gctccatcttcaggctgcga

SEQ ID NO: 267346 - DNA, 20 bp, synthetic construct
  source 1..20: mol_type = other DNA
tgctccatcttcaggctgcg

SEQ ID NO: 267347 - DNA, 20 bp, synthetic construct
  source 1..20: mol_type = other DNA
ctgctccatcttcaggctgc

SEQ ID NO: 267348 - DNA, 20 bp, synthetic construct
  source 1..20: mol_type = other DNA
actgctccatcttcaggctg

SEQ ID NO: 267349 - DNA, 20 bp, synthetic construct
  source 1..20: mol_type = other DNA
gactgctccatcttcaggct

SEQ ID NO: 267350 - DNA, 20 bp, synthetic construct
  source 1..20: mol_type = other DNA
ggactgctccatcttcaggc

SEQ ID NO: 267351 - DNA, 20 bp, synthetic construct
  source 1..20: mol_type = other DNA
cggactgctccatcttcagg

SEQ ID NO: 267352 - DNA, 20 bp, synthetic construct
  source 1..20: mol_type = other DNA
tcggactgctccatcttcag

SEQ ID NO: 267353 - DNA, 20 bp, synthetic construct
  source 1..20: mol_type = other DNA
ttcggactgctccatcttca

SEQ ID NO: 267354 - DNA, 20 bp, synthetic construct
  source 1..20: mol_type = other DNA
attcggactgctccatcttc

SEQ ID NO: 267355 - DNA, 20 bp, synthetic construct
  source 1..20: mol_type = other DNA
aattcggactgctccatctt

SEQ ID NO: 267356 - DNA, 20 bp, synthetic construct
  source 1..20: mol_type = other DNA
gaattcggactgctccatct

SEQ ID NO: 267357 - DNA, 20 bp, synthetic construct
  source 1..20: mol_type = other DNA
agaattcggactgctccatc

SEQ ID NO: 267358 - DNA, 20 bp, synthetic construct
  source 1..20: mol_type = other DNA
gagaattcggactgctccat

SEQ ID NO: 267359 - DNA, 20 bp, synthetic construct
  source 1..20: mol_type = other DNA
agagaattcggactgctcca

SEQ ID NO: 267360 - DNA, 20 bp, synthetic construct
  source 1..20: mol_type = other DNA
aagagaattcggactgctcc

SEQ ID NO: 267361 - DNA, 20 bp, synthetic construct
  source 1..20: mol_type = other DNA
gaagagaattcggactgctc

SEQ ID NO: 267362 - DNA, 20 bp, synthetic construct
  source 1..20: mol_type = other DNA
ggaagagaattcggactgct

SEQ ID NO: 267363 - DNA, 20 bp, synthetic construct
  source 1..20: mol_type = other DNA
gggaagagaattcggactgc

SEQ ID NO: 267364 - DNA, 20 bp, synthetic construct
  source 1..20: mol_type = other DNA
agggaagagaattcggactg

SEQ ID NO: 267365 - DNA, 20 bp, synthetic construct
  source 1..20: mol_type = other DNA
cagggaagagaattcggact

SEQ ID NO: 267366 - DNA, 20 bp, synthetic construct
  source 1..20: mol_type = other DNA
acagggaagagaattcggac

SEQ ID NO: 267367 - DNA, 20 bp, synthetic construct
  source 1..20: mol_type = other DNA
cacagggaagagaattcgga

SEQ ID NO: 267368 - DNA, 20 bp, synthetic construct
  source 1..20: mol_type = other DNA
gcacagggaagagaattcgg

SEQ ID NO: 267369 - DNA, 20 bp, synthetic construct
  source 1..20: mol_type = other DNA
tgcacagggaagagaattcg

SEQ ID NO: 267370 - DNA, 20 bp, synthetic construct
  source 1..20: mol_type = other DNA
ctgcacagggaagagaattc

SEQ ID NO: 267371 - DNA, 20 bp, synthetic construct
  source 1..20: mol_type = other DNA
actgcacagggaagagaatt

SEQ ID NO: 267372 - DNA, 20 bp, synthetic construct
  source 1..20: mol_type = other DNA
aactgcacagggaagagaat

SEQ ID NO: 267373 - DNA, 20 bp, synthetic construct
  source 1..20: mol_type = other DNA
aaactgcacagggaagagaa

SEQ ID NO: 267374 - DNA, 20 bp, synthetic construct
  source 1..20: mol_type = other DNA
caaactgcacagggaagaga

SEQ ID NO: 267375 - DNA, 20 bp, synthetic construct
  source 1..20: mol_type = other DNA
gcaaactgcacagggaagag

SEQ ID NO: 267376 - DNA, 20 bp, synthetic construct
  source 1..20: mol_type = other DNA
cgcaaactgcacagggaaga

SEQ ID NO: 267377 - DNA, 20 bp, synthetic construct
  source 1..20: mol_type = other DNA
gcgcaaactgcacagggaag

SEQ ID NO: 267378 - DNA, 20 bp, synthetic construct
  source 1..20: mol_type = other DNA
tgcgcaaactgcacagggaa

SEQ ID NO: 267379 - DNA, 20 bp, synthetic construct
  source 1..20: mol_type = other DNA
ctgcgcaaactgcacaggga

SEQ ID NO: 267380 - DNA, 20 bp, synthetic construct
  source 1..20: mol_type = other DNA
gctgcgcaaactgcacaggg

SEQ ID NO: 267381 - DNA, 20 bp, synthetic construct
  source 1..20: mol_type = other DNA
agctgcgcaaactgcacagg

SEQ ID NO: 267382 - DNA, 20 bp, synthetic construct
  source 1..20: mol_type = other DNA
cagctgcgcaaactgcacag

SEQ ID NO: 267383 - DNA, 20 bp, synthetic construct
  source 1..20: mol_type = other DNA
acagctgcgcaaactgcaca

SEQ ID NO: 267384 - DNA, 20 bp, synthetic construct
  source 1..20: mol_type = other DNA
cacagctgcgcaaactgcac

SEQ ID NO: 267385 - DNA, 20 bp, synthetic construct
  source 1..20: mol_type = other DNA
acacagctgcgcaaactgca

SEQ ID NO: 267386 - DNA, 20 bp, synthetic construct
  source 1..20: mol_type = other DNA
aacacagctgcgcaaactgc

SEQ ID NO: 267387 - DNA, 20 bp, synthetic construct
  source 1..20: mol_type = other DNA
aaacacagctgcgcaaactg

SEQ ID NO: 267388 - DNA, 20 bp, synthetic construct
  source 1..20: mol_type = other DNA
caaacacagctgcgcaaact

SEQ ID NO: 267389 - DNA, 20 bp, synthetic construct
  source 1..20: mol_type = other DNA
acaaacacagctgcgcaaac

SEQ ID NO: 267390 - DNA, 20 bp, synthetic construct
  source 1..20: mol_type = other DNA
gacaaacacagctgcgcaaa

SEQ ID NO: 267391 - DNA, 20 bp, synthetic construct
  source 1..20: mol_type = other DNA
agacaaacacagctgcgcaa

SEQ ID NO: 267392 - DNA, 20 bp, synthetic construct
  source 1..20: mol_type = other DNA
cagacaaacacagctgcgca

SEQ ID NO: 267393 - DNA, 20 bp, synthetic construct
  source 1..20: mol_type = other DNA
tcagacaaacacagctgcgc

SEQ ID NO: 267394 - DNA, 20 bp, synthetic construct
  source 1..20: mol_type = other DNA
atcagacaaacacagctgcg

SEQ ID NO: 267395 - DNA, 20 bp, synthetic construct
  source 1..20: mol_type = other DNA
catcagacaaacacagctgc

SEQ ID NO: 267396 - DNA, 20 bp, synthetic construct
  source 1..20: mol_type = other DNA
ccatcagacaaacacagctg

SEQ ID NO: 267397 - DNA, 20 bp, synthetic construct
  source 1..20: mol_type = other DNA
cccatcagacaaacacagct

SEQ ID NO: 267398 - DNA, 20 bp, synthetic construct
  source 1..20: mol_type = other DNA
gcccatcagacaaacacagc

SEQ ID NO: 267399 - DNA, 20 bp, synthetic construct
  source 1..20: mol_type = other DNA
agcccatcagacaaacacag

SEQ ID NO: 267400 - DNA, 20 bp, synthetic construct
  source 1..20: mol_type = other DNA
aagcccatcagacaaacaca

SEQ ID NO: 267401 - DNA, 20 bp, synthetic construct
  source 1..20: mol_type = other DNA
aaagcccatcagacaaacac

SEQ ID NO: 267402 - DNA, 20 bp, synthetic construct
  source 1..20: mol_type = other DNA
gaaagcccatcagacaaaca

SEQ ID NO: 267403 - DNA, 20 bp, synthetic construct
  source 1..20: mol_type = other DNA
agaaagcccatcagacaaac

SEQ ID NO: 267404 - DNA, 20 bp, synthetic construct
  source 1..20: mol_type = other DNA
tagaaagcccatcagacaaa

SEQ ID NO: 267405 - DNA, 20 bp, synthetic construct
  source 1..20: mol_type = other DNA
ttagaaagcccatcagacaa

SEQ ID NO: 267406 - DNA, 20 bp, synthetic construct
  source 1..20: mol_type = other DNA
attagaaagcccatcagaca

SEQ ID NO: 267407 - DNA, 20 bp, synthetic construct
  source 1..20: mol_type = other DNA
gattagaaagcccatcagac

SEQ ID NO: 267408 - DNA, 20 bp, synthetic construct
  source 1..20: mol_type = other DNA
ggattagaaagcccatcaga

SEQ ID NO: 267409 - DNA, 20 bp, synthetic construct
  source 1..20: mol_type = other DNA
aggattagaaagcccatcag

SEQ ID NO: 267410 - DNA, 20 bp, synthetic construct
  source 1..20: mol_type = other DNA
caggattagaaagcccatca

SEQ ID NO: 267411 - DNA, 20 bp, synthetic construct
  source 1..20: mol_type = other DNA
acaggattagaaagcccatc

SEQ ID NO: 267412 - DNA, 20 bp, synthetic construct
  source 1..20: mol_type = other DNA
cacaggattagaaagcccat

SEQ ID NO: 267413 - DNA, 20 bp, synthetic construct
  source 1..20: mol_type = other DNA
acacaggattagaaagccca

SEQ ID NO: 267414 - DNA, 20 bp, synthetic construct
  source 1..20: mol_type = other DNA
cacacaggattagaaagccc

SEQ ID NO: 267415 - DNA, 20 bp, synthetic construct
  source 1..20: mol_type = other DNA
gcacacaggattagaaagcc

SEQ ID NO: 267416 - DNA, 20 bp, synthetic construct
  source 1..20: mol_type = other DNA
agcacacaggattagaaagc

SEQ ID NO: 267417 - DNA, 20 bp, synthetic construct
  source 1..20: mol_type = other DNA
gagcacacaggattagaaag

SEQ ID NO: 267418 - DNA, 20 bp, synthetic construct
  source 1..20: mol_type = other DNA
agagcacacaggattagaaa

SEQ ID NO: 267419 - DNA, 20 bp, synthetic construct
  source 1..20: mol_type = other DNA
gagagcacacaggattagaa

SEQ ID NO: 267420 - DNA, 20 bp, synthetic construct
  source 1..20: mol_type = other DNA
ggagagcacacaggattaga

SEQ ID NO: 267421 - DNA, 20 bp, synthetic construct
  source 1..20: mol_type = other DNA
aggagagcacacaggattag

SEQ ID NO: 267422 - DNA, 20 bp, synthetic construct
  source 1..20: mol_type = other DNA
aaggagagcacacaggatta

SEQ ID NO: 267423 - DNA, 20 bp, synthetic construct
  source 1..20: mol_type = other DNA
caaggagagcacacaggatt

SEQ ID NO: 267424 - DNA, 20 bp, synthetic construct
  source 1..20: mol_type = other DNA
tcaaggagagcacacaggat

SEQ ID NO: 267425 - DNA, 20 bp, synthetic construct
  source 1..20: mol_type = other DNA
gtcaaggagagcacacagga

SEQ ID NO: 267426 - DNA, 20 bp, synthetic construct
  source 1..20: mol_type = other DNA
agtcaaggagagcacacagg

SEQ ID NO: 267427 - DNA, 20 bp, synthetic construct
  source 1..20: mol_type = other DNA
aagtcaaggagagcacacag

SEQ ID NO: 267428 - DNA, 20 bp, synthetic construct
  source 1..20: mol_type = other DNA
gaagtcaaggagagcacaca

SEQ ID NO: 267429 - DNA, 20 bp, synthetic construct
  source 1..20: mol_type = other DNA
tgaagtcaaggagagcacac

SEQ ID NO: 267430 - DNA, 20 bp, synthetic construct
  source 1..20: mol_type = other DNA
ctgaagtcaaggagagcaca

SEQ ID NO: 267431 - DNA, 20 bp, synthetic construct
  source 1..20: mol_type = other DNA
cctgaagtcaaggagagcac

SEQ ID NO: 267432 - DNA, 20 bp, synthetic construct
  source 1..20: mol_type = other DNA
ccctgaagtcaaggagagca

SEQ ID NO: 267433 - DNA, 20 bp, synthetic construct
  source 1..20: mol_type = other DNA
tccctgaagtcaaggagagc

SEQ ID NO: 267434 - DNA, 20 bp, synthetic construct
  source 1..20: mol_type = other DNA
gtccctgaagtcaaggagag

SEQ ID NO: 267435 - DNA, 20 bp, synthetic construct
  source 1..20: mol_type = other DNA
tgtccctgaagtcaaggaga

SEQ ID NO: 267436 - DNA, 20 bp, synthetic construct
  source 1..20: mol_type = other DNA
ttgtccctgaagtcaaggag

SEQ ID NO: 267437 - DNA, 20 bp, synthetic construct
  source 1..20: mol_type = other DNA
attgtccctgaagtcaagga

SEQ ID NO: 267438 - DNA, 20 bp, synthetic construct
  source 1..20: mol_type = other DNA
cattgtccctgaagtcaagg

SEQ ID NO: 267439 - DNA, 20 bp, synthetic construct
  source 1..20: mol_type = other DNA
ccattgtccctgaagtcaag

SEQ ID NO: 267440 - DNA, 20 bp, synthetic construct
  source 1..20: mol_type = other DNA
gccattgtccctgaagtcaa

SEQ ID NO: 267441 - DNA, 20 bp, synthetic construct
  source 1..20: mol_type = other DNA
tgccattgtccctgaagtca

SEQ ID NO: 267442 - DNA, 20 bp, synthetic construct
  source 1..20: mol_type = other DNA
atgccattgtccctgaagtc

SEQ ID NO: 267443 - DNA, 20 bp, synthetic construct
  source 1..20: mol_type = other DNA
aatgccattgtccctgaagt

SEQ ID NO: 267444 - DNA, 20 bp, synthetic construct
  source 1..20: mol_type = other DNA
taatgccattgtccctgaag

SEQ ID NO: 267445 - DNA, 20 bp, synthetic construct
  source 1..20: mol_type = other DNA
gtaatgccattgtccctgaa

SEQ ID NO: 267446 - DNA, 20 bp, synthetic construct
  source 1..20: mol_type = other DNA
tgtaatgccattgtccctga

SEQ ID NO: 267447 - DNA, 20 bp, synthetic construct
  source 1..20: mol_type = other DNA
ctgtaatgccattgtccctg

SEQ ID NO: 267448 - DNA, 20 bp, synthetic construct
  source 1..20: mol_type = other DNA
cctgtaatgccattgtccct

SEQ ID NO: 267449 - DNA, 20 bp, synthetic construct
  source 1..20: mol_type = other DNA
gcctgtaatgccattgtccc

SEQ ID NO: 267450 - DNA, 20 bp, synthetic construct
  source 1..20: mol_type = other DNA
tgcctgtaatgccattgtcc

SEQ ID NO: 267451 - DNA, 20 bp, synthetic construct
  source 1..20: mol_type = other DNA
atgcctgtaatgccattgtc

SEQ ID NO: 267452 - DNA, 20 bp, synthetic construct
  source 1..20: mol_type = other DNA
catgcctgtaatgccattgt

SEQ ID NO: 267453 - DNA, 20 bp, synthetic construct
  source 1..20: mol_type = other DNA
tcatgcctgtaatgccattg

SEQ ID NO: 267454 - DNA, 20 bp, synthetic construct
  source 1..20: mol_type = other DNA
ctcatgcctgtaatgccatt

SEQ ID NO: 267455 - DNA, 20 bp, synthetic construct
  source 1..20: mol_type = other DNA
gctcatgcctgtaatgccat

SEQ ID NO: 267456 - DNA, 20 bp, synthetic construct
  source 1..20: mol_type = other DNA
ggctcatgcctgtaatgcca

SEQ ID NO: 267457 - DNA, 20 bp, synthetic construct
  source 1..20: mol_type = other DNA
tggctcatgcctgtaatgcc

SEQ ID NO: 267458 - DNA, 20 bp, synthetic construct
  source 1..20: mol_type = other DNA
gtggctcatgcctgtaatgc

SEQ ID NO: 267459 - DNA, 20 bp, synthetic construct
  source 1..20: mol_type = other DNA
ggtggctcatgcctgtaatg

SEQ ID NO: 267460 - DNA, 20 bp, synthetic construct
  source 1..20: mol_type = other DNA
tggtggctcatgcctgtaat

SEQ ID NO: 267461 - DNA, 20 bp, synthetic construct
  source 1..20: mol_type = other DNA
atggtggctcatgcctgtaa

SEQ ID NO: 267462 - DNA, 20 bp, synthetic construct
  source 1..20: mol_type = other DNA
catggtggctcatgcctgta

SEQ ID NO: 267463 - DNA, 20 bp, synthetic construct
  source 1..20: mol_type = other DNA
gcatggtggctcatgcctgt

SEQ ID NO: 267464 - DNA, 20 bp, synthetic construct
  source 1..20: mol_type = other DNA
ggcatggtggctcatgcctg

SEQ ID NO: 267465 - DNA, 20 bp, synthetic construct
  source 1..20: mol_type = other DNA
aggcatggtggctcatgcct

SEQ ID NO: 267466 - DNA, 20 bp, synthetic construct
  source 1..20: mol_type = other DNA
caggcatggtggctcatgcc

SEQ ID NO: 267467 - DNA, 20 bp, synthetic construct
  source 1..20: mol_type = other DNA
ccaggcatggtggctcatgc

SEQ ID NO: 267468 - DNA, 20 bp, synthetic construct
  source 1..20: mol_type = other DNA
gccaggcatggtggctcatg

SEQ ID NO: 267469 - DNA, 20 bp, synthetic construct
  source 1..20: mol_type = other DNA
agccaggcatggtggctcat

SEQ ID NO: 267470 - DNA, 20 bp, synthetic construct
  source 1..20: mol_type = other DNA
cagccaggcatggtggctca

SEQ ID NO: 267471 - DNA, 20 bp, synthetic construct
  source 1..20: mol_type = other DNA
acagccaggcatggtggctc

SEQ ID NO: 267472 - DNA, 20 bp, synthetic construct
  source 1..20: mol_type = other DNA
gacagccaggcatggtggct

SEQ ID NO: 267473 - DNA, 20 bp, synthetic construct
  source 1..20: mol_type = other DNA
agacagccaggcatggtggc

SEQ ID NO: 267474 - DNA, 20 bp, synthetic construct
  source 1..20: mol_type = other DNA
gagacagccaggcatggtgg

SEQ ID NO: 267475 - DNA, 20 bp, synthetic construct
  source 1..20: mol_type = other DNA
ggagacagccaggcatggtg

SEQ ID NO: 267476 - DNA, 20 bp, synthetic construct
  source 1..20: mol_type = other DNA
gggagacagccaggcatggt

SEQ ID NO: 267477 - DNA, 20 bp, synthetic construct
  source 1..20: mol_type = other DNA
agggagacagccaggcatgg

SEQ ID NO: 267478 - DNA, 20 bp, synthetic construct
  source 1..20: mol_type = other DNA
tagggagacagccaggcatg

SEQ ID NO: 267479 - DNA, 20 bp, synthetic construct
  source 1..20: mol_type = other DNA
atagggagacagccaggcat

SEQ ID NO: 267480 - DNA, 20 bp, synthetic construct
  source 1..20: mol_type = other DNA
catagggagacagccaggca

SEQ ID NO: 267481 - DNA, 20 bp, synthetic construct
  source 1..20: mol_type = other DNA
acatagggagacagccaggc

SEQ ID NO: 267482 - DNA, 20 bp, synthetic construct
  source 1..20: mol_type = other DNA
aacatagggagacagccagg

SEQ ID NO: 267483 - DNA, 20 bp, synthetic construct
  source 1..20: mol_type = other DNA
aaacatagggagacagccag

SEQ ID NO: 267484 - DNA, 20 bp, synthetic construct
  source 1..20: mol_type = other DNA
gaaacatagggagacagcca

SEQ ID NO: 267485 - DNA, 20 bp, synthetic construct
  source 1..20: mol_type = other DNA
tgaaacatagggagacagcc

SEQ ID NO: 267486 - DNA, 20 bp, synthetic construct
  source 1..20: mol_type = other DNA
ctgaaacatagggagacagc

SEQ ID NO: 267487 - DNA, 20 bp, synthetic construct
  source 1..20: mol_type = other DNA
tctgaaacatagggagacag

SEQ ID NO: 267488 - DNA, 20 bp, synthetic construct
  source 1..20: mol_type = other DNA
atctgaaacatagggagaca

SEQ ID NO: 267489 - DNA, 20 bp, synthetic construct
  source 1..20: mol_type = other DNA
catctgaaacatagggagac

SEQ ID NO: 267490 - DNA, 20 bp, synthetic construct
  source 1..20: mol_type = other DNA
tcatctgaaacatagggaga

SEQ ID NO: 267491 - DNA, 20 bp, synthetic construct
  source 1..20: mol_type = other DNA
ttcatctgaaacatagggag

SEQ ID NO: 267492 - DNA, 20 bp, synthetic construct
  source 1..20: mol_type = other DNA
cttcatctgaaacataggga

SEQ ID NO: 267493 - DNA, 20 bp, synthetic construct
  source 1..20: mol_type = other DNA
tcttcatctgaaacataggg

SEQ ID NO: 267494 - DNA, 20 bp, synthetic construct
  source 1..20: mol_type = other DNA
gtcttcatctgaaacatagg

SEQ ID NO: 267495 - DNA, 20 bp, synthetic construct
  source 1..20: mol_type = other DNA
tgtcttcatctgaaacatag

SEQ ID NO: 267496 - DNA, 20 bp, synthetic construct
  source 1..20: mol_type = other DNA
atgtcttcatctgaaacata

SEQ ID NO: 267497 - DNA, 20 bp, synthetic construct
  source 1..20: mol_type = other DNA
tatgtcttcatctgaaacat

SEQ ID NO: 267498 - DNA, 20 bp, synthetic construct
  source 1..20: mol_type = other DNA
ctatgtcttcatctgaaaca

SEQ ID NO: 267499 - DNA, 20 bp, synthetic construct
  source 1..20: mol_type = other DNA
cctatgtcttcatctgaaac

SEQ ID NO: 267500 - DNA, 20 bp, synthetic construct
  source 1..20: mol_type = other DNA
gcctatgtcttcatctgaaa

SEQ ID NO: 267501 - DNA, 20 bp, synthetic construct
  source 1..20: mol_type = other DNA
agcctatgtcttcatctgaa

SEQ ID NO: 267502 - DNA, 20 bp, synthetic construct
  source 1..20: mol_type = other DNA
aagcctatgtcttcatctga

SEQ ID NO: 267503 - DNA, 20 bp, synthetic construct
  source 1..20: mol_type = other DNA
taagcctatgtcttcatctg

SEQ ID NO: 267504 - DNA, 20 bp, synthetic construct
  source 1..20: mol_type = other DNA
ttaagcctatgtcttcatct

SEQ ID NO: 267505 - DNA, 20 bp, synthetic construct
  source 1..20: mol_type = other DNA
cttaagcctatgtcttcatc

SEQ ID NO: 267506 - DNA, 20 bp, synthetic construct
  source 1..20: mol_type = other DNA
ccttaagcctatgtcttcat

SEQ ID NO: 267507 - DNA, 20 bp, synthetic construct
  source 1..20: mol_type = other DNA
tccttaagcctatgtcttca

SEQ ID NO: 267508 - DNA, 20 bp, synthetic construct
  source 1..20: mol_type = other DNA
ctccttaagcctatgtcttc

SEQ ID NO: 267509 - DNA, 20 bp, synthetic construct
  source 1..20: mol_type = other DNA
cctccttaagcctatgtctt

SEQ ID NO: 267510 - DNA, 20 bp, synthetic construct
  source 1..20: mol_type = other DNA
acctccttaagcctatgtct

SEQ ID NO: 267511 - DNA, 20 bp, synthetic construct
  source 1..20: mol_type = other DNA
gacctccttaagcctatgtc

SEQ ID NO: 267512 - DNA, 20 bp, synthetic construct
  source 1..20: mol_type = other DNA
tgacctccttaagcctatgt

SEQ ID NO: 267513 - DNA, 20 bp, synthetic construct
  source 1..20: mol_type = other DNA
ctgacctccttaagcctatg

SEQ ID NO: 267514 - DNA, 20 bp, synthetic construct
  source 1..20: mol_type = other DNA
cctgacctccttaagcctat

SEQ ID NO: 267515 - DNA, 20 bp, synthetic construct
  source 1..20: mol_type = other DNA
acctgacctccttaagccta

SEQ ID NO: 267516 - DNA, 20 bp, synthetic construct
  source 1..20: mol_type = other DNA
cacctgacctccttaagcct

SEQ ID NO: 267517 - DNA, 20 bp, synthetic construct
  source 1..20: mol_type = other DNA
tcacctgacctccttaagcc

SEQ ID NO: 267518 - DNA, 20 bp, synthetic construct
  source 1..20: mol_type = other DNA
gtcacctgacctccttaagc

SEQ ID NO: 267519 - DNA, 20 bp, synthetic construct
  source 1..20: mol_type = other DNA
agtcacctgacctccttaag

SEQ ID NO: 267520 - DNA, 20 bp, synthetic construct
  source 1..20: mol_type = other DNA
aagtcacctgacctccttaa

SEQ ID NO: 267521 - DNA, 20 bp, synthetic construct
  source 1..20: mol_type = other DNA
caagtcacctgacctcctta

SEQ ID NO: 267522 - DNA, 20 bp, synthetic construct
  source 1..20: mol_type = other DNA
gcaagtcacctgacctcctt

SEQ ID NO: 267523 - DNA, 20 bp, synthetic construct
  source 1..20: mol_type = other DNA
ggcaagtcacctgacctcct

SEQ ID NO: 267524 - DNA, 20 bp, synthetic construct
  source 1..20: mol_type = other DNA
gggcaagtcacctgacctcc

SEQ ID NO: 267525 - DNA, 20 bp, synthetic construct
  source 1..20: mol_type = other DNA
tgggcaagtcacctgacctc

SEQ ID NO: 267526 - DNA, 20 bp, synthetic construct
  source 1..20: mol_type = other DNA
gtgggcaagtcacctgacct

SEQ ID NO: 267527 - DNA, 20 bp, synthetic construct
  source 1..20: mol_type = other DNA
cgtgggcaagtcacctgacc

SEQ ID NO: 267528 - DNA, 20 bp, synthetic construct
  source 1..20: mol_type = other DNA
tcgtgggcaagtcacctgac

SEQ ID NO: 267529 - DNA, 20 bp, synthetic construct
  source 1..20: mol_type = other DNA
gtcgtgggcaagtcacctga

SEQ ID NO: 267530 - DNA, 20 bp, synthetic construct
  source 1..20: mol_type = other DNA
ggtcgtgggcaagtcacctg

SEQ ID NO: 267531 - DNA, 20 bp, synthetic construct
  source 1..20: mol_type = other DNA
tggtcgtgggcaagtcacct

SEQ ID NO: 267532 - DNA, 20 bp, synthetic construct
  source 1..20: mol_type = other DNA
gtggtcgtgggcaagtcacc

SEQ ID NO: 267533 - DNA, 20 bp, synthetic construct
  source 1..20: mol_type = other DNA
agtggtcgtgggcaagtcac

SEQ ID NO: 267534 - DNA, 20 bp, synthetic construct
  source 1..20: mol_type = other DNA
gagtggtcgtgggcaagtca

SEQ ID NO: 267535 - DNA, 20 bp, synthetic construct
  source 1..20: mol_type = other DNA
agagtggtcgtgggcaagtc

SEQ ID NO: 267536 - DNA, 20 bp, synthetic construct
  source 1..20: mol_type = other DNA
cagagtggtcgtgggcaagt

SEQ ID NO: 267537 - DNA, 20 bp, synthetic construct
  source 1..20: mol_type = other DNA
acagagtggtcgtgggcaag

SEQ ID NO: 267538 - DNA, 20 bp, synthetic construct
  source 1..20: mol_type = other DNA
tacagagtggtcgtgggcaa

SEQ ID NO: 267539 - DNA, 20 bp, synthetic construct
  source 1..20: mol_type = other DNA
ttacagagtggtcgtgggca

SEQ ID NO: 267540 - DNA, 20 bp, synthetic construct
  source 1..20: mol_type = other DNA
tttacagagtggtcgtgggc

SEQ ID NO: 267541 - DNA, 20 bp, synthetic construct
  source 1..20: mol_type = other DNA
atttacagagtggtcgtggg

SEQ ID NO: 267542 - DNA, 20 bp, synthetic construct
  source 1..20: mol_type = other DNA
tatttacagagtggtcgtgg

SEQ ID NO: 267543 - DNA, 20 bp, synthetic construct
  source 1..20: mol_type = other DNA
ttatttacagagtggtcgtg

SEQ ID NO: 267544 - DNA, 20 bp, synthetic construct
  source 1..20: mol_type = other DNA
cttatttacagagtggtcgt

SEQ ID NO: 267545 - DNA, 20 bp, synthetic construct
  source 1..20: mol_type = other DNA
tcttatttacagagtggtcg

SEQ ID NO: 267546 - DNA, 20 bp, synthetic construct
  source 1..20: mol_type = other DNA
ctcttatttacagagtggtc

SEQ ID NO: 267547 - DNA, 20 bp, synthetic construct
  source 1..20: mol_type = other DNA
cctcttatttacagagtggt

SEQ ID NO: 267548 - DNA, 20 bp, synthetic construct
  source 1..20: mol_type = other DNA
gcctcttatttacagagtgg

SEQ ID NO: 267549 - DNA, 20 bp, synthetic construct
  source 1..20: mol_type = other DNA
tgcctcttatttacagagtg

SEQ ID NO: 267550 - DNA, 20 bp, synthetic construct
  source 1..20: mol_type = other DNA
atgcctcttatttacagagt

SEQ ID NO: 267551 - DNA, 20 bp, synthetic construct
  source 1..20: mol_type = other DNA
catgcctcttatttacagag

SEQ ID NO: 267552 - DNA, 20 bp, synthetic construct
  source 1..20: mol_type = other DNA
tcatgcctcttatttacaga

SEQ ID NO: 267553 - DNA, 20 bp, synthetic construct
  source 1..20: mol_type = other DNA
ttcatgcctcttatttacag

SEQ ID NO: 267554 - DNA, 20 bp, synthetic construct
  source 1..20: mol_type = other DNA
tttcatgcctcttatttaca

SEQ ID NO: 267555 - DNA, 20 bp, synthetic construct
  source 1..20: mol_type = other DNA
ttttcatgcctcttatttac

SEQ ID NO: 267556 - DNA, 20 bp, synthetic construct
  source 1..20: mol_type = other DNA
cttttcatgcctcttattta

SEQ ID NO: 267557 - DNA, 20 bp, synthetic construct
  source 1..20: mol_type = other DNA
acttttcatgcctcttattt

SEQ ID NO: 267558 - DNA, 20 bp, synthetic construct
  source 1..20: mol_type = other DNA
tacttttcatgcctcttatt

SEQ ID NO: 267559 - DNA, 20 bp, synthetic construct
  source 1..20: mol_type = other DNA
atacttttcatgcctcttat

SEQ ID NO: 267560 - DNA, 20 bp, synthetic construct
  source 1..20: mol_type = other DNA
aatacttttcatgcctctta

SEQ ID NO: 267561 - DNA, 20 bp, synthetic construct
  source 1..20: mol_type = other DNA
aaatacttttcatgcctctt

SEQ ID NO: 267562 - DNA, 20 bp, synthetic construct
  source 1..20: mol_type = other DNA
caaatacttttcatgcctct

SEQ ID NO: 267563 - DNA, 20 bp, synthetic construct
  source 1..20: mol_type = other DNA
ccaaatacttttcatgcctc

SEQ ID NO: 267564 - DNA, 20 bp, synthetic construct
  source 1..20: mol_type = other DNA
tccaaatacttttcatgcct

SEQ ID NO: 267565 - DNA, 20 bp, synthetic construct
  source 1..20: mol_type = other DNA
ctccaaatacttttcatgcc

SEQ ID NO: 267566 - DNA, 20 bp, synthetic construct
  source 1..20: mol_type = other DNA
gctccaaatacttttcatgc

SEQ ID NO: 267567 - DNA, 20 bp, synthetic construct
  source 1..20: mol_type = other DNA
ggctccaaatacttttcatg

SEQ ID NO: 267568 - DNA, 20 bp, synthetic construct
  source 1..20: mol_type = other DNA
tggctccaaatacttttcat

SEQ ID NO: 267569 - DNA, 20 bp, synthetic construct
  source 1..20: mol_type = other DNA
gtggctccaaatacttttca

SEQ ID NO: 267570 - DNA, 20 bp, synthetic construct
  source 1..20: mol_type = other DNA
ggtggctccaaatacttttc

SEQ ID NO: 267571 - DNA, 20 bp, synthetic construct
  source 1..20: mol_type = other DNA
tggtggctccaaatactttt

SEQ ID NO: 267572 - DNA, 20 bp, synthetic construct
  source 1..20: mol_type = other DNA
gtggtggctccaaatacttt

SEQ ID NO: 267573 - DNA, 20 bp, synthetic construct
  source 1..20: mol_type = other DNA
ggtggtggctccaaatactt

SEQ ID NO: 267574 - DNA, 20 bp, synthetic construct
  source 1..20: mol_type = other DNA
tggtggtggctccaaatact

SEQ ID NO: 267575 - DNA, 20 bp, synthetic construct
  source 1..20: mol_type = other DNA
gtggtggtggctccaaatac

SEQ ID NO: 267576 - DNA, 20 bp, synthetic construct
  source 1..20: mol_type = other DNA
ggtggtggtggctccaaata

SEQ ID NO: 267577 - DNA, 20 bp, synthetic construct
  source 1..20: mol_type = other DNA
tggtggtggtggctccaaat

SEQ ID NO: 267578 - DNA, 20 bp, synthetic construct
  source 1..20: mol_type = other DNA
ttggtggtggtggctccaaa

SEQ ID NO: 267579 - DNA, 20 bp, synthetic construct
  source 1..20: mol_type = other DNA
cttggtggtggtggctccaa

SEQ ID NO: 267580 - DNA, 20 bp, synthetic construct
  source 1..20: mol_type = other DNA
gcttggtggtggtggctcca

SEQ ID NO: 267581 - DNA, 20 bp, synthetic construct
  source 1..20: mol_type = other DNA
ggcttggtggtggtggctcc

SEQ ID NO: 267582 - DNA, 20 bp, synthetic construct
  source 1..20: mol_type = other DNA
gggcttggtggtggtggctc

SEQ ID NO: 267583 - DNA, 20 bp, synthetic construct
  source 1..20: mol_type = other DNA
tgggcttggtggtggtggct

SEQ ID NO: 267584 - DNA, 20 bp, synthetic construct
  source 1..20: mol_type = other DNA
gtgggcttggtggtggtggc

SEQ ID NO: 267585 - DNA, 20 bp, synthetic construct
  source 1..20: mol_type = other DNA
agtgggcttggtggtggtgg

SEQ ID NO: 267586 - DNA, 20 bp, synthetic construct
  source 1..20: mol_type = other DNA
cagtgggcttggtggtggtg

SEQ ID NO: 267587 - DNA, 20 bp, synthetic construct
  source 1..20: mol_type = other DNA
ccagtgggcttggtggtggt

SEQ ID NO: 267588 - DNA, 20 bp, synthetic construct
  source 1..20: mol_type = other DNA
accagtgggcttggtggtgg

SEQ ID NO: 267589 - DNA, 20 bp, synthetic construct
  source 1..20: mol_type = other DNA
gaccagtgggcttggtggtg

SEQ ID NO: 267590 - DNA, 20 bp, synthetic construct
  source 1..20: mol_type = other DNA
tgaccagtgggcttggtggt

SEQ ID NO: 267591 - DNA, 20 bp, synthetic construct
  source 1..20: mol_type = other DNA
gtgaccagtgggcttggtgg

SEQ ID NO: 267592 - DNA, 20 bp, synthetic construct
  source 1..20: mol_type = other DNA
ggtgaccagtgggcttggtg

SEQ ID NO: 267593 - DNA, 20 bp, synthetic construct
  source 1..20: mol_type = other DNA
gggtgaccagtgggcttggt

SEQ ID NO: 267594 - DNA, 20 bp, synthetic construct
  source 1..20: mol_type = other DNA
agggtgaccagtgggcttgg

SEQ ID NO: 267595 - DNA, 20 bp, synthetic construct
  source 1..20: mol_type = other DNA
cagggtgaccagtgggcttg

SEQ ID NO: 267596 - DNA, 20 bp, synthetic construct
  source 1..20: mol_type = other DNA
ccagggtgaccagtgggctt

SEQ ID NO: 267597 - DNA, 20 bp, synthetic construct
  source 1..20: mol_type = other DNA
cccagggtgaccagtgggct

SEQ ID NO: 267598 - DNA, 20 bp, synthetic construct
  source 1..20: mol_type = other DNA
acccagggtgaccagtgggc

SEQ ID NO: 267599 - DNA, 20 bp, synthetic construct
  source 1..20: mol_type = other DNA
gacccagggtgaccagtggg

SEQ ID NO: 267600 - DNA, 20 bp, synthetic construct
  source 1..20: mol_type = other DNA
agacccagggtgaccagtgg

SEQ ID NO: 267601 - DNA, 20 bp, synthetic construct
  source 1..20: mol_type = other DNA
gagacccagggtgaccagtg

SEQ ID NO: 267602 - DNA, 20 bp, synthetic construct
  source 1..20: mol_type = other DNA
agagacccagggtgaccagt

SEQ ID NO: 267603 - DNA, 20 bp, synthetic construct
  source 1..20: mol_type = other DNA
cagagacccagggtgaccag

SEQ ID NO: 267604 - DNA, 20 bp, synthetic construct
  source 1..20: mol_type = other DNA
tcagagacccagggtgacca

SEQ ID NO: 267605 - DNA, 20 bp, synthetic construct
  source 1..20: mol_type = other DNA
ttcagagacccagggtgacc

SEQ ID NO: 267606 - DNA, 20 bp, synthetic construct
  source 1..20: mol_type = other DNA
cttcagagacccagggtgac

SEQ ID NO: 267607 - DNA, 20 bp, synthetic construct
  source 1..20: mol_type = other DNA
acttcagagacccagggtga

SEQ ID NO: 267608 - DNA, 20 bp, synthetic construct
  source 1..20: mol_type = other DNA
gacttcagagacccagggtg

SEQ ID NO: 267609 - DNA, 20 bp, synthetic construct
  source 1..20: mol_type = other DNA
tgacttcagagacccagggt

SEQ ID NO: 267610 - DNA, 20 bp, synthetic construct
  source 1..20: mol_type = other DNA
ctgacttcagagacccaggg

SEQ ID NO: 267611 - DNA, 20 bp, synthetic construct
  source 1..20: mol_type = other DNA
cctgacttcagagacccagg

SEQ ID NO: 267612 - DNA, 20 bp, synthetic construct
  source 1..20: mol_type = other DNA
ccctgacttcagagacccag

SEQ ID NO: 267613 - DNA, 20 bp, synthetic construct
  source 1..20: mol_type = other DNA
tccctgacttcagagaccca

SEQ ID NO: 267614 - DNA, 20 bp, synthetic construct
  source 1..20: mol_type = other DNA
ctccctgacttcagagaccc

SEQ ID NO: 267615 - DNA, 20 bp, synthetic construct
  source 1..20: mol_type = other DNA
cctccctgacttcagagacc

SEQ ID NO: 267616 - DNA, 20 bp, synthetic construct
  source 1..20: mol_type = other DNA
gcctccctgacttcagagac

SEQ ID NO: 267617 - DNA, 20 bp, synthetic construct
  source 1..20: mol_type = other DNA
tgcctccctgacttcagaga

SEQ ID NO: 267618 - DNA, 20 bp, synthetic construct
  source 1..20: mol_type = other DNA
ctgcctccctgacttcagag

SEQ ID NO: 267619 - DNA, 20 bp, synthetic construct
  source 1..20: mol_type = other DNA
cctgcctccctgacttcaga

SEQ ID NO: 267620 - DNA, 20 bp, synthetic construct
  source 1..20: mol_type = other DNA
tcctgcctccctgacttcag

SEQ ID NO: 267621 - DNA, 20 bp, synthetic construct
  source 1..20: mol_type = other DNA
ctcctgcctccctgacttca

SEQ ID NO: 267622 - DNA, 20 bp, synthetic construct
  source 1..20: mol_type = other DNA
cctcctgcctccctgacttc

SEQ ID NO: 267623 - DNA, 20 bp, synthetic construct
  source 1..20: mol_type = other DNA
tcctcctgcctccctgactt

SEQ ID NO: 267624 - DNA, 20 bp, synthetic construct
  source 1..20: mol_type = other DNA
atcctcctgcctccctgact

SEQ ID NO: 267625 - DNA, 20 bp, synthetic construct
  source 1..20: mol_type = other DNA
catcctcctgcctccctgac

SEQ ID NO: 267626 - DNA, 20 bp, synthetic construct
  source 1..20: mol_type = other DNA
ccatcctcctgcctccctga

SEQ ID NO: 267627 - DNA, 20 bp, synthetic construct
  source 1..20: mol_type = other DNA
cccatcctcctgcctccctg

SEQ ID NO: 267628 - DNA, 20 bp, synthetic construct
  source 1..20: mol_type = other DNA
tcccatcctcctgcctccct

SEQ ID NO: 267629 - DNA, 20 bp, synthetic construct
  source 1..20: mol_type = other DNA
ctcccatcctcctgcctccc

SEQ ID NO: 267630 - DNA, 20 bp, synthetic construct
  source 1..20: mol_type = other DNA
cctcccatcctcctgcctcc

SEQ ID NO: 267631 - DNA, 20 bp, synthetic construct
  source 1..20: mol_type = other DNA
acctcccatcctcctgcctc

SEQ ID NO: 267632 - DNA, 20 bp, synthetic construct
  source 1..20: mol_type = other DNA
gacctcccatcctcctgcct

SEQ ID NO: 267633 - DNA, 20 bp, synthetic construct
  source 1..20: mol_type = other DNA
agacctcccatcctcctgcc

SEQ ID NO: 267634 - DNA, 20 bp, synthetic construct
  source 1..20: mol_type = other DNA
cagacctcccatcctcctgc

SEQ ID NO: 267635 - DNA, 20 bp, synthetic construct
  source 1..20: mol_type = other DNA
tcagacctcccatcctcctg

SEQ ID NO: 267636 - DNA, 20 bp, synthetic construct
  source 1..20: mol_type = other DNA
ctcagacctcccatcctcct

SEQ ID NO: 267637 - DNA, 20 bp, synthetic construct
  source 1..20: mol_type = other DNA
cctcagacctcccatcctcc

SEQ ID NO: 267638 - DNA, 20 bp, synthetic construct
  source 1..20: mol_type = other DNA
tcctcagacctcccatcctc

SEQ ID NO: 267639 - DNA, 20 bp, synthetic construct
  source 1..20: mol_type = other DNA
ctcctcagacctcccatcct

SEQ ID NO: 267640 - DNA, 20 bp, synthetic construct
  source 1..20: mol_type = other DNA
cctcctcagacctcccatcc

SEQ ID NO: 267641 - DNA, 20 bp, synthetic construct
  source 1..20: mol_type = other DNA
gcctcctcagacctcccatc

SEQ ID NO: 267642 - DNA, 20 bp, synthetic construct
  source 1..20: mol_type = other DNA
tgcctcctcagacctcccat

SEQ ID NO: 267643 - DNA, 20 bp, synthetic construct
  source 1..20: mol_type = other DNA
ctgcctcctcagacctccca

SEQ ID NO: 267644 - DNA, 20 bp, synthetic construct
  source 1..20: mol_type = other DNA
tctgcctcctcagacctccc

SEQ ID NO: 267645 - DNA, 20 bp, synthetic construct
  source 1..20: mol_type = other DNA
ctctgcctcctcagacctcc

SEQ ID NO: 267646 - DNA, 20 bp, synthetic construct
  source 1..20: mol_type = other DNA
tctctgcctcctcagacctc

SEQ ID NO: 267647 - DNA, 20 bp, synthetic construct
  source 1..20: mol_type = other DNA
ctctctgcctcctcagacct

SEQ ID NO: 267648 - DNA, 20 bp, synthetic construct
  source 1..20: mol_type = other DNA
cctctctgcctcctcagacc

SEQ ID NO: 267649 - DNA, 20 bp, synthetic construct
  source 1..20: mol_type = other DNA
gcctctctgcctcctcagac

SEQ ID NO: 267650 - DNA, 20 bp, synthetic construct
  source 1..20: mol_type = other DNA
agcctctctgcctcctcaga

SEQ ID NO: 267651 - DNA, 20 bp, synthetic construct
  source 1..20: mol_type = other DNA
cagcctctctgcctcctcag

SEQ ID NO: 267652 - DNA, 20 bp, synthetic construct
  source 1..20: mol_type = other DNA
tcagcctctctgcctcctca

SEQ ID NO: 267653 - DNA, 20 bp, synthetic construct
  source 1..20: mol_type = other DNA
ctcagcctctctgcctcctc

SEQ ID NO: 267654 - DNA, 20 bp, synthetic construct
  source 1..20: mol_type = other DNA
gctcagcctctctgcctcct

SEQ ID NO: 267655 - DNA, 20 bp, synthetic construct
  source 1..20: mol_type = other DNA
ggctcagcctctctgcctcc

SEQ ID NO: 267656 - DNA, 20 bp, synthetic construct
  source 1..20: mol_type = other DNA
aggctcagcctctctgcctc

SEQ ID NO: 267657 - DNA, 20 bp, synthetic construct
  source 1..20: mol_type = other DNA
caggctcagcctctctgcct

SEQ ID NO: 267658 - DNA, 20 bp, synthetic construct
  source 1..20: mol_type = other DNA
ccaggctcagcctctctgcc

SEQ ID NO: 267659 - DNA, 20 bp, synthetic construct
  source 1..20: mol_type = other DNA
tccaggctcagcctctctgc

SEQ ID NO: 267660 - DNA, 20 bp, synthetic construct
  source 1..20: mol_type = other DNA
ctccaggctcagcctctctg

SEQ ID NO: 267661 - DNA, 20 bp, synthetic construct
  source 1..20: mol_type = other DNA
cctccaggctcagcctctct

SEQ ID NO: 267662 - DNA, 20 bp, synthetic construct
  source 1..20: mol_type = other DNA
gcctccaggctcagcctctc

SEQ ID NO: 267663 - DNA, 20 bp, synthetic construct
  source 1..20: mol_type = other DNA
ggcctccaggctcagcctct

SEQ ID NO: 267664 - DNA, 20 bp, synthetic construct
  source 1..20: mol_type = other DNA
gggcctccaggctcagcctc

SEQ ID NO: 267665 - DNA, 20 bp, synthetic construct
  source 1..20: mol_type = other DNA
agggcctccaggctcagcct

SEQ ID NO: 267666 - DNA, 20 bp, synthetic construct
  source 1..20: mol_type = other DNA
cagggcctccaggctcagcc

SEQ ID NO: 267667 - DNA, 20 bp, synthetic construct
  source 1..20: mol_type = other DNA
ccagggcctccaggctcagc

SEQ ID NO: 267668 - DNA, 20 bp, synthetic construct
  source 1..20: mol_type = other DNA
tccagggcctccaggctcag

SEQ ID NO: 267669 - DNA, 20 bp, synthetic construct
  source 1..20: mol_type = other DNA
ctccagggcctccaggctca

SEQ ID NO: 267670 - DNA, 20 bp, synthetic construct
  source 1..20: mol_type = other DNA
cctccagggcctccaggctc

SEQ ID NO: 267671 - DNA, 20 bp, synthetic construct
  source 1..20: mol_type = other DNA
gcctccagggcctccaggct

SEQ ID NO: 267672 - DNA, 20 bp, synthetic construct
  source 1..20: mol_type = other DNA
ggcctccagggcctccaggc

SEQ ID NO: 267673 - DNA, 20 bp, synthetic construct
  source 1..20: mol_type = other DNA
cggcctccagggcctccagg

SEQ ID NO: 267674 - DNA, 20 bp, synthetic construct
  source 1..20: mol_type = other DNA
tcggcctccagggcctccag

SEQ ID NO: 267675 - DNA, 20 bp, synthetic construct
  source 1..20: mol_type = other DNA
ctcggcctccagggcctcca

SEQ ID NO: 267676 - DNA, 20 bp, synthetic construct
  source 1..20: mol_type = other DNA
cctcggcctccagggcctcc

SEQ ID NO: 267677 - DNA, 20 bp, synthetic construct
  source 1..20: mol_type = other DNA
gcctcggcctccagggcctc

SEQ ID NO: 267678 - DNA, 20 bp, synthetic construct
  source 1..20: mol_type = other DNA
ggcctcggcctccagggcct

SEQ ID NO: 267679 - DNA, 20 bp, synthetic construct
  source 1..20: mol_type = other DNA
gggcctcggcctccagggcc

SEQ ID NO: 267680 - DNA, 20 bp, synthetic construct
  source 1..20: mol_type = other DNA
ggggcctcggcctccagggc

SEQ ID NO: 267681 - DNA, 20 bp, synthetic construct
  source 1..20: mol_type = other DNA
tggggcctcggcctccaggg

SEQ ID NO: 267682 - DNA, 20 bp, synthetic construct
  source 1..20: mol_type = other DNA
atggggcctcggcctccagg

SEQ ID NO: 267683 - DNA, 20 bp, synthetic construct
  source 1..20: mol_type = other DNA
gatggggcctcggcctccag

SEQ ID NO: 267684 - DNA, 20 bp, synthetic construct
  source 1..20: mol_type = other DNA
agatggggcctcggcctcca

SEQ ID NO: 267685 - DNA, 20 bp, synthetic construct
  source 1..20: mol_type = other DNA
cagatggggcctcggcctcc

SEQ ID NO: 267686 - DNA, 20 bp, synthetic construct
  source 1..20: mol_type = other DNA
acagatggggcctcggcctc

SEQ ID NO: 267687 - DNA, 20 bp, synthetic construct
  source 1..20: mol_type = other DNA
aacagatggggcctcggcct

SEQ ID NO: 267688 - DNA, 20 bp, synthetic construct
  source 1..20: mol_type = other DNA
caacagatggggcctcggcc

SEQ ID NO: 267689 - DNA, 20 bp, synthetic construct
  source 1..20: mol_type = other DNA
acaacagatggggcctcggc

SEQ ID NO: 267690 - DNA, 20 bp, synthetic construct
  source 1..20: mol_type = other DNA
aacaacagatggggcctcgg

SEQ ID NO: 267691 - DNA, 20 bp, synthetic construct
  source 1..20: mol_type = other DNA
aaacaacagatggggcctcg

SEQ ID NO: 267692 - DNA, 20 bp, synthetic construct
  source 1..20: mol_type = other DNA
gaaacaacagatggggcctc

SEQ ID NO: 267693 - DNA, 20 bp, synthetic construct
  source 1..20: mol_type = other DNA
ggaaacaacagatggggcct

SEQ ID NO: 267694 - DNA, 20 bp, synthetic construct
  source 1..20: mol_type = other DNA
aggaaacaacagatggggcc

SEQ ID NO: 267695 - DNA, 20 bp, synthetic construct
  source 1..20: mol_type = other DNA
aaggaaacaacagatggggc

SEQ ID NO: 267696 - DNA, 20 bp, synthetic construct
  source 1..20: mol_type = other DNA
taaggaaacaacagatgggg

SEQ ID NO: 267697 - DNA, 20 bp, synthetic construct
  source 1..20: mol_type = other DNA
ataaggaaacaacagatggg

SEQ ID NO: 267698 - DNA, 20 bp, synthetic construct
  source 1..20: mol_type = other DNA
cataaggaaacaacagatgg

SEQ ID NO: 267699 - DNA, 20 bp, synthetic construct
  source 1..20: mol_type = other DNA
acataaggaaacaacagatg

SEQ ID NO: 267700 - DNA, 20 bp, synthetic construct
  source 1..20: mol_type = other DNA
cacataaggaaacaacagat

SEQ ID NO: 267701 - DNA, 20 bp, synthetic construct
  source 1..20: mol_type = other DNA
ccacataaggaaacaacaga

SEQ ID NO: 267702 - DNA, 20 bp, synthetic construct
  source 1..20: mol_type = other DNA
tccacataaggaaacaacag

SEQ ID NO: 267703 - DNA, 20 bp, synthetic construct
  source 1..20: mol_type = other DNA
ttccacataaggaaacaaca

SEQ ID NO: 267704 - DNA, 20 bp, synthetic construct
  source 1..20: mol_type = other DNA
tttccacataaggaaacaac

SEQ ID NO: 267705 - DNA, 20 bp, synthetic construct
  source 1..20: mol_type = other DNA
ttttccacataaggaaacaa

SEQ ID NO: 267706 - DNA, 20 bp, synthetic construct
  source 1..20: mol_type = other DNA
attttccacataaggaaaca

SEQ ID NO: 267707 - DNA, 20 bp, synthetic construct
  source 1..20: mol_type = other DNA
tattttccacataaggaaac

SEQ ID NO: 267708 - DNA, 20 bp, synthetic construct
  source 1..20: mol_type = other DNA
ttattttccacataaggaaa

SEQ ID NO: 267709 - DNA, 20 bp, synthetic construct
  source 1..20: mol_type = other DNA
cttattttccacataaggaa

SEQ ID NO: 267710 - DNA, 20 bp, synthetic construct
  source 1..20: mol_type = other DNA
tcttattttccacataagga

SEQ ID NO: 267711 - DNA, 20 bp, synthetic construct
  source 1..20: mol_type = other DNA
ctcttattttccacataagg

SEQ ID NO: 267712 - DNA, 20 bp, synthetic construct
  source 1..20: mol_type = other DNA
cctcttattttccacataag

SEQ ID NO: 267713 - DNA, 20 bp, synthetic construct
  source 1..20: mol_type = other DNA
gcctcttattttccacataa

SEQ ID NO: 267714 - DNA, 20 bp, synthetic construct
  source 1..20: mol_type = other DNA
agcctcttattttccacata

SEQ ID NO: 267715 - DNA, 20 bp, synthetic construct
  source 1..20: mol_type = other DNA
aagcctcttattttccacat

SEQ ID NO: 267716 - DNA, 20 bp, synthetic construct
  source 1..20: mol_type = other DNA
gaagcctcttattttccaca

SEQ ID NO: 267717 - DNA, 20 bp, synthetic construct
  source 1..20: mol_type = other DNA
cgaagcctcttattttccac

SEQ ID NO: 267718 - DNA, 20 bp, synthetic construct
  source 1..20: mol_type = other DNA
acgaagcctcttattttcca

SEQ ID NO: 267719 - DNA, 20 bp, synthetic construct
  source 1..20: mol_type = other DNA
aacgaagcctcttattttcc

SEQ ID NO: 267720 - DNA, 20 bp, synthetic construct
  source 1..20: mol_type = other DNA
aaacgaagcctcttattttc

SEQ ID NO: 267721 - DNA, 20 bp, synthetic construct
  source 1..20: mol_type = other DNA
caaacgaagcctcttatttt

SEQ ID NO: 267722 - DNA, 20 bp, synthetic construct
  source 1..20: mol_type = other DNA
acaaacgaagcctcttattt

SEQ ID NO: 267723 - DNA, 20 bp, synthetic construct
  source 1..20: mol_type = other DNA
gacaaacgaagcctcttatt

SEQ ID NO: 267724 - DNA, 20 bp, synthetic construct
  source 1..20: mol_type = other DNA
ggacaaacgaagcctcttat

SEQ ID NO: 267725 - DNA, 20 bp, synthetic construct
  source 1..20: mol_type = other DNA
aggacaaacgaagcctctta

SEQ ID NO: 267726 - DNA, 20 bp, synthetic construct
  source 1..20: mol_type = other DNA
taggacaaacgaagcctctt

SEQ ID NO: 267727 - DNA, 20 bp, synthetic construct
  source 1..20: mol_type = other DNA
ataggacaaacgaagcctct

SEQ ID NO: 267728 - DNA, 20 bp, synthetic construct
  source 1..20: mol_type = other DNA
aataggacaaacgaagcctc

SEQ ID NO: 267729 - DNA, 20 bp, synthetic construct
  source 1..20: mol_type = other DNA
caataggacaaacgaagcct

SEQ ID NO: 267730 - DNA, 20 bp, synthetic construct
  source 1..20: mol_type = other DNA
gcaataggacaaacgaagcc

SEQ ID NO: 267731 - DNA, 20 bp, synthetic construct
  source 1..20: mol_type = other DNA
ggcaataggacaaacgaagc

SEQ ID NO: 267732 - DNA, 20 bp, synthetic construct
  source 1..20: mol_type = other DNA
tggcaataggacaaacgaag

SEQ ID NO: 267733 - DNA, 20 bp, synthetic construct
  source 1..20: mol_type = other DNA
gtggcaataggacaaacgaa

SEQ ID NO: 267734 - DNA, 20 bp, synthetic construct
  source 1..20: mol_type = other DNA
tgtggcaataggacaaacga

SEQ ID NO: 267735 - DNA, 20 bp, synthetic construct
  source 1..20: mol_type = other DNA
ctgtggcaataggacaaacg

SEQ ID NO: 267736 - DNA, 20 bp, synthetic construct
  source 1..20: mol_type = other DNA
tctgtggcaataggacaaac

SEQ ID NO: 267737 - DNA, 20 bp, synthetic construct
  source 1..20: mol_type = other DNA
ctctgtggcaataggacaaa

SEQ ID NO: 267738 - DNA, 20 bp, synthetic construct
  source 1..20: mol_type = other DNA
gctctgtggcaataggacaa

SEQ ID NO: 267739 - DNA, 20 bp, synthetic construct
  source 1..20: mol_type = other DNA
cgctctgtggcaataggaca

SEQ ID NO: 267740 - DNA, 20 bp, synthetic construct
  source 1..20: mol_type = other DNA
acgctctgtggcaataggac

SEQ ID NO: 267741 - DNA, 20 bp, synthetic construct
  source 1..20: mol_type = other DNA
tacgctctgtggcaatagga

SEQ ID NO: 267742 - DNA, 20 bp, synthetic construct
  source 1..20: mol_type = other DNA
gtacgctctgtggcaatagg

SEQ ID NO: 267743 - DNA, 20 bp, synthetic construct
  source 1..20: mol_type = other DNA
agtacgctctgtggcaatag

SEQ ID NO: 267744 - DNA, 20 bp, synthetic construct
  source 1..20: mol_type = other DNA
tagtacgctctgtggcaata

SEQ ID NO: 267745 - DNA, 20 bp, synthetic construct
  source 1..20: mol_type = other DNA
gtagtacgctctgtggcaat

SEQ ID NO: 267746 - DNA, 20 bp, synthetic construct
  source 1..20: mol_type = other DNA
agtagtacgctctgtggcaa

SEQ ID NO: 267747 - DNA, 20 bp, synthetic construct
  source 1..20: mol_type = other DNA
aagtagtacgctctgtggca

SEQ ID NO: 267748 - DNA, 20 bp, synthetic construct
  source 1..20: mol_type = other DNA
gaagtagtacgctctgtggc

SEQ ID NO: 267749 - DNA, 20 bp, synthetic construct
  source 1..20: mol_type = other DNA
tgaagtagtacgctctgtgg

SEQ ID NO: 267750 - DNA, 20 bp, synthetic construct
  source 1..20: mol_type = other DNA
ctgaagtagtacgctctgtg

SEQ ID NO: 267751 - DNA, 20 bp, synthetic construct
  source 1..20: mol_type = other DNA
cctgaagtagtacgctctgt

SEQ ID NO: 267752 - DNA, 20 bp, synthetic construct
  source 1..20: mol_type = other DNA
tcctgaagtagtacgctctg

SEQ ID NO: 267753 - DNA, 20 bp, synthetic construct
  source 1..20: mol_type = other DNA
ttcctgaagtagtacgctct

SEQ ID NO: 267754 - DNA, 20 bp, synthetic construct
  source 1..20: mol_type = other DNA
gttcctgaagtagtacgctc

SEQ ID NO: 267755 - DNA, 20 bp, synthetic construct
  source 1..20: mol_type = other DNA
tgttcctgaagtagtacgct

SEQ ID NO: 267756 - DNA, 20 bp, synthetic construct
  source 1..20: mol_type = other DNA
atgttcctgaagtagtacgc

SEQ ID NO: 267757 - DNA, 20 bp, synthetic construct
  source 1..20: mol_type = other DNA
gatgttcctgaagtagtacg

SEQ ID NO: 267758 - DNA, 20 bp, synthetic construct
  source 1..20: mol_type = other DNA
ggatgttcctgaagtagtac

SEQ ID NO: 267759 - DNA, 20 bp, synthetic construct
  source 1..20: mol_type = other DNA
tggatgttcctgaagtagta

SEQ ID NO: 267760 - DNA, 20 bp, synthetic construct
  source 1..20: mol_type = other DNA
ttggatgttcctgaagtagt

SEQ ID NO: 267761 - DNA, 20 bp, synthetic construct
  source 1..20: mol_type = other DNA
cttggatgttcctgaagtag

SEQ ID NO: 267762 - DNA, 20 bp, synthetic construct
  source 1..20: mol_type = other DNA
tcttggatgttcctgaagta

SEQ ID NO: 267763 - DNA, 20 bp, synthetic construct
  source 1..20: mol_type = other DNA
gtcttggatgttcctgaagt

SEQ ID NO: 267764 - DNA, 20 bp, synthetic construct
  source 1..20: mol_type = other DNA
tgtcttggatgttcctgaag

SEQ ID NO: 267765 - DNA, 20 bp, synthetic construct
  source 1..20: mol_type = other DNA
atgtcttggatgttcctgaa

SEQ ID NO: 267766 - DNA, 20 bp, synthetic construct
  source 1..20: mol_type = other DNA
catgtcttggatgttcctga

SEQ ID NO: 267767 - DNA, 20 bp, synthetic construct
  source 1..20: mol_type = other DNA
ccatgtcttggatgttcctg

SEQ ID NO: 267768 - DNA, 20 bp, synthetic construct
  source 1..20: mol_type = other DNA
tccatgtcttggatgttcct

SEQ ID NO: 267769 - DNA, 20 bp, synthetic construct
  source 1..20: mol_type = other DNA
ttccatgtcttggatgttcc

SEQ ID NO: 267770 - DNA, 20 bp, synthetic construct
  source 1..20: mol_type = other DNA
tttccatgtcttggatgttc

SEQ ID NO: 267771 - DNA, 20 bp, synthetic construct
  source 1..20: mol_type = other DNA
atttccatgtcttggatgtt

SEQ ID NO: 267772 - DNA, 20 bp, synthetic construct
  source 1..20: mol_type = other DNA
gatttccatgtcttggatgt

SEQ ID NO: 267773 - DNA, 20 bp, synthetic construct
  source 1..20: mol_type = other DNA
ggatttccatgtcttggatg

SEQ ID NO: 267774 - DNA, 20 bp, synthetic construct
  source 1..20: mol_type = other DNA
cggatttccatgtcttggat

SEQ ID NO: 267775 - DNA, 20 bp, synthetic construct
  source 1..20: mol_type = other DNA
gcggatttccatgtcttgga

SEQ ID NO: 267776 - DNA, 20 bp, synthetic construct
  source 1..20: mol_type = other DNA
tgcggatttccatgtcttgg

SEQ ID NO: 267777 - DNA, 20 bp, synthetic construct
  source 1..20: mol_type = other DNA
ctgcggatttccatgtcttg

SEQ ID NO: 267778 - DNA, 20 bp, synthetic construct
  source 1..20: mol_type = other DNA
cctgcggatttccatgtctt

SEQ ID NO: 267779 - DNA, 20 bp, synthetic construct
  source 1..20: mol_type = other DNA
ccctgcggatttccatgtct

SEQ ID NO: 267780 - DNA, 20 bp, synthetic construct
  source 1..20: mol_type = other DNA
gccctgcggatttccatgtc

SEQ ID NO: 267781 - DNA, 20 bp, synthetic construct
  source 1..20: mol_type = other DNA
tgccctgcggatttccatgt

SEQ ID NO: 267782 - DNA, 20 bp, synthetic construct
  source 1..20: mol_type = other DNA
gtgccctgcggatttccatg

SEQ ID NO: 267783 - DNA, 20 bp, synthetic construct
  source 1..20: mol_type = other DNA
cgtgccctgcggatttccat

SEQ ID NO: 267784 - DNA, 20 bp, synthetic construct
  source 1..20: mol_type = other DNA
ccgtgccctgcggatttcca

SEQ ID NO: 267785 - DNA, 20 bp, synthetic construct
  source 1..20: mol_type = other DNA
accgtgccctgcggatttcc

SEQ ID NO: 267786 - DNA, 20 bp, synthetic construct
  source 1..20: mol_type = other DNA
caccgtgccctgcggatttc

SEQ ID NO: 267787 - DNA, 20 bp, synthetic construct
  source 1..20: mol_type = other DNA
ccaccgtgccctgcggattt

SEQ ID NO: 267788 - DNA, 20 bp, synthetic construct
  source 1..20: mol_type = other DNA
gccaccgtgccctgcggatt

SEQ ID NO: 267789 - DNA, 20 bp, synthetic construct
  source 1..20: mol_type = other DNA
agccaccgtgccctgcggat

SEQ ID NO: 267790 - DNA, 20 bp, synthetic construct
  source 1..20: mol_type = other DNA
gagccaccgtgccctgcgga

SEQ ID NO: 267791 - DNA, 20 bp, synthetic construct
  source 1..20: mol_type = other DNA
tgagccaccgtgccctgcgg

SEQ ID NO: 267792 - DNA, 20 bp, synthetic construct
  source 1..20: mol_type = other DNA
gtgagccaccgtgccctgcg

SEQ ID NO: 267793 - DNA, 20 bp, synthetic construct
  source 1..20: mol_type = other DNA
cgtgagccaccgtgccctgc

SEQ ID NO: 267794 - DNA, 20 bp, synthetic construct
  source 1..20: mol_type = other DNA
acgtgagccaccgtgccctg

SEQ ID NO: 267795 - DNA, 20 bp, synthetic construct
  source 1..20: mol_type = other DNA
gacgtgagccaccgtgccct

SEQ ID NO: 267796 - DNA, 20 bp, synthetic construct
  source 1..20: mol_type = other DNA
agacgtgagccaccgtgccc

SEQ ID NO: 267797 - DNA, 20 bp, synthetic construct
  source 1..20: mol_type = other DNA
tagacgtgagccaccgtgcc

SEQ ID NO: 267798 - DNA, 20 bp, synthetic construct
  source 1..20: mol_type = other DNA
atagacgtgagccaccgtgc

SEQ ID NO: 267799 - DNA, 20 bp, synthetic construct
  source 1..20: mol_type = other DNA
tatagacgtgagccaccgtg

SEQ ID NO: 267800 - DNA, 20 bp, synthetic construct
  source 1..20: mol_type = other DNA
ttatagacgtgagccaccgt

SEQ ID NO: 267801 - DNA, 20 bp, synthetic construct
  source 1..20: mol_type = other DNA
attatagacgtgagccaccg

SEQ ID NO: 267802 - DNA, 20 bp, synthetic construct
  source 1..20: mol_type = other DNA
gattatagacgtgagccacc

SEQ ID NO: 267803 - DNA, 20 bp, synthetic construct
  source 1..20: mol_type = other DNA
ggattatagacgtgagccac

SEQ ID NO: 267804 - DNA, 20 bp, synthetic construct
  source 1..20: mol_type = other DNA
gggattatagacgtgagcca

SEQ ID NO: 267805 - DNA, 20 bp, synthetic construct
  source 1..20: mol_type = other DNA
cgggattatagacgtgagcc

SEQ ID NO: 267806 - DNA, 20 bp, synthetic construct
  source 1..20: mol_type = other DNA
ccgggattatagacgtgagc

SEQ ID NO: 267807 - DNA, 20 bp, synthetic construct
  source 1..20: mol_type = other DNA
gccgggattatagacgtgag

SEQ ID NO: 267808 - DNA, 20 bp, synthetic construct
  source 1..20: mol_type = other DNA
tgccgggattatagacgtga

SEQ ID NO: 267809 - DNA, 20 bp, synthetic construct
  source 1..20: mol_type = other DNA
gtgccgggattatagacgtg

SEQ ID NO: 267810 - DNA, 20 bp, synthetic construct
  source 1..20: mol_type = other DNA
agtgccgggattatagacgt

SEQ ID NO: 267811 - DNA, 20 bp, synthetic construct
  source 1..20: mol_type = other DNA
aagtgccgggattatagacg

SEQ ID NO: 267812 - DNA, 20 bp, synthetic construct
  source 1..20: mol_type = other DNA
aaagtgccgggattatagac

SEQ ID NO: 267813 - DNA, 20 bp, synthetic construct
  source 1..20: mol_type = other DNA
caaagtgccgggattataga

SEQ ID NO: 267814 - DNA, 20 bp, synthetic construct
  source 1..20: mol_type = other DNA
ccaaagtgccgggattatag

SEQ ID NO: 267815 - DNA, 20 bp, synthetic construct
  source 1..20: mol_type = other DNA
cccaaagtgccgggattata

SEQ ID NO: 267816 - DNA, 20 bp, synthetic construct
  source 1..20: mol_type = other DNA
tcccaaagtgccgggattat

SEQ ID NO: 267817 - DNA, 20 bp, synthetic construct
  source 1..20: mol_type = other DNA
ctcccaaagtgccgggatta

SEQ ID NO: 267818 - DNA, 20 bp, synthetic construct
  source 1..20: mol_type = other DNA
cctcccaaagtgccgggatt

SEQ ID NO: 267819 - DNA, 20 bp, synthetic construct
  source 1..20: mol_type = other DNA
acctcccaaagtgccgggat

SEQ ID NO: 267820 - DNA, 20 bp, synthetic construct
  source 1..20: mol_type = other DNA
aacctcccaaagtgccggga

SEQ ID NO: 267821 - DNA, 20 bp, synthetic construct
  source 1..20: mol_type = other DNA
caacctcccaaagtgccggg

SEQ ID NO: 267822 - DNA, 20 bp, synthetic construct
  source 1..20: mol_type = other DNA
tcaacctcccaaagtgccgg

SEQ ID NO: 267823 - DNA, 20 bp, synthetic construct
  source 1..20: mol_type = other DNA
ctcaacctcccaaagtgccg

SEQ ID NO: 267824 - DNA, 20 bp, synthetic construct
  source 1..20: mol_type = other DNA
cctcaacctcccaaagtgcc

SEQ ID NO: 267825 - DNA, 20 bp, synthetic construct
  source 1..20: mol_type = other DNA
acctcaacctcccaaagtgc

SEQ ID NO: 267826 - DNA, 20 bp, synthetic construct
  source 1..20: mol_type = other DNA
cacctcaacctcccaaagtg

SEQ ID NO: 267827 - DNA, 20 bp, synthetic construct
  source 1..20: mol_type = other DNA
ccacctcaacctcccaaagt

SEQ ID NO: 267828 - DNA, 20 bp, synthetic construct
  source 1..20: mol_type = other DNA
cccacctcaacctcccaaag

SEQ ID NO: 267829 - DNA, 20 bp, synthetic construct
  source 1..20: mol_type = other DNA
tcccacctcaacctcccaaa

SEQ ID NO: 267830 - DNA, 20 bp, synthetic construct
  source 1..20: mol_type = other DNA
ctcccacctcaacctcccaa

SEQ ID NO: 267831 - DNA, 20 bp, synthetic construct
  source 1..20: mol_type = other DNA
tctcccacctcaacctccca

SEQ ID NO: 267832 - DNA, 20 bp, synthetic construct
  source 1..20: mol_type = other DNA
ttctcccacctcaacctccc

SEQ ID NO: 267833 - DNA, 20 bp, synthetic construct
  source 1..20: mol_type = other DNA
attctcccacctcaacctcc

SEQ ID NO: 267834 - DNA, 20 bp, synthetic construct
  source 1..20: mol_type = other DNA
gattctcccacctcaacctc

SEQ ID NO: 267835 - DNA, 20 bp, synthetic construct
  source 1..20: mol_type = other DNA
cgattctcccacctcaacct

SEQ ID NO: 267836 - DNA, 20 bp, synthetic construct
  source 1..20: mol_type = other DNA
gcgattctcccacctcaacc

SEQ ID NO: 267837 - DNA, 20 bp, synthetic construct
  source 1..20: mol_type = other DNA
agcgattctcccacctcaac

SEQ ID NO: 267838 - DNA, 20 bp, synthetic construct
  source 1..20: mol_type = other DNA
aagcgattctcccacctcaa

SEQ ID NO: 267839 - DNA, 20 bp, synthetic construct
  source 1..20: mol_type = other DNA
caagcgattctcccacctca

SEQ ID NO: 267840 - DNA, 20 bp, synthetic construct
  source 1..20: mol_type = other DNA
tcaagcgattctcccacctc

SEQ ID NO: 267841 - DNA, 20 bp, synthetic construct
  source 1..20: mol_type = other DNA
ctcaagcgattctcccacct

SEQ ID NO: 267842 - DNA, 20 bp, synthetic construct
  source 1..20: mol_type = other DNA
cctcaagcgattctcccacc

SEQ ID NO: 267843 - DNA, 20 bp, synthetic construct
  source 1..20: mol_type = other DNA
gcctcaagcgattctcccac

SEQ ID NO: 267844 - DNA, 20 bp, synthetic construct
  source 1..20: mol_type = other DNA
ggcctcaagcgattctccca

SEQ ID NO: 267845 - DNA, 20 bp, synthetic construct
  source 1..20: mol_type = other DNA
tggcctcaagcgattctccc

SEQ ID NO: 267846 - DNA, 20 bp, synthetic construct
  source 1..20: mol_type = other DNA
ctggcctcaagcgattctcc

SEQ ID NO: 267847 - DNA, 20 bp, synthetic construct
  source 1..20: mol_type = other DNA
tctggcctcaagcgattctc

SEQ ID NO: 267848 - DNA, 20 bp, synthetic construct
  source 1..20: mol_type = other DNA
ttctggcctcaagcgattct

SEQ ID NO: 267849 - DNA, 20 bp, synthetic construct
  source 1..20: mol_type = other DNA
cttctggcctcaagcgattc

SEQ ID NO: 267850 - DNA, 20 bp, synthetic construct
  source 1..20: mol_type = other DNA
acttctggcctcaagcgatt

SEQ ID NO: 267851 - DNA, 20 bp, synthetic construct
  source 1..20: mol_type = other DNA
aacttctggcctcaagcgat

SEQ ID NO: 267852 - DNA, 20 bp, synthetic construct
  source 1..20: mol_type = other DNA
gaacttctggcctcaagcga

SEQ ID NO: 267853 - DNA, 20 bp, synthetic construct
  source 1..20: mol_type = other DNA
tgaacttctggcctcaagcg

SEQ ID NO: 267854 - DNA, 20 bp, synthetic construct
  source 1..20: mol_type = other DNA
ttgaacttctggcctcaagc

SEQ ID NO: 267855 - DNA, 20 bp, synthetic construct
  source 1..20: mol_type = other DNA
cttgaacttctggcctcaag

SEQ ID NO: 267856 - DNA, 20 bp, synthetic construct
  source 1..20: mol_type = other DNA
tcttgaacttctggcctcaa

SEQ ID NO: 267857 - DNA, 20 bp, synthetic construct
  source 1..20: mol_type = other DNA
gtcttgaacttctggcctca

SEQ ID NO: 267858 - DNA, 20 bp, synthetic construct
  source 1..20: mol_type = other DNA
ggtcttgaacttctggcctc

SEQ ID NO: 267859 - DNA, 20 bp, synthetic construct
  source 1..20: mol_type = other DNA
tggtcttgaacttctggcct

SEQ ID NO: 267860 - DNA, 20 bp, synthetic construct
  source 1..20: mol_type = other DNA
ctggtcttgaacttctggcc

SEQ ID NO: 267861 - DNA, 20 bp, synthetic construct
  source 1..20: mol_type = other DNA
gctggtcttgaacttctggc

SEQ ID NO: 267862 - DNA, 20 bp, synthetic construct
  source 1..20: mol_type = other DNA
ggctggtcttgaacttctgg

SEQ ID NO: 267863 - DNA, 20 bp, synthetic construct
  source 1..20: mol_type = other DNA
aggctggtcttgaacttctg

SEQ ID NO: 267864 - DNA, 20 bp, synthetic construct
  source 1..20: mol_type = other DNA
caggctggtcttgaacttct

SEQ ID NO: 267865 - DNA, 20 bp, synthetic construct
  source 1..20: mol_type = other DNA
tcaggctggtcttgaacttc

SEQ ID NO: 267866 - DNA, 20 bp, synthetic construct
  source 1..20: mol_type = other DNA
ctcaggctggtcttgaactt

SEQ ID NO: 267867 - DNA, 20 bp, synthetic construct
  source 1..20: mol_type = other DNA
gctcaggctggtcttgaact

SEQ ID NO: 267868 - DNA, 20 bp, synthetic construct
  source 1..20: mol_type = other DNA
tgctcaggctggtcttgaac

SEQ ID NO: 267869 - DNA, 20 bp, synthetic construct
  source 1..20: mol_type = other DNA
ttgctcaggctggtcttgaa

SEQ ID NO: 267870 - DNA, 20 bp, synthetic construct
  source 1..20: mol_type = other DNA
gttgctcaggctggtcttga

SEQ ID NO: 267871 - DNA, 20 bp, synthetic construct
  source 1..20: mol_type = other DNA
tgttgctcaggctggtcttg

SEQ ID NO: 267872 - DNA, 20 bp, synthetic construct
  source 1..20: mol_type = other DNA
atgttgctcaggctggtctt

SEQ ID NO: 267873 - DNA, 20 bp, synthetic construct
  source 1..20: mol_type = other DNA
tatgttgctcaggctggtct

SEQ ID NO: 267874 - DNA, 20 bp, synthetic construct
  source 1..20: mol_type = other DNA
ctatgttgctcaggctggtc

SEQ ID NO: 267875 - DNA, 20 bp, synthetic construct
  source 1..20: mol_type = other DNA
actatgttgctcaggctggt

SEQ ID NO: 267876 - DNA, 20 bp, synthetic construct
  source 1..20: mol_type = other DNA
gactatgttgctcaggctgg

SEQ ID NO: 267877 - DNA, 20 bp, synthetic construct
  source 1..20: mol_type = other DNA
tgactatgttgctcaggctg

SEQ ID NO: 267878 - DNA, 20 bp, synthetic construct
  source 1..20: mol_type = other DNA
ctgactatgttgctcaggct

SEQ ID NO: 267879 - DNA, 20 bp, synthetic construct
  source 1..20: mol_type = other DNA
tctgactatgttgctcaggc

SEQ ID NO: 267880 - DNA, 20 bp, synthetic construct
  source 1..20: mol_type = other DNA
gtctgactatgttgctcagg

SEQ ID NO: 267881 - DNA, 20 bp, synthetic construct
  source 1..20: mol_type = other DNA
ggtctgactatgttgctcag

SEQ ID NO: 267882 - DNA, 20 bp, synthetic construct
  source 1..20: mol_type = other DNA
gggtctgactatgttgctca

SEQ ID NO: 267883 - DNA, 20 bp, synthetic construct
  source 1..20: mol_type = other DNA
ggggtctgactatgttgctc

SEQ ID NO: 267884 - DNA, 20 bp, synthetic construct
  source 1..20: mol_type = other DNA
cggggtctgactatgttgct

SEQ ID NO: 267885 - DNA, 20 bp, synthetic construct
  source 1..20: mol_type = other DNA
acggggtctgactatgttgc

SEQ ID NO: 267886 - DNA, 20 bp, synthetic construct
  source 1..20: mol_type = other DNA
gacggggtctgactatgttg

SEQ ID NO: 267887 - DNA, 20 bp, synthetic construct
  source 1..20: mol_type = other DNA
agacggggtctgactatgtt

SEQ ID NO: 267888 - DNA, 20 bp, synthetic construct
  source 1..20: mol_type = other DNA
gagacggggtctgactatgt

SEQ ID NO: 267889 - DNA, 20 bp, synthetic construct
  source 1..20: mol_type = other DNA
agagacggggtctgactatg

SEQ ID NO: 267890 - DNA, 20 bp, synthetic construct
  source 1..20: mol_type = other DNA
tagagacggggtctgactat

SEQ ID NO: 267891 - DNA, 20 bp, synthetic construct
  source 1..20: mol_type = other DNA
atagagacggggtctgacta

SEQ ID NO: 267892 - DNA, 20 bp, synthetic construct
  source 1..20: mol_type = other DNA
tatagagacggggtctgact

SEQ ID NO: 267893 - DNA, 20 bp, synthetic construct
  source 1..20: mol_type = other DNA
ttatagagacggggtctgac

SEQ ID NO: 267894 - DNA, 20 bp, synthetic construct
  source 1..20: mol_type = other DNA
tttatagagacggggtctga

SEQ ID NO: 267895 - DNA, 20 bp, synthetic construct
  source 1..20: mol_type = other DNA
ttttatagagacggggtctg

SEQ ID NO: 267896 - DNA, 20 bp, synthetic construct
  source 1..20: mol_type = other DNA
tttttatagagacggggtct

SEQ ID NO: 267897 - DNA, 20 bp, synthetic construct
  source 1..20: mol_type = other DNA
ttttttatagagacggggtc

SEQ ID NO: 267898 - DNA, 20 bp, synthetic construct
  source 1..20: mol_type = other DNA
gttttttatagagacggggt

SEQ ID NO: 267899 - DNA, 20 bp, synthetic construct
  source 1..20: mol_type = other DNA
tgttttttatagagacgggg

SEQ ID NO: 267900 - DNA, 20 bp, synthetic construct
  source 1..20: mol_type = other DNA
atgttttttatagagacggg

SEQ ID NO: 267901 - DNA, 20 bp, synthetic construct
  source 1..20: mol_type = other DNA
aatgttttttatagagacgg

SEQ ID NO: 267902 - DNA, 20 bp, synthetic construct
  source 1..20: mol_type = other DNA
taatgttttttatagagacg

SEQ ID NO: 267903 - DNA, 20 bp, synthetic construct
  source 1..20: mol_type = other DNA
ataatgttttttatagagac

SEQ ID NO: 267904 - DNA, 20 bp, synthetic construct
  source 1..20: mol_type = other DNA
aataatgttttttatagaga

SEQ ID NO: 267905 - DNA, 20 bp, synthetic construct
  source 1..20: mol_type = other DNA
aaataatgttttttatagag

SEQ ID NO: 267906 - DNA, 20 bp, synthetic construct
  source 1..20: mol_type = other DNA
aaaataatgttttttataga

SEQ ID NO: 267907 - DNA, 20 bp, synthetic construct
  source 1..20: mol_type = other DNA
aaaaataatgttttttatag

SEQ ID NO: 267908 - DNA, 20 bp, synthetic construct
  source 1..20: mol_type = other DNA
taaaaataatgttttttata

SEQ ID NO: 267909 - DNA, 20 bp, synthetic construct
  source 1..20: mol_type = other DNA
ttaaaaataatgttttttat

SEQ ID NO: 267910 - DNA, 20 bp, synthetic construct
  source 1..20: mol_type = other DNA
tttaaaaataatgtttttta

SEQ ID NO: 267911 - DNA, 20 bp, synthetic construct
  source 1..20: mol_type = other DNA
ttttaaaaataatgtttttt

SEQ ID NO: 267912 - DNA, 20 bp, synthetic construct
  source 1..20: mol_type = other DNA
tttttaaaaataatgttttt

SEQ ID NO: 267913 - DNA, 20 bp, synthetic construct
  source 1..20: mol_type = other DNA
ttttttaaaaataatgtttt

SEQ ID NO: 267914 - DNA, 20 bp, synthetic construct
  source 1..20: mol_type = other DNA
cttttttaaaaataatgttt

SEQ ID NO: 267915 - DNA, 20 bp, synthetic construct
  source 1..20: mol_type = other DNA
tcttttttaaaaataatgtt

SEQ ID NO: 267916 - DNA, 20 bp, synthetic construct
  source 1..20: mol_type = other DNA
gtcttttttaaaaataatgt

SEQ ID NO: 267917 - DNA, 20 bp, synthetic construct
  source 1..20: mol_type = other DNA
tgtcttttttaaaaataatg

SEQ ID NO: 267918 - DNA, 20 bp, synthetic construct
  source 1..20: mol_type = other DNA
atgtcttttttaaaaataat

SEQ ID NO: 267919 - DNA, 20 bp, synthetic construct
  source 1..20: mol_type = other DNA
catgtcttttttaaaaataa

SEQ ID NO: 267920 - DNA, 20 bp, synthetic construct
  source 1..20: mol_type = other DNA
ccatgtcttttttaaaaata

SEQ ID NO: 267921 - DNA, 20 bp, synthetic construct
  source 1..20: mol_type = other DNA
tccatgtcttttttaaaaat

SEQ ID NO: 267922 - DNA, 20 bp, synthetic construct
  source 1..20: mol_type = other DNA
ttccatgtcttttttaaaaa

SEQ ID NO: 267923 - DNA, 20 bp, synthetic construct
  source 1..20: mol_type = other DNA
cttccatgtcttttttaaaa

SEQ ID NO: 267924 - DNA, 20 bp, synthetic construct
  source 1..20: mol_type = other DNA
acttccatgtcttttttaaa

SEQ ID NO: 267925 - DNA, 20 bp, synthetic construct
  source 1..20: mol_type = other DNA
gacttccatgtcttttttaa

SEQ ID NO: 267926 - DNA, 20 bp, synthetic construct
  source 1..20: mol_type = other DNA
tgacttccatgtctttttta

SEQ ID NO: 267927 - DNA, 20 bp, synthetic construct
  source 1..20: mol_type = other DNA
ttgacttccatgtctttttt

SEQ ID NO: 267928 - DNA, 20 bp, synthetic construct
  source 1..20: mol_type = other DNA
tttgacttccatgtcttttt

SEQ ID NO: 267929 - DNA, 20 bp, synthetic construct
  source 1..20: mol_type = other DNA
atttgacttccatgtctttt

SEQ ID NO: 267930 - DNA, 20 bp, synthetic construct
  source 1..20: mol_type = other DNA
aatttgacttccatgtcttt

SEQ ID NO: 267931 - DNA, 20 bp, synthetic construct
  source 1..20: mol_type = other DNA
gaatttgacttccatgtctt

SEQ ID NO: 267932 - DNA, 20 bp, synthetic construct
  source 1..20: mol_type = other DNA
agaatttgacttccatgtct

SEQ ID NO: 267933 - DNA, 20 bp, synthetic construct
  source 1..20: mol_type = other DNA
tagaatttgacttccatgtc

SEQ ID NO: 267934 - DNA, 20 bp, synthetic construct
  source 1..20: mol_type = other DNA
ttagaatttgacttccatgt

SEQ ID NO: 267935 - DNA, 20 bp, synthetic construct
  source 1..20: mol_type = other DNA
tttagaatttgacttccatg

SEQ ID NO: 267936 - DNA, 20 bp, synthetic construct
  source 1..20: mol_type = other DNA
ttttagaatttgacttccat

SEQ ID NO: 267937 - DNA, 20 bp, synthetic construct
  source 1..20: mol_type = other DNA
tttttagaatttgacttcca

SEQ ID NO: 267938 - DNA, 20 bp, synthetic construct
  source 1..20: mol_type = other DNA
gtttttagaatttgacttcc

SEQ ID NO: 267939 - DNA, 20 bp, synthetic construct
  source 1..20: mol_type = other DNA
agtttttagaatttgacttc

SEQ ID NO: 267940 - DNA, 20 bp, synthetic construct
  source 1..20: mol_type = other DNA
cagtttttagaatttgactt

SEQ ID NO: 267941 - DNA, 20 bp, synthetic construct
  source 1..20: mol_type = other DNA
ccagtttttagaatttgact

SEQ ID NO: 267942 - DNA, 20 bp, synthetic construct
  source 1..20: mol_type = other DNA
accagtttttagaatttgac

SEQ ID NO: 267943 - DNA, 20 bp, synthetic construct
  source 1..20: mol_type = other DNA
caccagtttttagaatttga

SEQ ID NO: 267944 - DNA, 20 bp, synthetic construct
  source 1..20: mol_type = other DNA
gcaccagtttttagaatttg

SEQ ID NO: 267945 - DNA, 20 bp, synthetic construct
  source 1..20: mol_type = other DNA
agcaccagtttttagaattt

SEQ ID NO: 267946 - DNA, 20 bp, synthetic construct
  source 1..20: mol_type = other DNA
cagcaccagtttttagaatt

SEQ ID NO: 267947 - DNA, 20 bp, synthetic construct
  source 1..20: mol_type = other DNA
ccagcaccagtttttagaat

SEQ ID NO: 267948 - DNA, 20 bp, synthetic construct
  source 1..20: mol_type = other DNA
gccagcaccagtttttagaa

SEQ ID NO: 267949 - DNA, 20 bp, synthetic construct
  source 1..20: mol_type = other DNA
agccagcaccagtttttaga

SEQ ID NO: 267950 - DNA, 20 bp, synthetic construct
  source 1..20: mol_type = other DNA
cagccagcaccagtttttag

SEQ ID NO: 267951 - DNA, 20 bp, synthetic construct
  source 1..20: mol_type = other DNA
ccagccagcaccagttttta

SEQ ID NO: 267952 - DNA, 20 bp, synthetic construct
  source 1..20: mol_type = other DNA
cccagccagcaccagttttt

SEQ ID NO: 267953 - DNA, 20 bp, synthetic construct
  source 1..20: mol_type = other DNA
acccagccagcaccagtttt

SEQ ID NO: 267954 - DNA, 20 bp, synthetic construct
  source 1..20: mol_type = other DNA
cacccagccagcaccagttt

SEQ ID NO: 267955 - DNA, 20 bp, synthetic construct
  source 1..20: mol_type = other DNA
gcacccagccagcaccagtt

SEQ ID NO: 267956 - DNA, 20 bp, synthetic construct
  source 1..20: mol_type = other DNA
cgcacccagccagcaccagt

SEQ ID NO: 267957 - DNA, 20 bp, synthetic construct
  source 1..20: mol_type = other DNA
ccgcacccagccagcaccag

SEQ ID NO: 267958 - DNA, 20 bp, synthetic construct
  source 1..20: mol_type = other DNA
accgcacccagccagcacca

SEQ ID NO: 267959 - DNA, 20 bp, synthetic construct
  source 1..20: mol_type = other DNA
caccgcacccagccagcacc

SEQ ID NO: 267960 - DNA, 20 bp, synthetic construct
  source 1..20: mol_type = other DNA
ccaccgcacccagccagcac

SEQ ID NO: 267961 - DNA, 20 bp, synthetic construct
  source 1..20: mol_type = other DNA
gccaccgcacccagccagca

SEQ ID NO: 267962 - DNA, 20 bp, synthetic construct
  source 1..20: mol_type = other DNA
agccaccgcacccagccagc

SEQ ID NO: 267963 - DNA, 20 bp, synthetic construct
  source 1..20: mol_type = other DNA
gagccaccgcacccagccag

SEQ ID NO: 267964 - DNA, 20 bp, synthetic construct
  source 1..20: mol_type = other DNA
tgagccaccgcacccagcca

SEQ ID NO: 267965 - DNA, 20 bp, synthetic construct
  source 1..20: mol_type = other DNA
atgagccaccgcacccagcc

SEQ ID NO: 267966 - DNA, 20 bp, synthetic construct
  source 1..20: mol_type = other DNA
catgagccaccgcacccagc

SEQ ID NO: 267967 - DNA, 20 bp, synthetic construct
  source 1..20: mol_type = other DNA
gcatgagccaccgcacccag

SEQ ID NO: 267968 - DNA, 20 bp, synthetic construct
  source 1..20: mol_type = other DNA
ggcatgagccaccgcaccca

SEQ ID NO: 267969 - DNA, 20 bp, synthetic construct
  source 1..20: mol_type = other DNA
aggcatgagccaccgcaccc

SEQ ID NO: 267970 - DNA, 20 bp, synthetic construct
  source 1..20: mol_type = other DNA
taggcatgagccaccgcacc

SEQ ID NO: 267971 - DNA, 20 bp, synthetic construct
  source 1..20: mol_type = other DNA
ataggcatgagccaccgcac

SEQ ID NO: 267972 - DNA, 20 bp, synthetic construct
  source 1..20: mol_type = other DNA
tataggcatgagccaccgca

SEQ ID NO: 267973 - DNA, 20 bp, synthetic construct
  source 1..20: mol_type = other DNA
ttataggcatgagccaccgc

SEQ ID NO: 267974 - DNA, 20 bp, synthetic construct
  source 1..20: mol_type = other DNA
attataggcatgagccaccg

SEQ ID NO: 267975 - DNA, 20 bp, synthetic construct
  source 1..20: mol_type = other DNA
gattataggcatgagccacc

SEQ ID NO: 267976 - DNA, 20 bp, synthetic construct
  source 1..20: mol_type = other DNA
ggattataggcatgagccac

SEQ ID NO: 267977 - DNA, 20 bp, synthetic construct
  source 1..20: mol_type = other DNA
gggattataggcatgagcca

SEQ ID NO: 267978 - DNA, 20 bp, synthetic construct
  source 1..20: mol_type = other DNA
tgggattataggcatgagcc

SEQ ID NO: 267979 - DNA, 20 bp, synthetic construct
  source 1..20: mol_type = other DNA
ctgggattataggcatgagc

SEQ ID NO: 267980 - DNA, 20 bp, synthetic construct
  source 1..20: mol_type = other DNA
gctgggattataggcatgag

SEQ ID NO: 267981 - DNA, 20 bp, synthetic construct
  source 1..20: mol_type = other DNA
tgctgggattataggcatga

SEQ ID NO: 267982 - DNA, 20 bp, synthetic construct
  source 1..20: mol_type = other DNA
gtgctgggattataggcatg

SEQ ID NO: 267983 - DNA, 20 bp, synthetic construct
  source 1..20: mol_type = other DNA
agtgctgggattataggcat

SEQ ID NO: 267984 - DNA, 20 bp, synthetic construct
  source 1..20: mol_type = other DNA
aagtgctgggattataggca

SEQ ID NO: 267985 - DNA, 20 bp, synthetic construct
  source 1..20: mol_type = other DNA
aaagtgctgggattataggc

SEQ ID NO: 267986 - DNA, 20 bp, synthetic construct
  source 1..20: mol_type = other DNA
caaagtgctgggattatagg

SEQ ID NO: 267987 - DNA, 20 bp, synthetic construct
  source 1..20: mol_type = other DNA
ccaaagtgctgggattatag

SEQ ID NO: 267988 - DNA, 20 bp, synthetic construct
  source 1..20: mol_type = other DNA
cccaaagtgctgggattata

SEQ ID NO: 267989 - DNA, 20 bp, synthetic construct
  source 1..20: mol_type = other DNA
tcccaaagtgctgggattat

SEQ ID NO: 267990 - DNA, 20 bp, synthetic construct
  source 1..20: mol_type = other DNA
ctcccaaagtgctgggatta

SEQ ID NO: 267991 - DNA, 20 bp, synthetic construct
  source 1..20: mol_type = other DNA
cctcccaaagtgctgggatt

SEQ ID NO: 267992 - DNA, 20 bp, synthetic construct
  source 1..20: mol_type = other DNA
gcctcccaaagtgctgggat

SEQ ID NO: 267993 - DNA, 20 bp, synthetic construct
  source 1..20: mol_type = other DNA
ggcctcccaaagtgctggga

SEQ ID NO: 267994 - DNA, 20 bp, synthetic construct
  source 1..20: mol_type = other DNA
cggcctcccaaagtgctggg

SEQ ID NO: 267995 - DNA, 20 bp, synthetic construct
  source 1..20: mol_type = other DNA
tcggcctcccaaagtgctgg

SEQ ID NO: 267996 - DNA, 20 bp, synthetic construct
  source 1..20: mol_type = other DNA
ctcggcctcccaaagtgctg

SEQ ID NO: 267997 - DNA, 20 bp, synthetic construct
  source 1..20: mol_type = other DNA
cctcggcctcccaaagtgct

SEQ ID NO: 267998 - DNA, 20 bp, synthetic construct
  source 1..20: mol_type = other DNA
gcctcggcctcccaaagtgc

SEQ ID NO: 267999 - DNA, 20 bp, synthetic construct
  source 1..20: mol_type = other DNA
cgcctcggcctcccaaagtg

SEQ ID NO: 268000 - DNA, 20 bp, synthetic construct
  source 1..20: mol_type = other DNA
ccgcctcggcctcccaaagt

SEQ ID NO: 268001 - DNA, 20 bp, synthetic construct
  source 1..20: mol_type = other DNA
cccgcctcggcctcccaaag

SEQ ID NO: 268002 - DNA, 20 bp, synthetic construct
  source 1..20: mol_type = other DNA
acccgcctcggcctcccaaa

SEQ ID NO: 268003 - DNA, 20 bp, synthetic construct
  source 1..20: mol_type = other DNA
cacccgcctcggcctcccaa

SEQ ID NO: 268004 - DNA, 20 bp, synthetic construct
  source 1..20: mol_type = other DNA
ccacccgcctcggcctccca

SEQ ID NO: 268005 - DNA, 20 bp, synthetic construct
  source 1..20: mol_type = other DNA
tccacccgcctcggcctccc

SEQ ID NO: 268006 - DNA, 20 bp, synthetic construct
  source 1..20: mol_type = other DNA
atccacccgcctcggcctcc

SEQ ID NO: 268007 - DNA, 20 bp, synthetic construct
  source 1..20: mol_type = other DNA
gatccacccgcctcggcctc

SEQ ID NO: 268008 - DNA, 20 bp, synthetic construct
  source 1..20: mol_type = other DNA
tgatccacccgcctcggcct

SEQ ID NO: 268009 - DNA, 20 bp, synthetic construct
  source 1..20: mol_type = other DNA
gtgatccacccgcctcggcc

SEQ ID NO: 268010 - DNA, 20 bp, synthetic construct
  source 1..20: mol_type = other DNA
ggtgatccacccgcctcggc

SEQ ID NO: 268011 - DNA, 20 bp, synthetic construct
  source 1..20: mol_type = other DNA
aggtgatccacccgcctcgg

SEQ ID NO: 268012 - DNA, 20 bp, synthetic construct
  source 1..20: mol_type = other DNA
caggtgatccacccgcctcg

SEQ ID NO: 268013 - DNA, 20 bp, synthetic construct
  source 1..20: mol_type = other DNA
tcaggtgatccacccgcctc

SEQ ID NO: 268014 - DNA, 20 bp, synthetic construct
  source 1..20: mol_type = other DNA
ctcaggtgatccacccgcct

SEQ ID NO: 268015 - DNA, 20 bp, synthetic construct
  source 1..20: mol_type = other DNA
cctcaggtgatccacccgcc

SEQ ID NO: 268016 - DNA, 20 bp, synthetic construct
  source 1..20: mol_type = other DNA
acctcaggtgatccacccgc

SEQ ID NO: 268017 - DNA, 20 bp, synthetic construct
  source 1..20: mol_type = other DNA
gacctcaggtgatccacccg

SEQ ID NO: 268018 - DNA, 20 bp, synthetic construct
  source 1..20: mol_type = other DNA
tgacctcaggtgatccaccc

SEQ ID NO: 268019 - DNA, 20 bp, synthetic construct
  source 1..20: mol_type = other DNA
ctgacctcaggtgatccacc

SEQ ID NO: 268020 - DNA, 20 bp, synthetic construct
  source 1..20: mol_type = other DNA
cctgacctcaggtgatccac

SEQ ID NO: 268021 - DNA, 20 bp, synthetic construct
  source 1..20: mol_type = other DNA
tcctgacctcaggtgatcca

SEQ ID NO: 268022 - DNA, 20 bp, synthetic construct
  source 1..20: mol_type = other DNA
ctcctgacctcaggtgatcc

SEQ ID NO: 268023 - DNA, 20 bp, synthetic construct
  source 1..20: mol_type = other DNA
actcctgacctcaggtgatc

SEQ ID NO: 268024 - DNA, 20 bp, synthetic construct
  source 1..20: mol_type = other DNA
aactcctgacctcaggtgat

SEQ ID NO: 268025 - DNA, 20 bp, synthetic construct
  source 1..20: mol_type = other DNA
gaactcctgacctcaggtga

SEQ ID NO: 268026 - DNA, 20 bp, synthetic construct
  source 1..20: mol_type = other DNA
tgaactcctgacctcaggtg

SEQ ID NO: 268027 - DNA, 20 bp, synthetic construct
  source 1..20: mol_type = other DNA
ttgaactcctgacctcaggt

SEQ ID NO: 268028 - DNA, 20 bp, synthetic construct
  source 1..20: mol_type = other DNA
cttgaactcctgacctcagg

SEQ ID NO: 268029 - DNA, 20 bp, synthetic construct
  source 1..20: mol_type = other DNA
tcttgaactcctgacctcag

SEQ ID NO: 268030 - DNA, 20 bp, synthetic construct
  source 1..20: mol_type = other DNA
gtcttgaactcctgacctca

SEQ ID NO: 268031 - DNA, 20 bp, synthetic construct
  source 1..20: mol_type = other DNA
ggtcttgaactcctgacctc

SEQ ID NO: 268032 - DNA, 20 bp, synthetic construct
  source 1..20: mol_type = other DNA
tggtcttgaactcctgacct

SEQ ID NO: 268033 - DNA, 20 bp, synthetic construct
  source 1..20: mol_type = other DNA
ctggtcttgaactcctgacc

SEQ ID NO: 268034 - DNA, 20 bp, synthetic construct
  source 1..20: mol_type = other DNA
gctggtcttgaactcctgac

SEQ ID NO: 268035 - DNA, 20 bp, synthetic construct
  source 1..20: mol_type = other DNA
ggctggtcttgaactcctga

SEQ ID NO: 268036 - DNA, 20 bp, synthetic construct
  source 1..20: mol_type = other DNA
aggctggtcttgaactcctg

SEQ ID NO: 268037 - DNA, 20 bp, synthetic construct
  source 1..20: mol_type = other DNA
caggctggtcttgaactcct

SEQ ID NO: 268038 - DNA, 20 bp, synthetic construct
  source 1..20: mol_type = other DNA
ccaggctggtcttgaactcc

SEQ ID NO: 268039 - DNA, 20 bp, synthetic construct
  source 1..20: mol_type = other DNA
gccaggctggtcttgaactc

SEQ ID NO: 268040 - DNA, 20 bp, synthetic construct
  source 1..20: mol_type = other DNA
ggccaggctggtcttgaact

SEQ ID NO: 268041 - DNA, 20 bp, synthetic construct
  source 1..20: mol_type = other DNA
tggccaggctggtcttgaac

SEQ ID NO: 268042 - DNA, 20 bp, synthetic construct
  source 1..20: mol_type = other DNA
ttggccaggctggtcttgaa

SEQ ID NO: 268043 - DNA, 20 bp, synthetic construct
  source 1..20: mol_type = other DNA
gttggccaggctggtcttga

SEQ ID NO: 268044 - DNA, 20 bp, synthetic construct
  source 1..20: mol_type = other DNA
tgttggccaggctggtcttg

SEQ ID NO: 268045 - DNA, 20 bp, synthetic construct
  source 1..20: mol_type = other DNA
atgttggccaggctggtctt

SEQ ID NO: 268046 - DNA, 20 bp, synthetic construct
  source 1..20: mol_type = other DNA
catgttggccaggctggtct

SEQ ID NO: 268047 - DNA, 20 bp, synthetic construct
  source 1..20: mol_type = other DNA
ccatgttggccaggctggtc

SEQ ID NO: 268048 - DNA, 20 bp, synthetic construct
  source 1..20: mol_type = other DNA
accatgttggccaggctggt

SEQ ID NO: 268049 - DNA, 20 bp, synthetic construct
  source 1..20: mol_type = other DNA
taccatgttggccaggctgg

SEQ ID NO: 268050 - DNA, 20 bp, synthetic construct
  source 1..20: mol_type = other DNA
ttaccatgttggccaggctg

SEQ ID NO: 268051 - DNA, 20 bp, synthetic construct
  source 1..20: mol_type = other DNA
tttaccatgttggccaggct

SEQ ID NO: 268052 - DNA, 20 bp, synthetic construct
  source 1..20: mol_type = other DNA
ttttaccatgttggccaggc

SEQ ID NO: 268053 - DNA, 20 bp, synthetic construct
  source 1..20: mol_type = other DNA
gttttaccatgttggccagg

SEQ ID NO: 268054 - DNA, 20 bp, synthetic construct
  source 1..20: mol_type = other DNA
ggttttaccatgttggccag

SEQ ID NO: 268055 - DNA, 20 bp, synthetic construct
  source 1..20: mol_type = other DNA
aggttttaccatgttggcca

SEQ ID NO: 268056 - DNA, 20 bp, synthetic construct
  source 1..20: mol_type = other DNA
gaggttttaccatgttggcc

SEQ ID NO: 268057 - DNA, 20 bp, synthetic construct
  source 1..20: mol_type = other DNA
agaggttttaccatgttggc

SEQ ID NO: 268058 - DNA, 20 bp, synthetic construct
  source 1..20: mol_type = other DNA
tagaggttttaccatgttgg

SEQ ID NO: 268059 - DNA, 20 bp, synthetic construct
  source 1..20: mol_type = other DNA
gtagaggttttaccatgttg

SEQ ID NO: 268060 - DNA, 20 bp, synthetic construct
  source 1..20: mol_type = other DNA
agtagaggttttaccatgtt

SEQ ID NO: 268061 - DNA, 20 bp, synthetic construct
  source 1..20: mol_type = other DNA
tagtagaggttttaccatgt

SEQ ID NO: 268062 - DNA, 20 bp, synthetic construct
  source 1..20: mol_type = other DNA
ttagtagaggttttaccatg

SEQ ID NO: 268063 - DNA, 20 bp, synthetic construct
  source 1..20: mol_type = other DNA
tttagtagaggttttaccat

SEQ ID NO: 268064 - DNA, 20 bp, synthetic construct
  source 1..20: mol_type = other DNA
ctttagtagaggttttacca

SEQ ID NO: 268065 - DNA, 20 bp, synthetic construct
  source 1..20: mol_type = other DNA
tctttagtagaggttttacc

SEQ ID NO: 268066 - DNA, 20 bp, synthetic construct
  source 1..20: mol_type = other DNA
ttctttagtagaggttttac

SEQ ID NO: 268067 - DNA, 20 bp, synthetic construct
  source 1..20: mol_type = other DNA
tttctttagtagaggtttta

SEQ ID NO: 268068 - DNA, 20 bp, synthetic construct
  source 1..20: mol_type = other DNA
atttctttagtagaggtttt

SEQ ID NO: 268069 - DNA, 20 bp, synthetic construct
  source 1..20: mol_type = other DNA
gatttctttagtagaggttt

SEQ ID NO: 268070 - DNA, 20 bp, synthetic construct
  source 1..20: mol_type = other DNA
agatttctttagtagaggtt

SEQ ID NO: 268071 - DNA, 20 bp, synthetic construct
  source 1..20: mol_type = other DNA
aagatttctttagtagaggt

SEQ ID NO: 268072 - DNA, 20 bp, synthetic construct
  source 1..20: mol_type = other DNA
aaagatttctttagtagagg

SEQ ID NO: 268073 - DNA, 20 bp, synthetic construct
  source 1..20: mol_type = other DNA
taaagatttctttagtagag

SEQ ID NO: 268074 - DNA, 20 bp, synthetic construct
  source 1..20: mol_type = other DNA
gtaaagatttctttagtaga

SEQ ID NO: 268075 - DNA, 20 bp, synthetic construct
  source 1..20: mol_type = other DNA
agtaaagatttctttagtag

SEQ ID NO: 268076 - DNA, 20 bp, synthetic construct
  source 1..20: mol_type = other DNA
cagtaaagatttctttagta

SEQ ID NO: 268077 - DNA, 20 bp, synthetic construct
  source 1..20: mol_type = other DNA
tcagtaaagatttctttagt

SEQ ID NO: 268078 - DNA, 20 bp, synthetic construct
  source 1..20: mol_type = other DNA
ttcagtaaagatttctttag

SEQ ID NO: 268079 - DNA, 20 bp, synthetic construct
  source 1..20: mol_type = other DNA
tttcagtaaagatttcttta

SEQ ID NO: 268080 - DNA, 20 bp, synthetic construct
  source 1..20: mol_type = other DNA
ttttcagtaaagatttcttt

SEQ ID NO: 268081 - DNA, 20 bp, synthetic construct
  source 1..20: mol_type = other DNA
attttcagtaaagatttctt

SEQ ID NO: 268082 - DNA, 20 bp, synthetic construct
  source 1..20: mol_type = other DNA
tattttcagtaaagatttct

SEQ ID NO: 268083 - DNA, 20 bp, synthetic construct
  source 1..20: mol_type = other DNA
gtattttcagtaaagatttc

SEQ ID NO: 268084 - DNA, 20 bp, synthetic construct
  source 1..20: mol_type = other DNA
tgtattttcagtaaagattt

SEQ ID NO: 268085 - DNA, 20 bp, synthetic construct
  source 1..20: mol_type = other DNA
ttgtattttcagtaaagatt

SEQ ID NO: 268086 - DNA, 20 bp, synthetic construct
  source 1..20: mol_type = other DNA
tttgtattttcagtaaagat

SEQ ID NO: 268087 - DNA, 20 bp, synthetic construct
  source 1..20: mol_type = other DNA
ttttgtattttcagtaaaga

SEQ ID NO: 268088 - DNA, 20 bp, synthetic construct
  source 1..20: mol_type = other DNA
tttttgtattttcagtaaag

SEQ ID NO: 268089 - DNA, 20 bp, synthetic construct
  source 1..20: mol_type = other DNA
atttttgtattttcagtaaa

SEQ ID NO: 268090 - DNA, 20 bp, synthetic construct
  source 1..20: mol_type = other DNA
gatttttgtattttcagtaa

SEQ ID NO: 268091 - DNA, 20 bp, synthetic construct
  source 1..20: mol_type = other DNA
ggatttttgtattttcagta

SEQ ID NO: 268092 - DNA, 20 bp, synthetic construct
  source 1..20: mol_type = other DNA
tggatttttgtattttcagt

SEQ ID NO: 268093 - DNA, 20 bp, synthetic construct
  source 1..20: mol_type = other DNA
ctggatttttgtattttcag

SEQ ID NO: 268094 - DNA, 20 bp, synthetic construct
  source 1..20: mol_type = other DNA
actggatttttgtattttca

SEQ ID NO: 268095 - DNA, 20 bp, synthetic construct
  source 1..20: mol_type = other DNA
gactggatttttgtattttc

SEQ ID NO: 268096 - DNA, 20 bp, synthetic construct
  source 1..20: mol_type = other DNA
agactggatttttgtatttt

SEQ ID NO: 268097 - DNA, 20 bp, synthetic construct
  source 1..20: mol_type = other DNA
gagactggatttttgtattt

SEQ ID NO: 268098 - DNA, 20 bp, synthetic construct
  source 1..20: mol_type = other DNA
agagactggatttttgtatt

SEQ ID NO: 268099 - DNA, 20 bp, synthetic construct
  source 1..20: mol_type = other DNA
tagagactggatttttgtat

SEQ ID NO: 268100 - DNA, 20 bp, synthetic construct
  source 1..20: mol_type = other DNA
gtagagactggatttttgta

SEQ ID NO: 268101 - DNA, 20 bp, synthetic construct
  source 1..20: mol_type = other DNA
agtagagactggatttttgt

SEQ ID NO: 268102 - DNA, 20 bp, synthetic construct
  source 1..20: mol_type = other DNA
tagtagagactggatttttg

SEQ ID NO: 268103 - DNA, 20 bp, synthetic construct
  source 1..20: mol_type = other DNA
ttagtagagactggattttt

SEQ ID NO: 268104 - DNA, 20 bp, synthetic construct
  source 1..20: mol_type = other DNA
tttagtagagactggatttt

SEQ ID NO: 268105 - DNA, 20 bp, synthetic construct
  source 1..20: mol_type = other DNA
ttttagtagagactggattt

SEQ ID NO: 268106 - DNA, 20 bp, synthetic construct
  source 1..20: mol_type = other DNA
attttagtagagactggatt

SEQ ID NO: 268107 - DNA, 20 bp, synthetic construct
  source 1..20: mol_type = other DNA
tattttagtagagactggat

SEQ ID NO: 268108 - DNA, 20 bp, synthetic construct
  source 1..20: mol_type = other DNA
ttattttagtagagactgga

SEQ ID NO: 268109 - DNA, 20 bp, synthetic construct
  source 1..20: mol_type = other DNA
cttattttagtagagactgg

SEQ ID NO: 268110 - DNA, 20 bp, synthetic construct
  source 1..20: mol_type = other DNA
acttattttagtagagactg

SEQ ID NO: 268111 - DNA, 20 bp, synthetic construct
  source 1..20: mol_type = other DNA
gacttattttagtagagact

SEQ ID NO: 268112 - DNA, 20 bp, synthetic construct
  source 1..20: mol_type = other DNA
agacttattttagtagagac

SEQ ID NO: 268113 - DNA, 20 bp, synthetic construct
  source 1..20: mol_type = other DNA
gagacttattttagtagaga

SEQ ID NO: 268114 - DNA, 20 bp, synthetic construct
  source 1..20: mol_type = other DNA
agagacttattttagtagag

SEQ ID NO: 268115 - DNA, 20 bp, synthetic construct
  source 1..20: mol_type = other DNA
tagagacttattttagtaga

SEQ ID NO: 268116 - DNA, 20 bp, synthetic construct
  source 1..20: mol_type = other DNA
gtagagacttattttagtag

SEQ ID NO: 268117 - DNA, 20 bp, synthetic construct
  source 1..20: mol_type = other DNA
agtagagacttattttagta

SEQ ID NO: 268118 - DNA, 20 bp, synthetic construct
  source 1..20: mol_type = other DNA
tagtagagacttattttagt

SEQ ID NO: 268119 - DNA, 20 bp, synthetic construct
  source 1..20: mol_type = other DNA
ttagtagagacttattttag

SEQ ID NO: 268120 - DNA, 20 bp, synthetic construct
  source 1..20: mol_type = other DNA
tttagtagagacttatttta

SEQ ID NO: 268121 - DNA, 20 bp, synthetic construct
  source 1..20: mol_type = other DNA
ttttagtagagacttatttt

SEQ ID NO: 268122 - DNA, 20 bp, synthetic construct
  source 1..20: mol_type = other DNA
tttttagtagagacttattt

SEQ ID NO: 268123 - DNA, 20 bp, synthetic construct
  source 1..20: mol_type = other DNA
atttttagtagagacttatt

SEQ ID NO: 268124 - DNA, 20 bp, synthetic construct
  source 1..20: mol_type = other DNA
tatttttagtagagacttat

SEQ ID NO: 268125 - DNA, 20 bp, synthetic construct
  source 1..20: mol_type = other DNA
gtatttttagtagagactta

SEQ ID NO: 268126 - DNA, 20 bp, synthetic construct
  source 1..20: mol_type = other DNA
tgtatttttagtagagactt

SEQ ID NO: 268127 - DNA, 20 bp, synthetic construct
  source 1..20: mol_type = other DNA
ttgtatttttagtagagact

SEQ ID NO: 268128 - DNA, 20 bp, synthetic construct
  source 1..20: mol_type = other DNA
tttgtatttttagtagagac

SEQ ID NO: 268129 - DNA, 20 bp, synthetic construct
  source 1..20: mol_type = other DNA
ttttgtatttttagtagaga

SEQ ID NO: 268130 - DNA, 20 bp, synthetic construct
  source 1..20: mol_type = other DNA
tttttgtatttttagtagag

SEQ ID NO: 268131 - DNA, 20 bp, synthetic construct
  source 1..20: mol_type = other DNA
atttttgtatttttagtaga

SEQ ID NO: 268132 - DNA, 20 bp, synthetic construct
  source 1..20: mol_type = other DNA
aatttttgtatttttagtag

SEQ ID NO: 268133 - DNA, 20 bp, synthetic construct
  source 1..20: mol_type = other DNA
taatttttgtatttttagta

SEQ ID NO: 268134 - DNA, 20 bp, synthetic construct
  source 1..20: mol_type = other DNA
ctaatttttgtatttttagt

SEQ ID NO: 268135 - DNA, 20 bp, synthetic construct
  source 1..20: mol_type = other DNA
gctaatttttgtatttttag

SEQ ID NO: 268136 - DNA, 20 bp, synthetic construct
  source 1..20: mol_type = other DNA
ggctaatttttgtattttta

SEQ ID NO: 268137 - DNA, 20 bp, synthetic construct
  source 1..20: mol_type = other DNA
tggctaatttttgtattttt

SEQ ID NO: 268138 - DNA, 20 bp, synthetic construct
  source 1..20: mol_type = other DNA
ctggctaatttttgtatttt

SEQ ID NO: 268139 - DNA, 20 bp, synthetic construct
  source 1..20: mol_type = other DNA
cctggctaatttttgtattt

SEQ ID NO: 268140 - DNA, 20 bp, synthetic construct
  source 1..20: mol_type = other DNA
gcctggctaatttttgtatt

SEQ ID NO: 268141 - DNA, 20 bp, synthetic construct
  source 1..20: mol_type = other DNA
cgcctggctaatttttgtat

SEQ ID NO: 268142 - DNA, 20 bp, synthetic construct
  source 1..20: mol_type = other DNA
acgcctggctaatttttgta

SEQ ID NO: 268143 - DNA, 20 bp, synthetic construct
  source 1..20: mol_type = other DNA
cacgcctggctaatttttgt

SEQ ID NO: 268144 - DNA, 20 bp, synthetic construct
  source 1..20: mol_type = other DNA
ccacgcctggctaatttttg

SEQ ID NO: 268145 - DNA, 20 bp, synthetic construct
  source 1..20: mol_type = other DNA
accacgcctggctaattttt

SEQ ID NO: 268146 - DNA, 20 bp, synthetic construct
  source 1..20: mol_type = other DNA
caccacgcctggctaatttt

SEQ ID NO: 268147 - DNA, 20 bp, synthetic construct
  source 1..20: mol_type = other DNA
gcaccacgcctggctaattt

SEQ ID NO: 268148 - DNA, 20 bp, synthetic construct
  source 1..20: mol_type = other DNA
agcaccacgcctggctaatt

SEQ ID NO: 268149 - DNA, 20 bp, synthetic construct
  source 1..20: mol_type = other DNA
cagcaccacgcctggctaat

SEQ ID NO: 268150 - DNA, 20 bp, synthetic construct
  source 1..20: mol_type = other DNA
gcagcaccacgcctggctaa

SEQ ID NO: 268151 - DNA, 20 bp, synthetic construct
  source 1..20: mol_type = other DNA
tgcagcaccacgcctggcta

SEQ ID NO: 268152 - DNA, 20 bp, synthetic construct
  source 1..20: mol_type = other DNA
gtgcagcaccacgcctggct

SEQ ID NO: 268153 - DNA, 20 bp, synthetic construct
  source 1..20: mol_type = other DNA
tgtgcagcaccacgcctggc

SEQ ID NO: 268154 - DNA, 20 bp, synthetic construct
  source 1..20: mol_type = other DNA
gtgtgcagcaccacgcctgg

SEQ ID NO: 268155 - DNA, 20 bp, synthetic construct
  source 1..20: mol_type = other DNA
ggtgtgcagcaccacgcctg

SEQ ID NO: 268156 - DNA, 20 bp, synthetic construct
  source 1..20: mol_type = other DNA
aggtgtgcagcaccacgcct

SEQ ID NO: 268157 - DNA, 20 bp, synthetic construct
  source 1..20: mol_type = other DNA
caggtgtgcagcaccacgcc

SEQ ID NO: 268158 - DNA, 20 bp, synthetic construct
  source 1..20: mol_type = other DNA
acaggtgtgcagcaccacgc

SEQ ID NO: 268159 - DNA, 20 bp, synthetic construct
  source 1..20: mol_type = other DNA
tacaggtgtgcagcaccacg

SEQ ID NO: 268160 - DNA, 20 bp, synthetic construct
  source 1..20: mol_type = other DNA
ttacaggtgtgcagcaccac

SEQ ID NO: 268161 - DNA, 20 bp, synthetic construct
  source 1..20: mol_type = other DNA
attacaggtgtgcagcacca

SEQ ID NO: 268162 - DNA, 20 bp, synthetic construct
  source 1..20: mol_type = other DNA
tattacaggtgtgcagcacc

SEQ ID NO: 268163 - DNA, 20 bp, synthetic construct
  source 1..20: mol_type = other DNA
atattacaggtgtgcagcac

SEQ ID NO: 268164 - DNA, 20 bp, synthetic construct
  source 1..20: mol_type = other DNA
gatattacaggtgtgcagca

SEQ ID NO: 268165 - DNA, 20 bp, synthetic construct
  source 1..20: mol_type = other DNA
tgatattacaggtgtgcagc

SEQ ID NO: 268166 - DNA, 20 bp, synthetic construct
  source 1..20: mol_type = other DNA
ctgatattacaggtgtgcag

SEQ ID NO: 268167 - DNA, 20 bp, synthetic construct
  source 1..20: mol_type = other DNA
gctgatattacaggtgtgca

SEQ ID NO: 268168 - DNA, 20 bp, synthetic construct
  source 1..20: mol_type = other DNA
agctgatattacaggtgtgc

SEQ ID NO: 268169 - DNA, 20 bp, synthetic construct
  source 1..20: mol_type = other DNA
tagctgatattacaggtgtg

SEQ ID NO: 268170 - DNA, 20 bp, synthetic construct
  source 1..20: mol_type = other DNA
gtagctgatattacaggtgt

SEQ ID NO: 268171 - DNA, 20 bp, synthetic construct
  source 1..20: mol_type = other DNA
agtagctgatattacaggtg

SEQ ID NO: 268172 - DNA, 20 bp, synthetic construct
  source 1..20: mol_type = other DNA
gagtagctgatattacaggt

SEQ ID NO: 268173 - DNA, 20 bp, synthetic construct
  source 1..20: mol_type = other DNA
cgagtagctgatattacagg

SEQ ID NO: 268174 - DNA, 20 bp, synthetic construct
  source 1..20: mol_type = other DNA
ccgagtagctgatattacag

SEQ ID NO: 268175 - DNA, 20 bp, synthetic construct
  source 1..20: mol_type = other DNA
cccgagtagctgatattaca

SEQ ID NO: 268176 - DNA, 20 bp, synthetic construct
  source 1..20: mol_type = other DNA
tcccgagtagctgatattac

SEQ ID NO: 268177 - DNA, 20 bp, synthetic construct
  source 1..20: mol_type = other DNA
ctcccgagtagctgatatta

SEQ ID NO: 268178 - DNA, 20 bp, synthetic construct
  source 1..20: mol_type = other DNA
cctcccgagtagctgatatt

SEQ ID NO: 268179 - DNA, 20 bp, synthetic construct
  source 1..20: mol_type = other DNA
gcctcccgagtagctgatat

SEQ ID NO: 268180 - DNA, 20 bp, synthetic construct
  source 1..20: mol_type = other DNA
agcctcccgagtagctgata

SEQ ID NO: 268181 - DNA, 20 bp, synthetic construct
  source 1..20: mol_type = other DNA
cagcctcccgagtagctgat

SEQ ID NO: 268182 - DNA, 20 bp, synthetic construct
  source 1..20: mol_type = other DNA
tcagcctcccgagtagctga

SEQ ID NO: 268183 - DNA, 20 bp, synthetic construct
  source 1..20: mol_type = other DNA
ctcagcctcccgagtagctg

SEQ ID NO: 268184 - DNA, 20 bp, synthetic construct
  source 1..20: mol_type = other DNA
cctcagcctcccgagtagct

SEQ ID NO: 268185 - DNA, 20 bp, synthetic construct
  source 1..20: mol_type = other DNA
gcctcagcctcccgagtagc

SEQ ID NO: 268186 - DNA, 20 bp, synthetic construct
  source 1..20: mol_type = other DNA
tgcctcagcctcccgagtag

SEQ ID NO: 268187 - DNA, 20 bp, synthetic construct
  source 1..20: mol_type = other DNA
ctgcctcagcctcccgagta

SEQ ID NO: 268188 - DNA, 20 bp, synthetic construct
  source 1..20: mol_type = other DNA
cctgcctcagcctcccgagt

SEQ ID NO: 268189 - DNA, 20 bp, synthetic construct
  source 1..20: mol_type = other DNA
tcctgcctcagcctcccgag

SEQ ID NO: 268190 - DNA, 20 bp, synthetic construct
  source 1..20: mol_type = other DNA
ctcctgcctcagcctcccga

SEQ ID NO: 268191 - DNA, 20 bp, synthetic construct
  source 1..20: mol_type = other DNA
tctcctgcctcagcctcccg

SEQ ID NO: 268192 - DNA, 20 bp, synthetic construct
  source 1..20: mol_type = other DNA
gtctcctgcctcagcctccc

SEQ ID NO: 268193 - DNA, 20 bp, synthetic construct
  source 1..20: mol_type = other DNA
agtctcctgcctcagcctcc

SEQ ID NO: 268194 - DNA, 20 bp, synthetic construct
  source 1..20: mol_type = other DNA
gagtctcctgcctcagcctc

SEQ ID NO: 268195 - DNA, 20 bp, synthetic construct
  source 1..20: mol_type = other DNA
cgagtctcctgcctcagcct

SEQ ID NO: 268196 - DNA, 20 bp, synthetic construct
  source 1..20: mol_type = other DNA
gcgagtctcctgcctcagcc

SEQ ID NO: 268197 - DNA, 20 bp, synthetic construct
  source 1..20: mol_type = other DNA
agcgagtctcctgcctcagc

SEQ ID NO: 268198 - DNA, 20 bp, synthetic construct
  source 1..20: mol_type = other DNA
aagcgagtctcctgcctcag

SEQ ID NO: 268199 - DNA, 20 bp, synthetic construct
  source 1..20: mol_type = other DNA
caagcgagtctcctgcctca

SEQ ID NO: 268200 - DNA, 20 bp, synthetic construct
  source 1..20: mol_type = other DNA
tcaagcgagtctcctgcctc

SEQ ID NO: 268201 - DNA, 20 bp, synthetic construct
  source 1..20: mol_type = other DNA
atcaagcgagtctcctgcct

SEQ ID NO: 268202 - DNA, 20 bp, synthetic construct
  source 1..20: mol_type = other DNA
gatcaagcgagtctcctgcc

SEQ ID NO: 268203 - DNA, 20 bp, synthetic construct
  source 1..20: mol_type = other DNA
ggatcaagcgagtctcctgc

SEQ ID NO: 268204 - DNA, 20 bp, synthetic construct
  source 1..20: mol_type = other DNA
gggatcaagcgagtctcctg

SEQ ID NO: 268205 - DNA, 20 bp, synthetic construct
  source 1..20: mol_type = other DNA
tgggatcaagcgagtctcct

SEQ ID NO: 268206 - DNA, 20 bp, synthetic construct
  source 1..20: mol_type = other DNA
atgggatcaagcgagtctcc

SEQ ID NO: 268207 - DNA, 20 bp, synthetic construct
  source 1..20: mol_type = other DNA
catgggatcaagcgagtctc

SEQ ID NO: 268208 - DNA, 20 bp, synthetic construct
  source 1..20: mol_type = other DNA
gcatgggatcaagcgagtct

SEQ ID NO: 268209 - DNA, 20 bp, synthetic construct
  source 1..20: mol_type = other DNA
tgcatgggatcaagcgagtc

SEQ ID NO: 268210 - DNA, 20 bp, synthetic construct
  source 1..20: mol_type = other DNA
ctgcatgggatcaagcgagt

SEQ ID NO: 268211 - DNA, 20 bp, synthetic construct
  source 1..20: mol_type = other DNA
gctgcatgggatcaagcgag

SEQ ID NO: 268212 - DNA, 20 bp, synthetic construct
  source 1..20: mol_type = other DNA
cgctgcatgggatcaagcga

SEQ ID NO: 268213 - DNA, 20 bp, synthetic construct
  source 1..20: mol_type = other DNA
ccgctgcatgggatcaagcg

SEQ ID NO: 268214 - DNA, 20 bp, synthetic construct
  source 1..20: mol_type = other DNA
tccgctgcatgggatcaagc

SEQ ID NO: 268215 - DNA, 20 bp, synthetic construct
  source 1..20: mol_type = other DNA
ctccgctgcatgggatcaag

SEQ ID NO: 268216 - DNA, 20 bp, synthetic construct
  source 1..20: mol_type = other DNA
cctccgctgcatgggatcaa

SEQ ID NO: 268217 - DNA, 20 bp, synthetic construct
  source 1..20: mol_type = other DNA
acctccgctgcatgggatca

SEQ ID NO: 268218 - DNA, 20 bp, synthetic construct
  source 1..20: mol_type = other DNA
aacctccgctgcatgggatc

SEQ ID NO: 268219 - DNA, 20 bp, synthetic construct
  source 1..20: mol_type = other DNA
caacctccgctgcatgggat

SEQ ID NO: 268220 - DNA, 20 bp, synthetic construct
  source 1..20: mol_type = other DNA
gcaacctccgctgcatggga

SEQ ID NO: 268221 - DNA, 20 bp, synthetic construct
  source 1..20: mol_type = other DNA
tgcaacctccgctgcatggg

SEQ ID NO: 268222 - DNA, 20 bp, synthetic construct
  source 1..20: mol_type = other DNA
ctgcaacctccgctgcatgg

SEQ ID NO: 268223 - DNA, 20 bp, synthetic construct
  source 1..20: mol_type = other DNA
actgcaacctccgctgcatg

SEQ ID NO: 268224 - DNA, 20 bp, synthetic construct
  source 1..20: mol_type = other DNA
cactgcaacctccgctgcat

SEQ ID NO: 268225 - DNA, 20 bp, synthetic construct
  source 1..20: mol_type = other DNA
tcactgcaacctccgctgca

SEQ ID NO: 268226 - DNA, 20 bp, synthetic construct
  source 1..20: mol_type = other DNA
ctcactgcaacctccgctgc

SEQ ID NO: 268227 - DNA, 20 bp, synthetic construct
  source 1..20: mol_type = other DNA
gctcactgcaacctccgctg

SEQ ID NO: 268228 - DNA, 20 bp, synthetic construct
  source 1..20: mol_type = other DNA
ggctcactgcaacctccgct

SEQ ID NO: 268229 - DNA, 20 bp, synthetic construct
  source 1..20: mol_type = other DNA
cggctcactgcaacctccgc

SEQ ID NO: 268230 - DNA, 20 bp, synthetic construct
  source 1..20: mol_type = other DNA
tcggctcactgcaacctccg

SEQ ID NO: 268231 - DNA, 20 bp, synthetic construct
  source 1..20: mol_type = other DNA
ctcggctcactgcaacctcc

SEQ ID NO: 268232 - DNA, 20 bp, synthetic construct
  source 1..20: mol_type = other DNA
tctcggctcactgcaacctc

SEQ ID NO: 268233 - DNA, 20 bp, synthetic construct
  source 1..20: mol_type = other DNA
atctcggctcactgcaacct

SEQ ID NO: 268234 - DNA, 20 bp, synthetic construct
  source 1..20: mol_type = other DNA
gatctcggctcactgcaacc

SEQ ID NO: 268235 - DNA, 20 bp, synthetic construct
  source 1..20: mol_type = other DNA
tgatctcggctcactgcaac

SEQ ID NO: 268236 - DNA, 20 bp, synthetic construct
  source 1..20: mol_type = other DNA
gtgatctcggctcactgcaa

SEQ ID NO: 268237 - DNA, 20 bp, synthetic construct
  source 1..20: mol_type = other DNA
cgtgatctcggctcactgca

SEQ ID NO: 268238 - DNA, 20 bp, synthetic construct
  source 1..20: mol_type = other DNA
gcgtgatctcggctcactgc

SEQ ID NO: 268239 - DNA, 20 bp, synthetic construct
  source 1..20: mol_type = other DNA
ggcgtgatctcggctcactg

SEQ ID NO: 268240 - DNA, 20 bp, synthetic construct
  source 1..20: mol_type = other DNA
tggcgtgatctcggctcact

SEQ ID NO: 268241 - DNA, 20 bp, synthetic construct
  source 1..20: mol_type = other DNA
atggcgtgatctcggctcac

SEQ ID NO: 268242 - DNA, 20 bp, synthetic construct
  source 1..20: mol_type = other DNA
aatggcgtgatctcggctca

SEQ ID NO: 268243 - DNA, 20 bp, synthetic construct
  source 1..20: mol_type = other DNA
caatggcgtgatctcggctc

SEQ ID NO: 268244 - DNA, 20 bp, synthetic construct
  source 1..20: mol_type = other DNA
gcaatggcgtgatctcggct

SEQ ID NO: 268245 - DNA, 20 bp, synthetic construct
  source 1..20: mol_type = other DNA
tgcaatggcgtgatctcggc

SEQ ID NO: 268246 - DNA, 20 bp, synthetic construct
  source 1..20: mol_type = other DNA
gtgcaatggcgtgatctcgg

SEQ ID NO: 268247 - DNA, 20 bp, synthetic construct
  source 1..20: mol_type = other DNA
agtgcaatggcgtgatctcg

SEQ ID NO: 268248 - DNA, 20 bp, synthetic construct
  source 1..20: mol_type = other DNA
gagtgcaatggcgtgatctc

SEQ ID NO: 268249 - DNA, 20 bp, synthetic construct
  source 1..20: mol_type = other DNA
ggagtgcaatggcgtgatct

SEQ ID NO: 268250 - DNA, 20 bp, synthetic construct
  source 1..20: mol_type = other DNA
tggagtgcaatggcgtgatc

SEQ ID NO: 268251 - DNA, 20 bp, synthetic construct
  source 1..20: mol_type = other DNA
ctggagtgcaatggcgtgat

SEQ ID NO: 268252 - DNA, 20 bp, synthetic construct
  source 1..20: mol_type = other DNA
gctggagtgcaatggcgtga

SEQ ID NO: 268253 - DNA, 20 bp, synthetic construct
  source 1..20: mol_type = other DNA
ggctggagtgcaatggcgtg

SEQ ID NO: 268254 - DNA, 20 bp, synthetic construct
  source 1..20: mol_type = other DNA
aggctggagtgcaatggcgt

SEQ ID NO: 268255 - DNA, 20 bp, synthetic construct
  source 1..20: mol_type = other DNA
caggctggagtgcaatggcg

SEQ ID NO: 268256 - DNA, 20 bp, synthetic construct
  source 1..20: mol_type = other DNA
ccaggctggagtgcaatggc

SEQ ID NO: 268257 - DNA, 20 bp, synthetic construct
  source 1..20: mol_type = other DNA
cccaggctggagtgcaatgg

SEQ ID NO: 268258 - DNA, 20 bp, synthetic construct
  source 1..20: mol_type = other DNA
gcccaggctggagtgcaatg

SEQ ID NO: 268259 - DNA, 20 bp, synthetic construct
  source 1..20: mol_type = other DNA
tgcccaggctggagtgcaat

SEQ ID NO: 268260 - DNA, 20 bp, synthetic construct
  source 1..20: mol_type = other DNA
atgcccaggctggagtgcaa

SEQ ID NO: 268261 - DNA, 20 bp, synthetic construct
  source 1..20: mol_type = other DNA
gatgcccaggctggagtgca

SEQ ID NO: 268262 - DNA, 20 bp, synthetic construct
  source 1..20: mol_type = other DNA
tgatgcccaggctggagtgc

SEQ ID NO: 268263 - DNA, 20 bp, synthetic construct
  source 1..20: mol_type = other DNA
ctgatgcccaggctggagtg

SEQ ID NO: 268264 - DNA, 20 bp, synthetic construct
  source 1..20: mol_type = other DNA
tctgatgcccaggctggagt

SEQ ID NO: 268265 - DNA, 20 bp, synthetic construct
  source 1..20: mol_type = other DNA
ttctgatgcccaggctggag

SEQ ID NO: 268266 - DNA, 20 bp, synthetic construct
  source 1..20: mol_type = other DNA
attctgatgcccaggctgga

SEQ ID NO: 268267 - DNA, 20 bp, synthetic construct
  source 1..20: mol_type = other DNA
tattctgatgcccaggctgg

SEQ ID NO: 268268 - DNA, 20 bp, synthetic construct
  source 1..20: mol_type = other DNA
ttattctgatgcccaggctg

SEQ ID NO: 268269 - DNA, 20 bp, synthetic construct
  source 1..20: mol_type = other DNA
cttattctgatgcccaggct

SEQ ID NO: 268270 - DNA, 20 bp, synthetic construct
  source 1..20: mol_type = other DNA
tcttattctgatgcccaggc

SEQ ID NO: 268271 - DNA, 20 bp, synthetic construct
  source 1..20: mol_type = other DNA
gtcttattctgatgcccagg

SEQ ID NO: 268272 - DNA, 20 bp, synthetic construct
  source 1..20: mol_type = other DNA
agtcttattctgatgcccag

SEQ ID NO: 268273 - DNA, 20 bp, synthetic construct
  source 1..20: mol_type = other DNA
gagtcttattctgatgccca

SEQ ID NO: 268274 - DNA, 20 bp, synthetic construct
  source 1..20: mol_type = other DNA
ggagtcttattctgatgccc

SEQ ID NO: 268275 - DNA, 20 bp, synthetic construct
  source 1..20: mol_type = other DNA
cggagtcttattctgatgcc

SEQ ID NO: 268276 - DNA, 20 bp, synthetic construct
  source 1..20: mol_type = other DNA
acggagtcttattctgatgc

SEQ ID NO: 268277 - DNA, 20 bp, synthetic construct
  source 1..20: mol_type = other DNA
gacggagtcttattctgatg

SEQ ID NO: 268278 - DNA, 20 bp, synthetic construct
  source 1..20: mol_type = other DNA
agacggagtcttattctgat

SEQ ID NO: 268279 - DNA, 20 bp, synthetic construct
  source 1..20: mol_type = other DNA
gagacggagtcttattctga

SEQ ID NO: 268280 - DNA, 20 bp, synthetic construct
  source 1..20: mol_type = other DNA
tgagacggagtcttattctg

SEQ ID NO: 268281 - DNA, 20 bp, synthetic construct
  source 1..20: mol_type = other DNA
ttgagacggagtcttattct

SEQ ID NO: 268282 - DNA, 20 bp, synthetic construct
  source 1..20: mol_type = other DNA
tttgagacggagtcttattc

SEQ ID NO: 268283 - DNA, 20 bp, synthetic construct
  source 1..20: mol_type = other DNA
ttttgagacggagtcttatt

SEQ ID NO: 268284 - DNA, 20 bp, synthetic construct
  source 1..20: mol_type = other DNA
tttttgagacggagtcttat

SEQ ID NO: 268285 - DNA, 20 bp, synthetic construct
  source 1..20: mol_type = other DNA
ttttttgagacggagtctta

SEQ ID NO: 268286 - DNA, 20 bp, synthetic construct
  source 1..20: mol_type = other DNA
tttttttgagacggagtctt

SEQ ID NO: 268287 - DNA, 20 bp, synthetic construct
  source 1..20: mol_type = other DNA
ttttttttgagacggagtct

SEQ ID NO: 268288 - DNA, 20 bp, synthetic construct
  source 1..20: mol_type = other DNA
tttttttttgagacggagtc

SEQ ID NO: 268289 - DNA, 20 bp, synthetic construct
  source 1..20: mol_type = other DNA
ttttttttttgagacggagt

SEQ ID NO: 268290 - DNA, 20 bp, synthetic construct
  source 1..20: mol_type = other DNA
gttttttttttgagacggag

SEQ ID NO: 268291 - DNA, 20 bp, synthetic construct
  source 1..20: mol_type = other DNA
ggttttttttttgagacgga

SEQ ID NO: 268292 - DNA, 20 bp, synthetic construct
  source 1..20: mol_type = other DNA
tggttttttttttgagacgg

SEQ ID NO: 268293 - DNA, 20 bp, synthetic construct
  source 1..20: mol_type = other DNA
gtggttttttttttgagacg

SEQ ID NO: 268294 - DNA, 20 bp, synthetic construct
  source 1..20: mol_type = other DNA
tgtggttttttttttgagac

SEQ ID NO: 268295 - DNA, 20 bp, synthetic construct
  source 1..20: mol_type = other DNA
ttgtggttttttttttgaga

SEQ ID NO: 268296 - DNA, 20 bp, synthetic construct
  source 1..20: mol_type = other DNA
tttgtggttttttttttgag

SEQ ID NO: 268297 - DNA, 20 bp, synthetic construct
  source 1..20: mol_type = other DNA
ttttgtggttttttttttga

SEQ ID NO: 268298 - DNA, 20 bp, synthetic construct
  source 1..20: mol_type = other DNA
tttttgtggttttttttttg

SEQ ID NO: 268299 - DNA, 20 bp, synthetic construct
  source 1..20: mol_type = other DNA
ttttttgtggtttttttttt

SEQ ID NO: 268300 - DNA, 20 bp, synthetic construct
  source 1..20: mol_type = other DNA
tttttttgtggttttttttt

SEQ ID NO: 268301 - DNA, 20 bp, synthetic construct
  source 1..20: mol_type = other DNA
gtttttttgtggtttttttt

SEQ ID NO: 268302 - DNA, 20 bp, synthetic construct
  source 1..20: mol_type = other DNA
tgtttttttgtggttttttt

SEQ ID NO: 268303 - DNA, 20 bp, synthetic construct
  source 1..20: mol_type = other DNA
ttgtttttttgtggtttttt

SEQ ID NO: 268304 - DNA, 20 bp, synthetic construct
  source 1..20: mol_type = other DNA
tttgtttttttgtggttttt

SEQ ID NO: 268305 - DNA, 20 bp, synthetic construct
  source 1..20: mol_type = other DNA
ttttgtttttttgtggtttt

SEQ ID NO: 268306 - DNA, 20 bp, synthetic construct
  source 1..20: mol_type = other DNA
gttttgtttttttgtggttt

SEQ ID NO: 268307 - DNA, 20 bp, synthetic construct
  source 1..20: mol_type = other DNA
tgttttgtttttttgtggtt

SEQ ID NO: 268308 - DNA, 20 bp, synthetic construct
  source 1..20: mol_type = other DNA
ttgttttgtttttttgtggt

SEQ ID NO: 268309 - DNA, 20 bp, synthetic construct
  source 1..20: mol_type = other DNA
gttgttttgtttttttgtgg

SEQ ID NO: 268310 - DNA, 20 bp, synthetic construct
  source 1..20: mol_type = other DNA
tgttgttttgtttttttgtg

SEQ ID NO: 268311 - DNA, 20 bp, synthetic construct
  source 1..20: mol_type = other DNA
ttgttgttttgtttttttgt

SEQ ID NO: 268312 - DNA, 20 bp, synthetic construct
  source 1..20: mol_type = other DNA
gttgttgttttgtttttttg

SEQ ID NO: 268313 - DNA, 20 bp, synthetic construct
  source 1..20: mol_type = other DNA
tgttgttgttttgttttttt

SEQ ID NO: 268314 - DNA, 20 bp, synthetic construct
  source 1..20: mol_type = other DNA
ttgttgttgttttgtttttt

SEQ ID NO: 268315 - DNA, 20 bp, synthetic construct
  source 1..20: mol_type = other DNA
tttgttgttgttttgttttt

SEQ ID NO: 268316 - DNA, 20 bp, synthetic construct
  source 1..20: mol_type = other DNA
ttttgttgttgttttgtttt

SEQ ID NO: 268317 - DNA, 20 bp, synthetic construct
  source 1..20: mol_type = other DNA
cttttgttgttgttttgttt

SEQ ID NO: 268318 - DNA, 20 bp, synthetic construct
  source 1..20: mol_type = other DNA
tcttttgttgttgttttgtt

SEQ ID NO: 268319 - DNA, 20 bp, synthetic construct
  source 1..20: mol_type = other DNA
ttcttttgttgttgttttgt

SEQ ID NO: 268320 - DNA, 20 bp, synthetic construct
  source 1..20: mol_type = other DNA
tttcttttgttgttgttttg

SEQ ID NO: 268321 - DNA, 20 bp, synthetic construct
  source 1..20: mol_type = other DNA
ttttcttttgttgttgtttt

SEQ ID NO: 268322 - DNA, 20 bp, synthetic construct
  source 1..20: mol_type = other DNA
gttttcttttgttgttgttt

SEQ ID NO: 268323 - DNA, 20 bp, synthetic construct
  source 1..20: mol_type = other DNA
agttttcttttgttgttgtt

SEQ ID NO: 268324 - DNA, 20 bp, synthetic construct
  source 1..20: mol_type = other DNA
tagttttcttttgttgttgt

SEQ ID NO: 268325 - DNA, 20 bp, synthetic construct
  source 1..20: mol_type = other DNA
ctagttttcttttgttgttg

SEQ ID NO: 268326 - DNA, 20 bp, synthetic construct
  source 1..20: mol_type = other DNA
actagttttcttttgttgtt

SEQ ID NO: 268327 - DNA, 20 bp, synthetic construct
  source 1..20: mol_type = other DNA
cactagttttcttttgttgt

SEQ ID NO: 268328 - DNA, 20 bp, synthetic construct
  source 1..20: mol_type = other DNA
gcactagttttcttttgttg

SEQ ID NO: 268329 - DNA, 20 bp, synthetic construct
  source 1..20: mol_type = other DNA
agcactagttttcttttgtt

SEQ ID NO: 268330 - DNA, 20 bp, synthetic construct
  source 1..20: mol_type = other DNA
aagcactagttttcttttgt

SEQ ID NO: 268331 - DNA, 20 bp, synthetic construct
  source 1..20: mol_type = other DNA
taagcactagttttcttttg

SEQ ID NO: 268332 - DNA, 20 bp, synthetic construct
  source 1..20: mol_type = other DNA
ataagcactagttttctttt

SEQ ID NO: 268333 - DNA, 20 bp, synthetic construct
  source 1..20: mol_type = other DNA
aataagcactagttttcttt

SEQ ID NO: 268334 - DNA, 20 bp, synthetic construct
  source 1..20: mol_type = other DNA
gaataagcactagttttctt

SEQ ID NO: 268335 - DNA, 20 bp, synthetic construct
  source 1..20: mol_type = other DNA
cgaataagcactagttttct

SEQ ID NO: 268336 - DNA, 20 bp, synthetic construct
  source 1..20: mol_type = other DNA
acgaataagcactagttttc

SEQ ID NO: 268337 - DNA, 20 bp, synthetic construct
  source 1..20: mol_type = other DNA
gacgaataagcactagtttt

SEQ ID NO: 268338 - DNA, 20 bp, synthetic construct
  source 1..20: mol_type = other DNA
tgacgaataagcactagttt

SEQ ID NO: 268339 - DNA, 20 bp, synthetic construct
  source 1..20: mol_type = other DNA
gtgacgaataagcactagtt

SEQ ID NO: 268340 - DNA, 20 bp, synthetic construct
  source 1..20: mol_type = other DNA
agtgacgaataagcactagt

SEQ ID NO: 268341 - DNA, 20 bp, synthetic construct
  source 1..20: mol_type = other DNA
cagtgacgaataagcactag

SEQ ID NO: 268342 - DNA, 20 bp, synthetic construct
  source 1..20: mol_type = other DNA
ccagtgacgaataagcacta

SEQ ID NO: 268343 - DNA, 20 bp, synthetic construct
  source 1..20: mol_type = other DNA
gccagtgacgaataagcact

SEQ ID NO: 268344 - DNA, 20 bp, synthetic construct
  source 1..20: mol_type = other DNA
ggccagtgacgaataagcac

SEQ ID NO: 268345 - DNA, 20 bp, synthetic construct
  source 1..20: mol_type = other DNA
tggccagtgacgaataagca

SEQ ID NO: 268346 - DNA, 20 bp, synthetic construct
  source 1..20: mol_type = other DNA
ttggccagtgacgaataagc

SEQ ID NO: 268347 - DNA, 20 bp, synthetic construct
  source 1..20: mol_type = other DNA
cttggccagtgacgaataag

SEQ ID NO: 268348 - DNA, 20 bp, synthetic construct
  source 1..20: mol_type = other DNA
gcttggccagtgacgaataa

SEQ ID NO: 268349 - DNA, 20 bp, synthetic construct
  source 1..20: mol_type = other DNA
agcttggccagtgacgaata

SEQ ID NO: 268350 - DNA, 20 bp, synthetic construct
  source 1..20: mol_type = other DNA
cagcttggccagtgacgaat

SEQ ID NO: 268351 - DNA, 20 bp, synthetic construct
  source 1..20: mol_type = other DNA
gcagcttggccagtgacgaa

SEQ ID NO: 268352 - DNA, 20 bp, synthetic construct
  source 1..20: mol_type = other DNA
ggcagcttggccagtgacga

SEQ ID NO: 268353 - DNA, 20 bp, synthetic construct
  source 1..20: mol_type = other DNA
gggcagcttggccagtgacg

SEQ ID NO: 268354 - DNA, 20 bp, synthetic construct
  source 1..20: mol_type = other DNA
tgggcagcttggccagtgac

SEQ ID NO: 268355 - DNA, 20 bp, synthetic construct
  source 1..20: mol_type = other DNA
atgggcagcttggccagtga

SEQ ID NO: 268356 - DNA, 20 bp, synthetic construct
  source 1..20: mol_type = other DNA
aatgggcagcttggccagtg

SEQ ID NO: 268357 - DNA, 20 bp, synthetic construct
  source 1..20: mol_type = other DNA
caatgggcagcttggccagt

SEQ ID NO: 268358 - DNA, 20 bp, synthetic construct
  source 1..20: mol_type = other DNA
ccaatgggcagcttggccag

SEQ ID NO: 268359 - DNA, 20 bp, synthetic construct
  source 1..20: mol_type = other DNA
gccaatgggcagcttggcca

SEQ ID NO: 268360 - DNA, 20 bp, synthetic construct
  source 1..20: mol_type = other DNA
agccaatgggcagcttggcc

SEQ ID NO: 268361 - DNA, 20 bp, synthetic construct
  source 1..20: mol_type = other DNA
tagccaatgggcagcttggc

SEQ ID NO: 268362 - DNA, 20 bp, synthetic construct
  source 1..20: mol_type = other DNA
gtagccaatgggcagcttgg

SEQ ID NO: 268363 - DNA, 20 bp, synthetic construct
  source 1..20: mol_type = other DNA
tgtagccaatgggcagcttg

SEQ ID NO: 268364 - DNA, 20 bp, synthetic construct
  source 1..20: mol_type = other DNA
atgtagccaatgggcagctt

SEQ ID NO: 268365 - DNA, 20 bp, synthetic construct
  source 1..20: mol_type = other DNA
catgtagccaatgggcagct

SEQ ID NO: 268366 - DNA, 20 bp, synthetic construct
  source 1..20: mol_type = other DNA
ccatgtagccaatgggcagc

SEQ ID NO: 268367 - DNA, 20 bp, synthetic construct
  source 1..20: mol_type = other DNA
cccatgtagccaatgggcag

SEQ ID NO: 268368 - DNA, 20 bp, synthetic construct
  source 1..20: mol_type = other DNA
acccatgtagccaatgggca

SEQ ID NO: 268369 - DNA, 20 bp, synthetic construct
  source 1..20: mol_type = other DNA
cacccatgtagccaatgggc

SEQ ID NO: 268370 - DNA, 20 bp, synthetic construct
  source 1..20: mol_type = other DNA
gcacccatgtagccaatggg

SEQ ID NO: 268371 - DNA, 20 bp, synthetic construct
  source 1..20: mol_type = other DNA
agcacccatgtagccaatgg

SEQ ID NO: 268372 - DNA, 20 bp, synthetic construct
  source 1..20: mol_type = other DNA
aagcacccatgtagccaatg

SEQ ID NO: 268373 - DNA, 20 bp, synthetic construct
  source 1..20: mol_type = other DNA
gaagcacccatgtagccaat

SEQ ID NO: 268374 - DNA, 20 bp, synthetic construct
  source 1..20: mol_type = other DNA
tgaagcacccatgtagccaa

SEQ ID NO: 268375 - DNA, 20 bp, synthetic construct
  source 1..20: mol_type = other DNA
ttgaagcacccatgtagcca

SEQ ID NO: 268376 - DNA, 20 bp, synthetic construct
  source 1..20: mol_type = other DNA
tttgaagcacccatgtagcc

SEQ ID NO: 268377 - DNA, 20 bp, synthetic construct
  source 1..20: mol_type = other DNA
ctttgaagcacccatgtagc

SEQ ID NO: 268378 - DNA, 20 bp, synthetic construct
  source 1..20: mol_type = other DNA
tctttgaagcacccatgtag

SEQ ID NO: 268379 - DNA, 20 bp, synthetic construct
  source 1..20: mol_type = other DNA
ctctttgaagcacccatgta

SEQ ID NO: 268380 - DNA, 20 bp, synthetic construct
  source 1..20: mol_type = other DNA
gctctttgaagcacccatgt

SEQ ID NO: 268381 - DNA, 20 bp, synthetic construct
  source 1..20: mol_type = other DNA
agctctttgaagcacccatg

SEQ ID NO: 268382 - DNA, 20 bp, synthetic construct
  source 1..20: mol_type = other DNA
cagctctttgaagcacccat

SEQ ID NO: 268383 - DNA, 20 bp, synthetic construct
  source 1..20: mol_type = other DNA
gcagctctttgaagcaccca

SEQ ID NO: 268384 - DNA, 20 bp, synthetic construct
  source 1..20: mol_type = other DNA
ggcagctctttgaagcaccc

SEQ ID NO: 268385 - DNA, 20 bp, synthetic construct
  source 1..20: mol_type = other DNA
gggcagctctttgaagcacc

SEQ ID NO: 268386 - DNA, 20 bp, synthetic construct
  source 1..20: mol_type = other DNA
agggcagctctttgaagcac

SEQ ID NO: 268387 - DNA, 20 bp, synthetic construct
  source 1..20: mol_type = other DNA
aagggcagctctttgaagca

SEQ ID NO: 268388 - DNA, 20 bp, synthetic construct
  source 1..20: mol_type = other DNA
gaagggcagctctttgaagc

SEQ ID NO: 268389 - DNA, 20 bp, synthetic construct
  source 1..20: mol_type = other DNA
agaagggcagctctttgaag

SEQ ID NO: 268390 - DNA, 20 bp, synthetic construct
  source 1..20: mol_type = other DNA
gagaagggcagctctttgaa

SEQ ID NO: 268391 - DNA, 20 bp, synthetic construct
  source 1..20: mol_type = other DNA
ggagaagggcagctctttga

SEQ ID NO: 268392 - DNA, 20 bp, synthetic construct
  source 1..20: mol_type = other DNA
tggagaagggcagctctttg

SEQ ID NO: 268393 - DNA, 20 bp, synthetic construct
  source 1..20: mol_type = other DNA
ctggagaagggcagctcttt

SEQ ID NO: 268394 - DNA, 20 bp, synthetic construct
  source 1..20: mol_type = other DNA
cctggagaagggcagctctt

SEQ ID NO: 268395 - DNA, 20 bp, synthetic construct
  source 1..20: mol_type = other DNA
acctggagaagggcagctct

SEQ ID NO: 268396 - DNA, 20 bp, synthetic construct
  source 1..20: mol_type = other DNA
gacctggagaagggcagctc

SEQ ID NO: 268397 - DNA, 20 bp, synthetic construct
  source 1..20: mol_type = other DNA
agacctggagaagggcagct

SEQ ID NO: 268398 - DNA, 20 bp, synthetic construct
  source 1..20: mol_type = other DNA
cagacctggagaagggcagc

SEQ ID NO: 268399 - DNA, 20 bp, synthetic construct
  source 1..20: mol_type = other DNA
ccagacctggagaagggcag

SEQ ID NO: 268400 - DNA, 20 bp, synthetic construct
  source 1..20: mol_type = other DNA
gccagacctggagaagggca

SEQ ID NO: 268401 - DNA, 20 bp, synthetic construct
  source 1..20: mol_type = other DNA
ggccagacctggagaagggc

SEQ ID NO: 268402 - DNA, 20 bp, synthetic construct
  source 1..20: mol_type = other DNA
tggccagacctggagaaggg

SEQ ID NO: 268403 - DNA, 20 bp, synthetic construct
  source 1..20: mol_type = other DNA
ctggccagacctggagaagg

SEQ ID NO: 268404 - DNA, 20 bp, synthetic construct
  source 1..20: mol_type = other DNA
gctggccagacctggagaag

SEQ ID NO: 268405 - DNA, 20 bp, synthetic construct
  source 1..20: mol_type = other DNA
tgctggccagacctggagaa

SEQ ID NO: 268406 - DNA, 20 bp, synthetic construct
  source 1..20: mol_type = other DNA
ctgctggccagacctggaga

SEQ ID NO: 268407 - DNA, 20 bp, synthetic construct
  source 1..20: mol_type = other DNA
cctgctggccagacctggag

SEQ ID NO: 268408 - DNA, 20 bp, synthetic construct
  source 1..20: mol_type = other DNA
acctgctggccagacctgga

SEQ ID NO: 268409 - DNA, 20 bp, synthetic construct
  source 1..20: mol_type = other DNA
tacctgctggccagacctgg

SEQ ID NO: 268410 - DNA, 20 bp, synthetic construct
  source 1..20: mol_type = other DNA
atacctgctggccagacctg

SEQ ID NO: 268411 - DNA, 20 bp, synthetic construct
  source 1..20: mol_type = other DNA
catacctgctggccagacct

SEQ ID NO: 268412 - DNA, 20 bp, synthetic construct
  source 1..20: mol_type = other DNA
acatacctgctggccagacc

SEQ ID NO: 268413 - DNA, 20 bp, synthetic construct
  source 1..20: mol_type = other DNA
cacatacctgctggccagac

SEQ ID NO: 268414 - DNA, 20 bp, synthetic construct
  source 1..20: mol_type = other DNA
acacatacctgctggccaga

SEQ ID NO: 268415 - DNA, 20 bp, synthetic construct
  source 1..20: mol_type = other DNA
aacacatacctgctggccag

SEQ ID NO: 268416 - DNA, 20 bp, synthetic construct
  source 1..20: mol_type = other DNA
taacacatacctgctggcca

SEQ ID NO: 268417 - DNA, 20 bp, synthetic construct
  source 1..20: mol_type = other DNA
gtaacacatacctgctggcc

SEQ ID NO: 268418 - DNA, 20 bp, synthetic construct
  source 1..20: mol_type = other DNA
tgtaacacatacctgctggc

SEQ ID NO: 268419 - DNA, 20 bp, synthetic construct
  source 1..20: mol_type = other DNA
ctgtaacacatacctgctgg

SEQ ID NO: 268420 - DNA, 20 bp, synthetic construct
  source 1..20: mol_type = other DNA
gctgtaacacatacctgctg

SEQ ID NO: 268421 - DNA, 20 bp, synthetic construct
  source 1..20: mol_type = other DNA
tgctgtaacacatacctgct

SEQ ID NO: 268422 - DNA, 20 bp, synthetic construct
  source 1..20: mol_type = other DNA
ttgctgtaacacatacctgc

SEQ ID NO: 268423 - DNA, 20 bp, synthetic construct
  source 1..20: mol_type = other DNA
tttgctgtaacacatacctg

SEQ ID NO: 268424 - DNA, 20 bp, synthetic construct
  source 1..20: mol_type = other DNA
atttgctgtaacacatacct

SEQ ID NO: 268425 - DNA, 20 bp, synthetic construct
  source 1..20: mol_type = other DNA
catttgctgtaacacatacc

SEQ ID NO: 268426 - DNA, 20 bp, synthetic construct
  source 1..20: mol_type = other DNA
gcatttgctgtaacacatac

SEQ ID NO: 268427 - DNA, 20 bp, synthetic construct
  source 1..20: mol_type = other DNA
ggcatttgctgtaacacata

SEQ ID NO: 268428 - DNA, 20 bp, synthetic construct
  source 1..20: mol_type = other DNA
aggcatttgctgtaacacat

SEQ ID NO: 268429 - DNA, 20 bp, synthetic construct
  source 1..20: mol_type = other DNA
caggcatttgctgtaacaca

SEQ ID NO: 268430 - DNA, 20 bp, synthetic construct
  source 1..20: mol_type = other DNA
ccaggcatttgctgtaacac

SEQ ID NO: 268431 - DNA, 20 bp, synthetic construct
  source 1..20: mol_type = other DNA
cccaggcatttgctgtaaca

SEQ ID NO: 268432 - DNA, 20 bp, synthetic construct
  source 1..20: mol_type = other DNA
ccccaggcatttgctgtaac

SEQ ID NO: 268433 - DNA, 20 bp, synthetic construct
  source 1..20: mol_type = other DNA
gccccaggcatttgctgtaa

SEQ ID NO: 268434 - DNA, 20 bp, synthetic construct
  source 1..20: mol_type = other DNA
tgccccaggcatttgctgta

SEQ ID NO: 268435 - DNA, 20 bp, synthetic construct
  source 1..20: mol_type = other DNA
ctgccccaggcatttgctgt

SEQ ID NO: 268436 - DNA, 20 bp, synthetic construct
  source 1..20: mol_type = other DNA
gctgccccaggcatttgctg

SEQ ID NO: 268437 - DNA, 20 bp, synthetic construct
  source 1..20: mol_type = other DNA
cgctgccccaggcatttgct

SEQ ID NO: 268438 - DNA, 20 bp, synthetic construct
  source 1..20: mol_type = other DNA
ccgctgccccaggcatttgc

SEQ ID NO: 268439 - DNA, 20 bp, synthetic construct
  source 1..20: mol_type = other DNA
gccgctgccccaggcatttg

SEQ ID NO: 268440 - DNA, 20 bp, synthetic construct
  source 1..20: mol_type = other DNA
tgccgctgccccaggcattt

SEQ ID NO: 268441 - DNA, 20 bp, synthetic construct
  source 1..20: mol_type = other DNA
ctgccgctgccccaggcatt

SEQ ID NO: 268442 - DNA, 20 bp, synthetic construct
  source 1..20: mol_type = other DNA
cctgccgctgccccaggcat

SEQ ID NO: 268443 - DNA, 20 bp, synthetic construct
  source 1..20: mol_type = other DNA
ccctgccgctgccccaggca

SEQ ID NO: 268444 - DNA, 20 bp, synthetic construct
  source 1..20: mol_type = other DNA
cccctgccgctgccccaggc

SEQ ID NO: 268445 - DNA, 20 bp, synthetic construct
  source 1..20: mol_type = other DNA
gcccctgccgctgccccagg

SEQ ID NO: 268446 - DNA, 20 bp, synthetic construct
  source 1..20: mol_type = other DNA
tgcccctgccgctgccccag

SEQ ID NO: 268447 - DNA, 20 bp, synthetic construct
  source 1..20: mol_type = other DNA
atgcccctgccgctgcccca

SEQ ID NO: 268448 - DNA, 20 bp, synthetic construct
  source 1..20: mol_type = other DNA
aatgcccctgccgctgcccc

SEQ ID NO: 268449 - DNA, 20 bp, synthetic construct
  source 1..20: mol_type = other DNA
caatgcccctgccgctgccc

SEQ ID NO: 268450 - DNA, 20 bp, synthetic construct
  source 1..20: mol_type = other DNA
gcaatgcccctgccgctgcc

SEQ ID NO: 268451 - DNA, 20 bp, synthetic construct
  source 1..20: mol_type = other DNA
agcaatgcccctgccgctgc

SEQ ID NO: 268452 - DNA, 20 bp, synthetic construct
  source 1..20: mol_type = other DNA
cagcaatgcccctgccgctg

SEQ ID NO: 268453 - DNA, 20 bp, synthetic construct
  source 1..20: mol_type = other DNA
gcagcaatgcccctgccgct

SEQ ID NO: 268454 - DNA, 20 bp, synthetic construct
  source 1..20: mol_type = other DNA
cgcagcaatgcccctgccgc

SEQ ID NO: 268455 - DNA, 20 bp, synthetic construct
  source 1..20: mol_type = other DNA
ccgcagcaatgcccctgccg

SEQ ID NO: 268456 - DNA, 20 bp, synthetic construct
  source 1..20: mol_type = other DNA
cccgcagcaatgcccctgcc

SEQ ID NO: 268457 - DNA, 20 bp, synthetic construct
  source 1..20: mol_type = other DNA
tcccgcagcaatgcccctgc

SEQ ID NO: 268458 - DNA, 20 bp, synthetic construct
  source 1..20: mol_type = other DNA
ttcccgcagcaatgcccctg

SEQ ID NO: 268459 - DNA, 20 bp, synthetic construct
  source 1..20: mol_type = other DNA
cttcccgcagcaatgcccct

SEQ ID NO: 268460 - DNA, 20 bp, synthetic construct
  source 1..20: mol_type = other DNA
gcttcccgcagcaatgcccc

SEQ ID NO: 268461 - DNA, 20 bp, synthetic construct
  source 1..20: mol_type = other DNA
agcttcccgcagcaatgccc

SEQ ID NO: 268462 - DNA, 20 bp, synthetic construct
  source 1..20: mol_type = other DNA
aagcttcccgcagcaatgcc

SEQ ID NO: 268463 - DNA, 20 bp, synthetic construct
  source 1..20: mol_type = other DNA
gaagcttcccgcagcaatgc

SEQ ID NO: 268464 - DNA, 20 bp, synthetic construct
  source 1..20: mol_type = other DNA
agaagcttcccgcagcaatg

SEQ ID NO: 268465 - DNA, 20 bp, synthetic construct
  source 1..20: mol_type = other DNA
cagaagcttcccgcagcaat

SEQ ID NO: 268466 - DNA, 20 bp, synthetic construct
  source 1..20: mol_type = other DNA
ccagaagcttcccgcagcaa

SEQ ID NO: 268467 - DNA, 20 bp, synthetic construct
  source 1..20: mol_type = other DNA
tccagaagcttcccgcagca

SEQ ID NO: 268468 - DNA, 20 bp, synthetic construct
  source 1..20: mol_type = other DNA
gtccagaagcttcccgcagc

SEQ ID NO: 268469 - DNA, 20 bp, synthetic construct
  source 1..20: mol_type = other DNA
agtccagaagcttcccgcag

SEQ ID NO: 268470 - DNA, 20 bp, synthetic construct
  source 1..20: mol_type = other DNA
aagtccagaagcttcccgca

SEQ ID NO: 268471 - DNA, 20 bp, synthetic construct
  source 1..20: mol_type = other DNA
caagtccagaagcttcccgc

SEQ ID NO: 268472 - DNA, 20 bp, synthetic construct
  source 1..20: mol_type = other DNA
gcaagtccagaagcttcccg

SEQ ID NO: 268473 - DNA, 20 bp, synthetic construct
  source 1..20: mol_type = other DNA
tgcaagtccagaagcttccc

SEQ ID NO: 268474 - DNA, 20 bp, synthetic construct
  source 1..20: mol_type = other DNA
ctgcaagtccagaagcttcc

SEQ ID NO: 268475 - DNA, 20 bp, synthetic construct
  source 1..20: mol_type = other DNA
cctgcaagtccagaagcttc

SEQ ID NO: 268476 - DNA, 20 bp, synthetic construct
  source 1..20: mol_type = other DNA
tcctgcaagtccagaagctt

SEQ ID NO: 268477 - DNA, 20 bp, synthetic construct
  source 1..20: mol_type = other DNA
ttcctgcaagtccagaagct

SEQ ID NO: 268478 - DNA, 20 bp, synthetic construct
  source 1..20: mol_type = other DNA
tttcctgcaagtccagaagc

SEQ ID NO: 268479 - DNA, 20 bp, synthetic construct
  source 1..20: mol_type = other DNA
ctttcctgcaagtccagaag

SEQ ID NO: 268480 - DNA, 20 bp, synthetic construct
  source 1..20: mol_type = other DNA
gctttcctgcaagtccagaa

SEQ ID NO: 268481 - DNA, 20 bp, synthetic construct
  source 1..20: mol_type = other DNA
agctttcctgcaagtccaga

SEQ ID NO: 268482 - DNA, 20 bp, synthetic construct
  source 1..20: mol_type = other DNA
tagctttcctgcaagtccag

SEQ ID NO: 268483 - DNA, 20 bp, synthetic construct
  source 1..20: mol_type = other DNA
ttagctttcctgcaagtcca

SEQ ID NO: 268484 - DNA, 20 bp, synthetic construct
  source 1..20: mol_type = other DNA
cttagctttcctgcaagtcc

SEQ ID NO: 268485 - DNA, 20 bp, synthetic construct
  source 1..20: mol_type = other DNA
acttagctttcctgcaagtc

SEQ ID NO: 268486 - DNA, 20 bp, synthetic construct
  source 1..20: mol_type = other DNA
aacttagctttcctgcaagt

SEQ ID NO: 268487 - DNA, 20 bp, synthetic construct
  source 1..20: mol_type = other DNA
gaacttagctttcctgcaag

SEQ ID NO: 268488 - DNA, 20 bp, synthetic construct
  source 1..20: mol_type = other DNA
agaacttagctttcctgcaa

SEQ ID NO: 268489 - DNA, 20 bp, synthetic construct
  source 1..20: mol_type = other DNA
gagaacttagctttcctgca

SEQ ID NO: 268490 - DNA, 20 bp, synthetic construct
  source 1..20: mol_type = other DNA
tgagaacttagctttcctgc

SEQ ID NO: 268491 - DNA, 20 bp, synthetic construct
  source 1..20: mol_type = other DNA
ctgagaacttagctttcctg

SEQ ID NO: 268492 - DNA, 20 bp, synthetic construct
  source 1..20: mol_type = other DNA
tctgagaacttagctttcct

SEQ ID NO: 268493 - DNA, 20 bp, synthetic construct
  source 1..20: mol_type = other DNA
gtctgagaacttagctttcc

SEQ ID NO: 268494 - DNA, 20 bp, synthetic construct
  source 1..20: mol_type = other DNA
agtctgagaacttagctttc

SEQ ID NO: 268495 - DNA, 20 bp, synthetic construct
  source 1..20: mol_type = other DNA
cagtctgagaacttagcttt

SEQ ID NO: 268496 - DNA, 20 bp, synthetic construct
  source 1..20: mol_type = other DNA
gcagtctgagaacttagctt

SEQ ID NO: 268497 - DNA, 20 bp, synthetic construct
  source 1..20: mol_type = other DNA
tgcagtctgagaacttagct

SEQ ID NO: 268498 - DNA, 20 bp, synthetic construct
  source 1..20: mol_type = other DNA
ctgcagtctgagaacttagc

SEQ ID NO: 268499 - DNA, 20 bp, synthetic construct
  source 1..20: mol_type = other DNA
cctgcagtctgagaacttag

SEQ ID NO: 268500 - DNA, 20 bp, synthetic construct
  source 1..20: mol_type = other DNA
ccctgcagtctgagaactta

SEQ ID NO: 268501 - DNA, 20 bp, synthetic construct
  source 1..20: mol_type = other DNA
cccctgcagtctgagaactt

SEQ ID NO: 268502 - DNA, 20 bp, synthetic construct
  source 1..20: mol_type = other DNA
tcccctgcagtctgagaact

SEQ ID NO: 268503 - DNA, 20 bp, synthetic construct
  source 1..20: mol_type = other DNA
ctcccctgcagtctgagaac

SEQ ID NO: 268504 - DNA, 20 bp, synthetic construct
  source 1..20: mol_type = other DNA
gctcccctgcagtctgagaa

SEQ ID NO: 268505 - DNA, 20 bp, synthetic construct
  source 1..20: mol_type = other DNA
agctcccctgcagtctgaga

SEQ ID NO: 268506 - DNA, 20 bp, synthetic construct
  source 1..20: mol_type = other DNA
tagctcccctgcagtctgag

SEQ ID NO: 268507 - DNA, 20 bp, synthetic construct
  source 1..20: mol_type = other DNA
ttagctcccctgcagtctga

SEQ ID NO: 268508 - DNA, 20 bp, synthetic construct
  source 1..20: mol_type = other DNA
cttagctcccctgcagtctg

SEQ ID NO: 268509 - DNA, 20 bp, synthetic construct
  source 1..20: mol_type = other DNA
gcttagctcccctgcagtct

SEQ ID NO: 268510 - DNA, 20 bp, synthetic construct
  source 1..20: mol_type = other DNA
tgcttagctcccctgcagtc

SEQ ID NO: 268511 - DNA, 20 bp, synthetic construct
  source 1..20: mol_type = other DNA
gtgcttagctcccctgcagt

SEQ ID NO: 268512 - DNA, 20 bp, synthetic construct
  source 1..20: mol_type = other DNA
tgtgcttagctcccctgcag

SEQ ID NO: 268513 - DNA, 20 bp, synthetic construct
  source 1..20: mol_type = other DNA
gtgtgcttagctcccctgca

SEQ ID NO: 268514 - DNA, 20 bp, synthetic construct
  source 1..20: mol_type = other DNA
ggtgtgcttagctcccctgc

SEQ ID NO: 268515 - DNA, 20 bp, synthetic construct
  source 1..20: mol_type = other DNA
aggtgtgcttagctcccctg

SEQ ID NO: 268516 - DNA, 20 bp, synthetic construct
  source 1..20: mol_type = other DNA
gaggtgtgcttagctcccct

SEQ ID NO: 268517 - DNA, 20 bp, synthetic construct
  source 1..20: mol_type = other DNA
cgaggtgtgcttagctcccc

SEQ ID NO: 268518 - DNA, 20 bp, synthetic construct
  source 1..20: mol_type = other DNA
ccgaggtgtgcttagctccc

SEQ ID NO: 268519 - DNA, 20 bp, synthetic construct
  source 1..20: mol_type = other DNA
gccgaggtgtgcttagctcc

SEQ ID NO: 268520 - DNA, 20 bp, synthetic construct
  source 1..20: mol_type = other DNA
tgccgaggtgtgcttagctc

SEQ ID NO: 268521 - DNA, 20 bp, synthetic construct
  source 1..20: mol_type = other DNA
gtgccgaggtgtgcttagct

SEQ ID NO: 268522 - DNA, 20 bp, synthetic construct
  source 1..20: mol_type = other DNA
tgtgccgaggtgtgcttagc

SEQ ID NO: 268523 - DNA, 20 bp, synthetic construct
  source 1..20: mol_type = other DNA
ctgtgccgaggtgtgcttag

SEQ ID NO: 268524 - DNA, 20 bp, synthetic construct
  source 1..20: mol_type = other DNA
cctgtgccgaggtgtgctta

SEQ ID NO: 268525 - DNA, 20 bp, synthetic construct
  source 1..20: mol_type = other DNA
ccctgtgccgaggtgtgctt

SEQ ID NO: 268526 - DNA, 20 bp, synthetic construct
  source 1..20: mol_type = other DNA
accctgtgccgaggtgtgct

SEQ ID NO: 268527 - DNA, 20 bp, synthetic construct
  source 1..20: mol_type = other DNA
caccctgtgccgaggtgtgc

SEQ ID NO: 268528 - DNA, 20 bp, synthetic construct
  source 1..20: mol_type = other DNA
tcaccctgtgccgaggtgtg

SEQ ID NO: 268529 - DNA, 20 bp, synthetic construct
  source 1..20: mol_type = other DNA
ctcaccctgtgccgaggtgt

SEQ ID NO: 268530 - DNA, 20 bp, synthetic construct
  source 1..20: mol_type = other DNA
cctcaccctgtgccgaggtg

SEQ ID NO: 268531 - DNA, 20 bp, synthetic construct
  source 1..20: mol_type = other DNA
gcctcaccctgtgccgaggt

SEQ ID NO: 268532 - DNA, 20 bp, synthetic construct
  source 1..20: mol_type = other DNA
ggcctcaccctgtgccgagg

SEQ ID NO: 268533 - DNA, 20 bp, synthetic construct
  source 1..20: mol_type = other DNA
aggcctcaccctgtgccgag

SEQ ID NO: 268534 - DNA, 20 bp, synthetic construct
  source 1..20: mol_type = other DNA
caggcctcaccctgtgccga

SEQ ID NO: 268535 - DNA, 20 bp, synthetic construct
  source 1..20: mol_type = other DNA
gcaggcctcaccctgtgccg

SEQ ID NO: 268536 - DNA, 20 bp, synthetic construct
  source 1..20: mol_type = other DNA
cgcaggcctcaccctgtgcc

SEQ ID NO: 268537 - DNA, 20 bp, synthetic construct
  source 1..20: mol_type = other DNA
ccgcaggcctcaccctgtgc

SEQ ID NO: 268538 - DNA, 20 bp, synthetic construct
  source 1..20: mol_type = other DNA
accgcaggcctcaccctgtg

SEQ ID NO: 268539 - DNA, 20 bp, synthetic construct
  source 1..20: mol_type = other DNA
aaccgcaggcctcaccctgt

SEQ ID NO: 268540 - DNA, 20 bp, synthetic construct
  source 1..20: mol_type = other DNA
gaaccgcaggcctcaccctg

SEQ ID NO: 268541 - DNA, 20 bp, synthetic construct
  source 1..20: mol_type = other DNA
agaaccgcaggcctcaccct

SEQ ID NO: 268542 - DNA, 20 bp, synthetic construct
  source 1..20: mol_type = other DNA
gagaaccgcaggcctcaccc

SEQ ID NO: 268543 - DNA, 20 bp, synthetic construct
  source 1..20: mol_type = other DNA
tgagaaccgcaggcctcacc

SEQ ID NO: 268544 - DNA, 20 bp, synthetic construct
  source 1..20: mol_type = other DNA
ctgagaaccgcaggcctcac

SEQ ID NO: 268545 - DNA, 20 bp, synthetic construct
  source 1..20: mol_type = other DNA
tctgagaaccgcaggcctca

SEQ ID NO: 268546 - DNA, 20 bp, synthetic construct
  source 1..20: mol_type = other DNA
gtctgagaaccgcaggcctc

SEQ ID NO: 268547 - DNA, 20 bp, synthetic construct
  source 1..20: mol_type = other DNA
agtctgagaaccgcaggcct

SEQ ID NO: 268548 - DNA, 20 bp, synthetic construct
  source 1..20: mol_type = other DNA
aagtctgagaaccgcaggcc

SEQ ID NO: 268549 - DNA, 20 bp, synthetic construct
  source 1..20: mol_type = other DNA
gaagtctgagaaccgcaggc

SEQ ID NO: 268550 - DNA, 20 bp, synthetic construct
  source 1..20: mol_type = other DNA
tgaagtctgagaaccgcagg

SEQ ID NO: 268551 - DNA, 20 bp, synthetic construct
  source 1..20: mol_type = other DNA
ctgaagtctgagaaccgcag

SEQ ID NO: 268552 - DNA, 20 bp, synthetic construct
  source 1..20: mol_type = other DNA
actgaagtctgagaaccgca

SEQ ID NO: 268553 - DNA, 20 bp, synthetic construct
  source 1..20: mol_type = other DNA
gactgaagtctgagaaccgc

SEQ ID NO: 268554 - DNA, 20 bp, synthetic construct
  source 1..20: mol_type = other DNA
agactgaagtctgagaaccg

SEQ ID NO: 268555 - DNA, 20 bp, synthetic construct
  source 1..20: mol_type = other DNA
aagactgaagtctgagaacc

SEQ ID NO: 268556 - DNA, 20 bp, synthetic construct
  source 1..20: mol_type = other DNA
aaagactgaagtctgagaac

SEQ ID NO: 268557 - DNA, 20 bp, synthetic construct
  source 1..20: mol_type = other DNA
caaagactgaagtctgagaa

SEQ ID NO: 268558 - DNA, 20 bp, synthetic construct
  source 1..20: mol_type = other DNA
acaaagactgaagtctgaga

SEQ ID NO: 268559 - DNA, 20 bp, synthetic construct
  source 1..20: mol_type = other DNA
cacaaagactgaagtctgag

SEQ ID NO: 268560 - DNA, 20 bp, synthetic construct
  source 1..20: mol_type = other DNA
ccacaaagactgaagtctga

SEQ ID NO: 268561 - DNA, 20 bp, synthetic construct
  source 1..20: mol_type = other DNA
tccacaaagactgaagtctg

SEQ ID NO: 268562 - DNA, 20 bp, synthetic construct
  source 1..20: mol_type = other DNA
ctccacaaagactgaagtct

SEQ ID NO: 268563 - DNA, 20 bp, synthetic construct
  source 1..20: mol_type = other DNA
gctccacaaagactgaagtc

SEQ ID NO: 268564 - DNA, 20 bp, synthetic construct
  source 1..20: mol_type = other DNA
agctccacaaagactgaagt

SEQ ID NO: 268565 - DNA, 20 bp, synthetic construct
  source 1..20: mol_type = other DNA
aagctccacaaagactgaag

SEQ ID NO: 268566 - DNA, 20 bp, synthetic construct
  source 1..20: mol_type = other DNA
caagctccacaaagactgaa

SEQ ID NO: 268567 - DNA, 20 bp, synthetic construct
  source 1..20: mol_type = other DNA
tcaagctccacaaagactga

SEQ ID NO: 268568 - DNA, 20 bp, synthetic construct
  source 1..20: mol_type = other DNA
ctcaagctccacaaagactg

SEQ ID NO: 268569 - DNA, 20 bp, synthetic construct
  source 1..20: mol_type = other DNA
tctcaagctccacaaagact

SEQ ID NO: 268570 - DNA, 20 bp, synthetic construct
  source 1..20: mol_type = other DNA
ttctcaagctccacaaagac

SEQ ID NO: 268571 - DNA, 20 bp, synthetic construct
  source 1..20: mol_type = other DNA
tttctcaagctccacaaaga

SEQ ID NO: 268572 - DNA, 20 bp, synthetic construct
  source 1..20: mol_type = other DNA
ttttctcaagctccacaaag

SEQ ID NO: 268573 - DNA, 20 bp, synthetic construct
  source 1..20: mol_type = other DNA
tttttctcaagctccacaaa

SEQ ID NO: 268574 - DNA, 20 bp, synthetic construct
  source 1..20: mol_type = other DNA
atttttctcaagctccacaa

SEQ ID NO: 268575 - DNA, 20 bp, synthetic construct
  source 1..20: mol_type = other DNA
catttttctcaagctccaca

SEQ ID NO: 268576 - DNA, 20 bp, synthetic construct
  source 1..20: mol_type = other DNA
tcatttttctcaagctccac

SEQ ID NO: 268577 - DNA, 20 bp, synthetic construct
  source 1..20: mol_type = other DNA
ctcatttttctcaagctcca

SEQ ID NO: 268578 - DNA, 20 bp, synthetic construct
  source 1..20: mol_type = other DNA
cctcatttttctcaagctcc

SEQ ID NO: 268579 - DNA, 20 bp, synthetic construct
  source 1..20: mol_type = other DNA
gcctcatttttctcaagctc

SEQ ID NO: 268580 - DNA, 20 bp, synthetic construct
  source 1..20: mol_type = other DNA
agcctcatttttctcaagct

SEQ ID NO: 268581 - DNA, 20 bp, synthetic construct
  source 1..20: mol_type = other DNA
aagcctcatttttctcaagc

SEQ ID NO: 268582 - DNA, 20 bp, synthetic construct
  source 1..20: mol_type = other DNA
aaagcctcatttttctcaag

SEQ ID NO: 268583 - DNA, 20 bp, synthetic construct
  source 1..20: mol_type = other DNA
caaagcctcatttttctcaa

SEQ ID NO: 268584 - DNA, 20 bp, synthetic construct
  source 1..20: mol_type = other DNA
gcaaagcctcatttttctca

SEQ ID NO: 268585 - DNA, 20 bp, synthetic construct
  source 1..20: mol_type = other DNA
tgcaaagcctcatttttctc

SEQ ID NO: 268586 - DNA, 20 bp, synthetic construct
  source 1..20: mol_type = other DNA
ctgcaaagcctcatttttct

SEQ ID NO: 268587 - DNA, 20 bp, synthetic construct
  source 1..20: mol_type = other DNA
cctgcaaagcctcatttttc

SEQ ID NO: 268588 - DNA, 20 bp, synthetic construct
  source 1..20: mol_type = other DNA
acctgcaaagcctcattttt

SEQ ID NO: 268589 - DNA, 20 bp, synthetic construct
  source 1..20: mol_type = other DNA
gacctgcaaagcctcatttt

SEQ ID NO: 268590 - DNA, 20 bp, synthetic construct
  source 1..20: mol_type = other DNA
ggacctgcaaagcctcattt

SEQ ID NO: 268591 - DNA, 20 bp, synthetic construct
  source 1..20: mol_type = other DNA
gggacctgcaaagcctcatt

SEQ ID NO: 268592 - DNA, 20 bp, synthetic construct
  source 1..20: mol_type = other DNA
tgggacctgcaaagcctcat

SEQ ID NO: 268593 - DNA, 20 bp, synthetic construct
  source 1..20: mol_type = other DNA
gtgggacctgcaaagcctca

SEQ ID NO: 268594 - DNA, 20 bp, synthetic construct
  source 1..20: mol_type = other DNA
ggtgggacctgcaaagcctc

SEQ ID NO: 268595 - DNA, 20 bp, synthetic construct
  source 1..20: mol_type = other DNA
gggtgggacctgcaaagcct

SEQ ID NO: 268596 - DNA, 20 bp, synthetic construct
  source 1..20: mol_type = other DNA
ggggtgggacctgcaaagcc

SEQ ID NO: 268597 - DNA, 20 bp, synthetic construct
  source 1..20: mol_type = other DNA
aggggtgggacctgcaaagc

SEQ ID NO: 268598 - DNA, 20 bp, synthetic construct
  source 1..20: mol_type = other DNA
taggggtgggacctgcaaag

SEQ ID NO: 268599 - DNA, 20 bp, synthetic construct
  source 1..20: mol_type = other DNA
ctaggggtgggacctgcaaa

SEQ ID NO: 268600 - DNA, 20 bp, synthetic construct
  source 1..20: mol_type = other DNA
tctaggggtgggacctgcaa

SEQ ID NO: 268601 - DNA, 20 bp, synthetic construct
  source 1..20: mol_type = other DNA
ctctaggggtgggacctgca

SEQ ID NO: 268602 - DNA, 20 bp, synthetic construct
  source 1..20: mol_type = other DNA
tctctaggggtgggacctgc

SEQ ID NO: 268603 - DNA, 20 bp, synthetic construct
  source 1..20: mol_type = other DNA
atctctaggggtgggacctg

SEQ ID NO: 268604 - DNA, 20 bp, synthetic construct
  source 1..20: mol_type = other DNA
aatctctaggggtgggacct

SEQ ID NO: 268605 - DNA, 20 bp, synthetic construct
  source 1..20: mol_type = other DNA
gaatctctaggggtgggacc

SEQ ID NO: 268606 - DNA, 20 bp, synthetic construct
  source 1..20: mol_type = other DNA
agaatctctaggggtgggac

SEQ ID NO: 268607 - DNA, 20 bp, synthetic construct
  source 1..20: mol_type = other DNA
cagaatctctaggggtggga

SEQ ID NO: 268608 - DNA, 20 bp, synthetic construct
  source 1..20: mol_type = other DNA
gcagaatctctaggggtggg

SEQ ID NO: 268609 - DNA, 20 bp, synthetic construct
  source 1..20: mol_type = other DNA
agcagaatctctaggggtgg

SEQ ID NO: 268610 - DNA, 20 bp, synthetic construct
  source 1..20: mol_type = other DNA
gagcagaatctctaggggtg

SEQ ID NO: 268611 - DNA, 20 bp, synthetic construct
  source 1..20: mol_type = other DNA
agagcagaatctctaggggt

SEQ ID NO: 268612 - DNA, 20 bp, synthetic construct
  source 1..20: mol_type = other DNA
tagagcagaatctctagggg

SEQ ID NO: 268613 - DNA, 20 bp, synthetic construct
  source 1..20: mol_type = other DNA
atagagcagaatctctaggg

SEQ ID NO: 268614 - DNA, 20 bp, synthetic construct
  source 1..20: mol_type = other DNA
gatagagcagaatctctagg

SEQ ID NO: 268615 - DNA, 20 bp, synthetic construct
  source 1..20: mol_type = other DNA
ggatagagcagaatctctag

SEQ ID NO: 268616 - DNA, 20 bp, synthetic construct
  source 1..20: mol_type = other DNA
tggatagagcagaatctcta

SEQ ID NO: 268617 - DNA, 20 bp, synthetic construct
  source 1..20: mol_type = other DNA
gtggatagagcagaatctct

SEQ ID NO: 268618 - DNA, 20 bp, synthetic construct
  source 1..20: mol_type = other DNA
agtggatagagcagaatctc

SEQ ID NO: 268619 - DNA, 20 bp, synthetic construct
  source 1..20: mol_type = other DNA
gagtggatagagcagaatct

SEQ ID NO: 268620 - DNA, 20 bp, synthetic construct
  source 1..20: mol_type = other DNA
agagtggatagagcagaatc

SEQ ID NO: 268621 - DNA, 20 bp, synthetic construct
  source 1..20: mol_type = other DNA
aagagtggatagagcagaat

SEQ ID NO: 268622 - DNA, 20 bp, synthetic construct
  source 1..20: mol_type = other DNA
caagagtggatagagcagaa

SEQ ID NO: 268623 - DNA, 20 bp, synthetic construct
  source 1..20: mol_type = other DNA
tcaagagtggatagagcaga

SEQ ID NO: 268624 - DNA, 20 bp, synthetic construct
  source 1..20: mol_type = other DNA
ttcaagagtggatagagcag

SEQ ID NO: 268625 - DNA, 20 bp, synthetic construct
  source 1..20: mol_type = other DNA
cttcaagagtggatagagca

SEQ ID NO: 268626 - DNA, 20 bp, synthetic construct
  source 1..20: mol_type = other DNA
ccttcaagagtggatagagc

SEQ ID NO: 268627 - DNA, 20 bp, synthetic construct
  source 1..20: mol_type = other DNA
cccttcaagagtggatagag

SEQ ID NO: 268628 - DNA, 20 bp, synthetic construct
  source 1..20: mol_type = other DNA
ccccttcaagagtggataga

SEQ ID NO: 268629 - DNA, 20 bp, synthetic construct
  source 1..20: mol_type = other DNA
tccccttcaagagtggatag

SEQ ID NO: 268630 - DNA, 20 bp, synthetic construct
  source 1..20: mol_type = other DNA
atccccttcaagagtggata

SEQ ID NO: 268631 - DNA, 20 bp, synthetic construct
  source 1..20: mol_type = other DNA
gatccccttcaagagtggat

SEQ ID NO: 268632 - DNA, 20 bp, synthetic construct
  source 1..20: mol_type = other DNA
cgatccccttcaagagtgga

SEQ ID NO: 268633 - DNA, 20 bp, synthetic construct
  source 1..20: mol_type = other DNA
tcgatccccttcaagagtgg

SEQ ID NO: 268634 - DNA, 20 bp, synthetic construct
  source 1..20: mol_type = other DNA
ctcgatccccttcaagagtg

SEQ ID NO: 268635 - DNA, 20 bp, synthetic construct
  source 1..20: mol_type = other DNA
tctcgatccccttcaagagt

SEQ ID NO: 268636 - DNA, 20 bp, synthetic construct
  source 1..20: mol_type = other DNA
ttctcgatccccttcaagag

SEQ ID NO: 268637 - DNA, 20 bp, synthetic construct
  source 1..20: mol_type = other DNA
tttctcgatccccttcaaga

SEQ ID NO: 268638 - DNA, 20 bp, synthetic construct
  source 1..20: mol_type = other DNA
atttctcgatccccttcaag

SEQ ID NO: 268639 - DNA, 20 bp, synthetic construct
  source 1..20: mol_type = other DNA
aatttctcgatccccttcaa

SEQ ID NO: 268640 - DNA, 20 bp, synthetic construct
  source 1..20: mol_type = other DNA
aaatttctcgatccccttca

SEQ ID NO: 268641 - DNA, 20 bp, synthetic construct
  source 1..20: mol_type = other DNA
caaatttctcgatccccttc

SEQ ID NO: 268642 - DNA, 20 bp, synthetic construct
  source 1..20: mol_type = other DNA
gcaaatttctcgatcccctt

SEQ ID NO: 268643 - DNA, 20 bp, synthetic construct
  source 1..20: mol_type = other DNA
tgcaaatttctcgatcccct

SEQ ID NO: 268644 - DNA, 20 bp, synthetic construct
  source 1..20: mol_type = other DNA
atgcaaatttctcgatcccc

SEQ ID NO: 268645 - DNA, 20 bp, synthetic construct
  source 1..20: mol_type = other DNA
aatgcaaatttctcgatccc

SEQ ID NO: 268646 - DNA, 20 bp, synthetic construct
  source 1..20: mol_type = other DNA
aaatgcaaatttctcgatcc

SEQ ID NO: 268647 - DNA, 20 bp, synthetic construct
  source 1..20: mol_type = other DNA
aaaatgcaaatttctcgatc

SEQ ID NO: 268648 - DNA, 20 bp, synthetic construct
  source 1..20: mol_type = other DNA
caaaatgcaaatttctcgat

SEQ ID NO: 268649 - DNA, 20 bp, synthetic construct
  source 1..20: mol_type = other DNA
gcaaaatgcaaatttctcga

SEQ ID NO: 268650 - DNA, 20 bp, synthetic construct
  source 1..20: mol_type = other DNA
tgcaaaatgcaaatttctcg

SEQ ID NO: 268651 - DNA, 20 bp, synthetic construct
  source 1..20: mol_type = other DNA
ttgcaaaatgcaaatttctc

SEQ ID NO: 268652 - DNA, 20 bp, synthetic construct
  source 1..20: mol_type = other DNA
gttgcaaaatgcaaatttct

SEQ ID NO: 268653 - DNA, 20 bp, synthetic construct
  source 1..20: mol_type = other DNA
agttgcaaaatgcaaatttc

SEQ ID NO: 268654 - DNA, 20 bp, synthetic construct
  source 1..20: mol_type = other DNA
gagttgcaaaatgcaaattt

SEQ ID NO: 268655 - DNA, 20 bp, synthetic construct
  source 1..20: mol_type = other DNA
ggagttgcaaaatgcaaatt

SEQ ID NO: 268656 - DNA, 20 bp, synthetic construct
  source 1..20: mol_type = other DNA
gggagttgcaaaatgcaaat

SEQ ID NO: 268657 - DNA, 20 bp, synthetic construct
  source 1..20: mol_type = other DNA
tgggagttgcaaaatgcaaa

SEQ ID NO: 268658 - DNA, 20 bp, synthetic construct
  source 1..20: mol_type = other DNA
gtgggagttgcaaaatgcaa

SEQ ID NO: 268659 - DNA, 20 bp, synthetic construct
  source 1..20: mol_type = other DNA
agtgggagttgcaaaatgca

SEQ ID NO: 268660 - DNA, 20 bp, synthetic construct
  source 1..20: mol_type = other DNA
aagtgggagttgcaaaatgc

SEQ ID NO: 268661 - DNA, 20 bp, synthetic construct
  source 1..20: mol_type = other DNA
aaagtgggagttgcaaaatg

SEQ ID NO: 268662 - DNA, 20 bp, synthetic construct
  source 1..20: mol_type = other DNA
gaaagtgggagttgcaaaat

SEQ ID NO: 268663 - DNA, 20 bp, synthetic construct
  source 1..20: mol_type = other DNA
ggaaagtgggagttgcaaaa

SEQ ID NO: 268664 - DNA, 20 bp, synthetic construct
  source 1..20: mol_type = other DNA
aggaaagtgggagttgcaaa

SEQ ID NO: 268665 - DNA, 20 bp, synthetic construct
  source 1..20: mol_type = other DNA
gaggaaagtgggagttgcaa

SEQ ID NO: 268666 - DNA, 20 bp, synthetic construct
  source 1..20: mol_type = other DNA
ggaggaaagtgggagttgca

SEQ ID NO: 268667 - DNA, 20 bp, synthetic construct
  source 1..20: mol_type = other DNA
aggaggaaagtgggagttgc

SEQ ID NO: 268668 - DNA, 20 bp, synthetic construct
  source 1..20: mol_type = other DNA
aaggaggaaagtgggagttg

SEQ ID NO: 268669 - DNA, 20 bp, synthetic construct
  source 1..20: mol_type = other DNA
caaggaggaaagtgggagtt

SEQ ID NO: 268670 - DNA, 20 bp, synthetic construct
  source 1..20: mol_type = other DNA
tcaaggaggaaagtgggagt

SEQ ID NO: 268671 - DNA, 20 bp, synthetic construct
  source 1..20: mol_type = other DNA
ttcaaggaggaaagtgggag

SEQ ID NO: 268672 - DNA, 20 bp, synthetic construct
  source 1..20: mol_type = other DNA
tttcaaggaggaaagtggga

SEQ ID NO: 268673 - DNA, 20 bp, synthetic construct
  source 1..20: mol_type = other DNA
ctttcaaggaggaaagtggg

SEQ ID NO: 268674 - DNA, 20 bp, synthetic construct
  source 1..20: mol_type = other DNA
gctttcaaggaggaaagtgg

SEQ ID NO: 268675 - DNA, 20 bp, synthetic construct
  source 1..20: mol_type = other DNA
agctttcaaggaggaaagtg

SEQ ID NO: 268676 - DNA, 20 bp, synthetic construct
  source 1..20: mol_type = other DNA
gagctttcaaggaggaaagt

SEQ ID NO: 268677 - DNA, 20 bp, synthetic construct
  source 1..20: mol_type = other DNA
ggagctttcaaggaggaaag

SEQ ID NO: 268678 - DNA, 20 bp, synthetic construct
  source 1..20: mol_type = other DNA
cggagctttcaaggaggaaa

SEQ ID NO: 268679 - DNA, 20 bp, synthetic construct
  source 1..20: mol_type = other DNA
ccggagctttcaaggaggaa

SEQ ID NO: 268680 - DNA, 20 bp, synthetic construct
  source 1..20: mol_type = other DNA
tccggagctttcaaggagga

SEQ ID NO: 268681 - DNA, 20 bp, synthetic construct
  source 1..20: mol_type = other DNA
ctccggagctttcaaggagg

SEQ ID NO: 268682 - DNA, 20 bp, synthetic construct
  source 1..20: mol_type = other DNA
tctccggagctttcaaggag

SEQ ID NO: 268683 - DNA, 20 bp, synthetic construct
  source 1..20: mol_type = other DNA
atctccggagctttcaagga

SEQ ID NO: 268684 - DNA, 20 bp, synthetic construct
  source 1..20: mol_type = other DNA
aatctccggagctttcaagg

SEQ ID NO: 268685 - DNA, 20 bp, synthetic construct
  source 1..20: mol_type = other DNA
gaatctccggagctttcaag

SEQ ID NO: 268686 - DNA, 20 bp, synthetic construct
  source 1..20: mol_type = other DNA
agaatctccggagctttcaa

SEQ ID NO: 268687 - DNA, 20 bp, synthetic construct
  source 1..20: mol_type = other DNA
cagaatctccggagctttca

SEQ ID NO: 268688 - DNA, 20 bp, synthetic construct
  source 1..20: mol_type = other DNA
tcagaatctccggagctttc

SEQ ID NO: 268689 - DNA, 20 bp, synthetic construct
  source 1..20: mol_type = other DNA
gtcagaatctccggagcttt

SEQ ID NO: 268690 - DNA, 20 bp, synthetic construct
  source 1..20: mol_type = other DNA
cgtcagaatctccggagctt

SEQ ID NO: 268691 - DNA, 20 bp, synthetic construct
  source 1..20: mol_type = other DNA
gcgtcagaatctccggagct

SEQ ID NO: 268692 - DNA, 20 bp, synthetic construct
  source 1..20: mol_type = other DNA
tgcgtcagaatctccggagc

SEQ ID NO: 268693 - DNA, 20 bp, synthetic construct
  source 1..20: mol_type = other DNA
ctgcgtcagaatctccggag

SEQ ID NO: 268694 - DNA, 20 bp, synthetic construct
  source 1..20: mol_type = other DNA
cctgcgtcagaatctccgga

SEQ ID NO: 268695 - DNA, 20 bp, synthetic construct
  source 1..20: mol_type = other DNA
ccctgcgtcagaatctccgg

SEQ ID NO: 268696 - DNA, 20 bp, synthetic construct
  source 1..20: mol_type = other DNA
accctgcgtcagaatctccg

SEQ ID NO: 268697 - DNA, 20 bp, synthetic construct
  source 1..20: mol_type = other DNA
aaccctgcgtcagaatctcc

SEQ ID NO: 268698 - DNA, 20 bp, synthetic construct
  source 1..20: mol_type = other DNA
gaaccctgcgtcagaatctc

SEQ ID NO: 268699 - DNA, 20 bp, synthetic construct
  source 1..20: mol_type = other DNA
ggaaccctgcgtcagaatct

SEQ ID NO: 268700 - DNA, 20 bp, synthetic construct
  source 1..20: mol_type = other DNA
cggaaccctgcgtcagaatc

SEQ ID NO: 268701 - DNA, 20 bp, synthetic construct
  source 1..20: mol_type = other DNA
acggaaccctgcgtcagaat

SEQ ID NO: 268702 - DNA, 20 bp, synthetic construct
  source 1..20: mol_type = other DNA
cacggaaccctgcgtcagaa

SEQ ID NO: 268703 - DNA, 20 bp, synthetic construct
  source 1..20: mol_type = other DNA
ccacggaaccctgcgtcaga

SEQ ID NO: 268704 - DNA, 20 bp, synthetic construct
  source 1..20: mol_type = other DNA
cccacggaaccctgcgtcag

SEQ ID NO: 268705 - DNA, 20 bp, synthetic construct
  source 1..20: mol_type = other DNA
gcccacggaaccctgcgtca

SEQ ID NO: 268706 - DNA, 20 bp, synthetic construct
  source 1..20: mol_type = other DNA
ggcccacggaaccctgcgtc

SEQ ID NO: 268707 - DNA, 20 bp, synthetic construct
  source 1..20: mol_type = other DNA
tggcccacggaaccctgcgt

SEQ ID NO: 268708 - DNA, 20 bp, synthetic construct
  source 1..20: mol_type = other DNA
gtggcccacggaaccctgcg

SEQ ID NO: 268709 - DNA, 20 bp, synthetic construct
  source 1..20: mol_type = other DNA
tgtggcccacggaaccctgc

SEQ ID NO: 268710 - DNA, 20 bp, synthetic construct
  source 1..20: mol_type = other DNA
gtgtggcccacggaaccctg

SEQ ID NO: 268711 - DNA, 20 bp, synthetic construct
  source 1..20: mol_type = other DNA
agtgtggcccacggaaccct

SEQ ID NO: 268712 - DNA, 20 bp, synthetic construct
  source 1..20: mol_type = other DNA
aagtgtggcccacggaaccc

SEQ ID NO: 268713 - DNA, 20 bp, synthetic construct
  source 1..20: mol_type = other DNA
aaagtgtggcccacggaacc

SEQ ID NO: 268714 - DNA, 20 bp, synthetic construct
  source 1..20: mol_type = other DNA
caaagtgtggcccacggaac

SEQ ID NO: 268715 - DNA, 20 bp, synthetic construct
  source 1..20: mol_type = other DNA
ccaaagtgtggcccacggaa

SEQ ID NO: 268716 - DNA, 20 bp, synthetic construct
  source 1..20: mol_type = other DNA
tccaaagtgtggcccacgga

SEQ ID NO: 268717 - DNA, 20 bp, synthetic construct
  source 1..20: mol_type = other DNA
ttccaaagtgtggcccacgg

SEQ ID NO: 268718 - DNA, 20 bp, synthetic construct
  source 1..20: mol_type = other DNA
tttccaaagtgtggcccacg

SEQ ID NO: 268719 - DNA, 20 bp, synthetic construct
  source 1..20: mol_type = other DNA
ttttccaaagtgtggcccac

SEQ ID NO: 268720 - DNA, 20 bp, synthetic construct
  source 1..20: mol_type = other DNA
attttccaaagtgtggccca

SEQ ID NO: 268721 - DNA, 20 bp, synthetic construct
  source 1..20: mol_type = other DNA
tattttccaaagtgtggccc

SEQ ID NO: 268722 - DNA, 20 bp, synthetic construct
  source 1..20: mol_type = other DNA
gtattttccaaagtgtggcc

SEQ ID NO: 268723 - DNA, 20 bp, synthetic construct
  source 1..20: mol_type = other DNA
tgtattttccaaagtgtggc

SEQ ID NO: 268724 - DNA, 20 bp, synthetic construct
  source 1..20: mol_type = other DNA
ctgtattttccaaagtgtgg

SEQ ID NO: 268725 - DNA, 20 bp, synthetic construct
  source 1..20: mol_type = other DNA
tctgtattttccaaagtgtg

SEQ ID NO: 268726 - DNA, 20 bp, synthetic construct
  source 1..20: mol_type = other DNA
gtctgtattttccaaagtgt

SEQ ID NO: 268727 - DNA, 20 bp, synthetic construct
  source 1..20: mol_type = other DNA
ggtctgtattttccaaagtg

SEQ ID NO: 268728 - DNA, 20 bp, synthetic construct
  source 1..20: mol_type = other DNA
gggtctgtattttccaaagt

SEQ ID NO: 268729 - DNA, 20 bp, synthetic construct
  source 1..20: mol_type = other DNA
tgggtctgtattttccaaag

SEQ ID NO: 268730 - DNA, 20 bp, synthetic construct
  source 1..20: mol_type = other DNA
atgggtctgtattttccaaa

SEQ ID NO: 268731 - DNA, 20 bp, synthetic construct
  source 1..20: mol_type = other DNA
catgggtctgtattttccaa

SEQ ID NO: 268732 - DNA, 20 bp, synthetic construct
  source 1..20: mol_type = other DNA
tcatgggtctgtattttcca

SEQ ID NO: 268733 - DNA, 20 bp, synthetic construct
  source 1..20: mol_type = other DNA
ctcatgggtctgtattttcc

SEQ ID NO: 268734 - DNA, 20 bp, synthetic construct
  source 1..20: mol_type = other DNA
tctcatgggtctgtattttc

SEQ ID NO: 268735 - DNA, 20 bp, synthetic construct
  source 1..20: mol_type = other DNA
atctcatgggtctgtatttt

SEQ ID NO: 268736 - DNA, 20 bp, synthetic construct
  source 1..20: mol_type = other DNA
tatctcatgggtctgtattt

SEQ ID NO: 268737 - DNA, 20 bp, synthetic construct
  source 1..20: mol_type = other DNA
ctatctcatgggtctgtatt

SEQ ID NO: 268738 - DNA, 20 bp, synthetic construct
  source 1..20: mol_type = other DNA
tctatctcatgggtctgtat

SEQ ID NO: 268739 - DNA, 20 bp, synthetic construct
  source 1..20: mol_type = other DNA
ttctatctcatgggtctgta

SEQ ID NO: 268740 - DNA, 20 bp, synthetic construct
  source 1..20: mol_type = other DNA
attctatctcatgggtctgt

SEQ ID NO: 268741 - DNA, 20 bp, synthetic construct
  source 1..20: mol_type = other DNA
tattctatctcatgggtctg

SEQ ID NO: 268742 - DNA, 20 bp, synthetic construct
  source 1..20: mol_type = other DNA
gtattctatctcatgggtct

SEQ ID NO: 268743 - DNA, 20 bp, synthetic construct
  source 1..20: mol_type = other DNA
ggtattctatctcatgggtc

SEQ ID NO: 268744 - DNA, 20 bp, synthetic construct
  source 1..20: mol_type = other DNA
tggtattctatctcatgggt

SEQ ID NO: 268745 - DNA, 20 bp, synthetic construct
  source 1..20: mol_type = other DNA
ctggtattctatctcatggg

SEQ ID NO: 268746 - DNA, 20 bp, synthetic construct
  source 1..20: mol_type = other DNA
tctggtattctatctcatgg

SEQ ID NO: 268747 - DNA, 20 bp, synthetic construct
  source 1..20: mol_type = other DNA
gtctggtattctatctcatg

SEQ ID NO: 268748 - DNA, 20 bp, synthetic construct
  source 1..20: mol_type = other DNA
agtctggtattctatctcat

SEQ ID NO: 268749 - DNA, 20 bp, synthetic construct
  source 1..20: mol_type = other DNA
cagtctggtattctatctca

SEQ ID NO: 268750 - DNA, 20 bp, synthetic construct
  source 1..20: mol_type = other DNA
acagtctggtattctatctc

SEQ ID NO: 268751 - DNA, 20 bp, synthetic construct
  source 1..20: mol_type = other DNA
aacagtctggtattctatct

SEQ ID NO: 268752 - DNA, 20 bp, synthetic construct
  source 1..20: mol_type = other DNA
caacagtctggtattctatc

SEQ ID NO: 268753 - DNA, 20 bp, synthetic construct
  source 1..20: mol_type = other DNA
tcaacagtctggtattctat

SEQ ID NO: 268754 - DNA, 20 bp, synthetic construct
  source 1..20: mol_type = other DNA
ttcaacagtctggtattcta

SEQ ID NO: 268755 - DNA, 20 bp, synthetic construct
  source 1..20: mol_type = other DNA
cttcaacagtctggtattct

SEQ ID NO: 268756 - DNA, 20 bp, synthetic construct
  source 1..20: mol_type = other DNA
acttcaacagtctggtattc

SEQ ID NO: 268757 - DNA, 20 bp, synthetic construct
  source 1..20: mol_type = other DNA
cacttcaacagtctggtatt

SEQ ID NO: 268758 - DNA, 20 bp, synthetic construct
  source 1..20: mol_type = other DNA
acacttcaacagtctggtat

SEQ ID NO: 268759 - DNA, 20 bp, synthetic construct
  source 1..20: mol_type = other DNA
tacacttcaacagtctggta

SEQ ID NO: 268760 - DNA, 20 bp, synthetic construct
  source 1..20: mol_type = other DNA
ttacacttcaacagtctggt

SEQ ID NO: 268761 - DNA, 20 bp, synthetic construct
  source 1..20: mol_type = other DNA
gttacacttcaacagtctgg

SEQ ID NO: 268762 - DNA, 20 bp, synthetic construct
  source 1..20: mol_type = other DNA
cgttacacttcaacagtctg

SEQ ID NO: 268763 - DNA, 20 bp, synthetic construct
  source 1..20: mol_type = other DNA
ccgttacacttcaacagtct

SEQ ID NO: 268764 - DNA, 20 bp, synthetic construct
  source 1..20: mol_type = other DNA
cccgttacacttcaacagtc

SEQ ID NO: 268765 - DNA, 20 bp, synthetic construct
  source 1..20: mol_type = other DNA
ccccgttacacttcaacagt

SEQ ID NO: 268766 - DNA, 20 bp, synthetic construct
  source 1..20: mol_type = other DNA
cccccgttacacttcaacag

SEQ ID NO: 268767 - DNA, 20 bp, synthetic construct
  source 1..20: mol_type = other DNA
gcccccgttacacttcaaca

SEQ ID NO: 268768 - DNA, 20 bp, synthetic construct
  source 1..20: mol_type = other DNA
ggcccccgttacacttcaac

SEQ ID NO: 268769 - DNA, 20 bp, synthetic construct
  source 1..20: mol_type = other DNA
aggcccccgttacacttcaa

SEQ ID NO: 268770 - DNA, 20 bp, synthetic construct
  source 1..20: mol_type = other DNA
caggcccccgttacacttca

SEQ ID NO: 268771 - DNA, 20 bp, synthetic construct
  source 1..20: mol_type = other DNA
ccaggcccccgttacacttc

SEQ ID NO: 268772 - DNA, 20 bp, synthetic construct
  source 1..20: mol_type = other DNA
cccaggcccccgttacactt

SEQ ID NO: 268773 - DNA, 20 bp, synthetic construct
  source 1..20: mol_type = other DNA
tcccaggcccccgttacact

SEQ ID NO: 268774 - DNA, 20 bp, synthetic construct
  source 1..20: mol_type = other DNA
ttcccaggcccccgttacac

SEQ ID NO: 268775 - DNA, 20 bp, synthetic construct
  source 1..20: mol_type = other DNA
cttcccaggcccccgttaca

SEQ ID NO: 268776 - DNA, 20 bp, synthetic construct
  source 1..20: mol_type = other DNA
acttcccaggcccccgttac

SEQ ID NO: 268777 - DNA, 20 bp, synthetic construct
  source 1..20: mol_type = other DNA
cacttcccaggcccccgtta

SEQ ID NO: 268778 - DNA, 20 bp, synthetic construct
  source 1..20: mol_type = other DNA
gcacttcccaggcccccgtt

SEQ ID NO: 268779 - DNA, 20 bp, synthetic construct
  source 1..20: mol_type = other DNA
tgcacttcccaggcccccgt

SEQ ID NO: 268780 - DNA, 20 bp, synthetic construct
  source 1..20: mol_type = other DNA
ctgcacttcccaggcccccg

SEQ ID NO: 268781 - DNA, 20 bp, synthetic construct
  source 1..20: mol_type = other DNA
actgcacttcccaggccccc

SEQ ID NO: 268782 - DNA, 20 bp, synthetic construct
  source 1..20: mol_type = other DNA
tactgcacttcccaggcccc

SEQ ID NO: 268783 - DNA, 20 bp, synthetic construct
  source 1..20: mol_type = other DNA
ttactgcacttcccaggccc

SEQ ID NO: 268784 - DNA, 20 bp, synthetic construct
  source 1..20: mol_type = other DNA
gttactgcacttcccaggcc

SEQ ID NO: 268785 - DNA, 20 bp, synthetic construct
  source 1..20: mol_type = other DNA
tgttactgcacttcccaggc

SEQ ID NO: 268786 - DNA, 20 bp, synthetic construct
  source 1..20: mol_type = other DNA
ctgttactgcacttcccagg

SEQ ID NO: 268787 - DNA, 20 bp, synthetic construct
  source 1..20: mol_type = other DNA
tctgttactgcacttcccag

SEQ ID NO: 268788 - DNA, 20 bp, synthetic construct
  source 1..20: mol_type = other DNA
ttctgttactgcacttccca

SEQ ID NO: 268789 - DNA, 20 bp, synthetic construct
  source 1..20: mol_type = other DNA
cttctgttactgcacttccc

SEQ ID NO: 268790 - DNA, 20 bp, synthetic construct
  source 1..20: mol_type = other DNA
gcttctgttactgcacttcc

SEQ ID NO: 268791 - DNA, 20 bp, synthetic construct
  source 1..20: mol_type = other DNA
tgcttctgttactgcacttc

SEQ ID NO: 268792 - DNA, 20 bp, synthetic construct
  source 1..20: mol_type = other DNA
ttgcttctgttactgcactt

SEQ ID NO: 268793 - DNA, 20 bp, synthetic construct
  source 1..20: mol_type = other DNA
cttgcttctgttactgcact

SEQ ID NO: 268794 - DNA, 20 bp, synthetic construct
  source 1..20: mol_type = other DNA
acttgcttctgttactgcac

SEQ ID NO: 268795 - DNA, 20 bp, synthetic construct
  source 1..20: mol_type = other DNA
aacttgcttctgttactgca

SEQ ID NO: 268796 - DNA, 20 bp, synthetic construct
  source 1..20: mol_type = other DNA
aaacttgcttctgttactgc

SEQ ID NO: 268797 - DNA, 20 bp, synthetic construct
  source 1..20: mol_type = other DNA
caaacttgcttctgttactg

SEQ ID NO: 268798 - DNA, 20 bp, synthetic construct
  source 1..20: mol_type = other DNA
tcaaacttgcttctgttact

SEQ ID NO: 268799 - DNA, 20 bp, synthetic construct
  source 1..20: mol_type = other DNA
ctcaaacttgcttctgttac

SEQ ID NO: 268800 - DNA, 20 bp, synthetic construct
  source 1..20: mol_type = other DNA
cctcaaacttgcttctgtta

SEQ ID NO: 268801 - DNA, 20 bp, synthetic construct
  source 1..20: mol_type = other DNA
ccctcaaacttgcttctgtt

SEQ ID NO: 268802 - DNA, 20 bp, synthetic construct
  source 1..20: mol_type = other DNA
accctcaaacttgcttctgt

SEQ ID NO: 268803 - DNA, 20 bp, synthetic construct
  source 1..20: mol_type = other DNA
taccctcaaacttgcttctg

SEQ ID NO: 268804 - DNA, 20 bp, synthetic construct
  source 1..20: mol_type = other DNA
ttaccctcaaacttgcttct

SEQ ID NO: 268805 - DNA, 20 bp, synthetic construct
  source 1..20: mol_type = other DNA
tttaccctcaaacttgcttc

SEQ ID NO: 268806 - DNA, 20 bp, synthetic construct
  source 1..20: mol_type = other DNA
ctttaccctcaaacttgctt

SEQ ID NO: 268807 - DNA, 20 bp, synthetic construct
  source 1..20: mol_type = other DNA
cctttaccctcaaacttgct

SEQ ID NO: 268808 - DNA, 20 bp, synthetic construct
  source 1..20: mol_type = other DNA
tcctttaccctcaaacttgc

SEQ ID NO: 268809 - DNA, 20 bp, synthetic construct
  source 1..20: mol_type = other DNA
gtcctttaccctcaaacttg

SEQ ID NO: 268810 - DNA, 20 bp, synthetic construct
  source 1..20: mol_type = other DNA
tgtcctttaccctcaaactt

SEQ ID NO: 268811 - DNA, 20 bp, synthetic construct
  source 1..20: mol_type = other DNA
gtgtcctttaccctcaaact

SEQ ID NO: 268812 - DNA, 20 bp, synthetic construct
  source 1..20: mol_type = other DNA
ggtgtcctttaccctcaaac

SEQ ID NO: 268813 - DNA, 20 bp, synthetic construct
  source 1..20: mol_type = other DNA
gggtgtcctttaccctcaaa

SEQ ID NO: 268814 - DNA, 20 bp, synthetic construct
  source 1..20: mol_type = other DNA
tgggtgtcctttaccctcaa

SEQ ID NO: 268815 - DNA, 20 bp, synthetic construct
  source 1..20: mol_type = other DNA
ctgggtgtcctttaccctca

SEQ ID NO: 268816 - DNA, 20 bp, synthetic construct
  source 1..20: mol_type = other DNA
tctgggtgtcctttaccctc

SEQ ID NO: 268817 - DNA, 20 bp, synthetic construct
  source 1..20: mol_type = other DNA
ctctgggtgtcctttaccct

SEQ ID NO: 268818 - DNA, 20 bp, synthetic construct
  source 1..20: mol_type = other DNA
cctctgggtgtcctttaccc

SEQ ID NO: 268819 - DNA, 20 bp, synthetic construct
  source 1..20: mol_type = other DNA
tcctctgggtgtcctttacc

SEQ ID NO: 268820 - DNA, 20 bp, synthetic construct
  source 1..20: mol_type = other DNA
ctcctctgggtgtcctttac

SEQ ID NO: 268821 - DNA, 20 bp, synthetic construct
  source 1..20: mol_type = other DNA
cctcctctgggtgtccttta

SEQ ID NO: 268822 - DNA, 20 bp, synthetic construct
  source 1..20: mol_type = other DNA
ccctcctctgggtgtccttt

SEQ ID NO: 268823 - DNA, 20 bp, synthetic construct
  source 1..20: mol_type = other DNA
tccctcctctgggtgtcctt

SEQ ID NO: 268824 - DNA, 20 bp, synthetic construct
  source 1..20: mol_type = other DNA
ctccctcctctgggtgtcct

SEQ ID NO: 268825 - DNA, 20 bp, synthetic construct
  source 1..20: mol_type = other DNA
cctccctcctctgggtgtcc

SEQ ID NO: 268826 - DNA, 20 bp, synthetic construct
  source 1..20: mol_type = other DNA
ccctccctcctctgggtgtc

SEQ ID NO: 268827 - DNA, 20 bp, synthetic construct
  source 1..20: mol_type = other DNA
tccctccctcctctgggtgt

SEQ ID NO: 268828 - DNA, 20 bp, synthetic construct
  source 1..20: mol_type = other DNA
gtccctccctcctctgggtg

SEQ ID NO: 268829 - DNA, 20 bp, synthetic construct
  source 1..20: mol_type = other DNA
tgtccctccctcctctgggt

SEQ ID NO: 268830 - DNA, 20 bp, synthetic construct
  source 1..20: mol_type = other DNA
ctgtccctccctcctctggg

SEQ ID NO: 268831 - DNA, 20 bp, synthetic construct
  source 1..20: mol_type = other DNA
gctgtccctccctcctctgg

SEQ ID NO: 268832 - DNA, 20 bp, synthetic construct
  source 1..20: mol_type = other DNA
tgctgtccctccctcctctg

SEQ ID NO: 268833 - DNA, 20 bp, synthetic construct
  source 1..20: mol_type = other DNA
atgctgtccctccctcctct

SEQ ID NO: 268834 - DNA, 20 bp, synthetic construct
  source 1..20: mol_type = other DNA
gatgctgtccctccctcctc

SEQ ID NO: 268835 - DNA, 20 bp, synthetic construct
  source 1..20: mol_type = other DNA
agatgctgtccctccctcct

SEQ ID NO: 268836 - DNA, 20 bp, synthetic construct
  source 1..20: mol_type = other DNA
cagatgctgtccctccctcc

SEQ ID NO: 268837 - DNA, 20 bp, synthetic construct
  source 1..20: mol_type = other DNA
gcagatgctgtccctccctc

SEQ ID NO: 268838 - DNA, 20 bp, synthetic construct
  source 1..20: mol_type = other DNA
tgcagatgctgtccctccct

SEQ ID NO: 268839 - DNA, 20 bp, synthetic construct
  source 1..20: mol_type = other DNA
atgcagatgctgtccctccc

SEQ ID NO: 268840 - DNA, 20 bp, synthetic construct
  source 1..20: mol_type = other DNA
catgcagatgctgtccctcc

SEQ ID NO: 268841 - DNA, 20 bp, synthetic construct
  source 1..20: mol_type = other DNA
ccatgcagatgctgtccctc

SEQ ID NO: 268842 - DNA, 20 bp, synthetic construct
  source 1..20: mol_type = other DNA
tccatgcagatgctgtccct

SEQ ID NO: 268843 - DNA, 20 bp, synthetic construct
  source 1..20: mol_type = other DNA
ctccatgcagatgctgtccc

SEQ ID NO: 268844 - DNA, 20 bp, synthetic construct
  source 1..20: mol_type = other DNA
tctccatgcagatgctgtcc

SEQ ID NO: 268845 - DNA, 20 bp, synthetic construct
  source 1..20: mol_type = other DNA
ctctccatgcagatgctgtc

SEQ ID NO: 268846 - DNA, 20 bp, synthetic construct
  source 1..20: mol_type = other DNA
cctctccatgcagatgctgt

SEQ ID NO: 268847 - DNA, 20 bp, synthetic construct
  source 1..20: mol_type = other DNA
tcctctccatgcagatgctg

SEQ ID NO: 268848 - DNA, 20 bp, synthetic construct
  source 1..20: mol_type = other DNA
ctcctctccatgcagatgct

SEQ ID NO: 268849 - DNA, 20 bp, synthetic construct
  source 1..20: mol_type = other DNA
tctcctctccatgcagatgc

SEQ ID NO: 268850 - DNA, 20 bp, synthetic construct
  source 1..20: mol_type = other DNA
ttctcctctccatgcagatg

SEQ ID NO: 268851 - DNA, 20 bp, synthetic construct
  source 1..20: mol_type = other DNA
cttctcctctccatgcagat

SEQ ID NO: 268852 - DNA, 20 bp, synthetic construct
  source 1..20: mol_type = other DNA
tcttctcctctccatgcaga

SEQ ID NO: 268853 - DNA, 20 bp, synthetic construct
  source 1..20: mol_type = other DNA
ctcttctcctctccatgcag

SEQ ID NO: 268854 - DNA, 20 bp, synthetic construct
  source 1..20: mol_type = other DNA
tctcttctcctctccatgca

SEQ ID NO: 268855 - DNA, 20 bp, synthetic construct
  source 1..20: mol_type = other DNA
gtctcttctcctctccatgc

SEQ ID NO: 268856 - DNA, 20 bp, synthetic construct
  source 1..20: mol_type = other DNA
ggtctcttctcctctccatg

SEQ ID NO: 268857 - DNA, 20 bp, synthetic construct
  source 1..20: mol_type = other DNA
gggtctcttctcctctccat

SEQ ID NO: 268858 - DNA, 20 bp, synthetic construct
  source 1..20: mol_type = other DNA
ggggtctcttctcctctcca

SEQ ID NO: 268859 - DNA, 20 bp, synthetic construct
  source 1..20: mol_type = other DNA
gggggtctcttctcctctcc

SEQ ID NO: 268860 - DNA, 20 bp, synthetic construct
  source 1..20: mol_type = other DNA
ggggggtctcttctcctctc

SEQ ID NO: 268861 - DNA, 20 bp, synthetic construct
  source 1..20: mol_type = other DNA
tggggggtctcttctcctct

SEQ ID NO: 268862 - DNA, 20 bp, synthetic construct
  source 1..20: mol_type = other DNA
ctggggggtctcttctcctc

SEQ ID NO: 268863 - DNA, 20 bp, synthetic construct
  source 1..20: mol_type = other DNA
gctggggggtctcttctcct

SEQ ID NO: 268864 - DNA, 20 bp, synthetic construct
  source 1..20: mol_type = other DNA
tgctggggggtctcttctcc

SEQ ID NO: 268865 - DNA, 20 bp, synthetic construct
  source 1..20: mol_type = other DNA
ctgctggggggtctcttctc

SEQ ID NO: 268866 - DNA, 20 bp, synthetic construct
  source 1..20: mol_type = other DNA
gctgctggggggtctcttct

SEQ ID NO: 268867 - DNA, 20 bp, synthetic construct
  source 1..20: mol_type = other DNA
agctgctggggggtctcttc

SEQ ID NO: 268868 - DNA, 20 bp, synthetic construct
  source 1..20: mol_type = other DNA
aagctgctggggggtctctt

SEQ ID NO: 268869 - DNA, 20 bp, synthetic construct
  source 1..20: mol_type = other DNA
gaagctgctggggggtctct

SEQ ID NO: 268870 - DNA, 20 bp, synthetic construct
  source 1..20: mol_type = other DNA
ggaagctgctggggggtctc

SEQ ID NO: 268871 - DNA, 20 bp, synthetic construct
  source 1..20: mol_type = other DNA
tggaagctgctggggggtct

SEQ ID NO: 268872 - DNA, 20 bp, synthetic construct
  source 1..20: mol_type = other DNA
ctggaagctgctggggggtc

SEQ ID NO: 268873 - DNA, 20 bp, synthetic construct
  source 1..20: mol_type = other DNA
cctggaagctgctggggggt

SEQ ID NO: 268874 - DNA, 20 bp, synthetic construct
  source 1..20: mol_type = other DNA
ccctggaagctgctgggggg

SEQ ID NO: 268875 - DNA, 20 bp, synthetic construct
  source 1..20: mol_type = other DNA
accctggaagctgctggggg

SEQ ID NO: 268876 - DNA, 20 bp, synthetic construct
  source 1..20: mol_type = other DNA
caccctggaagctgctgggg

SEQ ID NO: 268877 - DNA, 20 bp, synthetic construct
  source 1..20: mol_type = other DNA
acaccctggaagctgctggg

SEQ ID NO: 268878 - DNA, 20 bp, synthetic construct
  source 1..20: mol_type = other DNA
aacaccctggaagctgctgg

SEQ ID NO: 268879 - DNA, 20 bp, synthetic construct
  source 1..20: mol_type = other DNA
caacaccctggaagctgctg

SEQ ID NO: 268880 - DNA, 20 bp, synthetic construct
  source 1..20: mol_type = other DNA
ccaacaccctggaagctgct

SEQ ID NO: 268881 - DNA, 20 bp, synthetic construct
  source 1..20: mol_type = other DNA
tccaacaccctggaagctgc

SEQ ID NO: 268882 - DNA, 20 bp, synthetic construct
  source 1..20: mol_type = other DNA
ttccaacaccctggaagctg

SEQ ID NO: 268883 - DNA, 20 bp, synthetic construct
  source 1..20: mol_type = other DNA
cttccaacaccctggaagct

SEQ ID NO: 268884 - DNA, 20 bp, synthetic construct
  source 1..20: mol_type = other DNA
ccttccaacaccctggaagc

SEQ ID NO: 268885 - DNA, 20 bp, synthetic construct
  source 1..20: mol_type = other DNA
cccttccaacaccctggaag

SEQ ID NO: 268886 - DNA, 20 bp, synthetic construct
  source 1..20: mol_type = other DNA
acccttccaacaccctggaa

SEQ ID NO: 268887 - DNA, 20 bp, synthetic construct
  source 1..20: mol_type = other DNA
cacccttccaacaccctgga

SEQ ID NO: 268888 - DNA, 20 bp, synthetic construct
  source 1..20: mol_type = other DNA
gcacccttccaacaccctgg

SEQ ID NO: 268889 - DNA, 20 bp, synthetic construct
  source 1..20: mol_type = other DNA
cgcacccttccaacaccctg

SEQ ID NO: 268890 - DNA, 20 bp, synthetic construct
  source 1..20: mol_type = other DNA
gcgcacccttccaacaccct

SEQ ID NO: 268891 - DNA, 20 bp, synthetic construct
  source 1..20: mol_type = other DNA
agcgcacccttccaacaccc

SEQ ID NO: 268892 - DNA, 20 bp, synthetic construct
  source 1..20: mol_type = other DNA
tagcgcacccttccaacacc

SEQ ID NO: 268893 - DNA, 20 bp, synthetic construct
  source 1..20: mol_type = other DNA
ctagcgcacccttccaacac

SEQ ID NO: 268894 - DNA, 20 bp, synthetic construct
  source 1..20: mol_type = other DNA
actagcgcacccttccaaca

SEQ ID NO: 268895 - DNA, 20 bp, synthetic construct
  source 1..20: mol_type = other DNA
tactagcgcacccttccaac

SEQ ID NO: 268896 - DNA, 20 bp, synthetic construct
  source 1..20: mol_type = other DNA
ttactagcgcacccttccaa

SEQ ID NO: 268897 - DNA, 20 bp, synthetic construct
  source 1..20: mol_type = other DNA
gttactagcgcacccttcca

SEQ ID NO: 268898 - DNA, 20 bp, synthetic construct
  source 1..20: mol_type = other DNA
agttactagcgcacccttcc

SEQ ID NO: 268899 - DNA, 20 bp, synthetic construct
  source 1..20: mol_type = other DNA
cagttactagcgcacccttc

SEQ ID NO: 268900 - DNA, 20 bp, synthetic construct
  source 1..20: mol_type = other DNA
gcagttactagcgcaccctt

SEQ ID NO: 268901 - DNA, 20 bp, synthetic construct
  source 1..20: mol_type = other DNA
agcagttactagcgcaccct

SEQ ID NO: 268902 - DNA, 20 bp, synthetic construct
  source 1..20: mol_type = other DNA
tagcagttactagcgcaccc

SEQ ID NO: 268903 - DNA, 20 bp, synthetic construct
  source 1..20: mol_type = other DNA
atagcagttactagcgcacc

SEQ ID NO: 268904 - DNA, 20 bp, synthetic construct
  source 1..20: mol_type = other DNA
catagcagttactagcgcac

SEQ ID NO: 268905 - DNA, 20 bp, synthetic construct
  source 1..20: mol_type = other DNA
gcatagcagttactagcgca

SEQ ID NO: 268906 - DNA, 20 bp, synthetic construct
  source 1..20: mol_type = other DNA
tgcatagcagttactagcgc

SEQ ID NO: 268907 - DNA, 20 bp, synthetic construct
  source 1..20: mol_type = other DNA
atgcatagcagttactagcg

SEQ ID NO: 268908 - DNA, 20 bp, synthetic construct
  source 1..20: mol_type = other DNA
catgcatagcagttactagc

SEQ ID NO: 268909 - DNA, 20 bp, synthetic construct
  source 1..20: mol_type = other DNA
ccatgcatagcagttactag

SEQ ID NO: 268910 - DNA, 20 bp, synthetic construct
  source 1..20: mol_type = other DNA
gccatgcatagcagttacta

SEQ ID NO: 268911 - DNA, 20 bp, synthetic construct
  source 1..20: mol_type = other DNA
tgccatgcatagcagttact

SEQ ID NO: 268912 - DNA, 20 bp, synthetic construct
  source 1..20: mol_type = other DNA
ctgccatgcatagcagttac

SEQ ID NO: 268913 - DNA, 20 bp, synthetic construct
  source 1..20: mol_type = other DNA
cctgccatgcatagcagtta

SEQ ID NO: 268914 - DNA, 20 bp, synthetic construct
  source 1..20: mol_type = other DNA
acctgccatgcatagcagtt

SEQ ID NO: 268915 - DNA, 20 bp, synthetic construct
  source 1..20: mol_type = other DNA
cacctgccatgcatagcagt

SEQ ID NO: 268916 - DNA, 20 bp, synthetic construct
  source 1..20: mol_type = other DNA
ccacctgccatgcatagcag

SEQ ID NO: 268917 - DNA, 20 bp, synthetic construct
  source 1..20: mol_type = other DNA
cccacctgccatgcatagca

SEQ ID NO: 268918 - DNA, 20 bp, synthetic construct
  source 1..20: mol_type = other DNA
ccccacctgccatgcatagc

SEQ ID NO: 268919 - DNA, 20 bp, synthetic construct
  source 1..20: mol_type = other DNA
tccccacctgccatgcatag

SEQ ID NO: 268920 - DNA, 20 bp, synthetic construct
  source 1..20: mol_type = other DNA
ttccccacctgccatgcata

SEQ ID NO: 268921 - DNA, 20 bp, synthetic construct
  source 1..20: mol_type = other DNA
gttccccacctgccatgcat

SEQ ID NO: 268922 - DNA, 20 bp, synthetic construct
  source 1..20: mol_type = other DNA
agttccccacctgccatgca

SEQ ID NO: 268923 - DNA, 20 bp, synthetic construct
  source 1..20: mol_type = other DNA
cagttccccacctgccatgc

SEQ ID NO: 268924 - DNA, 20 bp, synthetic construct
  source 1..20: mol_type = other DNA
acagttccccacctgccatg

SEQ ID NO: 268925 - DNA, 20 bp, synthetic construct
  source 1..20: mol_type = other DNA
tacagttccccacctgccat

SEQ ID NO: 268926 - DNA, 20 bp, synthetic construct
  source 1..20: mol_type = other DNA
gtacagttccccacctgcca

SEQ ID NO: 268927 - DNA, 20 bp, synthetic construct
  source 1..20: mol_type = other DNA
cgtacagttccccacctgcc

SEQ ID NO: 268928 - DNA, 20 bp, synthetic construct
  source 1..20: mol_type = other DNA
acgtacagttccccacctgc

SEQ ID NO: 268929 - DNA, 20 bp, synthetic construct
  source 1..20: mol_type = other DNA
gacgtacagttccccacctg

SEQ ID NO: 268930 - DNA, 20 bp, synthetic construct
  source 1..20: mol_type = other DNA
tgacgtacagttccccacct

SEQ ID NO: 268931 - DNA, 20 bp, synthetic construct
  source 1..20: mol_type = other DNA
ctgacgtacagttccccacc

SEQ ID NO: 268932 - DNA, 20 bp, synthetic construct
  source 1..20: mol_type = other DNA
cctgacgtacagttccccac

SEQ ID NO: 268933 - DNA, 20 bp, synthetic construct
  source 1..20: mol_type = other DNA
ccctgacgtacagttcccca

SEQ ID NO: 268934 - DNA, 20 bp, synthetic construct
  source 1..20: mol_type = other DNA
gccctgacgtacagttcccc

SEQ ID NO: 268935 - DNA, 20 bp, synthetic construct
  source 1..20: mol_type = other DNA
tgccctgacgtacagttccc

SEQ ID NO: 268936 - DNA, 20 bp, synthetic construct
  source 1..20: mol_type = other DNA
gtgccctgacgtacagttcc

SEQ ID NO: 268937 - DNA, 20 bp, synthetic construct
  source 1..20: mol_type = other DNA
tgtgccctgacgtacagttc

SEQ ID NO: 268938 - DNA, 20 bp, synthetic construct
  source 1..20: mol_type = other DNA
ctgtgccctgacgtacagtt

SEQ ID NO: 268939 - DNA, 20 bp, synthetic construct
  source 1..20: mol_type = other DNA
gctgtgccctgacgtacagt

SEQ ID NO: 268940 - DNA, 20 bp, synthetic construct
  source 1..20: mol_type = other DNA
tgctgtgccctgacgtacag

SEQ ID NO: 268941 - DNA, 20 bp, synthetic construct
  source 1..20: mol_type = other DNA
ctgctgtgccctgacgtaca

SEQ ID NO: 268942 - DNA, 20 bp, synthetic construct
  source 1..20: mol_type = other DNA
gctgctgtgccctgacgtac

SEQ ID NO: 268943 - DNA, 20 bp, synthetic construct
  source 1..20: mol_type = other DNA
tgctgctgtgccctgacgta

SEQ ID NO: 268944 - DNA, 20 bp, synthetic construct
  source 1..20: mol_type = other DNA
atgctgctgtgccctgacgt

SEQ ID NO: 268945 - DNA, 20 bp, synthetic construct
  source 1..20: mol_type = other DNA
catgctgctgtgccctgacg

SEQ ID NO: 268946 - DNA, 20 bp, synthetic construct
  source 1..20: mol_type = other DNA
tcatgctgctgtgccctgac

SEQ ID NO: 268947 - DNA, 20 bp, synthetic construct
  source 1..20: mol_type = other DNA
ttcatgctgctgtgccctga

SEQ ID NO: 268948 - DNA, 20 bp, synthetic construct
  source 1..20: mol_type = other DNA
cttcatgctgctgtgccctg

SEQ ID NO: 268949 - DNA, 20 bp, synthetic construct
  source 1..20: mol_type = other DNA
gcttcatgctgctgtgccct

SEQ ID NO: 268950 - DNA, 20 bp, synthetic construct
  source 1..20: mol_type = other DNA
cgcttcatgctgctgtgccc

SEQ ID NO: 268951 - DNA, 20 bp, synthetic construct
  source 1..20: mol_type = other DNA
ccgcttcatgctgctgtgcc

SEQ ID NO: 268952 - DNA, 20 bp, synthetic construct
  source 1..20: mol_type = other DNA
accgcttcatgctgctgtgc

SEQ ID NO: 268953 - DNA, 20 bp, synthetic construct
  source 1..20: mol_type = other DNA
taccgcttcatgctgctgtg

SEQ ID NO: 268954 - DNA, 20 bp, synthetic construct
  source 1..20: mol_type = other DNA
ataccgcttcatgctgctgt

SEQ ID NO: 268955 - DNA, 20 bp, synthetic construct
  source 1..20: mol_type = other DNA
cataccgcttcatgctgctg

SEQ ID NO: 268956 - DNA, 20 bp, synthetic construct
  source 1..20: mol_type = other DNA
ccataccgcttcatgctgct

SEQ ID NO: 268957 - DNA, 20 bp, synthetic construct
  source 1..20: mol_type = other DNA
gccataccgcttcatgctgc

SEQ ID NO: 268958 - DNA, 20 bp, synthetic construct
  source 1..20: mol_type = other DNA
agccataccgcttcatgctg

SEQ ID NO: 268959 - DNA, 20 bp, synthetic construct
  source 1..20: mol_type = other DNA
gagccataccgcttcatgct

SEQ ID NO: 268960 - DNA, 20 bp, synthetic construct
  source 1..20: mol_type = other DNA
cgagccataccgcttcatgc

SEQ ID NO: 268961 - DNA, 20 bp, synthetic construct
  source 1..20: mol_type = other DNA
acgagccataccgcttcatg

SEQ ID NO: 268962 - DNA, 20 bp, synthetic construct
  source 1..20: mol_type = other DNA
cacgagccataccgcttcat

SEQ ID NO: 268963 - DNA, 20 bp, synthetic construct
  source 1..20: mol_type = other DNA
acacgagccataccgcttca

SEQ ID NO: 268964 - DNA, 20 bp, synthetic construct
  source 1..20: mol_type = other DNA
cacacgagccataccgcttc

SEQ ID NO: 268965 - DNA, 20 bp, synthetic construct
  source 1..20: mol_type = other DNA
ccacacgagccataccgctt

SEQ ID NO: 268966 - DNA, 20 bp, synthetic construct
  source 1..20: mol_type = other DNA
tccacacgagccataccgct

SEQ ID NO: 268967 - DNA, 20 bp, synthetic construct
  source 1..20: mol_type = other DNA
gtccacacgagccataccgc

SEQ ID NO: 268968 - DNA, 20 bp, synthetic construct
  source 1..20: mol_type = other DNA
tgtccacacgagccataccg

SEQ ID NO: 268969 - DNA, 20 bp, synthetic construct
  source 1..20: mol_type = other DNA
ctgtccacacgagccatacc

SEQ ID NO: 268970 - DNA, 20 bp, synthetic construct
  source 1..20: mol_type = other DNA
gctgtccacacgagccatac

SEQ ID NO: 268971 - DNA, 20 bp, synthetic construct
  source 1..20: mol_type = other DNA
agctgtccacacgagccata

SEQ ID NO: 268972 - DNA, 20 bp, synthetic construct
  source 1..20: mol_type = other DNA
tagctgtccacacgagccat

SEQ ID NO: 268973 - DNA, 20 bp, synthetic construct
  source 1..20: mol_type = other DNA
ctagctgtccacacgagcca

SEQ ID NO: 268974 - DNA, 20 bp, synthetic construct
  source 1..20: mol_type = other DNA
cctagctgtccacacgagcc

SEQ ID NO: 268975 - DNA, 20 bp, synthetic construct
  source 1..20: mol_type = other DNA
ccctagctgtccacacgagc

SEQ ID NO: 268976 - DNA, 20 bp, synthetic construct
  source 1..20: mol_type = other DNA
tccctagctgtccacacgag

SEQ ID NO: 268977 - DNA, 20 bp, synthetic construct
  source 1..20: mol_type = other DNA
gtccctagctgtccacacga

SEQ ID NO: 268978 - DNA, 20 bp, synthetic construct
  source 1..20: mol_type = other DNA
tgtccctagctgtccacacg

SEQ ID NO: 268979 - DNA, 20 bp, synthetic construct
  source 1..20: mol_type = other DNA
ctgtccctagctgtccacac

SEQ ID NO: 268980 - DNA, 20 bp, synthetic construct
  source 1..20: mol_type = other DNA
cctgtccctagctgtccaca

SEQ ID NO: 268981 - DNA, 20 bp, synthetic construct
  source 1..20: mol_type = other DNA
gcctgtccctagctgtccac

SEQ ID NO: 268982 - DNA, 20 bp, synthetic construct
  source 1..20: mol_type = other DNA
tgcctgtccctagctgtcca

SEQ ID NO: 268983 - DNA, 20 bp, synthetic construct
  source 1..20: mol_type = other DNA
ctgcctgtccctagctgtcc

SEQ ID NO: 268984 - DNA, 20 bp, synthetic construct
  source 1..20: mol_type = other DNA
cctgcctgtccctagctgtc

SEQ ID NO: 268985 - DNA, 20 bp, synthetic construct
  source 1..20: mol_type = other DNA
gcctgcctgtccctagctgt

SEQ ID NO: 268986 - DNA, 20 bp, synthetic construct
  source 1..20: mol_type = other DNA
cgcctgcctgtccctagctg

SEQ ID NO: 268987 - DNA, 20 bp, synthetic construct
  source 1..20: mol_type = other DNA
acgcctgcctgtccctagct

SEQ ID NO: 268988 - DNA, 20 bp, synthetic construct
  source 1..20: mol_type = other DNA
cacgcctgcctgtccctagc

SEQ ID NO: 268989 - DNA, 20 bp, synthetic construct
  source 1..20: mol_type = other DNA
ccacgcctgcctgtccctag

SEQ ID NO: 268990 - DNA, 20 bp, synthetic construct
  source 1..20: mol_type = other DNA
tccacgcctgcctgtcccta

SEQ ID NO: 268991 - DNA, 20 bp, synthetic construct
  source 1..20: mol_type = other DNA
ctccacgcctgcctgtccct

SEQ ID NO: 268992 - DNA, 20 bp, synthetic construct
  source 1..20: mol_type = other DNA
gctccacgcctgcctgtccc

SEQ ID NO: 268993 - DNA, 20 bp, synthetic construct
  source 1..20: mol_type = other DNA
tgctccacgcctgcctgtcc

SEQ ID NO: 268994 - DNA, 20 bp, synthetic construct
  source 1..20: mol_type = other DNA
ctgctccacgcctgcctgtc

SEQ ID NO: 268995 - DNA, 20 bp, synthetic construct
  source 1..20: mol_type = other DNA
cctgctccacgcctgcctgt

SEQ ID NO: 268996 - DNA, 20 bp, synthetic construct
  source 1..20: mol_type = other DNA
gcctgctccacgcctgcctg

SEQ ID NO: 268997 - DNA, 20 bp, synthetic construct
  source 1..20: mol_type = other DNA
tgcctgctccacgcctgcct

SEQ ID NO: 268998 - DNA, 20 bp, synthetic construct
  source 1..20: mol_type = other DNA
atgcctgctccacgcctgcc

SEQ ID NO: 268999 - DNA, 20 bp, synthetic construct
  source 1..20: mol_type = other DNA
gatgcctgctccacgcctgc

SEQ ID NO: 269000 - DNA, 20 bp, synthetic construct
  source 1..20: mol_type = other DNA
ggatgcctgctccacgcctg

SEQ ID NO: 269001 - DNA, 20 bp, synthetic construct
  source 1..20: mol_type = other DNA
aggatgcctgctccacgcct

SEQ ID NO: 269002 - DNA, 20 bp, synthetic construct
  source 1..20: mol_type = other DNA
caggatgcctgctccacgcc

SEQ ID NO: 269003 - DNA, 20 bp, synthetic construct
  source 1..20: mol_type = other DNA
acaggatgcctgctccacgc

SEQ ID NO: 269004 - DNA, 20 bp, synthetic construct
  source 1..20: mol_type = other DNA
aacaggatgcctgctccacg

SEQ ID NO: 269005 - DNA, 20 bp, synthetic construct
  source 1..20: mol_type = other DNA
gaacaggatgcctgctccac

SEQ ID NO: 269006 - DNA, 20 bp, synthetic construct
  source 1..20: mol_type = other DNA
agaacaggatgcctgctcca

SEQ ID NO: 269007 - DNA, 20 bp, synthetic construct
  source 1..20: mol_type = other DNA
cagaacaggatgcctgctcc

SEQ ID NO: 269008 - DNA, 20 bp, synthetic construct
  source 1..20: mol_type = other DNA
tcagaacaggatgcctgctc

SEQ ID NO: 269009 - DNA, 20 bp, synthetic construct
  source 1..20: mol_type = other DNA
ttcagaacaggatgcctgct

SEQ ID NO: 269010 - DNA, 20 bp, synthetic construct
  source 1..20: mol_type = other DNA
cttcagaacaggatgcctgc

SEQ ID NO: 269011 - DNA, 20 bp, synthetic construct
  source 1..20: mol_type = other DNA
ccttcagaacaggatgcctg

SEQ ID NO: 269012 - DNA, 20 bp, synthetic construct
  source 1..20: mol_type = other DNA
gccttcagaacaggatgcct

SEQ ID NO: 269013 - DNA, 20 bp, synthetic construct
  source 1..20: mol_type = other DNA
ggccttcagaacaggatgcc

SEQ ID NO: 269014 - DNA, 20 bp, synthetic construct
  source 1..20: mol_type = other DNA
tggccttcagaacaggatgc

SEQ ID NO: 269015 - DNA, 20 bp, synthetic construct
  source 1..20: mol_type = other DNA
ttggccttcagaacaggatg

SEQ ID NO: 269016 - DNA, 20 bp, synthetic construct
  source 1..20: mol_type = other DNA
tttggccttcagaacaggat

SEQ ID NO: 269017 - DNA, 20 bp, synthetic construct
  source 1..20: mol_type = other DNA
atttggccttcagaacagga

SEQ ID NO: 269018 - DNA, 20 bp, synthetic construct
  source 1..20: mol_type = other DNA
gatttggccttcagaacagg

SEQ ID NO: 269019 - DNA, 20 bp, synthetic construct
  source 1..20: mol_type = other DNA
ggatttggccttcagaacag

SEQ ID NO: 269020 - DNA, 20 bp, synthetic construct
  source 1..20: mol_type = other DNA
gggatttggccttcagaaca

SEQ ID NO: 269021 - DNA, 20 bp, synthetic construct
  source 1..20: mol_type = other DNA
tgggatttggccttcagaac

SEQ ID NO: 269022 - DNA, 20 bp, synthetic construct
  source 1..20: mol_type = other DNA
gtgggatttggccttcagaa

SEQ ID NO: 269023 - DNA, 20 bp, synthetic construct
  source 1..20: mol_type = other DNA
tgtgggatttggccttcaga

SEQ ID NO: 269024 - DNA, 20 bp, synthetic construct
  source 1..20: mol_type = other DNA
ctgtgggatttggccttcag

SEQ ID NO: 269025 - DNA, 20 bp, synthetic construct
  source 1..20: mol_type = other DNA
tctgtgggatttggccttca

SEQ ID NO: 269026 - DNA, 20 bp, synthetic construct
  source 1..20: mol_type = other DNA
ctctgtgggatttggccttc

SEQ ID NO: 269027 - DNA, 20 bp, synthetic construct
  source 1..20: mol_type = other DNA
cctctgtgggatttggcctt

SEQ ID NO: 269028 - DNA, 20 bp, synthetic construct
  source 1..20: mol_type = other DNA
tcctctgtgggatttggcct

SEQ ID NO: 269029 - DNA, 20 bp, synthetic construct
  source 1..20: mol_type = other DNA
ctcctctgtgggatttggcc

SEQ ID NO: 269030 - DNA, 20 bp, synthetic construct
  source 1..20: mol_type = other DNA
gctcctctgtgggatttggc

SEQ ID NO: 269031 - DNA, 20 bp, synthetic construct
  source 1..20: mol_type = other DNA
ggctcctctgtgggatttgg

SEQ ID NO: 269032 - DNA, 20 bp, synthetic construct
  source 1..20: mol_type = other DNA
tggctcctctgtgggatttg

SEQ ID NO: 269033 - DNA, 20 bp, synthetic construct
  source 1..20: mol_type = other DNA
ctggctcctctgtgggattt

SEQ ID NO: 269034 - DNA, 20 bp, synthetic construct
  source 1..20: mol_type = other DNA
cctggctcctctgtgggatt

SEQ ID NO: 269035 - DNA, 20 bp, synthetic construct
  source 1..20: mol_type = other DNA
ccctggctcctctgtgggat

SEQ ID NO: 269036 - DNA, 20 bp, synthetic construct
  source 1..20: mol_type = other DNA
accctggctcctctgtggga

SEQ ID NO: 269037 - DNA, 20 bp, synthetic construct
  source 1..20: mol_type = other DNA
caccctggctcctctgtggg

SEQ ID NO: 269038 - DNA, 20 bp, synthetic construct
  source 1..20: mol_type = other DNA
gcaccctggctcctctgtgg

SEQ ID NO: 269039 - DNA, 20 bp, synthetic construct
  source 1..20: mol_type = other DNA
agcaccctggctcctctgtg

SEQ ID NO: 269040 - DNA, 20 bp, synthetic construct
  source 1..20: mol_type = other DNA
cagcaccctggctcctctgt

SEQ ID NO: 269041 - DNA, 20 bp, synthetic construct
  source 1..20: mol_type = other DNA
ccagcaccctggctcctctg

SEQ ID NO: 269042 - DNA, 20 bp, synthetic construct
  source 1..20: mol_type = other DNA
gccagcaccctggctcctct

SEQ ID NO: 269043 - DNA, 20 bp, synthetic construct
  source 1..20: mol_type = other DNA
tgccagcaccctggctcctc

SEQ ID NO: 269044 - DNA, 20 bp, synthetic construct
  source 1..20: mol_type = other DNA
ctgccagcaccctggctcct

SEQ ID NO: 269045 - DNA, 20 bp, synthetic construct
  source 1..20: mol_type = other DNA
cctgccagcaccctggctcc

SEQ ID NO: 269046 - DNA, 20 bp, synthetic construct
  source 1..20: mol_type = other DNA
tcctgccagcaccctggctc

SEQ ID NO: 269047 - DNA, 20 bp, synthetic construct
  source 1..20: mol_type = other DNA
ctcctgccagcaccctggct

SEQ ID NO: 269048 - DNA, 20 bp, synthetic construct
  source 1..20: mol_type = other DNA
gctcctgccagcaccctggc

SEQ ID NO: 269049 - DNA, 20 bp, synthetic construct
  source 1..20: mol_type = other DNA
ggctcctgccagcaccctgg

SEQ ID NO: 269050 - DNA, 20 bp, synthetic construct
  source 1..20: mol_type = other DNA
gggctcctgccagcaccctg

SEQ ID NO: 269051 - DNA, 20 bp, synthetic construct
  source 1..20: mol_type = other DNA
agggctcctgccagcaccct

SEQ ID NO: 269052 - DNA, 20 bp, synthetic construct
  source 1..20: mol_type = other DNA
cagggctcctgccagcaccc

SEQ ID NO: 269053 - DNA, 20 bp, synthetic construct
  source 1..20: mol_type = other DNA
tcagggctcctgccagcacc

SEQ ID NO: 269054 - DNA, 20 bp, synthetic construct
  source 1..20: mol_type = other DNA
ttcagggctcctgccagcac

SEQ ID NO: 269055 - DNA, 20 bp, synthetic construct
  source 1..20: mol_type = other DNA
gttcagggctcctgccagca

SEQ ID NO: 269056 - DNA, 20 bp, synthetic construct
  source 1..20: mol_type = other DNA
agttcagggctcctgccagc

SEQ ID NO: 269057 - DNA, 20 bp, synthetic construct
  source 1..20: mol_type = other DNA
tagttcagggctcctgccag

SEQ ID NO: 269058 - DNA, 20 bp, synthetic construct
  source 1..20: mol_type = other DNA
ctagttcagggctcctgcca

SEQ ID NO: 269059 - DNA, 20 bp, synthetic construct
  source 1..20: mol_type = other DNA
gctagttcagggctcctgcc

SEQ ID NO: 269060 - DNA, 20 bp, synthetic construct
  source 1..20: mol_type = other DNA
ggctagttcagggctcctgc

SEQ ID NO: 269061 - DNA, 20 bp, synthetic construct
  source 1..20: mol_type = other DNA
cggctagttcagggctcctg

SEQ ID NO: 269062 - DNA, 20 bp, synthetic construct
  source 1..20: mol_type = other DNA
tcggctagttcagggctcct

SEQ ID NO: 269063 - DNA, 20 bp, synthetic construct
  source 1..20: mol_type = other DNA
ttcggctagttcagggctcc

SEQ ID NO: 269064 - DNA, 20 bp, synthetic construct
  source 1..20: mol_type = other DNA
gttcggctagttcagggctc

SEQ ID NO: 269065 - DNA, 20 bp, synthetic construct
  source 1..20: mol_type = other DNA
tgttcggctagttcagggct

SEQ ID NO: 269066 - DNA, 20 bp, synthetic construct
  source 1..20: mol_type = other DNA
ctgttcggctagttcagggc

SEQ ID NO: 269067 - DNA, 20 bp, synthetic construct
  source 1..20: mol_type = other DNA
gctgttcggctagttcaggg

SEQ ID NO: 269068 - DNA, 20 bp, synthetic construct
  source 1..20: mol_type = other DNA
agctgttcggctagttcagg

SEQ ID NO: 269069 - DNA, 20 bp, synthetic construct
  source 1..20: mol_type = other DNA
cagctgttcggctagttcag

SEQ ID NO: 269070 - DNA, 20 bp, synthetic construct
  source 1..20: mol_type = other DNA
tcagctgttcggctagttca

SEQ ID NO: 269071 - DNA, 20 bp, synthetic construct
  source 1..20: mol_type = other DNA
ttcagctgttcggctagttc

SEQ ID NO: 269072 - DNA, 20 bp, synthetic construct
  source 1..20: mol_type = other DNA
gttcagctgttcggctagtt

SEQ ID NO: 269073 - DNA, 20 bp, synthetic construct
  source 1..20: mol_type = other DNA
tgttcagctgttcggctagt

SEQ ID NO: 269074 - DNA, 20 bp, synthetic construct
  source 1..20: mol_type = other DNA
ctgttcagctgttcggctag

SEQ ID NO: 269075 - DNA, 20 bp, synthetic construct
  source 1..20: mol_type = other DNA
gctgttcagctgttcggcta

SEQ ID NO: 269076 - DNA, 20 bp, synthetic construct
  source 1..20: mol_type = other DNA
agctgttcagctgttcggct

SEQ ID NO: 269077 - DNA, 20 bp, synthetic construct
  source 1..20: mol_type = other DNA
cagctgttcagctgttcggc

SEQ ID NO: 269078 - DNA, 20 bp, synthetic construct
  source 1..20: mol_type = other DNA
tcagctgttcagctgttcgg

SEQ ID NO: 269079 - DNA, 20 bp, synthetic construct
  source 1..20: mol_type = other DNA
ttcagctgttcagctgttcg

SEQ ID NO: 269080 - DNA, 20 bp, synthetic construct
  source 1..20: mol_type = other DNA
gttcagctgttcagctgttc

SEQ ID NO: 269081 - DNA, 20 bp, synthetic construct
  source 1..20: mol_type = other DNA
tgttcagctgttcagctgtt

SEQ ID NO: 269082 - DNA, 20 bp, synthetic construct
  source 1..20: mol_type = other DNA
atgttcagctgttcagctgt

SEQ ID NO: 269083 - DNA, 20 bp, synthetic construct
  source 1..20: mol_type = other DNA
aatgttcagctgttcagctg

SEQ ID NO: 269084 - DNA, 20 bp, synthetic construct
  source 1..20: mol_type = other DNA
gaatgttcagctgttcagct

SEQ ID NO: 269085 - DNA, 20 bp, synthetic construct
  source 1..20: mol_type = other DNA
tgaatgttcagctgttcagc

SEQ ID NO: 269086 - DNA, 20 bp, synthetic construct
  source 1..20: mol_type = other DNA
gtgaatgttcagctgttcag

SEQ ID NO: 269087 - DNA, 20 bp, synthetic construct
  source 1..20: mol_type = other DNA
ggtgaatgttcagctgttca

SEQ ID NO: 269088 - DNA, 20 bp, synthetic construct
  source 1..20: mol_type = other DNA
gggtgaatgttcagctgttc

SEQ ID NO: 269089 - DNA, 20 bp, synthetic construct
  source 1..20: mol_type = other DNA
agggtgaatgttcagctgtt

SEQ ID NO: 269090 - DNA, 20 bp, synthetic construct
  source 1..20: mol_type = other DNA
cagggtgaatgttcagctgt

SEQ ID NO: 269091 - DNA, 20 bp, synthetic construct
  source 1..20: mol_type = other DNA
acagggtgaatgttcagctg

SEQ ID NO: 269092 - DNA, 20 bp, synthetic construct
  source 1..20: mol_type = other DNA
cacagggtgaatgttcagct

SEQ ID NO: 269093 - DNA, 20 bp, synthetic construct
  source 1..20: mol_type = other DNA
ccacagggtgaatgttcagc

SEQ ID NO: 269094 - DNA, 20 bp, synthetic construct
  source 1..20: mol_type = other DNA
cccacagggtgaatgttcag

SEQ ID NO: 269095 - DNA, 20 bp, synthetic construct
  source 1..20: mol_type = other DNA
ccccacagggtgaatgttca

SEQ ID NO: 269096 - DNA, 20 bp, synthetic construct
  source 1..20: mol_type = other DNA
tccccacagggtgaatgttc

SEQ ID NO: 269097 - DNA, 20 bp, synthetic construct
  source 1..20: mol_type = other DNA
ttccccacagggtgaatgtt

SEQ ID NO: 269098 - DNA, 20 bp, synthetic construct
  source 1..20: mol_type = other DNA
tttccccacagggtgaatgt

SEQ ID NO: 269099 - DNA, 20 bp, synthetic construct
  source 1..20: mol_type = other DNA
ctttccccacagggtgaatg

SEQ ID NO: 269100 - DNA, 20 bp, synthetic construct
  source 1..20: mol_type = other DNA
cctttccccacagggtgaat

SEQ ID NO: 269101 - DNA, 20 bp, synthetic construct
  source 1..20: mol_type = other DNA
ccctttccccacagggtgaa

SEQ ID NO: 269102 - DNA, 20 bp, synthetic construct
  source 1..20: mol_type = other DNA
accctttccccacagggtga

SEQ ID NO: 269103 - DNA, 20 bp, synthetic construct
  source 1..20: mol_type = other DNA
gaccctttccccacagggtg

SEQ ID NO: 269104 - DNA, 20 bp, synthetic construct
  source 1..20: mol_type = other DNA
tgaccctttccccacagggt

SEQ ID NO: 269105 - DNA, 20 bp, synthetic construct
  source 1..20: mol_type = other DNA
ctgaccctttccccacaggg

SEQ ID NO: 269106 - DNA, 20 bp, synthetic construct
  source 1..20: mol_type = other DNA
tctgaccctttccccacagg

SEQ ID NO: 269107 - DNA, 20 bp, synthetic construct
  source 1..20: mol_type = other DNA
ttctgaccctttccccacag

SEQ ID NO: 269108 - DNA, 20 bp, synthetic construct
  source 1..20: mol_type = other DNA
cttctgaccctttccccaca

SEQ ID NO: 269109 - DNA, 20 bp, synthetic construct
  source 1..20: mol_type = other DNA
gcttctgaccctttccccac

SEQ ID NO: 269110 - DNA, 20 bp, synthetic construct
  source 1..20: mol_type = other DNA
cgcttctgaccctttcccca

SEQ ID NO: 269111 - DNA, 20 bp, synthetic construct
  source 1..20: mol_type = other DNA
acgcttctgaccctttcccc

SEQ ID NO: 269112 - DNA, 20 bp, synthetic construct
  source 1..20: mol_type = other DNA
gacgcttctgaccctttccc

SEQ ID NO: 269113 - DNA, 20 bp, synthetic construct
  source 1..20: mol_type = other DNA
ggacgcttctgaccctttcc

SEQ ID NO: 269114 - DNA, 20 bp, synthetic construct
  source 1..20: mol_type = other DNA
tggacgcttctgaccctttc

SEQ ID NO: 269115 - DNA, 20 bp, synthetic construct
  source 1..20: mol_type = other DNA
ctggacgcttctgacccttt

SEQ ID NO: 269116 - DNA, 20 bp, synthetic construct
  source 1..20: mol_type = other DNA
cctggacgcttctgaccctt

SEQ ID NO: 269117 - DNA, 20 bp, synthetic construct
  source 1..20: mol_type = other DNA
gcctggacgcttctgaccct

SEQ ID NO: 269118 - DNA, 20 bp, synthetic construct
  source 1..20: mol_type = other DNA
agcctggacgcttctgaccc

SEQ ID NO: 269119 - DNA, 20 bp, synthetic construct
  source 1..20: mol_type = other DNA
aagcctggacgcttctgacc

SEQ ID NO: 269120 - DNA, 20 bp, synthetic construct
  source 1..20: mol_type = other DNA
caagcctggacgcttctgac

SEQ ID NO: 269121 - DNA, 20 bp, synthetic construct
  source 1..20: mol_type = other DNA
tcaagcctggacgcttctga

SEQ ID NO: 269122 - DNA, 20 bp, synthetic construct
  source 1..20: mol_type = other DNA
ctcaagcctggacgcttctg

SEQ ID NO: 269123 - DNA, 20 bp, synthetic construct
  source 1..20: mol_type = other DNA
cctcaagcctggacgcttct

SEQ ID NO: 269124 - DNA, 20 bp, synthetic construct
  source 1..20: mol_type = other DNA
ccctcaagcctggacgcttc

SEQ ID NO: 269125 - DNA, 20 bp, synthetic construct
  source 1..20: mol_type = other DNA
gccctcaagcctggacgctt

SEQ ID NO: 269126 - DNA, 20 bp, synthetic construct
  source 1..20: mol_type = other DNA
tgccctcaagcctggacgct

SEQ ID NO: 269127 - DNA, 20 bp, synthetic construct
  source 1..20: mol_type = other DNA
gtgccctcaagcctggacgc

SEQ ID NO: 269128 - DNA, 20 bp, synthetic construct
  source 1..20: mol_type = other DNA
tgtgccctcaagcctggacg

SEQ ID NO: 269129 - DNA, 20 bp, synthetic construct
  source 1..20: mol_type = other DNA
ctgtgccctcaagcctggac

SEQ ID NO: 269130 - DNA, 20 bp, synthetic construct
  source 1..20: mol_type = other DNA
gctgtgccctcaagcctgga

SEQ ID NO: 269131 - DNA, 20 bp, synthetic construct
  source 1..20: mol_type = other DNA
agctgtgccctcaagcctgg

SEQ ID NO: 269132 - DNA, 20 bp, synthetic construct
  source 1..20: mol_type = other DNA
cagctgtgccctcaagcctg

SEQ ID NO: 269133 - DNA, 20 bp, synthetic construct
  source 1..20: mol_type = other DNA
ccagctgtgccctcaagcct

SEQ ID NO: 269134 - DNA, 20 bp, synthetic construct
  source 1..20: mol_type = other DNA
cccagctgtgccctcaagcc

SEQ ID NO: 269135 - DNA, 20 bp, synthetic construct
  source 1..20: mol_type = other DNA
acccagctgtgccctcaagc

SEQ ID NO: 269136 - DNA, 20 bp, synthetic construct
  source 1..20: mol_type = other DNA
gacccagctgtgccctcaag

SEQ ID NO: 269137 - DNA, 20 bp, synthetic construct
  source 1..20: mol_type = other DNA
agacccagctgtgccctcaa

SEQ ID NO: 269138 - DNA, 20 bp, synthetic construct
  source 1..20: mol_type = other DNA
gagacccagctgtgccctca

SEQ ID NO: 269139 - DNA, 20 bp, synthetic construct
  source 1..20: mol_type = other DNA
cgagacccagctgtgccctc

SEQ ID NO: 269140 - DNA, 20 bp, synthetic construct
  source 1..20: mol_type = other DNA
acgagacccagctgtgccct

SEQ ID NO: 269141 - DNA, 20 bp, synthetic construct
  source 1..20: mol_type = other DNA
gacgagacccagctgtgccc

SEQ ID NO: 269142 - DNA, 20 bp, synthetic construct
  source 1..20: mol_type = other DNA
tgacgagacccagctgtgcc

SEQ ID NO: 269143 - DNA, 20 bp, synthetic construct
  source 1..20: mol_type = other DNA
gtgacgagacccagctgtgc

SEQ ID NO: 269144 - DNA, 20 bp, synthetic construct
  source 1..20: mol_type = other DNA
agtgacgagacccagctgtg

SEQ ID NO: 269145 - DNA, 20 bp, synthetic construct
  source 1..20: mol_type = other DNA
cagtgacgagacccagctgt

SEQ ID NO: 269146 - DNA, 20 bp, synthetic construct
  source 1..20: mol_type = other DNA
gcagtgacgagacccagctg

SEQ ID NO: 269147 - DNA, 20 bp, synthetic construct
  source 1..20: mol_type = other DNA
tgcagtgacgagacccagct

SEQ ID NO: 269148 - DNA, 20 bp, synthetic construct
  source 1..20: mol_type = other DNA
atgcagtgacgagacccagc

SEQ ID NO: 269149 - DNA, 20 bp, synthetic construct
  source 1..20: mol_type = other DNA
gatgcagtgacgagacccag

SEQ ID NO: 269150 - DNA, 20 bp, synthetic construct
  source 1..20: mol_type = other DNA
tgatgcagtgacgagaccca

SEQ ID NO: 269151 - DNA, 20 bp, synthetic construct
  source 1..20: mol_type = other DNA
gtgatgcagtgacgagaccc

SEQ ID NO: 269152 - DNA, 20 bp, synthetic construct
  source 1..20: mol_type = other DNA
ggtgatgcagtgacgagacc

SEQ ID NO: 269153 - DNA, 20 bp, synthetic construct
  source 1..20: mol_type = other DNA
gggtgatgcagtgacgagac

SEQ ID NO: 269154 - DNA, 20 bp, synthetic construct
  source 1..20: mol_type = other DNA
agggtgatgcagtgacgaga

SEQ ID NO: 269155 - DNA, 20 bp, synthetic construct
  source 1..20: mol_type = other DNA
aagggtgatgcagtgacgag

SEQ ID NO: 269156 - DNA, 20 bp, synthetic construct
  source 1..20: mol_type = other DNA
taagggtgatgcagtgacga

SEQ ID NO: 269157 - DNA, 20 bp, synthetic construct
  source 1..20: mol_type = other DNA
ataagggtgatgcagtgacg

SEQ ID NO: 269158 - DNA, 20 bp, synthetic construct
  source 1..20: mol_type = other DNA
aataagggtgatgcagtgac

SEQ ID NO: 269159 - DNA, 20 bp, synthetic construct
  source 1..20: mol_type = other DNA
aaataagggtgatgcagtga

SEQ ID NO: 269160 - DNA, 20 bp, synthetic construct
  source 1..20: mol_type = other DNA
taaataagggtgatgcagtg

SEQ ID NO: 269161 - DNA, 20 bp, synthetic construct
  source 1..20: mol_type = other DNA
ctaaataagggtgatgcagt

SEQ ID NO: 269162 - DNA, 20 bp, synthetic construct
  source 1..20: mol_type = other DNA
cctaaataagggtgatgcag

SEQ ID NO: 269163 - DNA, 20 bp, synthetic construct
  source 1..20: mol_type = other DNA
tcctaaataagggtgatgca

SEQ ID NO: 269164 - DNA, 20 bp, synthetic construct
  source 1..20: mol_type = other DNA
atcctaaataagggtgatgc

SEQ ID NO: 269165 - DNA, 20 bp, synthetic construct
  source 1..20: mol_type = other DNA
tatcctaaataagggtgatg

SEQ ID NO: 269166 - DNA, 20 bp, synthetic construct
  source 1..20: mol_type = other DNA
ttatcctaaataagggtgat

SEQ ID NO: 269167 - DNA, 20 bp, synthetic construct
  source 1..20: mol_type = other DNA
tttatcctaaataagggtga

SEQ ID NO: 269168 - DNA, 20 bp, synthetic construct
  source 1..20: mol_type = other DNA
ctttatcctaaataagggtg

SEQ ID NO: 269169 - DNA, 20 bp, synthetic construct
  source 1..20: mol_type = other DNA
cctttatcctaaataagggt

SEQ ID NO: 269170 - DNA, 20 bp, synthetic construct
  source 1..20: mol_type = other DNA
gcctttatcctaaataaggg

SEQ ID NO: 269171 - DNA, 20 bp, synthetic construct
  source 1..20: mol_type = other DNA
ggcctttatcctaaataagg

SEQ ID NO: 269172 - DNA, 20 bp, synthetic construct
  source 1..20: mol_type = other DNA
gggcctttatcctaaataag

SEQ ID NO: 269173 - DNA, 20 bp, synthetic construct
  source 1..20: mol_type = other DNA
agggcctttatcctaaataa

SEQ ID NO: 269174 - DNA, 20 bp, synthetic construct
  source 1..20: mol_type = other DNA
cagggcctttatcctaaata

SEQ ID NO: 269175 - DNA, 20 bp, synthetic construct
  source 1..20: mol_type = other DNA
tcagggcctttatcctaaat

SEQ ID NO: 269176 - DNA, 20 bp, synthetic construct
  source 1..20: mol_type = other DNA
ttcagggcctttatcctaaa

SEQ ID NO: 269177 - DNA, 20 bp, synthetic construct
  source 1..20: mol_type = other DNA
cttcagggcctttatcctaa

SEQ ID NO: 269178 - DNA, 20 bp, synthetic construct
  source 1..20: mol_type = other DNA
tcttcagggcctttatccta

SEQ ID NO: 269179 - DNA, 20 bp, synthetic construct
  source 1..20: mol_type = other DNA
ttcttcagggcctttatcct

SEQ ID NO: 269180 - DNA, 20 bp, synthetic construct
  source 1..20: mol_type = other DNA
attcttcagggcctttatcc

SEQ ID NO: 269181 - DNA, 20 bp, synthetic construct
  source 1..20: mol_type = other DNA
aattcttcagggcctttatc

SEQ ID NO: 269182 - DNA, 20 bp, synthetic construct
  source 1..20: mol_type = other DNA
caattcttcagggcctttat

SEQ ID NO: 269183 - DNA, 20 bp, synthetic construct
  source 1..20: mol_type = other DNA
acaattcttcagggccttta

SEQ ID NO: 269184 - DNA, 20 bp, synthetic construct
  source 1..20: mol_type = other DNA
tacaattcttcagggccttt

SEQ ID NO: 269185 - DNA, 20 bp, synthetic construct
  source 1..20: mol_type = other DNA
atacaattcttcagggcctt

SEQ ID NO: 269186 - DNA, 20 bp, synthetic construct
  source 1..20: mol_type = other DNA
aatacaattcttcagggcct

SEQ ID NO: 269187 - DNA, 20 bp, synthetic construct
  source 1..20: mol_type = other DNA
taatacaattcttcagggcc

SEQ ID NO: 269188 - DNA, 20 bp, synthetic construct
  source 1..20: mol_type = other DNA
ctaatacaattcttcagggc

SEQ ID NO: 269189 - DNA, 20 bp, synthetic construct
  source 1..20: mol_type = other DNA
tctaatacaattcttcaggg

SEQ ID NO: 269190 - DNA, 20 bp, synthetic construct
  source 1..20: mol_type = other DNA
ctctaatacaattcttcagg

SEQ ID NO: 269191 - DNA, 20 bp, synthetic construct
  source 1..20: mol_type = other DNA
cctctaatacaattcttcag

SEQ ID NO: 269192 - DNA, 20 bp, synthetic construct
  source 1..20: mol_type = other DNA
acctctaatacaattcttca

SEQ ID NO: 269193 - DNA, 20 bp, synthetic construct
  source 1..20: mol_type = other DNA
aacctctaatacaattcttc

SEQ ID NO: 269194 - DNA, 20 bp, synthetic construct
  source 1..20: mol_type = other DNA
caacctctaatacaattctt

SEQ ID NO: 269195 - DNA, 20 bp, synthetic construct
  source 1..20: mol_type = other DNA
ccaacctctaatacaattct

SEQ ID NO: 269196 - DNA, 20 bp, synthetic construct
  source 1..20: mol_type = other DNA
gccaacctctaatacaattc

SEQ ID NO: 269197 - DNA, 20 bp, synthetic construct
  source 1..20: mol_type = other DNA
tgccaacctctaatacaatt

SEQ ID NO: 269198 - DNA, 20 bp, synthetic construct
  source 1..20: mol_type = other DNA
ttgccaacctctaatacaat

SEQ ID NO: 269199 - DNA, 20 bp, synthetic construct
  source 1..20: mol_type = other DNA
tttgccaacctctaatacaa

SEQ ID NO: 269200 - DNA, 20 bp, synthetic construct
  source 1..20: mol_type = other DNA
ctttgccaacctctaataca

SEQ ID NO: 269201 - DNA, 20 bp, synthetic construct
  source 1..20: mol_type = other DNA
gctttgccaacctctaatac

SEQ ID NO: 269202 - DNA, 20 bp, synthetic construct
  source 1..20: mol_type = other DNA
tgctttgccaacctctaata

SEQ ID NO: 269203 - DNA, 20 bp, synthetic construct
  source 1..20: mol_type = other DNA
atgctttgccaacctctaat

SEQ ID NO: 269204 - DNA, 20 bp, synthetic construct
  source 1..20: mol_type = other DNA
tatgctttgccaacctctaa

SEQ ID NO: 269205 - DNA, 20 bp, synthetic construct
  source 1..20: mol_type = other DNA
atatgctttgccaacctcta

SEQ ID NO: 269206 - DNA, 20 bp, synthetic construct
  source 1..20: mol_type = other DNA
gatatgctttgccaacctct

SEQ ID NO: 269207 - DNA, 20 bp, synthetic construct
  source 1..20: mol_type = other DNA
agatatgctttgccaacctc

SEQ ID NO: 269208 - DNA, 20 bp, synthetic construct
  source 1..20: mol_type = other DNA
tagatatgctttgccaacct

SEQ ID NO: 269209 - DNA, 20 bp, synthetic construct
  source 1..20: mol_type = other DNA
gtagatatgctttgccaacc

SEQ ID NO: 269210 - DNA, 20 bp, synthetic construct
  source 1..20: mol_type = other DNA
ggtagatatgctttgccaac

SEQ ID NO: 269211 - DNA, 20 bp, synthetic construct
  source 1..20: mol_type = other DNA
tggtagatatgctttgccaa

SEQ ID NO: 269212 - DNA, 20 bp, synthetic construct
  source 1..20: mol_type = other DNA
gtggtagatatgctttgcca

SEQ ID NO: 269213 - DNA, 20 bp, synthetic construct
  source 1..20: mol_type = other DNA
ggtggtagatatgctttgcc

SEQ ID NO: 269214 - DNA, 20 bp, synthetic construct
  source 1..20: mol_type = other DNA
aggtggtagatatgctttgc

SEQ ID NO: 269215 - DNA, 20 bp, synthetic construct
  source 1..20: mol_type = other DNA
gaggtggtagatatgctttg

SEQ ID NO: 269216 - DNA, 20 bp, synthetic construct
  source 1..20: mol_type = other DNA
ggaggtggtagatatgcttt

SEQ ID NO: 269217 - DNA, 20 bp, synthetic construct
  source 1..20: mol_type = other DNA
aggaggtggtagatatgctt

SEQ ID NO: 269218 - DNA, 20 bp, synthetic construct
  source 1..20: mol_type = other DNA
caggaggtggtagatatgct

SEQ ID NO: 269219 - DNA, 20 bp, synthetic construct
  source 1..20: mol_type = other DNA
ccaggaggtggtagatatgc

SEQ ID NO: 269220 - DNA, 20 bp, synthetic construct
  source 1..20: mol_type = other DNA
tccaggaggtggtagatatg

SEQ ID NO: 269221 - DNA, 20 bp, synthetic construct
  source 1..20: mol_type = other DNA
ctccaggaggtggtagatat

SEQ ID NO: 269222 - DNA, 20 bp, synthetic construct
  source 1..20: mol_type = other DNA
gctccaggaggtggtagata

SEQ ID NO: 269223 - DNA, 20 bp, synthetic construct
  source 1..20: mol_type = other DNA
ggctccaggaggtggtagat

SEQ ID NO: 269224 - DNA, 20 bp, synthetic construct
  source 1..20: mol_type = other DNA
tggctccaggaggtggtaga

SEQ ID NO: 269225 - DNA, 20 bp, synthetic construct
  source 1..20: mol_type = other DNA
gtggctccaggaggtggtag

SEQ ID NO: 269226 - DNA, 20 bp, synthetic construct
  source 1..20: mol_type = other DNA
cgtggctccaggaggtggta

SEQ ID NO: 269227 - DNA, 20 bp, synthetic construct
  source 1..20: mol_type = other DNA
gcgtggctccaggaggtggt

SEQ ID NO: 269228 - DNA, 20 bp, synthetic construct
  source 1..20: mol_type = other DNA
agcgtggctccaggaggtgg

SEQ ID NO: 269229 - DNA, 20 bp, synthetic construct
  source 1..20: mol_type = other DNA
cagcgtggctccaggaggtg

SEQ ID NO: 269230 - DNA, 20 bp, synthetic construct
  source 1..20: mol_type = other DNA
ccagcgtggctccaggaggt

SEQ ID NO: 269231 - DNA, 20 bp, synthetic construct
  source 1..20: mol_type = other DNA
gccagcgtggctccaggagg

SEQ ID NO: 269232 - DNA, 20 bp, synthetic construct
  source 1..20: mol_type = other DNA
ggccagcgtggctccaggag

SEQ ID NO: 269233 - DNA, 20 bp, synthetic construct
  source 1..20: mol_type = other DNA
cggccagcgtggctccagga

SEQ ID NO: 269234 - DNA, 20 bp, synthetic construct
  source 1..20: mol_type = other DNA
gcggccagcgtggctccagg

SEQ ID NO: 269235 - DNA, 20 bp, synthetic construct
  source 1..20: mol_type = other DNA
tgcggccagcgtggctccag

SEQ ID NO: 269236 - DNA, 20 bp, synthetic construct
  source 1..20: mol_type = other DNA
ctgcggccagcgtggctcca

SEQ ID NO: 269237 - DNA, 20 bp, synthetic construct
  source 1..20: mol_type = other DNA
cctgcggccagcgtggctcc

SEQ ID NO: 269238 - DNA, 20 bp, synthetic construct
  source 1..20: mol_type = other DNA
ccctgcggccagcgtggctc

SEQ ID NO: 269239 - DNA, 20 bp, synthetic construct
  source 1..20: mol_type = other DNA
tccctgcggccagcgtggct

SEQ ID NO: 269240 - DNA, 20 bp, synthetic construct
  source 1..20: mol_type = other DNA
atccctgcggccagcgtggc

SEQ ID NO: 269241 - DNA, 20 bp, synthetic construct
  source 1..20: mol_type = other DNA
aatccctgcggccagcgtgg

SEQ ID NO: 269242 - DNA, 20 bp, synthetic construct
  source 1..20: mol_type = other DNA
taatccctgcggccagcgtg

SEQ ID NO: 269243 - DNA, 20 bp, synthetic construct
  source 1..20: mol_type = other DNA
ataatccctgcggccagcgt

SEQ ID NO: 269244 - DNA, 20 bp, synthetic construct
  source 1..20: mol_type = other DNA
tataatccctgcggccagcg

SEQ ID NO: 269245 - DNA, 20 bp, synthetic construct
  source 1..20: mol_type = other DNA
ttataatccctgcggccagc

SEQ ID NO: 269246 - DNA, 20 bp, synthetic construct
  source 1..20: mol_type = other DNA
attataatccctgcggccag

SEQ ID NO: 269247 - DNA, 20 bp, synthetic construct
  source 1..20: mol_type = other DNA
aattataatccctgcggcca

SEQ ID NO: 269248 - DNA, 20 bp, synthetic construct
  source 1..20: mol_type = other DNA
taattataatccctgcggcc

SEQ ID NO: 269249 - DNA, 20 bp, synthetic construct
  source 1..20: mol_type = other DNA
ataattataatccctgcggc

SEQ ID NO: 269250 - DNA, 20 bp, synthetic construct
  source 1..20: mol_type = other DNA
aataattataatccctgcgg

SEQ ID NO: 269251 - DNA, 20 bp, synthetic construct
  source 1..20: mol_type = other DNA
aaataattataatccctgcg

SEQ ID NO: 269252 - DNA, 20 bp, synthetic construct
  source 1..20: mol_type = other DNA
gaaataattataatccctgc

SEQ ID NO: 269253 - DNA, 20 bp, synthetic construct
  source 1..20: mol_type = other DNA
ggaaataattataatccctg

SEQ ID NO: 269254 - DNA, 20 bp, synthetic construct
  source 1..20: mol_type = other DNA
tggaaataattataatccct

SEQ ID NO: 269255 - DNA, 20 bp, synthetic construct
  source 1..20: mol_type = other DNA
atggaaataattataatccc

SEQ ID NO: 269256 - DNA, 20 bp, synthetic construct
  source 1..20: mol_type = other DNA
aatggaaataattataatcc

SEQ ID NO: 269257 - DNA, 20 bp, synthetic construct
  source 1..20: mol_type = other DNA
aaatggaaataattataatc

SEQ ID NO: 269258 - DNA, 20 bp, synthetic construct
  source 1..20: mol_type = other DNA
aaaatggaaataattataat

SEQ ID NO: 269259 - DNA, 20 bp, synthetic construct
  source 1..20: mol_type = other DNA
gaaaatggaaataattataa

SEQ ID NO: 269260 - DNA, 20 bp, synthetic construct
  source 1..20: mol_type = other DNA
tgaaaatggaaataattata

SEQ ID NO: 269261 - DNA, 20 bp, synthetic construct
  source 1..20: mol_type = other DNA
ttgaaaatggaaataattat

SEQ ID NO: 269262 - DNA, 20 bp, synthetic construct
  source 1..20: mol_type = other DNA
tttgaaaatggaaataatta

SEQ ID NO: 269263 - DNA, 20 bp, synthetic construct
  source 1..20: mol_type = other DNA
atttgaaaatggaaataatt

SEQ ID NO: 269264 - DNA, 20 bp, synthetic construct
  source 1..20: mol_type = other DNA
aatttgaaaatggaaataat

SEQ ID NO: 269265 - DNA, 20 bp, synthetic construct
  source 1..20: mol_type = other DNA
taatttgaaaatggaaataa

SEQ ID NO: 269266 - DNA, 20 bp, synthetic construct
  source 1..20: mol_type = other DNA
ttaatttgaaaatggaaata

SEQ ID NO: 269267 - DNA, 20 bp, synthetic construct
  source 1..20: mol_type = other DNA
cttaatttgaaaatggaaat

SEQ ID NO: 269268 - DNA, 20 bp, synthetic construct
  source 1..20: mol_type = other DNA
ccttaatttgaaaatggaaa

SEQ ID NO: 269269 - DNA, 20 bp, synthetic construct
  source 1..20: mol_type = other DNA
gccttaatttgaaaatggaa

SEQ ID NO: 269270 - DNA, 20 bp, synthetic construct
  source 1..20: mol_type = other DNA
ggccttaatttgaaaatgga

SEQ ID NO: 269271 - DNA, 20 bp, synthetic construct
  source 1..20: mol_type = other DNA
aggccttaatttgaaaatgg

SEQ ID NO: 269272 - DNA, 20 bp, synthetic construct
  source 1..20: mol_type = other DNA
gaggccttaatttgaaaatg

SEQ ID NO: 269273 - DNA, 20 bp, synthetic construct
  source 1..20: mol_type = other DNA
agaggccttaatttgaaaat

SEQ ID NO: 269274 - DNA, 20 bp, synthetic construct
  source 1..20: mol_type = other DNA
cagaggccttaatttgaaaa

SEQ ID NO: 269275 - DNA, 20 bp, synthetic construct
  source 1..20: mol_type = other DNA
tcagaggccttaatttgaaa

SEQ ID NO: 269276 - DNA, 20 bp, synthetic construct
  source 1..20: mol_type = other DNA
ctcagaggccttaatttgaa

SEQ ID NO: 269277 - DNA, 20 bp, synthetic construct
  source 1..20: mol_type = other DNA
gctcagaggccttaatttga

SEQ ID NO: 269278 - DNA, 20 bp, synthetic construct
  source 1..20: mol_type = other DNA
agctcagaggccttaatttg

SEQ ID NO: 269279 - DNA, 20 bp, synthetic construct
  source 1..20: mol_type = other DNA
gagctcagaggccttaattt

SEQ ID NO: 269280 - DNA, 20 bp, synthetic construct
  source 1..20: mol_type = other DNA
tgagctcagaggccttaatt

SEQ ID NO: 269281 - DNA, 20 bp, synthetic construct
  source 1..20: mol_type = other DNA
ctgagctcagaggccttaat

SEQ ID NO: 269282 - DNA, 20 bp, synthetic construct
  source 1..20: mol_type = other DNA
tctgagctcagaggccttaa

SEQ ID NO: 269283 - DNA, 20 bp, synthetic construct
  source 1..20: mol_type = other DNA
ctctgagctcagaggcctta

SEQ ID NO: 269284 - DNA, 20 bp, synthetic construct
  source 1..20: mol_type = other DNA
tctctgagctcagaggcctt

SEQ ID NO: 269285 - DNA, 20 bp, synthetic construct
  source 1..20: mol_type = other DNA
ctctctgagctcagaggcct

SEQ ID NO: 269286 - DNA, 20 bp, synthetic construct
  source 1..20: mol_type = other DNA
cctctctgagctcagaggcc

SEQ ID NO: 269287 - DNA, 20 bp, synthetic construct
  source 1..20: mol_type = other DNA
ccctctctgagctcagaggc

SEQ ID NO: 269288 - DNA, 20 bp, synthetic construct
  source 1..20: mol_type = other DNA
cccctctctgagctcagagg

SEQ ID NO: 269289 - DNA, 20 bp, synthetic construct
  source 1..20: mol_type = other DNA
tcccctctctgagctcagag

SEQ ID NO: 269290 - DNA, 20 bp, synthetic construct
  source 1..20: mol_type = other DNA
ttcccctctctgagctcaga

SEQ ID NO: 269291 - DNA, 20 bp, synthetic construct
  source 1..20: mol_type = other DNA
cttcccctctctgagctcag

SEQ ID NO: 269292 - DNA, 20 bp, synthetic construct
  source 1..20: mol_type = other DNA
acttcccctctctgagctca

SEQ ID NO: 269293 - DNA, 20 bp, synthetic construct
  source 1..20: mol_type = other DNA
aacttcccctctctgagctc

SEQ ID NO: 269294 - DNA, 20 bp, synthetic construct
  source 1..20: mol_type = other DNA
taacttcccctctctgagct

SEQ ID NO: 269295 - DNA, 20 bp, synthetic construct
  source 1..20: mol_type = other DNA
gtaacttcccctctctgagc

SEQ ID NO: 269296 - DNA, 20 bp, synthetic construct
  source 1..20: mol_type = other DNA
agtaacttcccctctctgag

SEQ ID NO: 269297 - DNA, 20 bp, synthetic construct
  source 1..20: mol_type = other DNA
aagtaacttcccctctctga

SEQ ID NO: 269298 - DNA, 20 bp, synthetic construct
  source 1..20: mol_type = other DNA
caagtaacttcccctctctg

SEQ ID NO: 269299 - DNA, 20 bp, synthetic construct
  source 1..20: mol_type = other DNA
acaagtaacttcccctctct

SEQ ID NO: 269300 - DNA, 20 bp, synthetic construct
  source 1..20: mol_type = other DNA
gacaagtaacttcccctctc

SEQ ID NO: 269301 - DNA, 20 bp, synthetic construct
  source 1..20: mol_type = other DNA
agacaagtaacttcccctct

SEQ ID NO: 269302 - DNA, 20 bp, synthetic construct
  source 1..20: mol_type = other DNA
cagacaagtaacttcccctc

SEQ ID NO: 269303 - DNA, 20 bp, synthetic construct
  source 1..20: mol_type = other DNA
tcagacaagtaacttcccct

SEQ ID NO: 269304 - DNA, 20 bp, synthetic construct
  source 1..20: mol_type = other DNA
ctcagacaagtaacttcccc

SEQ ID NO: 269305 - DNA, 20 bp, synthetic construct
  source 1..20: mol_type = other DNA
cctcagacaagtaacttccc

SEQ ID NO: 269306 - DNA, 20 bp, synthetic construct
  source 1..20: mol_type = other DNA
gcctcagacaagtaacttcc

SEQ ID NO: 269307 - DNA, 20 bp, synthetic construct
  source 1..20: mol_type = other DNA
ggcctcagacaagtaacttc

SEQ ID NO: 269308 - DNA, 20 bp, synthetic construct
  source 1..20: mol_type = other DNA
tggcctcagacaagtaactt

SEQ ID NO: 269309 - DNA, 20 bp, synthetic construct
  source 1..20: mol_type = other DNA
gtggcctcagacaagtaact

SEQ ID NO: 269310 - DNA, 20 bp, synthetic construct
  source 1..20: mol_type = other DNA
tgtggcctcagacaagtaac

SEQ ID NO: 269311 - DNA, 20 bp, synthetic construct
  source 1..20: mol_type = other DNA
gtgtggcctcagacaagtaa

SEQ ID NO: 269312 - DNA, 20 bp, synthetic construct
  source 1..20: mol_type = other DNA
tgtgtggcctcagacaagta

SEQ ID NO: 269313 - DNA, 20 bp, synthetic construct
  source 1..20: mol_type = other DNA
ctgtgtggcctcagacaagt

SEQ ID NO: 269314 - DNA, 20 bp, synthetic construct
  source 1..20: mol_type = other DNA
gctgtgtggcctcagacaag

SEQ ID NO: 269315 - DNA, 20 bp, synthetic construct
  source 1..20: mol_type = other DNA
agctgtgtggcctcagacaa

SEQ ID NO: 269316 - DNA, 20 bp, synthetic construct
  source 1..20: mol_type = other DNA
aagctgtgtggcctcagaca

SEQ ID NO: 269317 - DNA, 20 bp, synthetic construct
  source 1..20: mol_type = other DNA
caagctgtgtggcctcagac

SEQ ID NO: 269318 - DNA, 20 bp, synthetic construct
  source 1..20: mol_type = other DNA
acaagctgtgtggcctcaga

SEQ ID NO: 269319 - DNA, 20 bp, synthetic construct
  source 1..20: mol_type = other DNA
aacaagctgtgtggcctcag

SEQ ID NO: 269320 - DNA, 20 bp, synthetic construct
  source 1..20: mol_type = other DNA
caacaagctgtgtggcctca

SEQ ID NO: 269321 - DNA, 20 bp, synthetic construct
  source 1..20: mol_type = other DNA
ccaacaagctgtgtggcctc

SEQ ID NO: 269322 - DNA, 20 bp, synthetic construct
  source 1..20: mol_type = other DNA
tccaacaagctgtgtggcct

SEQ ID NO: 269323 - DNA, 20 bp, synthetic construct
  source 1..20: mol_type = other DNA
ctccaacaagctgtgtggcc

SEQ ID NO: 269324 - DNA, 20 bp, synthetic construct
  source 1..20: mol_type = other DNA
gctccaacaagctgtgtggc

SEQ ID NO: 269325 - DNA, 20 bp, synthetic construct
  source 1..20: mol_type = other DNA
ggctccaacaagctgtgtgg

SEQ ID NO: 269326 - DNA, 20 bp, synthetic construct
  source 1..20: mol_type = other DNA
gggctccaacaagctgtgtg

SEQ ID NO: 269327 - DNA, 20 bp, synthetic construct
  source 1..20: mol_type = other DNA
tgggctccaacaagctgtgt

SEQ ID NO: 269328 - DNA, 20 bp, synthetic construct
  source 1..20: mol_type = other DNA
atgggctccaacaagctgtg

SEQ ID NO: 269329 - DNA, 20 bp, synthetic construct
  source 1..20: mol_type = other DNA
gatgggctccaacaagctgt

SEQ ID NO: 269330 - DNA, 20 bp, synthetic construct
  source 1..20: mol_type = other DNA
agatgggctccaacaagctg

SEQ ID NO: 269331 - DNA, 20 bp, synthetic construct
  source 1..20: mol_type = other DNA
gagatgggctccaacaagct

SEQ ID NO: 269332 - DNA, 20 bp, synthetic construct
  source 1..20: mol_type = other DNA
agagatgggctccaacaagc

SEQ ID NO: 269333 - DNA, 20 bp, synthetic construct
  source 1..20: mol_type = other DNA
aagagatgggctccaacaag

SEQ ID NO: 269334 - DNA, 20 bp, synthetic construct
  source 1..20: mol_type = other DNA
caagagatgggctccaacaa

SEQ ID NO: 269335 - DNA, 20 bp, synthetic construct
  source 1..20: mol_type = other DNA
tcaagagatgggctccaaca

SEQ ID NO: 269336 - DNA, 20 bp, synthetic construct
  source 1..20: mol_type = other DNA
gtcaagagatgggctccaac

SEQ ID NO: 269337 - DNA, 20 bp, synthetic construct
  source 1..20: mol_type = other DNA
ggtcaagagatgggctccaa

SEQ ID NO: 269338 - DNA, 20 bp, synthetic construct
  source 1..20: mol_type = other DNA
gggtcaagagatgggctcca

SEQ ID NO: 269339 - DNA, 20 bp, synthetic construct
  source 1..20: mol_type = other DNA
tgggtcaagagatgggctcc

SEQ ID NO: 269340 - DNA, 20 bp, synthetic construct
  source 1..20: mol_type = other DNA
ttgggtcaagagatgggctc

SEQ ID NO: 269341 - DNA, 20 bp, synthetic construct
  source 1..20: mol_type = other DNA
tttgggtcaagagatgggct

SEQ ID NO: 269342 - DNA, 20 bp, synthetic construct
  source 1..20: mol_type = other DNA
ctttgggtcaagagatgggc

SEQ ID NO: 269343 - DNA, 20 bp, synthetic construct
  source 1..20: mol_type = other DNA
tctttgggtcaagagatggg

SEQ ID NO: 269344 - DNA, 20 bp, synthetic construct
  source 1..20: mol_type = other DNA
gtctttgggtcaagagatgg

SEQ ID NO: 269345 - DNA, 20 bp, synthetic construct
  source 1..20: mol_type = other DNA
agtctttgggtcaagagatg

SEQ ID NO: 269346 - DNA, 20 bp, synthetic construct
  source 1..20: mol_type = other DNA
cagtctttgggtcaagagat

SEQ ID NO: 269347 - DNA, 20 bp, synthetic construct
  source 1..20: mol_type = other DNA
acagtctttgggtcaagaga

SEQ ID NO: 269348 - DNA, 20 bp, synthetic construct
  source 1..20: mol_type = other DNA
cacagtctttgggtcaagag

SEQ ID NO: 269349 - DNA, 20 bp, synthetic construct
  source 1..20: mol_type = other DNA
ccacagtctttgggtcaaga

SEQ ID NO: 269350 - DNA, 20 bp, synthetic construct
  source 1..20: mol_type = other DNA
tccacagtctttgggtcaag

SEQ ID NO: 269351 - DNA, 20 bp, synthetic construct
  source 1..20: mol_type = other DNA
ctccacagtctttgggtcaa

SEQ ID NO: 269352 - DNA, 20 bp, synthetic construct
  source 1..20: mol_type = other DNA
gctccacagtctttgggtca

SEQ ID NO: 269353 - DNA, 20 bp, synthetic construct
  source 1..20: mol_type = other DNA
ggctccacagtctttgggtc

SEQ ID NO: 269354 - DNA, 20 bp, synthetic construct
  source 1..20: mol_type = other DNA
cggctccacagtctttgggt

SEQ ID NO: 269355 - DNA, 20 bp, synthetic construct
  source 1..20: mol_type = other DNA
tcggctccacagtctttggg

SEQ ID NO: 269356 - DNA, 20 bp, synthetic construct
  source 1..20: mol_type = other DNA
ctcggctccacagtctttgg

SEQ ID NO: 269357 - DNA, 20 bp, synthetic construct
  source 1..20: mol_type = other DNA
actcggctccacagtctttg

SEQ ID NO: 269358 - DNA, 20 bp, synthetic construct
  source 1..20: mol_type = other DNA
aactcggctccacagtcttt

SEQ ID NO: 269359 - DNA, 20 bp, synthetic construct
  source 1..20: mol_type = other DNA
caactcggctccacagtctt

SEQ ID NO: 269360 - DNA, 20 bp, synthetic construct
  source 1..20: mol_type = other DNA
ccaactcggctccacagtct

SEQ ID NO: 269361 - DNA, 20 bp, synthetic construct
  source 1..20: mol_type = other DNA
gccaactcggctccacagtc

SEQ ID NO: 269362 - DNA, 20 bp, synthetic construct
  source 1..20: mol_type = other DNA
ggccaactcggctccacagt

SEQ ID NO: 269363 - DNA, 20 bp, synthetic construct
  source 1..20: mol_type = other DNA
tggccaactcggctccacag

SEQ ID NO: 269364 - DNA, 20 bp, synthetic construct
  source 1..20: mol_type = other DNA
gtggccaactcggctccaca

SEQ ID NO: 269365 - DNA, 20 bp, synthetic construct
  source 1..20: mol_type = other DNA
ggtggccaactcggctccac

SEQ ID NO: 269366 - DNA, 20 bp, synthetic construct
  source 1..20: mol_type = other DNA
aggtggccaactcggctcca

SEQ ID NO: 269367 - DNA, 20 bp, synthetic construct
  source 1..20: mol_type = other DNA
gaggtggccaactcggctcc

SEQ ID NO: 269368 - DNA, 20 bp, synthetic construct
  source 1..20: mol_type = other DNA
agaggtggccaactcggctc

SEQ ID NO: 269369 - DNA, 20 bp, synthetic construct
  source 1..20: mol_type = other DNA
gagaggtggccaactcggct

SEQ ID NO: 269370 - DNA, 20 bp, synthetic construct
  source 1..20: mol_type = other DNA
agagaggtggccaactcggc

SEQ ID NO: 269371 - DNA, 20 bp, synthetic construct
  source 1..20: mol_type = other DNA
cagagaggtggccaactcgg

SEQ ID NO: 269372 - DNA, 20 bp, synthetic construct
  source 1..20: mol_type = other DNA
ccagagaggtggccaactcg

SEQ ID NO: 269373 - DNA, 20 bp, synthetic construct
  source 1..20: mol_type = other DNA
cccagagaggtggccaactc

SEQ ID NO: 269374 - DNA, 20 bp, synthetic construct
  source 1..20: mol_type = other DNA
tcccagagaggtggccaact

SEQ ID NO: 269375 - DNA, 20 bp, synthetic construct
  source 1..20: mol_type = other DNA
ctcccagagaggtggccaac

SEQ ID NO: 269376 - DNA, 20 bp, synthetic construct
  source 1..20: mol_type = other DNA
gctcccagagaggtggccaa

SEQ ID NO: 269377 - DNA, 20 bp, synthetic construct
  source 1..20: mol_type = other DNA
cgctcccagagaggtggcca

SEQ ID NO: 269378 - DNA, 20 bp, synthetic construct
  source 1..20: mol_type = other DNA
ccgctcccagagaggtggcc

SEQ ID NO: 269379 - DNA, 20 bp, synthetic construct
  source 1..20: mol_type = other DNA
cccgctcccagagaggtggc

SEQ ID NO: 269380 - DNA, 20 bp, synthetic construct
  source 1..20: mol_type = other DNA
acccgctcccagagaggtgg

SEQ ID NO: 269381 - DNA, 20 bp, synthetic construct
  source 1..20: mol_type = other DNA
tacccgctcccagagaggtg

SEQ ID NO: 269382 - DNA, 20 bp, synthetic construct
  source 1..20: mol_type = other DNA
atacccgctcccagagaggt

SEQ ID NO: 269383 - DNA, 20 bp, synthetic construct
  source 1..20: mol_type = other DNA
aatacccgctcccagagagg

SEQ ID NO: 269384 - DNA, 20 bp, synthetic construct
  source 1..20: mol_type = other DNA
caatacccgctcccagagag

SEQ ID NO: 269385 - DNA, 20 bp, synthetic construct
  source 1..20: mol_type = other DNA
ccaatacccgctcccagaga

SEQ ID NO: 269386 - DNA, 20 bp, synthetic construct
  source 1..20: mol_type = other DNA
tccaatacccgctcccagag

SEQ ID NO: 269387 - DNA, 20 bp, synthetic construct
  source 1..20: mol_type = other DNA
atccaatacccgctcccaga

SEQ ID NO: 269388 - DNA, 20 bp, synthetic construct
  source 1..20: mol_type = other DNA
catccaatacccgctcccag

SEQ ID NO: 269389 - DNA, 20 bp, synthetic construct
  source 1..20: mol_type = other DNA
ccatccaatacccgctccca

SEQ ID NO: 269390 - DNA, 20 bp, synthetic construct
  source 1..20: mol_type = other DNA
accatccaatacccgctccc

SEQ ID NO: 269391 - DNA, 20 bp, synthetic construct
  source 1..20: mol_type = other DNA
caccatccaatacccgctcc

SEQ ID NO: 269392 - DNA, 20 bp, synthetic construct
  source 1..20: mol_type = other DNA
ccaccatccaatacccgctc

SEQ ID NO: 269393 - DNA, 20 bp, synthetic construct
  source 1..20: mol_type = other DNA
accaccatccaatacccgct

SEQ ID NO: 269394 - DNA, 20 bp, synthetic construct
  source 1..20: mol_type = other DNA
aaccaccatccaatacccgc

SEQ ID NO: 269395 - DNA, 20 bp, synthetic construct
  source 1..20: mol_type = other DNA
caaccaccatccaatacccg

SEQ ID NO: 269396 - DNA, 20 bp, synthetic construct
  source 1..20: mol_type = other DNA
tcaaccaccatccaataccc

SEQ ID NO: 269397 - DNA, 20 bp, synthetic construct
  source 1..20: mol_type = other DNA
atcaaccaccatccaatacc

SEQ ID NO: 269398 - DNA, 20 bp, synthetic construct
  source 1..20: mol_type = other DNA
catcaaccaccatccaatac

SEQ ID NO: 269399 - DNA, 20 bp, synthetic construct
  source 1..20: mol_type = other DNA
ccatcaaccaccatccaata

SEQ ID NO: 269400 - DNA, 20 bp, synthetic construct
  source 1..20: mol_type = other DNA
accatcaaccaccatccaat

SEQ ID NO: 269401 - DNA, 20 bp, synthetic construct
  source 1..20: mol_type = other DNA
aaccatcaaccaccatccaa

SEQ ID NO: 269402 - DNA, 20 bp, synthetic construct
  source 1..20: mol_type = other DNA
aaaccatcaaccaccatcca

SEQ ID NO: 269403 - DNA, 20 bp, synthetic construct
  source 1..20: mol_type = other DNA
aaaaccatcaaccaccatcc

SEQ ID NO: 269404 - DNA, 20 bp, synthetic construct
  source 1..20: mol_type = other DNA
gaaaaccatcaaccaccatc

SEQ ID NO: 269405 - DNA, 20 bp, synthetic construct
  source 1..20: mol_type = other DNA
ggaaaaccatcaaccaccat

SEQ ID NO: 269406 - DNA, 20 bp, synthetic construct
  source 1..20: mol_type = other DNA
tggaaaaccatcaaccacca

SEQ ID NO: 269407 - DNA, 20 bp, synthetic construct
  source 1..20: mol_type = other DNA
atggaaaaccatcaaccacc

SEQ ID NO: 269408 - DNA, 20 bp, synthetic construct
  source 1..20: mol_type = other DNA
aatggaaaaccatcaaccac

SEQ ID NO: 269409 - DNA, 20 bp, synthetic construct
  source 1..20: mol_type = other DNA
caatggaaaaccatcaacca

SEQ ID NO: 269410 - DNA, 20 bp, synthetic construct
  source 1..20: mol_type = other DNA
gcaatggaaaaccatcaacc

SEQ ID NO: 269411 - DNA, 20 bp, synthetic construct
  source 1..20: mol_type = other DNA
agcaatggaaaaccatcaac

SEQ ID NO: 269412 - DNA, 20 bp, synthetic construct
  source 1..20: mol_type = other DNA
aagcaatggaaaaccatcaa

SEQ ID NO: 269413 - DNA, 20 bp, synthetic construct
  source 1..20: mol_type = other DNA
aaagcaatggaaaaccatca

SEQ ID NO: 269414 - DNA, 20 bp, synthetic construct
  source 1..20: mol_type = other DNA
gaaagcaatggaaaaccatc

SEQ ID NO: 269415 - DNA, 20 bp, synthetic construct
  source 1..20: mol_type = other DNA
ggaaagcaatggaaaaccat

SEQ ID NO: 269416 - DNA, 20 bp, synthetic construct
  source 1..20: mol_type = other DNA
aggaaagcaatggaaaacca

SEQ ID NO: 269417 - DNA, 20 bp, synthetic construct
  source 1..20: mol_type = other DNA
caggaaagcaatggaaaacc

SEQ ID NO: 269418 - DNA, 20 bp, synthetic construct
  source 1..20: mol_type = other DNA
ccaggaaagcaatggaaaac

SEQ ID NO: 269419 - DNA, 20 bp, synthetic construct
  source 1..20: mol_type = other DNA
cccaggaaagcaatggaaaa

SEQ ID NO: 269420 - DNA, 20 bp, synthetic construct
  source 1..20: mol_type = other DNA
tcccaggaaagcaatggaaa

SEQ ID NO: 269421 - DNA, 20 bp, synthetic construct
  source 1..20: mol_type = other DNA
ttcccaggaaagcaatggaa

SEQ ID NO: 269422 - DNA, 20 bp, synthetic construct
  source 1..20: mol_type = other DNA
tttcccaggaaagcaatgga

SEQ ID NO: 269423 - DNA, 20 bp, synthetic construct
  source 1..20: mol_type = other DNA
ctttcccaggaaagcaatgg

SEQ ID NO: 269424 - DNA, 20 bp, synthetic construct
  source 1..20: mol_type = other DNA
cctttcccaggaaagcaatg

SEQ ID NO: 269425 - DNA, 20 bp, synthetic construct
  source 1..20: mol_type = other DNA
ccctttcccaggaaagcaat

SEQ ID NO: 269426 - DNA, 20 bp, synthetic construct
  source 1..20: mol_type = other DNA
cccctttcccaggaaagcaa

SEQ ID NO: 269427 - DNA, 20 bp, synthetic construct
  source 1..20: mol_type = other DNA
acccctttcccaggaaagca

SEQ ID NO: 269428 - DNA, 20 bp, synthetic construct
  source 1..20: mol_type = other DNA
cacccctttcccaggaaagc

SEQ ID NO: 269429 - DNA, 20 bp, synthetic construct
  source 1..20: mol_type = other DNA
acacccctttcccaggaaag

SEQ ID NO: 269430 - DNA, 20 bp, synthetic construct
  source 1..20: mol_type = other DNA
gacacccctttcccaggaaa

SEQ ID NO: 269431 - DNA, 20 bp, synthetic construct
  source 1..20: mol_type = other DNA
agacacccctttcccaggaa

SEQ ID NO: 269432 - DNA, 20 bp, synthetic construct
  source 1..20: mol_type = other DNA
gagacacccctttcccagga

SEQ ID NO: 269433 - DNA, 20 bp, synthetic construct
  source 1..20: mol_type = other DNA
agagacacccctttcccagg

SEQ ID NO: 269434 - DNA, 20 bp, synthetic construct
  source 1..20: mol_type = other DNA
cagagacacccctttcccag

SEQ ID NO: 269435 - DNA, 20 bp, synthetic construct
  source 1..20: mol_type = other DNA
acagagacacccctttccca

SEQ ID NO: 269436 - DNA, 20 bp, synthetic construct
  source 1..20: mol_type = other DNA
gacagagacacccctttccc

SEQ ID NO: 269437 - DNA, 20 bp, synthetic construct
  source 1..20: mol_type = other DNA
ggacagagacacccctttcc

SEQ ID NO: 269438 - DNA, 20 bp, synthetic construct
  source 1..20: mol_type = other DNA
gggacagagacacccctttc

SEQ ID NO: 269439 - DNA, 20 bp, synthetic construct
  source 1..20: mol_type = other DNA
agggacagagacaccccttt

SEQ ID NO: 269440 - DNA, 20 bp, synthetic construct
  source 1..20: mol_type = other DNA
tagggacagagacacccctt

SEQ ID NO: 269441 - DNA, 20 bp, synthetic construct
  source 1..20: mol_type = other DNA
ttagggacagagacacccct

SEQ ID NO: 269442 - DNA, 20 bp, synthetic construct
  source 1..20: mol_type = other DNA
cttagggacagagacacccc

SEQ ID NO: 269443 - DNA, 20 bp, synthetic construct
  source 1..20: mol_type = other DNA
gcttagggacagagacaccc

SEQ ID NO: 269444 - DNA, 20 bp, synthetic construct
  source 1..20: mol_type = other DNA
tgcttagggacagagacacc

SEQ ID NO: 269445 - DNA, 20 bp, synthetic construct
  source 1..20: mol_type = other DNA
ttgcttagggacagagacac

SEQ ID NO: 269446 - DNA, 20 bp, synthetic construct
  source 1..20: mol_type = other DNA
tttgcttagggacagagaca

SEQ ID NO: 269447 - DNA, 20 bp, synthetic construct
  source 1..20: mol_type = other DNA
ttttgcttagggacagagac

SEQ ID NO: 269448 - DNA, 20 bp, synthetic construct
  source 1..20: mol_type = other DNA
tttttgcttagggacagaga

SEQ ID NO: 269449 - DNA, 20 bp, synthetic construct
  source 1..20: mol_type = other DNA
ctttttgcttagggacagag

SEQ ID NO: 269450 - DNA, 20 bp, synthetic construct
  source 1..20: mol_type = other DNA
cctttttgcttagggacaga

SEQ ID NO: 269451 - DNA, 20 bp, synthetic construct
  source 1..20: mol_type = other DNA
gcctttttgcttagggacag

SEQ ID NO: 269452 - DNA, 20 bp, synthetic construct
  source 1..20: mol_type = other DNA
tgcctttttgcttagggaca

SEQ ID NO: 269453 - DNA, 20 bp, synthetic construct
  source 1..20: mol_type = other DNA
ctgcctttttgcttagggac

SEQ ID NO: 269454 - DNA, 20 bp, synthetic construct
  source 1..20: mol_type = other DNA
cctgcctttttgcttaggga

SEQ ID NO: 269455 - DNA, 20 bp, synthetic construct
  source 1..20: mol_type = other DNA
ccctgcctttttgcttaggg

SEQ ID NO: 269456 - DNA, 20 bp, synthetic construct
  source 1..20: mol_type = other DNA
tccctgcctttttgcttagg

SEQ ID NO: 269457 - DNA, 20 bp, synthetic construct
  source 1..20: mol_type = other DNA
ctccctgcctttttgcttag

SEQ ID NO: 269458 - DNA, 20 bp, synthetic construct
  source 1..20: mol_type = other DNA
cctccctgcctttttgctta

SEQ ID NO: 269459 - DNA, 20 bp, synthetic construct
  source 1..20: mol_type = other DNA
tcctccctgcctttttgctt

SEQ ID NO: 269460 - DNA, 20 bp, synthetic construct
  source 1..20: mol_type = other DNA
ttcctccctgcctttttgct

SEQ ID NO: 269461 - DNA, 20 bp, synthetic construct
  source 1..20: mol_type = other DNA
cttcctccctgcctttttgc

SEQ ID NO: 269462 - DNA, 20 bp, synthetic construct
  source 1..20: mol_type = other DNA
tcttcctccctgcctttttg

SEQ ID NO: 269463 - DNA, 20 bp, synthetic construct
  source 1..20: mol_type = other DNA
ctcttcctccctgccttttt

SEQ ID NO: 269464 - DNA, 20 bp, synthetic construct
  source 1..20: mol_type = other DNA
tctcttcctccctgcctttt

SEQ ID NO: 269465 - DNA, 20 bp, synthetic construct
  source 1..20: mol_type = other DNA
atctcttcctccctgccttt

SEQ ID NO: 269466 - DNA, 20 bp, synthetic construct
  source 1..20: mol_type = other DNA
catctcttcctccctgcctt

SEQ ID NO: 269467 - DNA, 20 bp, synthetic construct
  source 1..20: mol_type = other DNA
gcatctcttcctccctgcct

SEQ ID NO: 269468 - DNA, 20 bp, synthetic construct
  source 1..20: mol_type = other DNA
agcatctcttcctccctgcc

SEQ ID NO: 269469 - DNA, 20 bp, synthetic construct
  source 1..20: mol_type = other DNA
aagcatctcttcctccctgc

SEQ ID NO: 269470 - DNA, 20 bp, synthetic construct
  source 1..20: mol_type = other DNA
gaagcatctcttcctccctg

SEQ ID NO: 269471 - DNA, 20 bp, synthetic construct
  source 1..20: mol_type = other DNA
ggaagcatctcttcctccct

SEQ ID NO: 269472 - DNA, 20 bp, synthetic construct
  source 1..20: mol_type = other DNA
gggaagcatctcttcctccc

SEQ ID NO: 269473 - DNA, 20 bp, synthetic construct
  source 1..20: mol_type = other DNA
ggggaagcatctcttcctcc

SEQ ID NO: 269474 - DNA, 20 bp, synthetic construct
  source 1..20: mol_type = other DNA
tggggaagcatctcttcctc

SEQ ID NO: 269475 - DNA, 20 bp, synthetic construct
  source 1..20: mol_type = other DNA
ctggggaagcatctcttcct

SEQ ID NO: 269476 - DNA, 20 bp, synthetic construct
  source 1..20: mol_type = other DNA
cctggggaagcatctcttcc

SEQ ID NO: 269477 - DNA, 20 bp, synthetic construct
  source 1..20: mol_type = other DNA
ccctggggaagcatctcttc

SEQ ID NO: 269478 - DNA, 20 bp, synthetic construct
  source 1..20: mol_type = other DNA
gccctggggaagcatctctt

SEQ ID NO: 269479 - DNA, 20 bp, synthetic construct
  source 1..20: mol_type = other DNA
tgccctggggaagcatctct

SEQ ID NO: 269480 - DNA, 20 bp, synthetic construct
  source 1..20: mol_type = other DNA
ctgccctggggaagcatctc

SEQ ID NO: 269481 - DNA, 20 bp, synthetic construct
  source 1..20: mol_type = other DNA
gctgccctggggaagcatct

SEQ ID NO: 269482 - DNA, 20 bp, synthetic construct
  source 1..20: mol_type = other DNA
ggctgccctggggaagcatc

SEQ ID NO: 269483 - DNA, 20 bp, synthetic construct
  source 1..20: mol_type = other DNA
cggctgccctggggaagcat

SEQ ID NO: 269484 - DNA, 20 bp, synthetic construct
  source 1..20: mol_type = other DNA
acggctgccctggggaagca

SEQ ID NO: 269485 - DNA, 20 bp, synthetic construct
  source 1..20: mol_type = other DNA
gacggctgccctggggaagc

SEQ ID NO: 269486 - DNA, 20 bp, synthetic construct
  source 1..20: mol_type = other DNA
agacggctgccctggggaag

SEQ ID NO: 269487 - DNA, 20 bp, synthetic construct
  source 1..20: mol_type = other DNA
cagacggctgccctggggaa

SEQ ID NO: 269488 - DNA, 20 bp, synthetic construct
  source 1..20: mol_type = other DNA
gcagacggctgccctgggga

SEQ ID NO: 269489 - DNA, 20 bp, synthetic construct
  source 1..20: mol_type = other DNA
agcagacggctgccctgggg

SEQ ID NO: 269490 - DNA, 20 bp, synthetic construct
  source 1..20: mol_type = other DNA
cagcagacggctgccctggg

SEQ ID NO: 269491 - DNA, 20 bp, synthetic construct
  source 1..20: mol_type = other DNA
acagcagacggctgccctgg

SEQ ID NO: 269492 - DNA, 20 bp, synthetic construct
  source 1..20: mol_type = other DNA
tacagcagacggctgccctg

SEQ ID NO: 269493 - DNA, 20 bp, synthetic construct
  source 1..20: mol_type = other DNA
ctacagcagacggctgccct

SEQ ID NO: 269494 - DNA, 20 bp, synthetic construct
  source 1..20: mol_type = other DNA
gctacagcagacggctgccc

SEQ ID NO: 269495 - DNA, 20 bp, synthetic construct
  source 1..20: mol_type = other DNA
agctacagcagacggctgcc

SEQ ID NO: 269496 - DNA, 20 bp, synthetic construct
  source 1..20: mol_type = other DNA
cagctacagcagacggctgc

SEQ ID NO: 269497 - DNA, 20 bp, synthetic construct
  source 1..20: mol_type = other DNA
gcagctacagcagacggctg

SEQ ID NO: 269498 - DNA, 20 bp, synthetic construct
  source 1..20: mol_type = other DNA
cgcagctacagcagacggct

SEQ ID NO: 269499 - DNA, 20 bp, synthetic construct
  source 1..20: mol_type = other DNA
gcgcagctacagcagacggc

SEQ ID NO: 269500 - DNA, 20 bp, synthetic construct
  source 1..20: mol_type = other DNA
agcgcagctacagcagacgg

SEQ ID NO: 269501 - DNA, 20 bp, synthetic construct
  source 1..20: mol_type = other DNA
aagcgcagctacagcagacg

SEQ ID NO: 269502 - DNA, 20 bp, synthetic construct
  source 1..20: mol_type = other DNA
gaagcgcagctacagcagac

SEQ ID NO: 269503 - DNA, 20 bp, synthetic construct
  source 1..20: mol_type = other DNA
ggaagcgcagctacagcaga

SEQ ID NO: 269504 - DNA, 20 bp, synthetic construct
  source 1..20: mol_type = other DNA
tggaagcgcagctacagcag

SEQ ID NO: 269505 - DNA, 20 bp, synthetic construct
  source 1..20: mol_type = other DNA
ttggaagcgcagctacagca

SEQ ID NO: 269506 - DNA, 20 bp, synthetic construct
  source 1..20: mol_type = other DNA
gttggaagcgcagctacagc

SEQ ID NO: 269507 - DNA, 20 bp, synthetic construct
  source 1..20: mol_type = other DNA
ggttggaagcgcagctacag

SEQ ID NO: 269508 - DNA, 20 bp, synthetic construct
  source 1..20: mol_type = other DNA
aggttggaagcgcagctaca

SEQ ID NO: 269509 - DNA, 20 bp, synthetic construct
  source 1..20: mol_type = other DNA
caggttggaagcgcagctac

SEQ ID NO: 269510 - DNA, 20 bp, synthetic construct
  source 1..20: mol_type = other DNA
ccaggttggaagcgcagcta

SEQ ID NO: 269511 - DNA, 20 bp, synthetic construct
  source 1..20: mol_type = other DNA
gccaggttggaagcgcagct

SEQ ID NO: 269512 - DNA, 20 bp, synthetic construct
  source 1..20: mol_type = other DNA
agccaggttggaagcgcagc

SEQ ID NO: 269513 - DNA, 20 bp, synthetic construct
  source 1..20: mol_type = other DNA
aagccaggttggaagcgcag

SEQ ID NO: 269514 - DNA, 20 bp, synthetic construct
  source 1..20: mol_type = other DNA
gaagccaggttggaagcgca

SEQ ID NO: 269515 - DNA, 20 bp, synthetic construct
  source 1..20: mol_type = other DNA
ggaagccaggttggaagcgc

SEQ ID NO: 269516 - DNA, 20 bp, synthetic construct
  source 1..20: mol_type = other DNA
tggaagccaggttggaagcg

SEQ ID NO: 269517 - DNA, 20 bp, synthetic construct
  source 1..20: mol_type = other DNA
gtggaagccaggttggaagc

SEQ ID NO: 269518 - DNA, 20 bp, synthetic construct
  source 1..20: mol_type = other DNA
ggtggaagccaggttggaag

SEQ ID NO: 269519 - DNA, 20 bp, synthetic construct
  source 1..20: mol_type = other DNA
aggtggaagccaggttggaa

SEQ ID NO: 269520 - DNA, 20 bp, synthetic construct
  source 1..20: mol_type = other DNA
caggtggaagccaggttgga

SEQ ID NO: 269521 - DNA, 20 bp, synthetic construct
  source 1..20: mol_type = other DNA
gcaggtggaagccaggttgg

SEQ ID NO: 269522 - DNA, 20 bp, synthetic construct
  source 1..20: mol_type = other DNA
ggcaggtggaagccaggttg

SEQ ID NO: 269523 - DNA, 20 bp, synthetic construct
  source 1..20: mol_type = other DNA
aggcaggtggaagccaggtt

SEQ ID NO: 269524 - DNA, 20 bp, synthetic construct
  source 1..20: mol_type = other DNA
taggcaggtggaagccaggt

SEQ ID NO: 269525 - DNA, 20 bp, synthetic construct
  source 1..20: mol_type = other DNA
ttaggcaggtggaagccagg

SEQ ID NO: 269526 - DNA, 20 bp, synthetic construct
  source 1..20: mol_type = other DNA
gttaggcaggtggaagccag

SEQ ID NO: 269527 - DNA, 20 bp, synthetic construct
  source 1..20: mol_type = other DNA
ggttaggcaggtggaagcca

SEQ ID NO: 269528 - DNA, 20 bp, synthetic construct
  source 1..20: mol_type = other DNA
gggttaggcaggtggaagcc

SEQ ID NO: 269529 - DNA, 20 bp, synthetic construct
  source 1..20: mol_type = other DNA
tgggttaggcaggtggaagc

SEQ ID NO: 269530 - DNA, 20 bp, synthetic construct
  source 1..20: mol_type = other DNA
ctgggttaggcaggtggaag

SEQ ID NO: 269531 - DNA, 20 bp, synthetic construct
  source 1..20: mol_type = other DNA
actgggttaggcaggtggaa

SEQ ID NO: 269532 - DNA, 20 bp, synthetic construct
  source 1..20: mol_type = other DNA
cactgggttaggcaggtgga

SEQ ID NO: 269533 - DNA, 20 bp, synthetic construct
  source 1..20: mol_type = other DNA
ccactgggttaggcaggtgg

SEQ ID NO: 269534 - DNA, 20 bp, synthetic construct
  source 1..20: mol_type = other DNA
accactgggttaggcaggtg

SEQ ID NO: 269535 - DNA, 20 bp, synthetic construct
  source 1..20: mol_type = other DNA
caccactgggttaggcaggt

SEQ ID NO: 269536 - DNA, 20 bp, synthetic construct
  source 1..20: mol_type = other DNA
tcaccactgggttaggcagg

SEQ ID NO: 269537 - DNA, 20 bp, synthetic construct
  source 1..20: mol_type = other DNA
ctcaccactgggttaggcag

SEQ ID NO: 269538 - DNA, 20 bp, synthetic construct
  source 1..20: mol_type = other DNA
gctcaccactgggttaggca

SEQ ID NO: 269539 - DNA, 20 bp, synthetic construct
  source 1..20: mol_type = other DNA
ggctcaccactgggttaggc

SEQ ID NO: 269540 - DNA, 20 bp, synthetic construct
  source 1..20: mol_type = other DNA
aggctcaccactgggttagg

SEQ ID NO: 269541 - DNA, 20 bp, synthetic construct
  source 1..20: mol_type = other DNA
caggctcaccactgggttag

SEQ ID NO: 269542 - DNA, 20 bp, synthetic construct
  source 1..20: mol_type = other DNA
ccaggctcaccactgggtta

SEQ ID NO: 269543 - DNA, 20 bp, synthetic construct
  source 1..20: mol_type = other DNA
cccaggctcaccactgggtt

SEQ ID NO: 269544 - DNA, 20 bp, synthetic construct
  source 1..20: mol_type = other DNA
tcccaggctcaccactgggt

SEQ ID NO: 269545 - DNA, 20 bp, synthetic construct
  source 1..20: mol_type = other DNA
ttcccaggctcaccactggg

SEQ ID NO: 269546 - DNA, 20 bp, synthetic construct
  source 1..20: mol_type = other DNA
attcccaggctcaccactgg

SEQ ID NO: 269547 - DNA, 20 bp, synthetic construct
  source 1..20: mol_type = other DNA
cattcccaggctcaccactg

SEQ ID NO: 269548 - DNA, 20 bp, synthetic construct
  source 1..20: mol_type = other DNA
ccattcccaggctcaccact

SEQ ID NO: 269549 - DNA, 20 bp, synthetic construct
  source 1..20: mol_type = other DNA
tccattcccaggctcaccac

SEQ ID NO: 269550 - DNA, 20 bp, synthetic construct
  source 1..20: mol_type = other DNA
gtccattcccaggctcacca

SEQ ID NO: 269551 - DNA, 20 bp, synthetic construct
  source 1..20: mol_type = other DNA
ggtccattcccaggctcacc

SEQ ID NO: 269552 - DNA, 20 bp, synthetic construct
  source 1..20: mol_type = other DNA
gggtccattcccaggctcac

SEQ ID NO: 269553 - DNA, 20 bp, synthetic construct
  source 1..20: mol_type = other DNA
tgggtccattcccaggctca

SEQ ID NO: 269554 - DNA, 20 bp, synthetic construct
  source 1..20: mol_type = other DNA
gtgggtccattcccaggctc

SEQ ID NO: 269555 - DNA, 20 bp, synthetic construct
  source 1..20: mol_type = other DNA
cgtgggtccattcccaggct

SEQ ID NO: 269556 - DNA, 20 bp, synthetic construct
  source 1..20: mol_type = other DNA
ccgtgggtccattcccaggc

SEQ ID NO: 269557 - DNA, 20 bp, synthetic construct
  source 1..20: mol_type = other DNA
cccgtgggtccattcccagg

SEQ ID NO: 269558 - DNA, 20 bp, synthetic construct
  source 1..20: mol_type = other DNA
tcccgtgggtccattcccag

SEQ ID NO: 269559 - DNA, 20 bp, synthetic construct
  source 1..20: mol_type = other DNA
gtcccgtgggtccattccca

SEQ ID NO: 269560 - DNA, 20 bp, synthetic construct
  source 1..20: mol_type = other DNA
tgtcccgtgggtccattccc

SEQ ID NO: 269561 - DNA, 20 bp, synthetic construct
  source 1..20: mol_type = other DNA
ctgtcccgtgggtccattcc

SEQ ID NO: 269562 - DNA, 20 bp, synthetic construct
  source 1..20: mol_type = other DNA
cctgtcccgtgggtccattc

SEQ ID NO: 269563 - DNA, 20 bp, synthetic construct
  source 1..20: mol_type = other DNA
gcctgtcccgtgggtccatt

SEQ ID NO: 269564 - DNA, 20 bp, synthetic construct
  source 1..20: mol_type = other DNA
tgcctgtcccgtgggtccat

SEQ ID NO: 269565 - DNA, 20 bp, synthetic construct
  source 1..20: mol_type = other DNA
ctgcctgtcccgtgggtcca

SEQ ID NO: 269566 - DNA, 20 bp, synthetic construct
  source 1..20: mol_type = other DNA
gctgcctgtcccgtgggtcc

SEQ ID NO: 269567 - DNA, 20 bp, synthetic construct
  source 1..20: mol_type = other DNA
ggctgcctgtcccgtgggtc

SEQ ID NO: 269568 - DNA, 20 bp, synthetic construct
  source 1..20: mol_type = other DNA
gggctgcctgtcccgtgggt

SEQ ID NO: 269569 - DNA, 20 bp, synthetic construct
  source 1..20: mol_type = other DNA
ggggctgcctgtcccgtggg

SEQ ID NO: 269570 - DNA, 20 bp, synthetic construct
  source 1..20: mol_type = other DNA
gggggctgcctgtcccgtgg

SEQ ID NO: 269571 - DNA, 20 bp, synthetic construct
  source 1..20: mol_type = other DNA
tgggggctgcctgtcccgtg

SEQ ID NO: 269572 - DNA, 20 bp, synthetic construct
  source 1..20: mol_type = other DNA
ctgggggctgcctgtcccgt

SEQ ID NO: 269573 - DNA, 20 bp, synthetic construct
  source 1..20: mol_type = other DNA
cctgggggctgcctgtcccg

SEQ ID NO: 269574 - DNA, 20 bp, synthetic construct
  source 1..20: mol_type = other DNA
ccctgggggctgcctgtccc

SEQ ID NO: 269575 - DNA, 20 bp, synthetic construct
  source 1..20: mol_type = other DNA
gccctgggggctgcctgtcc

SEQ ID NO: 269576 - DNA, 20 bp, synthetic construct
  source 1..20: mol_type = other DNA
ggccctgggggctgcctgtc

SEQ ID NO: 269577 - DNA, 20 bp, synthetic construct
  source 1..20: mol_type = other DNA
aggccctgggggctgcctgt

SEQ ID NO: 269578 - DNA, 20 bp, synthetic construct
  source 1..20: mol_type = other DNA
aaggccctgggggctgcctg

SEQ ID NO: 269579 - DNA, 20 bp, synthetic construct
  source 1..20: mol_type = other DNA
aaaggccctgggggctgcct

SEQ ID NO: 269580 - DNA, 20 bp, synthetic construct
  source 1..20: mol_type = other DNA
aaaaggccctgggggctgcc

SEQ ID NO: 269581 - DNA, 20 bp, synthetic construct
  source 1..20: mol_type = other DNA
gaaaaggccctgggggctgc

SEQ ID NO: 269582 - DNA, 20 bp, synthetic construct
  source 1..20: mol_type = other DNA
agaaaaggccctgggggctg

SEQ ID NO: 269583 - DNA, 20 bp, synthetic construct
  source 1..20: mol_type = other DNA
cagaaaaggccctgggggct

SEQ ID NO: 269584 - DNA, 20 bp, synthetic construct
  source 1..20: mol_type = other DNA
tcagaaaaggccctgggggc

SEQ ID NO: 269585 - DNA, 20 bp, synthetic construct
  source 1..20: mol_type = other DNA
gtcagaaaaggccctggggg

SEQ ID NO: 269586 - DNA, 20 bp, synthetic construct
  source 1..20: mol_type = other DNA
ggtcagaaaaggccctgggg

SEQ ID NO: 269587 - DNA, 20 bp, synthetic construct
  source 1..20: mol_type = other DNA
gggtcagaaaaggccctggg

SEQ ID NO: 269588 - DNA, 20 bp, synthetic construct
  source 1..20: mol_type = other DNA
ggggtcagaaaaggccctgg

SEQ ID NO: 269589 - DNA, 20 bp, synthetic construct
  source 1..20: mol_type = other DNA
tggggtcagaaaaggccctg

SEQ ID NO: 269590 - DNA, 20 bp, synthetic construct
  source 1..20: mol_type = other DNA
gtggggtcagaaaaggccct

SEQ ID NO: 269591 - DNA, 20 bp, synthetic construct
  source 1..20: mol_type = other DNA
ggtggggtcagaaaaggccc

SEQ ID NO: 269592 - DNA, 20 bp, synthetic construct
  source 1..20: mol_type = other DNA
gggtggggtcagaaaaggcc

SEQ ID NO: 269593 - DNA, 20 bp, synthetic construct
  source 1..20: mol_type = other DNA
tgggtggggtcagaaaaggc

SEQ ID NO: 269594 - DNA, 20 bp, synthetic construct
  source 1..20: mol_type = other DNA
gtgggtggggtcagaaaagg

SEQ ID NO: 269595 - DNA, 20 bp, synthetic construct
  source 1..20: mol_type = other DNA
agtgggtggggtcagaaaag

SEQ ID NO: 269596 - DNA, 20 bp, synthetic construct
  source 1..20: mol_type = other DNA
gagtgggtggggtcagaaaa

SEQ ID NO: 269597 - DNA, 20 bp, synthetic construct
  source 1..20: mol_type = other DNA
cgagtgggtggggtcagaaa

SEQ ID NO: 269598 - DNA, 20 bp, synthetic construct
  source 1..20: mol_type = other DNA
tcgagtgggtggggtcagaa

SEQ ID NO: 269599 - DNA, 20 bp, synthetic construct
  source 1..20: mol_type = other DNA
ctcgagtgggtggggtcaga

SEQ ID NO: 269600 - DNA, 20 bp, synthetic construct
  source 1..20: mol_type = other DNA
actcgagtgggtggggtcag

SEQ ID NO: 269601 - DNA, 20 bp, synthetic construct
  source 1..20: mol_type = other DNA
gactcgagtgggtggggtca

SEQ ID NO: 269602 - DNA, 20 bp, synthetic construct
  source 1..20: mol_type = other DNA
ggactcgagtgggtggggtc

SEQ ID NO: 269603 - DNA, 20 bp, synthetic construct
  source 1..20: mol_type = other DNA
aggactcgagtgggtggggt

SEQ ID NO: 269604 - DNA, 20 bp, synthetic construct
  source 1..20: mol_type = other DNA
caggactcgagtgggtgggg

SEQ ID NO: 269605 - DNA, 20 bp, synthetic construct
  source 1..20: mol_type = other DNA
ccaggactcgagtgggtggg

SEQ ID NO: 269606 - DNA, 20 bp, synthetic construct
  source 1..20: mol_type = other DNA
gccaggactcgagtgggtgg

SEQ ID NO: 269607 - DNA, 20 bp, synthetic construct
  source 1..20: mol_type = other DNA
agccaggactcgagtgggtg

SEQ ID NO: 269608 - DNA, 20 bp, synthetic construct
  source 1..20: mol_type = other DNA
aagccaggactcgagtgggt

SEQ ID NO: 269609 - DNA, 20 bp, synthetic construct
  source 1..20: mol_type = other DNA
gaagccaggactcgagtggg

SEQ ID NO: 269610 - DNA, 20 bp, synthetic construct
  source 1..20: mol_type = other DNA
tgaagccaggactcgagtgg

SEQ ID NO: 269611 - DNA, 20 bp, synthetic construct
  source 1..20: mol_type = other DNA
gtgaagccaggactcgagtg

SEQ ID NO: 269612 - DNA, 20 bp, synthetic construct
  source 1..20: mol_type = other DNA
agtgaagccaggactcgagt

SEQ ID NO: 269613 - DNA, 20 bp, synthetic construct
  source 1..20: mol_type = other DNA
gagtgaagccaggactcgag

SEQ ID NO: 269614 - DNA, 20 bp, synthetic construct
  source 1..20: mol_type = other DNA
ggagtgaagccaggactcga

SEQ ID NO: 269615 - DNA, 20 bp, synthetic construct
  source 1..20: mol_type = other DNA
gggagtgaagccaggactcg

SEQ ID NO: 269616 - DNA, 20 bp, synthetic construct
  source 1..20: mol_type = other DNA
agggagtgaagccaggactc

SEQ ID NO: 269617 - DNA, 20 bp, synthetic construct
  source 1..20: mol_type = other DNA
aagggagtgaagccaggact

SEQ ID NO: 269618 - DNA, 20 bp, synthetic construct
  source 1..20: mol_type = other DNA
gaagggagtgaagccaggac

SEQ ID NO: 269619 - DNA, 20 bp, synthetic construct
  source 1..20: mol_type = other DNA
ggaagggagtgaagccagga

SEQ ID NO: 269620 - DNA, 20 bp, synthetic construct
  source 1..20: mol_type = other DNA
aggaagggagtgaagccagg

SEQ ID NO: 269621 - DNA, 20 bp, synthetic construct
  source 1..20: mol_type = other DNA
aaggaagggagtgaagccag

SEQ ID NO: 269622 - DNA, 20 bp, synthetic construct
  source 1..20: mol_type = other DNA
gaaggaagggagtgaagcca

SEQ ID NO: 269623 - DNA, 20 bp, synthetic construct
  source 1..20: mol_type = other DNA
ggaaggaagggagtgaagcc

SEQ ID NO: 269624 - DNA, 20 bp, synthetic construct
  source 1..20: mol_type = other DNA
aggaaggaagggagtgaagc

SEQ ID NO: 269625 - DNA, 20 bp, synthetic construct
  source 1..20: mol_type = other DNA
aaggaaggaagggagtgaag

SEQ ID NO: 269626 - DNA, 20 bp, synthetic construct
  source 1..20: mol_type = other DNA
gaaggaaggaagggagtgaa

SEQ ID NO: 269627 - DNA, 20 bp, synthetic construct
  source 1..20: mol_type = other DNA
ggaaggaaggaagggagtga

SEQ ID NO: 269628 - DNA, 20 bp, synthetic construct
  source 1..20: mol_type = other DNA
gggaaggaaggaagggagtg

SEQ ID NO: 269629 - DNA, 20 bp, synthetic construct
  source 1..20: mol_type = other DNA
tgggaaggaaggaagggagt

SEQ ID NO: 269630 - DNA, 20 bp, synthetic construct
  source 1..20: mol_type = other DNA
ctgggaaggaaggaagggag

SEQ ID NO: 269631 - DNA, 20 bp, synthetic construct
  source 1..20: mol_type = other DNA
cctgggaaggaaggaaggga

SEQ ID NO: 269632 - DNA, 20 bp, synthetic construct
  source 1..20: mol_type = other DNA
acctgggaaggaaggaaggg

SEQ ID NO: 269633 - DNA, 20 bp, synthetic construct
  source 1..20: mol_type = other DNA
cacctgggaaggaaggaagg

SEQ ID NO: 269634 - DNA, 20 bp, synthetic construct
  source 1..20: mol_type = other DNA
tcacctgggaaggaaggaag

SEQ ID NO: 269635 - DNA, 20 bp, synthetic construct
  source 1..20: mol_type = other DNA
ttcacctgggaaggaaggaa

SEQ ID NO: 269636 - DNA, 20 bp, synthetic construct
  source 1..20: mol_type = other DNA
gttcacctgggaaggaagga

SEQ ID NO: 269637 - DNA, 20 bp, synthetic construct
  source 1..20: mol_type = other DNA
ggttcacctgggaaggaagg

SEQ ID NO: 269638 - DNA, 20 bp, synthetic construct
  source 1..20: mol_type = other DNA
aggttcacctgggaaggaag

SEQ ID NO: 269639 - DNA, 20 bp, synthetic construct
  source 1..20: mol_type = other DNA
gaggttcacctgggaaggaa

SEQ ID NO: 269640 - DNA, 20 bp, synthetic construct
  source 1..20: mol_type = other DNA
ggaggttcacctgggaagga

SEQ ID NO: 269641 - DNA, 20 bp, synthetic construct
  source 1..20: mol_type = other DNA
tggaggttcacctgggaagg

SEQ ID NO: 269642 - DNA, 20 bp, synthetic construct
  source 1..20: mol_type = other DNA
ttggaggttcacctgggaag

SEQ ID NO: 269643 - DNA, 20 bp, synthetic construct
  source 1..20: mol_type = other DNA
tttggaggttcacctgggaa

SEQ ID NO: 269644 - DNA, 20 bp, synthetic construct
  source 1..20: mol_type = other DNA
ttttggaggttcacctggga

SEQ ID NO: 269645 - DNA, 20 bp, synthetic construct
  source 1..20: mol_type = other DNA
attttggaggttcacctggg

SEQ ID NO: 269646 - DNA, 20 bp, synthetic construct
  source 1..20: mol_type = other DNA
gattttggaggttcacctgg

SEQ ID NO: 269647 - DNA, 20 bp, synthetic construct
  source 1..20: mol_type = other DNA
tgattttggaggttcacctg

SEQ ID NO: 269648 - DNA, 20 bp, synthetic construct
  source 1..20: mol_type = other DNA
ctgattttggaggttcacct

SEQ ID NO: 269649 - DNA, 20 bp, synthetic construct
  source 1..20: mol_type = other DNA
cctgattttggaggttcacc

SEQ ID NO: 269650 - DNA, 20 bp, synthetic construct
  source 1..20: mol_type = other DNA
ccctgattttggaggttcac

SEQ ID NO: 269651 - DNA, 20 bp, synthetic construct
  source 1..20: mol_type = other DNA
cccctgattttggaggttca

SEQ ID NO: 269652 - DNA, 20 bp, synthetic construct
  source 1..20: mol_type = other DNA
tcccctgattttggaggttc

SEQ ID NO: 269653 - DNA, 20 bp, synthetic construct
  source 1..20: mol_type = other DNA
atcccctgattttggaggtt

SEQ ID NO: 269654 - DNA, 20 bp, synthetic construct
  source 1..20: mol_type = other DNA
gatcccctgattttggaggt

SEQ ID NO: 269655 - DNA, 20 bp, synthetic construct
  source 1..20: mol_type = other DNA
cgatcccctgattttggagg

SEQ ID NO: 269656 - DNA, 20 bp, synthetic construct
  source 1..20: mol_type = other DNA
gcgatcccctgattttggag

SEQ ID NO: 269657 - DNA, 20 bp, synthetic construct
  source 1..20: mol_type = other DNA
tgcgatcccctgattttgga

SEQ ID NO: 269658 - DNA, 20 bp, synthetic construct
  source 1..20: mol_type = other DNA
ctgcgatcccctgattttgg

SEQ ID NO: 269659 - DNA, 20 bp, synthetic construct
  source 1..20: mol_type = other DNA
gctgcgatcccctgattttg

SEQ ID NO: 269660 - DNA, 20 bp, synthetic construct
  source 1..20: mol_type = other DNA
cgctgcgatcccctgatttt

SEQ ID NO: 269661 - DNA, 20 bp, synthetic construct
  source 1..20: mol_type = other DNA
ccgctgcgatcccctgattt

SEQ ID NO: 269662 - DNA, 20 bp, synthetic construct
  source 1..20: mol_type = other DNA
gccgctgcgatcccctgatt

SEQ ID NO: 269663 - DNA, 20 bp, synthetic construct
  source 1..20: mol_type = other DNA
agccgctgcgatcccctgat

SEQ ID NO: 269664 - DNA, 20 bp, synthetic construct
  source 1..20: mol_type = other DNA
tagccgctgcgatcccctga

SEQ ID NO: 269665 - DNA, 20 bp, synthetic construct
  source 1..20: mol_type = other DNA
gtagccgctgcgatcccctg

SEQ ID NO: 269666 - DNA, 20 bp, synthetic construct
  source 1..20: mol_type = other DNA
tgtagccgctgcgatcccct

SEQ ID NO: 269667 - DNA, 20 bp, synthetic construct
  source 1..20: mol_type = other DNA
ctgtagccgctgcgatcccc

SEQ ID NO: 269668 - DNA, 20 bp, synthetic construct
  source 1..20: mol_type = other DNA
gctgtagccgctgcgatccc

SEQ ID NO: 269669 - DNA, 20 bp, synthetic construct
  source 1..20: mol_type = other DNA
tgctgtagccgctgcgatcc

SEQ ID NO: 269670 - DNA, 20 bp, synthetic construct
  source 1..20: mol_type = other DNA
ctgctgtagccgctgcgatc

SEQ ID NO: 269671 - DNA, 20 bp, synthetic construct
  source 1..20: mol_type = other DNA
gctgctgtagccgctgcgat

SEQ ID NO: 269672 - DNA, 20 bp, synthetic construct
  source 1..20: mol_type = other DNA
ggctgctgtagccgctgcga

SEQ ID NO: 269673 - DNA, 20 bp, synthetic construct
  source 1..20: mol_type = other DNA
gggctgctgtagccgctgcg

SEQ ID NO: 269674 - DNA, 20 bp, synthetic construct
  source 1..20: mol_type = other DNA
ggggctgctgtagccgctgc

SEQ ID NO: 269675 - DNA, 20 bp, synthetic construct
  source 1..20: mol_type = other DNA
cggggctgctgtagccgctg

SEQ ID NO: 269676 - DNA, 20 bp, synthetic construct
  source 1..20: mol_type = other DNA
ccggggctgctgtagccgct

SEQ ID NO: 269677 - DNA, 20 bp, synthetic construct
  source 1..20: mol_type = other DNA
gccggggctgctgtagccgc

SEQ ID NO: 269678 - DNA, 20 bp, synthetic construct
  source 1..20: mol_type = other DNA
agccggggctgctgtagccg

SEQ ID NO: 269679 - DNA, 20 bp, synthetic construct
  source 1..20: mol_type = other DNA
gagccggggctgctgtagcc

SEQ ID NO: 269680 - DNA, 20 bp, synthetic construct
  source 1..20: mol_type = other DNA
ggagccggggctgctgtagc

SEQ ID NO: 269681 - DNA, 20 bp, synthetic construct
  source 1..20: mol_type = other DNA
gggagccggggctgctgtag

SEQ ID NO: 269682 - DNA, 20 bp, synthetic construct
  source 1..20: mol_type = other DNA
ggggagccggggctgctgta

SEQ ID NO: 269683 - DNA, 20 bp, synthetic construct
  source 1..20: mol_type = other DNA
tggggagccggggctgctgt

SEQ ID NO: 269684 - DNA, 20 bp, synthetic construct
  source 1..20: mol_type = other DNA
ctggggagccggggctgctg

SEQ ID NO: 269685 - DNA, 20 bp, synthetic construct
  source 1..20: mol_type = other DNA
cctggggagccggggctgct

SEQ ID NO: 269686 - DNA, 20 bp, synthetic construct
  source 1..20: mol_type = other DNA
gcctggggagccggggctgc

SEQ ID NO: 269687 - DNA, 20 bp, synthetic construct
  source 1..20: mol_type = other DNA
tgcctggggagccggggctg

SEQ ID NO: 269688 - DNA, 20 bp, synthetic construct
  source 1..20: mol_type = other DNA
gtgcctggggagccggggct

SEQ ID NO: 269689 - DNA, 20 bp, synthetic construct
  source 1..20: mol_type = other DNA
agtgcctggggagccggggc

SEQ ID NO: 269690 - DNA, 20 bp, synthetic construct
  source 1..20: mol_type = other DNA
gagtgcctggggagccgggg

SEQ ID NO: 269691 - DNA, 20 bp, synthetic construct
  source 1..20: mol_type = other DNA
ggagtgcctggggagccggg

SEQ ID NO: 269692 - DNA, 20 bp, synthetic construct
  source 1..20: mol_type = other DNA
gggagtgcctggggagccgg

SEQ ID NO: 269693 - DNA, 20 bp, synthetic construct
  source 1..20: mol_type = other DNA
cgggagtgcctggggagccg

SEQ ID NO: 269694 - DNA, 20 bp, synthetic construct
  source 1..20: mol_type = other DNA
ccgggagtgcctggggagcc

SEQ ID NO: 269695 - DNA, 20 bp, synthetic construct
  source 1..20: mol_type = other DNA
gccgggagtgcctggggagc

SEQ ID NO: 269696 - DNA, 20 bp, synthetic construct
  source 1..20: mol_type = other DNA
tgccgggagtgcctggggag

SEQ ID NO: 269697 - DNA, 20 bp, synthetic construct
  source 1..20: mol_type = other DNA
ctgccgggagtgcctgggga

SEQ ID NO: 269698 - DNA, 20 bp, synthetic construct
  source 1..20: mol_type = other DNA
gctgccgggagtgcctgggg

SEQ ID NO: 269699 - DNA, 20 bp, synthetic construct
  source 1..20: mol_type = other DNA
ggctgccgggagtgcctggg

SEQ ID NO: 269700 - DNA, 20 bp, synthetic construct
  source 1..20: mol_type = other DNA
cggctgccgggagtgcctgg

SEQ ID NO: 269701 - DNA, 20 bp, synthetic construct
  source 1..20: mol_type = other DNA
gcggctgccgggagtgcctg

SEQ ID NO: 269702 - DNA, 20 bp, synthetic construct
  source 1..20: mol_type = other DNA
agcggctgccgggagtgcct

SEQ ID NO: 269703 - DNA, 20 bp, synthetic construct
  source 1..20: mol_type = other DNA
gagcggctgccgggagtgcc

SEQ ID NO: 269704 - DNA, 20 bp, synthetic construct
  source 1..20: mol_type = other DNA
ggagcggctgccgggagtgc

SEQ ID NO: 269705 - DNA, 20 bp, synthetic construct
  source 1..20: mol_type = other DNA
gggagcggctgccgggagtg

SEQ ID NO: 269706 - DNA, 20 bp, synthetic construct
  source 1..20: mol_type = other DNA
cgggagcggctgccgggagt

SEQ ID NO: 269707 - DNA, 20 bp, synthetic construct
  source 1..20: mol_type = other DNA
gcgggagcggctgccgggag

SEQ ID NO: 269708 - DNA, 20 bp, synthetic construct
  source 1..20: mol_type = other DNA
tgcgggagcggctgccggga

SEQ ID NO: 269709 - DNA, 20 bp, synthetic construct
  source 1..20: mol_type = other DNA
gtgcgggagcggctgccggg

SEQ ID NO: 269710 - DNA, 20 bp, synthetic construct
  source 1..20: mol_type = other DNA
ggtgcgggagcggctgccgg

SEQ ID NO: 269711 - DNA, 20 bp, synthetic construct
  source 1..20: mol_type = other DNA
gggtgcgggagcggctgccg

SEQ ID NO: 269712 - DNA, 20 bp, synthetic construct
  source 1..20: mol_type = other DNA
ggggtgcgggagcggctgcc

SEQ ID NO: 269713 - DNA, 20 bp, synthetic construct
  source 1..20: mol_type = other DNA
cggggtgcgggagcggctgc

SEQ ID NO: 269714 - DNA, 20 bp, synthetic construct
  source 1..20: mol_type = other DNA
acggggtgcgggagcggctg

SEQ ID NO: 269715 - DNA, 20 bp, synthetic construct
  source 1..20: mol_type = other DNA
gacggggtgcgggagcggct

SEQ ID NO: 269716 - DNA, 20 bp, synthetic construct
  source 1..20: mol_type = other DNA
ggacggggtgcgggagcggc

SEQ ID NO: 269717 - DNA, 20 bp, synthetic construct
  source 1..20: mol_type = other DNA
gggacggggtgcgggagcgg

SEQ ID NO: 269718 - DNA, 20 bp, synthetic construct
  source 1..20: mol_type = other DNA
agggacggggtgcgggagcg

SEQ ID NO: 269719 - DNA, 20 bp, synthetic construct
  source 1..20: mol_type = other DNA
aagggacggggtgcgggagc

SEQ ID NO: 269720 - DNA, 20 bp, synthetic construct
  source 1..20: mol_type = other DNA
gaagggacggggtgcgggag

SEQ ID NO: 269721 - DNA, 20 bp, synthetic construct
  source 1..20: mol_type = other DNA
ggaagggacggggtgcggga

SEQ ID NO: 269722 - DNA, 20 bp, synthetic construct
  source 1..20: mol_type = other DNA
tggaagggacggggtgcggg

SEQ ID NO: 269723 - DNA, 20 bp, synthetic construct
  source 1..20: mol_type = other DNA
ttggaagggacggggtgcgg

SEQ ID NO: 269724 - DNA, 20 bp, synthetic construct
  source 1..20: mol_type = other DNA
gttggaagggacggggtgcg

SEQ ID NO: 269725 - DNA, 20 bp, synthetic construct
  source 1..20: mol_type = other DNA
ggttggaagggacggggtgc

SEQ ID NO: 269726 - DNA, 20 bp, synthetic construct
  source 1..20: mol_type = other DNA
gggttggaagggacggggtg

SEQ ID NO: 269727 - DNA, 20 bp, synthetic construct
  source 1..20: mol_type = other DNA
ggggttggaagggacggggt

SEQ ID NO: 269728 - DNA, 20 bp, synthetic construct
  source 1..20: mol_type = other DNA
tggggttggaagggacgggg

SEQ ID NO: 269729 - DNA, 20 bp, synthetic construct
  source 1..20: mol_type = other DNA
gtggggttggaagggacggg

SEQ ID NO: 269730 - DNA, 20 bp, synthetic construct
  source 1..20: mol_type = other DNA
ggtggggttggaagggacgg

SEQ ID NO: 269731 - DNA, 20 bp, synthetic construct
  source 1..20: mol_type = other DNA
gggtggggttggaagggacg

SEQ ID NO: 269732 - DNA, 20 bp, synthetic construct
  source 1..20: mol_type = other DNA
tgggtggggttggaagggac

SEQ ID NO: 269733 - DNA, 20 bp, synthetic construct
  source 1..20: mol_type = other DNA
gtgggtggggttggaaggga

SEQ ID NO: 269734 - DNA, 20 bp, synthetic construct
  source 1..20: mol_type = other DNA
ggtgggtggggttggaaggg

SEQ ID NO: 269735 - DNA, 20 bp, synthetic construct
  source 1..20: mol_type = other DNA
gggtgggtggggttggaagg

SEQ ID NO: 269736 - DNA, 20 bp, synthetic construct
  source 1..20: mol_type = other DNA
cgggtgggtggggttggaag

SEQ ID NO: 269737 - DNA, 20 bp, synthetic construct
  source 1..20: mol_type = other DNA
ccgggtgggtggggttggaa

SEQ ID NO: 269738 - DNA, 20 bp, synthetic construct
  source 1..20: mol_type = other DNA
cccgggtgggtggggttgga

SEQ ID NO: 269739 - DNA, 20 bp, synthetic construct
  source 1..20: mol_type = other DNA
tcccgggtgggtggggttgg

SEQ ID NO: 269740 - DNA, 20 bp, synthetic construct
  source 1..20: mol_type = other DNA
ctcccgggtgggtggggttg

SEQ ID NO: 269741 - DNA, 20 bp, synthetic construct
  source 1..20: mol_type = other DNA
gctcccgggtgggtggggtt

SEQ ID NO: 269742 - DNA, 20 bp, synthetic construct
  source 1..20: mol_type = other DNA
ggctcccgggtgggtggggt

SEQ ID NO: 269743 - DNA, 20 bp, synthetic construct
  source 1..20: mol_type = other DNA
gggctcccgggtgggtgggg

SEQ ID NO: 269744 - DNA, 20 bp, synthetic construct
  source 1..20: mol_type = other DNA
tgggctcccgggtgggtggg

SEQ ID NO: 269745 - DNA, 20 bp, synthetic construct
  source 1..20: mol_type = other DNA
ttgggctcccgggtgggtgg

SEQ ID NO: 269746 - DNA, 20 bp, synthetic construct
  source 1..20: mol_type = other DNA
cttgggctcccgggtgggtg

SEQ ID NO: 269747 - DNA, 20 bp, synthetic construct
  source 1..20: mol_type = other DNA
tcttgggctcccgggtgggt

SEQ ID NO: 269748 - DNA, 20 bp, synthetic construct
  source 1..20: mol_type = other DNA
ttcttgggctcccgggtggg

SEQ ID NO: 269749 - DNA, 20 bp, synthetic construct
  source 1..20: mol_type = other DNA
cttcttgggctcccgggtgg

SEQ ID NO: 269750 - DNA, 20 bp, synthetic construct
  source 1..20: mol_type = other DNA
ccttcttgggctcccgggtg

SEQ ID NO: 269751 - DNA, 20 bp, synthetic construct
  source 1..20: mol_type = other DNA
accttcttgggctcccgggt

SEQ ID NO: 269752 - DNA, 20 bp, synthetic construct
  source 1..20: mol_type = other DNA
caccttcttgggctcccggg

SEQ ID NO: 269753 - DNA, 20 bp, synthetic construct
  source 1..20: mol_type = other DNA
ccaccttcttgggctcccgg

SEQ ID NO: 269754 - DNA, 20 bp, synthetic construct
  source 1..20: mol_type = other DNA
gccaccttcttgggctcccg

SEQ ID NO: 269755 - DNA, 20 bp, synthetic construct
  source 1..20: mol_type = other DNA
tgccaccttcttgggctccc

SEQ ID NO: 269756 - DNA, 20 bp, synthetic construct
  source 1..20: mol_type = other DNA
ctgccaccttcttgggctcc

SEQ ID NO: 269757 - DNA, 20 bp, synthetic construct
  source 1..20: mol_type = other DNA
actgccaccttcttgggctc

SEQ ID NO: 269758 - DNA, 20 bp, synthetic construct
  source 1..20: mol_type = other DNA
cactgccaccttcttgggct

SEQ ID NO: 269759 - DNA, 20 bp, synthetic construct
  source 1..20: mol_type = other DNA
ccactgccaccttcttgggc

SEQ ID NO: 269760 - DNA, 20 bp, synthetic construct
  source 1..20: mol_type = other DNA
accactgccaccttcttggg

SEQ ID NO: 269761 - DNA, 20 bp, synthetic construct
  source 1..20: mol_type = other DNA
gaccactgccaccttcttgg

SEQ ID NO: 269762 - DNA, 20 bp, synthetic construct
  source 1..20: mol_type = other DNA
ggaccactgccaccttcttg

SEQ ID NO: 269763 - DNA, 20 bp, synthetic construct
  source 1..20: mol_type = other DNA
cggaccactgccaccttctt

SEQ ID NO: 269764 - DNA, 20 bp, synthetic construct
  source 1..20: mol_type = other DNA
acggaccactgccaccttct

SEQ ID NO: 269765 - DNA, 20 bp, synthetic construct
  source 1..20: mol_type = other DNA
tacggaccactgccaccttc

SEQ ID NO: 269766 - DNA, 20 bp, synthetic construct
  source 1..20: mol_type = other DNA
gtacggaccactgccacctt

SEQ ID NO: 269767 - DNA, 20 bp, synthetic construct
  source 1..20: mol_type = other DNA
agtacggaccactgccacct

SEQ ID NO: 269768 - DNA, 20 bp, synthetic construct
  source 1..20: mol_type = other DNA
gagtacggaccactgccacc

SEQ ID NO: 269769 - DNA, 20 bp, synthetic construct
  source 1..20: mol_type = other DNA
ggagtacggaccactgccac

SEQ ID NO: 269770 - DNA, 20 bp, synthetic construct
  source 1..20: mol_type = other DNA
tggagtacggaccactgcca

SEQ ID NO: 269771 - DNA, 20 bp, synthetic construct
  source 1..20: mol_type = other DNA
gtggagtacggaccactgcc

SEQ ID NO: 269772 - DNA, 20 bp, synthetic construct
  source 1..20: mol_type = other DNA
ggtggagtacggaccactgc

SEQ ID NO: 269773 - DNA, 20 bp, synthetic construct
  source 1..20: mol_type = other DNA
gggtggagtacggaccactg

SEQ ID NO: 269774 - DNA, 20 bp, synthetic construct
  source 1..20: mol_type = other DNA
tgggtggagtacggaccact

SEQ ID NO: 269775 - DNA, 20 bp, synthetic construct
  source 1..20: mol_type = other DNA
ttgggtggagtacggaccac

SEQ ID NO: 269776 - DNA, 20 bp, synthetic construct
  source 1..20: mol_type = other DNA
cttgggtggagtacggacca

SEQ ID NO: 269777 - DNA, 20 bp, synthetic construct
  source 1..20: mol_type = other DNA
acttgggtggagtacggacc

SEQ ID NO: 269778 - DNA, 20 bp, synthetic construct
  source 1..20: mol_type = other DNA
gacttgggtggagtacggac

SEQ ID NO: 269779 - DNA, 20 bp, synthetic construct
  source 1..20: mol_type = other DNA
cgacttgggtggagtacgga

SEQ ID NO: 269780 - DNA, 20 bp, synthetic construct
  source 1..20: mol_type = other DNA
gcgacttgggtggagtacgg

SEQ ID NO: 269781 - DNA, 20 bp, synthetic construct
  source 1..20: mol_type = other DNA
ggcgacttgggtggagtacg

SEQ ID NO: 269782 - DNA, 20 bp, synthetic construct
  source 1..20: mol_type = other DNA
cggcgacttgggtggagtac

SEQ ID NO: 269783 - DNA, 20 bp, synthetic construct
  source 1..20: mol_type = other DNA
acggcgacttgggtggagta

SEQ ID NO: 269784 - DNA, 20 bp, synthetic construct
  source 1..20: mol_type = other DNA
gacggcgacttgggtggagt

SEQ ID NO: 269785 - DNA, 20 bp, synthetic construct
  source 1..20: mol_type = other DNA
agacggcgacttgggtggag

SEQ ID NO: 269786 - DNA, 20 bp, synthetic construct
  source 1..20: mol_type = other DNA
aagacggcgacttgggtgga

SEQ ID NO: 269787 - DNA, 20 bp, synthetic construct
  source 1..20: mol_type = other DNA
gaagacggcgacttgggtgg

SEQ ID NO: 269788 - DNA, 20 bp, synthetic construct
  source 1..20: mol_type = other DNA
ggaagacggcgacttgggtg

SEQ ID NO: 269789 - DNA, 20 bp, synthetic construct
  source 1..20: mol_type = other DNA
cggaagacggcgacttgggt

SEQ ID NO: 269790 - DNA, 20 bp, synthetic construct
  source 1..20: mol_type = other DNA
gcggaagacggcgacttggg

SEQ ID NO: 269791 - DNA, 20 bp, synthetic construct
  source 1..20: mol_type = other DNA
ggcggaagacggcgacttgg

SEQ ID NO: 269792 - DNA, 20 bp, synthetic construct
  source 1..20: mol_type = other DNA
tggcggaagacggcgacttg

SEQ ID NO: 269793 - DNA, 20 bp, synthetic construct
  source 1..20: mol_type = other DNA
ttggcggaagacggcgactt

SEQ ID NO: 269794 - DNA, 20 bp, synthetic construct
  source 1..20: mol_type = other DNA
cttggcggaagacggcgact

SEQ ID NO: 269795 - DNA, 20 bp, synthetic construct
  source 1..20: mol_type = other DNA
tcttggcggaagacggcgac

SEQ ID NO: 269796 - DNA, 20 bp, synthetic construct
  source 1..20: mol_type = other DNA
ctcttggcggaagacggcga

SEQ ID NO: 269797 - DNA, 20 bp, synthetic construct
  source 1..20: mol_type = other DNA
gctcttggcggaagacggcg

SEQ ID NO: 269798 - DNA, 20 bp, synthetic construct
  source 1..20: mol_type = other DNA
ggctcttggcggaagacggc

SEQ ID NO: 269799 - DNA, 20 bp, synthetic construct
  source 1..20: mol_type = other DNA
cggctcttggcggaagacgg

SEQ ID NO: 269800 - DNA, 20 bp, synthetic construct
  source 1..20: mol_type = other DNA
gcggctcttggcggaagacg

SEQ ID NO: 269801 - DNA, 20 bp, synthetic construct
  source 1..20: mol_type = other DNA
ggcggctcttggcggaagac

SEQ ID NO: 269802 - DNA, 20 bp, synthetic construct
  source 1..20: mol_type = other DNA
aggcggctcttggcggaaga

SEQ ID NO: 269803 - DNA, 20 bp, synthetic construct
  source 1..20: mol_type = other DNA
caggcggctcttggcggaag

SEQ ID NO: 269804 - DNA, 20 bp, synthetic construct
  source 1..20: mol_type = other DNA
gcaggcggctcttggcggaa

SEQ ID NO: 269805 - DNA, 20 bp, synthetic construct
  source 1..20: mol_type = other DNA
tgcaggcggctcttggcgga

SEQ ID NO: 269806 - DNA, 20 bp, synthetic construct
  source 1..20: mol_type = other DNA
ctgcaggcggctcttggcgg

SEQ ID NO: 269807 - DNA, 20 bp, synthetic construct
  source 1..20: mol_type = other DNA
tctgcaggcggctcttggcg

SEQ ID NO: 269808 - DNA, 20 bp, synthetic construct
  source 1..20: mol_type = other DNA
gtctgcaggcggctcttggc

SEQ ID NO: 269809 - DNA, 20 bp, synthetic construct
  source 1..20: mol_type = other DNA
tgtctgcaggcggctcttgg

SEQ ID NO: 269810 - DNA, 20 bp, synthetic construct
  source 1..20: mol_type = other DNA
ctgtctgcaggcggctcttg

SEQ ID NO: 269811 - DNA, 20 bp, synthetic construct
  source 1..20: mol_type = other DNA
gctgtctgcaggcggctctt

SEQ ID NO: 269812 - DNA, 20 bp, synthetic construct
  source 1..20: mol_type = other DNA
ggctgtctgcaggcggctct

SEQ ID NO: 269813 - DNA, 20 bp, synthetic construct
  source 1..20: mol_type = other DNA
gggctgtctgcaggcggctc

SEQ ID NO: 269814 - DNA, 20 bp, synthetic construct
  source 1..20: mol_type = other DNA
ggggctgtctgcaggcggct

SEQ ID NO: 269815 - DNA, 20 bp, synthetic construct
  source 1..20: mol_type = other DNA
gggggctgtctgcaggcggc

SEQ ID NO: 269816 - DNA, 20 bp, synthetic construct
  source 1..20: mol_type = other DNA
cgggggctgtctgcaggcgg

SEQ ID NO: 269817 - DNA, 20 bp, synthetic construct
  source 1..20: mol_type = other DNA
acgggggctgtctgcaggcg

SEQ ID NO: 269818 - DNA, 20 bp, synthetic construct
  source 1..20: mol_type = other DNA
cacgggggctgtctgcaggc

SEQ ID NO: 269819 - DNA, 20 bp, synthetic construct
  source 1..20: mol_type = other DNA
gcacgggggctgtctgcagg

SEQ ID NO: 269820 - DNA, 20 bp, synthetic construct
  source 1..20: mol_type = other DNA
ggcacgggggctgtctgcag

SEQ ID NO: 269821 - DNA, 20 bp, synthetic construct
  source 1..20: mol_type = other DNA
gggcacgggggctgtctgca

SEQ ID NO: 269822 - DNA, 20 bp, synthetic construct
  source 1..20: mol_type = other DNA
tgggcacgggggctgtctgc

SEQ ID NO: 269823 - DNA, 20 bp, synthetic construct
  source 1..20: mol_type = other DNA
atgggcacgggggctgtctg

SEQ ID NO: 269824 - DNA, 20 bp, synthetic construct
  source 1..20: mol_type = other DNA
catgggcacgggggctgtct

SEQ ID NO: 269825 - DNA, 20 bp, synthetic construct
  source 1..20: mol_type = other DNA
gcatgggcacgggggctgtc

SEQ ID NO: 269826 - DNA, 20 bp, synthetic construct
  source 1..20: mol_type = other DNA
ggcatgggcacgggggctgt

SEQ ID NO: 269827 - DNA, 20 bp, synthetic construct
  source 1..20: mol_type = other DNA
tggcatgggcacgggggctg

SEQ ID NO: 269828 - DNA, 20 bp, synthetic construct
  source 1..20: mol_type = other DNA
ctggcatgggcacgggggct

SEQ ID NO: 269829 - DNA, 20 bp, synthetic construct
  source 1..20: mol_type = other DNA
tctggcatgggcacgggggc

SEQ ID NO: 269830 - DNA, 20 bp, synthetic construct
  source 1..20: mol_type = other DNA
gtctggcatgggcacggggg

SEQ ID NO: 269831 - DNA, 20 bp, synthetic construct
  source 1..20: mol_type = other DNA
ggtctggcatgggcacgggg

SEQ ID NO: 269832 - DNA, 20 bp, synthetic construct
  source 1..20: mol_type = other DNA
aggtctggcatgggcacggg

SEQ ID NO: 269833 - DNA, 20 bp, synthetic construct
  source 1..20: mol_type = other DNA
caggtctggcatgggcacgg

SEQ ID NO: 269834 - DNA, 20 bp, synthetic construct
  source 1..20: mol_type = other DNA
tcaggtctggcatgggcacg

SEQ ID NO: 269835 - DNA, 20 bp, synthetic construct
  source 1..20: mol_type = other DNA
ttcaggtctggcatgggcac

SEQ ID NO: 269836 - DNA, 20 bp, synthetic construct
  source 1..20: mol_type = other DNA
cttcaggtctggcatgggca

SEQ ID NO: 269837 - DNA, 20 bp, synthetic construct
  source 1..20: mol_type = other DNA
tcttcaggtctggcatgggc

SEQ ID NO: 269838 - DNA, 20 bp, synthetic construct
  source 1..20: mol_type = other DNA
ttcttcaggtctggcatggg

SEQ ID NO: 269839 - DNA, 20 bp, synthetic construct
  source 1..20: mol_type = other DNA
attcttcaggtctggcatgg

SEQ ID NO: 269840 - DNA, 20 bp, synthetic construct
  source 1..20: mol_type = other DNA
cattcttcaggtctggcatg

SEQ ID NO: 269841 - DNA, 20 bp, synthetic construct
  source 1..20: mol_type = other DNA
acattcttcaggtctggcat

SEQ ID NO: 269842 - DNA, 20 bp, synthetic construct
  source 1..20: mol_type = other DNA
gacattcttcaggtctggca

SEQ ID NO: 269843 - DNA, 20 bp, synthetic construct
  source 1..20: mol_type = other DNA
tgacattcttcaggtctggc

SEQ ID NO: 269844 - DNA, 20 bp, synthetic construct
  source 1..20: mol_type = other DNA
ttgacattcttcaggtctgg

SEQ ID NO: 269845 - DNA, 20 bp, synthetic construct
  source 1..20: mol_type = other DNA
cttgacattcttcaggtctg

SEQ ID NO: 269846 - DNA, 20 bp, synthetic construct
  source 1..20: mol_type = other DNA
acttgacattcttcaggtct

SEQ ID NO: 269847 - DNA, 20 bp, synthetic construct
  source 1..20: mol_type = other DNA
gacttgacattcttcaggtc

SEQ ID NO: 269848 - DNA, 20 bp, synthetic construct
  source 1..20: mol_type = other DNA
ggacttgacattcttcaggt

SEQ ID NO: 269849 - DNA, 20 bp, synthetic construct
  source 1..20: mol_type = other DNA
tggacttgacattcttcagg

SEQ ID NO: 269850 - DNA, 20 bp, synthetic construct
  source 1..20: mol_type = other DNA
ttggacttgacattcttcag

SEQ ID NO: 269851 - DNA, 20 bp, synthetic construct
  source 1..20: mol_type = other DNA
cttggacttgacattcttca

SEQ ID NO: 269852 - DNA, 20 bp, synthetic construct
  source 1..20: mol_type = other DNA
tcttggacttgacattcttc

SEQ ID NO: 269853 - DNA, 20 bp, synthetic construct
  source 1..20: mol_type = other DNA
atcttggacttgacattctt

SEQ ID NO: 269854 - DNA, 20 bp, synthetic construct
  source 1..20: mol_type = other DNA
gatcttggacttgacattct

SEQ ID NO: 269855 - DNA, 20 bp, synthetic construct
  source 1..20: mol_type = other DNA
cgatcttggacttgacattc

SEQ ID NO: 269856 - DNA, 20 bp, synthetic construct
  source 1..20: mol_type = other DNA
ccgatcttggacttgacatt

SEQ ID NO: 269857 - DNA, 20 bp, synthetic construct
  source 1..20: mol_type = other DNA
gccgatcttggacttgacat

SEQ ID NO: 269858 - DNA, 20 bp, synthetic construct
  source 1..20: mol_type = other DNA
agccgatcttggacttgaca

SEQ ID NO: 269859 - DNA, 20 bp, synthetic construct
  source 1..20: mol_type = other DNA
gagccgatcttggacttgac

SEQ ID NO: 269860 - DNA, 20 bp, synthetic construct
  source 1..20: mol_type = other DNA
ggagccgatcttggacttga

SEQ ID NO: 269861 - DNA, 20 bp, synthetic construct
  source 1..20: mol_type = other DNA
tggagccgatcttggacttg

SEQ ID NO: 269862 - DNA, 20 bp, synthetic construct
  source 1..20: mol_type = other DNA
gtggagccgatcttggactt

SEQ ID NO: 269863 - DNA, 20 bp, synthetic construct
  source 1..20: mol_type = other DNA
agtggagccgatcttggact

SEQ ID NO: 269864 - DNA, 20 bp, synthetic construct
  source 1..20: mol_type = other DNA
cagtggagccgatcttggac

SEQ ID NO: 269865 - DNA, 20 bp, synthetic construct
  source 1..20: mol_type = other DNA
tcagtggagccgatcttgga

SEQ ID NO: 269866 - DNA, 20 bp, synthetic construct
  source 1..20: mol_type = other DNA
ctcagtggagccgatcttgg

SEQ ID NO: 269867 - DNA, 20 bp, synthetic construct
  source 1..20: mol_type = other DNA
tctcagtggagccgatcttg

SEQ ID NO: 269868 - DNA, 20 bp, synthetic construct
  source 1..20: mol_type = other DNA
ttctcagtggagccgatctt

SEQ ID NO: 269869 - DNA, 20 bp, synthetic construct
  source 1..20: mol_type = other DNA
gttctcagtggagccgatct

SEQ ID NO: 269870 - DNA, 20 bp, synthetic construct
  source 1..20: mol_type = other DNA
ggttctcagtggagccgatc

SEQ ID NO: 269871 - DNA, 20 bp, synthetic construct
  source 1..20: mol_type = other DNA
aggttctcagtggagccgat

SEQ ID NO: 269872 - DNA, 20 bp, synthetic construct
  source 1..20: mol_type = other DNA
caggttctcagtggagccga

SEQ ID NO: 269873 - DNA, 20 bp, synthetic construct
  source 1..20: mol_type = other DNA
tcaggttctcagtggagccg

SEQ ID NO: 269874 - DNA, 20 bp, synthetic construct
  source 1..20: mol_type = other DNA
ttcaggttctcagtggagcc

SEQ ID NO: 269875 - DNA, 20 bp, synthetic construct
  source 1..20: mol_type = other DNA
cttcaggttctcagtggagc

SEQ ID NO: 269876 - DNA, 20 bp, synthetic construct
  source 1..20: mol_type = other DNA
gcttcaggttctcagtggag

SEQ ID NO: 269877 - DNA, 20 bp, synthetic construct
  source 1..20: mol_type = other DNA
tgcttcaggttctcagtgga

SEQ ID NO: 269878 - DNA, 20 bp, synthetic construct
  source 1..20: mol_type = other DNA
gtgcttcaggttctcagtgg

SEQ ID NO: 269879 - DNA, 20 bp, synthetic construct
  source 1..20: mol_type = other DNA
ggtgcttcaggttctcagtg

SEQ ID NO: 269880 - DNA, 20 bp, synthetic construct
  source 1..20: mol_type = other DNA
tggtgcttcaggttctcagt

SEQ ID NO: 269881 - DNA, 20 bp, synthetic construct
  source 1..20: mol_type = other DNA
ctggtgcttcaggttctcag

SEQ ID NO: 269882 - DNA, 20 bp, synthetic construct
  source 1..20: mol_type = other DNA
gctggtgcttcaggttctca

SEQ ID NO: 269883 - DNA, 20 bp, synthetic construct
  source 1..20: mol_type = other DNA
ggctggtgcttcaggttctc

SEQ ID NO: 269884 - DNA, 20 bp, synthetic construct
  source 1..20: mol_type = other DNA
cggctggtgcttcaggttct

SEQ ID NO: 269885 - DNA, 20 bp, synthetic construct
  source 1..20: mol_type = other DNA
ccggctggtgcttcaggttc

SEQ ID NO: 269886 - DNA, 20 bp, synthetic construct
  source 1..20: mol_type = other DNA
cccggctggtgcttcaggtt

SEQ ID NO: 269887 - DNA, 20 bp, synthetic construct
  source 1..20: mol_type = other DNA
tcccggctggtgcttcaggt

SEQ ID NO: 269888 - DNA, 20 bp, synthetic construct
  source 1..20: mol_type = other DNA
ctcccggctggtgcttcagg

SEQ ID NO: 269889 - DNA, 20 bp, synthetic construct
  source 1..20: mol_type = other DNA
cctcccggctggtgcttcag

SEQ ID NO: 269890 - DNA, 20 bp, synthetic construct
  source 1..20: mol_type = other DNA
gcctcccggctggtgcttca

SEQ ID NO: 269891 - DNA, 20 bp, synthetic construct
  source 1..20: mol_type = other DNA
cgcctcccggctggtgcttc

SEQ ID NO: 269892 - DNA, 20 bp, synthetic construct
  source 1..20: mol_type = other DNA
ccgcctcccggctggtgctt

SEQ ID NO: 269893 - DNA, 20 bp, synthetic construct
  source 1..20: mol_type = other DNA
cccgcctcccggctggtgct

SEQ ID NO: 269894 - DNA, 20 bp, synthetic construct
  source 1..20: mol_type = other DNA
tcccgcctcccggctggtgc

SEQ ID NO: 269895 - DNA, 20 bp, synthetic construct
  source 1..20: mol_type = other DNA
ttcccgcctcccggctggtg

SEQ ID NO: 269896 - DNA, 20 bp, synthetic construct
  source 1..20: mol_type = other DNA
cttcccgcctcccggctggt

SEQ ID NO: 269897 - DNA, 20 bp, synthetic construct
  source 1..20: mol_type = other DNA
ccttcccgcctcccggctgg

SEQ ID NO: 269898 - DNA, 20 bp, synthetic construct
  source 1..20: mol_type = other DNA
accttcccgcctcccggctg

SEQ ID NO: 269899 - DNA, 20 bp, synthetic construct
  source 1..20: mol_type = other DNA
caccttcccgcctcccggct

SEQ ID NO: 269900 - DNA, 20 bp, synthetic construct
  source 1..20: mol_type = other DNA
tcaccttcccgcctcccggc

SEQ ID NO: 269901 - DNA, 20 bp, synthetic construct
  source 1..20: mol_type = other DNA
ctcaccttcccgcctcccgg

SEQ ID NO: 269902 - DNA, 20 bp, synthetic construct
  source 1..20: mol_type = other DNA
tctcaccttcccgcctcccg

SEQ ID NO: 269903 - DNA, 20 bp, synthetic construct
  source 1..20: mol_type = other DNA
ctctcaccttcccgcctccc

SEQ ID NO: 269904 - DNA, 20 bp, synthetic construct
  source 1..20: mol_type = other DNA
actctcaccttcccgcctcc

SEQ ID NO: 269905 - DNA, 20 bp, synthetic construct
  source 1..20: mol_type = other DNA
cactctcaccttcccgcctc

SEQ ID NO: 269906 - DNA, 20 bp, synthetic construct
  source 1..20: mol_type = other DNA
ccactctcaccttcccgcct

SEQ ID NO: 269907 - DNA, 20 bp, synthetic construct
  source 1..20: mol_type = other DNA
gccactctcaccttcccgcc

SEQ ID NO: 269908 - DNA, 20 bp, synthetic construct
  source 1..20: mol_type = other DNA
agccactctcaccttcccgc

SEQ ID NO: 269909 - DNA, 20 bp, synthetic construct
  source 1..20: mol_type = other DNA
cagccactctcaccttcccg

SEQ ID NO: 269910 - DNA, 20 bp, synthetic construct
  source 1..20: mol_type = other DNA
ccagccactctcaccttccc

SEQ ID NO: 269911 - DNA, 20 bp, synthetic construct
  source 1..20: mol_type = other DNA
gccagccactctcaccttcc

SEQ ID NO: 269912 - DNA, 20 bp, synthetic construct
  source 1..20: mol_type = other DNA
agccagccactctcaccttc

SEQ ID NO: 269913 - DNA, 20 bp, synthetic construct
  source 1..20: mol_type = other DNA
cagccagccactctcacctt

SEQ ID NO: 269914 - DNA, 20 bp, synthetic construct
  source 1..20: mol_type = other DNA
gcagccagccactctcacct

SEQ ID NO: 269915 - DNA, 20 bp, synthetic construct
  source 1..20: mol_type = other DNA
cgcagccagccactctcacc

SEQ ID NO: 269916 - DNA, 20 bp, synthetic construct
  source 1..20: mol_type = other DNA
gcgcagccagccactctcac

SEQ ID NO: 269917 - DNA, 20 bp, synthetic construct
  source 1..20: mol_type = other DNA
cgcgcagccagccactctca

SEQ ID NO: 269918 - DNA, 20 bp, synthetic construct
  source 1..20: mol_type = other DNA
acgcgcagccagccactctc

SEQ ID NO: 269919 - DNA, 20 bp, synthetic construct
  source 1..20: mol_type = other DNA
cacgcgcagccagccactct

SEQ ID NO: 269920 - DNA, 20 bp, synthetic construct
  source 1..20: mol_type = other DNA
ccacgcgcagccagccactc

SEQ ID NO: 269921 - DNA, 20 bp, synthetic construct
  source 1..20: mol_type = other DNA
tccacgcgcagccagccact

SEQ ID NO: 269922 - DNA, 20 bp, synthetic construct
  source 1..20: mol_type = other DNA
ctccacgcgcagccagccac

SEQ ID NO: 269923 - DNA, 20 bp, synthetic construct
  source 1..20: mol_type = other DNA
cctccacgcgcagccagcca

SEQ ID NO: 269924 - DNA, 20 bp, synthetic construct
  source 1..20: mol_type = other DNA
acctccacgcgcagccagcc

SEQ ID NO: 269925 - DNA, 20 bp, synthetic construct
  source 1..20: mol_type = other DNA
cacctccacgcgcagccagc

SEQ ID NO: 269926 - DNA, 20 bp, synthetic construct
  source 1..20: mol_type = other DNA
acacctccacgcgcagccag

SEQ ID NO: 269927 - DNA, 20 bp, synthetic construct
  source 1..20: mol_type = other DNA
cacacctccacgcgcagcca

SEQ ID NO: 269928 - DNA, 20 bp, synthetic construct
  source 1..20: mol_type = other DNA
ccacacctccacgcgcagcc

SEQ ID NO: 269929 - DNA, 20 bp, synthetic construct
  source 1..20: mol_type = other DNA
cccacacctccacgcgcagc

SEQ ID NO: 269930 - DNA, 20 bp, synthetic construct
  source 1..20: mol_type = other DNA
ccccacacctccacgcgcag

SEQ ID NO: 269931 - DNA, 20 bp, synthetic construct
  source 1..20: mol_type = other DNA
cccccacacctccacgcgca

SEQ ID NO: 269932 - DNA, 20 bp, synthetic construct
  source 1..20: mol_type = other DNA
ccccccacacctccacgcgc

SEQ ID NO: 269933 - DNA, 20 bp, synthetic construct
  source 1..20: mol_type = other DNA
gccccccacacctccacgcg

SEQ ID NO: 269934 - DNA, 20 bp, synthetic construct
  source 1..20: mol_type = other DNA
agccccccacacctccacgc

SEQ ID NO: 269935 - DNA, 20 bp, synthetic construct
  source 1..20: mol_type = other DNA
cagccccccacacctccacg

SEQ ID NO: 269936 - DNA, 20 bp, synthetic construct
  source 1..20: mol_type = other DNA
gcagccccccacacctccac

SEQ ID NO: 269937 - DNA, 20 bp, synthetic construct
  source 1..20: mol_type = other DNA
cgcagccccccacacctcca

SEQ ID NO: 269938 - DNA, 20 bp, synthetic construct
  source 1..20: mol_type = other DNA
gcgcagccccccacacctcc

SEQ ID NO: 269939 - DNA, 20 bp, synthetic construct
  source 1..20: mol_type = other DNA
ggcgcagccccccacacctc

SEQ ID NO: 269940 - DNA, 20 bp, synthetic construct
  source 1..20: mol_type = other DNA
aggcgcagccccccacacct

SEQ ID NO: 269941 - DNA, 20 bp, synthetic construct
  source 1..20: mol_type = other DNA
caggcgcagccccccacacc

SEQ ID NO: 269942 - DNA, 20 bp, synthetic construct
  source 1..20: mol_type = other DNA
ccaggcgcagccccccacac

SEQ ID NO: 269943 - DNA, 20 bp, synthetic construct
  source 1..20: mol_type = other DNA
tccaggcgcagccccccaca

SEQ ID NO: 269944 - DNA, 20 bp, synthetic construct
  source 1..20: mol_type = other DNA
ctccaggcgcagccccccac

SEQ ID NO: 269945 - DNA, 20 bp, synthetic construct
  source 1..20: mol_type = other DNA
cctccaggcgcagcccccca

SEQ ID NO: 269946 - DNA, 20 bp, synthetic construct
  source 1..20: mol_type = other DNA
ccctccaggcgcagcccccc

SEQ ID NO: 269947 - DNA, 20 bp, synthetic construct
  source 1..20: mol_type = other DNA
cccctccaggcgcagccccc

SEQ ID NO: 269948 - DNA, 20 bp, synthetic construct
  source 1..20: mol_type = other DNA
acccctccaggcgcagcccc

SEQ ID NO: 269949 - DNA, 20 bp, synthetic construct
  source 1..20: mol_type = other DNA
tacccctccaggcgcagccc

SEQ ID NO: 269950 - DNA, 20 bp, synthetic construct
  source 1..20: mol_type = other DNA
ctacccctccaggcgcagcc

SEQ ID NO: 269951 - DNA, 20 bp, synthetic construct
  source 1..20: mol_type = other DNA
cctacccctccaggcgcagc

SEQ ID NO: 269952 - DNA, 20 bp, synthetic construct
  source 1..20: mol_type = other DNA
ccctacccctccaggcgcag

SEQ ID NO: 269953 - DNA, 20 bp, synthetic construct
  source 1..20: mol_type = other DNA
gccctacccctccaggcgca

SEQ ID NO: 269954 - DNA, 20 bp, synthetic construct
  source 1..20: mol_type = other DNA
agccctacccctccaggcgc

SEQ ID NO: 269955 - DNA, 20 bp, synthetic construct
  source 1..20: mol_type = other DNA
cagccctacccctccaggcg

SEQ ID NO: 269956 - DNA, 20 bp, synthetic construct
  source 1..20: mol_type = other DNA
acagccctacccctccaggc

SEQ ID NO: 269957 - DNA, 20 bp, synthetic construct
  source 1..20: mol_type = other DNA
cacagccctacccctccagg

SEQ ID NO: 269958 - DNA, 20 bp, synthetic construct
  source 1..20: mol_type = other DNA
gcacagccctacccctccag

SEQ ID NO: 269959 - DNA, 20 bp, synthetic construct
  source 1..20: mol_type = other DNA
ggcacagccctacccctcca

SEQ ID NO: 269960 - DNA, 20 bp, synthetic construct
  source 1..20: mol_type = other DNA
aggcacagccctacccctcc

SEQ ID NO: 269961 - DNA, 20 bp, synthetic construct
  source 1..20: mol_type = other DNA
caggcacagccctacccctc

SEQ ID NO: 269962 - DNA, 20 bp, synthetic construct
  source 1..20: mol_type = other DNA
ccaggcacagccctacccct

SEQ ID NO: 269963 - DNA, 20 bp, synthetic construct
  source 1..20: mol_type = other DNA
tccaggcacagccctacccc

SEQ ID NO: 269964 - DNA, 20 bp, synthetic construct
  source 1..20: mol_type = other DNA
ttccaggcacagccctaccc

SEQ ID NO: 269965 - DNA, 20 bp, synthetic construct
  source 1..20: mol_type = other DNA
cttccaggcacagccctacc

SEQ ID NO: 269966 - DNA, 20 bp, synthetic construct
  source 1..20: mol_type = other DNA
ccttccaggcacagccctac

SEQ ID NO: 269967 - DNA, 20 bp, synthetic construct
  source 1..20: mol_type = other DNA
cccttccaggcacagcccta

SEQ ID NO: 269968 - DNA, 20 bp, synthetic construct
  source 1..20: mol_type = other DNA
acccttccaggcacagccct

SEQ ID NO: 269969 - DNA, 20 bp, synthetic construct
  source 1..20: mol_type = other DNA
tacccttccaggcacagccc

SEQ ID NO: 269970 - DNA, 20 bp, synthetic construct
  source 1..20: mol_type = other DNA
ctacccttccaggcacagcc

SEQ ID NO: 269971 - DNA, 20 bp, synthetic construct
  source 1..20: mol_type = other DNA
cctacccttccaggcacagc

SEQ ID NO: 269972 - DNA, 20 bp, synthetic construct
  source 1..20: mol_type = other DNA
ccctacccttccaggcacag

SEQ ID NO: 269973 - DNA, 20 bp, synthetic construct
  source 1..20: mol_type = other DNA
gccctacccttccaggcaca

SEQ ID NO: 269974 - DNA, 20 bp, synthetic construct
  source 1..20: mol_type = other DNA
agccctacccttccaggcac

SEQ ID NO: 269975 - DNA, 20 bp, synthetic construct
  source 1..20: mol_type = other DNA
cagccctacccttccaggca

SEQ ID NO: 269976 - DNA, 20 bp, synthetic construct
  source 1..20: mol_type = other DNA
gcagccctacccttccaggc

SEQ ID NO: 269977 - DNA, 20 bp, synthetic construct
  source 1..20: mol_type = other DNA
cgcagccctacccttccagg

SEQ ID NO: 269978 - DNA, 20 bp, synthetic construct
  source 1..20: mol_type = other DNA
gcgcagccctacccttccag

SEQ ID NO: 269979 - DNA, 20 bp, synthetic construct
  source 1..20: mol_type = other DNA
ggcgcagccctacccttcca

SEQ ID NO: 269980 - DNA, 20 bp, synthetic construct
  source 1..20: mol_type = other DNA
aggcgcagccctacccttcc

SEQ ID NO: 269981 - DNA, 20 bp, synthetic construct
  source 1..20: mol_type = other DNA
caggcgcagccctacccttc

SEQ ID NO: 269982 - DNA, 20 bp, synthetic construct
  source 1..20: mol_type = other DNA
ccaggcgcagccctaccctt

SEQ ID NO: 269983 - DNA, 20 bp, synthetic construct
  source 1..20: mol_type = other DNA
tccaggcgcagccctaccct

SEQ ID NO: 269984 - DNA, 20 bp, synthetic construct
  source 1..20: mol_type = other DNA
ctccaggcgcagccctaccc

SEQ ID NO: 269985 - DNA, 20 bp, synthetic construct
  source 1..20: mol_type = other DNA
cctccaggcgcagccctacc

SEQ ID NO: 269986 - DNA, 20 bp, synthetic construct
  source 1..20: mol_type = other DNA
acctccaggcgcagccctac

SEQ ID NO: 269987 - DNA, 20 bp, synthetic construct
  source 1..20: mol_type = other DNA
cacctccaggcgcagcccta

SEQ ID NO: 269988 - DNA, 20 bp, synthetic construct
  source 1..20: mol_type = other DNA
gcacctccaggcgcagccct

SEQ ID NO: 269989 - DNA, 20 bp, synthetic construct
  source 1..20: mol_type = other DNA
cgcacctccaggcgcagccc

SEQ ID NO: 269990 - DNA, 20 bp, synthetic construct
  source 1..20: mol_type = other DNA
gcgcacctccaggcgcagcc

SEQ ID NO: 269991 - DNA, 20 bp, synthetic construct
  source 1..20: mol_type = other DNA
cgcgcacctccaggcgcagc

SEQ ID NO: 269992 - DNA, 20 bp, synthetic construct
  source 1..20: mol_type = other DNA
ccgcgcacctccaggcgcag

SEQ ID NO: 269993 - DNA, 20 bp, synthetic construct
  source 1..20: mol_type = other DNA
accgcgcacctccaggcgca

SEQ ID NO: 269994 - DNA, 20 bp, synthetic construct
  source 1..20: mol_type = other DNA
aaccgcgcacctccaggcgc

SEQ ID NO: 269995 - DNA, 20 bp, synthetic construct
  source 1..20: mol_type = other DNA
caaccgcgcacctccaggcg

SEQ ID NO: 269996 - DNA, 20 bp, synthetic construct
  source 1..20: mol_type = other DNA
tcaaccgcgcacctccaggc

SEQ ID NO: 269997 - DNA, 20 bp, synthetic construct
  source 1..20: mol_type = other DNA
ctcaaccgcgcacctccagg

SEQ ID NO: 269998 - DNA, 20 bp, synthetic construct
  source 1..20: mol_type = other DNA
gctcaaccgcgcacctccag

SEQ ID NO: 269999 - DNA, 20 bp, synthetic construct
  source 1..20: mol_type = other DNA
cgctcaaccgcgcacctcca

SEQ ID NO: 270000 - DNA, 20 bp, synthetic construct
  source 1..20: mol_type = other DNA
acgctcaaccgcgcacctcc

SEQ ID NO: 270001 - DNA, 20 bp, synthetic construct
  source 1..20: mol_type = other DNA
cacgctcaaccgcgcacctc

SEQ ID NO: 270002 - DNA, 20 bp, synthetic construct
  source 1..20: mol_type = other DNA
ccacgctcaaccgcgcacct

SEQ ID NO: 270003 - DNA, 20 bp, synthetic construct
  source 1..20: mol_type = other DNA
tccacgctcaaccgcgcacc

SEQ ID NO: 270004 - DNA, 20 bp, synthetic construct
  source 1..20: mol_type = other DNA
ctccacgctcaaccgcgcac

SEQ ID NO: 270005 - DNA, 20 bp, synthetic construct
  source 1..20: mol_type = other DNA
actccacgctcaaccgcgca

SEQ ID NO: 270006 - DNA, 20 bp, synthetic construct
  source 1..20: mol_type = other DNA
gactccacgctcaaccgcgc

SEQ ID NO: 270007 - DNA, 20 bp, synthetic construct
  source 1..20: mol_type = other DNA
cgactccacgctcaaccgcg

SEQ ID NO: 270008 - DNA, 20 bp, synthetic construct
  source 1..20: mol_type = other DNA
acgactccacgctcaaccgc

SEQ ID NO: 270009 - DNA, 20 bp, synthetic construct
  source 1..20: mol_type = other DNA
cacgactccacgctcaaccg

SEQ ID NO: 270010 - DNA, 20 bp, synthetic construct
  source 1..20: mol_type = other DNA
ccacgactccacgctcaacc

SEQ ID NO: 270011 - DNA, 20 bp, synthetic construct
  source 1..20: mol_type = other DNA
cccacgactccacgctcaac

SEQ ID NO: 270012 - DNA, 20 bp, synthetic construct
  source 1..20: mol_type = other DNA
tcccacgactccacgctcaa

SEQ ID NO: 270013 - DNA, 20 bp, synthetic construct
  source 1..20: mol_type = other DNA
gtcccacgactccacgctca

SEQ ID NO: 270014 - DNA, 20 bp, synthetic construct
  source 1..20: mol_type = other DNA
agtcccacgactccacgctc

SEQ ID NO: 270015 - DNA, 20 bp, synthetic construct
  source 1..20: mol_type = other DNA
cagtcccacgactccacgct

SEQ ID NO: 270016 - DNA, 20 bp, synthetic construct
  source 1..20: mol_type = other DNA
acagtcccacgactccacgc

SEQ ID NO: 270017 - DNA, 20 bp, synthetic construct
  source 1..20: mol_type = other DNA
cacagtcccacgactccacg

SEQ ID NO: 270018 - DNA, 20 bp, synthetic construct
  source 1..20: mol_type = other DNA
gcacagtcccacgactccac

SEQ ID NO: 270019 - DNA, 20 bp, synthetic construct
  source 1..20: mol_type = other DNA
tgcacagtcccacgactcca

SEQ ID NO: 270020 - DNA, 20 bp, synthetic construct
  source 1..20: mol_type = other DNA
atgcacagtcccacgactcc

SEQ ID NO: 270021 - DNA, 20 bp, synthetic construct
  source 1..20: mol_type = other DNA
catgcacagtcccacgactc

SEQ ID NO: 270022 - DNA, 20 bp, synthetic construct
  source 1..20: mol_type = other DNA
ccatgcacagtcccacgact

SEQ ID NO: 270023 - DNA, 20 bp, synthetic construct
  source 1..20: mol_type = other DNA
tccatgcacagtcccacgac

SEQ ID NO: 270024 - DNA, 20 bp, synthetic construct
  source 1..20: mol_type = other DNA
ctccatgcacagtcccacga

SEQ ID NO: 270025 - DNA, 20 bp, synthetic construct
  source 1..20: mol_type = other DNA
cctccatgcacagtcccacg

SEQ ID NO: 270026 - DNA, 20 bp, synthetic construct
  source 1..20: mol_type = other DNA
acctccatgcacagtcccac

SEQ ID NO: 270027 - DNA, 20 bp, synthetic construct
  source 1..20: mol_type = other DNA
cacctccatgcacagtccca

SEQ ID NO: 270028 - DNA, 20 bp, synthetic construct
  source 1..20: mol_type = other DNA
acacctccatgcacagtccc

SEQ ID NO: 270029 - DNA, 20 bp, synthetic construct
  source 1..20: mol_type = other DNA
cacacctccatgcacagtcc

SEQ ID NO: 270030 - DNA, 20 bp, synthetic construct
  source 1..20: mol_type = other DNA
ccacacctccatgcacagtc

SEQ ID NO: 270031 - DNA, 20 bp, synthetic construct
  source 1..20: mol_type = other DNA
cccacacctccatgcacagt

SEQ ID NO: 270032 - DNA, 20 bp, synthetic construct
  source 1..20: mol_type = other DNA
ccccacacctccatgcacag

SEQ ID NO: 270033 - DNA, 20 bp, synthetic construct
  source 1..20: mol_type = other DNA
gccccacacctccatgcaca

SEQ ID NO: 270034 - DNA, 20 bp, synthetic construct
  source 1..20: mol_type = other DNA
agccccacacctccatgcac

SEQ ID NO: 270035 - DNA, 20 bp, synthetic construct
  source 1..20: mol_type = other DNA
gagccccacacctccatgca

SEQ ID NO: 270036 - DNA, 20 bp, synthetic construct
  source 1..20: mol_type = other DNA
ggagccccacacctccatgc

SEQ ID NO: 270037 - DNA, 20 bp, synthetic construct
  source 1..20: mol_type = other DNA
gggagccccacacctccatg

SEQ ID NO: 270038 - DNA, 20 bp, synthetic construct
  source 1..20: mol_type = other DNA
ggggagccccacacctccat

SEQ ID NO: 270039 - DNA, 20 bp, synthetic construct
  source 1..20: mol_type = other DNA
cggggagccccacacctcca

SEQ ID NO: 270040 - DNA, 20 bp, synthetic construct
  source 1..20: mol_type = other DNA
gcggggagccccacacctcc

SEQ ID NO: 270041 - DNA, 20 bp, synthetic construct
  source 1..20: mol_type = other DNA
tgcggggagccccacacctc

SEQ ID NO: 270042 - DNA, 20 bp, synthetic construct
  source 1..20: mol_type = other DNA
gtgcggggagccccacacct

SEQ ID NO: 270043 - DNA, 20 bp, synthetic construct
  source 1..20: mol_type = other DNA
ggtgcggggagccccacacc

SEQ ID NO: 270044 - DNA, 20 bp, synthetic construct
  source 1..20: mol_type = other DNA
aggtgcggggagccccacac

SEQ ID NO: 270045 - DNA, 20 bp, synthetic construct
  source 1..20: mol_type = other DNA
caggtgcggggagccccaca

SEQ ID NO: 270046 - DNA, 20 bp, synthetic construct
  source 1..20: mol_type = other DNA
tcaggtgcggggagccccac

SEQ ID NO: 270047 - DNA, 20 bp, synthetic construct
  source 1..20: mol_type = other DNA
ctcaggtgcggggagcccca

SEQ ID NO: 270048 - DNA, 20 bp, synthetic construct
  source 1..20: mol_type = other DNA
gctcaggtgcggggagcccc

SEQ ID NO: 270049 - DNA, 20 bp, synthetic construct
  source 1..20: mol_type = other DNA
tgctcaggtgcggggagccc

SEQ ID NO: 270050 - DNA, 20 bp, synthetic construct
  source 1..20: mol_type = other DNA
gtgctcaggtgcggggagcc

SEQ ID NO: 270051 - DNA, 20 bp, synthetic construct
  source 1..20: mol_type = other DNA
ggtgctcaggtgcggggagc

SEQ ID NO: 270052 - DNA, 20 bp, synthetic construct
  source 1..20: mol_type = other DNA
gggtgctcaggtgcggggag

SEQ ID NO: 270053 - DNA, 20 bp, synthetic construct
  source 1..20: mol_type = other DNA
ggggtgctcaggtgcgggga

SEQ ID NO: 270054 - DNA, 20 bp, synthetic construct
  source 1..20: mol_type = other DNA
gggggtgctcaggtgcgggg

SEQ ID NO: 270055 - DNA, 20 bp, synthetic construct
  source 1..20: mol_type = other DNA
cgggggtgctcaggtgcggg

SEQ ID NO: 270056 - DNA, 20 bp, synthetic construct
  source 1..20: mol_type = other DNA
gcgggggtgctcaggtgcgg

SEQ ID NO: 270057 - DNA, 20 bp, synthetic construct
  source 1..20: mol_type = other DNA
tgcgggggtgctcaggtgcg

SEQ ID NO: 270058 - DNA, 20 bp, synthetic construct
  source 1..20: mol_type = other DNA
atgcgggggtgctcaggtgc

SEQ ID NO: 270059 - DNA, 20 bp, synthetic construct
  source 1..20: mol_type = other DNA
tatgcgggggtgctcaggtg

SEQ ID NO: 270060 - DNA, 20 bp, synthetic construct
  source 1..20: mol_type = other DNA
ttatgcgggggtgctcaggt

SEQ ID NO: 270061 - DNA, 20 bp, synthetic construct
  source 1..20: mol_type = other DNA
gttatgcgggggtgctcagg

SEQ ID NO: 270062 - DNA, 20 bp, synthetic construct
  source 1..20: mol_type = other DNA
tgttatgcgggggtgctcag

SEQ ID NO: 270063 - DNA, 20 bp, synthetic construct
  source 1..20: mol_type = other DNA
gtgttatgcgggggtgctca

SEQ ID NO: 270064 - DNA, 20 bp, synthetic construct
  source 1..20: mol_type = other DNA
ggtgttatgcgggggtgctc

SEQ ID NO: 270065 - DNA, 20 bp, synthetic construct
  source 1..20: mol_type = other DNA
gggtgttatgcgggggtgct

SEQ ID NO: 270066 - DNA, 20 bp, synthetic construct
  source 1..20: mol_type = other DNA
ggggtgttatgcgggggtgc

SEQ ID NO: 270067 - DNA, 20 bp, synthetic construct
  source 1..20: mol_type = other DNA
tggggtgttatgcgggggtg

SEQ ID NO: 270068 - DNA, 20 bp, synthetic construct
  source 1..20: mol_type = other DNA
ctggggtgttatgcgggggt

SEQ ID NO: 270069 - DNA, 20 bp, synthetic construct
  source 1..20: mol_type = other DNA
actggggtgttatgcggggg

SEQ ID NO: 270070 - DNA, 20 bp, synthetic construct
  source 1..20: mol_type = other DNA
gactggggtgttatgcgggg

SEQ ID NO: 270071 - DNA, 20 bp, synthetic construct
  source 1..20: mol_type = other DNA
ggactggggtgttatgcggg

SEQ ID NO: 270072 - DNA, 20 bp, synthetic construct
  source 1..20: mol_type = other DNA
gggactggggtgttatgcgg

SEQ ID NO: 270073 - DNA, 20 bp, synthetic construct
  source 1..20: mol_type = other DNA
ggggactggggtgttatgcg

SEQ ID NO: 270074 - DNA, 20 bp, synthetic construct
  source 1..20: mol_type = other DNA
aggggactggggtgttatgc

SEQ ID NO: 270075 - DNA, 20 bp, synthetic construct
  source 1..20: mol_type = other DNA
gaggggactggggtgttatg

SEQ ID NO: 270076 - DNA, 20 bp, synthetic construct
  source 1..20: mol_type = other DNA
agaggggactggggtgttat

SEQ ID NO: 270077 - DNA, 20 bp, synthetic construct
  source 1..20: mol_type = other DNA
cagaggggactggggtgtta

SEQ ID NO: 270078 - DNA, 20 bp, synthetic construct
  source 1..20: mol_type = other DNA
ccagaggggactggggtgtt

SEQ ID NO: 270079 - DNA, 20 bp, synthetic construct
  source 1..20: mol_type = other DNA
tccagaggggactggggtgt

SEQ ID NO: 270080 - DNA, 20 bp, synthetic construct
  source 1..20: mol_type = other DNA
gtccagaggggactggggtg

SEQ ID NO: 270081 - DNA, 20 bp, synthetic construct
  source 1..20: mol_type = other DNA
ggtccagaggggactggggt

SEQ ID NO: 270082 - DNA, 20 bp, synthetic construct
  source 1..20: mol_type = other DNA
gggtccagaggggactgggg

SEQ ID NO: 270083 - DNA, 20 bp, synthetic construct
  source 1..20: mol_type = other DNA
agggtccagaggggactggg

SEQ ID NO: 270084 - DNA, 20 bp, synthetic construct
  source 1..20: mol_type = other DNA
gagggtccagaggggactgg

SEQ ID NO: 270085 - DNA, 20 bp, synthetic construct
  source 1..20: mol_type = other DNA
agagggtccagaggggactg

SEQ ID NO: 270086 - DNA, 20 bp, synthetic construct
  source 1..20: mol_type = other DNA
aagagggtccagaggggact

SEQ ID NO: 270087 - DNA, 20 bp, synthetic construct
  source 1..20: mol_type = other DNA
gaagagggtccagaggggac

SEQ ID NO: 270088 - DNA, 20 bp, synthetic construct
  source 1..20: mol_type = other DNA
tgaagagggtccagagggga

SEQ ID NO: 270089 - DNA, 20 bp, synthetic construct
  source 1..20: mol_type = other DNA
ttgaagagggtccagagggg

SEQ ID NO: 270090 - DNA, 20 bp, synthetic construct
  source 1..20: mol_type = other DNA
cttgaagagggtccagaggg

SEQ ID NO: 270091 - DNA, 20 bp, synthetic construct
  source 1..20: mol_type = other DNA
ccttgaagagggtccagagg

SEQ ID NO: 270092 - DNA, 20 bp, synthetic construct
  source 1..20: mol_type = other DNA
tccttgaagagggtccagag

SEQ ID NO: 270093 - DNA, 20 bp, synthetic construct
  source 1..20: mol_type = other DNA
ttccttgaagagggtccaga

SEQ ID NO: 270094 - DNA, 20 bp, synthetic construct
  source 1..20: mol_type = other DNA
cttccttgaagagggtccag

SEQ ID NO: 270095 - DNA, 20 bp, synthetic construct
  source 1..20: mol_type = other DNA
acttccttgaagagggtcca

SEQ ID NO: 270096 - DNA, 20 bp, synthetic construct
  source 1..20: mol_type = other DNA
aacttccttgaagagggtcc

SEQ ID NO: 270097 - DNA, 20 bp, synthetic construct
  source 1..20: mol_type = other DNA
gaacttccttgaagagggtc

SEQ ID NO: 270098 - DNA, 20 bp, synthetic construct
  source 1..20: mol_type = other DNA
tgaacttccttgaagagggt

SEQ ID NO: 270099 - DNA, 20 bp, synthetic construct
  source 1..20: mol_type = other DNA
ctgaacttccttgaagaggg

SEQ ID NO: 270100 - DNA, 20 bp, synthetic construct
  source 1..20: mol_type = other DNA
actgaacttccttgaagagg

SEQ ID NO: 270101 - DNA, 20 bp, synthetic construct
  source 1..20: mol_type = other DNA
aactgaacttccttgaagag

SEQ ID NO: 270102 - DNA, 20 bp, synthetic construct
  source 1..20: mol_type = other DNA
gaactgaacttccttgaaga

SEQ ID NO: 270103 - DNA, 20 bp, synthetic construct
  source 1..20: mol_type = other DNA
agaactgaacttccttgaag

SEQ ID NO: 270104 - DNA, 20 bp, synthetic construct
  source 1..20: mol_type = other DNA
aagaactgaacttccttgaa

SEQ ID NO: 270105 - DNA, 20 bp, synthetic construct
  source 1..20: mol_type = other DNA
aaagaactgaacttccttga

SEQ ID NO: 270106 - DNA, 20 bp, synthetic construct
  source 1..20: mol_type = other DNA
taaagaactgaacttccttg

SEQ ID NO: 270107 - DNA, 20 bp, synthetic construct
  source 1..20: mol_type = other DNA
ataaagaactgaacttcctt

SEQ ID NO: 270108 - DNA, 20 bp, synthetic construct
  source 1..20: mol_type = other DNA
aataaagaactgaacttcct

SEQ ID NO: 270109 - DNA, 20 bp, synthetic construct
  source 1..20: mol_type = other DNA
caataaagaactgaacttcc

SEQ ID NO: 270110 - DNA, 20 bp, synthetic construct
  source 1..20: mol_type = other DNA
ccaataaagaactgaacttc

SEQ ID NO: 270111 - DNA, 20 bp, synthetic construct
  source 1..20: mol_type = other DNA
cccaataaagaactgaactt

SEQ ID NO: 270112 - DNA, 20 bp, synthetic construct
  source 1..20: mol_type = other DNA
gcccaataaagaactgaact

SEQ ID NO: 270113 - DNA, 20 bp, synthetic construct
  source 1..20: mol_type = other DNA
agcccaataaagaactgaac

SEQ ID NO: 270114 - DNA, 20 bp, synthetic construct
  source 1..20: mol_type = other DNA
gagcccaataaagaactgaa

SEQ ID NO: 270115 - DNA, 20 bp, synthetic construct
  source 1..20: mol_type = other DNA
agagcccaataaagaactga

SEQ ID NO: 270116 - DNA, 20 bp, synthetic construct
  source 1..20: mol_type = other DNA
gagagcccaataaagaactg

SEQ ID NO: 270117 - DNA, 20 bp, synthetic construct
  source 1..20: mol_type = other DNA
ggagagcccaataaagaact

SEQ ID NO: 270118 - DNA, 20 bp, synthetic construct
  source 1..20: mol_type = other DNA
tggagagcccaataaagaac

SEQ ID NO: 270119 - DNA, 20 bp, synthetic construct
  source 1..20: mol_type = other DNA
gtggagagcccaataaagaa

SEQ ID NO: 270120 - DNA, 20 bp, synthetic construct
  source 1..20: mol_type = other DNA
agtggagagcccaataaaga

SEQ ID NO: 270121 - DNA, 20 bp, synthetic construct
  source 1..20: mol_type = other DNA
tagtggagagcccaataaag

SEQ ID NO: 270122 - DNA, 20 bp, synthetic construct
  source 1..20: mol_type = other DNA
gtagtggagagcccaataaa

SEQ ID NO: 270123 - DNA, 20 bp, synthetic construct
  source 1..20: mol_type = other DNA
tgtagtggagagcccaataa

SEQ ID NO: 270124 - DNA, 20 bp, synthetic construct
  source 1..20: mol_type = other DNA
gtgtagtggagagcccaata

SEQ ID NO: 270125 - DNA, 20 bp, synthetic construct
  source 1..20: mol_type = other DNA
agtgtagtggagagcccaat

SEQ ID NO: 270126 - DNA, 20 bp, synthetic construct
  source 1..20: mol_type = other DNA
cagtgtagtggagagcccaa

SEQ ID NO: 270127 - DNA, 20 bp, synthetic construct
  source 1..20: mol_type = other DNA
acagtgtagtggagagccca

SEQ ID NO: 270128 - DNA, 20 bp, synthetic construct
  source 1..20: mol_type = other DNA
cacagtgtagtggagagccc

SEQ ID NO: 270129 - DNA, 20 bp, synthetic construct
  source 1..20: mol_type = other DNA
tcacagtgtagtggagagcc

SEQ ID NO: 270130 - DNA, 20 bp, synthetic construct
  source 1..20: mol_type = other DNA
ctcacagtgtagtggagagc

SEQ ID NO: 270131 - DNA, 20 bp, synthetic construct
  source 1..20: mol_type = other DNA
actcacagtgtagtggagag

SEQ ID NO: 270132 - DNA, 20 bp, synthetic construct
  source 1..20: mol_type = other DNA
cactcacagtgtagtggaga

SEQ ID NO: 270133 - DNA, 20 bp, synthetic construct
  source 1..20: mol_type = other DNA
gcactcacagtgtagtggag

SEQ ID NO: 270134 - DNA, 20 bp, synthetic construct
  source 1..20: mol_type = other DNA
ggcactcacagtgtagtgga

SEQ ID NO: 270135 - DNA, 20 bp, synthetic construct
  source 1..20: mol_type = other DNA
gggcactcacagtgtagtgg

SEQ ID NO: 270136 - DNA, 20 bp, synthetic construct
  source 1..20: mol_type = other DNA
agggcactcacagtgtagtg

SEQ ID NO: 270137 - DNA, 20 bp, synthetic construct
  source 1..20: mol_type = other DNA
gagggcactcacagtgtagt

SEQ ID NO: 270138 - DNA, 20 bp, synthetic construct
  source 1..20: mol_type = other DNA
ggagggcactcacagtgtag

SEQ ID NO: 270139 - DNA, 20 bp, synthetic construct
  source 1..20: mol_type = other DNA
aggagggcactcacagtgta

SEQ ID NO: 270140 - DNA, 20 bp, synthetic construct
  source 1..20: mol_type = other DNA
gaggagggcactcacagtgt

SEQ ID NO: 270141 - DNA, 20 bp, synthetic construct
  source 1..20: mol_type = other DNA
tgaggagggcactcacagtg

SEQ ID NO: 270142 - DNA, 20 bp, synthetic construct
  source 1..20: mol_type = other DNA
ctgaggagggcactcacagt

SEQ ID NO: 270143 - DNA, 20 bp, synthetic construct
  source 1..20: mol_type = other DNA
cctgaggagggcactcacag

SEQ ID NO: 270144 - DNA, 20 bp, synthetic construct
  source 1..20: mol_type = other DNA
gcctgaggagggcactcaca

SEQ ID NO: 270145 - DNA, 20 bp, synthetic construct
  source 1..20: mol_type = other DNA
cgcctgaggagggcactcac

SEQ ID NO: 270146 - DNA, 20 bp, synthetic construct
  source 1..20: mol_type = other DNA
tcgcctgaggagggcactca

SEQ ID NO: 270147 - DNA, 20 bp, synthetic construct
  source 1..20: mol_type = other DNA
ctcgcctgaggagggcactc

SEQ ID NO: 270148 - DNA, 20 bp, synthetic construct
  source 1..20: mol_type = other DNA
tctcgcctgaggagggcact

SEQ ID NO: 270149 - DNA, 20 bp, synthetic construct
  source 1..20: mol_type = other DNA
ctctcgcctgaggagggcac

SEQ ID NO: 270150 - DNA, 20 bp, synthetic construct
  source 1..20: mol_type = other DNA
tctctcgcctgaggagggca

SEQ ID NO: 270151 - DNA, 20 bp, synthetic construct
  source 1..20: mol_type = other DNA
ttctctcgcctgaggagggc

SEQ ID NO: 270152 - DNA, 20 bp, synthetic construct
  source 1..20: mol_type = other DNA
gttctctcgcctgaggaggg

SEQ ID NO: 270153 - DNA, 20 bp, synthetic construct
  source 1..20: mol_type = other DNA
cgttctctcgcctgaggagg

SEQ ID NO: 270154 - DNA, 20 bp, synthetic construct
  source 1..20: mol_type = other DNA
acgttctctcgcctgaggag

SEQ ID NO: 270155 - DNA, 20 bp, synthetic construct
  source 1..20: mol_type = other DNA
aacgttctctcgcctgagga

SEQ ID NO: 270156 - DNA, 20 bp, synthetic construct
  source 1..20: mol_type = other DNA
gaacgttctctcgcctgagg

SEQ ID NO: 270157 - DNA, 20 bp, synthetic construct
  source 1..20: mol_type = other DNA
agaacgttctctcgcctgag

SEQ ID NO: 270158 - DNA, 20 bp, synthetic construct
  source 1..20: mol_type = other DNA
cagaacgttctctcgcctga

SEQ ID NO: 270159 - DNA, 20 bp, synthetic construct
  source 1..20: mol_type = other DNA
ccagaacgttctctcgcctg

SEQ ID NO: 270160 - DNA, 20 bp, synthetic construct
  source 1..20: mol_type = other DNA
gccagaacgttctctcgcct

SEQ ID NO: 270161 - DNA, 20 bp, synthetic construct
  source 1..20: mol_type = other DNA
agccagaacgttctctcgcc

SEQ ID NO: 270162 - DNA, 20 bp, synthetic construct
  source 1..20: mol_type = other DNA
gagccagaacgttctctcgc

SEQ ID NO: 270163 - DNA, 20 bp, synthetic construct
  source 1..20: mol_type = other DNA
agagccagaacgttctctcg

SEQ ID NO: 270164 - DNA, 20 bp, synthetic construct
  source 1..20: mol_type = other DNA
aagagccagaacgttctctc

SEQ ID NO: 270165 - DNA, 20 bp, synthetic construct
  source 1..20: mol_type = other DNA
gaagagccagaacgttctct

SEQ ID NO: 270166 - DNA, 20 bp, synthetic construct
  source 1..20: mol_type = other DNA
agaagagccagaacgttctc

SEQ ID NO: 270167 - DNA, 20 bp, synthetic construct
  source 1..20: mol_type = other DNA
gagaagagccagaacgttct

SEQ ID NO: 270168 - DNA, 20 bp, synthetic construct
  source 1..20: mol_type = other DNA
agagaagagccagaacgttc

SEQ ID NO: 270169 - DNA, 20 bp, synthetic construct
  source 1..20: mol_type = other DNA
aagagaagagccagaacgtt

SEQ ID NO: 270170 - DNA, 20 bp, synthetic construct
  source 1..20: mol_type = other DNA
caagagaagagccagaacgt

SEQ ID NO: 270171 - DNA, 20 bp, synthetic construct
  source 1..20: mol_type = other DNA
gcaagagaagagccagaacg

SEQ ID NO: 270172 - DNA, 20 bp, synthetic construct
  source 1..20: mol_type = other DNA
ggcaagagaagagccagaac

SEQ ID NO: 270173 - DNA, 20 bp, synthetic construct
  source 1..20: mol_type = other DNA
gggcaagagaagagccagaa

SEQ ID NO: 270174 - DNA, 20 bp, synthetic construct
  source 1..20: mol_type = other DNA
ggggcaagagaagagccaga

SEQ ID NO: 270175 - DNA, 20 bp, synthetic construct
  source 1..20: mol_type = other DNA
aggggcaagagaagagccag

SEQ ID NO: 270176 - DNA, 20 bp, synthetic construct
  source 1..20: mol_type = other DNA
aaggggcaagagaagagcca

SEQ ID NO: 270177 - DNA, 20 bp, synthetic construct
  source 1..20: mol_type = other DNA
gaaggggcaagagaagagcc

SEQ ID NO: 270178 - DNA, 20 bp, synthetic construct
  source 1..20: mol_type = other DNA
tgaaggggcaagagaagagc

SEQ ID NO: 270179 - DNA, 20 bp, synthetic construct
  source 1..20: mol_type = other DNA
ctgaaggggcaagagaagag

SEQ ID NO: 270180 - DNA, 20 bp, synthetic construct
  source 1..20: mol_type = other DNA
gctgaaggggcaagagaaga

SEQ ID NO: 270181 - DNA, 20 bp, synthetic construct
  source 1..20: mol_type = other DNA
ggctgaaggggcaagagaag

SEQ ID NO: 270182 - DNA, 20 bp, synthetic construct
  source 1..20: mol_type = other DNA
gggctgaaggggcaagagaa

SEQ ID NO: 270183 - DNA, 20 bp, synthetic construct
  source 1..20: mol_type = other DNA
ggggctgaaggggcaagaga

SEQ ID NO: 270184 - DNA, 20 bp, synthetic construct
  source 1..20: mol_type = other DNA
aggggctgaaggggcaagag

SEQ ID NO: 270185 - DNA, 20 bp, synthetic construct
  source 1..20: mol_type = other DNA
caggggctgaaggggcaaga

SEQ ID NO: 270186 - DNA, 20 bp, synthetic construct
  source 1..20: mol_type = other DNA
acaggggctgaaggggcaag

SEQ ID NO: 270187 - DNA, 20 bp, synthetic construct
  source 1..20: mol_type = other DNA
aacaggggctgaaggggcaa

SEQ ID NO: 270188 - DNA, 20 bp, synthetic construct
  source 1..20: mol_type = other DNA
taacaggggctgaaggggca

SEQ ID NO: 270189 - DNA, 20 bp, synthetic construct
  source 1..20: mol_type = other DNA
ttaacaggggctgaaggggc

SEQ ID NO: 270190 - DNA, 20 bp, synthetic construct
  source 1..20: mol_type = other DNA
attaacaggggctgaagggg

SEQ ID NO: 270191 - DNA, 20 bp, synthetic construct
  source 1..20: mol_type = other DNA
gattaacaggggctgaaggg

SEQ ID NO: 270192 - DNA, 20 bp, synthetic construct
  source 1..20: mol_type = other DNA
cgattaacaggggctgaagg

SEQ ID NO: 270193 - DNA, 20 bp, synthetic construct
  source 1..20: mol_type = other DNA
ccgattaacaggggctgaag

SEQ ID NO: 270194 - DNA, 20 bp, synthetic construct
  source 1..20: mol_type = other DNA
tccgattaacaggggctgaa

SEQ ID NO: 270195 - DNA, 20 bp, synthetic construct
  source 1..20: mol_type = other DNA
gtccgattaacaggggctga

SEQ ID NO: 270196 - DNA, 20 bp, synthetic construct
  source 1..20: mol_type = other DNA
tgtccgattaacaggggctg

SEQ ID NO: 270197 - DNA, 20 bp, synthetic construct
  source 1..20: mol_type = other DNA
ctgtccgattaacaggggct

SEQ ID NO: 270198 - DNA, 20 bp, synthetic construct
  source 1..20: mol_type = other DNA
tctgtccgattaacaggggc

SEQ ID NO: 270199 - DNA, 20 bp, synthetic construct
  source 1..20: mol_type = other DNA
ctctgtccgattaacagggg

SEQ ID NO: 270200 - DNA, 20 bp, synthetic construct
  source 1..20: mol_type = other DNA
tctctgtccgattaacaggg

SEQ ID NO: 270201 - DNA, 20 bp, synthetic construct
  source 1..20: mol_type = other DNA
atctctgtccgattaacagg

SEQ ID NO: 270202 - DNA, 20 bp, synthetic construct
  source 1..20: mol_type = other DNA
catctctgtccgattaacag

SEQ ID NO: 270203 - DNA, 20 bp, synthetic construct
  source 1..20: mol_type = other DNA
ccatctctgtccgattaaca

SEQ ID NO: 270204 - DNA, 20 bp, synthetic construct
  source 1..20: mol_type = other DNA
gccatctctgtccgattaac

SEQ ID NO: 270205 - DNA, 20 bp, synthetic construct
  source 1..20: mol_type = other DNA
tgccatctctgtccgattaa

SEQ ID NO: 270206 - DNA, 20 bp, synthetic construct
  source 1..20: mol_type = other DNA
ctgccatctctgtccgatta

SEQ ID NO: 270207 - DNA, 20 bp, synthetic construct
  source 1..20: mol_type = other DNA
cctgccatctctgtccgatt

SEQ ID NO: 270208 - DNA, 20 bp, synthetic construct
  source 1..20: mol_type = other DNA
ccctgccatctctgtccgat

SEQ ID NO: 270209 - DNA, 20 bp, synthetic construct
  source 1..20: mol_type = other DNA
gccctgccatctctgtccga

SEQ ID NO: 270210 - DNA, 20 bp, synthetic construct
  source 1..20: mol_type = other DNA
agccctgccatctctgtccg

SEQ ID NO: 270211 - DNA, 20 bp, synthetic construct
  source 1..20: mol_type = other DNA
cagccctgccatctctgtcc

SEQ ID NO: 270212 - DNA, 20 bp, synthetic construct
  source 1..20: mol_type = other DNA
acagccctgccatctctgtc

SEQ ID NO: 270213 - DNA, 20 bp, synthetic construct
  source 1..20: mol_type = other DNA
cacagccctgccatctctgt

SEQ ID NO: 270214 - DNA, 20 bp, synthetic construct
  source 1..20: mol_type = other DNA
acacagccctgccatctctg

SEQ ID NO: 270215 - DNA, 20 bp, synthetic construct
  source 1..20: mol_type = other DNA
gacacagccctgccatctct

SEQ ID NO: 270216 - DNA, 20 bp, synthetic construct
  source 1..20: mol_type = other DNA
agacacagccctgccatctc

SEQ ID NO: 270217 - DNA, 20 bp, synthetic construct
  source 1..20: mol_type = other DNA
gagacacagccctgccatct

SEQ ID NO: 270218 - DNA, 20 bp, synthetic construct
  source 1..20: mol_type = other DNA
ggagacacagccctgccatc

SEQ ID NO: 270219 - DNA, 20 bp, synthetic construct
  source 1..20: mol_type = other DNA
tggagacacagccctgccat

SEQ ID NO: 270220 - DNA, 20 bp, synthetic construct
  source 1..20: mol_type = other DNA
gtggagacacagccctgcca

SEQ ID NO: 270221 - DNA, 20 bp, synthetic construct
  source 1..20: mol_type = other DNA
cgtggagacacagccctgcc

SEQ ID NO: 270222 - DNA, 20 bp, synthetic construct
  source 1..20: mol_type = other DNA
ccgtggagacacagccctgc

SEQ ID NO: 270223 - DNA, 20 bp, synthetic construct
  source 1..20: mol_type = other DNA
gccgtggagacacagccctg

SEQ ID NO: 270224 - DNA, 20 bp, synthetic construct
  source 1..20: mol_type = other DNA
ggccgtggagacacagccct

SEQ ID NO: 270225 - DNA, 20 bp, synthetic construct
  source 1..20: mol_type = other DNA
cggccgtggagacacagccc

SEQ ID NO: 270226 - DNA, 20 bp, synthetic construct
  source 1..20: mol_type = other DNA
ccggccgtggagacacagcc

SEQ ID NO: 270227 - DNA, 20 bp, synthetic construct
  source 1..20: mol_type = other DNA
tccggccgtggagacacagc

SEQ ID NO: 270228 - DNA, 20 bp, synthetic construct
  source 1..20: mol_type = other DNA
ctccggccgtggagacacag

SEQ ID NO: 270229 - DNA, 20 bp, synthetic construct
  source 1..20: mol_type = other DNA
cctccggccgtggagacaca

SEQ ID NO: 270230 - DNA, 20 bp, synthetic construct
  source 1..20: mol_type = other DNA
gcctccggccgtggagacac

SEQ ID NO: 270231 - DNA, 20 bp, synthetic construct
  source 1..20: mol_type = other DNA
agcctccggccgtggagaca

SEQ ID NO: 270232 - DNA, 20 bp, synthetic construct
  source 1..20: mol_type = other DNA
gagcctccggccgtggagac

SEQ ID NO: 270233 - DNA, 20 bp, synthetic construct
  source 1..20: mol_type = other DNA
agagcctccggccgtggaga

SEQ ID NO: 270234 - DNA, 20 bp, synthetic construct
  source 1..20: mol_type = other DNA
gagagcctccggccgtggag

SEQ ID NO: 270235 - DNA, 20 bp, synthetic construct
  source 1..20: mol_type = other DNA
tgagagcctccggccgtgga

SEQ ID NO: 270236 - DNA, 20 bp, synthetic construct
  source 1..20: mol_type = other DNA
atgagagcctccggccgtgg

SEQ ID NO: 270237 - DNA, 20 bp, synthetic construct
  source 1..20: mol_type = other DNA
tatgagagcctccggccgtg

SEQ ID NO: 270238 - DNA, 20 bp, synthetic construct
  source 1..20: mol_type = other DNA
ctatgagagcctccggccgt

SEQ ID NO: 270239 - DNA, 20 bp, synthetic construct
  source 1..20: mol_type = other DNA
actatgagagcctccggccg

SEQ ID NO: 270240 - DNA, 20 bp, synthetic construct
  source 1..20: mol_type = other DNA
gactatgagagcctccggcc

SEQ ID NO: 270241 - DNA, 20 bp, synthetic construct
  source 1..20: mol_type = other DNA
tgactatgagagcctccggc

SEQ ID NO: 270242 - DNA, 20 bp, synthetic construct
  source 1..20: mol_type = other DNA
ctgactatgagagcctccgg

SEQ ID NO: 270243 - DNA, 20 bp, synthetic construct
  source 1..20: mol_type = other DNA
cctgactatgagagcctccg

SEQ ID NO: 270244 - DNA, 20 bp, synthetic construct
  source 1..20: mol_type = other DNA
ccctgactatgagagcctcc

SEQ ID NO: 270245 - DNA, 20 bp, synthetic construct
  source 1..20: mol_type = other DNA
gccctgactatgagagcctc

SEQ ID NO: 270246 - DNA, 20 bp, synthetic construct
  source 1..20: mol_type = other DNA
tgccctgactatgagagcct

SEQ ID NO: 270247 - DNA, 20 bp, synthetic construct
  source 1..20: mol_type = other DNA
gtgccctgactatgagagcc

SEQ ID NO: 270248 - DNA, 20 bp, synthetic construct
  source 1..20: mol_type = other DNA
ggtgccctgactatgagagc

SEQ ID NO: 270249 - DNA, 20 bp, synthetic construct
  source 1..20: mol_type = other DNA
gggtgccctgactatgagag

SEQ ID NO: 270250 - DNA, 20 bp, synthetic construct
  source 1..20: mol_type = other DNA
tgggtgccctgactatgaga

SEQ ID NO: 270251 - DNA, 20 bp, synthetic construct
  source 1..20: mol_type = other DNA
gtgggtgccctgactatgag

SEQ ID NO: 270252 - DNA, 20 bp, synthetic construct
  source 1..20: mol_type = other DNA
tgtgggtgccctgactatga

SEQ ID NO: 270253 - DNA, 20 bp, synthetic construct
  source 1..20: mol_type = other DNA
ctgtgggtgccctgactatg

SEQ ID NO: 270254 - DNA, 20 bp, synthetic construct
  source 1..20: mol_type = other DNA
gctgtgggtgccctgactat

SEQ ID NO: 270255 - DNA, 20 bp, synthetic construct
  source 1..20: mol_type = other DNA
cgctgtgggtgccctgacta

SEQ ID NO: 270256 - DNA, 20 bp, synthetic construct
  source 1..20: mol_type = other DNA
ccgctgtgggtgccctgact

SEQ ID NO: 270257 - DNA, 20 bp, synthetic construct
  source 1..20: mol_type = other DNA
accgctgtgggtgccctgac

SEQ ID NO: 270258 - DNA, 20 bp, synthetic construct
  source 1..20: mol_type = other DNA
aaccgctgtgggtgccctga

SEQ ID NO: 270259 - DNA, 20 bp, synthetic construct
  source 1..20: mol_type = other DNA
gaaccgctgtgggtgccctg

SEQ ID NO: 270260 - DNA, 20 bp, synthetic construct
  source 1..20: mol_type = other DNA
ggaaccgctgtgggtgccct

SEQ ID NO: 270261 - DNA, 20 bp, synthetic construct
  source 1..20: mol_type = other DNA
gggaaccgctgtgggtgccc

SEQ ID NO: 270262 - DNA, 20 bp, synthetic construct
  source 1..20: mol_type = other DNA
ggggaaccgctgtgggtgcc

SEQ ID NO: 270263 - DNA, 20 bp, synthetic construct
  source 1..20: mol_type = other DNA
tggggaaccgctgtgggtgc

SEQ ID NO: 270264 - DNA, 20 bp, synthetic construct
  source 1..20: mol_type = other DNA
gtggggaaccgctgtgggtg

SEQ ID NO: 270265 - DNA, 20 bp, synthetic construct
  source 1..20: mol_type = other DNA
ggtggggaaccgctgtgggt

SEQ ID NO: 270266 - DNA, 20 bp, synthetic construct
  source 1..20: mol_type = other DNA
aggtggggaaccgctgtggg

SEQ ID NO: 270267 - DNA, 20 bp, synthetic construct
  source 1..20: mol_type = other DNA
caggtggggaaccgctgtgg

SEQ ID NO: 270268 - DNA, 20 bp, synthetic construct
  source 1..20: mol_type = other DNA
gcaggtggggaaccgctgtg

SEQ ID NO: 270269 - DNA, 20 bp, synthetic construct
  source 1..20: mol_type = other DNA
ggcaggtggggaaccgctgt

SEQ ID NO: 270270 - DNA, 20 bp, synthetic construct
  source 1..20: mol_type = other DNA
aggcaggtggggaaccgctg

SEQ ID NO: 270271 - DNA, 20 bp, synthetic construct
  source 1..20: mol_type = other DNA
aaggcaggtggggaaccgct

SEQ ID NO: 270272 - DNA, 20 bp, synthetic construct
  source 1..20: mol_type = other DNA
gaaggcaggtggggaaccgc

SEQ ID NO: 270273 - DNA, 20 bp, synthetic construct
  source 1..20: mol_type = other DNA
agaaggcaggtggggaaccg

SEQ ID NO: 270274 - DNA, 20 bp, synthetic construct
  source 1..20: mol_type = other DNA
cagaaggcaggtggggaacc

SEQ ID NO: 270275 - DNA, 20 bp, synthetic construct
  source 1..20: mol_type = other DNA
ccagaaggcaggtggggaac

SEQ ID NO: 270276 - DNA, 20 bp, synthetic construct
  source 1..20: mol_type = other DNA
cccagaaggcaggtggggaa

SEQ ID NO: 270277 - DNA, 20 bp, synthetic construct
  source 1..20: mol_type = other DNA
gcccagaaggcaggtgggga

SEQ ID NO: 270278 - DNA, 20 bp, synthetic construct
  source 1..20: mol_type = other DNA
tgcccagaaggcaggtgggg

SEQ ID NO: 270279 - DNA, 20 bp, synthetic construct
  source 1..20: mol_type = other DNA
ctgcccagaaggcaggtggg

SEQ ID NO: 270280 - DNA, 20 bp, synthetic construct
  source 1..20: mol_type = other DNA
tctgcccagaaggcaggtgg

SEQ ID NO: 270281 - DNA, 20 bp, synthetic construct
  source 1..20: mol_type = other DNA
ttctgcccagaaggcaggtg

SEQ ID NO: 270282 - DNA, 20 bp, synthetic construct
  source 1..20: mol_type = other DNA
attctgcccagaaggcaggt

SEQ ID NO: 270283 - DNA, 20 bp, synthetic construct
  source 1..20: mol_type = other DNA
tattctgcccagaaggcagg

SEQ ID NO: 270284 - DNA, 20 bp, synthetic construct
  source 1..20: mol_type = other DNA
gtattctgcccagaaggcag

SEQ ID NO: 270285 - DNA, 20 bp, synthetic construct
  source 1..20: mol_type = other DNA
tgtattctgcccagaaggca

SEQ ID NO: 270286 - DNA, 20 bp, synthetic construct
  source 1..20: mol_type = other DNA
gtgtattctgcccagaaggc

SEQ ID NO: 270287 - DNA, 20 bp, synthetic construct
  source 1..20: mol_type = other DNA
agtgtattctgcccagaagg

SEQ ID NO: 270288 - DNA, 20 bp, synthetic construct
  source 1..20: mol_type = other DNA
cagtgtattctgcccagaag

SEQ ID NO: 270289 - DNA, 20 bp, synthetic construct
  source 1..20: mol_type = other DNA
gcagtgtattctgcccagaa

SEQ ID NO: 270290 - DNA, 20 bp, synthetic construct
  source 1..20: mol_type = other DNA
ggcagtgtattctgcccaga

SEQ ID NO: 270291 - DNA, 20 bp, synthetic construct
  source 1..20: mol_type = other DNA
tggcagtgtattctgcccag

SEQ ID NO: 270292 - DNA, 20 bp, synthetic construct
  source 1..20: mol_type = other DNA
gtggcagtgtattctgccca

SEQ ID NO: 270293 - DNA, 20 bp, synthetic construct
  source 1..20: mol_type = other DNA
ggtggcagtgtattctgccc

SEQ ID NO: 270294 - DNA, 20 bp, synthetic construct
  source 1..20: mol_type = other DNA
gggtggcagtgtattctgcc

SEQ ID NO: 270295 - DNA, 20 bp, synthetic construct
  source 1..20: mol_type = other DNA
tgggtggcagtgtattctgc

SEQ ID NO: 270296 - DNA, 20 bp, synthetic construct
  source 1..20: mol_type = other DNA
atgggtggcagtgtattctg

SEQ ID NO: 270297 - DNA, 20 bp, synthetic construct
  source 1..20: mol_type = other DNA
tatgggtggcagtgtattct

SEQ ID NO: 270298 - DNA, 20 bp, synthetic construct
  source 1..20: mol_type = other DNA
ctatgggtggcagtgtattc

SEQ ID NO: 270299 - DNA, 20 bp, synthetic construct
  source 1..20: mol_type = other DNA
cctatgggtggcagtgtatt

SEQ ID NO: 270300 - DNA, 20 bp, synthetic construct
  source 1..20: mol_type = other DNA
acctatgggtggcagtgtat

SEQ ID NO: 270301 - DNA, 20 bp, synthetic construct
  source 1..20: mol_type = other DNA
gacctatgggtggcagtgta

SEQ ID NO: 270302 - DNA, 20 bp, synthetic construct
  source 1..20: mol_type = other DNA
tgacctatgggtggcagtgt

SEQ ID NO: 270303 - DNA, 20 bp, synthetic construct
  source 1..20: mol_type = other DNA
ctgacctatgggtggcagtg

SEQ ID NO: 270304 - DNA, 20 bp, synthetic construct
  source 1..20: mol_type = other DNA
gctgacctatgggtggcagt

SEQ ID NO: 270305 - DNA, 20 bp, synthetic construct
  source 1..20: mol_type = other DNA
tgctgacctatgggtggcag

SEQ ID NO: 270306 - DNA, 20 bp, synthetic construct
  source 1..20: mol_type = other DNA
atgctgacctatgggtggca

SEQ ID NO: 270307 - DNA, 20 bp, synthetic construct
  source 1..20: mol_type = other DNA
gatgctgacctatgggtggc

SEQ ID NO: 270308 - DNA, 20 bp, synthetic construct
  source 1..20: mol_type = other DNA
agatgctgacctatgggtgg

SEQ ID NO: 270309 - DNA, 20 bp, synthetic construct
  source 1..20: mol_type = other DNA
gagatgctgacctatgggtg

SEQ ID NO: 270310 - DNA, 20 bp, synthetic construct
  source 1..20: mol_type = other DNA
ggagatgctgacctatgggt

SEQ ID NO: 270311 - DNA, 20 bp, synthetic construct
  source 1..20: mol_type = other DNA
tggagatgctgacctatggg

SEQ ID NO: 270312 - DNA, 20 bp, synthetic construct
  source 1..20: mol_type = other DNA
gtggagatgctgacctatgg

SEQ ID NO: 270313 - DNA, 20 bp, synthetic construct
  source 1..20: mol_type = other DNA
agtggagatgctgacctatg

SEQ ID NO: 270314 - DNA, 20 bp, synthetic construct
  source 1..20: mol_type = other DNA
gagtggagatgctgacctat

SEQ ID NO: 270315 - DNA, 20 bp, synthetic construct
  source 1..20: mol_type = other DNA
cgagtggagatgctgaccta

SEQ ID NO: 270316 - DNA, 20 bp, synthetic construct
  source 1..20: mol_type = other DNA
acgagtggagatgctgacct

SEQ ID NO: 270317 - DNA, 20 bp, synthetic construct
  source 1..20: mol_type = other DNA
cacgagtggagatgctgacc

SEQ ID NO: 270318 - DNA, 20 bp, synthetic construct
  source 1..20: mol_type = other DNA
ccacgagtggagatgctgac

SEQ ID NO: 270319 - DNA, 20 bp, synthetic construct
  source 1..20: mol_type = other DNA
cccacgagtggagatgctga

SEQ ID NO: 270320 - DNA, 20 bp, synthetic construct
  source 1..20: mol_type = other DNA
gcccacgagtggagatgctg

SEQ ID NO: 270321 - DNA, 20 bp, synthetic construct
  source 1..20: mol_type = other DNA
ggcccacgagtggagatgct

SEQ ID NO: 270322 - DNA, 20 bp, synthetic construct
  source 1..20: mol_type = other DNA
tggcccacgagtggagatgc

SEQ ID NO: 270323 - DNA, 20 bp, synthetic construct
  source 1..20: mol_type = other DNA
atggcccacgagtggagatg

SEQ ID NO: 270324 - DNA, 20 bp, synthetic construct
  source 1..20: mol_type = other DNA
gatggcccacgagtggagat

SEQ ID NO: 270325 - DNA, 20 bp, synthetic construct
  source 1..20: mol_type = other DNA
agatggcccacgagtggaga

SEQ ID NO: 270326 - DNA, 20 bp, synthetic construct
  source 1..20: mol_type = other DNA
cagatggcccacgagtggag

SEQ ID NO: 270327 - DNA, 20 bp, synthetic construct
  source 1..20: mol_type = other DNA
gcagatggcccacgagtgga

SEQ ID NO: 270328 - DNA, 20 bp, synthetic construct
  source 1..20: mol_type = other DNA
agcagatggcccacgagtgg

SEQ ID NO: 270329 - DNA, 20 bp, synthetic construct
  source 1..20: mol_type = other DNA
aagcagatggcccacgagtg

SEQ ID NO: 270330 - DNA, 20 bp, synthetic construct
  source 1..20: mol_type = other DNA
taagcagatggcccacgagt

SEQ ID NO: 270331 - DNA, 20 bp, synthetic construct
  source 1..20: mol_type = other DNA
ctaagcagatggcccacgag

SEQ ID NO: 270332 - DNA, 20 bp, synthetic construct
  source 1..20: mol_type = other DNA
cctaagcagatggcccacga

SEQ ID NO: 270333 - DNA, 20 bp, synthetic construct
  source 1..20: mol_type = other DNA
acctaagcagatggcccacg

SEQ ID NO: 270334 - DNA, 20 bp, synthetic construct
  source 1..20: mol_type = other DNA
aacctaagcagatggcccac

SEQ ID NO: 270335 - DNA, 20 bp, synthetic construct
  source 1..20: mol_type = other DNA
caacctaagcagatggccca

SEQ ID NO: 270336 - DNA, 20 bp, synthetic construct
  source 1..20: mol_type = other DNA
ccaacctaagcagatggccc

SEQ ID NO: 270337 - DNA, 20 bp, synthetic construct
  source 1..20: mol_type = other DNA
cccaacctaagcagatggcc

SEQ ID NO: 270338 - DNA, 20 bp, synthetic construct
  source 1..20: mol_type = other DNA
acccaacctaagcagatggc

SEQ ID NO: 270339 - DNA, 20 bp, synthetic construct
  source 1..20: mol_type = other DNA
aacccaacctaagcagatgg

SEQ ID NO: 270340 - DNA, 20 bp, synthetic construct
  source 1..20: mol_type = other DNA
gaacccaacctaagcagatg

SEQ ID NO: 270341 - DNA, 20 bp, synthetic construct
  source 1..20: mol_type = other DNA
ggaacccaacctaagcagat

SEQ ID NO: 270342 - DNA, 20 bp, synthetic construct
  source 1..20: mol_type = other DNA
aggaacccaacctaagcaga

SEQ ID NO: 270343 - DNA, 20 bp, synthetic construct
  source 1..20: mol_type = other DNA
gaggaacccaacctaagcag

SEQ ID NO: 270344 - DNA, 20 bp, synthetic construct
  source 1..20: mol_type = other DNA
agaggaacccaacctaagca

SEQ ID NO: 270345 - DNA, 20 bp, synthetic construct
  source 1..20: mol_type = other DNA
cagaggaacccaacctaagc

SEQ ID NO: 270346 - DNA, 20 bp, synthetic construct
  source 1..20: mol_type = other DNA
ccagaggaacccaacctaag

SEQ ID NO: 270347 - DNA, 20 bp, synthetic construct
  source 1..20: mol_type = other DNA
tccagaggaacccaacctaa

SEQ ID NO: 270348 - DNA, 20 bp, synthetic construct
  source 1..20: mol_type = other DNA
atccagaggaacccaaccta

SEQ ID NO: 270349 - DNA, 20 bp, synthetic construct
  source 1..20: mol_type = other DNA
aatccagaggaacccaacct

SEQ ID NO: 270350 - DNA, 20 bp, synthetic construct
  source 1..20: mol_type = other DNA
gaatccagaggaacccaacc

SEQ ID NO: 270351 - DNA, 20 bp, synthetic construct
  source 1..20: mol_type = other DNA
agaatccagaggaacccaac

SEQ ID NO: 270352 - DNA, 20 bp, synthetic construct
  source 1..20: mol_type = other DNA
cagaatccagaggaacccaa

SEQ ID NO: 270353 - DNA, 20 bp, synthetic construct
  source 1..20: mol_type = other DNA
ccagaatccagaggaaccca

SEQ ID NO: 270354 - DNA, 20 bp, synthetic construct
  source 1..20: mol_type = other DNA
cccagaatccagaggaaccc

SEQ ID NO: 270355 - DNA, 20 bp, synthetic construct
  source 1..20: mol_type = other DNA
ccccagaatccagaggaacc

SEQ ID NO: 270356 - DNA, 20 bp, synthetic construct
  source 1..20: mol_type = other DNA
tccccagaatccagaggaac

SEQ ID NO: 270357 - DNA, 20 bp, synthetic construct
  source 1..20: mol_type = other DNA
ctccccagaatccagaggaa

SEQ ID NO: 270358 - DNA, 20 bp, synthetic construct
  source 1..20: mol_type = other DNA
tctccccagaatccagagga

SEQ ID NO: 270359 - DNA, 20 bp, synthetic construct
  source 1..20: mol_type = other DNA
atctccccagaatccagagg

SEQ ID NO: 270360 - DNA, 20 bp, synthetic construct
  source 1..20: mol_type = other DNA
aatctccccagaatccagag

SEQ ID NO: 270361 - DNA, 20 bp, synthetic construct
  source 1..20: mol_type = other DNA
caatctccccagaatccaga

SEQ ID NO: 270362 - DNA, 20 bp, synthetic construct
  source 1..20: mol_type = other DNA
ccaatctccccagaatccag

SEQ ID NO: 270363 - DNA, 20 bp, synthetic construct
  source 1..20: mol_type = other DNA
cccaatctccccagaatcca

SEQ ID NO: 270364 - DNA, 20 bp, synthetic construct
  source 1..20: mol_type = other DNA
ccccaatctccccagaatcc

SEQ ID NO: 270365 - DNA, 20 bp, synthetic construct
  source 1..20: mol_type = other DNA
cccccaatctccccagaatc

SEQ ID NO: 270366 - DNA, 20 bp, synthetic construct
  source 1..20: mol_type = other DNA
acccccaatctccccagaat

SEQ ID NO: 270367 - DNA, 20 bp, synthetic construct
  source 1..20: mol_type = other DNA
aacccccaatctccccagaa

SEQ ID NO: 270368 - DNA, 20 bp, synthetic construct
  source 1..20: mol_type = other DNA
gaacccccaatctccccaga

SEQ ID NO: 270369 - DNA, 20 bp, synthetic construct
  source 1..20: mol_type = other DNA
agaacccccaatctccccag

SEQ ID NO: 270370 - DNA, 20 bp, synthetic construct
  source 1..20: mol_type = other DNA
cagaacccccaatctcccca

SEQ ID NO: 270371 - DNA, 20 bp, synthetic construct
  source 1..20: mol_type = other DNA
acagaacccccaatctcccc

SEQ ID NO: 270372 - DNA, 20 bp, synthetic construct
  source 1..20: mol_type = other DNA
aacagaacccccaatctccc

SEQ ID NO: 270373 - DNA, 20 bp, synthetic construct
  source 1..20: mol_type = other DNA
aaacagaacccccaatctcc

SEQ ID NO: 270374 - DNA, 20 bp, synthetic construct
  source 1..20: mol_type = other DNA
aaaacagaacccccaatctc

SEQ ID NO: 270375 - DNA, 20 bp, synthetic construct
  source 1..20: mol_type = other DNA
caaaacagaacccccaatct

SEQ ID NO: 270376 - DNA, 20 bp, synthetic construct
  source 1..20: mol_type = other DNA
tcaaaacagaacccccaatc

SEQ ID NO: 270377 - DNA, 20 bp, synthetic construct
  source 1..20: mol_type = other DNA
atcaaaacagaacccccaat

SEQ ID NO: 270378 - DNA, 20 bp, synthetic construct
  source 1..20: mol_type = other DNA
gatcaaaacagaacccccaa

SEQ ID NO: 270379 - DNA, 20 bp, synthetic construct
  source 1..20: mol_type = other DNA
tgatcaaaacagaaccccca

SEQ ID NO: 270380 - DNA, 20 bp, synthetic construct
  source 1..20: mol_type = other DNA
ctgatcaaaacagaaccccc

SEQ ID NO: 270381 - DNA, 20 bp, synthetic construct
  source 1..20: mol_type = other DNA
gctgatcaaaacagaacccc

SEQ ID NO: 270382 - DNA, 20 bp, synthetic construct
  source 1..20: mol_type = other DNA
agctgatcaaaacagaaccc

SEQ ID NO: 270383 - DNA, 20 bp, synthetic construct
  source 1..20: mol_type = other DNA
cagctgatcaaaacagaacc

SEQ ID NO: 270384 - DNA, 20 bp, synthetic construct
  source 1..20: mol_type = other DNA
tcagctgatcaaaacagaac

SEQ ID NO: 270385 - DNA, 20 bp, synthetic construct
  source 1..20: mol_type = other DNA
atcagctgatcaaaacagaa

SEQ ID NO: 270386 - DNA, 20 bp, synthetic construct
  source 1..20: mol_type = other DNA
aatcagctgatcaaaacaga

SEQ ID NO: 270387 - DNA, 20 bp, synthetic construct
  source 1..20: mol_type = other DNA
gaatcagctgatcaaaacag

SEQ ID NO: 270388 - DNA, 20 bp, synthetic construct
  source 1..20: mol_type = other DNA
agaatcagctgatcaaaaca

SEQ ID NO: 270389 - DNA, 20 bp, synthetic construct
  source 1..20: mol_type = other DNA
aagaatcagctgatcaaaac

SEQ ID NO: 270390 - DNA, 20 bp, synthetic construct
  source 1..20: mol_type = other DNA
gaagaatcagctgatcaaaa

SEQ ID NO: 270391 - DNA, 20 bp, synthetic construct
  source 1..20: mol_type = other DNA
agaagaatcagctgatcaaa

SEQ ID NO: 270392 - DNA, 20 bp, synthetic construct
  source 1..20: mol_type = other DNA
cagaagaatcagctgatcaa

SEQ ID NO: 270393 - DNA, 20 bp, synthetic construct
  source 1..20: mol_type = other DNA
ccagaagaatcagctgatca

SEQ ID NO: 270394 - DNA, 20 bp, synthetic construct
  source 1..20: mol_type = other DNA
cccagaagaatcagctgatc

SEQ ID NO: 270395 - DNA, 20 bp, synthetic construct
  source 1..20: mol_type = other DNA
tcccagaagaatcagctgat

SEQ ID NO: 270396 - DNA, 20 bp, synthetic construct
  source 1..20: mol_type = other DNA
ctcccagaagaatcagctga

SEQ ID NO: 270397 - DNA, 20 bp, synthetic construct
  source 1..20: mol_type = other DNA
gctcccagaagaatcagctg

SEQ ID NO: 270398 - DNA, 20 bp, synthetic construct
  source 1..20: mol_type = other DNA
tgctcccagaagaatcagct

SEQ ID NO: 270399 - DNA, 20 bp, synthetic construct
  source 1..20: mol_type = other DNA
ttgctcccagaagaatcagc

SEQ ID NO: 270400 - DNA, 20 bp, synthetic construct
  source 1..20: mol_type = other DNA
cttgctcccagaagaatcag

SEQ ID NO: 270401 - DNA, 20 bp, synthetic construct
  source 1..20: mol_type = other DNA
acttgctcccagaagaatca

SEQ ID NO: 270402 - DNA, 20 bp, synthetic construct
  source 1..20: mol_type = other DNA
cacttgctcccagaagaatc

SEQ ID NO: 270403 - DNA, 20 bp, synthetic construct
  source 1..20: mol_type = other DNA
ccacttgctcccagaagaat

SEQ ID NO: 270404 - DNA, 20 bp, synthetic construct
  source 1..20: mol_type = other DNA
cccacttgctcccagaagaa

SEQ ID NO: 270405 - DNA, 20 bp, synthetic construct
  source 1..20: mol_type = other DNA
acccacttgctcccagaaga

SEQ ID NO: 270406 - DNA, 20 bp, synthetic construct
  source 1..20: mol_type = other DNA
cacccacttgctcccagaag

SEQ ID NO: 270407 - DNA, 20 bp, synthetic construct
  source 1..20: mol_type = other DNA
gcacccacttgctcccagaa

SEQ ID NO: 270408 - DNA, 20 bp, synthetic construct
  source 1..20: mol_type = other DNA
agcacccacttgctcccaga

SEQ ID NO: 270409 - DNA, 20 bp, synthetic construct
  source 1..20: mol_type = other DNA
gagcacccacttgctcccag

SEQ ID NO: 270410 - DNA, 20 bp, synthetic construct
  source 1..20: mol_type = other DNA
cgagcacccacttgctccca

SEQ ID NO: 270411 - DNA, 20 bp, synthetic construct
  source 1..20: mol_type = other DNA
gcgagcacccacttgctccc

SEQ ID NO: 270412 - DNA, 20 bp, synthetic construct
  source 1..20: mol_type = other DNA
cgcgagcacccacttgctcc

SEQ ID NO: 270413 - DNA, 20 bp, synthetic construct
  source 1..20: mol_type = other DNA
tcgcgagcacccacttgctc

SEQ ID NO: 270414 - DNA, 20 bp, synthetic construct
  source 1..20: mol_type = other DNA
ctcgcgagcacccacttgct

SEQ ID NO: 270415 - DNA, 20 bp, synthetic construct
  source 1..20: mol_type = other DNA
gctcgcgagcacccacttgc

SEQ ID NO: 270416 - DNA, 20 bp, synthetic construct
  source 1..20: mol_type = other DNA
agctcgcgagcacccacttg

SEQ ID NO: 270417 - DNA, 20 bp, synthetic construct
  source 1..20: mol_type = other DNA
gagctcgcgagcacccactt

SEQ ID NO: 270418 - DNA, 20 bp, synthetic construct
  source 1..20: mol_type = other DNA
agagctcgcgagcacccact

SEQ ID NO: 270419 - DNA, 20 bp, synthetic construct
  source 1..20: mol_type = other DNA
gagagctcgcgagcacccac

SEQ ID NO: 270420 - DNA, 20 bp, synthetic construct
  source 1..20: mol_type = other DNA
ggagagctcgcgagcaccca

SEQ ID NO: 270421 - DNA, 20 bp, synthetic construct
  source 1..20: mol_type = other DNA
tggagagctcgcgagcaccc

SEQ ID NO: 270422 - DNA, 20 bp, synthetic construct
  source 1..20: mol_type = other DNA
ctggagagctcgcgagcacc

SEQ ID NO: 270423 - DNA, 20 bp, synthetic construct
  source 1..20: mol_type = other DNA
gctggagagctcgcgagcac

SEQ ID NO: 270424 - DNA, 20 bp, synthetic construct
  source 1..20: mol_type = other DNA
agctggagagctcgcgagca

SEQ ID NO: 270425 - DNA, 20 bp, synthetic construct
  source 1..20: mol_type = other DNA
aagctggagagctcgcgagc

SEQ ID NO: 270426 - DNA, 20 bp, synthetic construct
  source 1..20: mol_type = other DNA
gaagctggagagctcgcgag

SEQ ID NO: 270427 - DNA, 20 bp, synthetic construct
  source 1..20: mol_type = other DNA
ggaagctggagagctcgcga

SEQ ID NO: 270428 - DNA, 20 bp, synthetic construct
  source 1..20: mol_type = other DNA
aggaagctggagagctcgcg

SEQ ID NO: 270429 - DNA, 20 bp, synthetic construct
  source 1..20: mol_type = other DNA
taggaagctggagagctcgc

SEQ ID NO: 270430 - DNA, 20 bp, synthetic construct
  source 1..20: mol_type = other DNA
ttaggaagctggagagctcg

SEQ ID NO: 270431 - DNA, 20 bp, synthetic construct
  source 1..20: mol_type = other DNA
tttaggaagctggagagctc

SEQ ID NO: 270432 - DNA, 20 bp, synthetic construct
  source 1..20: mol_type = other DNA
ctttaggaagctggagagct

SEQ ID NO: 270433 - DNA, 20 bp, synthetic construct
  source 1..20: mol_type = other DNA
cctttaggaagctggagagc

SEQ ID NO: 270434 - DNA, 20 bp, synthetic construct
  source 1..20: mol_type = other DNA
acctttaggaagctggagag

SEQ ID NO: 270435 - DNA, 20 bp, synthetic construct
  source 1..20: mol_type = other DNA
cacctttaggaagctggaga

SEQ ID NO: 270436 - DNA, 20 bp, synthetic construct
  source 1..20: mol_type = other DNA
ccacctttaggaagctggag

SEQ ID NO: 270437 - DNA, 20 bp, synthetic construct
  source 1..20: mol_type = other DNA
tccacctttaggaagctgga

SEQ ID NO: 270438 - DNA, 20 bp, synthetic construct
  source 1..20: mol_type = other DNA
ctccacctttaggaagctgg

SEQ ID NO: 270439 - DNA, 20 bp, synthetic construct
  source 1..20: mol_type = other DNA
tctccacctttaggaagctg

SEQ ID NO: 270440 - DNA, 20 bp, synthetic construct
  source 1..20: mol_type = other DNA
ttctccacctttaggaagct

SEQ ID NO: 270441 - DNA, 20 bp, synthetic construct
  source 1..20: mol_type = other DNA
cttctccacctttaggaagc

SEQ ID NO: 270442 - DNA, 20 bp, synthetic construct
  source 1..20: mol_type = other DNA
gcttctccacctttaggaag

SEQ ID NO: 270443 - DNA, 20 bp, synthetic construct
  source 1..20: mol_type = other DNA
tgcttctccacctttaggaa

SEQ ID NO: 270444 - DNA, 20 bp, synthetic construct
  source 1..20: mol_type = other DNA
gtgcttctccacctttagga

SEQ ID NO: 270445 - DNA, 20 bp, synthetic construct
  source 1..20: mol_type = other DNA
tgtgcttctccacctttagg

SEQ ID NO: 270446 - DNA, 20 bp, synthetic construct
  source 1..20: mol_type = other DNA
ctgtgcttctccacctttag

SEQ ID NO: 270447 - DNA, 20 bp, synthetic construct
  source 1..20: mol_type = other DNA
tctgtgcttctccaccttta

SEQ ID NO: 270448 - DNA, 20 bp, synthetic construct
  source 1..20: mol_type = other DNA
gtctgtgcttctccaccttt

SEQ ID NO: 270449 - DNA, 20 bp, synthetic construct
  source 1..20: mol_type = other DNA
agtctgtgcttctccacctt

SEQ ID NO: 270450 - DNA, 20 bp, synthetic construct
  source 1..20: mol_type = other DNA
aagtctgtgcttctccacct

SEQ ID NO: 270451 - DNA, 20 bp, synthetic construct
  source 1..20: mol_type = other DNA
gaagtctgtgcttctccacc

SEQ ID NO: 270452 - DNA, 20 bp, synthetic construct
  source 1..20: mol_type = other DNA
cgaagtctgtgcttctccac

SEQ ID NO: 270453 - DNA, 20 bp, synthetic construct
  source 1..20: mol_type = other DNA
ccgaagtctgtgcttctcca

SEQ ID NO: 270454 - DNA, 20 bp, synthetic construct
  source 1..20: mol_type = other DNA
cccgaagtctgtgcttctcc

SEQ ID NO: 270455 - DNA, 20 bp, synthetic construct
  source 1..20: mol_type = other DNA
ccccgaagtctgtgcttctc

SEQ ID NO: 270456 - DNA, 20 bp, synthetic construct
  source 1..20: mol_type = other DNA
cccccgaagtctgtgcttct

SEQ ID NO: 270457 - DNA, 20 bp, synthetic construct
  source 1..20: mol_type = other DNA
gcccccgaagtctgtgcttc

SEQ ID NO: 270458 - DNA, 20 bp, synthetic construct
  source 1..20: mol_type = other DNA
ggcccccgaagtctgtgctt

SEQ ID NO: 270459 - DNA, 20 bp, synthetic construct
  source 1..20: mol_type = other DNA
aggcccccgaagtctgtgct

SEQ ID NO: 270460 - DNA, 20 bp, synthetic construct
  source 1..20: mol_type = other DNA
caggcccccgaagtctgtgc

SEQ ID NO: 270461 - DNA, 20 bp, synthetic construct
  source 1..20: mol_type = other DNA
ccaggcccccgaagtctgtg

SEQ ID NO: 270462 - DNA, 20 bp, synthetic construct
  source 1..20: mol_type = other DNA
gccaggcccccgaagtctgt

SEQ ID NO: 270463 - DNA, 20 bp, synthetic construct
  source 1..20: mol_type = other DNA
ggccaggcccccgaagtctg

SEQ ID NO: 270464 - DNA, 20 bp, synthetic construct
  source 1..20: mol_type = other DNA
aggccaggcccccgaagtct

SEQ ID NO: 270465 - DNA, 20 bp, synthetic construct
  source 1..20: mol_type = other DNA
caggccaggcccccgaagtc

SEQ ID NO: 270466 - DNA, 20 bp, synthetic construct
  source 1..20: mol_type = other DNA
ccaggccaggcccccgaagt

SEQ ID NO: 270467 - DNA, 20 bp, synthetic construct
  source 1..20: mol_type = other DNA
tccaggccaggcccccgaag

SEQ ID NO: 270468 - DNA, 20 bp, synthetic construct
  source 1..20: mol_type = other DNA
atccaggccaggcccccgaa

SEQ ID NO: 270469 - DNA, 20 bp, synthetic construct
  source 1..20: mol_type = other DNA
gatccaggccaggcccccga

SEQ ID NO: 270470 - DNA, 20 bp, synthetic construct
  source 1..20: mol_type = other DNA
ggatccaggccaggcccccg

SEQ ID NO: 270471 - DNA, 20 bp, synthetic construct
  source 1..20: mol_type = other DNA
gggatccaggccaggccccc

SEQ ID NO: 270472 - DNA, 20 bp, synthetic construct
  source 1..20: mol_type = other DNA
agggatccaggccaggcccc

SEQ ID NO: 270473 - DNA, 20 bp, synthetic construct
  source 1..20: mol_type = other DNA
aagggatccaggccaggccc

SEQ ID NO: 270474 - DNA, 20 bp, synthetic construct
  source 1..20: mol_type = other DNA
aaagggatccaggccaggcc

SEQ ID NO: 270475 - DNA, 20 bp, synthetic construct
  source 1..20: mol_type = other DNA
gaaagggatccaggccaggc

SEQ ID NO: 270476 - DNA, 20 bp, synthetic construct
  source 1..20: mol_type = other DNA
ggaaagggatccaggccagg

SEQ ID NO: 270477 - DNA, 20 bp, synthetic construct
  source 1..20: mol_type = other DNA
gggaaagggatccaggccag

SEQ ID NO: 270478 - DNA, 20 bp, synthetic construct
  source 1..20: mol_type = other DNA
ggggaaagggatccaggcca

SEQ ID NO: 270479 - DNA, 20 bp, synthetic construct
  source 1..20: mol_type = other DNA
tggggaaagggatccaggcc

SEQ ID NO: 270480 - DNA, 20 bp, synthetic construct
  source 1..20: mol_type = other DNA
atggggaaagggatccaggc

SEQ ID NO: 270481 - DNA, 20 bp, synthetic construct
  source 1..20: mol_type = other DNA
aatggggaaagggatccagg

SEQ ID NO: 270482 - DNA, 20 bp, synthetic construct
  source 1..20: mol_type = other DNA
gaatggggaaagggatccag

SEQ ID NO: 270483 - DNA, 20 bp, synthetic construct
  source 1..20: mol_type = other DNA
ggaatggggaaagggatcca

SEQ ID NO: 270484 - DNA, 20 bp, synthetic construct
  source 1..20: mol_type = other DNA
aggaatggggaaagggatcc

SEQ ID NO: 270485 - DNA, 20 bp, synthetic construct
  source 1..20: mol_type = other DNA
caggaatggggaaagggatc

SEQ ID NO: 270486 - DNA, 20 bp, synthetic construct
  source 1..20: mol_type = other DNA
acaggaatggggaaagggat

SEQ ID NO: 270487 - DNA, 20 bp, synthetic construct
  source 1..20: mol_type = other DNA
gacaggaatggggaaaggga

SEQ ID NO: 270488 - DNA, 20 bp, synthetic construct
  source 1..20: mol_type = other DNA
ggacaggaatggggaaaggg

SEQ ID NO: 270489 - DNA, 20 bp, synthetic construct
  source 1..20: mol_type = other DNA
gggacaggaatggggaaagg

SEQ ID NO: 270490 - DNA, 20 bp, synthetic construct
  source 1..20: mol_type = other DNA
agggacaggaatggggaaag

SEQ ID NO: 270491 - DNA, 20 bp, synthetic construct
  source 1..20: mol_type = other DNA
cagggacaggaatggggaaa

SEQ ID NO: 270492 - DNA, 20 bp, synthetic construct
  source 1..20: mol_type = other DNA
acagggacaggaatggggaa

SEQ ID NO: 270493 - DNA, 20 bp, synthetic construct
  source 1..20: mol_type = other DNA
cacagggacaggaatgggga

SEQ ID NO: 270494 - DNA, 20 bp, synthetic construct
  source 1..20: mol_type = other DNA
gcacagggacaggaatgggg

SEQ ID NO: 270495 - DNA, 20 bp, synthetic construct
  source 1..20: mol_type = other DNA
ggcacagggacaggaatggg

SEQ ID NO: 270496 - DNA, 20 bp, synthetic construct
  source 1..20: mol_type = other DNA
gggcacagggacaggaatgg

SEQ ID NO: 270497 - DNA, 20 bp, synthetic construct
  source 1..20: mol_type = other DNA
ggggcacagggacaggaatg

SEQ ID NO: 270498 - DNA, 20 bp, synthetic construct
  source 1..20: mol_type = other DNA
aggggcacagggacaggaat

SEQ ID NO: 270499 - DNA, 20 bp, synthetic construct
  source 1..20: mol_type = other DNA
gaggggcacagggacaggaa

SEQ ID NO: 270500 - DNA, 20 bp, synthetic construct
  source 1..20: mol_type = other DNA
cgaggggcacagggacagga

SEQ ID NO: 270501 - DNA, 20 bp, synthetic construct
  source 1..20: mol_type = other DNA
acgaggggcacagggacagg

SEQ ID NO: 270502 - DNA, 20 bp, synthetic construct
  source 1..20: mol_type = other DNA
gacgaggggcacagggacag

SEQ ID NO: 270503 - DNA, 20 bp, synthetic construct
  source 1..20: mol_type = other DNA
agacgaggggcacagggaca

SEQ ID NO: 270504 - DNA, 20 bp, synthetic construct
  source 1..20: mol_type = other DNA
cagacgaggggcacagggac

SEQ ID NO: 270505 - DNA, 20 bp, synthetic construct
  source 1..20: mol_type = other DNA
ccagacgaggggcacaggga

SEQ ID NO: 270506 - DNA, 20 bp, synthetic construct
  source 1..20: mol_type = other DNA
cccagacgaggggcacaggg

SEQ ID NO: 270507 - DNA, 20 bp, synthetic construct
  source 1..20: mol_type = other DNA
acccagacgaggggcacagg

SEQ ID NO: 270508 - DNA, 20 bp, synthetic construct
  source 1..20: mol_type = other DNA
cacccagacgaggggcacag

SEQ ID NO: 270509 - DNA, 20 bp, synthetic construct
  source 1..20: mol_type = other DNA
gcacccagacgaggggcaca

SEQ ID NO: 270510 - DNA, 20 bp, synthetic construct
  source 1..20: mol_type = other DNA
cgcacccagacgaggggcac

SEQ ID NO: 270511 - DNA, 20 bp, synthetic construct
  source 1..20: mol_type = other DNA
acgcacccagacgaggggca

SEQ ID NO: 270512 - DNA, 20 bp, synthetic construct
  source 1..20: mol_type = other DNA
aacgcacccagacgaggggc

SEQ ID NO: 270513 - DNA, 20 bp, synthetic construct
  source 1..20: mol_type = other DNA
taacgcacccagacgagggg

SEQ ID NO: 270514 - DNA, 20 bp, synthetic construct
  source 1..20: mol_type = other DNA
ctaacgcacccagacgaggg

SEQ ID NO: 270515 - DNA, 20 bp, synthetic construct
  source 1..20: mol_type = other DNA
cctaacgcacccagacgagg

SEQ ID NO: 270516 - DNA, 20 bp, synthetic construct
  source 1..20: mol_type = other DNA
ccctaacgcacccagacgag

SEQ ID NO: 270517 - DNA, 20 bp, synthetic construct
  source 1..20: mol_type = other DNA
gccctaacgcacccagacga

SEQ ID NO: 270518 - DNA, 20 bp, synthetic construct
  source 1..20: mol_type = other DNA
agccctaacgcacccagacg

SEQ ID NO: 270519 - DNA, 20 bp, synthetic construct
  source 1..20: mol_type = other DNA
cagccctaacgcacccagac

SEQ ID NO: 270520 - DNA, 20 bp, synthetic construct
  source 1..20: mol_type = other DNA
tcagccctaacgcacccaga

SEQ ID NO: 270521 - DNA, 20 bp, synthetic construct
  source 1..20: mol_type = other DNA
gtcagccctaacgcacccag

SEQ ID NO: 270522 - DNA, 20 bp, synthetic construct
  source 1..20: mol_type = other DNA
tgtcagccctaacgcaccca

SEQ ID NO: 270523 - DNA, 20 bp, synthetic construct
  source 1..20: mol_type = other DNA
atgtcagccctaacgcaccc

SEQ ID NO: 270524 - DNA, 20 bp, synthetic construct
  source 1..20: mol_type = other DNA
tatgtcagccctaacgcacc

SEQ ID NO: 270525 - DNA, 20 bp, synthetic construct
  source 1..20: mol_type = other DNA
gtatgtcagccctaacgcac

SEQ ID NO: 270526 - DNA, 20 bp, synthetic construct
  source 1..20: mol_type = other DNA
tgtatgtcagccctaacgca

SEQ ID NO: 270527 - DNA, 20 bp, synthetic construct
  source 1..20: mol_type = other DNA
ttgtatgtcagccctaacgc

SEQ ID NO: 270528 - DNA, 20 bp, synthetic construct
  source 1..20: mol_type = other DNA
tttgtatgtcagccctaacg

SEQ ID NO: 270529 - DNA, 20 bp, synthetic construct
  source 1..20: mol_type = other DNA
ctttgtatgtcagccctaac

SEQ ID NO: 270530 - DNA, 20 bp, synthetic construct
  source 1..20: mol_type = other DNA
gctttgtatgtcagccctaa

SEQ ID NO: 270531 - DNA, 20 bp, synthetic construct
  source 1..20: mol_type = other DNA
tgctttgtatgtcagcccta

SEQ ID NO: 270532 - DNA, 20 bp, synthetic construct
  source 1..20: mol_type = other DNA
gtgctttgtatgtcagccct

SEQ ID NO: 270533 - DNA, 20 bp, synthetic construct
  source 1..20: mol_type = other DNA
ggtgctttgtatgtcagccc

SEQ ID NO: 270534 - DNA, 20 bp, synthetic construct
  source 1..20: mol_type = other DNA
tggtgctttgtatgtcagcc

SEQ ID NO: 270535 - DNA, 20 bp, synthetic construct
  source 1..20: mol_type = other DNA
gtggtgctttgtatgtcagc

SEQ ID NO: 270536 - DNA, 20 bp, synthetic construct
  source 1..20: mol_type = other DNA
tgtggtgctttgtatgtcag

SEQ ID NO: 270537 - DNA, 20 bp, synthetic construct
  source 1..20: mol_type = other DNA
ctgtggtgctttgtatgtca

SEQ ID NO: 270538 - DNA, 20 bp, synthetic construct
  source 1..20: mol_type = other DNA
actgtggtgctttgtatgtc

SEQ ID NO: 270539 - DNA, 20 bp, synthetic construct
  source 1..20: mol_type = other DNA
cactgtggtgctttgtatgt

SEQ ID NO: 270540 - DNA, 20 bp, synthetic construct
  source 1..20: mol_type = other DNA
tcactgtggtgctttgtatg

SEQ ID NO: 270541 - DNA, 20 bp, synthetic construct
  source 1..20: mol_type = other DNA
ttcactgtggtgctttgtat

SEQ ID NO: 270542 - DNA, 20 bp, synthetic construct
  source 1..20: mol_type = other DNA
tttcactgtggtgctttgta

SEQ ID NO: 270543 - DNA, 20 bp, synthetic construct
  source 1..20: mol_type = other DNA
ctttcactgtggtgctttgt

SEQ ID NO: 270544 - DNA, 20 bp, synthetic construct
  source 1..20: mol_type = other DNA
tctttcactgtggtgctttg

SEQ ID NO: 270545 - DNA, 20 bp, synthetic construct
  source 1..20: mol_type = other DNA
ttctttcactgtggtgcttt

SEQ ID NO: 270546 - DNA, 20 bp, synthetic construct
  source 1..20: mol_type = other DNA
gttctttcactgtggtgctt

SEQ ID NO: 270547 - DNA, 20 bp, synthetic construct
  source 1..20: mol_type = other DNA
tgttctttcactgtggtgct

SEQ ID NO: 270548 - DNA, 20 bp, synthetic construct
  source 1..20: mol_type = other DNA
ctgttctttcactgtggtgc

SEQ ID NO: 270549 - DNA, 20 bp, synthetic construct
  source 1..20: mol_type = other DNA
gctgttctttcactgtggtg

SEQ ID NO: 270550 - DNA, 20 bp, synthetic construct
  source 1..20: mol_type = other DNA
tgctgttctttcactgtggt

SEQ ID NO: 270551 - DNA, 20 bp, synthetic construct
  source 1..20: mol_type = other DNA
ctgctgttctttcactgtgg

SEQ ID NO: 270552 - DNA, 20 bp, synthetic construct
  source 1..20: mol_type = other DNA
actgctgttctttcactgtg

SEQ ID NO: 270553 - DNA, 20 bp, synthetic construct
  source 1..20: mol_type = other DNA
tactgctgttctttcactgt

SEQ ID NO: 270554 - DNA, 20 bp, synthetic construct
  source 1..20: mol_type = other DNA
atactgctgttctttcactg

SEQ ID NO: 270555 - DNA, 20 bp, synthetic construct
  source 1..20: mol_type = other DNA
catactgctgttctttcact

SEQ ID NO: 270556 - DNA, 20 bp, synthetic construct
  source 1..20: mol_type = other DNA
gcatactgctgttctttcac

SEQ ID NO: 270557 - DNA, 20 bp, synthetic construct
  source 1..20: mol_type = other DNA
ggcatactgctgttctttca

SEQ ID NO: 270558 - DNA, 20 bp, synthetic construct
  source 1..20: mol_type = other DNA
aggcatactgctgttctttc

SEQ ID NO: 270559 - DNA, 20 bp, synthetic construct
  source 1..20: mol_type = other DNA
gaggcatactgctgttcttt

SEQ ID NO: 270560 - DNA, 20 bp, synthetic construct
  source 1..20: mol_type = other DNA
ggaggcatactgctgttctt

SEQ ID NO: 270561 - DNA, 20 bp, synthetic construct
  source 1..20: mol_type = other DNA
aggaggcatactgctgttct

SEQ ID NO: 270562 - DNA, 20 bp, synthetic construct
  source 1..20: mol_type = other DNA
gaggaggcatactgctgttc

SEQ ID NO: 270563 - DNA, 20 bp, synthetic construct
  source 1..20: mol_type = other DNA
tgaggaggcatactgctgtt

SEQ ID NO: 270564 - DNA, 20 bp, synthetic construct
  source 1..20: mol_type = other DNA
gtgaggaggcatactgctgt

SEQ ID NO: 270565 - DNA, 20 bp, synthetic construct
  source 1..20: mol_type = other DNA
agtgaggaggcatactgctg

SEQ ID NO: 270566 - DNA, 20 bp, synthetic construct
  source 1..20: mol_type = other DNA
tagtgaggaggcatactgct

SEQ ID NO: 270567 - DNA, 20 bp, synthetic construct
  source 1..20: mol_type = other DNA
ctagtgaggaggcatactgc

SEQ ID NO: 270568 - DNA, 20 bp, synthetic construct
  source 1..20: mol_type = other DNA
gctagtgaggaggcatactg

SEQ ID NO: 270569 - DNA, 20 bp, synthetic construct
  source 1..20: mol_type = other DNA
ggctagtgaggaggcatact

SEQ ID NO: 270570 - DNA, 20 bp, synthetic construct
  source 1..20: mol_type = other DNA
tggctagtgaggaggcatac

SEQ ID NO: 270571 - DNA, 20 bp, synthetic construct
  source 1..20: mol_type = other DNA
ctggctagtgaggaggcata

SEQ ID NO: 270572 - DNA, 20 bp, synthetic construct
  source 1..20: mol_type = other DNA
cctggctagtgaggaggcat

SEQ ID NO: 270573 - DNA, 20 bp, synthetic construct
  source 1..20: mol_type = other DNA
acctggctagtgaggaggca

SEQ ID NO: 270574 - DNA, 20 bp, synthetic construct
  source 1..20: mol_type = other DNA
cacctggctagtgaggaggc

SEQ ID NO: 270575 - DNA, 20 bp, synthetic construct
  source 1..20: mol_type = other DNA
acacctggctagtgaggagg

SEQ ID NO: 270576 - DNA, 20 bp, synthetic construct
  source 1..20: mol_type = other DNA
cacacctggctagtgaggag

SEQ ID NO: 270577 - DNA, 20 bp, synthetic construct
  source 1..20: mol_type = other DNA
ccacacctggctagtgagga

SEQ ID NO: 270578 - DNA, 20 bp, synthetic construct
  source 1..20: mol_type = other DNA
cccacacctggctagtgagg

SEQ ID NO: 270579 - DNA, 20 bp, synthetic construct
  source 1..20: mol_type = other DNA
gcccacacctggctagtgag

SEQ ID NO: 270580 - DNA, 20 bp, synthetic construct
  source 1..20: mol_type = other DNA
cgcccacacctggctagtga

SEQ ID NO: 270581 - DNA, 20 bp, synthetic construct
  source 1..20: mol_type = other DNA
ccgcccacacctggctagtg

SEQ ID NO: 270582 - DNA, 20 bp, synthetic construct
  source 1..20: mol_type = other DNA
cccgcccacacctggctagt

SEQ ID NO: 270583 - DNA, 20 bp, synthetic construct
  source 1..20: mol_type = other DNA
acccgcccacacctggctag

SEQ ID NO: 270584 - DNA, 20 bp, synthetic construct
  source 1..20: mol_type = other DNA
cacccgcccacacctggcta

SEQ ID NO: 270585 - DNA, 20 bp, synthetic construct
  source 1..20: mol_type = other DNA
ccacccgcccacacctggct

SEQ ID NO: 270586 - DNA, 20 bp, synthetic construct
  source 1..20: mol_type = other DNA
cccacccgcccacacctggc

SEQ ID NO: 270587 - DNA, 20 bp, synthetic construct
  source 1..20: mol_type = other DNA
acccacccgcccacacctgg

SEQ ID NO: 270588 - DNA, 20 bp, synthetic construct
  source 1..20: mol_type = other DNA
aacccacccgcccacacctg

SEQ ID NO: 270589 - DNA, 20 bp, synthetic construct
  source 1..20: mol_type = other DNA
aaacccacccgcccacacct

SEQ ID NO: 270590 - DNA, 20 bp, synthetic construct
  source 1..20: mol_type = other DNA
gaaacccacccgcccacacc

SEQ ID NO: 270591 - DNA, 20 bp, synthetic construct
  source 1..20: mol_type = other DNA
agaaacccacccgcccacac

SEQ ID NO: 270592 - DNA, 20 bp, synthetic construct
  source 1..20: mol_type = other DNA
aagaaacccacccgcccaca

SEQ ID NO: 270593 - DNA, 20 bp, synthetic construct
  source 1..20: mol_type = other DNA
gaagaaacccacccgcccac

SEQ ID NO: 270594 - DNA, 20 bp, synthetic construct
  source 1..20: mol_type = other DNA
ggaagaaacccacccgccca

SEQ ID NO: 270595 - DNA, 20 bp, synthetic construct
  source 1..20: mol_type = other DNA
tggaagaaacccacccgccc

SEQ ID NO: 270596 - DNA, 20 bp, synthetic construct
  source 1..20: mol_type = other DNA
ttggaagaaacccacccgcc

SEQ ID NO: 270597 - DNA, 20 bp, synthetic construct
  source 1..20: mol_type = other DNA
cttggaagaaacccacccgc

SEQ ID NO: 270598 - DNA, 20 bp, synthetic construct
  source 1..20: mol_type = other DNA
ccttggaagaaacccacccg

SEQ ID NO: 270599 - DNA, 20 bp, synthetic construct
  source 1..20: mol_type = other DNA
gccttggaagaaacccaccc

SEQ ID NO: 270600 - DNA, 20 bp, synthetic construct
  source 1..20: mol_type = other DNA
ggccttggaagaaacccacc

SEQ ID NO: 270601 - DNA, 20 bp, synthetic construct
  source 1..20: mol_type = other DNA
aggccttggaagaaacccac

SEQ ID NO: 270602 - DNA, 20 bp, synthetic construct
  source 1..20: mol_type = other DNA
gaggccttggaagaaaccca

SEQ ID NO: 270603 - DNA, 20 bp, synthetic construct
  source 1..20: mol_type = other DNA
agaggccttggaagaaaccc

SEQ ID NO: 270604 - DNA, 20 bp, synthetic construct
  source 1..20: mol_type = other DNA
gagaggccttggaagaaacc

SEQ ID NO: 270605 - DNA, 20 bp, synthetic construct
  source 1..20: mol_type = other DNA
agagaggccttggaagaaac

SEQ ID NO: 270606 - DNA, 20 bp, synthetic construct
  source 1..20: mol_type = other DNA
cagagaggccttggaagaaa

SEQ ID NO: 270607 - DNA, 20 bp, synthetic construct
  source 1..20: mol_type = other DNA
acagagaggccttggaagaa

SEQ ID NO: 270608 - DNA, 20 bp, synthetic construct
  source 1..20: mol_type = other DNA
cacagagaggccttggaaga

SEQ ID NO: 270609 - DNA, 20 bp, synthetic construct
  source 1..20: mol_type = other DNA
ccacagagaggccttggaag

SEQ ID NO: 270610 - DNA, 20 bp, synthetic construct
  source 1..20: mol_type = other DNA
gccacagagaggccttggaa

SEQ ID NO: 270611 - DNA, 20 bp, synthetic construct
  source 1..20: mol_type = other DNA
ggccacagagaggccttgga

SEQ ID NO: 270612 - DNA, 20 bp, synthetic construct
  source 1..20: mol_type = other DNA
cggccacagagaggccttgg

SEQ ID NO: 270613 - DNA, 20 bp, synthetic construct
  source 1..20: mol_type = other DNA
acggccacagagaggccttg

SEQ ID NO: 270614 - DNA, 20 bp, synthetic construct
  source 1..20: mol_type = other DNA
cacggccacagagaggcctt

SEQ ID NO: 270615 - DNA, 20 bp, synthetic construct
  source 1..20: mol_type = other DNA
ccacggccacagagaggcct

SEQ ID NO: 270616 - DNA, 20 bp, synthetic construct
  source 1..20: mol_type = other DNA
cccacggccacagagaggcc

SEQ ID NO: 270617 - DNA, 20 bp, synthetic construct
  source 1..20: mol_type = other DNA
acccacggccacagagaggc

SEQ ID NO: 270618 - DNA, 20 bp, synthetic construct
  source 1..20: mol_type = other DNA
tacccacggccacagagagg

SEQ ID NO: 270619 - DNA, 20 bp, synthetic construct
  source 1..20: mol_type = other DNA
ctacccacggccacagagag

SEQ ID NO: 270620 - DNA, 20 bp, synthetic construct
  source 1..20: mol_type = other DNA
gctacccacggccacagaga

SEQ ID NO: 270621 - DNA, 20 bp, synthetic construct
  source 1..20: mol_type = other DNA
ggctacccacggccacagag

SEQ ID NO: 270622 - DNA, 20 bp, synthetic construct
  source 1..20: mol_type = other DNA
tggctacccacggccacaga

SEQ ID NO: 270623 - DNA, 20 bp, synthetic construct
  source 1..20: mol_type = other DNA
gtggctacccacggccacag

SEQ ID NO: 270624 - DNA, 20 bp, synthetic construct
  source 1..20: mol_type = other DNA
ggtggctacccacggccaca

SEQ ID NO: 270625 - DNA, 20 bp, synthetic construct
  source 1..20: mol_type = other DNA
aggtggctacccacggccac

SEQ ID NO: 270626 - DNA, 20 bp, synthetic construct
  source 1..20: mol_type = other DNA
gaggtggctacccacggcca

SEQ ID NO: 270627 - DNA, 20 bp, synthetic construct
  source 1..20: mol_type = other DNA
agaggtggctacccacggcc

SEQ ID NO: 270628 - DNA, 20 bp, synthetic construct
  source 1..20: mol_type = other DNA
cagaggtggctacccacggc

SEQ ID NO: 270629 - DNA, 20 bp, synthetic construct
  source 1..20: mol_type = other DNA
acagaggtggctacccacgg

SEQ ID NO: 270630 - DNA, 20 bp, synthetic construct
  source 1..20: mol_type = other DNA
gacagaggtggctacccacg

SEQ ID NO: 270631 - DNA, 20 bp, synthetic construct
  source 1..20: mol_type = other DNA
ggacagaggtggctacccac

SEQ ID NO: 270632 - DNA, 20 bp, synthetic construct
  source 1..20: mol_type = other DNA
aggacagaggtggctaccca

SEQ ID NO: 270633 - DNA, 20 bp, synthetic construct
  source 1..20: mol_type = other DNA
caggacagaggtggctaccc

SEQ ID NO: 270634 - DNA, 20 bp, synthetic construct
  source 1..20: mol_type = other DNA
gcaggacagaggtggctacc

SEQ ID NO: 270635 - DNA, 20 bp, synthetic construct
  source 1..20: mol_type = other DNA
tgcaggacagaggtggctac

SEQ ID NO: 270636 - DNA, 20 bp, synthetic construct
  source 1..20: mol_type = other DNA
gtgcaggacagaggtggcta

SEQ ID NO: 270637 - DNA, 20 bp, synthetic construct
  source 1..20: mol_type = other DNA
ggtgcaggacagaggtggct

SEQ ID NO: 270638 - DNA, 20 bp, synthetic construct
  source 1..20: mol_type = other DNA
cggtgcaggacagaggtggc

SEQ ID NO: 270639 - DNA, 20 bp, synthetic construct
  source 1..20: mol_type = other DNA
gcggtgcaggacagaggtgg

SEQ ID NO: 270640 - DNA, 20 bp, synthetic construct
  source 1..20: mol_type = other DNA
agcggtgcaggacagaggtg

SEQ ID NO: 270641 - DNA, 20 bp, synthetic construct
  source 1..20: mol_type = other DNA
cagcggtgcaggacagaggt

SEQ ID NO: 270642 - DNA, 20 bp, synthetic construct
  source 1..20: mol_type = other DNA
gcagcggtgcaggacagagg

SEQ ID NO: 270643 - DNA, 20 bp, synthetic construct
  source 1..20: mol_type = other DNA
tgcagcggtgcaggacagag

SEQ ID NO: 270644 - DNA, 20 bp, synthetic construct
  source 1..20: mol_type = other DNA
ctgcagcggtgcaggacaga

SEQ ID NO: 270645 - DNA, 20 bp, synthetic construct
  source 1..20: mol_type = other DNA
actgcagcggtgcaggacag

SEQ ID NO: 270646 - DNA, 20 bp, synthetic construct
  source 1..20: mol_type = other DNA
gactgcagcggtgcaggaca

SEQ ID NO: 270647 - DNA, 20 bp, synthetic construct
  source 1..20: mol_type = other DNA
agactgcagcggtgcaggac

SEQ ID NO: 270648 - DNA, 20 bp, synthetic construct
  source 1..20: mol_type = other DNA
aagactgcagcggtgcagga

SEQ ID NO: 270649 - DNA, 20 bp, synthetic construct
  source 1..20: mol_type = other DNA
gaagactgcagcggtgcagg

SEQ ID NO: 270650 - DNA, 20 bp, synthetic construct
  source 1..20: mol_type = other DNA
ggaagactgcagcggtgcag

SEQ ID NO: 270651 - DNA, 20 bp, synthetic construct
  source 1..20: mol_type = other DNA
gggaagactgcagcggtgca

SEQ ID NO: 270652 - DNA, 20 bp, synthetic construct
  source 1..20: mol_type = other DNA
agggaagactgcagcggtgc

SEQ ID NO: 270653 - DNA, 20 bp, synthetic construct
  source 1..20: mol_type = other DNA
gagggaagactgcagcggtg

SEQ ID NO: 270654 - DNA, 20 bp, synthetic construct
  source 1..20: mol_type = other DNA
agagggaagactgcagcggt

SEQ ID NO: 270655 - DNA, 20 bp, synthetic construct
  source 1..20: mol_type = other DNA
cagagggaagactgcagcgg

SEQ ID NO: 270656 - DNA, 20 bp, synthetic construct
  source 1..20: mol_type = other DNA
acagagggaagactgcagcg

SEQ ID NO: 270657 - DNA, 20 bp, synthetic construct
  source 1..20: mol_type = other DNA
cacagagggaagactgcagc

SEQ ID NO: 270658 - DNA, 20 bp, synthetic construct
  source 1..20: mol_type = other DNA
acacagagggaagactgcag

SEQ ID NO: 270659 - DNA, 20 bp, synthetic construct
  source 1..20: mol_type = other DNA
cacacagagggaagactgca

SEQ ID NO: 270660 - DNA, 20 bp, synthetic construct
  source 1..20: mol_type = other DNA
acacacagagggaagactgc

SEQ ID NO: 270661 - DNA, 20 bp, synthetic construct
  source 1..20: mol_type = other DNA
cacacacagagggaagactg

SEQ ID NO: 270662 - DNA, 20 bp, synthetic construct
  source 1..20: mol_type = other DNA
gcacacacagagggaagact

SEQ ID NO: 270663 - DNA, 20 bp, synthetic construct
  source 1..20: mol_type = other DNA
agcacacacagagggaagac

SEQ ID NO: 270664 - DNA, 20 bp, synthetic construct
  source 1..20: mol_type = other DNA
gagcacacacagagggaaga

SEQ ID NO: 270665 - DNA, 20 bp, synthetic construct
  source 1..20: mol_type = other DNA
ggagcacacacagagggaag

SEQ ID NO: 270666 - DNA, 20 bp, synthetic construct
  source 1..20: mol_type = other DNA
aggagcacacacagagggaa

SEQ ID NO: 270667 - DNA, 20 bp, synthetic construct
  source 1..20: mol_type = other DNA
caggagcacacacagaggga

SEQ ID NO: 270668 - DNA, 20 bp, synthetic construct
  source 1..20: mol_type = other DNA
ccaggagcacacacagaggg

SEQ ID NO: 270669 - DNA, 20 bp, synthetic construct
  source 1..20: mol_type = other DNA
accaggagcacacacagagg

SEQ ID NO: 270670 - DNA, 20 bp, synthetic construct
  source 1..20: mol_type = other DNA
taccaggagcacacacagag

SEQ ID NO: 270671 - DNA, 20 bp, synthetic construct
  source 1..20: mol_type = other DNA
ctaccaggagcacacacaga

SEQ ID NO: 270672 - DNA, 20 bp, synthetic construct
  source 1..20: mol_type = other DNA
gctaccaggagcacacacag

SEQ ID NO: 270673 - DNA, 20 bp, synthetic construct
  source 1..20: mol_type = other DNA
agctaccaggagcacacaca

SEQ ID NO: 270674 - DNA, 20 bp, synthetic construct
  source 1..20: mol_type = other DNA
gagctaccaggagcacacac

SEQ ID NO: 270675 - DNA, 20 bp, synthetic construct
  source 1..20: mol_type = other DNA
agagctaccaggagcacaca

SEQ ID NO: 270676 - DNA, 20 bp, synthetic construct
  source 1..20: mol_type = other DNA
cagagctaccaggagcacac

SEQ ID NO: 270677 - DNA, 20 bp, synthetic construct
  source 1..20: mol_type = other DNA
gcagagctaccaggagcaca

SEQ ID NO: 270678 - DNA, 20 bp, synthetic construct
  source 1..20: mol_type = other DNA
cgcagagctaccaggagcac

SEQ ID NO: 270679 - DNA, 20 bp, synthetic construct
  source 1..20: mol_type = other DNA
gcgcagagctaccaggagca

SEQ ID NO: 270680 - DNA, 20 bp, synthetic construct
  source 1..20: mol_type = other DNA
tgcgcagagctaccaggagc

SEQ ID NO: 270681 - DNA, 20 bp, synthetic construct
  source 1..20: mol_type = other DNA
atgcgcagagctaccaggag

SEQ ID NO: 270682 - DNA, 20 bp, synthetic construct
  source 1..20: mol_type = other DNA
catgcgcagagctaccagga

SEQ ID NO: 270683 - DNA, 20 bp, synthetic construct
  source 1..20: mol_type = other DNA
gcatgcgcagagctaccagg

SEQ ID NO: 270684 - DNA, 20 bp, synthetic construct
  source 1..20: mol_type = other DNA
agcatgcgcagagctaccag

SEQ ID NO: 270685 - DNA, 20 bp, synthetic construct
  source 1..20: mol_type = other DNA
gagcatgcgcagagctacca

SEQ ID NO: 270686 - DNA, 20 bp, synthetic construct
  source 1..20: mol_type = other DNA
tgagcatgcgcagagctacc

SEQ ID NO: 270687 - DNA, 20 bp, synthetic construct
  source 1..20: mol_type = other DNA
atgagcatgcgcagagctac

SEQ ID NO: 270688 - DNA, 20 bp, synthetic construct
  source 1..20: mol_type = other DNA
gatgagcatgcgcagagcta

SEQ ID NO: 270689 - DNA, 20 bp, synthetic construct
  source 1..20: mol_type = other DNA
agatgagcatgcgcagagct

SEQ ID NO: 270690 - DNA, 20 bp, synthetic construct
  source 1..20: mol_type = other DNA
aagatgagcatgcgcagagc

SEQ ID NO: 270691 - DNA, 20 bp, synthetic construct
  source 1..20: mol_type = other DNA
gaagatgagcatgcgcagag

SEQ ID NO: 270692 - DNA, 20 bp, synthetic construct
  source 1..20: mol_type = other DNA
agaagatgagcatgcgcaga

SEQ ID NO: 270693 - DNA, 20 bp, synthetic construct
  source 1..20: mol_type = other DNA
aagaagatgagcatgcgcag

SEQ ID NO: 270694 - DNA, 20 bp, synthetic construct
  source 1..20: mol_type = other DNA
taagaagatgagcatgcgca

SEQ ID NO: 270695 - DNA, 20 bp, synthetic construct
  source 1..20: mol_type = other DNA
ataagaagatgagcatgcgc

SEQ ID NO: 270696 - DNA, 20 bp, synthetic construct
  source 1..20: mol_type = other DNA
tataagaagatgagcatgcg

SEQ ID NO: 270697 - DNA, 20 bp, synthetic construct
  source 1..20: mol_type = other DNA
ttataagaagatgagcatgc

SEQ ID NO: 270698 - DNA, 20 bp, synthetic construct
  source 1..20: mol_type = other DNA
cttataagaagatgagcatg

SEQ ID NO: 270699 - DNA, 20 bp, synthetic construct
  source 1..20: mol_type = other DNA
tcttataagaagatgagcat

SEQ ID NO: 270700 - DNA, 20 bp, synthetic construct
  source 1..20: mol_type = other DNA
ttcttataagaagatgagca

SEQ ID NO: 270701 - DNA, 20 bp, synthetic construct
  source 1..20: mol_type = other DNA
gttcttataagaagatgagc

SEQ ID NO: 270702 - DNA, 20 bp, synthetic construct
  source 1..20: mol_type = other DNA
tgttcttataagaagatgag

SEQ ID NO: 270703 - DNA, 20 bp, synthetic construct
  source 1..20: mol_type = other DNA
gtgttcttataagaagatga

SEQ ID NO: 270704 - DNA, 20 bp, synthetic construct
  source 1..20: mol_type = other DNA
ggtgttcttataagaagatg

SEQ ID NO: 270705 - DNA, 20 bp, synthetic construct
  source 1..20: mol_type = other DNA
tggtgttcttataagaagat

SEQ ID NO: 270706 - DNA, 20 bp, synthetic construct
  source 1..20: mol_type = other DNA
atggtgttcttataagaaga

SEQ ID NO: 270707 - DNA, 20 bp, synthetic construct
  source 1..20: mol_type = other DNA
catggtgttcttataagaag

SEQ ID NO: 270708 - DNA, 20 bp, synthetic construct
  source 1..20: mol_type = other DNA
ccatggtgttcttataagaa

SEQ ID NO: 270709 - DNA, 20 bp, synthetic construct
  source 1..20: mol_type = other DNA
gccatggtgttcttataaga

SEQ ID NO: 270710 - DNA, 20 bp, synthetic construct
  source 1..20: mol_type = other DNA
tgccatggtgttcttataag

SEQ ID NO: 270711 - DNA, 20 bp, synthetic construct
  source 1..20: mol_type = other DNA
ctgccatggtgttcttataa

SEQ ID NO: 270712 - DNA, 20 bp, synthetic construct
  source 1..20: mol_type = other DNA
gctgccatggtgttcttata

SEQ ID NO: 270713 - DNA, 20 bp, synthetic construct
  source 1..20: mol_type = other DNA
agctgccatggtgttcttat

SEQ ID NO: 270714 - DNA, 20 bp, synthetic construct
  source 1..20: mol_type = other DNA
cagctgccatggtgttctta

SEQ ID NO: 270715 - DNA, 20 bp, synthetic construct
  source 1..20: mol_type = other DNA
ccagctgccatggtgttctt

SEQ ID NO: 270716 - DNA, 20 bp, synthetic construct
  source 1..20: mol_type = other DNA
cccagctgccatggtgttct

SEQ ID NO: 270717 - DNA, 20 bp, synthetic construct
  source 1..20: mol_type = other DNA
gcccagctgccatggtgttc

SEQ ID NO: 270718 - DNA, 20 bp, synthetic construct
  source 1..20: mol_type = other DNA
cgcccagctgccatggtgtt

SEQ ID NO: 270719 - DNA, 20 bp, synthetic construct
  source 1..20: mol_type = other DNA
acgcccagctgccatggtgt

SEQ ID NO: 270720 - DNA, 20 bp, synthetic construct
  source 1..20: mol_type = other DNA
tacgcccagctgccatggtg

SEQ ID NO: 270721 - DNA, 20 bp, synthetic construct
  source 1..20: mol_type = other DNA
ctacgcccagctgccatggt

SEQ ID NO: 270722 - DNA, 20 bp, synthetic construct
  source 1..20: mol_type = other DNA
actacgcccagctgccatgg

SEQ ID NO: 270723 - DNA, 20 bp, synthetic construct
  source 1..20: mol_type = other DNA
cactacgcccagctgccatg

SEQ ID NO: 270724 - DNA, 20 bp, synthetic construct
  source 1..20: mol_type = other DNA
ccactacgcccagctgccat

SEQ ID NO: 270725 - DNA, 20 bp, synthetic construct
  source 1..20: mol_type = other DNA
gccactacgcccagctgcca

SEQ ID NO: 270726 - DNA, 20 bp, synthetic construct
  source 1..20: mol_type = other DNA
agccactacgcccagctgcc

SEQ ID NO: 270727 - DNA, 20 bp, synthetic construct
  source 1..20: mol_type = other DNA
gagccactacgcccagctgc

SEQ ID NO: 270728 - DNA, 20 bp, synthetic construct
  source 1..20: mol_type = other DNA
tgagccactacgcccagctg

SEQ ID NO: 270729 - DNA, 20 bp, synthetic construct
  source 1..20: mol_type = other DNA
gtgagccactacgcccagct

SEQ ID NO: 270730 - DNA, 20 bp, synthetic construct
  source 1..20: mol_type = other DNA
cgtgagccactacgcccagc

SEQ ID NO: 270731 - DNA, 20 bp, synthetic construct
  source 1..20: mol_type = other DNA
gcgtgagccactacgcccag

SEQ ID NO: 270732 - DNA, 20 bp, synthetic construct
  source 1..20: mol_type = other DNA
ggcgtgagccactacgccca

SEQ ID NO: 270733 - DNA, 20 bp, synthetic construct
  source 1..20: mol_type = other DNA
aggcgtgagccactacgccc

SEQ ID NO: 270734 - DNA, 20 bp, synthetic construct
  source 1..20: mol_type = other DNA
taggcgtgagccactacgcc

SEQ ID NO: 270735 - DNA, 20 bp, synthetic construct
  source 1..20: mol_type = other DNA
ataggcgtgagccactacgc

SEQ ID NO: 270736 - DNA, 20 bp, synthetic construct
  source 1..20: mol_type = other DNA
tataggcgtgagccactacg

SEQ ID NO: 270737 - DNA, 20 bp, synthetic construct
  source 1..20: mol_type = other DNA
ttataggcgtgagccactac

SEQ ID NO: 270738 - DNA, 20 bp, synthetic construct
  source 1..20: mol_type = other DNA
attataggcgtgagccacta

SEQ ID NO: 270739 - DNA, 20 bp, synthetic construct
  source 1..20: mol_type = other DNA
gattataggcgtgagccact

SEQ ID NO: 270740 - DNA, 20 bp, synthetic construct
  source 1..20: mol_type = other DNA
ggattataggcgtgagccac

SEQ ID NO: 270741 - DNA, 20 bp, synthetic construct
  source 1..20: mol_type = other DNA
gggattataggcgtgagcca

SEQ ID NO: 270742 - DNA, 20 bp, synthetic construct
  source 1..20: mol_type = other DNA
tgggattataggcgtgagcc

SEQ ID NO: 270743 - DNA, 20 bp, synthetic construct
  source 1..20: mol_type = other DNA
ctgggattataggcgtgagc

SEQ ID NO: 270744 - DNA, 20 bp, synthetic construct
  source 1..20: mol_type = other DNA
gctgggattataggcgtgag

SEQ ID NO: 270745 - DNA, 20 bp, synthetic construct
  source 1..20: mol_type = other DNA
tgctgggattataggcgtga

SEQ ID NO: 270746 - DNA, 20 bp, synthetic construct
  source 1..20: mol_type = other DNA
gtgctgggattataggcgtg

SEQ ID NO: 270747 - DNA, 20 bp, synthetic construct
  source 1..20: mol_type = other DNA
agtgctgggattataggcgt

SEQ ID NO: 270748 - DNA, 20 bp, synthetic construct
  source 1..20: mol_type = other DNA
aagtgctgggattataggcg

SEQ ID NO: 270749 - DNA, 20 bp, synthetic construct
  source 1..20: mol_type = other DNA
aaagtgctgggattataggc

SEQ ID NO: 270750 - DNA, 20 bp, synthetic construct
  source 1..20: mol_type = other DNA
caaagtgctgggattatagg

SEQ ID NO: 270751 - DNA, 20 bp, synthetic construct
  source 1..20: mol_type = other DNA
ccaaagtgctgggattatag

SEQ ID NO: 270752 - DNA, 20 bp, synthetic construct
  source 1..20: mol_type = other DNA
cccaaagtgctgggattata

SEQ ID NO: 270753 - DNA, 20 bp, synthetic construct
  source 1..20: mol_type = other DNA
tcccaaagtgctgggattat

SEQ ID NO: 270754 - DNA, 20 bp, synthetic construct
  source 1..20: mol_type = other DNA
ctcccaaagtgctgggatta

SEQ ID NO: 270755 - DNA, 20 bp, synthetic construct
  source 1..20: mol_type = other DNA
cctcccaaagtgctgggatt

SEQ ID NO: 270756 - DNA, 20 bp, synthetic construct
  source 1..20: mol_type = other DNA
gcctcccaaagtgctgggat

SEQ ID NO: 270757 - DNA, 20 bp, synthetic construct
  source 1..20: mol_type = other DNA
agcctcccaaagtgctggga

SEQ ID NO: 270758 - DNA, 20 bp, synthetic construct
  source 1..20: mol_type = other DNA
cagcctcccaaagtgctggg

SEQ ID NO: 270759 - DNA, 20 bp, synthetic construct
  source 1..20: mol_type = other DNA
tcagcctcccaaagtgctgg

SEQ ID NO: 270760 - DNA, 20 bp, synthetic construct
  source 1..20: mol_type = other DNA
ctcagcctcccaaagtgctg

SEQ ID NO: 270761 - DNA, 20 bp, synthetic construct
  source 1..20: mol_type = other DNA
cctcagcctcccaaagtgct

SEQ ID NO: 270762 - DNA, 20 bp, synthetic construct
  source 1..20: mol_type = other DNA
gcctcagcctcccaaagtgc

SEQ ID NO: 270763 - DNA, 20 bp, synthetic construct
  source 1..20: mol_type = other DNA
tgcctcagcctcccaaagtg

SEQ ID NO: 270764 - DNA, 20 bp, synthetic construct
  source 1..20: mol_type = other DNA
ctgcctcagcctcccaaagt

SEQ ID NO: 270765 - DNA, 20 bp, synthetic construct
  source 1..20: mol_type = other DNA
cctgcctcagcctcccaaag

SEQ ID NO: 270766 - DNA, 20 bp, synthetic construct
  source 1..20: mol_type = other DNA
gcctgcctcagcctcccaaa

SEQ ID NO: 270767 - DNA, 20 bp, synthetic construct
  source 1..20: mol_type = other DNA
tgcctgcctcagcctcccaa

SEQ ID NO: 270768 - DNA, 20 bp, synthetic construct
  source 1..20: mol_type = other DNA
ctgcctgcctcagcctccca

SEQ ID NO: 270769 - DNA, 20 bp, synthetic construct
  source 1..20: mol_type = other DNA
tctgcctgcctcagcctccc

SEQ ID NO: 270770 - DNA, 20 bp, synthetic construct
  source 1..20: mol_type = other DNA
atctgcctgcctcagcctcc

SEQ ID NO: 270771 - DNA, 20 bp, synthetic construct
  source 1..20: mol_type = other DNA
gatctgcctgcctcagcctc

SEQ ID NO: 270772 - DNA, 20 bp, synthetic construct
  source 1..20: mol_type = other DNA
tgatctgcctgcctcagcct

SEQ ID NO: 270773 - DNA, 20 bp, synthetic construct
  source 1..20: mol_type = other DNA
gtgatctgcctgcctcagcc

SEQ ID NO: 270774 - DNA, 20 bp, synthetic construct
  source 1..20: mol_type = other DNA
cgtgatctgcctgcctcagc

SEQ ID NO: 270775 - DNA, 20 bp, synthetic construct
  source 1..20: mol_type = other DNA
tcgtgatctgcctgcctcag

SEQ ID NO: 270776 - DNA, 20 bp, synthetic construct
  source 1..20: mol_type = other DNA
ctcgtgatctgcctgcctca

SEQ ID NO: 270777 - DNA, 20 bp, synthetic construct
  source 1..20: mol_type = other DNA
cctcgtgatctgcctgcctc

SEQ ID NO: 270778 - DNA, 20 bp, synthetic construct
  source 1..20: mol_type = other DNA
acctcgtgatctgcctgcct

SEQ ID NO: 270779 - DNA, 20 bp, synthetic construct
  source 1..20: mol_type = other DNA
gacctcgtgatctgcctgcc

SEQ ID NO: 270780 - DNA, 20 bp, synthetic construct
  source 1..20: mol_type = other DNA
tgacctcgtgatctgcctgc

SEQ ID NO: 270781 - DNA, 20 bp, synthetic construct
  source 1..20: mol_type = other DNA
ctgacctcgtgatctgcctg

SEQ ID NO: 270782 - DNA, 20 bp, synthetic construct
  source 1..20: mol_type = other DNA
cctgacctcgtgatctgcct

SEQ ID NO: 270783 - DNA, 20 bp, synthetic construct
  source 1..20: mol_type = other DNA
tcctgacctcgtgatctgcc

SEQ ID NO: 270784 - DNA, 20 bp, synthetic construct
  source 1..20: mol_type = other DNA
ctcctgacctcgtgatctgc

SEQ ID NO: 270785 - DNA, 20 bp, synthetic construct
  source 1..20: mol_type = other DNA
actcctgacctcgtgatctg

SEQ ID NO: 270786 - DNA, 20 bp, synthetic construct
  source 1..20: mol_type = other DNA
aactcctgacctcgtgatct

SEQ ID NO: 270787 - DNA, 20 bp, synthetic construct
  source 1..20: mol_type = other DNA
gaactcctgacctcgtgatc

SEQ ID NO: 270788 - DNA, 20 bp, synthetic construct
  source 1..20: mol_type = other DNA
cgaactcctgacctcgtgat

SEQ ID NO: 270789 - DNA, 20 bp, synthetic construct
  source 1..20: mol_type = other DNA
tcgaactcctgacctcgtga

SEQ ID NO: 270790 - DNA, 20 bp, synthetic construct
  source 1..20: mol_type = other DNA
ctcgaactcctgacctcgtg

SEQ ID NO: 270791 - DNA, 20 bp, synthetic construct
  source 1..20: mol_type = other DNA
tctcgaactcctgacctcgt

SEQ ID NO: 270792 - DNA, 20 bp, synthetic construct
  source 1..20: mol_type = other DNA
gtctcgaactcctgacctcg

SEQ ID NO: 270793 - DNA, 20 bp, synthetic construct
  source 1..20: mol_type = other DNA
ggtctcgaactcctgacctc

SEQ ID NO: 270794 - DNA, 20 bp, synthetic construct
  source 1..20: mol_type = other DNA
tggtctcgaactcctgacct

SEQ ID NO: 270795 - DNA, 20 bp, synthetic construct
  source 1..20: mol_type = other DNA
ttggtctcgaactcctgacc

SEQ ID NO: 270796 - DNA, 20 bp, synthetic construct
  source 1..20: mol_type = other DNA
gttggtctcgaactcctgac

SEQ ID NO: 270797 - DNA, 20 bp, synthetic construct
  source 1..20: mol_type = other DNA
ggttggtctcgaactcctga

SEQ ID NO: 270798 - DNA, 20 bp, synthetic construct
  source 1..20: mol_type = other DNA
aggttggtctcgaactcctg

SEQ ID NO: 270799 - DNA, 20 bp, synthetic construct
  source 1..20: mol_type = other DNA
caggttggtctcgaactcct

SEQ ID NO: 270800 - DNA, 20 bp, synthetic construct
  source 1..20: mol_type = other DNA
tcaggttggtctcgaactcc

SEQ ID NO: 270801 - DNA, 20 bp, synthetic construct
  source 1..20: mol_type = other DNA
gtcaggttggtctcgaactc

SEQ ID NO: 270802 - DNA, 20 bp, synthetic construct
  source 1..20: mol_type = other DNA
ggtcaggttggtctcgaact

SEQ ID NO: 270803 - DNA, 20 bp, synthetic construct
  source 1..20: mol_type = other DNA
tggtcaggttggtctcgaac

SEQ ID NO: 270804 - DNA, 20 bp, synthetic construct
  source 1..20: mol_type = other DNA
ttggtcaggttggtctcgaa

SEQ ID NO: 270805 - DNA, 20 bp, synthetic construct
  source 1..20: mol_type = other DNA
gttggtcaggttggtctcga

SEQ ID NO: 270806 - DNA, 20 bp, synthetic construct
  source 1..20: mol_type = other DNA
tgttggtcaggttggtctcg

SEQ ID NO: 270807 - DNA, 20 bp, synthetic construct
  source 1..20: mol_type = other DNA
ctgttggtcaggttggtctc

SEQ ID NO: 270808 - DNA, 20 bp, synthetic construct
  source 1..20: mol_type = other DNA
cctgttggtcaggttggtct

SEQ ID NO: 270809 - DNA, 20 bp, synthetic construct
  source 1..20: mol_type = other DNA
ccctgttggtcaggttggtc

SEQ ID NO: 270810 - DNA, 20 bp, synthetic construct
  source 1..20: mol_type = other DNA
accctgttggtcaggttggt

SEQ ID NO: 270811 - DNA, 20 bp, synthetic construct
  source 1..20: mol_type = other DNA
caccctgttggtcaggttgg

SEQ ID NO: 270812 - DNA, 20 bp, synthetic construct
  source 1..20: mol_type = other DNA
tcaccctgttggtcaggttg

SEQ ID NO: 270813 - DNA, 20 bp, synthetic construct
  source 1..20: mol_type = other DNA
ttcaccctgttggtcaggtt

SEQ ID NO: 270814 - DNA, 20 bp, synthetic construct
  source 1..20: mol_type = other DNA
tttcaccctgttggtcaggt

SEQ ID NO: 270815 - DNA, 20 bp, synthetic construct
  source 1..20: mol_type = other DNA
gtttcaccctgttggtcagg

SEQ ID NO: 270816 - DNA, 20 bp, synthetic construct
  source 1..20: mol_type = other DNA
ggtttcaccctgttggtcag

SEQ ID NO: 270817 - DNA, 20 bp, synthetic construct
  source 1..20: mol_type = other DNA
aggtttcaccctgttggtca

SEQ ID NO: 270818 - DNA, 20 bp, synthetic construct
  source 1..20: mol_type = other DNA
gaggtttcaccctgttggtc

SEQ ID NO: 270819 - DNA, 20 bp, synthetic construct
  source 1..20: mol_type = other DNA
cgaggtttcaccctgttggt

SEQ ID NO: 270820 - DNA, 20 bp, synthetic construct
  source 1..20: mol_type = other DNA
acgaggtttcaccctgttgg

SEQ ID NO: 270821 - DNA, 20 bp, synthetic construct
  source 1..20: mol_type = other DNA
gacgaggtttcaccctgttg

SEQ ID NO: 270822 - DNA, 20 bp, synthetic construct
  source 1..20: mol_type = other DNA
agacgaggtttcaccctgtt

SEQ ID NO: 270823 - DNA, 20 bp, synthetic construct
  source 1..20: mol_type = other DNA
gagacgaggtttcaccctgt

SEQ ID NO: 270824 - DNA, 20 bp, synthetic construct
  source 1..20: mol_type = other DNA
agagacgaggtttcaccctg

SEQ ID NO: 270825 - DNA, 20 bp, synthetic construct
  source 1..20: mol_type = other DNA
tagagacgaggtttcaccct

SEQ ID NO: 270826 - DNA, 20 bp, synthetic construct
  source 1..20: mol_type = other DNA
gtagagacgaggtttcaccc

SEQ ID NO: 270827 - DNA, 20 bp, synthetic construct
  source 1..20: mol_type = other DNA
agtagagacgaggtttcacc

SEQ ID NO: 270828 - DNA, 20 bp, synthetic construct
  source 1..20: mol_type = other DNA
tagtagagacgaggtttcac

SEQ ID NO: 270829 - DNA, 20 bp, synthetic construct
  source 1..20: mol_type = other DNA
ttagtagagacgaggtttca

SEQ ID NO: 270830 - DNA, 20 bp, synthetic construct
  source 1..20: mol_type = other DNA
tttagtagagacgaggtttc

SEQ ID NO: 270831 - DNA, 20 bp, synthetic construct
  source 1..20: mol_type = other DNA
ttttagtagagacgaggttt

SEQ ID NO: 270832 - DNA, 20 bp, synthetic construct
  source 1..20: mol_type = other DNA
tttttagtagagacgaggtt

SEQ ID NO: 270833 - DNA, 20 bp, synthetic construct
  source 1..20: mol_type = other DNA
atttttagtagagacgaggt

SEQ ID NO: 270834 - DNA, 20 bp, synthetic construct
  source 1..20: mol_type = other DNA
tatttttagtagagacgagg

SEQ ID NO: 270835 - DNA, 20 bp, synthetic construct
  source 1..20: mol_type = other DNA
gtatttttagtagagacgag

SEQ ID NO: 270836 - DNA, 20 bp, synthetic construct
  source 1..20: mol_type = other DNA
tgtatttttagtagagacga

SEQ ID NO: 270837 - DNA, 20 bp, synthetic construct
  source 1..20: mol_type = other DNA
ttgtatttttagtagagacg

SEQ ID NO: 270838 - DNA, 20 bp, synthetic construct
  source 1..20: mol_type = other DNA
tttgtatttttagtagagac

SEQ ID NO: 270839 - DNA, 20 bp, synthetic construct
  source 1..20: mol_type = other DNA
ttttgtatttttagtagaga

SEQ ID NO: 270840 - DNA, 20 bp, synthetic construct
  source 1..20: mol_type = other DNA
tttttgtatttttagtagag

SEQ ID NO: 270841 - DNA, 20 bp, synthetic construct
  source 1..20: mol_type = other DNA
atttttgtatttttagtaga

SEQ ID NO: 270842 - DNA, 20 bp, synthetic construct
  source 1..20: mol_type = other DNA
tatttttgtatttttagtag

SEQ ID NO: 270843 - DNA, 20 bp, synthetic construct
  source 1..20: mol_type = other DNA
gtatttttgtatttttagta

SEQ ID NO: 270844 - DNA, 20 bp, synthetic construct
  source 1..20: mol_type = other DNA
ggtatttttgtatttttagt

SEQ ID NO: 270845 - DNA, 20 bp, synthetic construct
  source 1..20: mol_type = other DNA
aggtatttttgtatttttag

SEQ ID NO: 270846 - DNA, 20 bp, synthetic construct
  source 1..20: mol_type = other DNA
caggtatttttgtattttta

SEQ ID NO: 270847 - DNA, 20 bp, synthetic construct
  source 1..20: mol_type = other DNA
ccaggtatttttgtattttt

SEQ ID NO: 270848 - DNA, 20 bp, synthetic construct
  source 1..20: mol_type = other DNA
cccaggtatttttgtatttt

SEQ ID NO: 270849 - DNA, 20 bp, synthetic construct
  source 1..20: mol_type = other DNA
gcccaggtatttttgtattt

SEQ ID NO: 270850 - DNA, 20 bp, synthetic construct
  source 1..20: mol_type = other DNA
cgcccaggtatttttgtatt

SEQ ID NO: 270851 - DNA, 20 bp, synthetic construct
  source 1..20: mol_type = other DNA
acgcccaggtatttttgtat

SEQ ID NO: 270852 - DNA, 20 bp, synthetic construct
  source 1..20: mol_type = other DNA
cacgcccaggtatttttgta

SEQ ID NO: 270853 - DNA, 20 bp, synthetic construct
  source 1..20: mol_type = other DNA
ccacgcccaggtatttttgt

SEQ ID NO: 270854 - DNA, 20 bp, synthetic construct
  source 1..20: mol_type = other DNA
accacgcccaggtatttttg

SEQ ID NO: 270855 - DNA, 20 bp, synthetic construct
  source 1..20: mol_type = other DNA
caccacgcccaggtattttt

SEQ ID NO: 270856 - DNA, 20 bp, synthetic construct
  source 1..20: mol_type = other DNA
ccaccacgcccaggtatttt

SEQ ID NO: 270857 - DNA, 20 bp, synthetic construct
  source 1..20: mol_type = other DNA
accaccacgcccaggtattt

SEQ ID NO: 270858 - DNA, 20 bp, synthetic construct
  source 1..20: mol_type = other DNA
caccaccacgcccaggtatt

SEQ ID NO: 270859 - DNA, 20 bp, synthetic construct
  source 1..20: mol_type = other DNA
ccaccaccacgcccaggtat

SEQ ID NO: 270860 - DNA, 20 bp, synthetic construct
  source 1..20: mol_type = other DNA
accaccaccacgcccaggta

SEQ ID NO: 270861 - DNA, 20 bp, synthetic construct
  source 1..20: mol_type = other DNA
caccaccaccacgcccaggt

SEQ ID NO: 270862 - DNA, 20 bp, synthetic construct
  source 1..20: mol_type = other DNA
gcaccaccaccacgcccagg

SEQ ID NO: 270863 - DNA, 20 bp, synthetic construct
  source 1..20: mol_type = other DNA
cgcaccaccaccacgcccag

SEQ ID NO: 270864 - DNA, 20 bp, synthetic construct
  source 1..20: mol_type = other DNA
gcgcaccaccaccacgccca

SEQ ID NO: 270865 - DNA, 20 bp, synthetic construct
  source 1..20: mol_type = other DNA
cgcgcaccaccaccacgccc

SEQ ID NO: 270866 - DNA, 20 bp, synthetic construct
  source 1..20: mol_type = other DNA
gcgcgcaccaccaccacgcc

SEQ ID NO: 270867 - DNA, 20 bp, synthetic construct
  source 1..20: mol_type = other DNA
ggcgcgcaccaccaccacgc

SEQ ID NO: 270868 - DNA, 20 bp, synthetic construct
  source 1..20: mol_type = other DNA
aggcgcgcaccaccaccacg

SEQ ID NO: 270869 - DNA, 20 bp, synthetic construct
  source 1..20: mol_type = other DNA
taggcgcgcaccaccaccac

SEQ ID NO: 270870 - DNA, 20 bp, synthetic construct
  source 1..20: mol_type = other DNA
ataggcgcgcaccaccacca

SEQ ID NO: 270871 - DNA, 20 bp, synthetic construct
  source 1..20: mol_type = other DNA
tataggcgcgcaccaccacc

SEQ ID NO: 270872 - DNA, 20 bp, synthetic construct
  source 1..20: mol_type = other DNA
ttataggcgcgcaccaccac

SEQ ID NO: 270873 - DNA, 20 bp, synthetic construct
  source 1..20: mol_type = other DNA
attataggcgcgcaccacca

SEQ ID NO: 270874 - DNA, 20 bp, synthetic construct
  source 1..20: mol_type = other DNA
gattataggcgcgcaccacc

SEQ ID NO: 270875 - DNA, 20 bp, synthetic construct
  source 1..20: mol_type = other DNA
ggattataggcgcgcaccac

SEQ ID NO: 270876 - DNA, 20 bp, synthetic construct
  source 1..20: mol_type = other DNA
gggattataggcgcgcacca

SEQ ID NO: 270877 - DNA, 20 bp, synthetic construct
  source 1..20: mol_type = other DNA
tgggattataggcgcgcacc

SEQ ID NO: 270878 - DNA, 20 bp, synthetic construct
  source 1..20: mol_type = other DNA
ctgggattataggcgcgcac

SEQ ID NO: 270879 - DNA, 20 bp, synthetic construct
  source 1..20: mol_type = other DNA
gctgggattataggcgcgca

SEQ ID NO: 270880 - DNA, 20 bp, synthetic construct
  source 1..20: mol_type = other DNA
agctgggattataggcgcgc

SEQ ID NO: 270881 - DNA, 20 bp, synthetic construct
  source 1..20: mol_type = other DNA
tagctgggattataggcgcg

SEQ ID NO: 270882 - DNA, 20 bp, synthetic construct
  source 1..20: mol_type = other DNA
gtagctgggattataggcgc

SEQ ID NO: 270883 - DNA, 20 bp, synthetic construct
  source 1..20: mol_type = other DNA
agtagctgggattataggcg

SEQ ID NO: 270884 - DNA, 20 bp, synthetic construct
  source 1..20: mol_type = other DNA
gagtagctgggattataggc

SEQ ID NO: 270885 - DNA, 20 bp, synthetic construct
  source 1..20: mol_type = other DNA
tgagtagctgggattatagg

SEQ ID NO: 270886 - DNA, 20 bp, synthetic construct
  source 1..20: mol_type = other DNA
ctgagtagctgggattatag

SEQ ID NO: 270887 - DNA, 20 bp, synthetic construct
  source 1..20: mol_type = other DNA
cctgagtagctgggattata

SEQ ID NO: 270888 - DNA, 20 bp, synthetic construct
  source 1..20: mol_type = other DNA
tcctgagtagctgggattat

SEQ ID NO: 270889 - DNA, 20 bp, synthetic construct
  source 1..20: mol_type = other DNA
ctcctgagtagctgggatta

SEQ ID NO: 270890 - DNA, 20 bp, synthetic construct
  source 1..20: mol_type = other DNA
cctcctgagtagctgggatt

SEQ ID NO: 270891 - DNA, 20 bp, synthetic construct
  source 1..20: mol_type = other DNA
gcctcctgagtagctgggat

SEQ ID NO: 270892 - DNA, 20 bp, synthetic construct
  source 1..20: mol_type = other DNA
agcctcctgagtagctggga

SEQ ID NO: 270893 - DNA, 20 bp, synthetic construct
  source 1..20: mol_type = other DNA
cagcctcctgagtagctggg

SEQ ID NO: 270894 - DNA, 20 bp, synthetic construct
  source 1..20: mol_type = other DNA
tcagcctcctgagtagctgg

SEQ ID NO: 270895 - DNA, 20 bp, synthetic construct
  source 1..20: mol_type = other DNA
ctcagcctcctgagtagctg

SEQ ID NO: 270896 - DNA, 20 bp, synthetic construct
  source 1..20: mol_type = other DNA
cctcagcctcctgagtagct

SEQ ID NO: 270897 - DNA, 20 bp, synthetic construct
  source 1..20: mol_type = other DNA
gcctcagcctcctgagtagc

SEQ ID NO: 270898 - DNA, 20 bp, synthetic construct
  source 1..20: mol_type = other DNA
tgcctcagcctcctgagtag

SEQ ID NO: 270899 - DNA, 20 bp, synthetic construct
  source 1..20: mol_type = other DNA
ctgcctcagcctcctgagta

SEQ ID NO: 270900 - DNA, 20 bp, synthetic construct
  source 1..20: mol_type = other DNA
cctgcctcagcctcctgagt

SEQ ID NO: 270901 - DNA, 20 bp, synthetic construct
  source 1..20: mol_type = other DNA
tcctgcctcagcctcctgag

SEQ ID NO: 270902 - DNA, 20 bp, synthetic construct
  source 1..20: mol_type = other DNA
ctcctgcctcagcctcctga

SEQ ID NO: 270903 - DNA, 20 bp, synthetic construct
  source 1..20: mol_type = other DNA
tctcctgcctcagcctcctg

SEQ ID NO: 270904 - DNA, 20 bp, synthetic construct
  source 1..20: mol_type = other DNA
ttctcctgcctcagcctcct

SEQ ID NO: 270905 - DNA, 20 bp, synthetic construct
  source 1..20: mol_type = other DNA
attctcctgcctcagcctcc

SEQ ID NO: 270906 - DNA, 20 bp, synthetic construct
  source 1..20: mol_type = other DNA
gattctcctgcctcagcctc

SEQ ID NO: 270907 - DNA, 20 bp, synthetic construct
  source 1..20: mol_type = other DNA
cgattctcctgcctcagcct

SEQ ID NO: 270908 - DNA, 20 bp, synthetic construct
  source 1..20: mol_type = other DNA
gcgattctcctgcctcagcc

SEQ ID NO: 270909 - DNA, 20 bp, synthetic construct
  source 1..20: mol_type = other DNA
agcgattctcctgcctcagc

SEQ ID NO: 270910 - DNA, 20 bp, synthetic construct
  source 1..20: mol_type = other DNA
aagcgattctcctgcctcag

SEQ ID NO: 270911 - DNA, 20 bp, synthetic construct
  source 1..20: mol_type = other DNA
caagcgattctcctgcctca

SEQ ID NO: 270912 - DNA, 20 bp, synthetic construct
  source 1..20: mol_type = other DNA
tcaagcgattctcctgcctc

SEQ ID NO: 270913 - DNA, 20 bp, synthetic construct
  source 1..20: mol_type = other DNA
ttcaagcgattctcctgcct

SEQ ID NO: 270914 - DNA, 20 bp, synthetic construct
  source 1..20: mol_type = other DNA
gttcaagcgattctcctgcc

SEQ ID NO: 270915 - DNA, 20 bp, synthetic construct
  source 1..20: mol_type = other DNA
ggttcaagcgattctcctgc

SEQ ID NO: 270916 - DNA, 20 bp, synthetic construct
  source 1..20: mol_type = other DNA
gggttcaagcgattctcctg

SEQ ID NO: 270917 - DNA, 20 bp, synthetic construct
  source 1..20: mol_type = other DNA
tgggttcaagcgattctcct

SEQ ID NO: 270918 - DNA, 20 bp, synthetic construct
  source 1..20: mol_type = other DNA
ctgggttcaagcgattctcc

SEQ ID NO: 270919 - DNA, 20 bp, synthetic construct
  source 1..20: mol_type = other DNA
cctgggttcaagcgattctc

SEQ ID NO: 270920 - DNA, 20 bp, synthetic construct
  source 1..20: mol_type = other DNA
tcctgggttcaagcgattct

SEQ ID NO: 270921 - DNA, 20 bp, synthetic construct
  source 1..20: mol_type = other DNA
ctcctgggttcaagcgattc

SEQ ID NO: 270922 - DNA, 20 bp, synthetic construct
  source 1..20: mol_type = other DNA
cctcctgggttcaagcgatt

SEQ ID NO: 270923 - DNA, 20 bp, synthetic construct
  source 1..20: mol_type = other DNA
gcctcctgggttcaagcgat

SEQ ID NO: 270924 - DNA, 20 bp, synthetic construct
  source 1..20: mol_type = other DNA
tgcctcctgggttcaagcga

SEQ ID NO: 270925 - DNA, 20 bp, synthetic construct
  source 1..20: mol_type = other DNA
ctgcctcctgggttcaagcg

SEQ ID NO: 270926 - DNA, 20 bp, synthetic construct
  source 1..20: mol_type = other DNA
tctgcctcctgggttcaagc

SEQ ID NO: 270927 - DNA, 20 bp, synthetic construct
  source 1..20: mol_type = other DNA
ctctgcctcctgggttcaag

SEQ ID NO: 270928 - DNA, 20 bp, synthetic construct
  source 1..20: mol_type = other DNA
cctctgcctcctgggttcaa

SEQ ID NO: 270929 - DNA, 20 bp, synthetic construct
  source 1..20: mol_type = other DNA
acctctgcctcctgggttca

SEQ ID NO: 270930 - DNA, 20 bp, synthetic construct
  source 1..20: mol_type = other DNA
aacctctgcctcctgggttc

SEQ ID NO: 270931 - DNA, 20 bp, synthetic construct
  source 1..20: mol_type = other DNA
caacctctgcctcctgggtt

SEQ ID NO: 270932 - DNA, 20 bp, synthetic construct
  source 1..20: mol_type = other DNA
gcaacctctgcctcctgggt

SEQ ID NO: 270933 - DNA, 20 bp, synthetic construct
  source 1..20: mol_type = other DNA
tgcaacctctgcctcctggg

SEQ ID NO: 270934 - DNA, 20 bp, synthetic construct
  source 1..20: mol_type = other DNA
ctgcaacctctgcctcctgg

SEQ ID NO: 270935 - DNA, 20 bp, synthetic construct
  source 1..20: mol_type = other DNA
actgcaacctctgcctcctg

SEQ ID NO: 270936 - DNA, 20 bp, synthetic construct
  source 1..20: mol_type = other DNA
cactgcaacctctgcctcct

SEQ ID NO: 270937 - DNA, 20 bp, synthetic construct
  source 1..20: mol_type = other DNA
tcactgcaacctctgcctcc

SEQ ID NO: 270938 - DNA, 20 bp, synthetic construct
  source 1..20: mol_type = other DNA
ctcactgcaacctctgcctc

SEQ ID NO: 270939 - DNA, 20 bp, synthetic construct
  source 1..20: mol_type = other DNA
gctcactgcaacctctgcct

SEQ ID NO: 270940 - DNA, 20 bp, synthetic construct
  source 1..20: mol_type = other DNA
ggctcactgcaacctctgcc

SEQ ID NO: 270941 - DNA, 20 bp, synthetic construct
  source 1..20: mol_type = other DNA
cggctcactgcaacctctgc

SEQ ID NO: 270942 - DNA, 20 bp, synthetic construct
  source 1..20: mol_type = other DNA
tcggctcactgcaacctctg

SEQ ID NO: 270943 - DNA, 20 bp, synthetic construct
  source 1..20: mol_type = other DNA
ctcggctcactgcaacctct

SEQ ID NO: 270944 - DNA, 20 bp, synthetic construct
  source 1..20: mol_type = other DNA
tctcggctcactgcaacctc

SEQ ID NO: 270945 - DNA, 20 bp, synthetic construct
  source 1..20: mol_type = other DNA
atctcggctcactgcaacct

SEQ ID NO: 270946 - DNA, 20 bp, synthetic construct
  source 1..20: mol_type = other DNA
tatctcggctcactgcaacc

SEQ ID NO: 270947 - DNA, 20 bp, synthetic construct
  source 1..20: mol_type = other DNA
ctatctcggctcactgcaac

SEQ ID NO: 270948 - DNA, 20 bp, synthetic construct
  source 1..20: mol_type = other DNA
actatctcggctcactgcaa

SEQ ID NO: 270949 - DNA, 20 bp, synthetic construct
  source 1..20: mol_type = other DNA
cactatctcggctcactgca

SEQ ID NO: 270950 - DNA, 20 bp, synthetic construct
  source 1..20: mol_type = other DNA
gcactatctcggctcactgc

SEQ ID NO: 270951 - DNA, 20 bp, synthetic construct
  source 1..20: mol_type = other DNA
ggcactatctcggctcactg

SEQ ID NO: 270952 - DNA, 20 bp, synthetic construct
  source 1..20: mol_type = other DNA
tggcactatctcggctcact

SEQ ID NO: 270953 - DNA, 20 bp, synthetic construct
  source 1..20: mol_type = other DNA
gtggcactatctcggctcac

SEQ ID NO: 270954 - DNA, 20 bp, synthetic construct
  source 1..20: mol_type = other DNA
agtggcactatctcggctca

SEQ ID NO: 270955 - DNA, 20 bp, synthetic construct
  source 1..20: mol_type = other DNA
cagtggcactatctcggctc

SEQ ID NO: 270956 - DNA, 20 bp, synthetic construct
  source 1..20: mol_type = other DNA
gcagtggcactatctcggct

SEQ ID NO: 270957 - DNA, 20 bp, synthetic construct
  source 1..20: mol_type = other DNA
tgcagtggcactatctcggc

SEQ ID NO: 270958 - DNA, 20 bp, synthetic construct
  source 1..20: mol_type = other DNA
gtgcagtggcactatctcgg

SEQ ID NO: 270959 - DNA, 20 bp, synthetic construct
  source 1..20: mol_type = other DNA
agtgcagtggcactatctcg

SEQ ID NO: 270960 - DNA, 20 bp, synthetic construct
  source 1..20: mol_type = other DNA
gagtgcagtggcactatctc

SEQ ID NO: 270961 - DNA, 20 bp, synthetic construct
  source 1..20: mol_type = other DNA
ggagtgcagtggcactatct

SEQ ID NO: 270962 - DNA, 20 bp, synthetic construct
  source 1..20: mol_type = other DNA
tggagtgcagtggcactatc

SEQ ID NO: 270963 - DNA, 20 bp, synthetic construct
  source 1..20: mol_type = other DNA
ctggagtgcagtggcactat

SEQ ID NO: 270964 - DNA, 20 bp, synthetic construct
  source 1..20: mol_type = other DNA
actggagtgcagtggcacta

SEQ ID NO: 270965 - DNA, 20 bp, synthetic construct
  source 1..20: mol_type = other DNA
aactggagtgcagtggcact

SEQ ID NO: 270966 - DNA, 20 bp, synthetic construct
  source 1..20: mol_type = other DNA
aaactggagtgcagtggcac

SEQ ID NO: 270967 - DNA, 20 bp, synthetic construct
  source 1..20: mol_type = other DNA
caaactggagtgcagtggca

SEQ ID NO: 270968 - DNA, 20 bp, synthetic construct
  source 1..20: mol_type = other DNA
tcaaactggagtgcagtggc

SEQ ID NO: 270969 - DNA, 20 bp, synthetic construct
  source 1..20: mol_type = other DNA
ctcaaactggagtgcagtgg

SEQ ID NO: 270970 - DNA, 20 bp, synthetic construct
  source 1..20: mol_type = other DNA
gctcaaactggagtgcagtg

SEQ ID NO: 270971 - DNA, 20 bp, synthetic construct
  source 1..20: mol_type = other DNA
tgctcaaactggagtgcagt

SEQ ID NO: 270972 - DNA, 20 bp, synthetic construct
  source 1..20: mol_type = other DNA
ttgctcaaactggagtgcag

SEQ ID NO: 270973 - DNA, 20 bp, synthetic construct
  source 1..20: mol_type = other DNA
gttgctcaaactggagtgca

SEQ ID NO: 270974 - DNA, 20 bp, synthetic construct
  source 1..20: mol_type = other DNA
tgttgctcaaactggagtgc

SEQ ID NO: 270975 - DNA, 20 bp, synthetic construct
  source 1..20: mol_type = other DNA
ctgttgctcaaactggagtg

SEQ ID NO: 270976 - DNA, 20 bp, synthetic construct
  source 1..20: mol_type = other DNA
tctgttgctcaaactggagt

SEQ ID NO: 270977 - DNA, 20 bp, synthetic construct
  source 1..20: mol_type = other DNA
ctctgttgctcaaactggag

SEQ ID NO: 270978 - DNA, 20 bp, synthetic construct
  source 1..20: mol_type = other DNA
gctctgttgctcaaactgga

SEQ ID NO: 270979 - DNA, 20 bp, synthetic construct
  source 1..20: mol_type = other DNA
cgctctgttgctcaaactgg

SEQ ID NO: 270980 - DNA, 20 bp, synthetic construct
  source 1..20: mol_type = other DNA
tcgctctgttgctcaaactg

SEQ ID NO: 270981 - DNA, 20 bp, synthetic construct
  source 1..20: mol_type = other DNA
ctcgctctgttgctcaaact

SEQ ID NO: 270982 - DNA, 20 bp, synthetic construct
  source 1..20: mol_type = other DNA
tctcgctctgttgctcaaac

SEQ ID NO: 270983 - DNA, 20 bp, synthetic construct
  source 1..20: mol_type = other DNA
gtctcgctctgttgctcaaa

SEQ ID NO: 270984 - DNA, 20 bp, synthetic construct
  source 1..20: mol_type = other DNA
agtctcgctctgttgctcaa

SEQ ID NO: 270985 - DNA, 20 bp, synthetic construct
  source 1..20: mol_type = other DNA
gagtctcgctctgttgctca

SEQ ID NO: 270986 - DNA, 20 bp, synthetic construct
  source 1..20: mol_type = other DNA
agagtctcgctctgttgctc

SEQ ID NO: 270987 - DNA, 20 bp, synthetic construct
  source 1..20: mol_type = other DNA
cagagtctcgctctgttgct

SEQ ID NO: 270988 - DNA, 20 bp, synthetic construct
  source 1..20: mol_type = other DNA
acagagtctcgctctgttgc

SEQ ID NO: 270989 - DNA, 20 bp, synthetic construct
  source 1..20: mol_type = other DNA
gacagagtctcgctctgttg

SEQ ID NO: 270990 - DNA, 20 bp, synthetic construct
  source 1..20: mol_type = other DNA
agacagagtctcgctctgtt

SEQ ID NO: 270991 - DNA, 20 bp, synthetic construct
  source 1..20: mol_type = other DNA
gagacagagtctcgctctgt

SEQ ID NO: 270992 - DNA, 20 bp, synthetic construct
  source 1..20: mol_type = other DNA
tgagacagagtctcgctctg

SEQ ID NO: 270993 - DNA, 20 bp, synthetic construct
  source 1..20: mol_type = other DNA
ttgagacagagtctcgctct

SEQ ID NO: 270994 - DNA, 20 bp, synthetic construct
  source 1..20: mol_type = other DNA
tttgagacagagtctcgctc

SEQ ID NO: 270995 - DNA, 20 bp, synthetic construct
  source 1..20: mol_type = other DNA
ttttgagacagagtctcgct

SEQ ID NO: 270996 - DNA, 20 bp, synthetic construct
  source 1..20: mol_type = other DNA
gttttgagacagagtctcgc

SEQ ID NO: 270997 - DNA, 20 bp, synthetic construct
  source 1..20: mol_type = other DNA
tgttttgagacagagtctcg

SEQ ID NO: 270998 - DNA, 20 bp, synthetic construct
  source 1..20: mol_type = other DNA
ttgttttgagacagagtctc

SEQ ID NO: 270999 - DNA, 20 bp, synthetic construct
  source 1..20: mol_type = other DNA
tttgttttgagacagagtct

SEQ ID NO: 271000 - DNA, 20 bp, synthetic construct
  source 1..20: mol_type = other DNA
ttttgttttgagacagagtc

SEQ ID NO: 271001 - DNA, 20 bp, synthetic construct
  source 1..20: mol_type = other DNA
attttgttttgagacagagt

SEQ ID NO: 271002 - DNA, 20 bp, synthetic construct
  source 1..20: mol_type = other DNA
tattttgttttgagacagag

SEQ ID NO: 271003 - DNA, 20 bp, synthetic construct
  source 1..20: mol_type = other DNA
ttattttgttttgagacaga

SEQ ID NO: 271004 - DNA, 20 bp, synthetic construct
  source 1..20: mol_type = other DNA
tttattttgttttgagacag

SEQ ID NO: 271005 - DNA, 20 bp, synthetic construct
  source 1..20: mol_type = other DNA
ttttattttgttttgagaca

SEQ ID NO: 271006 - DNA, 20 bp, synthetic construct
  source 1..20: mol_type = other DNA
gttttattttgttttgagac

SEQ ID NO: 271007 - DNA, 20 bp, synthetic construct
  source 1..20: mol_type = other DNA
tgttttattttgttttgaga

SEQ ID NO: 271008 - DNA, 20 bp, synthetic construct
  source 1..20: mol_type = other DNA
ttgttttattttgttttgag

SEQ ID NO: 271009 - DNA, 20 bp, synthetic construct
  source 1..20: mol_type = other DNA
tttgttttattttgttttga

SEQ ID NO: 271010 - DNA, 20 bp, synthetic construct
  source 1..20: mol_type = other DNA
gtttgttttattttgttttg

SEQ ID NO: 271011 - DNA, 20 bp, synthetic construct
  source 1..20: mol_type = other DNA
ggtttgttttattttgtttt

SEQ ID NO: 271012 - DNA, 20 bp, synthetic construct
  source 1..20: mol_type = other DNA
tggtttgttttattttgttt

SEQ ID NO: 271013 - DNA, 20 bp, synthetic construct
  source 1..20: mol_type = other DNA
ttggtttgttttattttgtt

SEQ ID NO: 271014 - DNA, 20 bp, synthetic construct
  source 1..20: mol_type = other DNA
tttggtttgttttattttgt

SEQ ID NO: 271015 - DNA, 20 bp, synthetic construct
  source 1..20: mol_type = other DNA
ttttggtttgttttattttg

SEQ ID NO: 271016 - DNA, 20 bp, synthetic construct
  source 1..20: mol_type = other DNA
tttttggtttgttttatttt

SEQ ID NO: 271017 - DNA, 20 bp, synthetic construct
  source 1..20: mol_type = other DNA
ttttttggtttgttttattt

SEQ ID NO: 271018 - DNA, 20 bp, synthetic construct
  source 1..20: mol_type = other DNA
tttttttggtttgttttatt

SEQ ID NO: 271019 - DNA, 20 bp, synthetic construct
  source 1..20: mol_type = other DNA
gtttttttggtttgttttat

SEQ ID NO: 271020 - DNA, 20 bp, synthetic construct
  source 1..20: mol_type = other DNA
ggtttttttggtttgtttta

SEQ ID NO: 271021 - DNA, 20 bp, synthetic construct
  source 1..20: mol_type = other DNA
gggtttttttggtttgtttt

SEQ ID NO: 271022 - DNA, 20 bp, synthetic construct
  source 1..20: mol_type = other DNA
tgggtttttttggtttgttt

SEQ ID NO: 271023 - DNA, 20 bp, synthetic construct
  source 1..20: mol_type = other DNA
gtgggtttttttggtttgtt

SEQ ID NO: 271024 - DNA, 20 bp, synthetic construct
  source 1..20: mol_type = other DNA
ggtgggtttttttggtttgt

SEQ ID NO: 271025 - DNA, 20 bp, synthetic construct
  source 1..20: mol_type = other DNA
tggtgggtttttttggtttg

SEQ ID NO: 271026 - DNA, 20 bp, synthetic construct
  source 1..20: mol_type = other DNA
atggtgggtttttttggttt

SEQ ID NO: 271027 - DNA, 20 bp, synthetic construct
  source 1..20: mol_type = other DNA
catggtgggtttttttggtt

SEQ ID NO: 271028 - DNA, 20 bp, synthetic construct
  source 1..20: mol_type = other DNA
ccatggtgggtttttttggt

SEQ ID NO: 271029 - DNA, 20 bp, synthetic construct
  source 1..20: mol_type = other DNA
gccatggtgggtttttttgg

SEQ ID NO: 271030 - DNA, 20 bp, synthetic construct
  source 1..20: mol_type = other DNA
agccatggtgggtttttttg

SEQ ID NO: 271031 - DNA, 20 bp, synthetic construct
  source 1..20: mol_type = other DNA
aagccatggtgggttttttt

SEQ ID NO: 271032 - DNA, 20 bp, synthetic construct
  source 1..20: mol_type = other DNA
taagccatggtgggtttttt

SEQ ID NO: 271033 - DNA, 20 bp, synthetic construct
  source 1..20: mol_type = other DNA
ctaagccatggtgggttttt

SEQ ID NO: 271034 - DNA, 20 bp, synthetic construct
  source 1..20: mol_type = other DNA
cctaagccatggtgggtttt

SEQ ID NO: 271035 - DNA, 20 bp, synthetic construct
  source 1..20: mol_type = other DNA
ccctaagccatggtgggttt

SEQ ID NO: 271036 - DNA, 20 bp, synthetic construct
  source 1..20: mol_type = other DNA
gccctaagccatggtgggtt

SEQ ID NO: 271037 - DNA, 20 bp, synthetic construct
  source 1..20: mol_type = other DNA
ggccctaagccatggtgggt

SEQ ID NO: 271038 - DNA, 20 bp, synthetic construct
  source 1..20: mol_type = other DNA
gggccctaagccatggtggg

SEQ ID NO: 271039 - DNA, 20 bp, synthetic construct
  source 1..20: mol_type = other DNA
tgggccctaagccatggtgg

SEQ ID NO: 271040 - DNA, 20 bp, synthetic construct
  source 1..20: mol_type = other DNA
ctgggccctaagccatggtg

SEQ ID NO: 271041 - DNA, 20 bp, synthetic construct
  source 1..20: mol_type = other DNA
gctgggccctaagccatggt

SEQ ID NO: 271042 - DNA, 20 bp, synthetic construct
  source 1..20: mol_type = other DNA
ggctgggccctaagccatgg

SEQ ID NO: 271043 - DNA, 20 bp, synthetic construct
  source 1..20: mol_type = other DNA
aggctgggccctaagccatg

SEQ ID NO: 271044 - DNA, 20 bp, synthetic construct
  source 1..20: mol_type = other DNA
caggctgggccctaagccat

SEQ ID NO: 271045 - DNA, 20 bp, synthetic construct
  source 1..20: mol_type = other DNA
tcaggctgggccctaagcca

SEQ ID NO: 271046 - DNA, 20 bp, synthetic construct
  source 1..20: mol_type = other DNA
atcaggctgggccctaagcc

SEQ ID NO: 271047 - DNA, 20 bp, synthetic construct
  source 1..20: mol_type = other DNA
catcaggctgggccctaagc

SEQ ID NO: 271048 - DNA, 20 bp, synthetic construct
  source 1..20: mol_type = other DNA
tcatcaggctgggccctaag

SEQ ID NO: 271049 - DNA, 20 bp, synthetic construct
  source 1..20: mol_type = other DNA
gtcatcaggctgggccctaa

SEQ ID NO: 271050 - DNA, 20 bp, synthetic construct
  source 1..20: mol_type = other DNA
ggtcatcaggctgggcccta

SEQ ID NO: 271051 - DNA, 20 bp, synthetic construct
  source 1..20: mol_type = other DNA
aggtcatcaggctgggccct

SEQ ID NO: 271052 - DNA, 20 bp, synthetic construct
  source 1..20: mol_type = other DNA
gaggtcatcaggctgggccc

SEQ ID NO: 271053 - DNA, 20 bp, synthetic construct
  source 1..20: mol_type = other DNA
tgaggtcatcaggctgggcc

SEQ ID NO: 271054 - DNA, 20 bp, synthetic construct
  source 1..20: mol_type = other DNA
atgaggtcatcaggctgggc

SEQ ID NO: 271055 - DNA, 20 bp, synthetic construct
  source 1..20: mol_type = other DNA
aatgaggtcatcaggctggg

SEQ ID NO: 271056 - DNA, 20 bp, synthetic construct
  source 1..20: mol_type = other DNA
aaatgaggtcatcaggctgg

SEQ ID NO: 271057 - DNA, 20 bp, synthetic construct
  source 1..20: mol_type = other DNA
aaaatgaggtcatcaggctg

SEQ ID NO: 271058 - DNA, 20 bp, synthetic construct
  source 1..20: mol_type = other DNA
aaaaatgaggtcatcaggct

SEQ ID NO: 271059 - DNA, 20 bp, synthetic construct
  source 1..20: mol_type = other DNA
gaaaaatgaggtcatcaggc

SEQ ID NO: 271060 - DNA, 20 bp, synthetic construct
  source 1..20: mol_type = other DNA
tgaaaaatgaggtcatcagg

SEQ ID NO: 271061 - DNA, 20 bp, synthetic construct
  source 1..20: mol_type = other DNA
gtgaaaaatgaggtcatcag

SEQ ID NO: 271062 - DNA, 20 bp, synthetic construct
  source 1..20: mol_type = other DNA
agtgaaaaatgaggtcatca

SEQ ID NO: 271063 - DNA, 20 bp, synthetic construct
  source 1..20: mol_type = other DNA
aagtgaaaaatgaggtcatc

SEQ ID NO: 271064 - DNA, 20 bp, synthetic construct
  source 1..20: mol_type = other DNA
taagtgaaaaatgaggtcat

SEQ ID NO: 271065 - DNA, 20 bp, synthetic construct
  source 1..20: mol_type = other DNA
ctaagtgaaaaatgaggtca

SEQ ID NO: 271066 - DNA, 20 bp, synthetic construct
  source 1..20: mol_type = other DNA
actaagtgaaaaatgaggtc

SEQ ID NO: 271067 - DNA, 20 bp, synthetic construct
  source 1..20: mol_type = other DNA
gactaagtgaaaaatgaggt

SEQ ID NO: 271068 - DNA, 20 bp, synthetic construct
  source 1..20: mol_type = other DNA
tgactaagtgaaaaatgagg

SEQ ID NO: 271069 - DNA, 20 bp, synthetic construct
  source 1..20: mol_type = other DNA
gtgactaagtgaaaaatgag

SEQ ID NO: 271070 - DNA, 20 bp, synthetic construct
  source 1..20: mol_type = other DNA
ggtgactaagtgaaaaatga

SEQ ID NO: 271071 - DNA, 20 bp, synthetic construct
  source 1..20: mol_type = other DNA
aggtgactaagtgaaaaatg

SEQ ID NO: 271072 - DNA, 20 bp, synthetic construct
  source 1..20: mol_type = other DNA
gaggtgactaagtgaaaaat

SEQ ID NO: 271073 - DNA, 20 bp, synthetic construct
  source 1..20: mol_type = other DNA
agaggtgactaagtgaaaaa

SEQ ID NO: 271074 - DNA, 20 bp, synthetic construct
  source 1..20: mol_type = other DNA
gagaggtgactaagtgaaaa

SEQ ID NO: 271075 - DNA, 20 bp, synthetic construct
  source 1..20: mol_type = other DNA
agagaggtgactaagtgaaa

SEQ ID NO: 271076 - DNA, 20 bp, synthetic construct
  source 1..20: mol_type = other DNA
tagagaggtgactaagtgaa

SEQ ID NO: 271077 - DNA, 20 bp, synthetic construct
  source 1..20: mol_type = other DNA
ttagagaggtgactaagtga

SEQ ID NO: 271078 - DNA, 20 bp, synthetic construct
  source 1..20: mol_type = other DNA
tttagagaggtgactaagtg

SEQ ID NO: 271079 - DNA, 20 bp, synthetic construct
  source 1..20: mol_type = other DNA
ctttagagaggtgactaagt

SEQ ID NO: 271080 - DNA, 20 bp, synthetic construct
  source 1..20: mol_type = other DNA
cctttagagaggtgactaag

SEQ ID NO: 271081 - DNA, 20 bp, synthetic construct
  source 1..20: mol_type = other DNA
gcctttagagaggtgactaa

SEQ ID NO: 271082 - DNA, 20 bp, synthetic construct
  source 1..20: mol_type = other DNA
ggcctttagagaggtgacta

SEQ ID NO: 271083 - DNA, 20 bp, synthetic construct
  source 1..20: mol_type = other DNA
gggcctttagagaggtgact

SEQ ID NO: 271084 - DNA, 20 bp, synthetic construct
  source 1..20: mol_type = other DNA
agggcctttagagaggtgac

SEQ ID NO: 271085 - DNA, 20 bp, synthetic construct
  source 1..20: mol_type = other DNA
cagggcctttagagaggtga

SEQ ID NO: 271086 - DNA, 20 bp, synthetic construct
  source 1..20: mol_type = other DNA
acagggcctttagagaggtg

SEQ ID NO: 271087 - DNA, 20 bp, synthetic construct
  source 1..20: mol_type = other DNA
gacagggcctttagagaggt

SEQ ID NO: 271088 - DNA, 20 bp, synthetic construct
  source 1..20: mol_type = other DNA
agacagggcctttagagagg

SEQ ID NO: 271089 - DNA, 20 bp, synthetic construct
  source 1..20: mol_type = other DNA
gagacagggcctttagagag

SEQ ID NO: 271090 - DNA, 20 bp, synthetic construct
  source 1..20: mol_type = other DNA
ggagacagggcctttagaga

SEQ ID NO: 271091 - DNA, 20 bp, synthetic construct
  source 1..20: mol_type = other DNA
tggagacagggcctttagag

SEQ ID NO: 271092 - DNA, 20 bp, synthetic construct
  source 1..20: mol_type = other DNA
ttggagacagggcctttaga

SEQ ID NO: 271093 - DNA, 20 bp, synthetic construct
  source 1..20: mol_type = other DNA
tttggagacagggcctttag

SEQ ID NO: 271094 - DNA, 20 bp, synthetic construct
  source 1..20: mol_type = other DNA
atttggagacagggccttta

SEQ ID NO: 271095 - DNA, 20 bp, synthetic construct
  source 1..20: mol_type = other DNA
tatttggagacagggccttt

SEQ ID NO: 271096 - DNA, 20 bp, synthetic construct
  source 1..20: mol_type = other DNA
ctatttggagacagggcctt

SEQ ID NO: 271097 - DNA, 20 bp, synthetic construct
  source 1..20: mol_type = other DNA
tctatttggagacagggcct

SEQ ID NO: 271098 - DNA, 20 bp, synthetic construct
  source 1..20: mol_type = other DNA
ctctatttggagacagggcc

SEQ ID NO: 271099 - DNA, 20 bp, synthetic construct
  source 1..20: mol_type = other DNA
actctatttggagacagggc

SEQ ID NO: 271100 - DNA, 20 bp, synthetic construct
  source 1..20: mol_type = other DNA
gactctatttggagacaggg

SEQ ID NO: 271101 - DNA, 20 bp, synthetic construct
  source 1..20: mol_type = other DNA
tgactctatttggagacagg

SEQ ID NO: 271102 - DNA, 20 bp, synthetic construct
  source 1..20: mol_type = other DNA
gtgactctatttggagacag

SEQ ID NO: 271103 - DNA, 20 bp, synthetic construct
  source 1..20: mol_type = other DNA
tgtgactctatttggagaca

SEQ ID NO: 271104 - DNA, 20 bp, synthetic construct
  source 1..20: mol_type = other DNA
atgtgactctatttggagac

SEQ ID NO: 271105 - DNA, 20 bp, synthetic construct
  source 1..20: mol_type = other DNA
aatgtgactctatttggaga

SEQ ID NO: 271106 - DNA, 20 bp, synthetic construct
  source 1..20: mol_type = other DNA
gaatgtgactctatttggag

SEQ ID NO: 271107 - DNA, 20 bp, synthetic construct
  source 1..20: mol_type = other DNA
agaatgtgactctatttgga

SEQ ID NO: 271108 - DNA, 20 bp, synthetic construct
  source 1..20: mol_type = other DNA
tagaatgtgactctatttgg

SEQ ID NO: 271109 - DNA, 20 bp, synthetic construct
  source 1..20: mol_type = other DNA
ttagaatgtgactctatttg

SEQ ID NO: 271110 - DNA, 20 bp, synthetic construct
  source 1..20: mol_type = other DNA
cttagaatgtgactctattt

SEQ ID NO: 271111 - DNA, 20 bp, synthetic construct
  source 1..20: mol_type = other DNA
ccttagaatgtgactctatt

SEQ ID NO: 271112 - DNA, 20 bp, synthetic construct
  source 1..20: mol_type = other DNA
accttagaatgtgactctat

SEQ ID NO: 271113 - DNA, 20 bp, synthetic construct
  source 1..20: mol_type = other DNA
taccttagaatgtgactcta

SEQ ID NO: 271114 - DNA, 20 bp, synthetic construct
  source 1..20: mol_type = other DNA
gtaccttagaatgtgactct

SEQ ID NO: 271115 - DNA, 20 bp, synthetic construct
  source 1..20: mol_type = other DNA
cgtaccttagaatgtgactc

SEQ ID NO: 271116 - DNA, 20 bp, synthetic construct
  source 1..20: mol_type = other DNA
ccgtaccttagaatgtgact

SEQ ID NO: 271117 - DNA, 20 bp, synthetic construct
  source 1..20: mol_type = other DNA
cccgtaccttagaatgtgac

SEQ ID NO: 271118 - DNA, 20 bp, synthetic construct
  source 1..20: mol_type = other DNA
ccccgtaccttagaatgtga

SEQ ID NO: 271119 - DNA, 20 bp, synthetic construct
  source 1..20: mol_type = other DNA
cccccgtaccttagaatgtg

SEQ ID NO: 271120 - DNA, 20 bp, synthetic construct
  source 1..20: mol_type = other DNA
acccccgtaccttagaatgt

SEQ ID NO: 271121 - DNA, 20 bp, synthetic construct
  source 1..20: mol_type = other DNA
cacccccgtaccttagaatg

SEQ ID NO: 271122 - DNA, 20 bp, synthetic construct
  source 1..20: mol_type = other DNA
acacccccgtaccttagaat

SEQ ID NO: 271123 - DNA, 20 bp, synthetic construct
  source 1..20: mol_type = other DNA
aacacccccgtaccttagaa

SEQ ID NO: 271124 - DNA, 20 bp, synthetic construct
  source 1..20: mol_type = other DNA
caacacccccgtaccttaga

SEQ ID NO: 271125 - DNA, 20 bp, synthetic construct
  source 1..20: mol_type = other DNA
ccaacacccccgtaccttag

SEQ ID NO: 271126 - DNA, 20 bp, synthetic construct
  source 1..20: mol_type = other DNA
cccaacacccccgtacctta

SEQ ID NO: 271127 - DNA, 20 bp, synthetic construct
  source 1..20: mol_type = other DNA
ccccaacacccccgtacctt

SEQ ID NO: 271128 - DNA, 20 bp, synthetic construct
  source 1..20: mol_type = other DNA
tccccaacacccccgtacct

SEQ ID NO: 271129 - DNA, 20 bp, synthetic construct
  source 1..20: mol_type = other DNA
ctccccaacacccccgtacc

SEQ ID NO: 271130 - DNA, 20 bp, synthetic construct
  source 1..20: mol_type = other DNA
cctccccaacacccccgtac

SEQ ID NO: 271131 - DNA, 20 bp, synthetic construct
  source 1..20: mol_type = other DNA
ccctccccaacacccccgta

SEQ ID NO: 271132 - DNA, 20 bp, synthetic construct
  source 1..20: mol_type = other DNA
cccctccccaacacccccgt

SEQ ID NO: 271133 - DNA, 20 bp, synthetic construct
  source 1..20: mol_type = other DNA
ccccctccccaacacccccg

SEQ ID NO: 271134 - DNA, 20 bp, synthetic construct
  source 1..20: mol_type = other DNA
cccccctccccaacaccccc

SEQ ID NO: 271135 - DNA, 20 bp, synthetic construct
  source 1..20: mol_type = other DNA
acccccctccccaacacccc

SEQ ID NO: 271136 - DNA, 20 bp, synthetic construct
  source 1..20: mol_type = other DNA
aacccccctccccaacaccc

SEQ ID NO: 271137 - DNA, 20 bp, synthetic construct
  source 1..20: mol_type = other DNA
taacccccctccccaacacc

SEQ ID NO: 271138 - DNA, 20 bp, synthetic construct
  source 1..20: mol_type = other DNA
ctaacccccctccccaacac

SEQ ID NO: 271139 - DNA, 20 bp, synthetic construct
  source 1..20: mol_type = other DNA
cctaacccccctccccaaca

SEQ ID NO: 271140 - DNA, 20 bp, synthetic construct
  source 1..20: mol_type = other DNA
ccctaacccccctccccaac

SEQ ID NO: 271141 - DNA, 20 bp, synthetic construct
  source 1..20: mol_type = other DNA
gccctaacccccctccccaa

SEQ ID NO: 271142 - DNA, 20 bp, synthetic construct
  source 1..20: mol_type = other DNA
agccctaacccccctcccca

SEQ ID NO: 271143 - DNA, 20 bp, synthetic construct
  source 1..20: mol_type = other DNA
aagccctaacccccctcccc

SEQ ID NO: 271144 - DNA, 20 bp, synthetic construct
  source 1..20: mol_type = other DNA
gaagccctaacccccctccc

SEQ ID NO: 271145 - DNA, 20 bp, synthetic construct
  source 1..20: mol_type = other DNA
tgaagccctaacccccctcc

SEQ ID NO: 271146 - DNA, 20 bp, synthetic construct
  source 1..20: mol_type = other DNA
ttgaagccctaacccccctc

SEQ ID NO: 271147 - DNA, 20 bp, synthetic construct
  source 1..20: mol_type = other DNA
gttgaagccctaacccccct

SEQ ID NO: 271148 - DNA, 20 bp, synthetic construct
  source 1..20: mol_type = other DNA
tgttgaagccctaacccccc

SEQ ID NO: 271149 - DNA, 20 bp, synthetic construct
  source 1..20: mol_type = other DNA
atgttgaagccctaaccccc

SEQ ID NO: 271150 - DNA, 20 bp, synthetic construct
  source 1..20: mol_type = other DNA
catgttgaagccctaacccc

SEQ ID NO: 271151 - DNA, 20 bp, synthetic construct
  source 1..20: mol_type = other DNA
acatgttgaagccctaaccc

SEQ ID NO: 271152 - DNA, 20 bp, synthetic construct
  source 1..20: mol_type = other DNA
cacatgttgaagccctaacc

SEQ ID NO: 271153 - DNA, 20 bp, synthetic construct
  source 1..20: mol_type = other DNA
tcacatgttgaagccctaac

SEQ ID NO: 271154 - DNA, 20 bp, synthetic construct
  source 1..20: mol_type = other DNA
ttcacatgttgaagccctaa

SEQ ID NO: 271155 - DNA, 20 bp, synthetic construct
  source 1..20: mol_type = other DNA
attcacatgttgaagcccta

SEQ ID NO: 271156 - DNA, 20 bp, synthetic construct
  source 1..20: mol_type = other DNA
aattcacatgttgaagccct

SEQ ID NO: 271157 - DNA, 20 bp, synthetic construct
  source 1..20: mol_type = other DNA
aaattcacatgttgaagccc

SEQ ID NO: 271158 - DNA, 20 bp, synthetic construct
  source 1..20: mol_type = other DNA
caaattcacatgttgaagcc

SEQ ID NO: 271159 - DNA, 20 bp, synthetic construct
  source 1..20: mol_type = other DNA
gcaaattcacatgttgaagc

SEQ ID NO: 271160 - DNA, 20 bp, synthetic construct
  source 1..20: mol_type = other DNA
cgcaaattcacatgttgaag

SEQ ID NO: 271161 - DNA, 20 bp, synthetic construct
  source 1..20: mol_type = other DNA
ccgcaaattcacatgttgaa

SEQ ID NO: 271162 - DNA, 20 bp, synthetic construct
  source 1..20: mol_type = other DNA
cccgcaaattcacatgttga

SEQ ID NO: 271163 - DNA, 20 bp, synthetic construct
  source 1..20: mol_type = other DNA
ccccgcaaattcacatgttg

SEQ ID NO: 271164 - DNA, 20 bp, synthetic construct
  source 1..20: mol_type = other DNA
tccccgcaaattcacatgtt

SEQ ID NO: 271165 - DNA, 20 bp, synthetic construct
  source 1..20: mol_type = other DNA
gtccccgcaaattcacatgt

SEQ ID NO: 271166 - DNA, 20 bp, synthetic construct
  source 1..20: mol_type = other DNA
ggtccccgcaaattcacatg

SEQ ID NO: 271167 - DNA, 20 bp, synthetic construct
  source 1..20: mol_type = other DNA
tggtccccgcaaattcacat

SEQ ID NO: 271168 - DNA, 20 bp, synthetic construct
  source 1..20: mol_type = other DNA
gtggtccccgcaaattcaca

SEQ ID NO: 271169 - DNA, 20 bp, synthetic construct
  source 1..20: mol_type = other DNA
tgtggtccccgcaaattcac

SEQ ID NO: 271170 - DNA, 20 bp, synthetic construct
  source 1..20: mol_type = other DNA
ttgtggtccccgcaaattca

SEQ ID NO: 271171 - DNA, 20 bp, synthetic construct
  source 1..20: mol_type = other DNA
attgtggtccccgcaaattc

SEQ ID NO: 271172 - DNA, 20 bp, synthetic construct
  source 1..20: mol_type = other DNA
aattgtggtccccgcaaatt

SEQ ID NO: 271173 - DNA, 20 bp, synthetic construct
  source 1..20: mol_type = other DNA
gaattgtggtccccgcaaat

SEQ ID NO: 271174 - DNA, 20 bp, synthetic construct
  source 1..20: mol_type = other DNA
tgaattgtggtccccgcaaa

SEQ ID NO: 271175 - DNA, 20 bp, synthetic construct
  source 1..20: mol_type = other DNA
ctgaattgtggtccccgcaa

SEQ ID NO: 271176 - DNA, 20 bp, synthetic construct
  source 1..20: mol_type = other DNA
gctgaattgtggtccccgca

SEQ ID NO: 271177 - DNA, 20 bp, synthetic construct
  source 1..20: mol_type = other DNA
ggctgaattgtggtccccgc

SEQ ID NO: 271178 - DNA, 20 bp, synthetic construct
  source 1..20: mol_type = other DNA
gggctgaattgtggtccccg

SEQ ID NO: 271179 - DNA, 20 bp, synthetic construct
  source 1..20: mol_type = other DNA
tgggctgaattgtggtcccc

SEQ ID NO: 271180 - DNA, 20 bp, synthetic construct
  source 1..20: mol_type = other DNA
ctgggctgaattgtggtccc

SEQ ID NO: 271181 - DNA, 20 bp, synthetic construct
  source 1..20: mol_type = other DNA
cctgggctgaattgtggtcc

SEQ ID NO: 271182 - DNA, 20 bp, synthetic construct
  source 1..20: mol_type = other DNA
tcctgggctgaattgtggtc

SEQ ID NO: 271183 - DNA, 20 bp, synthetic construct
  source 1..20: mol_type = other DNA
gtcctgggctgaattgtggt

SEQ ID NO: 271184 - DNA, 20 bp, synthetic construct
  source 1..20: mol_type = other DNA
ggtcctgggctgaattgtgg

SEQ ID NO: 271185 - DNA, 20 bp, synthetic construct
  source 1..20: mol_type = other DNA
gggtcctgggctgaattgtg

SEQ ID NO: 271186 - DNA, 20 bp, synthetic construct
  source 1..20: mol_type = other DNA
ggggtcctgggctgaattgt

SEQ ID NO: 271187 - DNA, 20 bp, synthetic construct
  source 1..20: mol_type = other DNA
cggggtcctgggctgaattg

SEQ ID NO: 271188 - DNA, 20 bp, synthetic construct
  source 1..20: mol_type = other DNA
gcggggtcctgggctgaatt

SEQ ID NO: 271189 - DNA, 20 bp, synthetic construct
  source 1..20: mol_type = other DNA
agcggggtcctgggctgaat

SEQ ID NO: 271190 - DNA, 20 bp, synthetic construct
  source 1..20: mol_type = other DNA
gagcggggtcctgggctgaa

SEQ ID NO: 271191 - DNA, 20 bp, synthetic construct
  source 1..20: mol_type = other DNA
ggagcggggtcctgggctga

SEQ ID NO: 271192 - DNA, 20 bp, synthetic construct
  source 1..20: mol_type = other DNA
gggagcggggtcctgggctg

SEQ ID NO: 271193 - DNA, 20 bp, synthetic construct
  source 1..20: mol_type = other DNA
cgggagcggggtcctgggct

SEQ ID NO: 271194 - DNA, 20 bp, synthetic construct
  source 1..20: mol_type = other DNA
gcgggagcggggtcctgggc

SEQ ID NO: 271195 - DNA, 20 bp, synthetic construct
  source 1..20: mol_type = other DNA
ggcgggagcggggtcctggg

SEQ ID NO: 271196 - DNA, 20 bp, synthetic construct
  source 1..20: mol_type = other DNA
tggcgggagcggggtcctgg

SEQ ID NO: 271197 - DNA, 20 bp, synthetic construct
  source 1..20: mol_type = other DNA
gtggcgggagcggggtcctg

SEQ ID NO: 271198 - DNA, 20 bp, synthetic construct
  source 1..20: mol_type = other DNA
ggtggcgggagcggggtcct

SEQ ID NO: 271199 - DNA, 20 bp, synthetic construct
  source 1..20: mol_type = other DNA
gggtggcgggagcggggtcc

SEQ ID NO: 271200 - DNA, 20 bp, synthetic construct
  source 1..20: mol_type = other DNA
tgggtggcgggagcggggtc

SEQ ID NO: 271201 - DNA, 20 bp, synthetic construct
  source 1..20: mol_type = other DNA
ctgggtggcgggagcggggt

SEQ ID NO: 271202 - DNA, 20 bp, synthetic construct
  source 1..20: mol_type = other DNA
gctgggtggcgggagcgggg

SEQ ID NO: 271203 - DNA, 20 bp, synthetic construct
  source 1..20: mol_type = other DNA
tgctgggtggcgggagcggg

SEQ ID NO: 271204 - DNA, 20 bp, synthetic construct
  source 1..20: mol_type = other DNA
gtgctgggtggcgggagcgg

SEQ ID NO: 271205 - DNA, 20 bp, synthetic construct
  source 1..20: mol_type = other DNA
agtgctgggtggcgggagcg

SEQ ID NO: 271206 - DNA, 20 bp, synthetic construct
  source 1..20: mol_type = other DNA
cagtgctgggtggcgggagc

SEQ ID NO: 271207 - DNA, 20 bp, synthetic construct
  source 1..20: mol_type = other DNA
ccagtgctgggtggcgggag

SEQ ID NO: 271208 - DNA, 20 bp, synthetic construct
  source 1..20: mol_type = other DNA
cccagtgctgggtggcggga

SEQ ID NO: 271209 - DNA, 20 bp, synthetic construct
  source 1..20: mol_type = other DNA
ccccagtgctgggtggcggg

SEQ ID NO: 271210 - DNA, 20 bp, synthetic construct
  source 1..20: mol_type = other DNA
tccccagtgctgggtggcgg

SEQ ID NO: 271211 - DNA, 20 bp, synthetic construct
  source 1..20: mol_type = other DNA
ctccccagtgctgggtggcg

SEQ ID NO: 271212 - DNA, 20 bp, synthetic construct
  source 1..20: mol_type = other DNA
gctccccagtgctgggtggc

SEQ ID NO: 271213 - DNA, 20 bp, synthetic construct
  source 1..20: mol_type = other DNA
agctccccagtgctgggtgg

SEQ ID NO: 271214 - DNA, 20 bp, synthetic construct
  source 1..20: mol_type = other DNA
cagctccccagtgctgggtg

SEQ ID NO: 271215 - DNA, 20 bp, synthetic construct
  source 1..20: mol_type = other DNA
ccagctccccagtgctgggt

SEQ ID NO: 271216 - DNA, 20 bp, synthetic construct
  source 1..20: mol_type = other DNA
cccagctccccagtgctggg

SEQ ID NO: 271217 - DNA, 20 bp, synthetic construct
  source 1..20: mol_type = other DNA
ccccagctccccagtgctgg

SEQ ID NO: 271218 - DNA, 20 bp, synthetic construct
  source 1..20: mol_type = other DNA
tccccagctccccagtgctg

SEQ ID NO: 271219 - DNA, 20 bp, synthetic construct
  source 1..20: mol_type = other DNA
ttccccagctccccagtgct

SEQ ID NO: 271220 - DNA, 20 bp, synthetic construct
  source 1..20: mol_type = other DNA
cttccccagctccccagtgc

SEQ ID NO: 271221 - DNA, 20 bp, synthetic construct
  source 1..20: mol_type = other DNA
ccttccccagctccccagtg

SEQ ID NO: 271222 - DNA, 20 bp, synthetic construct
  source 1..20: mol_type = other DNA
cccttccccagctccccagt

SEQ ID NO: 271223 - DNA, 20 bp, synthetic construct
  source 1..20: mol_type = other DNA
acccttccccagctccccag

SEQ ID NO: 271224 - DNA, 20 bp, synthetic construct
  source 1..20: mol_type = other DNA
cacccttccccagctcccca

SEQ ID NO: 271225 - DNA, 20 bp, synthetic construct
  source 1..20: mol_type = other DNA
tcacccttccccagctcccc

SEQ ID NO: 271226 - DNA, 20 bp, synthetic construct
  source 1..20: mol_type = other DNA
ttcacccttccccagctccc

SEQ ID NO: 271227 - DNA, 20 bp, synthetic construct
  source 1..20: mol_type = other DNA
cttcacccttccccagctcc

SEQ ID NO: 271228 - DNA, 20 bp, synthetic construct
  source 1..20: mol_type = other DNA
tcttcacccttccccagctc

SEQ ID NO: 271229 - DNA, 20 bp, synthetic construct
  source 1..20: mol_type = other DNA
ctcttcacccttccccagct

SEQ ID NO: 271230 - DNA, 20 bp, synthetic construct
  source 1..20: mol_type = other DNA
cctcttcacccttccccagc

SEQ ID NO: 271231 - DNA, 20 bp, synthetic construct
  source 1..20: mol_type = other DNA
tcctcttcacccttccccag

SEQ ID NO: 271232 - DNA, 20 bp, synthetic construct
  source 1..20: mol_type = other DNA
ctcctcttcacccttcccca

SEQ ID NO: 271233 - DNA, 20 bp, synthetic construct
  source 1..20: mol_type = other DNA
cctcctcttcacccttcccc

SEQ ID NO: 271234 - DNA, 20 bp, synthetic construct
  source 1..20: mol_type = other DNA
gcctcctcttcacccttccc

SEQ ID NO: 271235 - DNA, 20 bp, synthetic construct
  source 1..20: mol_type = other DNA
agcctcctcttcacccttcc

SEQ ID NO: 271236 - DNA, 20 bp, synthetic construct
  source 1..20: mol_type = other DNA
cagcctcctcttcacccttc

SEQ ID NO: 271237 - DNA, 20 bp, synthetic construct
  source 1..20: mol_type = other DNA
ccagcctcctcttcaccctt

SEQ ID NO: 271238 - DNA, 20 bp, synthetic construct
  source 1..20: mol_type = other DNA
cccagcctcctcttcaccct

SEQ ID NO: 271239 - DNA, 20 bp, synthetic construct
  source 1..20: mol_type = other DNA
ccccagcctcctcttcaccc

SEQ ID NO: 271240 - DNA, 20 bp, synthetic construct
  source 1..20: mol_type = other DNA
cccccagcctcctcttcacc

SEQ ID NO: 271241 - DNA, 20 bp, synthetic construct
  source 1..20: mol_type = other DNA
acccccagcctcctcttcac

SEQ ID NO: 271242 - DNA, 20 bp, synthetic construct
  source 1..20: mol_type = other DNA
cacccccagcctcctcttca

SEQ ID NO: 271243 - DNA, 20 bp, synthetic construct
  source 1..20: mol_type = other DNA
tcacccccagcctcctcttc

SEQ ID NO: 271244 - DNA, 20 bp, synthetic construct
  source 1..20: mol_type = other DNA
ctcacccccagcctcctctt

SEQ ID NO: 271245 - DNA, 20 bp, synthetic construct
  source 1..20: mol_type = other DNA
tctcacccccagcctcctct

SEQ ID NO: 271246 - DNA, 20 bp, synthetic construct
  source 1..20: mol_type = other DNA
ttctcacccccagcctcctc

SEQ ID NO: 271247 - DNA, 20 bp, synthetic construct
  source 1..20: mol_type = other DNA
cttctcacccccagcctcct

SEQ ID NO: 271248 - DNA, 20 bp, synthetic construct
  source 1..20: mol_type = other DNA
ccttctcacccccagcctcc

SEQ ID NO: 271249 - DNA, 20 bp, synthetic construct
  source 1..20: mol_type = other DNA
tccttctcacccccagcctc

SEQ ID NO: 271250 - DNA, 20 bp, synthetic construct
  source 1..20: mol_type = other DNA
gtccttctcacccccagcct

SEQ ID NO: 271251 - DNA, 20 bp, synthetic construct
  source 1..20: mol_type = other DNA
ggtccttctcacccccagcc

SEQ ID NO: 271252 - DNA, 20 bp, synthetic construct
  source 1..20: mol_type = other DNA
tggtccttctcacccccagc

SEQ ID NO: 271253 - DNA, 20 bp, synthetic construct
  source 1..20: mol_type = other DNA
gtggtccttctcacccccag

SEQ ID NO: 271254 - DNA, 20 bp, synthetic construct
  source 1..20: mol_type = other DNA
tgtggtccttctcaccccca

SEQ ID NO: 271255 - DNA, 20 bp, synthetic construct
  source 1..20: mol_type = other DNA
ctgtggtccttctcaccccc

SEQ ID NO: 271256 - DNA, 20 bp, synthetic construct
  source 1..20: mol_type = other DNA
gctgtggtccttctcacccc

SEQ ID NO: 271257 - DNA, 20 bp, synthetic construct
  source 1..20: mol_type = other DNA
agctgtggtccttctcaccc

SEQ ID NO: 271258 - DNA, 20 bp, synthetic construct
  source 1..20: mol_type = other DNA
gagctgtggtccttctcacc

SEQ ID NO: 271259 - DNA, 20 bp, synthetic construct
  source 1..20: mol_type = other DNA
tgagctgtggtccttctcac

SEQ ID NO: 271260 - DNA, 20 bp, synthetic construct
  source 1..20: mol_type = other DNA
gtgagctgtggtccttctca

SEQ ID NO: 271261 - DNA, 20 bp, synthetic construct
  source 1..20: mol_type = other DNA
agtgagctgtggtccttctc

SEQ ID NO: 271262 - DNA, 20 bp, synthetic construct
  source 1..20: mol_type = other DNA
gagtgagctgtggtccttct

SEQ ID NO: 271263 - DNA, 20 bp, synthetic construct
  source 1..20: mol_type = other DNA
agagtgagctgtggtccttc

SEQ ID NO: 271264 - DNA, 20 bp, synthetic construct
  source 1..20: mol_type = other DNA
cagagtgagctgtggtcctt

SEQ ID NO: 271265 - DNA, 20 bp, synthetic construct
  source 1..20: mol_type = other DNA
tcagagtgagctgtggtcct

SEQ ID NO: 271266 - DNA, 20 bp, synthetic construct
  source 1..20: mol_type = other DNA
ctcagagtgagctgtggtcc

SEQ ID NO: 271267 - DNA, 20 bp, synthetic construct
  source 1..20: mol_type = other DNA
cctcagagtgagctgtggtc

SEQ ID NO: 271268 - DNA, 20 bp, synthetic construct
  source 1..20: mol_type = other DNA
gcctcagagtgagctgtggt

SEQ ID NO: 271269 - DNA, 20 bp, synthetic construct
  source 1..20: mol_type = other DNA
agcctcagagtgagctgtgg

SEQ ID NO: 271270 - DNA, 20 bp, synthetic construct
  source 1..20: mol_type = other DNA
cagcctcagagtgagctgtg

SEQ ID NO: 271271 - DNA, 20 bp, synthetic construct
  source 1..20: mol_type = other DNA
gcagcctcagagtgagctgt

SEQ ID NO: 271272 - DNA, 20 bp, synthetic construct
  source 1..20: mol_type = other DNA
tgcagcctcagagtgagctg

SEQ ID NO: 271273 - DNA, 20 bp, synthetic construct
  source 1..20: mol_type = other DNA
ctgcagcctcagagtgagct

SEQ ID NO: 271274 - DNA, 20 bp, synthetic construct
  source 1..20: mol_type = other DNA
tctgcagcctcagagtgagc

SEQ ID NO: 271275 - DNA, 20 bp, synthetic construct
  source 1..20: mol_type = other DNA
atctgcagcctcagagtgag

SEQ ID NO: 271276 - DNA, 20 bp, synthetic construct
  source 1..20: mol_type = other DNA
catctgcagcctcagagtga

SEQ ID NO: 271277 - DNA, 20 bp, synthetic construct
  source 1..20: mol_type = other DNA
acatctgcagcctcagagtg

SEQ ID NO: 271278 - DNA, 20 bp, synthetic construct
  source 1..20: mol_type = other DNA
cacatctgcagcctcagagt

SEQ ID NO: 271279 - DNA, 20 bp, synthetic construct
  source 1..20: mol_type = other DNA
gcacatctgcagcctcagag

SEQ ID NO: 271280 - DNA, 20 bp, synthetic construct
  source 1..20: mol_type = other DNA
agcacatctgcagcctcaga

SEQ ID NO: 271281 - DNA, 20 bp, synthetic construct
  source 1..20: mol_type = other DNA
cagcacatctgcagcctcag

SEQ ID NO: 271282 - DNA, 20 bp, synthetic construct
  source 1..20: mol_type = other DNA
ccagcacatctgcagcctca

SEQ ID NO: 271283 - DNA, 20 bp, synthetic construct
  source 1..20: mol_type = other DNA
cccagcacatctgcagcctc

SEQ ID NO: 271284 - DNA, 20 bp, synthetic construct
  source 1..20: mol_type = other DNA
gcccagcacatctgcagcct

SEQ ID NO: 271285 - DNA, 20 bp, synthetic construct
  source 1..20: mol_type = other DNA
ggcccagcacatctgcagcc

SEQ ID NO: 271286 - DNA, 20 bp, synthetic construct
  source 1..20: mol_type = other DNA
aggcccagcacatctgcagc

SEQ ID NO: 271287 - DNA, 20 bp, synthetic construct
  source 1..20: mol_type = other DNA
aaggcccagcacatctgcag

SEQ ID NO: 271288 - DNA, 20 bp, synthetic construct
  source 1..20: mol_type = other DNA
gaaggcccagcacatctgca

SEQ ID NO: 271289 - DNA, 20 bp, synthetic construct
  source 1..20: mol_type = other DNA
agaaggcccagcacatctgc

SEQ ID NO: 271290 - DNA, 20 bp, synthetic construct
  source 1..20: mol_type = other DNA
cagaaggcccagcacatctg

SEQ ID NO: 271291 - DNA, 20 bp, synthetic construct
  source 1..20: mol_type = other DNA
ccagaaggcccagcacatct

SEQ ID NO: 271292 - DNA, 20 bp, synthetic construct
  source 1..20: mol_type = other DNA
cccagaaggcccagcacatc

SEQ ID NO: 271293 - DNA, 20 bp, synthetic construct
  source 1..20: mol_type = other DNA
gcccagaaggcccagcacat

SEQ ID NO: 271294 - DNA, 20 bp, synthetic construct
  source 1..20: mol_type = other DNA
tgcccagaaggcccagcaca

SEQ ID NO: 271295 - DNA, 20 bp, synthetic construct
  source 1..20: mol_type = other DNA
gtgcccagaaggcccagcac

SEQ ID NO: 271296 - DNA, 20 bp, synthetic construct
  source 1..20: mol_type = other DNA
agtgcccagaaggcccagca

SEQ ID NO: 271297 - DNA, 20 bp, synthetic construct
  source 1..20: mol_type = other DNA
cagtgcccagaaggcccagc

SEQ ID NO: 271298 - DNA, 20 bp, synthetic construct
  source 1..20: mol_type = other DNA
ccagtgcccagaaggcccag

SEQ ID NO: 271299 - DNA, 20 bp, synthetic construct
  source 1..20: mol_type = other DNA
cccagtgcccagaaggccca

SEQ ID NO: 271300 - DNA, 20 bp, synthetic construct
  source 1..20: mol_type = other DNA
gcccagtgcccagaaggccc

SEQ ID NO: 271301 - DNA, 20 bp, synthetic construct
  source 1..20: mol_type = other DNA
ggcccagtgcccagaaggcc

SEQ ID NO: 271302 - DNA, 20 bp, synthetic construct
  source 1..20: mol_type = other DNA
aggcccagtgcccagaaggc

SEQ ID NO: 271303 - DNA, 20 bp, synthetic construct
  source 1..20: mol_type = other DNA
gaggcccagtgcccagaagg

SEQ ID NO: 271304 - DNA, 20 bp, synthetic construct
  source 1..20: mol_type = other DNA
cgaggcccagtgcccagaag

SEQ ID NO: 271305 - DNA, 20 bp, synthetic construct
  source 1..20: mol_type = other DNA
ccgaggcccagtgcccagaa

SEQ ID NO: 271306 - DNA, 20 bp, synthetic construct
  source 1..20: mol_type = other DNA
cccgaggcccagtgcccaga

SEQ ID NO: 271307 - DNA, 20 bp, synthetic construct
  source 1..20: mol_type = other DNA
ccccgaggcccagtgcccag

SEQ ID NO: 271308 - DNA, 20 bp, synthetic construct
  source 1..20: mol_type = other DNA
tccccgaggcccagtgccca

SEQ ID NO: 271309 - DNA, 20 bp, synthetic construct
  source 1..20: mol_type = other DNA
ctccccgaggcccagtgccc

SEQ ID NO: 271310 - DNA, 20 bp, synthetic construct
  source 1..20: mol_type = other DNA
gctccccgaggcccagtgcc

SEQ ID NO: 271311 - DNA, 20 bp, synthetic construct
  source 1..20: mol_type = other DNA
agctccccgaggcccagtgc

SEQ ID NO: 271312 - DNA, 20 bp, synthetic construct
  source 1..20: mol_type = other DNA
tagctccccgaggcccagtg

SEQ ID NO: 271313 - DNA, 20 bp, synthetic construct
  source 1..20: mol_type = other DNA
ctagctccccgaggcccagt

SEQ ID NO: 271314 - DNA, 20 bp, synthetic construct
  source 1..20: mol_type = other DNA
cctagctccccgaggcccag

SEQ ID NO: 271315 - DNA, 20 bp, synthetic construct
  source 1..20: mol_type = other DNA
ccctagctccccgaggccca

SEQ ID NO: 271316 - DNA, 20 bp, synthetic construct
  source 1..20: mol_type = other DNA
cccctagctccccgaggccc

SEQ ID NO: 271317 - DNA, 20 bp, synthetic construct
  source 1..20: mol_type = other DNA
ccccctagctccccgaggcc

SEQ ID NO: 271318 - DNA, 20 bp, synthetic construct
  source 1..20: mol_type = other DNA
gccccctagctccccgaggc

SEQ ID NO: 271319 - DNA, 20 bp, synthetic construct
  source 1..20: mol_type = other DNA
agccccctagctccccgagg

SEQ ID NO: 271320 - DNA, 20 bp, synthetic construct
  source 1..20: mol_type = other DNA
aagccccctagctccccgag

SEQ ID NO: 271321 - DNA, 20 bp, synthetic construct
  source 1..20: mol_type = other DNA
aaagccccctagctccccga

SEQ ID NO: 271322 - DNA, 20 bp, synthetic construct
  source 1..20: mol_type = other DNA
gaaagccccctagctccccg

SEQ ID NO: 271323 - DNA, 20 bp, synthetic construct
  source 1..20: mol_type = other DNA
agaaagccccctagctcccc

SEQ ID NO: 271324 - DNA, 20 bp, synthetic construct
  source 1..20: mol_type = other DNA
cagaaagccccctagctccc

SEQ ID NO: 271325 - DNA, 20 bp, synthetic construct
  source 1..20: mol_type = other DNA
ccagaaagccccctagctcc

SEQ ID NO: 271326 - DNA, 20 bp, synthetic construct
  source 1..20: mol_type = other DNA
tccagaaagccccctagctc

SEQ ID NO: 271327 - DNA, 20 bp, synthetic construct
  source 1..20: mol_type = other DNA
ttccagaaagccccctagct

SEQ ID NO: 271328 - DNA, 20 bp, synthetic construct
  source 1..20: mol_type = other DNA
gttccagaaagccccctagc

SEQ ID NO: 271329 - DNA, 20 bp, synthetic construct
  source 1..20: mol_type = other DNA
ggttccagaaagccccctag

SEQ ID NO: 271330 - DNA, 20 bp, synthetic construct
  source 1..20: mol_type = other DNA
gggttccagaaagcccccta

SEQ ID NO: 271331 - DNA, 20 bp, synthetic construct
  source 1..20: mol_type = other DNA
agggttccagaaagccccct

SEQ ID NO: 271332 - DNA, 20 bp, synthetic construct
  source 1..20: mol_type = other DNA
cagggttccagaaagccccc

SEQ ID NO: 271333 - DNA, 20 bp, synthetic construct
  source 1..20: mol_type = other DNA
ccagggttccagaaagcccc

SEQ ID NO: 271334 - DNA, 20 bp, synthetic construct
  source 1..20: mol_type = other DNA
cccagggttccagaaagccc

SEQ ID NO: 271335 - DNA, 20 bp, synthetic construct
  source 1..20: mol_type = other DNA
gcccagggttccagaaagcc

SEQ ID NO: 271336 - DNA, 20 bp, synthetic construct
  source 1..20: mol_type = other DNA
ggcccagggttccagaaagc

SEQ ID NO: 271337 - DNA, 20 bp, synthetic construct
  source 1..20: mol_type = other DNA
aggcccagggttccagaaag

SEQ ID NO: 271338 - DNA, 20 bp, synthetic construct
  source 1..20: mol_type = other DNA
caggcccagggttccagaaa

SEQ ID NO: 271339 - DNA, 20 bp, synthetic construct
  source 1..20: mol_type = other DNA
gcaggcccagggttccagaa

SEQ ID NO: 271340 - DNA, 20 bp, synthetic construct
  source 1..20: mol_type = other DNA
cgcaggcccagggttccaga

SEQ ID NO: 271341 - DNA, 20 bp, synthetic construct
  source 1..20: mol_type = other DNA
acgcaggcccagggttccag

SEQ ID NO: 271342 - DNA, 20 bp, synthetic construct
  source 1..20: mol_type = other DNA
cacgcaggcccagggttcca

SEQ ID NO: 271343 - DNA, 20 bp, synthetic construct
  source 1..20: mol_type = other DNA
acacgcaggcccagggttcc

SEQ ID NO: 271344 - DNA, 20 bp, synthetic construct
  source 1..20: mol_type = other DNA
gacacgcaggcccagggttc

SEQ ID NO: 271345 - DNA, 20 bp, synthetic construct
  source 1..20: mol_type = other DNA
tgacacgcaggcccagggtt

SEQ ID NO: 271346 - DNA, 20 bp, synthetic construct
  source 1..20: mol_type = other DNA
ctgacacgcaggcccagggt

SEQ ID NO: 271347 - DNA, 20 bp, synthetic construct
  source 1..20: mol_type = other DNA
gctgacacgcaggcccaggg

SEQ ID NO: 271348 - DNA, 20 bp, synthetic construct
  source 1..20: mol_type = other DNA
agctgacacgcaggcccagg

SEQ ID NO: 271349 - DNA, 20 bp, synthetic construct
  source 1..20: mol_type = other DNA
aagctgacacgcaggcccag

SEQ ID NO: 271350 - DNA, 20 bp, synthetic construct
  source 1..20: mol_type = other DNA
caagctgacacgcaggccca

SEQ ID NO: 271351 - DNA, 20 bp, synthetic construct
  source 1..20: mol_type = other DNA
gcaagctgacacgcaggccc

SEQ ID NO: 271352 - DNA, 20 bp, synthetic construct
  source 1..20: mol_type = other DNA
ggcaagctgacacgcaggcc

SEQ ID NO: 271353 - DNA, 20 bp, synthetic construct
  source 1..20: mol_type = other DNA
aggcaagctgacacgcaggc

SEQ ID NO: 271354 - DNA, 20 bp, synthetic construct
  source 1..20: mol_type = other DNA
gaggcaagctgacacgcagg

SEQ ID NO: 271355 - DNA, 20 bp, synthetic construct
  source 1..20: mol_type = other DNA
ggaggcaagctgacacgcag

SEQ ID NO: 271356 - DNA, 20 bp, synthetic construct
  source 1..20: mol_type = other DNA
gggaggcaagctgacacgca

SEQ ID NO: 271357 - DNA, 20 bp, synthetic construct
  source 1..20: mol_type = other DNA
ggggaggcaagctgacacgc

SEQ ID NO: 271358 - DNA, 20 bp, synthetic construct
  source 1..20: mol_type = other DNA
gggggaggcaagctgacacg

SEQ ID NO: 271359 - DNA, 20 bp, synthetic construct
  source 1..20: mol_type = other DNA
tgggggaggcaagctgacac

SEQ ID NO: 271360 - DNA, 20 bp, synthetic construct
  source 1..20: mol_type = other DNA
gtgggggaggcaagctgaca

SEQ ID NO: 271361 - DNA, 20 bp, synthetic construct
  source 1..20: mol_type = other DNA
cgtgggggaggcaagctgac

SEQ ID NO: 271362 - DNA, 20 bp, synthetic construct
  source 1..20: mol_type = other DNA
gcgtgggggaggcaagctga

SEQ ID NO: 271363 - DNA, 20 bp, synthetic construct
  source 1..20: mol_type = other DNA
tgcgtgggggaggcaagctg

SEQ ID NO: 271364 - DNA, 20 bp, synthetic construct
  source 1..20: mol_type = other DNA
ctgcgtgggggaggcaagct

SEQ ID NO: 271365 - DNA, 20 bp, synthetic construct
  source 1..20: mol_type = other DNA
cctgcgtgggggaggcaagc

SEQ ID NO: 271366 - DNA, 20 bp, synthetic construct
  source 1..20: mol_type = other DNA
gcctgcgtgggggaggcaag

SEQ ID NO: 271367 - DNA, 20 bp, synthetic construct
  source 1..20: mol_type = other DNA
cgcctgcgtgggggaggcaa

SEQ ID NO: 271368 - DNA, 20 bp, synthetic construct
  source 1..20: mol_type = other DNA
gcgcctgcgtgggggaggca

SEQ ID NO: 271369 - DNA, 20 bp, synthetic construct
  source 1..20: mol_type = other DNA
agcgcctgcgtgggggaggc

SEQ ID NO: 271370 - DNA, 20 bp, synthetic construct
  source 1..20: mol_type = other DNA
gagcgcctgcgtgggggagg

SEQ ID NO: 271371 - DNA, 20 bp, synthetic construct
  source 1..20: mol_type = other DNA
agagcgcctgcgtgggggag

SEQ ID NO: 271372 - DNA, 20 bp, synthetic construct
  source 1..20: mol_type = other DNA
gagagcgcctgcgtggggga

SEQ ID NO: 271373 - DNA, 20 bp, synthetic construct
  source 1..20: mol_type = other DNA
ggagagcgcctgcgtggggg

SEQ ID NO: 271374 - DNA, 20 bp, synthetic construct
  source 1..20: mol_type = other DNA
tggagagcgcctgcgtgggg

SEQ ID NO: 271375 - DNA, 20 bp, synthetic construct
  source 1..20: mol_type = other DNA
gtggagagcgcctgcgtggg

SEQ ID NO: 271376 - DNA, 20 bp, synthetic construct
  source 1..20: mol_type = other DNA
tgtggagagcgcctgcgtgg

SEQ ID NO: 271377 - DNA, 20 bp, synthetic construct
  source 1..20: mol_type = other DNA
gtgtggagagcgcctgcgtg

SEQ ID NO: 271378 - DNA, 20 bp, synthetic construct
  source 1..20: mol_type = other DNA
ggtgtggagagcgcctgcgt

SEQ ID NO: 271379 - DNA, 20 bp, synthetic construct
  source 1..20: mol_type = other DNA
tggtgtggagagcgcctgcg

SEQ ID NO: 271380 - DNA, 20 bp, synthetic construct
  source 1..20: mol_type = other DNA
atggtgtggagagcgcctgc

SEQ ID NO: 271381 - DNA, 20 bp, synthetic construct
  source 1..20: mol_type = other DNA
aatggtgtggagagcgcctg

SEQ ID NO: 271382 - DNA, 20 bp, synthetic construct
  source 1..20: mol_type = other DNA
caatggtgtggagagcgcct

SEQ ID NO: 271383 - DNA, 20 bp, synthetic construct
  source 1..20: mol_type = other DNA
tcaatggtgtggagagcgcc

SEQ ID NO: 271384 - DNA, 20 bp, synthetic construct
  source 1..20: mol_type = other DNA
ttcaatggtgtggagagcgc

SEQ ID NO: 271385 - DNA, 20 bp, synthetic construct
  source 1..20: mol_type = other DNA
cttcaatggtgtggagagcg

SEQ ID NO: 271386 - DNA, 20 bp, synthetic construct
  source 1..20: mol_type = other DNA
acttcaatggtgtggagagc

SEQ ID NO: 271387 - DNA, 20 bp, synthetic construct
  source 1..20: mol_type = other DNA
aacttcaatggtgtggagag

SEQ ID NO: 271388 - DNA, 20 bp, synthetic construct
  source 1..20: mol_type = other DNA
gaacttcaatggtgtggaga

SEQ ID NO: 271389 - DNA, 20 bp, synthetic construct
  source 1..20: mol_type = other DNA
agaacttcaatggtgtggag

SEQ ID NO: 271390 - DNA, 20 bp, synthetic construct
  source 1..20: mol_type = other DNA
aagaacttcaatggtgtgga

SEQ ID NO: 271391 - DNA, 20 bp, synthetic construct
  source 1..20: mol_type = other DNA
taagaacttcaatggtgtgg

SEQ ID NO: 271392 - DNA, 20 bp, synthetic construct
  source 1..20: mol_type = other DNA
ataagaacttcaatggtgtg

SEQ ID NO: 271393 - DNA, 20 bp, synthetic construct
  source 1..20: mol_type = other DNA
gataagaacttcaatggtgt

SEQ ID NO: 271394 - DNA, 20 bp, synthetic construct
  source 1..20: mol_type = other DNA
tgataagaacttcaatggtg

SEQ ID NO: 271395 - DNA, 20 bp, synthetic construct
  source 1..20: mol_type = other DNA
gtgataagaacttcaatggt

SEQ ID NO: 271396 - DNA, 20 bp, synthetic construct
  source 1..20: mol_type = other DNA
agtgataagaacttcaatgg

SEQ ID NO: 271397 - DNA, 20 bp, synthetic construct
  source 1..20: mol_type = other DNA
aagtgataagaacttcaatg

SEQ ID NO: 271398 - DNA, 20 bp, synthetic construct
  source 1..20: mol_type = other DNA
caagtgataagaacttcaat

SEQ ID NO: 271399 - DNA, 20 bp, synthetic construct
  source 1..20: mol_type = other DNA
ccaagtgataagaacttcaa

SEQ ID NO: 271400 - DNA, 20 bp, synthetic construct
  source 1..20: mol_type = other DNA
cccaagtgataagaacttca

SEQ ID NO: 271401 - DNA, 20 bp, synthetic construct
  source 1..20: mol_type = other DNA
acccaagtgataagaacttc

SEQ ID NO: 271402 - DNA, 20 bp, synthetic construct
  source 1..20: mol_type = other DNA
gacccaagtgataagaactt

SEQ ID NO: 271403 - DNA, 20 bp, synthetic construct
  source 1..20: mol_type = other DNA
agacccaagtgataagaact

SEQ ID NO: 271404 - DNA, 20 bp, synthetic construct
  source 1..20: mol_type = other DNA
cagacccaagtgataagaac

SEQ ID NO: 271405 - DNA, 20 bp, synthetic construct
  source 1..20: mol_type = other DNA
tcagacccaagtgataagaa

SEQ ID NO: 271406 - DNA, 20 bp, synthetic construct
  source 1..20: mol_type = other DNA
ctcagacccaagtgataaga

SEQ ID NO: 271407 - DNA, 20 bp, synthetic construct
  source 1..20: mol_type = other DNA
gctcagacccaagtgataag

SEQ ID NO: 271408 - DNA, 20 bp, synthetic construct
  source 1..20: mol_type = other DNA
ggctcagacccaagtgataa

SEQ ID NO: 271409 - DNA, 20 bp, synthetic construct
  source 1..20: mol_type = other DNA
aggctcagacccaagtgata

SEQ ID NO: 271410 - DNA, 20 bp, synthetic construct
  source 1..20: mol_type = other DNA
caggctcagacccaagtgat

SEQ ID NO: 271411 - DNA, 20 bp, synthetic construct
  source 1..20: mol_type = other DNA
ccaggctcagacccaagtga

SEQ ID NO: 271412 - DNA, 20 bp, synthetic construct
  source 1..20: mol_type = other DNA
cccaggctcagacccaagtg

SEQ ID NO: 271413 - DNA, 20 bp, synthetic construct
  source 1..20: mol_type = other DNA
ccccaggctcagacccaagt

SEQ ID NO: 271414 - DNA, 20 bp, synthetic construct
  source 1..20: mol_type = other DNA
gccccaggctcagacccaag

SEQ ID NO: 271415 - DNA, 20 bp, synthetic construct
  source 1..20: mol_type = other DNA
tgccccaggctcagacccaa

SEQ ID NO: 271416 - DNA, 20 bp, synthetic construct
  source 1..20: mol_type = other DNA
atgccccaggctcagaccca

SEQ ID NO: 271417 - DNA, 20 bp, synthetic construct
  source 1..20: mol_type = other DNA
aatgccccaggctcagaccc

SEQ ID NO: 271418 - DNA, 20 bp, synthetic construct
  source 1..20: mol_type = other DNA
aaatgccccaggctcagacc

SEQ ID NO: 271419 - DNA, 20 bp, synthetic construct
  source 1..20: mol_type = other DNA
caaatgccccaggctcagac

SEQ ID NO: 271420 - DNA, 20 bp, synthetic construct
  source 1..20: mol_type = other DNA
ccaaatgccccaggctcaga

SEQ ID NO: 271421 - DNA, 20 bp, synthetic construct
  source 1..20: mol_type = other DNA
tccaaatgccccaggctcag

SEQ ID NO: 271422 - DNA, 20 bp, synthetic construct
  source 1..20: mol_type = other DNA
gtccaaatgccccaggctca

SEQ ID NO: 271423 - DNA, 20 bp, synthetic construct
  source 1..20: mol_type = other DNA
cgtccaaatgccccaggctc

SEQ ID NO: 271424 - DNA, 20 bp, synthetic construct
  source 1..20: mol_type = other DNA
ccgtccaaatgccccaggct

SEQ ID NO: 271425 - DNA, 20 bp, synthetic construct
  source 1..20: mol_type = other DNA
tccgtccaaatgccccaggc

SEQ ID NO: 271426 - DNA, 20 bp, synthetic construct
  source 1..20: mol_type = other DNA
ctccgtccaaatgccccagg

SEQ ID NO: 271427 - DNA, 20 bp, synthetic construct
  source 1..20: mol_type = other DNA
cctccgtccaaatgccccag

SEQ ID NO: 271428 - DNA, 20 bp, synthetic construct
  source 1..20: mol_type = other DNA
ccctccgtccaaatgcccca

SEQ ID NO: 271429 - DNA, 20 bp, synthetic construct
  source 1..20: mol_type = other DNA
accctccgtccaaatgcccc

SEQ ID NO: 271430 - DNA, 20 bp, synthetic construct
  source 1..20: mol_type = other DNA
caccctccgtccaaatgccc

SEQ ID NO: 271431 - DNA, 20 bp, synthetic construct
  source 1..20: mol_type = other DNA
ccaccctccgtccaaatgcc

SEQ ID NO: 271432 - DNA, 20 bp, synthetic construct
  source 1..20: mol_type = other DNA
gccaccctccgtccaaatgc

SEQ ID NO: 271433 - DNA, 20 bp, synthetic construct
  source 1..20: mol_type = other DNA
ggccaccctccgtccaaatg

SEQ ID NO: 271434 - DNA, 20 bp, synthetic construct
  source 1..20: mol_type = other DNA
tggccaccctccgtccaaat

SEQ ID NO: 271435 - DNA, 20 bp, synthetic construct
  source 1..20: mol_type = other DNA
gtggccaccctccgtccaaa

SEQ ID NO: 271436 - DNA, 20 bp, synthetic construct
  source 1..20: mol_type = other DNA
ggtggccaccctccgtccaa

SEQ ID NO: 271437 - DNA, 20 bp, synthetic construct
  source 1..20: mol_type = other DNA
tggtggccaccctccgtcca

SEQ ID NO: 271438 - DNA, 20 bp, synthetic construct
  source 1..20: mol_type = other DNA
ctggtggccaccctccgtcc

SEQ ID NO: 271439 - DNA, 20 bp, synthetic construct
  source 1..20: mol_type = other DNA
actggtggccaccctccgtc

SEQ ID NO: 271440 - DNA, 20 bp, synthetic construct
  source 1..20: mol_type = other DNA
cactggtggccaccctccgt

SEQ ID NO: 271441 - DNA, 20 bp, synthetic construct
  source 1..20: mol_type = other DNA
gcactggtggccaccctccg

SEQ ID NO: 271442 - DNA, 20 bp, synthetic construct
  source 1..20: mol_type = other DNA
tgcactggtggccaccctcc

SEQ ID NO: 271443 - DNA, 20 bp, synthetic construct
  source 1..20: mol_type = other DNA
gtgcactggtggccaccctc

SEQ ID NO: 271444 - DNA, 20 bp, synthetic construct
  source 1..20: mol_type = other DNA
tgtgcactggtggccaccct

SEQ ID NO: 271445 - DNA, 20 bp, synthetic construct
  source 1..20: mol_type = other DNA
atgtgcactggtggccaccc

SEQ ID NO: 271446 - DNA, 20 bp, synthetic construct
  source 1..20: mol_type = other DNA
catgtgcactggtggccacc

SEQ ID NO: 271447 - DNA, 20 bp, synthetic construct
  source 1..20: mol_type = other DNA
ccatgtgcactggtggccac

SEQ ID NO: 271448 - DNA, 20 bp, synthetic construct
  source 1..20: mol_type = other DNA
cccatgtgcactggtggcca

SEQ ID NO: 271449 - DNA, 20 bp, synthetic construct
  source 1..20: mol_type = other DNA
gcccatgtgcactggtggcc

SEQ ID NO: 271450 - DNA, 20 bp, synthetic construct
  source 1..20: mol_type = other DNA
tgcccatgtgcactggtggc

SEQ ID NO: 271451 - DNA, 20 bp, synthetic construct
  source 1..20: mol_type = other DNA
gtgcccatgtgcactggtgg

SEQ ID NO: 271452 - DNA, 20 bp, synthetic construct
  source 1..20: mol_type = other DNA
ggtgcccatgtgcactggtg

SEQ ID NO: 271453 - DNA, 20 bp, synthetic construct
  source 1..20: mol_type = other DNA
aggtgcccatgtgcactggt

SEQ ID NO: 271454 - DNA, 20 bp, synthetic construct
  source 1..20: mol_type = other DNA
aaggtgcccatgtgcactgg

SEQ ID NO: 271455 - DNA, 20 bp, synthetic construct
  source 1..20: mol_type = other DNA
caaggtgcccatgtgcactg

SEQ ID NO: 271456 - DNA, 20 bp, synthetic construct
  source 1..20: mol_type = other DNA
gcaaggtgcccatgtgcact

SEQ ID NO: 271457 - DNA, 20 bp, synthetic construct
  source 1..20: mol_type = other DNA
ggcaaggtgcccatgtgcac

SEQ ID NO: 271458 - DNA, 20 bp, synthetic construct
  source 1..20: mol_type = other DNA
aggcaaggtgcccatgtgca

SEQ ID NO: 271459 - DNA, 20 bp, synthetic construct
  source 1..20: mol_type = other DNA
gaggcaaggtgcccatgtgc

SEQ ID NO: 271460 - DNA, 20 bp, synthetic construct
  source 1..20: mol_type = other DNA
tgaggcaaggtgcccatgtg

SEQ ID NO: 271461 - DNA, 20 bp, synthetic construct
  source 1..20: mol_type = other DNA
ttgaggcaaggtgcccatgt

SEQ ID NO: 271462 - DNA, 20 bp, synthetic construct
  source 1..20: mol_type = other DNA
tttgaggcaaggtgcccatg

SEQ ID NO: 271463 - DNA, 20 bp, synthetic construct
  source 1..20: mol_type = other DNA
gtttgaggcaaggtgcccat

SEQ ID NO: 271464 - DNA, 20 bp, synthetic construct
  source 1..20: mol_type = other DNA
ggtttgaggcaaggtgccca

SEQ ID NO: 271465 - DNA, 20 bp, synthetic construct
  source 1..20: mol_type = other DNA
gggtttgaggcaaggtgccc

SEQ ID NO: 271466 - DNA, 20 bp, synthetic construct
  source 1..20: mol_type = other DNA
agggtttgaggcaaggtgcc

SEQ ID NO: 271467 - DNA, 20 bp, synthetic construct
  source 1..20: mol_type = other DNA
cagggtttgaggcaaggtgc

SEQ ID NO: 271468 - DNA, 20 bp, synthetic construct
  source 1..20: mol_type = other DNA
gcagggtttgaggcaaggtg

SEQ ID NO: 271469 - DNA, 20 bp, synthetic construct
  source 1..20: mol_type = other DNA
ggcagggtttgaggcaaggt

SEQ ID NO: 271470 - DNA, 20 bp, synthetic construct
  source 1..20: mol_type = other DNA
tggcagggtttgaggcaagg

SEQ ID NO: 271471 - DNA, 20 bp, synthetic construct
  source 1..20: mol_type = other DNA
gtggcagggtttgaggcaag

SEQ ID NO: 271472 - DNA, 20 bp, synthetic construct
  source 1..20: mol_type = other DNA
ggtggcagggtttgaggcaa

SEQ ID NO: 271473 - DNA, 20 bp, synthetic construct
  source 1..20: mol_type = other DNA
aggtggcagggtttgaggca

SEQ ID NO: 271474 - DNA, 20 bp, synthetic construct
  source 1..20: mol_type = other DNA
gaggtggcagggtttgaggc

SEQ ID NO: 271475 - DNA, 20 bp, synthetic construct
  source 1..20: mol_type = other DNA
ggaggtggcagggtttgagg

SEQ ID NO: 271476 - DNA, 20 bp, synthetic construct
  source 1..20: mol_type = other DNA
gggaggtggcagggtttgag

SEQ ID NO: 271477 - DNA, 20 bp, synthetic construct
  source 1..20: mol_type = other DNA
ggggaggtggcagggtttga

SEQ ID NO: 271478 - DNA, 20 bp, synthetic construct
  source 1..20: mol_type = other DNA
gggggaggtggcagggtttg

SEQ ID NO: 271479 - DNA, 20 bp, synthetic construct
  source 1..20: mol_type = other DNA
ggggggaggtggcagggttt

SEQ ID NO: 271480 - DNA, 20 bp, synthetic construct
  source 1..20: mol_type = other DNA
tggggggaggtggcagggtt

SEQ ID NO: 271481 - DNA, 20 bp, synthetic construct
  source 1..20: mol_type = other DNA
gtggggggaggtggcagggt

SEQ ID NO: 271482 - DNA, 20 bp, synthetic construct
  source 1..20: mol_type = other DNA
ggtggggggaggtggcaggg

SEQ ID NO: 271483 - DNA, 20 bp, synthetic construct
  source 1..20: mol_type = other DNA
gggtggggggaggtggcagg

SEQ ID NO: 271484 - DNA, 20 bp, synthetic construct
  source 1..20: mol_type = other DNA
tgggtggggggaggtggcag

SEQ ID NO: 271485 - DNA, 20 bp, synthetic construct
  source 1..20: mol_type = other DNA
ctgggtggggggaggtggca

SEQ ID NO: 271486 - DNA, 20 bp, synthetic construct
  source 1..20: mol_type = other DNA
cctgggtggggggaggtggc

SEQ ID NO: 271487 - DNA, 20 bp, synthetic construct
  source 1..20: mol_type = other DNA
tcctgggtggggggaggtgg

SEQ ID NO: 271488 - DNA, 20 bp, synthetic construct
  source 1..20: mol_type = other DNA
atcctgggtggggggaggtg

SEQ ID NO: 271489 - DNA, 20 bp, synthetic construct
  source 1..20: mol_type = other DNA
gatcctgggtggggggaggt

SEQ ID NO: 271490 - DNA, 20 bp, synthetic construct
  source 1..20: mol_type = other DNA
ggatcctgggtggggggagg

SEQ ID NO: 271491 - DNA, 20 bp, synthetic construct
  source 1..20: mol_type = other DNA
gggatcctgggtggggggag

SEQ ID NO: 271492 - DNA, 20 bp, synthetic construct
  source 1..20: mol_type = other DNA
ggggatcctgggtgggggga

SEQ ID NO: 271493 - DNA, 20 bp, synthetic construct
  source 1..20: mol_type = other DNA
gggggatcctgggtgggggg

SEQ ID NO: 271494 - DNA, 20 bp, synthetic construct
  source 1..20: mol_type = other DNA
ggggggatcctgggtggggg

SEQ ID NO: 271495 - DNA, 20 bp, synthetic construct
  source 1..20: mol_type = other DNA
aggggggatcctgggtgggg

SEQ ID NO: 271496 - DNA, 20 bp, synthetic construct
  source 1..20: mol_type = other DNA
caggggggatcctgggtggg

SEQ ID NO: 271497 - DNA, 20 bp, synthetic construct
  source 1..20: mol_type = other DNA
gcaggggggatcctgggtgg

SEQ ID NO: 271498 - DNA, 20 bp, synthetic construct
  source 1..20: mol_type = other DNA
ggcaggggggatcctgggtg

SEQ ID NO: 271499 - DNA, 20 bp, synthetic construct
  source 1..20: mol_type = other DNA
gggcaggggggatcctgggt

SEQ ID NO: 271500 - DNA, 20 bp, synthetic construct
  source 1..20: mol_type = other DNA
ggggcaggggggatcctggg

SEQ ID NO: 271501 - DNA, 20 bp, synthetic construct
  source 1..20: mol_type = other DNA
gggggcaggggggatcctgg

SEQ ID NO: 271502 - DNA, 20 bp, synthetic construct
  source 1..20: mol_type = other DNA
cgggggcaggggggatcctg

SEQ ID NO: 271503 - DNA, 20 bp, synthetic construct
  source 1..20: mol_type = other DNA
tcgggggcaggggggatcct

SEQ ID NO: 271504 - DNA, 20 bp, synthetic construct
  source 1..20: mol_type = other DNA
ttcgggggcaggggggatcc

SEQ ID NO: 271505 - DNA, 20 bp, synthetic construct
  source 1..20: mol_type = other DNA
gttcgggggcaggggggatc

SEQ ID NO: 271506 - DNA, 20 bp, synthetic construct
  source 1..20: mol_type = other DNA
tgttcgggggcaggggggat

SEQ ID NO: 271507 - DNA, 20 bp, synthetic construct
  source 1..20: mol_type = other DNA
ttgttcgggggcagggggga

SEQ ID NO: 271508 - DNA, 20 bp, synthetic construct
  source 1..20: mol_type = other DNA
cttgttcgggggcagggggg

SEQ ID NO: 271509 - DNA, 20 bp, synthetic construct
  source 1..20: mol_type = other DNA
gcttgttcgggggcaggggg

SEQ ID NO: 271510 - DNA, 20 bp, synthetic construct
  source 1..20: mol_type = other DNA
agcttgttcgggggcagggg

SEQ ID NO: 271511 - DNA, 20 bp, synthetic construct
  source 1..20: mol_type = other DNA
aagcttgttcgggggcaggg

SEQ ID NO: 271512 - DNA, 20 bp, synthetic construct
  source 1..20: mol_type = other DNA
caagcttgttcgggggcagg

SEQ ID NO: 271513 - DNA, 20 bp, synthetic construct
  source 1..20: mol_type = other DNA
acaagcttgttcgggggcag

SEQ ID NO: 271514 - DNA, 20 bp, synthetic construct
  source 1..20: mol_type = other DNA
cacaagcttgttcgggggca

SEQ ID NO: 271515 - DNA, 20 bp, synthetic construct
  source 1..20: mol_type = other DNA
tcacaagcttgttcgggggc

SEQ ID NO: 271516 - DNA, 20 bp, synthetic construct
  source 1..20: mol_type = other DNA
ctcacaagcttgttcggggg

SEQ ID NO: 271517 - DNA, 20 bp, synthetic construct
  source 1..20: mol_type = other DNA
actcacaagcttgttcgggg

SEQ ID NO: 271518 - DNA, 20 bp, synthetic construct
  source 1..20: mol_type = other DNA
cactcacaagcttgttcggg

SEQ ID NO: 271519 - DNA, 20 bp, synthetic construct
  source 1..20: mol_type = other DNA
gcactcacaagcttgttcgg

SEQ ID NO: 271520 - DNA, 20 bp, synthetic construct
  source 1..20: mol_type = other DNA
tgcactcacaagcttgttcg

SEQ ID NO: 271521 - DNA, 20 bp, synthetic construct
  source 1..20: mol_type = other DNA
ctgcactcacaagcttgttc

SEQ ID NO: 271522 - DNA, 20 bp, synthetic construct
  source 1..20: mol_type = other DNA
actgcactcacaagcttgtt

SEQ ID NO: 271523 - DNA, 20 bp, synthetic construct
  source 1..20: mol_type = other DNA
cactgcactcacaagcttgt

SEQ ID NO: 271524 - DNA, 20 bp, synthetic construct
  source 1..20: mol_type = other DNA
acactgcactcacaagcttg

SEQ ID NO: 271525 - DNA, 20 bp, synthetic construct
  source 1..20: mol_type = other DNA
gacactgcactcacaagctt

SEQ ID NO: 271526 - DNA, 20 bp, synthetic construct
  source 1..20: mol_type = other DNA
tgacactgcactcacaagct

SEQ ID NO: 271527 - DNA, 20 bp, synthetic construct
  source 1..20: mol_type = other DNA
gtgacactgcactcacaagc

SEQ ID NO: 271528 - DNA, 20 bp, synthetic construct
  source 1..20: mol_type = other DNA
tgtgacactgcactcacaag

SEQ ID NO: 271529 - DNA, 20 bp, synthetic construct
  source 1..20: mol_type = other DNA
atgtgacactgcactcacaa

SEQ ID NO: 271530 - DNA, 20 bp, synthetic construct
  source 1..20: mol_type = other DNA
gatgtgacactgcactcaca

SEQ ID NO: 271531 - DNA, 20 bp, synthetic construct
  source 1..20: mol_type = other DNA
ggatgtgacactgcactcac

SEQ ID NO: 271532 - DNA, 20 bp, synthetic construct
  source 1..20: mol_type = other DNA
gggatgtgacactgcactca

SEQ ID NO: 271533 - DNA, 20 bp, synthetic construct
  source 1..20: mol_type = other DNA
tgggatgtgacactgcactc

SEQ ID NO: 271534 - DNA, 20 bp, synthetic construct
  source 1..20: mol_type = other DNA
atgggatgtgacactgcact

SEQ ID NO: 271535 - DNA, 20 bp, synthetic construct
  source 1..20: mol_type = other DNA
gatgggatgtgacactgcac

SEQ ID NO: 271536 - DNA, 20 bp, synthetic construct
  source 1..20: mol_type = other DNA
cgatgggatgtgacactgca

SEQ ID NO: 271537 - DNA, 20 bp, synthetic construct
  source 1..20: mol_type = other DNA
ccgatgggatgtgacactgc

SEQ ID NO: 271538 - DNA, 20 bp, synthetic construct
  source 1..20: mol_type = other DNA
cccgatgggatgtgacactg

SEQ ID NO: 271539 - DNA, 20 bp, synthetic construct
  source 1..20: mol_type = other DNA
tcccgatgggatgtgacact

SEQ ID NO: 271540 - DNA, 20 bp, synthetic construct
  source 1..20: mol_type = other DNA
atcccgatgggatgtgacac

SEQ ID NO: 271541 - DNA, 20 bp, synthetic construct
  source 1..20: mol_type = other DNA
catcccgatgggatgtgaca

SEQ ID NO: 271542 - DNA, 20 bp, synthetic construct
  source 1..20: mol_type = other DNA
ccatcccgatgggatgtgac

SEQ ID NO: 271543 - DNA, 20 bp, synthetic construct
  source 1..20: mol_type = other DNA
tccatcccgatgggatgtga

SEQ ID NO: 271544 - DNA, 20 bp, synthetic construct
  source 1..20: mol_type = other DNA
ttccatcccgatgggatgtg

SEQ ID NO: 271545 - DNA, 20 bp, synthetic construct
  source 1..20: mol_type = other DNA
tttccatcccgatgggatgt

SEQ ID NO: 271546 - DNA, 20 bp, synthetic construct
  source 1..20: mol_type = other DNA
atttccatcccgatgggatg

SEQ ID NO: 271547 - DNA, 20 bp, synthetic construct
  source 1..20: mol_type = other DNA
catttccatcccgatgggat

SEQ ID NO: 271548 - DNA, 20 bp, synthetic construct
  source 1..20: mol_type = other DNA
ccatttccatcccgatggga

SEQ ID NO: 271549 - DNA, 20 bp, synthetic construct
  source 1..20: mol_type = other DNA
tccatttccatcccgatggg

SEQ ID NO: 271550 - DNA, 20 bp, synthetic construct
  source 1..20: mol_type = other DNA
gtccatttccatcccgatgg

SEQ ID NO: 271551 - DNA, 20 bp, synthetic construct
  source 1..20: mol_type = other DNA
cgtccatttccatcccgatg

SEQ ID NO: 271552 - DNA, 20 bp, synthetic construct
  source 1..20: mol_type = other DNA
ccgtccatttccatcccgat

SEQ ID NO: 271553 - DNA, 20 bp, synthetic construct
  source 1..20: mol_type = other DNA
accgtccatttccatcccga

SEQ ID NO: 271554 - DNA, 20 bp, synthetic construct
  source 1..20: mol_type = other DNA
gaccgtccatttccatcccg

SEQ ID NO: 271555 - DNA, 20 bp, synthetic construct
  source 1..20: mol_type = other DNA
cgaccgtccatttccatccc

SEQ ID NO: 271556 - DNA, 20 bp, synthetic construct
  source 1..20: mol_type = other DNA
ccgaccgtccatttccatcc

SEQ ID NO: 271557 - DNA, 20 bp, synthetic construct
  source 1..20: mol_type = other DNA
cccgaccgtccatttccatc

SEQ ID NO: 271558 - DNA, 20 bp, synthetic construct
  source 1..20: mol_type = other DNA
acccgaccgtccatttccat

SEQ ID NO: 271559 - DNA, 20 bp, synthetic construct
  source 1..20: mol_type = other DNA
aacccgaccgtccatttcca

SEQ ID NO: 271560 - DNA, 20 bp, synthetic construct
  source 1..20: mol_type = other DNA
taacccgaccgtccatttcc

SEQ ID NO: 271561 - DNA, 20 bp, synthetic construct
  source 1..20: mol_type = other DNA
ttaacccgaccgtccatttc

SEQ ID NO: 271562 - DNA, 20 bp, synthetic construct
  source 1..20: mol_type = other DNA
tttaacccgaccgtccattt

SEQ ID NO: 271563 - DNA, 20 bp, synthetic construct
  source 1..20: mol_type = other DNA
ttttaacccgaccgtccatt

SEQ ID NO: 271564 - DNA, 20 bp, synthetic construct
  source 1..20: mol_type = other DNA
cttttaacccgaccgtccat

SEQ ID NO: 271565 - DNA, 20 bp, synthetic construct
  source 1..20: mol_type = other DNA
ccttttaacccgaccgtcca

SEQ ID NO: 271566 - DNA, 20 bp, synthetic construct
  source 1..20: mol_type = other DNA
cccttttaacccgaccgtcc

SEQ ID NO: 271567 - DNA, 20 bp, synthetic construct
  source 1..20: mol_type = other DNA
tcccttttaacccgaccgtc

SEQ ID NO: 271568 - DNA, 20 bp, synthetic construct
  source 1..20: mol_type = other DNA
gtcccttttaacccgaccgt

SEQ ID NO: 271569 - DNA, 20 bp, synthetic construct
  source 1..20: mol_type = other DNA
cgtcccttttaacccgaccg

SEQ ID NO: 271570 - DNA, 20 bp, synthetic construct
  source 1..20: mol_type = other DNA
gcgtcccttttaacccgacc

SEQ ID NO: 271571 - DNA, 20 bp, synthetic construct
  source 1..20: mol_type = other DNA
tgcgtcccttttaacccgac

SEQ ID NO: 271572 - DNA, 20 bp, synthetic construct
  source 1..20: mol_type = other DNA
atgcgtcccttttaacccga

SEQ ID NO: 271573 - DNA, 20 bp, synthetic construct
  source 1..20: mol_type = other DNA
catgcgtcccttttaacccg

SEQ ID NO: 271574 - DNA, 20 bp, synthetic construct
  source 1..20: mol_type = other DNA
acatgcgtcccttttaaccc

SEQ ID NO: 271575 - DNA, 20 bp, synthetic construct
  source 1..20: mol_type = other DNA
cacatgcgtcccttttaacc

SEQ ID NO: 271576 - DNA, 20 bp, synthetic construct
  source 1..20: mol_type = other DNA
acacatgcgtcccttttaac

SEQ ID NO: 271577 - DNA, 20 bp, synthetic construct
  source 1..20: mol_type = other DNA
tacacatgcgtcccttttaa

SEQ ID NO: 271578 - DNA, 20 bp, synthetic construct
  source 1..20: mol_type = other DNA
ctacacatgcgtccctttta

SEQ ID NO: 271579 - DNA, 20 bp, synthetic construct
  source 1..20: mol_type = other DNA
tctacacatgcgtccctttt

SEQ ID NO: 271580 - DNA, 20 bp, synthetic construct
  source 1..20: mol_type = other DNA
gtctacacatgcgtcccttt

SEQ ID NO: 271581 - DNA, 20 bp, synthetic construct
  source 1..20: mol_type = other DNA
ggtctacacatgcgtccctt

SEQ ID NO: 271582 - DNA, 20 bp, synthetic construct
  source 1..20: mol_type = other DNA
gggtctacacatgcgtccct

SEQ ID NO: 271583 - DNA, 20 bp, synthetic construct
  source 1..20: mol_type = other DNA
agggtctacacatgcgtccc

SEQ ID NO: 271584 - DNA, 20 bp, synthetic construct
  source 1..20: mol_type = other DNA
cagggtctacacatgcgtcc

SEQ ID NO: 271585 - DNA, 20 bp, synthetic construct
  source 1..20: mol_type = other DNA
gcagggtctacacatgcgtc

SEQ ID NO: 271586 - DNA, 20 bp, synthetic construct
  source 1..20: mol_type = other DNA
ggcagggtctacacatgcgt

SEQ ID NO: 271587 - DNA, 20 bp, synthetic construct
  source 1..20: mol_type = other DNA
aggcagggtctacacatgcg

SEQ ID NO: 271588 - DNA, 20 bp, synthetic construct
  source 1..20: mol_type = other DNA
gaggcagggtctacacatgc

SEQ ID NO: 271589 - DNA, 20 bp, synthetic construct
  source 1..20: mol_type = other DNA
agaggcagggtctacacatg

SEQ ID NO: 271590 - DNA, 20 bp, synthetic construct
  source 1..20: mol_type = other DNA
cagaggcagggtctacacat

SEQ ID NO: 271591 - DNA, 20 bp, synthetic construct
  source 1..20: mol_type = other DNA
acagaggcagggtctacaca

SEQ ID NO: 271592 - DNA, 20 bp, synthetic construct
  source 1..20: mol_type = other DNA
cacagaggcagggtctacac

SEQ ID NO: 271593 - DNA, 20 bp, synthetic construct
  source 1..20: mol_type = other DNA
gcacagaggcagggtctaca

SEQ ID NO: 271594 - DNA, 20 bp, synthetic construct
  source 1..20: mol_type = other DNA
tgcacagaggcagggtctac

SEQ ID NO: 271595 - DNA, 20 bp, synthetic construct
  source 1..20: mol_type = other DNA
atgcacagaggcagggtcta

SEQ ID NO: 271596 - DNA, 20 bp, synthetic construct
  source 1..20: mol_type = other DNA
gatgcacagaggcagggtct

SEQ ID NO: 271597 - DNA, 20 bp, synthetic construct
  source 1..20: mol_type = other DNA
tgatgcacagaggcagggtc

SEQ ID NO: 271598 - DNA, 20 bp, synthetic construct
  source 1..20: mol_type = other DNA
ctgatgcacagaggcagggt

SEQ ID NO: 271599 - DNA, 20 bp, synthetic construct
  source 1..20: mol_type = other DNA
cctgatgcacagaggcaggg

SEQ ID NO: 271600 - DNA, 20 bp, synthetic construct
  source 1..20: mol_type = other DNA
gcctgatgcacagaggcagg

SEQ ID NO: 271601 - DNA, 20 bp, synthetic construct
  source 1..20: mol_type = other DNA
ggcctgatgcacagaggcag

SEQ ID NO: 271602 - DNA, 20 bp, synthetic construct
  source 1..20: mol_type = other DNA
aggcctgatgcacagaggca

SEQ ID NO: 271603 - DNA, 20 bp, synthetic construct
  source 1..20: mol_type = other DNA
gaggcctgatgcacagaggc

SEQ ID NO: 271604 - DNA, 20 bp, synthetic construct
  source 1..20: mol_type = other DNA
agaggcctgatgcacagagg

SEQ ID NO: 271605 - DNA, 20 bp, synthetic construct
  source 1..20: mol_type = other DNA
aagaggcctgatgcacagag

SEQ ID NO: 271606 - DNA, 20 bp, synthetic construct
  source 1..20: mol_type = other DNA
aaagaggcctgatgcacaga

SEQ ID NO: 271607 - DNA, 20 bp, synthetic construct
  source 1..20: mol_type = other DNA
aaaagaggcctgatgcacag

SEQ ID NO: 271608 - DNA, 20 bp, synthetic construct
  source 1..20: mol_type = other DNA
caaaagaggcctgatgcaca

SEQ ID NO: 271609 - DNA, 20 bp, synthetic construct
  source 1..20: mol_type = other DNA
tcaaaagaggcctgatgcac

SEQ ID NO: 271610 - DNA, 20 bp, synthetic construct
  source 1..20: mol_type = other DNA
ctcaaaagaggcctgatgca

SEQ ID NO: 271611 - DNA, 20 bp, synthetic construct
  source 1..20: mol_type = other DNA
tctcaaaagaggcctgatgc

SEQ ID NO: 271612 - DNA, 20 bp, synthetic construct
  source 1..20: mol_type = other DNA
ctctcaaaagaggcctgatg

SEQ ID NO: 271613 - DNA, 20 bp, synthetic construct
  source 1..20: mol_type = other DNA
actctcaaaagaggcctgat

SEQ ID NO: 271614 - DNA, 20 bp, synthetic construct
  source 1..20: mol_type = other DNA
gactctcaaaagaggcctga

SEQ ID NO: 271615 - DNA, 20 bp, synthetic construct
  source 1..20: mol_type = other DNA
ggactctcaaaagaggcctg

SEQ ID NO: 271616 - DNA, 20 bp, synthetic construct
  source 1..20: mol_type = other DNA
gggactctcaaaagaggcct

SEQ ID NO: 271617 - DNA, 20 bp, synthetic construct
  source 1..20: mol_type = other DNA
agggactctcaaaagaggcc

SEQ ID NO: 271618 - DNA, 20 bp, synthetic construct
  source 1..20: mol_type = other DNA
cagggactctcaaaagaggc

SEQ ID NO: 271619 - DNA, 20 bp, synthetic construct
  source 1..20: mol_type = other DNA
gcagggactctcaaaagagg

SEQ ID NO: 271620 - DNA, 20 bp, synthetic construct
  source 1..20: mol_type = other DNA
cgcagggactctcaaaagag

SEQ ID NO: 271621 - DNA, 20 bp, synthetic construct
  source 1..20: mol_type = other DNA
acgcagggactctcaaaaga

SEQ ID NO: 271622 - DNA, 20 bp, synthetic construct
  source 1..20: mol_type = other DNA
cacgcagggactctcaaaag

SEQ ID NO: 271623 - DNA, 20 bp, synthetic construct
  source 1..20: mol_type = other DNA
gcacgcagggactctcaaaa

SEQ ID NO: 271624 - DNA, 20 bp, synthetic construct
  source 1..20: mol_type = other DNA
ggcacgcagggactctcaaa

SEQ ID NO: 271625 - DNA, 20 bp, synthetic construct
  source 1..20: mol_type = other DNA
tggcacgcagggactctcaa

SEQ ID NO: 271626 - DNA, 20 bp, synthetic construct
  source 1..20: mol_type = other DNA
ctggcacgcagggactctca

SEQ ID NO: 271627 - DNA, 20 bp, synthetic construct
  source 1..20: mol_type = other DNA
cctggcacgcagggactctc

SEQ ID NO: 271628 - DNA, 20 bp, synthetic construct
  source 1..20: mol_type = other DNA
gcctggcacgcagggactct

SEQ ID NO: 271629 - DNA, 20 bp, synthetic construct
  source 1..20: mol_type = other DNA
cgcctggcacgcagggactc

SEQ ID NO: 271630 - DNA, 20 bp, synthetic construct
  source 1..20: mol_type = other DNA
ccgcctggcacgcagggact

SEQ ID NO: 271631 - DNA, 20 bp, synthetic construct
  source 1..20: mol_type = other DNA
accgcctggcacgcagggac

SEQ ID NO: 271632 - DNA, 20 bp, synthetic construct
  source 1..20: mol_type = other DNA
caccgcctggcacgcaggga

SEQ ID NO: 271633 - DNA, 20 bp, synthetic construct
  source 1..20: mol_type = other DNA
gcaccgcctggcacgcaggg

SEQ ID NO: 271634 - DNA, 20 bp, synthetic construct
  source 1..20: mol_type = other DNA
tgcaccgcctggcacgcagg

SEQ ID NO: 271635 - DNA, 20 bp, synthetic construct
  source 1..20: mol_type = other DNA
gtgcaccgcctggcacgcag

SEQ ID NO: 271636 - DNA, 20 bp, synthetic construct
  source 1..20: mol_type = other DNA
tgtgcaccgcctggcacgca

SEQ ID NO: 271637 - DNA, 20 bp, synthetic construct
  source 1..20: mol_type = other DNA
ctgtgcaccgcctggcacgc

SEQ ID NO: 271638 - DNA, 20 bp, synthetic construct
  source 1..20: mol_type = other DNA
tctgtgcaccgcctggcacg

SEQ ID NO: 271639 - DNA, 20 bp, synthetic construct
  source 1..20: mol_type = other DNA
ctctgtgcaccgcctggcac

SEQ ID NO: 271640 - DNA, 20 bp, synthetic construct
  source 1..20: mol_type = other DNA
cctctgtgcaccgcctggca

SEQ ID NO: 271641 - DNA, 20 bp, synthetic construct
  source 1..20: mol_type = other DNA
acctctgtgcaccgcctggc

SEQ ID NO: 271642 - DNA, 20 bp, synthetic construct
  source 1..20: mol_type = other DNA
cacctctgtgcaccgcctgg

SEQ ID NO: 271643 - DNA, 20 bp, synthetic construct
  source 1..20: mol_type = other DNA
ccacctctgtgcaccgcctg

SEQ ID NO: 271644 - DNA, 20 bp, synthetic construct
  source 1..20: mol_type = other DNA
tccacctctgtgcaccgcct

SEQ ID NO: 271645 - DNA, 20 bp, synthetic construct
  source 1..20: mol_type = other DNA
ctccacctctgtgcaccgcc

SEQ ID NO: 271646 - DNA, 20 bp, synthetic construct
  source 1..20: mol_type = other DNA
tctccacctctgtgcaccgc

SEQ ID NO: 271647 - DNA, 20 bp, synthetic construct
  source 1..20: mol_type = other DNA
ttctccacctctgtgcaccg

SEQ ID NO: 271648 - DNA, 20 bp, synthetic construct
  source 1..20: mol_type = other DNA
cttctccacctctgtgcacc

SEQ ID NO: 271649 - DNA, 20 bp, synthetic construct
  source 1..20: mol_type = other DNA
tcttctccacctctgtgcac

SEQ ID NO: 271650 - DNA, 20 bp, synthetic construct
  source 1..20: mol_type = other DNA
gtcttctccacctctgtgca

SEQ ID NO: 271651 - DNA, 20 bp, synthetic construct
  source 1..20: mol_type = other DNA
agtcttctccacctctgtgc

SEQ ID NO: 271652 - DNA, 20 bp, synthetic construct
  source 1..20: mol_type = other DNA
gagtcttctccacctctgtg

SEQ ID NO: 271653 - DNA, 20 bp, synthetic construct
  source 1..20: mol_type = other DNA
cgagtcttctccacctctgt

SEQ ID NO: 271654 - DNA, 20 bp, synthetic construct
  source 1..20: mol_type = other DNA
ccgagtcttctccacctctg

SEQ ID NO: 271655 - DNA, 20 bp, synthetic construct
  source 1..20: mol_type = other DNA
gccgagtcttctccacctct

SEQ ID NO: 271656 - DNA, 20 bp, synthetic construct
  source 1..20: mol_type = other DNA
agccgagtcttctccacctc

SEQ ID NO: 271657 - DNA, 20 bp, synthetic construct
  source 1..20: mol_type = other DNA
cagccgagtcttctccacct

SEQ ID NO: 271658 - DNA, 20 bp, synthetic construct
  source 1..20: mol_type = other DNA
acagccgagtcttctccacc

SEQ ID NO: 271659 - DNA, 20 bp, synthetic construct
  source 1..20: mol_type = other DNA
cacagccgagtcttctccac

SEQ ID NO: 271660 - DNA, 20 bp, synthetic construct
  source 1..20: mol_type = other DNA
gcacagccgagtcttctcca

SEQ ID NO: 271661 - DNA, 20 bp, synthetic construct
  source 1..20: mol_type = other DNA
ggcacagccgagtcttctcc

SEQ ID NO: 271662 - DNA, 20 bp, synthetic construct
  source 1..20: mol_type = other DNA
gggcacagccgagtcttctc

SEQ ID NO: 271663 - DNA, 20 bp, synthetic construct
  source 1..20: mol_type = other DNA
ggggcacagccgagtcttct

SEQ ID NO: 271664 - DNA, 20 bp, synthetic construct
  source 1..20: mol_type = other DNA
tggggcacagccgagtcttc

SEQ ID NO: 271665 - DNA, 20 bp, synthetic construct
  source 1..20: mol_type = other DNA
ctggggcacagccgagtctt

SEQ ID NO: 271666 - DNA, 20 bp, synthetic construct
  source 1..20: mol_type = other DNA
tctggggcacagccgagtct

SEQ ID NO: 271667 - DNA, 20 bp, synthetic construct
  source 1..20: mol_type = other DNA
ctctggggcacagccgagtc

SEQ ID NO: 271668 - DNA, 20 bp, synthetic construct
  source 1..20: mol_type = other DNA
gctctggggcacagccgagt

SEQ ID NO: 271669 - DNA, 20 bp, synthetic construct
  source 1..20: mol_type = other DNA
tgctctggggcacagccgag

SEQ ID NO: 271670 - DNA, 20 bp, synthetic construct
  source 1..20: mol_type = other DNA
gtgctctggggcacagccga

SEQ ID NO: 271671 - DNA, 20 bp, synthetic construct
  source 1..20: mol_type = other DNA
ggtgctctggggcacagccg

SEQ ID NO: 271672 - DNA, 20 bp, synthetic construct
  source 1..20: mol_type = other DNA
aggtgctctggggcacagcc

SEQ ID NO: 271673 - DNA, 20 bp, synthetic construct
  source 1..20: mol_type = other DNA
gaggtgctctggggcacagc

SEQ ID NO: 271674 - DNA, 20 bp, synthetic construct
  source 1..20: mol_type = other DNA
ggaggtgctctggggcacag

SEQ ID NO: 271675 - DNA, 20 bp, synthetic construct
  source 1..20: mol_type = other DNA
aggaggtgctctggggcaca

SEQ ID NO: 271676 - DNA, 20 bp, synthetic construct
  source 1..20: mol_type = other DNA
gaggaggtgctctggggcac

SEQ ID NO: 271677 - DNA, 20 bp, synthetic construct
  source 1..20: mol_type = other DNA
agaggaggtgctctggggca

SEQ ID NO: 271678 - DNA, 20 bp, synthetic construct
  source 1..20: mol_type = other DNA
gagaggaggtgctctggggc

SEQ ID NO: 271679 - DNA, 20 bp, synthetic construct
  source 1..20: mol_type = other DNA
tgagaggaggtgctctgggg

SEQ ID NO: 271680 - DNA, 20 bp, synthetic construct
  source 1..20: mol_type = other DNA
atgagaggaggtgctctggg

SEQ ID NO: 271681 - DNA, 20 bp, synthetic construct
  source 1..20: mol_type = other DNA
gatgagaggaggtgctctgg

SEQ ID NO: 271682 - DNA, 20 bp, synthetic construct
  source 1..20: mol_type = other DNA
cgatgagaggaggtgctctg

SEQ ID NO: 271683 - DNA, 20 bp, synthetic construct
  source 1..20: mol_type = other DNA
tcgatgagaggaggtgctct

SEQ ID NO: 271684 - DNA, 20 bp, synthetic construct
  source 1..20: mol_type = other DNA
ctcgatgagaggaggtgctc

SEQ ID NO: 271685 - DNA, 20 bp, synthetic construct
  source 1..20: mol_type = other DNA
cctcgatgagaggaggtgct

SEQ ID NO: 271686 - DNA, 20 bp, synthetic construct
  source 1..20: mol_type = other DNA
tcctcgatgagaggaggtgc

SEQ ID NO: 271687 - DNA, 20 bp, synthetic construct
  source 1..20: mol_type = other DNA
ttcctcgatgagaggaggtg

SEQ ID NO: 271688 - DNA, 20 bp, synthetic construct
  source 1..20: mol_type = other DNA
tttcctcgatgagaggaggt

SEQ ID NO: 271689 - DNA, 20 bp, synthetic construct
  source 1..20: mol_type = other DNA
ctttcctcgatgagaggagg

SEQ ID NO: 271690 - DNA, 20 bp, synthetic construct
  source 1..20: mol_type = other DNA
cctttcctcgatgagaggag

SEQ ID NO: 271691 - DNA, 20 bp, synthetic construct
  source 1..20: mol_type = other DNA
tcctttcctcgatgagagga

SEQ ID NO: 271692 - DNA, 20 bp, synthetic construct
  source 1..20: mol_type = other DNA
gtcctttcctcgatgagagg

SEQ ID NO: 271693 - DNA, 20 bp, synthetic construct
  source 1..20: mol_type = other DNA
tgtcctttcctcgatgagag

SEQ ID NO: 271694 - DNA, 20 bp, synthetic construct
  source 1..20: mol_type = other DNA
ctgtcctttcctcgatgaga

SEQ ID NO: 271695 - DNA, 20 bp, synthetic construct
  source 1..20: mol_type = other DNA
tctgtcctttcctcgatgag

SEQ ID NO: 271696 - DNA, 20 bp, synthetic construct
  source 1..20: mol_type = other DNA
gtctgtcctttcctcgatga

SEQ ID NO: 271697 - DNA, 20 bp, synthetic construct
  source 1..20: mol_type = other DNA
tgtctgtcctttcctcgatg

SEQ ID NO: 271698 - DNA, 20 bp, synthetic construct
  source 1..20: mol_type = other DNA
ctgtctgtcctttcctcgat

SEQ ID NO: 271699 - DNA, 20 bp, synthetic construct
  source 1..20: mol_type = other DNA
actgtctgtcctttcctcga

SEQ ID NO: 271700 - DNA, 20 bp, synthetic construct
  source 1..20: mol_type = other DNA
cactgtctgtcctttcctcg

SEQ ID NO: 271701 - DNA, 20 bp, synthetic construct
  source 1..20: mol_type = other DNA
ccactgtctgtcctttcctc

SEQ ID NO: 271702 - DNA, 20 bp, synthetic construct
  source 1..20: mol_type = other DNA
gccactgtctgtcctttcct

SEQ ID NO: 271703 - DNA, 20 bp, synthetic construct
  source 1..20: mol_type = other DNA
agccactgtctgtcctttcc

SEQ ID NO: 271704 - DNA, 20 bp, synthetic construct
  source 1..20: mol_type = other DNA
gagccactgtctgtcctttc

SEQ ID NO: 271705 - DNA, 20 bp, synthetic construct
  source 1..20: mol_type = other DNA
ggagccactgtctgtccttt

SEQ ID NO: 271706 - DNA, 20 bp, synthetic construct
  source 1..20: mol_type = other DNA
gggagccactgtctgtcctt

SEQ ID NO: 271707 - DNA, 20 bp, synthetic construct
  source 1..20: mol_type = other DNA
ggggagccactgtctgtcct

SEQ ID NO: 271708 - DNA, 20 bp, synthetic construct
  source 1..20: mol_type = other DNA
aggggagccactgtctgtcc

SEQ ID NO: 271709 - DNA, 20 bp, synthetic construct
  source 1..20: mol_type = other DNA
caggggagccactgtctgtc

SEQ ID NO: 271710 - DNA, 20 bp, synthetic construct
  source 1..20: mol_type = other DNA
acaggggagccactgtctgt

SEQ ID NO: 271711 - DNA, 20 bp, synthetic construct
  source 1..20: mol_type = other DNA
cacaggggagccactgtctg

SEQ ID NO: 271712 - DNA, 20 bp, synthetic construct
  source 1..20: mol_type = other DNA
ccacaggggagccactgtct

SEQ ID NO: 271713 - DNA, 20 bp, synthetic construct
  source 1..20: mol_type = other DNA
gccacaggggagccactgtc

SEQ ID NO: 271714 - DNA, 20 bp, synthetic construct
  source 1..20: mol_type = other DNA
agccacaggggagccactgt

SEQ ID NO: 271715 - DNA, 20 bp, synthetic construct
  source 1..20: mol_type = other DNA
cagccacaggggagccactg

SEQ ID NO: 271716 - DNA, 20 bp, synthetic construct
  source 1..20: mol_type = other DNA
acagccacaggggagccact

SEQ ID NO: 271717 - DNA, 20 bp, synthetic construct
  source 1..20: mol_type = other DNA
cacagccacaggggagccac

SEQ ID NO: 271718 - DNA, 20 bp, synthetic construct
  source 1..20: mol_type = other DNA
ccacagccacaggggagcca

SEQ ID NO: 271719 - DNA, 20 bp, synthetic construct
  source 1..20: mol_type = other DNA
cccacagccacaggggagcc

SEQ ID NO: 271720 - DNA, 20 bp, synthetic construct
  source 1..20: mol_type = other DNA
ccccacagccacaggggagc

SEQ ID NO: 271721 - DNA, 20 bp, synthetic construct
  source 1..20: mol_type = other DNA
tccccacagccacaggggag

SEQ ID NO: 271722 - DNA, 20 bp, synthetic construct
  source 1..20: mol_type = other DNA
gtccccacagccacagggga

SEQ ID NO: 271723 - DNA, 20 bp, synthetic construct
  source 1..20: mol_type = other DNA
tgtccccacagccacagggg

SEQ ID NO: 271724 - DNA, 20 bp, synthetic construct
  source 1..20: mol_type = other DNA
ttgtccccacagccacaggg

SEQ ID NO: 271725 - DNA, 20 bp, synthetic construct
  source 1..20: mol_type = other DNA
cttgtccccacagccacagg

SEQ ID NO: 271726 - DNA, 20 bp, synthetic construct
  source 1..20: mol_type = other DNA
ccttgtccccacagccacag

SEQ ID NO: 271727 - DNA, 20 bp, synthetic construct
  source 1..20: mol_type = other DNA
cccttgtccccacagccaca

SEQ ID NO: 271728 - DNA, 20 bp, synthetic construct
  source 1..20: mol_type = other DNA
gcccttgtccccacagccac

SEQ ID NO: 271729 - DNA, 20 bp, synthetic construct
  source 1..20: mol_type = other DNA
tgcccttgtccccacagcca

SEQ ID NO: 271730 - DNA, 20 bp, synthetic construct
  source 1..20: mol_type = other DNA
ctgcccttgtccccacagcc

SEQ ID NO: 271731 - DNA, 20 bp, synthetic construct
  source 1..20: mol_type = other DNA
tctgcccttgtccccacagc

SEQ ID NO: 271732 - DNA, 20 bp, synthetic construct
  source 1..20: mol_type = other DNA
ctctgcccttgtccccacag

SEQ ID NO: 271733 - DNA, 20 bp, synthetic construct
  source 1..20: mol_type = other DNA
gctctgcccttgtccccaca

SEQ ID NO: 271734 - DNA, 20 bp, synthetic construct
  source 1..20: mol_type = other DNA
agctctgcccttgtccccac

SEQ ID NO: 271735 - DNA, 20 bp, synthetic construct
  source 1..20: mol_type = other DNA
gagctctgcccttgtcccca

SEQ ID NO: 271736 - DNA, 20 bp, synthetic construct
  source 1..20: mol_type = other DNA
ggagctctgcccttgtcccc

SEQ ID NO: 271737 - DNA, 20 bp, synthetic construct
  source 1..20: mol_type = other DNA
gggagctctgcccttgtccc

SEQ ID NO: 271738 - DNA, 20 bp, synthetic construct
  source 1..20: mol_type = other DNA
agggagctctgcccttgtcc

SEQ ID NO: 271739 - DNA, 20 bp, synthetic construct
  source 1..20: mol_type = other DNA
cagggagctctgcccttgtc

SEQ ID NO: 271740 - DNA, 20 bp, synthetic construct
  source 1..20: mol_type = other DNA
ccagggagctctgcccttgt

SEQ ID NO: 271741 - DNA, 20 bp, synthetic construct
  source 1..20: mol_type = other DNA
tccagggagctctgcccttg

SEQ ID NO: 271742 - DNA, 20 bp, synthetic construct
  source 1..20: mol_type = other DNA
ttccagggagctctgccctt

SEQ ID NO: 271743 - DNA, 20 bp, synthetic construct
  source 1..20: mol_type = other DNA
gttccagggagctctgccct

SEQ ID NO: 271744 - DNA, 20 bp, synthetic construct
  source 1..20: mol_type = other DNA
tgttccagggagctctgccc

SEQ ID NO: 271745 - DNA, 20 bp, synthetic construct
  source 1..20: mol_type = other DNA
gtgttccagggagctctgcc

SEQ ID NO: 271746 - DNA, 20 bp, synthetic construct
  source 1..20: mol_type = other DNA
tgtgttccagggagctctgc

SEQ ID NO: 271747 - DNA, 20 bp, synthetic construct
  source 1..20: mol_type = other DNA
ctgtgttccagggagctctg

SEQ ID NO: 271748 - DNA, 20 bp, synthetic construct
  source 1..20: mol_type = other DNA
cctgtgttccagggagctct

SEQ ID NO: 271749 - DNA, 20 bp, synthetic construct
  source 1..20: mol_type = other DNA
tcctgtgttccagggagctc

SEQ ID NO: 271750 - DNA, 20 bp, synthetic construct
  source 1..20: mol_type = other DNA
ctcctgtgttccagggagct

SEQ ID NO: 271751 - DNA, 20 bp, synthetic construct
  source 1..20: mol_type = other DNA
cctcctgtgttccagggagc

SEQ ID NO: 271752 - DNA, 20 bp, synthetic construct
  source 1..20: mol_type = other DNA
ccctcctgtgttccagggag

SEQ ID NO: 271753 - DNA, 20 bp, synthetic construct
  source 1..20: mol_type = other DNA
tccctcctgtgttccaggga

SEQ ID NO: 271754 - DNA, 20 bp, synthetic construct
  source 1..20: mol_type = other DNA
ctccctcctgtgttccaggg

SEQ ID NO: 271755 - DNA, 20 bp, synthetic construct
  source 1..20: mol_type = other DNA
cctccctcctgtgttccagg

SEQ ID NO: 271756 - DNA, 20 bp, synthetic construct
  source 1..20: mol_type = other DNA
ccctccctcctgtgttccag

SEQ ID NO: 271757 - DNA, 20 bp, synthetic construct
  source 1..20: mol_type = other DNA
tccctccctcctgtgttcca

SEQ ID NO: 271758 - DNA, 20 bp, synthetic construct
  source 1..20: mol_type = other DNA
ttccctccctcctgtgttcc

SEQ ID NO: 271759 - DNA, 20 bp, synthetic construct
  source 1..20: mol_type = other DNA
cttccctccctcctgtgttc

SEQ ID NO: 271760 - DNA, 20 bp, synthetic construct
  source 1..20: mol_type = other DNA
ccttccctccctcctgtgtt

SEQ ID NO: 271761 - DNA, 20 bp, synthetic construct
  source 1..20: mol_type = other DNA
tccttccctccctcctgtgt

SEQ ID NO: 271762 - DNA, 20 bp, synthetic construct
  source 1..20: mol_type = other DNA
ttccttccctccctcctgtg

SEQ ID NO: 271763 - DNA, 20 bp, synthetic construct
  source 1..20: mol_type = other DNA
cttccttccctccctcctgt

SEQ ID NO: 271764 - DNA, 20 bp, synthetic construct
  source 1..20: mol_type = other DNA
tcttccttccctccctcctg

SEQ ID NO: 271765 - DNA, 20 bp, synthetic construct
  source 1..20: mol_type = other DNA
ctcttccttccctccctcct

SEQ ID NO: 271766 - DNA, 20 bp, synthetic construct
  source 1..20: mol_type = other DNA
tctcttccttccctccctcc

SEQ ID NO: 271767 - DNA, 20 bp, synthetic construct
  source 1..20: mol_type = other DNA
ttctcttccttccctccctc

SEQ ID NO: 271768 - DNA, 20 bp, synthetic construct
  source 1..20: mol_type = other DNA
gttctcttccttccctccct

SEQ ID NO: 271769 - DNA, 20 bp, synthetic construct
  source 1..20: mol_type = other DNA
tgttctcttccttccctccc

SEQ ID NO: 271770 - DNA, 20 bp, synthetic construct
  source 1..20: mol_type = other DNA
atgttctcttccttccctcc

SEQ ID NO: 271771 - DNA, 20 bp, synthetic construct
  source 1..20: mol_type = other DNA
gatgttctcttccttccctc

SEQ ID NO: 271772 - DNA, 20 bp, synthetic construct
  source 1..20: mol_type = other DNA
agatgttctcttccttccct

SEQ ID NO: 271773 - DNA, 20 bp, synthetic construct
  source 1..20: mol_type = other DNA
gagatgttctcttccttccc

SEQ ID NO: 271774 - DNA, 20 bp, synthetic construct
  source 1..20: mol_type = other DNA
tgagatgttctcttccttcc

SEQ ID NO: 271775 - DNA, 20 bp, synthetic construct
  source 1..20: mol_type = other DNA
ctgagatgttctcttccttc

SEQ ID NO: 271776 - DNA, 20 bp, synthetic construct
  source 1..20: mol_type = other DNA
tctgagatgttctcttcctt

SEQ ID NO: 271777 - DNA, 20 bp, synthetic construct
  source 1..20: mol_type = other DNA
ttctgagatgttctcttcct

SEQ ID NO: 271778 - DNA, 20 bp, synthetic construct
  source 1..20: mol_type = other DNA
attctgagatgttctcttcc

SEQ ID NO: 271779 - DNA, 20 bp, synthetic construct
  source 1..20: mol_type = other DNA
gattctgagatgttctcttc

SEQ ID NO: 271780 - DNA, 20 bp, synthetic construct
  source 1..20: mol_type = other DNA
agattctgagatgttctctt

SEQ ID NO: 271781 - DNA, 20 bp, synthetic construct
  source 1..20: mol_type = other DNA
gagattctgagatgttctct

SEQ ID NO: 271782 - DNA, 20 bp, synthetic construct
  source 1..20: mol_type = other DNA
ggagattctgagatgttctc

SEQ ID NO: 271783 - DNA, 20 bp, synthetic construct
  source 1..20: mol_type = other DNA
gggagattctgagatgttct

SEQ ID NO: 271784 - DNA, 20 bp, synthetic construct
  source 1..20: mol_type = other DNA
agggagattctgagatgttc

SEQ ID NO: 271785 - DNA, 20 bp, synthetic construct
  source 1..20: mol_type = other DNA
gagggagattctgagatgtt

SEQ ID NO: 271786 - DNA, 20 bp, synthetic construct
  source 1..20: mol_type = other DNA
ggagggagattctgagatgt

SEQ ID NO: 271787 - DNA, 20 bp, synthetic construct
  source 1..20: mol_type = other DNA
aggagggagattctgagatg

SEQ ID NO: 271788 - DNA, 20 bp, synthetic construct
  source 1..20: mol_type = other DNA
caggagggagattctgagat

SEQ ID NO: 271789 - DNA, 20 bp, synthetic construct
  source 1..20: mol_type = other DNA
tcaggagggagattctgaga

SEQ ID NO: 271790 - DNA, 20 bp, synthetic construct
  source 1..20: mol_type = other DNA
atcaggagggagattctgag

SEQ ID NO: 271791 - DNA, 20 bp, synthetic construct
  source 1..20: mol_type = other DNA
catcaggagggagattctga

SEQ ID NO: 271792 - DNA, 20 bp, synthetic construct
  source 1..20: mol_type = other DNA
ccatcaggagggagattctg

SEQ ID NO: 271793 - DNA, 20 bp, synthetic construct
  source 1..20: mol_type = other DNA
gccatcaggagggagattct

SEQ ID NO: 271794 - DNA, 20 bp, synthetic construct
  source 1..20: mol_type = other DNA
tgccatcaggagggagattc

SEQ ID NO: 271795 - DNA, 20 bp, synthetic construct
  source 1..20: mol_type = other DNA
ttgccatcaggagggagatt

SEQ ID NO: 271796 - DNA, 20 bp, synthetic construct
  source 1..20: mol_type = other DNA
tttgccatcaggagggagat

SEQ ID NO: 271797 - DNA, 20 bp, synthetic construct
  source 1..20: mol_type = other DNA
gtttgccatcaggagggaga

SEQ ID NO: 271798 - DNA, 20 bp, synthetic construct
  source 1..20: mol_type = other DNA
cgtttgccatcaggagggag

SEQ ID NO: 271799 - DNA, 20 bp, synthetic construct
  source 1..20: mol_type = other DNA
tcgtttgccatcaggaggga

SEQ ID NO: 271800 - DNA, 20 bp, synthetic construct
  source 1..20: mol_type = other DNA
atcgtttgccatcaggaggg

SEQ ID NO: 271801 - DNA, 20 bp, synthetic construct
  source 1..20: mol_type = other DNA
gatcgtttgccatcaggagg

SEQ ID NO: 271802 - DNA, 20 bp, synthetic construct
  source 1..20: mol_type = other DNA
ggatcgtttgccatcaggag

SEQ ID NO: 271803 - DNA, 20 bp, synthetic construct
  source 1..20: mol_type = other DNA
cggatcgtttgccatcagga

SEQ ID NO: 271804 - DNA, 20 bp, synthetic construct
  source 1..20: mol_type = other DNA
ccggatcgtttgccatcagg

SEQ ID NO: 271805 - DNA, 20 bp, synthetic construct
  source 1..20: mol_type = other DNA
cccggatcgtttgccatcag

SEQ ID NO: 271806 - DNA, 20 bp, synthetic construct
  source 1..20: mol_type = other DNA
acccggatcgtttgccatca

SEQ ID NO: 271807 - DNA, 20 bp, synthetic construct
  source 1..20: mol_type = other DNA
aacccggatcgtttgccatc

SEQ ID NO: 271808 - DNA, 20 bp, synthetic construct
  source 1..20: mol_type = other DNA
taacccggatcgtttgccat

SEQ ID NO: 271809 - DNA, 20 bp, synthetic construct
  source 1..20: mol_type = other DNA
ttaacccggatcgtttgcca

SEQ ID NO: 271810 - DNA, 20 bp, synthetic construct
  source 1..20: mol_type = other DNA
tttaacccggatcgtttgcc

SEQ ID NO: 271811 - DNA, 20 bp, synthetic construct
  source 1..20: mol_type = other DNA
atttaacccggatcgtttgc

SEQ ID NO: 271812 - DNA, 20 bp, synthetic construct
  source 1..20: mol_type = other DNA
aatttaacccggatcgtttg

SEQ ID NO: 271813 - DNA, 20 bp, synthetic construct
  source 1..20: mol_type = other DNA
taatttaacccggatcgttt

SEQ ID NO: 271814 - DNA, 20 bp, synthetic construct
  source 1..20: mol_type = other DNA
ttaatttaacccggatcgtt

SEQ ID NO: 271815 - DNA, 20 bp, synthetic construct
  source 1..20: mol_type = other DNA
cttaatttaacccggatcgt

SEQ ID NO: 271816 - DNA, 20 bp, synthetic construct
  source 1..20: mol_type = other DNA
ccttaatttaacccggatcg

SEQ ID NO: 271817 - DNA, 20 bp, synthetic construct
  source 1..20: mol_type = other DNA
accttaatttaacccggatc

SEQ ID NO: 271818 - DNA, 20 bp, synthetic construct
  source 1..20: mol_type = other DNA
gaccttaatttaacccggat

SEQ ID NO: 271819 - DNA, 20 bp, synthetic construct
  source 1..20: mol_type = other DNA
ggaccttaatttaacccgga

SEQ ID NO: 271820 - DNA, 20 bp, synthetic construct
  source 1..20: mol_type = other DNA
cggaccttaatttaacccgg

SEQ ID NO: 271821 - DNA, 20 bp, synthetic construct
  source 1..20: mol_type = other DNA
ccggaccttaatttaacccg

SEQ ID NO: 271822 - DNA, 20 bp, synthetic construct
  source 1..20: mol_type = other DNA
gccggaccttaatttaaccc

SEQ ID NO: 271823 - DNA, 20 bp, synthetic construct
  source 1..20: mol_type = other DNA
ggccggaccttaatttaacc

SEQ ID NO: 271824 - DNA, 20 bp, synthetic construct
  source 1..20: mol_type = other DNA
aggccggaccttaatttaac

SEQ ID NO: 271825 - DNA, 20 bp, synthetic construct
  source 1..20: mol_type = other DNA
aaggccggaccttaatttaa

SEQ ID NO: 271826 - DNA, 20 bp, synthetic construct
  source 1..20: mol_type = other DNA
aaaggccggaccttaattta

SEQ ID NO: 271827 - DNA, 20 bp, synthetic construct
  source 1..20: mol_type = other DNA
aaaaggccggaccttaattt

SEQ ID NO: 271828 - DNA, 20 bp, synthetic construct
  source 1..20: mol_type = other DNA
gaaaaggccggaccttaatt

SEQ ID NO: 271829 - DNA, 20 bp, synthetic construct
  source 1..20: mol_type = other DNA
ggaaaaggccggaccttaat

SEQ ID NO: 271830 - DNA, 20 bp, synthetic construct
  source 1..20: mol_type = other DNA
aggaaaaggccggaccttaa

SEQ ID NO: 271831 - DNA, 20 bp, synthetic construct
  source 1..20: mol_type = other DNA
caggaaaaggccggacctta

SEQ ID NO: 271832 - DNA, 20 bp, synthetic construct
  source 1..20: mol_type = other DNA
gcaggaaaaggccggacctt

SEQ ID NO: 271833 - DNA, 20 bp, synthetic construct
  source 1..20: mol_type = other DNA
agcaggaaaaggccggacct

SEQ ID NO: 271834 - DNA, 20 bp, synthetic construct
  source 1..20: mol_type = other DNA
gagcaggaaaaggccggacc

SEQ ID NO: 271835 - DNA, 20 bp, synthetic construct
  source 1..20: mol_type = other DNA
tgagcaggaaaaggccggac

SEQ ID NO: 271836 - DNA, 20 bp, synthetic construct
  source 1..20: mol_type = other DNA
ctgagcaggaaaaggccgga

SEQ ID NO: 271837 - DNA, 20 bp, synthetic construct
  source 1..20: mol_type = other DNA
cctgagcaggaaaaggccgg

SEQ ID NO: 271838 - DNA, 20 bp, synthetic construct
  source 1..20: mol_type = other DNA
gcctgagcaggaaaaggccg

SEQ ID NO: 271839 - DNA, 20 bp, synthetic construct
  source 1..20: mol_type = other DNA
tgcctgagcaggaaaaggcc

SEQ ID NO: 271840 - DNA, 20 bp, synthetic construct
  source 1..20: mol_type = other DNA
atgcctgagcaggaaaaggc

SEQ ID NO: 271841 - DNA, 20 bp, synthetic construct
  source 1..20: mol_type = other DNA
catgcctgagcaggaaaagg

SEQ ID NO: 271842 - DNA, 20 bp, synthetic construct
  source 1..20: mol_type = other DNA
acatgcctgagcaggaaaag

SEQ ID NO: 271843 - DNA, 20 bp, synthetic construct
  source 1..20: mol_type = other DNA
cacatgcctgagcaggaaaa

SEQ ID NO: 271844 - DNA, 20 bp, synthetic construct
  source 1..20: mol_type = other DNA
ccacatgcctgagcaggaaa

SEQ ID NO: 271845 - DNA, 20 bp, synthetic construct
  source 1..20: mol_type = other DNA
tccacatgcctgagcaggaa

SEQ ID NO: 271846 - DNA, 20 bp, synthetic construct
  source 1..20: mol_type = other DNA
ctccacatgcctgagcagga

SEQ ID NO: 271847 - DNA, 20 bp, synthetic construct
  source 1..20: mol_type = other DNA
gctccacatgcctgagcagg

SEQ ID NO: 271848 - DNA, 20 bp, synthetic construct
  source 1..20: mol_type = other DNA
agctccacatgcctgagcag

SEQ ID NO: 271849 - DNA, 20 bp, synthetic construct
  source 1..20: mol_type = other DNA
aagctccacatgcctgagca

SEQ ID NO: 271850 - DNA, 20 bp, synthetic construct
  source 1..20: mol_type = other DNA
caagctccacatgcctgagc

SEQ ID NO: 271851 - DNA, 20 bp, synthetic construct
  source 1..20: mol_type = other DNA
acaagctccacatgcctgag

SEQ ID NO: 271852 - DNA, 20 bp, synthetic construct
  source 1..20: mol_type = other DNA
tacaagctccacatgcctga

SEQ ID NO: 271853 - DNA, 20 bp, synthetic construct
  source 1..20: mol_type = other DNA
ctacaagctccacatgcctg

SEQ ID NO: 271854 - DNA, 20 bp, synthetic construct
  source 1..20: mol_type = other DNA
actacaagctccacatgcct

SEQ ID NO: 271855 - DNA, 20 bp, synthetic construct
  source 1..20: mol_type = other DNA
cactacaagctccacatgcc

SEQ ID NO: 271856 - DNA, 20 bp, synthetic construct
  source 1..20: mol_type = other DNA
ccactacaagctccacatgc

SEQ ID NO: 271857 - DNA, 20 bp, synthetic construct
  source 1..20: mol_type = other DNA
tccactacaagctccacatg

SEQ ID NO: 271858 - DNA, 20 bp, synthetic construct
  source 1..20: mol_type = other DNA
ttccactacaagctccacat

SEQ ID NO: 271859 - DNA, 20 bp, synthetic construct
  source 1..20: mol_type = other DNA
cttccactacaagctccaca

SEQ ID NO: 271860 - DNA, 20 bp, synthetic construct
  source 1..20: mol_type = other DNA
tcttccactacaagctccac

SEQ ID NO: 271861 - DNA, 20 bp, synthetic construct
  source 1..20: mol_type = other DNA
ctcttccactacaagctcca

SEQ ID NO: 271862 - DNA, 20 bp, synthetic construct
  source 1..20: mol_type = other DNA
cctcttccactacaagctcc

SEQ ID NO: 271863 - DNA, 20 bp, synthetic construct
  source 1..20: mol_type = other DNA
gcctcttccactacaagctc

SEQ ID NO: 271864 - DNA, 20 bp, synthetic construct
  source 1..20: mol_type = other DNA
agcctcttccactacaagct

SEQ ID NO: 271865 - DNA, 20 bp, synthetic construct
  source 1..20: mol_type = other DNA
gagcctcttccactacaagc

SEQ ID NO: 271866 - DNA, 20 bp, synthetic construct
  source 1..20: mol_type = other DNA
agagcctcttccactacaag

SEQ ID NO: 271867 - DNA, 20 bp, synthetic construct
  source 1..20: mol_type = other DNA
gagagcctcttccactacaa

SEQ ID NO: 271868 - DNA, 20 bp, synthetic construct
  source 1..20: mol_type = other DNA
agagagcctcttccactaca

SEQ ID NO: 271869 - DNA, 20 bp, synthetic construct
  source 1..20: mol_type = other DNA
cagagagcctcttccactac

SEQ ID NO: 271870 - DNA, 20 bp, synthetic construct
  source 1..20: mol_type = other DNA
ccagagagcctcttccacta

SEQ ID NO: 271871 - DNA, 20 bp, synthetic construct
  source 1..20: mol_type = other DNA
tccagagagcctcttccact

SEQ ID NO: 271872 - DNA, 20 bp, synthetic construct
  source 1..20: mol_type = other DNA
gtccagagagcctcttccac

SEQ ID NO: 271873 - DNA, 20 bp, synthetic construct
  source 1..20: mol_type = other DNA
ggtccagagagcctcttcca

SEQ ID NO: 271874 - DNA, 20 bp, synthetic construct
  source 1..20: mol_type = other DNA
gggtccagagagcctcttcc

SEQ ID NO: 271875 - DNA, 20 bp, synthetic construct
  source 1..20: mol_type = other DNA
agggtccagagagcctcttc

SEQ ID NO: 271876 - DNA, 20 bp, synthetic construct
  source 1..20: mol_type = other DNA
gagggtccagagagcctctt

SEQ ID NO: 271877 - DNA, 20 bp, synthetic construct
  source 1..20: mol_type = other DNA
tgagggtccagagagcctct

SEQ ID NO: 271878 - DNA, 20 bp, synthetic construct
  source 1..20: mol_type = other DNA
atgagggtccagagagcctc

SEQ ID NO: 271879 - DNA, 20 bp, synthetic construct
  source 1..20: mol_type = other DNA
gatgagggtccagagagcct

SEQ ID NO: 271880 - DNA, 20 bp, synthetic construct
  source 1..20: mol_type = other DNA
ggatgagggtccagagagcc

SEQ ID NO: 271881 - DNA, 20 bp, synthetic construct
  source 1..20: mol_type = other DNA
tggatgagggtccagagagc

SEQ ID NO: 271882 - DNA, 20 bp, synthetic construct
  source 1..20: mol_type = other DNA
gtggatgagggtccagagag

SEQ ID NO: 271883 - DNA, 20 bp, synthetic construct
  source 1..20: mol_type = other DNA
ggtggatgagggtccagaga

SEQ ID NO: 271884 - DNA, 20 bp, synthetic construct
  source 1..20: mol_type = other DNA
tggtggatgagggtccagag

SEQ ID NO: 271885 - DNA, 20 bp, synthetic construct
  source 1..20: mol_type = other DNA
gtggtggatgagggtccaga

SEQ ID NO: 271886 - DNA, 20 bp, synthetic construct
  source 1..20: mol_type = other DNA
tgtggtggatgagggtccag

SEQ ID NO: 271887 - DNA, 20 bp, synthetic construct
  source 1..20: mol_type = other DNA
ctgtggtggatgagggtcca

SEQ ID NO: 271888 - DNA, 20 bp, synthetic construct
  source 1..20: mol_type = other DNA
actgtggtggatgagggtcc

SEQ ID NO: 271889 - DNA, 20 bp, synthetic construct
  source 1..20: mol_type = other DNA
cactgtggtggatgagggtc

SEQ ID NO: 271890 - DNA, 20 bp, synthetic construct
  source 1..20: mol_type = other DNA
ccactgtggtggatgagggt

SEQ ID NO: 271891 - DNA, 20 bp, synthetic construct
  source 1..20: mol_type = other DNA
gccactgtggtggatgaggg

SEQ ID NO: 271892 - DNA, 20 bp, synthetic construct
  source 1..20: mol_type = other DNA
ggccactgtggtggatgagg

SEQ ID NO: 271893 - DNA, 20 bp, synthetic construct
  source 1..20: mol_type = other DNA
aggccactgtggtggatgag

SEQ ID NO: 271894 - DNA, 20 bp, synthetic construct
  source 1..20: mol_type = other DNA
caggccactgtggtggatga

SEQ ID NO: 271895 - DNA, 20 bp, synthetic construct
  source 1..20: mol_type = other DNA
ccaggccactgtggtggatg

SEQ ID NO: 271896 - DNA, 20 bp, synthetic construct
  source 1..20: mol_type = other DNA
accaggccactgtggtggat

SEQ ID NO: 271897 - DNA, 20 bp, synthetic construct
  source 1..20: mol_type = other DNA
aaccaggccactgtggtgga

SEQ ID NO: 271898 - DNA, 20 bp, synthetic construct
  source 1..20: mol_type = other DNA
taaccaggccactgtggtgg

SEQ ID NO: 271899 - DNA, 20 bp, synthetic construct
  source 1..20: mol_type = other DNA
ctaaccaggccactgtggtg

SEQ ID NO: 271900 - DNA, 20 bp, synthetic construct
  source 1..20: mol_type = other DNA
tctaaccaggccactgtggt

SEQ ID NO: 271901 - DNA, 20 bp, synthetic construct
  source 1..20: mol_type = other DNA
ctctaaccaggccactgtgg

SEQ ID NO: 271902 - DNA, 20 bp, synthetic construct
  source 1..20: mol_type = other DNA
tctctaaccaggccactgtg

SEQ ID NO: 271903 - DNA, 20 bp, synthetic construct
  source 1..20: mol_type = other DNA
gtctctaaccaggccactgt

SEQ ID NO: 271904 - DNA, 20 bp, synthetic construct
  source 1..20: mol_type = other DNA
ggtctctaaccaggccactg

SEQ ID NO: 271905 - DNA, 20 bp, synthetic construct
  source 1..20: mol_type = other DNA
aggtctctaaccaggccact

SEQ ID NO: 271906 - DNA, 20 bp, synthetic construct
  source 1..20: mol_type = other DNA
aaggtctctaaccaggccac

SEQ ID NO: 271907 - DNA, 20 bp, synthetic construct
  source 1..20: mol_type = other DNA
caaggtctctaaccaggcca

SEQ ID NO: 271908 - DNA, 20 bp, synthetic construct
  source 1..20: mol_type = other DNA
ccaaggtctctaaccaggcc

SEQ ID NO: 271909 - DNA, 20 bp, synthetic construct
  source 1..20: mol_type = other DNA
cccaaggtctctaaccaggc

SEQ ID NO: 271910 - DNA, 20 bp, synthetic construct
  source 1..20: mol_type = other DNA
ccccaaggtctctaaccagg

SEQ ID NO: 271911 - DNA, 20 bp, synthetic construct
  source 1..20: mol_type = other DNA
tccccaaggtctctaaccag

SEQ ID NO: 271912 - DNA, 20 bp, synthetic construct
  source 1..20: mol_type = other DNA
ttccccaaggtctctaacca

SEQ ID NO: 271913 - DNA, 20 bp, synthetic construct
  source 1..20: mol_type = other DNA
tttccccaaggtctctaacc

SEQ ID NO: 271914 - DNA, 20 bp, synthetic construct
  source 1..20: mol_type = other DNA
atttccccaaggtctctaac

SEQ ID NO: 271915 - DNA, 20 bp, synthetic construct
  source 1..20: mol_type = other DNA
tatttccccaaggtctctaa

SEQ ID NO: 271916 - DNA, 20 bp, synthetic construct
  source 1..20: mol_type = other DNA
ttatttccccaaggtctcta

SEQ ID NO: 271917 - DNA, 20 bp, synthetic construct
  source 1..20: mol_type = other DNA
gttatttccccaaggtctct

SEQ ID NO: 271918 - DNA, 20 bp, synthetic construct
  source 1..20: mol_type = other DNA
agttatttccccaaggtctc

SEQ ID NO: 271919 - DNA, 20 bp, synthetic construct
  source 1..20: mol_type = other DNA
gagttatttccccaaggtct

SEQ ID NO: 271920 - DNA, 20 bp, synthetic construct
  source 1..20: mol_type = other DNA
tgagttatttccccaaggtc

SEQ ID NO: 271921 - DNA, 20 bp, synthetic construct
  source 1..20: mol_type = other DNA
gtgagttatttccccaaggt

SEQ ID NO: 271922 - DNA, 20 bp, synthetic construct
  source 1..20: mol_type = other DNA
tgtgagttatttccccaagg

SEQ ID NO: 271923 - DNA, 20 bp, synthetic construct
  source 1..20: mol_type = other DNA
ctgtgagttatttccccaag

SEQ ID NO: 271924 - DNA, 20 bp, synthetic construct
  source 1..20: mol_type = other DNA
cctgtgagttatttccccaa

SEQ ID NO: 271925 - DNA, 20 bp, synthetic construct
  source 1..20: mol_type = other DNA
acctgtgagttatttcccca

SEQ ID NO: 271926 - DNA, 20 bp, synthetic construct
  source 1..20: mol_type = other DNA
cacctgtgagttatttcccc

SEQ ID NO: 271927 - DNA, 20 bp, synthetic construct
  source 1..20: mol_type = other DNA
tcacctgtgagttatttccc

SEQ ID NO: 271928 - DNA, 20 bp, synthetic construct
  source 1..20: mol_type = other DNA
gtcacctgtgagttatttcc

SEQ ID NO: 271929 - DNA, 20 bp, synthetic construct
  source 1..20: mol_type = other DNA
ggtcacctgtgagttatttc

SEQ ID NO: 271930 - DNA, 20 bp, synthetic construct
  source 1..20: mol_type = other DNA
gggtcacctgtgagttattt

SEQ ID NO: 271931 - DNA, 20 bp, synthetic construct
  source 1..20: mol_type = other DNA
tgggtcacctgtgagttatt

SEQ ID NO: 271932 - DNA, 20 bp, synthetic construct
  source 1..20: mol_type = other DNA
ctgggtcacctgtgagttat

SEQ ID NO: 271933 - DNA, 20 bp, synthetic construct
  source 1..20: mol_type = other DNA
cctgggtcacctgtgagtta

SEQ ID NO: 271934 - DNA, 20 bp, synthetic construct
  source 1..20: mol_type = other DNA
ccctgggtcacctgtgagtt

SEQ ID NO: 271935 - DNA, 20 bp, synthetic construct
  source 1..20: mol_type = other DNA
gccctgggtcacctgtgagt

SEQ ID NO: 271936 - DNA, 20 bp, synthetic construct
  source 1..20: mol_type = other DNA
ggccctgggtcacctgtgag

SEQ ID NO: 271937 - DNA, 20 bp, synthetic construct
  source 1..20: mol_type = other DNA
aggccctgggtcacctgtga

SEQ ID NO: 271938 - DNA, 20 bp, synthetic construct
  source 1..20: mol_type = other DNA
gaggccctgggtcacctgtg

SEQ ID NO: 271939 - DNA, 20 bp, synthetic construct
  source 1..20: mol_type = other DNA
agaggccctgggtcacctgt

SEQ ID NO: 271940 - DNA, 20 bp, synthetic construct
  source 1..20: mol_type = other DNA
cagaggccctgggtcacctg

SEQ ID NO: 271941 - DNA, 20 bp, synthetic construct
  source 1..20: mol_type = other DNA
acagaggccctgggtcacct

SEQ ID NO: 271942 - DNA, 20 bp, synthetic construct
  source 1..20: mol_type = other DNA
gacagaggccctgggtcacc

SEQ ID NO: 271943 - DNA, 20 bp, synthetic construct
  source 1..20: mol_type = other DNA
ggacagaggccctgggtcac

SEQ ID NO: 271944 - DNA, 20 bp, synthetic construct
  source 1..20: mol_type = other DNA
aggacagaggccctgggtca

SEQ ID NO: 271945 - DNA, 20 bp, synthetic construct
  source 1..20: mol_type = other DNA
caggacagaggccctgggtc

SEQ ID NO: 271946 - DNA, 20 bp, synthetic construct
  source 1..20: mol_type = other DNA
acaggacagaggccctgggt

SEQ ID NO: 271947 - DNA, 20 bp, synthetic construct
  source 1..20: mol_type = other DNA
tacaggacagaggccctggg

SEQ ID NO: 271948 - DNA, 20 bp, synthetic construct
  source 1..20: mol_type = other DNA
gtacaggacagaggccctgg

SEQ ID NO: 271949 - DNA, 20 bp, synthetic construct
  source 1..20: mol_type = other DNA
ggtacaggacagaggccctg

SEQ ID NO: 271950 - DNA, 20 bp, synthetic construct
  source 1..20: mol_type = other DNA
cggtacaggacagaggccct

SEQ ID NO: 271951 - DNA, 20 bp, synthetic construct
  source 1..20: mol_type = other DNA
gcggtacaggacagaggccc

SEQ ID NO: 271952 - DNA, 20 bp, synthetic construct
  source 1..20: mol_type = other DNA
tgcggtacaggacagaggcc

SEQ ID NO: 271953 - DNA, 20 bp, synthetic construct
  source 1..20: mol_type = other DNA
ctgcggtacaggacagaggc

SEQ ID NO: 271954 - DNA, 20 bp, synthetic construct
  source 1..20: mol_type = other DNA
gctgcggtacaggacagagg

SEQ ID NO: 271955 - DNA, 20 bp, synthetic construct
  source 1..20: mol_type = other DNA
agctgcggtacaggacagag

SEQ ID NO: 271956 - DNA, 20 bp, synthetic construct
  source 1..20: mol_type = other DNA
cagctgcggtacaggacaga

SEQ ID NO: 271957 - DNA, 20 bp, synthetic construct
  source 1..20: mol_type = other DNA
tcagctgcggtacaggacag

SEQ ID NO: 271958 - DNA, 20 bp, synthetic construct
  source 1..20: mol_type = other DNA
ctcagctgcggtacaggaca

SEQ ID NO: 271959 - DNA, 20 bp, synthetic construct
  source 1..20: mol_type = other DNA
cctcagctgcggtacaggac

SEQ ID NO: 271960 - DNA, 20 bp, synthetic construct
  source 1..20: mol_type = other DNA
ccctcagctgcggtacagga

SEQ ID NO: 271961 - DNA, 20 bp, synthetic construct
  source 1..20: mol_type = other DNA
tccctcagctgcggtacagg

SEQ ID NO: 271962 - DNA, 20 bp, synthetic construct
  source 1..20: mol_type = other DNA
ttccctcagctgcggtacag

SEQ ID NO: 271963 - DNA, 20 bp, synthetic construct
  source 1..20: mol_type = other DNA
tttccctcagctgcggtaca

SEQ ID NO: 271964 - DNA, 20 bp, synthetic construct
  source 1..20: mol_type = other DNA
gtttccctcagctgcggtac

SEQ ID NO: 271965 - DNA, 20 bp, synthetic construct
  source 1..20: mol_type = other DNA
agtttccctcagctgcggta

SEQ ID NO: 271966 - DNA, 20 bp, synthetic construct
  source 1..20: mol_type = other DNA
cagtttccctcagctgcggt

SEQ ID NO: 271967 - DNA, 20 bp, synthetic construct
  source 1..20: mol_type = other DNA
acagtttccctcagctgcgg

SEQ ID NO: 271968 - DNA, 20 bp, synthetic construct
  source 1..20: mol_type = other DNA
gacagtttccctcagctgcg

SEQ ID NO: 271969 - DNA, 20 bp, synthetic construct
  source 1..20: mol_type = other DNA
ggacagtttccctcagctgc

SEQ ID NO: 271970 - DNA, 20 bp, synthetic construct
  source 1..20: mol_type = other DNA
aggacagtttccctcagctg

SEQ ID NO: 271971 - DNA, 20 bp, synthetic construct
  source 1..20: mol_type = other DNA
caggacagtttccctcagct

SEQ ID NO: 271972 - DNA, 20 bp, synthetic construct
  source 1..20: mol_type = other DNA
gcaggacagtttccctcagc

SEQ ID NO: 271973 - DNA, 20 bp, synthetic construct
  source 1..20: mol_type = other DNA
cgcaggacagtttccctcag

SEQ ID NO: 271974 - DNA, 20 bp, synthetic construct
  source 1..20: mol_type = other DNA
gcgcaggacagtttccctca

SEQ ID NO: 271975 - DNA, 20 bp, synthetic construct
  source 1..20: mol_type = other DNA
agcgcaggacagtttccctc

SEQ ID NO: 271976 - DNA, 20 bp, synthetic construct
  source 1..20: mol_type = other DNA
aagcgcaggacagtttccct

SEQ ID NO: 271977 - DNA, 20 bp, synthetic construct
  source 1..20: mol_type = other DNA
gaagcgcaggacagtttccc

SEQ ID NO: 271978 - DNA, 20 bp, synthetic construct
  source 1..20: mol_type = other DNA
ggaagcgcaggacagtttcc

SEQ ID NO: 271979 - DNA, 20 bp, synthetic construct
  source 1..20: mol_type = other DNA
tggaagcgcaggacagtttc

SEQ ID NO: 271980 - DNA, 20 bp, synthetic construct
  source 1..20: mol_type = other DNA
gtggaagcgcaggacagttt

SEQ ID NO: 271981 - DNA, 20 bp, synthetic construct
  source 1..20: mol_type = other DNA
agtggaagcgcaggacagtt

SEQ ID NO: 271982 - DNA, 20 bp, synthetic construct
  source 1..20: mol_type = other DNA
cagtggaagcgcaggacagt

SEQ ID NO: 271983 - DNA, 20 bp, synthetic construct
  source 1..20: mol_type = other DNA
ccagtggaagcgcaggacag

SEQ ID NO: 271984 - DNA, 20 bp, synthetic construct
  source 1..20: mol_type = other DNA
cccagtggaagcgcaggaca

SEQ ID NO: 271985 - DNA, 20 bp, synthetic construct
  source 1..20: mol_type = other DNA
ccccagtggaagcgcaggac

SEQ ID NO: 271986 - DNA, 20 bp, synthetic construct
  source 1..20: mol_type = other DNA
tccccagtggaagcgcagga

SEQ ID NO: 271987 - DNA, 20 bp, synthetic construct
  source 1..20: mol_type = other DNA
gtccccagtggaagcgcagg

SEQ ID NO: 271988 - DNA, 20 bp, synthetic construct
  source 1..20: mol_type = other DNA
tgtccccagtggaagcgcag

SEQ ID NO: 271989 - DNA, 20 bp, synthetic construct
  source 1..20: mol_type = other DNA
ttgtccccagtggaagcgca

SEQ ID NO: 271990 - DNA, 20 bp, synthetic construct
  source 1..20: mol_type = other DNA
attgtccccagtggaagcgc

SEQ ID NO: 271991 - DNA, 20 bp, synthetic construct
  source 1..20: mol_type = other DNA
cattgtccccagtggaagcg

SEQ ID NO: 271992 - DNA, 20 bp, synthetic construct
  source 1..20: mol_type = other DNA
gcattgtccccagtggaagc

SEQ ID NO: 271993 - DNA, 20 bp, synthetic construct
  source 1..20: mol_type = other DNA
cgcattgtccccagtggaag

SEQ ID NO: 271994 - DNA, 20 bp, synthetic construct
  source 1..20: mol_type = other DNA
gcgcattgtccccagtggaa

SEQ ID NO: 271995 - DNA, 20 bp, synthetic construct
  source 1..20: mol_type = other DNA
agcgcattgtccccagtgga

SEQ ID NO: 271996 - DNA, 20 bp, synthetic construct
  source 1..20: mol_type = other DNA
gagcgcattgtccccagtgg

SEQ ID NO: 271997 - DNA, 20 bp, synthetic construct
  source 1..20: mol_type = other DNA
ggagcgcattgtccccagtg

SEQ ID NO: 271998 - DNA, 20 bp, synthetic construct
  source 1..20: mol_type = other DNA
gggagcgcattgtccccagt

SEQ ID NO: 271999 - DNA, 20 bp, synthetic construct
  source 1..20: mol_type = other DNA
agggagcgcattgtccccag

SEQ ID NO: 272000 - DNA, 20 bp, synthetic construct
  source 1..20: mol_type = other DNA
gagggagcgcattgtcccca

SEQ ID NO: 272001 - DNA, 20 bp, synthetic construct
  source 1..20: mol_type = other DNA
cgagggagcgcattgtcccc

SEQ ID NO: 272002 - DNA, 20 bp, synthetic construct
  source 1..20: mol_type = other DNA
acgagggagcgcattgtccc

SEQ ID NO: 272003 - DNA, 20 bp, synthetic construct
  source 1..20: mol_type = other DNA
gacgagggagcgcattgtcc

SEQ ID NO: 272004 - DNA, 20 bp, synthetic construct
  source 1..20: mol_type = other DNA
agacgagggagcgcattgtc

SEQ ID NO: 272005 - DNA, 20 bp, synthetic construct
  source 1..20: mol_type = other DNA
gagacgagggagcgcattgt

SEQ ID NO: 272006 - DNA, 20 bp, synthetic construct
  source 1..20: mol_type = other DNA
ggagacgagggagcgcattg

SEQ ID NO: 272007 - DNA, 20 bp, synthetic construct
  source 1..20: mol_type = other DNA
tggagacgagggagcgcatt

SEQ ID NO: 272008 - DNA, 20 bp, synthetic construct
  source 1..20: mol_type = other DNA
ctggagacgagggagcgcat

SEQ ID NO: 272009 - DNA, 20 bp, synthetic construct
  source 1..20: mol_type = other DNA
tctggagacgagggagcgca

SEQ ID NO: 272010 - DNA, 20 bp, synthetic construct
  source 1..20: mol_type = other DNA
gtctggagacgagggagcgc

SEQ ID NO: 272011 - DNA, 20 bp, synthetic construct
  source 1..20: mol_type = other DNA
agtctggagacgagggagcg

SEQ ID NO: 272012 - DNA, 20 bp, synthetic construct
  source 1..20: mol_type = other DNA
aagtctggagacgagggagc

SEQ ID NO: 272013 - DNA, 20 bp, synthetic construct
  source 1..20: mol_type = other DNA
aaagtctggagacgagggag

SEQ ID NO: 272014 - DNA, 20 bp, synthetic construct
  source 1..20: mol_type = other DNA
gaaagtctggagacgaggga

SEQ ID NO: 272015 - DNA, 20 bp, synthetic construct
  source 1..20: mol_type = other DNA
ggaaagtctggagacgaggg

SEQ ID NO: 272016 - DNA, 20 bp, synthetic construct
  source 1..20: mol_type = other DNA
tggaaagtctggagacgagg

SEQ ID NO: 272017 - DNA, 20 bp, synthetic construct
  source 1..20: mol_type = other DNA
ctggaaagtctggagacgag

SEQ ID NO: 272018 - DNA, 20 bp, synthetic construct
  source 1..20: mol_type = other DNA
actggaaagtctggagacga

SEQ ID NO: 272019 - DNA, 20 bp, synthetic construct
  source 1..20: mol_type = other DNA
gactggaaagtctggagacg

SEQ ID NO: 272020 - DNA, 20 bp, synthetic construct
  source 1..20: mol_type = other DNA
ggactggaaagtctggagac

SEQ ID NO: 272021 - DNA, 20 bp, synthetic construct
  source 1..20: mol_type = other DNA
aggactggaaagtctggaga

SEQ ID NO: 272022 - DNA, 20 bp, synthetic construct
  source 1..20: mol_type = other DNA
gaggactggaaagtctggag

SEQ ID NO: 272023 - DNA, 20 bp, synthetic construct
  source 1..20: mol_type = other DNA
tgaggactggaaagtctgga

SEQ ID NO: 272024 - DNA, 20 bp, synthetic construct
  source 1..20: mol_type = other DNA
atgaggactggaaagtctgg

SEQ ID NO: 272025 - DNA, 20 bp, synthetic construct
  source 1..20: mol_type = other DNA
aatgaggactggaaagtctg

SEQ ID NO: 272026 - DNA, 20 bp, synthetic construct
  source 1..20: mol_type = other DNA
gaatgaggactggaaagtct

SEQ ID NO: 272027 - DNA, 20 bp, synthetic construct
  source 1..20: mol_type = other DNA
cgaatgaggactggaaagtc

SEQ ID NO: 272028 - DNA, 20 bp, synthetic construct
  source 1..20: mol_type = other DNA
ccgaatgaggactggaaagt

SEQ ID NO: 272029 - DNA, 20 bp, synthetic construct
  source 1..20: mol_type = other DNA
accgaatgaggactggaaag

SEQ ID NO: 272030 - DNA, 20 bp, synthetic construct
  source 1..20: mol_type = other DNA
aaccgaatgaggactggaaa

SEQ ID NO: 272031 - DNA, 20 bp, synthetic construct
  source 1..20: mol_type = other DNA
gaaccgaatgaggactggaa

SEQ ID NO: 272032 - DNA, 20 bp, synthetic construct
  source 1..20: mol_type = other DNA
agaaccgaatgaggactgga

SEQ ID NO: 272033 - DNA, 20 bp, synthetic construct
  source 1..20: mol_type = other DNA
gagaaccgaatgaggactgg

SEQ ID NO: 272034 - DNA, 20 bp, synthetic construct
  source 1..20: mol_type = other DNA
cgagaaccgaatgaggactg

SEQ ID NO: 272035 - DNA, 20 bp, synthetic construct
  source 1..20: mol_type = other DNA
tcgagaaccgaatgaggact

SEQ ID NO: 272036 - DNA, 20 bp, synthetic construct
  source 1..20: mol_type = other DNA
ttcgagaaccgaatgaggac

SEQ ID NO: 272037 - DNA, 20 bp, synthetic construct
  source 1..20: mol_type = other DNA
tttcgagaaccgaatgagga

SEQ ID NO: 272038 - DNA, 20 bp, synthetic construct
  source 1..20: mol_type = other DNA
ctttcgagaaccgaatgagg

SEQ ID NO: 272039 - DNA, 20 bp, synthetic construct
  source 1..20: mol_type = other DNA
actttcgagaaccgaatgag

SEQ ID NO: 272040 - DNA, 20 bp, synthetic construct
  source 1..20: mol_type = other DNA
gactttcgagaaccgaatga

SEQ ID NO: 272041 - DNA, 20 bp, synthetic construct
  source 1..20: mol_type = other DNA
cgactttcgagaaccgaatg

SEQ ID NO: 272042 - DNA, 20 bp, synthetic construct
  source 1..20: mol_type = other DNA
gcgactttcgagaaccgaat

SEQ ID NO: 272043 - DNA, 20 bp, synthetic construct
  source 1..20: mol_type = other DNA
ggcgactttcgagaaccgaa

SEQ ID NO: 272044 - DNA, 20 bp, synthetic construct
  source 1..20: mol_type = other DNA
aggcgactttcgagaaccga

SEQ ID NO: 272045 - DNA, 20 bp, synthetic construct
  source 1..20: mol_type = other DNA
gaggcgactttcgagaaccg

SEQ ID NO: 272046 - DNA, 20 bp, synthetic construct
  source 1..20: mol_type = other DNA
ggaggcgactttcgagaacc

SEQ ID NO: 272047 - DNA, 20 bp, synthetic construct
  source 1..20: mol_type = other DNA
tggaggcgactttcgagaac

SEQ ID NO: 272048 - DNA, 20 bp, synthetic construct
  source 1..20: mol_type = other DNA
ctggaggcgactttcgagaa

SEQ ID NO: 272049 - DNA, 20 bp, synthetic construct
  source 1..20: mol_type = other DNA
tctggaggcgactttcgaga

SEQ ID NO: 272050 - DNA, 20 bp, synthetic construct
  source 1..20: mol_type = other DNA
ttctggaggcgactttcgag

SEQ ID NO: 272051 - DNA, 20 bp, synthetic construct
  source 1..20: mol_type = other DNA
cttctggaggcgactttcga

SEQ ID NO: 272052 - DNA, 20 bp, synthetic construct
  source 1..20: mol_type = other DNA
gcttctggaggcgactttcg

SEQ ID NO: 272053 - DNA, 20 bp, synthetic construct
  source 1..20: mol_type = other DNA
ggcttctggaggcgactttc

SEQ ID NO: 272054 - DNA, 20 bp, synthetic construct
  source 1..20: mol_type = other DNA
gggcttctggaggcgacttt

SEQ ID NO: 272055 - DNA, 20 bp, synthetic construct
  source 1..20: mol_type = other DNA
ggggcttctggaggcgactt

SEQ ID NO: 272056 - DNA, 20 bp, synthetic construct
  source 1..20: mol_type = other DNA
tggggcttctggaggcgact

SEQ ID NO: 272057 - DNA, 20 bp, synthetic construct
  source 1..20: mol_type = other DNA
atggggcttctggaggcgac

SEQ ID NO: 272058 - DNA, 20 bp, synthetic construct
  source 1..20: mol_type = other DNA
gatggggcttctggaggcga

SEQ ID NO: 272059 - DNA, 20 bp, synthetic construct
  source 1..20: mol_type = other DNA
agatggggcttctggaggcg

SEQ ID NO: 272060 - DNA, 20 bp, synthetic construct
  source 1..20: mol_type = other DNA
aagatggggcttctggaggc

SEQ ID NO: 272061 - DNA, 20 bp, synthetic construct
  source 1..20: mol_type = other DNA
caagatggggcttctggagg

SEQ ID NO: 272062 - DNA, 20 bp, synthetic construct
  source 1..20: mol_type = other DNA
ccaagatggggcttctggag

SEQ ID NO: 272063 - DNA, 20 bp, synthetic construct
  source 1..20: mol_type = other DNA
cccaagatggggcttctgga

SEQ ID NO: 272064 - DNA, 20 bp, synthetic construct
  source 1..20: mol_type = other DNA
tcccaagatggggcttctgg

SEQ ID NO: 272065 - DNA, 20 bp, synthetic construct
  source 1..20: mol_type = other DNA
gtcccaagatggggcttctg

SEQ ID NO: 272066 - DNA, 20 bp, synthetic construct
  source 1..20: mol_type = other DNA
ggtcccaagatggggcttct

SEQ ID NO: 272067 - DNA, 20 bp, synthetic construct
  source 1..20: mol_type = other DNA
tggtcccaagatggggcttc

SEQ ID NO: 272068 - DNA, 20 bp, synthetic construct
  source 1..20: mol_type = other DNA
gtggtcccaagatggggctt

SEQ ID NO: 272069 - DNA, 20 bp, synthetic construct
  source 1..20: mol_type = other DNA
ggtggtcccaagatggggct

SEQ ID NO: 272070 - DNA, 20 bp, synthetic construct
  source 1..20: mol_type = other DNA
cggtggtcccaagatggggc

SEQ ID NO: 272071 - DNA, 20 bp, synthetic construct
  source 1..20: mol_type = other DNA
acggtggtcccaagatgggg

SEQ ID NO: 272072 - DNA, 20 bp, synthetic construct
  source 1..20: mol_type = other DNA
cacggtggtcccaagatggg

SEQ ID NO: 272073 - DNA, 20 bp, synthetic construct
  source 1..20: mol_type = other DNA
tcacggtggtcccaagatgg

SEQ ID NO: 272074 - DNA, 20 bp, synthetic construct
  source 1..20: mol_type = other DNA
gtcacggtggtcccaagatg

SEQ ID NO: 272075 - DNA, 20 bp, synthetic construct
  source 1..20: mol_type = other DNA
agtcacggtggtcccaagat

SEQ ID NO: 272076 - DNA, 20 bp, synthetic construct
  source 1..20: mol_type = other DNA
aagtcacggtggtcccaaga

SEQ ID NO: 272077 - DNA, 20 bp, synthetic construct
  source 1..20: mol_type = other DNA
aaagtcacggtggtcccaag

SEQ ID NO: 272078 - DNA, 20 bp, synthetic construct
  source 1..20: mol_type = other DNA
gaaagtcacggtggtcccaa

SEQ ID NO: 272079 - DNA, 20 bp, synthetic construct
  source 1..20: mol_type = other DNA
tgaaagtcacggtggtccca

SEQ ID NO: 272080 - DNA, 20 bp, synthetic construct
  source 1..20: mol_type = other DNA
atgaaagtcacggtggtccc

SEQ ID NO: 272081 - DNA, 20 bp, synthetic construct
  source 1..20: mol_type = other DNA
aatgaaagtcacggtggtcc

SEQ ID NO: 272082 - DNA, 20 bp, synthetic construct
  source 1..20: mol_type = other DNA
gaatgaaagtcacggtggtc

SEQ ID NO: 272083 - DNA, 20 bp, synthetic construct
  source 1..20: mol_type = other DNA
agaatgaaagtcacggtggt

SEQ ID NO: 272084 - DNA, 20 bp, synthetic construct
  source 1..20: mol_type = other DNA
gagaatgaaagtcacggtgg

SEQ ID NO: 272085 - DNA, 20 bp, synthetic construct
  source 1..20: mol_type = other DNA
ggagaatgaaagtcacggtg

SEQ ID NO: 272086 - DNA, 20 bp, synthetic construct
  source 1..20: mol_type = other DNA
tggagaatgaaagtcacggt

SEQ ID NO: 272087 - DNA, 20 bp, synthetic construct
  source 1..20: mol_type = other DNA
ctggagaatgaaagtcacgg

SEQ ID NO: 272088 - DNA, 20 bp, synthetic construct
  source 1..20: mol_type = other DNA
cctggagaatgaaagtcacg

SEQ ID NO: 272089 - DNA, 20 bp, synthetic construct
  source 1..20: mol_type = other DNA
ccctggagaatgaaagtcac

SEQ ID NO: 272090 - DNA, 20 bp, synthetic construct
  source 1..20: mol_type = other DNA
accctggagaatgaaagtca

SEQ ID NO: 272091 - DNA, 20 bp, synthetic construct
  source 1..20: mol_type = other DNA
caccctggagaatgaaagtc

SEQ ID NO: 272092 - DNA, 20 bp, synthetic construct
  source 1..20: mol_type = other DNA
gcaccctggagaatgaaagt

SEQ ID NO: 272093 - DNA, 20 bp, synthetic construct
  source 1..20: mol_type = other DNA
ggcaccctggagaatgaaag

SEQ ID NO: 272094 - DNA, 20 bp, synthetic construct
  source 1..20: mol_type = other DNA
aggcaccctggagaatgaaa

SEQ ID NO: 272095 - DNA, 20 bp, synthetic construct
  source 1..20: mol_type = other DNA
caggcaccctggagaatgaa

SEQ ID NO: 272096 - DNA, 20 bp, synthetic construct
  source 1..20: mol_type = other DNA
ccaggcaccctggagaatga

SEQ ID NO: 272097 - DNA, 20 bp, synthetic construct
  source 1..20: mol_type = other DNA
gccaggcaccctggagaatg

SEQ ID NO: 272098 - DNA, 20 bp, synthetic construct
  source 1..20: mol_type = other DNA
ggccaggcaccctggagaat

SEQ ID NO: 272099 - DNA, 20 bp, synthetic construct
  source 1..20: mol_type = other DNA
aggccaggcaccctggagaa

SEQ ID NO: 272100 - DNA, 20 bp, synthetic construct
  source 1..20: mol_type = other DNA
aaggccaggcaccctggaga

SEQ ID NO: 272101 - DNA, 20 bp, synthetic construct
  source 1..20: mol_type = other DNA
caaggccaggcaccctggag

SEQ ID NO: 272102 - DNA, 20 bp, synthetic construct
  source 1..20: mol_type = other DNA
ccaaggccaggcaccctgga

SEQ ID NO: 272103 - DNA, 20 bp, synthetic construct
  source 1..20: mol_type = other DNA
accaaggccaggcaccctgg

SEQ ID NO: 272104 - DNA, 20 bp, synthetic construct
  source 1..20: mol_type = other DNA
caccaaggccaggcaccctg

SEQ ID NO: 272105 - DNA, 20 bp, synthetic construct
  source 1..20: mol_type = other DNA
gcaccaaggccaggcaccct

SEQ ID NO: 272106 - DNA, 20 bp, synthetic construct
  source 1..20: mol_type = other DNA
agcaccaaggccaggcaccc

SEQ ID NO: 272107 - DNA, 20 bp, synthetic construct
  source 1..20: mol_type = other DNA
cagcaccaaggccaggcacc

SEQ ID NO: 272108 - DNA, 20 bp, synthetic construct
  source 1..20: mol_type = other DNA
gcagcaccaaggccaggcac

SEQ ID NO: 272109 - DNA, 20 bp, synthetic construct
  source 1..20: mol_type = other DNA
ggcagcaccaaggccaggca

SEQ ID NO: 272110 - DNA, 20 bp, synthetic construct
  source 1..20: mol_type = other DNA
gggcagcaccaaggccaggc

SEQ ID NO: 272111 - DNA, 20 bp, synthetic construct
  source 1..20: mol_type = other DNA
tgggcagcaccaaggccagg

SEQ ID NO: 272112 - DNA, 20 bp, synthetic construct
  source 1..20: mol_type = other DNA
ttgggcagcaccaaggccag

SEQ ID NO: 272113 - DNA, 20 bp, synthetic construct
  source 1..20: mol_type = other DNA
cttgggcagcaccaaggcca

SEQ ID NO: 272114 - DNA, 20 bp, synthetic construct
  source 1..20: mol_type = other DNA
tcttgggcagcaccaaggcc

SEQ ID NO: 272115 - DNA, 20 bp, synthetic construct
  source 1..20: mol_type = other DNA
gtcttgggcagcaccaaggc

SEQ ID NO: 272116 - DNA, 20 bp, synthetic construct
  source 1..20: mol_type = other DNA
ggtcttgggcagcaccaagg

SEQ ID NO: 272117 - DNA, 20 bp, synthetic construct
  source 1..20: mol_type = other DNA
gggtcttgggcagcaccaag

SEQ ID NO: 272118 - DNA, 20 bp, synthetic construct
  source 1..20: mol_type = other DNA
ggggtcttgggcagcaccaa

SEQ ID NO: 272119 - DNA, 20 bp, synthetic construct
  source 1..20: mol_type = other DNA
tggggtcttgggcagcacca

SEQ ID NO: 272120 - DNA, 20 bp, synthetic construct
  source 1..20: mol_type = other DNA
ctggggtcttgggcagcacc

SEQ ID NO: 272121 - DNA, 20 bp, synthetic construct
  source 1..20: mol_type = other DNA
tctggggtcttgggcagcac

SEQ ID NO: 272122 - DNA, 20 bp, synthetic construct
  source 1..20: mol_type = other DNA
ctctggggtcttgggcagca

SEQ ID NO: 272123 - DNA, 20 bp, synthetic construct
  source 1..20: mol_type = other DNA
cctctggggtcttgggcagc

SEQ ID NO: 272124 - DNA, 20 bp, synthetic construct
  source 1..20: mol_type = other DNA
ccctctggggtcttgggcag

SEQ ID NO: 272125 - DNA, 20 bp, synthetic construct
  source 1..20: mol_type = other DNA
cccctctggggtcttgggca

SEQ ID NO: 272126 - DNA, 20 bp, synthetic construct
  source 1..20: mol_type = other DNA
gcccctctggggtcttgggc

SEQ ID NO: 272127 - DNA, 20 bp, synthetic construct
  source 1..20: mol_type = other DNA
ggcccctctggggtcttggg

SEQ ID NO: 272128 - DNA, 20 bp, synthetic construct
  source 1..20: mol_type = other DNA
gggcccctctggggtcttgg

SEQ ID NO: 272129 - DNA, 20 bp, synthetic construct
  source 1..20: mol_type = other DNA
agggcccctctggggtcttg

SEQ ID NO: 272130 - DNA, 20 bp, synthetic construct
  source 1..20: mol_type = other DNA
gagggcccctctggggtctt

SEQ ID NO: 272131 - DNA, 20 bp, synthetic construct
  source 1..20: mol_type = other DNA
tgagggcccctctggggtct

SEQ ID NO: 272132 - DNA, 20 bp, synthetic construct
  source 1..20: mol_type = other DNA
gtgagggcccctctggggtc

SEQ ID NO: 272133 - DNA, 20 bp, synthetic construct
  source 1..20: mol_type = other DNA
agtgagggcccctctggggt

SEQ ID NO: 272134 - DNA, 20 bp, synthetic construct
  source 1..20: mol_type = other DNA
cagtgagggcccctctgggg

SEQ ID NO: 272135 - DNA, 20 bp, synthetic construct
  source 1..20: mol_type = other DNA
ccagtgagggcccctctggg

SEQ ID NO: 272136 - DNA, 20 bp, synthetic construct
  source 1..20: mol_type = other DNA
gccagtgagggcccctctgg

SEQ ID NO: 272137 - DNA, 20 bp, synthetic construct
  source 1..20: mol_type = other DNA
ggccagtgagggcccctctg

SEQ ID NO: 272138 - DNA, 20 bp, synthetic construct
  source 1..20: mol_type = other DNA
aggccagtgagggcccctct

SEQ ID NO: 272139 - DNA, 20 bp, synthetic construct
  source 1..20: mol_type = other DNA
aaggccagtgagggcccctc

SEQ ID NO: 272140 - DNA, 20 bp, synthetic construct
  source 1..20: mol_type = other DNA
aaaggccagtgagggcccct

SEQ ID NO: 272141 - DNA, 20 bp, synthetic construct
  source 1..20: mol_type = other DNA
gaaaggccagtgagggcccc

SEQ ID NO: 272142 - DNA, 20 bp, synthetic construct
  source 1..20: mol_type = other DNA
ggaaaggccagtgagggccc

SEQ ID NO: 272143 - DNA, 20 bp, synthetic construct
  source 1..20: mol_type = other DNA
aggaaaggccagtgagggcc

SEQ ID NO: 272144 - DNA, 20 bp, synthetic construct
  source 1..20: mol_type = other DNA
caggaaaggccagtgagggc

SEQ ID NO: 272145 - DNA, 20 bp, synthetic construct
  source 1..20: mol_type = other DNA
gcaggaaaggccagtgaggg

SEQ ID NO: 272146 - DNA, 20 bp, synthetic construct
  source 1..20: mol_type = other DNA
ggcaggaaaggccagtgagg

SEQ ID NO: 272147 - DNA, 20 bp, synthetic construct
  source 1..20: mol_type = other DNA
aggcaggaaaggccagtgag

SEQ ID NO: 272148 - DNA, 20 bp, synthetic construct
  source 1..20: mol_type = other DNA
aaggcaggaaaggccagtga

SEQ ID NO: 272149 - DNA, 20 bp, synthetic construct
  source 1..20: mol_type = other DNA
aaaggcaggaaaggccagtg

SEQ ID NO: 272150 - DNA, 20 bp, synthetic construct
  source 1..20: mol_type = other DNA
aaaaggcaggaaaggccagt

SEQ ID NO: 272151 - DNA, 20 bp, synthetic construct
  source 1..20: mol_type = other DNA
gaaaaggcaggaaaggccag

SEQ ID NO: 272152 - DNA, 20 bp, synthetic construct
  source 1..20: mol_type = other DNA
agaaaaggcaggaaaggcca

SEQ ID NO: 272153 - DNA, 20 bp, synthetic construct
  source 1..20: mol_type = other DNA
gagaaaaggcaggaaaggcc

SEQ ID NO: 272154 - DNA, 20 bp, synthetic construct
  source 1..20: mol_type = other DNA
ggagaaaaggcaggaaaggc

SEQ ID NO: 272155 - DNA, 20 bp, synthetic construct
  source 1..20: mol_type = other DNA
gggagaaaaggcaggaaagg

SEQ ID NO: 272156 - DNA, 20 bp, synthetic construct
  source 1..20: mol_type = other DNA
tgggagaaaaggcaggaaag

SEQ ID NO: 272157 - DNA, 20 bp, synthetic construct
  source 1..20: mol_type = other DNA
atgggagaaaaggcaggaaa

SEQ ID NO: 272158 - DNA, 20 bp, synthetic construct
  source 1..20: mol_type = other DNA
aatgggagaaaaggcaggaa

SEQ ID NO: 272159 - DNA, 20 bp, synthetic construct
  source 1..20: mol_type = other DNA
caatgggagaaaaggcagga

SEQ ID NO: 272160 - DNA, 20 bp, synthetic construct
  source 1..20: mol_type = other DNA
gcaatgggagaaaaggcagg

SEQ ID NO: 272161 - DNA, 20 bp, synthetic construct
  source 1..20: mol_type = other DNA
ggcaatgggagaaaaggcag

SEQ ID NO: 272162 - DNA, 20 bp, synthetic construct
  source 1..20: mol_type = other DNA
gggcaatgggagaaaaggca

SEQ ID NO: 272163 - DNA, 20 bp, synthetic construct
  source 1..20: mol_type = other DNA
tgggcaatgggagaaaaggc

SEQ ID NO: 272164 - DNA, 20 bp, synthetic construct
  source 1..20: mol_type = other DNA
gtgggcaatgggagaaaagg

SEQ ID NO: 272165 - DNA, 20 bp, synthetic construct
  source 1..20: mol_type = other DNA
ggtgggcaatgggagaaaag

SEQ ID NO: 272166 - DNA, 20 bp, synthetic construct
  source 1..20: mol_type = other DNA
gggtgggcaatgggagaaaa

SEQ ID NO: 272167 - DNA, 20 bp, synthetic construct
  source 1..20: mol_type = other DNA
tgggtgggcaatgggagaaa

SEQ ID NO: 272168 - DNA, 20 bp, synthetic construct
  source 1..20: mol_type = other DNA
atgggtgggcaatgggagaa

SEQ ID NO: 272169 - DNA, 20 bp, synthetic construct
  source 1..20: mol_type = other DNA
catgggtgggcaatgggaga

SEQ ID NO: 272170 - DNA, 20 bp, synthetic construct
  source 1..20: mol_type = other DNA
gcatgggtgggcaatgggag

SEQ ID NO: 272171 - DNA, 20 bp, synthetic construct
  source 1..20: mol_type = other DNA
tgcatgggtgggcaatggga

SEQ ID NO: 272172 - DNA, 20 bp, synthetic construct
  source 1..20: mol_type = other DNA
gtgcatgggtgggcaatggg

SEQ ID NO: 272173 - DNA, 20 bp, synthetic construct
  source 1..20: mol_type = other DNA
ggtgcatgggtgggcaatgg

SEQ ID NO: 272174 - DNA, 20 bp, synthetic construct
  source 1..20: mol_type = other DNA
gggtgcatgggtgggcaatg

SEQ ID NO: 272175 - DNA, 20 bp, synthetic construct
  source 1..20: mol_type = other DNA
ggggtgcatgggtgggcaat

SEQ ID NO: 272176 - DNA, 20 bp, synthetic construct
  source 1..20: mol_type = other DNA
gggggtgcatgggtgggcaa

SEQ ID NO: 272177 - DNA, 20 bp, synthetic construct
  source 1..20: mol_type = other DNA
tgggggtgcatgggtgggca

SEQ ID NO: 272178 - DNA, 20 bp, synthetic construct
  source 1..20: mol_type = other DNA
atgggggtgcatgggtgggc

SEQ ID NO: 272179 - DNA, 20 bp, synthetic construct
  source 1..20: mol_type = other DNA
gatgggggtgcatgggtggg

SEQ ID NO: 272180 - DNA, 20 bp, synthetic construct
  source 1..20: mol_type = other DNA
ggatgggggtgcatgggtgg

SEQ ID NO: 272181 - DNA, 20 bp, synthetic construct
  source 1..20: mol_type = other DNA
aggatgggggtgcatgggtg

SEQ ID NO: 272182 - DNA, 20 bp, synthetic construct
  source 1..20: mol_type = other DNA
caggatgggggtgcatgggt

SEQ ID NO: 272183 - DNA, 20 bp, synthetic construct
  source 1..20: mol_type = other DNA
gcaggatgggggtgcatggg

SEQ ID NO: 272184 - DNA, 20 bp, synthetic construct
  source 1..20: mol_type = other DNA
agcaggatgggggtgcatgg

SEQ ID NO: 272185 - DNA, 20 bp, synthetic construct
  source 1..20: mol_type = other DNA
gagcaggatgggggtgcatg

SEQ ID NO: 272186 - DNA, 20 bp, synthetic construct
  source 1..20: mol_type = other DNA
ggagcaggatgggggtgcat

SEQ ID NO: 272187 - DNA, 20 bp, synthetic construct
  source 1..20: mol_type = other DNA
tggagcaggatgggggtgca

SEQ ID NO: 272188 - DNA, 20 bp, synthetic construct
  source 1..20: mol_type = other DNA
ctggagcaggatgggggtgc

SEQ ID NO: 272189 - DNA, 20 bp, synthetic construct
  source 1..20: mol_type = other DNA
gctggagcaggatgggggtg

SEQ ID NO: 272190 - DNA, 20 bp, synthetic construct
  source 1..20: mol_type = other DNA
tgctggagcaggatgggggt

SEQ ID NO: 272191 - DNA, 20 bp, synthetic construct
  source 1..20: mol_type = other DNA
gtgctggagcaggatggggg

SEQ ID NO: 272192 - DNA, 20 bp, synthetic construct
  source 1..20: mol_type = other DNA
ggtgctggagcaggatgggg

SEQ ID NO: 272193 - DNA, 20 bp, synthetic construct
  source 1..20: mol_type = other DNA
gggtgctggagcaggatggg

SEQ ID NO: 272194 - DNA, 20 bp, synthetic construct
  source 1..20: mol_type = other DNA
tgggtgctggagcaggatgg

SEQ ID NO: 272195 - DNA, 20 bp, synthetic construct
  source 1..20: mol_type = other DNA
ctgggtgctggagcaggatg

SEQ ID NO: 272196 - DNA, 20 bp, synthetic construct
  source 1..20: mol_type = other DNA
tctgggtgctggagcaggat

SEQ ID NO: 272197 - DNA, 20 bp, synthetic construct
  source 1..20: mol_type = other DNA
gtctgggtgctggagcagga

SEQ ID NO: 272198 - DNA, 20 bp, synthetic construct
  source 1..20: mol_type = other DNA
agtctgggtgctggagcagg

SEQ ID NO: 272199 - DNA, 20 bp, synthetic construct
  source 1..20: mol_type = other DNA
cagtctgggtgctggagcag

SEQ ID NO: 272200 - DNA, 20 bp, synthetic construct
  source 1..20: mol_type = other DNA
gcagtctgggtgctggagca

SEQ ID NO: 272201 - DNA, 20 bp, synthetic construct
  source 1..20: mol_type = other DNA
ggcagtctgggtgctggagc

SEQ ID NO: 272202 - DNA, 20 bp, synthetic construct
  source 1..20: mol_type = other DNA
tggcagtctgggtgctggag

SEQ ID NO: 272203 - DNA, 20 bp, synthetic construct
  source 1..20: mol_type = other DNA
atggcagtctgggtgctgga

SEQ ID NO: 272204 - DNA, 20 bp, synthetic construct
  source 1..20: mol_type = other DNA
gatggcagtctgggtgctgg

SEQ ID NO: 272205 - DNA, 20 bp, synthetic construct
  source 1..20: mol_type = other DNA
ggatggcagtctgggtgctg

SEQ ID NO: 272206 - DNA, 20 bp, synthetic construct
  source 1..20: mol_type = other DNA
tggatggcagtctgggtgct

SEQ ID NO: 272207 - DNA, 20 bp, synthetic construct
  source 1..20: mol_type = other DNA
ctggatggcagtctgggtgc

SEQ ID NO: 272208 - DNA, 20 bp, synthetic construct
  source 1..20: mol_type = other DNA
cctggatggcagtctgggtg

SEQ ID NO: 272209 - DNA, 20 bp, synthetic construct
  source 1..20: mol_type = other DNA
tcctggatggcagtctgggt

SEQ ID NO: 272210 - DNA, 20 bp, synthetic construct
  source 1..20: mol_type = other DNA
atcctggatggcagtctggg

SEQ ID NO: 272211 - DNA, 20 bp, synthetic construct
  source 1..20: mol_type = other DNA
gatcctggatggcagtctgg

SEQ ID NO: 272212 - DNA, 20 bp, synthetic construct
  source 1..20: mol_type = other DNA
agatcctggatggcagtctg

SEQ ID NO: 272213 - DNA, 20 bp, synthetic construct
  source 1..20: mol_type = other DNA
gagatcctggatggcagtct

SEQ ID NO: 272214 - DNA, 20 bp, synthetic construct
  source 1..20: mol_type = other DNA
ggagatcctggatggcagtc

SEQ ID NO: 272215 - DNA, 20 bp, synthetic construct
  source 1..20: mol_type = other DNA
aggagatcctggatggcagt

SEQ ID NO: 272216 - DNA, 20 bp, synthetic construct
  source 1..20: mol_type = other DNA
gaggagatcctggatggcag

SEQ ID NO: 272217 - DNA, 20 bp, synthetic construct
  source 1..20: mol_type = other DNA
tgaggagatcctggatggca

SEQ ID NO: 272218 - DNA, 20 bp, synthetic construct
  source 1..20: mol_type = other DNA
ttgaggagatcctggatggc

SEQ ID NO: 272219 - DNA, 20 bp, synthetic construct
  source 1..20: mol_type = other DNA
cttgaggagatcctggatgg

SEQ ID NO: 272220 - DNA, 20 bp, synthetic construct
  source 1..20: mol_type = other DNA
acttgaggagatcctggatg

SEQ ID NO: 272221 - DNA, 20 bp, synthetic construct
  source 1..20: mol_type = other DNA
gacttgaggagatcctggat

SEQ ID NO: 272222 - DNA, 20 bp, synthetic construct
  source 1..20: mol_type = other DNA
tgacttgaggagatcctgga

SEQ ID NO: 272223 - DNA, 20 bp, synthetic construct
  source 1..20: mol_type = other DNA
gtgacttgaggagatcctgg

SEQ ID NO: 272224 - DNA, 20 bp, synthetic construct
  source 1..20: mol_type = other DNA
tgtgacttgaggagatcctg

SEQ ID NO: 272225 - DNA, 20 bp, synthetic construct
  source 1..20: mol_type = other DNA
atgtgacttgaggagatcct

SEQ ID NO: 272226 - DNA, 20 bp, synthetic construct
  source 1..20: mol_type = other DNA
tatgtgacttgaggagatcc

SEQ ID NO: 272227 - DNA, 20 bp, synthetic construct
  source 1..20: mol_type = other DNA
ttatgtgacttgaggagatc

SEQ ID NO: 272228 - DNA, 20 bp, synthetic construct
  source 1..20: mol_type = other DNA
gttatgtgacttgaggagat

SEQ ID NO: 272229 - DNA, 20 bp, synthetic construct
  source 1..20: mol_type = other DNA
tgttatgtgacttgaggaga

SEQ ID NO: 272230 - DNA, 20 bp, synthetic construct
  source 1..20: mol_type = other DNA
ttgttatgtgacttgaggag

SEQ ID NO: 272231 - DNA, 20 bp, synthetic construct
  source 1..20: mol_type = other DNA
cttgttatgtgacttgagga

SEQ ID NO: 272232 - DNA, 20 bp, synthetic construct
  source 1..20: mol_type = other DNA
gcttgttatgtgacttgagg

SEQ ID NO: 272233 - DNA, 20 bp, synthetic construct
  source 1..20: mol_type = other DNA
tgcttgttatgtgacttgag

SEQ ID NO: 272234 - DNA, 20 bp, synthetic construct
  source 1..20: mol_type = other DNA
ctgcttgttatgtgacttga

SEQ ID NO: 272235 - DNA, 20 bp, synthetic construct
  source 1..20: mol_type = other DNA
gctgcttgttatgtgacttg

SEQ ID NO: 272236 - DNA, 20 bp, synthetic construct
  source 1..20: mol_type = other DNA
tgctgcttgttatgtgactt

SEQ ID NO: 272237 - DNA, 20 bp, synthetic construct
  source 1..20: mol_type = other DNA
gtgctgcttgttatgtgact

SEQ ID NO: 272238 - DNA, 20 bp, synthetic construct
  source 1..20: mol_type = other DNA
ggtgctgcttgttatgtgac

SEQ ID NO: 272239 - DNA, 20 bp, synthetic construct
  source 1..20: mol_type = other DNA
gggtgctgcttgttatgtga

SEQ ID NO: 272240 - DNA, 20 bp, synthetic construct
  source 1..20: mol_type = other DNA
tgggtgctgcttgttatgtg

SEQ ID NO: 272241 - DNA, 20 bp, synthetic construct
  source 1..20: mol_type = other DNA
gtgggtgctgcttgttatgt

SEQ ID NO: 272242 - DNA, 20 bp, synthetic construct
  source 1..20: mol_type = other DNA
tgtgggtgctgcttgttatg

SEQ ID NO: 272243 - DNA, 20 bp, synthetic construct
  source 1..20: mol_type = other DNA
ttgtgggtgctgcttgttat

SEQ ID NO: 272244 - DNA, 20 bp, synthetic construct
  source 1..20: mol_type = other DNA
cttgtgggtgctgcttgtta

SEQ ID NO: 272245 - DNA, 20 bp, synthetic construct
  source 1..20: mol_type = other DNA
ccttgtgggtgctgcttgtt

SEQ ID NO: 272246 - DNA, 20 bp, synthetic construct
  source 1..20: mol_type = other DNA
accttgtgggtgctgcttgt

SEQ ID NO: 272247 - DNA, 20 bp, synthetic construct
  source 1..20: mol_type = other DNA
caccttgtgggtgctgcttg

SEQ ID NO: 272248 - DNA, 20 bp, synthetic construct
  source 1..20: mol_type = other DNA
gcaccttgtgggtgctgctt

SEQ ID NO: 272249 - DNA, 20 bp, synthetic construct
  source 1..20: mol_type = other DNA
agcaccttgtgggtgctgct

SEQ ID NO: 272250 - DNA, 20 bp, synthetic construct
  source 1..20: mol_type = other DNA
gagcaccttgtgggtgctgc

SEQ ID NO: 272251 - DNA, 20 bp, synthetic construct
  source 1..20: mol_type = other DNA
ggagcaccttgtgggtgctg

SEQ ID NO: 272252 - DNA, 20 bp, synthetic construct
  source 1..20: mol_type = other DNA
gggagcaccttgtgggtgct

SEQ ID NO: 272253 - DNA, 20 bp, synthetic construct
  source 1..20: mol_type = other DNA
agggagcaccttgtgggtgc

SEQ ID NO: 272254 - DNA, 20 bp, synthetic construct
  source 1..20: mol_type = other DNA
aagggagcaccttgtgggtg

SEQ ID NO: 272255 - DNA, 20 bp, synthetic construct
  source 1..20: mol_type = other DNA
gaagggagcaccttgtgggt

SEQ ID NO: 272256 - DNA, 20 bp, synthetic construct
  source 1..20: mol_type = other DNA
ggaagggagcaccttgtggg

SEQ ID NO: 272257 - DNA, 20 bp, synthetic construct
  source 1..20: mol_type = other DNA
gggaagggagcaccttgtgg

SEQ ID NO: 272258 - DNA, 20 bp, synthetic construct
  source 1..20: mol_type = other DNA
ggggaagggagcaccttgtg

SEQ ID NO: 272259 - DNA, 20 bp, synthetic construct
  source 1..20: mol_type = other DNA
gggggaagggagcaccttgt

SEQ ID NO: 272260 - DNA, 20 bp, synthetic construct
  source 1..20: mol_type = other DNA
agggggaagggagcaccttg

SEQ ID NO: 272261 - DNA, 20 bp, synthetic construct
  source 1..20: mol_type = other DNA
tagggggaagggagcacctt

SEQ ID NO: 272262 - DNA, 20 bp, synthetic construct
  source 1..20: mol_type = other DNA
ctagggggaagggagcacct

SEQ ID NO: 272263 - DNA, 20 bp, synthetic construct
  source 1..20: mol_type = other DNA
gctagggggaagggagcacc

SEQ ID NO: 272264 - DNA, 20 bp, synthetic construct
  source 1..20: mol_type = other DNA
ggctagggggaagggagcac

SEQ ID NO: 272265 - DNA, 20 bp, synthetic construct
  source 1..20: mol_type = other DNA
aggctagggggaagggagca

SEQ ID NO: 272266 - DNA, 20 bp, synthetic construct
  source 1..20: mol_type = other DNA
caggctagggggaagggagc

SEQ ID NO: 272267 - DNA, 20 bp, synthetic construct
  source 1..20: mol_type = other DNA
tcaggctagggggaagggag

SEQ ID NO: 272268 - DNA, 20 bp, synthetic construct
  source 1..20: mol_type = other DNA
ttcaggctagggggaaggga

SEQ ID NO: 272269 - DNA, 20 bp, synthetic construct
  source 1..20: mol_type = other DNA
attcaggctagggggaaggg

SEQ ID NO: 272270 - DNA, 20 bp, synthetic construct
  source 1..20: mol_type = other DNA
gattcaggctagggggaagg

SEQ ID NO: 272271 - DNA, 20 bp, synthetic construct
  source 1..20: mol_type = other DNA
agattcaggctagggggaag

SEQ ID NO: 272272 - DNA, 20 bp, synthetic construct
  source 1..20: mol_type = other DNA
cagattcaggctagggggaa

SEQ ID NO: 272273 - DNA, 20 bp, synthetic construct
  source 1..20: mol_type = other DNA
gcagattcaggctaggggga

SEQ ID NO: 272274 - DNA, 20 bp, synthetic construct
  source 1..20: mol_type = other DNA
agcagattcaggctaggggg

SEQ ID NO: 272275 - DNA, 20 bp, synthetic construct
  source 1..20: mol_type = other DNA
cagcagattcaggctagggg

SEQ ID NO: 272276 - DNA, 20 bp, synthetic construct
  source 1..20: mol_type = other DNA
gcagcagattcaggctaggg

SEQ ID NO: 272277 - DNA, 20 bp, synthetic construct
  source 1..20: mol_type = other DNA
agcagcagattcaggctagg

SEQ ID NO: 272278 - DNA, 20 bp, synthetic construct
  source 1..20: mol_type = other DNA
gagcagcagattcaggctag

SEQ ID NO: 272279 - DNA, 20 bp, synthetic construct
  source 1..20: mol_type = other DNA
ggagcagcagattcaggcta

SEQ ID NO: 272280 - DNA, 20 bp, synthetic construct
  source 1..20: mol_type = other DNA
gggagcagcagattcaggct

SEQ ID NO: 272281 - DNA, 20 bp, synthetic construct
  source 1..20: mol_type = other DNA
ggggagcagcagattcaggc

SEQ ID NO: 272282 - DNA, 20 bp, synthetic construct
  source 1..20: mol_type = other DNA
cggggagcagcagattcagg

SEQ ID NO: 272283 - DNA, 20 bp, synthetic construct
  source 1..20: mol_type = other DNA
acggggagcagcagattcag

SEQ ID NO: 272284 - DNA, 20 bp, synthetic construct
  source 1..20: mol_type = other DNA
gacggggagcagcagattca

SEQ ID NO: 272285 - DNA, 20 bp, synthetic construct
  source 1..20: mol_type = other DNA
agacggggagcagcagattc

SEQ ID NO: 272286 - DNA, 20 bp, synthetic construct
  source 1..20: mol_type = other DNA
cagacggggagcagcagatt

SEQ ID NO: 272287 - DNA, 20 bp, synthetic construct
  source 1..20: mol_type = other DNA
ccagacggggagcagcagat

SEQ ID NO: 272288 - DNA, 20 bp, synthetic construct
  source 1..20: mol_type = other DNA
cccagacggggagcagcaga

SEQ ID NO: 272289 - DNA, 20 bp, synthetic construct
  source 1..20: mol_type = other DNA
ccccagacggggagcagcag

SEQ ID NO: 272290 - DNA, 20 bp, synthetic construct
  source 1..20: mol_type = other DNA
accccagacggggagcagca

SEQ ID NO: 272291 - DNA, 20 bp, synthetic construct
  source 1..20: mol_type = other DNA
aaccccagacggggagcagc

SEQ ID NO: 272292 - DNA, 20 bp, synthetic construct
  source 1..20: mol_type = other DNA
gaaccccagacggggagcag

SEQ ID NO: 272293 - DNA, 20 bp, synthetic construct
  source 1..20: mol_type = other DNA
ggaaccccagacggggagca

SEQ ID NO: 272294 - DNA, 20 bp, synthetic construct
  source 1..20: mol_type = other DNA
gggaaccccagacggggagc

SEQ ID NO: 272295 - DNA, 20 bp, synthetic construct
  source 1..20: mol_type = other DNA
ggggaaccccagacggggag

SEQ ID NO: 272296 - DNA, 20 bp, synthetic construct
  source 1..20: mol_type = other DNA
cggggaaccccagacgggga

SEQ ID NO: 272297 - DNA, 20 bp, synthetic construct
  source 1..20: mol_type = other DNA
gcggggaaccccagacgggg

SEQ ID NO: 272298 - DNA, 20 bp, synthetic construct
  source 1..20: mol_type = other DNA
ggcggggaaccccagacggg

SEQ ID NO: 272299 - DNA, 20 bp, synthetic construct
  source 1..20: mol_type = other DNA
gggcggggaaccccagacgg

SEQ ID NO: 272300 - DNA, 20 bp, synthetic construct
  source 1..20: mol_type = other DNA
tgggcggggaaccccagacg

SEQ ID NO: 272301 - DNA, 20 bp, synthetic construct
  source 1..20: mol_type = other DNA
atgggcggggaaccccagac

SEQ ID NO: 272302 - DNA, 20 bp, synthetic construct
  source 1..20: mol_type = other DNA
catgggcggggaaccccaga

SEQ ID NO: 272303 - DNA, 20 bp, synthetic construct
  source 1..20: mol_type = other DNA
gcatgggcggggaaccccag

SEQ ID NO: 272304 - DNA, 20 bp, synthetic construct
  source 1..20: mol_type = other DNA
tgcatgggcggggaacccca

SEQ ID NO: 272305 - DNA, 20 bp, synthetic construct
  source 1..20: mol_type = other DNA
gtgcatgggcggggaacccc

SEQ ID NO: 272306 - DNA, 20 bp, synthetic construct
  source 1..20: mol_type = other DNA
ggtgcatgggcggggaaccc

SEQ ID NO: 272307 - DNA, 20 bp, synthetic construct
  source 1..20: mol_type = other DNA
aggtgcatgggcggggaacc

SEQ ID NO: 272308 - DNA, 20 bp, synthetic construct
  source 1..20: mol_type = other DNA
gaggtgcatgggcggggaac

SEQ ID NO: 272309 - DNA, 20 bp, synthetic construct
  source 1..20: mol_type = other DNA
agaggtgcatgggcggggaa

SEQ ID NO: 272310 - DNA, 20 bp, synthetic construct
  source 1..20: mol_type = other DNA
cagaggtgcatgggcgggga

SEQ ID NO: 272311 - DNA, 20 bp, synthetic construct
  source 1..20: mol_type = other DNA
ccagaggtgcatgggcgggg

SEQ ID NO: 272312 - DNA, 20 bp, synthetic construct
  source 1..20: mol_type = other DNA
cccagaggtgcatgggcggg

SEQ ID NO: 272313 - DNA, 20 bp, synthetic construct
  source 1..20: mol_type = other DNA
ccccagaggtgcatgggcgg

SEQ ID NO: 272314 - DNA, 20 bp, synthetic construct
  source 1..20: mol_type = other DNA
cccccagaggtgcatgggcg

SEQ ID NO: 272315 - DNA, 20 bp, synthetic construct
  source 1..20: mol_type = other DNA
gcccccagaggtgcatgggc

SEQ ID NO: 272316 - DNA, 20 bp, synthetic construct
  source 1..20: mol_type = other DNA
ggcccccagaggtgcatggg

SEQ ID NO: 272317 - DNA, 20 bp, synthetic construct
  source 1..20: mol_type = other DNA
gggcccccagaggtgcatgg

SEQ ID NO: 272318 - DNA, 20 bp, synthetic construct
  source 1..20: mol_type = other DNA
ggggcccccagaggtgcatg

SEQ ID NO: 272319 - DNA, 20 bp, synthetic construct
  source 1..20: mol_type = other DNA
aggggcccccagaggtgcat

SEQ ID NO: 272320 - DNA, 20 bp, synthetic construct
  source 1..20: mol_type = other DNA
caggggcccccagaggtgca

SEQ ID NO: 272321 - DNA, 20 bp, synthetic construct
  source 1..20: mol_type = other DNA
ccaggggcccccagaggtgc

SEQ ID NO: 272322 - DNA, 20 bp, synthetic construct
  source 1..20: mol_type = other DNA
cccaggggcccccagaggtg

SEQ ID NO: 272323 - DNA, 20 bp, synthetic construct
  source 1..20: mol_type = other DNA
acccaggggcccccagaggt

SEQ ID NO: 272324 - DNA, 20 bp, synthetic construct
  source 1..20: mol_type = other DNA
aacccaggggcccccagagg

SEQ ID NO: 272325 - DNA, 20 bp, synthetic construct
  source 1..20: mol_type = other DNA
gaacccaggggcccccagag

SEQ ID NO: 272326 - DNA, 20 bp, synthetic construct
  source 1..20: mol_type = other DNA
agaacccaggggcccccaga

SEQ ID NO: 272327 - DNA, 20 bp, synthetic construct
  source 1..20: mol_type = other DNA
cagaacccaggggcccccag

SEQ ID NO: 272328 - DNA, 20 bp, synthetic construct
  source 1..20: mol_type = other DNA
gcagaacccaggggccccca

SEQ ID NO: 272329 - DNA, 20 bp, synthetic construct
  source 1..20: mol_type = other DNA
ggcagaacccaggggccccc

SEQ ID NO: 272330 - DNA, 20 bp, synthetic construct
  source 1..20: mol_type = other DNA
tggcagaacccaggggcccc

SEQ ID NO: 272331 - DNA, 20 bp, synthetic construct
  source 1..20: mol_type = other DNA
atggcagaacccaggggccc

SEQ ID NO: 272332 - DNA, 20 bp, synthetic construct
  source 1..20: mol_type = other DNA
tatggcagaacccaggggcc

SEQ ID NO: 272333 - DNA, 20 bp, synthetic construct
  source 1..20: mol_type = other DNA
gtatggcagaacccaggggc

SEQ ID NO: 272334 - DNA, 20 bp, synthetic construct
  source 1..20: mol_type = other DNA
ggtatggcagaacccagggg

SEQ ID NO: 272335 - DNA, 20 bp, synthetic construct
  source 1..20: mol_type = other DNA
gggtatggcagaacccaggg

SEQ ID NO: 272336 - DNA, 20 bp, synthetic construct
  source 1..20: mol_type = other DNA
agggtatggcagaacccagg

SEQ ID NO: 272337 - DNA, 20 bp, synthetic construct
  source 1..20: mol_type = other DNA
cagggtatggcagaacccag

SEQ ID NO: 272338 - DNA, 20 bp, synthetic construct
  source 1..20: mol_type = other DNA
gcagggtatggcagaaccca

SEQ ID NO: 272339 - DNA, 20 bp, synthetic construct
  source 1..20: mol_type = other DNA
ggcagggtatggcagaaccc

SEQ ID NO: 272340 - DNA, 20 bp, synthetic construct
  source 1..20: mol_type = other DNA
gggcagggtatggcagaacc

SEQ ID NO: 272341 - DNA, 20 bp, synthetic construct
  source 1..20: mol_type = other DNA
agggcagggtatggcagaac

SEQ ID NO: 272342 - DNA, 20 bp, synthetic construct
  source 1..20: mol_type = other DNA
cagggcagggtatggcagaa

SEQ ID NO: 272343 - DNA, 20 bp, synthetic construct
  source 1..20: mol_type = other DNA
acagggcagggtatggcaga

SEQ ID NO: 272344 - DNA, 20 bp, synthetic construct
  source 1..20: mol_type = other DNA
cacagggcagggtatggcag

SEQ ID NO: 272345 - DNA, 20 bp, synthetic construct
  source 1..20: mol_type = other DNA
acacagggcagggtatggca

SEQ ID NO: 272346 - DNA, 20 bp, synthetic construct
  source 1..20: mol_type = other DNA
gacacagggcagggtatggc

SEQ ID NO: 272347 - DNA, 20 bp, synthetic construct
  source 1..20: mol_type = other DNA
ggacacagggcagggtatgg

SEQ ID NO: 272348 - DNA, 20 bp, synthetic construct
  source 1..20: mol_type = other DNA
gggacacagggcagggtatg

SEQ ID NO: 272349 - DNA, 20 bp, synthetic construct
  source 1..20: mol_type = other DNA
tgggacacagggcagggtat

SEQ ID NO: 272350 - DNA, 20 bp, synthetic construct
  source 1..20: mol_type = other DNA
atgggacacagggcagggta

SEQ ID NO: 272351 - DNA, 20 bp, synthetic construct
  source 1..20: mol_type = other DNA
catgggacacagggcagggt

SEQ ID NO: 272352 - DNA, 20 bp, synthetic construct
  source 1..20: mol_type = other DNA
ccatgggacacagggcaggg

SEQ ID NO: 272353 - DNA, 20 bp, synthetic construct
  source 1..20: mol_type = other DNA
accatgggacacagggcagg

SEQ ID NO: 272354 - DNA, 20 bp, synthetic construct
  source 1..20: mol_type = other DNA
caccatgggacacagggcag

SEQ ID NO: 272355 - DNA, 20 bp, synthetic construct
  source 1..20: mol_type = other DNA
ccaccatgggacacagggca

SEQ ID NO: 272356 - DNA, 20 bp, synthetic construct
  source 1..20: mol_type = other DNA
cccaccatgggacacagggc

SEQ ID NO: 272357 - DNA, 20 bp, synthetic construct
  source 1..20: mol_type = other DNA
ccccaccatgggacacaggg

SEQ ID NO: 272358 - DNA, 20 bp, synthetic construct
  source 1..20: mol_type = other DNA
tccccaccatgggacacagg

SEQ ID NO: 272359 - DNA, 20 bp, synthetic construct
  source 1..20: mol_type = other DNA
ttccccaccatgggacacag

SEQ ID NO: 272360 - DNA, 20 bp, synthetic construct
  source 1..20: mol_type = other DNA
attccccaccatgggacaca

SEQ ID NO: 272361 - DNA, 20 bp, synthetic construct
  source 1..20: mol_type = other DNA
cattccccaccatgggacac

SEQ ID NO: 272362 - DNA, 20 bp, synthetic construct
  source 1..20: mol_type = other DNA
acattccccaccatgggaca

SEQ ID NO: 272363 - DNA, 20 bp, synthetic construct
  source 1..20: mol_type = other DNA
gacattccccaccatgggac

SEQ ID NO: 272364 - DNA, 20 bp, synthetic construct
  source 1..20: mol_type = other DNA
ggacattccccaccatggga

SEQ ID NO: 272365 - DNA, 20 bp, synthetic construct
  source 1..20: mol_type = other DNA
aggacattccccaccatggg

SEQ ID NO: 272366 - DNA, 20 bp, synthetic construct
  source 1..20: mol_type = other DNA
aaggacattccccaccatgg

SEQ ID NO: 272367 - DNA, 20 bp, synthetic construct
  source 1..20: mol_type = other DNA
gaaggacattccccaccatg

SEQ ID NO: 272368 - DNA, 20 bp, synthetic construct
  source 1..20: mol_type = other DNA
agaaggacattccccaccat

SEQ ID NO: 272369 - DNA, 20 bp, synthetic construct
  source 1..20: mol_type = other DNA
gagaaggacattccccacca

SEQ ID NO: 272370 - DNA, 20 bp, synthetic construct
  source 1..20: mol_type = other DNA
agagaaggacattccccacc

SEQ ID NO: 272371 - DNA, 20 bp, synthetic construct
  source 1..20: mol_type = other DNA
gagagaaggacattccccac

SEQ ID NO: 272372 - DNA, 20 bp, synthetic construct
  source 1..20: mol_type = other DNA
ggagagaaggacattcccca

SEQ ID NO: 272373 - DNA, 20 bp, synthetic construct
  source 1..20: mol_type = other DNA
aggagagaaggacattcccc

SEQ ID NO: 272374 - DNA, 20 bp, synthetic construct
  source 1..20: mol_type = other DNA
aaggagagaaggacattccc

SEQ ID NO: 272375 - DNA, 20 bp, synthetic construct
  source 1..20: mol_type = other DNA
taaggagagaaggacattcc

SEQ ID NO: 272376 - DNA, 20 bp, synthetic construct
  source 1..20: mol_type = other DNA
ataaggagagaaggacattc

SEQ ID NO: 272377 - DNA, 20 bp, synthetic construct
  source 1..20: mol_type = other DNA
gataaggagagaaggacatt

SEQ ID NO: 272378 - DNA, 20 bp, synthetic construct
  source 1..20: mol_type = other DNA
agataaggagagaaggacat

SEQ ID NO: 272379 - DNA, 20 bp, synthetic construct
  source 1..20: mol_type = other DNA
gagataaggagagaaggaca

SEQ ID NO: 272380 - DNA, 20 bp, synthetic construct
  source 1..20: mol_type = other DNA
agagataaggagagaaggac

SEQ ID NO: 272381 - DNA, 20 bp, synthetic construct
  source 1..20: mol_type = other DNA
aagagataaggagagaagga

SEQ ID NO: 272382 - DNA, 20 bp, synthetic construct
  source 1..20: mol_type = other DNA
gaagagataaggagagaagg

SEQ ID NO: 272383 - DNA, 20 bp, synthetic construct
  source 1..20: mol_type = other DNA
ggaagagataaggagagaag

SEQ ID NO: 272384 - DNA, 20 bp, synthetic construct
  source 1..20: mol_type = other DNA
gggaagagataaggagagaa

SEQ ID NO: 272385 - DNA, 20 bp, synthetic construct
  source 1..20: mol_type = other DNA
agggaagagataaggagaga

SEQ ID NO: 272386 - DNA, 20 bp, synthetic construct
  source 1..20: mol_type = other DNA
aagggaagagataaggagag

SEQ ID NO: 272387 - DNA, 20 bp, synthetic construct
  source 1..20: mol_type = other DNA
gaagggaagagataaggaga

SEQ ID NO: 272388 - DNA, 20 bp, synthetic construct
  source 1..20: mol_type = other DNA
ggaagggaagagataaggag

SEQ ID NO: 272389 - DNA, 20 bp, synthetic construct
  source 1..20: mol_type = other DNA
gggaagggaagagataagga

SEQ ID NO: 272390 - DNA, 20 bp, synthetic construct
  source 1..20: mol_type = other DNA
agggaagggaagagataagg

SEQ ID NO: 272391 - DNA, 20 bp, synthetic construct
  source 1..20: mol_type = other DNA
aagggaagggaagagataag

SEQ ID NO: 272392 - DNA, 20 bp, synthetic construct
  source 1..20: mol_type = other DNA
taagggaagggaagagataa

SEQ ID NO: 272393 - DNA, 20 bp, synthetic construct
  source 1..20: mol_type = other DNA
ttaagggaagggaagagata

SEQ ID NO: 272394 - DNA, 20 bp, synthetic construct
  source 1..20: mol_type = other DNA
tttaagggaagggaagagat

SEQ ID NO: 272395 - DNA, 20 bp, synthetic construct
  source 1..20: mol_type = other DNA
atttaagggaagggaagaga

SEQ ID NO: 272396 - DNA, 20 bp, synthetic construct
  source 1..20: mol_type = other DNA
gatttaagggaagggaagag

SEQ ID NO: 272397 - DNA, 20 bp, synthetic construct
  source 1..20: mol_type = other DNA
ggatttaagggaagggaaga

SEQ ID NO: 272398 - DNA, 20 bp, synthetic construct
  source 1..20: mol_type = other DNA
tggatttaagggaagggaag

SEQ ID NO: 272399 - DNA, 20 bp, synthetic construct
  source 1..20: mol_type = other DNA
ttggatttaagggaagggaa

SEQ ID NO: 272400 - DNA, 20 bp, synthetic construct
  source 1..20: mol_type = other DNA
cttggatttaagggaaggga

SEQ ID NO: 272401 - DNA, 20 bp, synthetic construct
  source 1..20: mol_type = other DNA
acttggatttaagggaaggg

SEQ ID NO: 272402 - DNA, 20 bp, synthetic construct
  source 1..20: mol_type = other DNA
aacttggatttaagggaagg

SEQ ID NO: 272403 - DNA, 20 bp, synthetic construct
  source 1..20: mol_type = other DNA
gaacttggatttaagggaag

SEQ ID NO: 272404 - DNA, 20 bp, synthetic construct
  source 1..20: mol_type = other DNA
tgaacttggatttaagggaa

SEQ ID NO: 272405 - DNA, 20 bp, synthetic construct
  source 1..20: mol_type = other DNA
ctgaacttggatttaaggga

SEQ ID NO: 272406 - DNA, 20 bp, synthetic construct
  source 1..20: mol_type = other DNA
actgaacttggatttaaggg

SEQ ID NO: 272407 - DNA, 20 bp, synthetic construct
  source 1..20: mol_type = other DNA
aactgaacttggatttaagg

SEQ ID NO: 272408 - DNA, 20 bp, synthetic construct
  source 1..20: mol_type = other DNA
caactgaacttggatttaag

SEQ ID NO: 272409 - DNA, 20 bp, synthetic construct
  source 1..20: mol_type = other DNA
gcaactgaacttggatttaa

SEQ ID NO: 272410 - DNA, 20 bp, synthetic construct
  source 1..20: mol_type = other DNA
ggcaactgaacttggattta

SEQ ID NO: 272411 - DNA, 20 bp, synthetic construct
  source 1..20: mol_type = other DNA
tggcaactgaacttggattt

SEQ ID NO: 272412 - DNA, 20 bp, synthetic construct
  source 1..20: mol_type = other DNA
atggcaactgaacttggatt

SEQ ID NO: 272413 - DNA, 20 bp, synthetic construct
  source 1..20: mol_type = other DNA
gatggcaactgaacttggat

SEQ ID NO: 272414 - DNA, 20 bp, synthetic construct
  source 1..20: mol_type = other DNA
agatggcaactgaacttgga

SEQ ID NO: 272415 - DNA, 20 bp, synthetic construct
  source 1..20: mol_type = other DNA
gagatggcaactgaacttgg

SEQ ID NO: 272416 - DNA, 20 bp, synthetic construct
  source 1..20: mol_type = other DNA
ggagatggcaactgaacttg

SEQ ID NO: 272417 - DNA, 20 bp, synthetic construct
  source 1..20: mol_type = other DNA
aggagatggcaactgaactt

SEQ ID NO: 272418 - DNA, 20 bp, synthetic construct
  source 1..20: mol_type = other DNA
gaggagatggcaactgaact

SEQ ID NO: 272419 - DNA, 20 bp, synthetic construct
  source 1..20: mol_type = other DNA
ggaggagatggcaactgaac

SEQ ID NO: 272420 - DNA, 20 bp, synthetic construct
  source 1..20: mol_type = other DNA
tggaggagatggcaactgaa

SEQ ID NO: 272421 - DNA, 20 bp, synthetic construct
  source 1..20: mol_type = other DNA
ctggaggagatggcaactga

SEQ ID NO: 272422 - DNA, 20 bp, synthetic construct
  source 1..20: mol_type = other DNA
cctggaggagatggcaactg

SEQ ID NO: 272423 - DNA, 20 bp, synthetic construct
  source 1..20: mol_type = other DNA
tcctggaggagatggcaact

SEQ ID NO: 272424 - DNA, 20 bp, synthetic construct
  source 1..20: mol_type = other DNA
ttcctggaggagatggcaac

SEQ ID NO: 272425 - DNA, 20 bp, synthetic construct
  source 1..20: mol_type = other DNA
cttcctggaggagatggcaa

SEQ ID NO: 272426 - DNA, 20 bp, synthetic construct
  source 1..20: mol_type = other DNA
acttcctggaggagatggca

SEQ ID NO: 272427 - DNA, 20 bp, synthetic construct
  source 1..20: mol_type = other DNA
gacttcctggaggagatggc

SEQ ID NO: 272428 - DNA, 20 bp, synthetic construct
  source 1..20: mol_type = other DNA
agacttcctggaggagatgg

SEQ ID NO: 272429 - DNA, 20 bp, synthetic construct
  source 1..20: mol_type = other DNA
aagacttcctggaggagatg

SEQ ID NO: 272430 - DNA, 20 bp, synthetic construct
  source 1..20: mol_type = other DNA
gaagacttcctggaggagat

SEQ ID NO: 272431 - DNA, 20 bp, synthetic construct
  source 1..20: mol_type = other DNA
ggaagacttcctggaggaga

SEQ ID NO: 272432 - DNA, 20 bp, synthetic construct
  source 1..20: mol_type = other DNA
aggaagacttcctggaggag

SEQ ID NO: 272433 - DNA, 20 bp, synthetic construct
  source 1..20: mol_type = other DNA
caggaagacttcctggagga

SEQ ID NO: 272434 - DNA, 20 bp, synthetic construct
  source 1..20: mol_type = other DNA
ccaggaagacttcctggagg

SEQ ID NO: 272435 - DNA, 20 bp, synthetic construct
  source 1..20: mol_type = other DNA
tccaggaagacttcctggag

SEQ ID NO: 272436 - DNA, 20 bp, synthetic construct
  source 1..20: mol_type = other DNA
atccaggaagacttcctgga

SEQ ID NO: 272437 - DNA, 20 bp, synthetic construct
  source 1..20: mol_type = other DNA
aatccaggaagacttcctgg

SEQ ID NO: 272438 - DNA, 20 bp, synthetic construct
  source 1..20: mol_type = other DNA
gaatccaggaagacttcctg

SEQ ID NO: 272439 - DNA, 20 bp, synthetic construct
  source 1..20: mol_type = other DNA
ggaatccaggaagacttcct

SEQ ID NO: 272440 - DNA, 20 bp, synthetic construct
  source 1..20: mol_type = other DNA
gggaatccaggaagacttcc

SEQ ID NO: 272441 - DNA, 20 bp, synthetic construct
  source 1..20: mol_type = other DNA
ggggaatccaggaagacttc

SEQ ID NO: 272442 - DNA, 20 bp, synthetic construct
  source 1..20: mol_type = other DNA
aggggaatccaggaagactt

SEQ ID NO: 272443 - DNA, 20 bp, synthetic construct
  source 1..20: mol_type = other DNA
gaggggaatccaggaagact

SEQ ID NO: 272444 - DNA, 20 bp, synthetic construct
  source 1..20: mol_type = other DNA
agaggggaatccaggaagac

SEQ ID NO: 272445 - DNA, 20 bp, synthetic construct
  source 1..20: mol_type = other DNA
gagaggggaatccaggaaga

SEQ ID NO: 272446 - DNA, 20 bp, synthetic construct
  source 1..20: mol_type = other DNA
agagaggggaatccaggaag

SEQ ID NO: 272447 - DNA, 20 bp, synthetic construct
  source 1..20: mol_type = other DNA
gagagaggggaatccaggaa

SEQ ID NO: 272448 - DNA, 20 bp, synthetic construct
  source 1..20: mol_type = other DNA
agagagaggggaatccagga

SEQ ID NO: 272449 - DNA, 20 bp, synthetic construct
  source 1..20: mol_type = other DNA
aagagagaggggaatccagg

SEQ ID NO: 272450 - DNA, 20 bp, synthetic construct
  source 1..20: mol_type = other DNA
gaagagagaggggaatccag

SEQ ID NO: 272451 - DNA, 20 bp, synthetic construct
  source 1..20: mol_type = other DNA
agaagagagaggggaatcca

SEQ ID NO: 272452 - DNA, 20 bp, synthetic construct
  source 1..20: mol_type = other DNA
aagaagagagaggggaatcc

SEQ ID NO: 272453 - DNA, 20 bp, synthetic construct
  source 1..20: mol_type = other DNA
taagaagagagaggggaatc

SEQ ID NO: 272454 - DNA, 20 bp, synthetic construct
  source 1..20: mol_type = other DNA
ttaagaagagagaggggaat

SEQ ID NO: 272455 - DNA, 20 bp, synthetic construct
  source 1..20: mol_type = other DNA
tttaagaagagagaggggaa

SEQ ID NO: 272456 - DNA, 20 bp, synthetic construct
  source 1..20: mol_type = other DNA
ctttaagaagagagagggga

SEQ ID NO: 272457 - DNA, 20 bp, synthetic construct
  source 1..20: mol_type = other DNA
gctttaagaagagagagggg

SEQ ID NO: 272458 - DNA, 20 bp, synthetic construct
  source 1..20: mol_type = other DNA
ggctttaagaagagagaggg

SEQ ID NO: 272459 - DNA, 20 bp, synthetic construct
  source 1..20: mol_type = other DNA
gggctttaagaagagagagg

SEQ ID NO: 272460 - DNA, 20 bp, synthetic construct
  source 1..20: mol_type = other DNA
ggggctttaagaagagagag

SEQ ID NO: 272461 - DNA, 20 bp, synthetic construct
  source 1..20: mol_type = other DNA
aggggctttaagaagagaga

SEQ ID NO: 272462 - DNA, 20 bp, synthetic construct
  source 1..20: mol_type = other DNA
caggggctttaagaagagag

SEQ ID NO: 272463 - DNA, 20 bp, synthetic construct
  source 1..20: mol_type = other DNA
acaggggctttaagaagaga

SEQ ID NO: 272464 - DNA, 20 bp, synthetic construct
  source 1..20: mol_type = other DNA
tacaggggctttaagaagag

SEQ ID NO: 272465 - DNA, 20 bp, synthetic construct
  source 1..20: mol_type = other DNA
ttacaggggctttaagaaga

SEQ ID NO: 272466 - DNA, 20 bp, synthetic construct
  source 1..20: mol_type = other DNA
tttacaggggctttaagaag

SEQ ID NO: 272467 - DNA, 20 bp, synthetic construct
  source 1..20: mol_type = other DNA
gtttacaggggctttaagaa

SEQ ID NO: 272468 - DNA, 20 bp, synthetic construct
  source 1..20: mol_type = other DNA
agtttacaggggctttaaga

SEQ ID NO: 272469 - DNA, 20 bp, synthetic construct
  source 1..20: mol_type = other DNA
gagtttacaggggctttaag

SEQ ID NO: 272470 - DNA, 20 bp, synthetic construct
  source 1..20: mol_type = other DNA
agagtttacaggggctttaa

SEQ ID NO: 272471 - DNA, 20 bp, synthetic construct
  source 1..20: mol_type = other DNA
cagagtttacaggggcttta

SEQ ID NO: 272472 - DNA, 20 bp, synthetic construct
  source 1..20: mol_type = other DNA
tcagagtttacaggggcttt

SEQ ID NO: 272473 - DNA, 20 bp, synthetic construct
  source 1..20: mol_type = other DNA
gtcagagtttacaggggctt

SEQ ID NO: 272474 - DNA, 20 bp, synthetic construct
  source 1..20: mol_type = other DNA
ggtcagagtttacaggggct

SEQ ID NO: 272475 - DNA, 20 bp, synthetic construct
  source 1..20: mol_type = other DNA
tggtcagagtttacaggggc

SEQ ID NO: 272476 - DNA, 20 bp, synthetic construct
  source 1..20: mol_type = other DNA
gtggtcagagtttacagggg

SEQ ID NO: 272477 - DNA, 20 bp, synthetic construct
  source 1..20: mol_type = other DNA
tgtggtcagagtttacaggg

SEQ ID NO: 272478 - DNA, 20 bp, synthetic construct
  source 1..20: mol_type = other DNA
gtgtggtcagagtttacagg

SEQ ID NO: 272479 - DNA, 20 bp, synthetic construct
  source 1..20: mol_type = other DNA
agtgtggtcagagtttacag

SEQ ID NO: 272480 - DNA, 20 bp, synthetic construct
  source 1..20: mol_type = other DNA
cagtgtggtcagagtttaca

SEQ ID NO: 272481 - DNA, 20 bp, synthetic construct
  source 1..20: mol_type = other DNA
tcagtgtggtcagagtttac

SEQ ID NO: 272482 - DNA, 20 bp, synthetic construct
  source 1..20: mol_type = other DNA
ctcagtgtggtcagagttta

SEQ ID NO: 272483 - DNA, 20 bp, synthetic construct
  source 1..20: mol_type = other DNA
gctcagtgtggtcagagttt

SEQ ID NO: 272484 - DNA, 20 bp, synthetic construct
  source 1..20: mol_type = other DNA
tgctcagtgtggtcagagtt

SEQ ID NO: 272485 - DNA, 20 bp, synthetic construct
  source 1..20: mol_type = other DNA
atgctcagtgtggtcagagt

SEQ ID NO: 272486 - DNA, 20 bp, synthetic construct
  source 1..20: mol_type = other DNA
catgctcagtgtggtcagag

SEQ ID NO: 272487 - DNA, 20 bp, synthetic construct
  source 1..20: mol_type = other DNA
acatgctcagtgtggtcaga

SEQ ID NO: 272488 - DNA, 20 bp, synthetic construct
  source 1..20: mol_type = other DNA
cacatgctcagtgtggtcag

SEQ ID NO: 272489 - DNA, 20 bp, synthetic construct
  source 1..20: mol_type = other DNA
acacatgctcagtgtggtca

SEQ ID NO: 272490 - DNA, 20 bp, synthetic construct
  source 1..20: mol_type = other DNA
gacacatgctcagtgtggtc

SEQ ID NO: 272491 - DNA, 20 bp, synthetic construct
  source 1..20: mol_type = other DNA
agacacatgctcagtgtggt

SEQ ID NO: 272492 - DNA, 20 bp, synthetic construct
  source 1..20: mol_type = other DNA
cagacacatgctcagtgtgg

SEQ ID NO: 272493 - DNA, 20 bp, synthetic construct
  source 1..20: mol_type = other DNA
gcagacacatgctcagtgtg

SEQ ID NO: 272494 - DNA, 20 bp, synthetic construct
  source 1..20: mol_type = other DNA
agcagacacatgctcagtgt

SEQ ID NO: 272495 - DNA, 20 bp, synthetic construct
  source 1..20: mol_type = other DNA
cagcagacacatgctcagtg

SEQ ID NO: 272496 - DNA, 20 bp, synthetic construct
  source 1..20: mol_type = other DNA
gcagcagacacatgctcagt

SEQ ID NO: 272497 - DNA, 20 bp, synthetic construct
  source 1..20: mol_type = other DNA
agcagcagacacatgctcag

SEQ ID NO: 272498 - DNA, 20 bp, synthetic construct
  source 1..20: mol_type = other DNA
gagcagcagacacatgctca

SEQ ID NO: 272499 - DNA, 20 bp, synthetic construct
  source 1..20: mol_type = other DNA
ggagcagcagacacatgctc

SEQ ID NO: 272500 - DNA, 20 bp, synthetic construct
  source 1..20: mol_type = other DNA
gggagcagcagacacatgct

SEQ ID NO: 272501 - DNA, 20 bp, synthetic construct
  source 1..20: mol_type = other DNA
agggagcagcagacacatgc

SEQ ID NO: 272502 - DNA, 20 bp, synthetic construct
  source 1..20: mol_type = other DNA
tagggagcagcagacacatg

SEQ ID NO: 272503 - DNA, 20 bp, synthetic construct
  source 1..20: mol_type = other DNA
ctagggagcagcagacacat

SEQ ID NO: 272504 - DNA, 20 bp, synthetic construct
  source 1..20: mol_type = other DNA
actagggagcagcagacaca

SEQ ID NO: 272505 - DNA, 20 bp, synthetic construct
  source 1..20: mol_type = other DNA
gactagggagcagcagacac

SEQ ID NO: 272506 - DNA, 20 bp, synthetic construct
  source 1..20: mol_type = other DNA
agactagggagcagcagaca

SEQ ID NO: 272507 - DNA, 20 bp, synthetic construct
  source 1..20: mol_type = other DNA
cagactagggagcagcagac

SEQ ID NO: 272508 - DNA, 20 bp, synthetic construct
  source 1..20: mol_type = other DNA
ccagactagggagcagcaga

SEQ ID NO: 272509 - DNA, 20 bp, synthetic construct
  source 1..20: mol_type = other DNA
cccagactagggagcagcag

SEQ ID NO: 272510 - DNA, 20 bp, synthetic construct
  source 1..20: mol_type = other DNA
gcccagactagggagcagca

SEQ ID NO: 272511 - DNA, 20 bp, synthetic construct
  source 1..20: mol_type = other DNA
ggcccagactagggagcagc

SEQ ID NO: 272512 - DNA, 20 bp, synthetic construct
  source 1..20: mol_type = other DNA
tggcccagactagggagcag

SEQ ID NO: 272513 - DNA, 20 bp, synthetic construct
  source 1..20: mol_type = other DNA
atggcccagactagggagca

SEQ ID NO: 272514 - DNA, 20 bp, synthetic construct
  source 1..20: mol_type = other DNA
catggcccagactagggagc

SEQ ID NO: 272515 - DNA, 20 bp, synthetic construct
  source 1..20: mol_type = other DNA
tcatggcccagactagggag

SEQ ID NO: 272516 - DNA, 20 bp, synthetic construct
  source 1..20: mol_type = other DNA
ctcatggcccagactaggga

SEQ ID NO: 272517 - DNA, 20 bp, synthetic construct
  source 1..20: mol_type = other DNA
actcatggcccagactaggg

SEQ ID NO: 272518 - DNA, 20 bp, synthetic construct
  source 1..20: mol_type = other DNA
cactcatggcccagactagg

SEQ ID NO: 272519 - DNA, 20 bp, synthetic construct
  source 1..20: mol_type = other DNA
tcactcatggcccagactag

SEQ ID NO: 272520 - DNA, 20 bp, synthetic construct
  source 1..20: mol_type = other DNA
ctcactcatggcccagacta

SEQ ID NO: 272521 - DNA, 20 bp, synthetic construct
  source 1..20: mol_type = other DNA
cctcactcatggcccagact

SEQ ID NO: 272522 - DNA, 20 bp, synthetic construct
  source 1..20: mol_type = other DNA
ccctcactcatggcccagac

SEQ ID NO: 272523 - DNA, 20 bp, synthetic construct
  source 1..20: mol_type = other DNA
accctcactcatggcccaga

SEQ ID NO: 272524 - DNA, 20 bp, synthetic construct
  source 1..20: mol_type = other DNA
caccctcactcatggcccag

SEQ ID NO: 272525 - DNA, 20 bp, synthetic construct
  source 1..20: mol_type = other DNA
ccaccctcactcatggccca

SEQ ID NO: 272526 - DNA, 20 bp, synthetic construct
  source 1..20: mol_type = other DNA
tccaccctcactcatggccc

SEQ ID NO: 272527 - DNA, 20 bp, synthetic construct
  source 1..20: mol_type = other DNA
ctccaccctcactcatggcc

SEQ ID NO: 272528 - DNA, 20 bp, synthetic construct
  source 1..20: mol_type = other DNA
cctccaccctcactcatggc

SEQ ID NO: 272529 - DNA, 20 bp, synthetic construct
  source 1..20: mol_type = other DNA
gcctccaccctcactcatgg

SEQ ID NO: 272530 - DNA, 20 bp, synthetic construct
  source 1..20: mol_type = other DNA
ggcctccaccctcactcatg

SEQ ID NO: 272531 - DNA, 20 bp, synthetic construct
  source 1..20: mol_type = other DNA
tggcctccaccctcactcat

SEQ ID NO: 272532 - DNA, 20 bp, synthetic construct
  source 1..20: mol_type = other DNA
ttggcctccaccctcactca

SEQ ID NO: 272533 - DNA, 20 bp, synthetic construct
  source 1..20: mol_type = other DNA
cttggcctccaccctcactc

SEQ ID NO: 272534 - DNA, 20 bp, synthetic construct
  source 1..20: mol_type = other DNA
acttggcctccaccctcact

SEQ ID NO: 272535 - DNA, 20 bp, synthetic construct
  source 1..20: mol_type = other DNA
gacttggcctccaccctcac

SEQ ID NO: 272536 - DNA, 20 bp, synthetic construct
  source 1..20: mol_type = other DNA
agacttggcctccaccctca

SEQ ID NO: 272537 - DNA, 20 bp, synthetic construct
  source 1..20: mol_type = other DNA
gagacttggcctccaccctc

SEQ ID NO: 272538 - DNA, 20 bp, synthetic construct
  source 1..20: mol_type = other DNA
tgagacttggcctccaccct

SEQ ID NO: 272539 - DNA, 20 bp, synthetic construct
  source 1..20: mol_type = other DNA
atgagacttggcctccaccc

SEQ ID NO: 272540 - DNA, 20 bp, synthetic construct
  source 1..20: mol_type = other DNA
catgagacttggcctccacc

SEQ ID NO: 272541 - DNA, 20 bp, synthetic construct
  source 1..20: mol_type = other DNA
gcatgagacttggcctccac

SEQ ID NO: 272542 - DNA, 20 bp, synthetic construct
  source 1..20: mol_type = other DNA
tgcatgagacttggcctcca

SEQ ID NO: 272543 - DNA, 20 bp, synthetic construct
  source 1..20: mol_type = other DNA
atgcatgagacttggcctcc

SEQ ID NO: 272544 - DNA, 20 bp, synthetic construct
  source 1..20: mol_type = other DNA
aatgcatgagacttggcctc

SEQ ID NO: 272545 - DNA, 20 bp, synthetic construct
  source 1..20: mol_type = other DNA
aaatgcatgagacttggcct

SEQ ID NO: 272546 - DNA, 20 bp, synthetic construct
  source 1..20: mol_type = other DNA
aaaatgcatgagacttggcc

SEQ ID NO: 272547 - DNA, 20 bp, synthetic construct
  source 1..20: mol_type = other DNA
aaaaatgcatgagacttggc

SEQ ID NO: 272548 - DNA, 20 bp, synthetic construct
  source 1..20: mol_type = other DNA
caaaaatgcatgagacttgg

SEQ ID NO: 272549 - DNA, 20 bp, synthetic construct
  source 1..20: mol_type = other DNA
gcaaaaatgcatgagacttg

SEQ ID NO: 272550 - DNA, 20 bp, synthetic construct
  source 1..20: mol_type = other DNA
tgcaaaaatgcatgagactt

SEQ ID NO: 272551 - DNA, 20 bp, synthetic construct
  source 1..20: mol_type = other DNA
ctgcaaaaatgcatgagact

SEQ ID NO: 272552 - DNA, 20 bp, synthetic construct
  source 1..20: mol_type = other DNA
gctgcaaaaatgcatgagac

SEQ ID NO: 272553 - DNA, 20 bp, synthetic construct
  source 1..20: mol_type = other DNA
ggctgcaaaaatgcatgaga

SEQ ID NO: 272554 - DNA, 20 bp, synthetic construct
  source 1..20: mol_type = other DNA
gggctgcaaaaatgcatgag

SEQ ID NO: 272555 - DNA, 20 bp, synthetic construct
  source 1..20: mol_type = other DNA
ggggctgcaaaaatgcatga

SEQ ID NO: 272556 - DNA, 20 bp, synthetic construct
  source 1..20: mol_type = other DNA
gggggctgcaaaaatgcatg

SEQ ID NO: 272557 - DNA, 20 bp, synthetic construct
  source 1..20: mol_type = other DNA
tgggggctgcaaaaatgcat

SEQ ID NO: 272558 - DNA, 20 bp, synthetic construct
  source 1..20: mol_type = other DNA
gtgggggctgcaaaaatgca

SEQ ID NO: 272559 - DNA, 20 bp, synthetic construct
  source 1..20: mol_type = other DNA
tgtgggggctgcaaaaatgc

SEQ ID NO: 272560 - DNA, 20 bp, synthetic construct
  source 1..20: mol_type = other DNA
ttgtgggggctgcaaaaatg

SEQ ID NO: 272561 - DNA, 20 bp, synthetic construct
  source 1..20: mol_type = other DNA
cttgtgggggctgcaaaaat

SEQ ID NO: 272562 - DNA, 20 bp, synthetic construct
  source 1..20: mol_type = other DNA
tcttgtgggggctgcaaaaa

SEQ ID NO: 272563 - DNA, 20 bp, synthetic construct
  source 1..20: mol_type = other DNA
gtcttgtgggggctgcaaaa

SEQ ID NO: 272564 - DNA, 20 bp, synthetic construct
  source 1..20: mol_type = other DNA
agtcttgtgggggctgcaaa

SEQ ID NO: 272565 - DNA, 20 bp, synthetic construct
  source 1..20: mol_type = other DNA
cagtcttgtgggggctgcaa

SEQ ID NO: 272566 - DNA, 20 bp, synthetic construct
  source 1..20: mol_type = other DNA
acagtcttgtgggggctgca

SEQ ID NO: 272567 - DNA, 20 bp, synthetic construct
  source 1..20: mol_type = other DNA
cacagtcttgtgggggctgc

SEQ ID NO: 272568 - DNA, 20 bp, synthetic construct
  source 1..20: mol_type = other DNA
gcacagtcttgtgggggctg

SEQ ID NO: 272569 - DNA, 20 bp, synthetic construct
  source 1..20: mol_type = other DNA
tgcacagtcttgtgggggct

SEQ ID NO: 272570 - DNA, 20 bp, synthetic construct
  source 1..20: mol_type = other DNA
ctgcacagtcttgtgggggc

SEQ ID NO: 272571 - DNA, 20 bp, synthetic construct
  source 1..20: mol_type = other DNA
cctgcacagtcttgtggggg

SEQ ID NO: 272572 - DNA, 20 bp, synthetic construct
  source 1..20: mol_type = other DNA
acctgcacagtcttgtgggg

SEQ ID NO: 272573 - DNA, 20 bp, synthetic construct
  source 1..20: mol_type = other DNA
cacctgcacagtcttgtggg

SEQ ID NO: 272574 - DNA, 20 bp, synthetic construct
  source 1..20: mol_type = other DNA
ccacctgcacagtcttgtgg

SEQ ID NO: 272575 - DNA, 20 bp, synthetic construct
  source 1..20: mol_type = other DNA
gccacctgcacagtcttgtg

SEQ ID NO: 272576 - DNA, 20 bp, synthetic construct
  source 1..20: mol_type = other DNA
ggccacctgcacagtcttgt

SEQ ID NO: 272577 - DNA, 20 bp, synthetic construct
  source 1..20: mol_type = other DNA
cggccacctgcacagtcttg

SEQ ID NO: 272578 - DNA, 20 bp, synthetic construct
  source 1..20: mol_type = other DNA
ccggccacctgcacagtctt

SEQ ID NO: 272579 - DNA, 20 bp, synthetic construct
  source 1..20: mol_type = other DNA
gccggccacctgcacagtct

SEQ ID NO: 272580 - DNA, 20 bp, synthetic construct
  source 1..20: mol_type = other DNA
ggccggccacctgcacagtc

SEQ ID NO: 272581 - DNA, 20 bp, synthetic construct
  source 1..20: mol_type = other DNA
gggccggccacctgcacagt

SEQ ID NO: 272582 - DNA, 20 bp, synthetic construct
  source 1..20: mol_type = other DNA
agggccggccacctgcacag

SEQ ID NO: 272583 - DNA, 20 bp, synthetic construct
  source 1..20: mol_type = other DNA
gagggccggccacctgcaca

SEQ ID NO: 272584 - DNA, 20 bp, synthetic construct
  source 1..20: mol_type = other DNA
tgagggccggccacctgcac

SEQ ID NO: 272585 - DNA, 20 bp, synthetic construct
  source 1..20: mol_type = other DNA
atgagggccggccacctgca

SEQ ID NO: 272586 - DNA, 20 bp, synthetic construct
  source 1..20: mol_type = other DNA
aatgagggccggccacctgc

SEQ ID NO: 272587 - DNA, 20 bp, synthetic construct
  source 1..20: mol_type = other DNA
caatgagggccggccacctg

SEQ ID NO: 272588 - DNA, 20 bp, synthetic construct
  source 1..20: mol_type = other DNA
tcaatgagggccggccacct

SEQ ID NO: 272589 - DNA, 20 bp, synthetic construct
  source 1..20: mol_type = other DNA
ttcaatgagggccggccacc

SEQ ID NO: 272590 - DNA, 20 bp, synthetic construct
  source 1..20: mol_type = other DNA
attcaatgagggccggccac

SEQ ID NO: 272591 - DNA, 20 bp, synthetic construct
  source 1..20: mol_type = other DNA
cattcaatgagggccggcca

SEQ ID NO: 272592 - DNA, 20 bp, synthetic construct
  source 1..20: mol_type = other DNA
gcattcaatgagggccggcc

SEQ ID NO: 272593 - DNA, 20 bp, synthetic construct
  source 1..20: mol_type = other DNA
cgcattcaatgagggccggc

SEQ ID NO: 272594 - DNA, 20 bp, synthetic construct
  source 1..20: mol_type = other DNA
ccgcattcaatgagggccgg

SEQ ID NO: 272595 - DNA, 20 bp, synthetic construct
  source 1..20: mol_type = other DNA
cccgcattcaatgagggccg

SEQ ID NO: 272596 - DNA, 20 bp, synthetic construct
  source 1..20: mol_type = other DNA
ccccgcattcaatgagggcc

SEQ ID NO: 272597 - DNA, 20 bp, synthetic construct
  source 1..20: mol_type = other DNA
accccgcattcaatgagggc

SEQ ID NO: 272598 - DNA, 20 bp, synthetic construct
  source 1..20: mol_type = other DNA
aaccccgcattcaatgaggg

SEQ ID NO: 272599 - DNA, 20 bp, synthetic construct
  source 1..20: mol_type = other DNA
taaccccgcattcaatgagg

SEQ ID NO: 272600 - DNA, 20 bp, synthetic construct
  source 1..20: mol_type = other DNA
ttaaccccgcattcaatgag

SEQ ID NO: 272601 - DNA, 20 bp, synthetic construct
  source 1..20: mol_type = other DNA
attaaccccgcattcaatga

SEQ ID NO: 272602 - DNA, 20 bp, synthetic construct
  source 1..20: mol_type = other DNA
aattaaccccgcattcaatg

SEQ ID NO: 272603 - DNA, 20 bp, synthetic construct
  source 1..20: mol_type = other DNA
aaattaaccccgcattcaat

SEQ ID NO: 272604 - DNA, 20 bp, synthetic construct
  source 1..20: mol_type = other DNA
taaattaaccccgcattcaa

SEQ ID NO: 272605 - DNA, 20 bp, synthetic construct
  source 1..20: mol_type = other DNA
ttaaattaaccccgcattca

SEQ ID NO: 272606 - DNA, 20 bp, synthetic construct
  source 1..20: mol_type = other DNA
gttaaattaaccccgcattc

SEQ ID NO: 272607 - DNA, 20 bp, synthetic construct
  source 1..20: mol_type = other DNA
agttaaattaaccccgcatt

SEQ ID NO: 272608 - DNA, 20 bp, synthetic construct
  source 1..20: mol_type = other DNA
gagttaaattaaccccgcat

SEQ ID NO: 272609 - DNA, 20 bp, synthetic construct
  source 1..20: mol_type = other DNA
tgagttaaattaaccccgca

SEQ ID NO: 272610 - DNA, 20 bp, synthetic construct
  source 1..20: mol_type = other DNA
ctgagttaaattaaccccgc

SEQ ID NO: 272611 - DNA, 20 bp, synthetic construct
  source 1..20: mol_type = other DNA
gctgagttaaattaaccccg

SEQ ID NO: 272612 - DNA, 20 bp, synthetic construct
  source 1..20: mol_type = other DNA
ggctgagttaaattaacccc

SEQ ID NO: 272613 - DNA, 20 bp, synthetic construct
  source 1..20: mol_type = other DNA
aggctgagttaaattaaccc

SEQ ID NO: 272614 - DNA, 20 bp, synthetic construct
  source 1..20: mol_type = other DNA
gaggctgagttaaattaacc

SEQ ID NO: 272615 - DNA, 20 bp, synthetic construct
  source 1..20: mol_type = other DNA
agaggctgagttaaattaac

SEQ ID NO: 272616 - DNA, 20 bp, synthetic construct
  source 1..20: mol_type = other DNA
cagaggctgagttaaattaa

SEQ ID NO: 272617 - DNA, 20 bp, synthetic construct
  source 1..20: mol_type = other DNA
acagaggctgagttaaatta

SEQ ID NO: 272618 - DNA, 20 bp, synthetic construct
  source 1..20: mol_type = other DNA
cacagaggctgagttaaatt

SEQ ID NO: 272619 - DNA, 20 bp, synthetic construct
  source 1..20: mol_type = other DNA
acacagaggctgagttaaat

SEQ ID NO: 272620 - DNA, 20 bp, synthetic construct
  source 1..20: mol_type = other DNA
cacacagaggctgagttaaa

SEQ ID NO: 272621 - DNA, 20 bp, synthetic construct
  source 1..20: mol_type = other DNA
tcacacagaggctgagttaa

SEQ ID NO: 272622 - DNA, 20 bp, synthetic construct
  source 1..20: mol_type = other DNA
ctcacacagaggctgagtta

SEQ ID NO: 272623 - DNA, 20 bp, synthetic construct
  source 1..20: mol_type = other DNA
actcacacagaggctgagtt

SEQ ID NO: 272624 - DNA, 20 bp, synthetic construct
  source 1..20: mol_type = other DNA
cactcacacagaggctgagt

SEQ ID NO: 272625 - DNA, 20 bp, synthetic construct
  source 1..20: mol_type = other DNA
ccactcacacagaggctgag

SEQ ID NO: 272626 - DNA, 20 bp, synthetic construct
  source 1..20: mol_type = other DNA
tccactcacacagaggctga

SEQ ID NO: 272627 - DNA, 20 bp, synthetic construct
  source 1..20: mol_type = other DNA
atccactcacacagaggctg

SEQ ID NO: 272628 - DNA, 20 bp, synthetic construct
  source 1..20: mol_type = other DNA
catccactcacacagaggct

SEQ ID NO: 272629 - DNA, 20 bp, synthetic construct
  source 1..20: mol_type = other DNA
tcatccactcacacagaggc

SEQ ID NO: 272630 - DNA, 20 bp, synthetic construct
  source 1..20: mol_type = other DNA
atcatccactcacacagagg

SEQ ID NO: 272631 - DNA, 20 bp, synthetic construct
  source 1..20: mol_type = other DNA
aatcatccactcacacagag

SEQ ID NO: 272632 - DNA, 20 bp, synthetic construct
  source 1..20: mol_type = other DNA
gaatcatccactcacacaga

SEQ ID NO: 272633 - DNA, 20 bp, synthetic construct
  source 1..20: mol_type = other DNA
tgaatcatccactcacacag

SEQ ID NO: 272634 - DNA, 20 bp, synthetic construct
  source 1..20: mol_type = other DNA
ctgaatcatccactcacaca

SEQ ID NO: 272635 - DNA, 20 bp, synthetic construct
  source 1..20: mol_type = other DNA
cctgaatcatccactcacac

SEQ ID NO: 272636 - DNA, 20 bp, synthetic construct
  source 1..20: mol_type = other DNA
acctgaatcatccactcaca

SEQ ID NO: 272637 - DNA, 20 bp, synthetic construct
  source 1..20: mol_type = other DNA
aacctgaatcatccactcac

SEQ ID NO: 272638 - DNA, 20 bp, synthetic construct
  source 1..20: mol_type = other DNA
caacctgaatcatccactca

SEQ ID NO: 272639 - DNA, 20 bp, synthetic construct
  source 1..20: mol_type = other DNA
gcaacctgaatcatccactc

SEQ ID NO: 272640 - DNA, 20 bp, synthetic construct
  source 1..20: mol_type = other DNA
ggcaacctgaatcatccact

SEQ ID NO: 272641 - DNA, 20 bp, synthetic construct
  source 1..20: mol_type = other DNA
tggcaacctgaatcatccac

SEQ ID NO: 272642 - DNA, 20 bp, synthetic construct
  source 1..20: mol_type = other DNA
ctggcaacctgaatcatcca

SEQ ID NO: 272643 - DNA, 20 bp, synthetic construct
  source 1..20: mol_type = other DNA
tctggcaacctgaatcatcc

SEQ ID NO: 272644 - DNA, 20 bp, synthetic construct
  source 1..20: mol_type = other DNA
ctctggcaacctgaatcatc

SEQ ID NO: 272645 - DNA, 20 bp, synthetic construct
  source 1..20: mol_type = other DNA
tctctggcaacctgaatcat

SEQ ID NO: 272646 - DNA, 20 bp, synthetic construct
  source 1..20: mol_type = other DNA
gtctctggcaacctgaatca

SEQ ID NO: 272647 - DNA, 20 bp, synthetic construct
  source 1..20: mol_type = other DNA
tgtctctggcaacctgaatc

SEQ ID NO: 272648 - DNA, 20 bp, synthetic construct
  source 1..20: mol_type = other DNA
ctgtctctggcaacctgaat

SEQ ID NO: 272649 - DNA, 20 bp, synthetic construct
  source 1..20: mol_type = other DNA
tctgtctctggcaacctgaa

SEQ ID NO: 272650 - DNA, 20 bp, synthetic construct
  source 1..20: mol_type = other DNA
ttctgtctctggcaacctga

SEQ ID NO: 272651 - DNA, 20 bp, synthetic construct
  source 1..20: mol_type = other DNA
gttctgtctctggcaacctg

SEQ ID NO: 272652 - DNA, 20 bp, synthetic construct
  source 1..20: mol_type = other DNA
ggttctgtctctggcaacct

SEQ ID NO: 272653 - DNA, 20 bp, synthetic construct
  source 1..20: mol_type = other DNA
gggttctgtctctggcaacc

SEQ ID NO: 272654 - DNA, 20 bp, synthetic construct
  source 1..20: mol_type = other DNA
agggttctgtctctggcaac

SEQ ID NO: 272655 - DNA, 20 bp, synthetic construct
  source 1..20: mol_type = other DNA
gagggttctgtctctggcaa

SEQ ID NO: 272656 - DNA, 20 bp, synthetic construct
  source 1..20: mol_type = other DNA
tgagggttctgtctctggca

SEQ ID NO: 272657 - DNA, 20 bp, synthetic construct
  source 1..20: mol_type = other DNA
ctgagggttctgtctctggc

SEQ ID NO: 272658 - DNA, 20 bp, synthetic construct
  source 1..20: mol_type = other DNA
gctgagggttctgtctctgg

SEQ ID NO: 272659 - DNA, 20 bp, synthetic construct
  source 1..20: mol_type = other DNA
agctgagggttctgtctctg

SEQ ID NO: 272660 - DNA, 20 bp, synthetic construct
  source 1..20: mol_type = other DNA
aagctgagggttctgtctct

SEQ ID NO: 272661 - DNA, 20 bp, synthetic construct
  source 1..20: mol_type = other DNA
taagctgagggttctgtctc

SEQ ID NO: 272662 - DNA, 20 bp, synthetic construct
  source 1..20: mol_type = other DNA
ctaagctgagggttctgtct

SEQ ID NO: 272663 - DNA, 20 bp, synthetic construct
  source 1..20: mol_type = other DNA
gctaagctgagggttctgtc

SEQ ID NO: 272664 - DNA, 20 bp, synthetic construct
  source 1..20: mol_type = other DNA
tgctaagctgagggttctgt

SEQ ID NO: 272665 - DNA, 20 bp, synthetic construct
  source 1..20: mol_type = other DNA
atgctaagctgagggttctg

SEQ ID NO: 272666 - DNA, 20 bp, synthetic construct
  source 1..20: mol_type = other DNA
catgctaagctgagggttct

SEQ ID NO: 272667 - DNA, 20 bp, synthetic construct
  source 1..20: mol_type = other DNA
ccatgctaagctgagggttc

SEQ ID NO: 272668 - DNA, 20 bp, synthetic construct
  source 1..20: mol_type = other DNA
cccatgctaagctgagggtt

SEQ ID NO: 272669 - DNA, 20 bp, synthetic construct
  source 1..20: mol_type = other DNA
tcccatgctaagctgagggt

SEQ ID NO: 272670 - DNA, 20 bp, synthetic construct
  source 1..20: mol_type = other DNA
ttcccatgctaagctgaggg

SEQ ID NO: 272671 - DNA, 20 bp, synthetic construct
  source 1..20: mol_type = other DNA
cttcccatgctaagctgagg

SEQ ID NO: 272672 - DNA, 20 bp, synthetic construct
  source 1..20: mol_type = other DNA
acttcccatgctaagctgag

SEQ ID NO: 272673 - DNA, 20 bp, synthetic construct
  source 1..20: mol_type = other DNA
tacttcccatgctaagctga

SEQ ID NO: 272674 - DNA, 20 bp, synthetic construct
  source 1..20: mol_type = other DNA
ctacttcccatgctaagctg

SEQ ID NO: 272675 - DNA, 20 bp, synthetic construct
  source 1..20: mol_type = other DNA
gctacttcccatgctaagct

SEQ ID NO: 272676 - DNA, 20 bp, synthetic construct
  source 1..20: mol_type = other DNA
agctacttcccatgctaagc

SEQ ID NO: 272677 - DNA, 20 bp, synthetic construct
  source 1..20: mol_type = other DNA
aagctacttcccatgctaag

SEQ ID NO: 272678 - DNA, 20 bp, synthetic construct
  source 1..20: mol_type = other DNA
gaagctacttcccatgctaa

SEQ ID NO: 272679 - DNA, 20 bp, synthetic construct
  source 1..20: mol_type = other DNA
ggaagctacttcccatgcta

SEQ ID NO: 272680 - DNA, 20 bp, synthetic construct
  source 1..20: mol_type = other DNA
gggaagctacttcccatgct

SEQ ID NO: 272681 - DNA, 20 bp, synthetic construct
  source 1..20: mol_type = other DNA
agggaagctacttcccatgc

SEQ ID NO: 272682 - DNA, 20 bp, synthetic construct
  source 1..20: mol_type = other DNA
cagggaagctacttcccatg

SEQ ID NO: 272683 - DNA, 20 bp, synthetic construct
  source 1..20: mol_type = other DNA
acagggaagctacttcccat

SEQ ID NO: 272684 - DNA, 20 bp, synthetic construct
  source 1..20: mol_type = other DNA
aacagggaagctacttccca

SEQ ID NO: 272685 - DNA, 20 bp, synthetic construct
  source 1..20: mol_type = other DNA
caacagggaagctacttccc

SEQ ID NO: 272686 - DNA, 20 bp, synthetic construct
  source 1..20: mol_type = other DNA
tcaacagggaagctacttcc

SEQ ID NO: 272687 - DNA, 20 bp, synthetic construct
  source 1..20: mol_type = other DNA
gtcaacagggaagctacttc

SEQ ID NO: 272688 - DNA, 20 bp, synthetic construct
  source 1..20: mol_type = other DNA
ggtcaacagggaagctactt

SEQ ID NO: 272689 - DNA, 20 bp, synthetic construct
  source 1..20: mol_type = other DNA
gggtcaacagggaagctact

SEQ ID NO: 272690 - DNA, 20 bp, synthetic construct
  source 1..20: mol_type = other DNA
agggtcaacagggaagctac

SEQ ID NO: 272691 - DNA, 20 bp, synthetic construct
  source 1..20: mol_type = other DNA
cagggtcaacagggaagcta

SEQ ID NO: 272692 - DNA, 20 bp, synthetic construct
  source 1..20: mol_type = other DNA
tcagggtcaacagggaagct

SEQ ID NO: 272693 - DNA, 20 bp, synthetic construct
  source 1..20: mol_type = other DNA
ctcagggtcaacagggaagc

SEQ ID NO: 272694 - DNA, 20 bp, synthetic construct
  source 1..20: mol_type = other DNA
actcagggtcaacagggaag

SEQ ID NO: 272695 - DNA, 20 bp, synthetic construct
  source 1..20: mol_type = other DNA
aactcagggtcaacagggaa

SEQ ID NO: 272696 - DNA, 20 bp, synthetic construct
  source 1..20: mol_type = other DNA
gaactcagggtcaacaggga

SEQ ID NO: 272697 - DNA, 20 bp, synthetic construct
  source 1..20: mol_type = other DNA
tgaactcagggtcaacaggg

SEQ ID NO: 272698 - DNA, 20 bp, synthetic construct
  source 1..20: mol_type = other DNA
atgaactcagggtcaacagg

SEQ ID NO: 272699 - DNA, 20 bp, synthetic construct
  source 1..20: mol_type = other DNA
gatgaactcagggtcaacag

SEQ ID NO: 272700 - DNA, 20 bp, synthetic construct
  source 1..20: mol_type = other DNA
agatgaactcagggtcaaca

SEQ ID NO: 272701 - DNA, 20 bp, synthetic construct
  source 1..20: mol_type = other DNA
cagatgaactcagggtcaac

SEQ ID NO: 272702 - DNA, 20 bp, synthetic construct
  source 1..20: mol_type = other DNA
tcagatgaactcagggtcaa

SEQ ID NO: 272703 - DNA, 20 bp, synthetic construct
  source 1..20: mol_type = other DNA
ctcagatgaactcagggtca

SEQ ID NO: 272704 - DNA, 20 bp, synthetic construct
  source 1..20: mol_type = other DNA
cctcagatgaactcagggtc

SEQ ID NO: 272705 - DNA, 20 bp, synthetic construct
  source 1..20: mol_type = other DNA
acctcagatgaactcagggt

SEQ ID NO: 272706 - DNA, 20 bp, synthetic construct
  source 1..20: mol_type = other DNA
aacctcagatgaactcaggg

SEQ ID NO: 272707 - DNA, 20 bp, synthetic construct
  source 1..20: mol_type = other DNA
caacctcagatgaactcagg

SEQ ID NO: 272708 - DNA, 20 bp, synthetic construct
  source 1..20: mol_type = other DNA
ccaacctcagatgaactcag

SEQ ID NO: 272709 - DNA, 20 bp, synthetic construct
  source 1..20: mol_type = other DNA
gccaacctcagatgaactca

SEQ ID NO: 272710 - DNA, 20 bp, synthetic construct
  source 1..20: mol_type = other DNA
agccaacctcagatgaactc

SEQ ID NO: 272711 - DNA, 20 bp, synthetic construct
  source 1..20: mol_type = other DNA
aagccaacctcagatgaact

SEQ ID NO: 272712 - DNA, 20 bp, synthetic construct
  source 1..20: mol_type = other DNA
caagccaacctcagatgaac

SEQ ID NO: 272713 - DNA, 20 bp, synthetic construct
  source 1..20: mol_type = other DNA
ccaagccaacctcagatgaa

SEQ ID NO: 272714 - DNA, 20 bp, synthetic construct
  source 1..20: mol_type = other DNA
tccaagccaacctcagatga

SEQ ID NO: 272715 - DNA, 20 bp, synthetic construct
  source 1..20: mol_type = other DNA
ttccaagccaacctcagatg

SEQ ID NO: 272716 - DNA, 20 bp, synthetic construct
  source 1..20: mol_type = other DNA
cttccaagccaacctcagat

SEQ ID NO: 272717 - DNA, 20 bp, synthetic construct
  source 1..20: mol_type = other DNA
ccttccaagccaacctcaga

SEQ ID NO: 272718 - DNA, 20 bp, synthetic construct
  source 1..20: mol_type = other DNA
accttccaagccaacctcag

SEQ ID NO: 272719 - DNA, 20 bp, synthetic construct
  source 1..20: mol_type = other DNA
caccttccaagccaacctca

SEQ ID NO: 272720 - DNA, 20 bp, synthetic construct
  source 1..20: mol_type = other DNA
acaccttccaagccaacctc

SEQ ID NO: 272721 - DNA, 20 bp, synthetic construct
  source 1..20: mol_type = other DNA
cacaccttccaagccaacct

SEQ ID NO: 272722 - DNA, 20 bp, synthetic construct
  source 1..20: mol_type = other DNA
ccacaccttccaagccaacc

SEQ ID NO: 272723 - DNA, 20 bp, synthetic construct
  source 1..20: mol_type = other DNA
cccacaccttccaagccaac

SEQ ID NO: 272724 - DNA, 20 bp, synthetic construct
  source 1..20: mol_type = other DNA
gcccacaccttccaagccaa

SEQ ID NO: 272725 - DNA, 20 bp, synthetic construct
  source 1..20: mol_type = other DNA
tgcccacaccttccaagcca

SEQ ID NO: 272726 - DNA, 20 bp, synthetic construct
  source 1..20: mol_type = other DNA
gtgcccacaccttccaagcc

SEQ ID NO: 272727 - DNA, 20 bp, synthetic construct
  source 1..20: mol_type = other DNA
ggtgcccacaccttccaagc

SEQ ID NO: 272728 - DNA, 20 bp, synthetic construct
  source 1..20: mol_type = other DNA
tggtgcccacaccttccaag

SEQ ID NO: 272729 - DNA, 20 bp, synthetic construct
  source 1..20: mol_type = other DNA
atggtgcccacaccttccaa

SEQ ID NO: 272730 - DNA, 20 bp, synthetic construct
  source 1..20: mol_type = other DNA
aatggtgcccacaccttcca

SEQ ID NO: 272731 - DNA, 20 bp, synthetic construct
  source 1..20: mol_type = other DNA
aaatggtgcccacaccttcc

SEQ ID NO: 272732 - DNA, 20 bp, synthetic construct
  source 1..20: mol_type = other DNA
caaatggtgcccacaccttc

SEQ ID NO: 272733 - DNA, 20 bp, synthetic construct
  source 1..20: mol_type = other DNA
ccaaatggtgcccacacctt

SEQ ID NO: 272734 - DNA, 20 bp, synthetic construct
  source 1..20: mol_type = other DNA
gccaaatggtgcccacacct

SEQ ID NO: 272735 - DNA, 20 bp, synthetic construct
  source 1..20: mol_type = other DNA
ggccaaatggtgcccacacc

SEQ ID NO: 272736 - DNA, 20 bp, synthetic construct
  source 1..20: mol_type = other DNA
gggccaaatggtgcccacac

SEQ ID NO: 272737 - DNA, 20 bp, synthetic construct
  source 1..20: mol_type = other DNA
tgggccaaatggtgcccaca

SEQ ID NO: 272738 - DNA, 20 bp, synthetic construct
  source 1..20: mol_type = other DNA
ctgggccaaatggtgcccac

SEQ ID NO: 272739 - DNA, 20 bp, synthetic construct
  source 1..20: mol_type = other DNA
actgggccaaatggtgccca

SEQ ID NO: 272740 - DNA, 20 bp, synthetic construct
  source 1..20: mol_type = other DNA
aactgggccaaatggtgccc

SEQ ID NO: 272741 - DNA, 20 bp, synthetic construct
  source 1..20: mol_type = other DNA
gaactgggccaaatggtgcc

SEQ ID NO: 272742 - DNA, 20 bp, synthetic construct
  source 1..20: mol_type = other DNA
agaactgggccaaatggtgc

SEQ ID NO: 272743 - DNA, 20 bp, synthetic construct
  source 1..20: mol_type = other DNA
aagaactgggccaaatggtg

SEQ ID NO: 272744 - DNA, 20 bp, synthetic construct
  source 1..20: mol_type = other DNA
taagaactgggccaaatggt

SEQ ID NO: 272745 - DNA, 20 bp, synthetic construct
  source 1..20: mol_type = other DNA
gtaagaactgggccaaatgg

SEQ ID NO: 272746 - DNA, 20 bp, synthetic construct
  source 1..20: mol_type = other DNA
tgtaagaactgggccaaatg

SEQ ID NO: 272747 - DNA, 20 bp, synthetic construct
  source 1..20: mol_type = other DNA
ctgtaagaactgggccaaat

SEQ ID NO: 272748 - DNA, 20 bp, synthetic construct
  source 1..20: mol_type = other DNA
gctgtaagaactgggccaaa

SEQ ID NO: 272749 - DNA, 20 bp, synthetic construct
  source 1..20: mol_type = other DNA
agctgtaagaactgggccaa

SEQ ID NO: 272750 - DNA, 20 bp, synthetic construct
  source 1..20: mol_type = other DNA
gagctgtaagaactgggcca

SEQ ID NO: 272751 - DNA, 20 bp, synthetic construct
  source 1..20: mol_type = other DNA
agagctgtaagaactgggcc

SEQ ID NO: 272752 - DNA, 20 bp, synthetic construct
  source 1..20: mol_type = other DNA
cagagctgtaagaactgggc

SEQ ID NO: 272753 - DNA, 20 bp, synthetic construct
  source 1..20: mol_type = other DNA
tcagagctgtaagaactggg

SEQ ID NO: 272754 - DNA, 20 bp, synthetic construct
  source 1..20: mol_type = other DNA
ttcagagctgtaagaactgg

SEQ ID NO: 272755 - DNA, 20 bp, synthetic construct
  source 1..20: mol_type = other DNA
cttcagagctgtaagaactg

SEQ ID NO: 272756 - DNA, 20 bp, synthetic construct
  source 1..20: mol_type = other DNA
tcttcagagctgtaagaact

SEQ ID NO: 272757 - DNA, 20 bp, synthetic construct
  source 1..20: mol_type = other DNA
ctcttcagagctgtaagaac

SEQ ID NO: 272758 - DNA, 20 bp, synthetic construct
  source 1..20: mol_type = other DNA
tctcttcagagctgtaagaa

SEQ ID NO: 272759 - DNA, 20 bp, synthetic construct
  source 1..20: mol_type = other DNA
ctctcttcagagctgtaaga

SEQ ID NO: 272760 - DNA, 20 bp, synthetic construct
  source 1..20: mol_type = other DNA
gctctcttcagagctgtaag

SEQ ID NO: 272761 - DNA, 20 bp, synthetic construct
  source 1..20: mol_type = other DNA
tgctctcttcagagctgtaa

SEQ ID NO: 272762 - DNA, 20 bp, synthetic construct
  source 1..20: mol_type = other DNA
ctgctctcttcagagctgta

SEQ ID NO: 272763 - DNA, 20 bp, synthetic construct
  source 1..20: mol_type = other DNA
gctgctctcttcagagctgt

SEQ ID NO: 272764 - DNA, 20 bp, synthetic construct
  source 1..20: mol_type = other DNA
tgctgctctcttcagagctg

SEQ ID NO: 272765 - DNA, 20 bp, synthetic construct
  source 1..20: mol_type = other DNA
ctgctgctctcttcagagct

SEQ ID NO: 272766 - DNA, 20 bp, synthetic construct
  source 1..20: mol_type = other DNA
cctgctgctctcttcagagc

SEQ ID NO: 272767 - DNA, 20 bp, synthetic construct
  source 1..20: mol_type = other DNA
tcctgctgctctcttcagag

SEQ ID NO: 272768 - DNA, 20 bp, synthetic construct
  source 1..20: mol_type = other DNA
ttcctgctgctctcttcaga

SEQ ID NO: 272769 - DNA, 20 bp, synthetic construct
  source 1..20: mol_type = other DNA
attcctgctgctctcttcag

SEQ ID NO: 272770 - DNA, 20 bp, synthetic construct
  source 1..20: mol_type = other DNA
cattcctgctgctctcttca

SEQ ID NO: 272771 - DNA, 20 bp, synthetic construct
  source 1..20: mol_type = other DNA
ccattcctgctgctctcttc

SEQ ID NO: 272772 - DNA, 20 bp, synthetic construct
  source 1..20: mol_type = other DNA
cccattcctgctgctctctt

SEQ ID NO: 272773 - DNA, 20 bp, synthetic construct
  source 1..20: mol_type = other DNA
ccccattcctgctgctctct

SEQ ID NO: 272774 - DNA, 20 bp, synthetic construct
  source 1..20: mol_type = other DNA
gccccattcctgctgctctc

SEQ ID NO: 272775 - DNA, 20 bp, synthetic construct
  source 1..20: mol_type = other DNA
agccccattcctgctgctct

SEQ ID NO: 272776 - DNA, 20 bp, synthetic construct
  source 1..20: mol_type = other DNA
cagccccattcctgctgctc

SEQ ID NO: 272777 - DNA, 20 bp, synthetic construct
  source 1..20: mol_type = other DNA
tcagccccattcctgctgct

SEQ ID NO: 272778 - DNA, 20 bp, synthetic construct
  source 1..20: mol_type = other DNA
ctcagccccattcctgctgc

SEQ ID NO: 272779 - DNA, 20 bp, synthetic construct
  source 1..20: mol_type = other DNA
gctcagccccattcctgctg

SEQ ID NO: 272780 - DNA, 20 bp, synthetic construct
  source 1..20: mol_type = other DNA
tgctcagccccattcctgct

SEQ ID NO: 272781 - DNA, 20 bp, synthetic construct
  source 1..20: mol_type = other DNA
ctgctcagccccattcctgc

SEQ ID NO: 272782 - DNA, 20 bp, synthetic construct
  source 1..20: mol_type = other DNA
cctgctcagccccattcctg

SEQ ID NO: 272783 - DNA, 20 bp, synthetic construct
  source 1..20: mol_type = other DNA
ccctgctcagccccattcct

SEQ ID NO: 272784 - DNA, 20 bp, synthetic construct
  source 1..20: mol_type = other DNA
tccctgctcagccccattcc

SEQ ID NO: 272785 - DNA, 20 bp, synthetic construct
  source 1..20: mol_type = other DNA
ttccctgctcagccccattc

SEQ ID NO: 272786 - DNA, 20 bp, synthetic construct
  source 1..20: mol_type = other DNA
cttccctgctcagccccatt

SEQ ID NO: 272787 - DNA, 20 bp, synthetic construct
  source 1..20: mol_type = other DNA
tcttccctgctcagccccat

SEQ ID NO: 272788 - DNA, 20 bp, synthetic construct
  source 1..20: mol_type = other DNA
gtcttccctgctcagcccca

SEQ ID NO: 272789 - DNA, 20 bp, synthetic construct
  source 1..20: mol_type = other DNA
tgtcttccctgctcagcccc

SEQ ID NO: 272790 - DNA, 20 bp, synthetic construct
  source 1..20: mol_type = other DNA
ttgtcttccctgctcagccc

SEQ ID NO: 272791 - DNA, 20 bp, synthetic construct
  source 1..20: mol_type = other DNA
gttgtcttccctgctcagcc

SEQ ID NO: 272792 - DNA, 20 bp, synthetic construct
  source 1..20: mol_type = other DNA
agttgtcttccctgctcagc

SEQ ID NO: 272793 - DNA, 20 bp, synthetic construct
  source 1..20: mol_type = other DNA
aagttgtcttccctgctcag

SEQ ID NO: 272794 - DNA, 20 bp, synthetic construct
  source 1..20: mol_type = other DNA
aaagttgtcttccctgctca

SEQ ID NO: 272795 - DNA, 20 bp, synthetic construct
  source 1..20: mol_type = other DNA
gaaagttgtcttccctgctc

SEQ ID NO: 272796 - DNA, 20 bp, synthetic construct
  source 1..20: mol_type = other DNA
ggaaagttgtcttccctgct

SEQ ID NO: 272797 - DNA, 20 bp, synthetic construct
  source 1..20: mol_type = other DNA
tggaaagttgtcttccctgc

SEQ ID NO: 272798 - DNA, 20 bp, synthetic construct
  source 1..20: mol_type = other DNA
atggaaagttgtcttccctg

SEQ ID NO: 272799 - DNA, 20 bp, synthetic construct
  source 1..20: mol_type = other DNA
aatggaaagttgtcttccct

SEQ ID NO: 272800 - DNA, 20 bp, synthetic construct
  source 1..20: mol_type = other DNA
caatggaaagttgtcttccc

SEQ ID NO: 272801 - DNA, 20 bp, synthetic construct
  source 1..20: mol_type = other DNA
tcaatggaaagttgtcttcc

SEQ ID NO: 272802 - DNA, 20 bp, synthetic construct
  source 1..20: mol_type = other DNA
ttcaatggaaagttgtcttc

SEQ ID NO: 272803 - DNA, 20 bp, synthetic construct
  source 1..20: mol_type = other DNA
cttcaatggaaagttgtctt

SEQ ID NO: 272804 - DNA, 20 bp, synthetic construct
  source 1..20: mol_type = other DNA
ccttcaatggaaagttgtct

SEQ ID NO: 272805 - DNA, 20 bp, synthetic construct
  source 1..20: mol_type = other DNA
gccttcaatggaaagttgtc

SEQ ID NO: 272806 - DNA, 20 bp, synthetic construct
  source 1..20: mol_type = other DNA
ggccttcaatggaaagttgt

SEQ ID NO: 272807 - DNA, 20 bp, synthetic construct
  source 1..20: mol_type = other DNA
gggccttcaatggaaagttg

SEQ ID NO: 272808 - DNA, 20 bp, synthetic construct
  source 1..20: mol_type = other DNA
ggggccttcaatggaaagtt

SEQ ID NO: 272809 - DNA, 20 bp, synthetic construct
  source 1..20: mol_type = other DNA
aggggccttcaatggaaagt

SEQ ID NO: 272810 - DNA, 20 bp, synthetic construct
  source 1..20: mol_type = other DNA
aaggggccttcaatggaaag

SEQ ID NO: 272811 - DNA, 20 bp, synthetic construct
  source 1..20: mol_type = other DNA
aaaggggccttcaatggaaa

SEQ ID NO: 272812 - DNA, 20 bp, synthetic construct
  source 1..20: mol_type = other DNA
gaaaggggccttcaatggaa

SEQ ID NO: 272813 - DNA, 20 bp, synthetic construct
  source 1..20: mol_type = other DNA
tgaaaggggccttcaatgga

SEQ ID NO: 272814 - DNA, 20 bp, synthetic construct
  source 1..20: mol_type = other DNA
ctgaaaggggccttcaatgg

SEQ ID NO: 272815 - DNA, 20 bp, synthetic construct
  source 1..20: mol_type = other DNA
cctgaaaggggccttcaatg

SEQ ID NO: 272816 - DNA, 20 bp, synthetic construct
  source 1..20: mol_type = other DNA
ccctgaaaggggccttcaat

SEQ ID NO: 272817 - DNA, 20 bp, synthetic construct
  source 1..20: mol_type = other DNA
gccctgaaaggggccttcaa

SEQ ID NO: 272818 - DNA, 20 bp, synthetic construct
  source 1..20: mol_type = other DNA
ggccctgaaaggggccttca

SEQ ID NO: 272819 - DNA, 20 bp, synthetic construct
  source 1..20: mol_type = other DNA
tggccctgaaaggggccttc

SEQ ID NO: 272820 - DNA, 20 bp, synthetic construct
  source 1..20: mol_type = other DNA
ctggccctgaaaggggcctt

SEQ ID NO: 272821 - DNA, 20 bp, synthetic construct
  source 1..20: mol_type = other DNA
tctggccctgaaaggggcct

SEQ ID NO: 272822 - DNA, 20 bp, synthetic construct
  source 1..20: mol_type = other DNA
ttctggccctgaaaggggcc

SEQ ID NO: 272823 - DNA, 20 bp, synthetic construct
  source 1..20: mol_type = other DNA
gttctggccctgaaaggggc

SEQ ID NO: 272824 - DNA, 20 bp, synthetic construct
  source 1..20: mol_type = other DNA
agttctggccctgaaagggg

SEQ ID NO: 272825 - DNA, 20 bp, synthetic construct
  source 1..20: mol_type = other DNA
cagttctggccctgaaaggg

SEQ ID NO: 272826 - DNA, 20 bp, synthetic construct
  source 1..20: mol_type = other DNA
acagttctggccctgaaagg

SEQ ID NO: 272827 - DNA, 20 bp, synthetic construct
  source 1..20: mol_type = other DNA
gacagttctggccctgaaag

SEQ ID NO: 272828 - DNA, 20 bp, synthetic construct
  source 1..20: mol_type = other DNA
ggacagttctggccctgaaa

SEQ ID NO: 272829 - DNA, 20 bp, synthetic construct
  source 1..20: mol_type = other DNA
gggacagttctggccctgaa

SEQ ID NO: 272830 - DNA, 20 bp, synthetic construct
  source 1..20: mol_type = other DNA
agggacagttctggccctga

SEQ ID NO: 272831 - DNA, 20 bp, synthetic construct
  source 1..20: mol_type = other DNA
gagggacagttctggccctg

SEQ ID NO: 272832 - DNA, 20 bp, synthetic construct
  source 1..20: mol_type = other DNA
ggagggacagttctggccct

SEQ ID NO: 272833 - DNA, 20 bp, synthetic construct
  source 1..20: mol_type = other DNA
gggagggacagttctggccc

SEQ ID NO: 272834 - DNA, 20 bp, synthetic construct
  source 1..20: mol_type = other DNA
tgggagggacagttctggcc

SEQ ID NO: 272835 - DNA, 20 bp, synthetic construct
  source 1..20: mol_type = other DNA
gtgggagggacagttctggc

SEQ ID NO: 272836 - DNA, 20 bp, synthetic construct
  source 1..20: mol_type = other DNA
ggtgggagggacagttctgg

SEQ ID NO: 272837 - DNA, 20 bp, synthetic construct
  source 1..20: mol_type = other DNA
gggtgggagggacagttctg

SEQ ID NO: 272838 - DNA, 20 bp, synthetic construct
  source 1..20: mol_type = other DNA
agggtgggagggacagttct

SEQ ID NO: 272839 - DNA, 20 bp, synthetic construct
  source 1..20: mol_type = other DNA
cagggtgggagggacagttc

SEQ ID NO: 272840 - DNA, 20 bp, synthetic construct
  source 1..20: mol_type = other DNA
gcagggtgggagggacagtt

SEQ ID NO: 272841 - DNA, 20 bp, synthetic construct
  source 1..20: mol_type = other DNA
tgcagggtgggagggacagt

SEQ ID NO: 272842 - DNA, 20 bp, synthetic construct
  source 1..20: mol_type = other DNA
ctgcagggtgggagggacag

SEQ ID NO: 272843 - DNA, 20 bp, synthetic construct
  source 1..20: mol_type = other DNA
gctgcagggtgggagggaca

SEQ ID NO: 272844 - DNA, 20 bp, synthetic construct
  source 1..20: mol_type = other DNA
agctgcagggtgggagggac

SEQ ID NO: 272845 - DNA, 20 bp, synthetic construct
  source 1..20: mol_type = other DNA
cagctgcagggtgggaggga

SEQ ID NO: 272846 - DNA, 20 bp, synthetic construct
  source 1..20: mol_type = other DNA
gcagctgcagggtgggaggg

SEQ ID NO: 272847 - DNA, 20 bp, synthetic construct
  source 1..20: mol_type = other DNA
ggcagctgcagggtgggagg

SEQ ID NO: 272848 - DNA, 20 bp, synthetic construct
  source 1..20: mol_type = other DNA
gggcagctgcagggtgggag

SEQ ID NO: 272849 - DNA, 20 bp, synthetic construct
  source 1..20: mol_type = other DNA
agggcagctgcagggtggga

SEQ ID NO: 272850 - DNA, 20 bp, synthetic construct
  source 1..20: mol_type = other DNA
cagggcagctgcagggtggg

SEQ ID NO: 272851 - DNA, 20 bp, synthetic construct
  source 1..20: mol_type = other DNA
gcagggcagctgcagggtgg

SEQ ID NO: 272852 - DNA, 20 bp, synthetic construct
  source 1..20: mol_type = other DNA
ggcagggcagctgcagggtg

SEQ ID NO: 272853 - DNA, 20 bp, synthetic construct
  source 1..20: mol_type = other DNA
aggcagggcagctgcagggt

SEQ ID NO: 272854 - DNA, 20 bp, synthetic construct
  source 1..20: mol_type = other DNA
gaggcagggcagctgcaggg

SEQ ID NO: 272855 - DNA, 20 bp, synthetic construct
  source 1..20: mol_type = other DNA
agaggcagggcagctgcagg

SEQ ID NO: 272856 - DNA, 20 bp, synthetic construct
  source 1..20: mol_type = other DNA
cagaggcagggcagctgcag

SEQ ID NO: 272857 - DNA, 20 bp, synthetic construct
  source 1..20: mol_type = other DNA
gcagaggcagggcagctgca

SEQ ID NO: 272858 - DNA, 20 bp, synthetic construct
  source 1..20: mol_type = other DNA
ggcagaggcagggcagctgc

SEQ ID NO: 272859 - DNA, 20 bp, synthetic construct
  source 1..20: mol_type = other DNA
gggcagaggcagggcagctg

SEQ ID NO: 272860 - DNA, 20 bp, synthetic construct
  source 1..20: mol_type = other DNA
tgggcagaggcagggcagct

SEQ ID NO: 272861 - DNA, 20 bp, synthetic construct
  source 1..20: mol_type = other DNA
atgggcagaggcagggcagc

SEQ ID NO: 272862 - DNA, 20 bp, synthetic construct
  source 1..20: mol_type = other DNA
catgggcagaggcagggcag

SEQ ID NO: 272863 - DNA, 20 bp, synthetic construct
  source 1..20: mol_type = other DNA
tcatgggcagaggcagggca

SEQ ID NO: 272864 - DNA, 20 bp, synthetic construct
  source 1..20: mol_type = other DNA
ctcatgggcagaggcagggc

SEQ ID NO: 272865 - DNA, 20 bp, synthetic construct
  source 1..20: mol_type = other DNA
cctcatgggcagaggcaggg

SEQ ID NO: 272866 - DNA, 20 bp, synthetic construct
  source 1..20: mol_type = other DNA
ccctcatgggcagaggcagg

SEQ ID NO: 272867 - DNA, 20 bp, synthetic construct
  source 1..20: mol_type = other DNA
cccctcatgggcagaggcag

SEQ ID NO: 272868 - DNA, 20 bp, synthetic construct
  source 1..20: mol_type = other DNA
acccctcatgggcagaggca

SEQ ID NO: 272869 - DNA, 20 bp, synthetic construct
  source 1..20: mol_type = other DNA
cacccctcatgggcagaggc

SEQ ID NO: 272870 - DNA, 20 bp, synthetic construct
  source 1..20: mol_type = other DNA
tcacccctcatgggcagagg

SEQ ID NO: 272871 - DNA, 20 bp, synthetic construct
  source 1..20: mol_type = other DNA
ctcacccctcatgggcagag

SEQ ID NO: 272872 - DNA, 20 bp, synthetic construct
  source 1..20: mol_type = other DNA
tctcacccctcatgggcaga

SEQ ID NO: 272873 - DNA, 20 bp, synthetic construct
  source 1..20: mol_type = other DNA
ctctcacccctcatgggcag

SEQ ID NO: 272874 - DNA, 20 bp, synthetic construct
  source 1..20: mol_type = other DNA
actctcacccctcatgggca

SEQ ID NO: 272875 - DNA, 20 bp, synthetic construct
  source 1..20: mol_type = other DNA
gactctcacccctcatgggc

SEQ ID NO: 272876 - DNA, 20 bp, synthetic construct
  source 1..20: mol_type = other DNA
tgactctcacccctcatggg

SEQ ID NO: 272877 - DNA, 20 bp, synthetic construct
  source 1..20: mol_type = other DNA
ctgactctcacccctcatgg

SEQ ID NO: 272878 - DNA, 20 bp, synthetic construct
  source 1..20: mol_type = other DNA
cctgactctcacccctcatg

SEQ ID NO: 272879 - DNA, 20 bp, synthetic construct
  source 1..20: mol_type = other DNA
gcctgactctcacccctcat

SEQ ID NO: 272880 - DNA, 20 bp, synthetic construct
  source 1..20: mol_type = other DNA
cgcctgactctcacccctca

SEQ ID NO: 272881 - DNA, 20 bp, synthetic construct
  source 1..20: mol_type = other DNA
tcgcctgactctcacccctc

SEQ ID NO: 272882 - DNA, 20 bp, synthetic construct
  source 1..20: mol_type = other DNA
gtcgcctgactctcacccct

SEQ ID NO: 272883 - DNA, 20 bp, synthetic construct
  source 1..20: mol_type = other DNA
ggtcgcctgactctcacccc

SEQ ID NO: 272884 - DNA, 20 bp, synthetic construct
  source 1..20: mol_type = other DNA
aggtcgcctgactctcaccc

SEQ ID NO: 272885 - DNA, 20 bp, synthetic construct
  source 1..20: mol_type = other DNA
gaggtcgcctgactctcacc

SEQ ID NO: 272886 - DNA, 20 bp, synthetic construct
  source 1..20: mol_type = other DNA
tgaggtcgcctgactctcac

SEQ ID NO: 272887 - DNA, 20 bp, synthetic construct
  source 1..20: mol_type = other DNA
atgaggtcgcctgactctca

SEQ ID NO: 272888 - DNA, 20 bp, synthetic construct
  source 1..20: mol_type = other DNA
catgaggtcgcctgactctc

SEQ ID NO: 272889 - DNA, 20 bp, synthetic construct
  source 1..20: mol_type = other DNA
gcatgaggtcgcctgactct

SEQ ID NO: 272890 - DNA, 20 bp, synthetic construct
  source 1..20: mol_type = other DNA
ggcatgaggtcgcctgactc

SEQ ID NO: 272891 - DNA, 20 bp, synthetic construct
  source 1..20: mol_type = other DNA
tggcatgaggtcgcctgact

SEQ ID NO: 272892 - DNA, 20 bp, synthetic construct
  source 1..20: mol_type = other DNA
ttggcatgaggtcgcctgac

SEQ ID NO: 272893 - DNA, 20 bp, synthetic construct
  source 1..20: mol_type = other DNA
cttggcatgaggtcgcctga

SEQ ID NO: 272894 - DNA, 20 bp, synthetic construct
  source 1..20: mol_type = other DNA
acttggcatgaggtcgcctg

SEQ ID NO: 272895 - DNA, 20 bp, synthetic construct
  source 1..20: mol_type = other DNA
cacttggcatgaggtcgcct

SEQ ID NO: 272896 - DNA, 20 bp, synthetic construct
  source 1..20: mol_type = other DNA
acacttggcatgaggtcgcc

SEQ ID NO: 272897 - DNA, 20 bp, synthetic construct
  source 1..20: mol_type = other DNA
tacacttggcatgaggtcgc

SEQ ID NO: 272898 - DNA, 20 bp, synthetic construct
  source 1..20: mol_type = other DNA
ctacacttggcatgaggtcg

SEQ ID NO: 272899 - DNA, 20 bp, synthetic construct
  source 1..20: mol_type = other DNA
tctacacttggcatgaggtc

SEQ ID NO: 272900 - DNA, 20 bp, synthetic construct
  source 1..20: mol_type = other DNA
ttctacacttggcatgaggt

SEQ ID NO: 272901 - DNA, 20 bp, synthetic construct
  source 1..20: mol_type = other DNA
tttctacacttggcatgagg

SEQ ID NO: 272902 - DNA, 20 bp, synthetic construct
  source 1..20: mol_type = other DNA
ctttctacacttggcatgag

SEQ ID NO: 272903 - DNA, 20 bp, synthetic construct
  source 1..20: mol_type = other DNA
cctttctacacttggcatga

SEQ ID NO: 272904 - DNA, 20 bp, synthetic construct
  source 1..20: mol_type = other DNA
ccctttctacacttggcatg

SEQ ID NO: 272905 - DNA, 20 bp, synthetic construct
  source 1..20: mol_type = other DNA
cccctttctacacttggcat

SEQ ID NO: 272906 - DNA, 20 bp, synthetic construct
  source 1..20: mol_type = other DNA
gcccctttctacacttggca

SEQ ID NO: 272907 - DNA, 20 bp, synthetic construct
  source 1..20: mol_type = other DNA
tgcccctttctacacttggc

SEQ ID NO: 272908 - DNA, 20 bp, synthetic construct
  source 1..20: mol_type = other DNA
ctgcccctttctacacttgg

SEQ ID NO: 272909 - DNA, 20 bp, synthetic construct
  source 1..20: mol_type = other DNA
tctgcccctttctacacttg

SEQ ID NO: 272910 - DNA, 20 bp, synthetic construct
  source 1..20: mol_type = other DNA
atctgcccctttctacactt

SEQ ID NO: 272911 - DNA, 20 bp, synthetic construct
  source 1..20: mol_type = other DNA
catctgcccctttctacact

SEQ ID NO: 272912 - DNA, 20 bp, synthetic construct
  source 1..20: mol_type = other DNA
ccatctgcccctttctacac

SEQ ID NO: 272913 - DNA, 20 bp, synthetic construct
  source 1..20: mol_type = other DNA
cccatctgcccctttctaca

SEQ ID NO: 272914 - DNA, 20 bp, synthetic construct
  source 1..20: mol_type = other DNA
tcccatctgcccctttctac

SEQ ID NO: 272915 - DNA, 20 bp, synthetic construct
  source 1..20: mol_type = other DNA
ctcccatctgcccctttcta

SEQ ID NO: 272916 - DNA, 20 bp, synthetic construct
  source 1..20: mol_type = other DNA
gctcccatctgcccctttct

SEQ ID NO: 272917 - DNA, 20 bp, synthetic construct
  source 1..20: mol_type = other DNA
ggctcccatctgcccctttc

SEQ ID NO: 272918 - DNA, 20 bp, synthetic construct
  source 1..20: mol_type = other DNA
gggctcccatctgccccttt

SEQ ID NO: 272919 - DNA, 20 bp, synthetic construct
  source 1..20: mol_type = other DNA
ggggctcccatctgcccctt

SEQ ID NO: 272920 - DNA, 20 bp, synthetic construct
  source 1..20: mol_type = other DNA
tggggctcccatctgcccct

SEQ ID NO: 272921 - DNA, 20 bp, synthetic construct
  source 1..20: mol_type = other DNA
ctggggctcccatctgcccc

SEQ ID NO: 272922 - DNA, 20 bp, synthetic construct
  source 1..20: mol_type = other DNA
cctggggctcccatctgccc

SEQ ID NO: 272923 - DNA, 20 bp, synthetic construct
  source 1..20: mol_type = other DNA
acctggggctcccatctgcc

SEQ ID NO: 272924 - DNA, 20 bp, synthetic construct
  source 1..20: mol_type = other DNA
aacctggggctcccatctgc

SEQ ID NO: 272925 - DNA, 20 bp, synthetic construct
  source 1..20: mol_type = other DNA
taacctggggctcccatctg

SEQ ID NO: 272926 - DNA, 20 bp, synthetic construct
  source 1..20: mol_type = other DNA
ataacctggggctcccatct

SEQ ID NO: 272927 - DNA, 20 bp, synthetic construct
  source 1..20: mol_type = other DNA
cataacctggggctcccatc

SEQ ID NO: 272928 - DNA, 20 bp, synthetic construct
  source 1..20: mol_type = other DNA
tcataacctggggctcccat

SEQ ID NO: 272929 - DNA, 20 bp, synthetic construct
  source 1..20: mol_type = other DNA
gtcataacctggggctccca

SEQ ID NO: 272930 - DNA, 20 bp, synthetic construct
  source 1..20: mol_type = other DNA
cgtcataacctggggctccc

SEQ ID NO: 272931 - DNA, 20 bp, synthetic construct
  source 1..20: mol_type = other DNA
acgtcataacctggggctcc

SEQ ID NO: 272932 - DNA, 20 bp, synthetic construct
  source 1..20: mol_type = other DNA
gacgtcataacctggggctc

SEQ ID NO: 272933 - DNA, 20 bp, synthetic construct
  source 1..20: mol_type = other DNA
tgacgtcataacctggggct

SEQ ID NO: 272934 - DNA, 20 bp, synthetic construct
  source 1..20: mol_type = other DNA
gtgacgtcataacctggggc

SEQ ID NO: 272935 - DNA, 20 bp, synthetic construct
  source 1..20: mol_type = other DNA
ggtgacgtcataacctgggg

SEQ ID NO: 272936 - DNA, 20 bp, synthetic construct
  source 1..20: mol_type = other DNA
tggtgacgtcataacctggg

SEQ ID NO: 272937 - DNA, 20 bp, synthetic construct
  source 1..20: mol_type = other DNA
atggtgacgtcataacctgg

SEQ ID NO: 272938 - DNA, 20 bp, synthetic construct
  source 1..20: mol_type = other DNA
catggtgacgtcataacctg

SEQ ID NO: 272939 - DNA, 20 bp, synthetic construct
  source 1..20: mol_type = other DNA
gcatggtgacgtcataacct

SEQ ID NO: 272940 - DNA, 20 bp, synthetic construct
  source 1..20: mol_type = other DNA
agcatggtgacgtcataacc

SEQ ID NO: 272941 - DNA, 20 bp, synthetic construct
  source 1..20: mol_type = other DNA
cagcatggtgacgtcataac

SEQ ID NO: 272942 - DNA, 20 bp, synthetic construct
  source 1..20: mol_type = other DNA
ccagcatggtgacgtcataa

SEQ ID NO: 272943 - DNA, 20 bp, synthetic construct
  source 1..20: mol_type = other DNA
cccagcatggtgacgtcata

SEQ ID NO: 272944 - DNA, 20 bp, synthetic construct
  source 1..20: mol_type = other DNA
acccagcatggtgacgtcat

SEQ ID NO: 272945 - DNA, 20 bp, synthetic construct
  source 1..20: mol_type = other DNA
cacccagcatggtgacgtca

SEQ ID NO: 272946 - DNA, 20 bp, synthetic construct
  source 1..20: mol_type = other DNA
ccacccagcatggtgacgtc

SEQ ID NO: 272947 - DNA, 20 bp, synthetic construct
  source 1..20: mol_type = other DNA
tccacccagcatggtgacgt

SEQ ID NO: 272948 - DNA, 20 bp, synthetic construct
  source 1..20: mol_type = other DNA
ctccacccagcatggtgacg

SEQ ID NO: 272949 - DNA, 20 bp, synthetic construct
  source 1..20: mol_type = other DNA
cctccacccagcatggtgac

SEQ ID NO: 272950 - DNA, 20 bp, synthetic construct
  source 1..20: mol_type = other DNA
gcctccacccagcatggtga

SEQ ID NO: 272951 - DNA, 20 bp, synthetic construct
  source 1..20: mol_type = other DNA
tgcctccacccagcatggtg

SEQ ID NO: 272952 - DNA, 20 bp, synthetic construct
  source 1..20: mol_type = other DNA
ctgcctccacccagcatggt

SEQ ID NO: 272953 - DNA, 20 bp, synthetic construct
  source 1..20: mol_type = other DNA
gctgcctccacccagcatgg

SEQ ID NO: 272954 - DNA, 20 bp, synthetic construct
  source 1..20: mol_type = other DNA
tgctgcctccacccagcatg

SEQ ID NO: 272955 - DNA, 20 bp, synthetic construct
  source 1..20: mol_type = other DNA
gtgctgcctccacccagcat

SEQ ID NO: 272956 - DNA, 20 bp, synthetic construct
  source 1..20: mol_type = other DNA
cgtgctgcctccacccagca

SEQ ID NO: 272957 - DNA, 20 bp, synthetic construct
  source 1..20: mol_type = other DNA
acgtgctgcctccacccagc

SEQ ID NO: 272958 - DNA, 20 bp, synthetic construct
  source 1..20: mol_type = other DNA
gacgtgctgcctccacccag

SEQ ID NO: 272959 - DNA, 20 bp, synthetic construct
  source 1..20: mol_type = other DNA
ggacgtgctgcctccaccca

SEQ ID NO: 272960 - DNA, 20 bp, synthetic construct
  source 1..20: mol_type = other DNA
tggacgtgctgcctccaccc

SEQ ID NO: 272961 - DNA, 20 bp, synthetic construct
  source 1..20: mol_type = other DNA
ttggacgtgctgcctccacc

SEQ ID NO: 272962 - DNA, 20 bp, synthetic construct
  source 1..20: mol_type = other DNA
tttggacgtgctgcctccac

SEQ ID NO: 272963 - DNA, 20 bp, synthetic construct
  source 1..20: mol_type = other DNA
atttggacgtgctgcctcca

SEQ ID NO: 272964 - DNA, 20 bp, synthetic construct
  source 1..20: mol_type = other DNA
gatttggacgtgctgcctcc

SEQ ID NO: 272965 - DNA, 20 bp, synthetic construct
  source 1..20: mol_type = other DNA
agatttggacgtgctgcctc

SEQ ID NO: 272966 - DNA, 20 bp, synthetic construct
  source 1..20: mol_type = other DNA
tagatttggacgtgctgcct

SEQ ID NO: 272967 - DNA, 20 bp, synthetic construct
  source 1..20: mol_type = other DNA
gtagatttggacgtgctgcc

SEQ ID NO: 272968 - DNA, 20 bp, synthetic construct
  source 1..20: mol_type = other DNA
agtagatttggacgtgctgc

SEQ ID NO: 272969 - DNA, 20 bp, synthetic construct
  source 1..20: mol_type = other DNA
tagtagatttggacgtgctg

SEQ ID NO: 272970 - DNA, 20 bp, synthetic construct
  source 1..20: mol_type = other DNA
ttagtagatttggacgtgct

SEQ ID NO: 272971 - DNA, 20 bp, synthetic construct
  source 1..20: mol_type = other DNA
tttagtagatttggacgtgc

SEQ ID NO: 272972 - DNA, 20 bp, synthetic construct
  source 1..20: mol_type = other DNA
ctttagtagatttggacgtg

SEQ ID NO: 272973 - DNA, 20 bp, synthetic construct
  source 1..20: mol_type = other DNA
cctttagtagatttggacgt

SEQ ID NO: 272974 - DNA, 20 bp, synthetic construct
  source 1..20: mol_type = other DNA
ccctttagtagatttggacg

SEQ ID NO: 272975 - DNA, 20 bp, synthetic construct
  source 1..20: mol_type = other DNA
accctttagtagatttggac

SEQ ID NO: 272976 - DNA, 20 bp, synthetic construct
  source 1..20: mol_type = other DNA
aaccctttagtagatttgga

SEQ ID NO: 272977 - DNA, 20 bp, synthetic construct
  source 1..20: mol_type = other DNA
taaccctttagtagatttgg

SEQ ID NO: 272978 - DNA, 20 bp, synthetic construct
  source 1..20: mol_type = other DNA
ttaaccctttagtagatttg

SEQ ID NO: 272979 - DNA, 20 bp, synthetic construct
  source 1..20: mol_type = other DNA
tttaaccctttagtagattt

SEQ ID NO: 272980 - DNA, 20 bp, synthetic construct
  source 1..20: mol_type = other DNA
ctttaaccctttagtagatt

SEQ ID NO: 272981 - DNA, 20 bp, synthetic construct
  source 1..20: mol_type = other DNA
cctttaaccctttagtagat

SEQ ID NO: 272982 - DNA, 20 bp, synthetic construct
  source 1..20: mol_type = other DNA
tcctttaaccctttagtaga

SEQ ID NO: 272983 - DNA, 20 bp, synthetic construct
  source 1..20: mol_type = other DNA
ctcctttaaccctttagtag

SEQ ID NO: 272984 - DNA, 20 bp, synthetic construct
  source 1..20: mol_type = other DNA
tctcctttaaccctttagta

SEQ ID NO: 272985 - DNA, 20 bp, synthetic construct
  source 1..20: mol_type = other DNA
ttctcctttaaccctttagt

SEQ ID NO: 272986 - DNA, 20 bp, synthetic construct
  source 1..20: mol_type = other DNA
tttctcctttaaccctttag

SEQ ID NO: 272987 - DNA, 20 bp, synthetic construct
  source 1..20: mol_type = other DNA
ctttctcctttaacccttta

SEQ ID NO: 272988 - DNA, 20 bp, synthetic construct
  source 1..20: mol_type = other DNA
cctttctcctttaacccttt

SEQ ID NO: 272989 - DNA, 20 bp, synthetic construct
  source 1..20: mol_type = other DNA
ccctttctcctttaaccctt

SEQ ID NO: 272990 - DNA, 20 bp, synthetic construct
  source 1..20: mol_type = other DNA
accctttctcctttaaccct

SEQ ID NO: 272991 - DNA, 20 bp, synthetic construct
  source 1..20: mol_type = other DNA
caccctttctcctttaaccc

SEQ ID NO: 272992 - DNA, 20 bp, synthetic construct
  source 1..20: mol_type = other DNA
tcaccctttctcctttaacc

SEQ ID NO: 272993 - DNA, 20 bp, synthetic construct
  source 1..20: mol_type = other DNA
gtcaccctttctcctttaac

SEQ ID NO: 272994 - DNA, 20 bp, synthetic construct
  source 1..20: mol_type = other DNA
agtcaccctttctcctttaa

SEQ ID NO: 272995 - DNA, 20 bp, synthetic construct
  source 1..20: mol_type = other DNA
aagtcaccctttctccttta

SEQ ID NO: 272996 - DNA, 20 bp, synthetic construct
  source 1..20: mol_type = other DNA
caagtcaccctttctccttt

SEQ ID NO: 272997 - DNA, 20 bp, synthetic construct
  source 1..20: mol_type = other DNA
tcaagtcaccctttctcctt

SEQ ID NO: 272998 - DNA, 20 bp, synthetic construct
  source 1..20: mol_type = other DNA
gtcaagtcaccctttctcct

SEQ ID NO: 272999 - DNA, 20 bp, synthetic construct
  source 1..20: mol_type = other DNA
agtcaagtcaccctttctcc

SEQ ID NO: 273000 - DNA, 20 bp, synthetic construct
  source 1..20: mol_type = other DNA
aagtcaagtcaccctttctc

SEQ ID NO: 273001 - DNA, 20 bp, synthetic construct
  source 1..20: mol_type = other DNA
aaagtcaagtcaccctttct

SEQ ID NO: 273002 - DNA, 20 bp, synthetic construct
  source 1..20: mol_type = other DNA
aaaagtcaagtcaccctttc

SEQ ID NO: 273003 - DNA, 20 bp, synthetic construct
  source 1..20: mol_type = other DNA
gaaaagtcaagtcacccttt

SEQ ID NO: 273004 - DNA, 20 bp, synthetic construct
  source 1..20: mol_type = other DNA
agaaaagtcaagtcaccctt

SEQ ID NO: 273005 - DNA, 20 bp, synthetic construct
  source 1..20: mol_type = other DNA
aagaaaagtcaagtcaccct

SEQ ID NO: 273006 - DNA, 20 bp, synthetic construct
  source 1..20: mol_type = other DNA
caagaaaagtcaagtcaccc

SEQ ID NO: 273007 - DNA, 20 bp, synthetic construct
  source 1..20: mol_type = other DNA
tcaagaaaagtcaagtcacc

SEQ ID NO: 273008 - DNA, 20 bp, synthetic construct
  source 1..20: mol_type = other DNA
ctcaagaaaagtcaagtcac

SEQ ID NO: 273009 - DNA, 20 bp, synthetic construct
  source 1..20: mol_type = other DNA
tctcaagaaaagtcaagtca

SEQ ID NO: 273010 - DNA, 20 bp, synthetic construct
  source 1..20: mol_type = other DNA
atctcaagaaaagtcaagtc

SEQ ID NO: 273011 - DNA, 20 bp, synthetic construct
  source 1..20: mol_type = other DNA
tatctcaagaaaagtcaagt

SEQ ID NO: 273012 - DNA, 20 bp, synthetic construct
  source 1..20: mol_type = other DNA
atatctcaagaaaagtcaag

SEQ ID NO: 273013 - DNA, 20 bp, synthetic construct
  source 1..20: mol_type = other DNA
aatatctcaagaaaagtcaa

SEQ ID NO: 273014 - DNA, 20 bp, synthetic construct
  source 1..20: mol_type = other DNA
aaatatctcaagaaaagtca

SEQ ID NO: 273015 - DNA, 20 bp, synthetic construct
  source 1..20: mol_type = other DNA
aaaatatctcaagaaaagtc

SEQ ID NO: 273016 - DNA, 20 bp, synthetic construct
  source 1..20: mol_type = other DNA
caaaatatctcaagaaaagt

SEQ ID NO: 273017 - DNA, 20 bp, synthetic construct
  source 1..20: mol_type = other DNA
ccaaaatatctcaagaaaag

SEQ ID NO: 273018 - DNA, 20 bp, synthetic construct
  source 1..20: mol_type = other DNA
cccaaaatatctcaagaaaa

SEQ ID NO: 273019 - DNA, 20 bp, synthetic construct
  source 1..20: mol_type = other DNA
ccccaaaatatctcaagaaa

SEQ ID NO: 273020 - DNA, 20 bp, synthetic construct
  source 1..20: mol_type = other DNA
cccccaaaatatctcaagaa

SEQ ID NO: 273021 - DNA, 20 bp, synthetic construct
  source 1..20: mol_type = other DNA
tcccccaaaatatctcaaga

SEQ ID NO: 273022 - DNA, 20 bp, synthetic construct
  source 1..20: mol_type = other DNA
gtcccccaaaatatctcaag

SEQ ID NO: 273023 - DNA, 20 bp, synthetic construct
  source 1..20: mol_type = other DNA
cgtcccccaaaatatctcaa

SEQ ID NO: 273024 - DNA, 20 bp, synthetic construct
  source 1..20: mol_type = other DNA
tcgtcccccaaaatatctca

SEQ ID NO: 273025 - DNA, 20 bp, synthetic construct
  source 1..20: mol_type = other DNA
ttcgtcccccaaaatatctc

SEQ ID NO: 273026 - DNA, 20 bp, synthetic construct
  source 1..20: mol_type = other DNA
cttcgtcccccaaaatatct

SEQ ID NO: 273027 - DNA, 20 bp, synthetic construct
  source 1..20: mol_type = other DNA
acttcgtcccccaaaatatc

SEQ ID NO: 273028 - DNA, 20 bp, synthetic construct
  source 1..20: mol_type = other DNA
cacttcgtcccccaaaatat

SEQ ID NO: 273029 - DNA, 20 bp, synthetic construct
  source 1..20: mol_type = other DNA
acacttcgtcccccaaaata

SEQ ID NO: 273030 - DNA, 20 bp, synthetic construct
  source 1..20: mol_type = other DNA
cacacttcgtcccccaaaat

SEQ ID NO: 273031 - DNA, 20 bp, synthetic construct
  source 1..20: mol_type = other DNA
ccacacttcgtcccccaaaa

SEQ ID NO: 273032 - DNA, 20 bp, synthetic construct
  source 1..20: mol_type = other DNA
tccacacttcgtcccccaaa

SEQ ID NO: 273033 - DNA, 20 bp, synthetic construct
  source 1..20: mol_type = other DNA
ttccacacttcgtcccccaa

SEQ ID NO: 273034 - DNA, 20 bp, synthetic construct
  source 1..20: mol_type = other DNA
tttccacacttcgtccccca

SEQ ID NO: 273035 - DNA, 20 bp, synthetic construct
  source 1..20: mol_type = other DNA
ttttccacacttcgtccccc

SEQ ID NO: 273036 - DNA, 20 bp, synthetic construct
  source 1..20: mol_type = other DNA
cttttccacacttcgtcccc

SEQ ID NO: 273037 - DNA, 20 bp, synthetic construct
  source 1..20: mol_type = other DNA
acttttccacacttcgtccc

SEQ ID NO: 273038 - DNA, 20 bp, synthetic construct
  source 1..20: mol_type = other DNA
cacttttccacacttcgtcc

SEQ ID NO: 273039 - DNA, 20 bp, synthetic construct
  source 1..20: mol_type = other DNA
ccacttttccacacttcgtc

SEQ ID NO: 273040 - DNA, 20 bp, synthetic construct
  source 1..20: mol_type = other DNA
gccacttttccacacttcgt

SEQ ID NO: 273041 - DNA, 20 bp, synthetic construct
  source 1..20: mol_type = other DNA
tgccacttttccacacttcg

SEQ ID NO: 273042 - DNA, 20 bp, synthetic construct
  source 1..20: mol_type = other DNA
ctgccacttttccacacttc

SEQ ID NO: 273043 - DNA, 20 bp, synthetic construct
  source 1..20: mol_type = other DNA
tctgccacttttccacactt

SEQ ID NO: 273044 - DNA, 20 bp, synthetic construct
  source 1..20: mol_type = other DNA
ctctgccacttttccacact

SEQ ID NO: 273045 - DNA, 20 bp, synthetic construct
  source 1..20: mol_type = other DNA
cctctgccacttttccacac

SEQ ID NO: 273046 - DNA, 20 bp, synthetic construct
  source 1..20: mol_type = other DNA
tcctctgccacttttccaca

SEQ ID NO: 273047 - DNA, 20 bp, synthetic construct
  source 1..20: mol_type = other DNA
gtcctctgccacttttccac

SEQ ID NO: 273048 - DNA, 20 bp, synthetic construct
  source 1..20: mol_type = other DNA
tgtcctctgccacttttcca

SEQ ID NO: 273049 - DNA, 20 bp, synthetic construct
  source 1..20: mol_type = other DNA
gtgtcctctgccacttttcc

SEQ ID NO: 273050 - DNA, 20 bp, synthetic construct
  source 1..20: mol_type = other DNA
tgtgtcctctgccacttttc

SEQ ID NO: 273051 - DNA, 20 bp, synthetic construct
  source 1..20: mol_type = other DNA
ctgtgtcctctgccactttt

SEQ ID NO: 273052 - DNA, 20 bp, synthetic construct
  source 1..20: mol_type = other DNA
actgtgtcctctgccacttt

SEQ ID NO: 273053 - DNA, 20 bp, synthetic construct
  source 1..20: mol_type = other DNA
gactgtgtcctctgccactt

SEQ ID NO: 273054 - DNA, 20 bp, synthetic construct
  source 1..20: mol_type = other DNA
tgactgtgtcctctgccact

SEQ ID NO: 273055 - DNA, 20 bp, synthetic construct
  source 1..20: mol_type = other DNA
gtgactgtgtcctctgccac

SEQ ID NO: 273056 - DNA, 20 bp, synthetic construct
  source 1..20: mol_type = other DNA
tgtgactgtgtcctctgcca

SEQ ID NO: 273057 - DNA, 20 bp, synthetic construct
  source 1..20: mol_type = other DNA
ctgtgactgtgtcctctgcc

SEQ ID NO: 273058 - DNA, 20 bp, synthetic construct
  source 1..20: mol_type = other DNA
gctgtgactgtgtcctctgc

SEQ ID NO: 273059 - DNA, 20 bp, synthetic construct
  source 1..20: mol_type = other DNA
ggctgtgactgtgtcctctg

SEQ ID NO: 273060 - DNA, 20 bp, synthetic construct
  source 1..20: mol_type = other DNA
aggctgtgactgtgtcctct

SEQ ID NO: 273061 - DNA, 20 bp, synthetic construct
  source 1..20: mol_type = other DNA
gaggctgtgactgtgtcctc

SEQ ID NO: 273062 - DNA, 20 bp, synthetic construct
  source 1..20: mol_type = other DNA
ggaggctgtgactgtgtcct

SEQ ID NO: 273063 - DNA, 20 bp, synthetic construct
  source 1..20: mol_type = other DNA
gggaggctgtgactgtgtcc

SEQ ID NO: 273064 - DNA, 20 bp, synthetic construct
  source 1..20: mol_type = other DNA
agggaggctgtgactgtgtc

SEQ ID NO: 273065 - DNA, 20 bp, synthetic construct
  source 1..20: mol_type = other DNA
aagggaggctgtgactgtgt

SEQ ID NO: 273066 - DNA, 20 bp, synthetic construct
  source 1..20: mol_type = other DNA
taagggaggctgtgactgtg

SEQ ID NO: 273067 - DNA, 20 bp, synthetic construct
  source 1..20: mol_type = other DNA
ttaagggaggctgtgactgt

SEQ ID NO: 273068 - DNA, 20 bp, synthetic construct
  source 1..20: mol_type = other DNA
tttaagggaggctgtgactg

SEQ ID NO: 273069 - DNA, 20 bp, synthetic construct
  source 1..20: mol_type = other DNA
atttaagggaggctgtgact

SEQ ID NO: 273070 - DNA, 20 bp, synthetic construct
  source 1..20: mol_type = other DNA
catttaagggaggctgtgac

SEQ ID NO: 273071 - DNA, 20 bp, synthetic construct
  source 1..20: mol_type = other DNA
gcatttaagggaggctgtga

SEQ ID NO: 273072 - DNA, 20 bp, synthetic construct
  source 1..20: mol_type = other DNA
ggcatttaagggaggctgtg

SEQ ID NO: 273073 - DNA, 20 bp, synthetic construct
  source 1..20: mol_type = other DNA
tggcatttaagggaggctgt

SEQ ID NO: 273074 - DNA, 20 bp, synthetic construct
  source 1..20: mol_type = other DNA
ctggcatttaagggaggctg

SEQ ID NO: 273075 - DNA, 20 bp, synthetic construct
  source 1..20: mol_type = other DNA
cctggcatttaagggaggct

SEQ ID NO: 273076 - DNA, 20 bp, synthetic construct
  source 1..20: mol_type = other DNA
tcctggcatttaagggaggc

SEQ ID NO: 273077 - DNA, 20 bp, synthetic construct
  source 1..20: mol_type = other DNA
ttcctggcatttaagggagg

SEQ ID NO: 273078 - DNA, 20 bp, synthetic construct
  source 1..20: mol_type = other DNA
tttcctggcatttaagggag

SEQ ID NO: 273079 - DNA, 20 bp, synthetic construct
  source 1..20: mol_type = other DNA
ctttcctggcatttaaggga

SEQ ID NO: 273080 - DNA, 20 bp, synthetic construct
  source 1..20: mol_type = other DNA
gctttcctggcatttaaggg

SEQ ID NO: 273081 - DNA, 20 bp, synthetic construct
  source 1..20: mol_type = other DNA
ggctttcctggcatttaagg

SEQ ID NO: 273082 - DNA, 20 bp, synthetic construct
  source 1..20: mol_type = other DNA
aggctttcctggcatttaag

SEQ ID NO: 273083 - DNA, 20 bp, synthetic construct
  source 1..20: mol_type = other DNA
taggctttcctggcatttaa

SEQ ID NO: 273084 - DNA, 20 bp, synthetic construct
  source 1..20: mol_type = other DNA
ctaggctttcctggcattta

SEQ ID NO: 273085 - DNA, 20 bp, synthetic construct
  source 1..20: mol_type = other DNA
tctaggctttcctggcattt

SEQ ID NO: 273086 - DNA, 20 bp, synthetic construct
  source 1..20: mol_type = other DNA
ttctaggctttcctggcatt

SEQ ID NO: 273087 - DNA, 20 bp, synthetic construct
  source 1..20: mol_type = other DNA
tttctaggctttcctggcat

SEQ ID NO: 273088 - DNA, 20 bp, synthetic construct
  source 1..20: mol_type = other DNA
ttttctaggctttcctggca

SEQ ID NO: 273089 - DNA, 20 bp, synthetic construct
  source 1..20: mol_type = other DNA
tttttctaggctttcctggc

SEQ ID NO: 273090 - DNA, 20 bp, synthetic construct
  source 1..20: mol_type = other DNA
atttttctaggctttcctgg

SEQ ID NO: 273091 - DNA, 20 bp, synthetic construct
  source 1..20: mol_type = other DNA
aatttttctaggctttcctg

SEQ ID NO: 273092 - DNA, 20 bp, synthetic construct
  source 1..20: mol_type = other DNA
caatttttctaggctttcct

SEQ ID NO: 273093 - DNA, 20 bp, synthetic construct
  source 1..20: mol_type = other DNA
acaatttttctaggctttcc

SEQ ID NO: 273094 - DNA, 20 bp, synthetic construct
  source 1..20: mol_type = other DNA
gacaatttttctaggctttc

SEQ ID NO: 273095 - DNA, 20 bp, synthetic construct
  source 1..20: mol_type = other DNA
agacaatttttctaggcttt

SEQ ID NO: 273096 - DNA, 20 bp, synthetic construct
  source 1..20: mol_type = other DNA
cagacaatttttctaggctt

SEQ ID NO: 273097 - DNA, 20 bp, synthetic construct
  source 1..20: mol_type = other DNA
tcagacaatttttctaggct

SEQ ID NO: 273098 - DNA, 20 bp, synthetic construct
  source 1..20: mol_type = other DNA
ttcagacaatttttctaggc

SEQ ID NO: 273099 - DNA, 20 bp, synthetic construct
  source 1..20: mol_type = other DNA
tttcagacaatttttctagg

SEQ ID NO: 273100 - DNA, 20 bp, synthetic construct
  source 1..20: mol_type = other DNA
gtttcagacaatttttctag

SEQ ID NO: 273101 - DNA, 20 bp, synthetic construct
  source 1..20: mol_type = other DNA
agtttcagacaatttttcta

SEQ ID NO: 273102 - DNA, 20 bp, synthetic construct
  source 1..20: mol_type = other DNA
tagtttcagacaatttttct

SEQ ID NO: 273103 - DNA, 20 bp, synthetic construct
  source 1..20: mol_type = other DNA
ttagtttcagacaatttttc

SEQ ID NO: 273104 - DNA, 20 bp, synthetic construct
  source 1..20: mol_type = other DNA
tttagtttcagacaattttt

SEQ ID NO: 273105 - DNA, 20 bp, synthetic construct
  source 1..20: mol_type = other DNA
gtttagtttcagacaatttt

SEQ ID NO: 273106 - DNA, 20 bp, synthetic construct
  source 1..20: mol_type = other DNA
ggtttagtttcagacaattt

SEQ ID NO: 273107 - DNA, 20 bp, synthetic construct
  source 1..20: mol_type = other DNA
aggtttagtttcagacaatt

SEQ ID NO: 273108 - DNA, 20 bp, synthetic construct
  source 1..20: mol_type = other DNA
gaggtttagtttcagacaat

SEQ ID NO: 273109 - DNA, 20 bp, synthetic construct
  source 1..20: mol_type = other DNA
tgaggtttagtttcagacaa

SEQ ID NO: 273110 - DNA, 20 bp, synthetic construct
  source 1..20: mol_type = other DNA
ctgaggtttagtttcagaca

SEQ ID NO: 273111 - DNA, 20 bp, synthetic construct
  source 1..20: mol_type = other DNA
gctgaggtttagtttcagac

SEQ ID NO: 273112 - DNA, 20 bp, synthetic construct
  source 1..20: mol_type = other DNA
ggctgaggtttagtttcaga

SEQ ID NO: 273113 - DNA, 20 bp, synthetic construct
  source 1..20: mol_type = other DNA
tggctgaggtttagtttcag

SEQ ID NO: 273114 - DNA, 20 bp, synthetic construct
  source 1..20: mol_type = other DNA
atggctgaggtttagtttca

SEQ ID NO: 273115 - DNA, 20 bp, synthetic construct
  source 1..20: mol_type = other DNA
tatggctgaggtttagtttc

SEQ ID NO: 273116 - DNA, 20 bp, synthetic construct
  source 1..20: mol_type = other DNA
ttatggctgaggtttagttt

SEQ ID NO: 273117 - DNA, 20 bp, synthetic construct
  source 1..20: mol_type = other DNA
gttatggctgaggtttagtt

SEQ ID NO: 273118 - DNA, 20 bp, synthetic construct
  source 1..20: mol_type = other DNA
tgttatggctgaggtttagt

SEQ ID NO: 273119 - DNA, 20 bp, synthetic construct
  source 1..20: mol_type = other DNA
ttgttatggctgaggtttag

SEQ ID NO: 273120 - DNA, 20 bp, synthetic construct
  source 1..20: mol_type = other DNA
tttgttatggctgaggttta

SEQ ID NO: 273121 - DNA, 20 bp, synthetic construct
  source 1..20: mol_type = other DNA
ctttgttatggctgaggttt

SEQ ID NO: 273122 - DNA, 20 bp, synthetic construct
  source 1..20: mol_type = other DNA
tctttgttatggctgaggtt

SEQ ID NO: 273123 - DNA, 20 bp, synthetic construct
  source 1..20: mol_type = other DNA
gtctttgttatggctgaggt

SEQ ID NO: 273124 - DNA, 20 bp, synthetic construct
  source 1..20: mol_type = other DNA
ggtctttgttatggctgagg

SEQ ID NO: 273125 - DNA, 20 bp, synthetic construct
  source 1..20: mol_type = other DNA
tggtctttgttatggctgag

SEQ ID NO: 273126 - DNA, 20 bp, synthetic construct
  source 1..20: mol_type = other DNA
ttggtctttgttatggctga

SEQ ID NO: 273127 - DNA, 20 bp, synthetic construct
  source 1..20: mol_type = other DNA
gttggtctttgttatggctg

SEQ ID NO: 273128 - DNA, 20 bp, synthetic construct
  source 1..20: mol_type = other DNA
tgttggtctttgttatggct

SEQ ID NO: 273129 - DNA, 20 bp, synthetic construct
  source 1..20: mol_type = other DNA
gtgttggtctttgttatggc

SEQ ID NO: 273130 - DNA, 20 bp, synthetic construct
  source 1..20: mol_type = other DNA
tgtgttggtctttgttatgg

SEQ ID NO: 273131 - DNA, 20 bp, synthetic construct
  source 1..20: mol_type = other DNA
atgtgttggtctttgttatg

SEQ ID NO: 273132 - DNA, 20 bp, synthetic construct
  source 1..20: mol_type = other DNA
catgtgttggtctttgttat

SEQ ID NO: 273133 - DNA, 20 bp, synthetic construct
  source 1..20: mol_type = other DNA
tcatgtgttggtctttgtta

SEQ ID NO: 273134 - DNA, 20 bp, synthetic construct
  source 1..20: mol_type = other DNA
ttcatgtgttggtctttgtt

SEQ ID NO: 273135 - DNA, 20 bp, synthetic construct
  source 1..20: mol_type = other DNA
attcatgtgttggtctttgt

SEQ ID NO: 273136 - DNA, 20 bp, synthetic construct
  source 1..20: mol_type = other DNA
gattcatgtgttggtctttg

SEQ ID NO: 273137 - DNA, 20 bp, synthetic construct
  source 1..20: mol_type = other DNA
agattcatgtgttggtcttt

SEQ ID NO: 273138 - DNA, 20 bp, synthetic construct
  source 1..20: mol_type = other DNA
gagattcatgtgttggtctt

SEQ ID NO: 273139 - DNA, 20 bp, synthetic construct
  source 1..20: mol_type = other DNA
ggagattcatgtgttggtct

SEQ ID NO: 273140 - DNA, 20 bp, synthetic construct
  source 1..20: mol_type = other DNA
tggagattcatgtgttggtc

SEQ ID NO: 273141 - DNA, 20 bp, synthetic construct
  source 1..20: mol_type = other DNA
ctggagattcatgtgttggt

SEQ ID NO: 273142 - DNA, 20 bp, synthetic construct
  source 1..20: mol_type = other DNA
cctggagattcatgtgttgg

SEQ ID NO: 273143 - DNA, 20 bp, synthetic construct
  source 1..20: mol_type = other DNA
tcctggagattcatgtgttg

SEQ ID NO: 273144 - DNA, 20 bp, synthetic construct
  source 1..20: mol_type = other DNA
ttcctggagattcatgtgtt

SEQ ID NO: 273145 - DNA, 20 bp, synthetic construct
  source 1..20: mol_type = other DNA
tttcctggagattcatgtgt

SEQ ID NO: 273146 - DNA, 20 bp, synthetic construct
  source 1..20: mol_type = other DNA
ttttcctggagattcatgtg

SEQ ID NO: 273147 - DNA, 20 bp, synthetic construct
  source 1..20: mol_type = other DNA
tttttcctggagattcatgt

SEQ ID NO: 273148 - DNA, 20 bp, synthetic construct
  source 1..20: mol_type = other DNA
ttttttcctggagattcatg

SEQ ID NO: 273149 - DNA, 20 bp, synthetic construct
  source 1..20: mol_type = other DNA
cttttttcctggagattcat

SEQ ID NO: 273150 - DNA, 20 bp, synthetic construct
  source 1..20: mol_type = other DNA
tcttttttcctggagattca

SEQ ID NO: 273151 - DNA, 20 bp, synthetic construct
  source 1..20: mol_type = other DNA
ttcttttttcctggagattc

SEQ ID NO: 273152 - DNA, 20 bp, synthetic construct
  source 1..20: mol_type = other DNA
tttcttttttcctggagatt

SEQ ID NO: 273153 - DNA, 20 bp, synthetic construct
  source 1..20: mol_type = other DNA
ttttcttttttcctggagat

SEQ ID NO: 273154 - DNA, 20 bp, synthetic construct
  source 1..20: mol_type = other DNA
tttttcttttttcctggaga

SEQ ID NO: 273155 - DNA, 20 bp, synthetic construct
  source 1..20: mol_type = other DNA
ctttttcttttttcctggag

SEQ ID NO: 273156 - DNA, 20 bp, synthetic construct
  source 1..20: mol_type = other DNA
tctttttcttttttcctgga

SEQ ID NO: 273157 - DNA, 20 bp, synthetic construct
  source 1..20: mol_type = other DNA
ttctttttcttttttcctgg

SEQ ID NO: 273158 - DNA, 20 bp, synthetic construct
  source 1..20: mol_type = other DNA
tttctttttcttttttcctg

SEQ ID NO: 273159 - DNA, 20 bp, synthetic construct
  source 1..20: mol_type = other DNA
ttttctttttcttttttcct

SEQ ID NO: 273160 - DNA, 20 bp, synthetic construct
  source 1..20: mol_type = other DNA
tttttctttttcttttttcc

SEQ ID NO: 273161 - DNA, 20 bp, synthetic construct
  source 1..20: mol_type = other DNA
atttttctttttcttttttc

SEQ ID NO: 273162 - DNA, 20 bp, synthetic construct
  source 1..20: mol_type = other DNA
catttttctttttctttttt

SEQ ID NO: 273163 - DNA, 20 bp, synthetic construct
  source 1..20: mol_type = other DNA
acatttttctttttcttttt

SEQ ID NO: 273164 - DNA, 20 bp, synthetic construct
  source 1..20: mol_type = other DNA
gacatttttctttttctttt

SEQ ID NO: 273165 - DNA, 20 bp, synthetic construct
  source 1..20: mol_type = other DNA
tgacatttttctttttcttt

SEQ ID NO: 273166 - DNA, 20 bp, synthetic construct
  source 1..20: mol_type = other DNA
atgacatttttctttttctt

SEQ ID NO: 273167 - DNA, 20 bp, synthetic construct
  source 1..20: mol_type = other DNA
tatgacatttttctttttct

SEQ ID NO: 273168 - DNA, 20 bp, synthetic construct
  source 1..20: mol_type = other DNA
gtatgacatttttctttttc

SEQ ID NO: 273169 - DNA, 20 bp, synthetic construct
  source 1..20: mol_type = other DNA
tgtatgacatttttcttttt

SEQ ID NO: 273170 - DNA, 20 bp, synthetic construct
  source 1..20: mol_type = other DNA
ctgtatgacatttttctttt

SEQ ID NO: 273171 - DNA, 20 bp, synthetic construct
  source 1..20: mol_type = other DNA
cctgtatgacatttttcttt

SEQ ID NO: 273172 - DNA, 20 bp, synthetic construct
  source 1..20: mol_type = other DNA
ccctgtatgacatttttctt

SEQ ID NO: 273173 - DNA, 20 bp, synthetic construct
  source 1..20: mol_type = other DNA
accctgtatgacatttttct

SEQ ID NO: 273174 - DNA, 20 bp, synthetic construct
  source 1..20: mol_type = other DNA
gaccctgtatgacatttttc

SEQ ID NO: 273175 - DNA, 20 bp, synthetic construct
  source 1..20: mol_type = other DNA
ggaccctgtatgacattttt

SEQ ID NO: 273176 - DNA, 20 bp, synthetic construct
  source 1..20: mol_type = other DNA
tggaccctgtatgacatttt

SEQ ID NO: 273177 - DNA, 20 bp, synthetic construct
  source 1..20: mol_type = other DNA
atggaccctgtatgacattt

SEQ ID NO: 273178 - DNA, 20 bp, synthetic construct
  source 1..20: mol_type = other DNA
catggaccctgtatgacatt

SEQ ID NO: 273179 - DNA, 20 bp, synthetic construct
  source 1..20: mol_type = other DNA
gcatggaccctgtatgacat

SEQ ID NO: 273180 - DNA, 20 bp, synthetic construct
  source 1..20: mol_type = other DNA
tgcatggaccctgtatgaca

SEQ ID NO: 273181 - DNA, 20 bp, synthetic construct
  source 1..20: mol_type = other DNA
gtgcatggaccctgtatgac

SEQ ID NO: 273182 - DNA, 20 bp, synthetic construct
  source 1..20: mol_type = other DNA
tgtgcatggaccctgtatga

SEQ ID NO: 273183 - DNA, 20 bp, synthetic construct
  source 1..20: mol_type = other DNA
ttgtgcatggaccctgtatg

SEQ ID NO: 273184 - DNA, 20 bp, synthetic construct
  source 1..20: mol_type = other DNA
cttgtgcatggaccctgtat

SEQ ID NO: 273185 - DNA, 20 bp, synthetic construct
  source 1..20: mol_type = other DNA
tcttgtgcatggaccctgta

SEQ ID NO: 273186 - DNA, 20 bp, synthetic construct
  source 1..20: mol_type = other DNA
ctcttgtgcatggaccctgt

SEQ ID NO: 273187 - DNA, 20 bp, synthetic construct
  source 1..20: mol_type = other DNA
gctcttgtgcatggaccctg

SEQ ID NO: 273188 - DNA, 20 bp, synthetic construct
  source 1..20: mol_type = other DNA
ggctcttgtgcatggaccct

SEQ ID NO: 273189 - DNA, 20 bp, synthetic construct
  source 1..20: mol_type = other DNA
aggctcttgtgcatggaccc

SEQ ID NO: 273190 - DNA, 20 bp, synthetic construct
  source 1..20: mol_type = other DNA
aaggctcttgtgcatggacc

SEQ ID NO: 273191 - DNA, 20 bp, synthetic construct
  source 1..20: mol_type = other DNA
aaaggctcttgtgcatggac

SEQ ID NO: 273192 - DNA, 20 bp, synthetic construct
  source 1..20: mol_type = other DNA
taaaggctcttgtgcatgga

SEQ ID NO: 273193 - DNA, 20 bp, synthetic construct
  source 1..20: mol_type = other DNA
ttaaaggctcttgtgcatgg

SEQ ID NO: 273194 - DNA, 20 bp, synthetic construct
  source 1..20: mol_type = other DNA
tttaaaggctcttgtgcatg

SEQ ID NO: 273195 - DNA, 20 bp, synthetic construct
  source 1..20: mol_type = other DNA
ttttaaaggctcttgtgcat

SEQ ID NO: 273196 - DNA, 20 bp, synthetic construct
  source 1..20: mol_type = other DNA
attttaaaggctcttgtgca

SEQ ID NO: 273197 - DNA, 20 bp, synthetic construct
  source 1..20: mol_type = other DNA
cattttaaaggctcttgtgc

SEQ ID NO: 273198 - DNA, 20 bp, synthetic construct
  source 1..20: mol_type = other DNA
tcattttaaaggctcttgtg

SEQ ID NO: 273199 - DNA, 20 bp, synthetic construct
  source 1..20: mol_type = other DNA
gtcattttaaaggctcttgt

SEQ ID NO: 273200 - DNA, 20 bp, synthetic construct
  source 1..20: mol_type = other DNA
ggtcattttaaaggctcttg

SEQ ID NO: 273201 - DNA, 20 bp, synthetic construct
  source 1..20: mol_type = other DNA
gggtcattttaaaggctctt

SEQ ID NO: 273202 - DNA, 20 bp, synthetic construct
  source 1..20: mol_type = other DNA
cgggtcattttaaaggctct

SEQ ID NO: 273203 - DNA, 20 bp, synthetic construct
  source 1..20: mol_type = other DNA
gcgggtcattttaaaggctc

SEQ ID NO: 273204 - DNA, 20 bp, synthetic construct
  source 1..20: mol_type = other DNA
agcgggtcattttaaaggct

SEQ ID NO: 273205 - DNA, 20 bp, synthetic construct
  source 1..20: mol_type = other DNA
cagcgggtcattttaaaggc

SEQ ID NO: 273206 - DNA, 20 bp, synthetic construct
  source 1..20: mol_type = other DNA
tcagcgggtcattttaaagg

SEQ ID NO: 273207 - DNA, 20 bp, synthetic construct
  source 1..20: mol_type = other DNA
ttcagcgggtcattttaaag

SEQ ID NO: 273208 - DNA, 20 bp, synthetic construct
  source 1..20: mol_type = other DNA
cttcagcgggtcattttaaa

SEQ ID NO: 273209 - DNA, 20 bp, synthetic construct
  source 1..20: mol_type = other DNA
ccttcagcgggtcattttaa

SEQ ID NO: 273210 - DNA, 20 bp, synthetic construct
  source 1..20: mol_type = other DNA
cccttcagcgggtcatttta

SEQ ID NO: 273211 - DNA, 20 bp, synthetic construct
  source 1..20: mol_type = other DNA
acccttcagcgggtcatttt

SEQ ID NO: 273212 - DNA, 20 bp, synthetic construct
  source 1..20: mol_type = other DNA
cacccttcagcgggtcattt

SEQ ID NO: 273213 - DNA, 20 bp, synthetic construct
  source 1..20: mol_type = other DNA
acacccttcagcgggtcatt

SEQ ID NO: 273214 - DNA, 20 bp, synthetic construct
  source 1..20: mol_type = other DNA
gacacccttcagcgggtcat

SEQ ID NO: 273215 - DNA, 20 bp, synthetic construct
  source 1..20: mol_type = other DNA
tgacacccttcagcgggtca

SEQ ID NO: 273216 - DNA, 20 bp, synthetic construct
  source 1..20: mol_type = other DNA
ctgacacccttcagcgggtc

SEQ ID NO: 273217 - DNA, 20 bp, synthetic construct
  source 1..20: mol_type = other DNA
cctgacacccttcagcgggt

SEQ ID NO: 273218 - DNA, 20 bp, synthetic construct
  source 1..20: mol_type = other DNA
gcctgacacccttcagcggg

SEQ ID NO: 273219 - DNA, 20 bp, synthetic construct
  source 1..20: mol_type = other DNA
ggcctgacacccttcagcgg

SEQ ID NO: 273220 - DNA, 20 bp, synthetic construct
  source 1..20: mol_type = other DNA
aggcctgacacccttcagcg

SEQ ID NO: 273221 - DNA, 20 bp, synthetic construct
  source 1..20: mol_type = other DNA
gaggcctgacacccttcagc

SEQ ID NO: 273222 - DNA, 20 bp, synthetic construct
  source 1..20: mol_type = other DNA
ggaggcctgacacccttcag

SEQ ID NO: 273223 - DNA, 20 bp, synthetic construct
  source 1..20: mol_type = other DNA
aggaggcctgacacccttca

SEQ ID NO: 273224 - DNA, 20 bp, synthetic construct
  source 1..20: mol_type = other DNA
gaggaggcctgacacccttc

SEQ ID NO: 273225 - DNA, 20 bp, synthetic construct
  source 1..20: mol_type = other DNA
ggaggaggcctgacaccctt

SEQ ID NO: 273226 - DNA, 20 bp, synthetic construct
  source 1..20: mol_type = other DNA
aggaggaggcctgacaccct

SEQ ID NO: 273227 - DNA, 20 bp, synthetic construct
  source 1..20: mol_type = other DNA
gaggaggaggcctgacaccc

SEQ ID NO: 273228 - DNA, 20 bp, synthetic construct
  source 1..20: mol_type = other DNA
ggaggaggaggcctgacacc

SEQ ID NO: 273229 - DNA, 20 bp, synthetic construct
  source 1..20: mol_type = other DNA
aggaggaggaggcctgacac

SEQ ID NO: 273230 - DNA, 20 bp, synthetic construct
  source 1..20: mol_type = other DNA
caggaggaggaggcctgaca

SEQ ID NO: 273231 - DNA, 20 bp, synthetic construct
  source 1..20: mol_type = other DNA
ccaggaggaggaggcctgac

SEQ ID NO: 273232 - DNA, 20 bp, synthetic construct
  source 1..20: mol_type = other DNA
tccaggaggaggaggcctga

SEQ ID NO: 273233 - DNA, 20 bp, synthetic construct
  source 1..20: mol_type = other DNA
gtccaggaggaggaggcctg

SEQ ID NO: 273234 - DNA, 20 bp, synthetic construct
  source 1..20: mol_type = other DNA
agtccaggaggaggaggcct

SEQ ID NO: 273235 - DNA, 20 bp, synthetic construct
  source 1..20: mol_type = other DNA
cagtccaggaggaggaggcc

SEQ ID NO: 273236 - DNA, 20 bp, synthetic construct
  source 1..20: mol_type = other DNA
ccagtccaggaggaggaggc

SEQ ID NO: 273237 - DNA, 20 bp, synthetic construct
  source 1..20: mol_type = other DNA
gccagtccaggaggaggagg

SEQ ID NO: 273238 - DNA, 20 bp, synthetic construct
  source 1..20: mol_type = other DNA
ggccagtccaggaggaggag

SEQ ID NO: 273239 - DNA, 20 bp, synthetic construct
  source 1..20: mol_type = other DNA
aggccagtccaggaggagga

SEQ ID NO: 273240 - DNA, 20 bp, synthetic construct
  source 1..20: mol_type = other DNA
caggccagtccaggaggagg

SEQ ID NO: 273241 - DNA, 20 bp, synthetic construct
  source 1..20: mol_type = other DNA
tcaggccagtccaggaggag

SEQ ID NO: 273242 - DNA, 20 bp, synthetic construct
  source 1..20: mol_type = other DNA
ttcaggccagtccaggagga

SEQ ID NO: 273243 - DNA, 20 bp, synthetic construct
  source 1..20: mol_type = other DNA
cttcaggccagtccaggagg

SEQ ID NO: 273244 - DNA, 20 bp, synthetic construct
  source 1..20: mol_type = other DNA
ccttcaggccagtccaggag

SEQ ID NO: 273245 - DNA, 20 bp, synthetic construct
  source 1..20: mol_type = other DNA
gccttcaggccagtccagga

SEQ ID NO: 273246 - DNA, 20 bp, synthetic construct
  source 1..20: mol_type = other DNA
agccttcaggccagtccagg

SEQ ID NO: 273247 - DNA, 20 bp, synthetic construct
  source 1..20: mol_type = other DNA
gagccttcaggccagtccag

SEQ ID NO: 273248 - DNA, 20 bp, synthetic construct
  source 1..20: mol_type = other DNA
ggagccttcaggccagtcca

SEQ ID NO: 273249 - DNA, 20 bp, synthetic construct
  source 1..20: mol_type = other DNA
tggagccttcaggccagtcc

SEQ ID NO: 273250 - DNA, 20 bp, synthetic construct
  source 1..20: mol_type = other DNA
gtggagccttcaggccagtc

SEQ ID NO: 273251 - DNA, 20 bp, synthetic construct
  source 1..20: mol_type = other DNA
cgtggagccttcaggccagt

SEQ ID NO: 273252 - DNA, 20 bp, synthetic construct
  source 1..20: mol_type = other DNA
tcgtggagccttcaggccag

SEQ ID NO: 273253 - DNA, 20 bp, synthetic construct
  source 1..20: mol_type = other DNA
ctcgtggagccttcaggcca

SEQ ID NO: 273254 - DNA, 20 bp, synthetic construct
  source 1..20: mol_type = other DNA
gctcgtggagccttcaggcc

SEQ ID NO: 273255 - DNA, 20 bp, synthetic construct
  source 1..20: mol_type = other DNA
agctcgtggagccttcaggc

SEQ ID NO: 273256 - DNA, 20 bp, synthetic construct
  source 1..20: mol_type = other DNA
aagctcgtggagccttcagg

SEQ ID NO: 273257 - DNA, 20 bp, synthetic construct
  source 1..20: mol_type = other DNA
aaagctcgtggagccttcag

SEQ ID NO: 273258 - DNA, 20 bp, synthetic construct
  source 1..20: mol_type = other DNA
aaaagctcgtggagccttca

SEQ ID NO: 273259 - DNA, 20 bp, synthetic construct
  source 1..20: mol_type = other DNA
caaaagctcgtggagccttc

SEQ ID NO: 273260 - DNA, 20 bp, synthetic construct
  source 1..20: mol_type = other DNA
gcaaaagctcgtggagcctt

SEQ ID NO: 273261 - DNA, 20 bp, synthetic construct
  source 1..20: mol_type = other DNA
agcaaaagctcgtggagcct

SEQ ID NO: 273262 - DNA, 20 bp, synthetic construct
  source 1..20: mol_type = other DNA
cagcaaaagctcgtggagcc

SEQ ID NO: 273263 - DNA, 20 bp, synthetic construct
  source 1..20: mol_type = other DNA
tcagcaaaagctcgtggagc

SEQ ID NO: 273264 - DNA, 20 bp, synthetic construct
  source 1..20: mol_type = other DNA
ctcagcaaaagctcgtggag

SEQ ID NO: 273265 - DNA, 20 bp, synthetic construct
  source 1..20: mol_type = other DNA
tctcagcaaaagctcgtgga

SEQ ID NO: 273266 - DNA, 20 bp, synthetic construct
  source 1..20: mol_type = other DNA
gtctcagcaaaagctcgtgg

SEQ ID NO: 273267 - DNA, 20 bp, synthetic construct
  source 1..20: mol_type = other DNA
ggtctcagcaaaagctcgtg

SEQ ID NO: 273268 - DNA, 20 bp, synthetic construct
  source 1..20: mol_type = other DNA
aggtctcagcaaaagctcgt

SEQ ID NO: 273269 - DNA, 20 bp, synthetic construct
  source 1..20: mol_type = other DNA
aaggtctcagcaaaagctcg

SEQ ID NO: 273270 - DNA, 20 bp, synthetic construct
  source 1..20: mol_type = other DNA
aaaggtctcagcaaaagctc

SEQ ID NO: 273271 - DNA, 20 bp, synthetic construct
  source 1..20: mol_type = other DNA
caaaggtctcagcaaaagct

SEQ ID NO: 273272 - DNA, 20 bp, synthetic construct
  source 1..20: mol_type = other DNA
ccaaaggtctcagcaaaagc

SEQ ID NO: 273273 - DNA, 20 bp, synthetic construct
  source 1..20: mol_type = other DNA
cccaaaggtctcagcaaaag

SEQ ID NO: 273274 - DNA, 20 bp, synthetic construct
  source 1..20: mol_type = other DNA
acccaaaggtctcagcaaaa

SEQ ID NO: 273275 - DNA, 20 bp, synthetic construct
  source 1..20: mol_type = other DNA
gacccaaaggtctcagcaaa

SEQ ID NO: 273276 - DNA, 20 bp, synthetic construct
  source 1..20: mol_type = other DNA
ggacccaaaggtctcagcaa

SEQ ID NO: 273277 - DNA, 20 bp, synthetic construct
  source 1..20: mol_type = other DNA
gggacccaaaggtctcagca

SEQ ID NO: 273278 - DNA, 20 bp, synthetic construct
  source 1..20: mol_type = other DNA
agggacccaaaggtctcagc

SEQ ID NO: 273279 - DNA, 20 bp, synthetic construct
  source 1..20: mol_type = other DNA
cagggacccaaaggtctcag

SEQ ID NO: 273280 - DNA, 20 bp, synthetic construct
  source 1..20: mol_type = other DNA
acagggacccaaaggtctca

SEQ ID NO: 273281 - DNA, 20 bp, synthetic construct
  source 1..20: mol_type = other DNA
cacagggacccaaaggtctc

SEQ ID NO: 273282 - DNA, 20 bp, synthetic construct
  source 1..20: mol_type = other DNA
ccacagggacccaaaggtct

SEQ ID NO: 273283 - DNA, 20 bp, synthetic construct
  source 1..20: mol_type = other DNA
gccacagggacccaaaggtc

SEQ ID NO: 273284 - DNA, 20 bp, synthetic construct
  source 1..20: mol_type = other DNA
ggccacagggacccaaaggt

SEQ ID NO: 273285 - DNA, 20 bp, synthetic construct
  source 1..20: mol_type = other DNA
aggccacagggacccaaagg

SEQ ID NO: 273286 - DNA, 20 bp, synthetic construct
  source 1..20: mol_type = other DNA
gaggccacagggacccaaag

SEQ ID NO: 273287 - DNA, 20 bp, synthetic construct
  source 1..20: mol_type = other DNA
tgaggccacagggacccaaa

SEQ ID NO: 273288 - DNA, 20 bp, synthetic construct
  source 1..20: mol_type = other DNA
atgaggccacagggacccaa

SEQ ID NO: 273289 - DNA, 20 bp, synthetic construct
  source 1..20: mol_type = other DNA
catgaggccacagggaccca

SEQ ID NO: 273290 - DNA, 20 bp, synthetic construct
  source 1..20: mol_type = other DNA
acatgaggccacagggaccc

SEQ ID NO: 273291 - DNA, 20 bp, synthetic construct
  source 1..20: mol_type = other DNA
tacatgaggccacagggacc

SEQ ID NO: 273292 - DNA, 20 bp, synthetic construct
  source 1..20: mol_type = other DNA
ctacatgaggccacagggac

SEQ ID NO: 273293 - DNA, 20 bp, synthetic construct
  source 1..20: mol_type = other DNA
actacatgaggccacaggga

SEQ ID NO: 273294 - DNA, 20 bp, synthetic construct
  source 1..20: mol_type = other DNA
tactacatgaggccacaggg

SEQ ID NO: 273295 - DNA, 20 bp, synthetic construct
  source 1..20: mol_type = other DNA
gtactacatgaggccacagg

SEQ ID NO: 273296 - DNA, 20 bp, synthetic construct
  source 1..20: mol_type = other DNA
ggtactacatgaggccacag

SEQ ID NO: 273297 - DNA, 20 bp, synthetic construct
  source 1..20: mol_type = other DNA
gggtactacatgaggccaca

SEQ ID NO: 273298 - DNA, 20 bp, synthetic construct
  source 1..20: mol_type = other DNA
tgggtactacatgaggccac

SEQ ID NO: 273299 - DNA, 20 bp, synthetic construct
  source 1..20: mol_type = other DNA
ctgggtactacatgaggcca

SEQ ID NO: 273300 - DNA, 20 bp, synthetic construct
  source 1..20: mol_type = other DNA
actgggtactacatgaggcc

SEQ ID NO: 273301 - DNA, 20 bp, synthetic construct
  source 1..20: mol_type = other DNA
tactgggtactacatgaggc

SEQ ID NO: 273302 - DNA, 20 bp, synthetic construct
  source 1..20: mol_type = other DNA
atactgggtactacatgagg

SEQ ID NO: 273303 - DNA, 20 bp, synthetic construct
  source 1..20: mol_type = other DNA
catactgggtactacatgag

SEQ ID NO: 273304 - DNA, 20 bp, synthetic construct
  source 1..20: mol_type = other DNA
gcatactgggtactacatga

SEQ ID NO: 273305 - DNA, 20 bp, synthetic construct
  source 1..20: mol_type = other DNA
tgcatactgggtactacatg

SEQ ID NO: 273306 - DNA, 20 bp, synthetic construct
  source 1..20: mol_type = other DNA
ctgcatactgggtactacat

SEQ ID NO: 273307 - DNA, 20 bp, synthetic construct
  source 1..20: mol_type = other DNA
actgcatactgggtactaca

SEQ ID NO: 273308 - DNA, 20 bp, synthetic construct
  source 1..20: mol_type = other DNA
tactgcatactgggtactac

SEQ ID NO: 273309 - DNA, 20 bp, synthetic construct
  source 1..20: mol_type = other DNA
ttactgcatactgggtacta

SEQ ID NO: 273310 - DNA, 20 bp, synthetic construct
  source 1..20: mol_type = other DNA
cttactgcatactgggtact

SEQ ID NO: 273311 - DNA, 20 bp, synthetic construct
  source 1..20: mol_type = other DNA
acttactgcatactgggtac

SEQ ID NO: 273312 - DNA, 20 bp, synthetic construct
  source 1..20: mol_type = other DNA
cacttactgcatactgggta

SEQ ID NO: 273313 - DNA, 20 bp, synthetic construct
  source 1..20: mol_type = other DNA
gcacttactgcatactgggt

SEQ ID NO: 273314 - DNA, 20 bp, synthetic construct
  source 1..20: mol_type = other DNA
agcacttactgcatactggg

SEQ ID NO: 273315 - DNA, 20 bp, synthetic construct
  source 1..20: mol_type = other DNA
gagcacttactgcatactgg

SEQ ID NO: 273316 - DNA, 20 bp, synthetic construct
  source 1..20: mol_type = other DNA
tgagcacttactgcatactg

SEQ ID NO: 273317 - DNA, 20 bp, synthetic construct
  source 1..20: mol_type = other DNA
ttgagcacttactgcatact

SEQ ID NO: 273318 - DNA, 20 bp, synthetic construct
  source 1..20: mol_type = other DNA
attgagcacttactgcatac

SEQ ID NO: 273319 - DNA, 20 bp, synthetic construct
  source 1..20: mol_type = other DNA
tattgagcacttactgcata

SEQ ID NO: 273320 - DNA, 20 bp, synthetic construct
  source 1..20: mol_type = other DNA
ttattgagcacttactgcat

SEQ ID NO: 273321 - DNA, 20 bp, synthetic construct
  source 1..20: mol_type = other DNA
tttattgagcacttactgca

SEQ ID NO: 273322 - DNA, 20 bp, synthetic construct
  source 1..20: mol_type = other DNA
atttattgagcacttactgc

SEQ ID NO: 273323 - DNA, 20 bp, synthetic construct
  source 1..20: mol_type = other DNA
catttattgagcacttactg

SEQ ID NO: 273324 - DNA, 20 bp, synthetic construct
  source 1..20: mol_type = other DNA
acatttattgagcacttact

SEQ ID NO: 273325 - DNA, 20 bp, synthetic construct
  source 1..20: mol_type = other DNA
aacatttattgagcacttac

SEQ ID NO: 273326 - DNA, 20 bp, synthetic construct
  source 1..20: mol_type = other DNA
aaacatttattgagcactta

SEQ ID NO: 273327 - DNA, 20 bp, synthetic construct
  source 1..20: mol_type = other DNA
caaacatttattgagcactt

SEQ ID NO: 273328 - DNA, 20 bp, synthetic construct
  source 1..20: mol_type = other DNA
ccaaacatttattgagcact

SEQ ID NO: 273329 - DNA, 20 bp, synthetic construct
  source 1..20: mol_type = other DNA
gccaaacatttattgagcac

SEQ ID NO: 273330 - DNA, 20 bp, synthetic construct
  source 1..20: mol_type = other DNA
agccaaacatttattgagca

SEQ ID NO: 273331 - DNA, 20 bp, synthetic construct
  source 1..20: mol_type = other DNA
tagccaaacatttattgagc

SEQ ID NO: 273332 - DNA, 20 bp, synthetic construct
  source 1..20: mol_type = other DNA
gtagccaaacatttattgag

SEQ ID NO: 273333 - DNA, 20 bp, synthetic construct
  source 1..20: mol_type = other DNA
tgtagccaaacatttattga

SEQ ID NO: 273334 - DNA, 20 bp, synthetic construct
  source 1..20: mol_type = other DNA
ttgtagccaaacatttattg

SEQ ID NO: 273335 - DNA, 20 bp, synthetic construct
  source 1..20: mol_type = other DNA
tttgtagccaaacatttatt

SEQ ID NO: 273336 - DNA, 20 bp, synthetic construct
  source 1..20: mol_type = other DNA
ttttgtagccaaacatttat

SEQ ID NO: 273337 - DNA, 20 bp, synthetic construct
  source 1..20: mol_type = other DNA
cttttgtagccaaacattta

SEQ ID NO: 273338 - DNA, 20 bp, synthetic construct
  source 1..20: mol_type = other DNA
tcttttgtagccaaacattt

SEQ ID NO: 273339 - DNA, 20 bp, synthetic construct
  source 1..20: mol_type = other DNA
ctcttttgtagccaaacatt

SEQ ID NO: 273340 - DNA, 20 bp, synthetic construct
  source 1..20: mol_type = other DNA
cctcttttgtagccaaacat

SEQ ID NO: 273341 - DNA, 20 bp, synthetic construct
  source 1..20: mol_type = other DNA
gcctcttttgtagccaaaca

SEQ ID NO: 273342 - DNA, 20 bp, synthetic construct
  source 1..20: mol_type = other DNA
tgcctcttttgtagccaaac

SEQ ID NO: 273343 - DNA, 20 bp, synthetic construct
  source 1..20: mol_type = other DNA
ttgcctcttttgtagccaaa

SEQ ID NO: 273344 - DNA, 20 bp, synthetic construct
  source 1..20: mol_type = other DNA
tttgcctcttttgtagccaa

SEQ ID NO: 273345 - DNA, 20 bp, synthetic construct
  source 1..20: mol_type = other DNA
ctttgcctcttttgtagcca

SEQ ID NO: 273346 - DNA, 20 bp, synthetic construct
  source 1..20: mol_type = other DNA
gctttgcctcttttgtagcc

SEQ ID NO: 273347 - DNA, 20 bp, synthetic construct
  source 1..20: mol_type = other DNA
agctttgcctcttttgtagc

SEQ ID NO: 273348 - DNA, 20 bp, synthetic construct
  source 1..20: mol_type = other DNA
cagctttgcctcttttgtag

SEQ ID NO: 273349 - DNA, 20 bp, synthetic construct
  source 1..20: mol_type = other DNA
ccagctttgcctcttttgta

SEQ ID NO: 273350 - DNA, 20 bp, synthetic construct
  source 1..20: mol_type = other DNA
gccagctttgcctcttttgt

SEQ ID NO: 273351 - DNA, 20 bp, synthetic construct
  source 1..20: mol_type = other DNA
cgccagctttgcctcttttg

SEQ ID NO: 273352 - DNA, 20 bp, synthetic construct
  source 1..20: mol_type = other DNA
ccgccagctttgcctctttt

SEQ ID NO: 273353 - DNA, 20 bp, synthetic construct
  source 1..20: mol_type = other DNA
tccgccagctttgcctcttt

SEQ ID NO: 273354 - DNA, 20 bp, synthetic construct
  source 1..20: mol_type = other DNA
ctccgccagctttgcctctt

SEQ ID NO: 273355 - DNA, 20 bp, synthetic construct
  source 1..20: mol_type = other DNA
actccgccagctttgcctct

SEQ ID NO: 273356 - DNA, 20 bp, synthetic construct
  source 1..20: mol_type = other DNA
gactccgccagctttgcctc

SEQ ID NO: 273357 - DNA, 20 bp, synthetic construct
  source 1..20: mol_type = other DNA
agactccgccagctttgcct

SEQ ID NO: 273358 - DNA, 20 bp, synthetic construct
  source 1..20: mol_type = other DNA
cagactccgccagctttgcc

SEQ ID NO: 273359 - DNA, 20 bp, synthetic construct
  source 1..20: mol_type = other DNA
tcagactccgccagctttgc

SEQ ID NO: 273360 - DNA, 20 bp, synthetic construct
  source 1..20: mol_type = other DNA
ttcagactccgccagctttg

SEQ ID NO: 273361 - DNA, 20 bp, synthetic construct
  source 1..20: mol_type = other DNA
cttcagactccgccagcttt

SEQ ID NO: 273362 - DNA, 20 bp, synthetic construct
  source 1..20: mol_type = other DNA
tcttcagactccgccagctt

SEQ ID NO: 273363 - DNA, 20 bp, synthetic construct
  source 1..20: mol_type = other DNA
ttcttcagactccgccagct

SEQ ID NO: 273364 - DNA, 20 bp, synthetic construct
  source 1..20: mol_type = other DNA
attcttcagactccgccagc

SEQ ID NO: 273365 - DNA, 20 bp, synthetic construct
  source 1..20: mol_type = other DNA
gattcttcagactccgccag

SEQ ID NO: 273366 - DNA, 20 bp, synthetic construct
  source 1..20: mol_type = other DNA
ggattcttcagactccgcca

SEQ ID NO: 273367 - DNA, 20 bp, synthetic construct
  source 1..20: mol_type = other DNA
gggattcttcagactccgcc

SEQ ID NO: 273368 - DNA, 20 bp, synthetic construct
  source 1..20: mol_type = other DNA
agggattcttcagactccgc

SEQ ID NO: 273369 - DNA, 20 bp, synthetic construct
  source 1..20: mol_type = other DNA
gagggattcttcagactccg

SEQ ID NO: 273370 - DNA, 20 bp, synthetic construct
  source 1..20: mol_type = other DNA
tgagggattcttcagactcc

SEQ ID NO: 273371 - DNA, 20 bp, synthetic construct
  source 1..20: mol_type = other DNA
ttgagggattcttcagactc

SEQ ID NO: 273372 - DNA, 20 bp, synthetic construct
  source 1..20: mol_type = other DNA
gttgagggattcttcagact

SEQ ID NO: 273373 - DNA, 20 bp, synthetic construct
  source 1..20: mol_type = other DNA
ggttgagggattcttcagac

SEQ ID NO: 273374 - DNA, 20 bp, synthetic construct
  source 1..20: mol_type = other DNA
cggttgagggattcttcaga

SEQ ID NO: 273375 - DNA, 20 bp, synthetic construct
  source 1..20: mol_type = other DNA
acggttgagggattcttcag

SEQ ID NO: 273376 - DNA, 20 bp, synthetic construct
  source 1..20: mol_type = other DNA
cacggttgagggattcttca

SEQ ID NO: 273377 - DNA, 20 bp, synthetic construct
  source 1..20: mol_type = other DNA
gcacggttgagggattcttc

SEQ ID NO: 273378 - DNA, 20 bp, synthetic construct
  source 1..20: mol_type = other DNA
ggcacggttgagggattctt

SEQ ID NO: 273379 - DNA, 20 bp, synthetic construct
  source 1..20: mol_type = other DNA
cggcacggttgagggattct

SEQ ID NO: 273380 - DNA, 20 bp, synthetic construct
  source 1..20: mol_type = other DNA
ccggcacggttgagggattc

SEQ ID NO: 273381 - DNA, 20 bp, synthetic construct
  source 1..20: mol_type = other DNA
tccggcacggttgagggatt

SEQ ID NO: 273382 - DNA, 20 bp, synthetic construct
  source 1..20: mol_type = other DNA
ttccggcacggttgagggat

SEQ ID NO: 273383 - DNA, 20 bp, synthetic construct
  source 1..20: mol_type = other DNA
gttccggcacggttgaggga

SEQ ID NO: 273384 - DNA, 20 bp, synthetic construct
  source 1..20: mol_type = other DNA
tgttccggcacggttgaggg

SEQ ID NO: 273385 - DNA, 20 bp, synthetic construct
  source 1..20: mol_type = other DNA
ctgttccggcacggttgagg

SEQ ID NO: 273386 - DNA, 20 bp, synthetic construct
  source 1..20: mol_type = other DNA
tctgttccggcacggttgag

SEQ ID NO: 273387 - DNA, 20 bp, synthetic construct
  source 1..20: mol_type = other DNA
atctgttccggcacggttga

SEQ ID NO: 273388 - DNA, 20 bp, synthetic construct
  source 1..20: mol_type = other DNA
catctgttccggcacggttg

SEQ ID NO: 273389 - DNA, 20 bp, synthetic construct
  source 1..20: mol_type = other DNA
gcatctgttccggcacggtt

SEQ ID NO: 273390 - DNA, 20 bp, synthetic construct
  source 1..20: mol_type = other DNA
agcatctgttccggcacggt

SEQ ID NO: 273391 - DNA, 20 bp, synthetic construct
  source 1..20: mol_type = other DNA
tagcatctgttccggcacgg

SEQ ID NO: 273392 - DNA, 20 bp, synthetic construct
  source 1..20: mol_type = other DNA
ttagcatctgttccggcacg

SEQ ID NO: 273393 - DNA, 20 bp, synthetic construct
  source 1..20: mol_type = other DNA
gttagcatctgttccggcac

SEQ ID NO: 273394 - DNA, 20 bp, synthetic construct
  source 1..20: mol_type = other DNA
tgttagcatctgttccggca

SEQ ID NO: 273395 - DNA, 20 bp, synthetic construct
  source 1..20: mol_type = other DNA
gtgttagcatctgttccggc

SEQ ID NO: 273396 - DNA, 20 bp, synthetic construct
  source 1..20: mol_type = other DNA
ggtgttagcatctgttccgg

SEQ ID NO: 273397 - DNA, 20 bp, synthetic construct
  source 1..20: mol_type = other DNA
tggtgttagcatctgttccg

SEQ ID NO: 273398 - DNA, 20 bp, synthetic construct
  source 1..20: mol_type = other DNA
ttggtgttagcatctgttcc

SEQ ID NO: 273399 - DNA, 20 bp, synthetic construct
  source 1..20: mol_type = other DNA
tttggtgttagcatctgttc

SEQ ID NO: 273400 - DNA, 20 bp, synthetic construct
  source 1..20: mol_type = other DNA
ctttggtgttagcatctgtt

SEQ ID NO: 273401 - DNA, 20 bp, synthetic construct
  source 1..20: mol_type = other DNA
cctttggtgttagcatctgt

SEQ ID NO: 273402 - DNA, 20 bp, synthetic construct
  source 1..20: mol_type = other DNA
ccctttggtgttagcatctg

SEQ ID NO: 273403 - DNA, 20 bp, synthetic construct
  source 1..20: mol_type = other DNA
tccctttggtgttagcatct

SEQ ID NO: 273404 - DNA, 20 bp, synthetic construct
  source 1..20: mol_type = other DNA
ttccctttggtgttagcatc

SEQ ID NO: 273405 - DNA, 20 bp, synthetic construct
  source 1..20: mol_type = other DNA
tttccctttggtgttagcat

SEQ ID NO: 273406 - DNA, 20 bp, synthetic construct
  source 1..20: mol_type = other DNA
ttttccctttggtgttagca

SEQ ID NO: 273407 - DNA, 20 bp, synthetic construct
  source 1..20: mol_type = other DNA
cttttccctttggtgttagc

SEQ ID NO: 273408 - DNA, 20 bp, synthetic construct
  source 1..20: mol_type = other DNA
tcttttccctttggtgttag

SEQ ID NO: 273409 - DNA, 20 bp, synthetic construct
  source 1..20: mol_type = other DNA
ctcttttccctttggtgtta

SEQ ID NO: 273410 - DNA, 20 bp, synthetic construct
  source 1..20: mol_type = other DNA
gctcttttccctttggtgtt

SEQ ID NO: 273411 - DNA, 20 bp, synthetic construct
  source 1..20: mol_type = other DNA
tgctcttttccctttggtgt

SEQ ID NO: 273412 - DNA, 20 bp, synthetic construct
  source 1..20: mol_type = other DNA
ctgctcttttccctttggtg

SEQ ID NO: 273413 - DNA, 20 bp, synthetic construct
  source 1..20: mol_type = other DNA
cctgctcttttccctttggt

SEQ ID NO: 273414 - DNA, 20 bp, synthetic construct
  source 1..20: mol_type = other DNA
tcctgctcttttccctttgg

SEQ ID NO: 273415 - DNA, 20 bp, synthetic construct
  source 1..20: mol_type = other DNA
ctcctgctcttttccctttg

SEQ ID NO: 273416 - DNA, 20 bp, synthetic construct
  source 1..20: mol_type = other DNA
gctcctgctcttttcccttt

SEQ ID NO: 273417 - DNA, 20 bp, synthetic construct
  source 1..20: mol_type = other DNA
ggctcctgctcttttccctt

SEQ ID NO: 273418 - DNA, 20 bp, synthetic construct
  source 1..20: mol_type = other DNA
tggctcctgctcttttccct

SEQ ID NO: 273419 - DNA, 20 bp, synthetic construct
  source 1..20: mol_type = other DNA
ttggctcctgctcttttccc

SEQ ID NO: 273420 - DNA, 20 bp, synthetic construct
  source 1..20: mol_type = other DNA
cttggctcctgctcttttcc

SEQ ID NO: 273421 - DNA, 20 bp, synthetic construct
  source 1..20: mol_type = other DNA
acttggctcctgctcttttc

SEQ ID NO: 273422 - DNA, 20 bp, synthetic construct
  source 1..20: mol_type = other DNA
gacttggctcctgctctttt

SEQ ID NO: 273423 - DNA, 20 bp, synthetic construct
  source 1..20: mol_type = other DNA
tgacttggctcctgctcttt

SEQ ID NO: 273424 - DNA, 20 bp, synthetic construct
  source 1..20: mol_type = other DNA
gtgacttggctcctgctctt

SEQ ID NO: 273425 - DNA, 20 bp, synthetic construct
  source 1..20: mol_type = other DNA
cgtgacttggctcctgctct

SEQ ID NO: 273426 - DNA, 20 bp, synthetic construct
  source 1..20: mol_type = other DNA
acgtgacttggctcctgctc

SEQ ID NO: 273427 - DNA, 20 bp, synthetic construct
  source 1..20: mol_type = other DNA
aacgtgacttggctcctgct

SEQ ID NO: 273428 - DNA, 20 bp, synthetic construct
  source 1..20: mol_type = other DNA
aaacgtgacttggctcctgc

SEQ ID NO: 273429 - DNA, 20 bp, synthetic construct
  source 1..20: mol_type = other DNA
caaacgtgacttggctcctg

SEQ ID NO: 273430 - DNA, 20 bp, synthetic construct
  source 1..20: mol_type = other DNA
ccaaacgtgacttggctcct

SEQ ID NO: 273431 - DNA, 20 bp, synthetic construct
  source 1..20: mol_type = other DNA
cccaaacgtgacttggctcc

SEQ ID NO: 273432 - DNA, 20 bp, synthetic construct
  source 1..20: mol_type = other DNA
tcccaaacgtgacttggctc

SEQ ID NO: 273433 - DNA, 20 bp, synthetic construct
  source 1..20: mol_type = other DNA
ttcccaaacgtgacttggct

SEQ ID NO: 273434 - DNA, 20 bp, synthetic construct
  source 1..20: mol_type = other DNA
gttcccaaacgtgacttggc

SEQ ID NO: 273435 - DNA, 20 bp, synthetic construct
  source 1..20: mol_type = other DNA
ggttcccaaacgtgacttgg

SEQ ID NO: 273436 - DNA, 20 bp, synthetic construct
  source 1..20: mol_type = other DNA
aggttcccaaacgtgacttg

SEQ ID NO: 273437 - DNA, 20 bp, synthetic construct
  source 1..20: mol_type = other DNA
caggttcccaaacgtgactt

SEQ ID NO: 273438 - DNA, 20 bp, synthetic construct
  source 1..20: mol_type = other DNA
gcaggttcccaaacgtgact

SEQ ID NO: 273439 - DNA, 20 bp, synthetic construct
  source 1..20: mol_type = other DNA
tgcaggttcccaaacgtgac

SEQ ID NO: 273440 - DNA, 20 bp, synthetic construct
  source 1..20: mol_type = other DNA
ctgcaggttcccaaacgtga

SEQ ID NO: 273441 - DNA, 20 bp, synthetic construct
  source 1..20: mol_type = other DNA
tctgcaggttcccaaacgtg

SEQ ID NO: 273442 - DNA, 20 bp, synthetic construct
  source 1..20: mol_type = other DNA
ctctgcaggttcccaaacgt

SEQ ID NO: 273443 - DNA, 20 bp, synthetic construct
  source 1..20: mol_type = other DNA
cctctgcaggttcccaaacg

SEQ ID NO: 273444 - DNA, 20 bp, synthetic construct
  source 1..20: mol_type = other DNA
gcctctgcaggttcccaaac

SEQ ID NO: 273445 - DNA, 20 bp, synthetic construct
  source 1..20: mol_type = other DNA
agcctctgcaggttcccaaa

SEQ ID NO: 273446 - DNA, 20 bp, synthetic construct
  source 1..20: mol_type = other DNA
cagcctctgcaggttcccaa

SEQ ID NO: 273447 - DNA, 20 bp, synthetic construct
  source 1..20: mol_type = other DNA
tcagcctctgcaggttccca

SEQ ID NO: 273448 - DNA, 20 bp, synthetic construct
  source 1..20: mol_type = other DNA
ttcagcctctgcaggttccc

SEQ ID NO: 273449 - DNA, 20 bp, synthetic construct
  source 1..20: mol_type = other DNA
tttcagcctctgcaggttcc

SEQ ID NO: 273450 - DNA, 20 bp, synthetic construct
  source 1..20: mol_type = other DNA
ttttcagcctctgcaggttc

SEQ ID NO: 273451 - DNA, 20 bp, synthetic construct
  source 1..20: mol_type = other DNA
gttttcagcctctgcaggtt

SEQ ID NO: 273452 - DNA, 20 bp, synthetic construct
  source 1..20: mol_type = other DNA
agttttcagcctctgcaggt

SEQ ID NO: 273453 - DNA, 20 bp, synthetic construct
  source 1..20: mol_type = other DNA
cagttttcagcctctgcagg

SEQ ID NO: 273454 - DNA, 20 bp, synthetic construct
  source 1..20: mol_type = other DNA
gcagttttcagcctctgcag

SEQ ID NO: 273455 - DNA, 20 bp, synthetic construct
  source 1..20: mol_type = other DNA
ggcagttttcagcctctgca

SEQ ID NO: 273456 - DNA, 20 bp, synthetic construct
  source 1..20: mol_type = other DNA
cggcagttttcagcctctgc

SEQ ID NO: 273457 - DNA, 20 bp, synthetic construct
  source 1..20: mol_type = other DNA
gcggcagttttcagcctctg

SEQ ID NO: 273458 - DNA, 20 bp, synthetic construct
  source 1..20: mol_type = other DNA
tgcggcagttttcagcctct

SEQ ID NO: 273459 - DNA, 20 bp, synthetic construct
  source 1..20: mol_type = other DNA
ctgcggcagttttcagcctc

SEQ ID NO: 273460 - DNA, 20 bp, synthetic construct
  source 1..20: mol_type = other DNA
tctgcggcagttttcagcct

SEQ ID NO: 273461 - DNA, 20 bp, synthetic construct
  source 1..20: mol_type = other DNA
atctgcggcagttttcagcc

SEQ ID NO: 273462 - DNA, 20 bp, synthetic construct
  source 1..20: mol_type = other DNA
aatctgcggcagttttcagc

SEQ ID NO: 273463 - DNA, 20 bp, synthetic construct
  source 1..20: mol_type = other DNA
caatctgcggcagttttcag

SEQ ID NO: 273464 - DNA, 20 bp, synthetic construct
  source 1..20: mol_type = other DNA
gcaatctgcggcagttttca

SEQ ID NO: 273465 - DNA, 20 bp, synthetic construct
  source 1..20: mol_type = other DNA
agcaatctgcggcagttttc

SEQ ID NO: 273466 - DNA, 20 bp, synthetic construct
  source 1..20: mol_type = other DNA
cagcaatctgcggcagtttt

SEQ ID NO: 273467 - DNA, 20 bp, synthetic construct
  source 1..20: mol_type = other DNA
gcagcaatctgcggcagttt

SEQ ID NO: 273468 - DNA, 20 bp, synthetic construct
  source 1..20: mol_type = other DNA
tgcagcaatctgcggcagtt

SEQ ID NO: 273469 - DNA, 20 bp, synthetic construct
  source 1..20: mol_type = other DNA
ttgcagcaatctgcggcagt

SEQ ID NO: 273470 - DNA, 20 bp, synthetic construct
  source 1..20: mol_type = other DNA
tttgcagcaatctgcggcag

SEQ ID NO: 273471 - DNA, 20 bp, synthetic construct
  source 1..20: mol_type = other DNA
atttgcagcaatctgcggca

SEQ ID NO: 273472 - DNA, 20 bp, synthetic construct
  source 1..20: mol_type = other DNA
gatttgcagcaatctgcggc

SEQ ID NO: 273473 - DNA, 20 bp, synthetic construct
  source 1..20: mol_type = other DNA
tgatttgcagcaatctgcgg

SEQ ID NO: 273474 - DNA, 20 bp, synthetic construct
  source 1..20: mol_type = other DNA
atgatttgcagcaatctgcg

SEQ ID NO: 273475 - DNA, 20 bp, synthetic construct
  source 1..20: mol_type = other DNA
aatgatttgcagcaatctgc

SEQ ID NO: 273476 - DNA, 20 bp, synthetic construct
  source 1..20: mol_type = other DNA
caatgatttgcagcaatctg

SEQ ID NO: 273477 - DNA, 20 bp, synthetic construct
  source 1..20: mol_type = other DNA
ccaatgatttgcagcaatct

SEQ ID NO: 273478 - DNA, 20 bp, synthetic construct
  source 1..20: mol_type = other DNA
cccaatgatttgcagcaatc

SEQ ID NO: 273479 - DNA, 20 bp, synthetic construct
  source 1..20: mol_type = other DNA
ccccaatgatttgcagcaat

SEQ ID NO: 273480 - DNA, 20 bp, synthetic construct
  source 1..20: mol_type = other DNA
cccccaatgatttgcagcaa

SEQ ID NO: 273481 - DNA, 20 bp, synthetic construct
  source 1..20: mol_type = other DNA
tcccccaatgatttgcagca

SEQ ID NO: 273482 - DNA, 20 bp, synthetic construct
  source 1..20: mol_type = other DNA
ttcccccaatgatttgcagc

SEQ ID NO: 273483 - DNA, 20 bp, synthetic construct
  source 1..20: mol_type = other DNA
tttcccccaatgatttgcag

SEQ ID NO: 273484 - DNA, 20 bp, synthetic construct
  source 1..20: mol_type = other DNA
ttttcccccaatgatttgca

SEQ ID NO: 273485 - DNA, 20 bp, synthetic construct
  source 1..20: mol_type = other DNA
tttttcccccaatgatttgc

SEQ ID NO: 273486 - DNA, 20 bp, synthetic construct
  source 1..20: mol_type = other DNA
gtttttcccccaatgatttg

SEQ ID NO: 273487 - DNA, 20 bp, synthetic construct
  source 1..20: mol_type = other DNA
cgtttttcccccaatgattt

SEQ ID NO: 273488 - DNA, 20 bp, synthetic construct
  source 1..20: mol_type = other DNA
ccgtttttcccccaatgatt

SEQ ID NO: 273489 - DNA, 20 bp, synthetic construct
  source 1..20: mol_type = other DNA
tccgtttttcccccaatgat

SEQ ID NO: 273490 - DNA, 20 bp, synthetic construct
  source 1..20: mol_type = other DNA
ttccgtttttcccccaatga

SEQ ID NO: 273491 - DNA, 20 bp, synthetic construct
  source 1..20: mol_type = other DNA
tttccgtttttcccccaatg

SEQ ID NO: 273492 - DNA, 20 bp, synthetic construct
  source 1..20: mol_type = other DNA
ttttccgtttttcccccaat

SEQ ID NO: 273493 - DNA, 20 bp, synthetic construct
  source 1..20: mol_type = other DNA
gttttccgtttttcccccaa

SEQ ID NO: 273494 - DNA, 20 bp, synthetic construct
  source 1..20: mol_type = other DNA
cgttttccgtttttccccca

SEQ ID NO: 273495 - DNA, 20 bp, synthetic construct
  source 1..20: mol_type = other DNA
acgttttccgtttttccccc

SEQ ID NO: 273496 - DNA, 20 bp, synthetic construct
  source 1..20: mol_type = other DNA
gacgttttccgtttttcccc

SEQ ID NO: 273497 - DNA, 20 bp, synthetic construct
  source 1..20: mol_type = other DNA
agacgttttccgtttttccc

SEQ ID NO: 273498 - DNA, 20 bp, synthetic construct
  source 1..20: mol_type = other DNA
cagacgttttccgtttttcc

SEQ ID NO: 273499 - DNA, 20 bp, synthetic construct
  source 1..20: mol_type = other DNA
acagacgttttccgtttttc

SEQ ID NO: 273500 - DNA, 20 bp, synthetic construct
  source 1..20: mol_type = other DNA
aacagacgttttccgttttt

SEQ ID NO: 273501 - DNA, 20 bp, synthetic construct
  source 1..20: mol_type = other DNA
aaacagacgttttccgtttt

SEQ ID NO: 273502 - DNA, 20 bp, synthetic construct
  source 1..20: mol_type = other DNA
aaaacagacgttttccgttt

SEQ ID NO: 273503 - DNA, 20 bp, synthetic construct
  source 1..20: mol_type = other DNA
gaaaacagacgttttccgtt

SEQ ID NO: 273504 - DNA, 20 bp, synthetic construct
  source 1..20: mol_type = other DNA
ggaaaacagacgttttccgt

SEQ ID NO: 273505 - DNA, 20 bp, synthetic construct
  source 1..20: mol_type = other DNA
gggaaaacagacgttttccg

SEQ ID NO: 273506 - DNA, 20 bp, synthetic construct
  source 1..20: mol_type = other DNA
ggggaaaacagacgttttcc

SEQ ID NO: 273507 - DNA, 20 bp, synthetic construct
  source 1..20: mol_type = other DNA
aggggaaaacagacgttttc

SEQ ID NO: 273508 - DNA, 20 bp, synthetic construct
  source 1..20: mol_type = other DNA
aaggggaaaacagacgtttt

SEQ ID NO: 273509 - DNA, 20 bp, synthetic construct
  source 1..20: mol_type = other DNA
aaaggggaaaacagacgttt

SEQ ID NO: 273510 - DNA, 20 bp, synthetic construct
  source 1..20: mol_type = other DNA
caaaggggaaaacagacgtt

SEQ ID NO: 273511 - DNA, 20 bp, synthetic construct
  source 1..20: mol_type = other DNA
acaaaggggaaaacagacgt

SEQ ID NO: 273512 - DNA, 20 bp, synthetic construct
  source 1..20: mol_type = other DNA
cacaaaggggaaaacagacg

SEQ ID NO: 273513 - DNA, 20 bp, synthetic construct
  source 1..20: mol_type = other DNA
gcacaaaggggaaaacagac

SEQ ID NO: 273514 - DNA, 20 bp, synthetic construct
  source 1..20: mol_type = other DNA
agcacaaaggggaaaacaga

SEQ ID NO: 273515 - DNA, 20 bp, synthetic construct
  source 1..20: mol_type = other DNA
aagcacaaaggggaaaacag

SEQ ID NO: 273516 - DNA, 20 bp, synthetic construct
  source 1..20: mol_type = other DNA
aaagcacaaaggggaaaaca

SEQ ID NO: 273517 - DNA, 20 bp, synthetic construct
  source 1..20: mol_type = other DNA
aaaagcacaaaggggaaaac

SEQ ID NO: 273518 - DNA, 20 bp, synthetic construct
  source 1..20: mol_type = other DNA
gaaaagcacaaaggggaaaa

SEQ ID NO: 273519 - DNA, 20 bp, synthetic construct
  source 1..20: mol_type = other DNA
agaaaagcacaaaggggaaa

SEQ ID NO: 273520 - DNA, 20 bp, synthetic construct
  source 1..20: mol_type = other DNA
gagaaaagcacaaaggggaa

SEQ ID NO: 273521 - DNA, 20 bp, synthetic construct
  source 1..20: mol_type = other DNA
agagaaaagcacaaagggga

SEQ ID NO: 273522 - DNA, 20 bp, synthetic construct
  source 1..20: mol_type = other DNA
cagagaaaagcacaaagggg

SEQ ID NO: 273523 - DNA, 20 bp, synthetic construct
  source 1..20: mol_type = other DNA
acagagaaaagcacaaaggg

SEQ ID NO: 273524 - DNA, 20 bp, synthetic construct
  source 1..20: mol_type = other DNA
aacagagaaaagcacaaagg

SEQ ID NO: 273525 - DNA, 20 bp, synthetic construct
  source 1..20: mol_type = other DNA
aaacagagaaaagcacaaag

SEQ ID NO: 273526 - DNA, 20 bp, synthetic construct
  source 1..20: mol_type = other DNA
aaaacagagaaaagcacaaa

SEQ ID NO: 273527 - DNA, 20 bp, synthetic construct
  source 1..20: mol_type = other DNA
gaaaacagagaaaagcacaa

SEQ ID NO: 273528 - DNA, 20 bp, synthetic construct
  source 1..20: mol_type = other DNA
agaaaacagagaaaagcaca

SEQ ID NO: 273529 - DNA, 20 bp, synthetic construct
  source 1..20: mol_type = other DNA
aagaaaacagagaaaagcac

SEQ ID NO: 273530 - DNA, 20 bp, synthetic construct
  source 1..20: mol_type = other DNA
gaagaaaacagagaaaagca

SEQ ID NO: 273531 - DNA, 20 bp, synthetic construct
  source 1..20: mol_type = other DNA
agaagaaaacagagaaaagc

SEQ ID NO: 273532 - DNA, 20 bp, synthetic construct
  source 1..20: mol_type = other DNA
aagaagaaaacagagaaaag

SEQ ID NO: 273533 - DNA, 20 bp, synthetic construct
  source 1..20: mol_type = other DNA
aaagaagaaaacagagaaaa

SEQ ID NO: 273534 - DNA, 20 bp, synthetic construct
  source 1..20: mol_type = other DNA
caaagaagaaaacagagaaa

SEQ ID NO: 273535 - DNA, 20 bp, synthetic construct
  source 1..20: mol_type = other DNA
acaaagaagaaaacagagaa

SEQ ID NO: 273536 - DNA, 20 bp, synthetic construct
  source 1..20: mol_type = other DNA
cacaaagaagaaaacagaga

SEQ ID NO: 273537 - DNA, 20 bp, synthetic construct
  source 1..20: mol_type = other DNA
gcacaaagaagaaaacagag

SEQ ID NO: 273538 - DNA, 20 bp, synthetic construct
  source 1..20: mol_type = other DNA
agcacaaagaagaaaacaga

SEQ ID NO: 273539 - DNA, 20 bp, synthetic construct
  source 1..20: mol_type = other DNA
aagcacaaagaagaaaacag

SEQ ID NO: 273540 - DNA, 20 bp, synthetic construct
  source 1..20: mol_type = other DNA
aaagcacaaagaagaaaaca

SEQ ID NO: 273541 - DNA, 20 bp, synthetic construct
  source 1..20: mol_type = other DNA
aaaagcacaaagaagaaaac

SEQ ID NO: 273542 - DNA, 20 bp, synthetic construct
  source 1..20: mol_type = other DNA
gaaaagcacaaagaagaaaa

SEQ ID NO: 273543 - DNA, 20 bp, synthetic construct
  source 1..20: mol_type = other DNA
agaaaagcacaaagaagaaa

SEQ ID NO: 273544 - DNA, 20 bp, synthetic construct
  source 1..20: mol_type = other DNA
gagaaaagcacaaagaagaa

SEQ ID NO: 273545 - DNA, 20 bp, synthetic construct
  source 1..20: mol_type = other DNA
agagaaaagcacaaagaaga

SEQ ID NO: 273546 - DNA, 20 bp, synthetic construct
  source 1..20: mol_type = other DNA
cagagaaaagcacaaagaag

SEQ ID NO: 273547 - DNA, 20 bp, synthetic construct
  source 1..20: mol_type = other DNA
acagagaaaagcacaaagaa

SEQ ID NO: 273548 - DNA, 20 bp, synthetic construct
  source 1..20: mol_type = other DNA
aacagagaaaagcacaaaga

SEQ ID NO: 273549 - DNA, 20 bp, synthetic construct
  source 1..20: mol_type = other DNA
aaacagagaaaagcacaaag

SEQ ID NO: 273550 - DNA, 20 bp, synthetic construct
  source 1..20: mol_type = other DNA
aaaacagagaaaagcacaaa

SEQ ID NO: 273551 - DNA, 20 bp, synthetic construct
  source 1..20: mol_type = other DNA
gaaaacagagaaaagcacaa

SEQ ID NO: 273552 - DNA, 20 bp, synthetic construct
  source 1..20: mol_type = other DNA
tgaaaacagagaaaagcaca

SEQ ID NO: 273553 - DNA, 20 bp, synthetic construct
  source 1..20: mol_type = other DNA
ctgaaaacagagaaaagcac

SEQ ID NO: 273554 - DNA, 20 bp, synthetic construct
  source 1..20: mol_type = other DNA
cctgaaaacagagaaaagca

SEQ ID NO: 273555 - DNA, 20 bp, synthetic construct
  source 1..20: mol_type = other DNA
tcctgaaaacagagaaaagc

SEQ ID NO: 273556 - DNA, 20 bp, synthetic construct
  source 1..20: mol_type = other DNA
atcctgaaaacagagaaaag

SEQ ID NO: 273557 - DNA, 20 bp, synthetic construct
  source 1..20: mol_type = other DNA
aatcctgaaaacagagaaaa

SEQ ID NO: 273558 - DNA, 20 bp, synthetic construct
  source 1..20: mol_type = other DNA
aaatcctgaaaacagagaaa

SEQ ID NO: 273559 - DNA, 20 bp, synthetic construct
  source 1..20: mol_type = other DNA
caaatcctgaaaacagagaa

SEQ ID NO: 273560 - DNA, 20 bp, synthetic construct
  source 1..20: mol_type = other DNA
gcaaatcctgaaaacagaga

SEQ ID NO: 273561 - DNA, 20 bp, synthetic construct
  source 1..20: mol_type = other DNA
agcaaatcctgaaaacagag

SEQ ID NO: 273562 - DNA, 20 bp, synthetic construct
  source 1..20: mol_type = other DNA
tagcaaatcctgaaaacaga

SEQ ID NO: 273563 - DNA, 20 bp, synthetic construct
  source 1..20: mol_type = other DNA
gtagcaaatcctgaaaacag

SEQ ID NO: 273564 - DNA, 20 bp, synthetic construct
  source 1..20: mol_type = other DNA
tgtagcaaatcctgaaaaca

SEQ ID NO: 273565 - DNA, 20 bp, synthetic construct
  source 1..20: mol_type = other DNA
ctgtagcaaatcctgaaaac

SEQ ID NO: 273566 - DNA, 20 bp, synthetic construct
  source 1..20: mol_type = other DNA
actgtagcaaatcctgaaaa

SEQ ID NO: 273567 - DNA, 20 bp, synthetic construct
  source 1..20: mol_type = other DNA
cactgtagcaaatcctgaaa

SEQ ID NO: 273568 - DNA, 20 bp, synthetic construct
  source 1..20: mol_type = other DNA
tcactgtagcaaatcctgaa

SEQ ID NO: 273569 - DNA, 20 bp, synthetic construct
  source 1..20: mol_type = other DNA
ttcactgtagcaaatcctga

SEQ ID NO: 273570 - DNA, 20 bp, synthetic construct
  source 1..20: mol_type = other DNA
gttcactgtagcaaatcctg

SEQ ID NO: 273571 - DNA, 20 bp, synthetic construct
  source 1..20: mol_type = other DNA
tgttcactgtagcaaatcct

SEQ ID NO: 273572 - DNA, 20 bp, synthetic construct
  source 1..20: mol_type = other DNA
atgttcactgtagcaaatcc

SEQ ID NO: 273573 - DNA, 20 bp, synthetic construct
  source 1..20: mol_type = other DNA
tatgttcactgtagcaaatc

SEQ ID NO: 273574 - DNA, 20 bp, synthetic construct
  source 1..20: mol_type = other DNA
ctatgttcactgtagcaaat

SEQ ID NO: 273575 - DNA, 20 bp, synthetic construct
  source 1..20: mol_type = other DNA
tctatgttcactgtagcaaa

SEQ ID NO: 273576 - DNA, 20 bp, synthetic construct
  source 1..20: mol_type = other DNA
atctatgttcactgtagcaa

SEQ ID NO: 273577 - DNA, 20 bp, synthetic construct
  source 1..20: mol_type = other DNA
aatctatgttcactgtagca

SEQ ID NO: 273578 - DNA, 20 bp, synthetic construct
  source 1..20: mol_type = other DNA
caatctatgttcactgtagc

SEQ ID NO: 273579 - DNA, 20 bp, synthetic construct
  source 1..20: mol_type = other DNA
gcaatctatgttcactgtag

SEQ ID NO: 273580 - DNA, 20 bp, synthetic construct
  source 1..20: mol_type = other DNA
agcaatctatgttcactgta

SEQ ID NO: 273581 - DNA, 20 bp, synthetic construct
  source 1..20: mol_type = other DNA
aagcaatctatgttcactgt

SEQ ID NO: 273582 - DNA, 20 bp, synthetic construct
  source 1..20: mol_type = other DNA
aaagcaatctatgttcactg

SEQ ID NO: 273583 - DNA, 20 bp, synthetic construct
  source 1..20: mol_type = other DNA
caaagcaatctatgttcact

SEQ ID NO: 273584 - DNA, 20 bp, synthetic construct
  source 1..20: mol_type = other DNA
ccaaagcaatctatgttcac

SEQ ID NO: 273585 - DNA, 20 bp, synthetic construct
  source 1..20: mol_type = other DNA
cccaaagcaatctatgttca

SEQ ID NO: 273586 - DNA, 20 bp, synthetic construct
  source 1..20: mol_type = other DNA
ccccaaagcaatctatgttc

SEQ ID NO: 273587 - DNA, 20 bp, synthetic construct
  source 1..20: mol_type = other DNA
gccccaaagcaatctatgtt

SEQ ID NO: 273588 - DNA, 20 bp, synthetic construct
  source 1..20: mol_type = other DNA
ggccccaaagcaatctatgt

SEQ ID NO: 273589 - DNA, 20 bp, synthetic construct
  source 1..20: mol_type = other DNA
gggccccaaagcaatctatg

SEQ ID NO: 273590 - DNA, 20 bp, synthetic construct
  source 1..20: mol_type = other DNA
ggggccccaaagcaatctat

SEQ ID NO: 273591 - DNA, 20 bp, synthetic construct
  source 1..20: mol_type = other DNA
tggggccccaaagcaatcta

SEQ ID NO: 273592 - DNA, 20 bp, synthetic construct
  source 1..20: mol_type = other DNA
ttggggccccaaagcaatct

SEQ ID NO: 273593 - DNA, 20 bp, synthetic construct
  source 1..20: mol_type = other DNA
tttggggccccaaagcaatc

SEQ ID NO: 273594 - DNA, 20 bp, synthetic construct
  source 1..20: mol_type = other DNA
atttggggccccaaagcaat

SEQ ID NO: 273595 - DNA, 20 bp, synthetic construct
  source 1..20: mol_type = other DNA
catttggggccccaaagcaa

SEQ ID NO: 273596 - DNA, 20 bp, synthetic construct
  source 1..20: mol_type = other DNA
ccatttggggccccaaagca

SEQ ID NO: 273597 - DNA, 20 bp, synthetic construct
  source 1..20: mol_type = other DNA
tccatttggggccccaaagc

SEQ ID NO: 273598 - DNA, 20 bp, synthetic construct
  source 1..20: mol_type = other DNA
ttccatttggggccccaaag

SEQ ID NO: 273599 - DNA, 20 bp, synthetic construct
  source 1..20: mol_type = other DNA
attccatttggggccccaaa

SEQ ID NO: 273600 - DNA, 20 bp, synthetic construct
  source 1..20: mol_type = other DNA
aattccatttggggccccaa

SEQ ID NO: 273601 - DNA, 20 bp, synthetic construct
  source 1..20: mol_type = other DNA
taattccatttggggcccca

SEQ ID NO: 273602 - DNA, 20 bp, synthetic construct
  source 1..20: mol_type = other DNA
ataattccatttggggcccc

SEQ ID NO: 273603 - DNA, 20 bp, synthetic construct
  source 1..20: mol_type = other DNA
aataattccatttggggccc

SEQ ID NO: 273604 - DNA, 20 bp, synthetic construct
  source 1..20: mol_type = other DNA
aaataattccatttggggcc

SEQ ID NO: 273605 - DNA, 20 bp, synthetic construct
  source 1..20: mol_type = other DNA
aaaataattccatttggggc

SEQ ID NO: 273606 - DNA, 20 bp, synthetic construct
  source 1..20: mol_type = other DNA
caaaataattccatttgggg

SEQ ID NO: 273607 - DNA, 20 bp, synthetic construct
  source 1..20: mol_type = other DNA
tcaaaataattccatttggg

SEQ ID NO: 273608 - DNA, 20 bp, synthetic construct
  source 1..20: mol_type = other DNA
ttcaaaataattccatttgg

SEQ ID NO: 273609 - DNA, 20 bp, synthetic construct
  source 1..20: mol_type = other DNA
tttcaaaataattccatttg

SEQ ID NO: 273610 - DNA, 20 bp, synthetic construct
  source 1..20: mol_type = other DNA
ctttcaaaataattccattt

SEQ ID NO: 273611 - DNA, 20 bp, synthetic construct
  source 1..20: mol_type = other DNA
cctttcaaaataattccatt

SEQ ID NO: 273612 - DNA, 20 bp, synthetic construct
  source 1..20: mol_type = other DNA
tcctttcaaaataattccat

SEQ ID NO: 273613 - DNA, 20 bp, synthetic construct
  source 1..20: mol_type = other DNA
ttcctttcaaaataattcca

SEQ ID NO: 273614 - DNA, 20 bp, synthetic construct
  source 1..20: mol_type = other DNA
tttcctttcaaaataattcc

SEQ ID NO: 273615 - DNA, 20 bp, synthetic construct
  source 1..20: mol_type = other DNA
ttttcctttcaaaataattc

SEQ ID NO: 273616 - DNA, 20 bp, synthetic construct
  source 1..20: mol_type = other DNA
attttcctttcaaaataatt

SEQ ID NO: 273617 - DNA, 20 bp, synthetic construct
  source 1..20: mol_type = other DNA
cattttcctttcaaaataat

SEQ ID NO: 273618 - DNA, 20 bp, synthetic construct
  source 1..20: mol_type = other DNA
gcattttcctttcaaaataa

SEQ ID NO: 273619 - DNA, 20 bp, synthetic construct
  source 1..20: mol_type = other DNA
tgcattttcctttcaaaata

SEQ ID NO: 273620 - DNA, 20 bp, synthetic construct
  source 1..20: mol_type = other DNA
ctgcattttcctttcaaaat

SEQ ID NO: 273621 - DNA, 20 bp, synthetic construct
  source 1..20: mol_type = other DNA
tctgcattttcctttcaaaa

SEQ ID NO: 273622 - DNA, 20 bp, synthetic construct
  source 1..20: mol_type = other DNA
atctgcattttcctttcaaa

SEQ ID NO: 273623 - DNA, 20 bp, synthetic construct
  source 1..20: mol_type = other DNA
tatctgcattttcctttcaa

SEQ ID NO: 273624 - DNA, 20 bp, synthetic construct
  source 1..20: mol_type = other DNA
ttatctgcattttcctttca

SEQ ID NO: 273625 - DNA, 20 bp, synthetic construct
  source 1..20: mol_type = other DNA
attatctgcattttcctttc

SEQ ID NO: 273626 - DNA, 20 bp, synthetic construct
  source 1..20: mol_type = other DNA
gattatctgcattttccttt

SEQ ID NO: 273627 - DNA, 20 bp, synthetic construct
  source 1..20: mol_type = other DNA
tgattatctgcattttcctt

SEQ ID NO: 273628 - DNA, 20 bp, synthetic construct
  source 1..20: mol_type = other DNA
ctgattatctgcattttcct

SEQ ID NO: 273629 - DNA, 20 bp, synthetic construct
  source 1..20: mol_type = other DNA
cctgattatctgcattttcc

SEQ ID NO: 273630 - DNA, 20 bp, synthetic construct
  source 1..20: mol_type = other DNA
acctgattatctgcattttc

SEQ ID NO: 273631 - DNA, 20 bp, synthetic construct
  source 1..20: mol_type = other DNA
cacctgattatctgcatttt

SEQ ID NO: 273632 - DNA, 20 bp, synthetic construct
  source 1..20: mol_type = other DNA
ccacctgattatctgcattt

SEQ ID NO: 273633 - DNA, 20 bp, synthetic construct
  source 1..20: mol_type = other DNA
gccacctgattatctgcatt

SEQ ID NO: 273634 - DNA, 20 bp, synthetic construct
  source 1..20: mol_type = other DNA
ggccacctgattatctgcat

SEQ ID NO: 273635 - DNA, 20 bp, synthetic construct
  source 1..20: mol_type = other DNA
cggccacctgattatctgca

SEQ ID NO: 273636 - DNA, 20 bp, synthetic construct
  source 1..20: mol_type = other DNA
gcggccacctgattatctgc

SEQ ID NO: 273637 - DNA, 20 bp, synthetic construct
  source 1..20: mol_type = other DNA
tgcggccacctgattatctg

SEQ ID NO: 273638 - DNA, 20 bp, synthetic construct
  source 1..20: mol_type = other DNA
gtgcggccacctgattatct

SEQ ID NO: 273639 - DNA, 20 bp, synthetic construct
  source 1..20: mol_type = other DNA
agtgcggccacctgattatc

SEQ ID NO: 273640 - DNA, 20 bp, synthetic construct
  source 1..20: mol_type = other DNA
cagtgcggccacctgattat

SEQ ID NO: 273641 - DNA, 20 bp, synthetic construct
  source 1..20: mol_type = other DNA
ccagtgcggccacctgatta

SEQ ID NO: 273642 - DNA, 20 bp, synthetic construct
  source 1..20: mol_type = other DNA
tccagtgcggccacctgatt

SEQ ID NO: 273643 - DNA, 20 bp, synthetic construct
  source 1..20: mol_type = other DNA
ctccagtgcggccacctgat

SEQ ID NO: 273644 - DNA, 20 bp, synthetic construct
  source 1..20: mol_type = other DNA
gctccagtgcggccacctga

SEQ ID NO: 273645 - DNA, 20 bp, synthetic construct
  source 1..20: mol_type = other DNA
tgctccagtgcggccacctg

SEQ ID NO: 273646 - DNA, 20 bp, synthetic construct
  source 1..20: mol_type = other DNA
gtgctccagtgcggccacct

SEQ ID NO: 273647 - DNA, 20 bp, synthetic construct
  source 1..20: mol_type = other DNA
ggtgctccagtgcggccacc

SEQ ID NO: 273648 - DNA, 20 bp, synthetic construct
  source 1..20: mol_type = other DNA
tggtgctccagtgcggccac

SEQ ID NO: 273649 - DNA, 20 bp, synthetic construct
  source 1..20: mol_type = other DNA
ctggtgctccagtgcggcca

SEQ ID NO: 273650 - DNA, 20 bp, synthetic construct
  source 1..20: mol_type = other DNA
gctggtgctccagtgcggcc

SEQ ID NO: 273651 - DNA, 20 bp, synthetic construct
  source 1..20: mol_type = other DNA
agctggtgctccagtgcggc

SEQ ID NO: 273652 - DNA, 20 bp, synthetic construct
  source 1..20: mol_type = other DNA
cagctggtgctccagtgcgg

SEQ ID NO: 273653 - DNA, 20 bp, synthetic construct
  source 1..20: mol_type = other DNA
ccagctggtgctccagtgcg

SEQ ID NO: 273654 - DNA, 20 bp, synthetic construct
  source 1..20: mol_type = other DNA
cccagctggtgctccagtgc

SEQ ID NO: 273655 - DNA, 20 bp, synthetic construct
  source 1..20: mol_type = other DNA
acccagctggtgctccagtg

SEQ ID NO: 273656 - DNA, 20 bp, synthetic construct
  source 1..20: mol_type = other DNA
tacccagctggtgctccagt

SEQ ID NO: 273657 - DNA, 20 bp, synthetic construct
  source 1..20: mol_type = other DNA
ctacccagctggtgctccag

SEQ ID NO: 273658 - DNA, 20 bp, synthetic construct
  source 1..20: mol_type = other DNA
cctacccagctggtgctcca

SEQ ID NO: 273659 - DNA, 20 bp, synthetic construct
  source 1..20: mol_type = other DNA
ccctacccagctggtgctcc

SEQ ID NO: 273660 - DNA, 20 bp, synthetic construct
  source 1..20: mol_type = other DNA
cccctacccagctggtgctc

SEQ ID NO: 273661 - DNA, 20 bp, synthetic construct
  source 1..20: mol_type = other DNA
acccctacccagctggtgct

SEQ ID NO: 273662 - DNA, 20 bp, synthetic construct
  source 1..20: mol_type = other DNA
tacccctacccagctggtgc

SEQ ID NO: 273663 - DNA, 20 bp, synthetic construct
  source 1..20: mol_type = other DNA
ctacccctacccagctggtg

SEQ ID NO: 273664 - DNA, 20 bp, synthetic construct
  source 1..20: mol_type = other DNA
tctacccctacccagctggt

SEQ ID NO: 273665 - DNA, 20 bp, synthetic construct
  source 1..20: mol_type = other DNA
ctctacccctacccagctgg

SEQ ID NO: 273666 - DNA, 20 bp, synthetic construct
  source 1..20: mol_type = other DNA
tctctacccctacccagctg

SEQ ID NO: 273667 - DNA, 20 bp, synthetic construct
  source 1..20: mol_type = other DNA
atctctacccctacccagct

SEQ ID NO: 273668 - DNA, 20 bp, synthetic construct
  source 1..20: mol_type = other DNA
aatctctacccctacccagc

SEQ ID NO: 273669 - DNA, 20 bp, synthetic construct
  source 1..20: mol_type = other DNA
caatctctacccctacccag

SEQ ID NO: 273670 - DNA, 20 bp, synthetic construct
  source 1..20: mol_type = other DNA
gcaatctctacccctaccca

SEQ ID NO: 273671 - DNA, 20 bp, synthetic construct
  source 1..20: mol_type = other DNA
tgcaatctctacccctaccc

SEQ ID NO: 273672 - DNA, 20 bp, synthetic construct
  source 1..20: mol_type = other DNA
ctgcaatctctacccctacc

SEQ ID NO: 273673 - DNA, 20 bp, synthetic construct
  source 1..20: mol_type = other DNA
cctgcaatctctacccctac

SEQ ID NO: 273674 - DNA, 20 bp, synthetic construct
  source 1..20: mol_type = other DNA
gcctgcaatctctaccccta

SEQ ID NO: 273675 - DNA, 20 bp, synthetic construct
  source 1..20: mol_type = other DNA
tgcctgcaatctctacccct

SEQ ID NO: 273676 - DNA, 20 bp, synthetic construct
  source 1..20: mol_type = other DNA
ttgcctgcaatctctacccc

SEQ ID NO: 273677 - DNA, 20 bp, synthetic construct
  source 1..20: mol_type = other DNA
cttgcctgcaatctctaccc

SEQ ID NO: 273678 - DNA, 20 bp, synthetic construct
  source 1..20: mol_type = other DNA
ccttgcctgcaatctctacc

SEQ ID NO: 273679 - DNA, 20 bp, synthetic construct
  source 1..20: mol_type = other DNA
tccttgcctgcaatctctac

SEQ ID NO: 273680 - DNA, 20 bp, synthetic construct
  source 1..20: mol_type = other DNA
ctccttgcctgcaatctcta

SEQ ID NO: 273681 - DNA, 20 bp, synthetic construct
  source 1..20: mol_type = other DNA
cctccttgcctgcaatctct

SEQ ID NO: 273682 - DNA, 20 bp, synthetic construct
  source 1..20: mol_type = other DNA
tcctccttgcctgcaatctc

SEQ ID NO: 273683 - DNA, 20 bp, synthetic construct
  source 1..20: mol_type = other DNA
ctcctccttgcctgcaatct

SEQ ID NO: 273684 - DNA, 20 bp, synthetic construct
  source 1..20: mol_type = other DNA
cctcctccttgcctgcaatc

SEQ ID NO: 273685 - DNA, 20 bp, synthetic construct
  source 1..20: mol_type = other DNA
tcctcctccttgcctgcaat

SEQ ID NO: 273686 - DNA, 20 bp, synthetic construct
  source 1..20: mol_type = other DNA
ctcctcctccttgcctgcaa

SEQ ID NO: 273687 - DNA, 20 bp, synthetic construct
  source 1..20: mol_type = other DNA
gctcctcctccttgcctgca

SEQ ID NO: 273688 - DNA, 20 bp, synthetic construct
  source 1..20: mol_type = other DNA
agctcctcctccttgcctgc

SEQ ID NO: 273689 - DNA, 20 bp, synthetic construct
  source 1..20: mol_type = other DNA
cagctcctcctccttgcctg

SEQ ID NO: 273690 - DNA, 20 bp, synthetic construct
  source 1..20: mol_type = other DNA
ccagctcctcctccttgcct

SEQ ID NO: 273691 - DNA, 20 bp, synthetic construct
  source 1..20: mol_type = other DNA
cccagctcctcctccttgcc

SEQ ID NO: 273692 - DNA, 20 bp, synthetic construct
  source 1..20: mol_type = other DNA
acccagctcctcctccttgc

SEQ ID NO: 273693 - DNA, 20 bp, synthetic construct
  source 1..20: mol_type = other DNA
cacccagctcctcctccttg

SEQ ID NO: 273694 - DNA, 20 bp, synthetic construct
  source 1..20: mol_type = other DNA
ccacccagctcctcctcctt

SEQ ID NO: 273695 - DNA, 20 bp, synthetic construct
  source 1..20: mol_type = other DNA
cccacccagctcctcctcct

SEQ ID NO: 273696 - DNA, 20 bp, synthetic construct
  source 1..20: mol_type = other DNA
ccccacccagctcctcctcc

SEQ ID NO: 273697 - DNA, 20 bp, synthetic construct
  source 1..20: mol_type = other DNA
accccacccagctcctcctc

SEQ ID NO: 273698 - DNA, 20 bp, synthetic construct
  source 1..20: mol_type = other DNA
caccccacccagctcctcct

SEQ ID NO: 273699 - DNA, 20 bp, synthetic construct
  source 1..20: mol_type = other DNA
gcaccccacccagctcctcc

SEQ ID NO: 273700 - DNA, 20 bp, synthetic construct
  source 1..20: mol_type = other DNA
ggcaccccacccagctcctc

SEQ ID NO: 273701 - DNA, 20 bp, synthetic construct
  source 1..20: mol_type = other DNA
tggcaccccacccagctcct

SEQ ID NO: 273702 - DNA, 20 bp, synthetic construct
  source 1..20: mol_type = other DNA
ctggcaccccacccagctcc

SEQ ID NO: 273703 - DNA, 20 bp, synthetic construct
  source 1..20: mol_type = other DNA
cctggcaccccacccagctc

SEQ ID NO: 273704 - DNA, 20 bp, synthetic construct
  source 1..20: mol_type = other DNA
gcctggcaccccacccagct

SEQ ID NO: 273705 - DNA, 20 bp, synthetic construct
  source 1..20: mol_type = other DNA
tgcctggcaccccacccagc

SEQ ID NO: 273706 - DNA, 20 bp, synthetic construct
  source 1..20: mol_type = other DNA
ctgcctggcaccccacccag

SEQ ID NO: 273707 - DNA, 20 bp, synthetic construct
  source 1..20: mol_type = other DNA
cctgcctggcaccccaccca

SEQ ID NO: 273708 - DNA, 20 bp, synthetic construct
  source 1..20: mol_type = other DNA
tcctgcctggcaccccaccc

SEQ ID NO: 273709 - DNA, 20 bp, synthetic construct
  source 1..20: mol_type = other DNA
ttcctgcctggcaccccacc

SEQ ID NO: 273710 - DNA, 20 bp, synthetic construct
  source 1..20: mol_type = other DNA
cttcctgcctggcaccccac

SEQ ID NO: 273711 - DNA, 20 bp, synthetic construct
  source 1..20: mol_type = other DNA
tcttcctgcctggcacccca

SEQ ID NO: 273712 - DNA, 20 bp, synthetic construct
  source 1..20: mol_type = other DNA
ctcttcctgcctggcacccc

SEQ ID NO: 273713 - DNA, 20 bp, synthetic construct
  source 1..20: mol_type = other DNA
gctcttcctgcctggcaccc

SEQ ID NO: 273714 - DNA, 20 bp, synthetic construct
  source 1..20: mol_type = other DNA
ggctcttcctgcctggcacc

SEQ ID NO: 273715 - DNA, 20 bp, synthetic construct
  source 1..20: mol_type = other DNA
gggctcttcctgcctggcac

SEQ ID NO: 273716 - DNA, 20 bp, synthetic construct
  source 1..20: mol_type = other DNA
cgggctcttcctgcctggca

SEQ ID NO: 273717 - DNA, 20 bp, synthetic construct
  source 1..20: mol_type = other DNA
acgggctcttcctgcctggc

SEQ ID NO: 273718 - DNA, 20 bp, synthetic construct
  source 1..20: mol_type = other DNA
tacgggctcttcctgcctgg

SEQ ID NO: 273719 - DNA, 20 bp, synthetic construct
  source 1..20: mol_type = other DNA
ctacgggctcttcctgcctg

SEQ ID NO: 273720 - DNA, 20 bp, synthetic construct
  source 1..20: mol_type = other DNA
cctacgggctcttcctgcct

SEQ ID NO: 273721 - DNA, 20 bp, synthetic construct
  source 1..20: mol_type = other DNA
gcctacgggctcttcctgcc

SEQ ID NO: 273722 - DNA, 20 bp, synthetic construct
  source 1..20: mol_type = other DNA
ggcctacgggctcttcctgc

SEQ ID NO: 273723 - DNA, 20 bp, synthetic construct
  source 1..20: mol_type = other DNA
gggcctacgggctcttcctg

SEQ ID NO: 273724 - DNA, 20 bp, synthetic construct
  source 1..20: mol_type = other DNA
ggggcctacgggctcttcct

SEQ ID NO: 273725 - DNA, 20 bp, synthetic construct
  source 1..20: mol_type = other DNA
cggggcctacgggctcttcc

SEQ ID NO: 273726 - DNA, 20 bp, synthetic construct
  source 1..20: mol_type = other DNA
gcggggcctacgggctcttc

SEQ ID NO: 273727 - DNA, 20 bp, synthetic construct
  source 1..20: mol_type = other DNA
ggcggggcctacgggctctt

SEQ ID NO: 273728 - DNA, 20 bp, synthetic construct
  source 1..20: mol_type = other DNA
cggcggggcctacgggctct

SEQ ID NO: 273729 - DNA, 20 bp, synthetic construct
  source 1..20: mol_type = other DNA
tcggcggggcctacgggctc

SEQ ID NO: 273730 - DNA, 20 bp, synthetic construct
  source 1..20: mol_type = other DNA
atcggcggggcctacgggct

SEQ ID NO: 273731 - DNA, 20 bp, synthetic construct
  source 1..20: mol_type = other DNA
gatcggcggggcctacgggc

SEQ ID NO: 273732 - DNA, 20 bp, synthetic construct
  source 1..20: mol_type = other DNA
agatcggcggggcctacggg

SEQ ID NO: 273733 - DNA, 20 bp, synthetic construct
  source 1..20: mol_type = other DNA
aagatcggcggggcctacgg

SEQ ID NO: 273734 - DNA, 20 bp, synthetic construct
  source 1..20: mol_type = other DNA
caagatcggcggggcctacg

SEQ ID NO: 273735 - DNA, 20 bp, synthetic construct
  source 1..20: mol_type = other DNA
acaagatcggcggggcctac

SEQ ID NO: 273736 - DNA, 20 bp, synthetic construct
  source 1..20: mol_type = other DNA
cacaagatcggcggggccta

SEQ ID NO: 273737 - DNA, 20 bp, synthetic construct
  source 1..20: mol_type = other DNA
ccacaagatcggcggggcct

SEQ ID NO: 273738 - DNA, 20 bp, synthetic construct
  source 1..20: mol_type = other DNA
cccacaagatcggcggggcc

SEQ ID NO: 273739 - DNA, 20 bp, synthetic construct
  source 1..20: mol_type = other DNA
tcccacaagatcggcggggc

SEQ ID NO: 273740 - DNA, 20 bp, synthetic construct
  source 1..20: mol_type = other DNA
ctcccacaagatcggcgggg

SEQ ID NO: 273741 - DNA, 20 bp, synthetic construct
  source 1..20: mol_type = other DNA
actcccacaagatcggcggg

SEQ ID NO: 273742 - DNA, 20 bp, synthetic construct
  source 1..20: mol_type = other DNA
gactcccacaagatcggcgg

SEQ ID NO: 273743 - DNA, 20 bp, synthetic construct
  source 1..20: mol_type = other DNA
cgactcccacaagatcggcg

SEQ ID NO: 273744 - DNA, 20 bp, synthetic construct
  source 1..20: mol_type = other DNA
acgactcccacaagatcggc

SEQ ID NO: 273745 - DNA, 20 bp, synthetic construct
  source 1..20: mol_type = other DNA
cacgactcccacaagatcgg

SEQ ID NO: 273746 - DNA, 20 bp, synthetic construct
  source 1..20: mol_type = other DNA
ccacgactcccacaagatcg

SEQ ID NO: 273747 - DNA, 20 bp, synthetic construct
  source 1..20: mol_type = other DNA
cccacgactcccacaagatc

SEQ ID NO: 273748 - DNA, 20 bp, synthetic construct
  source 1..20: mol_type = other DNA
acccacgactcccacaagat

SEQ ID NO: 273749 - DNA, 20 bp, synthetic construct
  source 1..20: mol_type = other DNA
cacccacgactcccacaaga

SEQ ID NO: 273750 - DNA, 20 bp, synthetic construct
  source 1..20: mol_type = other DNA
ccacccacgactcccacaag

SEQ ID NO: 273751 - DNA, 20 bp, synthetic construct
  source 1..20: mol_type = other DNA
gccacccacgactcccacaa

SEQ ID NO: 273752 - DNA, 20 bp, synthetic construct
  source 1..20: mol_type = other DNA
tgccacccacgactcccaca

SEQ ID NO: 273753 - DNA, 20 bp, synthetic construct
  source 1..20: mol_type = other DNA
ctgccacccacgactcccac

SEQ ID NO: 273754 - DNA, 20 bp, synthetic construct
  source 1..20: mol_type = other DNA
actgccacccacgactccca

SEQ ID NO: 273755 - DNA, 20 bp, synthetic construct
  source 1..20: mol_type = other DNA
cactgccacccacgactccc

SEQ ID NO: 273756 - DNA, 20 bp, synthetic construct
  source 1..20: mol_type = other DNA
acactgccacccacgactcc

SEQ ID NO: 273757 - DNA, 20 bp, synthetic construct
  source 1..20: mol_type = other DNA
aacactgccacccacgactc

SEQ ID NO: 273758 - DNA, 20 bp, synthetic construct
  source 1..20: mol_type = other DNA
gaacactgccacccacgact

SEQ ID NO: 273759 - DNA, 20 bp, synthetic construct
  source 1..20: mol_type = other DNA
ggaacactgccacccacgac

SEQ ID NO: 273760 - DNA, 20 bp, synthetic construct
  source 1..20: mol_type = other DNA
gggaacactgccacccacga

SEQ ID NO: 273761 - DNA, 20 bp, synthetic construct
  source 1..20: mol_type = other DNA
agggaacactgccacccacg

SEQ ID NO: 273762 - DNA, 20 bp, synthetic construct
  source 1..20: mol_type = other DNA
gagggaacactgccacccac

SEQ ID NO: 273763 - DNA, 20 bp, synthetic construct
  source 1..20: mol_type = other DNA
ggagggaacactgccaccca

SEQ ID NO: 273764 - DNA, 20 bp, synthetic construct
  source 1..20: mol_type = other DNA
tggagggaacactgccaccc

SEQ ID NO: 273765 - DNA, 20 bp, synthetic construct
  source 1..20: mol_type = other DNA
ctggagggaacactgccacc

SEQ ID NO: 273766 - DNA, 20 bp, synthetic construct
  source 1..20: mol_type = other DNA
tctggagggaacactgccac

SEQ ID NO: 273767 - DNA, 20 bp, synthetic construct
  source 1..20: mol_type = other DNA
gtctggagggaacactgcca

SEQ ID NO: 273768 - DNA, 20 bp, synthetic construct
  source 1..20: mol_type = other DNA
agtctggagggaacactgcc

SEQ ID NO: 273769 - DNA, 20 bp, synthetic construct
  source 1..20: mol_type = other DNA
cagtctggagggaacactgc

SEQ ID NO: 273770 - DNA, 20 bp, synthetic construct
  source 1..20: mol_type = other DNA
acagtctggagggaacactg

SEQ ID NO: 273771 - DNA, 20 bp, synthetic construct
  source 1..20: mol_type = other DNA
tacagtctggagggaacact

SEQ ID NO: 273772 - DNA, 20 bp, synthetic construct
  source 1..20: mol_type = other DNA
ttacagtctggagggaacac

SEQ ID NO: 273773 - DNA, 20 bp, synthetic construct
  source 1..20: mol_type = other DNA
tttacagtctggagggaaca

SEQ ID NO: 273774 - DNA, 20 bp, synthetic construct
  source 1..20: mol_type = other DNA
ttttacagtctggagggaac

SEQ ID NO: 273775 - DNA, 20 bp, synthetic construct
  source 1..20: mol_type = other DNA
cttttacagtctggagggaa

SEQ ID NO: 273776 - DNA, 20 bp, synthetic construct
  source 1..20: mol_type = other DNA
ccttttacagtctggaggga

SEQ ID NO: 273777 - DNA, 20 bp, synthetic construct
  source 1..20: mol_type = other DNA
cccttttacagtctggaggg

SEQ ID NO: 273778 - DNA, 20 bp, synthetic construct
  source 1..20: mol_type = other DNA
tcccttttacagtctggagg

SEQ ID NO: 273779 - DNA, 20 bp, synthetic construct
  source 1..20: mol_type = other DNA
ctcccttttacagtctggag

SEQ ID NO: 273780 - DNA, 20 bp, synthetic construct
  source 1..20: mol_type = other DNA
gctcccttttacagtctgga

SEQ ID NO: 273781 - DNA, 20 bp, synthetic construct
  source 1..20: mol_type = other DNA
tgctcccttttacagtctgg

SEQ ID NO: 273782 - DNA, 20 bp, synthetic construct
  source 1..20: mol_type = other DNA
gtgctcccttttacagtctg

SEQ ID NO: 273783 - DNA, 20 bp, synthetic construct
  source 1..20: mol_type = other DNA
ggtgctcccttttacagtct

SEQ ID NO: 273784 - DNA, 20 bp, synthetic construct
  source 1..20: mol_type = other DNA
aggtgctcccttttacagtc

SEQ ID NO: 273785 - DNA, 20 bp, synthetic construct
  source 1..20: mol_type = other DNA
caggtgctcccttttacagt

SEQ ID NO: 273786 - DNA, 20 bp, synthetic construct
  source 1..20: mol_type = other DNA
ccaggtgctcccttttacag

SEQ ID NO: 273787 - DNA, 20 bp, synthetic construct
  source 1..20: mol_type = other DNA
gccaggtgctcccttttaca

SEQ ID NO: 273788 - DNA, 20 bp, synthetic construct
  source 1..20: mol_type = other DNA
cgccaggtgctcccttttac

SEQ ID NO: 273789 - DNA, 20 bp, synthetic construct
  source 1..20: mol_type = other DNA
ccgccaggtgctccctttta

SEQ ID NO: 273790 - DNA, 20 bp, synthetic construct
  source 1..20: mol_type = other DNA
cccgccaggtgctccctttt

SEQ ID NO: 273791 - DNA, 20 bp, synthetic construct
  source 1..20: mol_type = other DNA
tcccgccaggtgctcccttt

SEQ ID NO: 273792 - DNA, 20 bp, synthetic construct
  source 1..20: mol_type = other DNA
ttcccgccaggtgctccctt

SEQ ID NO: 273793 - DNA, 20 bp, synthetic construct
  source 1..20: mol_type = other DNA
cttcccgccaggtgctccct

SEQ ID NO: 273794 - DNA, 20 bp, synthetic construct
  source 1..20: mol_type = other DNA
tcttcccgccaggtgctccc

SEQ ID NO: 273795 - DNA, 20 bp, synthetic construct
  source 1..20: mol_type = other DNA
ctcttcccgccaggtgctcc

SEQ ID NO: 273796 - DNA, 20 bp, synthetic construct
  source 1..20: mol_type = other DNA
cctcttcccgccaggtgctc

SEQ ID NO: 273797 - DNA, 20 bp, synthetic construct
  source 1..20: mol_type = other DNA
ccctcttcccgccaggtgct

SEQ ID NO: 273798 - DNA, 20 bp, synthetic construct
  source 1..20: mol_type = other DNA
tccctcttcccgccaggtgc

SEQ ID NO: 273799 - DNA, 20 bp, synthetic construct
  source 1..20: mol_type = other DNA
ttccctcttcccgccaggtg

SEQ ID NO: 273800 - DNA, 20 bp, synthetic construct
  source 1..20: mol_type = other DNA
attccctcttcccgccaggt

SEQ ID NO: 273801 - DNA, 20 bp, synthetic construct
  source 1..20: mol_type = other DNA
aattccctcttcccgccagg

SEQ ID NO: 273802 - DNA, 20 bp, synthetic construct
  source 1..20: mol_type = other DNA
gaattccctcttcccgccag

SEQ ID NO: 273803 - DNA, 20 bp, synthetic construct
  source 1..20: mol_type = other DNA
agaattccctcttcccgcca

SEQ ID NO: 273804 - DNA, 20 bp, synthetic construct
  source 1..20: mol_type = other DNA
aagaattccctcttcccgcc

SEQ ID NO: 273805 - DNA, 20 bp, synthetic construct
  source 1..20: mol_type = other DNA
aaagaattccctcttcccgc

SEQ ID NO: 273806 - DNA, 20 bp, synthetic construct
  source 1..20: mol_type = other DNA
aaaagaattccctcttcccg

SEQ ID NO: 273807 - DNA, 20 bp, synthetic construct
  source 1..20: mol_type = other DNA
taaaagaattccctcttccc

SEQ ID NO: 273808 - DNA, 20 bp, synthetic construct
  source 1..20: mol_type = other DNA
ttaaaagaattccctcttcc

SEQ ID NO: 273809 - DNA, 20 bp, synthetic construct
  source 1..20: mol_type = other DNA
tttaaaagaattccctcttc

SEQ ID NO: 273810 - DNA, 20 bp, synthetic construct
  source 1..20: mol_type = other DNA
gtttaaaagaattccctctt

SEQ ID NO: 273811 - DNA, 20 bp, synthetic construct
  source 1..20: mol_type = other DNA
tgtttaaaagaattccctct

SEQ ID NO: 273812 - DNA, 20 bp, synthetic construct
  source 1..20: mol_type = other DNA
atgtttaaaagaattccctc

SEQ ID NO: 273813 - DNA, 20 bp, synthetic construct
  source 1..20: mol_type = other DNA
gatgtttaaaagaattccct

SEQ ID NO: 273814 - DNA, 20 bp, synthetic construct
  source 1..20: mol_type = other DNA
tgatgtttaaaagaattccc

SEQ ID NO: 273815 - DNA, 20 bp, synthetic construct
  source 1..20: mol_type = other DNA
atgatgtttaaaagaattcc

SEQ ID NO: 273816 - DNA, 20 bp, synthetic construct
  source 1..20: mol_type = other DNA
aatgatgtttaaaagaattc

SEQ ID NO: 273817 - DNA, 20 bp, synthetic construct
  source 1..20: mol_type = other DNA
gaatgatgtttaaaagaatt

SEQ ID NO: 273818 - DNA, 20 bp, synthetic construct
  source 1..20: mol_type = other DNA
ggaatgatgtttaaaagaat

SEQ ID NO: 273819 - DNA, 20 bp, synthetic construct
  source 1..20: mol_type = other DNA
tggaatgatgtttaaaagaa

SEQ ID NO: 273820 - DNA, 20 bp, synthetic construct
  source 1..20: mol_type = other DNA
ctggaatgatgtttaaaaga

SEQ ID NO: 273821 - DNA, 20 bp, synthetic construct
  source 1..20: mol_type = other DNA
actggaatgatgtttaaaag

SEQ ID NO: 273822 - DNA, 20 bp, synthetic construct
  source 1..20: mol_type = other DNA
cactggaatgatgtttaaaa

SEQ ID NO: 273823 - DNA, 20 bp, synthetic construct
  source 1..20: mol_type = other DNA
gcactggaatgatgtttaaa

SEQ ID NO: 273824 - DNA, 20 bp, synthetic construct
  source 1..20: mol_type = other DNA
ggcactggaatgatgtttaa

SEQ ID NO: 273825 - DNA, 20 bp, synthetic construct
  source 1..20: mol_type = other DNA
gggcactggaatgatgttta

SEQ ID NO: 273826 - DNA, 20 bp, synthetic construct
  source 1..20: mol_type = other DNA
cgggcactggaatgatgttt

SEQ ID NO: 273827 - DNA, 20 bp, synthetic construct
  source 1..20: mol_type = other DNA
tcgggcactggaatgatgtt

SEQ ID NO: 273828 - DNA, 20 bp, synthetic construct
  source 1..20: mol_type = other DNA
ctcgggcactggaatgatgt

SEQ ID NO: 273829 - DNA, 20 bp, synthetic construct
  source 1..20: mol_type = other DNA
gctcgggcactggaatgatg

SEQ ID NO: 273830 - DNA, 20 bp, synthetic construct
  source 1..20: mol_type = other DNA
ggctcgggcactggaatgat

SEQ ID NO: 273831 - DNA, 20 bp, synthetic construct
  source 1..20: mol_type = other DNA
aggctcgggcactggaatga

SEQ ID NO: 273832 - DNA, 20 bp, synthetic construct
  source 1..20: mol_type = other DNA
gaggctcgggcactggaatg

SEQ ID NO: 273833 - DNA, 20 bp, synthetic construct
  source 1..20: mol_type = other DNA
ggaggctcgggcactggaat

SEQ ID NO: 273834 - DNA, 20 bp, synthetic construct
  source 1..20: mol_type = other DNA
aggaggctcgggcactggaa

SEQ ID NO: 273835 - DNA, 20 bp, synthetic construct
  source 1..20: mol_type = other DNA
caggaggctcgggcactgga

SEQ ID NO: 273836 - DNA, 20 bp, synthetic construct
  source 1..20: mol_type = other DNA
ccaggaggctcgggcactgg

SEQ ID NO: 273837 - DNA, 20 bp, synthetic construct
  source 1..20: mol_type = other DNA
tccaggaggctcgggcactg

SEQ ID NO: 273838 - DNA, 20 bp, synthetic construct
  source 1..20: mol_type = other DNA
gtccaggaggctcgggcact

SEQ ID NO: 273839 - DNA, 20 bp, synthetic construct
  source 1..20: mol_type = other DNA
ggtccaggaggctcgggcac

SEQ ID NO: 273840 - DNA, 20 bp, synthetic construct
  source 1..20: mol_type = other DNA
aggtccaggaggctcgggca

SEQ ID NO: 273841 - DNA, 20 bp, synthetic construct
  source 1..20: mol_type = other DNA
caggtccaggaggctcgggc

SEQ ID NO: 273842 - DNA, 20 bp, synthetic construct
  source 1..20: mol_type = other DNA
acaggtccaggaggctcggg

SEQ ID NO: 273843 - DNA, 20 bp, synthetic construct
  source 1..20: mol_type = other DNA
aacaggtccaggaggctcgg

SEQ ID NO: 273844 - DNA, 20 bp, synthetic construct
  source 1..20: mol_type = other DNA
caacaggtccaggaggctcg

SEQ ID NO: 273845 - DNA, 20 bp, synthetic construct
  source 1..20: mol_type = other DNA
acaacaggtccaggaggctc

SEQ ID NO: 273846 - DNA, 20 bp, synthetic construct
  source 1..20: mol_type = other DNA
gacaacaggtccaggaggct

SEQ ID NO: 273847 - DNA, 20 bp, synthetic construct
  source 1..20: mol_type = other DNA
tgacaacaggtccaggaggc

SEQ ID NO: 273848 - DNA, 20 bp, synthetic construct
  source 1..20: mol_type = other DNA
atgacaacaggtccaggagg

SEQ ID NO: 273849 - DNA, 20 bp, synthetic construct
  source 1..20: mol_type = other DNA
gatgacaacaggtccaggag

SEQ ID NO: 273850 - DNA, 20 bp, synthetic construct
  source 1..20: mol_type = other DNA
agatgacaacaggtccagga

SEQ ID NO: 273851 - DNA, 20 bp, synthetic construct
  source 1..20: mol_type = other DNA
aagatgacaacaggtccagg

SEQ ID NO: 273852 - DNA, 20 bp, synthetic construct
  source 1..20: mol_type = other DNA
caagatgacaacaggtccag

SEQ ID NO: 273853 - DNA, 20 bp, synthetic construct
  source 1..20: mol_type = other DNA
tcaagatgacaacaggtcca

SEQ ID NO: 273854 - DNA, 20 bp, synthetic construct
  source 1..20: mol_type = other DNA
ctcaagatgacaacaggtcc

SEQ ID NO: 273855 - DNA, 20 bp, synthetic construct
  source 1..20: mol_type = other DNA
cctcaagatgacaacaggtc

SEQ ID NO: 273856 - DNA, 20 bp, synthetic construct
  source 1..20: mol_type = other DNA
acctcaagatgacaacaggt

SEQ ID NO: 273857 - DNA, 20 bp, synthetic construct
  source 1..20: mol_type = other DNA
cacctcaagatgacaacagg

SEQ ID NO: 273858 - DNA, 20 bp, synthetic construct
  source 1..20: mol_type = other DNA
ccacctcaagatgacaacag

SEQ ID NO: 273859 - DNA, 20 bp, synthetic construct
  source 1..20: mol_type = other DNA
cccacctcaagatgacaaca

SEQ ID NO: 273860 - DNA, 20 bp, synthetic construct
  source 1..20: mol_type = other DNA
gcccacctcaagatgacaac

SEQ ID NO: 273861 - DNA, 20 bp, synthetic construct
  source 1..20: mol_type = other DNA
ggcccacctcaagatgacaa

SEQ ID NO: 273862 - DNA, 20 bp, synthetic construct
  source 1..20: mol_type = other DNA
aggcccacctcaagatgaca

SEQ ID NO: 273863 - DNA, 20 bp, synthetic construct
  source 1..20: mol_type = other DNA
gaggcccacctcaagatgac

SEQ ID NO: 273864 - DNA, 20 bp, synthetic construct
  source 1..20: mol_type = other DNA
ggaggcccacctcaagatga

SEQ ID NO: 273865 - DNA, 20 bp, synthetic construct
  source 1..20: mol_type = other DNA
gggaggcccacctcaagatg

SEQ ID NO: 273866 - DNA, 20 bp, synthetic construct
  source 1..20: mol_type = other DNA
ggggaggcccacctcaagat

SEQ ID NO: 273867 - DNA, 20 bp, synthetic construct
  source 1..20: mol_type = other DNA
aggggaggcccacctcaaga

SEQ ID NO: 273868 - DNA, 20 bp, synthetic construct
  source 1..20: mol_type = other DNA
caggggaggcccacctcaag

SEQ ID NO: 273869 - DNA, 20 bp, synthetic construct
  source 1..20: mol_type = other DNA
ccaggggaggcccacctcaa

SEQ ID NO: 273870 - DNA, 20 bp, synthetic construct
  source 1..20: mol_type = other DNA
cccaggggaggcccacctca

SEQ ID NO: 273871 - DNA, 20 bp, synthetic construct
  source 1..20: mol_type = other DNA
acccaggggaggcccacctc

SEQ ID NO: 273872 - DNA, 20 bp, synthetic construct
  source 1..20: mol_type = other DNA
cacccaggggaggcccacct

SEQ ID NO: 273873 - DNA, 20 bp, synthetic construct
  source 1..20: mol_type = other DNA
tcacccaggggaggcccacc

SEQ ID NO: 273874 - DNA, 20 bp, synthetic construct
  source 1..20: mol_type = other DNA
gtcacccaggggaggcccac

SEQ ID NO: 273875 - DNA, 20 bp, synthetic construct
  source 1..20: mol_type = other DNA
agtcacccaggggaggccca

SEQ ID NO: 273876 - DNA, 20 bp, synthetic construct
  source 1..20: mol_type = other DNA
gagtcacccaggggaggccc

SEQ ID NO: 273877 - DNA, 20 bp, synthetic construct
  source 1..20: mol_type = other DNA
agagtcacccaggggaggcc

SEQ ID NO: 273878 - DNA, 20 bp, synthetic construct
  source 1..20: mol_type = other DNA
tagagtcacccaggggaggc

SEQ ID NO: 273879 - DNA, 20 bp, synthetic construct
  source 1..20: mol_type = other DNA
ctagagtcacccaggggagg

SEQ ID NO: 273880 - DNA, 20 bp, synthetic construct
  source 1..20: mol_type = other DNA
actagagtcacccaggggag

SEQ ID NO: 273881 - DNA, 20 bp, synthetic construct
  source 1..20: mol_type = other DNA
cactagagtcacccagggga

SEQ ID NO: 273882 - DNA, 20 bp, synthetic construct
  source 1..20: mol_type = other DNA
acactagagtcacccagggg

SEQ ID NO: 273883 - DNA, 20 bp, synthetic construct
  source 1..20: mol_type = other DNA
cacactagagtcacccaggg

SEQ ID NO: 273884 - DNA, 20 bp, synthetic construct
  source 1..20: mol_type = other DNA
gcacactagagtcacccagg

SEQ ID NO: 273885 - DNA, 20 bp, synthetic construct
  source 1..20: mol_type = other DNA
tgcacactagagtcacccag

SEQ ID NO: 273886 - DNA, 20 bp, synthetic construct
  source 1..20: mol_type = other DNA
ctgcacactagagtcaccca

SEQ ID NO: 273887 - DNA, 20 bp, synthetic construct
  source 1..20: mol_type = other DNA
gctgcacactagagtcaccc

SEQ ID NO: 273888 - DNA, 20 bp, synthetic construct
  source 1..20: mol_type = other DNA
ggctgcacactagagtcacc

SEQ ID NO: 273889 - DNA, 20 bp, synthetic construct
  source 1..20: mol_type = other DNA
aggctgcacactagagtcac

SEQ ID NO: 273890 - DNA, 20 bp, synthetic construct
  source 1..20: mol_type = other DNA
caggctgcacactagagtca

SEQ ID NO: 273891 - DNA, 20 bp, synthetic construct
  source 1..20: mol_type = other DNA
ccaggctgcacactagagtc

SEQ ID NO: 273892 - DNA, 20 bp, synthetic construct
  source 1..20: mol_type = other DNA
gccaggctgcacactagagt

SEQ ID NO: 273893 - DNA, 20 bp, synthetic construct
  source 1..20: mol_type = other DNA
agccaggctgcacactagag

SEQ ID NO: 273894 - DNA, 20 bp, synthetic construct
  source 1..20: mol_type = other DNA
cagccaggctgcacactaga

SEQ ID NO: 273895 - DNA, 20 bp, synthetic construct
  source 1..20: mol_type = other DNA
tcagccaggctgcacactag

SEQ ID NO: 273896 - DNA, 20 bp, synthetic construct
  source 1..20: mol_type = other DNA
ctcagccaggctgcacacta

SEQ ID NO: 273897 - DNA, 20 bp, synthetic construct
  source 1..20: mol_type = other DNA
tctcagccaggctgcacact

SEQ ID NO: 273898 - DNA, 20 bp, synthetic construct
  source 1..20: mol_type = other DNA
gtctcagccaggctgcacac

SEQ ID NO: 273899 - DNA, 20 bp, synthetic construct
  source 1..20: mol_type = other DNA
agtctcagccaggctgcaca

SEQ ID NO: 273900 - DNA, 20 bp, synthetic construct
  source 1..20: mol_type = other DNA
gagtctcagccaggctgcac

SEQ ID NO: 273901 - DNA, 20 bp, synthetic construct
  source 1..20: mol_type = other DNA
tgagtctcagccaggctgca

SEQ ID NO: 273902 - DNA, 20 bp, synthetic construct
  source 1..20: mol_type = other DNA
ctgagtctcagccaggctgc

SEQ ID NO: 273903 - DNA, 20 bp, synthetic construct
  source 1..20: mol_type = other DNA
actgagtctcagccaggctg

SEQ ID NO: 273904 - DNA, 20 bp, synthetic construct
  source 1..20: mol_type = other DNA
cactgagtctcagccaggct

SEQ ID NO: 273905 - DNA, 20 bp, synthetic construct
  source 1..20: mol_type = other DNA
ccactgagtctcagccaggc

SEQ ID NO: 273906 - DNA, 20 bp, synthetic construct
  source 1..20: mol_type = other DNA
gccactgagtctcagccagg

SEQ ID NO: 273907 - DNA, 20 bp, synthetic construct
  source 1..20: mol_type = other DNA
ggccactgagtctcagccag

SEQ ID NO: 273908 - DNA, 20 bp, synthetic construct
  source 1..20: mol_type = other DNA
gggccactgagtctcagcca

SEQ ID NO: 273909 - DNA, 20 bp, synthetic construct
  source 1..20: mol_type = other DNA
agggccactgagtctcagcc

SEQ ID NO: 273910 - DNA, 20 bp, synthetic construct
  source 1..20: mol_type = other DNA
cagggccactgagtctcagc

SEQ ID NO: 273911 - DNA, 20 bp, synthetic construct
  source 1..20: mol_type = other DNA
ccagggccactgagtctcag

SEQ ID NO: 273912 - DNA, 20 bp, synthetic construct
  source 1..20: mol_type = other DNA
cccagggccactgagtctca

SEQ ID NO: 273913 - DNA, 20 bp, synthetic construct
  source 1..20: mol_type = other DNA
acccagggccactgagtctc

SEQ ID NO: 273914 - DNA, 20 bp, synthetic construct
  source 1..20: mol_type = other DNA
aacccagggccactgagtct

SEQ ID NO: 273915 - DNA, 20 bp, synthetic construct
  source 1..20: mol_type = other DNA
gaacccagggccactgagtc

SEQ ID NO: 273916 - DNA, 20 bp, synthetic construct
  source 1..20: mol_type = other DNA
agaacccagggccactgagt

SEQ ID NO: 273917 - DNA, 20 bp, synthetic construct
  source 1..20: mol_type = other DNA
aagaacccagggccactgag

SEQ ID NO: 273918 - DNA, 20 bp, synthetic construct
  source 1..20: mol_type = other DNA
taagaacccagggccactga

SEQ ID NO: 273919 - DNA, 20 bp, synthetic construct
  source 1..20: mol_type = other DNA
gtaagaacccagggccactg

SEQ ID NO: 273920 - DNA, 20 bp, synthetic construct
  source 1..20: mol_type = other DNA
agtaagaacccagggccact

SEQ ID NO: 273921 - DNA, 20 bp, synthetic construct
  source 1..20: mol_type = other DNA
cagtaagaacccagggccac

SEQ ID NO: 273922 - DNA, 20 bp, synthetic construct
  source 1..20: mol_type = other DNA
gcagtaagaacccagggcca

SEQ ID NO: 273923 - DNA, 20 bp, synthetic construct
  source 1..20: mol_type = other DNA
agcagtaagaacccagggcc

SEQ ID NO: 273924 - DNA, 20 bp, synthetic construct
  source 1..20: mol_type = other DNA
cagcagtaagaacccagggc

SEQ ID NO: 273925 - DNA, 20 bp, synthetic construct
  source 1..20: mol_type = other DNA
tcagcagtaagaacccaggg

SEQ ID NO: 273926 - DNA, 20 bp, synthetic construct
  source 1..20: mol_type = other DNA
gtcagcagtaagaacccagg

SEQ ID NO: 273927 - DNA, 20 bp, synthetic construct
  source 1..20: mol_type = other DNA
tgtcagcagtaagaacccag

SEQ ID NO: 273928 - DNA, 20 bp, synthetic construct
  source 1..20: mol_type = other DNA
gtgtcagcagtaagaaccca

SEQ ID NO: 273929 - DNA, 20 bp, synthetic construct
  source 1..20: mol_type = other DNA
ggtgtcagcagtaagaaccc

SEQ ID NO: 273930 - DNA, 20 bp, synthetic construct
  source 1..20: mol_type = other DNA
aggtgtcagcagtaagaacc

SEQ ID NO: 273931 - DNA, 20 bp, synthetic construct
  source 1..20: mol_type = other DNA
taggtgtcagcagtaagaac

SEQ ID NO: 273932 - DNA, 20 bp, synthetic construct
  source 1..20: mol_type = other DNA
gtaggtgtcagcagtaagaa

SEQ ID NO: 273933 - DNA, 20 bp, synthetic construct
  source 1..20: mol_type = other DNA
ggtaggtgtcagcagtaaga

SEQ ID NO: 273934 - DNA, 20 bp, synthetic construct
  source 1..20: mol_type = other DNA
gggtaggtgtcagcagtaag

SEQ ID NO: 273935 - DNA, 20 bp, synthetic construct
  source 1..20: mol_type = other DNA
agggtaggtgtcagcagtaa

SEQ ID NO: 273936 - DNA, 20 bp, synthetic construct
  source 1..20: mol_type = other DNA
gagggtaggtgtcagcagta

SEQ ID NO: 273937 - DNA, 20 bp, synthetic construct
  source 1..20: mol_type = other DNA
tgagggtaggtgtcagcagt

SEQ ID NO: 273938 - DNA, 20 bp, synthetic construct
  source 1..20: mol_type = other DNA
ttgagggtaggtgtcagcag

SEQ ID NO: 273939 - DNA, 20 bp, synthetic construct
  source 1..20: mol_type = other DNA
gttgagggtaggtgtcagca

SEQ ID NO: 273940 - DNA, 20 bp, synthetic construct
  source 1..20: mol_type = other DNA
ggttgagggtaggtgtcagc

SEQ ID NO: 273941 - DNA, 20 bp, synthetic construct
  source 1..20: mol_type = other DNA
aggttgagggtaggtgtcag

SEQ ID NO: 273942 - DNA, 20 bp, synthetic construct
  source 1..20: mol_type = other DNA
gaggttgagggtaggtgtca

SEQ ID NO: 273943 - DNA, 20 bp, synthetic construct
  source 1..20: mol_type = other DNA
tgaggttgagggtaggtgtc

SEQ ID NO: 273944 - DNA, 20 bp, synthetic construct
  source 1..20: mol_type = other DNA
ttgaggttgagggtaggtgt

SEQ ID NO: 273945 - DNA, 20 bp, synthetic construct
  source 1..20: mol_type = other DNA
gttgaggttgagggtaggtg

SEQ ID NO: 273946 - DNA, 20 bp, synthetic construct
  source 1..20: mol_type = other DNA
ggttgaggttgagggtaggt

SEQ ID NO: 273947 - DNA, 20 bp, synthetic construct
  source 1..20: mol_type = other DNA
tggttgaggttgagggtagg

SEQ ID NO: 273948 - DNA, 20 bp, synthetic construct
  source 1..20: mol_type = other DNA
gtggttgaggttgagggtag

SEQ ID NO: 273949 - DNA, 20 bp, synthetic construct
  source 1..20: mol_type = other DNA
agtggttgaggttgagggta

SEQ ID NO: 273950 - DNA, 20 bp, synthetic construct
  source 1..20: mol_type = other DNA
cagtggttgaggttgagggt

SEQ ID NO: 273951 - DNA, 20 bp, synthetic construct
  source 1..20: mol_type = other DNA
gcagtggttgaggttgaggg

SEQ ID NO: 273952 - DNA, 20 bp, synthetic construct
  source 1..20: mol_type = other DNA
cgcagtggttgaggttgagg

SEQ ID NO: 273953 - DNA, 20 bp, synthetic construct
  source 1..20: mol_type = other DNA
ccgcagtggttgaggttgag

SEQ ID NO: 273954 - DNA, 20 bp, synthetic construct
  source 1..20: mol_type = other DNA
gccgcagtggttgaggttga

SEQ ID NO: 273955 - DNA, 20 bp, synthetic construct
  source 1..20: mol_type = other DNA
ggccgcagtggttgaggttg

SEQ ID NO: 273956 - DNA, 20 bp, synthetic construct
  source 1..20: mol_type = other DNA
aggccgcagtggttgaggtt

SEQ ID NO: 273957 - DNA, 20 bp, synthetic construct
  source 1..20: mol_type = other DNA
gaggccgcagtggttgaggt

SEQ ID NO: 273958 - DNA, 20 bp, synthetic construct
  source 1..20: mol_type = other DNA
ggaggccgcagtggttgagg

SEQ ID NO: 273959 - DNA, 20 bp, synthetic construct
  source 1..20: mol_type = other DNA
aggaggccgcagtggttgag

SEQ ID NO: 273960 - DNA, 20 bp, synthetic construct
  source 1..20: mol_type = other DNA
caggaggccgcagtggttga

SEQ ID NO: 273961 - DNA, 20 bp, synthetic construct
  source 1..20: mol_type = other DNA
acaggaggccgcagtggttg

SEQ ID NO: 273962 - DNA, 20 bp, synthetic construct
  source 1..20: mol_type = other DNA
cacaggaggccgcagtggtt

SEQ ID NO: 273963 - DNA, 20 bp, synthetic construct
  source 1..20: mol_type = other DNA
gcacaggaggccgcagtggt

SEQ ID NO: 273964 - DNA, 20 bp, synthetic construct
  source 1..20: mol_type = other DNA
tgcacaggaggccgcagtgg

SEQ ID NO: 273965 - DNA, 20 bp, synthetic construct
  source 1..20: mol_type = other DNA
gtgcacaggaggccgcagtg

SEQ ID NO: 273966 - DNA, 20 bp, synthetic construct
  source 1..20: mol_type = other DNA
ggtgcacaggaggccgcagt

SEQ ID NO: 273967 - DNA, 20 bp, synthetic construct
  source 1..20: mol_type = other DNA
gggtgcacaggaggccgcag

SEQ ID NO: 273968 - DNA, 20 bp, synthetic construct
  source 1..20: mol_type = other DNA
agggtgcacaggaggccgca

SEQ ID NO: 273969 - DNA, 20 bp, synthetic construct
  source 1..20: mol_type = other DNA
cagggtgcacaggaggccgc

SEQ ID NO: 273970 - DNA, 20 bp, synthetic construct
  source 1..20: mol_type = other DNA
tcagggtgcacaggaggccg

SEQ ID NO: 273971 - DNA, 20 bp, synthetic construct
  source 1..20: mol_type = other DNA
atcagggtgcacaggaggcc

SEQ ID NO: 273972 - DNA, 20 bp, synthetic construct
  source 1..20: mol_type = other DNA
gatcagggtgcacaggaggc

SEQ ID NO: 273973 - DNA, 20 bp, synthetic construct
  source 1..20: mol_type = other DNA
ggatcagggtgcacaggagg

SEQ ID NO: 273974 - DNA, 20 bp, synthetic construct
  source 1..20: mol_type = other DNA
tggatcagggtgcacaggag

SEQ ID NO: 273975 - DNA, 20 bp, synthetic construct
  source 1..20: mol_type = other DNA
ctggatcagggtgcacagga

SEQ ID NO: 273976 - DNA, 20 bp, synthetic construct
  source 1..20: mol_type = other DNA
actggatcagggtgcacagg

SEQ ID NO: 273977 - DNA, 20 bp, synthetic construct
  source 1..20: mol_type = other DNA
cactggatcagggtgcacag

SEQ ID NO: 273978 - DNA, 20 bp, synthetic construct
  source 1..20: mol_type = other DNA
ccactggatcagggtgcaca

SEQ ID NO: 273979 - DNA, 20 bp, synthetic construct
  source 1..20: mol_type = other DNA
gccactggatcagggtgcac

SEQ ID NO: 273980 - DNA, 20 bp, synthetic construct
  source 1..20: mol_type = other DNA
agccactggatcagggtgca

SEQ ID NO: 273981 - DNA, 20 bp, synthetic construct
  source 1..20: mol_type = other DNA
gagccactggatcagggtgc

SEQ ID NO: 273982 - DNA, 20 bp, synthetic construct
  source 1..20: mol_type = other DNA
tgagccactggatcagggtg

SEQ ID NO: 273983 - DNA, 20 bp, synthetic construct
  source 1..20: mol_type = other DNA
atgagccactggatcagggt

SEQ ID NO: 273984 - DNA, 20 bp, synthetic construct
  source 1..20: mol_type = other DNA
aatgagccactggatcaggg

SEQ ID NO: 273985 - DNA, 20 bp, synthetic construct
  source 1..20: mol_type = other DNA
aaatgagccactggatcagg

SEQ ID NO: 273986 - DNA, 20 bp, synthetic construct
  source 1..20: mol_type = other DNA
aaaatgagccactggatcag

SEQ ID NO: 273987 - DNA, 20 bp, synthetic construct
  source 1..20: mol_type = other DNA
gaaaatgagccactggatca

SEQ ID NO: 273988 - DNA, 20 bp, synthetic construct
  source 1..20: mol_type = other DNA
ggaaaatgagccactggatc

SEQ ID NO: 273989 - DNA, 20 bp, synthetic construct
  source 1..20: mol_type = other DNA
tggaaaatgagccactggat

SEQ ID NO: 273990 - DNA, 20 bp, synthetic construct
  source 1..20: mol_type = other DNA
gtggaaaatgagccactgga

SEQ ID NO: 273991 - DNA, 20 bp, synthetic construct
  source 1..20: mol_type = other DNA
agtggaaaatgagccactgg

SEQ ID NO: 273992 - DNA, 20 bp, synthetic construct
  source 1..20: mol_type = other DNA
aagtggaaaatgagccactg

SEQ ID NO: 273993 - DNA, 20 bp, synthetic construct
  source 1..20: mol_type = other DNA
aaagtggaaaatgagccact

SEQ ID NO: 273994 - DNA, 20 bp, synthetic construct
  source 1..20: mol_type = other DNA
gaaagtggaaaatgagccac

SEQ ID NO: 273995 - DNA, 20 bp, synthetic construct
  source 1..20: mol_type = other DNA
tgaaagtggaaaatgagcca

SEQ ID NO: 273996 - DNA, 20 bp, synthetic construct
  source 1..20: mol_type = other DNA
ctgaaagtggaaaatgagcc

SEQ ID NO: 273997 - DNA, 20 bp, synthetic construct
  source 1..20: mol_type = other DNA
actgaaagtggaaaatgagc

SEQ ID NO: 273998 - DNA, 20 bp, synthetic construct
  source 1..20: mol_type = other DNA
gactgaaagtggaaaatgag

SEQ ID NO: 273999 - DNA, 20 bp, synthetic construct
  source 1..20: mol_type = other DNA
ggactgaaagtggaaaatga

SEQ ID NO: 274000 - DNA, 20 bp, synthetic construct
  source 1..20: mol_type = other DNA
gggactgaaagtggaaaatg

SEQ ID NO: 274001 - DNA, 20 bp, synthetic construct
  source 1..20: mol_type = other DNA
tgggactgaaagtggaaaat

SEQ ID NO: 274002 - DNA, 20 bp, synthetic construct
  source 1..20: mol_type = other DNA
ctgggactgaaagtggaaaa

SEQ ID NO: 274003 - DNA, 20 bp, synthetic construct
  source 1..20: mol_type = other DNA
gctgggactgaaagtggaaa

SEQ ID NO: 274004 - DNA, 20 bp, synthetic construct
  source 1..20: mol_type = other DNA
agctgggactgaaagtggaa

SEQ ID NO: 274005 - DNA, 20 bp, synthetic construct
  source 1..20: mol_type = other DNA
gagctgggactgaaagtgga

SEQ ID NO: 274006 - DNA, 20 bp, synthetic construct
  source 1..20: mol_type = other DNA
agagctgggactgaaagtgg

SEQ ID NO: 274007 - DNA, 20 bp, synthetic construct
  source 1..20: mol_type = other DNA
tagagctgggactgaaagtg

SEQ ID NO: 274008 - DNA, 20 bp, synthetic construct
  source 1..20: mol_type = other DNA
atagagctgggactgaaagt

SEQ ID NO: 274009 - DNA, 20 bp, synthetic construct
  source 1..20: mol_type = other DNA
gatagagctgggactgaaag

SEQ ID NO: 274010 - DNA, 20 bp, synthetic construct
  source 1..20: mol_type = other DNA
ggatagagctgggactgaaa

SEQ ID NO: 274011 - DNA, 20 bp, synthetic construct
  source 1..20: mol_type = other DNA
gggatagagctgggactgaa

SEQ ID NO: 274012 - DNA, 20 bp, synthetic construct
  source 1..20: mol_type = other DNA
agggatagagctgggactga

SEQ ID NO: 274013 - DNA, 20 bp, synthetic construct
  source 1..20: mol_type = other DNA
tagggatagagctgggactg

SEQ ID NO: 274014 - DNA, 20 bp, synthetic construct
  source 1..20: mol_type = other DNA
atagggatagagctgggact

SEQ ID NO: 274015 - DNA, 20 bp, synthetic construct
  source 1..20: mol_type = other DNA
aatagggatagagctgggac

SEQ ID NO: 274016 - DNA, 20 bp, synthetic construct
  source 1..20: mol_type = other DNA
aaatagggatagagctggga

SEQ ID NO: 274017 - DNA, 20 bp, synthetic construct
  source 1..20: mol_type = other DNA
caaatagggatagagctggg

SEQ ID NO: 274018 - DNA, 20 bp, synthetic construct
  source 1..20: mol_type = other DNA
gcaaatagggatagagctgg

SEQ ID NO: 274019 - DNA, 20 bp, synthetic construct
  source 1..20: mol_type = other DNA
tgcaaatagggatagagctg

SEQ ID NO: 274020 - DNA, 20 bp, synthetic construct
  source 1..20: mol_type = other DNA
ctgcaaatagggatagagct

SEQ ID NO: 274021 - DNA, 20 bp, synthetic construct
  source 1..20: mol_type = other DNA
actgcaaatagggatagagc

SEQ ID NO: 274022 - DNA, 20 bp, synthetic construct
  source 1..20: mol_type = other DNA
aactgcaaatagggatagag

SEQ ID NO: 274023 - DNA, 20 bp, synthetic construct
  source 1..20: mol_type = other DNA
aaactgcaaatagggataga

SEQ ID NO: 274024 - DNA, 20 bp, synthetic construct
  source 1..20: mol_type = other DNA
gaaactgcaaatagggatag

SEQ ID NO: 274025 - DNA, 20 bp, synthetic construct
  source 1..20: mol_type = other DNA
ggaaactgcaaatagggata

SEQ ID NO: 274026 - DNA, 20 bp, synthetic construct
  source 1..20: mol_type = other DNA
tggaaactgcaaatagggat

SEQ ID NO: 274027 - DNA, 20 bp, synthetic construct
  source 1..20: mol_type = other DNA
ttggaaactgcaaataggga

SEQ ID NO: 274028 - DNA, 20 bp, synthetic construct
  source 1..20: mol_type = other DNA
cttggaaactgcaaataggg

SEQ ID NO: 274029 - DNA, 20 bp, synthetic construct
  source 1..20: mol_type = other DNA
acttggaaactgcaaatagg

SEQ ID NO: 274030 - DNA, 20 bp, synthetic construct
  source 1..20: mol_type = other DNA
cacttggaaactgcaaatag

SEQ ID NO: 274031 - DNA, 20 bp, synthetic construct
  source 1..20: mol_type = other DNA
gcacttggaaactgcaaata

SEQ ID NO: 274032 - DNA, 20 bp, synthetic construct
  source 1..20: mol_type = other DNA
ggcacttggaaactgcaaat

SEQ ID NO: 274033 - DNA, 20 bp, synthetic construct
  source 1..20: mol_type = other DNA
aggcacttggaaactgcaaa

SEQ ID NO: 274034 - DNA, 20 bp, synthetic construct
  source 1..20: mol_type = other DNA
caggcacttggaaactgcaa

SEQ ID NO: 274035 - DNA, 20 bp, synthetic construct
  source 1..20: mol_type = other DNA
ccaggcacttggaaactgca

SEQ ID NO: 274036 - DNA, 20 bp, synthetic construct
  source 1..20: mol_type = other DNA
accaggcacttggaaactgc

SEQ ID NO: 274037 - DNA, 20 bp, synthetic construct
  source 1..20: mol_type = other DNA
gaccaggcacttggaaactg

SEQ ID NO: 274038 - DNA, 20 bp, synthetic construct
  source 1..20: mol_type = other DNA
ggaccaggcacttggaaact

SEQ ID NO: 274039 - DNA, 20 bp, synthetic construct
  source 1..20: mol_type = other DNA
aggaccaggcacttggaaac

SEQ ID NO: 274040 - DNA, 20 bp, synthetic construct
  source 1..20: mol_type = other DNA
gaggaccaggcacttggaaa

SEQ ID NO: 274041 - DNA, 20 bp, synthetic construct
  source 1..20: mol_type = other DNA
tgaggaccaggcacttggaa

SEQ ID NO: 274042 - DNA, 20 bp, synthetic construct
  source 1..20: mol_type = other DNA
ctgaggaccaggcacttgga

SEQ ID NO: 274043 - DNA, 20 bp, synthetic construct
  source 1..20: mol_type = other DNA
actgaggaccaggcacttgg

SEQ ID NO: 274044 - DNA, 20 bp, synthetic construct
  source 1..20: mol_type = other DNA
gactgaggaccaggcacttg

SEQ ID NO: 274045 - DNA, 20 bp, synthetic construct
  source 1..20: mol_type = other DNA
tgactgaggaccaggcactt

SEQ ID NO: 274046 - DNA, 20 bp, synthetic construct
  source 1..20: mol_type = other DNA
ctgactgaggaccaggcact

SEQ ID NO: 274047 - DNA, 20 bp, synthetic construct
  source 1..20: mol_type = other DNA
gctgactgaggaccaggcac

SEQ ID NO: 274048 - DNA, 20 bp, synthetic construct
  source 1..20: mol_type = other DNA
agctgactgaggaccaggca

SEQ ID NO: 274049 - DNA, 20 bp, synthetic construct
  source 1..20: mol_type = other DNA
gagctgactgaggaccaggc

SEQ ID NO: 274050 - DNA, 20 bp, synthetic construct
  source 1..20: mol_type = other DNA
tgagctgactgaggaccagg

SEQ ID NO: 274051 - DNA, 20 bp, synthetic construct
  source 1..20: mol_type = other DNA
ctgagctgactgaggaccag

SEQ ID NO: 274052 - DNA, 20 bp, synthetic construct
  source 1..20: mol_type = other DNA
tctgagctgactgaggacca

SEQ ID NO: 274053 - DNA, 20 bp, synthetic construct
  source 1..20: mol_type = other DNA
gtctgagctgactgaggacc

SEQ ID NO: 274054 - DNA, 20 bp, synthetic construct
  source 1..20: mol_type = other DNA
ggtctgagctgactgaggac

SEQ ID NO: 274055 - DNA, 20 bp, synthetic construct
  source 1..20: mol_type = other DNA
gggtctgagctgactgagga

SEQ ID NO: 274056 - DNA, 20 bp, synthetic construct
  source 1..20: mol_type = other DNA
tgggtctgagctgactgagg

SEQ ID NO: 274057 - DNA, 20 bp, synthetic construct
  source 1..20: mol_type = other DNA
ctgggtctgagctgactgag

SEQ ID NO: 274058 - DNA, 20 bp, synthetic construct
  source 1..20: mol_type = other DNA
gctgggtctgagctgactga

SEQ ID NO: 274059 - DNA, 20 bp, synthetic construct
  source 1..20: mol_type = other DNA
ggctgggtctgagctgactg

SEQ ID NO: 274060 - DNA, 20 bp, synthetic construct
  source 1..20: mol_type = other DNA
tggctgggtctgagctgact

SEQ ID NO: 274061 - DNA, 20 bp, synthetic construct
  source 1..20: mol_type = other DNA
ctggctgggtctgagctgac

SEQ ID NO: 274062 - DNA, 20 bp, synthetic construct
  source 1..20: mol_type = other DNA
cctggctgggtctgagctga

SEQ ID NO: 274063 - DNA, 20 bp, synthetic construct
  source 1..20: mol_type = other DNA
gcctggctgggtctgagctg

SEQ ID NO: 274064 - DNA, 20 bp, synthetic construct
  source 1..20: mol_type = other DNA
ggcctggctgggtctgagct

SEQ ID NO: 274065 - DNA, 20 bp, synthetic construct
  source 1..20: mol_type = other DNA
tggcctggctgggtctgagc

SEQ ID NO: 274066 - DNA, 20 bp, synthetic construct
  source 1..20: mol_type = other DNA
ctggcctggctgggtctgag

SEQ ID NO: 274067 - DNA, 20 bp, synthetic construct
  source 1..20: mol_type = other DNA
gctggcctggctgggtctga

SEQ ID NO: 274068 - DNA, 20 bp, synthetic construct
  source 1..20: mol_type = other DNA
ggctggcctggctgggtctg

SEQ ID NO: 274069 - DNA, 20 bp, synthetic construct
  source 1..20: mol_type = other DNA
gggctggcctggctgggtct

SEQ ID NO: 274070 - DNA, 20 bp, synthetic construct
  source 1..20: mol_type = other DNA
ggggctggcctggctgggtc

SEQ ID NO: 274071 - DNA, 20 bp, synthetic construct
  source 1..20: mol_type = other DNA
aggggctggcctggctgggt

SEQ ID NO: 274072 - DNA, 20 bp, synthetic construct
  source 1..20: mol_type = other DNA
caggggctggcctggctggg

SEQ ID NO: 274073 - DNA, 20 bp, synthetic construct
  source 1..20: mol_type = other DNA
ccaggggctggcctggctgg

SEQ ID NO: 274074 - DNA, 20 bp, synthetic construct
  source 1..20: mol_type = other DNA
accaggggctggcctggctg

SEQ ID NO: 274075 - DNA, 20 bp, synthetic construct
  source 1..20: mol_type = other DNA
aaccaggggctggcctggct

SEQ ID NO: 274076 - DNA, 20 bp, synthetic construct
  source 1..20: mol_type = other DNA
gaaccaggggctggcctggc

SEQ ID NO: 274077 - DNA, 20 bp, synthetic construct
  source 1..20: mol_type = other DNA
ggaaccaggggctggcctgg

SEQ ID NO: 274078 - DNA, 20 bp, synthetic construct
  source 1..20: mol_type = other DNA
gggaaccaggggctggcctg

SEQ ID NO: 274079 - DNA, 20 bp, synthetic construct
  source 1..20: mol_type = other DNA
tgggaaccaggggctggcct

SEQ ID NO: 274080 - DNA, 20 bp, synthetic construct
  source 1..20: mol_type = other DNA
gtgggaaccaggggctggcc

SEQ ID NO: 274081 - DNA, 20 bp, synthetic construct
  source 1..20: mol_type = other DNA
tgtgggaaccaggggctggc

SEQ ID NO: 274082 - DNA, 20 bp, synthetic construct
  source 1..20: mol_type = other DNA
atgtgggaaccaggggctgg

SEQ ID NO: 274083 - DNA, 20 bp, synthetic construct
  source 1..20: mol_type = other DNA
gatgtgggaaccaggggctg

SEQ ID NO: 274084 - DNA, 20 bp, synthetic construct
  source 1..20: mol_type = other DNA
ggatgtgggaaccaggggct

SEQ ID NO: 274085 - DNA, 20 bp, synthetic construct
  source 1..20: mol_type = other DNA
gggatgtgggaaccaggggc

SEQ ID NO: 274086 - DNA, 20 bp, synthetic construct
  source 1..20: mol_type = other DNA
ggggatgtgggaaccagggg

SEQ ID NO: 274087 - DNA, 20 bp, synthetic construct
  source 1..20: mol_type = other DNA
aggggatgtgggaaccaggg

SEQ ID NO: 274088 - DNA, 20 bp, synthetic construct
  source 1..20: mol_type = other DNA
aaggggatgtgggaaccagg

SEQ ID NO: 274089 - DNA, 20 bp, synthetic construct
  source 1..20: mol_type = other DNA
aaaggggatgtgggaaccag

SEQ ID NO: 274090 - DNA, 20 bp, synthetic construct
  source 1..20: mol_type = other DNA
caaaggggatgtgggaacca

SEQ ID NO: 274091 - DNA, 20 bp, synthetic construct
  source 1..20: mol_type = other DNA
gcaaaggggatgtgggaacc

SEQ ID NO: 274092 - DNA, 20 bp, synthetic construct
  source 1..20: mol_type = other DNA
ggcaaaggggatgtgggaac

SEQ ID NO: 274093 - DNA, 20 bp, synthetic construct
  source 1..20: mol_type = other DNA
tggcaaaggggatgtgggaa

SEQ ID NO: 274094 - DNA, 20 bp, synthetic construct
  source 1..20: mol_type = other DNA
ttggcaaaggggatgtggga

SEQ ID NO: 274095 - DNA, 20 bp, synthetic construct
  source 1..20: mol_type = other DNA
cttggcaaaggggatgtggg

SEQ ID NO: 274096 - DNA, 20 bp, synthetic construct
  source 1..20: mol_type = other DNA
gcttggcaaaggggatgtgg

SEQ ID NO: 274097 - DNA, 20 bp, synthetic construct
  source 1..20: mol_type = other DNA
agcttggcaaaggggatgtg

SEQ ID NO: 274098 - DNA, 20 bp, synthetic construct
  source 1..20: mol_type = other DNA
gagcttggcaaaggggatgt

SEQ ID NO: 274099 - DNA, 20 bp, synthetic construct
  source 1..20: mol_type = other DNA
tgagcttggcaaaggggatg

SEQ ID NO: 274100 - DNA, 20 bp, synthetic construct
  source 1..20: mol_type = other DNA
atgagcttggcaaaggggat

SEQ ID NO: 274101 - DNA, 20 bp, synthetic construct
  source 1..20: mol_type = other DNA
gatgagcttggcaaagggga

SEQ ID NO: 274102 - DNA, 20 bp, synthetic construct
  source 1..20: mol_type = other DNA
ggatgagcttggcaaagggg

SEQ ID NO: 274103 - DNA, 20 bp, synthetic construct
  source 1..20: mol_type = other DNA
gggatgagcttggcaaaggg

SEQ ID NO: 274104 - DNA, 20 bp, synthetic construct
  source 1..20: mol_type = other DNA
ggggatgagcttggcaaagg

SEQ ID NO: 274105 - DNA, 20 bp, synthetic construct
  source 1..20: mol_type = other DNA
cggggatgagcttggcaaag

SEQ ID NO: 274106 - DNA, 20 bp, synthetic construct
  source 1..20: mol_type = other DNA
gcggggatgagcttggcaaa

SEQ ID NO: 274107 - DNA, 20 bp, synthetic construct
  source 1..20: mol_type = other DNA
ggcggggatgagcttggcaa

SEQ ID NO: 274108 - DNA, 20 bp, synthetic construct
  source 1..20: mol_type = other DNA
gggcggggatgagcttggca

SEQ ID NO: 274109 - DNA, 20 bp, synthetic construct
  source 1..20: mol_type = other DNA
agggcggggatgagcttggc

SEQ ID NO: 274110 - DNA, 20 bp, synthetic construct
  source 1..20: mol_type = other DNA
cagggcggggatgagcttgg

SEQ ID NO: 274111 - DNA, 20 bp, synthetic construct
  source 1..20: mol_type = other DNA
acagggcggggatgagcttg

SEQ ID NO: 274112 - DNA, 20 bp, synthetic construct
  source 1..20: mol_type = other DNA
aacagggcggggatgagctt

SEQ ID NO: 274113 - DNA, 20 bp, synthetic construct
  source 1..20: mol_type = other DNA
aaacagggcggggatgagct

SEQ ID NO: 274114 - DNA, 20 bp, synthetic construct
  source 1..20: mol_type = other DNA
caaacagggcggggatgagc

SEQ ID NO: 274115 - DNA, 20 bp, synthetic construct
  source 1..20: mol_type = other DNA
ccaaacagggcggggatgag

SEQ ID NO: 274116 - DNA, 20 bp, synthetic construct
  source 1..20: mol_type = other DNA
gccaaacagggcggggatga

SEQ ID NO: 274117 - DNA, 20 bp, synthetic construct
  source 1..20: mol_type = other DNA
ggccaaacagggcggggatg

SEQ ID NO: 274118 - DNA, 20 bp, synthetic construct
  source 1..20: mol_type = other DNA
aggccaaacagggcggggat

SEQ ID NO: 274119 - DNA, 20 bp, synthetic construct
  source 1..20: mol_type = other DNA
caggccaaacagggcgggga

SEQ ID NO: 274120 - DNA, 20 bp, synthetic construct
  source 1..20: mol_type = other DNA
gcaggccaaacagggcgggg

SEQ ID NO: 274121 - DNA, 20 bp, synthetic construct
  source 1..20: mol_type = other DNA
cgcaggccaaacagggcggg

SEQ ID NO: 274122 - DNA, 20 bp, synthetic construct
  source 1..20: mol_type = other DNA
ccgcaggccaaacagggcgg

SEQ ID NO: 274123 - DNA, 20 bp, synthetic construct
  source 1..20: mol_type = other DNA
cccgcaggccaaacagggcg

SEQ ID NO: 274124 - DNA, 20 bp, synthetic construct
  source 1..20: mol_type = other DNA
tcccgcaggccaaacagggc

SEQ ID NO: 274125 - DNA, 20 bp, synthetic construct
  source 1..20: mol_type = other DNA
ctcccgcaggccaaacaggg

SEQ ID NO: 274126 - DNA, 20 bp, synthetic construct
  source 1..20: mol_type = other DNA
actcccgcaggccaaacagg

SEQ ID NO: 274127 - DNA, 20 bp, synthetic construct
  source 1..20: mol_type = other DNA
cactcccgcaggccaaacag

SEQ ID NO: 274128 - DNA, 20 bp, synthetic construct
  source 1..20: mol_type = other DNA
ccactcccgcaggccaaaca

SEQ ID NO: 274129 - DNA, 20 bp, synthetic construct
  source 1..20: mol_type = other DNA
cccactcccgcaggccaaac

SEQ ID NO: 274130 - DNA, 20 bp, synthetic construct
  source 1..20: mol_type = other DNA
tcccactcccgcaggccaaa

SEQ ID NO: 274131 - DNA, 20 bp, synthetic construct
  source 1..20: mol_type = other DNA
ctcccactcccgcaggccaa

SEQ ID NO: 274132 - DNA, 20 bp, synthetic construct
  source 1..20: mol_type = other DNA
actcccactcccgcaggcca

SEQ ID NO: 274133 - DNA, 20 bp, synthetic construct
  source 1..20: mol_type = other DNA
cactcccactcccgcaggcc

SEQ ID NO: 274134 - DNA, 20 bp, synthetic construct
  source 1..20: mol_type = other DNA
acactcccactcccgcaggc

SEQ ID NO: 274135 - DNA, 20 bp, synthetic construct
  source 1..20: mol_type = other DNA
cacactcccactcccgcagg

SEQ ID NO: 274136 - DNA, 20 bp, synthetic construct
  source 1..20: mol_type = other DNA
acacactcccactcccgcag

SEQ ID NO: 274137 - DNA, 20 bp, synthetic construct
  source 1..20: mol_type = other DNA
gacacactcccactcccgca

SEQ ID NO: 274138 - DNA, 20 bp, synthetic construct
  source 1..20: mol_type = other DNA
ggacacactcccactcccgc

SEQ ID NO: 274139 - DNA, 20 bp, synthetic construct
  source 1..20: mol_type = other DNA
tggacacactcccactcccg

SEQ ID NO: 274140 - DNA, 20 bp, synthetic construct
  source 1..20: mol_type = other DNA
ctggacacactcccactccc

SEQ ID NO: 274141 - DNA, 20 bp, synthetic construct
  source 1..20: mol_type = other DNA
tctggacacactcccactcc

SEQ ID NO: 274142 - DNA, 20 bp, synthetic construct
  source 1..20: mol_type = other DNA
gtctggacacactcccactc

SEQ ID NO: 274143 - DNA, 20 bp, synthetic construct
  source 1..20: mol_type = other DNA
tgtctggacacactcccact

SEQ ID NO: 274144 - DNA, 20 bp, synthetic construct
  source 1..20: mol_type = other DNA
gtgtctggacacactcccac

SEQ ID NO: 274145 - DNA, 20 bp, synthetic construct
  source 1..20: mol_type = other DNA
tgtgtctggacacactccca

SEQ ID NO: 274146 - DNA, 20 bp, synthetic construct
  source 1..20: mol_type = other DNA
ctgtgtctggacacactccc

SEQ ID NO: 274147 - DNA, 20 bp, synthetic construct
  source 1..20: mol_type = other DNA
tctgtgtctggacacactcc

SEQ ID NO: 274148 - DNA, 20 bp, synthetic construct
  source 1..20: mol_type = other DNA
ctctgtgtctggacacactc

SEQ ID NO: 274149 - DNA, 20 bp, synthetic construct
  source 1..20: mol_type = other DNA
tctctgtgtctggacacact

SEQ ID NO: 274150 - DNA, 20 bp, synthetic construct
  source 1..20: mol_type = other DNA
gtctctgtgtctggacacac

SEQ ID NO: 274151 - DNA, 20 bp, synthetic construct
  source 1..20: mol_type = other DNA
tgtctctgtgtctggacaca

SEQ ID NO: 274152 - DNA, 20 bp, synthetic construct
  source 1..20: mol_type = other DNA
ttgtctctgtgtctggacac

SEQ ID NO: 274153 - DNA, 20 bp, synthetic construct
  source 1..20: mol_type = other DNA
tttgtctctgtgtctggaca

SEQ ID NO: 274154 - DNA, 20 bp, synthetic construct
  source 1..20: mol_type = other DNA
ctttgtctctgtgtctggac

SEQ ID NO: 274155 - DNA, 20 bp, synthetic construct
  source 1..20: mol_type = other DNA
cctttgtctctgtgtctgga

SEQ ID NO: 274156 - DNA, 20 bp, synthetic construct
  source 1..20: mol_type = other DNA
tcctttgtctctgtgtctgg

SEQ ID NO: 274157 - DNA, 20 bp, synthetic construct
  source 1..20: mol_type = other DNA
gtcctttgtctctgtgtctg

SEQ ID NO: 274158 - DNA, 20 bp, synthetic construct
  source 1..20: mol_type = other DNA
ggtcctttgtctctgtgtct

SEQ ID NO: 274159 - DNA, 20 bp, synthetic construct
  source 1..20: mol_type = other DNA
tggtcctttgtctctgtgtc

SEQ ID NO: 274160 - DNA, 20 bp, synthetic construct
  source 1..20: mol_type = other DNA
ctggtcctttgtctctgtgt

SEQ ID NO: 274161 - DNA, 20 bp, synthetic construct
  source 1..20: mol_type = other DNA
gctggtcctttgtctctgtg

SEQ ID NO: 274162 - DNA, 20 bp, synthetic construct
  source 1..20: mol_type = other DNA
agctggtcctttgtctctgt

SEQ ID NO: 274163 - DNA, 20 bp, synthetic construct
  source 1..20: mol_type = other DNA
aagctggtcctttgtctctg

SEQ ID NO: 274164 - DNA, 20 bp, synthetic construct
  source 1..20: mol_type = other DNA
aaagctggtcctttgtctct

SEQ ID NO: 274165 - DNA, 20 bp, synthetic construct
  source 1..20: mol_type = other DNA
aaaagctggtcctttgtctc

SEQ ID NO: 274166 - DNA, 20 bp, synthetic construct
  source 1..20: mol_type = other DNA
taaaagctggtcctttgtct

SEQ ID NO: 274167 - DNA, 20 bp, synthetic construct
  source 1..20: mol_type = other DNA
ttaaaagctggtcctttgtc

SEQ ID NO: 274168 - DNA, 20 bp, synthetic construct
  source 1..20: mol_type = other DNA
tttaaaagctggtcctttgt

SEQ ID NO: 274169 - DNA, 20 bp, synthetic construct
  source 1..20: mol_type = other DNA
ttttaaaagctggtcctttg

SEQ ID NO: 274170 - DNA, 20 bp, synthetic construct
  source 1..20: mol_type = other DNA
gttttaaaagctggtccttt

SEQ ID NO: 274171 - DNA, 20 bp, synthetic construct
  source 1..20: mol_type = other DNA
tgttttaaaagctggtcctt

SEQ ID NO: 274172 - DNA, 20 bp, synthetic construct
  source 1..20: mol_type = other DNA
atgttttaaaagctggtcct

SEQ ID NO: 274173 - DNA, 20 bp, synthetic construct
  source 1..20: mol_type = other DNA
aatgttttaaaagctggtcc

SEQ ID NO: 274174 - DNA, 20 bp, synthetic construct
  source 1..20: mol_type = other DNA
aaatgttttaaaagctggtc

SEQ ID NO: 274175 - DNA, 20 bp, synthetic construct
  source 1..20: mol_type = other DNA
aaaatgttttaaaagctggt

SEQ ID NO: 274176 - DNA, 20 bp, synthetic construct
  source 1..20: mol_type = other DNA
caaaatgttttaaaagctgg

SEQ ID NO: 274177 - DNA, 20 bp, synthetic construct
  source 1..20: mol_type = other DNA
acaaaatgttttaaaagctg

SEQ ID NO: 274178 - DNA, 20 bp, synthetic construct
  source 1..20: mol_type = other DNA
aacaaaatgttttaaaagct

SEQ ID NO: 274179 - DNA, 20 bp, synthetic construct
  source 1..20: mol_type = other DNA
caacaaaatgttttaaaagc

SEQ ID NO: 274180 - DNA, 20 bp, synthetic construct
  source 1..20: mol_type = other DNA
ccaacaaaatgttttaaaag

SEQ ID NO: 274181 - DNA, 20 bp, synthetic construct
  source 1..20: mol_type = other DNA
cccaacaaaatgttttaaaa

SEQ ID NO: 274182 - DNA, 20 bp, synthetic construct
  source 1..20: mol_type = other DNA
ccccaacaaaatgttttaaa

SEQ ID NO: 274183 - DNA, 20 bp, synthetic construct
  source 1..20: mol_type = other DNA
gccccaacaaaatgttttaa

SEQ ID NO: 274184 - DNA, 20 bp, synthetic construct
  source 1..20: mol_type = other DNA
ggccccaacaaaatgtttta

SEQ ID NO: 274185 - DNA, 20 bp, synthetic construct
  source 1..20: mol_type = other DNA
tggccccaacaaaatgtttt

SEQ ID NO: 274186 - DNA, 20 bp, synthetic construct
  source 1..20: mol_type = other DNA
ctggccccaacaaaatgttt

SEQ ID NO: 274187 - DNA, 20 bp, synthetic construct
  source 1..20: mol_type = other DNA
cctggccccaacaaaatgtt

SEQ ID NO: 274188 - DNA, 20 bp, synthetic construct
  source 1..20: mol_type = other DNA
acctggccccaacaaaatgt

SEQ ID NO: 274189 - DNA, 20 bp, synthetic construct
  source 1..20: mol_type = other DNA
cacctggccccaacaaaatg

SEQ ID NO: 274190 - DNA, 20 bp, synthetic construct
  source 1..20: mol_type = other DNA
acacctggccccaacaaaat

SEQ ID NO: 274191 - DNA, 20 bp, synthetic construct
  source 1..20: mol_type = other DNA
cacacctggccccaacaaaa

SEQ ID NO: 274192 - DNA, 20 bp, synthetic construct
  source 1..20: mol_type = other DNA
ccacacctggccccaacaaa

SEQ ID NO: 274193 - DNA, 20 bp, synthetic construct
  source 1..20: mol_type = other DNA
accacacctggccccaacaa

SEQ ID NO: 274194 - DNA, 20 bp, synthetic construct
  source 1..20: mol_type = other DNA
caccacacctggccccaaca

SEQ ID NO: 274195 - DNA, 20 bp, synthetic construct
  source 1..20: mol_type = other DNA
ccaccacacctggccccaac

SEQ ID NO: 274196 - DNA, 20 bp, synthetic construct
  source 1..20: mol_type = other DNA
gccaccacacctggccccaa

SEQ ID NO: 274197 - DNA, 20 bp, synthetic construct
  source 1..20: mol_type = other DNA
agccaccacacctggcccca

SEQ ID NO: 274198 - DNA, 20 bp, synthetic construct
  source 1..20: mol_type = other DNA
gagccaccacacctggcccc

SEQ ID NO: 274199 - DNA, 20 bp, synthetic construct
  source 1..20: mol_type = other DNA
tgagccaccacacctggccc

SEQ ID NO: 274200 - DNA, 20 bp, synthetic construct
  source 1..20: mol_type = other DNA
gtgagccaccacacctggcc

SEQ ID NO: 274201 - DNA, 20 bp, synthetic construct
  source 1..20: mol_type = other DNA
tgtgagccaccacacctggc

SEQ ID NO: 274202 - DNA, 20 bp, synthetic construct
  source 1..20: mol_type = other DNA
gtgtgagccaccacacctgg

SEQ ID NO: 274203 - DNA, 20 bp, synthetic construct
  source 1..20: mol_type = other DNA
ggtgtgagccaccacacctg

SEQ ID NO: 274204 - DNA, 20 bp, synthetic construct
  source 1..20: mol_type = other DNA
aggtgtgagccaccacacct

SEQ ID NO: 274205 - DNA, 20 bp, synthetic construct
  source 1..20: mol_type = other DNA
taggtgtgagccaccacacc

SEQ ID NO: 274206 - DNA, 20 bp, synthetic construct
  source 1..20: mol_type = other DNA
ttaggtgtgagccaccacac

SEQ ID NO: 274207 - DNA, 20 bp, synthetic construct
  source 1..20: mol_type = other DNA
attaggtgtgagccaccaca

SEQ ID NO: 274208 - DNA, 20 bp, synthetic construct
  source 1..20: mol_type = other DNA
gattaggtgtgagccaccac

SEQ ID NO: 274209 - DNA, 20 bp, synthetic construct
  source 1..20: mol_type = other DNA
ggattaggtgtgagccacca

SEQ ID NO: 274210 - DNA, 20 bp, synthetic construct
  source 1..20: mol_type = other DNA
gggattaggtgtgagccacc

SEQ ID NO: 274211 - DNA, 20 bp, synthetic construct
  source 1..20: mol_type = other DNA
tgggattaggtgtgagccac

SEQ ID NO: 274212 - DNA, 20 bp, synthetic construct
  source 1..20: mol_type = other DNA
ttgggattaggtgtgagcca

SEQ ID NO: 274213 - DNA, 20 bp, synthetic construct
  source 1..20: mol_type = other DNA
gttgggattaggtgtgagcc

SEQ ID NO: 274214 - DNA, 20 bp, synthetic construct
  source 1..20: mol_type = other DNA
tgttgggattaggtgtgagc

SEQ ID NO: 274215 - DNA, 20 bp, synthetic construct
  source 1..20: mol_type = other DNA
gtgttgggattaggtgtgag

SEQ ID NO: 274216 - DNA, 20 bp, synthetic construct
  source 1..20: mol_type = other DNA
ggtgttgggattaggtgtga

SEQ ID NO: 274217 - DNA, 20 bp, synthetic construct
  source 1..20: mol_type = other DNA
aggtgttgggattaggtgtg

SEQ ID NO: 274218 - DNA, 20 bp, synthetic construct
  source 1..20: mol_type = other DNA
caggtgttgggattaggtgt

SEQ ID NO: 274219 - DNA, 20 bp, synthetic construct
  source 1..20: mol_type = other DNA
ccaggtgttgggattaggtg

SEQ ID NO: 274220 - DNA, 20 bp, synthetic construct
  source 1..20: mol_type = other DNA
cccaggtgttgggattaggt

SEQ ID NO: 274221 - DNA, 20 bp, synthetic construct
  source 1..20: mol_type = other DNA
ccccaggtgttgggattagg

SEQ ID NO: 274222 - DNA, 20 bp, synthetic construct
  source 1..20: mol_type = other DNA
tccccaggtgttgggattag

SEQ ID NO: 274223 - DNA, 20 bp, synthetic construct
  source 1..20: mol_type = other DNA
ctccccaggtgttgggatta

SEQ ID NO: 274224 - DNA, 20 bp, synthetic construct
  source 1..20: mol_type = other DNA
cctccccaggtgttgggatt

SEQ ID NO: 274225 - DNA, 20 bp, synthetic construct
  source 1..20: mol_type = other DNA
gcctccccaggtgttgggat

SEQ ID NO: 274226 - DNA, 20 bp, synthetic construct
  source 1..20: mol_type = other DNA
ggcctccccaggtgttggga

SEQ ID NO: 274227 - DNA, 20 bp, synthetic construct
  source 1..20: mol_type = other DNA
tggcctccccaggtgttggg

SEQ ID NO: 274228 - DNA, 20 bp, synthetic construct
  source 1..20: mol_type = other DNA
ttggcctccccaggtgttgg

SEQ ID NO: 274229 - DNA, 20 bp, synthetic construct
  source 1..20: mol_type = other DNA
cttggcctccccaggtgttg

SEQ ID NO: 274230 - DNA, 20 bp, synthetic construct
  source 1..20: mol_type = other DNA
ccttggcctccccaggtgtt

SEQ ID NO: 274231 - DNA, 20 bp, synthetic construct
  source 1..20: mol_type = other DNA
gccttggcctccccaggtgt

SEQ ID NO: 274232 - DNA, 20 bp, synthetic construct
  source 1..20: mol_type = other DNA
tgccttggcctccccaggtg

SEQ ID NO: 274233 - DNA, 20 bp, synthetic construct
  source 1..20: mol_type = other DNA
ctgccttggcctccccaggt

SEQ ID NO: 274234 - DNA, 20 bp, synthetic construct
  source 1..20: mol_type = other DNA
tctgccttggcctccccagg

SEQ ID NO: 274235 - DNA, 20 bp, synthetic construct
  source 1..20: mol_type = other DNA
ttctgccttggcctccccag

SEQ ID NO: 274236 - DNA, 20 bp, synthetic construct
  source 1..20: mol_type = other DNA
cttctgccttggcctcccca

SEQ ID NO: 274237 - DNA, 20 bp, synthetic construct
  source 1..20: mol_type = other DNA
ccttctgccttggcctcccc

SEQ ID NO: 274238 - DNA, 20 bp, synthetic construct
  source 1..20: mol_type = other DNA
tccttctgccttggcctccc

SEQ ID NO: 274239 - DNA, 20 bp, synthetic construct
  source 1..20: mol_type = other DNA
atccttctgccttggcctcc

SEQ ID NO: 274240 - DNA, 20 bp, synthetic construct
  source 1..20: mol_type = other DNA
gatccttctgccttggcctc

SEQ ID NO: 274241 - DNA, 20 bp, synthetic construct
  source 1..20: mol_type = other DNA
tgatccttctgccttggcct

SEQ ID NO: 274242 - DNA, 20 bp, synthetic construct
  source 1..20: mol_type = other DNA
gtgatccttctgccttggcc

SEQ ID NO: 274243 - DNA, 20 bp, synthetic construct
  source 1..20: mol_type = other DNA
agtgatccttctgccttggc

SEQ ID NO: 274244 - DNA, 20 bp, synthetic construct
  source 1..20: mol_type = other DNA
aagtgatccttctgccttgg

SEQ ID NO: 274245 - DNA, 20 bp, synthetic construct
  source 1..20: mol_type = other DNA
caagtgatccttctgccttg

SEQ ID NO: 274246 - DNA, 20 bp, synthetic construct
  source 1..20: mol_type = other DNA
tcaagtgatccttctgcctt

SEQ ID NO: 274247 - DNA, 20 bp, synthetic construct
  source 1..20: mol_type = other DNA
ctcaagtgatccttctgcct

SEQ ID NO: 274248 - DNA, 20 bp, synthetic construct
  source 1..20: mol_type = other DNA
actcaagtgatccttctgcc

SEQ ID NO: 274249 - DNA, 20 bp, synthetic construct
  source 1..20: mol_type = other DNA
gactcaagtgatccttctgc

SEQ ID NO: 274250 - DNA, 20 bp, synthetic construct
  source 1..20: mol_type = other DNA
ggactcaagtgatccttctg

SEQ ID NO: 274251 - DNA, 20 bp, synthetic construct
  source 1..20: mol_type = other DNA
tggactcaagtgatccttct

SEQ ID NO: 274252 - DNA, 20 bp, synthetic construct
  source 1..20: mol_type = other DNA
ctggactcaagtgatccttc

SEQ ID NO: 274253 - DNA, 20 bp, synthetic construct
  source 1..20: mol_type = other DNA
cctggactcaagtgatcctt

SEQ ID NO: 274254 - DNA, 20 bp, synthetic construct
  source 1..20: mol_type = other DNA
tcctggactcaagtgatcct

SEQ ID NO: 274255 - DNA, 20 bp, synthetic construct
  source 1..20: mol_type = other DNA
ctcctggactcaagtgatcc

SEQ ID NO: 274256 - DNA, 20 bp, synthetic construct
  source 1..20: mol_type = other DNA
actcctggactcaagtgatc

SEQ ID NO: 274257 - DNA, 20 bp, synthetic construct
  source 1..20: mol_type = other DNA
aactcctggactcaagtgat

SEQ ID NO: 274258 - DNA, 20 bp, synthetic construct
  source 1..20: mol_type = other DNA
gaactcctggactcaagtga

SEQ ID NO: 274259 - DNA, 20 bp, synthetic construct
  source 1..20: mol_type = other DNA
tgaactcctggactcaagtg

SEQ ID NO: 274260 - DNA, 20 bp, synthetic construct
  source 1..20: mol_type = other DNA
ttgaactcctggactcaagt

SEQ ID NO: 274261 - DNA, 20 bp, synthetic construct
  source 1..20: mol_type = other DNA
cttgaactcctggactcaag

SEQ ID NO: 274262 - DNA, 20 bp, synthetic construct
  source 1..20: mol_type = other DNA
tcttgaactcctggactcaa

SEQ ID NO: 274263 - DNA, 20 bp, synthetic construct
  source 1..20: mol_type = other DNA
gtcttgaactcctggactca

SEQ ID NO: 274264 - DNA, 20 bp, synthetic construct
  source 1..20: mol_type = other DNA
ggtcttgaactcctggactc

SEQ ID NO: 274265 - DNA, 20 bp, synthetic construct
  source 1..20: mol_type = other DNA
tggtcttgaactcctggact

SEQ ID NO: 274266 - DNA, 20 bp, synthetic construct
  source 1..20: mol_type = other DNA
ctggtcttgaactcctggac

SEQ ID NO: 274267 - DNA, 20 bp, synthetic construct
  source 1..20: mol_type = other DNA
gctggtcttgaactcctgga

SEQ ID NO: 274268 - DNA, 20 bp, synthetic construct
  source 1..20: mol_type = other DNA
ggctggtcttgaactcctgg

SEQ ID NO: 274269 - DNA, 20 bp, synthetic construct
  source 1..20: mol_type = other DNA
aggctggtcttgaactcctg

SEQ ID NO: 274270 - DNA, 20 bp, synthetic construct
  source 1..20: mol_type = other DNA
caggctggtcttgaactcct

SEQ ID NO: 274271 - DNA, 20 bp, synthetic construct
  source 1..20: mol_type = other DNA
ccaggctggtcttgaactcc

SEQ ID NO: 274272 - DNA, 20 bp, synthetic construct
  source 1..20: mol_type = other DNA
cccaggctggtcttgaactc

SEQ ID NO: 274273 - DNA, 20 bp, synthetic construct
  source 1..20: mol_type = other DNA
gcccaggctggtcttgaact

SEQ ID NO: 274274 - DNA, 20 bp, synthetic construct
  source 1..20: mol_type = other DNA
tgcccaggctggtcttgaac

SEQ ID NO: 274275 - DNA, 20 bp, synthetic construct
  source 1..20: mol_type = other DNA
ttgcccaggctggtcttgaa

SEQ ID NO: 274276 - DNA, 20 bp, synthetic construct
  source 1..20: mol_type = other DNA
gttgcccaggctggtcttga

SEQ ID NO: 274277 - DNA, 20 bp, synthetic construct
  source 1..20: mol_type = other DNA
tgttgcccaggctggtcttg

SEQ ID NO: 274278 - DNA, 20 bp, synthetic construct
  source 1..20: mol_type = other DNA
atgttgcccaggctggtctt

SEQ ID NO: 274279 - DNA, 20 bp, synthetic construct
  source 1..20: mol_type = other DNA
tatgttgcccaggctggtct

SEQ ID NO: 274280 - DNA, 20 bp, synthetic construct
  source 1..20: mol_type = other DNA
ctatgttgcccaggctggtc

SEQ ID NO: 274281 - DNA, 20 bp, synthetic construct
  source 1..20: mol_type = other DNA
cctatgttgcccaggctggt

SEQ ID NO: 274282 - DNA, 20 bp, synthetic construct
  source 1..20: mol_type = other DNA
ccctatgttgcccaggctgg

SEQ ID NO: 274283 - DNA, 20 bp, synthetic construct
  source 1..20: mol_type = other DNA
tccctatgttgcccaggctg

SEQ ID NO: 274284 - DNA, 20 bp, synthetic construct
  source 1..20: mol_type = other DNA
ctccctatgttgcccaggct

SEQ ID NO: 274285 - DNA, 20 bp, synthetic construct
  source 1..20: mol_type = other DNA
tctccctatgttgcccaggc

SEQ ID NO: 274286 - DNA, 20 bp, synthetic construct
  source 1..20: mol_type = other DNA
gtctccctatgttgcccagg

SEQ ID NO: 274287 - DNA, 20 bp, synthetic construct
  source 1..20: mol_type = other DNA
ggtctccctatgttgcccag

SEQ ID NO: 274288 - DNA, 20 bp, synthetic construct
  source 1..20: mol_type = other DNA
gggtctccctatgttgccca

SEQ ID NO: 274289 - DNA, 20 bp, synthetic construct
  source 1..20: mol_type = other DNA
agggtctccctatgttgccc

SEQ ID NO: 274290 - DNA, 20 bp, synthetic construct
  source 1..20: mol_type = other DNA
cagggtctccctatgttgcc

SEQ ID NO: 274291 - DNA, 20 bp, synthetic construct
  source 1..20: mol_type = other DNA
acagggtctccctatgttgc

SEQ ID NO: 274292 - DNA, 20 bp, synthetic construct
  source 1..20: mol_type = other DNA
gacagggtctccctatgttg

SEQ ID NO: 274293 - DNA, 20 bp, synthetic construct
  source 1..20: mol_type = other DNA
agacagggtctccctatgtt

SEQ ID NO: 274294 - DNA, 20 bp, synthetic construct
  source 1..20: mol_type = other DNA
gagacagggtctccctatgt

SEQ ID NO: 274295 - DNA, 20 bp, synthetic construct
  source 1..20: mol_type = other DNA
agagacagggtctccctatg

SEQ ID NO: 274296 - DNA, 20 bp, synthetic construct
  source 1..20: mol_type = other DNA
tagagacagggtctccctat

SEQ ID NO: 274297 - DNA, 20 bp, synthetic construct
  source 1..20: mol_type = other DNA
gtagagacagggtctcccta

SEQ ID NO: 274298 - DNA, 20 bp, synthetic construct
  source 1..20: mol_type = other DNA
tgtagagacagggtctccct

SEQ ID NO: 274299 - DNA, 20 bp, synthetic construct
  source 1..20: mol_type = other DNA
ttgtagagacagggtctccc

SEQ ID NO: 274300 - DNA, 20 bp, synthetic construct
  source 1..20: mol_type = other DNA
attgtagagacagggtctcc

SEQ ID NO: 274301 - DNA, 20 bp, synthetic construct
  source 1..20: mol_type = other DNA
aattgtagagacagggtctc

SEQ ID NO: 274302 - DNA, 20 bp, synthetic construct
  source 1..20: mol_type = other DNA
aaattgtagagacagggtct

SEQ ID NO: 274303 - DNA, 20 bp, synthetic construct
  source 1..20: mol_type = other DNA
aaaattgtagagacagggtc

SEQ ID NO: 274304 - DNA, 20 bp, synthetic construct
  source 1..20: mol_type = other DNA
aaaaattgtagagacagggt

SEQ ID NO: 274305 - DNA, 20 bp, synthetic construct
  source 1..20: mol_type = other DNA
aaaaaattgtagagacaggg

SEQ ID NO: 274306 - DNA, 20 bp, synthetic construct
  source 1..20: mol_type = other DNA
aaaaaaattgtagagacagg

SEQ ID NO: 274307 - DNA, 20 bp, synthetic construct
  source 1..20: mol_type = other DNA
aaaaaaaattgtagagacag

SEQ ID NO: 274308 - DNA, 20 bp, synthetic construct
  source 1..20: mol_type = other DNA
aaaaaaaaattgtagagaca

SEQ ID NO: 274309 - DNA, 20 bp, synthetic construct
  source 1..20: mol_type = other DNA
aaaaaaaaaattgtagagac

SEQ ID NO: 274310 - DNA, 20 bp, synthetic construct
  source 1..20: mol_type = other DNA
taaaaaaaaaattgtagaga

SEQ ID NO: 274311 - DNA, 20 bp, synthetic construct
  source 1..20: mol_type = other DNA
ttaaaaaaaaaattgtagag

SEQ ID NO: 274312 - DNA, 20 bp, synthetic construct
  source 1..20: mol_type = other DNA
attaaaaaaaaaattgtaga

SEQ ID NO: 274313 - DNA, 20 bp, synthetic construct
  source 1..20: mol_type = other DNA
aattaaaaaaaaaattgtag

SEQ ID NO: 274314 - DNA, 20 bp, synthetic construct
  source 1..20: mol_type = other DNA
taattaaaaaaaaaattgta

SEQ ID NO: 274315 - DNA, 20 bp, synthetic construct
  source 1..20: mol_type = other DNA
ctaattaaaaaaaaaattgt

SEQ ID NO: 274316 - DNA, 20 bp, synthetic construct
  source 1..20: mol_type = other DNA
gctaattaaaaaaaaaattg

SEQ ID NO: 274317 - DNA, 20 bp, synthetic construct
  source 1..20: mol_type = other DNA
agctaattaaaaaaaaaatt

SEQ ID NO: 274318 - DNA, 20 bp, synthetic construct
  source 1..20: mol_type = other DNA
cagctaattaaaaaaaaaat

SEQ ID NO: 274319 - DNA, 20 bp, synthetic construct
  source 1..20: mol_type = other DNA
ccagctaattaaaaaaaaaa

SEQ ID NO: 274320 - DNA, 20 bp, synthetic construct
  source 1..20: mol_type = other DNA
cccagctaattaaaaaaaaa

SEQ ID NO: 274321 - DNA, 20 bp, synthetic construct
  source 1..20: mol_type = other DNA
gcccagctaattaaaaaaaa

SEQ ID NO: 274322 - DNA, 20 bp, synthetic construct
  source 1..20: mol_type = other DNA
ggcccagctaattaaaaaaa

SEQ ID NO: 274323 - DNA, 20 bp, synthetic construct
  source 1..20: mol_type = other DNA
aggcccagctaattaaaaaa

SEQ ID NO: 274324 - DNA, 20 bp, synthetic construct
  source 1..20: mol_type = other DNA
caggcccagctaattaaaaa

SEQ ID NO: 274325 - DNA, 20 bp, synthetic construct
  source 1..20: mol_type = other DNA
acaggcccagctaattaaaa

SEQ ID NO: 274326 - DNA, 20 bp, synthetic construct
  source 1..20: mol_type = other DNA
aacaggcccagctaattaaa

SEQ ID NO: 274327 - DNA, 20 bp, synthetic construct
  source 1..20: mol_type = other DNA
caacaggcccagctaattaa

SEQ ID NO: 274328 - DNA, 20 bp, synthetic construct
  source 1..20: mol_type = other DNA
ccaacaggcccagctaatta

SEQ ID NO: 274329 - DNA, 20 bp, synthetic construct
  source 1..20: mol_type = other DNA
gccaacaggcccagctaatt

SEQ ID NO: 274330 - DNA, 20 bp, synthetic construct
  source 1..20: mol_type = other DNA
tgccaacaggcccagctaat

SEQ ID NO: 274331 - DNA, 20 bp, synthetic construct
  source 1..20: mol_type = other DNA
gtgccaacaggcccagctaa

SEQ ID NO: 274332 - DNA, 20 bp, synthetic construct
  source 1..20: mol_type = other DNA
agtgccaacaggcccagcta

SEQ ID NO: 274333 - DNA, 20 bp, synthetic construct
  source 1..20: mol_type = other DNA
gagtgccaacaggcccagct

SEQ ID NO: 274334 - DNA, 20 bp, synthetic construct
  source 1..20: mol_type = other DNA
agagtgccaacaggcccagc

SEQ ID NO: 274335 - DNA, 20 bp, synthetic construct
  source 1..20: mol_type = other DNA
gagagtgccaacaggcccag

SEQ ID NO: 274336 - DNA, 20 bp, synthetic construct
  source 1..20: mol_type = other DNA
ggagagtgccaacaggccca

SEQ ID NO: 274337 - DNA, 20 bp, synthetic construct
  source 1..20: mol_type = other DNA
aggagagtgccaacaggccc

SEQ ID NO: 274338 - DNA, 20 bp, synthetic construct
  source 1..20: mol_type = other DNA
caggagagtgccaacaggcc

SEQ ID NO: 274339 - DNA, 20 bp, synthetic construct
  source 1..20: mol_type = other DNA
acaggagagtgccaacaggc

SEQ ID NO: 274340 - DNA, 20 bp, synthetic construct
  source 1..20: mol_type = other DNA
tacaggagagtgccaacagg

SEQ ID NO: 274341 - DNA, 20 bp, synthetic construct
  source 1..20: mol_type = other DNA
ctacaggagagtgccaacag

SEQ ID NO: 274342 - DNA, 20 bp, synthetic construct
  source 1..20: mol_type = other DNA
actacaggagagtgccaaca

SEQ ID NO: 274343 - DNA, 20 bp, synthetic construct
  source 1..20: mol_type = other DNA
aactacaggagagtgccaac

SEQ ID NO: 274344 - DNA, 20 bp, synthetic construct
  source 1..20: mol_type = other DNA
gaactacaggagagtgccaa

SEQ ID NO: 274345 - DNA, 20 bp, synthetic construct
  source 1..20: mol_type = other DNA
ggaactacaggagagtgcca

SEQ ID NO: 274346 - DNA, 20 bp, synthetic construct
  source 1..20: mol_type = other DNA
tggaactacaggagagtgcc

SEQ ID NO: 274347 - DNA, 20 bp, synthetic construct
  source 1..20: mol_type = other DNA
ctggaactacaggagagtgc

SEQ ID NO: 274348 - DNA, 20 bp, synthetic construct
  source 1..20: mol_type = other DNA
gctggaactacaggagagtg

SEQ ID NO: 274349 - DNA, 20 bp, synthetic construct
  source 1..20: mol_type = other DNA
agctggaactacaggagagt

SEQ ID NO: 274350 - DNA, 20 bp, synthetic construct
  source 1..20: mol_type = other DNA
tagctggaactacaggagag

SEQ ID NO: 274351 - DNA, 20 bp, synthetic construct
  source 1..20: mol_type = other DNA
gtagctggaactacaggaga

SEQ ID NO: 274352 - DNA, 20 bp, synthetic construct
  source 1..20: mol_type = other DNA
agtagctggaactacaggag

SEQ ID NO: 274353 - DNA, 20 bp, synthetic construct
  source 1..20: mol_type = other DNA
gagtagctggaactacagga

SEQ ID NO: 274354 - DNA, 20 bp, synthetic construct
  source 1..20: mol_type = other DNA
agagtagctggaactacagg

SEQ ID NO: 274355 - DNA, 20 bp, synthetic construct
  source 1..20: mol_type = other DNA
tagagtagctggaactacag

SEQ ID NO: 274356 - DNA, 20 bp, synthetic construct
  source 1..20: mol_type = other DNA
ctagagtagctggaactaca

SEQ ID NO: 274357 - DNA, 20 bp, synthetic construct
  source 1..20: mol_type = other DNA
tctagagtagctggaactac

SEQ ID NO: 274358 - DNA, 20 bp, synthetic construct
  source 1..20: mol_type = other DNA
ctctagagtagctggaacta

SEQ ID NO: 274359 - DNA, 20 bp, synthetic construct
  source 1..20: mol_type = other DNA
cctctagagtagctggaact

SEQ ID NO: 274360 - DNA, 20 bp, synthetic construct
  source 1..20: mol_type = other DNA
gcctctagagtagctggaac

SEQ ID NO: 274361 - DNA, 20 bp, synthetic construct
  source 1..20: mol_type = other DNA
agcctctagagtagctggaa

SEQ ID NO: 274362 - DNA, 20 bp, synthetic construct
  source 1..20: mol_type = other DNA
cagcctctagagtagctgga

SEQ ID NO: 274363 - DNA, 20 bp, synthetic construct
  source 1..20: mol_type = other DNA
tcagcctctagagtagctgg

SEQ ID NO: 274364 - DNA, 20 bp, synthetic construct
  source 1..20: mol_type = other DNA
ctcagcctctagagtagctg

SEQ ID NO: 274365 - DNA, 20 bp, synthetic construct
  source 1..20: mol_type = other DNA
cctcagcctctagagtagct

SEQ ID NO: 274366 - DNA, 20 bp, synthetic construct
  source 1..20: mol_type = other DNA
acctcagcctctagagtagc

SEQ ID NO: 274367 - DNA, 20 bp, synthetic construct
  source 1..20: mol_type = other DNA
cacctcagcctctagagtag

SEQ ID NO: 274368 - DNA, 20 bp, synthetic construct
  source 1..20: mol_type = other DNA
ccacctcagcctctagagta

SEQ ID NO: 274369 - DNA, 20 bp, synthetic construct
  source 1..20: mol_type = other DNA
cccacctcagcctctagagt

SEQ ID NO: 274370 - DNA, 20 bp, synthetic construct
  source 1..20: mol_type = other DNA
tcccacctcagcctctagag

SEQ ID NO: 274371 - DNA, 20 bp, synthetic construct
  source 1..20: mol_type = other DNA
ctcccacctcagcctctaga

SEQ ID NO: 274372 - DNA, 20 bp, synthetic construct
  source 1..20: mol_type = other DNA
cctcccacctcagcctctag

SEQ ID NO: 274373 - DNA, 20 bp, synthetic construct
  source 1..20: mol_type = other DNA
tcctcccacctcagcctcta

SEQ ID NO: 274374 - DNA, 20 bp, synthetic construct
  source 1..20: mol_type = other DNA
gtcctcccacctcagcctct

SEQ ID NO: 274375 - DNA, 20 bp, synthetic construct
  source 1..20: mol_type = other DNA
agtcctcccacctcagcctc

SEQ ID NO: 274376 - DNA, 20 bp, synthetic construct
  source 1..20: mol_type = other DNA
cagtcctcccacctcagcct

SEQ ID NO: 274377 - DNA, 20 bp, synthetic construct
  source 1..20: mol_type = other DNA
gcagtcctcccacctcagcc

SEQ ID NO: 274378 - DNA, 20 bp, synthetic construct
  source 1..20: mol_type = other DNA
agcagtcctcccacctcagc

SEQ ID NO: 274379 - DNA, 20 bp, synthetic construct
  source 1..20: mol_type = other DNA
aagcagtcctcccacctcag

SEQ ID NO: 274380 - DNA, 20 bp, synthetic construct
  source 1..20: mol_type = other DNA
caagcagtcctcccacctca

SEQ ID NO: 274381 - DNA, 20 bp, synthetic construct
  source 1..20: mol_type = other DNA
tcaagcagtcctcccacctc

SEQ ID NO: 274382 - DNA, 20 bp, synthetic construct
  source 1..20: mol_type = other DNA
ctcaagcagtcctcccacct

SEQ ID NO: 274383 - DNA, 20 bp, synthetic construct
  source 1..20: mol_type = other DNA
gctcaagcagtcctcccacc

SEQ ID NO: 274384 - DNA, 20 bp, synthetic construct
  source 1..20: mol_type = other DNA
ggctcaagcagtcctcccac

SEQ ID NO: 274385 - DNA, 20 bp, synthetic construct
  source 1..20: mol_type = other DNA
aggctcaagcagtcctccca

SEQ ID NO: 274386 - DNA, 20 bp, synthetic construct
  source 1..20: mol_type = other DNA
caggctcaagcagtcctccc

SEQ ID NO: 274387 - DNA, 20 bp, synthetic construct
  source 1..20: mol_type = other DNA
ccaggctcaagcagtcctcc

SEQ ID NO: 274388 - DNA, 20 bp, synthetic construct
  source 1..20: mol_type = other DNA
cccaggctcaagcagtcctc

SEQ ID NO: 274389 - DNA, 20 bp, synthetic construct
  source 1..20: mol_type = other DNA
tcccaggctcaagcagtcct

SEQ ID NO: 274390 - DNA, 20 bp, synthetic construct
  source 1..20: mol_type = other DNA
ctcccaggctcaagcagtcc

SEQ ID NO: 274391 - DNA, 20 bp, synthetic construct
  source 1..20: mol_type = other DNA
cctcccaggctcaagcagtc

SEQ ID NO: 274392 - DNA, 20 bp, synthetic construct
  source 1..20: mol_type = other DNA
acctcccaggctcaagcagt

SEQ ID NO: 274393 - DNA, 20 bp, synthetic construct
  source 1..20: mol_type = other DNA
gacctcccaggctcaagcag

SEQ ID NO: 274394 - DNA, 20 bp, synthetic construct
  source 1..20: mol_type = other DNA
tgacctcccaggctcaagca

SEQ ID NO: 274395 - DNA, 20 bp, synthetic construct
  source 1..20: mol_type = other DNA
ctgacctcccaggctcaagc

SEQ ID NO: 274396 - DNA, 20 bp, synthetic construct
  source 1..20: mol_type = other DNA
cctgacctcccaggctcaag

SEQ ID NO: 274397 - DNA, 20 bp, synthetic construct
  source 1..20: mol_type = other DNA
ccctgacctcccaggctcaa

SEQ ID NO: 274398 - DNA, 20 bp, synthetic construct
  source 1..20: mol_type = other DNA
gccctgacctcccaggctca

SEQ ID NO: 274399 - DNA, 20 bp, synthetic construct
  source 1..20: mol_type = other DNA
agccctgacctcccaggctc

SEQ ID NO: 274400 - DNA, 20 bp, synthetic construct
  source 1..20: mol_type = other DNA
cagccctgacctcccaggct

SEQ ID NO: 274401 - DNA, 20 bp, synthetic construct
  source 1..20: mol_type = other DNA
gcagccctgacctcccaggc

SEQ ID NO: 274402 - DNA, 20 bp, synthetic construct
  source 1..20: mol_type = other DNA
tgcagccctgacctcccagg

SEQ ID NO: 274403 - DNA, 20 bp, synthetic construct
  source 1..20: mol_type = other DNA
ttgcagccctgacctcccag

SEQ ID NO: 274404 - DNA, 20 bp, synthetic construct
  source 1..20: mol_type = other DNA
attgcagccctgacctccca

SEQ ID NO: 274405 - DNA, 20 bp, synthetic construct
  source 1..20: mol_type = other DNA
cattgcagccctgacctccc

SEQ ID NO: 274406 - DNA, 20 bp, synthetic construct
  source 1..20: mol_type = other DNA
tcattgcagccctgacctcc

SEQ ID NO: 274407 - DNA, 20 bp, synthetic construct
  source 1..20: mol_type = other DNA
ctcattgcagccctgacctc

SEQ ID NO: 274408 - DNA, 20 bp, synthetic construct
  source 1..20: mol_type = other DNA
gctcattgcagccctgacct

SEQ ID NO: 274409 - DNA, 20 bp, synthetic construct
  source 1..20: mol_type = other DNA
ggctcattgcagccctgacc

SEQ ID NO: 274410 - DNA, 20 bp, synthetic construct
  source 1..20: mol_type = other DNA
tggctcattgcagccctgac

SEQ ID NO: 274411 - DNA, 20 bp, synthetic construct
  source 1..20: mol_type = other DNA
atggctcattgcagccctga

SEQ ID NO: 274412 - DNA, 20 bp, synthetic construct
  source 1..20: mol_type = other DNA
catggctcattgcagccctg

SEQ ID NO: 274413 - DNA, 20 bp, synthetic construct
  source 1..20: mol_type = other DNA
acatggctcattgcagccct

SEQ ID NO: 274414 - DNA, 20 bp, synthetic construct
  source 1..20: mol_type = other DNA
aacatggctcattgcagccc

SEQ ID NO: 274415 - DNA, 20 bp, synthetic construct
  source 1..20: mol_type = other DNA
gaacatggctcattgcagcc

SEQ ID NO: 274416 - DNA, 20 bp, synthetic construct
  source 1..20: mol_type = other DNA
tgaacatggctcattgcagc

SEQ ID NO: 274417 - DNA, 20 bp, synthetic construct
  source 1..20: mol_type = other DNA
gtgaacatggctcattgcag

SEQ ID NO: 274418 - DNA, 20 bp, synthetic construct
  source 1..20: mol_type = other DNA
tgtgaacatggctcattgca

SEQ ID NO: 274419 - DNA, 20 bp, synthetic construct
  source 1..20: mol_type = other DNA
gtgtgaacatggctcattgc

SEQ ID NO: 274420 - DNA, 20 bp, synthetic construct
  source 1..20: mol_type = other DNA
ggtgtgaacatggctcattg

SEQ ID NO: 274421 - DNA, 20 bp, synthetic construct
  source 1..20: mol_type = other DNA
tggtgtgaacatggctcatt

SEQ ID NO: 274422 - DNA, 20 bp, synthetic construct
  source 1..20: mol_type = other DNA
gtggtgtgaacatggctcat

SEQ ID NO: 274423 - DNA, 20 bp, synthetic construct
  source 1..20: mol_type = other DNA
agtggtgtgaacatggctca

SEQ ID NO: 274424 - DNA, 20 bp, synthetic construct
  source 1..20: mol_type = other DNA
cagtggtgtgaacatggctc

SEQ ID NO: 274425 - DNA, 20 bp, synthetic construct
  source 1..20: mol_type = other DNA
tcagtggtgtgaacatggct

SEQ ID NO: 274426 - DNA, 20 bp, synthetic construct
  source 1..20: mol_type = other DNA
ttcagtggtgtgaacatggc

SEQ ID NO: 274427 - DNA, 20 bp, synthetic construct
  source 1..20: mol_type = other DNA
gttcagtggtgtgaacatgg

SEQ ID NO: 274428 - DNA, 20 bp, synthetic construct
  source 1..20: mol_type = other DNA
cgttcagtggtgtgaacatg

SEQ ID NO: 274429 - DNA, 20 bp, synthetic construct
  source 1..20: mol_type = other DNA
gcgttcagtggtgtgaacat

SEQ ID NO: 274430 - DNA, 20 bp, synthetic construct
  source 1..20: mol_type = other DNA
ggcgttcagtggtgtgaaca

SEQ ID NO: 274431 - DNA, 20 bp, synthetic construct
  source 1..20: mol_type = other DNA
tggcgttcagtggtgtgaac

SEQ ID NO: 274432 - DNA, 20 bp, synthetic construct
  source 1..20: mol_type = other DNA
ctggcgttcagtggtgtgaa

SEQ ID NO: 274433 - DNA, 20 bp, synthetic construct
  source 1..20: mol_type = other DNA
gctggcgttcagtggtgtga

SEQ ID NO: 274434 - DNA, 20 bp, synthetic construct
  source 1..20: mol_type = other DNA
ggctggcgttcagtggtgtg

SEQ ID NO: 274435 - DNA, 20 bp, synthetic construct
  source 1..20: mol_type = other DNA
aggctggcgttcagtggtgt

SEQ ID NO: 274436 - DNA, 20 bp, synthetic construct
  source 1..20: mol_type = other DNA
caggctggcgttcagtggtg

SEQ ID NO: 274437 - DNA, 20 bp, synthetic construct
  source 1..20: mol_type = other DNA
ccaggctggcgttcagtggt

SEQ ID NO: 274438 - DNA, 20 bp, synthetic construct
  source 1..20: mol_type = other DNA
cccaggctggcgttcagtgg

SEQ ID NO: 274439 - DNA, 20 bp, synthetic construct
  source 1..20: mol_type = other DNA
gcccaggctggcgttcagtg

SEQ ID NO: 274440 - DNA, 20 bp, synthetic construct
  source 1..20: mol_type = other DNA
cgcccaggctggcgttcagt

SEQ ID NO: 274441 - DNA, 20 bp, synthetic construct
  source 1..20: mol_type = other DNA
tcgcccaggctggcgttcag

SEQ ID NO: 274442 - DNA, 20 bp, synthetic construct
  source 1..20: mol_type = other DNA
ctcgcccaggctggcgttca

SEQ ID NO: 274443 - DNA, 20 bp, synthetic construct
  source 1..20: mol_type = other DNA
tctcgcccaggctggcgttc

SEQ ID NO: 274444 - DNA, 20 bp, synthetic construct
  source 1..20: mol_type = other DNA
gtctcgcccaggctggcgtt

SEQ ID NO: 274445 - DNA, 20 bp, synthetic construct
  source 1..20: mol_type = other DNA
ggtctcgcccaggctggcgt

SEQ ID NO: 274446 - DNA, 20 bp, synthetic construct
  source 1..20: mol_type = other DNA
gggtctcgcccaggctggcg

SEQ ID NO: 274447 - DNA, 20 bp, synthetic construct
  source 1..20: mol_type = other DNA
agggtctcgcccaggctggc

SEQ ID NO: 274448 - DNA, 20 bp, synthetic construct
  source 1..20: mol_type = other DNA
cagggtctcgcccaggctgg

SEQ ID NO: 274449 - DNA, 20 bp, synthetic construct
  source 1..20: mol_type = other DNA
acagggtctcgcccaggctg

SEQ ID NO: 274450 - DNA, 20 bp, synthetic construct
  source 1..20: mol_type = other DNA
tacagggtctcgcccaggct

SEQ ID NO: 274451 - DNA, 20 bp, synthetic construct
  source 1..20: mol_type = other DNA
atacagggtctcgcccaggc

SEQ ID NO: 274452 - DNA, 20 bp, synthetic construct
  source 1..20: mol_type = other DNA
gatacagggtctcgcccagg

SEQ ID NO: 274453 - DNA, 20 bp, synthetic construct
  source 1..20: mol_type = other DNA
tgatacagggtctcgcccag

SEQ ID NO: 274454 - DNA, 20 bp, synthetic construct
  source 1..20: mol_type = other DNA
ttgatacagggtctcgccca

SEQ ID NO: 274455 - DNA, 20 bp, synthetic construct
  source 1..20: mol_type = other DNA
tttgatacagggtctcgccc

SEQ ID NO: 274456 - DNA, 20 bp, synthetic construct
  source 1..20: mol_type = other DNA
ttttgatacagggtctcgcc

SEQ ID NO: 274457 - DNA, 20 bp, synthetic construct
  source 1..20: mol_type = other DNA
tttttgatacagggtctcgc

SEQ ID NO: 274458 - DNA, 20 bp, synthetic construct
  source 1..20: mol_type = other DNA
ttttttgatacagggtctcg

SEQ ID NO: 274459 - DNA, 20 bp, synthetic construct
  source 1..20: mol_type = other DNA
cttttttgatacagggtctc

SEQ ID NO: 274460 - DNA, 20 bp, synthetic construct
  source 1..20: mol_type = other DNA
acttttttgatacagggtct

SEQ ID NO: 274461 - DNA, 20 bp, synthetic construct
  source 1..20: mol_type = other DNA
tacttttttgatacagggtc

SEQ ID NO: 274462 - DNA, 20 bp, synthetic construct
  source 1..20: mol_type = other DNA
ttacttttttgatacagggt

SEQ ID NO: 274463 - DNA, 20 bp, synthetic construct
  source 1..20: mol_type = other DNA
tttacttttttgatacaggg

SEQ ID NO: 274464 - DNA, 20 bp, synthetic construct
  source 1..20: mol_type = other DNA
ctttacttttttgatacagg

SEQ ID NO: 274465 - DNA, 20 bp, synthetic construct
  source 1..20: mol_type = other DNA
actttacttttttgatacag

SEQ ID NO: 274466 - DNA, 20 bp, synthetic construct
  source 1..20: mol_type = other DNA
tactttacttttttgataca

SEQ ID NO: 274467 - DNA, 20 bp, synthetic construct
  source 1..20: mol_type = other DNA
ttactttacttttttgatac

SEQ ID NO: 274468 - DNA, 20 bp, synthetic construct
  source 1..20: mol_type = other DNA
tttactttacttttttgata

SEQ ID NO: 274469 - DNA, 20 bp, synthetic construct
  source 1..20: mol_type = other DNA
ttttactttacttttttgat

SEQ ID NO: 274470 - DNA, 20 bp, synthetic construct
  source 1..20: mol_type = other DNA
attttactttacttttttga

SEQ ID NO: 274471 - DNA, 20 bp, synthetic construct
  source 1..20: mol_type = other DNA
cattttactttacttttttg

SEQ ID NO: 274472 - DNA, 20 bp, synthetic construct
  source 1..20: mol_type = other DNA
tcattttactttactttttt

SEQ ID NO: 274473 - DNA, 20 bp, synthetic construct
  source 1..20: mol_type = other DNA
ttcattttactttacttttt

SEQ ID NO: 274474 - DNA, 20 bp, synthetic construct
  source 1..20: mol_type = other DNA
attcattttactttactttt

SEQ ID NO: 274475 - DNA, 20 bp, synthetic construct
  source 1..20: mol_type = other DNA
gattcattttactttacttt

SEQ ID NO: 274476 - DNA, 20 bp, synthetic construct
  source 1..20: mol_type = other DNA
ggattcattttactttactt

SEQ ID NO: 274477 - DNA, 20 bp, synthetic construct
  source 1..20: mol_type = other DNA
aggattcattttactttact

SEQ ID NO: 274478 - DNA, 20 bp, synthetic construct
  source 1..20: mol_type = other DNA
caggattcattttactttac

SEQ ID NO: 274479 - DNA, 20 bp, synthetic construct
  source 1..20: mol_type = other DNA
acaggattcattttacttta

SEQ ID NO: 274480 - DNA, 20 bp, synthetic construct
  source 1..20: mol_type = other DNA
tacaggattcattttacttt

SEQ ID NO: 274481 - DNA, 20 bp, synthetic construct
  source 1..20: mol_type = other DNA
gtacaggattcattttactt

SEQ ID NO: 274482 - DNA, 20 bp, synthetic construct
  source 1..20: mol_type = other DNA
cgtacaggattcattttact

SEQ ID NO: 274483 - DNA, 20 bp, synthetic construct
  source 1..20: mol_type = other DNA
acgtacaggattcattttac

SEQ ID NO: 274484 - DNA, 20 bp, synthetic construct
  source 1..20: mol_type = other DNA
aacgtacaggattcatttta

SEQ ID NO: 274485 - DNA, 20 bp, synthetic construct
  source 1..20: mol_type = other DNA
taacgtacaggattcatttt

SEQ ID NO: 274486 - DNA, 20 bp, synthetic construct
  source 1..20: mol_type = other DNA
ataacgtacaggattcattt

SEQ ID NO: 274487 - DNA, 20 bp, synthetic construct
  source 1..20: mol_type = other DNA
tataacgtacaggattcatt

SEQ ID NO: 274488 - DNA, 20 bp, synthetic construct
  source 1..20: mol_type = other DNA
atataacgtacaggattcat

SEQ ID NO: 274489 - DNA, 20 bp, synthetic construct
  source 1..20: mol_type = other DNA
aatataacgtacaggattca

SEQ ID NO: 274490 - DNA, 20 bp, synthetic construct
  source 1..20: mol_type = other DNA
taatataacgtacaggattc

SEQ ID NO: 274491 - DNA, 20 bp, synthetic construct
  source 1..20: mol_type = other DNA
ttaatataacgtacaggatt

SEQ ID NO: 274492 - DNA, 20 bp, synthetic construct
  source 1..20: mol_type = other DNA
cttaatataacgtacaggat

SEQ ID NO: 274493 - DNA, 20 bp, synthetic construct
  source 1..20: mol_type = other DNA
ccttaatataacgtacagga

SEQ ID NO: 274494 - DNA, 20 bp, synthetic construct
  source 1..20: mol_type = other DNA
accttaatataacgtacagg

SEQ ID NO: 274495 - DNA, 20 bp, synthetic construct
  source 1..20: mol_type = other DNA
caccttaatataacgtacag

SEQ ID NO: 274496 - DNA, 20 bp, synthetic construct
  source 1..20: mol_type = other DNA
gcaccttaatataacgtaca

SEQ ID NO: 274497 - DNA, 20 bp, synthetic construct
  source 1..20: mol_type = other DNA
ggcaccttaatataacgtac

SEQ ID NO: 274498 - DNA, 20 bp, synthetic construct
  source 1..20: mol_type = other DNA
gggcaccttaatataacgta

SEQ ID NO: 274499 - DNA, 20 bp, synthetic construct
  source 1..20: mol_type = other DNA
ggggcaccttaatataacgt

SEQ ID NO: 274500 - DNA, 20 bp, synthetic construct
  source 1..20: mol_type = other DNA
tggggcaccttaatataacg

SEQ ID NO: 274501 - DNA, 20 bp, synthetic construct
  source 1..20: mol_type = other DNA
ttggggcaccttaatataac

SEQ ID NO: 274502 - DNA, 20 bp, synthetic construct
  source 1..20: mol_type = other DNA
tttggggcaccttaatataa

SEQ ID NO: 274503 - DNA, 20 bp, synthetic construct
  source 1..20: mol_type = other DNA
atttggggcaccttaatata

SEQ ID NO: 274504 - DNA, 20 bp, synthetic construct
  source 1..20: mol_type = other DNA
aatttggggcaccttaatat

SEQ ID NO: 274505 - DNA, 20 bp, synthetic construct
  source 1..20: mol_type = other DNA
caatttggggcaccttaata

SEQ ID NO: 274506 - DNA, 20 bp, synthetic construct
  source 1..20: mol_type = other DNA
acaatttggggcaccttaat

SEQ ID NO: 274507 - DNA, 20 bp, synthetic construct
  source 1..20: mol_type = other DNA
tacaatttggggcaccttaa

SEQ ID NO: 274508 - DNA, 20 bp, synthetic construct
  source 1..20: mol_type = other DNA
gtacaatttggggcacctta

SEQ ID NO: 274509 - DNA, 20 bp, synthetic construct
  source 1..20: mol_type = other DNA
agtacaatttggggcacctt

SEQ ID NO: 274510 - DNA, 20 bp, synthetic construct
  source 1..20: mol_type = other DNA
aagtacaatttggggcacct

SEQ ID NO: 274511 - DNA, 20 bp, synthetic construct
  source 1..20: mol_type = other DNA
taagtacaatttggggcacc

SEQ ID NO: 274512 - DNA, 20 bp, synthetic construct
  source 1..20: mol_type = other DNA
ctaagtacaatttggggcac

SEQ ID NO: 274513 - DNA, 20 bp, synthetic construct
  source 1..20: mol_type = other DNA
tctaagtacaatttggggca

SEQ ID NO: 274514 - DNA, 20 bp, synthetic construct
  source 1..20: mol_type = other DNA
ttctaagtacaatttggggc

SEQ ID NO: 274515 - DNA, 20 bp, synthetic construct
  source 1..20: mol_type = other DNA
cttctaagtacaatttgggg

SEQ ID NO: 274516 - DNA, 20 bp, synthetic construct
  source 1..20: mol_type = other DNA
ccttctaagtacaatttggg

SEQ ID NO: 274517 - DNA, 20 bp, synthetic construct
  source 1..20: mol_type = other DNA
tccttctaagtacaatttgg

SEQ ID NO: 274518 - DNA, 20 bp, synthetic construct
  source 1..20: mol_type = other DNA
atccttctaagtacaatttg

SEQ ID NO: 274519 - DNA, 20 bp, synthetic construct
  source 1..20: mol_type = other DNA
aatccttctaagtacaattt

SEQ ID NO: 274520 - DNA, 20 bp, synthetic construct
  source 1..20: mol_type = other DNA
aaatccttctaagtacaatt

SEQ ID NO: 274521 - DNA, 20 bp, synthetic construct
  source 1..20: mol_type = other DNA
gaaatccttctaagtacaat

SEQ ID NO: 274522 - DNA, 20 bp, synthetic construct
  source 1..20: mol_type = other DNA
tgaaatccttctaagtacaa

SEQ ID NO: 274523 - DNA, 20 bp, synthetic construct
  source 1..20: mol_type = other DNA
atgaaatccttctaagtaca

SEQ ID NO: 274524 - DNA, 20 bp, synthetic construct
  source 1..20: mol_type = other DNA
tatgaaatccttctaagtac

SEQ ID NO: 274525 - DNA, 20 bp, synthetic construct
  source 1..20: mol_type = other DNA
ctatgaaatccttctaagta

SEQ ID NO: 274526 - DNA, 20 bp, synthetic construct
  source 1..20: mol_type = other DNA
actatgaaatccttctaagt

SEQ ID NO: 274527 - DNA, 20 bp, synthetic construct
  source 1..20: mol_type = other DNA
aactatgaaatccttctaag

SEQ ID NO: 274528 - DNA, 20 bp, synthetic construct
  source 1..20: mol_type = other DNA
aaactatgaaatccttctaa

SEQ ID NO: 274529 - DNA, 20 bp, synthetic construct
  source 1..20: mol_type = other DNA
aaaactatgaaatccttcta

SEQ ID NO: 274530 - DNA, 20 bp, synthetic construct
  source 1..20: mol_type = other DNA
taaaactatgaaatccttct

SEQ ID NO: 274531 - DNA, 20 bp, synthetic construct
  source 1..20: mol_type = other DNA
ttaaaactatgaaatccttc

SEQ ID NO: 274532 - DNA, 20 bp, synthetic construct
  source 1..20: mol_type = other DNA
tttaaaactatgaaatcctt

SEQ ID NO: 274533 - DNA, 20 bp, synthetic construct
  source 1..20: mol_type = other DNA
atttaaaactatgaaatcct

SEQ ID NO: 274534 - DNA, 20 bp, synthetic construct
  source 1..20: mol_type = other DNA
tatttaaaactatgaaatcc

SEQ ID NO: 274535 - DNA, 20 bp, synthetic construct
  source 1..20: mol_type = other DNA
gtatttaaaactatgaaatc

SEQ ID NO: 274536 - DNA, 20 bp, synthetic construct
  source 1..20: mol_type = other DNA
agtatttaaaactatgaaat

SEQ ID NO: 274537 - DNA, 20 bp, synthetic construct
  source 1..20: mol_type = other DNA
aagtatttaaaactatgaaa

SEQ ID NO: 274538 - DNA, 20 bp, synthetic construct
  source 1..20: mol_type = other DNA
aaagtatttaaaactatgaa

SEQ ID NO: 274539 - DNA, 20 bp, synthetic construct
  source 1..20: mol_type = other DNA
aaaagtatttaaaactatga

SEQ ID NO: 274540 - DNA, 20 bp, synthetic construct
  source 1..20: mol_type = other DNA
caaaagtatttaaaactatg

SEQ ID NO: 274541 - DNA, 20 bp, synthetic construct
  source 1..20: mol_type = other DNA
acaaaagtatttaaaactat

SEQ ID NO: 274542 - DNA, 20 bp, synthetic construct
  source 1..20: mol_type = other DNA
aacaaaagtatttaaaacta

SEQ ID NO: 274543 - DNA, 20 bp, synthetic construct
  source 1..20: mol_type = other DNA
taacaaaagtatttaaaact

SEQ ID NO: 274544 - DNA, 20 bp, synthetic construct
  source 1..20: mol_type = other DNA
ataacaaaagtatttaaaac

SEQ ID NO: 274545 - DNA, 20 bp, synthetic construct
  source 1..20: mol_type = other DNA
aataacaaaagtatttaaaa

SEQ ID NO: 274546 - DNA, 20 bp, synthetic construct
  source 1..20: mol_type = other DNA
aaataacaaaagtatttaaa

SEQ ID NO: 274547 - DNA, 20 bp, synthetic construct
  source 1..20: mol_type = other DNA
taaataacaaaagtatttaa

SEQ ID NO: 274548 - DNA, 20 bp, synthetic construct
  source 1..20: mol_type = other DNA
ttaaataacaaaagtattta

SEQ ID NO: 274549 - DNA, 20 bp, synthetic construct
  source 1..20: mol_type = other DNA
tttaaataacaaaagtattt

SEQ ID NO: 274550 - DNA, 20 bp, synthetic construct
  source 1..20: mol_type = other DNA
ttttaaataacaaaagtatt

SEQ ID NO: 274551 - DNA, 20 bp, synthetic construct
  source 1..20: mol_type = other DNA
tttttaaataacaaaagtat

SEQ ID NO: 274552 - DNA, 20 bp, synthetic construct
  source 1..20: mol_type = other DNA
ttttttaaataacaaaagta

SEQ ID NO: 274553 - DNA, 20 bp, synthetic construct
  source 1..20: mol_type = other DNA
attttttaaataacaaaagt

SEQ ID NO: 274554 - DNA, 20 bp, synthetic construct
  source 1..20: mol_type = other DNA
aattttttaaataacaaaag

SEQ ID NO: 274555 - DNA, 20 bp, synthetic construct
  source 1..20: mol_type = other DNA
taattttttaaataacaaaa

SEQ ID NO: 274556 - DNA, 20 bp, synthetic construct
  source 1..20: mol_type = other DNA
ttaattttttaaataacaaa

SEQ ID NO: 274557 - DNA, 20 bp, synthetic construct
  source 1..20: mol_type = other DNA
tttaattttttaaataacaa

SEQ ID NO: 274558 - DNA, 20 bp, synthetic construct
  source 1..20: mol_type = other DNA
atttaattttttaaataaca

SEQ ID NO: 274559 - DNA, 20 bp, synthetic construct
  source 1..20: mol_type = other DNA
catttaattttttaaataac

SEQ ID NO: 274560 - DNA, 20 bp, synthetic construct
  source 1..20: mol_type = other DNA
tcatttaattttttaaataa

SEQ ID NO: 274561 - DNA, 20 bp, synthetic construct
  source 1..20: mol_type = other DNA
gtcatttaattttttaaata

SEQ ID NO: 274562 - DNA, 20 bp, synthetic construct
  source 1..20: mol_type = other DNA
agtcatttaattttttaaat

SEQ ID NO: 274563 - DNA, 20 bp, synthetic construct
  source 1..20: mol_type = other DNA
cagtcatttaattttttaaa

SEQ ID NO: 274564 - DNA, 20 bp, synthetic construct
  source 1..20: mol_type = other DNA
gcagtcatttaattttttaa

SEQ ID NO: 274565 - DNA, 20 bp, synthetic construct
  source 1..20: mol_type = other DNA
tgcagtcatttaatttttta

SEQ ID NO: 274566 - DNA, 20 bp, synthetic construct
  source 1..20: mol_type = other DNA
ctgcagtcatttaatttttt

SEQ ID NO: 274567 - DNA, 20 bp, synthetic construct
  source 1..20: mol_type = other DNA
gctgcagtcatttaattttt

SEQ ID NO: 274568 - DNA, 20 bp, synthetic construct
  source 1..20: mol_type = other DNA
tgctgcagtcatttaatttt

SEQ ID NO: 274569 - DNA, 20 bp, synthetic construct
  source 1..20: mol_type = other DNA
atgctgcagtcatttaattt

SEQ ID NO: 274570 - DNA, 20 bp, synthetic construct
  source 1..20: mol_type = other DNA
tatgctgcagtcatttaatt

SEQ ID NO: 274571 - DNA, 20 bp, synthetic construct
  source 1..20: mol_type = other DNA
atatgctgcagtcatttaat

SEQ ID NO: 274572 - DNA, 20 bp, synthetic construct
  source 1..20: mol_type = other DNA
tatatgctgcagtcatttaa

SEQ ID NO: 274573 - DNA, 20 bp, synthetic construct
  source 1..20: mol_type = other DNA
ttatatgctgcagtcattta

SEQ ID NO: 274574 - DNA, 20 bp, synthetic construct
  source 1..20: mol_type = other DNA
tttatatgctgcagtcattt

SEQ ID NO: 274575 - DNA, 20 bp, synthetic construct
  source 1..20: mol_type = other DNA
atttatatgctgcagtcatt

SEQ ID NO: 274576 - DNA, 20 bp, synthetic construct
  source 1..20: mol_type = other DNA
aatttatatgctgcagtcat

SEQ ID NO: 274577 - DNA, 20 bp, synthetic construct
  source 1..20: mol_type = other DNA
taatttatatgctgcagtca

SEQ ID NO: 274578 - DNA, 20 bp, synthetic construct
  source 1..20: mol_type = other DNA
ctaatttatatgctgcagtc

SEQ ID NO: 274579 - DNA, 20 bp, synthetic construct
  source 1..20: mol_type = other DNA
cctaatttatatgctgcagt

SEQ ID NO: 274580 - DNA, 20 bp, synthetic construct
  source 1..20: mol_type = other DNA
acctaatttatatgctgcag

SEQ ID NO: 274581 - DNA, 20 bp, synthetic construct
  source 1..20: mol_type = other DNA
aacctaatttatatgctgca

SEQ ID NO: 274582 - DNA, 20 bp, synthetic construct
  source 1..20: mol_type = other DNA
gaacctaatttatatgctgc

SEQ ID NO: 274583 - DNA, 20 bp, synthetic construct
  source 1..20: mol_type = other DNA
agaacctaatttatatgctg

SEQ ID NO: 274584 - DNA, 20 bp, synthetic construct
  source 1..20: mol_type = other DNA
aagaacctaatttatatgct

SEQ ID NO: 274585 - DNA, 20 bp, synthetic construct
  source 1..20: mol_type = other DNA
taagaacctaatttatatgc

SEQ ID NO: 274586 - DNA, 20 bp, synthetic construct
  source 1..20: mol_type = other DNA
ttaagaacctaatttatatg

SEQ ID NO: 274587 - DNA, 20 bp, synthetic construct
  source 1..20: mol_type = other DNA
attaagaacctaatttatat

SEQ ID NO: 274588 - DNA, 20 bp, synthetic construct
  source 1..20: mol_type = other DNA
cattaagaacctaatttata

SEQ ID NO: 274589 - DNA, 20 bp, synthetic construct
  source 1..20: mol_type = other DNA
ccattaagaacctaatttat

SEQ ID NO: 274590 - DNA, 20 bp, synthetic construct
  source 1..20: mol_type = other DNA
tccattaagaacctaattta

SEQ ID NO: 274591 - DNA, 20 bp, synthetic construct
  source 1..20: mol_type = other DNA
ctccattaagaacctaattt

SEQ ID NO: 274592 - DNA, 20 bp, synthetic construct
  source 1..20: mol_type = other DNA
cctccattaagaacctaatt

SEQ ID NO: 274593 - DNA, 20 bp, synthetic construct
  source 1..20: mol_type = other DNA
ccctccattaagaacctaat

SEQ ID NO: 274594 - DNA, 20 bp, synthetic construct
  source 1..20: mol_type = other DNA
cccctccattaagaacctaa

SEQ ID NO: 274595 - DNA, 20 bp, synthetic construct
  source 1..20: mol_type = other DNA
tcccctccattaagaaccta

SEQ ID NO: 274596 - DNA, 20 bp, synthetic construct
  source 1..20: mol_type = other DNA
ttcccctccattaagaacct

SEQ ID NO: 274597 - DNA, 20 bp, synthetic construct
  source 1..20: mol_type = other DNA
tttcccctccattaagaacc

SEQ ID NO: 274598 - DNA, 20 bp, synthetic construct
  source 1..20: mol_type = other DNA
ttttcccctccattaagaac

SEQ ID NO: 274599 - DNA, 20 bp, synthetic construct
  source 1..20: mol_type = other DNA
tttttcccctccattaagaa

SEQ ID NO: 274600 - DNA, 20 bp, synthetic construct
  source 1..20: mol_type = other DNA
ctttttcccctccattaaga

SEQ ID NO: 274601 - DNA, 20 bp, synthetic construct
  source 1..20: mol_type = other DNA
tctttttcccctccattaag

SEQ ID NO: 274602 - DNA, 20 bp, synthetic construct
  source 1..20: mol_type = other DNA
ctctttttcccctccattaa

SEQ ID NO: 274603 - DNA, 20 bp, synthetic construct
  source 1..20: mol_type = other DNA
actctttttcccctccatta

SEQ ID NO: 274604 - DNA, 20 bp, synthetic construct
  source 1..20: mol_type = other DNA
tactctttttcccctccatt

SEQ ID NO: 274605 - DNA, 20 bp, synthetic construct
  source 1..20: mol_type = other DNA
gtactctttttcccctccat

SEQ ID NO: 274606 - DNA, 20 bp, synthetic construct
  source 1..20: mol_type = other DNA
tgtactctttttcccctcca

SEQ ID NO: 274607 - DNA, 20 bp, synthetic construct
  source 1..20: mol_type = other DNA
ttgtactctttttcccctcc

SEQ ID NO: 274608 - DNA, 20 bp, synthetic construct
  source 1..20: mol_type = other DNA
cttgtactctttttcccctc

SEQ ID NO: 274609 - DNA, 20 bp, synthetic construct
  source 1..20: mol_type = other DNA
tcttgtactctttttcccct

SEQ ID NO: 274610 - DNA, 20 bp, synthetic construct
  source 1..20: mol_type = other DNA
ttcttgtactctttttcccc

SEQ ID NO: 274611 - DNA, 20 bp, synthetic construct
  source 1..20: mol_type = other DNA
tttcttgtactctttttccc

SEQ ID NO: 274612 - DNA, 20 bp, synthetic construct
  source 1..20: mol_type = other DNA
ttttcttgtactctttttcc

SEQ ID NO: 274613 - DNA, 20 bp, synthetic construct
  source 1..20: mol_type = other DNA
cttttcttgtactctttttc

SEQ ID NO: 274614 - DNA, 20 bp, synthetic construct
  source 1..20: mol_type = other DNA
tcttttcttgtactcttttt

SEQ ID NO: 274615 - DNA, 20 bp, synthetic construct
  source 1..20: mol_type = other DNA
ttcttttcttgtactctttt

SEQ ID NO: 274616 - DNA, 20 bp, synthetic construct
  source 1..20: mol_type = other DNA
tttcttttcttgtactcttt

SEQ ID NO: 274617 - DNA, 20 bp, synthetic construct
  source 1..20: mol_type = other DNA
atttcttttcttgtactctt

SEQ ID NO: 274618 - DNA, 20 bp, synthetic construct
  source 1..20: mol_type = other DNA
tatttcttttcttgtactct

SEQ ID NO: 274619 - DNA, 20 bp, synthetic construct
  source 1..20: mol_type = other DNA
ttatttcttttcttgtactc

SEQ ID NO: 274620 - DNA, 20 bp, synthetic construct
  source 1..20: mol_type = other DNA
cttatttcttttcttgtact

SEQ ID NO: 274621 - DNA, 20 bp, synthetic construct
  source 1..20: mol_type = other DNA
tcttatttcttttcttgtac

SEQ ID NO: 274622 - DNA, 20 bp, synthetic construct
  source 1..20: mol_type = other DNA
ttcttatttcttttcttgta

SEQ ID NO: 274623 - DNA, 20 bp, synthetic construct
  source 1..20: mol_type = other DNA
attcttatttcttttcttgt

SEQ ID NO: 274624 - DNA, 20 bp, synthetic construct
  source 1..20: mol_type = other DNA
gattcttatttcttttcttg

SEQ ID NO: 274625 - DNA, 20 bp, synthetic construct
  source 1..20: mol_type = other DNA
agattcttatttcttttctt

SEQ ID NO: 274626 - DNA, 20 bp, synthetic construct
  source 1..20: mol_type = other DNA
tagattcttatttcttttct

SEQ ID NO: 274627 - DNA, 20 bp, synthetic construct
  source 1..20: mol_type = other DNA
ctagattcttatttcttttc

SEQ ID NO: 274628 - DNA, 20 bp, synthetic construct
  source 1..20: mol_type = other DNA
tctagattcttatttctttt

SEQ ID NO: 274629 - DNA, 20 bp, synthetic construct
  source 1..20: mol_type = other DNA
ttctagattcttatttcttt

SEQ ID NO: 274630 - DNA, 20 bp, synthetic construct
  source 1..20: mol_type = other DNA
tttctagattcttatttctt

SEQ ID NO: 274631 - DNA, 20 bp, synthetic construct
  source 1..20: mol_type = other DNA
gtttctagattcttatttct

SEQ ID NO: 274632 - DNA, 20 bp, synthetic construct
  source 1..20: mol_type = other DNA
tgtttctagattcttatttc

SEQ ID NO: 274633 - DNA, 20 bp, synthetic construct
  source 1..20: mol_type = other DNA
ttgtttctagattcttattt

SEQ ID NO: 274634 - DNA, 20 bp, synthetic construct
  source 1..20: mol_type = other DNA
tttgtttctagattcttatt

SEQ ID NO: 274635 - DNA, 20 bp, synthetic construct
  source 1..20: mol_type = other DNA
ctttgtttctagattcttat

SEQ ID NO: 274636 - DNA, 20 bp, synthetic construct
  source 1..20: mol_type = other DNA
tctttgtttctagattctta

SEQ ID NO: 274637 - DNA, 20 bp, synthetic construct
  source 1..20: mol_type = other DNA
atctttgtttctagattctt

SEQ ID NO: 274638 - DNA, 20 bp, synthetic construct
  source 1..20: mol_type = other DNA
tatctttgtttctagattct

SEQ ID NO: 274639 - DNA, 20 bp, synthetic construct
  source 1..20: mol_type = other DNA
ttatctttgtttctagattc

SEQ ID NO: 274640 - DNA, 20 bp, synthetic construct
  source 1..20: mol_type = other DNA
cttatctttgtttctagatt

SEQ ID NO: 274641 - DNA, 20 bp, synthetic construct
  source 1..20: mol_type = other DNA
tcttatctttgtttctagat

SEQ ID NO: 274642 - DNA, 20 bp, synthetic construct
  source 1..20: mol_type = other DNA
ctcttatctttgtttctaga

SEQ ID NO: 274643 - DNA, 20 bp, synthetic construct
  source 1..20: mol_type = other DNA
gctcttatctttgtttctag

SEQ ID NO: 274644 - DNA, 20 bp, synthetic construct
  source 1..20: mol_type = other DNA
tgctcttatctttgtttcta

SEQ ID NO: 274645 - DNA, 20 bp, synthetic construct
  source 1..20: mol_type = other DNA
ctgctcttatctttgtttct

SEQ ID NO: 274646 - DNA, 20 bp, synthetic construct
  source 1..20: mol_type = other DNA
tctgctcttatctttgtttc

SEQ ID NO: 274647 - DNA, 20 bp, synthetic construct
  source 1..20: mol_type = other DNA
ttctgctcttatctttgttt

SEQ ID NO: 274648 - DNA, 20 bp, synthetic construct
  source 1..20: mol_type = other DNA
tttctgctcttatctttgtt

SEQ ID NO: 274649 - DNA, 20 bp, synthetic construct
  source 1..20: mol_type = other DNA
atttctgctcttatctttgt

SEQ ID NO: 274650 - DNA, 20 bp, synthetic construct
  source 1..20: mol_type = other DNA
tatttctgctcttatctttg

SEQ ID NO: 274651 - DNA, 20 bp, synthetic construct
  source 1..20: mol_type = other DNA
ttatttctgctcttatcttt

SEQ ID NO: 274652 - DNA, 20 bp, synthetic construct
  source 1..20: mol_type = other DNA
tttatttctgctcttatctt

SEQ ID NO: 274653 - DNA, 20 bp, synthetic construct
  source 1..20: mol_type = other DNA
gtttatttctgctcttatct

SEQ ID NO: 274654 - DNA, 20 bp, synthetic construct
  source 1..20: mol_type = other DNA
ggtttatttctgctcttatc

SEQ ID NO: 274655 - DNA, 20 bp, synthetic construct
  source 1..20: mol_type = other DNA
tggtttatttctgctcttat

SEQ ID NO: 274656 - DNA, 20 bp, synthetic construct
  source 1..20: mol_type = other DNA
ctggtttatttctgctctta

SEQ ID NO: 274657 - DNA, 20 bp, synthetic construct
  source 1..20: mol_type = other DNA
tctggtttatttctgctctt

SEQ ID NO: 274658 - DNA, 20 bp, synthetic construct
  source 1..20: mol_type = other DNA
ttctggtttatttctgctct

SEQ ID NO: 274659 - DNA, 20 bp, synthetic construct
  source 1..20: mol_type = other DNA
tttctggtttatttctgctc

SEQ ID NO: 274660 - DNA, 20 bp, synthetic construct
  source 1..20: mol_type = other DNA
ttttctggtttatttctgct

SEQ ID NO: 274661 - DNA, 20 bp, synthetic construct
  source 1..20: mol_type = other DNA
gttttctggtttatttctgc

SEQ ID NO: 274662 - DNA, 20 bp, synthetic construct
  source 1..20: mol_type = other DNA
tgttttctggtttatttctg

SEQ ID NO: 274663 - DNA, 20 bp, synthetic construct
  source 1..20: mol_type = other DNA
gtgttttctggtttatttct

SEQ ID NO: 274664 - DNA, 20 bp, synthetic construct
  source 1..20: mol_type = other DNA
tgtgttttctggtttatttc

SEQ ID NO: 274665 - DNA, 20 bp, synthetic construct
  source 1..20: mol_type = other DNA
ttgtgttttctggtttattt

SEQ ID NO: 274666 - DNA, 20 bp, synthetic construct
  source 1..20: mol_type = other DNA
gttgtgttttctggtttatt

SEQ ID NO: 274667 - DNA, 20 bp, synthetic construct
  source 1..20: mol_type = other DNA
ggttgtgttttctggtttat

SEQ ID NO: 274668 - DNA, 20 bp, synthetic construct
  source 1..20: mol_type = other DNA
aggttgtgttttctggttta

SEQ ID NO: 274669 - DNA, 20 bp, synthetic construct
  source 1..20: mol_type = other DNA
aaggttgtgttttctggttt

SEQ ID NO: 274670 - DNA, 20 bp, synthetic construct
  source 1..20: mol_type = other DNA
caaggttgtgttttctggtt

SEQ ID NO: 274671 - DNA, 20 bp, synthetic construct
  source 1..20: mol_type = other DNA
gcaaggttgtgttttctggt

SEQ ID NO: 274672 - DNA, 20 bp, synthetic construct
  source 1..20: mol_type = other DNA
tgcaaggttgtgttttctgg

SEQ ID NO: 274673 - DNA, 20 bp, synthetic construct
  source 1..20: mol_type = other DNA
gtgcaaggttgtgttttctg

SEQ ID NO: 274674 - DNA, 20 bp, synthetic construct
  source 1..20: mol_type = other DNA
agtgcaaggttgtgttttct

SEQ ID NO: 274675 - DNA, 20 bp, synthetic construct
  source 1..20: mol_type = other DNA
gagtgcaaggttgtgttttc

SEQ ID NO: 274676 - DNA, 20 bp, synthetic construct
  source 1..20: mol_type = other DNA
ggagtgcaaggttgtgtttt

SEQ ID NO: 274677 - DNA, 20 bp, synthetic construct
  source 1..20: mol_type = other DNA
aggagtgcaaggttgtgttt

SEQ ID NO: 274678 - DNA, 20 bp, synthetic construct
  source 1..20: mol_type = other DNA
taggagtgcaaggttgtgtt

SEQ ID NO: 274679 - DNA, 20 bp, synthetic construct
  source 1..20: mol_type = other DNA
ttaggagtgcaaggttgtgt

SEQ ID NO: 274680 - DNA, 20 bp, synthetic construct
  source 1..20: mol_type = other DNA
gttaggagtgcaaggttgtg

SEQ ID NO: 274681 - DNA, 20 bp, synthetic construct
  source 1..20: mol_type = other DNA
agttaggagtgcaaggttgt

SEQ ID NO: 274682 - DNA, 20 bp, synthetic construct
  source 1..20: mol_type = other DNA
aagttaggagtgcaaggttg

SEQ ID NO: 274683 - DNA, 20 bp, synthetic construct
  source 1..20: mol_type = other DNA
taagttaggagtgcaaggtt

SEQ ID NO: 274684 - DNA, 20 bp, synthetic construct
  source 1..20: mol_type = other DNA
ttaagttaggagtgcaaggt

SEQ ID NO: 274685 - DNA, 20 bp, synthetic construct
  source 1..20: mol_type = other DNA
tttaagttaggagtgcaagg

SEQ ID NO: 274686 - DNA, 20 bp, synthetic construct
  source 1..20: mol_type = other DNA
ttttaagttaggagtgcaag

SEQ ID NO: 274687 - DNA, 20 bp, synthetic construct
  source 1..20: mol_type = other DNA
tttttaagttaggagtgcaa

SEQ ID NO: 274688 - DNA, 20 bp, synthetic construct
  source 1..20: mol_type = other DNA
ttttttaagttaggagtgca

SEQ ID NO: 274689 - DNA, 20 bp, synthetic construct
  source 1..20: mol_type = other DNA
tttttttaagttaggagtgc

SEQ ID NO: 274690 - DNA, 20 bp, synthetic construct
  source 1..20: mol_type = other DNA
ttttttttaagttaggagtg

SEQ ID NO: 274691 - DNA, 20 bp, synthetic construct
  source 1..20: mol_type = other DNA
tttttttttaagttaggagt

SEQ ID NO: 274692 - DNA, 20 bp, synthetic construct
  source 1..20: mol_type = other DNA
ttttttttttaagttaggag

SEQ ID NO: 274693 - DNA, 20 bp, synthetic construct
  source 1..20: mol_type = other DNA
tttttttttttaagttagga

SEQ ID NO: 274694 - DNA, 20 bp, synthetic construct
  source 1..20: mol_type = other DNA
atttttttttttaagttagg

SEQ ID NO: 274695 - DNA, 20 bp, synthetic construct
  source 1..20: mol_type = other DNA
catttttttttttaagttag

SEQ ID NO: 274696 - DNA, 20 bp, synthetic construct
  source 1..20: mol_type = other DNA
tcatttttttttttaagtta

SEQ ID NO: 274697 - DNA, 20 bp, synthetic construct
  source 1..20: mol_type = other DNA
ttcatttttttttttaagtt

SEQ ID NO: 274698 - DNA, 20 bp, synthetic construct
  source 1..20: mol_type = other DNA
cttcatttttttttttaagt

SEQ ID NO: 274699 - DNA, 20 bp, synthetic construct
  source 1..20: mol_type = other DNA
tcttcatttttttttttaag

SEQ ID NO: 274700 - DNA, 20 bp, synthetic construct
  source 1..20: mol_type = other DNA
ttcttcatttttttttttaa

SEQ ID NO: 274701 - DNA, 20 bp, synthetic construct
  source 1..20: mol_type = other DNA
tttcttcattttttttttta

SEQ ID NO: 274702 - DNA, 20 bp, synthetic construct
  source 1..20: mol_type = other DNA
ttttcttcattttttttttt

SEQ ID NO: 274703 - DNA, 20 bp, synthetic construct
  source 1..20: mol_type = other DNA
gttttcttcatttttttttt

SEQ ID NO: 274704 - DNA, 20 bp, synthetic construct
  source 1..20: mol_type = other DNA
tgttttcttcattttttttt

SEQ ID NO: 274705 - DNA, 20 bp, synthetic construct
  source 1..20: mol_type = other DNA
gtgttttcttcatttttttt

SEQ ID NO: 274706 - DNA, 20 bp, synthetic construct
  source 1..20: mol_type = other DNA
tgtgttttcttcattttttt

SEQ ID NO: 274707 - DNA, 20 bp, synthetic construct
  source 1..20: mol_type = other DNA
ttgtgttttcttcatttttt

SEQ ID NO: 274708 - DNA, 20 bp, synthetic construct
  source 1..20: mol_type = other DNA
gttgtgttttcttcattttt

SEQ ID NO: 274709 - DNA, 20 bp, synthetic construct
  source 1..20: mol_type = other DNA
ggttgtgttttcttcatttt

SEQ ID NO: 274710 - DNA, 20 bp, synthetic construct
  source 1..20: mol_type = other DNA
tggttgtgttttcttcattt

SEQ ID NO: 274711 - DNA, 20 bp, synthetic construct
  source 1..20: mol_type = other DNA
ctggttgtgttttcttcatt

SEQ ID NO: 274712 - DNA, 20 bp, synthetic construct
  source 1..20: mol_type = other DNA
actggttgtgttttcttcat

SEQ ID NO: 274713 - DNA, 20 bp, synthetic construct
  source 1..20: mol_type = other DNA
tactggttgtgttttcttca

SEQ ID NO: 274714 - DNA, 20 bp, synthetic construct
  source 1..20: mol_type = other DNA
ttactggttgtgttttcttc

SEQ ID NO: 274715 - DNA, 20 bp, synthetic construct
  source 1..20: mol_type = other DNA
tttactggttgtgttttctt

SEQ ID NO: 274716 - DNA, 20 bp, synthetic construct
  source 1..20: mol_type = other DNA
ttttactggttgtgttttct

SEQ ID NO: 274717 - DNA, 20 bp, synthetic construct
  source 1..20: mol_type = other DNA
gttttactggttgtgttttc

SEQ ID NO: 274718 - DNA, 20 bp, synthetic construct
  source 1..20: mol_type = other DNA
tgttttactggttgtgtttt

SEQ ID NO: 274719 - DNA, 20 bp, synthetic construct
  source 1..20: mol_type = other DNA
ttgttttactggttgtgttt

SEQ ID NO: 274720 - DNA, 20 bp, synthetic construct
  source 1..20: mol_type = other DNA
gttgttttactggttgtgtt

SEQ ID NO: 274721 - DNA, 20 bp, synthetic construct
  source 1..20: mol_type = other DNA
tgttgttttactggttgtgt

SEQ ID NO: 274722 - DNA, 20 bp, synthetic construct
  source 1..20: mol_type = other DNA
atgttgttttactggttgtg

SEQ ID NO: 274723 - DNA, 20 bp, synthetic construct
  source 1..20: mol_type = other DNA
tatgttgttttactggttgt

SEQ ID NO: 274724 - DNA, 20 bp, synthetic construct
  source 1..20: mol_type = other DNA
atatgttgttttactggttg

SEQ ID NO: 274725 - DNA, 20 bp, synthetic construct
  source 1..20: mol_type = other DNA
tatatgttgttttactggtt

SEQ ID NO: 274726 - DNA, 20 bp, synthetic construct
  source 1..20: mol_type = other DNA
ttatatgttgttttactggt

SEQ ID NO: 274727 - DNA, 20 bp, synthetic construct
  source 1..20: mol_type = other DNA
gttatatgttgttttactgg

SEQ ID NO: 274728 - DNA, 20 bp, synthetic construct
  source 1..20: mol_type = other DNA
tgttatatgttgttttactg

SEQ ID NO: 274729 - DNA, 20 bp, synthetic construct
  source 1..20: mol_type = other DNA
ctgttatatgttgttttact

SEQ ID NO: 274730 - DNA, 20 bp, synthetic construct
  source 1..20: mol_type = other DNA
gctgttatatgttgttttac

SEQ ID NO: 274731 - DNA, 20 bp, synthetic construct
  source 1..20: mol_type = other DNA
tgctgttatatgttgtttta

SEQ ID NO: 274732 - DNA, 20 bp, synthetic construct
  source 1..20: mol_type = other DNA
atgctgttatatgttgtttt

SEQ ID NO: 274733 - DNA, 20 bp, synthetic construct
  source 1..20: mol_type = other DNA
aatgctgttatatgttgttt

SEQ ID NO: 274734 - DNA, 20 bp, synthetic construct
  source 1..20: mol_type = other DNA
taatgctgttatatgttgtt

SEQ ID NO: 274735 - DNA, 20 bp, synthetic construct
  source 1..20: mol_type = other DNA
ttaatgctgttatatgttgt

SEQ ID NO: 274736 - DNA, 20 bp, synthetic construct
  source 1..20: mol_type = other DNA
cttaatgctgttatatgttg

SEQ ID NO: 274737 - DNA, 20 bp, synthetic construct
  source 1..20: mol_type = other DNA
tcttaatgctgttatatgtt

SEQ ID NO: 274738 - DNA, 20 bp, synthetic construct
  source 1..20: mol_type = other DNA
ctcttaatgctgttatatgt

SEQ ID NO: 274739 - DNA, 20 bp, synthetic construct
  source 1..20: mol_type = other DNA
gctcttaatgctgttatatg

SEQ ID NO: 274740 - DNA, 20 bp, synthetic construct
  source 1..20: mol_type = other DNA
agctcttaatgctgttatat

SEQ ID NO: 274741 - DNA, 20 bp, synthetic construct
  source 1..20: mol_type = other DNA
cagctcttaatgctgttata

SEQ ID NO: 274742 - DNA, 20 bp, synthetic construct
  source 1..20: mol_type = other DNA
ccagctcttaatgctgttat

SEQ ID NO: 274743 - DNA, 20 bp, synthetic construct
  source 1..20: mol_type = other DNA
gccagctcttaatgctgtta

SEQ ID NO: 274744 - DNA, 20 bp, synthetic construct
  source 1..20: mol_type = other DNA
agccagctcttaatgctgtt

SEQ ID NO: 274745 - DNA, 20 bp, synthetic construct
  source 1..20: mol_type = other DNA
gagccagctcttaatgctgt

SEQ ID NO: 274746 - DNA, 20 bp, synthetic construct
  source 1..20: mol_type = other DNA
ggagccagctcttaatgctg

SEQ ID NO: 274747 - DNA, 20 bp, synthetic construct
  source 1..20: mol_type = other DNA
aggagccagctcttaatgct

SEQ ID NO: 274748 - DNA, 20 bp, synthetic construct
  source 1..20: mol_type = other DNA
caggagccagctcttaatgc

SEQ ID NO: 274749 - DNA, 20 bp, synthetic construct
  source 1..20: mol_type = other DNA
ccaggagccagctcttaatg

SEQ ID NO: 274750 - DNA, 20 bp, synthetic construct
  source 1..20: mol_type = other DNA
gccaggagccagctcttaat

SEQ ID NO: 274751 - DNA, 20 bp, synthetic construct
  source 1..20: mol_type = other DNA
agccaggagccagctcttaa

SEQ ID NO: 274752 - DNA, 20 bp, synthetic construct
  source 1..20: mol_type = other DNA
cagccaggagccagctctta

SEQ ID NO: 274753 - DNA, 20 bp, synthetic construct
  source 1..20: mol_type = other DNA
ccagccaggagccagctctt

SEQ ID NO: 274754 - DNA, 20 bp, synthetic construct
  source 1..20: mol_type = other DNA
cccagccaggagccagctct

SEQ ID NO: 274755 - DNA, 20 bp, synthetic construct
  source 1..20: mol_type = other DNA
gcccagccaggagccagctc

SEQ ID NO: 274756 - DNA, 20 bp, synthetic construct
  source 1..20: mol_type = other DNA
cgcccagccaggagccagct

SEQ ID NO: 274757 - DNA, 20 bp, synthetic construct
  source 1..20: mol_type = other DNA
gcgcccagccaggagccagc

SEQ ID NO: 274758 - DNA, 20 bp, synthetic construct
  source 1..20: mol_type = other DNA
cgcgcccagccaggagccag

SEQ ID NO: 274759 - DNA, 20 bp, synthetic construct
  source 1..20: mol_type = other DNA
ccgcgcccagccaggagcca

SEQ ID NO: 274760 - DNA, 20 bp, synthetic construct
  source 1..20: mol_type = other DNA
accgcgcccagccaggagcc

SEQ ID NO: 274761 - DNA, 20 bp, synthetic construct
  source 1..20: mol_type = other DNA
caccgcgcccagccaggagc

SEQ ID NO: 274762 - DNA, 20 bp, synthetic construct
  source 1..20: mol_type = other DNA
ccaccgcgcccagccaggag

SEQ ID NO: 274763 - DNA, 20 bp, synthetic construct
  source 1..20: mol_type = other DNA
gccaccgcgcccagccagga

SEQ ID NO: 274764 - DNA, 20 bp, synthetic construct
  source 1..20: mol_type = other DNA
cgccaccgcgcccagccagg

SEQ ID NO: 274765 - DNA, 20 bp, synthetic construct
  source 1..20: mol_type = other DNA
gcgccaccgcgcccagccag

SEQ ID NO: 274766 - DNA, 20 bp, synthetic construct
  source 1..20: mol_type = other DNA
tgcgccaccgcgcccagcca

SEQ ID NO: 274767 - DNA, 20 bp, synthetic construct
  source 1..20: mol_type = other DNA
atgcgccaccgcgcccagcc

SEQ ID NO: 274768 - DNA, 20 bp, synthetic construct
  source 1..20: mol_type = other DNA
catgcgccaccgcgcccagc

SEQ ID NO: 274769 - DNA, 20 bp, synthetic construct
  source 1..20: mol_type = other DNA
gcatgcgccaccgcgcccag

SEQ ID NO: 274770 - DNA, 20 bp, synthetic construct
  source 1..20: mol_type = other DNA
ggcatgcgccaccgcgccca

SEQ ID NO: 274771 - DNA, 20 bp, synthetic construct
  source 1..20: mol_type = other DNA
aggcatgcgccaccgcgccc

SEQ ID NO: 274772 - DNA, 20 bp, synthetic construct
  source 1..20: mol_type = other DNA
caggcatgcgccaccgcgcc

SEQ ID NO: 274773 - DNA, 20 bp, synthetic construct
  source 1..20: mol_type = other DNA
acaggcatgcgccaccgcgc

SEQ ID NO: 274774 - DNA, 20 bp, synthetic construct
  source 1..20: mol_type = other DNA
tacaggcatgcgccaccgcg

SEQ ID NO: 274775 - DNA, 20 bp, synthetic construct
  source 1..20: mol_type = other DNA
ttacaggcatgcgccaccgc

SEQ ID NO: 274776 - DNA, 20 bp, synthetic construct
  source 1..20: mol_type = other DNA
attacaggcatgcgccaccg

SEQ ID NO: 274777 - DNA, 20 bp, synthetic construct
  source 1..20: mol_type = other DNA
gattacaggcatgcgccacc

SEQ ID NO: 274778 - DNA, 20 bp, synthetic construct
  source 1..20: mol_type = other DNA
ggattacaggcatgcgccac

SEQ ID NO: 274779 - DNA, 20 bp, synthetic construct
  source 1..20: mol_type = other DNA
gggattacaggcatgcgcca

SEQ ID NO: 274780 - DNA, 20 bp, synthetic construct
  source 1..20: mol_type = other DNA
tgggattacaggcatgcgcc

SEQ ID NO: 274781 - DNA, 20 bp, synthetic construct
  source 1..20: mol_type = other DNA
ttgggattacaggcatgcgc

SEQ ID NO: 274782 - DNA, 20 bp, synthetic construct
  source 1..20: mol_type = other DNA
gttgggattacaggcatgcg

SEQ ID NO: 274783 - DNA, 20 bp, synthetic construct
  source 1..20: mol_type = other DNA
tgttgggattacaggcatgc

SEQ ID NO: 274784 - DNA, 20 bp, synthetic construct
  source 1..20: mol_type = other DNA
gtgttgggattacaggcatg

SEQ ID NO: 274785 - DNA, 20 bp, synthetic construct
  source 1..20: mol_type = other DNA
agtgttgggattacaggcat

SEQ ID NO: 274786 - DNA, 20 bp, synthetic construct
  source 1..20: mol_type = other DNA
aagtgttgggattacaggca

SEQ ID NO: 274787 - DNA, 20 bp, synthetic construct
  source 1..20: mol_type = other DNA
aaagtgttgggattacaggc

SEQ ID NO: 274788 - DNA, 20 bp, synthetic construct
  source 1..20: mol_type = other DNA
caaagtgttgggattacagg

SEQ ID NO: 274789 - DNA, 20 bp, synthetic construct
  source 1..20: mol_type = other DNA
ccaaagtgttgggattacag

SEQ ID NO: 274790 - DNA, 20 bp, synthetic construct
  source 1..20: mol_type = other DNA
cccaaagtgttgggattaca

SEQ ID NO: 274791 - DNA, 20 bp, synthetic construct
  source 1..20: mol_type = other DNA
tcccaaagtgttgggattac

SEQ ID NO: 274792 - DNA, 20 bp, synthetic construct
  source 1..20: mol_type = other DNA
ctcccaaagtgttgggatta

SEQ ID NO: 274793 - DNA, 20 bp, synthetic construct
  source 1..20: mol_type = other DNA
cctcccaaagtgttgggatt

SEQ ID NO: 274794 - DNA, 20 bp, synthetic construct
  source 1..20: mol_type = other DNA
gcctcccaaagtgttgggat

SEQ ID NO: 274795 - DNA, 20 bp, synthetic construct
  source 1..20: mol_type = other DNA
ggcctcccaaagtgttggga

SEQ ID NO: 274796 - DNA, 20 bp, synthetic construct
  source 1..20: mol_type = other DNA
cggcctcccaaagtgttggg

SEQ ID NO: 274797 - DNA, 20 bp, synthetic construct
  source 1..20: mol_type = other DNA
tcggcctcccaaagtgttgg

SEQ ID NO: 274798 - DNA, 20 bp, synthetic construct
  source 1..20: mol_type = other DNA
atcggcctcccaaagtgttg

SEQ ID NO: 274799 - DNA, 20 bp, synthetic construct
  source 1..20: mol_type = other DNA
catcggcctcccaaagtgtt

SEQ ID NO: 274800 - DNA, 20 bp, synthetic construct
  source 1..20: mol_type = other DNA
gcatcggcctcccaaagtgt

SEQ ID NO: 274801 - DNA, 20 bp, synthetic construct
  source 1..20: mol_type = other DNA
agcatcggcctcccaaagtg

SEQ ID NO: 274802 - DNA, 20 bp, synthetic construct
  source 1..20: mol_type = other DNA
cagcatcggcctcccaaagt

SEQ ID NO: 274803 - DNA, 20 bp, synthetic construct
  source 1..20: mol_type = other DNA
ccagcatcggcctcccaaag

SEQ ID NO: 274804 - DNA, 20 bp, synthetic construct
  source 1..20: mol_type = other DNA
tccagcatcggcctcccaaa

SEQ ID NO: 274805 - DNA, 20 bp, synthetic construct
  source 1..20: mol_type = other DNA
ctccagcatcggcctcccaa

SEQ ID NO: 274806 - DNA, 20 bp, synthetic construct
  source 1..20: mol_type = other DNA
cctccagcatcggcctccca

SEQ ID NO: 274807 - DNA, 20 bp, synthetic construct
  source 1..20: mol_type = other DNA
tcctccagcatcggcctccc

SEQ ID NO: 274808 - DNA, 20 bp, synthetic construct
  source 1..20: mol_type = other DNA
atcctccagcatcggcctcc

SEQ ID NO: 274809 - DNA, 20 bp, synthetic construct
  source 1..20: mol_type = other DNA
gatcctccagcatcggcctc

SEQ ID NO: 274810 - DNA, 20 bp, synthetic construct
  source 1..20: mol_type = other DNA
tgatcctccagcatcggcct

SEQ ID NO: 274811 - DNA, 20 bp, synthetic construct
  source 1..20: mol_type = other DNA
gtgatcctccagcatcggcc

SEQ ID NO: 274812 - DNA, 20 bp, synthetic construct
  source 1..20: mol_type = other DNA
agtgatcctccagcatcggc

SEQ ID NO: 274813 - DNA, 20 bp, synthetic construct
  source 1..20: mol_type = other DNA
aagtgatcctccagcatcgg

SEQ ID NO: 274814 - DNA, 20 bp, synthetic construct
  source 1..20: mol_type = other DNA
caagtgatcctccagcatcg

SEQ ID NO: 274815 - DNA, 20 bp, synthetic construct
  source 1..20: mol_type = other DNA
tcaagtgatcctccagcatc

SEQ ID NO: 274816 - DNA, 20 bp, synthetic construct
  source 1..20: mol_type = other DNA
ctcaagtgatcctccagcat

SEQ ID NO: 274817 - DNA, 20 bp, synthetic construct
  source 1..20: mol_type = other DNA
tctcaagtgatcctccagca

SEQ ID NO: 274818 - DNA, 20 bp, synthetic construct
  source 1..20: mol_type = other DNA
gtctcaagtgatcctccagc

SEQ ID NO: 274819 - DNA, 20 bp, synthetic construct
  source 1..20: mol_type = other DNA
ggtctcaagtgatcctccag

SEQ ID NO: 274820 - DNA, 20 bp, synthetic construct
  source 1..20: mol_type = other DNA
tggtctcaagtgatcctcca

SEQ ID NO: 274821 - DNA, 20 bp, synthetic construct
  source 1..20: mol_type = other DNA
ctggtctcaagtgatcctcc

SEQ ID NO: 274822 - DNA, 20 bp, synthetic construct
  source 1..20: mol_type = other DNA
cctggtctcaagtgatcctc

SEQ ID NO: 274823 - DNA, 20 bp, synthetic construct
  source 1..20: mol_type = other DNA
tcctggtctcaagtgatcct

SEQ ID NO: 274824 - DNA, 20 bp, synthetic construct
  source 1..20: mol_type = other DNA
ctcctggtctcaagtgatcc

SEQ ID NO: 274825 - DNA, 20 bp, synthetic construct
  source 1..20: mol_type = other DNA
actcctggtctcaagtgatc

SEQ ID NO: 274826 - DNA, 20 bp, synthetic construct
  source 1..20: mol_type = other DNA
aactcctggtctcaagtgat

SEQ ID NO: 274827 - DNA, 20 bp, synthetic construct
  source 1..20: mol_type = other DNA
gaactcctggtctcaagtga

SEQ ID NO: 274828 - DNA, 20 bp, synthetic construct
  source 1..20: mol_type = other DNA
tgaactcctggtctcaagtg

SEQ ID NO: 274829 - DNA, 20 bp, synthetic construct
  source 1..20: mol_type = other DNA
ttgaactcctggtctcaagt

SEQ ID NO: 274830 - DNA, 20 bp, synthetic construct
  source 1..20: mol_type = other DNA
cttgaactcctggtctcaag

SEQ ID NO: 274831 - DNA, 20 bp, synthetic construct
  source 1..20: mol_type = other DNA
ccttgaactcctggtctcaa

SEQ ID NO: 274832 - DNA, 20 bp, synthetic construct
  source 1..20: mol_type = other DNA
accttgaactcctggtctca

SEQ ID NO: 274833 - DNA, 20 bp, synthetic construct
  source 1..20: mol_type = other DNA
aaccttgaactcctggtctc

SEQ ID NO: 274834 - DNA, 20 bp, synthetic construct
  source 1..20: mol_type = other DNA
caaccttgaactcctggtct

SEQ ID NO: 274835 - DNA, 20 bp, synthetic construct
  source 1..20: mol_type = other DNA
gcaaccttgaactcctggtc

SEQ ID NO: 274836 - DNA, 20 bp, synthetic construct
  source 1..20: mol_type = other DNA
tgcaaccttgaactcctggt

SEQ ID NO: 274837 - DNA, 20 bp, synthetic construct
  source 1..20: mol_type = other DNA
ctgcaaccttgaactcctgg

SEQ ID NO: 274838 - DNA, 20 bp, synthetic construct
  source 1..20: mol_type = other DNA
actgcaaccttgaactcctg

SEQ ID NO: 274839 - DNA, 20 bp, synthetic construct
  source 1..20: mol_type = other DNA
cactgcaaccttgaactcct

SEQ ID NO: 274840 - DNA, 20 bp, synthetic construct
  source 1..20: mol_type = other DNA
tcactgcaaccttgaactcc

SEQ ID NO: 274841 - DNA, 20 bp, synthetic construct
  source 1..20: mol_type = other DNA
ctcactgcaaccttgaactc

SEQ ID NO: 274842 - DNA, 20 bp, synthetic construct
  source 1..20: mol_type = other DNA
gctcactgcaaccttgaact

SEQ ID NO: 274843 - DNA, 20 bp, synthetic construct
  source 1..20: mol_type = other DNA
agctcactgcaaccttgaac

SEQ ID NO: 274844 - DNA, 20 bp, synthetic construct
  source 1..20: mol_type = other DNA
tagctcactgcaaccttgaa

SEQ ID NO: 274845 - DNA, 20 bp, synthetic construct
  source 1..20: mol_type = other DNA
atagctcactgcaaccttga

SEQ ID NO: 274846 - DNA, 20 bp, synthetic construct
  source 1..20: mol_type = other DNA
catagctcactgcaaccttg

SEQ ID NO: 274847 - DNA, 20 bp, synthetic construct
  source 1..20: mol_type = other DNA
tcatagctcactgcaacctt

SEQ ID NO: 274848 - DNA, 20 bp, synthetic construct
  source 1..20: mol_type = other DNA
atcatagctcactgcaacct

SEQ ID NO: 274849 - DNA, 20 bp, synthetic construct
  source 1..20: mol_type = other DNA
gatcatagctcactgcaacc

SEQ ID NO: 274850 - DNA, 20 bp, synthetic construct
  source 1..20: mol_type = other DNA
tgatcatagctcactgcaac

SEQ ID NO: 274851 - DNA, 20 bp, synthetic construct
  source 1..20: mol_type = other DNA
atgatcatagctcactgcaa

SEQ ID NO: 274852 - DNA, 20 bp, synthetic construct
  source 1..20: mol_type = other DNA
tatgatcatagctcactgca

SEQ ID NO: 274853 - DNA, 20 bp, synthetic construct
  source 1..20: mol_type = other DNA
gtatgatcatagctcactgc

SEQ ID NO: 274854 - DNA, 20 bp, synthetic construct
  source 1..20: mol_type = other DNA
ggtatgatcatagctcactg

SEQ ID NO: 274855 - DNA, 20 bp, synthetic construct
  source 1..20: mol_type = other DNA
tggtatgatcatagctcact

SEQ ID NO: 274856 - DNA, 20 bp, synthetic construct
  source 1..20: mol_type = other DNA
gtggtatgatcatagctcac

SEQ ID NO: 274857 - DNA, 20 bp, synthetic construct
  source 1..20: mol_type = other DNA
agtggtatgatcatagctca

SEQ ID NO: 274858 - DNA, 20 bp, synthetic construct
  source 1..20: mol_type = other DNA
tagtggtatgatcatagctc

SEQ ID NO: 274859 - DNA, 20 bp, synthetic construct
  source 1..20: mol_type = other DNA
gtagtggtatgatcatagct

SEQ ID NO: 274860 - DNA, 20 bp, synthetic construct
  source 1..20: mol_type = other DNA
tgtagtggtatgatcatagc

SEQ ID NO: 274861 - DNA, 20 bp, synthetic construct
  source 1..20: mol_type = other DNA
gtgtagtggtatgatcatag

SEQ ID NO: 274862 - DNA, 20 bp, synthetic construct
  source 1..20: mol_type = other DNA
ggtgtagtggtatgatcata

SEQ ID NO: 274863 - DNA, 20 bp, synthetic construct
  source 1..20: mol_type = other DNA
gggtgtagtggtatgatcat

SEQ ID NO: 274864 - DNA, 20 bp, synthetic construct
  source 1..20: mol_type = other DNA
agggtgtagtggtatgatca

SEQ ID NO: 274865 - DNA, 20 bp, synthetic construct
  source 1..20: mol_type = other DNA
tagggtgtagtggtatgatc

SEQ ID NO: 274866 - DNA, 20 bp, synthetic construct
  source 1..20: mol_type = other DNA
ctagggtgtagtggtatgat

SEQ ID NO: 274867 - DNA, 20 bp, synthetic construct
  source 1..20: mol_type = other DNA
gctagggtgtagtggtatga

SEQ ID NO: 274868 - DNA, 20 bp, synthetic construct
  source 1..20: mol_type = other DNA
ggctagggtgtagtggtatg

SEQ ID NO: 274869 - DNA, 20 bp, synthetic construct
  source 1..20: mol_type = other DNA
aggctagggtgtagtggtat

SEQ ID NO: 274870 - DNA, 20 bp, synthetic construct
  source 1..20: mol_type = other DNA
caggctagggtgtagtggta

SEQ ID NO: 274871 - DNA, 20 bp, synthetic construct
  source 1..20: mol_type = other DNA
ccaggctagggtgtagtggt

SEQ ID NO: 274872 - DNA, 20 bp, synthetic construct
  source 1..20: mol_type = other DNA
cccaggctagggtgtagtgg

SEQ ID NO: 274873 - DNA, 20 bp, synthetic construct
  source 1..20: mol_type = other DNA
gcccaggctagggtgtagtg

SEQ ID NO: 274874 - DNA, 20 bp, synthetic construct
  source 1..20: mol_type = other DNA
tgcccaggctagggtgtagt

SEQ ID NO: 274875 - DNA, 20 bp, synthetic construct
  source 1..20: mol_type = other DNA
ttgcccaggctagggtgtag

SEQ ID NO: 274876 - DNA, 20 bp, synthetic construct
  source 1..20: mol_type = other DNA
gttgcccaggctagggtgta

SEQ ID NO: 274877 - DNA, 20 bp, synthetic construct
  source 1..20: mol_type = other DNA
tgttgcccaggctagggtgt

SEQ ID NO: 274878 - DNA, 20 bp, synthetic construct
  source 1..20: mol_type = other DNA
gtgttgcccaggctagggtg

SEQ ID NO: 274879 - DNA, 20 bp, synthetic construct
  source 1..20: mol_type = other DNA
tgtgttgcccaggctagggt

SEQ ID NO: 274880 - DNA, 20 bp, synthetic construct
  source 1..20: mol_type = other DNA
ctgtgttgcccaggctaggg

SEQ ID NO: 274881 - DNA, 20 bp, synthetic construct
  source 1..20: mol_type = other DNA
actgtgttgcccaggctagg

SEQ ID NO: 274882 - DNA, 20 bp, synthetic construct
  source 1..20: mol_type = other DNA
cactgtgttgcccaggctag

SEQ ID NO: 274883 - DNA, 20 bp, synthetic construct
  source 1..20: mol_type = other DNA
tcactgtgttgcccaggcta

SEQ ID NO: 274884 - DNA, 20 bp, synthetic construct
  source 1..20: mol_type = other DNA
ctcactgtgttgcccaggct

SEQ ID NO: 274885 - DNA, 20 bp, synthetic construct
  source 1..20: mol_type = other DNA
tctcactgtgttgcccaggc

SEQ ID NO: 274886 - DNA, 20 bp, synthetic construct
  source 1..20: mol_type = other DNA
gtctcactgtgttgcccagg

SEQ ID NO: 274887 - DNA, 20 bp, synthetic construct
  source 1..20: mol_type = other DNA
agtctcactgtgttgcccag

SEQ ID NO: 274888 - DNA, 20 bp, synthetic construct
  source 1..20: mol_type = other DNA
cagtctcactgtgttgccca

SEQ ID NO: 274889 - DNA, 20 bp, synthetic construct
  source 1..20: mol_type = other DNA
tcagtctcactgtgttgccc

SEQ ID NO: 274890 - DNA, 20 bp, synthetic construct
  source 1..20: mol_type = other DNA
ctcagtctcactgtgttgcc

SEQ ID NO: 274891 - DNA, 20 bp, synthetic construct
  source 1..20: mol_type = other DNA
tctcagtctcactgtgttgc

SEQ ID NO: 274892 - DNA, 20 bp, synthetic construct
  source 1..20: mol_type = other DNA
gtctcagtctcactgtgttg

SEQ ID NO: 274893 - DNA, 20 bp, synthetic construct
  source 1..20: mol_type = other DNA
agtctcagtctcactgtgtt

SEQ ID NO: 274894 - DNA, 20 bp, synthetic construct
  source 1..20: mol_type = other DNA
gagtctcagtctcactgtgt

SEQ ID NO: 274895 - DNA, 20 bp, synthetic construct
  source 1..20: mol_type = other DNA
agagtctcagtctcactgtg

SEQ ID NO: 274896 - DNA, 20 bp, synthetic construct
  source 1..20: mol_type = other DNA
tagagtctcagtctcactgt

SEQ ID NO: 274897 - DNA, 20 bp, synthetic construct
  source 1..20: mol_type = other DNA
atagagtctcagtctcactg

SEQ ID NO: 274898 - DNA, 20 bp, synthetic construct
  source 1..20: mol_type = other DNA
aatagagtctcagtctcact

SEQ ID NO: 274899 - DNA, 20 bp, synthetic construct
  source 1..20: mol_type = other DNA
taatagagtctcagtctcac

SEQ ID NO: 274900 - DNA, 20 bp, synthetic construct
  source 1..20: mol_type = other DNA
ttaatagagtctcagtctca

SEQ ID NO: 274901 - DNA, 20 bp, synthetic construct
  source 1..20: mol_type = other DNA
tttaatagagtctcagtctc

SEQ ID NO: 274902 - DNA, 20 bp, synthetic construct
  source 1..20: mol_type = other DNA
ttttaatagagtctcagtct

SEQ ID NO: 274903 - DNA, 20 bp, synthetic construct
  source 1..20: mol_type = other DNA
tttttaatagagtctcagtc

SEQ ID NO: 274904 - DNA, 20 bp, synthetic construct
  source 1..20: mol_type = other DNA
ttttttaatagagtctcagt

SEQ ID NO: 274905 - DNA, 20 bp, synthetic construct
  source 1..20: mol_type = other DNA
tttttttaatagagtctcag

SEQ ID NO: 274906 - DNA, 20 bp, synthetic construct
  source 1..20: mol_type = other DNA
ttttttttaatagagtctca

SEQ ID NO: 274907 - DNA, 20 bp, synthetic construct
  source 1..20: mol_type = other DNA
tttttttttaatagagtctc

SEQ ID NO: 274908 - DNA, 20 bp, synthetic construct
  source 1..20: mol_type = other DNA
ttttttttttaatagagtct

SEQ ID NO: 274909 - DNA, 20 bp, synthetic construct
  source 1..20: mol_type = other DNA
attttttttttaatagagtc

SEQ ID NO: 274910 - DNA, 20 bp, synthetic construct
  source 1..20: mol_type = other DNA
cattttttttttaatagagt

SEQ ID NO: 274911 - DNA, 20 bp, synthetic construct
  source 1..20: mol_type = other DNA
gcattttttttttaatagag

SEQ ID NO: 274912 - DNA, 20 bp, synthetic construct
  source 1..20: mol_type = other DNA
agcattttttttttaataga

SEQ ID NO: 274913 - DNA, 20 bp, synthetic construct
  source 1..20: mol_type = other DNA
cagcattttttttttaatag

SEQ ID NO: 274914 - DNA, 20 bp, synthetic construct
  source 1..20: mol_type = other DNA
ccagcattttttttttaata

SEQ ID NO: 274915 - DNA, 20 bp, synthetic construct
  source 1..20: mol_type = other DNA
accagcattttttttttaat

SEQ ID NO: 274916 - DNA, 20 bp, synthetic construct
  source 1..20: mol_type = other DNA
aaccagcattttttttttaa

SEQ ID NO: 274917 - DNA, 20 bp, synthetic construct
  source 1..20: mol_type = other DNA
gaaccagcatttttttttta

SEQ ID NO: 274918 - DNA, 20 bp, synthetic construct
  source 1..20: mol_type = other DNA
ggaaccagcatttttttttt

SEQ ID NO: 274919 - DNA, 20 bp, synthetic construct
  source 1..20: mol_type = other DNA
aggaaccagcattttttttt

SEQ ID NO: 274920 - DNA, 20 bp, synthetic construct
  source 1..20: mol_type = other DNA
aaggaaccagcatttttttt

SEQ ID NO: 274921 - DNA, 20 bp, synthetic construct
  source 1..20: mol_type = other DNA
gaaggaaccagcattttttt

SEQ ID NO: 274922 - DNA, 20 bp, synthetic construct
  source 1..20: mol_type = other DNA
ggaaggaaccagcatttttt

SEQ ID NO: 274923 - DNA, 20 bp, synthetic construct
  source 1..20: mol_type = other DNA
aggaaggaaccagcattttt

SEQ ID NO: 274924 - DNA, 20 bp, synthetic construct
  source 1..20: mol_type = other DNA
aaggaaggaaccagcatttt

SEQ ID NO: 274925 - DNA, 20 bp, synthetic construct
  source 1..20: mol_type = other DNA
taaggaaggaaccagcattt

SEQ ID NO: 274926 - DNA, 20 bp, synthetic construct
  source 1..20: mol_type = other DNA
ataaggaaggaaccagcatt

SEQ ID NO: 274927 - DNA, 20 bp, synthetic construct
  source 1..20: mol_type = other DNA
aataaggaaggaaccagcat

SEQ ID NO: 274928 - DNA, 20 bp, synthetic construct
  source 1..20: mol_type = other DNA
aaataaggaaggaaccagca

SEQ ID NO: 274929 - DNA, 20 bp, synthetic construct
  source 1..20: mol_type = other DNA
gaaataaggaaggaaccagc

SEQ ID NO: 274930 - DNA, 20 bp, synthetic construct
  source 1..20: mol_type = other DNA
tgaaataaggaaggaaccag

SEQ ID NO: 274931 - DNA, 20 bp, synthetic construct
  source 1..20: mol_type = other DNA
atgaaataaggaaggaacca

SEQ ID NO: 274932 - DNA, 20 bp, synthetic construct
  source 1..20: mol_type = other DNA
aatgaaataaggaaggaacc

SEQ ID NO: 274933 - DNA, 20 bp, synthetic construct
  source 1..20: mol_type = other DNA
gaatgaaataaggaaggaac

SEQ ID NO: 274934 - DNA, 20 bp, synthetic construct
  source 1..20: mol_type = other DNA
ggaatgaaataaggaaggaa

SEQ ID NO: 274935 - DNA, 20 bp, synthetic construct
  source 1..20: mol_type = other DNA
aggaatgaaataaggaagga

SEQ ID NO: 274936 - DNA, 20 bp, synthetic construct
  source 1..20: mol_type = other DNA
aaggaatgaaataaggaagg

SEQ ID NO: 274937 - DNA, 20 bp, synthetic construct
  source 1..20: mol_type = other DNA
aaaggaatgaaataaggaag

SEQ ID NO: 274938 - DNA, 20 bp, synthetic construct
  source 1..20: mol_type = other DNA
taaaggaatgaaataaggaa

SEQ ID NO: 274939 - DNA, 20 bp, synthetic construct
  source 1..20: mol_type = other DNA
ataaaggaatgaaataagga

SEQ ID NO: 274940 - DNA, 20 bp, synthetic construct
  source 1..20: mol_type = other DNA
aataaaggaatgaaataagg

SEQ ID NO: 274941 - DNA, 20 bp, synthetic construct
  source 1..20: mol_type = other DNA
gaataaaggaatgaaataag

SEQ ID NO: 274942 - DNA, 20 bp, synthetic construct
  source 1..20: mol_type = other DNA
tgaataaaggaatgaaataa

SEQ ID NO: 274943 - DNA, 20 bp, synthetic construct
  source 1..20: mol_type = other DNA
atgaataaaggaatgaaata

SEQ ID NO: 274944 - DNA, 20 bp, synthetic construct
  source 1..20: mol_type = other DNA
aatgaataaaggaatgaaat

SEQ ID NO: 274945 - DNA, 20 bp, synthetic construct
  source 1..20: mol_type = other DNA
gaatgaataaaggaatgaaa

SEQ ID NO: 274946 - DNA, 20 bp, synthetic construct
  source 1..20: mol_type = other DNA
tgaatgaataaaggaatgaa

SEQ ID NO: 274947 - DNA, 20 bp, synthetic construct
  source 1..20: mol_type = other DNA
atgaatgaataaaggaatga

SEQ ID NO: 274948 - DNA, 20 bp, synthetic construct
  source 1..20: mol_type = other DNA
aatgaatgaataaaggaatg

SEQ ID NO: 274949 - DNA, 20 bp, synthetic construct
  source 1..20: mol_type = other DNA
gaatgaatgaataaaggaat

SEQ ID NO: 274950 - DNA, 20 bp, synthetic construct
  source 1..20: mol_type = other DNA
tgaatgaatgaataaaggaa

SEQ ID NO: 274951 - DNA, 20 bp, synthetic construct
  source 1..20: mol_type = other DNA
ctgaatgaatgaataaagga

SEQ ID NO: 274952 - DNA, 20 bp, synthetic construct
  source 1..20: mol_type = other DNA
tctgaatgaatgaataaagg

SEQ ID NO: 274953 - DNA, 20 bp, synthetic construct
  source 1..20: mol_type = other DNA
gtctgaatgaatgaataaag

SEQ ID NO: 274954 - DNA, 20 bp, synthetic construct
  source 1..20: mol_type = other DNA
tgtctgaatgaatgaataaa

SEQ ID NO: 274955 - DNA, 20 bp, synthetic construct
  source 1..20: mol_type = other DNA
ttgtctgaatgaatgaataa

SEQ ID NO: 274956 - DNA, 20 bp, synthetic construct
  source 1..20: mol_type = other DNA
gttgtctgaatgaatgaata

SEQ ID NO: 274957 - DNA, 20 bp, synthetic construct
  source 1..20: mol_type = other DNA
tgttgtctgaatgaatgaat

SEQ ID NO: 274958 - DNA, 20 bp, synthetic construct
  source 1..20: mol_type = other DNA
atgttgtctgaatgaatgaa

SEQ ID NO: 274959 - DNA, 20 bp, synthetic construct
  source 1..20: mol_type = other DNA
aatgttgtctgaatgaatga

SEQ ID NO: 274960 - DNA, 20 bp, synthetic construct
  source 1..20: mol_type = other DNA
aaatgttgtctgaatgaatg

SEQ ID NO: 274961 - DNA, 20 bp, synthetic construct
  source 1..20: mol_type = other DNA
taaatgttgtctgaatgaat

SEQ ID NO: 274962 - DNA, 20 bp, synthetic construct
  source 1..20: mol_type = other DNA
ataaatgttgtctgaatgaa

SEQ ID NO: 274963 - DNA, 20 bp, synthetic construct
  source 1..20: mol_type = other DNA
cataaatgttgtctgaatga

SEQ ID NO: 274964 - DNA, 20 bp, synthetic construct
  source 1..20: mol_type = other DNA
ccataaatgttgtctgaatg

SEQ ID NO: 274965 - DNA, 20 bp, synthetic construct
  source 1..20: mol_type = other DNA
cccataaatgttgtctgaat

SEQ ID NO: 274966 - DNA, 20 bp, synthetic construct
  source 1..20: mol_type = other DNA
ccccataaatgttgtctgaa

SEQ ID NO: 274967 - DNA, 20 bp, synthetic construct
  source 1..20: mol_type = other DNA
gccccataaatgttgtctga

SEQ ID NO: 274968 - DNA, 20 bp, synthetic construct
  source 1..20: mol_type = other DNA
tgccccataaatgttgtctg

SEQ ID NO: 274969 - DNA, 20 bp, synthetic construct
  source 1..20: mol_type = other DNA
gtgccccataaatgttgtct

SEQ ID NO: 274970 - DNA, 20 bp, synthetic construct
  source 1..20: mol_type = other DNA
agtgccccataaatgttgtc

SEQ ID NO: 274971 - DNA, 20 bp, synthetic construct
  source 1..20: mol_type = other DNA
aagtgccccataaatgttgt

SEQ ID NO: 274972 - DNA, 20 bp, synthetic construct
  source 1..20: mol_type = other DNA
gaagtgccccataaatgttg

SEQ ID NO: 274973 - DNA, 20 bp, synthetic construct
  source 1..20: mol_type = other DNA
agaagtgccccataaatgtt

SEQ ID NO: 274974 - DNA, 20 bp, synthetic construct
  source 1..20: mol_type = other DNA
cagaagtgccccataaatgt

SEQ ID NO: 274975 - DNA, 20 bp, synthetic construct
  source 1..20: mol_type = other DNA
tcagaagtgccccataaatg

SEQ ID NO: 274976 - DNA, 20 bp, synthetic construct
  source 1..20: mol_type = other DNA
ctcagaagtgccccataaat

SEQ ID NO: 274977 - DNA, 20 bp, synthetic construct
  source 1..20: mol_type = other DNA
gctcagaagtgccccataaa

SEQ ID NO: 274978 - DNA, 20 bp, synthetic construct
  source 1..20: mol_type = other DNA
tgctcagaagtgccccataa

SEQ ID NO: 274979 - DNA, 20 bp, synthetic construct
  source 1..20: mol_type = other DNA
gtgctcagaagtgccccata

SEQ ID NO: 274980 - DNA, 20 bp, synthetic construct
  source 1..20: mol_type = other DNA
ggtgctcagaagtgccccat

SEQ ID NO: 274981 - DNA, 20 bp, synthetic construct
  source 1..20: mol_type = other DNA
tggtgctcagaagtgcccca

SEQ ID NO: 274982 - DNA, 20 bp, synthetic construct
  source 1..20: mol_type = other DNA
ctggtgctcagaagtgcccc

SEQ ID NO: 274983 - DNA, 20 bp, synthetic construct
  source 1..20: mol_type = other DNA
cctggtgctcagaagtgccc

SEQ ID NO: 274984 - DNA, 20 bp, synthetic construct
  source 1..20: mol_type = other DNA
gcctggtgctcagaagtgcc

SEQ ID NO: 274985 - DNA, 20 bp, synthetic construct
  source 1..20: mol_type = other DNA
agcctggtgctcagaagtgc

SEQ ID NO: 274986 - DNA, 20 bp, synthetic construct
  source 1..20: mol_type = other DNA
gagcctggtgctcagaagtg

SEQ ID NO: 274987 - DNA, 20 bp, synthetic construct
  source 1..20: mol_type = other DNA
agagcctggtgctcagaagt

SEQ ID NO: 274988 - DNA, 20 bp, synthetic construct
  source 1..20: mol_type = other DNA
cagagcctggtgctcagaag

SEQ ID NO: 274989 - DNA, 20 bp, synthetic construct
  source 1..20: mol_type = other DNA
acagagcctggtgctcagaa

SEQ ID NO: 274990 - DNA, 20 bp, synthetic construct
  source 1..20: mol_type = other DNA
cacagagcctggtgctcaga

SEQ ID NO: 274991 - DNA, 20 bp, synthetic construct
  source 1..20: mol_type = other DNA
gcacagagcctggtgctcag

SEQ ID NO: 274992 - DNA, 20 bp, synthetic construct
  source 1..20: mol_type = other DNA
agcacagagcctggtgctca

SEQ ID NO: 274993 - DNA, 20 bp, synthetic construct
  source 1..20: mol_type = other DNA
tagcacagagcctggtgctc

SEQ ID NO: 274994 - DNA, 20 bp, synthetic construct
  source 1..20: mol_type = other DNA
ttagcacagagcctggtgct

SEQ ID NO: 274995 - DNA, 20 bp, synthetic construct
  source 1..20: mol_type = other DNA
cttagcacagagcctggtgc

SEQ ID NO: 274996 - DNA, 20 bp, synthetic construct
  source 1..20: mol_type = other DNA
tcttagcacagagcctggtg

SEQ ID NO: 274997 - DNA, 20 bp, synthetic construct
  source 1..20: mol_type = other DNA
ctcttagcacagagcctggt

SEQ ID NO: 274998 - DNA, 20 bp, synthetic construct
  source 1..20: mol_type = other DNA
gctcttagcacagagcctgg

SEQ ID NO: 274999 - DNA, 20 bp, synthetic construct
  source 1..20: mol_type = other DNA
agctcttagcacagagcctg

SEQ ID NO: 275000 - DNA, 20 bp, synthetic construct
  source 1..20: mol_type = other DNA
aagctcttagcacagagcct

SEQ ID NO: 275001 - DNA, 20 bp, synthetic construct
  source 1..20: mol_type = other DNA
aaagctcttagcacagagcc

SEQ ID NO: 275002 - DNA, 20 bp, synthetic construct
  source 1..20: mol_type = other DNA
aaaagctcttagcacagagc

SEQ ID NO: 275003 - DNA, 20 bp, synthetic construct
  source 1..20: mol_type = other DNA
caaaagctcttagcacagag

SEQ ID NO: 275004 - DNA, 20 bp, synthetic construct
  source 1..20: mol_type = other DNA
gcaaaagctcttagcacaga

SEQ ID NO: 275005 - DNA, 20 bp, synthetic construct
  source 1..20: mol_type = other DNA
ggcaaaagctcttagcacag

SEQ ID NO: 275006 - DNA, 20 bp, synthetic construct
  source 1..20: mol_type = other DNA
gggcaaaagctcttagcaca

SEQ ID NO: 275007 - DNA, 20 bp, synthetic construct
  source 1..20: mol_type = other DNA
ggggcaaaagctcttagcac

SEQ ID NO: 275008 - DNA, 20 bp, synthetic construct
  source 1..20: mol_type = other DNA
gggggcaaaagctcttagca

SEQ ID NO: 275009 - DNA, 20 bp, synthetic construct
  source 1..20: mol_type = other DNA
tgggggcaaaagctcttagc

SEQ ID NO: 275010 - DNA, 20 bp, synthetic construct
  source 1..20: mol_type = other DNA
ctgggggcaaaagctcttag

SEQ ID NO: 275011 - DNA, 20 bp, synthetic construct
  source 1..20: mol_type = other DNA
cctgggggcaaaagctctta

SEQ ID NO: 275012 - DNA, 20 bp, synthetic construct
  source 1..20: mol_type = other DNA
ccctgggggcaaaagctctt

SEQ ID NO: 275013 - DNA, 20 bp, synthetic construct
  source 1..20: mol_type = other DNA
accctgggggcaaaagctct

SEQ ID NO: 275014 - DNA, 20 bp, synthetic construct
  source 1..20: mol_type = other DNA
gaccctgggggcaaaagctc

SEQ ID NO: 275015 - DNA, 20 bp, synthetic construct
  source 1..20: mol_type = other DNA
ggaccctgggggcaaaagct

SEQ ID NO: 275016 - DNA, 20 bp, synthetic construct
  source 1..20: mol_type = other DNA
tggaccctgggggcaaaagc

SEQ ID NO: 275017 - DNA, 20 bp, synthetic construct
  source 1..20: mol_type = other DNA
ctggaccctgggggcaaaag

SEQ ID NO: 275018 - DNA, 20 bp, synthetic construct
  source 1..20: mol_type = other DNA
cctggaccctgggggcaaaa

SEQ ID NO: 275019 - DNA, 20 bp, synthetic construct
  source 1..20: mol_type = other DNA
gcctggaccctgggggcaaa

SEQ ID NO: 275020 - DNA, 20 bp, synthetic construct
  source 1..20: mol_type = other DNA
ggcctggaccctgggggcaa

SEQ ID NO: 275021 - DNA, 20 bp, synthetic construct
  source 1..20: mol_type = other DNA
tggcctggaccctgggggca

SEQ ID NO: 275022 - DNA, 20 bp, synthetic construct
  source 1..20: mol_type = other DNA
ctggcctggaccctgggggc

SEQ ID NO: 275023 - DNA, 20 bp, synthetic construct
  source 1..20: mol_type = other DNA
cctggcctggaccctggggg

SEQ ID NO: 275024 - DNA, 20 bp, synthetic construct
  source 1..20: mol_type = other DNA
ccctggcctggaccctgggg

SEQ ID NO: 275025 - DNA, 20 bp, synthetic construct
  source 1..20: mol_type = other DNA
cccctggcctggaccctggg

SEQ ID NO: 275026 - DNA, 20 bp, synthetic construct
  source 1..20: mol_type = other DNA
tcccctggcctggaccctgg

SEQ ID NO: 275027 - DNA, 20 bp, synthetic construct
  source 1..20: mol_type = other DNA
gtcccctggcctggaccctg

SEQ ID NO: 275028 - DNA, 20 bp, synthetic construct
  source 1..20: mol_type = other DNA
tgtcccctggcctggaccct

SEQ ID NO: 275029 - DNA, 20 bp, synthetic construct
  source 1..20: mol_type = other DNA
ctgtcccctggcctggaccc

SEQ ID NO: 275030 - DNA, 20 bp, synthetic construct
  source 1..20: mol_type = other DNA
cctgtcccctggcctggacc

SEQ ID NO: 275031 - DNA, 20 bp, synthetic construct
  source 1..20: mol_type = other DNA
ccctgtcccctggcctggac

SEQ ID NO: 275032 - DNA, 20 bp, synthetic construct
  source 1..20: mol_type = other DNA
cccctgtcccctggcctgga

SEQ ID NO: 275033 - DNA, 20 bp, synthetic construct
  source 1..20: mol_type = other DNA
gcccctgtcccctggcctgg

SEQ ID NO: 275034 - DNA, 20 bp, synthetic construct
  source 1..20: mol_type = other DNA
tgcccctgtcccctggcctg

SEQ ID NO: 275035 - DNA, 20 bp, synthetic construct
  source 1..20: mol_type = other DNA
ctgcccctgtcccctggcct

SEQ ID NO: 275036 - DNA, 20 bp, synthetic construct
  source 1..20: mol_type = other DNA
cctgcccctgtcccctggcc

SEQ ID NO: 275037 - DNA, 20 bp, synthetic construct
  source 1..20: mol_type = other DNA
acctgcccctgtcccctggc

SEQ ID NO: 275038 - DNA, 20 bp, synthetic construct
  source 1..20: mol_type = other DNA
cacctgcccctgtcccctgg

SEQ ID NO: 275039 - DNA, 20 bp, synthetic construct
  source 1..20: mol_type = other DNA
tcacctgcccctgtcccctg

SEQ ID NO: 275040 - DNA, 20 bp, synthetic construct
  source 1..20: mol_type = other DNA
ctcacctgcccctgtcccct

SEQ ID NO: 275041 - DNA, 20 bp, synthetic construct
  source 1..20: mol_type = other DNA
gctcacctgcccctgtcccc

SEQ ID NO: 275042 - DNA, 20 bp, synthetic construct
  source 1..20: mol_type = other DNA
tgctcacctgcccctgtccc

SEQ ID NO: 275043 - DNA, 20 bp, synthetic construct
  source 1..20: mol_type = other DNA
ctgctcacctgcccctgtcc

SEQ ID NO: 275044 - DNA, 20 bp, synthetic construct
  source 1..20: mol_type = other DNA
tctgctcacctgcccctgtc

SEQ ID NO: 275045 - DNA, 20 bp, synthetic construct
  source 1..20: mol_type = other DNA
ctctgctcacctgcccctgt

SEQ ID NO: 275046 - DNA, 20 bp, synthetic construct
  source 1..20: mol_type = other DNA
tctctgctcacctgcccctg

SEQ ID NO: 275047 - DNA, 20 bp, synthetic construct
  source 1..20: mol_type = other DNA
ttctctgctcacctgcccct

SEQ ID NO: 275048 - DNA, 20 bp, synthetic construct
  source 1..20: mol_type = other DNA
tttctctgctcacctgcccc

SEQ ID NO: 275049 - DNA, 20 bp, synthetic construct
  source 1..20: mol_type = other DNA
gtttctctgctcacctgccc

SEQ ID NO: 275050 - DNA, 20 bp, synthetic construct
  source 1..20: mol_type = other DNA
tgtttctctgctcacctgcc

SEQ ID NO: 275051 - DNA, 20 bp, synthetic construct
  source 1..20: mol_type = other DNA
ctgtttctctgctcacctgc

SEQ ID NO: 275052 - DNA, 20 bp, synthetic construct
  source 1..20: mol_type = other DNA
cctgtttctctgctcacctg

SEQ ID NO: 275053 - DNA, 20 bp, synthetic construct
  source 1..20: mol_type = other DNA
ccctgtttctctgctcacct

SEQ ID NO: 275054 - DNA, 20 bp, synthetic construct
  source 1..20: mol_type = other DNA
gccctgtttctctgctcacc

SEQ ID NO: 275055 - DNA, 20 bp, synthetic construct
  source 1..20: mol_type = other DNA
ggccctgtttctctgctcac

SEQ ID NO: 275056 - DNA, 20 bp, synthetic construct
  source 1..20: mol_type = other DNA
tggccctgtttctctgctca

SEQ ID NO: 275057 - DNA, 20 bp, synthetic construct
  source 1..20: mol_type = other DNA
ctggccctgtttctctgctc

SEQ ID NO: 275058 - DNA, 20 bp, synthetic construct
  source 1..20: mol_type = other DNA
actggccctgtttctctgct

SEQ ID NO: 275059 - DNA, 20 bp, synthetic construct
  source 1..20: mol_type = other DNA
gactggccctgtttctctgc

SEQ ID NO: 275060 - DNA, 20 bp, synthetic construct
  source 1..20: mol_type = other DNA
tgactggccctgtttctctg

SEQ ID NO: 275061 - DNA, 20 bp, synthetic construct
  source 1..20: mol_type = other DNA
gtgactggccctgtttctct

SEQ ID NO: 275062 - DNA, 20 bp, synthetic construct
  source 1..20: mol_type = other DNA
tgtgactggccctgtttctc

SEQ ID NO: 275063 - DNA, 20 bp, synthetic construct
  source 1..20: mol_type = other DNA
ctgtgactggccctgtttct

SEQ ID NO: 275064 - DNA, 20 bp, synthetic construct
  source 1..20: mol_type = other DNA
gctgtgactggccctgtttc

SEQ ID NO: 275065 - DNA, 20 bp, synthetic construct
  source 1..20: mol_type = other DNA
tgctgtgactggccctgttt

SEQ ID NO: 275066 - DNA, 20 bp, synthetic construct
  source 1..20: mol_type = other DNA
ctgctgtgactggccctgtt

SEQ ID NO: 275067 - DNA, 20 bp, synthetic construct
  source 1..20: mol_type = other DNA
gctgctgtgactggccctgt

SEQ ID NO: 275068 - DNA, 20 bp, synthetic construct
  source 1..20: mol_type = other DNA
tgctgctgtgactggccctg

SEQ ID NO: 275069 - DNA, 20 bp, synthetic construct
  source 1..20: mol_type = other DNA
ctgctgctgtgactggccct

SEQ ID NO: 275070 - DNA, 20 bp, synthetic construct
  source 1..20: mol_type = other DNA
cctgctgctgtgactggccc

SEQ ID NO: 275071 - DNA, 20 bp, synthetic construct
  source 1..20: mol_type = other DNA
tcctgctgctgtgactggcc

SEQ ID NO: 275072 - DNA, 20 bp, synthetic construct
  source 1..20: mol_type = other DNA
ctcctgctgctgtgactggc

SEQ ID NO: 275073 - DNA, 20 bp, synthetic construct
  source 1..20: mol_type = other DNA
cctcctgctgctgtgactgg

SEQ ID NO: 275074 - DNA, 20 bp, synthetic construct
  source 1..20: mol_type = other DNA
tcctcctgctgctgtgactg

SEQ ID NO: 275075 - DNA, 20 bp, synthetic construct
  source 1..20: mol_type = other DNA
ttcctcctgctgctgtgact

SEQ ID NO: 275076 - DNA, 20 bp, synthetic construct
  source 1..20: mol_type = other DNA
attcctcctgctgctgtgac

SEQ ID NO: 275077 - DNA, 20 bp, synthetic construct
  source 1..20: mol_type = other DNA
cattcctcctgctgctgtga

SEQ ID NO: 275078 - DNA, 20 bp, synthetic construct
  source 1..20: mol_type = other DNA
acattcctcctgctgctgtg

SEQ ID NO: 275079 - DNA, 20 bp, synthetic construct
  source 1..20: mol_type = other DNA
tacattcctcctgctgctgt

SEQ ID NO: 275080 - DNA, 20 bp, synthetic construct
  source 1..20: mol_type = other DNA
ctacattcctcctgctgctg

SEQ ID NO: 275081 - DNA, 20 bp, synthetic construct
  source 1..20: mol_type = other DNA
cctacattcctcctgctgct

SEQ ID NO: 275082 - DNA, 20 bp, synthetic construct
  source 1..20: mol_type = other DNA
tcctacattcctcctgctgc

SEQ ID NO: 275083 - DNA, 20 bp, synthetic construct
  source 1..20: mol_type = other DNA
atcctacattcctcctgctg

SEQ ID NO: 275084 - DNA, 20 bp, synthetic construct
  source 1..20: mol_type = other DNA
catcctacattcctcctgct

SEQ ID NO: 275085 - DNA, 20 bp, synthetic construct
  source 1..20: mol_type = other DNA
ccatcctacattcctcctgc

SEQ ID NO: 275086 - DNA, 20 bp, synthetic construct
  source 1..20: mol_type = other DNA
tccatcctacattcctcctg

SEQ ID NO: 275087 - DNA, 20 bp, synthetic construct
  source 1..20: mol_type = other DNA
ctccatcctacattcctcct

SEQ ID NO: 275088 - DNA, 20 bp, synthetic construct
  source 1..20: mol_type = other DNA
tctccatcctacattcctcc

SEQ ID NO: 275089 - DNA, 20 bp, synthetic construct
  source 1..20: mol_type = other DNA
ctctccatcctacattcctc

SEQ ID NO: 275090 - DNA, 20 bp, synthetic construct
  source 1..20: mol_type = other DNA
gctctccatcctacattcct

SEQ ID NO: 275091 - DNA, 20 bp, synthetic construct
  source 1..20: mol_type = other DNA
agctctccatcctacattcc

SEQ ID NO: 275092 - DNA, 20 bp, synthetic construct
  source 1..20: mol_type = other DNA
aagctctccatcctacattc

SEQ ID NO: 275093 - DNA, 20 bp, synthetic construct
  source 1..20: mol_type = other DNA
caagctctccatcctacatt

SEQ ID NO: 275094 - DNA, 20 bp, synthetic construct
  source 1..20: mol_type = other DNA
ccaagctctccatcctacat

SEQ ID NO: 275095 - DNA, 20 bp, synthetic construct
  source 1..20: mol_type = other DNA
gccaagctctccatcctaca

SEQ ID NO: 275096 - DNA, 20 bp, synthetic construct
  source 1..20: mol_type = other DNA
ggccaagctctccatcctac

SEQ ID NO: 275097 - DNA, 20 bp, synthetic construct
  source 1..20: mol_type = other DNA
tggccaagctctccatccta

SEQ ID NO: 275098 - DNA, 20 bp, synthetic construct
  source 1..20: mol_type = other DNA
ctggccaagctctccatcct

SEQ ID NO: 275099 - DNA, 20 bp, synthetic construct
  source 1..20: mol_type = other DNA
cctggccaagctctccatcc

SEQ ID NO: 275100 - DNA, 20 bp, synthetic construct
  source 1..20: mol_type = other DNA
gcctggccaagctctccatc

SEQ ID NO: 275101 - DNA, 20 bp, synthetic construct
  source 1..20: mol_type = other DNA
tgcctggccaagctctccat

SEQ ID NO: 275102 - DNA, 20 bp, synthetic construct
  source 1..20: mol_type = other DNA
ttgcctggccaagctctcca

SEQ ID NO: 275103 - DNA, 20 bp, synthetic construct
  source 1..20: mol_type = other DNA
cttgcctggccaagctctcc

SEQ ID NO: 275104 - DNA, 20 bp, synthetic construct
  source 1..20: mol_type = other DNA
ccttgcctggccaagctctc

SEQ ID NO: 275105 - DNA, 20 bp, synthetic construct
  source 1..20: mol_type = other DNA
tccttgcctggccaagctct

SEQ ID NO: 275106 - DNA, 20 bp, synthetic construct
  source 1..20: mol_type = other DNA
gtccttgcctggccaagctc

SEQ ID NO: 275107 - DNA, 20 bp, synthetic construct
  source 1..20: mol_type = other DNA
tgtccttgcctggccaagct

SEQ ID NO: 275108 - DNA, 20 bp, synthetic construct
  source 1..20: mol_type = other DNA
atgtccttgcctggccaagc

SEQ ID NO: 275109 - DNA, 20 bp, synthetic construct
  source 1..20: mol_type = other DNA
catgtccttgcctggccaag

SEQ ID NO: 275110 - DNA, 20 bp, synthetic construct
  source 1..20: mol_type = other DNA
gcatgtccttgcctggccaa

SEQ ID NO: 275111 - DNA, 20 bp, synthetic construct
  source 1..20: mol_type = other DNA
tgcatgtccttgcctggcca

SEQ ID NO: 275112 - DNA, 20 bp, synthetic construct
  source 1..20: mol_type = other DNA
ctgcatgtccttgcctggcc

SEQ ID NO: 275113 - DNA, 20 bp, synthetic construct
  source 1..20: mol_type = other DNA
cctgcatgtccttgcctggc

SEQ ID NO: 275114 - DNA, 20 bp, synthetic construct
  source 1..20: mol_type = other DNA
ccctgcatgtccttgcctgg

SEQ ID NO: 275115 - DNA, 20 bp, synthetic construct
  source 1..20: mol_type = other DNA
cccctgcatgtccttgcctg

SEQ ID NO: 275116 - DNA, 20 bp, synthetic construct
  source 1..20: mol_type = other DNA
ccccctgcatgtccttgcct

SEQ ID NO: 275117 - DNA, 20 bp, synthetic construct
  source 1..20: mol_type = other DNA
tccccctgcatgtccttgcc

SEQ ID NO: 275118 - DNA, 20 bp, synthetic construct
  source 1..20: mol_type = other DNA
ctccccctgcatgtccttgc

SEQ ID NO: 275119 - DNA, 20 bp, synthetic construct
  source 1..20: mol_type = other DNA
gctccccctgcatgtccttg

SEQ ID NO: 275120 - DNA, 20 bp, synthetic construct
  source 1..20: mol_type = other DNA
tgctccccctgcatgtcctt

SEQ ID NO: 275121 - DNA, 20 bp, synthetic construct
  source 1..20: mol_type = other DNA
ctgctccccctgcatgtcct

SEQ ID NO: 275122 - DNA, 20 bp, synthetic construct
  source 1..20: mol_type = other DNA
gctgctccccctgcatgtcc

SEQ ID NO: 275123 - DNA, 20 bp, synthetic construct
  source 1..20: mol_type = other DNA
ggctgctccccctgcatgtc

SEQ ID NO: 275124 - DNA, 20 bp, synthetic construct
  source 1..20: mol_type = other DNA
aggctgctccccctgcatgt

SEQ ID NO: 275125 - DNA, 20 bp, synthetic construct
  source 1..20: mol_type = other DNA
caggctgctccccctgcatg

SEQ ID NO: 275126 - DNA, 20 bp, synthetic construct
  source 1..20: mol_type = other DNA
gcaggctgctccccctgcat

SEQ ID NO: 275127 - DNA, 20 bp, synthetic construct
  source 1..20: mol_type = other DNA
tgcaggctgctccccctgca

SEQ ID NO: 275128 - DNA, 20 bp, synthetic construct
  source 1..20: mol_type = other DNA
gtgcaggctgctccccctgc

SEQ ID NO: 275129 - DNA, 20 bp, synthetic construct
  source 1..20: mol_type = other DNA
tgtgcaggctgctccccctg

SEQ ID NO: 275130 - DNA, 20 bp, synthetic construct
  source 1..20: mol_type = other DNA
ttgtgcaggctgctccccct

SEQ ID NO: 275131 - DNA, 20 bp, synthetic construct
  source 1..20: mol_type = other DNA
cttgtgcaggctgctccccc

SEQ ID NO: 275132 - DNA, 20 bp, synthetic construct
  source 1..20: mol_type = other DNA
acttgtgcaggctgctcccc

SEQ ID NO: 275133 - DNA, 20 bp, synthetic construct
  source 1..20: mol_type = other DNA
gacttgtgcaggctgctccc

SEQ ID NO: 275134 - DNA, 20 bp, synthetic construct
  source 1..20: mol_type = other DNA
tgacttgtgcaggctgctcc

SEQ ID NO: 275135 - DNA, 20 bp, synthetic construct
  source 1..20: mol_type = other DNA
ctgacttgtgcaggctgctc

SEQ ID NO: 275136 - DNA, 20 bp, synthetic construct
  source 1..20: mol_type = other DNA
gctgacttgtgcaggctgct

SEQ ID NO: 275137 - DNA, 20 bp, synthetic construct
  source 1..20: mol_type = other DNA
tgctgacttgtgcaggctgc

SEQ ID NO: 275138 - DNA, 20 bp, synthetic construct
  source 1..20: mol_type = other DNA
ttgctgacttgtgcaggctg

SEQ ID NO: 275139 - DNA, 20 bp, synthetic construct
  source 1..20: mol_type = other DNA
cttgctgacttgtgcaggct

SEQ ID NO: 275140 - DNA, 20 bp, synthetic construct
  source 1..20: mol_type = other DNA
gcttgctgacttgtgcaggc

SEQ ID NO: 275141 - DNA, 20 bp, synthetic construct
  source 1..20: mol_type = other DNA
ggcttgctgacttgtgcagg

SEQ ID NO: 275142 - DNA, 20 bp, synthetic construct
  source 1..20: mol_type = other DNA
tggcttgctgacttgtgcag

SEQ ID NO: 275143 - DNA, 20 bp, synthetic construct
  source 1..20: mol_type = other DNA
ctggcttgctgacttgtgca

SEQ ID NO: 275144 - DNA, 20 bp, synthetic construct
  source 1..20: mol_type = other DNA
tctggcttgctgacttgtgc

SEQ ID NO: 275145 - DNA, 20 bp, synthetic construct
  source 1..20: mol_type = other DNA
ctctggcttgctgacttgtg

SEQ ID NO: 275146 - DNA, 20 bp, synthetic construct
  source 1..20: mol_type = other DNA
tctctggcttgctgacttgt

SEQ ID NO: 275147 - DNA, 20 bp, synthetic construct
  source 1..20: mol_type = other DNA
ttctctggcttgctgacttg

SEQ ID NO: 275148 - DNA, 20 bp, synthetic construct
  source 1..20: mol_type = other DNA
cttctctggcttgctgactt

SEQ ID NO: 275149 - DNA, 20 bp, synthetic construct
  source 1..20: mol_type = other DNA
tcttctctggcttgctgact

SEQ ID NO: 275150 - DNA, 20 bp, synthetic construct
  source 1..20: mol_type = other DNA
gtcttctctggcttgctgac

SEQ ID NO: 275151 - DNA, 20 bp, synthetic construct
  source 1..20: mol_type = other DNA
tgtcttctctggcttgctga

SEQ ID NO: 275152 - DNA, 20 bp, synthetic construct
  source 1..20: mol_type = other DNA
ctgtcttctctggcttgctg

SEQ ID NO: 275153 - DNA, 20 bp, synthetic construct
  source 1..20: mol_type = other DNA
cctgtcttctctggcttgct

SEQ ID NO: 275154 - DNA, 20 bp, synthetic construct
  source 1..20: mol_type = other DNA
gcctgtcttctctggcttgc

SEQ ID NO: 275155 - DNA, 20 bp, synthetic construct
  source 1..20: mol_type = other DNA
tgcctgtcttctctggcttg

SEQ ID NO: 275156 - DNA, 20 bp, synthetic construct
  source 1..20: mol_type = other DNA
ctgcctgtcttctctggctt

SEQ ID NO: 275157 - DNA, 20 bp, synthetic construct
  source 1..20: mol_type = other DNA
tctgcctgtcttctctggct

SEQ ID NO: 275158 - DNA, 20 bp, synthetic construct
  source 1..20: mol_type = other DNA
gtctgcctgtcttctctggc

SEQ ID NO: 275159 - DNA, 20 bp, synthetic construct
  source 1..20: mol_type = other DNA
ggtctgcctgtcttctctgg

SEQ ID NO: 275160 - DNA, 20 bp, synthetic construct
  source 1..20: mol_type = other DNA
gggtctgcctgtcttctctg

SEQ ID NO: 275161 - DNA, 20 bp, synthetic construct
  source 1..20: mol_type = other DNA
agggtctgcctgtcttctct

SEQ ID NO: 275162 - DNA, 20 bp, synthetic construct
  source 1..20: mol_type = other DNA
aagggtctgcctgtcttctc

SEQ ID NO: 275163 - DNA, 20 bp, synthetic construct
  source 1..20: mol_type = other DNA
caagggtctgcctgtcttct

SEQ ID NO: 275164 - DNA, 20 bp, synthetic construct
  source 1..20: mol_type = other DNA
acaagggtctgcctgtcttc

SEQ ID NO: 275165 - DNA, 20 bp, synthetic construct
  source 1..20: mol_type = other DNA
aacaagggtctgcctgtctt

SEQ ID NO: 275166 - DNA, 20 bp, synthetic construct
  source 1..20: mol_type = other DNA
aaacaagggtctgcctgtct

SEQ ID NO: 275167 - DNA, 20 bp, synthetic construct
  source 1..20: mol_type = other DNA
caaacaagggtctgcctgtc

SEQ ID NO: 275168 - DNA, 20 bp, synthetic construct
  source 1..20: mol_type = other DNA
ccaaacaagggtctgcctgt

SEQ ID NO: 275169 - DNA, 20 bp, synthetic construct
  source 1..20: mol_type = other DNA
cccaaacaagggtctgcctg

SEQ ID NO: 275170 - DNA, 20 bp, synthetic construct
  source 1..20: mol_type = other DNA
tcccaaacaagggtctgcct

SEQ ID NO: 275171 - DNA, 20 bp, synthetic construct
  source 1..20: mol_type = other DNA
gtcccaaacaagggtctgcc

SEQ ID NO: 275172 - DNA, 20 bp, synthetic construct
  source 1..20: mol_type = other DNA
ggtcccaaacaagggtctgc

SEQ ID NO: 275173 - DNA, 20 bp, synthetic construct
  source 1..20: mol_type = other DNA
aggtcccaaacaagggtctg

SEQ ID NO: 275174 - DNA, 20 bp, synthetic construct
  source 1..20: mol_type = other DNA
caggtcccaaacaagggtct

SEQ ID NO: 275175 - DNA, 20 bp, synthetic construct
  source 1..20: mol_type = other DNA
acaggtcccaaacaagggtc

SEQ ID NO: 275176 - DNA, 20 bp, synthetic construct
  source 1..20: mol_type = other DNA
aacaggtcccaaacaagggt

SEQ ID NO: 275177 - DNA, 20 bp, synthetic construct
  source 1..20: mol_type = other DNA
gaacaggtcccaaacaaggg

SEQ ID NO: 275178 - DNA, 20 bp, synthetic construct
  source 1..20: mol_type = other DNA
tgaacaggtcccaaacaagg

SEQ ID NO: 275179 - DNA, 20 bp, synthetic construct
  source 1..20: mol_type = other DNA
ctgaacaggtcccaaacaag

SEQ ID NO: 275180 - DNA, 20 bp, synthetic construct
  source 1..20: mol_type = other DNA
actgaacaggtcccaaacaa

SEQ ID NO: 275181 - DNA, 20 bp, synthetic construct
  source 1..20: mol_type = other DNA
cactgaacaggtcccaaaca

SEQ ID NO: 275182 - DNA, 20 bp, synthetic construct
  source 1..20: mol_type = other DNA
ccactgaacaggtcccaaac

SEQ ID NO: 275183 - DNA, 20 bp, synthetic construct
  source 1..20: mol_type = other DNA
gccactgaacaggtcccaaa

SEQ ID NO: 275184 - DNA, 20 bp, synthetic construct
  source 1..20: mol_type = other DNA
ggccactgaacaggtcccaa

SEQ ID NO: 275185 - DNA, 20 bp, synthetic construct
  source 1..20: mol_type = other DNA
aggccactgaacaggtccca

SEQ ID NO: 275186 - DNA, 20 bp, synthetic construct
  source 1..20: mol_type = other DNA
aaggccactgaacaggtccc

SEQ ID NO: 275187 - DNA, 20 bp, synthetic construct
  source 1..20: mol_type = other DNA
aaaggccactgaacaggtcc

SEQ ID NO: 275188 - DNA, 20 bp, synthetic construct
  source 1..20: mol_type = other DNA
caaaggccactgaacaggtc

SEQ ID NO: 275189 - DNA, 20 bp, synthetic construct
  source 1..20: mol_type = other DNA
tcaaaggccactgaacaggt

SEQ ID NO: 275190 - DNA, 20 bp, synthetic construct
  source 1..20: mol_type = other DNA
ttcaaaggccactgaacagg

SEQ ID NO: 275191 - DNA, 20 bp, synthetic construct
  source 1..20: mol_type = other DNA
tttcaaaggccactgaacag

SEQ ID NO: 275192 - DNA, 20 bp, synthetic construct
  source 1..20: mol_type = other DNA
ctttcaaaggccactgaaca

SEQ ID NO: 275193 - DNA, 20 bp, synthetic construct
  source 1..20: mol_type = other DNA
cctttcaaaggccactgaac

SEQ ID NO: 275194 - DNA, 20 bp, synthetic construct
  source 1..20: mol_type = other DNA
tcctttcaaaggccactgaa

SEQ ID NO: 275195 - DNA, 20 bp, synthetic construct
  source 1..20: mol_type = other DNA
gtcctttcaaaggccactga

SEQ ID NO: 275196 - DNA, 20 bp, synthetic construct
  source 1..20: mol_type = other DNA
tgtcctttcaaaggccactg

SEQ ID NO: 275197 - DNA, 20 bp, synthetic construct
  source 1..20: mol_type = other DNA
ctgtcctttcaaaggccact

SEQ ID NO: 275198 - DNA, 20 bp, synthetic construct
  source 1..20: mol_type = other DNA
gctgtcctttcaaaggccac

SEQ ID NO: 275199 - DNA, 20 bp, synthetic construct
  source 1..20: mol_type = other DNA
ggctgtcctttcaaaggcca

SEQ ID NO: 275200 - DNA, 20 bp, synthetic construct
  source 1..20: mol_type = other DNA
gggctgtcctttcaaaggcc

SEQ ID NO: 275201 - DNA, 20 bp, synthetic construct
  source 1..20: mol_type = other DNA
ggggctgtcctttcaaaggc

SEQ ID NO: 275202 - DNA, 20 bp, synthetic construct
  source 1..20: mol_type = other DNA
gggggctgtcctttcaaagg

SEQ ID NO: 275203 - DNA, 20 bp, synthetic construct
  source 1..20: mol_type = other DNA
tgggggctgtcctttcaaag

SEQ ID NO: 275204 - DNA, 20 bp, synthetic construct
  source 1..20: mol_type = other DNA
gtgggggctgtcctttcaaa

SEQ ID NO: 275205 - DNA, 20 bp, synthetic construct
  source 1..20: mol_type = other DNA
ggtgggggctgtcctttcaa

SEQ ID NO: 275206 - DNA, 20 bp, synthetic construct
  source 1..20: mol_type = other DNA
gggtgggggctgtcctttca

SEQ ID NO: 275207 - DNA, 20 bp, synthetic construct
  source 1..20: mol_type = other DNA
cgggtgggggctgtcctttc

SEQ ID NO: 275208 - DNA, 20 bp, synthetic construct
  source 1..20: mol_type = other DNA
ccgggtgggggctgtccttt

SEQ ID NO: 275209 - DNA, 20 bp, synthetic construct
  source 1..20: mol_type = other DNA
tccgggtgggggctgtcctt

SEQ ID NO: 275210 - DNA, 20 bp, synthetic construct
  source 1..20: mol_type = other DNA
ctccgggtgggggctgtcct

SEQ ID NO: 275211 - DNA, 20 bp, synthetic construct
  source 1..20: mol_type = other DNA
actccgggtgggggctgtcc

SEQ ID NO: 275212 - DNA, 20 bp, synthetic construct
  source 1..20: mol_type = other DNA
cactccgggtgggggctgtc

SEQ ID NO: 275213 - DNA, 20 bp, synthetic construct
  source 1..20: mol_type = other DNA
gcactccgggtgggggctgt

SEQ ID NO: 275214 - DNA, 20 bp, synthetic construct
  source 1..20: mol_type = other DNA
agcactccgggtgggggctg

SEQ ID NO: 275215 - DNA, 20 bp, synthetic construct
  source 1..20: mol_type = other DNA
cagcactccgggtgggggct

SEQ ID NO: 275216 - DNA, 20 bp, synthetic construct
  source 1..20: mol_type = other DNA
ccagcactccgggtgggggc

SEQ ID NO: 275217 - DNA, 20 bp, synthetic construct
  source 1..20: mol_type = other DNA
cccagcactccgggtggggg

SEQ ID NO: 275218 - DNA, 20 bp, synthetic construct
  source 1..20: mol_type = other DNA
acccagcactccgggtgggg

SEQ ID NO: 275219 - DNA, 20 bp, synthetic construct
  source 1..20: mol_type = other DNA
cacccagcactccgggtggg

SEQ ID NO: 275220 - DNA, 20 bp, synthetic construct
  source 1..20: mol_type = other DNA
gcacccagcactccgggtgg

SEQ ID NO: 275221 - DNA, 20 bp, synthetic construct
  source 1..20: mol_type = other DNA
tgcacccagcactccgggtg

SEQ ID NO: 275222 - DNA, 20 bp, synthetic construct
  source 1..20: mol_type = other DNA
ctgcacccagcactccgggt

SEQ ID NO: 275223 - DNA, 20 bp, synthetic construct
  source 1..20: mol_type = other DNA
cctgcacccagcactccggg

SEQ ID NO: 275224 - DNA, 20 bp, synthetic construct
  source 1..20: mol_type = other DNA
tcctgcacccagcactccgg

SEQ ID NO: 275225 - DNA, 20 bp, synthetic construct
  source 1..20: mol_type = other DNA
ctcctgcacccagcactccg

SEQ ID NO: 275226 - DNA, 20 bp, synthetic construct
  source 1..20: mol_type = other DNA
gctcctgcacccagcactcc

SEQ ID NO: 275227 - DNA, 20 bp, synthetic construct
  source 1..20: mol_type = other DNA
agctcctgcacccagcactc

SEQ ID NO: 275228 - DNA, 20 bp, synthetic construct
  source 1..20: mol_type = other DNA
cagctcctgcacccagcact

SEQ ID NO: 275229 - DNA, 20 bp, synthetic construct
  source 1..20: mol_type = other DNA
tcagctcctgcacccagcac

SEQ ID NO: 275230 - DNA, 20 bp, synthetic construct
  source 1..20: mol_type = other DNA
ttcagctcctgcacccagca

SEQ ID NO: 275231 - DNA, 20 bp, synthetic construct
  source 1..20: mol_type = other DNA
cttcagctcctgcacccagc

SEQ ID NO: 275232 - DNA, 20 bp, synthetic construct
  source 1..20: mol_type = other DNA
ccttcagctcctgcacccag

SEQ ID NO: 275233 - DNA, 20 bp, synthetic construct
  source 1..20: mol_type = other DNA
tccttcagctcctgcaccca

SEQ ID NO: 275234 - DNA, 20 bp, synthetic construct
  source 1..20: mol_type = other DNA
ctccttcagctcctgcaccc

SEQ ID NO: 275235 - DNA, 20 bp, synthetic construct
  source 1..20: mol_type = other DNA
cctccttcagctcctgcacc

SEQ ID NO: 275236 - DNA, 20 bp, synthetic construct
  source 1..20: mol_type = other DNA
tcctccttcagctcctgcac

SEQ ID NO: 275237 - DNA, 20 bp, synthetic construct
  source 1..20: mol_type = other DNA
atcctccttcagctcctgca

SEQ ID NO: 275238 - DNA, 20 bp, synthetic construct
  source 1..20: mol_type = other DNA
tatcctccttcagctcctgc

SEQ ID NO: 275239 - DNA, 20 bp, synthetic construct
  source 1..20: mol_type = other DNA
ctatcctccttcagctcctg

SEQ ID NO: 275240 - DNA, 20 bp, synthetic construct
  source 1..20: mol_type = other DNA
actatcctccttcagctcct

SEQ ID NO: 275241 - DNA, 20 bp, synthetic construct
  source 1..20: mol_type = other DNA
cactatcctccttcagctcc

SEQ ID NO: 275242 - DNA, 20 bp, synthetic construct
  source 1..20: mol_type = other DNA
ccactatcctccttcagctc

SEQ ID NO: 275243 - DNA, 20 bp, synthetic construct
  source 1..20: mol_type = other DNA
tccactatcctccttcagct

SEQ ID NO: 275244 - DNA, 20 bp, synthetic construct
  source 1..20: mol_type = other DNA
ttccactatcctccttcagc

SEQ ID NO: 275245 - DNA, 20 bp, synthetic construct
  source 1..20: mol_type = other DNA
gttccactatcctccttcag

SEQ ID NO: 275246 - DNA, 20 bp, synthetic construct
  source 1..20: mol_type = other DNA
tgttccactatcctccttca

SEQ ID NO: 275247 - DNA, 20 bp, synthetic construct
  source 1..20: mol_type = other DNA
gtgttccactatcctccttc

SEQ ID NO: 275248 - DNA, 20 bp, synthetic construct
  source 1..20: mol_type = other DNA
agtgttccactatcctcctt

SEQ ID NO: 275249 - DNA, 20 bp, synthetic construct
  source 1..20: mol_type = other DNA
cagtgttccactatcctcct

SEQ ID NO: 275250 - DNA, 20 bp, synthetic construct
  source 1..20: mol_type = other DNA
gcagtgttccactatcctcc

SEQ ID NO: 275251 - DNA, 20 bp, synthetic construct
  source 1..20: mol_type = other DNA
tgcagtgttccactatcctc

SEQ ID NO: 275252 - DNA, 20 bp, synthetic construct
  source 1..20: mol_type = other DNA
ttgcagtgttccactatcct

SEQ ID NO: 275253 - DNA, 20 bp, synthetic construct
  source 1..20: mol_type = other DNA
gttgcagtgttccactatcc

SEQ ID NO: 275254 - DNA, 20 bp, synthetic construct
  source 1..20: mol_type = other DNA
cgttgcagtgttccactatc

SEQ ID NO: 275255 - DNA, 20 bp, synthetic construct
  source 1..20: mol_type = other DNA
acgttgcagtgttccactat

SEQ ID NO: 275256 - DNA, 20 bp, synthetic construct
  source 1..20: mol_type = other DNA
cacgttgcagtgttccacta

SEQ ID NO: 275257 - DNA, 20 bp, synthetic construct
  source 1..20: mol_type = other DNA
ccacgttgcagtgttccact

SEQ ID NO: 275258 - DNA, 20 bp, synthetic construct
  source 1..20: mol_type = other DNA
tccacgttgcagtgttccac

SEQ ID NO: 275259 - DNA, 20 bp, synthetic construct
  source 1..20: mol_type = other DNA
ctccacgttgcagtgttcca

SEQ ID NO: 275260 - DNA, 20 bp, synthetic construct
  source 1..20: mol_type = other DNA
gctccacgttgcagtgttcc

SEQ ID NO: 275261 - DNA, 20 bp, synthetic construct
  source 1..20: mol_type = other DNA
agctccacgttgcagtgttc

SEQ ID NO: 275262 - DNA, 20 bp, synthetic construct
  source 1..20: mol_type = other DNA
gagctccacgttgcagtgtt

SEQ ID NO: 275263 - DNA, 20 bp, synthetic construct
  source 1..20: mol_type = other DNA
agagctccacgttgcagtgt

SEQ ID NO: 275264 - DNA, 20 bp, synthetic construct
  source 1..20: mol_type = other DNA
aagagctccacgttgcagtg

SEQ ID NO: 275265 - DNA, 20 bp, synthetic construct
  source 1..20: mol_type = other DNA
gaagagctccacgttgcagt

SEQ ID NO: 275266 - DNA, 20 bp, synthetic construct
  source 1..20: mol_type = other DNA
tgaagagctccacgttgcag

SEQ ID NO: 275267 - DNA, 20 bp, synthetic construct
  source 1..20: mol_type = other DNA
ctgaagagctccacgttgca

SEQ ID NO: 275268 - DNA, 20 bp, synthetic construct
  source 1..20: mol_type = other DNA
tctgaagagctccacgttgc

SEQ ID NO: 275269 - DNA, 20 bp, synthetic construct
  source 1..20: mol_type = other DNA
ctctgaagagctccacgttg

SEQ ID NO: 275270 - DNA, 20 bp, synthetic construct
  source 1..20: mol_type = other DNA
gctctgaagagctccacgtt

SEQ ID NO: 275271 - DNA, 20 bp, synthetic construct
  source 1..20: mol_type = other DNA
tgctctgaagagctccacgt

SEQ ID NO: 275272 - DNA, 20 bp, synthetic construct
  source 1..20: mol_type = other DNA
ttgctctgaagagctccacg

SEQ ID NO: 275273 - DNA, 20 bp, synthetic construct
  source 1..20: mol_type = other DNA
tttgctctgaagagctccac

SEQ ID NO: 275274 - DNA, 20 bp, synthetic construct
  source 1..20: mol_type = other DNA
ttttgctctgaagagctcca

SEQ ID NO: 275275 - DNA, 20 bp, synthetic construct
  source 1..20: mol_type = other DNA
cttttgctctgaagagctcc

SEQ ID NO: 275276 - DNA, 20 bp, synthetic construct
  source 1..20: mol_type = other DNA
gcttttgctctgaagagctc

SEQ ID NO: 275277 - DNA, 20 bp, synthetic construct
  source 1..20: mol_type = other DNA
tgcttttgctctgaagagct

SEQ ID NO: 275278 - DNA, 20 bp, synthetic construct
  source 1..20: mol_type = other DNA
ttgcttttgctctgaagagc

SEQ ID NO: 275279 - DNA, 20 bp, synthetic construct
  source 1..20: mol_type = other DNA
tttgcttttgctctgaagag

SEQ ID NO: 275280 - DNA, 20 bp, synthetic construct
  source 1..20: mol_type = other DNA
ttttgcttttgctctgaaga

SEQ ID NO: 275281 - DNA, 20 bp, synthetic construct
  source 1..20: mol_type = other DNA
attttgcttttgctctgaag

SEQ ID NO: 275282 - DNA, 20 bp, synthetic construct
  source 1..20: mol_type = other DNA
tattttgcttttgctctgaa

SEQ ID NO: 275283 - DNA, 20 bp, synthetic construct
  source 1..20: mol_type = other DNA
ttattttgcttttgctctga

SEQ ID NO: 275284 - DNA, 20 bp, synthetic construct
  source 1..20: mol_type = other DNA
tttattttgcttttgctctg

SEQ ID NO: 275285 - DNA, 20 bp, synthetic construct
  source 1..20: mol_type = other DNA
gtttattttgcttttgctct

SEQ ID NO: 275286 - DNA, 20 bp, synthetic construct
  source 1..20: mol_type = other DNA
tgtttattttgcttttgctc

SEQ ID NO: 275287 - DNA, 20 bp, synthetic construct
  source 1..20: mol_type = other DNA
ttgtttattttgcttttgct

SEQ ID NO: 275288 - DNA, 20 bp, synthetic construct
  source 1..20: mol_type = other DNA
gttgtttattttgcttttgc

SEQ ID NO: 275289 - DNA, 20 bp, synthetic construct
  source 1..20: mol_type = other DNA
agttgtttattttgcttttg

SEQ ID NO: 275290 - DNA, 20 bp, synthetic construct
  source 1..20: mol_type = other DNA
cagttgtttattttgctttt

SEQ ID NO: 275291 - DNA, 20 bp, synthetic construct
  source 1..20: mol_type = other DNA
ccagttgtttattttgcttt

SEQ ID NO: 275292 - DNA, 20 bp, synthetic construct
  source 1..20: mol_type = other DNA
tccagttgtttattttgctt

SEQ ID NO: 275293 - DNA, 20 bp, synthetic construct
  source 1..20: mol_type = other DNA
ctccagttgtttattttgct

SEQ ID NO: 275294 - DNA, 20 bp, synthetic construct
  source 1..20: mol_type = other DNA
cctccagttgtttattttgc

SEQ ID NO: 275295 - DNA, 20 bp, synthetic construct
  source 1..20: mol_type = other DNA
gcctccagttgtttattttg

SEQ ID NO: 275296 - DNA, 20 bp, synthetic construct
  source 1..20: mol_type = other DNA
tgcctccagttgtttatttt

SEQ ID NO: 275297 - DNA, 20 bp, synthetic construct
  source 1..20: mol_type = other DNA
ctgcctccagttgtttattt

SEQ ID NO: 275298 - DNA, 20 bp, synthetic construct
  source 1..20: mol_type = other DNA
gctgcctccagttgtttatt

SEQ ID NO: 275299 - DNA, 20 bp, synthetic construct
  source 1..20: mol_type = other DNA
agctgcctccagttgtttat

SEQ ID NO: 275300 - DNA, 20 bp, synthetic construct
  source 1..20: mol_type = other DNA
cagctgcctccagttgttta

SEQ ID NO: 275301 - DNA, 20 bp, synthetic construct
  source 1..20: mol_type = other DNA
ccagctgcctccagttgttt

SEQ ID NO: 275302 - DNA, 20 bp, synthetic construct
  source 1..20: mol_type = other DNA
cccagctgcctccagttgtt

SEQ ID NO: 275303 - DNA, 20 bp, synthetic construct
  source 1..20: mol_type = other DNA
ccccagctgcctccagttgt

SEQ ID NO: 275304 - DNA, 20 bp, synthetic construct
  source 1..20: mol_type = other DNA
gccccagctgcctccagttg

SEQ ID NO: 275305 - DNA, 20 bp, synthetic construct
  source 1..20: mol_type = other DNA
tgccccagctgcctccagtt

SEQ ID NO: 275306 - DNA, 20 bp, synthetic construct
  source 1..20: mol_type = other DNA
ctgccccagctgcctccagt

SEQ ID NO: 275307 - DNA, 20 bp, synthetic construct
  source 1..20: mol_type = other DNA
gctgccccagctgcctccag

SEQ ID NO: 275308 - DNA, 20 bp, synthetic construct
  source 1..20: mol_type = other DNA
tgctgccccagctgcctcca

SEQ ID NO: 275309 - DNA, 20 bp, synthetic construct
  source 1..20: mol_type = other DNA
ctgctgccccagctgcctcc

SEQ ID NO: 275310 - DNA, 20 bp, synthetic construct
  source 1..20: mol_type = other DNA
tctgctgccccagctgcctc

SEQ ID NO: 275311 - DNA, 20 bp, synthetic construct
  source 1..20: mol_type = other DNA
ctctgctgccccagctgcct

SEQ ID NO: 275312 - DNA, 20 bp, synthetic construct
  source 1..20: mol_type = other DNA
cctctgctgccccagctgcc

SEQ ID NO: 275313 - DNA, 20 bp, synthetic construct
  source 1..20: mol_type = other DNA
ccctctgctgccccagctgc

SEQ ID NO: 275314 - DNA, 20 bp, synthetic construct
  source 1..20: mol_type = other DNA
accctctgctgccccagctg

SEQ ID NO: 275315 - DNA, 20 bp, synthetic construct
  source 1..20: mol_type = other DNA
caccctctgctgccccagct

SEQ ID NO: 275316 - DNA, 20 bp, synthetic construct
  source 1..20: mol_type = other DNA
acaccctctgctgccccagc

SEQ ID NO: 275317 - DNA, 20 bp, synthetic construct
  source 1..20: mol_type = other DNA
cacaccctctgctgccccag
